United States Patent Application Publication US 2024/0398993 A1 - sequence listing, part 13

SEQ ID NO: 40838 - protein, 179 aa, Homo sapiens
MAKTAMAYKEKMKELSMLSLICSCFYPEPRNINIYTYDDMEVKQINKRASGQAFELILKPPSPISEAPRTLASPKKKDLSLEEIQKKLEAAEERRKSQEAQVLKQLAEKREHEREVLQKALEENNNFSKMAEEKLILKMEQIKENREANLAAIIERLQEKERHAAEVRRNKELQVELSG

SEQ ID NO: 40839 - protein, 187 aa, Homo sapiens
MAKTAMAYKEKMKELSMLSLICSCFYPEPRNINIYTYDDMEVKQINKRASGQAFELILKPPSPISEAPRTLASPKKKDLSLEEIQKKLEAAEERRKSQEAQVLKQLAEKREHEREVLQKALEENNNFSKMAEEKLILKMEQIKENREANLAAIIERLQEKLVKFISSELKESIESQFLELQREGEKQ

SEQ ID NO: 40840 - protein, 247 aa, Homo sapiens
MPRLLHPALPLLLGATLTFRALRRALCRLPLPVHVRADPLRTWRWHNLLVSFAHSIVSGIWALLCVWQTPDMLVEIETAWSLSGYLLVCFSAGYFIHDTVDIVASGQTRASWEYLVHHVMAMGAFFSGIFWSSFVGGGVLTLLVEVSNIFLTIRMMMKISNAQDHLLYRVNKYVNLVMYFLFRLAPQAYLTHFFLRYVNQRTLGTFLLGILLMLDVMIIIYFSRLLRSDFCPEHVPKKQHKDKFLTE

SEQ ID NO: 40841 - protein, 200 aa, Homo sapiens
MGYSAVPKCPPRGRGRDSVWQTPDMLVEIETAWSLSGYLLVCFSAGYFIHDTVDIVASGQTRASWEYLVHHVMAMGAFFSGIFWSSFVGGGVLTLLVEVSNIFLTIRMMMKISNAQDHLLYRVNKYVNLVMYFLFRLAPQAYLTHFFLRYVNQRTLGTFLLGILLMLDVMIIIYFSRLLRSDFCPEHVPKKQHKDKFLTE

SEQ ID NO: 40842 - protein, 685 aa, Homo sapiens
MDVCVRLALWLLWGLLLHQGQSLSHSHSEKATGTSSGANSEESTAAEFCRIDKPLCHSEDEKLSFEAVRNIHKLMDDDANGDVDVEESDEFLREDLNYHDPTVKHSTFHGEDKLISVEDLWKAWKSSEVYNWTVDEVVQWLITYVELPQYEETFRKLQLSGHAMPRLAVTNTTMTGTVLKMTDRSHRQKLQLKALDTVLFGPPLLTRHNHLKDFMLVVSIVIGVGGCWFAYIQNRYSKEHMKKMMKDLEGLHRAEQSLHDLQERLHKAQEEHRTVEVEKVHLEKKLRDEINLAKQEAQRLKELREGTENERSRQKYAEEELEQVREALRKAEKELESHSSWYAPEALQKWLQLTHEVEVQYYNIKKQNAEKQLLVAKEGAEKIKKKRNTLFGTFHVAHSSSLDDVDHKILTAKQALSEVTAALRERLHRWQQIEILCGFQIVNNPGIHSLVAALNIDPSWMGSTRPNPAHFIMTDDVDDMDEEIVSPLSMQSPSLQSSVRQRLTEPQHGLGSQRDLTHSDSESSLHMSDRQRVAPKPPQMSRAADEALNAMTSNGSHRLIEGVHPGSLVEKLPDSPALAKKALLALNHGLDKAHSLMELSPSAPPGGSPHLDSSRSHSPSSPDPDTPSPVGDSRALQASRNTRIPHLAGKKAVAEEDNGSIGEETDSSPGRKKFPLKIFKKPLKK

SEQ ID NO: 40843 - protein, 540 aa, Homo sapiens
MDVCVRLALWLLWGLLLHQGQSLSHSHSEKATGTSSGANSEESTAAEFCRIDKPLCHSEDEKLSFEAVRNIHKLMDDDANGDVDVEESDEFLREDLNYHDPTVKHSTFHGEDKLISVEDLWKAWKSSEVYNWTVDEVVQWLITYVELPQYEETFRKLQLSGHAMPRLAVTNTTMTGTVLKMTDRSHRQKLQLKALDTVLFGPPLLTRHNHLKDFMLVVSIVIGVGGCWFAYIQNRYSKEHMKKMMKDLEGLHRAEQSLHDLQERLHKAQEEHRTVEVEKVHLEKKLRDEINLAKQEAQRLKELREGTENERSRQKYAEEELEQVREALRKAEKELESHSSWYAPEALQKWLQLTHEVEVQYYNIKKQNAEKQLLVAKEGAEKIKKKRNTLFGTFHVAHSSSLDDVDHKILTAKQALSEVTAALRERLHRWQQIEILCGFQIVNNPGIHSLVAALNIDPSWMGSTRPNPAHFIMTDDVDDMDEEIVSPLSMQSPSLQSSVRQRLTEPQHGLGSQRGSSLKANRLSSKGFDPFRFGVLPPHE

SEQ ID NO: 40844 - protein, 414 aa, Homo sapiens
MGGNHSHKPPVFDENEEVNFDHFQILRAIGKGSFGKVCIVQKRDTKKMYAMKYMNKQKCIERDEVRNVFRELQIMQGLEHPFLVNLWYSFQDEEDMFMVVDLLLGGDLRYHLQQNVHFTEGTVKLYICELALALEYLQRYHIIHRDIKPDNILLDEHGHVHITDFNIATVVKGAERASSMAGTKPYMAPEVFQVYMDRGPGYSYPVDWWSLGITAYELLRGWRPYEIHSVTPIDEILNMFKVERVHYSSTWCKGMVALLRKLLTKDPESRVSSLHDIQSVPYLADMNWDAVFKKALMPGFVPNKGRLNCDPTFELEEMILESKPLHKKKKRLAKNRSRDGTKDSCPLNGHLQHCLETVREEFIIFNREKLRRQQGQGSQLLDTDSRGGGQAQSKLQDGCNNNLLTHTCTRGCSS

SEQ ID NO: 40845 - protein, 367 aa, Homo sapiens
MYAMKYMNKQKCIERDEVRNVFRELQIMQGLEHPFLVNLWYSFQDEEDMFMVVDLLLGGDLRYHLQQNVHFTEGTVKLYICELALALEYLQRYHIIHRDIKPDNILLDEHGHVHITDFNIATVVKGAERASSMAGTKPYMAPEVFQVYMDRGPGYSYPVDWWSLGITAYELLRGWRPYEIHSVTPIDEILNMFKVERVHYSSTWCKGMVALLRKLLTKDPESRVSSLHDIQSVPYLADMNWDAVFKKALMPGFVPNKGRLNCDPTFELEEMILESKPLHKKKKRLAKNRSRDGTKDSCPLNGHLQHCLETVREEFIIFNREKLRRQQGQGSQLLDTDSRGGGQAQSKLQDGCNNNLLTHTCTRGCSS

SEQ ID NO: 40846 - protein, 355 aa, Homo sapiens
MIPRKRYGSKNTDQGVYLGLSKTQVLSPATAGSSSSDIAPLPPPVTLVPPPPDTMSCRDRTQEFLSACKSLQTRQNGIQTNKPALRAVRQRSEFTLMAKRIGKDLSNTFAKLEKLTILAKRKSLFDDKAVEIEELTYIIKQDINSLNKQIAQLQDFVRAKGSQSGRHLQTHSNTIVVSLQSKLASMSNDFKSVLEVRTENLKQQRSRREQFSRAPVSALPLAPNHLGGGAVVLGAESHASKDVAIDMMDSRTSQQLQLIDEQDSYIQSRADTMQNIESTIVELGSIFQQLAHMVKEQEETIQRIDENVLGAQLDVEAAHSEILKYFQSVTSNRWLMVKIFLILIVFFIIFVVFLA

SEQ ID NO: 40847 - protein, 301 aa, Homo sapiens
MSCRDRTQEFLSACKSLQTRQNGIQTNKPALRAVRQRSEFTLMAKRIGKDLSNTFAKLEKLTILAKRKSLFDDKAVEIEELTYIIKQDINSLNKQIAQLQDFVRAKGSQSGRHLQTHSNTIVVSLQSKLASMSNDFKSVLEVRTENLKQQRSRREQFSRAPVSALPLAPNHLGGGAVVLGAESHASKDVAIDMMDSRTSQQLQLIDEQDSYIQSRADTMQNIESTIVELGSIFQQLAHMVKEQEETIQRIDENVLGAQLDVEAAHSEILKYFQSVTSNRWLMVKIFLILIVFFIIFVVFLA

SEQ ID NO: 40848 - protein, 267 aa, Homo sapiens
MSCRDRTQEFLSACKSLQTRQNGIQTNKPALRAVRQRSEFTLMAKRIGKDLSNTFAKLEKLTILAKRKSLFDDKAVEIEELTYIIKQDINSLNKQIAQLQDFVRAKGSQSGRHLQTHSNTIVVSLQSKLASMSNDFKSVLEVRTENLKQQRSRREQFSRAPVSALPLAPNHLGGGAVVLGAESHASKDVAIDMMDSRTSQQLQLIDEQDSYIQSRADTMQNIESTIVELGSIFQQLAHMVKEQEETIQSVLLFPLLPALSPGSTRTC

SEQ ID NO: 40849 - protein, 321 aa, Homo sapiens
MIPRKRYGSKNTDQGVYLGLSKTQVLSPATAGSSSSDIAPLPPPVTLVPPPPDTMSCRDRTQEFLSACKSLQTRQNGIQTNKPALRAVRQRSEFTLMAKRIGKDLSNTFAKLEKLTILAKRKSLFDDKAVEIEELTYIIKQDINSLNKQIAQLQDFVRAKGSQSGRHLQTHSNTIVVSLQSKLASMSNDFKSVLEVRTENLKQQRSRREQFSRAPVSALPLAPNHLGGGAVVLGAESHASKDVAIDMMDSRTSQQLQLIDEQDSYIQSRADTMQNIESTIVELGSIFQQLAHMVKEQEETIQSVLLFPLLPALSPGSTRTC

SEQ ID NO: 40850 - protein, 553 aa, Homo sapiens
MNKNTSTVVSPSLLEKDPAFQMITIAKETGLGLKVLGGINRNEGPLVYIQEIIPGGDCYKDGRLKPGDQLVSVNKESMIGVSFEEAKSIITGAKLRLESAWEIAFIRQKSDNIQPENLSCTSLIEASGEYGPQASTLSLFSSPPEILIPKTSSTPKTNNDILSSCEIKTGYNKTVQIPITSENSTVGLSNTDVASAWTENYGLQEKISLNPSVRFKAEKLEMALNYLGIQPTKEQHQALRQQVQADSKGTVSFGDFVQVARNLFCLQLDEVNVGAHEISNILDSQLLPCDSSEADEMERLKCERDDALKEVNTLKEKLLESDKQRKQLTEELQNVKQEAKAVVEETRALRSRIHLAEAAQRQAHGMEMDYEEVIRLLEAKITELKAQLADYSDQNKESVQDLKKRIMVLDCQLRKSEMARKTFEASTEKLLHFVEAIQEVFSDNSTPLSNLSERRAVLASQTSLTPLGRNGRSIPATLALESKELVKSVRALLDMDCLPYGWEEAYTADGIKYFINHVTQTTSWIHPVMSVLNLSRSEENEEDCSRELPNQKS

SEQ ID NO: 40851 - protein, 245 aa, Homo sapiens
MIGVSFEEAKSIITGAKLSTRLESAWEIAFIRQKSDNIQPENLSCTSLIEASGEYGPQASTLSLFSSPPEILIPKTSSTPKTNNDILSSCEIKTGYNKTVQIPITSENSTVGLSNTDVASAWTENYGLQEKISLNPSVRFKAEKLEMALNYLGIQPTKEQHQALRQQVQADSKGTVSFGDFVQVARNLFCLQLDEVNVGAHEISNILDSQLLPCDSSEADEMERLKCERDDALKEVNTLKWPGQN

SEQ ID NO: 40852 - protein, 189 aa, Homo sapiens
MTLAAYKEKMKELPLVSLFCSCFLADPLNKSSYKYEADTVDLNWCVISDMEVIELNKCTSGQSFEVILKPPSFDGVPEFNASLPRRRDPSLEEIQKKLEAAEERRKYQEAELLKHLAEKREHEREVIQKAIEENNNFIKMAKEKLAQKMESNKENREAHLAAMLERLQEKDKHAEEVRKNKELKEEASR

SEQ ID NO: 40853 - protein, 216 aa, Homo sapiens
MTLAAYKEKMKELPLVSLFCSCFLADPLNKSSYKYEGWCGRQCRRKDESQRKDSADWRERRAQADTVDLNWCVISDMEVIELNKCTSGQSFEVILKPPSFDGVPEFNASLPRRRDPSLEEIQKKLEAAEERRKYQEAELLKHLAEKREHEREVIQKAIEENNNFIKMAKEKLAQKMESNKENREAHLAAMLERLQEKDKHAEEVRKNKELKEEASR

SEQ ID NO: 40854 - protein, 167 aa, Homo sapiens
MKELPLVSLFCSCFLADPLNKSSYKYEADTVDLNWCVISDMEVIELNKCTSGQSFEVILKPPSFDGVPEFNASLPRRRDPSLEEIQKKLEAAEERRKYQEAELLKHLAEKREHEREVIQKAIEENNNFIKMAKEKLAQKMESNKENREAHLAAMLERLQEKEPPAAR

SEQ ID NO: 40855 - protein, 203 aa, Homo sapiens
MTLAAYKEKMKELPLVSLFCSCFLADPLNKSSYKYEGWCGRQCRRKDESQRKDSADWRERRAQADTVDLNWCVISDMEVIELNKCTSGQSFEVILKPPSFDGVPEFNASLPRRRDPSLEEIQKKLEAAEERRKYQEAELLKHLAEKREHEREVIQKAIEENNNFIKMAKEKLAQKMESNKENREAHLAAMLERLQEKEPPAAR

SEQ ID NO: 40856 - protein, 486 aa, Homo sapiens
MRSGAERRGSSAAASPGSPPPGRARPAGSDAPSALPPPAAGQPRARDSGDVRSQPRPLFQWSKWKKRMGSSMSAATARRPVFDDKEDVNFDHFQILRAIGKGSFGKVCIVQKRDTEKMYAMKYMNKQQCIERDEVRNVFRELEILQEIEHVFLVNLWYSFQDEEDMFMVVDLLLGGDLRYHLQQNVQFSEDTVRLYICEMALALDYLRGQHIIHRDVKPDNILLDERGHAHLTDFNIATIIKDGERATALAGTKPYMAPEIFHSFVNGGTGYSFEVDWWSVGVMAYELLRGWRPYDIHSSNAVESLVQLFSTVSVQYVPTWSKEMVALLRKLLTVNPEHRLSSLQDVQAAPALAGVLWDHLSEKRVEPGFVPNKGRLHCDPTFELEEMILESRPLHKKKKRLAKNKSRDNSRDSSQSENDYLQDCLDAIQQDFVIFNREKLKRSQDLPREPLPAPESRDAAEPVEDEAERSALPMCGPICPSAGSG

SEQ ID NO: 40857 - protein, 369 aa, Homo sapiens
MYAMKYMNKQQCIERDEVRNVFRELEILQEIEHVFLVNLWYSFQDEEDMFMVVDLLLGGDLRYHLQQNVQFSEDTVRLYICEMALALDYLRGQHIIHRDVKPDNILLDERGHAHLTDFNIATIIKDGERATALAGTKPYMAPEIFHSFVNGGTGYSFEVDWWSVGVMAYELLRGWRPYDIHSSNAVESLVQLFSTVSVQYVPTWSKEMVALLRKLLTVNPEHRLSSLQDVQAAPALAGVLWDHLSEKRVEPGFVPNKGRLHCDPTFELEEMILESRPLHKKKKRLAKNKSRDNSRDSSQSENDYLQDCLDAIQQDFVIFNREKLKRSQDLPREPLPAPESRDAAEPVEDEAERSALPMCGPICPSAGSG

SEQ ID NO: 40858 - protein, 210 aa, Homo sapiens
MSAKSAISKEIFAPLDERMLGAVQVKRRTKKKIPFLATGGQGEYLTYICLSVTNKKPTQASITKVKQFEGSTSFVRRSQWMLEQLRQVNGIDPNGDSAEFDLLFENAFDQWVASTASEKCTFFQILHHTCQRYLTDRKPEFINCQSKIMGGNSILHSAADSVTSAVQKASQALNERGERLGRAEEKTEDLKNSAQQFAETAHKLAMKHKC

SEQ ID NO: 40859 - protein, 210 aa, Homo sapiens
MSAKSAISKEIFAPLDERMLGAVQVKRRTKKKIPFLATGGQGEYLTYICLSVTNKKPTQASITKVKQFEGSTSFVRRSQWMLEQLRQVNGIDPNGDSAEFDLLFENAFDQWVASTASEKCTFFQILHHTCQRYLTDRKPEFINCQSKIMGGNSILHSAADSVTSAVQKASQALNERGERLGRAEEKTEDLKNSAQQFAETAHKVTFRGRK

SEQ ID NO: 40860 - protein, 108 aa, Homo sapiens
MSACFLDTRRAAFLQCDLPSSYRILTLPESGHCGSAEPVSDAPALLLSGNSILHSAADSVTSAVQKASQALNERGERLGRAEEKTEDLKNSAQQFAETAHKLAMKHKC

SEQ ID NO: 40861 - protein, 235 aa, Homo sapiens
MAVELGVLLVRPRPGTGLGRVMRTLLLVLWLATRGSALYFHIGETEKKCFIEEIPDETMVIGNYRTQLYDKQREEYQPATPGLGMFVEVKDPEDKVILARQYGSEGRFTFTSHTPGEHQICLHSNSTKFSLFAGGMLRVHLDIQVGEHANDYAEIAAKDKLSELQLRVRQLVEQVEQIQKEQNYQRWREERFRQTSESTNQRVLWWSILQTLILVAIGVWQMRHLKSFFEAKKLV

SEQ ID NO: 40862 - protein, 215 aa, Homo sapiens
MRGLRWRYTRLPSQVEDTLSGEEGNEEEEEEEAAPDPAAAPEDPTVPQLTEASQVLSASEIRQLSFHFPPRVTGHPWSLVFCTSRDGFSLQSLYRRMEGCSGPVLLVLRDQDGQIFGAFSSSAIRLSKGFYGTGETFLFSFSPQLKVFKWTGSNSFFVKGDLDSLMMGSGSGRFGLWLDGDLFRGGSSPCPTFNNEVLARQEQFCIQELEAWLLS

SEQ ID NO: 40863 - protein, 101 aa, Homo sapiens
MSDLEAKPSTEHLGDKIKDEDIKLRVIGQDSSEIHFKVKMTTPLKKLKKSYCQRQGVPVNSLRFLFEGQRIADNHTPEELGMEEEDVIEVYQEQIGGHSTV

SEQ ID NO: 40864 - protein, 422 aa, Homo sapiens
MGMTRMLLECSLSDKLCVIQEKQYEVIIVPTLLVTIFLILLGVILWLFIREQRTQQQRSGPQGIAPVPPPRDLSWEAGHGGNVALPLKETSVENFLGATTPALAKLQVPREQLSEVLEQICSGSCGPIFRANMNTGDPSKPKSVILKALKEPAGLHEVQDFLGRIQFHQYLGKHKNLVQLEGCCTEKLPLYMVLEDVAQGDLLSFLWTCRRDVMTMDGLLYDLTEKQVYHIGKQVLLALEFLQEKHLFHGDVAARNILMQSDLTAKLCGLGLAYEVYTRGAISSTQTIPLKWLAPERLLLRPASIRADVWSFGILLYEMVTLGAPPYPEVPPTSILEHLQRRKIMKRPSSCTHTMYSIMKSCWRWREADRPSPRELRLRLEAAIKTADDEAVLQVPELVVPELYAAVAGIRVESLFYNYSML

SEQ ID NO: 40865 - protein, 484 aa, Homo sapiens
MAELRPSGAPGPTAPPAPGPTAPPAFASLFPPGLHAIYGECRRLYPDQPNPLQVTAIVKYWLGGPDPLDYVSMYRNVGSPSANIPEHWHYISFGLSDLYGDNRVHEFTGTDGPSGFGFELTFRLKRETGESAPPTWPAELMQGLARYVFQSENTFCSGDHVSWHSPLDNSESRIQHMLLTEDPQMQPVQTPFGVVTFLQIVGVCTEELHSAQQWNGQGILELLRTVPIAGGPWLITDMRRGETIFEIDPHLQERVDKGIETDGSNLSGVSAKCAWDDLSRPPEDDEDSRSICIGTQPRRLSGKDTEQIRETLRRGLEINSKPVLPPINPQRQNGLAHDRAPSRKDSLESDSSTAIIPHELIRTRQLESVHLKFNQESGALIPLCLRGRLLHGRHFTYKSITGDMAITFVSTGVEGAFATEEHPYAAHGPWLQILLTEEFVEKMLEDLEDLTSPEEFKLPKEYSWPEKKLKVSILPDVVFDSPLH

SEQ ID NO: 40866 - protein, 433 aa, Homo sapiens
MAELRPSGAPGPTAPPAPGPTAPPAFASLFPPGLHAIYGECRRLYPDQPNPLQVTAIVKYWLGGPDPLDYVSMYRNVGSPSANIPEHWHYISFGLSDLYGDNRVHEFTGTDGPSGFGFELTFRLKRETGESAPPTWPAELMQGLARYVFQSENTFCSGDHVSWHSPLDNSESRIQHMLLTEDPQMQPVQTPFGVVTFLQIVGVCTEELHSAQQWNGQGILELLRTVPIAGGPWLITDMRRGETIFEIDPHLQERVDKGIETDGSNLSGVSAKCAWDDLSRPPEDDEDSRSICIGTQPRRLSGKDTEQIRETLRRGLEINSKPVLPPINPQRQNGLAHDRAPSRKDSLESDSSTAIIPHELIRTRQLESVHLKFNQESGALIPLCLRGRLLHGRHFTYKSITGDMAITFVSTGVEGAFATEEHPYAAHGPWLQL

SEQ ID NO: 40867 - protein, 481 aa, Homo sapiens
MAELRPSGAPGPTAPPAPGPTAPPAFASLFPPGLHAIYGECRRLYPDQPNPLQVTAIVKYWLGGPDPLDYVSMYRNVGSPSANIPEHWHYISFGLSDLYGDNRVHEFTGTDGPSGFGFELTFRLKRETGESAPPTWPAELMQGLARYVFQSENTFCSGDHVSWHSPLDNSESRIQHMLLTEDPQMQPVQTPFGVVTFLQIVGVCTEELHSAQQWNGQGILELLRTVPIAGGPWLITDMRRGETIFEIDPHLQERVDKGIETDGSNLSGVSAKCAWDDLSRPPEDDEDSRSICIGTQPRRLSGKDTEQIRETLRRGLEINSKPVLPPINPQRQNGLAHDRAPSRKDSLESDSSTAIIPHELIRTRQLESVHLKFNQESGALIPLCLRGRLLHGRHFTYKSITGDMAITFVSTGVEGAFATEEHPYAAHGPWLQVRRPFFFSLLPFIDFLAHPSSSPLAALDGTPSWGAGHECLMDSGPGACV

SEQ ID NO: 40868 - protein, 785 aa, Homo sapiens
MDFSRLHMYSPPQCVPENTGYTYALSSSYSSDALDFETEHKLDPVFDSPRMSRRSLRLATTACTLGDGEAVGADSGTSSAVSLKNRAARTTKQRRSTNKSAFSINHVSRQVTSSGVSHGGTVSLQDAVTRRPPVLDESWIREQTTVDHFWGLDDDGDLKGGNKAAIQGNGDVGAAAATAHNGFSCSNCSMLSERKDVLTAHPAAPGPVSRVYSRDRNQKCYFLLQILRRIGAVGQAVSRTAWSALWLAVVAPGKAASGVFWWLGIGWYQFVTLISWLNVFLLTRCLRNICKFLVLLIPLFLLLAGLSLRGQGNFFSFLPVLNWASMHRTQRVDDPQDVFKPTTSRLKQPLQGDSEAFPWHWMSGVEQQVASLSGQCHHHGENLRELTTLLQKLQARVDQMEGGAAGPSASVRDAVGQPPRETDFMAFHQEHEVRMSHLEDILGKLREKSEAIQKELEQTKQKTISAVGEQLLPTVEHLQLELDQLKSELSSWRHVKTGCETVDAVQERVDVQVREMVKLLFSEDQQGGSLEQLLQRFSSQFVSKGDLQTMLRDLQLQILRNVTHHVSVTKQLPTSEAVVSAVSEAGASGITEAQARAIVNSALKLYSQDKTGMVDFALESGGGSILSTRCSETYETKTALMSLFGIPLWYFSQSPRVVIQPDIYPGNCWAFKGSQGYLVVRLSMMIHPAAFTLEHIPKTLSPTGNISSAPKDFAVYGLENEYQEEGQLLGQFTYDQDGESLQMFQALKRPDDTAFQIVELRIFSNWGHPEYTCLYRFRVHGEPVK

SEQ ID NO: 40869 - protein, 257 aa, Homo sapiens
MDFSRLHMYSPPQCVPENTGYTYALSSSYSSDALDFETEHKLDPVFDSPRMSRRSLRLATTACTLGDGEAVGADSGTSSAVSLKNRAARTTKQRRSTNKSAFSINHVSRQVTSSGVSHGGTVSLQDAVTRRPPVLDESWIREQTTVDHFWGLDDDGDLKGGNKAAIQGNGDVGAAAATAHNGFSCSNCSMLSERKDVLTAHPAAPGPVSRVYSRDRNQKCKSQSFKTQKKVCFPNLIFPFCKSQCLHYLSWRLKIIP

SEQ ID NO: 40870 - protein, 341 aa, Homo sapiens
MDFSRLHMYSPPQCVPENTGYTYALSSSYSSDALDFETEHKLDPVFDSPRMSRRSLRLATTACTLGDGEAVGADSGTSSAVSLKNRAARTTKQRRSTNKSAFSINHVSRQVTSSGVSHGGTVSLQDAVTRRPPVLDESWIREQTTVDHFWGLDDDGDLKGGNKAAIQGNGDVGAAAATAHNGFSCSNCSMLSERKDVLTAHPAAPGPVSRVYSRDRNQKCGASFYVNRILWLARYTASSFSSFLVQLFQVVLMKLSYESENYKLKTHESKDCESESYKSKSHESKAHASYYGRMNVREVLREDGHLSVNGEALCKYGFVFLWASVVELVPHAVMLGTSSRE

SEQ ID NO: 40871 - protein, 109 aa, Homo sapiens
MDFSRLHMYSPPQCVPENTGYTYALSSSYSSDALDFETEHKLDPVFDSPRMSRRSLRLATTACTLGDGEAVGADSGTSSAVSLKNRAARTTKQRRSTNKSAFSINHVSV

SEQ ID NO: 40872 - protein, 702 aa, Homo sapiens
MSRRSLRLATTACTLGDGEAVGADSGTSSAVSLKNRAARTTKQRRSTNKSAFSINHVSRQVTSSGVSHGGTVSLQDAVTRRPPVLDESWIREQTTVDHFWGLDDDGDLKGGNKAAIQGNGDVGAAAATAHNGFSCSNCSMLSERKDVLTAHPAAPGPVSRVYSRDRNQKWKAASGVFWWLGIGWYQFVTLISWLNVFLLTRCLRNICKFLVLLIPLFLLLAGLSLRGQGNFFSFLPVLNWASMHRTQRVDDPQDVFKPTTSRLKQPLQGDSEAFPWHWMSGVEQQVASLSGQCHHHGENLRELTTLLQKLQARVDQMEGGAAGPSASVRDAVGQPPRETDFMAFHQEHEVRMSHLEDILGKLREKSEAIQKELEQTKQKTISAVGEQLLPTVEHLQLELDQLKSELSSWRHVKTGCETVDAVQERVDVQVREMVKLLFSEDQQGGSLEQLLQRFSSQFVSKGDLQTMLRDLQLQILRNVTHHVSVTKQLPTSEAVVSAVSEAGASGITEAQARAIVNSALKLYSQDKTGMVDFALESGGGSILSTRCSETYETKTALMSLFGIPLWYFSQSPRVVIQPDIYPGNCWAFKGSQGYLVVRLSMMIHPAAFTLEHIPKTLSPTGNISSAPKDFAVYGLENEYQEEGQLLGQFTYDQDGESLQMFQALKRPDDTAFQIVELRIFSNWGHPEYTCLYRFRVHGEPVK

SEQ ID NO: 40873 - protein, 683 aa, Homo sapiens
MDFSRLHMYSPPQCVPENTGYTYALSSSYSSDALDFETEHKLDPVFDSPRMSRRSLRLATTACTLGDGEAVGADSGTSSAVSLKNRAARTTKQRRSTNKSAFSINHVSRQVTSSGVSHGGTVSLQDAVTRRPPVLDESWIREQTTVDHFWGKAASGVFWWLGIGWYQFVTLISWLNVFLLTRCLRNICKFLVLLIPLFLLLAGLSLRGQGNFFSFLPVLNWASMHRTQRVDDPQDVFKPTTSRLKQPLQGDSEAFPWHWMSGVEQQVASLSGQCHHHGENLRELTTLLQKLQARVDQMEGGAAGPSASVRDAVGQPPRETDFMAFHQEHEVRMSHLEDILGKLREKSEAIQKELEQTKQKTISAVGEQLLPTVEHLQLELDQLKSELSSWRHVKTGCETVDAVQERVDVQVREMVKLLFSEDQQGGSLEQLLQRFSSQFVSKGDLQTMLRDLQLQILRNVTHHVSVTKQLPTSEAVVSAVSEAGASGITEAQARAIVNSALKLYSQDKTGMVDFALESGGGSILSTRCSETYETKTALMSLFGIPLWYFSQSPRVVIQPDIYPGNCWAFKGSQGYLVVRLSMMIHPAAFTLEHIPKTLSPTGNISSAPKDFAVYGLENEYQEEGQLLGQFTYDQDGESLQMFQALKRPDDTAFQIVELRIFSNWGHPEYTCLYRFRVHGEPVK

SEQ ID NO: 40874 - protein, 278 aa, Homo sapiens
MGRISPGSPGLPRTVWFEVVNMDFSRLHMYSPPQCVPENTGYTYALSSSYSSDALDFETEHKLDPVFDSPRMSRRSLRLATTACTLGDGEAVGADSGTSSAVSLKNRAARTTKQRRSTNKSAFSINHVSRQVTSSGVSHGGTVSLQDAVTRRPPVLDESWIREQTTVDHFWGLDDDGDLKGGNKAAIQGNGDVGAAAATAHNGFSCSNCSMLSERKDVLTAHPAAPGPVSRVYSRDRNQKCKSQSFKTQKKVCFPNLIFPFCKSQCLHYLSWRLKIIP

SEQ ID NO: 40875 - protein, 916 aa, Homo sapiens
MDFSRLHMYSPPQCVPENTGYTYALSSSYSSDALDFETEHKLDPVFDSPRMSRRSLRLATTACTLGDGEAVGADSGTSSAVSLKNRAARTTKQRRSTNKSAFSINHVSRQVTSSGVSHGGTVSLQDAVTRRPPVLDESWIREQTTVDHFWGLDDDGDLKGGNKAAIQGNGDVGAAAATAHNGFSCSNCSMLSERKDVLTAHPAAPGPVSRVYSRDRNQKCGASFYVNRILWLARYTASSFSSFLVQLFQVVLMKLSYESENYKLKTHESKDCESESYKSKSHESKAHASYYGRMNVREVLREDGHLSVNGEALCDDCKGKRHLDAHTAAHSQSPRLPGRAGTLWHIWACAGYFLLQILRRIGAVGQAVSRTAWSALWLAVVAPGKAASGVFWWLGIGWYQFVTLISWLNVFLLTRCLRNICKFLVLLIPLFLLLAGLSLRGQGNFFSFLPVLNWASMHRTQRVDDPQDVFKPTTSRLKQPLQGDSEAFPWHWMSGVEQQVASLSGQCHHHGENLRELTTLLQKLQARVDQMEGGAAGPSASVRDAVGQPPRETDFMAFHQEHEVRMSHLEDILGKLREKSEAIQKELEQTKQKTISAVGEQLLPTVEHLQLELDQLKSELSSWRHVKTGCETVDAVQERVDVQVREMVKLLFSEDQQGGSLEQLLQRFSSQFVSKGDLQTMLRDLQLQILRNVTHHVSVTKQLPTSEAVVSAVSEAGASGITEAQARAIVNSALKLYSQDKTGMVDFALESGGGSILSTRCSETYETKTALMSLFGIPLWYFSQSPRVVIQPDIYPGNCWAFKGSQGYLVVRLSMMIHPAAFTLEHIPKTLSPTGNISSAPKDFAVYGLENEYQEEGQLLGQFTYDQDGESLQMFQALKRPDDTAFQIVELRIFSNWGHPEYTCLYRFRVHGEPVK

SEQ ID NO: 40876 - protein, 514 aa, Homo sapiens
MADSGLDKKSTKCPDCSSASQKDVLCVCSSKTRVPPVLVVEMSQTSSIGSAESLISLERKKEKNINRDITSRKDLPSRTSNVERKASQQQWGRGNFTEGKVPHIRIENGAAIEEIYTFGRILGKGSFGIVIEATDKETETKWAIKKVNKEKAGSSAVKLLEREVNILKSVKHEHIIHLEQVFETPKKMYLVMELCEDGELKEILDRKGHFSENETRWIIQSLASAIAYLHNNDIVHRDLKLENIMVKSSLIDDNNEINLNIKVTDFGLAVKKQSRSEAMLQATCGTPIYMAPEVISAHDYSQQCDIWSIGVVMYMLLRGEPPFLASSEEKLFELIRKGELHFENAVWNSISDCAKSVLKQLMKVDPAHRITAKELLDNQWLTGNKLSSVRPTNVLEMMKEWKNNPESVEENTTEEKNKPSTEEKLKSYQPWGNVPDANYTSDEEEEKQSTAYEKQFPATSKDNFDMCSSSFTSSKLLPAEIKGEMEKTPVTPSQGTATKYPAKSGALSRTKKKL

SEQ ID NO: 40877 - protein, 448 aa, Homo sapiens
MADSGLDKKSTKCPDCSSASQKDVLCVCSSKTRVPPVLVVEMSQTSSIGSAESLISLERKKEKNINRDITSRKDLPSRTSNVERKASQQQWGRGNFTEGKVPHIRIENGAAIEEIYTFGRILGKGSFGIVIEATDKETETKWAIKKVNKEKAGSSAVKLLEREVNILKSVKHEHIIHLEQVFETPKKMYLVMELCEDGELKEILDRKGHFSENETRWIIQSLASAIAYLHNNDIVHRDLKLENIMVKSSLIDDNNEINLNIKVTDFGLAVKKQSRSEAMLQATCGTPIYMAPEVISAHDYSQQCDIWSIGVVMYMLLRGEPPFLASSEEKLFELIRKGELHFENAVWNSISDCAKSVLKQLMKVDPAHRITAKELLDNQWLTSTAYEKQFPATSKDNFDMCSSSFTSSKLLPAEIKGEMEKTPVTPSQGTATKYPAKSGALSRTKKKL

SEQ ID NO: 40878 - protein, 465 aa, Homo sapiens
MAMTGSTPCSSMSNHTKERVTMTKVTLENFYSNLIAQHEEREMRQKKLEKVMEEEGLKDEEKRLRRSAHARKETEFLRLKRTRLGLEDFESLKVIGRGAFGEVRLVQKKDTGHVYAMKILRKADMLEKEQVGHIRAERDILVEADSLWVVKMFYSFQDKLNLYLIMEFLPGGDMMTLLMKKDTLTEEETQFYIAETVLAIDSIHQLGFIHRDIKPDNLLLDSKGHVKLSDFGLCTGLKKAHRTEFYRNLNHSLPSDFTFQNMNSKRKAETWKRNRRQLAFSTVGTPDYIAPEVFMQTGYNKLCDWWSLGVIMYEMLIGYPPFCSETPQETYKKVMNWKETLTFPPEVPISEKAKDLILRFCCEWEHRIGAPGVEEIKSNSFFEGVDWEHIRERPAAISIEIKSIDDTSNFDEFPESDILKPTVATSNHPETDYKNKDWVFINYTYKRFEGLTARGAIPSYMKAAK

SEQ ID NO: 40879 - protein, 273 aa, Homo sapiens
MGQKVTGGIKTVDMRDPTYRPLKQELQGLDYCKPTRLDLLLDMPPVSYDVQLLHSWNNNDRSLNVFVKEDDKLIFHRHPVAQSTDAIRGKVGYTRGLHVWQITWAMRQRGTHAVVGVATADAPLHSVGYTTLVGNNHESWGWDLGRNRLYHDGKNQPSKTYPAFLEPDETFIVPDSFLVALDMDDGTLSFIVDGQYMGVAFRGLKGKKLYPVVSAVWGHCEIRMRYLNGLDPEPLPLMDLCRRSVRLALGRERLGEIHTLPLPASLKAYLLYQ

SEQ ID NO: 40880 - protein, 379 aa, Homo sapiens
MPRSSRSPGDPGALLEDVAHNPRPRRIAQRGRNTSRMAEDTSPNMNDNILLPVRNNDQALGLTQCMLGCVSWFTCFACSLRTQAQQVLFNTCRCKLLCQKLMEKTGILLLCAFGFWMFSIHLPSKMKVWQDDSINGPLQSLRLYQEKVRHHSGEIQDLRGSMNQLIAKLQEMEAMSDEQKMAQKIMKMIHGDYIEKPDFALKSIGASIDFEHTSVTYNHEKAHSYWNWIQLWNYAQPPDVILEPNVTPGNCWAFEGDRGQVTIQLAQKVYLSNLTLQHIPKTISLSGSLDTAPKDFVIYGMEGSPKEEVFLGAFQFQPENIIQMFPLQNQPARAFSAVKVKISSNWGNPGFTCLYRVRVHGSVAPPREQPHQNPYPKRD

SEQ ID NO: 40881 - protein, 1231 aa, Homo sapiens
MIAAPEIPTDFNLLQESETHFSSDTDFEDIEGKNQKQGKGKTCKKGKKGPAEKGKGGNGGGKPPSGPNRMNGHHQQNGVENMMLFEVVKMGKSAMQSVVDDWIESYKHDRDIALLDLINFFIQCSGCKGVVTAEMFRHMQNSEIIRKMTEEFDEDSGDYPLTMAGPQWKKFKSSFCEFIGVLVRQCQYSIIYDEYMMDTVISLLTGLSDSQVRAFRHTSTLAAMKLMTALVNVALNLSINMDNTQRQYEAERNKMIGKRANERLELLLQKRKELQENQDEIENMMNAIFKGVFVHRYRDAIAEIRAICIEEIGIWMKMYSDAFLNDSYLKYVGWTMHDKQGEVRLKCLTALQGLYYNKELNSKLELFTSRFKDRIVSMTLDKEYDVAVQAIKLLTLVLQSSEEVLTAEDCENVYHLVYSAHRPVAVAAGEFLYKKLFSRRDPEEDGMMKRRGRQGPNANLVKTLVFFFLESELHEHAAYLVDSMWDCATELLKDWECMNSLLLEEPLSGEEALTDRQESALIEIMLCTIRQAAECHPPVGRGTGKRVLTAKEKKTQLDDRTKITELFAVALPQLLAKYSVDAEKVTNLLQLPQYFDLEIYTTGRLEKHLDALLRQIRNIVEKHTDTDVLEACSKTYHALCNEEFTIFNRVDISRSQLIDELADKFNRLLEDFLQEGEEPDEDDAYQVLSTLKRITAFHNAHDLSKWDLFACNYKLLKTGIENGDMPEQIVIHALQCTHYVILWQLAKITESSSTKEDLLRLKKQMRVFCQICQHYLTNVNTTVKEQAFTILCDILMIFSHQIMSGGRDMLEPLVYTPDSSLQSELLSFILDHVFIEQDDDNNSADGQQEDEASKIEALHKRRNLLAAFCKLIVYTVVEMNTAADIFKQYMKYYNDYGDIIKETMSKTRQIDKIQCAKTLILSLQQLFNEMIQENGYNFDRSSSTFSGIKELARRFALTFGLDQLKTREAIAMLHKDGIEFAFKEPNPQGESHPPLNLAFLDILSEFSSKLLRQDKRTVYVYLEKFMTFQMSLRREDVWLPLMSYRNSLLAGGDDDTMSVISGISSRGSTVRSKKSKPSTGKRKVVEGMQLSLTEESSSSDSMWLSREQTLHTPVMMQTPQLTSTIMREPKRLRPEDSFMSVYPMQTEHHQTPLDYNRRGTSLMEDDEEPIVEDVMMSSEGRIEDLNEGMDFDTMDIDLPPSKNRRERTELKPDFFDPASIMDESVLGVSMF

SEQ ID NO: 40882 - protein, 1268 aa, Homo sapiens
MIAAPEIPTDFNLLQESETHFSSDTDFEDIEGKNQKQGKGKTCKKGKKGPAEKGKGGNGGGKPPSGPNRMNGHHQQNGVENMMLFEVVKMGKSAMQSVVDDWIESYKHDRDIALLDLINFFIQCSGCKGVVTAEMFRHMQNSEIIRKMTEEFDEDSGDYPLTMAGPQWKKFKSSFCEFIGVLVRQCQYSIIYDEYMMDTVISLLTGLSDSQVRAFRHTSTLAAMKLMTALVNVALNLSINMDNTQRQYEAERNKMIGKRANERLELLLQKRKELQENQDEIENMMNAIFKGVFVHRYRDAIAEIRAICIEEIGIWMKMYSDAFLNDSYLKYVGWTMHDKQGEVRLKCLTALQGLYYNKELNSKLELFTSRFKDRIVSMTLDKEYDVAVQAIKLLTLVLQSSEEVLTAEDCENVYHLVYSAHRPVAVAAGEFLYKKLFSRRDPEEDGMMKRRGRQGPNANLVKTLVFFFLESELHEHAAYLVDSMWDCATELLKDWECMNSLLLEEPLSGEEALTDRQESALIEIMLCTIRQAAECHPPVGRGTGKRVLTAKEKKTQLDDRTKITELFAVALPQLLAKYSVDAEKVTNLLQLPQYFDLEIYTTGRLEKHLDALLRQIRNIVEKHTDTDVLEACSKTYHALCNEEFTIFNRVDISRSQLIDELADKFNRLLEDFLQEGEEPDEDDAYQVLSTLKRITAFHNAHDLSKWDLFACNYKLLKTGIENGDMPEQIVIHALQCTHYVILWQLAKITESSSTKEDLLRLKKQMRVFCQICQHYLTNVNTTVKEQAFTILCDILMIFSHQIMSGGRDMLEPLVYTPDSSLQSELLSFILDHVFIEQDDDNNSADGQQEDEASKIEALHKRRNLLAAFCKLIVYTVVEMNTAADIFKQYMKYYNDYGDIIKETMSKTRQIDKIQCAKTLILSLQQLFNEMIQENGYNFDRSSSTFSGIKELARRFALTFGLDQLKTREAIAMLHKDGIEFAFKEPNPQGESHPPLNLAFLDILSEFSSKLLRQDKRTVYVYLEKFMTFQMSLRREDVWLPLMSYRNSLLAGGDDDTMSVISGISSRGSTVRSKKSKPSTGKRKVVEGMQLSLTEESSSSDSMWLSREQTLHTPVMMQTPQLTSTIMREPKRLRPEDSFMSVYPMQTEHHQTPLDYNTQVTWMLAQRQQEEARQQQERAAMSYVKLRTNLQHAIRRGTSLMEDDEEPIVEDVMMSSEGRIEDLNEGMDFDTMDIDLPPSKNRRERTELKPDFFDPASIMDESVLGVSMF

SEQ ID NO: 40883 - protein, 403 aa, Homo sapiens
MASALRPPRVPKPKGVLPSHYYESFLEKKGPCDRDYKKFWAGLQGLTIYFYNSNRDFQHVEKLNLGAFEKLTDEIPWGSSRDPGTHFSLILRDQEIKFKVETLECREMWKGFILTVVELRVPTDLTLLPGHLYMMSEVLAKEEARRALETPSCFLKVSRLEAQLLLERYPECGNLLLRPSGDGADGVSVTTRQMHNGTHVVRHYKVKREGPKYVIDVEQPFSCTSLDAVVNYFVSHTKKALVPFLLDEDYEKVLGYVEADKENGENVWVAPSAPGPGPAPCTGGPKPLSPASSQDKLPPLPPLPNQEENYVTPIGDGPAVDYENQDVASSSWPVILKPKKLPKPPAKLPKPPVGPKPEPKVFNGGLGRKLPVSSAQPLFPTAGLADMTAELQKKLEKRRALEH

SEQ ID NO: 40884 - protein, 449 aa, Homo sapiens
MASALRPPRVPKPKGVLPSHYYESFLEKKGPCDRDYKKFWAGLQGLTIYFYNSNRDFQHVEKLNLGAFEKLTDEIPWGSSRDPGTHFSLILRDQEIKFKVETLECREMWKGFILTVVELRVPTDLTLLPGHLYMMSEVLAKEEARRALETPSCFLKVSRLEAQLLLERYPECGNLLLRPSGDGADGVSVTTRQMHNGTHVVRHYKVKREGPKYVIDVEQPFSCTSLDAVVNYFVSHTKKALVPFLLDEDYEKVLGYVEADKENGENVWVAPSAPGPGPAPCTGGPKPLSPASSQDKLPPLPPLPNQEENYVTPIGDGPAVDYENQDVASSSWPVILKPKKLPKPPAKLPKPPVGPKPVEKGFHHVAQAGLELLTSSDPPTSASQSAGITGVSHHTWPHLSSLPEPKVFNGGLGRKLPVSSAQPLFPTAGLADMTAELQKKLEKRRALEH

SEQ ID NO: 40885 - protein, 295 aa, Homo sapiens
MMAKKPPKPAPRRIFQERLKITALPLYFEGFLLIKRSGYREYEHYWTELRGTTLFFYTDKKSIIYVDKLDIVDLTCLTEQNSTEKNCAKFTLVLPKEEVQLKTENTESGEEWRGFILTVTELSVPQNVSLLPGQVIKLHEVLEREKKRRIETEQSTSVEKEKEPTEDYVDVLNPMPACFYTVSRKEATEMLQKNPSLGNMILRPGSDSRNYSITIRQEIDIPRIKHYKVMSVGQNYTIELEKPVTLPNLFSVIDYFVKETRGNLRPFICSTDENTGQEPSMEGRSEKLKKNPHIA

SEQ ID NO: 40886 - protein, 300 aa, Homo sapiens
MAAVAALQLGLRAAGLGRAPASAAWRSVLRVSPRPGVAWRPSRCGSSAAEASATKAEDDSFLQWVLLLIPVTAFGLGTWQVQRRKWKLNLIAELESRVLAEPVPLPADPMELKNLEYRPVKVRGCFDHSKELYMMPRTMVDPVREAREGGLISSSTQSGAYVVTPFHCTDLGVTILVNRGFVPRKKVNPETRQKGQIEGEVDLIGMVRLTETRQPFVPENNPERNHWHYRDLEAMARITGAEPIFIDANFQSTVPGGPIGGQTRVTLRNEHLQYIVTWYGLSAATSYLWFKKFLRGTPGV

SEQ ID NO: 40887 - protein, 288 aa, Homo sapiens
MAAVAALQLGLRAAGLGRAPASAAWRSVLRVSPRPGVAWRPSRCGSSAAEASATKAEDDSFLQWVLLLIPVTAFGLGTWQVQRRKWKLNLIAELESRVLAEPVPLPADPMELKNLEYRPVKVRGCFDHSKELYMMPRTMVDPVREAREGGLISSSTQSGAYVVTPFHCTDLGKKVNPETRQKGQIEGEVDLIGMVRLTETRQPFVPENNPERNHWHYRDLEAMARITGAEPIFIDANFQSTVPGGPIGGQTRVTLRNEHLQYIVTWYGLSAATSYLWFKKFLRGTPGV

SEQ ID NO: 40888 - protein, 652 aa, Homo sapiens
MTSASPEDQNAPVGCPKGARRRRPISVIGGVSLYGTNQTEELDNLLTQPASRPPMPAHQVPPYKAVSARFRPFTFSQSTPIGLDRVGRRRQMRASNVSSDGGTEPSALVDDNGSEEDFSYEDLCQASPRYLQPGGEQLAINELISDGNVVCAEALWDHVTMDDQELGFKAGDVIQVLEASNKDWWWGRSEDKEAWFPASFVRLRVNQEELSENSSSTPSEEQDEEASQSRHRHCENKQQMRTNVIREIMDTERVYIKHLRDICEGYIRQCRKHTGMFTVAQLATIFGNIEDIYKFQRKFLKDLEKQYNKEEPHLSEIGSCFLQNQEGFAIYSEYCNNHPGACLELANLMKQGKYRHFFEACRLLQQMIDIAIDGFLLTPVQKICKYPLQLAELLKYTTQEHGDYSNIKAAYEAMKNVACLINERKRKLESIDKIARWQVSIVGWEGLDILDRSSELIHSGELTKITKQGKSQQRTFFLFDHQLVSCKKDLLRRDMLYYKGRLDMDEMELVDLGDGRDKDCNLSVKNAFKLVSRTTDEVYLFCAKKQEDKARWLQACADERRRVQEDKEMGMEISENQKKLAMLNAQKAGHGKSKGYNRCPVAPPHQGLHPIHQRHITMPTSVPQQQVFGLAEPKRKSSLFWHTFNRLTPFRK

SEQ ID NO: 40889 - protein, 574 aa, Homo sapiens
MVARGEIARFWSLESLHLVSSDGGTEPSALVDDNGSEEDFSYEDLCQASPRYLQPGGEQLAINELISDGNVVCAEALWDHVTMDDQELGFKAGDVIQVLEASNKDWWWGRSEDKEAWFPASFVRLRVNQEELSENSSSTPSEEQDEEASQSRHRHCENKQQMRTNVIREIMDTERVYIKHLRDICEGYIRQCRKHTGMFTVAQLATIFGNIEDIYKFQRKFLKDLEKQYNKEEPHLSEIGSCFLQNQEGFAIYSEYCNNHPGACLELANLMKQGKYRHFFEACRLLQQMIDIAIDGFLLTPVQKICKYPLQLAELLKYTTQEHGDYSNIKAAYEAMKNVACLINERKRKLESIDKIARWQVSIVGWEGLDILDRSSELIHSGELTKITKQGKSQQRTFFLFDHQLVSCKKDLLRRDMLYYKGRLDMDEMELVDLGDGRDKDCNLSVKNAFKLVSRTTDEVYLFCAKKQEDKARWLQACADERRRVQEDKEMGMEISENQKKLAMLNAQKAGHGKSKGYNRCPVAPPHQGLHPIHQRHITMPTSVPQQQVFGLAEPKRKSSLFWHTFNRLTPFRK

SEQ ID NO: 40890 - protein, 596 aa, Homo sapiens
MGFIIHIQQVKKQRKKLDQGLILKKEKYRKEKKCASLSFEVSSDGGTEPSALVDDNGSEEDFSYEDLCQASPRYLQPGGEQLAINELISDGNVVCAEALWDHVTMDDQELGFKAGDVIQVLEASNKDWWWGRSEDKEAWFPASFVRLRVNQEELSENSSSTPSEEQDEEASQSRHRHCENKQQMRTNVIREIMDTERVYIKHLRDICEGYIRQCRKHTGMFTVAQLATIFGNIEDIYKFQRKFLKDLEKQYNKEEPHLSEIGSCFLQNQEGFAIYSEYCNNHPGACLELANLMKQGKYRHFFEACRLLQQMIDIAIDGFLLTPVQKICKYPLQLAELLKYTTQEHGDYSNIKAAYEAMKNVACLINERKRKLESIDKIARWQVSIVGWEGLDILDRSSELIHSGELTKITKQGKSQQRTFFLFDHQLVSCKKDLLRRDMLYYKGRLDMDEMELVDLGDGRDKDCNLSVKNAFKLVSRTTDEVYLFCAKKQEDKARWLQACADERRRVQEDKEMGMEISENQKKLAMLNAQKAGHGKSKGYNRCPVAPPHQGLHPIHQRHITMPTSVPQQQVFGLAEPKRKSSLFWHTFNRLTPFRK

SEQ ID NO: 40891 - protein, 616 aa, Homo sapiens
MPAHQVPPYKAVSARFRPFTFSQSTPIGLDRVGRRRQMRASNVSSDGGTEPSALVDDNGSEEDFSYEDLCQASPRYLQPGGEQLAINELISDGNVVCAEALWDHVTMDDQELGFKAGDVIQVLEASNKDWWWGRSEDKEAWFPASFVRLRVNQEELSENSSSTPSEEQDEEASQSRHRHCENKQQMRTNVIREIMDTERVYIKHLRDICEGYIRQCRKHTGMFTVAQLATIFGNIEDIYKFQRKFLKDLEKQYNKEEPHLSEIGSCFLQNQEGFAIYSEYCNNHPGACLELANLMKQGKYRHFFEACRLLQQMIDIAIDGFLLTPVQKICKYPLQLAELLKYTTQEHGDYSNIKAAYEAMKNVACLINERKRKLESIDKIARWQVSIVGWEGLDILDRSSELIHSGELTKITKQGKSQQRTFFLFDHQLVSCKKDLLRRDMLYYKGRLDMDEMELVDLGDGRDKDCNLSVKNAFKLVSRTTDEVYLFCAKKQEDKARWLQACADERRRVQEDKEMGMEISENQKKLAMLNAQKAGHGKSKVRLQQVPRGPTAPGPAPHPPAPHHYAHKRPPAAGLWPGGTQEEVLALLAHLQQAHPLPEMKTGGCASMELGVKRRN

SEQ ID NO: 40892 - protein, 536 aa, Homo sapiens
MPAHQVPPYKAVSARFRPFTFSQSTPIGLDRVGRRRQMRASNVSSDGGTEPSALVDDNGSEEDFSYEDLCQASPRYLQPGGEQLAINELISDGNVVCAEALWDHVTMDDQELGFKAGDVIQVLEASNKDWWWGRSEDKEAWFPASFVRGYIRQCRKHTGMFTVAQLATIFGNIEDIYKFQRKFLKDLEKQYNKEEPHLSEIGSCFLQNQEGFAIYSEYCNNHPGACLELANLMKQGKYRHFFEACRLLQQMIDIAIDGFLLTPVQKICKYPLQLAELLKYTTQEHGDYSNIKAAYEAMKNVACLINERKRKLESIDKIARWQVSIVGWEGLDILDRSSELIHSGELTKITKQGKSQQRTFFLFDHQLVSCKKDLLRRDMLYYKGRLDMDEMELVDLGDGRDKDCNLSVKNAFKLVSRTTDEVYLFCAKKQEDKARWLQACADERRRVQEDKEMGMEISENQKKLAMLNAQKAGHGKSKGYNRCPVAPPHQGLHPIHQRHITMPTSVPQQQVFGLAEPKRKSSLFWHTFNRLTPFRK

SEQ ID NO: 40893 - protein, 1277 aa, Homo sapiens
MTQAAVRPWAPCLENMTTAPNGLGPGPAAPCAGSDLKDAKMVTSLACGNGVCGCSPGGDTDTQEAKLSPAKLVRLFSTSRKRTGAHPERPHSMVLVGNSSTWNTLASFRKMGSFKKLKSSVLKGIQSREGSNACSKGEASEHGLGKSIPNGAVPGAQASRGSPLAPGPACGALRPAEWGTLDGSDLEDTDDAFQRSTHRSRSLRRAYGLGRICLLDAPQNHATPTIATGQVPAVCEILVRDPENNSMGYRRSKSTDNLAFLKKSSFKRKSTSNLADLRTAHDARVPQRTLSSSSTDSQKLGSGRTKRWRSPIRAKDFDRVFKLVSNVTEAAWRRESPRSGAPSPGEASLRLQAHSRLHDDYSRRVSRSTEQDSRRGGAVMHGTTATCTVAPGFGSATSKGPHLDADTAVFPLETKSSWAVESDSSCTCSSLPSPIVQDVLSKDSCDPNAGSQLTFDPEQPPTPLRPTTPKPQSPQSPQSPGAGSASCHSNHSALSANSEESEGRAEEPAQREPGPVSLQDPLEATHGDEGSKDLLVNIGVAAGPEEKEKEEVVPDGPWRRSSSQDEERTEAQRTPKRRWGSGRRPRPRPFSDYGQLASRSLSIPEDSVAADPQKEDRVDEDPQASMTSASPEDQNAPVGCPKGARRRRPISVIGGVSLYGTNQTEELDNLLTQPASRPPMPAHQVPPYKAVSARFRPFTFSQSTPIGLDRVGRRRQMRASNVSSDGGTEPSALVDDNGSEEDFSYEDLCQASPRYLQPGGEQLAINELISDGNVVCAEALWDHVTMDDQELGFKAGDVIQVLEASNKDWWWGRSEDKEAWFPASFVRLRVNQEELSENSSSTPSEEQDEEASQSRHRHCENKQQMRTNVIREIMDTERVYIKHLRDICEGYIRQCRKHTGMFTVAQLATIFGNIEDIYKFQRKFLKDLEKQYNKEEPHLSEIGSCFLQNQEGFAIYSEYCNNHPGACLELANLMKQGKYRHFFEACRLLQQMIDIAIDGFLLTPVQKICKYPLQLAELLKYTTQEHGDYSNIKAAYEAMKNVACLINERKRKLESIDKIARWQVSIVGWEGLDILDRSSELIHSGELTKITKQGKSQQRTFFLFDHQLVSCKKDLLRRDMLYYKGRLDMDEMELVDLGDGRDKDCNLSVKNAFKLVSRTTDEVYLFCAKKQEDKARWLQACADERRRVQEDKEMGMEISENQKKLAMLNAQKAGHGKSKGYNRCPVAPPHQGLHPIHQRHITMPTSVPQQQVFGLAEPKRKSSLFWHTFNRLTPFRK

SEQ ID NO: 40894 - protein, 450 aa, Homo sapiens
MVPLVAVVSGPRAQLFACLLRLGTQQVGPLQLHTGASHAARNHYEVLVLGGGSGGITMAARMKRKVGAENVAIVEPSERHFYQPIWTLVGAGAKQLSSSGRPTASVIPSGVEWIKARVTELNPDKNCIHTDDDEKISYRYLIIALGIQLDYEKIKGLPEGFAHPKIGSNYSVKTVEKTWKALQDFKEGNAIFTFPNTPVKCAGAPQKIMYLSEAYFRKTGKRSKANIIFNTSLGAIFGVKKYADALQEIIQERNLTVNYKKNLIEVRADKQEAVFENLDKPGETQVISYEMLHVTPPMSPPDVLKTSPVADAAGWVDVDKETLQHRRYPNVFGIGDCTNLPTSKTAAAVAAQSGILDRTISVIMKNQTPTKKYDGYTSCPLVTGYNRVILAEFDYKAEPLETFPFDQSKERLSMYLMKADLMPFLYWNMMLRGYWGGPAFLRKLFHLGMS

SEQ ID NO: 40895 - protein, 398 aa, Homo sapiens
MENETVSELNQTQLQPRAVVALEYQVVTILLVLIICGLGIVGNIMVVLVVMRTKHMRTPTNCYLVSLAVADLMVLVAAGLPNITDSIYGSWVYGYVGCLCITYLQYLGINASSCSITAFTIERYIAICHPIKAQFLCTFSRAKKIIIFVWAFTSLYCMLWFFLLDLNISTYKDAIVISCGYKISRNYYSPIYLMDFGVFYVVPMILATVLYGFIARILFLNPIPSDPKENSKTWKNDSTHQNTNLNVNTSNRCFNSTVSSRKQVTKMLAVVVILFALLWMPYRTLVVVNSFLSSPFQENWFLLFCRICIYLNSAINPVIYNLMSQKFRAAFRKLCNCKQKPTEKPANYSVALNYSVIKESDHFSTELDDITVTDTYLSATKVSFDDTCLASEVSFSQS

SEQ ID NO: 40896 - protein, 79 aa, Homo sapiens
MSSQQQQRQQQQCPPQRAQQQQVKQPCQPPPVKCQETCAPKTKDPCAPQVKKQCPPKGTIIPAQQKCPSAQQASKSKQK

SEQ ID NO: 40897 - protein, 155 aa, Homo sapiens
MAVPGCNKDSVRAGCKKCGYPGHLTFECRNFLRVDPKRDIVLDVSSTSSEDSDEENEELNKLQALQEKRINEEEEKKKEKSKEKIKLKKKRKRSYSSSSTEEDTSKQKKQKYQKKEKKKEKKSKSKKGKHHKKEKKKRKKEKHSSTPNSSEFSRK

SEQ ID NO: 40898 - protein, 108 aa, Homo sapiens
MSQQKQKQCAPPQQCCPPPQQRCPPPQQCCPPPQQCCPPPQQCCPPPQQCCPPPQQCCPPPQQCCPPPQQYCPPPQQTKQPCQPPPKCQEPCAPKCPPPQQCQTSKQK

SEQ ID NO: 40899 - protein, 473 aa, Homo sapiens
MATATEQWVLVEMVQALYEAPAYHLILEGILILWIIRLLFSKTYKLQERSDLTVKEKEELIEEWQPEPLVPPVPKDHPALNYNIVSGPPSHKTVVNGKECINFASFNFLGLLDNPRVKAAALASLKKYGVGTCGPRGFYGTFDVHLDLEDRLAKFMKTEEAIIYSYGFATIASAIPAYSKRGDIVFVDRAACFAIQKGLQASRSDIKLFKHNDMADLERLLKEQEIEDQKNPRKARVTRRFIVVEGLYMNTGTICPLPELVKLKYKYKARIFLEESLSFGVLGEHGRGVTEHYGINIDDIDLISANMENALASIGGFCCGRSFVIDHQRLSGQGYCFSASLPPLLAAAAIEALNIMEENPGIFAVLKEKCGQIHKALQGISGLKVVGESLSPAFHLQLEESTGSREQDVRLLQEIVDQCMNRSIALTQARYLEKEEKCLPPPSIRVVVTVEQTEEELERAASTIKEVAQAVLL

SEQ ID NO: 40900 - protein, 143 aa, Homo sapiens
MATATEQWVLVEMVQALYEAPAYHLILEGILILWIIRLLFSKTYKLQERSDLTVKEKEELIEEWQPEPLVPPVPKDHPALNYNIVSGPPSHKTVVNGKECINFASFNFLGLLDNPRVKAAALASLKKYGVGTCGPRGFYGTFE

SEQ ID NO: 40901 - protein, 59 aa, Homo sapiens
MIVLGWMFFVGLVCYMGTFPELMPPTLKWQERWPVQESKTQLRRRALGEDLLQNHVEGI

SEQ ID NO: 40902 - protein, 688 aa, Homo sapiens
MSVNSEKSSSSERPEPQQKAPLVPPPPPPPPPPPPPLPDPTPPEPEEEILGSDDEEQEDPADYCKGGYHPVKIGDLFNGRYHVIRKLGWGHFSTVWLCWDMQGKRFVAMKVVKSAQHYTETALDEIKLLKCVRESDPSDPNKDMVVQLIDDFKISGMNGIHVCMVFEVLGHHLLKWIIKSNYQGLPVRCVKSIIRQVLQGLDYLHSKCKIIHTDIKPENILMCVDDAYVRRMAAEATEWQKAGAPPPSGSAVSTAPQQKPIGKISKNKKKKLKKKQKRQAELLEKRLQEIEELEREAERKIIEENITSAAPSNDQDGEYCPEVKLKTTGLEEAAEAETAKDNGEAEDQEEKEDAEKENIEKDEDDVDQELANIDPTWIESPKTNGHIENGPFSLEQQLDDEDDDEEDCPNPEEYNLDEPNAESDYTYSSSYEQFNGELPNGRHKIPESQFPEFSTSLFSGSLEPVACGSVLSEGSPLTEQEESSPSHDRSRTVSASSTGDLPKAKTRAADLLVNPLDPRNADKIRVKIADLGNACWVHKHFTEDIQTRQYRSIEVLIGAGYSTPADIWSTACMAFELATGDYLFEPHSGEDYSRDEDHIAHIIELLGSIPRHFALSGKYSREFFNRRGELRHITKLKPWSLFDVLVEKYGWPHEDAAQFTDFLIPMLEMVPEKRASAGECLRHPWLNS

SEQ ID NO: 40903 - protein, 699 aa, Homo sapiens
MSSRKVLAIQARKRRPKREKHPKKPEPQQKAPLVPPPPPPPPPPPPPLPDPTPPEPEEEILGSDDEEQEDPADYCKGGYHPVKIGDLFNGRYHVIRKLGWGHFSTVWLCWDMQGKRFVAMKVVKSAQHYTETALDEIKLLKCVRESDPSDPNKDMVVQLIDDFKISGMNGIHVCMVFEVLGHHLLKWIIKSNYQGLPVRCVKSIIRQVLQGLDYLHSKCKIIHTDIKPENILMCVDDAYVRRMAAEATEWQKAGAPPPSGSAVSTAPQQKPIGKISKNKKKKLKKKQKRQAELLEKRLQEIEELEREAERKIIEENITSAAPSNDQDGEYCPEVKLKTTGLEEAAEAETAKDNGEAEDQEEKEDAEKENIEKDEDDVDQELANIDPTWIESPKTNGHIENGPFSLEQQLDDEDDDEEDCPNPEEYNLDEPNAESDYTYSSSYEQFNGELPNGRHKIPESQFPEFSTSLFSGSLEPVACGSVLSEGSPLTEQEESSPSHDRSRTVSASSTGDLPKAKTRAADLLVNPLDPRNADKIRVKIADLGNACWVHKHFTEDIQTRQYRSIEVLIGAGYSTPADIWSTACMAFELATGDYLFEPHSGEDYSRDEDHIAHIIELLGSIPRHFALSGKYSREFFNRRGELRHITKLKPWSLFDVLVEKYGWPHEDAAQFTDFLIPMLEMVPEKRASAGECLRHPWLNS

SEQ ID NO: 40904 - protein, 358 aa, Homo sapiens
MGAVWSALLVGGGLAGALFVWLLRGGPGDTGKDGDAEQEKDAPLGGAAIPGGHQSGSSGLSPGPSGQELVTKPEHLQESNGHLISKTKDLGKLQAASWRLQNPSREVCDNSREHVPSGQFPDTEAPATSETSNSRSYSEVSRNESLESPMGEWGFQKGQEISAKAATCFAEKLPSSNLLKNRAKEEMSLSDLNSQDRVDHEEWEMVPRHSSWGDVGVGGSLKAPVLNLNQGMDNGRSTLVEARGQQVHGKMERVAVMPAGSQQVSVRFQVHYVTSTDVQFIAVTGDHECLGRWNTYIPLHYNKDGFWSHSIFLPADTVVEWKFVLVENGGVTRWEECSNRFLETGHEDKVVHAWWGIH

SEQ ID NO: 40905 - protein, 117 aa, Homo sapiens
MRWALAVLLAFLSPASQISSNLEGRTKSVTRLTGSSAEITCDLPGASTLYIHWYLHQEGKAPQCLLYYEPYYSRVVLESGITPGKYDTGSTRSNWNLRLQNLIKNDSGFYYCATWDR

SEQ ID NO: 40906 - protein, 137 aa, Homo sapiens
MASPFGRLTDQKGRGHPAGSGGVEVNGGSARAAFSGGGRRVLSGGGRTAFGGGGRTAFGDGGRTAFGVGGRTAFGGGGRTAFGGGGRTAFGVGGRTAFGGGERVSLLSPGWSALARSWLTASSASRVQAILLPQPPE

SEQ ID NO: 40907 - protein, 1147 aa, Homo sapiens
MDEPPFSEAALEQALGEPCDLDAALLTDIEDMLQLINNQDSDFPGLFDPPYAGSGAGGTDPASPDTSSPGSLSPPPATLSSSLEAFLSGPQAAPSPLSPPQPAPTPLKMYPSMPAFSPGPGIKEESVPLSILQTPTPQPLPGALLPQSFPAPAPPQFSSTPVLGYPSPPGGFSTGSPPGNTQQPLPGLPLASPPGVPPVSLHTQVQSVVPQQLLTVTAAPTAAPVTTTVTSQIQQVPVLLQPHFIKADSLLLTAMKTDGATVKAAGLSPLVSGTTVQTGPLPTLVSGGTILATVPLVVDAEKLPINRLAAGSKAPASAQSRGEKRTAHNAIEKRYRSSINDKIIELKDLVVGTEAKLNKSAVLRKAIDYIRFLQHSNQKLKQENLSLRTAVHKSKSLKDLVSACGSGGNTDVLMEGVKTEVEDTLTPPPSDAGSPFQSSPLSLGSRGSGSGGSGSDSEPDSPVFEDSKAKPEQRPSLHSRGMLDRSRLALCTLVFLCLSCNPLASLLGARGLPSPSDTTSVYHSPGRNVLGTESRDGPGWAQWLLPPVVWLLNGLLVLVSLVLLFVYGEPVTRPHSGPAVYFWRHRKQADLDLARGDFAQAAQQLWLALRALGRPLPTSHLDLACSLLWNLIRHLLQRLWVGRWLAGRAGGLQQDCALRVDASASARDAALVYHKLHQLHTMGKHTGGHLTATNLALSALNLAECAGDAVSVATLAEIYVAAALRVKTSLPRALHFLTRFFLSSARQACLAQSGSVPPAMQWLCHPVGHRFFVDGDWSVLSTPWESLYSLAGNPVDPLAQVTQLFREHLLERALNCVTQPNPSPGSADGDKEFSDALGYLQLLNSCSDAAGAPAYSFSISSSMATTTGVDPVAKWWASLTAVVIHWLRRDEEAAERLCPLVEHLPRVLQESERPLPRAALHSFKAARALLGCAKAESGPASLTICEKASGYLQDSLATTPASSSIDKAVQLFLCDLLLVVRTSLWRQQQPPAPAPAAQGTSSRPQASALELRGFQRDLSSLRRLAQSFRPAMRRVFLHEATARLMAGASPTRTHQLLDRSLRRRAGPGGKGGAVAELEPRPTRREHAEALLLASCYLPPGFLSAPGQRVGMLAEAARTLEKLGDRRLLHDCQQMLMRLGGGTTVTSS

SEQ ID NO: 40908 - protein, 1071 aa, Homo sapiens
MDEPPFSEAALEQALGEPCDLDAALLTDIEDMLQLINNQDSDFPGLFDPPYAGSGAGGTDPASPDTSSPGSLSPPPATLSSSLEAFLSGPQAAPSPLSPPQPAPTPLKMYPSMPAFSPGPGIKEESVPLSILQTPTPQPLPGALLPQSFPAPAPPQFSSTPVLGYPSPPGGFSTGSPPGNTQQPLPGLPLASPPGVPPVSLHTQVQSVVPQQLLTVTAAPTAAPVTTTVTSQIQQVPVLLQPHFIKADSLLLTAMKTDGATVKAAGLSPLVSGTTVQTGPLPTLVSGGTILATVPLVVDAEKLPINRLAAGSKAPASAQSRGEKRTAHNAIEKRYRSSINDKIIELKDLVVGTEAKLNKSAVLRKAIDYIRFLQHSNQKLKQENLSLRTAVHKSKSLKDLVSACGSGGNTDVLMEGVKTEVEDTLTPPPSDAGSPFQSSPLSLGSRGSGSGGSGSDSEPDSPVFEDSKAKPEQRPSLHSRGMLDRSRLALCTLVFLCLSCNPLASLLGARGLPSPSDTTSVYHSPGRNVLGTESRDGPGWAQWLLPPVVWLLNGLLVLVSLVLLFVYGEPVTRPHSGPAVYFWRHRKQADLDLARGDFAQAAQQLWLALRALGRPLPTSHLDLACSLLWNLIRHLLQRLWVGRWLAGRAGGLQQDCALRVDASASARDAALVYHKLHQLHTMGKHTGGHLTATNLALSALNLAECAGDAVSVATLAEIYVAAALRVKTSLPRALHFLTRFFLSSARQACLAQSGSVPPAMQWLCHPVGHRFFVDGDWSVLSTPWESLYSLAGNPVDPLAQVTQLFREHLLERALNCVTQPNPSPGSADGDKEFSDALGYLQLLNSCSDAAGAPAYSFSISSSMATTTGVDPVAKWWASLTAVVIHWLRRDEEAAERLCPLVEHLPRVLQESERPLPRAALHSFKAARALLGCAKAESGPASLTICEKASGYLQDSLATTPASSSIDKAVQLFLCDLLLVVRTSLWRQQQPPAPAPAAQGTSSRPQASALELRGFQRDLSSLRRLAQSFRPAMRRLMDVLTSESAWALPQHLGKGFPSPSGHKVPGWHGRMD

SEQ ID NO: 40909 - protein, 1047 aa, Homo sapiens
MDCTFEDMLQLINNQDSDFPGLFDPPYAGSGAGGTDPASPDTSSPGSLSPPPATLSSSLEAFLSGPQAAPSPLSPPQPAPTPLKMYPSMPAFSPGPGIKEESVPLSILQTPTPQPLPGALLPQSFPAPAPPQFSSTPVLGYPSPPGGFSTGSPPGNTQQPLPGLPLASPPGVPPVSLHTQVQSVVPQQLLTVTAAPTAAPVTTTVTSQIQQVPVLLQPHFIKADSLLLTAMKTDGATVKAAGLSPLVSGTTVQTGPLPTLVSGGTILATVPLVVDAEKLPINRLAAGSKAPASAQSRGEKRTAHNAIEKRYRSSINDKIIELKDLVVGTEAKLNKSAVLRKAIDYIRFLQHSNQKLKQENLSLRTAVHKSKSLKDLVSACGSGGNTDVLMEGVKTEVEDTLTPPPSDAGSPFQSSPLSLGSRGSGSGGSGSDSEPDSPVFEDSKAKPEQRPSLHSRGMLDRSRLALCTLVFLCLSCNPLASLLGARGLPSPSDTTSVYHSPGRNVLGTESRDGPGWAQWLLPPVVWLLNGLLVLVSLVLLFVYGEPVTRPHSGPAVYFWRHRKQADLDLARGDFAQAAQQLWLALRALGRPLPTSHLDLACSLLWNLIRHLLQRLWVGRWLAGRAGGLQQDCALRVDASASARDAALVYHKLHQLHTMGKHTGGHLTATNLALSALNLAECAGDAVSVATLAEIYVAAALRVKTSLPRALHFLTRFFLSSARQACLAQSGSVPPAMQWLCHPVGHRFFVDGDWSVLSTPWESLYSLAGNPVDPLAQVTQLFREHLLERALNCVTQPNPSPGSADGDKEFSDALGYLQLLNSCSDAAGAPAYSFSISSSMATTTGVDPVAKWWASLTAVVIHWLRRDEEAAERLCPLVEHLPRVLQESERPLPRAALHSFKAARALLGCAKAESGPASLTICEKASGYLQDSLATTPASSSIDKAVQLFLCDLLLVVRTSLWRQQQPPAPAPAAQGTSSRPQASALELRGFQRDLSSLRRLAQSFRPAMRRLMDVLTSESAWALPQHLGKGFPSPSGHKVPGWHGRMD

SEQ ID NO: 40910 - protein, 1177 aa, Homo sapiens
MDEPPFSEAALEQALGEPCDLDAALLTDIEGEVGAGRGRANGLDAPRAGADRGAMDCTFEDMLQLINNQDSDFPGLFDPPYAGSGAGGTDPASPDTSSPGSLSPPPATLSSSLEAFLSGPQAAPSPLSPPQPAPTPLKMYPSMPAFSPGPGIKEESVPLSILQTPTPQPLPGALLPQSFPAPAPPQFSSTPVLGYPSPPGGFSTGSPPGNTQQPLPGLPLASPPGVPPVSLHTQVQSVVPQQLLTVTAAPTAAPVTTTVTSQIQQVPVLLQPHFIKADSLLLTAMKTDGATVKAAGLSPLVSGTTVQTGPLPTLVSGGTILATVPLVVDAEKLPINRLAAGSKAPASAQSRGEKRTAHNAIEKRYRSSINDKIIELKDLVVGTEAKLNKSAVLRKAIDYIRFLQHSNQKLKQENLSLRTAVHKSKSLKDLVSACGSGGNTDVLMEGVKTEVEDTLTPPPSDAGSPFQSSPLSLGSRGSGSGGSGSDSEPDSPVFEDSKAKPEQRPSLHSRGMLDRSRLALCTLVFLCLSCNPLASLLGARGLPSPSDTTSVYHSPGRNVLGTESRDGPGWAQWLLPPVVWLLNGLLVLVSLVLLFVYGEPVTRPHSGPAVYFWRHRKQADLDLARGDFAQAAQQLWLALRALGRPLPTSHLDLACSLLWNLIRHLLQRLWVGRWLAGRAGGLQQDCALRVDASASARDAALVYHKLHQLHTMGKHTGGHLTATNLALSALNLAECAGDAVSVATLAEIYVAAALRVKTSLPRALHFLTRFFLSSARQACLAQSGSVPPAMQWLCHPVGHRFFVDGDWSVLSTPWESLYSLAGNPVDPLAQVTQLFREHLLERALNCVTQPNPSPGSADGDKEFSDALGYLQLLNSCSDAAGAPAYSFSISSSMATTTGVDPVAKWWASLTAVVIHWLRRDEEAAERLCPLVEHLPRVLQESERPLPRAALHSFKAARALLGCAKAESGPASLTICEKASGYLQDSLATTPASSSIDKAVQLFLCDLLLVVRTSLWRQQQPPAPAPAAQGTSSRPQASALELRGFQRDLSSLRRLAQSFRPAMRRVFLHEATARLMAGASPTRTHQLLDRSLRRRAGPGGKGGAVAELEPRPTRREHAEALLLASCYLPPGFLSAPGQRVGMLAEAARTLEKLGDRRLLHDCQQMLMRLGGGTTVTSS

SEQ ID NO: 40911 - protein, 470 aa, Homo sapiens
MDEPPFSEAALEQALGEPCDLDAALLTDIEDMLQLINNQDSDFPGLFDPPYAGSGAGGTDPASPDTSSPGSLSPPPATLSSSLEAFLSGPQAAPSPLSPPQPAPTPLKMYPSMPAFSPGPGIKEESVPLSILQTPTPQPLPGALLPQSFPAPAPPQFSSTPVLGYPSPPGGFSTGSPPGNTQQPLPGLPLASPPGVPPVSLHTQVQSVVPQQLLTVTAAPTAAPVTTTVTSQIQQVPVLLQPHFIKADSLLLTAMKTDGATVKAAGLSPLVSGTTVQTGPLPTLVSGGTILATVPLVVDAEKLPINRLAAGSKAPASAQSRGEKRTAHNAIEKRYRSSINDKIIELKDLVVGTEAKLNKSAVLRKAIDYIRFLQHSNQKLKQENLSLRTAVHKSKSLKDLVSACGSGGNTDVLMEGVKTEVEDTLTPPPSDAGSPFQSSPLSLGSRGSGSGGSGSDSEPDSPVFEDSKTE

SEQ ID NO: 40912 - protein, 446 aa, Homo sapiens
MDCTFEDMLQLINNQDSDFPGLFDPPYAGSGAGGTDPASPDTSSPGSLSPPPATLSSSLEAFLSGPQAAPSPLSPPQPAPTPLKMYPSMPAFSPGPGIKEESVPLSILQTPTPQPLPGALLPQSFPAPAPPQFSSTPVLGYPSPPGGFSTGSPPGNTQQPLPGLPLASPPGVPPVSLHTQVQSVVPQQLLTVTAAPTAAPVTTTVTSQIQQVPVLLQPHFIKADSLLLTAMKTDGATVKAAGLSPLVSGTTVQTGPLPTLVSGGTILATVPLVVDAEKLPINRLAAGSKAPASAQSRGEKRTAHNAIEKRYRSSINDKIIELKDLVVGTEAKLNKSAVLRKAIDYIRFLQHSNQKLKQENLSLRTAVHKSKSLKDLVSACGSGGNTDVLMEGVKTEVEDTLTPPPSDAGSPFQSSPLSLGSRGSGSGGSGSDSEPDSPVFEDSKTE

SEQ ID NO: 40913 - protein, 185 aa, Homo sapiens
MAPKGSSKQQSEEDLLLQDFSRNLSAKSSALFFGNAFIVSAIPIWLYWRIWHMDLIQSAVLYSVMTLVSTYLVAFAYKNVKFVLKHKVAQKREDAVSKEVTRKLSEADNRKMSRKEKDERILWKKNEVADYEATTFSIFYNNTLFLVVVIVASFFILKNFNPTVNYILSISASSGLIALLSTGSK

SEQ ID NO: 40914 - protein, 198 aa, Homo sapiens
MAPKGSSKQQSEEDLLLQDFSRNLSAKSSALFFGNAFIVSAIPIWLYWRIWHMDLIQSAVLYSVMTLVSTYLVAFAYKNVKFVLKHKVAQKREDAVSKEVTRKLSEADNRKMSRKEKDERFDSCLKYGHHKRGILWKKNEVADYEATTFSIFYNNTLFLVVVIVASFFILKNFNPTVNYILSISASSGLIALLSTGSK

SEQ ID NO: 40915 - protein, 369 aa, Homo sapiens
MDMADEPLNGSHTWLSIPFDLNGSVVSTNTSNQTEPYYDLTSNAVLTFIYFVVCIIGLCGNTLVIYVILRYAKMKTITNIYILNLAIADELFMLGLPFLAMQVALVHWPFGKAICRVVMTVDGINQFTSIFCLTVMSIDRYLAVVHPIKSAKWRRPRTAKMITMAVWGVSLLVILPIMIYAGLRSNQWGRSSCTINWPGESGAWYTGFIIYTFILGFLVPLTIICLCYLFIIIKVKSSGIRVGSSKRKKSEKKVTRMVSIVVAVFIFCWLPFYIFNVSSVSMAISPTPALKGMFDFVVVLTYANSCANPILYAFLSDNFKKSFQNVLCLVKVSGTDDGERSDSKQDKSRLNETTETQRTLLNGDLQTSI

SEQ ID NO: 40916 - protein, 356 aa, Homo sapiens
MDMADEPLNGSHTWLSIPFDLNGSVVSTNTSNQTEPYYDLTSNAVLTFIYFVVCIIGLCGNTLVIYVILRYAKMKTITNIYILNLAIADELFMLGLPFLAMQVALVHWPFGKAICRVVMTVDGINQFTSIFCLTVMSIDRYLAVVHPIKSAKWRRPRTAKMITMAVWGVSLLVILPIMIYAGLRSNQWGRSSCTINWPGESGAWYTGFIIYTFILGFLVPLTIICLCYLFIIIKVKSSGIRVGSSKRKKSEKKVTRMVSIVVAVFIFCWLPFYIFNVSSVSMAISPTPALKGMFDFVVVLTYANSCANPILYAFLSDNFKKSFQNVLCLVKVDNSKSGEEGSCLDMIFRNNKNRKK

SEQ ID NO: 40917 - protein, 127 aa, Homo sapiens
MRPLDIVELAEPEEVEVLEPEEDFEQFLLPVINEMREDIASLTREHGRAYLRNRSKLWEMDNMLIQIKTQVEASEESALNHLQNPGDAAEGRAAKRCEKAEEKAKEIAKMAEMLVELVRRIEKSESS

SEQ ID NO: 40918 - protein, 351 aa, Homo sapiens
MTLRLLEDWCRGMDMNPRKALLIAGISQSCSVAEIEEALQAGLAPLGEYRLLGRMFRRDENRKVALVGLTAETSHALVPKEIPGKGGIWRVIFKPPDPDNTFLSRLNEFLAGEGMTVGELSRALGHENGSLDPEQGMIPEMWAPMLAQALEALQPALQCLKYKKLRVFSGRESPEPGEEEFGRWMFHTTQMIKAWQVPDVEKRRRLLESLRGPALDVIRVLKINNPLITVDECLQALEEVFGVTDNPRELQVKYLTTYQKDEEKLSAYVLRLEPLLQKLVQRGAIERDAVNQARLDQVIAGAVHKTIRRELNLPEDGPAPGFLQLLVLIKDYEAAEEEEALLQAILEGNFT

SEQ ID NO: 40919 - protein, 216 aa, Homo sapiens
MSIALKQVFNKDKTFRPKRKFEPGTQRFELHKRAQASLNSGVDLKAAVQLPSGEDQNDWVAVHVVDFFNRINLIYGTICEFCTERTCPVMSGGPKYEYRWQDDLKYKKPTALPAPQYMNLLMDWIEVQINNEEIFPTCVGVPFPKNFLQICKKILCRLFRVFVHVYIHHFDRVIVMGAEAHVNTCYKHFYYFVTEMNLIDRKELEPLKEMTSRMCH

SEQ ID NO: 40920 - protein, 1717 aa, Homo sapiens
MSGTSSPEAVKKLLENMQSDLRALSLECKKKFPPVKEAAESGIIKVKTIAARNTEILAALKENSSEVVQPFLMGCGTKEPKITQLCLAAIQRLMSHEVVSETAAGNIINMLWQLMENSLEELKLLQTVLVLLTTNTVVHDEALSKAIVLCFRLHFTKDNITNNTAAATVRQVVTVVFERMVAEDERHRDIIEQPVLVQGNSNRRSVSTLKPCAKDAYMLFQDLCQLVNADAPYWLVGMTEMTRTFGLELLESVLNDFPQVFLQHQEFSFLLKERVCPLVIKLFSPNIKFRQGSSTSSSPAPVEKPYFPICMRLLRVVSVLIKQFYSLLVTECEIFLSLLVKFLDADKPQWLRAVAVESIHRFCVQPQLLRSFCQSYDMKQHSTKVFRDIVNALGSFIQSLFLVPPTGNPATSNQAGNNNLGGSVSAPANSGMVGIGGGVTLLPAFEYRGTWIPILTITVQGSAKATYLEMLDKVEPPTIPEGYAMSVAFHCLLDLVRGITSMIEGELGELETECQTTTEEGSSPTQSTEQQDLQSTSDQMDKEIVSRAVWEEMVNACWCGLLAALSLLLDASTDEAATENILKAELTMAALCGRLGLVTSRDAFITAICKGSLPPHYALTVLNTTTAATLSNKSYSVQGQSVMMISPSSESHQQVVAVGQPLAVQPQGTVMLTSKNIQCMRTLLNLAHCHGAVLGTSWQLVLATLQHLVWILGLKPSSGGALKPGRAVEGPSTVLTTAVMTDLPVISNILSRLFESSQYLDDVSLHHLINALCSLSLEAMDMAYGNNKEPSLFAVAKLLETGLVNMHRIEILWRPLTGHLLEVCQHPNSRMREWGAEALTSLIKAGLTFNHDPPLSQNQRLQLLLLNPLKEMSNINHPDIRLKQLECVLQILQSQGDSLGPGWPLVLGVMGAIRNDQGESLIRTAFQCLQLVVTDFLPTMPCTCLQIVVDVAGSFGLHNQELNISLTSIGLLWNISDYFFQRGETIEKELNKEEAAQQKQAEEKGVVLNRPFHPAPPFDCLWLCLYAKLGELCVDPRPAVRKSAGQTLFSTIGAHGTLLQHSTWHTVIWKVLFHLLDRVRESSTTADKEKIESGGGNILIHHSRDTAEKQWAETWVLTLAGVARIFNTRRYLLQPLGDFSRAWDVLLDHIQSAALSKNNEVSLAALKSFQEILQIVSPVRDSDKPETPPVVNVPVPVLIGPISGMSRPFVRTDSIGEKLGRYSSSEPPIVTDELEDLNLWWAAWNTWYRIGSESTKPPITFDKLTFIPSQPFLTALIQIFPALYQHIKTGFNMDDLQKLGVILHSAISVPISSDASPFILPSYTEAVLTSLQEAVLTALDVLQKAICVGPENMQIMYPAIFDQLLAFVEFSCKPPQYGQLETKHIANAKYNQIQLFAPAEWVALNYVPFAERSLEVVVDLYQKTACHKAVVNEKVLQNIIKTLRVPLSLKYSCPSESTWKLAVSSLLRVLSIGLPVARQHASSGKFDSMWPELANTFEDFLFTKSIPPDNLSIQEFQRNENIDVEVVQLISNEILPYANFIPKEFVGQIMTMLNKGSIHSQSSSFTEAEIDIRLREEFSKMCFETLLQFSFSNKVTTPQEGYISRMALSVLLKRSQDVLHRYIEDERLSGKCPLPRQQVTEIIFVLKAVSTLIDSLKKTQPENVDGNTWAQVIALYPTLVECITCSSSEVCSALKEALVPFKDFMQPPASRVQNGES

SEQ ID NO: 40921 - protein, 1675 aa, Homo sapiens
MSGTSSPEAVKKLLENMQSDLRALSLECKKKFPPVKEAAESGIIKVKTIAARNTEILAALKENSSEVVQPFLMGCGTKEPKITQLCLAAIQRLMSHEVVSETAAGNIINMLWQLMENSLEELKLLQTVLVLLTTNTVVHDEALSKAIVLCFRLHFTKDNITNNTAAATVRQVVTVVFERMVAEDERHRDIIEQPVLVQGNSNRRSVSTLKPCAKDAYMLFQDLCQLVNADAPYWLVGMTEMTRTFGLELLESVLNDFPQVFLQHQEFSFLLKERVCPLVIKLFSPNIKFRQGSSTSSSPAPVEKPYFPICMRLLRVVSVLIKQFYSLLVTECEIFLSLLVKFLDADKPQWLRAVAVESIHRFCVQPQLLRSFCQSYDMKQHSTKVFRDIVNALGSFIQSLFLVPPTGNPATSNQAGNNNLGGSVSAPANSGMVGIGGGVTLLPAFEYRGTWIPILTITVQGSAKATYLEMLDKVEPPTIPEGYAMSVAFHCLLDLVRGITSMIEGELGELETECQTTTEEGSSPTQSTEQQDLQSTSDQMDKEIVSRAVWEEMVNACWCGLLAALSLLLDASTDEAATENILKAELTMAALCGRLGLVTSRDAFITAICKGSLPPHYALTVLNTTTAATLSNKSYSVQGQSVMMISPSSESHQQVVAVGQPLAVQPQGTVMLTSKNIQCMRTLLNLAHCHGAVLGTSWQLVLATLQHLVWILGLKPSSGGALKPGRAVEGPSTVLTTAVMTDLPVISNILSRLFESSQYLDDVSLHHLINALCSLSLEAMDMAYGNNKEPSLFAVAKLLETGLVNMHRIEILWRPLTGHLLEVCQHPNSRMREWGAEALTSLIKAGLTFNHDPPLSQNQRLQLLLLNPLKEMSNINHPDIRLKQLECVLQILQSQGDSLGPGWPLVLGVMGAIRNDQGESLIRTAFQCLQLVVTDFLPTMPCTCLQIVVDVAGSFGLHNQELNISLTSIGLLWNISDYFFQRGETIEKELNKEEAAQQKQAEEKGVVLNRPFHPAPPFDCLWLCLYAKLGELCVDPRPAVRKSAGQTLFSTIGAHGTLLQHSTWHTVIWKVLFHLLDRVRESSTTADKEKIESGGGNILIHHSRDTAEKQWAETWVLTLAGVARIFNTRRYLLQPLGDFSRAWDVLLDHIQSAALSKNNEVSLAALKSFQEILQIVSPVRDSDKPETPPVVNVPVPVLIGPISGMSRPFVRTDSIGEKLGRYSSSEPPIVTDELEDLNLWWAAWNTWYRIGSESTKPPITFDKLTFIPSQPFLTALIQIFPALYQHIKTGFNMDDLQKLGVILHSAISVPISSDASPFILPSYTEAVLTSLQEAVLTALDVLQKAICVGPENMQIMYPAIFDQLLAFVEFSCKPPQYGQLETKHIANAKYNQIQLFAPAEWVALNYVPFAERSLEVVVDLYQKTACHKAVVNEKVLQNIIKTLRVPLSLKYSCPSESTWKLAVSSLLRVLSIGLPVARQHASSGKFDSMWPELANTFEDFLFTKSIPPDNLSIQEFQRNENIDVEVVQLISNEILPYANFIPKEFVGQIMTMLNKGSIHSQSSSFTEAEIDIRLREEFSKMCFETLLQFSFSNKVTTPQEGYISRMALSVLLKRSQDVLHRYIEDERLSGKCPLPRQQVTEIIFVLKAVSTLIDSLKKTQPENACISLFGIPPYF

SEQ ID NO: 40922 - protein, 586 aa, Homo sapiens
MIIVFFSLPNIGDFSRAWDVLLDHIQSAALSKNNEVSLAALKSFQEILQIVSPVRDSDKPETPPVVNVPVPVLIGPISGMSRPFVRTDSIGEKLGRYSSSEPPIVTDELEDLNLWWAAWNTWYRIGSESTKPPITFDKLTFIPSQPFLTALIQIFPALYQHIKTGFNMDDLQKLGVILHSAISVPISSDASPFILPSYTEAVLTSLQEAVLTALDVLQKAICVGPENMQIMYPAIFDQLLAFVEFSCKPPQYGQLETKHIANAKYNQAEWVALNYVPFAERSLEVVVDLYQKTACHKAVVNEKVLQNIIKTLRVPLSLKYSCPSESTWKLAVSSLLRVLSIGLPVARQHASSGKFDSMWPELANTFEDFLFTKSIPPDNLSIQEFQRNENIDVEVVQLISNEILPYANFIPKEFVGQIMTMLNKGSIHSQSSSFTEAEIDIRLREEFSKMCFETLLQFSFSNKVTTPQEGYISRMALSVLLKRSQDVLHRYIEDERLSGKCPLPRQQVTEIIFVLKAVSTLIDSLKKTQPENVDGNTWAQVIALYPTLVECITCSSSEVCSALKEALVPFKDFMQPPASRVQNGES

SEQ ID NO: 40923 - protein, 1711 aa, Homo sapiens
MSGTSSPEAVKKLLENMQSDLRALSLECKKKFPPVKEAAESGIIKVKTIAARNTEILAALKENSSEVVQPFLMGCGTKEPKITQLCLAAIQRLMSHEVVSETAAGNIINMLWQLMENSLEELKLLQTVLVLLTTNTVVHDEALSKAIVLCFRLHFTKDNITNNTAAATVRQVVTVVFERMVAEDERHRDIIEQPVLVQGNSNRRSVSTLKPCAKDAYMLFQDLCQLVNADAPYWLVGMTEMTRTFGLELLESVLNDFPQVFLQHQEFSFLLKERVCPLVIKLFSPNIKFRQGSSTSSSPAPVEKPYFPICMRLLRVVSVLIKQFYSLLVTECEIFLSLLVKFLDADKPQWLRAVAVESIHRFCVQPQLLRSFCQSYDMKQHSTKVFRDIVNALGSFIQSLFLVPPTGNPATSNQAGNNNLGGSVSAPANSGMVGIGGGVTLLPAFEYRGTWIPILTITVQGSAKATYLEMLDKVEPPTIPEGYAMSVAFHCLLDLVRGITSMIEGELGELETECQTTTEEGSSPTQSTEQQDLQSTSDQMDKEIVSRAVWEEMVNACWCGLLAALSLLLDASTDEAATENILKAELTMAALCGRLGLVTSRDAFITAICKGSLPPHYALTVLNTTTAATLSNKSYSVQGQSVMMISPSSESHQQVVAVGQPLAVQPQGTVMLTSKNIQCMRTLLNLAHCHGAVLGTSWQLVLATLQHLVWILGLKPSSGGALKPGRAVEGPSTVLTTAVMTDLPVISNILSRLFESSQYLDDVSLHHLINALCSLSLEAMDMAYGNNKEPSLFAVAKLLETGLVNMHRIEILWRPLTGHLLEVCQHPNSRMREWGAEALTSLIKAGLTFNHDPPLSQNQRLQLLLLNPLKEMSNINHPDIRLKQLECVLQILQSQGDSLGPGWPLVLGVMGAIRNDQGESLIRTAFQCLQLVVTDFLPTMPCTCLQIVVDVAGSFGLHNQELNISLTSIGLLWNISDYFFQRGETIEKELNKEEAAQQKQAEEKGVVLNRPFHPAPPFDCLWLCLYAKLGELCVDPRPAVRKSAGQTLFSTIGAHGTLLQHSTWHTVIWKVLFHLLDRVRESSTTADKEKIESGGGNILIHHSRDTAEKQWAETWVLTLAGVARIFNTRRYLLQPLGDFSRAWDVLLDHIQSAALSKNNEVSLAALKSFQEILQIVSPVRDSDKPETPPVVNVPVPVLIGPISGMSRPFVRTDSIGEKLGRYSSSEPPIVTDELEDLNLWWAAWNTWYRIGSESTKPPITFDKLTFIPSQPFLTALIQIFPALYQHIKTGFNMDDLQKLGVILHSAISVPISSDASPFILPSYTEAVLTSLQEAVLTALDVLQKAICVGPENMQIMYPAIFDQLLAFVEFSCKPPQYGQLETKHIANAKYNQAEWVALNYVPFAERSLEVVVDLYQKTACHKAVVNEKVLQNIIKTLRVPLSLKYSCPSESTWKLAVSSLLRVLSIGLPVARQHASSGKFDSMWPELANTFEDFLFTKSIPPDNLSIQEFQRNENIDVEVVQLISNEILPYANFIPKEFVGQIMTMLNKGSIHSQSSSFTEAEIDIRLREEFSKMCFETLLQFSFSNKVTTPQEGYISRMALSVLLKRSQDVLHRYIEDERLSGKCPLPRQQVTEIIFVLKAVSTLIDSLKKTQPENVDGNTWAQVIALYPTLVECITCSSSEVCSALKEALVPFKDFMQPPASRVQNGES

SEQ ID NO: 40924 - protein, 1688 aa, Homo sapiens
MSGTSSPEAVKKLLENMQSDLRALSLECKKKFPPVKEAAESGIIKVKTIAARNTEILAALKENSSEVVQPFLMGCGTKEPKITQLCLAAIQRLMSHEVVSETAAGNIINMLWQLMENSLEELKLLQTVLVLLTTNTVVHDEALSKAIVLCFRLHFTKDNITNNTAAATVRQVVTVVFERMVAEDERHRDIIEQPVLVQGNSNRRSVSTLKPCAKDAYMLFQDLCQLVNADAPYWLVGMTEMTRTFGLELLESVLNDFPQVFLQHQEFSFLLKERVCPLVIKLFSPNIKFRQGSSTSSSPAPVEKPYFPICMRLLRVVSVLIKQFYSLLVTECEIFLSLLVKFLDADKPQWLRAVAVESIHRFCVQPQLLRSFCQSYDMKQHSTKVFRDIVNALGSFIQSLFLVPPTGNPATSNQAGNNNLGGSVSAPANSGMVGIGGGVTLLPAFEYRGTWIPILTITVQGSAKATYLEMLDKVEPPTIPEGYAMSVAFHCLLDLVRGITSMIEGELGELETECQTTTEEGSSPTQSTEQQDLQSTSDQMDKEIVSRAVWEEMVNACWCGLLAALSLLLDASTDEAATENILKAELTMAALCGRLGLVTSRDAFITAICKAYSVQGQSVMMISPSSESHQQVVAVGQPLAVQPQGTVMLTSKNIQCMRTLLNLAHCHGAVLGTSWQLVLATLQHLVWILGLKPSSGGALKPGRAVEGPSTVLTTAVMTDLPVISNILSRLFESSQYLDDVSLHHLINALCSLSLEAMDMAYGNNKEPSLFAVAKLLETGLVNMHRIEILWRPLTGHLLEVCQHPNSRMREWGAEALTSLIKAGLTFNHDPPLSQNQRLQLLLLNPLKEMSNINHPDIRLKQLECVLQILQSQGDSLGPGWPLVLGVMGAIRNDQGESLIRTAFQCLQLVVTDFLPTMPCTCLQIVVDVAGSFGLHNQELNISLTSIGLLWNISDYFFQRGETIEKELNKEEAAQQKQAEEKGVVLNRPFHPAPPFDCLWLCLYAKLGELCVDPRPAVRKSAGQTLFSTIGAHGTLLQHSTWHTVIWKVLFHLLDRVRESSTTADKEKIESGGGNILIHHSRDTAEKQWAETWVLTLAGVARIFNTRRYLLQPLGDFSRAWDVLLDHIQSAALSKNNEVSLAALKSFQEILQIVSPVRDSDKPETPPVVNVPVPVLIGPISGMSRPFVRTDSIGEKLGRYSSSEPPIVTDELEDLNLWWAAWNTWYRIGSESTKPPITFDKLTFIPSQPFLTALIQIFPALYQHIKTGFNMDDLQKLGVILHSAISVPISSDASPFILPSYTEAVLTSLQEAVLTALDVLQKAICVGPENMQIMYPAIFDQLLAFVEFSCKPPQYGQLETKHIANAKYNQAEWVALNYVPFAERSLEVVVDLYQKTACHKAVVNEKVLQNIIKTLRVPLSLKYSCPSESTWKLAVSSLLRVLSIGLPVARQHASSGKFDSMWPELANTFEDFLFTKSIPPDNLSIQEFQRNENIDVEVVQLISNEILPYANFIPKEFVGQIMTMLNKGSIHSQSSSFTEAEIDIRLREEFSKMCFETLLQFSFSNKVTTPQEGYISRMALSVLLKRSQDVLHRYIEDERLSGKCPLPRQQVTEIIFVLKAVSTLIDSLKKTQPENVDGNTWAQVIALYPTLVECITCSSSEVCSALKEALVPFKDFMQPPASRVQNGES

SEQ ID NO: 40925 - protein, 719 aa, Homo sapiens
MAGGVWGRSRAREAPVGALTLTALTEGIRARQGQPQGPPSAGPQPKSWEVKPEAEPQTQALTAPSEAEPGRGATVPEAGSEPCSLNSALEPAPEGPHQVPQSSWEEGVLADLALYTAACLEEAGFAGTQATVLTLSSALEARGERLEDQVHALVRGLLAQVPSLAEGRPWRAALRVLSALALEHARDVVCALLPRSLPADRVAAELWRSLSRNQRVNGQVLVQLLWALKGASGPEPQALAATRALGEMLAVSGCVGATRGFYPHLLLALVTQLHKLARSPCSPDMPKIWVLSHRGPPHSHASCAVEALKALLTGDGGRMVVTCMEQAGGWRRLVGAHTHLEGVLLLASAMVAHADHHLRGLFADLLPRLRSADDPQRLTAMAFFTGLLQSRPTARLLREEVILERLLTWQGDPEPTVRWLGLLGLGHLALNRRKVRHVSTLLPALLGALGEGDARLVGAALGALRRLLLRPRAPVRLLSAELGPRLPPLLDDTRDSIRASAVGLLGTLVRRGRGGLRLGLRGPLRKLVLQSLVPLLLRLHDPSRDAAESSEWTLARCDHAFCWGLLEELVTVAHYDSPEALSHLCCRLVQRYPGHVPNFLSQTQGYLRSPQDPLRRAAAVLIGFLVHHASPGCVNQDLLDSLFQDLGRLQSDPKPAVAAAAHVSAQQVAMLARARGCPRGPRLLRIAPRPARPPPVFADSPFQRRSVAGRWGCSGPRRA

SEQ ID NO: 40926 - protein, 931 aa, Homo sapiens
MPPLKSPAAFHEQRRSLERARTEDYLKRKIRSRPERSELVRMHILEETSAEPSLQAKQLKLKRARLADDLNEKIAQRPGPMELVEKNILPVESSLKEAIIVGQVNYPKVADSSSFDEDSSDALSPEQPASHESQGSVPSPLEARVSEPLLSATSASPTQVVSQLPMGRDSREMLFLAEQPPLPPPPLLPPSLTNGTTIPTAKSTPTLIKQSQPKSASEKSQRSKKAKELKPKVKKLKYHQYIPPDQKQDRGAPPMDSSYAKILQQQQLFLQLQILNQQQQQHHNYQAILPAPPKSAGEALGSSGTPPVRSLSTTNSSSSSGAPGPCGLARQNSTSLTGKPGALPANLDDMKVAELKQELKLRSLPVSGTKTELIERLRAYQDQISPVPGAPKAPAATSILHKAGEVVVAFPAARLSTGPALVAAGLAPAEVVVATVASSGVVKFGSTGSTPPVSPTPSERSLLSTGDENSTPGDTFGEMVTSPLTQLTLQASPLQILVKEEGPRAGSCCLSPGGRAELEGRDKDQMLQEKDKQIEALTRMLRQKQQLVERLKLQLEQEKRAQQPAPAPAPLGTPVKQENSFSSCQLSQQPLGPAHPFNPSLAAPATNHIDPCAVAPGPPSVVVKQEALQPEPEPVPAPQLLLGPQGPSLIKGVAPPTLITDSTGTHLVLTVTNKNADSPGLSSGSPQQPSSQPGSPAPAPSAQMDLEHPLQPLFGTPTSLLKKEPPGYEEAMSQQPKQQENGSSSQQMDDLFDILIQSGEISADFKEPPSLPGKEKPSPKTVCGSPLAAQPSPSAELPQAAPPPPGSPSLPGRLEDFLESSTGLPLLTSGHDGPEPLSLIDDLHSQMLSSTAILDHPPSPMDTSELHFVPEPSSTMGLDLADGHLDSMDWLELSSGGPVLSLAPLSTTAPSLFSTDFLDGHDLQLHWDSCL

SEQ ID NO: 40927 - protein, 795 aa, Homo sapiens
MGENEASLPNTSLQGKKMAYQKVHADQRAPGHSQYLDNDDLQATALDLEWDMEKELEESGFDQFQLDGAENQNLGHSETIDLNLDSIQPATSPKGRFQRLQEESDYITHYTRSAPKSNRCNFCHVLKILCTATILFIFGILIGYYVHTNCPSDAPSSGTVDPQLYQEILKTIQAEDIKKSFRNLVQLYKNEDDMEISKKIKTQWTSLGLEDVQFVNYSVLLDLPGPSPSTVTLSSSGQCFHPNGQPCSEEARKDSSQDLLYSYAAYSAKGTLKAEVIDVSYGMADDLKRIRKIKNVTNQIALLKLGKLPLLYKLSSLEKAGFGGVLLYIDPCDLPKTVNPSHDTFMVSLNPGGDPSTPGYPSVDESFRQSRSNLTSLLVQPISAPLVAKLISSPKARTKNEACSSLELPNNEIRVVSMQVQTVTKLKTVTNVVGFVMGLTSPDRYIIVGSHHHTAHSYNGQEWASSTAIITAFIRALMSKVKRGWRPDRTIVFCSWGGTAFGNIGSYEWGEDFKKVLQKNVVAYISLHSPIRGNSSLYPVASPSLQQLVVEKNNFNCTRRAQCPETNISSIQIQGDADYFINHLGVPIVQFAYEDIKTLEGPSFLSEARFSTRATKIEEMDPSFNLHETITKLSGEVILQIANEPVLPFNALDIALEVQNNLKGDQPNTHQLLAMALRLRESAELFQSDEMRPANDPKERAPIRIRMLNDILQDMEKSFLVKQAPPGFYRNILYHLDEKTSRFSILIEAWEHCKPLASNETLQEALSEVLNSINSAQVYFKAGLDVFKSVLDGKN

SEQ ID NO: 40928 - protein, 320 aa, Homo sapiens
MAYQKVHADQRAPGHSQYLDNDDLQATALDLEWDMEKELEESGFDQFQLDGAENQNLGHSETIDLNLDSIQPATSPKGRFQRLQEESDYITHYTRSAPKSNRCNFCHVLKILCTATILFIFGILIGYYVHTNCPSDAPSSGTVDPQLYQEILKTIQAEDIKKSFRNLVQLYKNEDDMEISKKIKTQWTSLGLEDVQFVNYSVLLDLPGPSPSTVTLSSSGQCFHPNGQPCSEEARKDSSQDLLYSYAAYSAKGTLKAEVIDVSYGMADDLKRIRKIKNVTNQIALLKLGKLPLLYKVGPVNVIQWFGQYFALFCWNYMLL

SEQ ID NO: 40929 - protein, 158 aa, Homo sapiens
MAAQGVGPGPGSAAPPGLEAARQKLALRRKKVLSTEEMELYELAQAAGGAIDPDVFKILVDLLKLNVAPLAVFQMLKSMCAGQRLASEPQDPAAVSLPTSSVPETRGRNKGSAALGGALALAERSSREGSSQRMPRQPSATRLPKGGGPGKSPTRGST

SEQ ID NO: 40930 - protein, 587 aa, Homo sapiens
MSQMLHIEIPNFGNTVLGCLNEQRLLGLYCDVSIVVKGQAFKAHRAVLAASSLYFRDLFSGNSKSAFELPGSVPPACFQQILSFCYTGRLTMTASEQLVVMYTAGFLQIQHIVERGTDLMFKVSSPHCDSQTAVIEDAGSEPQSPCNQLQPAAAAAAPYVVSPSVPIPLLTRVKHEAMELPPAGPGLAPKRPLETGPRDGVAVAAGAAVAAGTAPLKLPRVSYYGVPSLATLIPGIQQMPYPQGERTSPGASSLPTTDSPTSYHNEEDEEDDEAYDTMVEEQYGQMYIKASGSYAVQEKPEPVPLESRSCVLIRRDLVALPASLISQIGYRCHPKLYSEGDPGEKLELVAGSGVYITRGQLMNCHLCAGVKHKVLLRRLLATFFDRNTLANSCGTGIRSSTSDPSRKPLDSRVLNAVKLYCQNFAPSFKESEMNVIAADMCTNARRVRKRWLPKIKSMLPEGVEMYRTVMGSAAASVPLDPEFPPAAAQVFEQRIYAERRGDAATIVALRTDAVNVDLSAAANPAFDAGEEVDGAGSVIQEVAAPEPLPADGQSPPQPFEQGGGGPSRPQTPAAAARRPEGTYAGTL

SEQ ID NO: 40931 - protein, 242 aa, Homo sapiens
MMMDLFETGSYFFYLDGENVTLQPLEVAEGSPLYPGSDGTLSPCQDQMPPEAGSDSSGEEHVLAPPGLQPPHCPGQCLIWACKTCKRKSAPTDRRKAATLRERRRLKKINEAFEALKRRTVANPNQRLPKVEILRSAISYIERLQDLLHRLDQQEKMQELGVDPFSYRPKQENLEGADFLRTCSSQWPSVSDHSRGLVITAKEGGASIDSSASSSLRCLSSIVDSISSEERKLPCVEEVVEK

SEQ ID NO: 40932 - protein, 184 aa, Homo sapiens
MQFTSISNSLTSTAAIGLSFTTSTTTTATFTTNTTTTITSGFTVNQNQLLSRGFENLVPYTSTVSVVATPVMTYGHLEGLINEWNLELEDQEKYFLLQATQVNAWDHTLIENGEMIRILHGEVNKVKLDQKRLEQELDFILSQQQELEFLLTYLEESTRDQSGLHYLQDADEEHVEISTRSAEF

SEQ ID NO: 40933 - protein, 72 aa, Homo sapiens
MQFTSISNSLTSTAAIGLSFTTSTTTTATFTTNTTTTITSGFTVNQNQLLSRGFENLVPYTSTVRFVFYMEK

SEQ ID NO: 40934 - protein, 1562 aa, Homo sapiens
MPGEAARAELLLPEADRPGPRTDLSCDAAAATTILGGDRREPCALTPGPSHLALTFLPSKPGARPQPEGASWDAGPGGAPSAWADPGEGGPSPMLLPEGLSSQALSTEAPLPATLEPRIVMGEETCQALLSPRAARTALRDQEGGHASPDPPPELCSQGDLSVPSPPPDPDSFFTPPSTPTKTTYALLPACGPHGDARDSEAELRDELLDSPPASPSGSYITADGDSWASSPSCSLSLLAPAEGLDFPSGWGLSPQGSMVDERELHPAGTPEPPSSESSLSADSSSSWGQEGHFFDLDFLANDPMIPAALLPFQGSLIFQVEAVEVTPLSPEEEEEEAVADPDPGGDLAGEGEEDSTSASFLQSLSDLSITEGMDEAFAFRDDTSAASSDSDSASYAEADDERLYSGEPHAQATLLQDSVQKTEEESGGGAKGLQAQDGTVSWAVEAAPQTSDRGAYLSQRQELISEVTEEGLALGQESTATVTPHTLQVAPGLQVEVATRVTPQAGEEETDSTAGQESAAMAMPQPSQEGISEILGQESVTAEKLPTPQEETSLTLCPDSPQNLKEEGGLDLPSGRKPVAAATIVPRQAKEDLTLPQDSAMTPPLPLQDTDLSSAPKPVAAATIVSQQAEEGLTLPQDSVMTPPLPLQDTELSSAPKPVAAATLVSQQAEEGLTLPQDSAMTPPLPLQDTDLSSAPKPVAAATLVSQQAEEGLTLPQDSAMTPPLPLQDTDLSSAPKPVAAATLVSQQAEEGLTLPQDSAMTPPLPLQDTDLSSAPKPVAAATIVSQQAEEGLTLPQDSAMTPPLPLQDTDLSSAPKPVAAATIVSQQAEEGLTLPQDSAMTPPLPLQDTDLSSAPKPVAAATPVSQQAEEGLTLPQDSAMTPPLPLQDTDLSSAPKPVAAATPVSQQAEEGLTLPQDSAMTAPLPLQDTGPTSGPEPLAVATPQTLQAEAGCAPGTEPVATMAQQEVGEALGPRPAPEEKNAALPTVPEPAALDQVQQDDPQPAAEAGTPWAAQEDADSTLGMEALSLPEPASGAGEEIAEALSRPGREACLEARAHTGDGAKPDSPQKETLEVENQQEGGLKPLAQEHGPRSALGGAREVPDAPPAACPEVSQARLLSPAREERGLSGKSTPEPTLPSAVATEASLDSCPESSVGAVSSLDRGCPDAPAPTSAPTSQQPEPVLGLGSVEQPHEVPSVLGTPLLQPPENLAKGQPSTPVDRPLGPDPSAPGTLAGAALPPLEPPAPCLCQDPQEDSVEDEEPPGSLGLPPPQAGVQPAAAAVSGTTQPLGTGPRVSLSPHSPLLSPKVASMDAKDLALQILPPCQVPPPSGPQSPAGPQGLSAPEQQEDEDSLEEDSPRALGSGQHSDSHGESSAELDEQDILAPQTVQCPAQAPAGGSEETIAKAKQSRSEKKARKAMSKLGLRQIQGVTRITIQKSKNILFVIAKPDVFKSPASDTYVVFGEAKIEDLSQQVHKAAAEKFKVPSEPSALVPESAPRPRVRLECKEEEEEEEEEVDEAGLELRDIELVMAQANVSRAKAVRALRDNHSDIVNAIMELTM

SEQ ID NO: 40935 - protein, 1742 aa, Homo sapiens
MAVAELYTQYNRVWIPDPEEVWKSAEIAKDYRVGDKVLRLLLEDGTELDYSVNPESLPPLRNPDILVGENDLTALSYLHEPAVLHNLRIRFAESKLIYTYSGIILVAMNPYKQLPIYGDAIIHAYSGQNMGDMDPHIFAVAEEAYKQMARNNRNQSIIVSGESGAGKTVSARYAMRYFATVSKSGSNAHVEDKVLASNPITEAVGNAKTTRNDNSSRFGKYTEISFDEQNQIIGANMSTYLLEKSRVVFQSENERNYHIFYQLCASAQQSEFKHLKLGSAEEFNYTRMGGNTVIEGVNDRAEMVETQKTFTLLGFKEDFQMDVFKILAAILHLGNVQITAVGNERSSVSEDDSHLKVFCELLGLESGRVAQWLCNRKIVTSSETVVKPMTRPQAVNARDALAKKIYAHLFDFIVERINQALQFSGKQHTFIGVLDIYGFETFDVNSFEQFCINYANEKLQQQFNMHVFKLEQEEYMKEDIPWTLIDFYDNQPVIDLIEAKMGILELLDEECLLPHGTDENWLQKLYNNFVNRNPLFEKPRMSNTSFVIQHFADKVEYKCEGFLEKNRDTVYDMLVEILRASKFHLCANFFQENPTPPSPFGSMITVKSAKQVIKPNSKHFRTTVGSKFRSSLYLLMETLNATTPHYVRCIKPNDEKLPFEFDSKRIVQQLRACGVLETIRISAQSYPSRWTYIEFYSRYGILMTKQELSFSDKKEVCKVVLHRLIQDSNQYQFGKTKIFFRAGQVAYLEKLRLDKLRQSCVMVQKHMRGWLQRKKFLRERRAALIIQQYFRGQQTVRKAITAVALKEAWAAIIIQKHCRGYLVRSLYQLIRMATITMQAYSRGFLARRRYRKMLEEHKAVILQKYARAWLARRRFQSIRRFVLNIQLTYRVQRLQKKLEDQNKENHGLVEKLTSLAALRAGDVEKIQKLEAELEKAATHRRNYEEKGKRYRDAVEEKLAKLQKHNSELETQKEQIQLKLQEKTEELKEKMDNLTKQLFDDVQKEERQRMLLEKSFELKTQDYEKQIQSLKEEIKALKDEKMQLQHLVEGEHVTSDGLKAEVARLSKQVKTISEFEKEIELLQAQKIDVEKHVQSQKREMREKMSEITKQLLESYDIEDVRSRLSVEDLEHLNEDGELWFAYEGLKKATRVLESHFQSQKDCYEKEIEALNFKVVHLSQEINHLQKLFREENDINESIRHEVTRLTSENMMIPDFKQQISELEKQKQDLEIRLNEQAEKMKGKLEELSNQLHRSQEEEGTQRKALEAQNEIHTKEKEKLIDKIQEMQEASDHLKKQFETESEVKCNFRQEASRLTLENRDLEEELDMKDRVIKKLQDQVKTLSKTIGKANDVHSSSGPKEYLGMLQYKREDEAKLIQNLILDLKPRGVVVNMIPGLPAHILFMCVRYADSLNDANMLKSLMNSTINGIKQVVKEHLEDFEMLSFWLSNTCHFLNCLKQYSGEEEFMKHNSPQQNKNCLNNFDLSEYRQILSDVAIRIYHQFIIIMEKNIQPIIVPGMLEYESLQGISGLKPTGFRKRSSSIDDTDGYTMTSVLQQLSYFYTTMCQNGLDPELVRQAVKQLFFLIGAVTLNSLFLRKDMCSCRKGMQIRCNISYLEEWLKDKNLQNSLAKETLEPLSQAAWLLQVKKTTDSDAKEIYERCTSLSAVQIIKILNSYTPIDDFEKRVTPSFVRKVQALLNSREDSSQLMLDTKYLFQVTFPFTPSPHALEMIQIPSSFKLGFLNRL

SEQ ID NO: 40936 - protein, 430 aa, Homo sapiens
MAVAELYTQYNRVWIPDPEEVWKSAEIAKDYRVGDKVLRLLLEDGTELDYSVNPESLPPLRNPDILVGENDLTALSYLHEPAVLHNLRIRFAESKLIYTYSGIILVAMNPYKQLPIYGDAIIHAYSGQNMGDMDPHIFAVAEEAYKQMARNNRNQSIIVSGESGAGKTVSARYAMRYFATVSKSGSNAHVEDKVLASNPITEAVGNAKTTRNDNSSRFGKYTEISFDEQNQIIGANMSTYLLEKSRVVFQSENERNYHIFYQLCASAQQSEFKHLKLGSAEEFNYTRMGGNTVIEGVNDRAEMVETQKTFTLLGFKEDFQMDVFKILAAILHLGNVQITAVGNERSSVSEDDSHLKVFCELLGLESGRVAQWLCNRKIVTSSETVVKPMTRPQAVNARDALAKKIYAHLFDFIVERINQALQFSVLKPLM

SEQ ID NO: 40937 - protein, 350 aa, Homo sapiens
MATVGAPRHFCRCACFCTDNLYVARYGLHVRFRGEQQLRRDYGPILRSRGCVSAKDFQQLLAELEQEVERRQRLGQESAARKALIASSYHPARPEVYDSLQDAALAPEFLAVTEYSVSPDADLKGLLQRLETVSEEKRIYRVPVFTAPFCQALLEELEHFEQSDMPKGRPNTMNNYGVLLHELGLDEPLMTPLRERFLQPLMALLYPDCGGGRLDSHRAFVVKYAPGQDLELGCHYDNAELTLNVALGKVFTGGALYFGGLFQAPTALTEPLEVEHVVGQGVLHRGGQLHGARPLGTGERWNLVVWLRASAVRNSLCPMCCREPDLVDDEGFGDGFTREEPATVDVCALT

SEQ ID NO: 40938 - protein, 290 aa, Homo sapiens
MVELEQEVERRQRLGQESAARKALIASSYHPARPEVYDSLQDAALAPEFLAVTEYSVSPDADLKGLLQRLETVSEEKRIYRVPVFTAPFCQALLEELEHFEQSDMPKGRPNTMNNYGVLLHELGLDEPLMTPLRERFLQPLMALLYPDCGGGRLDSHRAFVVKYAPGQDLELGCHYDNAELTLNVALGKVFTGGALYFGGLFQAPTALTEPLEVEHVVGQGVLHRGGQLHGARPLGTGERWNLVVWLRASAVRNSLCPMCCREPDLVDDEGFGDGFTREEPATVDVCALT

SEQ ID NO: 40939 - protein, 129 aa, Homo sapiens
MATVGAPRHFCRCACFCTDNLYVARYGLHVRFRGEQQLRRDYGPILRSRGCVSAKDFQQLLAEWPQEDGRPHLVTTLCHPSLSRRWSGGSGWGRSQQLGKPSSRVPTTRHGLRSTTHCRMQLWPPSSWP

SEQ ID NO: 40940 - protein, 186 aa, Homo sapiens
MPKGRPNTMNNYGVLLHELGLDEPLMTPLRERFLQPLMALLYPDCGGGRLDSHRAFVVKYAPGQDLELGCHYDNAELTLNVALGKVFTGGALYFGGLFQAPTALTEPLEVEHVVGQGVLHRGGQLHGARPLGTGERWNLVVWLRASAVRNSLCPMCCREPDLVDDEGFGDGFTREEPATVDVCALT

SEQ ID NO: 40941 - protein, 109 aa, Homo sapiens
MSITDVLSADDIAAALQECRDPDTFEPQKFFQTSGLSKMSANQVKDVFRFIDNDQSGYLDEEELKFFLQKFESGARELTESETKSLMAAADNDGDGKIGAEEFQEMVHS

SEQ ID NO: 40942 - protein, 113 aa, Homo sapiens
MDSRQAAALLVLLLLIDGGCAEGPGGQQEDQLSAEEDSEPLPPQDAQTSGSLLHYLLQAMERPGRSQAFLFQPQRFGRNTQGSWRNEWLSPRAGEGLNSQFWSLAAPQRFGKK

SEQ ID NO: 40943 - protein, 116 aa, Homo sapiens
MVPQPPTTCPWKPVPSPCDLRVQGICPSSFPDTPLAQEEDSEPLPPQDAQTSGSLLHYLLQAMERPGRSQAFLFQPQRFGRNTQGSWRNEWLSPRAGEGLNSQFWSLAAPQRFGKK

SEQ ID NO: 40944 - protein, 1010 aa, Homo sapiens
MSQLRLLPSRLGVQAARLLAAHDVPVFGWRSRSSGPPATFPSSKGGGGSSYMEEMYFAWLENPQSVHKSWDSFFREASEEAFSGSAQPRPPSVVHESRSAVSSRTKTSKLVEDHLAVQSLIRAYQIRGHHVAQLDPLGILDADLDSFVPSDLITTIDKLAFYDLQEADLDKEFQLPTTTFIGGSENTLSLREIIRRLENTYCQHIGLEFMFINDVEQCQWIRQKFETPGVMQFSSEEKRTLLARLVRSMRFEDFLARKWSSEKRFGLEGCEVMIPALKTIIDKSSEMGIENVILGMPHRGRLNVLANVIRKDLEQIFCQFDPKLEAADEGSGDVKYHLGMYHERINRVTNRNITLSLVANPSHLEAVDPVVQGKTKAEQFYRGDAQGKKVMSILVHGDAAFAGQGVVYETFHLSDLPSYTTNGTVHVVVNNQIGFTTDPRMARSSPYPTDVARVVNAPIFHVNADDPEAVIYVCSVAAEWRNTFNKDVVVDLVCYRRRGHNEMDEPMFTQPLMYKQIHRQVPVLKKYADKLIAEGTVTLQEFEEEIAKYDRICEEAYGRSKDKKILHIKHWLDSPWPGFFNVDGEPKSMTCPATGIPEDMLTHIGSVASSVPLEDFKIHTGLSRILRGRADMTKNRTVDWALAEYMAFGSLLKEGIHVRLSGQDVERGTFSHRHHVLHDQEVDRRTCVPMNHLWPDQAPYTVCNSSLSEYGVLGFELGYAMASPNALVLWEAQFGDFHNTAQCIIDQFISTGQAKWVRHNGIVLLLPHGMEGMGPEHSSARPERFLQMSNDDSDAYPAFTKDFEVSQLYDCNWIVVNCSTPANYFHVLRRQILLPFRKPLIIFTPKSLLRHPEAKSSFDQMVSGTSFQRVIPEDGAAARAPEQVQRLIFCTGKVYYDLVKERSSQDLEEKVAITRLEQISPFPFDLIKQEAEKYPGAELAWCQEEHKNMGYYDYISPRFMTILRRARPIWYVGRDPAAAPATGNRNTHLVSLKKFLDTAFNLQAFEGKTF

SEQ ID NO: 40945 - protein, 953 aa, Homo sapiens
MSQLRLLPSRLGVQAARLLAAHDVPVFGWRSRSSGPPATFPSSKGGGGSSYMEEMYFAWLENPQSVHKIRGHHVAQLDPLGILDADLDSFVPSDLITTIDKLAFYDLQEADLDKEFQLPTTTFIGGSENTLSLREIIRRLENTYCQHIGLEFMFINDVEQCQWIRQKFETPGVMQFSSEEKRTLLARLVRSMRFEDFLARKWSSEKRFGLEGCEVMIPALKTIIDKSSEMGIENVILGMPHRGRLNVLANVIRKDLEQIFCQFDPKLEAADEGSGDVKYHLGMYHERINRVTNRNITLSLVANPSHLEAVDPVVQGKTKAEQFYRGDAQGKKVMSILVHGDAAFAGQGVVYETFHLSDLPSYTTNGTVHVVVNNQIGFTTDPRMARSSPYPTDVARVVNAPIFHVNADDPEAVIYVCSVAAEWRNTFNKDVVVDLVCYRRRGHNEMDEPMFTQPLMYKQIHRQVPVLKKYADKLIAEGTVTLQEFEEEIAKYDRICEEAYGRSKDKKILHIKHWLDSPWPGFFNVDGEPKSMTCPATGIPEDMLTHIGSVASSVPLEDFKIHTGLSRILRGRADMTKNRTVDWALAEYMAFGSLLKEGIHVRLSGQDVERGTFSHRHHVLHDQEVDRRTCVPMNHLWPDQAPYTVCNSSLSEYGVLGFELGYAMASPNALVLWEAQFGDFHNTAQCIIDQFISTGQAKWVRHNGIVLLLPHGMEGMGPEHSSARPERFLQMSNDDSDAYPAFTKDFEVSQLYDCNWIVVNCSTPANYFHVLRRQILLPFRKPLIIFTPKSLLRHPEAKSSFDQMVSGTSFQRVIPEDGAAARAPEQVQRLIFCTGKVYYDLVKERSSQDLEEKVAITRLEQISPFPFDLIKQEAEKYPGAELAWCQEEHKNMGYYDYISPRFMTILRRARPIWYVGRDPAAAPATGNRNTHLVSLKKFLDTAFNLQAFEGKTF

SEQ ID NO: 40946 - protein, 801 aa, Homo sapiens
MFINDVEQCQWIRQKFETPGVMQFSSEEKRTLLARLVRSMRFEDFLARKWSSEKRFGLEGCEVMIPALKTIIDKSSEMGIENVILGMPHRGRLNVLANVIRKDLEQIFCQFDPKLEAADEGSGDVKYHLGMYHERINRVTNRNITLSLVANPSHLEAVDPVVQGKTKAEQFYRGDAQGKKVMSILVHGDAAFAGQGVVYETFHLSDLPSYTTNGTVHVVVNNQIGFTTDPRMARSSPYPTDVARVVNAPIFHVNADDPEAVIYVCSVAAEWRNTFNKDVVVDLVCYRRRGHNEMDEPMFTQPLMYKQIHRQVPVLKKYADKLIAEGTVTLQEFEEEIAKYDRICEEAYGRSKDKKILHIKHWLDSPWPGFFNVDGEPKSMTCPATGIPEDMLTHIGSVASSVPLEDFKIHTGLSRILRGRADMTKNRTVDWALAEYMAFGSLLKEGIHVRLSGQDVERGTFSHRHHVLHDQEVDRRTCVPMNHLWPDQAPYTVCNSSLSEYGVLGFELGYAMASPNALVLWEAQFGDFHNTAQCIIDQFISTGQAKWVRHNGIVLLLPHGMEGMGPEHSSARPERFLQMSNDDSDAYPAFTKDFEVSQLYDCNWIVVNCSTPANYFHVLRRQILLPFRKPLIIFTPKSLLRHPEAKSSFDQMVSGTSFQRVIPEDGAAARAPEQVQRLIFCTGKVYYDLVKERSSQDLEEKVAITRLEQISPFPFDLIKQEAEKYPGAELAWCQEEHKNMGYYDYISPRFMTILRRARPIWYVGRDPAAAPATGNRNTHLVSLKKFLDTAFNLQAFEGKTF

SEQ ID NO: 40947 - protein, 158 aa, Homo sapiens
MYTASSSAETLRTVRRRSVPSSSMPYLALAHNRVSSLNHAASVDGWGTSHRNVADSFSRTSRSCSRFLKGTAGSARREDWNGHLQPWIPRPDRRGWETADRKGERTQVHGLRRSLGPRAPHPGAHRALRPAQSCRSGPRGWTPCRCRGRGPTACRRGS

SEQ ID NO: 40948 - protein, 113 aa, Homo sapiens
MYTASSSAETLRTVRRRSVPSSSMPYLALAHNRVSSLNHAASVDGWGTSHRNVADSFSRTSRSCSRFLKGTAGSARREDCYFEAYMGSWFLDPRIYQNLCILKFYGQPCGTQA

SEQ ID NO: 40949 - protein, 142 aa, Homo sapiens
MATSLDFKTYVDQACRAAEEFVNIYYETMDKRRRALTRLYLDKATLIWNGNAVSGLDALNNFFDTLPSSEFQVNMLDCQPVHEQATQSQTTVLVVTSGTVKFDGNKQHFFNQNFLLTAQSTPNNTVWKIASDCFRFQDWSSS

SEQ ID NO: 40950 - protein, 188 aa, Homo sapiens
VTNHVPALCTAGRGPRFAARPAGPTPSLVSSRFLIPERTLSWEIARGGDVGDFKTYVDQACRAAEEFVNIYYETMDKRRRALTRLYLDKATLIWNGNAVSGLDALNNFFDTLPSSEFQVNMLDCQPVHEQATQSQTTVLVVTSGTVKFDGNKQHFFNQNFLLTAQSTPNNTVWKIASDCFRFQDWSSS

SEQ ID NO: 40951 - protein, 197 aa, Homo sapiens
MRKYRSHWSQGDREGYQRRSNYYEGPHTSHSSPADRTREEVVTPTLPEHTATRSQMATSLDFKTYVDQACRAAEEFVNIYYETMDKRRRALTRLYLDKATLIWNGNAVSGLDALNNFFDTLPSSEFQVNMLDCQPVHEQATQSQTTVLVVTSGTVKFDGNKQHFFNQNFLLTAQSTPNNTVWKIASDCFRFQDWSSS

SEQ ID NO: 40952 - protein, 114 aa, Homo sapiens
MDKRRRALTRLYLDKATLIWNGNAVSGLDALNNFFDTLPSSEFQVNMLDCQPVHEQATQSQTTVLVVTSGTVKFDGNKQHFFNQNFLLTAQSTPNNTVWKIASDCFRFQDWSSS

SEQ ID NO: 40953 - protein, 311 aa, Homo sapiens
MPRPNFMAVTEFTFEGFSIFEWHHRLILFVIFLVLYVLTLASNAIILIVIRLNHQLHTPMYFFLSVLSISETYYTVAINPQMLSGLLSPQQTISIPGCAAQLFFYLTFGVNKCFLLTAMGYDHYVAICNPLQYSVIMGKKACIQLVSGSWNIGLSTAIIQVSSVFSLPFCDANLISHFFCDIRPIMKLACADTTIKEIITLLISLCVLVLPMVLIFISYVLIVTTILKIASAEGRRKAFATCASHLTVVIVHYGRTSFIYLKPKSQNSLQDRLISVTYTVITPLLNPVVYSLRNKEVKDALLRALGRKPLS

SEQ ID NO: 40954 - protein, 636 aa, Homo sapiens
MEKAVNDGSHSEELFCHLKTISEKEDLPRCTSESHLSCLKQDILNEKTELEATLKEAELVTHSVELLLPLFKDTIEKINFENANLSALNLKISEQKEILIKELDTFKSVKLALEHLLRKRDYKQTGDNLSSMLLENLTDNESENTNLKKKVFEKEAHIQELSCLFQSEKANTLKANRFSQSVKVVHERLQIQIHKREAENDKLKEYVKSLETKIAKWNLQSRMNKNEAIVMKEASRQKTVALKKASKVYKQRLDHFTGAIEKLTSQIRDQEAKLSETISASNAWKSHYEKIVIEKTELEVQIETMKKQIINLLEDLKKMEDHGKNSCEEILRKVHSIEYENETLNLENTKLKLRFPCRITESKNMNILIVLDMLCYISSEKTTLAALKDEVVSVENELSELQEVEKKQKTLIEMYKTQVQKLQEAAEIVKSRCENLLHKNNQITKTKNKNVEKMRGQMESHLKELERVCDSLTAAERRLHECQESLQCCKGKCADQEHTIRELQGQVDGNHNLLTKLSLEEENCLIQLKCENLQQKLEQMDAENKELEKKLANQEECLKHSNLKFKEKSAEYTALARQLEAALEEGRQKVAEEIEKMSSRESALQIKILDLETELRKKNEEQNQLVCKMNSDPETP

SEQ ID NO: 40955 - protein, 620 aa, Homo sapiens
MEKAVNDGSHSEELFCHLKTISEKEDLPRCTSESHLSCLKQDILNEKTELEATLKEAELVTHSVELLLPLFKDTIEKINFENANLSALNLKISEQKEILIKELDTFKSVKLALEHLLRKRDYKQTGDNLSSMLLENLTDNESENTNLKKKVFEKEAHIQELSCLFQSEKANTLKANRFSQSVKVVHERLQIQIHKREAENDKLKEYVKSLETKIAKWNLQSRMNKNEAIVMKEASRQKTVALKKASKVYKQRLDHFTGAIEKLTSQIRDQEAKLSETISASNAWKSHYEKIVIEKTELEVQIETMKKQIINLLEDLKKMEDHGKNSCEEILRKVHSIEYENETLNLENTKLKLRFPCRITESKNMNILIVLDMLCYISSEKTTLAALKDEVVSVENELSELQEVEKKQKTLIEMYKTQVQKLQEAAEIVKSRCENLLHKNNQITKTKNKNVEKVDGNHNLLTKLSLEEENCLIQLKCENLQQKLEQMDAENKELEKKLANQEECLKHSNLKFKEKSAEYTALARQLEAALEEGRQKVAEEIEKMSSRESALQIKILDLETELRKKNEEQNQLVCKMNSKAQHQEVCLKEVQNSLEKSENQNESIKNYLQFLKTSYVTMFE

SEQ ID NO: 40956 - protein, 620 aa, Homo sapiens
MEKAVNDGSHSEELFCHLKTISEKEDLPRCTSESHLSCLKQDILNEKTELEATLKEAELVTHSVELLLPLFKDTIEKINFENANLSALNLKISEQKEILIKELDTFKSVKLALEHLLRKRDYKQTGDNLSSMLLENLTDNESENTNLKKKVFEKEAHIQELSCLFQSEKANTLKANRFSQSVKVVHERLQIQIHKREAENDKLKEYVKSLETKIAKWNLQSRMNKNEAIVMKEASRQKTVALKKASKVYKQRLDHFTGAIEKLTSQIRDQEAKLSETISASNAWKSHYEKIVIEKTELEVQIETMKKQIINLLEDLKKMEDHGKNSCEEILRKVHSIEYENETLNLENTKLKTTLAALKDEVVSVENELSELQEVEKKQKTLIEMYKTQVQKLQEAAEIVKSRCENLLHKNNQITKTKNKNVEKMRGQMESHLKELERVCDSLTAAERRLHECQESLQCCKGKCADQEHTIRELQGQILKQWEEYSVLAWVDGNHNLLTKLSLEEENCLIQLKCENLQQKLEQMDAENKELEKKLANQEECLKHSNLKFKEKSAEYTALARQLEAALEEGRQKVAEEIEKMSSRESALQIKILDLETELRKKNEEQNQLVCKMNSDPETP

SEQ ID NO: 40957 - protein, 644 aa, Homo sapiens
MEKAVNDGSHSEELFCHLKTISEKEDLPRCTSESHLSCLKQDILNEKTELEATLKEAELVTHSVELLLPLFKDTIEKINFENANLSALNLKISEQKEILIKELDTFKSVKLALEHLLRKRDYKQTGDNLSSMLLENLTDNESENTNLKKKVFEKEAHIQELSCLFQSEKANTLKANRFSQSVKVVHERLQIQIHKREAENDKLKEYVKSLETKIAKWNLQSRMNKNEAIVMKEASRQKTVALKKASKVYKQRLDHFTGAIEKLTSQIRDQEAKLSETISASNAWKSHYEKIVIEKTELEVQIETMKKQIINLLEDLKKMEDHGKNSCEEILRKVHSIEYENETLNLENTKLKTTLAALKDEVVSVENELSELQEVEKKQKTLIEMYKTQVQKLQEAAEIVKSRCENLLHKNNQITKTKNKNVEKMRGQMESHLKELERVCDSLTAAERRLHECQESLQCCKGKCADQEHTIRELQGQVDGNHNLLTKLSLEEENCLIQLKCENLQQKLEQMDAENKELEKKLANQEECLKHSNLKFKEKSAEYTALARQLEAALEEGRQKVAEEIEKMSSRESALQIKILDLETELRKKNEEQNQLVCKMNSKAQHQEVCLKEVQNSLEKSENQNESIKNYLQFLKTSYVTMFE

SEQ ID NO: 40958 - protein, 513 aa, Homo sapiens
MLLENLTDNESENTNLKKKVFEKEAHIQELSCLFQSEKANTLKANRFSQSVKVVHERLQIQIHKREAENDKLKEYVKSLETKIAKWNLQSRMNKNEAIVMKEASRQKTVALKKASKVYKQRLDHFTGAIEKLTSQIRDQEAKLSETISASNAWKSHYEKIVIEKTELEVQIETMKKQIINLLEDLKKMEDHGKNSCEEILRKVHSIEYENETLNLENTKLKTTLAALKDEVVSVENELSELQEVEKKQKTLIEMYKTQVQKLQEAAEIVKSRCENLLHKNNQITKTKNKNVEKMRGQMESHLKELERVCDSLTAAERRLHECQESLQCCKGKCADQEHTIRELQGQVDGNHNLLTKLSLEEENCLIQLKCENLQQKLEQMDAENKELEKKLANQEECLKHSNLKFKEKSAEYTALARQLEAALEEGRQKVAEEIEKMSSRESALQIKILDLETELRKKNEEQNQLVCKMNSKAQHQEVCLKEVQNSLEKSENQNESIKNYLQFLKTSYVTMFE

SEQ ID NO: 40959 - protein, 591 aa, Homo sapiens
MEKAVNDGSHSEELFCHLKTISEKEDLPRCTSESHLSCLKQDILNEKTELEATLKEAELVTHSVELLLPLFKDTIEKINFENANLSALNLKISEQKEILIKELDTFKSVKLALEHLLRKRDYKQTGDNLSSMLLENLTDNESENTNLKKKVFEKEAHIQELSCLFQSEKANTLKANRFSQSVKVVHERLQIQIHKREAENDKLKEYVKSLETKIAKWNLQSRMNKNEAIVMKEASRQKTVALKKASKVYKQRLDHFTGAIEKLTSQIRDQEAKLSETISASNAWKSHYEKIVIEKTELEVQIETMKKQIINLLEDLKKMEDHGKNSCEEILRKVHSIEYENETLNLENTKLKTTLAALKDEVVSVENELSELQEVEKKQKTLIEMYKTQVQKLQEAAEIVKSRCENLLHKNNQITKTKNKNVEKVDGNHNLLTKLSLEEENCLIQLKCENLQQKLEQMDAENKELEKKLANQEECLKHSNLKFKEKSAEYTALARQLEAALEEGRQKVAEEIEKMSSRESALQIKILDLETELRKKNEEQNQLVCKMNSKAQHQEVCLKEVQNSLEKSENQNESIKNYLQFLKTSYVTMFE

SEQ ID NO: 40960 - protein, 318 aa, Homo sapiens
MQRANHSTVTQFILVGFSVFPHLQLMLFLLFLLMYLFTLLGNLLIMATVWSERSLHTPMYLFLCALSVSEILYTVAIIPRMLADLLSTQRSIAFLACASQMFFSFSFGFTHSFLLTVMGYDRYVAICHPLRYNVLMSPRGCACLVGCSWAGGLVMGMVVTSAIFHLAFCGHKEIHHFACHVPPLLKLACGDDVLVVAKGVGLVCITALLGCFLLILLSYAFIVAAILKIPSAEGRNKAFSTCASHLTVVVVHYGFASVIYLKPKSPQSLEGDTLMGITYTVLTPFLSPIIFSLRNKELKVAMKKTFFSKLYPEKNVMM

SEQ ID NO: 40961 - protein, 311 aa, Homo sapiens
MSNATLLTAFILTGLPHAPGLDAPLFGIFLVVYVLTVLGNLLILLVIRVDSHLHTPMYYFLTNLSFIDMWFSTVTVPKMLMTLVSPSGRTISFHSCVAQLYFFHFLGSTECFLYTVMSYDRYLAISYPLRYTNMMTGRSCALLATGTWLSGSLHSAVQTILTFHLPYCGPNQIQHYFCDAPPILKLACADTSANEMVIFVNIGLVASGCFVLIVLSYVSIVCSILRIRTSEGRHRAFQTCASHCIVVLCFFGPGLFIYLRPGSRDALHGVVAVFYTTLTPLFNPVVYTLRNKEVKKALLKLKNGSVFAQGE

SEQ ID NO: 40962 - protein, 335 aa, Homo sapiens
MLGSKPRVHLYILPCASQQVSTMGDRGTSNHSEMTDFILAGFRVRPELHILLFLLFLFVYAMILLGNVGMMTIIMTDPRLNTPMYFFLGNLSFIDLFYSSVIEPKAMINFWSENKSISFAGCVAQLFLFALLIVTEGFLLAAMAYDRFIAICNPLLYSVQMSTRLCTQLVAGSYFCGCISSVIQTSMTFTLSFCASRAVDHFYCDSRPLQRLSCSDLFIHRMISFSLSCIIILPTIIVIIVSYMYIVSTVLKIHSTEGHKKAFSTCSSHLGVVSVLYGAVFFMYLTPDRFPELSKVASLCYSLVTPMLNPLIYSLRNKDVQEALKKFLEKKNIIL

SEQ ID NO: 40963 - protein, 842 aa, Homo sapiens
MDFQERDPPFLPESAQSSKPSSAQQASELWEVVEEPRVRLGTEGVMPERQEGHLLKKRKWPLKGWHKRYFVLEDGILHYATTRQDITKGKLHGSIDVRLSVMSINKKAQRIDLDTEDNIYHLKIKSQDLFQSWVAQLRAHRLAHRLDMPRGSLPSTAHRKVPGAQLPTAATASALPGLGPREKVSSWLRDSDGLDRCSHELSECQGKLQELHRLLQSLESLHRIPSAPVIPTHQASVTTERPKKGKRTSRMWCTQSFAKDDTIGRVGRLHGSVPNLSRYLESRDSSGTRGLPPTDYAHLQRSFWALAQKVHSSLSSVLAALTMERDQLRDMHQGSELSRMGVSEASTGQRRLHSLSTSSDTTADSFSSLNPEEQEALYMKGRELTPQLSQTSILSLADSHTEFFDACEVLLSASSSENEGSEEEESCTSEITTSLSEEMLDLRGAERCQKGGCVPGRPMGPPRRRCLPAASGPGADVSLWNILRNNIGKDLSKVSMPVQLNEPLNTLQRLCEELEYSSLLDQASRIADPCERMVYIAAFAVSAYSSTYHRAGCKPFNPVLGETYECERPDRGFRFISEQVSHHPPISACHAESENFAFWQDMKWKNKFWGKSLEIVPVGTVNVSLPRFGDHFEWNKVTSCIHNVLSGQRWIEHYGEVLIRNTQDSSCHCKITFCKAKYWSSNVHEVQGAVLSRSGRVLHRLFGKWHEGLYRGPTPGGQCIWKPNSMPPDHERNFGFTQFALELNELTAELKRSLPSTDTRLRPDQRYLEEGNIQAAEAQKRRIEQLQRDRRKVMEENNIVHQARFFRRQTDSSGKEWWVTNNTYWRLRAEPGYGNMDGAVLW

SEQ ID NO: 40964 - protein, 357 aa, Homo sapiens
MDFQERDPPFLPESAQSSKPSSAQQASELWEVVEEPRVRLGTEGVMPERQEGHLLKKRKWPLKGWHKRYFVLEDGILHYATTRQDITKGKLHGSIDVRLSVMSINKKAQRIDLDTEDNIYHLKIKSQDLFQSWVAQLRAHRLAHRLDMPRGSLPSTAHRKVPGAQLPTAATASALPGLGPREKVSSWLRDSDGLDRCSHELSECQGKLQELHRLLQSLESLHRIPSAPVIPTHQASVTTERPKKGKRTSRMWCTQSFAKDDTIGRVGRLHGSVPNLSRYLESRDSSGTRGLPPTDYAHLQRSFWALAQKVHSSLSSVLAALTMERDQLRDMHQGSELSRMGVRPGGQGDWCGERASS

SEQ ID NO: 40965 - protein, 256 aa, Homo sapiens
MLWQKPTAPEQAPAPARPYQGVRVKEPVKELLRRKRGHASSGAAPAPTAVVLPHQPLATYTTVGPSCLDMEGSVSAVTEEAALCAGWLSQPTPATLQPLAPWTPYTEYVPHEAVSCPYSADMYVQPVCPSYTVVGPSSVLTYASPPLITNVTTRSSATPAVGPPLEGPEHQAPLTYFPWPQPLSTLPTSTLQYQPPAPALPGPQFVQLPISIPEPVLQDMEDPRRAASSLTIDKLLLEEEDSDAYALNHTLSVEGF

SEQ ID NO: 40966 - protein, 253 aa, Homo sapiens
MGSDAWVGLWRPHRPRGPIAAHYGGPGPKYKLPPNTGYALHDPSRPRAPAFTFGARFPTQQTTCGPGPGHLVPARMTVRGTDGAPAYSIYGRPRRSAPFLTPGPGRYFPERAGNATYPSAPRHTIAPRNWGVQAEQQSPGPAAYTVPSLLGPRVIGKVSAPTCSIYGRRAAGSFFEDLSKTPGPCAYQVVSPGVYKSRAPQFTILARTSLPQDNTRKPGPAAYNVDQHRKPRGWSFGIRHSDYLAPLVTDADN

SEQ ID NO: 40967 - protein, 109 aa, Homo sapiens
MGLGAGPGQTLTRMLPGYALHDPSRPRAPAFTFGARFPTQQTTCGPGPGHLVPARMTVRGTDGAPAYSIYGRPRRSAPFLTPGPGQDPRAPGHPNAELPPGRPTWEPPT

SEQ ID NO: 40968 - protein, 468 aa, Homo sapiens
MAKRNAEKELTDRNWDQEDEAEEVGTFSMASEEVLKNRAIKKAKRRNVGFESDTGGAFKGFKGLVVPSGGGRFSGFGSGAGGKPLEGLSNGNNITSAPPFASAKAAADPKVAFGSLAANGPTTLVDKVSNPKTNGDSQQPSSSGLASSKACVGNAYHKQLAALNCSVRDWIVKHVNTNPLCDLTPIFKDYEKYLANIEQQHGNSGRNSESESNKVAAETQSPSLFGSTKLQQESTFLFHGNKTEDTPDKKMEVASEKKTDPSSLGATSASFNFGKKVDSSVLGSLSSVPLTGFSFSPGNSSLFGKDTTQSKPVSSPFPTKPLEGQAEGDSGECKGGDEEENDEPPKVVVTEVKEEDAFYSKKCKLFYKKDNEFKEKGIGTLHLKPTANQKTQLLVRADTNLGNILLNVLIPPNMPCTRTGKNNVLIVCVPNPPIDEKNATMPVTMLIRVKTSEDADELHKILLEKKDA

SEQ ID NO: 40969 - protein, 440 aa, Homo sapiens
MASEEVLKNRAIKKAKRRNVGFESDTGGAFKGFKGLVVPSGGGRFSGFGSGAGGKPLEGLSNGNNITSAPPFASAKAAADPKVAFGSLAANGPTTLVDKVSNPKTNGDSQQPSSSGLASSKACVGNAYHKQLAALNCSVRDWIVKHVNTNPLCDLTPIFKDYEKYLANIEQQHGNSGRNSESESNKVAAETQSPSLFGSTKLQQESTFLFHGNKTEDTPDKKMEVASEKKTDPSSLGATSASFNFGKKVDSSVLGSLSSVPLTGFSFSPGNSSLFGKDTTQSKPVSSPFPTKPLEGQAEGDSGECKGGDEEENDEPPKVVVTEVKEEDAFYSKKCKLFYKKDNEFKEKGIGTLHLKPTANQKTQLLVRADTNLGNILLNVLIPPNMPCTRTGKNNVLIVCVPNPPIDEKNATMPVTMLIRVKTSEDADELHKILLEKKDA

SEQ ID NO: 40970 - protein, 312 aa, Homo sapiens
MAWENQTFNSDFLLLGIFNHSPTHTFLFFLVLAIFSVAFMGNSIMVLLIYLDTQLHTPMYFLLSQLSLMDLMLICTTVPKMAFNYLSGSKSISMAGCATQIFFYISLLGSECFLLAVMSYDRYTAICHPLRYTNLMRPKICGLMTAFSWILGSTDGIIDAVATFSFSYCGSREIAHFCCDFPSLLILSCNDTSIFEEVIFICCIVMLVFPVAIIITSYARVILAVIHMGSGEGRRKAFTTCSSHLMVVGMYYGAGLFMCIQPTSHHSPMQDKMVSVFYTIVTPMLNPLIYSLRNKEVTRALMKILGKGKSGD

SEQ ID NO: 40971 - protein, 315 aa, Homo sapiens
MQPESGANGTVIAEFILLGLLEAPGLQPVVFVLFLFAYLVTVRGNLSILAAVLVEPKLHTPMYFFLGNLSVLDVGCISVTVPSMLSRLLSRKRAVPCGACLTQLFFFHLFVGVDCFLLTAMAYDRFLAICRPLTYSTRMSQTVQRMLVAASWACAFTNALTHTVAMSTLNFCGPNVINHFYCDLPQLFQLSCSSTQLNELLLFAVGFIMAGTPMALIVISYIHVAAAVLRIRSVEGRKKAFSTCGSHLTVVAIFYGSGIFNYMRLGSTKLSDKDKAVGIFNTVINPMLNPIIYSFRNPDVQSAIWRMLTGRRSLA

SEQ ID NO: 40972 - protein, 441 aa, Homo sapiens
MIIPSLEELDSLKYSDLQNLAKSLGLRANLRATKLLKALKGYIKHEARKGNENQDESQTSASSCDETEIQISNQEEAERQPLGHVTKTRRRCKTVRVDPDSQQNHSEIKISNPTEFQNHEKQESQDLRATAKVPSPPDEHQEAENAVSSGNRDSKVPSEGKKSLYTDESSKPGKNKRTAITTPNFKKLHEAHFKEMESIDQYIERKKKHFEEHNSMNELKQQPINKGGVRTPVPPRGRLSVASTPISQRRSQGRSCGPASQSTLGLKGSLKRSAISAAKTGVRFSAATKDNEHKRSLTKTPARKSAHVTVSGGTPKGEAVLGTHKLKTITGNSAAVITPFKLTTEATQTPVSNKKPVFDLKASLSRPLNYEPHKGKLKPWGQSKENNYLNQHVNRINFYKKTYKQPHLQTKEEQRKKREQERKEKKAKVLGMRRGLILAED

SEQ ID NO: 40973 - protein, 440 aa, Homo sapiens
MIIPSLEELDSLKYSDLQNLAKSLGLRANLRATKLLKALKGYIKHEARKGNENQDESQTSASSCDETEIQISNQEEAERQPLGHVTKTRRRCKTVRVDPDSQQNHSEIKISNPTEFQNHEKQESQDLRATAKVPSPPDEHQEAENAVSSGNRDSKVPSEGKKSLYTDESSKPGKNKRTAITTPNFKKLHEAHFKEMESIDQYIERKKKHFEEHNSMNELKQPINKGGVRTPVPPRGRLSVASTPISQRRSQGRSCGPASQSTLGLKGSLKRSAISAAKTGVRFSAATKDNEHKRSLTKTPARKSAHVTVSGGTPKGEAVLGTHKLKTITGNSAAVITPFKLTTEATQTPVSNKKPVFDLKASLSRPLNYEPHKGKLKPWGQSKENNYLNQHVNRINFYKKTYKQPHLQTKEEQRKKREQERKEKKAKVLGMRRGLILAED

SEQ ID NO: 40974 - protein, 439 aa, Homo sapiens
MIIPSLEELDSLKYSDLQNLAKSLGLRANLRATKLLKALKGYIKHEARKGNENQDESQTSASSCDETEIQISNQEEAERQPLGHVTKTRRRCKTVRVDPDSQNHSEIKISNPTEFQNHEKQESQDLRATAKVPSPPDEHQEAENAVSSGNRDSKVPSEGKKSLYTDESSKPGKNKRTAITTPNFKKLHEAHFKEMESIDQYIERKKKHFEEHNSMNELKQPINKGGVRTPVPPRGRLSVASTPISQRRSQGRSCGPASQSTLGLKGSLKRSAISAAKTGVRFSAATKDNEHKRSLTKTPARKSAHVTVSGGTPKGEAVLGTHKLKTITGNSAAVITPFKLTTEATQTPVSNKKPVFDLKASLSRPLNYEPHKGKLKPWGQSKENNYLNQHVNRINFYKKTYKQPHLQTKEEQRKKREQERKEKKAKVLGMRRGLILAED

SEQ ID NO: 40975 - protein, 425 aa, Homo sapiens
MIIPSLEELDSLKYSDLQNLAKSLGLRANLRATKLLKALKGYIKHEARKGNENQDESQTSASSCDETEIQISNQEEAERQPLGHVTKTRRRCKTVRVDPDSQNHEKQESQDLRATAKVPSPPDEHQEAENAVSSGNRDSKVPSEGKKSLYTDESSKPGKNKRTAITTPNFKKLHEAHFKEMESIDQYIERKKKHFEEHNSMNELKQPINKGGVRTPVPPRGRLSVASTPISQRRSQGRSCGPASQSTLGLKGSLKRSAISAAKTGVRFSAATKDNEHKRSLTKTPARKSAHVTVSGGTPKGEAVLGTHKLKTITGNSAAVITPFKLTTEATQTPVSNKKPVFDLKASLSRPLNYEPHKGKLKPWGQSKENNYLNQHVNRINFYKKTYKQPHLQTKEEQRKKREQERKEKKAKVLGMRRGLILAED

SEQ ID NO: 40976 - protein, 440 aa, Homo sapiens
MIIPSLEELDSLKYSDLQNLAKSLGLRANLRATKLLKALKGYIKHEARKGNENQDESQTSASSCDETEIQISNQEEAERQPLGHVTKTRRRCKTVRVDPDSQNHSEIKISNPTEFQNHEKQESQDLRATAKVPSPPDEHQEAENAVSSGNRDSKVPSEGKKSLYTDESSKPGKNKRTAITTPNFKKLHEAHFKEMESIDQYIERKKKHFEEHNSMNELKQQPINKGGVRTPVPPRGRLSVASTPISQRRSQGRSCGPASQSTLGLKGSLKRSAISAAKTGVRFSAATKDNEHKRSLTKTPARKSAHVTVSGGTPKGEAVLGTHKLKTITGNSAAVITPFKLTTEATQTPVSNKKPVFDLKASLSRPLNYEPHKGKLKPWGQSKENNYLNQHVNRINFYKKTYKQPHLQTKEEQRKKREQERKEKKAKVLGMRRGLILAED

SEQ ID NO: 40977 - protein, 426 aa, Homo sapiens
MIIPSLEELDSLKYSDLQNLAKSLGLRANLRATKLLKALKGYIKHEARKGNENQDESQTSASSCDETEIQISNQEEAERQPLGHVTKTRRRCKTVRVDPDSQNHEKQESQDLRATAKVPSPPDEHQEAENAVSSGNRDSKVPSEGKKSLYTDESSKPGKNKRTAITTPNFKKLHEAHFKEMESIDQYIERKKKHFEEHNSMNELKQQPINKGGVRTPVPPRGRLSVASTPISQRRSQGRSCGPASQSTLGLKGSLKRSAISAAKTGVRFSAATKDNEHKRSLTKTPARKSAHVTVSGGTPKGEAVLGTHKLKTITGNSAAVITPFKLTTEATQTPVSNKKPVFDLKASLSRPLNYEPHKGKLKPWGQSKENNYLNQHVNRINFYKKTYKQPHLQTKEEQRKKREQERKEKKAKVLGMRRGLILAED

SEQ ID NO: 40978 - protein, 378 aa, Homo sapiens
MIIPSLEELDSLKYSDLQNLAKSLGLRANLRDESQTSASSCDETEIQISNQEEAERQPLGHVTKTRRRCKTVRVDPDSQQNHSEIKISNPTEFQNHEKQESQDLRATAKVPSPPDEHQEAENAVSSGNRDSKVPSEGKKSLYTDESSKPGKNKRTAITTPNFKKLHEAHFKEMESIDQYIERKKKHFEEHNSMNELKQPINKGGVRTPVPPRGRLSVASTPISQRRSQGRSCGPASQSTLGLKGSLKRSAISAAKTGVRFSAATKDNEHKRSLTKTPARKSAHVTVSGGTPKGEAVLGTHKLKTITGNSAAGKLKPWGQSKENNYLNQHVNRINFYKKTYKQPHLQTKEEQRKKREQERKEKKAKVLGMRRGLILAED

SEQ ID NO: 40979 - protein, 316 aa, Homo sapiens
MKIANNTVVTEFILLGLTQSQDIQLLVFVLILIFYLIILPGNFLIIFTIRSDPGLTAPLYLFLGNLAFLDASYSFIVAPRMLVDFLSEKKVISYRGCITQLFFLHFLGGGEGLLLVVMAFDRYIAICRPLHCSTVMNPRACYAMMLALWLGGFVHSIIQVVLILRLPFCGPNQLDNFFCDVRQVIKLACTDMFVVELLMVFNSGLMTLLCFLGLLASYAVILCHVRRAASEGKNKAMSTCTTRVIIILLMFGPAIFIYMCPFRALPADKMVSLFHTVIFPLMNPMIYTLRNQEVKTSMKRLLSRHVVCQVDFIIRN

SEQ ID NO: 40980 - protein, 312 aa, Homo sapiens
MENYNQTSTDFILLGLFPQSRIGLFVFTLIFLIFLMALIGNLSMILLIFLDIHLHTPMYFLLSQLSLIDLNYISTIVPKMVYDFLYGNKSISFTGCGIQSFFFLTLAVAEGLLLTSMAYDRYVAICFPLHYPIRISKRVCVMMITGSWMISSINSCAHTVYALCIPYCKSRAINHFFCDVPAMLTLACTDTWVYESTVFLSSTIFLVLPFTGIACSYGRVLLAVYRMHSAEGRKKAYSTCSTHLTVVSFYYAPFAYTYVRPRSLRSPTEDKILAVFYTILTPMLNPIIYSLRNKEVMGALTQVIQKIFSVKM

SEQ ID NO: 40981 - protein, 314 aa, Homo sapiens
MNNSQISTVTQFVLLGFPGPWKIQIIFFSMILLVYIFTLTGNMAIICAVRWDHRLHTPMYVLLANFSFLEIWYVTCTVPNMLVNFFSKTKTISFSGCFTQFHFFFSLGTTECFFLCVMAYDRYLAICHPLHYPSIMTGQLCGILVSLCWLIGFLGHSISIFFIFQLPFCGPNIIDHFLCDVDPLMALSSAPTHIIGHVFHSVSSLFINLTMVYILGSYTLVLRTVLQVPSSAGWQKAISTCGSHLVVVSLFYGAIMLMYVSPTPGNSVAMHKLITLIYSVVTPVLNPLIYSLRNKDMKYALHHVFCGMRIIQRS

SEQ ID NO: 40982 - protein, 318 aa, Homo sapiens
MIQPMASPSNSSTVPVSEFLLICFPNFQSWQHWLSLPLSLLFLLAMGANTTLLITIQLEASLHQPLYYLLSLLSLLDIVLCLTVIPKVLAIFWYDLRSISFPACFLQMFIMNSFLPMESCTFMVMAYDRYVAICHPLRYPSIITNQFVAKASVFIVVRNALLTAPIPILTSLLHYCGENVIENCICANLSVSRLSCDNFTLNRIYQFVAGWTLLGSDLFLIFLSYTFILRAVLRFKAEGAAVKALSTCGSHFILILFFSTILLVVVLTNVARKKVPMDILILLNVLHHLIPPALNPIVYGVRTKEIKQGIQKLLQRGR

SEQ ID NO: 40983 - protein, 310 aa, Homo sapiens
MDRLLRLGGGMPGLGQGPPTDAPAVDTAEQVYISSLALLKMLKHGRAGVPMEVMGLMLGEFVDDYTVRVIDVFAMPQSGTGVSVEAVDPVFQAKMLDMLKQTGRPEMVVGWYHSHPGFGCWLSGVDINTQQSFEALSERAVAVVVDPIQSVKGKVVIDAFRLINANMMVLGHEPRQTTSNLGHLNKPSIQALIHGLNRHYYSITINYRKNELEQKMLLNLHKKSWMEGLTLQDYSEHCKHNESVVKEMLELAKNYNKAVEEEDKMTPEQLAIKNVGKQDPKRHLEEHVDVLMTSNIVQCLAAMLDTVVFK

SEQ ID NO: 40984 - protein, 1337 aa, Homo sapiens
MKPAAREARLPPRSPGLRWALPLLLLLLRLGQILCAGGTPSPIPDPSVATVATGENGITQISSTAESFHKQNGTGTPQVETNTSEDGESSGANDSLRTPEQGSNGTDGASQKTPSSTGPSPVFDIKAVSISPTNVILTWKSNDTAASEYKYVVKHKMENEKTITVVHQPWCNITGLRPATSYVFSITPGIGNETWGDPRVIKVITEPIPVSDLRVALTGVRKAALSWSNGNGTASCRVLLESIGSHEELTQDSRLQVNISGLKPGVQYNINPYLLQSNKTKGDPLGTEGGLDASNTERSRAGSPTAPVHDESLVGPVDPSSGQQSRDTEVLLVGLEPGTRYNATVYSQAANGTEGQPQAIEFRTNAIQVFDVTAVNISATSLTLIWKVSDNESSSNYTYKIHVAGETDSSNLNVSEPRAVIPGLRSSTFYNITVCPVLGDIEGTPGFLQVHTPPVPVSDFRVTVVSTTEIGLAWSSHDAESFQMHITQEGAGNSRVEITTNQSIIIGGLFPGTKYCFEIVPKGPNGTEGASRTVCNRTVPSAVFDIHVVYVTTTEMWLDWKSPDGASEYVYHLVIESKHGSNHTSTYDKAITLQGLIPGTLYNITISPEVDHVWGDPNSTAQYTRPSNVSNIDVSTNTTAATLSWQNFDDASPTYSYCLLIEKAGNSSNATQVVTDIGITDATVTELIPGSSYTVEIFAQVGDGIKSLEPGRKSFCTDPASMASFDCEVVPKEPALVLKWTCPPGANAGFELEVSSGAWNNATHLESCSSENGTEYRTEVTYLNFSTSYNISITTVSCGKMAAPTRNTCTTGITDPPPPDGSPNITSVSHNSVKVKFSGFEASHGPIKAYAVILTTGEAGHPSADVLKYTYEDFKKGASDTYVTYLIRTEEKGRSQSLSEVLKYEIDVGNESTTLGYYNGKLEPLGSYRACVAGFTNITFHPQNKGLIDGAESYVSFSRYSDAVSLPQDPGVICGAVFGCIFGALVIVTVGGFIFWRKKRKDAKNNEVSFSQIKPKKSKLIRVENFEAYFKKQQADSNCGFAEEYEDLKLVGISQPKYAAELAENRGKNRYNNVLPYDISRVKLSVQTHSTDDYINANYMPGYHSKKDFIATQGPLPNTLKDFWRMVWEKNVYAIIMLTKCVEQGRTKCEEYWPSKQAQDYGDITVAMTSEIVLPEWTIRDFTVKNIQTSESHPLRQFHFTSWPDHGVPDTTDLLINFRYLVRDYMKQSPPESPILVHCSAGVGRTGTFIAIDRLIYQIENENTVDVYGIVYDLRMHRPLMVQTEDQYVFLNQCVLDIVRSQKDSKVDLIYQNTTAMTIYENLAPVTTFGKTNGYIA

SEQ ID NO: 40985 - protein, 539 aa, Homo sapiens
MKPAAREARLPPRSPGLRWALPLLLLLLRLGQILCAGGTPSPIPDPSVATVATGENGITQISSTAESFHKQNGTGTPQVETNTSEDGESSGANDSLRTPEQGSNGTDGASQKTPSSTGPSPVFDIKAVSISPTNVILTWKSNDTAASEYKYVVKHKMENEKTITVVHQPWCNITGLRPATSYVFSITPGIGNETWGDPRVIKVITEPIPVSDLRVALTGVRKAALSWSNGNGTASCRVLLESIGSHEELTQDSRLQVNISGLKPGVQYNINPYLLQSNKTKGDPLGTEGGLDASNTERSRAGSPTAPVHDESLVGPVDPSSGQQSRDTEVLLVGLEPGTRYNATVYSQAANGTEGQPQAIEFRTNAIQVFDVTAVNISATSLTLIWKVSDNESSSNYTYKIHVAGETDSSNLNVSEPRAVIPGLRSSTFYNITVCPVLGDIEGTPGFLQVHTPPVPVSDFRVTVVSTTEIGLAWSSHDAESFQMHITQEGAGNSRVEITTNQSIIIGGLFPGTKYCFEIVPKGPNGTEGASRTVCNRTG

SEQ ID NO: 40986 - protein, 1392 aa, Homo sapiens
MSPGKPGAGGAGTRRTGWRRRRRRRRQEAATTVPGLGRTAGPDSRVRGTFQGARGMKPAAREARLPPRSPGLRWALPLLLLLLRLGQILCAGGTPSPIPDPSVATVATGENGITQISSTAESFHKQNGTGTPQVETNTSEDGESSGANDSLRTPEQGSNGTDGASQKTPSSTGPSPVFDIKAVSISPTNVILTWKSNDTAASEYKYVVKHKMENEKTITVVHQPWCNITGLRPATSYVFSITPGIGNETWGDPRVIKVITEPIPVSDLRVALTGVRKAALSWSNGNGTASCRVLLESIGSHEELTQDSRLQVNISGLKPGVQYNINPYLLQSNKTKGDPLGTEGGLDASNTERSRAGSPTAPVHDESLVGPVDPSSGQQSRDTEVLLVGLEPGTRYNATVYSQAANGTEGQPQAIEFRTNAIQVFDVTAVNISATSLTLIWKVSDNESSSNYTYKIHVAGETDSSNLNVSEPRAVIPGLRSSTFYNITVCPVLGDIEGTPGFLQVHTPPVPVSDFRVTVVSTTEIGLAWSSHDAESFQMHITQEGAGNSRVEITTNQSIIIGGLFPGTKYCFEIVPKGPNGTEGASRTVCNRTVPSAVFDIHVVYVTTTEMWLDWKSPDGASEYVYHLVIESKHGSNHTSTYDKAITLQGLIPGTLYNITISPEVDHVWGDPNSTAQYTRPSNVSNIDVSTNTTAATLSWQNFDDASPTYSYCLLIEKAGNSSNATQVVTDIGITDATVTELIPGSSYTVEIFAQVGDGIKSLEPGRKSFCTDPASMASFDCEVVPKEPALVLKWTCPPGANAGFELEVSSGAWNNATHLESCSSENGTEYRTEVTYLNFSTSYNISITTVSCGKMAAPTRNTCTTGITDPPPPDGSPNITSVSHNSVKVKFSGFEASHGPIKAYAVILTTGEAGHPSADVLKYTYEDFKKGASDTYVTYLIRTEEKGRSQSLSEVLKYEIDVGNESTTLGYYNGKLEPLGSYRACVAGFTNITFHPQNKGLIDGAESYVSFSRYSDAVSLPQDPGVICGAVFGCIFGALVIVTVGGFIFWRKKRKDAKNNEVSFSQIKPKKSKLIRVENFEAYFKKQQADSNCGFAEEYEDLKLVGISQPKYAAELAENRGKNRYNNVLPYDISRVKLSVQTHSTDDYINANYMPGYHSKKDFIATQGPLPNTLKDFWRMVWEKNVYAIIMLTKCVEQGRTKCEEYWPSKQAQDYGDITVAMTSEIVLPEWTIRDFTVKNIQTSESHPLRQFHFTSWPDHGVPDTTDLLINFRYLVRDYMKQSPPESPILVHCSAGVGRTGTFIAIDRLIYQIENENTVDVYGIVYDLRMHRPLMVQTEDQYVFLNQCVLDIVRSQKDSKVDLIYQNTTAMTIYENLAPVTTFGKTNGYIA

SEQ ID NO: 40987 - protein, 1056 aa, Homo sapiens
MMGDYRLPDHPQPMEILNLYLGDSLEPHPGECPRETCSHEDPPEPFEEQTWATDPPEPTRQNVPPWGSGVELTHLGSWVHQDGLEPCQEQTRATDPPESTRQDAPPWGSGVELTHLGSPSAQREHRQNTASPGSPVNSHLPGSPKQNRSTSTQVVFWAGILQAQMCVLDLEEELEKTEGLKAGLKCCLPTPPVDLPGDTGLHSSPPENEDSGEDSSEPEGEGQAWLREGTPDSSPQWGAEEESMFFSNPLFLASPCSENSASGECFSWGASDSHAGVRTGPESPATLEPPLPEDTVLWELESEPDLGDGAAISGHCTPPFPVPIYKPHSICWASVAAAEGAPAAPPGHGESEGDRLGPAPSAAPCVDEALTWESGCVGSDLGPAAHPVQPWASLSPEGWQRGGPFWPQVTLNSQDRDEREGGHPQESLPCTLAPCPWRSPASSPEPSSPESESRGPGPRPSPASSQEGSPQLQHHSSGILPKWTLDASQSSLLETDGEQPSSLKKKEAGEAPKPGEEVKSEGTARPAETGDVQPDIHLTSAEHENLRTPMNSSWLPGSPMPQAQSPEEGQRPPAGDKLANGVRNNKVAWNLASRLYRLEGFRKSEVAAYLQKNNDFSRAVAEEYLSFFQFGGQSLDRALRSFLQALVLSGETQERERILYQFSRRFHHCNPGIFPSVDSVHTLTCAIMLLNTDLHGQNIGKSMSCQEFITNLNGLRDGGNFPKELLKALYWSIRSEKLEWAVDEEDTARPEKAQPSLPAGKMSKPFLQLAQDPTVPTYKQGILARKMHQDADGKKTPWGKRGWKMFHTLLRGMVLYFLKQGEDHCLEGESLVGQMVDEPVGVHHSLATPATHYTKKPHVFQLRTADWRLYLFQAPTAKEMSSWIARINLAAATHSAPPFPAAVGSQRRFVRPILPVGPAQSSLEEQHRSHENCLDAAADDLLDLQRNLPERRGRGRELEEHRLRKEYLEYEKTRYETYVQLLVARLHCPSDALDLWEEQLGREAGGTREPKLSLKKSHSSPSLHQDEAPTTAKVKRNISERRTYRKIIPKRNRNQL

SEQ ID NO: 40988 - protein, 1027 aa, Homo sapiens
MMGDYRLPDHPQPMEILNLYLGDSLEPHPGECPRETCSHEDPPEPFEEQTWATDPPEPTRQNVPPWGSGVELTHLGSWVHQDGLEPCQEQTRATDPPESTRQDAPPWGSGVELTHLGSPSAQREHRQNTASPGSPVNSHLPGSPKQNRSTSTQVVFWAGILQAQMCVLDLEEELEKTEGLKAGLKCCLPTPPVDLPGDTGLHSSPPENEDSGEDSSEPEGEGQAWLREGTPDSSPQWGAEEESMFFSNPLFLASPCSENSASGECFSWGASDSHAGVRTGPESPATLEPPLPEDTVLWELESEPDLGDGAAISGHCTPPFPVPIYKPHSICWASVAAAEGAPAAPPGHGESEGDRLGPAPSAAPCVDEALTWESGCVGSDLGPAAHPVQPWASLSPEGWQRGGPFWPQVTLNSQDREPSSPESESRGPGPRPSPASSQEGSPQLQHHSSGILPKWTLDASQSSLLETDGEQPSSLKKKEAGEAPKPGEEVKSEGTARPAETGDVQPDIHLTSAEHENLRTPMNSSWLPGSPMPQAQSPEEGQRPPAGDKLANGVRNNKVAWNLASRLYRLEGFRKSEVAAYLQKNNDFSRAVAEEYLSFFQFGGQSLDRALRSFLQALVLSGETQERERILYQFSRRFHHCNPGIFPSVDSVHTLTCAIMLLNTDLHGQNIGKSMSCQEFITNLNGLRDGGNFPKELLKALYWSIRSEKLEWAVDEEDTARPEKAQPSLPAGKMSKPFLQLAQDPTVPTYKQGILARKMHQDADGKKTPWGKRGWKMFHTLLRGMVLYFLKGEDHCLEGESLVGQMVDEPVGVHHSLATPATHYTKKPHVFQLRTADWRLYLFQAPTAKEMSSWIARINLAAATHSAPPFPAAVGSQRRFVRPILPVGPAQSSLEEQHRSHENCLDAAADDLLDLQRNLPERRGRGRELEEHRLRKEYLEYEKTRYETYVQLLVARLHCPSDALDLWEEQLGREAGGTREPKLSLKKSHSSPSLHQDEAPTTAKVKRNISERRTYRKIIPKRNRNQL

SEQ ID NO: 40989 - protein, 881 aa, Homo sapiens
MFWKFDLHTSSHLDTLLEREDLSLPELLDEEDVLQECKVVNRKLLDFLLQPPHLQAMVAWVTQEPPDSGEERLRYKYPSVACEILTSDVPQINDALGADESLLNRLYGFLQSTGSLNPLLASFFSKVMGILINRKTDQLVSFLRKKDDFVDLLLQHIGTSAIMDLLLRLLTCVERPQLRQDVVNWLNEEKIVQRLIEQIHPSKDENQHSNASQSLCDIIRLSREQMIQVQDSPEPDQLLATLEKQETIEQLLSNMFEGEQSQSVIVSGIQVLLTLLEPRRPRSESVTVNSFFSSVDGQLELLAQGALESTVSSVGALHALRPRLSCFHQLLLEPPKLEPLQMTWGMLAPPLGNTRLHVVKLLASALSANDAALTHELLALDVPNTMLDLFFHYVFNNFLHAQVEGCVSTMLSLGPPPDSSPETPIQNPVVKHLLQQCRLVERILTSWEENDRVQCAGGPRKGYMGHLTRVAGALVQNTEKGPNAEQLRQLLKELPSEQQEQWEAFVSGPLAETNKKNMVDLVNTHHLHSSSDDEDDRLKEFNFPEEAVLQQAFMDFQMQRMTSAFIDHFGFNDEEFGEQEESVNAPFDKTANITFSLNADDENPNANLLEICYKDRIQQFDDDEEEEDEEEAQGSGESDGEDGAWQGSQLARGARLGQPPGVRSGGSTDSEDEEEEDEEEEEDEEGIGCAARGGATPLSYPSPGPQPPGPSWTATFDPVPTDAPTSPRVSGEEELHTGPPAPQGPLSVPQGLPTQSLASPPARDALQLRSQDPTPPSAPQEATEGSKVTEPSAPCQALVSIGDLQATFHGIRSAPSSSDSATRDPSTSVPASGAHQPPQTTEGEKSPEPLGLPQSQSAQALTPPPIPNGSAPEGPASPGSQ

SEQ ID NO: 40990 - protein, 487 aa, Homo sapiens
MRRGERRDAGGPRPESPVPAGRASLEEPPDGPSAGQATGPGEGRRSTESEVYDDGTNTFFWRAHTLTVLFILTCTLGYVTLLEETPQDTAYNTKRGIVASILVFLCFGVTQAKDGPFSRPHPAYWRFWLCVSVVYELFLIFILFQTVQDGRQFLKYVDPKLGVPLPERDYGGNCLIYDPDNETDPFHNIWDKLDGFVPAHFLGWYLKTLMIRDWWMCMIISVMFEFLEYSLEHQLPNFSECWWDHWIMDVLVCNGLGIYCGMKTLEWLSLKTYKWQGLWNIPTYKGKMKRIAFQFTPYSWVRFEWKPASSLRRWLAVCGIILVFLLAELNTFYLKFVLWMPPEHYLVLLRLVFFVNVGGVAMREIYDFMDDPKPHKKLGPQAWLVAAITATELLIVVKYDPHTLTLSLPFYISQCWTLGSVLALTWTVWRFFLRDITLRYKETRWQKWQNKDDQGSTVGNGDQHPLGLDEDLLGPGVAEGEGAPTPN

SEQ ID NO: 40991 - protein, 247 aa, Homo sapiens
MDAFTRFTNQTQGRDRLFRATQYTCMLLRYLLEPKAGKEKVVMKLKKLESSVSTGRKWFRLGNVVHAIQATEQSIHATDLVPRLCLTLANLNRVIYFICDTILWVRSVGLTSGINKEKWRTRAAHHYYYSLLLSLVRDLYEISLQMKRVTCDRAKKEKSASQDPLWFSVAEEETEWLQSFLLLLFRSLKQHPPLLLDTVKNLCDILNPLDQLGIYKSNPGIIGLGGLVSSIAGMITVAYPQMKLKTR

SEQ ID NO: 40992 - protein, 216 aa, Homo sapiens
MDAFTRFTNQTQGRDRLFRATQYTCMLLRYLLEPKAGKEKVVMKLKKLESSVSTGRKSNLNRVIYFICDTILWVRSVGLTSGINKEKWRTRAAHHYYYSLLLSLVRDLYEISLQMKRVTCDRAKKEKSASQDPLWFSVAEEETEWLQSFLLLLFRSLKQHPPLLLDTVKNLCDILNPLDQLGIYKSNPGIIGLGGLVSSIAGMITVAYPQMKLKTR

SEQ ID NO: 40993 - protein, 412 aa, Homo sapiens
MGQDQTKQQIEKGLQLYQSNQTEKALQVWTKVLEKSSDLMGRFRVLGCLVTAHSEMGRYKEMLKFAVVQIDTARELEDADFLLESYLNLARSNEKLCEFHKTISYCKTCLGLPGTRAGAQLGGQVSLSMGNAFLGLSVFQKALESFEKALRYAHNNDDAMLECRVCCSLGSFYAQVKDYEKALFFPCKAAELVNNYGKGWSLKYRAMSQYHMAVAYRLLGRLGSAMECCEESMKIALQHGDRPLQALCLLCFADIHRSRGDLETAFPRYDSAMSIMTEIGNRLGQVQALLGVAKCWVARKALDKALDAIERAQDLAEEVGNKLSQLKLHCLSESIYRSKGLQRELRAHVVRFHECVEETELYCGLCGESIGEKNSRLQALPCSHIFHLRCLQNNGTRSCPNCRRSSMKPGFV

SEQ ID NO: 40994 - protein, 353 aa, Homo sapiens
MGQDQTKQQIEKGLQLYQSNQTEKALQVWTKVLEKSSDLMGRFRVLGCLVTAHSEMGRYKEMLKFAVVQIDTARELEDADFLLESYLNLARSNEKLCEFHKTISYCKTCLGLPGTRAGAQLGGQVSLSMGNAFLGLSVFQKALESFEKALRYAHNNDDAMLECRVCCSLGSFYAQVKDYEKALFFPCKAAELVNNYGKGWSLKYRAMSQYHMAVAYRLLGRLGSAMECCEESMKIALQHGDRPLQALCLLCFADIHRSRGDLELSQLKLHCLSESIYRSKGLQRELRAHVVRFHECVEETELYCGLCGESIGEKNSRLQALPCSHIFHLRCLQNNGTRSCPNCRRSSMKPGFV

SEQ ID NO: 40995 - protein, 357 aa, Homo sapiens
MASVLNVKESKAPERTVVVAGLPVDLFSDQLLAVLVKSHFQDIKNEGGDVEDVIYPTRTKGVAYVIFKEKKVAENVIRQKKHWLARKTRHAELTVSLRVSHFGDKIFSSVNAILDLSVFGKEVTLETLVKDLKKKIPSLSFSPLKPNGRISVEGSFLAVKRLRESLLARACSLLEKDRNFTSEERKWNRQNPQRNLQRSNNSLASVRTLVPETARSGEMLVLDTDVFLYLKHKCGSYESTLKKFHILSQEKVDGEITTICLKSIQVGSQPNNAKHVKELIEEWSHALYLKLRKETFILEGKENREKRMIKRACEQLSSRYLEVLINLYRTHIDIIGSSSDTYLFKKGVMKLIGQKVS

SEQ ID NO: 40996 - protein, 391 aa, Homo sapiens
MVEADRPGKLFIGGLNTETNEKALEAVFGKYGRIVEVLLMKDRETNKSRGFAFVTFESPADAKDAARDMNGKSLDGKAIKVEQATKPSFESGRRGPPPPPRSRGPPRGLRGGRGGSGGTRGPPSRGGHMDDGGYSMNFNMSSSRGPLPVKRGPPPRSGGPPPKRSAPSGPVRSSSGMGGRAPVSRGRDSYGGPPRREPLPSRRDVYLSPRDDGYSTKDSYSSRDYPSSRDTRDYAPPPRDYTYRDYGHSSSRDDYPSRGYSDRDGYGRDRDYSDHPSGGSYRDSYESYGNSRSAPPTRGPPPSYGGSSRYDDYSSSRDGYGGSRDSYSSSRSDLYSSGRDRVGRQERGLPPSMERGYPPPRDSYSSSSRGAPRGGGRGGSRSDRGGGRSRY

SEQ ID NO: 40997 - protein, 378 aa, Homo sapiens
MVEADRPGKLFIGGLNTETNEKALEAVFGKYGRIVEVLLMKDRESPADAKDAARDMNGKSLDGKAIKVEQATKPSFESGRRGPPPPPRSRGPPRGLRGGRGGSGGTRGPPSRGGHMDDGGYSMNFNMSSSRGPLPVKRGPPPRSGGPPPKRSAPSGPVRSSSGMGGRAPVSRGRDSYGGPPRREPLPSRRDVYLSPRDDGYSTKDSYSSRDYPSSRDTRDYAPPPRDYTYRDYGHSSSRDDYPSRGYSDRDGYGRDRDYSDHPSGGSYRDSYESYGNSRSAPPTRGPPPSYGGSSRYDDYSSSRDGYGGSRDSYSSSRSDLYSSGRDRVGRQERGLPPSMERGYPPPRDSYSSSSRGAPRGGGRGGSRSDRGGGRSRY

SEQ ID NO: 40998 - protein, 196 aa, Homo sapiens
MVEADRPGKLFIGGLNTETNEKALEAVFGKYGRIVEVLLMKDRETNKSRGFAFVTFESPADAKDAARDMNGKLLYHVEEIVMEVHLEGNRCPLVEMFICPQEMMGILLKTAIQAEITQVLVILEIMHHHHEIILTVIMVIPVHVMTIHQEDIAIEMDMVVIVTIQIIQVEVPTEIHMRVMVGDFAHYGRGVLIDSQ

SEQ ID NO: 40999 - protein, 208 aa, Homo sapiens [sequence omitted]

SEQ ID NO: 41000 - protein, 84 aa, Homo sapiens
MPLAKDLLHPSPEEEKRKHKKKRLVQSPNSYFMDVKCPGCYKITTVFSHAQTVVLCVGCSTVLCQPTGGKARLTEGCSFRRKQH

SEQ ID NO: 41001 - protein, 115 aa, Homo sapiens [sequence omitted]

SEQ ID NO: 41002 - protein, 293 aa, Homo sapiens [sequence omitted]

SEQ ID NO: 41003 - protein, 290 aa, Homo sapiens
MSNYVNDMWPGSPQEKDSPSTSRSGGSSRLSSRSRSRSFSRSSRSHSRVSSRFSSRSRRSKSRSRSRRRHQRKYRRYSRSYSRSRSRSRSRRYRERRYGFTRRYYRSPSRYRSRSRSRSRSRGRSYCGRAYAIARGQRYYGFGRTVYPEEHSRWRDRSRTRSRSRTPFRLSEKDRMELLEIAKTNAAKALGTTNIDLPASLRTVPSAKETSRGIGVSSNGAKPELSEKVTEDGTRNPNEKPTQQRSIAFSSNNSVAKPIQKSAKAATEEASSRSPKIDQKKSPYGLWIPI

SEQ ID NO: 41004 - protein, 242 aa, Homo sapiens
MSNYVNDMWPGSPQEKDSPSTSRSGGSSRLSSRSRSRSFSRSSRSHSRVSSRFSSRSRRSKSRSRSRRRHQRKYRRYSRSYSRSRSRSRSRRYRERRYGFTRRYYRSPSRYRSRSRSRSRSRGRSYCGRAYAIARGQRYYGFGRTVYPEEHSRWRDRSRTRSRSRTPFRLSEKDRMELLEIAKTNAAKALGTTNIDLPASLRTVPSAKETSRGIGVSSNGAKPEVSILGLSEQNFQKANCQI

SEQ ID NO: 41005 - protein, 226 aa, Homo sapiens
MSNYVNDMWPGSPQEKDSPSTSRSGGSSRLSSRSRSRSFSRSSRSHSRVSSRFSSRSRRSKSRSRSRRRHQRKYRRYSRSYSRSRSRSRSRRYRERRYGFTRRYYRSPSRYRSRSRSRSRSRGRSYCGRAYAIARGQRYYGFGRTVYPEEHSRWRDRSRTRSRSRTPFRLSEKDRMELLEIAKTNAAKALGTTNIDLPASLRTVPSAKETSRGIGVSSNGAKPEKS

SEQ ID NO: 41006 - protein, 250 aa, Homo sapiens
MGSQHSAAARPSSCRRKQEDDRDGLLAEREQEEAIAQFPYVEFTGRDSITCLTCQGTGYIPTEQVNELVALIPHSDQRLRPQRTKQYVLLSILLCLLASGLVVFFLFPHSVLVDDDGIKVVKVTFNKQDSLVILTIMATLKIRNSNFYTVAVTSLSSQIQYMNTVVSTYVTTNVSLIPPRSEQLVNFTGKAEMGGPFSYVYFFCTVPEILVHNIVIFMRTSVKISYIGLMTQSSLETHHYVDCGGNSTAI

SEQ ID NO: 41007 - protein, 231 aa, Homo sapiens
MGSQHSAAARPSSCRRKQEDDRDGLLAEREQEEAIAQFPYVEFTGRDSITCLTCQGTGYIPTEQVNELVALIPHSDQRLRPQRTKQYVLLSILLCLLASGLVVFFLFPHSVLVDDDGIKVVKVTFNKQDSLVILTIMATLKIRNSNFYTVAVTSLSSQIQYMNTVVNFTGKAEMGGPFSYVYFFCTVPEILVHNIVIFMRTSVKISYIGLMTQSSLETHHYVDCGGNSTAI

SEQ ID NO: 41008 - protein, 686 aa, Homo sapiens
MRLPDLRPWTSLLLVDAALLWLLQGPLGTLLPQGLPGLWLEGTLRLGGLWGLLKLRGLLGFVGTLLLPLCLATPLTVSLRALVAGASRAPPARVASAPWSWLLVGYGAAGLSWSLWAVLSPPGAQEKEQDQVNNKVLMWRLLKLSRPDLPLLVAAFFFLVLAVLGETLIPHYSGRVIDILGGDFDPHAFASAIFFMCLFSFGSSLSAGCRGGCFTYTMSRINLRIREQLFSSLLRQDLGFFQETKTGELNSRLSSDTTLMSNWLPLNANVLLRSLVKVVGLYGFMLSISPRLTLLSLLHMPFTIAAEKVYNTRHQEVLREIQDAVARAGQVVREAVGGLQTVRSFGAEEHEVCRYKEALEQCRQLYWRRDLERALYLLVRRVLHLGVQMLMLSCGLQQMQDGELTQGSLLSFMIYQESVGSYVQTLVYIYGDMLSNVGAAEKVFSYMDRQPNLPSPGTLAPTTLQGVVKFQDVSFAYPNRPDRPVLKGLTFTLRPGEVTALVGPNGSGKSTVAALLQNLYQPTGGQVLLDEKPISQYEHCYLHSQVVSVGQEPVLFSGSVRNNIAYGLQSCEDDKVMAAAQAAHADDFIQEMEHGIYTDVGEKGSQLAAGQKQRLAIARALVRDPRVLILDEATSALDVQCEQALQDWNSRGDRTVLVIAHRLQTVQRAHQILVLQEGKLQKLAQL

SEQ ID NO: 41009 - protein, 653 aa, Homo sapiens
MRLPDLRPWTSLLLVDAALLWLLQGPLGTLLPQGLPGLWLEGTLRLGGLWGLLKLRGLLGFVGTLLLPLCLATPLTVSLRALVAGASRAPPARVASAPWSWLLVGYGAAGLSWSLWAVLSPPGAQEKEQDQVNNKVLMWRLLKLSRPDLPLLVAAFFFLVLAVLGETLIPHYSGRVIDILGGDFDPHAFASAIFFMCLFSFGSSLSAGCRGGCFTYTMSRINLRIREQLFSSLLRQDLGFFQETKTGELNSRLSSDTTLMSNWLPLNANVLLRSLVKVVGLYGFMLSISPRLTLLSLLHMPFTIAAEKVYNTRHQEVLREIQDAVARAGQVVREAVGGLQTVRSFGAEEHEVCRYKEALEQCRQLYWRRDLERALYLLVRRVLHLGVQMLMLSCGLQQMQDGELTQGSLLSFMIYQESVGSYVQTLVYIYGDMLSNVGAAEKVFSYMDRQPNLPSPGTLAPTTLQGVVKFQDVSFAYPNRPDRPVLKGLTFTLRPGEVTALVGPNGSGKSTVAALLQNLYQPTGGQVLLDEKPISQYEHCYLHSQVVSVGQEPVLFSGSVRNNIAYGLQSCEDDKVMAAAQAAHADDFIQEMEHGIYTDVGEKGSQLAAGQKQRLAIARALVRDPRVLILDEATSALDVQCEQAKTLWKFMIF

SEQ ID NO: 41010 - protein, 295 aa, Homo sapiens [sequence omitted]

SEQ ID NO: 41011 - protein, 716 aa, Homo sapiens
MEDSTSPKQEKENQEELGETRRPWEGKTAASPQYSEPESSEPLEAKQGPETGRQSRSSRPWSPQSRAKTPLGGPAGPETSSPAPVSPREPSSSPSPLAPARQDLAAPPQSDRTTSVIPEAGTPYPDPLEQSSDKRESTPHHTSQSEGNTFQQSQQPKPHLCGRRDVSYNNAKQKELRFDVFQEEDSNSDYDLQQPAPGGSEVAPSMLEITIQNAKAYLLKTSSNSGFNLYDHLSNMLTKILNERPENAVDIFENISQDVKMAHFSKKFDALQNENELLPTYEIAEKQKALFLQGHLEGVDQELEDEIAENALPNVMESAFYFEQAGVGLGTDETYRIFLALKQLTDTHPIQRCRFWGKILGLEMNYIVAEVEFREGEDEEEVEEEDVAEERDNGESEAHEDEEDELPKSFYKAPQAIPKEESRTGANKYVYFVCNEPGRPWVKLPPVIPAQIVIARKIKKFFTGRLDAPIISYPPFPGNESNYLRAQIARISAGTHVSPLGFYQFGEEEGEEEEEAEGGRNSFEENPDFEGIQVIDLVESLSNWVHHVQHILSQGRCNWFNSIQKNEEEEEEEDEEKDDSDYIEQEVGLPLLTPISEDLEIQNIPPWTTRLSSNLIPQYAIAVLQSNLWPGAYAFSNGKKFENFYIGWGHKYSPDNYTPPVPPPVYQEYPSGPEITEMDDPSVEEEQAFRAAQEAVLLAAENEESEEDEDEEDDYD

SEQ ID NO: 41012 - protein, 469 aa, Homo sapiens
MEDSTSPKQEKENQEELGETRRPWEGKTAASPQYSEPESSEPLEAKQGPETGRQSRSSRPWSPQSRAKTPLGGPAGPETSSPAPVSPREPSSSPSPLAPARQDLAAPPQSDRTTSVIPEAGTPYPDPLEQSSDKRESTPHHTSQSEGNTFQQSQQPKPHLCGRRDVSYNNAKQKELRFDVFQEEDSNSDYDLQQPAPGGSEVAPSMLEITIQNAKAYLLKTSSNSGFNLYDHLSNMLTKILNERPENAVDIFENISQDVKMAHFSKKFDALQNENELLPTYEIAEKQKALFLQGHLEGVDQELEDEIGRCNWFNSIQKNEEEEEEEDEEKDDSDYIEQEVGLPLLTPISEDLEIQNIPPWTTRLSSNLIPQYAIAVLQSNLWPGAYAFSNGKKFENFYIGWGHKYSPDNYTPPVPPPVYQEYPSGPEITEMDDPSVEEEQAFRAAQEAVLLAAENEESEEDEDEEDDYD

SEQ ID NO: 41013 - protein, 600 aa, Homo sapiens
MEDSTSPKQEKENQEELGETRRPWEGKTAASPQYSEPESSEPLEAKQGPETGRQSRSSRPWSPQSRAKTPLGGPAGPETSSPAPVSPREPSSSPSPLAPARQDLAAPPQSDRTTSVIPEAGTPYPDPLEQSSDKRESTPHHTSQSEGNTFQQSQQPKPHLCGRRDVSYNNAKQKELRFDVFQEEDSNSDYDLQQPAPGGSEVAPSMLEITIQNAKAYLLKTSSNSGFNLYDHLSNMLTKILNERPENAVDIFENISQDVKMAHFSKKFDALQNENELLPTYEIAEKQKALFLQGHLEGVDQELEDEIAENALPNVMESAFYFEQAGVGLGTDETYRIFLALKQLTDTHPIQRCRFWGKILGLEMNYIVAEVEFREGEDEEEVEEEDVAEERDNGESEAHEDEEDELPKSFYKAPQAIPKEESRTGANKYVYFVCNEPGRPWVKLPPVIPAQIVIARKIKKFFTGRLDAPIISYPPFPGNESNYLRAQIARISAGTHVSPLGFYQFGEEEGEEEEEAEGGRNSFEENPDFEGIQVIDLVESLSNWVHHVQHILSQRFRIYPPGQHGYPQISFHNMLLQSFNPTFGLEHMPSPMAKSLKIST

SEQ ID NO: 41014 - protein, 277 aa, Homo sapiens
MSKSLKKLVEESREKNQPEVDMSDRGISNMLDVNGLFTLSHITQLVLSHNKLTMVPPNIAELKNLEVLNFFNNQIEELPTQISSLQKLKHLNLGMNRLNTLPRGFGSLPALEVLDLTYNNLSENSLPGNFFYLTTLRALYLSDNDFEILPPDIGKLTKLQILSLRDNDLISLPKEIGELTQLKELHIQGNRLTVLPPELGNLDLTGQKQVFKAENNPWVTPIADQFQLGVSHVFEYIRSETYKYLYGRHMQANPEPPKKNNDKSKKISRKPLAAKNR

SEQ ID NO: 41015 - protein, 224 aa, Homo sapiens
MVPPNIAELKNLEVLNFFNNQIEELPTQISSLQKLKHLNLGMNRLNTLPRGFGSLPALEVLDLTYNNLSENSLPGNFFYLTTLRALYLSDNDFEILPPDIGKLTKLQILSLRDNDLISLPKEIGELTQLKELHIQGNRLTVLPPELGNLDLTGQKQVFKAENNPWVTPIADQFQLGVSHVFEYIRSETYKYLYGRHMQANPEPPKKNNDKSKKISRKPLAAKNR

SEQ ID NO: 41016 - protein, 1032 aa, Homo sapiens
MAEPSAATQSHSISSSSFGAEPSAPGGGGSPGACPALGTKSCSSSCADSFVSSSSSQPVSLFSTSQEGLSSLCSDEPSSEIMTSSFLSSSEIHNTGLTILHGEKSHVLGSQPILAKEGKDHLDLLDMKKMEKPQGTSNNVSDSSVSLAAGVHCDRPSIPASFPEHPAFLSKKIGQVEEQIDKETKNPNGVSSREAKTALDADDRFTLLTAQKPPTEYSKVEGIYTYSLSPSKVSGDDVIEKDSPESPFEVIIDKAAFDKEFKDSYKESTDDFGSWSVHTDKESSEDISETNDKLFPLRNKEAGRYPMSALLSRQFSHTNAALEEVSRCVNDMHNFTNEILTWDLVPQVKQQTDKSSDCITKTTGLDMSEYNSEIPVVNLKTSTHQKTPVCSIDGSTPITKSTGDWAEASLQQENAITGKPVPDSLNSTKEFSIKGVQGNMQKQDDTLAELPGSPPEKCDSLGSGVATVKVVLPDDHLKDEMDWQSSALGEITEADSSGESDDTVIEDITADTSFENNKIQAEKPVSIPSAVVKTGEREIKEIPSCEREEKTSKNFEELVSDSELHQDQPDILGRSPASEAACSKVPDTNVSLEDVSEVAPEKPITTENPKLPSTVSPNVFNETEFSLNVTTSAYLESLHGKNVKHIDDSSPEDLIAAFTETRDKGIVDSERNAFKAISEKMTDFKTTPPVEVLHENESGGSEIKDIGSKYSEQSKETNGSEPLGVFPTQGTPVASLDLEQEQLTIKALKELGERQVEKSTSAQRDAELPSEEVLKQTFTFAPESWPQRSYDILERNVKNGSDLGISQKPITIRETTRVDAVSSLSKTELVKKHVLARLLTDFSVHDLIFWRDVKKTGFVFGTTLIMLLSLAAFSVISVVSYLILALLSVTISFRIYKSVIQAVQKSEEGHPFKAYLDVDITLSSEAFHNYMNAAMVHINRALKLIIRLFLVEDLVDSLKLAVFMWLMTYVGAVFNGITLLILAELLIFSVPIVYEKYKTQIDHYVGIARDQTKSIVEKIQAKLPGIAKKKAE

SEQ ID NO: 41017 - protein, 1013 aa, Homo sapiens
MAEPSAATQSHSISSSSFGAEPSAPGGGGSPGACPALGTKSCSSSCAEGLSSLCSDEPSSEIMTSSFLSSSEIHNTGLTILHGEKSHVLGSQPILAKEGKDHLDLLDMKKMEKPQGTSNNVSDSSVSLAAGVHCDRPSIPASFPEHPAFLSKKIGQVEEQIDKETKNPNGVSSREAKTALDADDRFTLLTAQKPPTEYSKVEGIYTYSLSPSKVSGDDVIEKDSPESPFEVIIDKAAFDKEFKDSYKESTDDFGSWSVHTDKESSEDISETNDKLFPLRNKEAGRYPMSALLSRQFSHTNAALEEVSRCVNDMHNFTNEILTWDLVPQVKQQTDKSSDCITKTTGLDMSEYNSEIPVVNLKTSTHQKTPVCSIDGSTPITKSTGDWAEASLQQENAITGKPVPDSLNSTKEFSIKGVQGNMQKQDDTLAELPGSPPEKCDSLGSGVATVKVVLPDDHLKDEMDWQSSALGEITEADSSGESDDTVIEDITADTSFENNKIQAEKPVSIPSAVVKTGEREIKEIPSCEREEKTSKNFEELVSDSELHQDQPDILGRSPASEAACSKVPDTNVSLEDVSEVAPEKPITTENPKLPSTVSPNVFNETEFSLNVTTSAYLESLHGKNVKHIDDSSPEDLIAAFTETRDKGIVDSERNAFKAISEKMTDFKTTPPVEVLHENESGGSEIKDIGSKYSEQSKETNGSEPLGVFPTQGTPVASLDLEQEQLTIKALKELGERQVEKSTSAQRDAELPSEEVLKQTFTFAPESWPQRSYDILERNVKNGSDLGISQKPITIRETTRVDAVSSLSKTELVKKHVLARLLTDFSVHDLIFWRDVKKTGFVFGTTLIMLLSLAAFSVISVVSYLILALLSVTISFRIYKSVIQAVQKSEEGHPFKAYLDVDITLSSEAFHNYMNAAMVHINRALKLIIRLFLVEDLVDSLKLAVFMWLMTYVGAVFNGITLLILAELLIFSVPIVYEKYKTQIDHYVGIARDQTKSIVEKIQAKLPGIAKKKAE

SEQ ID NO: 41018 - protein, 236 aa, Homo sapiens
MAEPSAATQSHSISSSSFGAEPSAPGGGGSPGACPALGTKSCSSSCAVHDLIFWRDVKKTGFVFGTTLIMLLSLAAFSVISVVSYLILALLSVTISFRIYKSVIQAVQKSEEGHPFKAYLDVDITLSSEAFHNYMNAAMVHINRALKLIIRLFLVEDLVDSLKLAVFMWLMTYVGAVFNGITLLILAELLIFSVPIVYEKYKTQIDHYVGIARDQTKSIVEKIQAKLPGIAKKKAE

SEQ ID NO: 41019 - protein, 255 aa, Homo sapiens
MAEPSAATQSHSISSSSFGAEPSAPGGGGSPGACPALGTKSCSSSCADSFVSSSSSQPVSLFSTSQVHDLIFWRDVKKTGFVFGTTLIMLLSLAAFSVISVVSYLILALLSVTISFRIYKSVIQAVQKSEEGHPFKAYLDVDITLSSEAFHNYMNAAMVHINRALKLIIRLFLVEDLVDSLKLAVFMWLMTYVGAVFNGITLLILAELLIFSVPIVYEKYKTQIDHYVGIARDQTKSIVEKIQAKLPGIAKKKAE

SEQ ID NO: 41020 - protein, 241 aa, Homo sapiens
MAEPSAATQSHSISSSSFGAEPSAPGGGGSPGACPALGTKSCSSSCAVHDLIFWRDVKKTGFVFGTTLIMLLSLAAFSVISVVSYLILALLSVTISFRIYKSVIQAVQKSEEGHPFKAYLDVDITLSSEAFHNYMNAAMVHINRALKLIIRLFLVEDLVDSLKLAVFMWLMTYVGAVFNGITLLILAELLIFSVPIVYEKYKDPSKTPWNRQKKGRISTWKPEMQQLLKHHLIVITSLLVL

SEQ ID NO: 41021 - protein, 214 aa, Homo sapiens
MAEPSAATQSHSISSSSFGAEPSAPGGGGSPGACPALGTKSCSSSCAVHDLIFWRDVKKTGFVFGTTLIMLLSLAAFSVISVVSYLILALLSVTISFRIYKSVIQAVQKSEEGHPFKPRLITMLASPEIRPSQLLKRSKQNSLESPKKRQNKYMETRNATVTKTPFNSYNVVTCTMKENTQCQLEPAFQAFFLIWCFLPSFPFNPQYQAQKLMD

SEQ ID NO: 41022 - protein, 920 aa, Homo sapiens
MAEPSAATQSHSISSSSFGAEPSAPGGGGSPGACPALGTKSCSSSCAASFPEHPAFLSKKIGQVEEQIDKETKNPNGVSSREAKTALDADDRFTLLTAQKPPTEYSKVEGIYTYSLSPSKVSGDDVIEKDSPESPFEVIIDKAAFDKEFKDSYKESTDDFGSWSVHTDKESSEDISETNDKLFPLRNKEAGRYPMSALLSRQFSHTNAALEEVSRCVNDMHNFTNEILTWDLVPQVKQQTDKSSDCITKTTGLDMSEYNSEIPVVNLKTSTHQKTPVCSIDGSTPITKSTGDWAEASLQQENAITGKPVPDSLNSTKEFSIKGVQGNMQKQDDTLAELPGSPPEKCDSLGSGVATVKVVLPDDHLKDEMDWQSSALGEITEADSSGESDDTVIEDITADTSFENNKIQAEKPVSIPSAVVKTGEREIKEIPSCEREEKTSKNFEELVSDSELHQDQPDILGRSPASEAACSKVPDTNVSLEDVSEVAPEKPITTENPKLPSTVSPNVFNETEFSLNVTTSAYLESLHGKNVKHIDDSSPEDLIAAFTETRDKGIVDSERNAFKAISEKMTDFKTTPPVEVLHENESGGSEIKDIGSKYSEQSKETNGSEPLGVFPTQGTPVASLDLEQEQLTIKALKELGERQVEKSTSAQRDAELPSEEVLKQTFTFAPESWPQRSYDILERNVKNGSDLGISQKPITIRETTRVDAVSSLSKTELVKKHVLARLLTDFSVHDLIFWRDVKKTGFVFGTTLIMLLSLAAFSVISVVSYLILALLSVTISFRIYKSVIQAVQKSEEGHPFKAYLDVDITLSSEAFHNYMNAAMVHINRALKLIIRLFLVEDLVDSLKLAVFMWLMTYVGAVFNGITLLILAELLIFSVPIVYEKYKTQIDHYVGIARDQTKSIVEKIQAKLPGIAKKKAE

SEQ ID NO: 41023 - protein, 545 aa, Homo sapiens
MGQVLPVFAHCKEAPSTASSTPDSTEGGNDDSDFRELHTAREFSEEDEEETTSQDWGTPRELTFSYIAFDGVVGSGGRRDSTARRPRPQGRSVSEPRDQHPQPSLGDSLESIPSLSQSPEPGRRGDPDTAPPSERPLEDLRLRLDHLGWVARGTGSGEDSSTSSSTPLEDEEPQEPNRLETGEAGEELDLRLRLAQPSSPEVLTPQLSPGSGTPQAGTPSPSRSRDSNSGPEEPLLEEEEKQWGPLEREPVRGQCLDSTDQLEFTVEPRLLGTAMEWLKTSLLLAVYKTVPILELSPPLWTAIGWVQRGPTPPTPVLRVLLKWAKSPRSSGVPSLSLGADMGSKVADLLYWKDTRTSGVVFTGLMVSLLCLLHFSIVSVAAHLALLLLCGTISLRVYRKVLQAVHRGDGANPFQAYLDVDLTLTREQTERLSHQITSRVVSAATQLRHFFLVEDLVDSLKLALLFYILTFVGAIFNGLTLLILGVIGLFTIPLLYRQHQAQIDQYVGLVTNQLSHIKAKIRAKIPGTGALASAAAAVSGSKAKAE

SEQ ID NO: 41024 - protein, 472 aa, Homo sapiens
MGQVLPVFAHCKEAPSTASSTPDSTEGGNDDSDFRELHTAREFSEEDEEETTSQDWGTPRELTFSYIAFDGVVGSGGRRDSTARRPRPQGRSVSEPRDQHPQPSLGDSLESIPSLSQSPEPGRRGDPDTAPPSERPLEDLRLRLDHLGWVARGTGSGEDSSTSSSTPLEDEEPQEPNRLETGEAGEELDLRLRLAQPSSPEVLTPQLSPGSGTPQAGTPSPSRSRDSNSGPEEPLLEEEEKQWGPLEREPVRGQCLDSTDQLEFTVEPRLLVADLLYWKDTRTSGVVFTGLMVSLLCLLHFSIVSVAAHLALLLLCGTISLRVYRKVLQAVHRGDGANPFQAYLDVDLTLTREQTERLSHQITSRVVSAATQLRHFFLVEDLVDSLKLALLFYILTFVGAIFNGLTLLILGVIGLFTIPLLYRQHQAQIDQYVGLVTNQLSHIKAKIRAKIPGTGALASAAAAVSGSKAKAE

SEQ ID NO: 41025 - protein, 205 aa, Homo sapiens
MGSKVADLLYWKDTRTSGVVFTGLMVSLLCLLHFSIVSVAAHLALLLLCGTISLRVYRKVLQAVHRGDGANPFQAYLDVDLTLTREQTERLSHQITSRVVSAATQLRHFFLVEDLVDSLKLALLFYILTFVGAIFNGLTLLILGVIGLFTIPLLYRQHQAQIDQYVGLVTNQLSHIKAKIRAKIPGTGALASAAAAVSGSKAKAE

SEQ ID NO: 41026 - protein, 430 aa, Homo sapiens
MATAVRAVGCLPVLCSGTAGHLLGRQCSLNTLPAASILAWKSVLGNGHLSSLGTRDTHPYASLSRALQTQCCISSPSHLMSQQYRPYSFFTKLTADELWKGALAETGAGAKKGRGKRTKKKKRKDLNRGQIIGEGRYGFLWPGLNVPLMKNGAVQTIAQRSKEEQEKVEADMIQQREEWDRKKKMKVKRERGWSGNSWGGISLGPPDPGPCGETYEDFDTRILEVRNVFTMTAKEGRKKSIRVLVAVGNGKGAAGFSIGKATDRMDAFRKAKNRAVHHLHYIERYEDHTIFHDISLRFKRTHIKMKKQPKGYGLRCHRAIITICRLIGIKDMYAKVSGSINMLSLTQGLFRGLSRQETHQQLADKKGLHVVEIREECGPLPIVVASPRGPLRKDPEPEDEVPDVKLDWEDVKTAQGMKRSVWSNLKRAAT

SEQ ID NO: 41027 - protein, 251 aa, Homo sapiens
MATAVRAVGCLPVLCSGTAGHLLGRQCSLNTLPAASILAWKSVLGNGHLSSLGTRDTHPYASLSRALQTQCCISSPSHLMSQQYRPYSFFTKLTADELWKGALAETGAGAKKGRGKRTKKKKRKDLNRGQIIGEGRYGFLWPGLNVPLMKNGAVQTIAQRSKEEQEKVEADMIQQREEWDRKKKMKVKRERGWSGNSWGGISLGPPDPGPCGETYEDFDTRILEVFLLGKLLIGWMLSGKQRTEQFTICII

SEQ ID NO: 41028 - protein, 225 aa, Homo sapiens
MDIRPNHTIYINNMNDKIKKEELKRSLYALFSQFGHVVDIVALKTMKMRGQAFVIFKELGSSTNALRQLQGFPFYGKPMRIQYAKTDSDIISKMRGTFADKEKKKEKKKAKTVEQTATTTNKKPGQGTPNSANTQGNSTPNPQVPDYPPNYILFLNNLPEETNEMMLSMLFNQFPGFKEVRLVPGRHDIAFVEFENDGQAGAARDALQGFKITPSHAMKITYAKK

SEQ ID NO: 41029 - protein, 610 aa, Homo sapiens
MDTPRGIGTFVVWDYVVFAGMLVISAAIGIYYAFAGGGQQTSKDFLMGGRRMTAVPVALSLTASFMSAVTVLGTPSEVYRFGAIFSIFAFTYFFVVVISAEVFLPVFYKLGITSTYEYLELRFNKCVRLCGTVLFIVQTILYTGIVIYAPALALNQVTGFDLWGAVVATGVVCTFYCTLGGLKAVIWTDVFQVGIMVAGFASVIIQAVVMQGGISTILNDAYDGGRLNFWNFNPNPLQRHTFWTIIIGGTFTWTSIYGVNQSQVQRYISCKSRFQAKLSLYINLVGLWAILTCSVFCGLALYSRYHDCDPWTAKKVSAPDQLMPYLVLDILQDYPGLPGLFVACAYSGTLSTVSSSINALAAVTVEDLIKPYFRSLSERSLSWISQGMSVVYGALCIGMAALASLMGALLQAALSVFGMVGGPLMGLFALGILVPFANSIGALVGLMAGFAISLWVGIGAQIYPPLPERTLPLHLDIQGCNSTYNETNLMTTTEMPFTTSVFQIYNVQRTPLMDNWYSLSYLYFSTVGTLVTLLVGILVSLSTGGRKQNLDPRYILTKEDFLSNFDIFKKKKHVLSYKSHPVEDGGTDNPAFNHIELNSDQSGKSNGTRL

SEQ ID NO: 41030 - protein, 1000 aa, Homo sapiens
MAERKPNGGSGGASTSSSGTNLLFSSSATEFSFNVPFIPVTQASASPASLLLPGEDSTDVGEEDSFLGQTSIHTSAPQTFSYFSQVSSSSDPFGNIGQSPLTTAATSVGQSGFPKPLTALPFTTGSQDVSNAFSPSISKAQPGAPPSSLMGINSYLPSQPSSLPPSYFGNQPQGIPQPGYNPYRHTPGSSRANPYIAPPQLQQCQTPGPPAHPPPSGPPVQMYQMPPGSLPPVPSSVQSPAQQQVPARPGAPSVQVPSPFLLQNQYEPVQPHWFYCKEVEYKQLWMPFSVFDSLNLEEIYNSVQPDPESVVLGTDGGRYDVYLYDRIRKAAYWEEEPAEVRRCTWFYKGDTDSRFIPYTEEFSEKLEAEYKKAVTTNQWHRRLEFPSGETIVMHNPKVIVQFQPSSVPDEWGTTQDGQTRPRVVKRGIDDNLDEIPDGEMPQVDHLVFVVHGIGPVCDLRFRSIIECVDDFRVVSLKLLRTHFKKSLDDGKVSRVEFLPVHWHSSLGGDATGVDRNIKKITLPSIGRFRHFTNETLLDILFYNSPTYCQTIVEKVGMEINHLHALFMSRNPDFKGGVSVAGHSLGSLILFDILSNQKDLNLSKCPGPLAVANGVVKQLHFQEKQMPEEPKLTLDESYDLVVENKEVLTLQETLEALSLSEYFSTFEKEKIDMESLLMCTVDDLKEMGIPLGPRKKIANFVEHKAAKLKKAASEKKAVAATSTKGQEQSAQKTKDMASLPSESNEPKRKLPVGACVSSVCVNYESFEVGAGQVSVAYNSLDFEPEIFFALGSPIAMFLTIRGVDRIDENYSLPTCKGFFNIYHPLDPVAYRLEPMIVPDLDLKAVLIPHHKGRKRLHLELKESLSRMGSDLKQGFISSLKSAWQTLNEFARAHTSSTQLQEELEKVANQIKEEEEKQVVEAEKVVESPDFSKDEDYLGKVGMLNGGRRIDYVLQEKPIESFNEYLFALQSHLCYWESEDTALLLLKEIYRTMNISPEQPQH

SEQ ID NO: 41031 - protein, 924 aa, Homo sapiens
MAERKPNGGSGGASTSSSGTNLLFSSSATEFSFNVPFIPVTQASASPASLLLPGEDSTDVGEEDSFLGQTSIHTSAPQTFSYFSQVSSSSDPFGNIGQSPLTTAATSVGQSGFPKPLTALPFTTGSQDVSNAFSPSISKAQPGAPPSSLMGINSYLPSQPSSLPPSYFGNQPQGIPQPGYNPYRHTPGSSRANPYIAPPQLQQCQTPGPPAHPPPSGPPVQMYQMPPGSLPPVPSSVQSPAQQQVPARPGAPSVQVPSPFLLQNQYEPVQPHWFYCKEVEYKQLWMPFSVFDSLNLEEIYNSVQPDPESVVLGTDGGRYDVYLYDRIRKAAYWEEEPAEVRRCTWFYKGDTDSRFIPYTEEFSEKLEAEYKKAVTTNQWHRRLEFPSGETIVMHNPKVIVQFQPSSVPDEWGTTQDGQTRPRVVKRGIDDNLDEIPDGEMPQVDHLVFVVHGIGPVCDLRFRSIIECVDDFRVVSLKLLRTHFKKSLDDGKVSRVEFLPVHWHSSLGGDATGVDRNIKKITLPSIGRFRHFTNETLLDILFYNSPTYCQTIVEKVGMEINHLHALFMSRNPDFKGGVSVAGHSLGSLILFDILSNQKDLNLSKCPGPLAVANGVVKQLHFQEKQMPEEPKLTLDESYDLVVENKEVLTLQETLEALSLSEYFSTFEKEKIDMESLLMCTVDDLKEMGIPLGPRKKIANFVEHKAAKLKKAASEKKAVAATSTKGQEQSAQKTKDMASLPSESNEPKRKLPVGACVSSVCVNYESFEVGAGQVSVAYNSLDFEPEIFFALGSPIAMFLTIRGVDRIDENYSLPTCKGFFNIYHPLDPVAYRLEPMIVPDLDLKAVLIPHHKGRKRLHLELKESLSRMGSDLKQGFISSLKSAWQTLNEFARAHTSSTQLQEELEKVANQIKEEEEKQVVEGKFDI

SEQ ID NO: 41032 - protein, 358 aa, Homo sapiens
MDPLRRSPSPCLSSQPSSPSTPPCEMLGPVGIEAVLDQLKIKAMKMGFEFNIMVVGQSGLGKSTMVNTLFKSKVWKSNPPGLGVPTPQTLQLHSLTHVIEEKGVKLKLTVTDTPGFGDQINNDNCWDPILGYINEQYEQYLQEEILITRQRHIPDTRVHCCVYFVPPTGHCLRPLDIEFLQRLCRTVNVVPVIARADSLTMEEREAFRRRIQQNLRTHCIDVYPQMCFDEDINDKILNSKLRDRIPFAVVGADQEHLVNGRCVLGRKTKWGIIEVENMAHCEFPLLRDLLIRSHLQDLKDITHNIHYENYRVIRLNESHLLPRGPGWVNLAPASPGQLTTPRTFKVCRGAHDDSDDEF

SEQ ID NO: 41033 - protein, 312 aa, Homo sapiens
MDPLRRSPSPCLSSQPSSPSTPPCEMLGPVGIEAVLDQLKIKAMKMGFEFNIMVVGQSGLGKSTMVNTLFKSKVWKSNPPGLGVPTPQTLQLHSLTHVIEEKGVKLKLTVTDTPGFGDQINNDNCLRPLDIEFLQRLCRTVNVVPVIARADSLTMEEREAFRRRIQQNLRTHCIDVYPQMCFDEDINDKILNSKLRDRIPFAVVGADQEHLVNGRCVLGRKTKWGIIEVENMAHCEFPLLRDLLIRSHLQDLKDITHNIHYENYRVIRLNESHLLPRGPGWVNLAPASPGQLTTPRTFKVCRGAHDDSDDEF

SEQ ID NO: 41034 - protein, 148 aa, Homo sapiens
MGSQGSGGVPLVQAPYTVLLLPLGTSRQDPGAQSFFLWLRRMQALEREQDALWQGLELLQHGQAWFEDHLREAQRQQLHLGALGENFLTDLHSEPGRPPLAQIQKVNICLQNLIHEKELSRQQKGVTQPKEEMAQRGCTKGPRGPTRV

SEQ ID NO: 41035 - protein, 178 aa, Homo sapiens
MGSQGSGGVPLVQAPYTVLLLPLGTSRQDPGAQSFFLWLRRMQALEREQDALWQGLELLQHGQAWFEDHLREAQRQQLHLGALGENFLTDLHSEPGRPPLAQIQKVNICLQNLIHEKFSPSPLNKASSCTTQDSKERRREQNLWQQQELSRQQKGVTQPKEEMAQRGCTKGPRGPTRV

SEQ ID NO: 41036 - protein, 394 aa, Homo sapiens
MAGAAMAERGRVPPPAPAPSTEGLPRAFLQSLRTLFDILDDRRRGCVHLREIESRWQGTDARELPRGVLEGLRQVAPASGYLTFERFVAGLRTSLLSADGGPRDPTRAPARPGDQPPPPPQRLVFAPADEPRTVLERKPLPLGVRAPLAGPSAAARSPEQLCAPAEAAPCPAEPERSQSAALEPSSSADAGAVACRALEADSGDARRAPRARGERRRHTIASGVDCGLLKQMKELEQEKEVLLQGLEMMARGRDWYQQQLQRVQERQRRLGQSRASADFGAAGSPRPLGRLLPKVQEVARCLGELLAAACASRALPPSSSGPPCPALTSTSPPVWQQQTILMLKEQNRLLTQEVTEKSERITQLEQEKSALIKQLFEARALSQQDGGPLDSTFI

SEQ ID NO: 41037 - protein, 617 aa, Homo sapiens [sequence omitted]

SEQ ID NO: 41038 - protein, 628 aa, Homo sapiens
MLLARMNPQVQPENNGADTGPEQPLRARKTAELLVVKERNGVQCLLAPRDGDAQPRETWGKKIDFLLSVVGFAVDLANVWRFPYLCYKNGGGAFLIPYTLFLIIAGMPLFYMELALGQYNREGAATVWKICPFFKGVGYAVILIALYVGFYYNVIIAWSLYYLFSSFTLNLPWTDCGHTWNSPNCTDPKLLNGSVLGNHTKYSKYKFTPAAEFYERGVLHLHESSGIHDIGLPQWQLLLCLMVVVIVLYFSLWKGVKTSGKVVWITATLPYFVLFVLLVHGVTLPGASNGINAYLHIDFYRLKEATVWIDAATQIFFSLGAGFGVLIAFASYNKFDNNCYRDALLTSSINCITSFVSGFAIFSILGYMAHEHKVNIEDVATEGAGLVFILYPEAISTLSGSTFWAVVFFVMLLALGLDSSMGGMEAVITGLADDFQVLKRHRKLFTFGVTFSTFLLALFCITKGGIYVLTLLDTFAAGTSILFAVLMEAIGVSWFYGVDRFSNDIQQMMGFRPGLYWRLCWKFVSPAFLLFVVVVSIINFKPLTYDDYIFPPWANWVGWGIALSSMVLVPIYVIYKFLSTQGSLWERLAYGITPENEHHLVAQRDIRQFQMKTRQGRRRATNSCQISC

SEQ ID NO: 41039 - protein, 512 aa, Homo sapiens
MGVQWWSHTQGEVAVGLGLGDSYLTPCPCPGVGYAVILIALYVGFYYNVIIAWSLYYLFSSFTLNLPWTDCGHTWNSPNCTDPKLLNGSVLGNHTKYSKYKFTPAAEFYERGVLHLHESSGIHDIGLPQWQLLLCLMVVVIVLYFSLWKGVKTSGKVVWITATLPYFVLFVLLVHGVTLPGASNGINAYLHIDFYRLKEATVWIDAATQIFFSLGAGFGVLIAFASYNKFDNNCYRDALLTSSINCITSFVSGFAIFSILGYMAHEHKVNIEDVATEGAGLVFILYPEAISTLSGSTFWAVVFFVMLLALGLDSSMGGMEAVITGLADDFQVLKRHRKLFTFGVTFSTFLLALFCITKGGIYVLTLLDTFAAGTSILFAVLMEAIGVSWFYGVDRFSNDIQQMMGFRPGLYWRLCWKFVSPAFLLFVVVVSIINFKPLTYDDYIFPPWANWVGWGIALSSMVLVPIYVIYKFLSTQGSLWERLAYGITPENEHHLVAQRDIRQFQLQHWLAI

SEQ ID NO: 41040 - protein, 712 aa, Homo sapiens
MAQSSPQLDIQVLHDLRQRFPEIPEGVVSQCMLQNNNNLEACCRALSQESSKYLYMEYHSPDDNRMNRNRLLHINLGIHSPSSYHPGDGAQLNGGRTLVHSSSDGHIDPQHAAGKQLICLVQEPHSAPAVVAATPNYNPFFMNEQNRSAATPPSQPPQQPSSMQTGMNPSAMQGPSPPPPPPSYMHIPRYSTNPITVTVSQNLPSGQTVPRALQILPQIPSNLYGSPGSIYIRQTSQSSSGRQTPQSTPWQSSPQGPVPHYSQRPLPVYPHQQNYQPSQYSPKQQQIPQSAYHSPPPSQCPSPFSSPQHQVQPSQLGHIFMPPSPSTTPPHPYQQGPPSYQKQGSHSVAYLPYTASSLSKGSMKKIEITVEPSQRPGTAINRSPSPISNQPSPRNQHSLYTATTPPSSSPSRGISSQPKPPFSVNPVYITYTQPTGPSCTPSPSPRVIPNPTTVFKITVGRATTENLLNLVDQEERSAAPEPIQPISVIPGSGGEKGSHKYQRSSSSGSDDYAYTQALLLHQRARMERLAKQLKLEKEELERLKSEVNGMEHDLMQRRLRRVSCTTAIPTPEEMTRLRSMNRQLQINVDCTLKEVDLLQSRGNFDPKAMNNFYDNIEPGPVVPPKPSKKDSSDPCTIERKARRISVTSKVQADIHDTQAAAADEHRTGSTQSPRTQPRDEDYEGAPWNCDSCTFLNHPALNRCEQCEMPRYT

SEQ ID NO: 41041 - protein, 684 aa, Homo sapiens
MAQSSPQLDIQVLHDLRQRFPEIPEGVVSQCMLQNNNNLEACCRALSQESSKYLYMEYHSPDDNRMNRNRLLHINLGIHSPSSYHPGDGAQLNGGRTLVHSSSDGHIDPQHAAGKQLICLVQEPHSAPAVVAATPNYNPFFMNEQNRSAATPPSQPPQQPSSMQTGMNPSAMQGPSPPPPPPSYMHIPRYSTNPITVTVSQNLPSGQTVPRALQILPQIPSNLYGSPGSIYIRQTSQSSSGRQTPQSTPWQSSPQGPVPHYSQRPLPVYPHQQNYQPSQYSPKQQQIPQSAYHSPPPSQCPSPFSSPQHQVQPSQLGHIFMPPSPSTTPPHPYQQGPPSYQKQGSHSVAYLPYTASSLSKGSMKKIEITVEPSQRPGTAINRSPSPISNQPSPRNQHSLYTATTPPSSSPSRGISSQPKPPFSVNPVYITYTQPTGPSCTPSPSPRVIPNPTTVFKITVGRATTENLLNLVDQEERSAAPEPIQPISVIPGSGGEKGSHKYQRSSSSGSDDYAYTQALLLHQRARMERLAKQLKLEKEELERLKSEVNGMEHDLMQRRLRRVSCTTAIPTPEEMTRLRSMNRQLQINVDCTLKEVDLLQSRDSSDPCTIERKARRISVTSKVQADIHDTQAAAADEHRTGSTQSPRTQPRDEDYEGAPWNCDSCTFLNHPALNRCEQCEMPRYT

SEQ ID NO: 41042 - protein, 202 aa, Homo sapiens
MEAALLGLCNWSTLGVCAALKLPQISAVLAARSARGLSLPSLLLELAGFLVFLRYQCYYGYPPLTYLEYPILIAQDVILLLCIFHFNGNVKQATPYIAVLVSSWFILALQKWIIDLAMNLCTFISAASKFAQLQCLWKTRDSGTVSALTWSLSSYTCATRIITTLMTTNDFTILLRFVIMLALNIWVTVTVLRYRKTAIKAE

SEQ ID NO: 41043 - protein, 188 aa, Homo sapiens
MEAALLGLCNWSTLGVCAALKLPQISAVLAARSARGLSLPSLLLELAGFLVFLRYQCYYGYPPLTYLEYPILIAQDVILLLCIFHFNGNVKQATPYIAVLVSSWFILALQKWIIDLAMNLCTFISAASKFAQLQCLWKTRDSGTVSALTWSLSSYTCAILLRFVIMLALNIWVTVTVLRYRKTAIKAE

SEQ ID NO: 41044 - protein, 632 aa, Homo sapiens
MTAEKALPLGNGKAAEEARESEAPGGGCSSGGAAPARHPRVKRDKAVHERGHWNNKVEFVLSVAGEIIGLGNVWRFPYLCYKNGGGAFLIPYVVFFICCGIPVFFLETALGQFTSEGGITCWRKVCPLFEGIGYATQVIEAHLNVYYIIILAWAIFYLSNCFTTELPWATCGHEWNTENCVEFQKLNVSNYSHVSLQNATSPVMEFWEHRVLAISDGIEHIGNLRWELALCLLAAWTICYFCIWKGTKSTGKVVYVTATFPYIMLLILLIRGVTLPGASEGIKFYLYPDLSRLSDPQVWVDAGTQIFFSYAICLGCLTALGSYNNYNNNCYRDCIMLCCLNSGTSFVAGFAIFSVLGFMAYEQGVPIAEVAESGPGLAFIAYPKAVTMMPLSPLWATLFFMMLIFLGLDSQFVCVESLVTAVVDMYPKVFRRGYRRELLILALSVISYFLGLVMLTEGGMYIFQLFDSYAASGMCLLFVAIFECICIGWVYGSNRFYDNIEDMIGYRPPSLIKWCWMIMTPGICAGIFIFFLIKYKPLKYNNIYTYPAWGYGIGWLMALSSMLCIPLWICITVWKTEGTLPEKLQKLTTPSTDLKMRGKLGVSPRMVTVNDCDAKLKSDGTIAAITEKETHF

SEQ ID NO: 41045 - protein, 208 aa, Homo sapiens
MTAEKALPLGNGKAAEEARESEAPGGGCSSGGAAPARHPRVKRDKAVHERGHWNNKVEFVLSVAGEIIGLGNVWRFPYLCYKNGGGAFLIPYVVFFICCGIPVFFLETALGQFTSEGGITCWRKVCPLFEGIGYATQVIEAHLNVYYIIILAWAIFYLSNCFTTELPWATCGHEWNTENCVEFQKLNVSNYSHVSLQNATSPVMEFWE

SEQ ID NO: 41046 - protein, 614 aa, Homo sapiens
MDGKVAVQECGPPAVSWVPEEGEKLDQEDEDQVKDRGQWTNKMEFVLSVAGEIIGLGNVWRFPYLCYKNGGGAFFIPYFIFFFVCGIPVFFLEVALGQYTSQGSVTAWRKICPLFQGIGLASVVIESYLNVYYIIILAWALFYLFSSFTSELPWTTCNNFWNTEHCTDFLNHSGAGTVTPFENFTSPVMEFWERRVLGITSGIHDLGSLRWELALCLLLAWVICYFCIWKGVKSTGKVVYFTATFPYLMLVILLIRGVTLPGAYQGIIYYLKPDLFRLKDPQVWMDAGTQIFFSFAICQGCLTALGSYNKYHNNCYKDCIALCFLNSATSFVAGFVVFSILGFMSQEQGVPISEVAESGPGLAFIAFPKAVTMMPLSQLWSCLFFIMLIFLGLDSQFVCVECLVTASIDMFPRQLRKSGRRELLILTIAVMCYLIGLFLVTEGGMYIFQLFDYYASSGICLLFLSLFEVVCISWVYGADRFYDNIEDMIGYRPWPLVKISWLFLTPGLCLATFLFSLSKYTPLKYNNVYVYPPWGYSIGWFLALSSMVCVPLFVVITLLKTRGPFRKRLRQLITPDSSLPQPKQHPCLDGSAGRNFGPSPTREGLIAGEKETHL

SEQ ID NO: 41047 - protein, 797 aa, Homo sapiens
MDCSAPKEMNKLPANSPEAAAAQGHPDGPCAPRTSPEQELPAAAAPPPPRVPRSASTGAQTFQSADARACEAERPGVGSCKLSSPRAQAASAALRDLREAQGAQASPPPGSSGPGNALHCKIPFLRGPEGDANVSVGKGTLERNNTPVVGWVNMSQSTVVLATDGITSVLPGSVATVATQEDEQGDENKARGNWSSKLDFILSMVGYAVGLGNVWRFPYLAFQNGGGAFLIPYLMMLALAGLPIFFLEVSLGQFASQGPVSVWKAIPALQGCGIAMLIISVLIAIYYNVIICYTLFYLFASFVSVLPWGSCNNPWNTPECKDKTKLLLDSCVISDHPKIQIKNSTFCMTAYPNVTMVNFTSQANKTFVSGSEEYFKYFVLKISAGIEYPGEIRWPLALCLFLAWVIVYASLAKGIKTSGKVVYFTATFPYVVLVILLIRGVTLPGAGAGIWYFITPKWEKLTDATVWKDAATQIFFSLSAAWGGLITLSSYNKFHNNCYRDTLIVTCTNSATSIFAGFVIFSVIGFMANERKVNIENVADQGPGIAFVVYPEALTRLPLSPFWAIIFFLMLLTLGLDTMFATIETIVTSISDEFPKYLRTHKPVFTLGCCICFFIMGFPMITQGGIYMFQLVDTYAASYALVIIAIFELVGISYVYGLQRFCEDIEMMIGFQPNIFWKVCWAFVTPTILTFILCFSFYQWEPMTYGSYRYPNWSMVLGWLMLACSVIWIPIMFVIKMHLAPGRFIERLKLVCSPQPDWGPFLAQHRGERYKNMIDPLGTSSLGLKLPVKDLELGTQC

SEQ ID NO: 41048 - protein, 636 aa, Homo sapiens
MKKLQGAHLRKPVTPDLLMTPSDQGDVDLDVDFAAHRGNWTGKLDFLLSCIGYCVGLGNVWRFPYRAYTNGGGAFLVPYFLMLAICGIPLFFLELSLGQFSSLGPLAVWKISPLFKGAGAAMLLIVGLVAIYYNMIIAYVLFYLFASLTSDLPWEHCGNWWNTELCLEHRVSKDGNGALPLNLTCTVSPSEEYWSRYVLHIQGSQGIGSPGEIRWNLCLCLLLAWVIVFLCILKGVKSSGKVVYFTATFPYLILLMLLVRGVTLPGAWKGIQFYLTPQFHHLLSSKVWIEAALQIFYSLGVGFGGLLTFASYNTFHQNIYRDTFIVTLGNAITSILAGFAIFSVLGYMSQELGVPVDQVAKAGPGLAFVVYPQAMTMLPLSPFWSFLFFFMLLTLGLDSQFAFLETIVTAVTDEFPYYLRPKKAVFSGLICVAMYLMGLILTTDGGMYWLVLLDDYSASFGLMVVVITTCLAVTRVYGIQRFCRDIHMMLGFKPGLYFRACWLFLSPATLLALMVYSIVKYQPSEYGSYRFPPWAELLGILMGLLSCLMIPAGMLVAVLREEGSLWERLQQASRPAMDWGPSLEENRTGMYVATLAGSQSPKPLMVHMRKYGGITSFENTAIEVDREIAEEEESMM

SEQ ID NO: 41049 - protein, 642 aa, Homo sapiens
MAAAAAATAAAAASIRERQTVALKRMLNFNVPHIKNSTGEPVWKVLIYDRFGQDIISPLLSVKELRDMGITLHLLLHSDRDPIPDVPAVYFVMPTEENIDRMCQDLRNQLYESYYLNFISAISRSKLEDIANAALAASAVTQVAKVFDQYLNFITLEDDMFVLCNQNKELVSYRAINRPDITDTEMETVMDTIVDSLFCFFVTLGAVPIIRCSRGTAAEMVAVKLDKKLRENLRDARNSLFTGDTLGAGQFSFQRPLLVLVDRNIDLATPLHHTWTYQALVHDVLDFHLNRVNLEESSGVENSPAGARPKRKNKKSYDLTPVDKFWQKHKGSPFPEVAESVQQELESYRAQEDEVKRLKSIMGLEGEDEGAISMLSDNTAKLTSAVSSLPELLEKKRLIDLHTNVATAVLEHIKARKLDVYFEYEEKIMSKTTLDKSLLDIISDPDAGTPEDKMRLFLIYYISTQQAPSEADLEQYKKALTDAGCNLNPLQYIKQWKAFTKMASAPASYGSTTTKPMGLLSRVMNTGSQFVMEGVKNLVLKQQNLPVTRILDNLMEMKSNPETDDYRYFDPKMLRGNDSSVPRNKNPFQEAIVFVVGGGNYIEYQNLVDYIKGKQGKHILYGCSELFNATQFIKQLSQLGQK

SEQ ID NO: 41050 - protein, 550 aa, Homo sapiens
MPTEENIDRMCQDLRNQLYESYYLNFISAISRSKLEDIANAALAASAVTQVAKVFDQYLNFITLEDDMFVLCNQNKELVSYRAINRPDITDTEMETVMDTIVDSLFCFFVTLGAVPIIRCSRGTAAEMVAVKLDKKLRENLRDARNSLFTGDTLGAGQFSFQRPLLVLVDRNIDLATPLHHTWTYQALVHDVLDFHLNRVNLEESSGVENSPAGARPKRKNKKSYDLTPVDKFWQKHKGSPFPEVAESVQQELESYRAQEDEVKRLKSIMGLEGEDEGAISMLSDNTAKLTSAVSSLPELLEKKRLIDLHTNVATAVLEHIKARKLDVYFEYEEKIMSKTTLDKSLLDIISDPDAGTPEDKMRLFLIYYISTQQAPSEADLEQYKKALTDAGCNLNPLQYIKQWKAFTKMASAPASYGSTTTKPMGLLSRVMNTGSQFVMEGVKNLVLKQQNLPVTRILDNLMEMKSNPETDDYRYFDPKMLRGNDSSVPRNKNPFQEAIVFVVGGGNYIEYQNLVDYIKGKQGKHILYGCSELFNATQFIKQLSQLGQK

SEQ ID NO: 41051 - protein, 575 aa, Homo sapiens
MGITLHLLLHSDRDPIPDVPAVYFVMPTEENIDRMCQDLRNQLYESYYLNFISAISRSKLEDIANAALAASAVTQVAKVFDQYLNFITLEDDMFVLCNQNKELVSYRAINRPDITDTEMETVMDTIVDSLFCFFVTLGAVPIIRCSRGTAAEMVAVKLDKKLRENLRDARNSLFTGDTLGAGQFSFQRPLLVLVDRNIDLATPLHHTWTYQALVHDVLDFHLNRVNLEESSGVENSPAGARPKRKNKKSYDLTPVDKFWQKHKGSPFPEVAESVQQELESYRAQEDEVKRLKSIMGLEGEDEGAISMLSDNTAKLTSAVSSLPELLEKKRLIDLHTNVATAVLEHIKARKLDVYFEYEEKIMSKTTLDKSLLDIISDPDAGTPEDKMRLFLIYYISTQQAPSEADLEQYKKALTDAGCNLNPLQYIKQWKAFTKMASAPASYGSTTTKPMGLLSRVMNTGSQFVMEGVKNLVLKQQNLPVTRILDNLMEMKSNPETDDYRYFDPKMLRGNDSSVPRNKNPFQEAIVFVVGGGNYIEYQNLVDYIKGKQGKHILYGCSELFNATQFIKQLSQLGQK

SEQ ID NO: 41052 - protein, 635 aa, Homo sapiens
MAKKSAENGIYSVSGDEKKGPLIAPGPDGAPAKGDGPVGLGTPGGRLAVPPRETWTRQMDFIMSCVGFAVGLGNVWRFPYLCYKNGGGVFLIPYVLIALVGGIPIFFLEISLGQFMKAGSINVWNICPLFKGLGYASMVIVFYCNTYYIMVLAWGFYYLVKSFTTTLPWATCGHTWNTPDCVEIFRHEDCANASLANLTCDQLADRRSPVIEFWENKVLRLSGGLEVPGALNWEVTLCLLACWVLVYFCVWKGVKSTGKIVYFTATFPYVVLVVLLVRGVLLPGALDGIIYYLKPDWSKLGSPQVWIDAGTQIFFSYAIGLGALTALGSYNRFNNNCYKDAIILALINSGTSFFAGFVVFSILGFMAAEQGVHISKVAESGPGLAFIAYPRAVTLMPVAPLWAALFFFMLLLLGLDSQFVGVEGFITGLLDLLPASYYFRFQREISVALCCALCFVIDLSMVTDGGMYVFQLFDYYSASGTTLLWQAFWECVVVAWVYGADRFMDDIACMIGYRPCPWMKWCWSFFTPLVCMGIFIFNVVYYEPLVYNNTYVYPWWGEAMGWAFALSSMLCVPLHLLGCLLRAKGTMAERWQHLTQPIWGLHHLEYRAQDADVRGLTTLTPVSESSKVVVVESVM

SEQ ID NO: 41053 - protein, 732 aa, Homo sapiens
MLPTLQIQGPAAFAPGDRGPGRHCPFPVPITPTGALLPVSDSCDSLVDLVWPSVTYLALGTQSRVWPHPLGAPGQAGESPEQRRQCLELWDMASSLGDKVPRAACGKRGQTVWQLHLACLCLAQFHSPPAQPPPLSRRGGGPDPDPISRSLPGPPTPALPTHSYSSHSPRAPRLLSPLRRAPRGSPAPHRHASLQTNEAPRELPHCTWPGLPGRSLAPSFLWREPWLGGQWGPLNIPARKGDRRRWEWGCEGGGATASAEQPGPQIVYFTATFPYVVLVVLLVRGVLLPGALDGIIYYLKPDWSKLGSPQVWIDAGTQIFFSYAIGLGALTALGSYNRFNNNCYKDAIILALINSGTSFFAGFVVFSILGFMAAEQGVHISKVAESGPGLAFIAYPRAVTLMPVAPLWAALFFFMLLLLGLDSQVCMGLWDREPGGGRREGCRQGKGWRRCGDRPELPWPQFVGVEGFITGLLDLLPASYYFRFQREISVALCCALCFVIDLSMVTDVSGVGGLPVTSGGRLPSSLTGLCPQGGMYVFQLFDYYSASGTTLLWQAFWECVVVAWVYGRSWLRAGLGDGGGEGRSPAWPSRLTSPQGADRFMDDIACMIGYRPCPWMKWCWSFFTPLVCMGIFIFNVVYYEPLVYNNTYVYPWWGEAMGWAFALSSMLCVPLHLLGCLLRAKGTMAERWQHLTQPIWGLHHLEYRAQDADVRGLTTLTPVSESSKVVVVESVM

SEQ ID NO: 41054 - protein, 270 aa, Homo sapiens
MAAEQGVHISKVAESGPGLAFIAYPRAVTLMPVAPLWAALFFFMLLLLGLDSQFVGVEGFITGLLDLLPASYYFRFQREISVALCCALCFVIDLSMVTDGGMYVFQLFDYYSASGTTLLWQAFWECVVVAWVYGADRFMDDIACMIGYRPCPWMKWCWSFFTPLVCMGIFIFNVVYYEPLVYNNTYVYPWWGEAMGWAFALSSMLCVPLHLLGCLLRAKGTMAERWQHLTQPIWGLHHLEYRAQDADVRGLTTLTPVSESSKVVVVESVM

SEQ ID NO: 41055 - protein, 520 aa, Homo sapiens
MKAGSINVWNICPLFKGLGYASMVIVFYCNTYYIMVLAWGFYYLVKSFTTTLPWATCGHTWNTPDCVEIFRHEDCANASLANLTCDQLADRRSPVIEFWENKVLRLSGGLEVPGALNWEVTLCLLACWVLVYFCVWKGVKSTGKIVYFTATFPYVVLVVLLVRGVLLPGALDGIIYYLKPDWSKLGSPQVWIDAGTQIFFSYAIGLGALTALGSYNRFNNNCYKDAIILALINSGTSFFAGFVVFSILGFMAAEQGVHISKVAESGPGLAFIAYPRAVTLMPVAPLWAALFFFMLLLLGLDSQFVGVEGFITGLLDLLPASYYFRFQREISVALCCALCFVIDLSMVTDGGMYVFQLFDYYSASGTTLLWQAFWECVVVAWVYGADRFMDDIACMIGYRPCPWMKWCWSFFTPLVCMGIFIFNVVYYEPLVYNNTYVYPWWGEAMGWAFALSSMLCVPLHLLGCLLRAKGTMAERWQHLTQPIWGLHHLEYRAQDADVRGLTTLTPVSESSKVVVVESVM

SEQ ID NO: 41056 - protein, 727 aa, Homo sapiens
MPKNSKVTQREHSSEHVTESVADLLALEEPVDYKQSVLNVAGEAGGKQKAVEEELDAEDRPAWNSKLQYILAQIGFSVGLGNIWRFPYLCQKNGGGAYLVPYLVLLIIIGIPLFFLELAVGQRIRRGSIGVWHYICPRLGGIGFSSCIVCLFVGLYYNVIIGWSIFYFFKSFQYPLPWSECPVVRNGSVAVVEAECEKSSATTYFWYREALDISDSISESGGLNWKMTLCLLVAWSIVGMAVVKGIQSSGKVMYFSSLFPYVVLACFLVRGLLLRGAVDGILHMFTPKLDKMLDPQVWREAATQVFFALGLGFGGVIAFSSYNKQDNNCHFDAALVSFINFFTSVLATLVVFAVLGFKANIMNEKCVVENAEKILGYLNTNVLSRDLIPPHVNFSHLTTKDYMEMYNVIMTVKEDQFSALGLDPCLLEDELDKSVQGTGLAFIAFTEAMTHFPASPFWSVMFFLMLINLGLGSMIGTMAGITTPIIDTFKVPKEMFTVGCCVFAFLVGLLFVQRSGNYFVTMFDDYSATLPLTLIVILENIAVAWIYGTKKFMQELTEMLGFRPYRFYFYMWKFVSPLCMAVLTTASIIQLGVTPPGYSAWIKEEAAERYLYFPNWAMALLITLIVVATLPIPVVFVLRHFHLLSDGSNTLSVSYKKGRMMKDISNLEENDETRFILSKVPSEAPSPMPTHRSYLGPGSTSPLETSGNPNGRYGSGYLLASTPESEL

SEQ ID NO: 41057 - protein, 348 aa, Homo sapiens
MPGKQSEEGPAEAGASEDSEEEGLGGLTLEELQQGQEAARALEDMMTLSAQTLVRAEVDELYEEVRPLGQGCYGRVLLVTHRQKGTPLALKQLPKPRTSLRGFLYEFCVGLSLGAHSAIVTAYGIGIESAHSYSFLTEPVLHGDLMAFIQPKVGLPQPAVHRCAAQLASALEYIHARGLVYRDLKPENVLVCDPACRRFKLTDFGHTRPRGTLLRLAGPPIPYTAPELCAPPPLPEGLPIQPALDAWALGVLLFCLLTGYFPWDRPLAEADPFYEDFLIWQASGQPRDRPQPWFGLAAAADALLRGLLDPHPRRRSAVIAIREHLGRPWRQREGEAEAVGAVEEEAGQ

SEQ ID NO: 41058 - protein, 198 aa, Homo sapiens
MSFIFDWIYSGFSSVLQFLGLYKKTGKLVFLGLDNAGKTTLLHMLKDDRLGQHVPTLHPTSEELTIAGMTFTTFDLGGHVQARRVWKNYLPAINGIVFLVDCADHERLLESKEELDSLMTDETIANVPILILGNKIDRPEAISEERLREMFGLYGQTTGKGSISLKELNARPLEVFMCSVLKRQGYGEGFRWMAQYID

SEQ ID NO: 41059 - protein, 587 aa, Homo sapiens
MNDSLFVSLDRLLLEFVFQYEQDISTKEEMIQRINKCCEDIKENKVTICRIHETINATDEEIDHYCKHSEEIKDNCRNWKPTCDVFRKHEDYMQDQFTVYQGTVEKDKEMYHDYICQYKEVLKQYQLKYSETPFSREYYEKKREHEEIQSRVLACTEQLKMNETIFMKFRVPAPFPSLTKWTLNIVNLRCETQDILKHASNLTKSSSELKKEVDEMEIEINYLNQQISRHNETKALSETLEEKNKNTENRKELKERIFGKDEHVLTLNKTQSSQLFLPYESQKLVRPIKMHSSEPRVADIKEESSAKQSKLANIDFRQKENDTQIFNDSAVDNHSKCSHITTITSSQKFMQVRLLTPQKQSNSNQWSEKGDKDAEYGDKGTVRQVRESKCTSQAIYTEHFGKSVENDSDEVEERAENFPRTSEIPIFLGTPKAVKAPESLEKIKFPKTPPFEINRNRNAVPEVQTEKESPGLSFLMSYTSRSPGLNLFDSSVFDTEISSDQFNEHYSARNLNPLSSEQEIGNLLEKPEGEDGFTFSFPSDTSTHTFGAGKDDFSFPFSFGQGQNSIPSSSLKGFSSSSQNTTQFTFF

SEQ ID NO: 41060 - protein, 120 aa, Homo sapiens
MGCCGCGGCGGCGGRCGGCGGGCGGGCGGGCGGGCGGGCGGGCGGGCGGGCGGSCGSCTTCRCYRVGCCSSCCPCCRGCCGGCCSTPVICCCRRTCHSCGCGCGKGCCQQKCCCQKQCCC

SEQ ID NO: 41061 - protein, 1271 aa, Homo sapiens
MEAVKTFNSELYSLNDYKPPISKAKMTQITKAAIKAIKFYKHVVQSVEKFIQKCKPEYKVPGLYVIDSIVRQSRHQFGQEKDVFAPRFSNNIISTFQNLYRCPGDDKSKIVRVLNLWQKNNVFKSEIIQPLLDMAAGIPPPVVTPVLASTTTAMSNTPGTPVTPVTPANVVQGLPDPWVSQITNTDTLAAVAQILQSPQGQQLQQLIQTLQIQQQKPQPSILQALDAGLVVQLQALTAQLTAAAAAANTLTPLEQGVSFNKKLMDRFDFGEDSEHSEEPKKEIPASQLSHVSESVNNSIFHQIAEQLQQQNLEHLRQQLLEQQQPQKATPQDSQEGTFGSEHSASPSQGSSQQHFLEPEVNLDDSIDIQQQDMDIDEGQDGVEEEVFEQEAKKVAVRSRSRTHSRSRSRSPRKRRSRSRSGSRKRKHRKRSRSRSRERKRKSSRSYSSERRAREREKERQKKGLPPIRSKTLSVCSTTLWVGQVDKKATQQDLTNLFEEFGQIESINMIPPRGCAYVCMVHRQDAFRALQKLSSGSYKIGSKVIKIAWALNKGVKTEYKQFWDVDLGVTYIPWEKVKVDDLEGFAEGGMIDQETVNTEWETVKSSEPVKETVQTTQSPTPVEKETVVTTQAEVFPPPVAMLQIPVAPAVPTVSLVPPAFPVSMPVPPPGFSPIPPPPFLRASFNPSQPPPGFMPPPVPPPVVPPPTIPPVVPTSLVQPSLSMTPETVKDVGFGSLVIPGGSVASNLATSALPAGNVFNAPTKQAEPEEKVPHLIDHQISSGENTRSVIPNDISSNAAILGGQPPNVTSNSGILGVQRPNVSSNSEILGVRPSNVSSSSGIIAAQPPNILNNSGILGIQPPSVSNSSGLLGVLPPNIPNNSGLVGVQPPNVPNTPGLLGTQPPAGPQNLPPLSIPNQRMPTMPMLDIRPGLIPQAPGPRFPLIQPGIPPQRGIPPPSVLDSALHPPPRGPFPPGDIFSQPERPFLAPGRQSVDNVTNPEKRIPLGNDNIQQEGDRDYRFPPIETRESISRPPPVDVRDVVGRPIDPREGPGRPPLDGRDHFGRPPVDIRENLVRPGIDHLGRRDHFGFNPEKPWGHRGDFDEREHRVLPVYGGPKGLHEERGRFRSGNYRFDPRSGPWNRGFGQEVHRDFDDRRRPWERQRDRDDRDFDFCREMNGNRLGRDRIQNTWVPPPHARVFDYFEGATSQRKGDNVPQVNGENTERHAQPPPIPVQNDPELYEKLTSSNEINKEKSDTVADIESEPVVESTETEGT

SEQ ID NO: 41062 - protein, 1337 aa, Homo sapiens
MPQPLLPALPPLSSPSGAGSCGPSGGECSGRRLFRRRARGLRSDNMEAVKTFNSEDCASTPACTDCFSSSMDTRSILYSLNDYKPPISKAKMTQITKAAIKAIKFYKHVVQSVEKFIQKCKPEYKVPGLYVIDSIVRQSRHQFGQEKDVFAPRFSNNIISTFQNLYRCPGDDKSKIVRVLNLWQKNNVFKSEIIQPLLDMAAGIPPPVVTPVLASTTTAMSNTPGTPVTPVTPANVVQGLPDPWVSQITNTDTLAAVAQILQSPQGQQLQQLIQTLQIQQQKPQPSILQALDAGLVVQLQALTAQLTAAAAAANTLTPLEQGVSFNKKLMDRFDFGEDSEHSEEPKKEIPASQLSHVSESVNNSIFHQIAEQLQQQNLEHLRQQLLEQQQPQKATPQDSQEGTFGSEHSASPSQGSSQQHFLEPEVNLDDSIDIQQQDMDIDEGQDGVEEEVFEQEAKKVAVRSRSRTHSRSRSRSPRKRRSRSRSGSRKRKHRKRSRSRSRERKRKSSRSYSSERRAREREKERQKKGLPPIRSKTLSVCSTTLWVGQVDKKATQQDLTNLFEEFGQIESINMIPPRGCAYVCMVHRQDAFRALQKLSSGSYKIGSKVIKIAWALNKGVKTEYKQFWDVDLGVTYIPWEKVKVDDLEGFAEGGMIDQETVNTEWETVKSSEPVKETVQTTQSPTPVEKETVVTTQAEVFPPPVAMLQIPVAPAVPTVSLVPPAFPVSMPVPPPGFSPIPPPPFLRASFNPSQPPPGFMPPPVPPPVVPPPTIPPVVPTSLVQPSLSMTPETVKDVGFGSLVIPGGSVASNLATSALPAGNVFNAPTKQAEPEEKVPHLIDHQISSGENTRSVIPNDISSNAAILGGQPPNVTSNSGILGVQRPNVSSNSEILGVRPSNVSSSSGIIAAQPPNILNNSGILGIQPPSVSNSSGLLGVLPPNIPNNSGLVGVQPPNVPNTPGLLGTQPPAGPQNLPPLSIPNQRMPTMPMLDIRPGLIPQAPGPRFPLIQPGIPPQRGIPPPSVLDSALHPPPRGPFPPGDIFSQPERPFLAPGRQSVDNVTNPEKRIPLGNDNIQQEGDRDYRFPPIETRESISRPPPVDVRDVVGRPIDPREGPGRPPLDGRDHFGRPPVDIRENLVRPGIDHLGRRDHFGFNPEKPWGHRGDFDEREHRVLPVYGGPKGLHEERGRFRSGNYRFDPRSGPWNRGFGQEVHRDFDDRRRPWERQRDRDDRDFDFCREMNGNRLGRDRIQNTWVPPPHARVFDYFEGATSQRKGDNVPQVNGENTERHAQPPPIPVQNDPELYEKLTSSNEINKEKSDTVADIESEPVVESTETEGT

SEQ ID NO: 41063 - protein, 1393 aa, Homo sapiens
MVEPGQDLLLAALSESGISPNDLFDIDGGDAGLATPMPTPSVQQSVPLSALELGLETEAAVPVKQEPETVPTPALLNVRQQPPSTTTFVLNQINHLPPLGSTIVMTKTPPVTTNRQTITLTKFIQTTASTRPSVSAPTVRNAMTSAPSKDQVQLKDLLKNNSLNELMKLKPPANIAQPVATAATDVSNGTVKKESSNKEGARMWINDMKMRSFSPTMKVPVVKEDDEPEEEDEEEMGHAETYAEYMPIKLKIGLRHPDAVVETSSLSSVTPPDVWYKTSISEETIDNGWLSALQLEAITYAAQQHETFLPNGDRAGFLIGDGAGVGKGRTIAGIIYENYLLSRKRALWFSVSNDLKYDAERDLRDIGAKNILVHSLNKFKYGKISSKHNGSVKKGVIFATYSSLIGESQSGGKYKTRLKQLLHWCGDDFDGVIVFDECHKAKNLCPVGSSKPTKTGLAVLELQNKLPKARVVYASATGASEPRNMAYMNRLGIWGEGTPFREFSDFIQAVERRGVGAMEIVAMDMKLRGMYIARQLSFTGVTFKIEEVLLSQSYVKMYNKAVKLWVIARERFQQAADLIDAEQRMKKSMWGQFWSAHQRFFKYLCIASKVKRVVQLAREEIKNGKCVVIGLQSTGEARTLEALEEGGGELNDFVSTAKGVLQSLIEKHFPAPDRKKLYSLLGIDLTAPSNNSSPRDSPCKENKIKKRKGEEITREAKKARKVGGLTGSSSDDSGSESDASDNEESDYESSKNMSSGDDDDFNPFLDESNEDDENDPWLIRKDHKKNKEKKKKKSIDPDSIQSALLASGLGSKRPSFSSTPVISPAPNSTPANSNTNSNSSLITSQDAVERAQQMKKDLLDKLEKLAEDLPPNTLDELIDELGGPENVAEMTGRKGRVVSNDDGSISYESRSELDVPVEILNITEKQRFMDGDKNIAIISEAASSGISLQADRRAKNQRRRVHMTLELPWSADRAIQQFGRTHRSNQVTAPEYVFLISELAGEQRFASIVAKRLESLGALTHGDRRATESRDLSRFNFDNKYGRNALEIVMKSIVNLDSPMVSPPPDYPGEFFKDVRQGLIGVGLINVEDRSGILTLDKDYNNIGKFLNRILGMEVHQQNALFQYFADTLTAVVQNAKKNGRYDMGILDLGSGDEKVRKSDVKKFLTPGYSTSGHVELYTISVERGMSWEEATKIWAELTGPDDGFYLSLQIRNNKKTAILVKEVNPKKKLFLVYRPNTGKQLKLEIYADLKKKYKKVVSDDALMHWLDQYNSSADTCTHAYWRGNCKKASLGLVCEIGLRCRTYYVLCGSVLSVWTKVEGVLASVSGTNVKMQIVRLRTEDGQRIVGLIIPANCVSPLVNLLSTSDQSQQLAVQQKQLWQQHHPQSITNLSNA

SEQ ID NO: 41064 - protein, 1392 aa, Homo sapiens
MVEPGQDLLLAALSESGISPNDLFDIDGGDAGLATPMPTPSVQQSVPLSALELGLETEAAVPVKQEPETVPTPALLNVRQPPSTTTFVLNQINHLPPLGSTIVMTKTPPVTTNRQTITLTKFIQTTASTRPSVSAPTVRNAMTSAPSKDQVQLKDLLKNNSLNELMKLKPPANIAQPVATAATDVSNGTVKKESSNKEGARMWINDMKMRSFSPTMKVPVVKEDDEPEEEDEEEMGHAETYAEYMPIKLKIGLRHPDAVVETSSLSSVTPPDVWYKTSISEETIDNGWLSALQLEAITYAAQQHETFLPNGDRAGFLIGDGAGVGKGRTIAGIIYENYLLSRKRALWFSVSNDLKYDAERDLRDIGAKNILVHSLNKFKYGKISSKHNGSVKKGVIFATYSSLIGESQSGGKYKTRLKQLLHWCGDDFDGVIVFDECHKAKNLCPVGSSKPTKTGLAVLELQNKLPKARVVYASATGASEPRNMAYMNRLGIWGEGTPFREFSDFIQAVERRGVGAMEIVAMDMKLRGMYIARQLSFTGVTFKIEEVLLSQSYVKMYNKAVKLWVIARERFQQAADLIDAEQRMKKSMWGQFWSAHQRFFKYLCIASKVKRVVQLAREEIKNGKCVVIGLQSTGEARTLEALEEGGGELNDFVSTAKGVLQSLIEKHFPAPDRKKLYSLLGIDLTAPSNNSSPRDSPCKENKIKKRKGEEITREAKKARKVGGLTGSSSDDSGSESDASDNEESDYESSKNMSSGDDDDFNPFLDESNEDDENDPWLIRKDHKKNKEKKKKKSIDPDSIQSALLASGLGSKRPSFSSTPVISPAPNSTPANSNTNSNSSLITSQDAVERAQQMKKDLLDKLEKLAEDLPPNTLDELIDELGGPENVAEMTGRKGRVVSNDDGSISYESRSELDVPVEILNITEKQRFMDGDKNIAIISEAASSGISLQADRRAKNQRRRVHMTLELPWSADRAIQQFGRTHRSNQVTAPEYVFLISELAGEQRFASIVAKRLESLGALTHGDRRATESRDLSRFNFDNKYGRNALEIVMKSIVNLDSPMVSPPPDYPGEFFKDVRQGLIGVGLINVEDRSGILTLDKDYNNIGKFLNRILGMEVHQQNALFQYFADTLTAVVQNAKKNGRYDMGILDLGSGDEKVRKSDVKKFLTPGYSTSGHVELYTISVERGMSWEEATKIWAELTGPDDGFYLSLQIRNNKKTAILVKEVNPKKKLFLVYRPNTGKQLKLEIYADLKKKYKKVVSDDALMHWLDQYNSSADTCTHAYWRGNCKKASLGLVCEIGLRCRTYYVLCGSVLSVWTKVEGVLASVSGTNVKMQIVRLRTEDGQRIVGLIIPANCVSPLVNLLSTSDQSQQLAVQQKQLWQQHHPQSITNLSNA

SEQ ID NO: 41065 - protein, 1391 aa, Homo sapiens
MVEPGQDLLLAALSESGISPNDLFDIDGGDAGLATPMPTPSVQQSVPLSALELGLETEAAVPVKQEPETVPTPALLNQQPPSTTTFVLNQINHLPPLGSTIVMTKTPPVTTNRQTITLTKFIQTTASTRPSVSAPTVRNAMTSAPSKDQVQLKDLLKNNSLNELMKLKPPANIAQPVATAATDVSNGTVKKESSNKEGARMWINDMKMRSFSPTMKVPVVKEDDEPEEEDEEEMGHAETYAEYMPIKLKIGLRHPDAVVETSSLSSVTPPDVWYKTSISEETIDNGWLSALQLEAITYAAQQHETFLPNGDRAGFLIGDGAGVGKGRTIAGIIYENYLLSRKRALWFSVSNDLKYDAERDLRDIGAKNILVHSLNKFKYGKISSKHNGSVKKGVIFATYSSLIGESQSGGKYKTRLKQLLHWCGDDFDGVIVFDECHKAKNLCPVGSSKPTKTGLAVLELQNKLPKARVVYASATGASEPRNMAYMNRLGIWGEGTPFREFSDFIQAVERRGVGAMEIVAMDMKLRGMYIARQLSFTGVTFKIEEVLLSQSYVKMYNKAVKLWVIARERFQQAADLIDAEQRMKKSMWGQFWSAHQRFFKYLCIASKVKRVVQLAREEIKNGKCVVIGLQSTGEARTLEALEEGGGELNDFVSTAKGVLQSLIEKHFPAPDRKKLYSLLGIDLTAPSNNSSPRDSPCKENKIKKRKGEEITREAKKARKVGGLTGSSSDDSGSESDASDNEESDYESSKNMSSGDDDDFNPFLDESNEDDENDPWLIRKDHKKNKEKKKKKSIDPDSIQSALLASGLGSKRPSFSSTPVISPAPNSTPANSNTNSNSSLITSQDAVERAQQMKKDLLDKLEKLAEDLPPNTLDELIDELGGPENVAEMTGRKGRVVSNDDGSISYESRSELDVPVEILNITEKQRFMDGDKNIAIISEAASSGISLQADRRAKNQRRRVHMTLELPWSADRAIQQFGRTHRSNQVTAPEYVFLISELAGEQRFASIVAKRLESLGALTHGDRRATESRDLSRFNFDNKYGRNALEIVMKSIVNLDSPMVSPPPDYPGEFFKDVRQGLIGVGLINVEDRSGILTLDKDYNNIGKFLNRILGMEVHQQNALFQYFADTLTAVVQNAKKNGRYDMGILDLGSGDEKVRKSDVKKFLTPGYSTSGHVELYTISVERGMSWEEATKIWAELTGPDDGFYLSLQIRNNKKTAILVKEVNPKKKLFLVYRPNTGKQLKLEIYADLKKKYKKVVSDDALMHWLDQYNSSADTCTHAYWRGNCKKASLGLVCEIGLRCRTYYVLCGSVLSVWTKVEGVLASVSGTNVKMQIVRLRTEDGQRIVGLIIPANCVSPLVNLLSTSDQSQQLAVQQKQLWQQHHPQSITNLSNA

SEQ ID NO: 41066 - protein, 732 aa, Homo sapiens
MVEPGQDLLLAALSESGISPNDLFDIDGGDAGLATPMPTPSVQQSVPLSALELGLETEAAVPVKQEPETVPTPALLNVRQPPSTTTFVLNQINHLPPLGSTIVMTKTPPVTTNRQTITLTKFIQTTASTRPSVSAPTVRNAMTSAPSKDQVQLKDLLKNNSLNELMKLKPPANIAQPVATAATDVSNGTVKKESSNKEGARMWINDMKMRSFSPTMKVPVVKEDDEPEEEDEEEMGHAETYAEYMPIKLKIGLRHPDAVVETSSLSSVTPPDVWYKTSISEETIDNGWLSALQLEAITYAAQQHETFLPNGDRAGFLIGDGAGVGKGRTIAGIIYENYLLSRKRALWFSVSNDLKYDAERDLRDIGAKNILVHSLNKFKYGKISSKHNGSVKKGVIFATYSSLIGESQSGGKYKTRLKQLLHWCGDDFDGVIVFDECHKAKNLCPVGSSKPTKTGLAVLELQNKLPKARVVYASATGASEPRNMAYMNRLGIWGEGTPFREFSDFIQAVERRGVGAMEIVAMDMKLRGMYIARQLSFTGVTFKIEEVLLSQSYVKMYNKAVKLWVIARERFQQAADLIDAEQRMKKSMWGQFWSAHQRFFKYLCIASKVKRVVQLAREEIKNGKCVVIGLQSTGEARTLEALEEGGGELNDFVSTAKGVLQSLIEKHFPAPDRKKLYSLLGIDLTAPSNNSSPRDSPCKENKIKKRKGEEITREAKKARKMSLMRMMKMIPG

SEQ ID NO: 41067 - protein, 339 aa, Homo sapiens
MAAACGPGAAGYCLLLGLHLFLLTAGPALGWNDPDRMLLRDVKALTLHYDRYTTSRRLDPIPQLKCVGGTAGCDSYTPKVIQCQNKGWDGYDVQWECKTDLDIAYKFGKTVVSCEGYESSEDQYVLRGSCGLEYNLDYTELGLQKLKESGKQHGFASFSDYYYKWSSADSCNMSGLITIVVLLGIAFVVYKLFLSDGQYSPPPYSEYPPFSHRYQRFTNSAGPPPPGFKSEFTGPQNTGHGATSGFGSAFTGQQGYENSGPGFWTGLGTGGILGYLFGSNRAATPFSDSWYYPSYPPSYPGTWNRAYSPLHGGSGSYSVCSNSDTKTRTASGYGGTRRR

SEQ ID NO: 41068 - protein, 167 aa, Homo sapiens
MSGLITIVVLLGIAFVVYKLFLSDGQYSPPPYSEYPPFSHRYQRFTNSAGPPPPGFKSEFTGPQNTGHGATSGFGSAFTGQQGYENSGPGFWTGLGTGGILGYLFGSNRAATPFSDSWYYPSYPPSYPGTWNRAYSPLHGGSGSYSVCSNSDTKTRTASGYGGTRRR

SEQ ID NO: 41069 - protein, 343 aa, Homo sapiens
MQPPPPGPLGDCLRDWEDLQQDFQNIQETHRLYRLKLEELTKLQNNCTSSITRQKKRLQELALALKKCKPSLPAEAEGAAQELENQMKERQGLFFDMEAYLPKKNGLYLSLVLGNVNVTLLSKQAKFAYKDEYEKFKLYLTIILILISFTCRFLLNSRVTDAAFNFLLVWYYCTLTIRESILINNGSRIKGWWVFHHYVSTFLSGVMLTWPDGLMYQKFRNQFLSFSMYQSFVQFLQYYYQSGCLYRLRALGERHTMDLTVEGFQSWMWRGLTFLLPFLFFGHFWQLFNALTLFNLAQDPQCKEWQVLMCGFPFLLLFLGNFFTTLRVVHHKFHSQRHGSKKD

SEQ ID NO: 41070 - protein, 322 aa, Homo sapiens
MQPPPPGPLGDCLRDWEDLQQDFQNIQETHRLYRLKLEELTKLQNNCTSSITRQKKRLQELALALKKCKPSLPAEAEGAAQELENQMKERQGLFFDMEAYLPKKNGLYLSLVLGNVNVTLLSKQAKFAYKDEYEKFKLYLTIILILISFTCRFLLNSRVTDAAFNFLLVWYYCTLTIRESILINNGSRWAGRALREGSMEWGARTLREAGTGAGGDGGSLLQDQRLVGVPSLRVHLPVGSHADVVRRSHVPEIPEPIPLLFHVPELRAVSPVLLPERLPLPPAGAGRAAHHGPHCGGLPVLDVAGPHLPAAFSFLWTLLAAF

SEQ ID NO: 41071 - protein, 517 aa, Homo sapiens
MAALGPSSQNVTEYVVRVPKNTTKKYNIMAFNAADKVNFATWNQARLERDLSNKKIYQEEEMPESGAGSEFNRKLREEARRKKYGIVLKEFRPEDQPWLLRVNGKSGRKFKGIKKGGVTENTSYYIFTQCPDGAFEAFPVHNWYNFTPLARHRTLTAEEAEEEWERRNKVLNHFSIMQQRRLKDQDQDEDEEEKEKRGRRKASELRIHDLEDDLEMSSDASDASGEEGGRVPKAKKKAPLAKGGRKKKKKKGSDDEAFEDSDDGDFEGQEVDYMSDGSSSSQEEPESKAKAPQQEEGPKGVDEQSDSSEESEEEKPPEEDKEEEEEKKAPTPQEKKRRKDSSEESDSSEESDIDSEASSALFMAKKKTPPKRERKPSGGSSRGNSRPGTPSAEGGSTSSTLRAAASKLEQGKRVSEMPAAKRLRLDTGPQSLSGKSTPQPPSGKTTPNSGDVQVTEDAVRRYLTRKPMTTKDLLKKFQTKKTGLSSEQTVNVLAQILKRLNPERKMINDKMHFSLKE

SEQ ID NO: 41072 - protein, 805 aa, Homo sapiens
MAFSPWQILSPVQWAKWTWSAVRGGAAGEDEAGGPEGDPEEEDSQAETKSLSFSSDSEGNFETPEAETPIRSPFKESCDPSLGLAGPGAKSQESQEADEQLVAEVVEKCSSKTCSKPSENEVPQQAIDSHSVKNFREEPEHDFSKISIVRPFSIETKDSTDISAVLGTKAAHGCVTAVSGKALPSSPPDALQDEAMTEGSMGVTLEASAEADLKAGNSCPELVPSRRSKLRKPKPVPLRKKAIGGEFSDTNAAVEGTPLPKASYHFSPEELDENTSPLLGDARFQKSPPDLKETPGTLSSDTNDSGVELGEESRSSPLKLEFDFTEDTGNIEARKALPRKLGRKLGSTLTPKIQKDGISKSAGLEQPTDPVARDGPLSQTSSKPDPSQWESPSFNPFGSHSVLQNSPPLSSEGSYHFDPDNFDESMDPFKPTTTLTSSDFCSPTGNHVNEILESPKKAKSRLITSGCKVKKHETQSLALDACSRDEGAVISQISDISNRDGHATDEEKLASTSCGQKSAGAEVKGEPEEDLEYFECSNVPVSTINHAFSSSEAGIEKETCQKMEEDGSTVLGLLESSAEKAPVSVSCGGESPLDGICLSESDKTAVLTLIREEIITKEIEANEWKKKYEETRQEVLEMRKIVAEYEKTIAQMIEDEQRTSMTSQKSFQQLTMEKEQALADLNSVERSLSDLFRRYENLKGVLEGFKKNEEALKKCAQDYLARVKQEEQRYQALKIHAEEKLDKANEEIAQVRTKAKAESAALHAGLRKEQMKVESLERALQQKNQEIEELTKICDELIAKLGKTD

SEQ ID NO: 41073 - protein, 817 aa, Homo sapiens
MAFSPWQILSPVQWAKWTWSAVRGGAAGEDEAGGPEGDPEEEDSQAETKSLSFSSDSEGNFETPEAETPIRSPFKESCDPSLGLAGPGAKSQESQEADEQLVAEVVEKCSSKTCSKPSENEVPQQAIDSHSVKNFREEPEHDFSKISIVRPFSIETKDSTDISAVLGTKAAHGCVTAVSGKALPSSPPDALQDEAMTEGSMGVTLEASAEADLKAGNSCPELVPSRRSKLRKPKPVPLRKKAIGGEFSDTNAAVEGTPLPKASYHFSPEELDENTSPLLGDARFQKSPPDLKETPGTLSSDTNDSGVELGEESRSSPLKLEFDFTEDTGNIEARKALPRKLGRKLGSTLTPKIQKDGISKSAGLEQPTDPVARDGPLSQTSSKPDPSQWESPSFNPFGSHSVLQNSPPLSSEGSYHFDPDNFDESMDPFKPTTTLTSSDFCSPTGNHVNEILESPKKAKSRLITTTEQVKFLCFLLSGCKVKKHETQSLALDACSRDEGAVISQISDISNRDGHATDEEKLASTSCGQKSAGAEVKGEPEEDLEYFECSNVPVSTINHAFSSSEAGIEKETCQKMEEDGSTVLGLLESSAEKAPVSVSCGGESPLDGICLSESDKTAVLTLIREEIITKEIEANEWKKKYEETRQEVLEMRKIVAEYEKTIAQMIEDEQRTSMTSQKSFQQLTMEKEQALADLNSVERSLSDLFRRYENLKGVLEGFKKNEEALKKCAQDYLARVKQEEQRYQALKIHAEEKLDKANEEIAQVRTKAKAESAALHAGLRKEQMKVESLERALQQKNQEIEELTKICDELIAKLGKTD

SEQ ID NO: 41074 - protein, 610 aa, Homo sapiens
MTEGSMGVTLEASAEADLKAGNSCPELVPSRRSKLRKPKPVPLRKKAIGGEFSDTNAAVEGTPLPKASYHFSPEELDENTSPLLGDARFQKSPPDLKETPGTLSSDTNDSGVELGEESRSSPLKLEFDFTEDTGNIEARKALPRKLGRKLGSTLTPKIQKDGISKSAGLEQPTDPVARDGPLSQTSSKPDPSQWESPSFNPFGSHSVLQNSPPLSSEGSYHFDPDNFDESMDPFKPTTTLTSSDFCSPTGNHVNEILESPKKAKSRLITSGCKVKKHETQSLALDACSRDEGAVISQISDISNRDGHATDEEKLASTSCGQKSAGAEVKGEPEEDLEYFECSNVPVSTINHAFSSSEAGIEKETCQKMEEDGSTVLGLLESSAEKAPVSVSCGGESPLDGICLSESDKTAVLTLIREEIITKEIEANEWKKKYEETRQEVLEMRKIVAEYEKTIAQMIEDEQRTSMTSQKSFQQLTMEKEQALADLNSVERSLSDLFRRYENLKGVLEGFKKNEEALKKCAQDYLARVKQEEQRYQALKIHAEEKLDKANEEIAQVRTKAKAESAALHAGLRKEQMKVESLERALQQKNQEIEELTKICDELIAKLGKTD

SEQ ID NO: 41075 - protein, 379 aa, Homo sapiens
MGGSHSQTPRGREPAGERHPRPTETATTEQVKFLCFLLSGCKVKKHETQSLALDACSRDEGAVISQISDISNRDGHATDEEKLASTSCGQKSAGAEVKGEPEEDLEYFECSNVPVSTINHAFSSSEAGIEKETCQKMEEDGSTVLGLLESSAEKAPVSVSCGGESPLDGICLSESDKTAVLTLIREEIITKEIEANEWKKKYEETRQEVLEMRKIVAEYEKTIAQMIEDEQRTSMTSQKSFQQLTMEKEQALADLNSVERSLSDLFRRYENLKGVLEGFKKNEEALKKCAQDYLARVKQEEQRYQALKIHAEEKLDKANEEIAQVRTKAKAESAALHAGLRKEQMKVESLERALQQKNQEIEELTKICDELIAKLGKTD

SEQ ID NO: 41076 - protein, 367 aa, Homo sapiens
MGGSHSQTPRGREPAGERHPRPTETASGCKVKKHETQSLALDACSRDEGAVISQISDISNRDGHATDEEKLASTSCGQKSAGAEVKGEPEEDLEYFECSNVPVSTINHAFSSSEAGIEKETCQKMEEDGSTVLGLLESSAEKAPVSVSCGGESPLDGICLSESDKTAVLTLIREEIITKEIEANEWKKKYEETRQEVLEMRKIVAEYEKTIAQMIEDEQRTSMTSQKSFQQLTMEKEQALADLNSVERSLSDLFRRYENLKGVLEGFKKNEEALKKCAQDYLARVKQEEQRYQALKIHAEEKLDKANEEIAQVRTKAKAESAALHAGLRKEQMKVESLERALQQKNQEIEELTKICDELIAKLGKTD

SEQ ID NO: 41077 - protein, 395 aa, Homo sapiens
MAFSPWQILSPVQWAKWTWSAVRGGAAGEDEAGGPEGDPEEEDSQAETKSLSFRSGCKVKKHETQSLALDACSRDEGAVISQISDISNRDGHATDEEKLASTSCGQKSAGAEVKGEPEEDLEYFECSNVPVSTINHAFSSSEAGIEKETCQKMEEDGSTVLGLLESSAEKAPVSVSCGGESPLDGICLSESDKTAVLTLIREEIITKEIEANEWKKKYEETRQEVLEMRKIVAEYEKTIAQMIEDEQRTSMTSQKSFQQLTMEKEQALADLNSVERSLSDLFRRYENLKGVLEGFKKNEEALKKCAQDYLARVKQEEQRYQALKIHAEEKLDKANEEIAQVRTKAKAESAALHAGLRKEQMKVESLERALQQKNQEIEELTKICDELIAKLGKTD

SEQ ID NO: 41078 - protein, 731 aa, Homo sapiens
MNNILKLKSSDSEGNFETPEAETPIRSPFKESCDPSLGLAGPGAKSQESQEADEQLVAEVVEKCSSKTCSKPSENEVPQQAIDSHSVKNFREEPEHDFSKISIVRPFSIETKDSTDISAVLGTKAAHGCVTAVSGKALPSSPPDALQDEAMTEGSMGVTLEASAEADLKAGNSCPELVPSRRSKLRKPKPVPLRKKAIGGEFSDTNAAVEGTPLPKASYHFSPEELDENTSPLLGDARFQKSPPDLKETPGTLSSDTNDSGVELGEESRSSPLKLEFDFTEDTGNIEARKALPRKLGRKLGSTLTPKIQKDGISKSAGLEQPTDPVARDGPLSQTSSKPDPSQWESPSFNPFGSHSVLQNSPPLSSEGSYHFDPDNFDESMDPFKPTTTLTSSDFCSPTGNHVNEILESPKKAKSRLITSGCKVKKHETQSLALDACSRDEGAVISQISDISNRDGHATDEEKLASTSCGQKSAGAEVKGIEKETCQKMEEDGSTVLGLLESSAEKAPVSVSCGGESPLDGICLSESDKTAVLTLIREEIITKEIEANEWKKKYEETRQEVLEMRKIVAEYEKTIAQMIEDEQRTSMTSQKSFQQLTMEKEQALADLNSVERSLSDLFRRYENLKGVLEGFKKNEEALKKCAQDYLARVKQEEQRYQALKIHAEEKLDKANEEIAQVRTKAKAESAALHAGLRKEQMKVESLERALQQKNQEIEELTKICDELIAKLGKTD

SEQ ID NO: 41079 - protein, 154 aa, Homo sapiens
MIEDEQRTSMTSQKSFQQLTMEKEQALADLNSVERSLSDLFRRYENLKGVLEGFKKNEEALKKCAQDYLARVKQEEQRYQALKIHAEEKLDKANEEIAQVRTKAKAESAALHAGLRKEQMKVESLERALQQKNQEIEELTKICDELIAKLGKTD

SEQ ID NO: 41080 - protein, 776 aa, Homo sapiens
MAFSPWQILSPVQWAKWTWSAVRGGAAGEDEAGGPEGDPEEEDSQAETKSLSFSSDSEGNFETPEAETPIRSPFKESCDPSLGLAGPGAKSQESQEADEQLVAEVVEKCSSKTCSKPSENEVPQQAIDSHSVKNFREEPEHDFSKISIVRPFSIETKDSTDISAVLGTKAAHGCVTAVSGKALPSSPPDALQDEAMTEGSMGVTLEASAEADLKAGNSCPELVPSRRSKLRKPKPVPLRKKAIGGEFSDTNAAVEGTPLPKASYHFSPEELDENTSPLLGDARFQKSPPDLKETPGTLSSDTNDSGVELGEESRSSPLKLEFDFTEDTGNIEARKALPRKLGRKLGSTLTPKIQKDGISKSAGLEQPTDPVARDGPLSQTSSKPDPSQWESPSFNPFGSHSVLQNSPPLSSEGSYHFDPDNFDESMDPFKPTTTLTSSDFCSPTGNHVNEILESPKKAKSRLITSGCKVKKHETQSLALDACSRDEGAVISQISDISNRDGHATDEEKLASTSCGQKSAGAEVKGIEKETCQKMEEDGSTVLGLLESSAEKAPVSVSCGGESPLDGICLSESDKTAVLTLIREEIITKEIEANEWKKKYEETRQEVLEMRKIVAEYEKTIAQMIEDEQRTSMTSQKSFQQLTMEKEQALADLNSVERSLSDLFRRYENLKGVLEGFKKNEEALKKCAQDYLARVKQEEQRYQALKIHAEEKLDKANEEIAQVRTKAKAESAALHAGLRKEQMKVESLERALQQKNQEIEELTKICDELIAKLGKTD

SEQ ID NO: 41081 - protein, 366 aa, Homo sapiens
MAFSPWQILSPVQWAKWTWSAVRGGAAGEDEAGGPEGDPEEEDSQAETKSLSFRSGCKVKKHETQSLALDACSRDEGAVISQISDISNRDGHATDEEKLASTSCGQKSAGAEVKGIEKETCQKMEEDGSTVLGLLESSAEKAPVSVSCGGESPLDGICLSESDKTAVLTLIREEIITKEIEANEWKKKYEETRQEVLEMRKIVAEYEKTIAQMIEDEQRTSMTSQKSFQQLTMEKEQALADLNSVERSLSDLFRRYENLKGVLEGFKKNEEALKKCAQDYLARVKQEEQRYQALKIHAEEKLDKANEEIAQVRTKAKAESAALHAGLRKEQMKVESLERALQQKNQEIEELTKICDELIAKLGKTD

SEQ ID NO: 41082 - protein, 2948 aa, Homo sapiens
MGNENSTSDNQRTLSAQTPRSAQPPGNSQNIKRKQQDTPGSPDHRDASSIGSVGLGGFCTASESSASLDPCLVSPEVTEPRKDPQGARGPEGSLLPSPPPSQEREHPSSSMPFAECPPEGCLASPAAAPEDGPQTQSPRREPAPNAPGDIAAAFPAERDSSTPYQEIAAVPSAGRERQPKEEGQKSSFSFSSGIDQSPGMSPVPLREPMKAPLCGEGDQPGGFESQEKEAAGGFPPAESRQGVASVQVTPEAPAAAQQGTESSAVLEKSPLKPMAPIPQDPAPRASDRERGQGEAPPQYLTDDLEFLRACHLPRSNSGAAPEAEVNAASQESCQQPVGAYLPHAELPWGLPSPALVPEAGGSGKEALDTIDVQGHPQTGMRGTKPNQVVCVAAGGQPEGGLPVSPEPSLLTPTEEAHPASSLASFPAAQIPIAVEEPGSSSRESVSKAGMPVSADAAKEVVDAGLVGLERQVSDLGSKGEHPEGDPGEVPAPSPQERGEHLNTEQSHEVQPGVPPPPLPKEQSHEVQPGAPPPPLPKAPSESARGPPGPTDGAKVHEDSTSPAVAKEGSRSPGDSPGGKEEAPEPPDGGDPGNLQGEDSQAFSSKRDPEVGKDELSKPSSDAESRDHPSSHSAQPPRKGGAGHTDGPHSQTAEADASGLPHKLGEEDPVLPPVPDGAGEPTVPEGAIWEGSGLQPKCPDTLQSREGLGRMESFLTLESEKSDFPPTPVAEVAPKAQEGESTLEIRKMGSCDGEGLLTSPDQPRGPACDASRQEFHAGVPHPPQGENLAADLGLTALILDQDQQGIPSCPGEGWIRGAASEWPLLSSEKHLQPSQAQPETSIFDVLKEQAQPPENGKETSPSHPGFKDQGADSSQIHVPVEPQEDNNLPTHGGQEQALGSELQSQLPKGTLSDTPTSSPTDMVWESSLTEESELSAPTRQKLPALGEKRPEGACGDGQSSRVSPPAADVLKDFSLAGNFSRKETCCTGQGPNKSQQALADALEEGSQHEEACQRHPGASEAADGCSPLWGLSKREMASGNTGEAPPCQPDSVALLDAVPCLPALAPASPGVTPTQDAPETEACDETQEGRQQPVPAPQQKMECWATSDAESPKLLASFPSAGEQGGEAGAAETGGSAGAGDPGKQQAPEKPGEATLSCGLLQTEHCLTSGEEASTSALRESCQAEHPMASCQDALLPARELGGIPRSTMDFSTHQAVPDPKELLLSGPPEVAAPDTPYLHVDSAAQRGAEDSGVKAVSSADPRAPGESPCPVGEPPLALENAASLKLFAGSLAPLLQPGAAGGEIPAVQASSGSPKARTTEGPVDSMPCLDRMPLLAKGKQATGEEKAATAPGAGAKASGEGMAGDAAGETEGSMERMGEPSQDPKQGTSGGVDTSSEQIATLTGFPDFREHIAKIFEKPVLGALATPGEKAGAGRSAVGKDLTRPLGPEKLLDGPPGVDVTLLPAPPARLQVEKKQQLAGEAEISHLALQDPASDKLLGPAGLTWERNLPGAGVGKEMAGVPPTLREDERPEGPGAAWPGLEGQAYSQLERSRQELASGLPSPAATQELPVERAAAFQVAPHSHGEEAVAQDRIPSGKQHQETSACDSPHGEDGPGDFAHTGVPGHVPRSTCAPSPQREVLTVPEANSEPWTLDTLGGERRPGVTAGILEMRNALGNQSTPAPPTGEVADTPLEPGKVAGAAGEAEGDITLSTAETQACASGDLPEAGTTRTFSVVAGDLVLPGSCQDPACSDKAPGMEGTAALHGDSPARPQQAKEQPGPERPIPAGDGKVCVSSPPEPDETHDPKLQHLAPEELHTDRESPRPGPSMLPSVPKKDAPRVMDKVTSDETRGAEGTESSPVADDIIQPAAPADLESPTLAASSYHGDVVGQVSTDLIAQSISPAAAHAGLPPSAAEHIVSPSAPAGDRVEASTPSCPDPAKDLSRSSDSEEAFETPESTTPVKAPPAPPPPPPEVIPEPEVSTQPPPEEPGCGSETVPVPDGPRSDSVEGSPFRPPSHSFSAVFDEDKPIASSGTYNLDFDNIELVDTFQTLEPRASDAKNQEGKVNTRRKSTDSVPISKSTLSRSLSLQASDFDGASSSGNPEAVALAPDAYSTGSSSASSTLKRTKKPRPPSLKKKQTTKKPTETPPVKETQQEPDEESLVPSGENLASETKTESAKTEGPSPALLEETPLEPAVGPKAACPLDSESAEGVVPPASGGGRVQNSPPVGRKTLPLTTAPEAGEVTPSDSGGQEDSPAKGLSVRLEFDYSEDKSSWDNQQENPPPTKKIGKKPVAKMPLRRPKMKKTPEKLDNTPASPPRSPAEPNDIPIAKGTYTFDIDKWDDPNFNPFSSTSKMQESPKLPQQSYNFDPDTCDESVDPFKTSSKTPSSPSKSPASFEIPASAMEANGVDGDGLNKPAKKKKTPLKTDTFRVKKSPKRSPLSDPPSQDPTPAATPETPPVISAVVHATDEEKLAVTNQKWTCMTVDLEADKQDYPQPSDLSTFVNETKFSSPTEELDYRNSYEIEYMEKIGSSLPQDDDAPKKQALYLMFDTSQESPVKSSPVRMSESPTPCSGSSFEETEALVNTAAKNQHPVPRGLAPNQESHLQVPEKSSQKELEAMGLGTPSEAIEITAPEGSFASADALLSRLAHPVSLCGALDYLEPDLAEKNPPLFAQKLQEELEFAIMRIEALKLARQIALASRSHQDAKREAAHPTDVSISKTALYSRIGTAEVEKPAGLLFQQPDLDSALQIARAEIITKEREVSEWKDKYEESRREVMEMRKIVAEYEKTIAQMIEDEQREKSVSHQTVQQLVLEKEQALADLNSVEKSLADLFRRYEKMKEVLEGFRKNEEVLKRCAQEYLSRVKKEEQRYQALKVHAEEKLDRANAEIAQVRGKAQQEQAAHQASLRKEQLRVDALERTLEQKNKEIEELTKICDELIAKMGKS

SEQ ID NO: 41083 - protein, 1026 aa, Homo sapiens
MGGSQSLQPAPASDLNLEASEAMSSDSEEAFETPESTTPVKAPPAPPPPPPEVIPEPEVSTQPPPEEPGCGSETVPVPDGPRSDSVEGSPFRPPSHSFSAVFDEDKPIASSGTYNLDFDNIELVDTFQTLEPRASDAKNQEGKVNTRRKSTDSVPISKSTLSRSLSLQASDFDGASSSGNPEAVALAPDAYSTGSSSASSTLKRTKKPRPPSLKKKQTTKKPTETPPVKETQQEPDEESLVPSGENLASETKTESAKTEGPSPALLEETPLEPAVGPKAACPLDSESAEGVVPPASGGGRVQNSPPVGRKTLPLTTAPEAGEVTPSDSGGQEDSPAKGLSVRLEFDYSEDKSSWDNQQENPPPTKKIGKKPVAKMPLRRPKMKKTPEKLDNTPASPPRSPAEPNDIPIAKGTYTFDIDKWDDPNFNPFSSTSKMQESPKLPQQSYNFDPDTCDESVDPFKTSSKTPSSPSKSPASFEIPASAMEANGVDGDGLNKPAKKKKTPLKTDTFRVKKSPKRSPLSDPPSQDPTPAATPETPPVISAVVHATDEEKLAVTNQKWTCMTVDLEADKQDYPQPSDLSTFVNETKFSSPTEELDYRNSYEIEYMEKIGSSLPQDDDAPKKQALYLMFDTSQESPVKSSPVRMSESPTPCSGSSFEETEALVNTAAKNQHPVPRGLAPNQESHLQVPEKSSQKELEAMGLGTPSEAIEITAPEGSFASADALLSRLAHPVSLCGALDYLEPDLAEKNPPLFAQKLQEELEFAIMRIEALKLARQIALASRSHQDAKREAAHPTDVSISKTALYSRIGTAEVEKPAGLLFQQPDLDSALQIARAEIITKEREVSEWKDKYEESRREVMEMRKIVAEYEKTIAQMIEDEQREKSVSHQTVQQLVLEKEQALADLNSVEKSLADLFRRYEKMKEVLEGFRKNEEVLKRCAQEYLSRVKKEEQRYQALKVHAEEKLDRANAEIAQVRGKAQQEQAAHQASLRKEQLRVDALERTLEQKNKEIEELTKICDELIAKMGKS

SEQ ID NO: 41084 - protein, 571 aa, Homo sapiens
MPLRRPKMKKTPEKLDNTPASPPRSPAEPNDIPIAKGTYTFDIDKWDDPNFNPFSSTSKMQESPKLPQQSYNFDPDTCDESVDPFKTSSKTPSSPSKSPASFEIPASAMEANGVDGDGLNKPAKKKKTPLKTVKKSPKRSPLSDPPSQDPTPAATPETPPVISAVVHATDEEKLAVTNQKWTCMTVDLEADKQDYPQPSDLSTFVNETKFSSPTEELDYRNSYEIEYMEKIGSSLPQDDDAPKKQALYLMFDTSQESPVKSSPVRMSESPTPCSGSSFEETEALVNTAAKNQHPVPRGLAPNQESHLQVPEKSSQKELEAMGLGTPSEAIEIREAAHPTDVSISKTALYSRIGTAEVEKPAGLLFQQPDLDSALQIARAEIITKEREVSEWKDKYEESRREVMEMRKIVAEYEKTIAQMIEDEQREKSVSHQTVQQLVLEKEQALADLNSVEKSLADLFRRYEKMKEVLEGFRKNEEVLKRCAQEYLSRVKKEEQRYQALKVHAEEKLDRANAEIAQVRGKAQQEQAAHQASLRKEQLRVDALERTLEQKNKEIEELTKICDELIAKMGKS

SEQ ID NO: 41085 - protein, 2871 aa, Homo sapiens
MGNENSTSDNQRTLSAQTPRSAQPPGNSQNIKRKQQDTPGSPDHRDASSIGSVGLGGFCTASESSASLDPCLVSPEVTEPRKDPQGARGPEGSLLPSPPPSQEREHPSSSMPFAECPPEGCLASPAAAPEDGPQTQSPRREPAPNAPGDIAAAFPAERDSSTPYQEIAAVPSAGRERQPKEEGQKSSFSFSSGIDQSPGMSPVPLREPMKAPLCGEGDQPGGFESQEKEAAGGFPPAESRQGVASVQVTPEAPAAAQQGTESSAVLEKSPLKPMAPIPQDPAPRASDRERGQGEAPPQYLTDDLEFLRACHLPRSNSGAAPEAEVNAASQESCQQPVGAYLPHAELPWGLPSPALVPEAGGSGKEALDTIDVQGHPQTGMRGTKPNQVVCVAAGGQPEGGLPVSPEPSLLTPTEEAHPASSLASFPAAQIPIAVEEPGSSSRESVSKAGMPVSADAAKEVVDAGLVGLERQVSDLGSKGEHPEGDPGEVPAPSPQERGEHLNTEQSHEVQPGVPPPPLPKEQSHEVQPGAPPPPLPKAPSESARGPPGPTDGAKVHEDSTSPAVAKEGSRSPGDSPGGKEEAPEPPDGGDPGNLQGEDSQAFSSKRDPEVGKDELSKPSSDAESRDHPSSHSAQPPRKGGAGHTDGPHSQTAEADASGLPHKLGEEDPVLPPVPDGAGEPTVPEGAIWEGSGLQPKCPDTLQSREGLGRMESFLTLESEKSDFPPTPVAEVAPKAQEGESTLEIRKMGSCDGEGLLTSPDQPRGPACDASRQEFHAGVPHPPQGENLAADLGLTALILDQDQQGIPSCPGEGWIRGAASEWPLLSSEKHLQPSQAQPETSIFDVLKEQAQPPENGKETSPSHPGFKDQGADSSQIHVPVEPQEDNNLPTHGGQEQALGSELQSQLPKGTLSDTPTSSPTDMVWESSLTEESELSAPTRQKLPALGEKRPEGACGDGQSSRVSPPAADVLKDFSLAGNFSRKETCCTGQGPNKSQQALADALEEGSQHEEACQRHPGASEAADGCSPLWGLSKREMASGNTGEAPPCQPDSVALLDAVPCLPALAPASPGVTPTQDAPETEACDETQEGRQQPVPAPQQKMECWATSDAESPKLLASFPSAGEQGGEAGAAETGGSAGAGDPGKQQAPEKPGEATLSCGLLQTEHCLTSGEEASTSALRESCQAEHPMASCQDALLPARELGGIPRSTMDFSTHQAVPDPKELLLSGPPEVAAPDTPYLHVDSAAQRGAEDSGVKAVSSADPRAPGESPCPVGEPPLALENAASLKLFAGSLAPLLQPGAAGGEIPAVQASSGSPKARTTEGPVDSMPCLDRMPLLAKGKQATGEEKAATAPGAGAKASGEGMAGDAAGETEGSMERMGEPSQDPKQGTSGGVDTSSEQIATLTGFPDFREHIAKIFEKPVLGALATPGEKAGAGRSAVGKDLTRPLGPEKLLDGPPGVDVTLLPAPPARLQVEKKQQLAGEAEISHLALQDPASDKLLGPAGLTWERNLPGAGVGKEMAGVPPTLREDERPEGPGAAWPGLEGQAYSQLERSRQELASGLPSPAATQELPVERAAAFQVAPHSHGEEAVAQDRIPSGKQHQETSACDSPHGEDGPGDFAHTGVPGHVPRSTCAPSPQREVLTVPEANSEPWTLDTLGGERRPGVTAGILEMRNALGNQSTPAPPTGEVADTPLEPGKVAGAAGEAEGDITLSTAETQACASGDLPEAGTTRTFSVVAGDLVLPGSCQDPACSDKAPGMEGTAALHGDSPARPQQAKEQPGPERPIPAGDGKVCVSSPPEPDETHDPKLQHLAPEELHTDRESPRPGPSMLPSVPKKDAPRVMDKVTSDETRGAEGTESSPVADDIIQPAAPADLESPTLAASSYHGDVVGQVSTDLIAQSISPAAAHAGLPPSAAEHIVSPSAPAGDRVEASTPSCPDPAKDLSRSSDSEEAFETPESTTPVKAPPAPPPPPPEVIPEPEVSTQPPPEEPGCGSETVPVPDGPRSDSVEGSPFRPPSHSFSAVFDEDKPIASSGTYNLDFDNIELVDTFQTLEPRASDAKNQEGKVNTRRKSTDSVPISKSTLSRSLSLQASDFDGASSSGNPEAVALAPDAYSTGSSSASSTLKRTKKPRPPSLKKKQTTKKPTETPPVKETQQEPDEESLVPSGENLASETKTESAKTEGPSPALLEETPLEPAVGPKAACPLDSESAEGVVPPASGGGRVQNSPPVGRKTLPLTTAPEAGEVTPSDSGGQEDSPAKGLSVRLEFDYSEDKSSWDNQQENPPPTKKIGKKPVAKMPLRRPKMKKTPEKLDNTPASPPRSPAEPNDIPIAKGTYTFDIDKWDDPNFNPFSSTSKMQESPKLPQQSYNFDPDTCDESVDPFKTSSKTPSSPSKSPASFEIPASAMEANGVDGDGLNKPAKKKKTPLKTDTFRVKKSPKRSPLSDPPSQDPTPAATPETPPVISAVVHATDEEKLAVTNQKWTCMTVDLEADKQDYPQPSDLSTFVNETKFSSPTEELDYRNSYEIEYMEKIGSSLPQDDDAPKKQALYLMFDTSQESPVKSSPVRMSESPTPCSGSSFEETEALVNTAAKNQHPVPRGLAPNQESHLQVPEKSSQKELEAMGLGTPSEAIEIREAAHPTDVSISKTALYSRIGTAEVEKPAGLLFQQPDLDSALQIARAEIITKEREVSEWKDKYEESRREVMEMRKIVAEYEKTIAQMIEDEQREKSVSHQTVQQLVLEKEQALADLNSVEKSLADLFRRYEKMKEVLEGFRKNEEVLKRCAQEYLSRVKKEEQRYQALKVHAEEKLDRANAEIAQVRGKAQQEQAAHQASLRKEQLRVDALERTLEQKNKEIEELTKICDELIAKMGKS

SEQ ID NO: 41086 - protein, 1094 aa, Homo sapiens
MGNENSTSDNQRTLSAQTPRSAQPPGNSQNIKRKQQDTPGSPDHRDASSSPVADDIIQPAAPADLESPTLAASSYHGDVVGQVSTDLIAQRSSDSEEAFETPESTTPVKAPPAPPPPPPEVIPEPEVSTQPPPEEPGCGSETVPVPDGPRSDSVEGSPFRPPSHSFSAVFDEDKPIASSGTYNLDFDNIELVDTFQTLEPRASDAKNQEGKVNTRRKSTDSVPISKSTLSRSLSLQASDFDGASSSGNPEAVALAPDAYSTGSSSASSTLKRTKKPRPPSLKKKQTTKKPTETPPVKETQQEPDEESLVPSGENLASETKTESAKTEGPSPALLEETPLEPAVGPKAACPLDSESAEGVVPPASGGGRVQNSPPVGRKTLPLTTAPEAGEVTPSDSGGQEDSPAKGLSVRLEFDYSEDKSSWDNQQENPPPTKKIGKKPVAKMPLRRPKMKKTPEKLDNTPASPPRSPAEPNDIPIAKGTYTFDIDKWDDPNFNPFSSTSKMQESPKLPQQSYNFDPDTCDESVDPFKTSSKTPSSPSKSPASFEIPASAMEANGVDGDGLNKPAKKKKTPLKTDTFRVKKSPKRSPLSDPPSQDPTPAATPETPPVISAVVHATDEEKLAVTNQKWTCMTVDLEADKQDYPQPSDLSTFVNETKFSSPTEELDYRNSYEIEYMEKIGSSLPQDDDAPKKQALYLMFDTSQESPVKSSPVRMSESPTPCSGSSFEETEALVNTAAKNQHPVPRGLAPNQESHLQVPEKSSQKELEAMGLGTPSEAIEITAPEGSFASADALLSRLAHPVSLCGALDYLEPDLAEKNPPLFAQKLQEELEFAIMRIEALKLARQIALASRSHQDAKREAAHPTDVSISKTALYSRIGTAEVEKPAGLLFQQPDLDSALQIARAEIITKEREVSEWKDKYEESRREVMEMRKIVAEYEKTIAQMIEDEQREKSVSHQTVQQLVLEKEQALADLNSVEKSLADLFRRYEKMKEVLEGFRKNEEVLKRCAQEYLSRVKKEEQRYQALKVHAEEKLDRANAEIAQVRGKAQQEQAAHQASLRKEQLRVDALERTLEQKNKEIEELTKICDELIAKMGKS

SEQ ID NO: 41087 - protein, 996 aa, Homo sapiens
MGGSQSLQPAPASDLNLEASEAMSSDSEEAFETPESTTPVKAPPAPPPPPPEVIPEPEVSTQPPPEEPGCGSETVPVPDGPRSDSVEGSPFRPPSHSFSAVFDEDKPIASSGTYNLDFDNIELVDTFQTLEPRASDAKNQEGKVNTRRKSTDSVPISKSTLSRSLSLQASDFDGASSSGNPEAVALAPDAYSTGSSSASSTLKRTKKPRPPSLKKKQTTKKPTETPPVKETQQEPDEESLVPSGENLASETKTESAKTEGPSPALLEETPLEPAVGPKAACPLDSESAEGVVPPASGGGRVQNSPPVGRKTLPLTTAPEAGEVTPSDSGGQEDSPAKGLSVRLEFDYSEDKSSWDNQQENPPPTKKIGKKPVAKMPLRRPKMKKTPEKLDNTPASPPRSPAEPNDIPIAKGTYTFDIDKWDDPNFNPFSSTSKMQESPKLPQQSYNFDPDTCDESVDPFKTSSKTPSSPSKSPASFEIPASAMEANGVDGDGLNKPAKKKKTPLKTDTFRVKKSPKRSPLSDPPSQDPTPAATPETPPVISAVVHATDEEKLAVTNQKWTCMTVDLEADKQDYPQPSDLSTFVNETKFSSPTEELDYRNSYEIEYMEKIGSSLPQDDDAPKKQALYLMFDTSQESPVKSSPVRMSESPTPCSGSSFEETEALVNTAAKNQHPVPRGLAPNQESHLQVPEKSSQKELEAMGLGTPSEAIEITAPEGSFASADALLSRLAHPVSLCGALDYLEPDLAEKNPPLFAQKLQREAAHPTDVSISKTALYSRIGTAEVEKPAGLLFQQPDLDSALQIARAEIITKEREVSEWKDKYEESRREVMEMRKIVAEYEKTIAQMIEDEQREKSVSHQTVQQLVLEKEQALADLNSVEKSLADLFRRYEKMKEVLEGFRKNEEVLKRCAQEYLSRVKKEEQRYQALKVHAEEKLDRANAEIAQVRGKAQQEQAAHQASLRKEQLRVDALERTLEQKNKEIEELTKICDELIAKMGKS

SEQ ID NO: 41088 - protein, 249 aa, Homo sapiens
MAERGELDLTGAKQNTGVWLVKVPKYLSQQWAKASGRGEVGKLRIAKTQGRTEVSFTLNEDLANIHDIGGKPASVSAPREHPFVLQSVGGQTLTVFTESSSDKLSLEGIVVQRAECRPAASENYMRLKRLQIEESSKPVRLSQQLDKVVTTNYKPVANHQYNIEYERKKKEDGKRARADKQHVLDMLFSAFEKHQYYNLKDLVDITKQPVVYLKEILKEIGVQNVKGIHKNTWELKPEYRHYQGEEKSD

SEQ ID NO: 41089 - protein, 838 aa, Homo sapiens
MSLQVLNDKNVSNEKNTENCDFLFSPPEVTGRSSVLRVSQKENVPPKNLAKAMKVTFQTPLRDPQTHRILSPSMASKLEAPFTQDDTLGLENSHPVWTQKENQQLIKEVDAKTTHGILQKPVEADTDLLGDASPAFGSGSSSESGPGALADLDCSSSSQSPGSSENQMVSPGKVSGSPEQAVEENLSSYSLDRRVTPASETLEDPCRTESQHKAETPHGAEEECKAETPHGAEEECRHGGVCAPAAVATSPPGAIPKEACGGAPLQGLPGEALGCPAGVGTPVPADGTQTLTCAHTSAPESTAPTNHLVAGRAMTLSPQEEVAAGQMASSSRSGPVKLEFDVSDGATSKRAPPPRRLGERSGLKPPLRKAAVRQQKAPQEVEEDDGRSGAGEDPPMPASRGSYHLDWDKMDDPNFIPFGGDTKSGCSEAQPPESPETRLGQPAAEQLHAGPATEEPGPCLSQQLHSASAEDTPVVQLAAETPTAESKERALNSASTSLPTSCPGSEPVPTHQQGQPALELKEESFRDPAEVLGTGAEVDYLEQFGTSSFKESALRKQSLYLKFDPLLRDSPGRPVPVATETSSMHGANETPSGRPREAKLVEFDFLGALDIPVPGPPPGVPAPGGPPLSTGPIVDLLQYSQKDLDAVVKATQEENRELRSRCEELHGKNLELGKIMDRFEEVVYQAMEEVQKQKELSKAEIQKVLKEKDQLTTDLNSMEKSFSDLFKRFEKQKEVIEGYRKNEESLKKCVEDYLARITQEGQRYQALKAHAEEKLQLANEEIAQVRSKAQAEALALQASLRKEQMRIQSLEKTVEQKTKENEELTRICDDLISKMEKI

SEQ ID NO: 41090 - protein, 323 aa, Homo sapiens
MARGPGLAPPPLRLPLLLLVLAAVTGHTAAQDNCTCPTNKMTVCSPDGPGGRCQCRALGSGMAVDCSTLTSKCLLLKARMSAPKNARTLVRPSEHALVDNDGLYDPDCDPEGRFKARQCNQTSVCWCVNSVGVRRTDKGDLSLRCDELVRTHHILIDLRHRPTAGAFNHSDLDAELRRLFRERYRLHPKFVAAVHYEQPTIQIELRQNTSQKAAGDVDIGDAAYYFERDIKGESLFQGRGGLDLRVRGEPLQVERTLIYYLDEIPPKFSMKRLTAGLIAVIVVVVVALVAGMAVLVITNRRKSGKYKKVEIKELGELRKEPSL

SEQ ID NO: 41091 - protein, 395 aa, Homo sapiens
MDEEPERTKRWEGGYERTWEILKEDESGSLKATIEDILFKAKRKRVFEHHGQVRLGMMRHLYVVVDGSRTMEDQDLKPNRLTCTLKLLEYFVEEYFDQNPISQIGIIVTKSKRAEKLTELSGNPRKHITSLKEAVDMTCHGEPSLYNSLSMAMQTLKHMPGHTSREVLIIFSSLTTCDPSNIYDLIKTLKAAKIRVSVIGLSAEVRVCTVLARETGGTYHVILDESHYKELLTHHLSPPPASSSSECSLIRMGFPQHTIASLSDQDAKPSFSMAHLDGNTEPGLTLGGYFCPQCRAKYCELPVECKICGLTLVSAPHLARSYHHLFPLDAFQEIPLEEYNGERFCYGCQGELKDQHVYVCAVCQNVFCVDCDVFVHDSLHCCPGCIHKIPAPSGV

SEQ ID NO: 41092 - protein, 140 aa, Homo sapiens
MDVFMKGLSKAKEGVVAAAEKTKQGVAEAAGKTKEGVLYVGSKTKEGVVHGVATVAEKTKEQVTNVGGAVVTGVTAVAQKTVEGAGSIAAATGFVKKDQLGKNEEGAPQEGILEDMPVDPDNEAYEMPSEEGYQDYEPEA

SEQ ID NO: 41093 - protein, 112 aa, Homo sapiens
MDVFMKGLSKAKEGVVAAAEKTKQGVAEAAGKTKEGVLYVGSKTKEGVVHGVATVAEKTKEQVTNVGGAVVTGVTAVAQKTVEGAGSIAAATGFVKKDQLGKEGYQDYEPEA

SEQ ID NO: 41094 - protein, 126 aa, Homo sapiens
MDVFMKGLSKAKEGVVAAAEKTKQGVAEAAGKTKEGVLYVVAEKTKEQVTNVGGAVVTGVTAVAQKTVEGAGSIAAATGFVKKDQLGKNEEGAPQEGILEDMPVDPDNEAYEMPSEEGYQDYEPEA

SEQ ID NO: 41095 - protein, 297 aa, Homo sapiens
MSAWAAASLSRAAARCLLARGPGVRAAPPRDPRPSHPEPRGCGAAPGRTLHFTAAVPAGHNKWSKVRHIKGPKDVERSRIFSKLCLNIRLAVKEGGPNPEHNSNLANILEVCRSKHMPKSTIETALKMEKSKDTYLLYEGRGPGGSSLLIEALSNSSHKCQADIRHILNKNGGVMAVGARHSFDKKGVIVVEVEDREKKAVNLERALEMAIEAGAEDVKETEDEEERNVFKFICDASSLHQVRKKLDSLGLCSVSCALEFIPNSKVQLAEPDLEQAAHLIQALSNHEDVIHVYDNIE

SEQ ID NO: 41096 - protein, 585 aa, Homo sapiens
MEKKWKYCAVYYIIQIHFVKGVWEKTVNTEENVYATLGSDVNLTCQTQTVGFFVQMQWSKVTNKIDLIAVYHPQYGFYCAYGRPCESLVTFTETPENGSKWTLHLRNMSCSVSGRYECMLVLYPEGIQTKIYNLLIQTHVTADEWNSNHTIEIEINQTLEIPCFQNSSSKISSEFTYAWSVENSSTDSWVLLSKGIKEDNGTQETLISQNHLISNSTLLKDRVKLGTDYRLHLSPVQIFDDGRKFSCHIRVGPNKILRSSTTVKVFAKPEIPVIVENNSTDVLVERRFTCLLKNVFPKANITWFIDGSFLHDEKEGIYITNEERKGKDGFLELKSVLTRVHSNKPAQSDNLTIWCMALSPVPGNKVWNISSEKITFLLGSEISSTDPPLSVTESTLDTQPSPASSVSPARYPATSSVTLVDVSALRPNTTPQPSNSSMTTRGFNYPWTSSGTDTKKSVSRIPSETYSSSPSGAGSTLHDNVFTSTARAFSEVPTTANGSTKTNHVHITGIVVNKPKDGMSWPVIVAALLFCCMILFGLGVRKWCQYQKEIMERPPPFKPPPPPIKYTCIQEPNESDLPYHEMETL

SEQ ID NO: 41097 - protein, 569 aa, Homo sapiens
MEKKWKYCAVYYIIQIHFVKGVWEKTVNTEENVYATLGSDVNLTCQTQTVGFFVQMQWSKVTNKIDLIAVYHPQYGFYCAYGRPCESLVTFTETPENGSKWTLHLRNMSCSVSGRYECMLVLYPEGIQTKIYNLLIQTHVTADEWNSNHTIEIEINQTLEIPCFQNSSSKISSEFTYAWSVEDNGTQETLISQNHLISNSTLLKDRVKLGTDYRLHLSPVQIFDDGRKFSCHIRVGPNKILRSSTTVKVFAKPEIPVIVENNSTDVLVERRFTCLLKNVFPKANITWFIDGSFLHDEKEGIYITNEERKGKDGFLELKSVLTRVHSNKPAQSDNLTIWCMALSPVPGNKVWNISSEKITFLLGSEISSTDPPLSVTESTLDTQPSPASSVSPARYPATSSVTLVDVSALRPNTTPQPSNSSMTTRGFNYPWTSSGTDTKKSVSRIPSETYSSSPSGAGSTLHDNVFTSTARAFSEVPTTANGSTKTNHVHITGIVVNKPKDGMSWPVIVAALLFCCMILFGLGVRKWCQYQKEIMERPPPFKPPPPPIKYTCIQEPNESDLPYHEMETL

SEQ ID NO: 41098 - protein, 106 aa, Homo sapiens
MKAKRSHQAVIMSTSLRVSPSIHGYHFDTASRKKAVGNIFENTDQESLERLFRNSGDKKAEERAKIIFAIDQDVEEKTRALMALKKRTKDKLFQFLKLRKYSIKVH

SEQ ID NO: 41099 - protein, 271 aa, Homo sapiens
MGIVCAQCSFILLLSIIRARPPPFLFCPLSSQRTESPYKPVHLGLGPTDKVAAIAMARIIDLVPWDDGSTHVYASPAILLPMERQRNQLAGVKQQLYHPALPTLRHMDRDTVKACLPDEHCQSTTYCRKDEFDNAHFTLLGVPNKPLQCLDITATGQKLRNRYHEGKLAPIAPGINRVDWPCFTRAIEDWSHFVSSAGEFKLPCLRKRAEGLSGYAVRYLKPDVTQTWRYCLSQNPSLDRYGQKPLPFDSLNTFRSFGSSYSRVNYLTPWH

SEQ ID NO: 41100 - protein, 298 aa, Homo sapiens
MGIVCAQCSFILLLSIIRARPPPFLFCPLSSQRTESPYKPVHLGLGPTDKVAAIAMARIIDLVPWDDGSTHVYASPAILLPMERQRNQLAGVKQQLYHPALPTLRHMDRDTVKACLPDEHCQSTTYCRKDEFDNAHFTLLGVPNKPLQCLDITATGQKLRNRYHEGKLAPIAPGINRVDWPCFTRAIEDWSHFVSSAGEFKLPCLRKRAEGLSGYAVRYLKPDVTQTWRQEALCGAWAGRPCSPDSPRPYPCCPPQYCLSQNPSLDRYGQKPLPFDSLNTFRSFGSSYSRVNYLTPWH

SEQ ID NO: 41101 - protein, 503 aa, Homo sapiens
MEAAVAAPRPRLLLLVLAAAAAAAAALLPGATALQCFCHLCTKDNFTCVTDGLCFVSVTETTDKVIHNSMCIAEIDLIPRDRPFVCAPSSKTGSVTTTYCCNQDHCNKIELPTTVKSSPGLGPVELAAVIAGPVCFVCISLMLMVYICHNRTVIHHRVPNEEDPSLDRPFISEGTTLKDLIYDMTTSGSGSGLPLLVQRTIARTIVLQESIGKGRFGEVWRGKWRGEEVAVKIFSSREERSWFREAEIYQTVMLRHENILGFIAADNKDNGTWTQLWLVSDYHEHGSLFDYLNRYTVTVEGMIKLALSTASGLAHLHMEIVGTQGKPAIAHRDLKSKNILVKKNGTCCIADLGLAVRHDSATDTIDIAPNHRVGTKRYMAPEVLDDSINMKHFESFKRADIYAMGLVFWEIARRCSIGGIHEDYQLPYYDLVPSDPSVEEMRKVVCEQKLRPNIPNRWQSCEALRVMAKIMRECWYANGAARLTALRIKKTLSQLSQQEGIKM

SEQ ID NO: 41102 - protein, 507 aa, Homo sapiens
MEAAVAAPRPRLLLLVLAAAAAAAAALLPGATALQCFCHLCTKDNFTCVTDGLCFVSVTETTDKVIHNSMCIAEIDLIPRDRPFVCAPSSKTGSVTTTYCCNQDHCNKIELPTTGPFSVKSSPGLGPVELAAVIAGPVCFVCISLMLMVYICHNRTVIHHRVPNEEDPSLDRPFISEGTTLKDLIYDMTTSGSGSGLPLLVQRTIARTIVLQESIGKGRFGEVWRGKWRGEEVAVKIFSSREERSWFREAEIYQTVMLRHENILGFIAADNKDNGTWTQLWLVSDYHEHGSLFDYLNRYTVTVEGMIKLALSTASGLAHLHMEIVGTQGKPAIAHRDLKSKNILVKKNGTCCIADLGLAVRHDSATDTIDIAPNHRVGTKRYMAPEVLDDSINMKHFESFKRADIYAMGLVFWEIARRCSIGGIHEDYQLPYYDLVPSDPSVEEMRKVVCEQKLRPNIPNRWQSCEALRVMAKIMRECWYANGAARLTALRIKKTLSQLSQQEGIKM

SEQ ID NO: 41103 - protein, 426 aa, Homo sapiens
MEAAVAAPRPRLLLLVLAAAAAAAAALLPGATALQCFCHLCTKDNFTCVTDGLCFVSVTETTDKVIHNSMCIAEIDLIPRDRPFVCAPSSKTGSVTTTYCCNQDHCNKIELPTTGLPLLVQRTIARTIVLQESIGKGRFGEVWRGKWRGEEVAVKIFSSREERSWFREAEIYQTVMLRHENILGFIAADNKDNGTWTQLWLVSDYHEHGSLFDYLNRYTVTVEGMIKLALSTASGLAHLHMEIVGTQGKPAIAHRDLKSKNILVKKNGTCCIADLGLAVRHDSATDTIDIAPNHRVGTKRYMAPEVLDDSINMKHFESFKRADIYAMGLVFWEIARRCSIGGIHEDYQLPYYDLVPSDPSVEEMRKVVCEQKLRPNIPNRWQSCEALRVMAKIMRECWYANGAARLTALRIKKTLSQLSQQEGIKM

SEQ ID NO: 41104 - protein, 114 aa, Homo sapiens
MAECPTLGEAVTDHPDRLWAWEKFVYLDEKQHAWLPLTIEIKDRLQLRVLLRREDVVLGRPMTPTQIGPSLLPIMWQLYPDGRYRSSDSSFWRLVYHIKIDGVEDMLLELLPDD

SEQ ID NO: 41105 - protein, 743 aa, Homo sapiens
MLHFNRCHHLKKITQKCFSSIHVKTDKHAQRFLSRTFALAELRKSWYSTHSLVGDKNIILMGPPGAGKTTVGRIIGQKLGCCVIDVDDDILEKTWNMSVSEKLQDVGNEQFLEEEGKAVLNFSASGSVISLTGSNPMHDASMWHLKKNGIIVYLDVPLLDLICRLKLMKTDRIVGQNSGTSMKDLLKFRRQYYKKWYDARVFCESGASPEEVADKVLNAIKRYQDVDSETFISTRHVWPEDCEQKVSAKFFSEAVIEGLASDGGLFVPAKEFPKLSCGEWKSLVGATYVERAQILLERCIHPADIPAARLGEMIETAYGENFACSKIAPVRHLSGNQFILELFHGPTGSFKDLSLQLMPHIFAHCIPPSCNYMILVATSGDTGSAVLNGFSRLNKNDKQRIAVVAFFPENGVSDFQKAQIIGSQRENGWAVGVESDFDFCQTAIKRIFNDSDFTGFLTVEYGTILSSANSINWGRLLPQVVYHASAYLDLVSQGFISFGSPVDVCIPTGNFGNILAAVYAKMMGIPIRKFICASNQNHVLTDFIKTGHYDLRERKLAQTFSPSIDILKSSNLERHLHLMANKDGQLMTELFNRLESQHHFQIEKALVEKLQQDFVADWCSEGECLAAINSTYNTSGYILDPHTAVAKVVADRVQDKTCPVIISSTAHYSKFAPAIMQALKIKEINETSSSQLYLLGSYNALPPLHEALLERTKQQEKMEYQVCAADMNVLKSHVEQLVQNQFI

SEQ ID NO: 41106 - protein, 128 aa, Homo sapiens
MASEASVRLGVPPGRLWIQRPGIYEDEEGRTWVTVVVRFNPSRREWARASQGSRYEPSITVHLWQMAVHTRELLSSGQMPFSQLPAVWQLYPGRKYRAADSSFWEIADHGQIDSMEQLVLTYQPERKD

SEQ ID NO: 41107 - protein, 484 aa, Homo sapiens
MWYVSTRGVAPRVNFEGALFSGYAPDGGLFMPEELPQLDRGTLCQWSTLSYPGLVKELCALFIGSELLPKDELNDLIDRAFSRFRHREVVHLSRLRNGLNVLELWHGVTYAFKDLSLSCTTQFLQYFLEKREKHVTVVVGTSGDTGSAAIESVQGAKNMDIIVLLPKGHCTKIQELQMTTVLKQNVHVFGVEGNSDELDEPIKTVFADVAFVKKHNLMSLNSINWSRVLVQMAHHFFAYFQCTPSLDTHPLPLVEVVVPTGAAGNLAAGYIAQKIGLPIRLVVAVNRNDIIHRTVQQGDFSLSEAVKSTLASAMDIQVPYNMERVFWLLSGSDSQVTRALMEQFERTQSVNLPKELHSKLSEAVTSVSVSDEAITQTMGRCWDENQYLLCPHSAVAVNYHYQQIDRQQPSTPRCCLAPASAAKFPEAVLAAGLTPETPAEIVALEHKETRCTLMRRGDNWMLMLRDTIEDLSRQWRSHALNTSQ

SEQ ID NO: 41108 - protein, 405 aa, Homo sapiens
MWYVSTRGVAPRVNFEGALFSGYAPDGGLFMPEELPQLDRGTLCQWSTLSYPGLVKELCALFIGSELLPKDELNDLIDRAFSRFRHREVVHLSRLRNGLNVLELWHGVTYAFKDLSLSCTTQFLQYFLEKREKHVTVVVGTSGDTGSAAIESVQGAKNMDIIVLLPKGHCTKIQELQMTTVLKQNVHVFGVEGNSDELDEPIKTVFADVAFVKKHNLMSLNSINWSRVLVQMAHHFFAYFQCTPSLDTHPLPLVEVVVPTGAAGNLAAGYIAQKIGLPIRLVVAVNRNDIIHRTVQQGDFSLSEAVKSTLASAMDIQVPYNMERVFWLLSGSDSQVTRALMEQFERTQSVNLPKELHSKWERQDYEKMAVMECDGCCVELCLGNCGPRRGSVTDIPGTAMVRGGG

SEQ ID NO: 41109 - protein, 384 aa, Homo sapiens
MWYVSTRGVAPRVNFEGALFSGYAPDGGLFMPEELPQLDRGTLCQWSTLSYPGLVKELCALFIGSELLPKDELNDLIDRAFSRFRHREVVHLSRLRNGLNVLELWHGVTYAFKDLSLSCTTQFLQYFLEKREKHVTVVVGTSGDTGSAAIESVQGAKNMDIIVLLPKGHCTKIQELQMTTVLKQNVHVFGVEGNSDELDEPIKTVFADVAFVKKHNLMSLNSINWSRVLVQMAHHFFAYFQCTPSLDTHPLPLVEVVVPTGAAGNLAAGYIAQKIGLPIRLVVAVNRNDIIHRTVQQGDFSLSEAVKSTLASAMDIQVPYNMERVFWLLSGSDSQVTRALMEQFERTQSVNLPKELHSKHSPVLPRPCLCSQVPGSCPGCWPDP

SEQ ID NO: 41110 - protein, 423 aa, Homo sapiens
MWYVSTRGVAPRVNFEGALFSGYAPDGGLFMPEELPQLDRGTLCQWSTLSYPGLVKELCALFIGSELLPKDELNDLIDRAFSRFRHREVVHLSRLRNGLNVLELWHGVTYAFKDLSLSCTTQFLQYFLEKREKHVTVVVGTSGDTGSAAIESVQGAKNMDIIVLLPKGHCTKIQELQMTTVLKQNVHVFGVEGNSDELDEPIKTVFADVAFVKIGLPIRLVVAVNRNDIIHRTVQQGDFSLSEAVKSTLASAMDIQVPYNMERVFWLLSGSDSQVTRALMEQFERTQSVNLPKELHSKLSEAVTSVSVSDEAITQTMGRCWDENQYLLCPHSAVAVNYHYQQIDRQQPSTPRCCLAPASAAKFPEAVLAAGLTPETPAEIVALEHKETRCTLMRRGDNWMLMLRDTIEDLSRQWRSHALNTSQ

SEQ ID NO: 41111 - protein, 247 aa, Homo sapiens
MDIIVLLPKGHCTKIQELQMTTVLKQNVHVFGVEGNSDELDEPIKTVFADVAFVKKHNLMSLNSINWSRVLVQMAHHFFAYFQCTPSLDTHPLPLVEVVVPTGAAGNLAAGYIAQKIGLPIRLVVAVNRNDIIHRTVQQGDFSLSEAVKSTLASAMDIQVPYNMERVFWLLSGSDSQVTRALMEQFERTQSVNLPKELHSKWERQDYEKMAVMECDGCCVELCLGNCGPRRGSVTDIPGTAMVRGGD

SEQ ID NO: 41112 - protein, 567 aa, Homo sapiens
MGRGLLRGLWPLHIVLWTRIASTIPPHVQKSVNNDMIVTDNNGAVKFPQLCKFCDVRFSTCDNQKSCMSNCSITSICEKPQEVCVAVWRKNDENITLETVCHDPKLPYHDFILEDAASPKCIMKEKKKPGETFFMCSCSSDECNDNIIFSEEYNTSNPDLLLVIFQVTGISLLPPLGVAISVIIIFYCYRVNRQQKLSSTWETGKTRKLMEFSEHCAIILEDDRSDISSTCANNINHNTELLPIELDTLVGKGRFAEVYKAKLKQNTSEQFETVAVKIFPYEEYASWKTEKDIFSDINLKHENILQFLTAEERKTELGKQYWLITAFHAKGNLQEYLTRHVISWEDLRKLGSSLARGIAHLHSDHTPCGRPKMPIVHRDLKSSNILVKNDLTCCLCDFGLSLRLDPTLSVDDLANSGQVGTARYMAPEVLESRMNLENVESFKQTDVYSMALVLWEMTSRCNAVGEVKDYEPPFGSKVREHPCVESMKDNVLRDRGRPEIPSFWLNHQGIQMVCETLTECWDHDPEARLTAQCVAERFSELEHLDRLSGRSCSEEKIPEDGSLNTTK

SEQ ID NO: 41113 - protein, 592 aa, Homo sapiens
MGRGLLRGLWPLHIVLWTRIASTIPPHVQKSDVEMEAQKDEIICPSCNRTAHPLRHINNDMIVTDNNGAVKFPQLCKFCDVRFSTCDNQKSCMSNCSITSICEKPQEVCVAVWRKNDENITLETVCHDPKLPYHDFILEDAASPKCIMKEKKKPGETFFMCSCSSDECNDNIIFSEEYNTSNPDLLLVIFQVTGISLLPPLGVAISVIIIFYCYRVNRQQKLSSTWETGKTRKLMEFSEHCAIILEDDRSDISSTCANNINHNTELLPIELDTLVGKGRFAEVYKAKLKQNTSEQFETVAVKIFPYEEYASWKTEKDIFSDINLKHENILQFLTAEERKTELGKQYWLITAFHAKGNLQEYLTRHVISWEDLRKLGSSLARGIAHLHSDHTPCGRPKMPIVHRDLKSSNILVKNDLTCCLCDFGLSLRLDPTLSVDDLANSGQVGTARYMAPEVLESRMNLENVESFKQTDVYSMALVLWEMTSRCNAVGEVKDYEPPFGSKVREHPCVESMKDNVLRDRGRPEIPSFWLNHQGIQMVCETLTECWDHDPEARLTAQCVAERFSELEHLDRLSGRSCSEEKIPEDGSLNTTK

SEQ ID NO: 41114 - protein, 806 aa, Homo sapiens
MASGADSKGDDLSTAILKQKNRPNRLIVDEAINEDNSVVSLSQPKMDELQLFRGDTVLLKGKKRREAVCIVLSDDTCSDEKIRMNRVVRNNLRVRLGDVISIQPCPDVKYGKRIHVLPIDDTVEGITGNLFEVYLKPYFLEAYRPIRKGDIFLVRGGMRAVEFKVVETDPSPYCIVAPDTVIHCEGEPIKREDEEESLNEVGYDDIGGCRKQLAQIKEMVELPLRHPALFKAIGVKPPRGILLYGPPGTGKTLIARAVANETGAFFFLINGPEIMSKLAGESESNLRKAFEEAEKNAPAIIFIDELDAIAPKREKTHGEVERRIVSQLLTLMDGLKQRAHVIVMAATNRPNSIDPALRRFGRFDREVDIGIPDATGRLEILQIHTKNMKLADDVDLEQVANETHGHVGADLAALCSEAALQAIRKKMDLIDLEDETIDAEVMNSLAVTMDDFRWALSQSNPSALRETVVEVPQVTWEDIGGLEDVKRELQELVQYPVEHPDKFLKFGMTPSKGVLFYGPPGCGKTLLAKAIANECQANFISIKGPELLTMWFGESEANVREIFDKARQAAPCVLFFDELDSIAKARGGNIGDGGGAADRVINQILTEMDGMSTKKNVFIIGATNRPDIIDPAILRPGRLDQLIYIPLPDEKSRVAILKANLRKSPVAKDVDLEFLAKMTNGFSGADLTEICQRACKLAIRESIESEIRRERERQTNPSAMEVEEDDPVPEIRRDHFEEAMRFARRSVSDNDIRKYEMFAQTLQQSRGFGSFRFPSGNQGGAGPSQGSGGGTGGSVYTEDNDDDLYG

SEQ ID NO: 41115 - protein, 401 aa, Homo sapiens
MVLAQSRVSAGVGSPHCSGSGGGGSDSFPWPASHPGNPQCSFSTAFLASPRLSRGTLAYLPPAPWSSLATPSALLGSSCAPPPPPARCPQPRALSPELGTKAGPRRPHRWELPRSPSQGAQGPAPRRRLLETMKGIVAASGSETEDEDSMDIPLDLSSSAGSGKRRRRGNLPKESVQILRDWLYEHRYNAYPSEQEKALLSQQTHLSTLQVCNWFINARRRLLPDMLRKDGKDPNQFTISRRGAKISETSSVESVMGIKNFMPALEETPFHSCTAGPNPTLGRPLSPKPSSPGSVLARPSVICHTTVTALKDVPFSLCQSVGVGQNTDIQQIAAKNFTDTSLMYPEDTCKSGPSTNTQSGLFNTPPPTPPDLNQDFSGFQLLVDVALKRAAEMELQAKLTA

SEQ ID NO: 41116 - protein, 272 aa, Homo sapiens
MKGKKGIVAASGSETEDEDSMDIPLDLSSSAGSGKRRRRGNLPKESVQILRDWLYEHRYNAYPSEQEKALLSQQTHLSTLQVCNWFINARRRLLPDMLRKDGKDPNQFTISRRGAKISETSSVESVMGIKNFMPALEETPFHSCTAGPNPTLGRPLSPKPSSPGSVLARPSVICHTTVTALKDVPFSLCQSVGVGQNTDIQQIAAKNFTDTSLMYPEDTCKSGPSTNTQSGLFNTPPPTPPDLNQDFSGFQLLVDVALKRAAEMELQAKLTA

SEQ ID NO: 41117 - protein, 286 aa, Homo sapiens
MTCSGKSCALARSSLTSSQGIVAASGSETEDEDSMDIPLDLSSSAGSGKRRRRGNLPKESVQILRDWLYEHRYNAYPSEQEKALLSQQTHLSTLQVCNWFINARRRLLPDMLRKDGKDPNQFTISRRGAKISETSSVESVMGIKNFMPALEETPFHSCTAGPNPTLGRPLSPKPSSPGSVLARPSVICHTTVTALKDVPFSLCQSVGVGQNTDIQQIAAKNFTDTSLMYPEDTCKSGPSTNTQSGLFNTPPPTPPDLNQDFSGFQLLVDVALKRAAEMELQAKLTA

SEQ ID NO: 41118 - protein, 252 aa, Homo sapiens
MDIPLDLSSSAGSGKRRRRGNLPKESVQILRDWLYEHRYNAYPSEQEKALLSQQTHLSTLQVCNWFINARRRLLPDMLRKDGKDPNQFTISRRGAKISETSSVESVMGIKNFMPALEETPFHSCTAGPNPTLGRPLSPKPSSPGSVLARPSVICHTTVTALKDVPFSLCQSVGVGQNTDIQQIAAKNFTDTSLMYPEDTCKSGPSTNTQSGLFNTPPPTPPDLNQDFSGFQLLVDVALKRAAEMELQAKLTA

SEQ ID NO: 41119 - protein, 237 aa, Homo sapiens
MSDSDLGEDEGLLSLAGKRKRRGNLPKESVKILRDWLYLHRYNAYPSEQEKLSLSGQTNLSVLQICNWFINARRRLLPDMLRKDGKDPNQFTISRRGGKASDVALPRGSSPSVLAVSVPAPTNVLSLSVCSMPLHSGQGEKPAAPFPRGELESPKPLVTPGSTLTLLTRAEAGSPTGGLFNTPPPTPPEQDKEDFSSFQLLVEVALQRAAEMELQKQQDPSLPLLHTPIPLVSENPQ

SEQ ID NO: 41120 - protein, 155 aa, Homo sapiens
MSDSDLGEDEGLLSLAGKRKRRGNLPKESVKILRDWLYLHRYNAYPSEQEKLSLSGQTNLSVLQDEFLDVIYWFRQIIAVVLGVIWGVLPLRGFLGIAGFCLINAGVLYLYFSNYLQIDEEEYGGTWELTKEGFMTSFALFMVIWIIFYTAIHYD

SEQ ID NO: 41121 - protein, 657 aa, Homo sapiens
MSPTPPLFSLPEARTRFTKSTREALNNKNIKPLLSTFSQVPGSENEKKCTLDQAFRGILEEEIINHSSCENVLAIISLAIGGVTEGICTASTPFVLLGDVLDCLPLDQCDTIFTFVEKNVATWKSNTFYSAGKNYLLRMCNDLLRRLSKSQNTVFCGRIQLFLARLFPLSEKSGLNLQSQFNLENVTVFNTNEQESTLGQKHTEDREEGMDVEEGEMGDEEAPTTCSIPIDYNLYRKFWSLQDYFRNPVQCYEKISWKTFLKYSEEVLAVFKSYKLDDTQASRKKMEELKTGGEHVYFAKFLTSEKLMDLQLSDSNFRRHILLQYLILFQYLKGQVKFKSSNYVLTDEQSLWIEDTTKSVYQLLSENPPDGERFSKMVEHILNTEENWNSWKNEGCPSFVKERTSDTKPTRIIRKRTAPEDFLGKGPTKKILMGNEELTRLWNLCPDNMEACKSETREHMPTLEEFFEEAIEQADPENMVENEYKAVNNSNYGWRALRLLARRSPHFFQPTNQQFKSLPEYLENMVIKLAKELPPPSEEIKTGEDEDEEDNDALLKENESPDVRRDKPVTGEQIEVFANKLGEQWKILAPYLEMKDSEIRQIECDSEDMKMRAKQLLVAWQDQEGVHATPENLINALNKSGLSDLAESLTNDNETNS

SEQ ID NO: 41122 - protein, 377 aa, Homo sapiens
MSPTPPLFSLPEARTRFTKSTREALNNKNIKPLLSTFSQVPGSENEKKCTLDQAFRGILEEEIINHSSCENVLAIISLAIGGVTEGICTASTPFVLLGDVLDCLPLDQCDTIFTFVEKNVATWKSNTFYSAGKNYLLRMCNDLLRRLSKSQNTVFCGRIQLFLARLFPLSEKSGLNLQSQFNLENVTVFNTNEQESTLGQKHTEDREEGMDVEEGEMGDEEAPTTCSIPIDYNLYRKFWSLQDYFRNPVQCYEKISWKTFLKYSEEVLAVFKSYKLDDTQASRKKMEELKTGGEHVYFAKFLTSEKLMDLQLSDSNFRRHILLQYLILFQYLKGQVKFKSSNYVLTDEQSLWIEDTTKSVYQVSSTRNKPMIEKMEI

SEQ ID NO: 41123 - protein, 433 aa, Homo sapiens
MRQSHQLPLVGLLLFSFIPSQLCEICEVSEENYIRLKPLLNTMIQSNYNRGTSAVNVVLSLKLVGIQIQTLMQKMIQQIKYNVKSRLSDVSSGELALIILALGVCRNAEENLIYDYHLIDKLENKFQAEIENMEAHNGTPLTNYYQLSLDVLALCLFNGNYSTAEVVNHFTPENKNYYFGSQFSVDTGAMAVLALTCVKKSLINGQIKADEGSLKNISIYTKSLVEKILSEKKENGLIGNTFSTGEAMQALFVSSDYYNENDWNCQQTLNTVLTEISQGAFSNPNAAAQVLPALMGKTFLDINKDSSCVSASGNFNISADEPITVTPPDSQSYISVNYSVRINETYFTNVTVLNGSVFLSVMEKAQKMNDTIFGFTMEERSWGPYITCIQGLCANNNDRTYWELLSGGEPLSQGAGSYVVRNGENLEVRWSKY

SEQ ID NO: 41124 - protein, 427 aa, Homo sapiens
MRHLGAFLFLLGVLGALTEMCEIPEMDSHLVEKLGQHLLPWMDRLSLEHLNPSIYVGLRLSSLQAGTKEDLYLHSLKLGYQQCLLGSAFSEDDGDCQGKPSMGQLALYLLALRANCEFVRGHKGDRLVSQLKWFLEDEKRAIGHDHKGHPHTSYYQYGLGILALCLHQKRVHDSVVDKLLYAVEPFHQGHHSVDTAAMAGLAFTCLKRSNFNPGRRQRITMAIRTVREEILKAQTPEGHFGNVYSTPLALQFLMTSPMRGAELGTACLKARVALLASLQDGAFQNALMISQLLPVLNHKTYIDLIFPDCLAPRVMLEPAAETIPQTQEIISVTLQVLSLLPPYRQSISVLAGSTVEDVLKKAHELGGFTYETQASLSGPYLTSVMGKAAGEREFWQLLRDPNTPLLQGIADYRPKDGETIELRLVSW

SEQ ID NO: 41125 - protein, 400 aa, Homo sapiens
MRHLGAFLFLLGVLGALTEMCEIPEMDSHLVEKLGQHLLPWMDRLSLEHLNPSIYVGLRLSSLQAGTKEDLYLHSLKLGYQQCLLGSAFSEDDGDCQGKPSMGQLALYLLALRANWHDHKGHPHTSYYQYGLGILALCLHQKRVHDSVVDKLLYAVEPFHQGHHSVDTAAMAGLAFTCLKRSNFNPGRRQRITMAIRTVREEILKAQTPEGHFGNVYSTPLALQFLMTSPMRGAELGTACLKARVALLASLQDGAFQNALMISQLLPVLNHKTYIDLIFPDCLAPRVMLEPAAETIPQTQEIISVTLQVLSLLPPYRQSISVLAGSTVEDVLKKAHELGGFTYETQASLSGPYLTSVMGKAAGEREFWQLLRDPNTPLLQGIADYRPKDGETIELRLVSW

SEQ ID NO: 41126 - protein, 727 aa, Homo sapiens
MESEDTKKTQEMKTDLNLLLECLKYQMDNAFSQKEALVTIHSICQQNSNASVYFREIGGLMFVKNLAKSSEHSMVKEAALYTLGAIAEKNVYCQQTLCTSELFEDLTWFLSNDSNINLKRMSVYVILVLVSNNRTGQTLVRETGCITVLSRLFRTVISKHELDLSDKNVFQSYQLWSSVCSTLCVCVNNPQNDENQMFCCSLFPHANEWLKNCTTPEIIRPICSFIGLTLANNTYVQKYFVSVGGLDVLSQVLMQLESDSHETLSSAKLAVVVTKTVDACIADNPTFGIVLSKYHIVSKLLALLLHESLDSGEKFSIMLTLGHCTEDCEENQYDLFKNNGLPLMIQALTESQNEELNKAATFVLHNCKKITEKLSLSLGEYPFDENETQQLKDISVKENNLEEHWRKAKEILHRIEQLEREGNEEEIQRENYQDNISSMNISIQNTWKHLHADRIGRGSKAEDEDKSHSRQLQSYKSHGVMSKACTNDDQMKTPLKSANPVHACYRESEQNKTLYKAKSSCNQNLHEETTFEKNFVSQSSDHVFKHPVHIAKNIKQQLPVTDPFTLCSDIINKEVVSFLATPSCSEMLTYRCSGCIAVEKSLNSRNFSKLLHSCPYQCDRHKVIVEAEDRYKSELRKSLICNKKILLTPRRRQRLSNESTTPGGIKKRRIRKNFTEEEVNYLFNGVKKMGNHWNSILWSFPFQQGRKAVDLAHKYHKLTKHPTCAAS

SEQ ID NO: 41127 - protein, 550 aa, Homo sapiens
MESEDTKKTQEMKTDLNLLLECLKYQMDNAFSQKEALVTIHSICQQNSNASVYFREIGGLMFVKNLAKSSEHSMVKEAALYTLGAIAEKNVYCQQTLCTSELFEDLTWFLSNDSNINLKRMSVYVILVLVSNNRTGQTLVRETGCITVLSRLFRTVISKHELDLSDKNVFQSYQLWSSVCSTLCVCVNNPQNDENQMFCCSLFPHANEWLKNCTTPEIIRPICSFIGLTLANNTYVQKYFVSVGGLDVLSQVLMQLESDSHETLSSAKLAVVVTKTVDACIADNPTFGIVLSKYHIVSKLLALLLHESLDSGEKFSIMLTLGHCTEDCEENQYDLFKNNGLPLMIQALTESQNEELNKAATFVLHNCKKITEKLSLSLGEYPFDENETQQLKDISVKENNLEEHWRKAKEILHRIEQLEREGNEEEIQRENYQDNISSMNISIQNTWKHLHADRIGRGSKAEDEDKSHSRQLQSYKSHGVMSKACTNDDQMKTPLKSANPVHACYRESEQNKTLYKAKSSCNQNLHEETTFEKNFVSQSRSIYIMFRYNK

SEQ ID NO: 41128 - protein, 508 aa, Homo sapiens
MESEDTKKTQEMKTDLNLLLECLKYQMDNAFSQKEALVTIHSICQQNSNASVYFREIGGLMFVKNLAKSSEHSMVKEAALYTLGAIAEKNVYCQQTLCTSELFEDLTWFLSNDSNINLKRMSVYVILVLVSNNRTGQTLVRETGCITVLSRLFRTVISKHELDLSDKNVFQSYQLWSSVCSTLCVCVNNPQNDENQMFCCSLFPHANEWLKNCTTPEIIRPICSFIGLTLANNTYVQKYFVSVGGLDVLSQVLMQLESDSHETLSSAKLAVVVTKTVDACIADNPTFGIVLSKYHIVSKLLALLLHESLDSGEKFSIMLTLGHCTEDCAEKLSLSLGEYPFDENETQQLKDISVKENNLEEHWRKAKEILHRIEQLEREGNEEEIQRENYQDNISSMNISIQNTWKHLHADRIGRGSKAEDEDKSHSRQLQSYKSHGVMSKACTNDDQMKTPLKSANPVHACYRESEQNKTLYKAKSSCNQNLHEETTFEKNFVSQSRSIYIMFRYNK

SEQ ID NO: 41129 - protein, 220 aa, Homo sapiens
MFQGQRGWFCGSVSQDLRQFWVAEGGTISDPRAADFLFSCDASHPDTLRIYQSLDYIEDNATVFHAYYLSAVANAKIKNSVALGHFILPPACLQKEIRRKIGSFIWEQDQHFLIEKHDEVTPNEIKTLRENSELATEHKKELSKSPEKHFIRTPVVEKQMYFPLQNYPVNNMVTGYISIDAMKKFLGELHDFIPGTSGYLAYHVQNEINMSAIKNKLKRK

SEQ ID NO: 41130 - protein, 1593 aa, Homo sapiens
MAAAAVVVPAEWIKNWEKSGRGEFLHLCRILSENKSHDSSTYRDFQQALYELSYHVIKGNLKHEQASNVLSDISEFREDMPSILADVFCILDIETNCLEEKSKRDYFTQLVLACLYLVSDTVLKERLDPETLESLGLIKQSQQFNQKSVKIKTKLFYKQQKFNLLREENEGYAKLIAELGQDLSGSITSDLILENIKSLIGCFNLDPNRVLDVILEVFECRPEHDDFFISLLESYMSMCEPQTLCHILGFKFKFYQEPNGETPSSLYRVAAVLLQFNLIDLDDLYVHLLPADNCIMDEHKREIAEAKQIVRKLTMVVLSSEKMDEREKEKEKEEEKVEKPPDNQKLGLLEALLKIGDWQHAQNIMDQMPPYYAASHKLIALAICKLIHITIEPLYRRVGVPKGAKGSPVNALQNKRAPKQAESFEDLRRDVFNMFCYLGPHLSHDPILFAKVVRIGKSFMKEFQSDGSKQEDKEKTEVILSCLLSITDQVLLPSLSLMDCNACMSEELWGMFKTFPYQHRYRLYGQWKNETYNSHPLLVKVKAQTIDRAKYIMKRLTKENVKPSGRQIGKLSHSNPTILFDYILSQIQKYDNLITPVVDSLKYLTSLNYDVLAYCIIEALANPEKERMKHDDTTISSWLQSLASFCGAVFRKYPIDLAGLLQYVANQLKAGKSFDLLILKEVVQKMAGIEITEEMTMEQLEAMTGGEQLKAEGGYFGQIRNTKKSSQRLKDALLDHDLALPLCLLMAQQRNGVIFQEGGEKHLKLVGKLYDQCHDTLVQFGGFLASNLSTEDYIKRVPSIDVLCNEFHTPHDAAFFLSRPMYAHHISSKYDELKKSEKGSKQQHKVHKYITSCEMVMAPVHEAVVSLHVSKVWDDISPQFYATFWSLTMYDLAVPHTSYEREVNKLKVQMKAIDDNQEMPPNKKKKEKERCTALQDKLLEEEKKQMEHVQRVLQRLKLEKDNWLLAKSTKNETITKFLQLCIFPRCIFSAIDAVYCARFVELVHQQKTPNFSTLLCYDRVFSDIIYTVASCTENEASRYGRFLCCMLETVTRWHSDRATYEKECGNYPGFLTILRATGFDGGNKADQLDYENFRHVVHKWHYKLTKASVHCLETGEYTHIRNILIVLTKILPWYPKVLNLGQALERRVHKICQEEKEKRPDLYALAMGYSGQLKSRKSYMIPENEFHHKDPPPRNAVASVQNGPGGGPSSSSIGSASKSDESSTEETDKSRERSQCGVKAVNKASSTTPKGNSSNGNSGSNSNKAVKENDKEKGKEKEKEKKEKTPATTPEARVLGKDGKEKPKEERPNKDEKARETKERTPKSDKEKEKFKKEEKAKDEKFKTTVPNAESKSTQEREREKEPSRERDIAKEMKSKENVKGGEKTPVSGSLKSPVPRSDIPEPEREQKRRKIDTHPSPSHSSTVKDSLIELKESSAKLYINHTPPPLSKSKEREMDKKDLDKSRERSREREKKDEKDRKERKRDHSNNDREVPPDLTKRRKEENGTMGVSKHKSESPCESPYPNEKDKEKNKSKSSGKEKGSDSFKSEKMDKISSGGKKESRHDKEKIEKKEKRDSSGGKEEKKHHKSSDKHR

SEQ ID NO: 41131 - protein, 414 aa, Homo sapiens
MIPENEFHHKDPPPRNAVASVQNGPGGGPSSSSIGSASKSDESSTEETDKSRERSQCGVKAVNKASSTTPKGNSSNGNSGSNSNKAVKENDKEKGKEKEKEKKEKTPATTPEARVLGKDGKEKPKEERPNKDEKARETKERTPKSDKEKEKFKKEEKAKDEKFKTTVPNAESKSTQEREREKEPSRERDIAKEMKSKENVKGGEKTPVSGSLKSPVPRSDIPEPEREQKRRKIDTHPSPSHSSTVKDSLIELKESSAKLYINHTPPPLSKSKEREMDKKDLDKSRERSREREKKDEKDRKERKRDHSNNDREVPPDLTKRRKEENGTMGVSKHKSESPCESPYPNEKDKEKNKSKSSGKEKGSDSFKSEKMDKISSGGKKESRHDKEKIEKKEKRDSSGGKEEKKHHKSSDKHR

SEQ ID NO: 41132 - protein, 1488 aa, Homo sapiens
MAEARKRRELLPLIYHHLLRAGYVRAAREVKEQSGQKCFLAQPVTLLDIYTHWQQTSELGRKRKAEEDAALQAKKTRVSDPISTSESSEEEEEAEAETAKATPRLASTNSSVLGADLPSSMKEKAKAETEKAGKTGNSMPHPATGKTVANLLSGKSPRKSAEPSANTTLVSETEEEGSVPAFGAAAKPGMVSAGQADSSSEDTSSSSDETDVEGKPSVKPAQVKASSVSTKESPARKAAPAPGKVGDVTPQVKGGALPPAKRAKKPEEESESSEEGSESEEEAPAGTRSQVKASEKILQVRAASAPAKGTPGKGATPAPPGKAGAVASQTKAGKPEEDSESSSEESSDSEEETPAAKALLQAKASGKTSQVGAASAPAKESPRKGAAPAPPGKTGPAVAKAQAGKREEDSQSSSEESDSEEEAPAQAKPSGKAPQVRAASAPAKESPRKGAAPAPPRKTGPAAAQVQVGKQEEDSRSSSEESDSDREALAAMNAAQVKPLGKSPQVKPASTMGMGPLGKGAGPVPPGKVGPATPSAQVGKWEEDSESSSEESSDSSDGEVPTAVAPAQEKSLGNILQAKPTSSPAKGPPQKAGPVAVQVKAEKPMDNSESSEESSDSADSEEAPAAMTAAQAKPALKIPQTKACPKKTNTTASAKVAPVRVGTQAPRKAGTATSPAGSSPAVAGGTQRPAEDSSSSEESDSEEEKTGLAVTVGQAKSVGKGLQVKAASVPVKGSLGQGTAPVLPGKTGPTVTQVKAEKQEDSESSEEESDSEEAAASPAQVKTSVKKTQAKANPAAARAPSAKGTISAPGKVVTAAAQAKQRSPSKVKPPVRNPQNSTVLARGPASVPSVGKAVATAAQAQTGPEEDSGSSEEESDSEEEAETLAQVKPSGKTHQIRAALAPAKESPRKGAAPTPPGKTGPSAAQAGKQDDSGSSSEESDSDGEAPAAVTSAQVIKPPLIFVDPNRSPAGPAATPAQAQAASTPRKARASESTARSSSSESEDEDVIPATQCLTPGIRTNVVTMPTAHPRIAPKASMAGASSSKESSRISDGKKQEGPATQVSKKNPASLPLTQAALKVLAQKASEAQPPVARTQPSSGVDSAVGTLPATSPQSTSVQAKGTNKLRKPKLPEVQQATKAPESSDDSEDSSDSSSGSEEDGEGPQGAKSAHTLGPTPSRTETLVEETAAESSEDDVVAPSQSLLSGYMTPGLTPANSQASKATPKLDSSPSVSSTLAAKDDPDGKQEAKPQQAAGMLSPKTGGKEAASGTTPQKSRKPKKGAGNPQASTLALQSNITQCLLGQPWPLNEAQVQASVVKVLTELLEQERKKVVDTTKESSRKGWESRKRKLSGDQPAARTPRSKKKKKLGAGEGGEASVSPEKTSTTSKGKAKRDKASGDVKEKKGKGSLGSQGAKDEPEEELQKGMGTVEGGDQSNPKSKKEKKKSDKRKKDKEKKEKKKKAKKASTKDSESPSQKKKKKKKKTAEQTV

SEQ ID NO: 41133 - protein, 1411 aa, Homo sapiens
MAEARKRRELLPLIYHHLLRAGYVRAAREVKEQSGQKCFLAQPVTLLDIYTHWQQTSELGRKRKAEEDAALQAKKTRVSDPISTSESSEEEEEAEAETAKATPRLASTNSSVLGADLPSSMKEKAKAETEKAGKTGNSMPHPATGKTVANLLSGKSPRKSAEPSANTTLVSETEEEGSVPAFGAAAKPGMVSAGQADSSSEDTSSSSDETDVEVKASEKILQVRAASAPAKGTPGKGATPAPPGKAGAVASQTKAGKPEEDSESSSEESSDSEEETPAAKALLQAKASGKTSQVGAASAPAKESPRKGAAPAPPGKTGPAVAKAQAGKREEDSQSSSEESDSEEEAPAQAKPSGKAPQVRAASAPAKESPRKGAAPAPPRKTGPAAAQVQVGKQEEDSRSSSEESDSDREALAAMNAAQVKPLGKSPQVKPASTMGMGPLGKGAGPVPPGKVGPATPSAQVGKWEEDSESSSEESSDSSDGEVPTAVAPAQEKSLGNILQAKPTSSPAKGPPQKAGPVAVQVKAEKPMDNSESSEESSDSADSEEAPAAMTAAQAKPALKIPQTKACPKKTNTTASAKVAPVRVGTQAPRKAGTATSPAGSSPAVAGGTQRPAEDSSSSEESDSEEEKTGLAVTVGQAKSVGKGLQVKAASVPVKGSLGQGTAPVLPGKTGPTVTQVKAEKQEDSESSEEESDSEEAAASPAQVKTSVKKTQAKANPAAARAPSAKGTISAPGKVVTAAAQAKQRSPSKVKPPVRNPQNSTVLARGPASVPSVGKAVATAAQAQTGPEEDSGSSEEESDSEEEAETLAQVKPSGKTHQIRAALAPAKESPRKGAAPTPPGKTGPSAAQAGKQDDSGSSSEESDSDGEAPAAVTSAQVIKPPLIFVDPNRSPAGPAATPAQAQAASTPRKARASESTARSSSSESEDEDVIPATQCLTPGIRTNVVTMPTAHPRIAPKASMAGASSSKESSRISDGKKQEGPATQVSKKNPASLPLTQAALKVLAQKASEAQPPVARTQPSSGVDSAVGTLPATSPQSTSVQAKGTNKLRKPKLPEVQQATKAPESSDDSEDSSDSSSGSEEDGEGPQGAKSAHTLGPTPSRTETLVEETAAESSEDDVVAPSQSLLSGYMTPGLTPANSQASKATPKLDSSPSVSSTLAAKDDPDGKQEAKPQQAAGMLSPKTGGKEAASGTTPQKSRKPKKGAGNPQASTLALQSNITQCLLGQPWPLNEAQVQASVVKVLTELLEQERKKVVDTTKESSRKGWESRKRKLSGDQPAARTPRSKKKKKLGAGEGGEASVSPEKTSTTSKGKAKRDKASGDVKEKKGKGSLGSQGAKDEPEEELQKGMGTVEGGDQSNPKSKKEKKKSDKRKKDKEKKEKKKKAKKASTKDSESPSQKKKKKKKKTAEQTV

SEQ ID NO: 41134 - protein, 1489 aa, Homo sapiens
MAEARKRRELLPLIYHHLLRAGYVRAAREVKEQSGQKCFLAQPVTLLDIYTHWQQTSELGRKRKAEEDAALQAKKTRVSDPISTSESSEEEEEAEAETAKATPRLASTNSSVLGADLPSSMKEKAKAETEKAGKTGNSMPHPATGKTVANLLSGKSPRKSAEPSANTTLVSETEEEGSVPAFGAAAKPGMVSAGQADSSSEDTSSSSDETDVEGKPSVKPAQVKASSVSTKESPARKAAPAPGKVGDVTPQVKGGALPPAKRAKKPEEESESSEEGSESEEEAPAGTRSQVKASEKILQVRAASAPAKGTPGKGATPAPPGKAGAVASQTKAGKPEEDSESSSEESSDSEEETPAAKALLQAKASGKTSQVGAASAPAKESPRKGAAPAPPGKTGPAVAKAQAGKREEDSQSSSEESDSEEEAPAQAKPSGKAPQVRAASAPAKESPRKGAAPAPPRKTGPAAAQVQVGKQEEDSRSSSEESDSDREALAAMNAAQVKPLGKSPQVKPASTMGMGPLGKGAGPVPPGKVGPATPSAQVGKWEEDSESSSEESSDSSDGEVPTAVAPAQEKSLGNILQAKPTSSPAKGPPQKAGPVAVQVKAEKPMDNSESSEESSDSADSEEAPAAMTAAQAKPALKIPQTKACPKKTNTTASAKVAPVRVGTQAPRKAGTATSPAGSSPAVAGGTQRPAEDSSSSEESDSEEEKTGLAVTVGQAKSVGKGLQVKAASVPVKGSLGQGTAPVLPGKTGPTVTQVKAEKQEDSESSEEESDSEEAAASPAQVKTSVKKTQAKANPAAARAPSAKGTISAPGKVVTAAAQAKQRSPSKVKPPVRNPQNSTVLARGPASVPSVGKAVATAAQAQTGPEEDSGSSEEESDSEEEAETLAQVKPSGKTHQIRAALAPAKESPRKGAAPTPPGKTGPSAAQAGKQDDSGSSSEESDSDGEAPAAVTSAQVIKPPLIFVDPNRSPAGPAATPAQAQAASTPRKARASESTARSSSSESEDEDVIPATQCLTPGIRTNVVTMPTAHPRIAPKASMAGASSSKESSRISDGKKQEGPATQVSKKNPASLPLTQAALKVLAQKASEAQPPVARTQPSSGVDSAVGTLPATSPQSTSVQAKGTNKLRKPKLPEVQQATKAPESSDDSEDSSDSSSGSEEDGEGPQGAKSAHTLVGPTPSRTETLVEETAAESSEDDVVAPSQSLLSGYMTPGLTPANSQASKATPKLDSSPSVSSTLAAKDDPDGKQEAKPQQAAGMLSPKTGGKEAASGTTPQKSRKPKKGAGNPQASTLALQSNITQCLLGQPWPLNEAQVQASVVKVLTELLEQERKKVVDTTKESSRKGWESRKRKLSGDQPAARTPRSKKKKKLGAGEGGEASVSPEKTSTTSKGKAKRDKASGDVKEKKGKGSLGSQGAKDEPEEELQKGMGTVEGGDQSNPKSKKEKKKSDKRKKDKEKKEKKKKAKKASTKDSESPSQKKKKKKKKTAEQTV

SEQ ID NO: 41135 - protein, 1524 aa, Homo sapiens
MAEARKRRELLPLIYHHLLRAGYVRAAREVKEQSGQKCFLAQPVTLLDIYTHWQQTSELGRKRKAEEDAALQAKKTRVSDPISTSESSEEEEEAEAETAKATPRLASTNSSVLGADLPSSMKEKAKAETEKAGKTGNSMPHPATGKTVANLLSGKSPRKSAEPSANTTLVSETEEEGSVPAFGAAAKPGMVSAGQADSSSEDTSSSSDETDVEGKPSVKPAQVKASSVSTKESPARKAAPAPGKVGDVTPQVKGGALPPAKRAKKPEEESESSEEGSESEEEAPAGTRSQVKASEKILQVRAASAPAKGTPGKGATPAPPGKAGAVASQTKAGKPEEDSESSSEESSDSEEETPAAKALLQAKASGKTSQVGAASAPAKESPRKGAAPAPPGKTGPAVAKAQAGKREEDSQSSSEESDSEEEAPAQAKPSGKAPQVRAASAPAKESPRKGAAPAPPRKTGPAAAQVQVGKQEEDSRSSSEESDSDREALAAMNAAQVKPLGKSPQVKPASTMGMGPLGKGAGPVPPGKVGPATPSAQVGKWEEDSESSSEESSDSSDGEVPTAVAPAQEKSLGNILQAKPTSSPAKGPPQKAGPVAVQVKAEKPMDNSESSEESSDSADSEEAPAAMTAAQAKPALKIPQTKACPKKTNTTASAKVAPVRVGTQAPRKAGTATSPAGSSPAVAGGTQRPAEDSSSSEESDSEEEKTGLAVTVGQAKSVGKGLQVKAASVPVKGSLGQGTAPVLPGKTGPTVTQVKAEKQEDSESSEEESDSEEAAASPAQVKTSVKKTQAKANPAAARAPSAKGTISAPGKVVTAAAQAKQRSPSKVKPPVRNPQNSTVLARGPASVPSVGKAVATAAQAQTGPEEDSGSSEEESDSEEEAETLAQVKPSGKTHQIRAALAPAKESPRKGAAPTPPGKTGPSAAQAGKQDDSGSSSEESDSDGEAPAAVTSAQDSNSKPARSKTLAPAPPERNTEGSSESSEEELPLTQVIKPPLIFVDPNRSPAGPAATPAQAQAASTPRKARASESTARSSSSESEDEDVIPATQCLTPGIRTNVVTMPTAHPRIAPKASMAGASSSKESSRISDGKKQEGPATQVSKKNPASLPLTQAALKVLAQKASEAQPPVARTQPSSGVDSAVGTLPATSPQSTSVQAKGTNKLRKPKLPEVQQATKAPESSDDSEDSSDSSSGSEEDGEGPQGAKSAHTLGPTPSRTETLVEETAAESSEDDVVAPSQSLLSGYMTPGLTPANSQASKATPKLDSSPSVSSTLAAKDDPDGKQEAKPQQAAGMLSPKTGGKEAASGTTPQKSRKPKKGAGNPQASTLALQSNITQCLLGQPWPLNEAQVQASVVKVLTELLEQERKKVVDTTKESSRKGWESRKRKLSGDQPAARTPRSKKKKKLGAGEGGEASVSPEKTSTTSKGKAKRDKASGDVKEKKGKGSLGSQGAKDEPEEELQKGMGTVEGGDQSNPKSKKEKKKSDKRKKDKEKKEKKKKAKKASTKDSESPSQKKKKKKKKTAEQTV

SEQ ID NO: 41136 - protein, 958 aa, Homo sapiens
MAEARKRRELLPLIYHHLLRAGYVRAAREVKEQSGQKCFLAQPVTLLDIYTHWQQTSELGRKRKAEEDAALQAKKTRVSDPISTSESSEEEEEAEAETAKATPRLASTNSSVLGADLPSSMKEKAKAETEKAGKTGNSMPHPATGKTVANLLSGKSPRKSAEPSANTTLVSETEEEGSVPAFGAAAKPGMVSAGQADSSSEDTSSSSDETDVEGKPSVKPAQVKASSVSTKESPARKAAPAPGKVGDVTPQVKGGALPPAKRAKKPEEESESSEEGSESEEEAPAGTRSQVKASEKILQVRAASAPAKGTPGKGATPAPPGKAGAVASQTKAGKPEEDSESSSEESSDSEEETPAAKALLQAKASGKTSQVGAASAPAKESPRKGAAPAPPGKTGPAVAKAQAGKREEDSQSSSEESDSEEEAPAQAKPSGKAPQVRAASAPAKESPRKGAAPAPPRKTGPAAAQVQVGKQEEDSRSSSEESDSDREALAAMNAAQVKPLGKSPQVKPASTMGMGPLGKGAGPVPPGKVGPATPSAQVGKWEEDSESSSEESSDSSDGEVPTAVAPAQEKSLGNILQAKPTSSPAKGPPQKAGPVAVQVKAEKPMDNSESSEESSDSADSEEAPAAMTAAQAKPALKIPQTKACPKKTNTTASAKVAPVRVGTQAPRKAGTATSPAGSSPAVAGGTQRPAEDSSSSEESDSEEEKTGLAVTVGQAKSVGKGLQVKAASVPVKGSLGQGTAPVLPGKTGPTVTQVKAEKQEDSESSEEESDSEEAAASPAQVKTSVKKTQAKANPAAARAPSAKGTISAPGKVVTAAAQAKQRSPSKVKPPVRNPQNSTVLARGPASVPSVGKAVATAAQAQTGPEEDSGSSEEESDSEEEAETLAQVKPSGKTHQIRAALAPAKESPRKGAAPTPPGKTGPSAAQAGKQDDSGSSSEESDSDGEAPAAVTSAQDQESS

SEQ ID NO: 41137 - protein, 1450 aa, Homo sapiens
MAEARKRRELLPLIYHHLLRAGYVRAAREVKEQSGQKCFLAQPVTLLDIYTHWQQTSELGRKRKAEEDAALQAKKTRVSDPISTSESSEEEEEAEAETAKATPRLASTNSSVLGADLPSSMKEKAKAETEKAGKTGNSMPHPATGKTVANLLSGKSPRKSAEPSANTTLVSETEEEGSVPAFGAAAKPGMVSAGQADSSSEDTSSSSDETDVEGKPSVKPAQVKASSVSTKESPARKAAPAPGKVGDVTPQVKGGALPPAKRAKKPEEESESSEEGSESEEEAPAGTRSQVKASEKILQVRAASAPAKGTPGKGATPAPPGKAGAVASQTKAGKPEEDSESSSEESSDSEEETPAAKALLQAKASGKTSQVGAASAPAKESPRKGAAPAPPGKTGPAVAKAQAGKREEDSQSSSEESDSEEEAPAQAKPSGKAPQVRAASAPAKESPRKGAAPAPPRKTGPAAAQVQVGKQEEDSRSSSEESDSDREALAAMNAAQVKPLGKSPQVKPASTMGMGPLGKGAGPVPPGKVGPATPSAQVGKWEEDSESSSEESSDSSDGEVPTAVAPAQEKSLGNILQAKPTSSPAKGPPQKAGPVAVQVKAEKPMDNSESSEESSDSADSEEAPAAMTAAQAKPALKIPQTKACPKKTNTTASAKVAPVRVGTQAPRKAGTATSPAGSSPAVAGGTQRPAEDSSSSEESDSEEEKTGLAVTVGQAKSVGKGLQVKAASVPVKGSLGQGTAPVLPGKTGPTVTQVKAEKQEDSESSEEESDSEEAAASPAQVKTSVKKTQAKANPAAARAPSAKGTISAPGKVVTAAAQAKQRSPSKVKPPVRNPQNSTVLARGPASVPSVGKAVATAAQAQTGPEEDSGSSEEESDSEEEAETLAQVKPSGKTHQIRAALAPAKESPRKGAAPTPPGKTGPSAAQAGKQDDSGSSSEESDSDGEAPAAVTSAQVIKPPLIFVDPNRSPAGPAATPAQAQAASTPRKARASESTARSSSSESEDEDVIPATQCLTPGIRTNVVTMPTAHPRIAPKASMAGASSSKESSRISDGKKQEGPATQVDSAVGTLPATSPQSTSVQAKGTNKLRKPKLPEVQQATKAPESSDDSEDSSDSSSGSEEDGEGPQGAKSAHTLGPTPSRTETLVEETAAESSEDDVVAPSQSLLSGYMTPGLTPANSQASKATPKLDSSPSVSSTLAAKDDPDGKQEAKPQQAAGMLSPKTGGKEAASGTTPQKSRKPKKGAGNPQASTLALQSNITQCLLGQPWPLNEAQVQASVVKVLTELLEQERKKVVDTTKESSRKGWESRKRKLSGDQPAARTPRSKKKKKLGAGEGGEASVSPEKTSTTSKGKAKRDKASGDVKEKKGKGSLGSQGAKDEPEEELQKGMGTVEGGDQSNPKSKKEKKKSDKRKKDKEKKEKKKKAKKASTKDSESPSQKKKKKKKKTAEQTV

SEQ ID NO: 41138 - protein, 1451 aa, Homo sapiens
MAEARKRRELLPLIYHHLLRAGYVRAAREVKEQSGQKCFLAQPVTLLDIYTHWQQTSELGRKRKAEEDAALQAKKTRVSDPISTSESSEEEEEAEAETAKATPRLASTNSSVLGADLPSSMKEKAKAETEKAGKTGNSMPHPATGKTVANLLSGKSPRKSAEPSANTTLVSETEEEGSVPAFGAAAKPGMVSAGQADSSSEDTSSSSDETDVEGKPSVKPAQVKASSVSTKESPARKAAPAPGKVGDVTPQVKGGALPPAKRAKKPEEESESSEEGSESEEEAPAGTRSQVKASEKILQVRAASAPAKGTPGKGATPAPPGKAGAVASQTKAGKPEEDSESSSEESSDSEEETPAAKALLQAKASGKTSQVGAASAPAKESPRKGAAPAPPGKTGPAVAKAQAGKREEDSQSSSEESDSEEEAPAQAKPSGKAPQVRAASAPAKESPRKGAAPAPPRKTGPAAAQVQVGKQEEDSRSSSEESDSDREALAAMNAAQVKPLGKSPQVKPASTMGMGPLGKGAGPVPPGKVGPATPSAQVGKWEEDSESSSEESSDSSDGEVPTAVAPAQEKSLGNILQAKPTSSPAKGPPQKAGPVAVQVKAEKPMDNSESSEESSDSADSEEAPAAMTAAQAKPALKIPQTKACPKKTNTTASAKVAPVRVGTQAPRKAGTATSPAGSSPAVAGGTQRPAEDSSSSEESDSEEEKTGLAVTVGQAKSVGKGLQVKAASVPVKGSLGQGTAPVLPGKTGPTVTQVKAEKQEDSESSEEESDSEEAAASPAQVKTSVKKTQAKANPAAARAPSAKGTISAPGKVVTAAAQAKQRSPSKVKPPVRNPQNSTVLARGPASVPSVGKAVATAAQAQTGPEEDSGSSEEESDSEEEAETLAQVKPSGKTHQIRAALAPAKESPRKGAAPTPPGKTGPSAAQAGKQDDSGSSSEESDSDGEAPAAVTSAQVIKPPLIFVDPNRSPAGPAATPAQAQAASTPRKARASESTARSSSSESEDEDVIPATQCLTPGIRTNVVTMPTAHPRIAPKASMAGASSSKESSRISDGKKQEGPATQVDSAVGTLPATSPQSTSVQAKGTNKLRKPKLPEVQQATKAPESSDDSEDSSDSSSGSEEDGEGPQGAKSAHTLVGPTPSRTETLVEETAAESSEDDVVAPSQSLLSGYMTPGLTPANSQASKATPKLDSSPSVSSTLAAKDDPDGKQEAKPQQAAGMLSPKTGGKEAASGTTPQKSRKPKKGAGNPQASTLALQSNITQCLLGQPWPLNEAQVQASVVKVLTELLEQERKKVVDTTKESSRKGWESRKRKLSGDQPAARTPRSKKKKKLGAGEGGEASVSPEKTSTTSKGKAKRDKASGDVKEKKGKGSLGSQGAKDEPEEELQKGMGTVEGGDQSNPKSKKEKKKSDKRKKDKEKKEKKKKAKKASTKDSESPSQKKKKKKKKTAEQTV

SEQ ID NO: 41139 - protein, 1412 aa, Homo sapiens
MAEARKRRELLPLIYHHLLRAGYVRAAREVKEQSGQKCFLAQPVTLLDIYTHWQQTSELGRKRKAEEDAALQAKKTRVSDPISTSESSEEEEEAEAETAKATPRLASTNSSVLGADLPSSMKEKAKAETEKAGKTGNSMPHPATGKTVANLLSGKSPRKSAEPSANTTLVSETEEEGSVPAFGAAAKPGMVSAGQADSSSEDTSSSSDETDVEVKASEKILQVRAASAPAKGTPGKGATPAPPGKAGAVASQTKAGKPEEDSESSSEESSDSEEETPAAKALLQAKASGKTSQVGAASAPAKESPRKGAAPAPPGKTGPAVAKAQAGKREEDSQSSSEESDSEEEAPAQAKPSGKAPQVRAASAPAKESPRKGAAPAPPRKTGPAAAQVQVGKQEEDSRSSSEESDSDREALAAMNAAQVKPLGKSPQVKPASTMGMGPLGKGAGPVPPGKVGPATPSAQVGKWEEDSESSSEESSDSSDGEVPTAVAPAQEKSLGNILQAKPTSSPAKGPPQKAGPVAVQVKAEKPMDNSESSEESSDSADSEEAPAAMTAAQAKPALKIPQTKACPKKTNTTASAKVAPVRVGTQAPRKAGTATSPAGSSPAVAGGTQRPAEDSSSSEESDSEEEKTGLAVTVGQAKSVGKGLQVKAASVPVKGSLGQGTAPVLPGKTGPTVTQVKAEKQEDSESSEEESDSEEAAASPAQVKTSVKKTQAKANPAAARAPSAKGTISAPGKVVTAAAQAKQRSPSKVKPPVRNPQNSTVLARGPASVPSVGKAVATAAQAQTGPEEDSGSSEEESDSEEEAETLAQVKPSGKTHQIRAALAPAKESPRKGAAPTPPGKTGPSAAQAGKQDDSGSSSEESDSDGEAPAAVTSAQVIKPPLIFVDPNRSPAGPAATPAQAQAASTPRKARASESTARSSSSESEDEDVIPATQCLTPGIRTNVVTMPTAHPRIAPKASMAGASSSKESSRISDGKKQEGPATQVSKKNPASLPLTQAALKVLAQKASEAQPPVARTQPSSGVDSAVGTLPATSPQSTSVQAKGTNKLRKPKLPEVQQATKAPESSDDSEDSSDSSSGSEEDGEGPQGAKSAHTLVGPTPSRTETLVEETAAESSEDDVVAPSQSLLSGYMTPGLTPANSQASKATPKLDSSPSVSSTLAAKDDPDGKQEAKPQQAAGMLSPKTGGKEAASGTTPQKSRKPKKGAGNPQASTLALQSNITQCLLGQPWPLNEAQVQASVVKVLTELLEQERKKVVDTTKESSRKGWESRKRKLSGDQPAARTPRSKKKKKLGAGEGGEASVSPEKTSTTSKGKAKRDKASGDVKEKKGKGSLGSQGAKDEPEEELQKGMGTVEGGDQSNPKSKKEKKKSDKRKKDKEKKEKKKKAKKASTKDSESPSQKKKKKKKKTAEQTV

SEQ ID NO: 41140 - protein, 1132 aa, Homo sapiens
MELFQAKDHYILQQGERALWCSRRDGGLQLRPATDLLLAWNPICLGLVEGVIGKIQLHSDLPWWLILIRQKALVGKLPGDHEVCKVTKIAVLSLSEMEPQDLELELCKKHHFGINKPEKIIPSPDDSKFLLKTFTHIKSNVSAPNKKKVKESKEKEKLERRLLEELLKMFMDSESFYYSLTYDLTNSVQRQSTGERDGRPLWQKVDDRFFWNKYMIQDLTEIGTPDVDFWIIPMIQGFVQIEELVVNYTESSDDEKSSPETPPQESTCVDDIHPRFLVALISRRSRHRAGMRYKRRGVDKNGNVANYVETEQLIHVHNHTLSFVQTRGSVPVFWSQVGYRYNPRPRLDRSEKETVAYFCAHFEEQLNIYKKQVIINLVDQAGREKIIGDAYLKQVLLFNNSHLTYVSFDFHEHCRGMKFENVQTLTDAIYDIILDMKWCWVDEAGVICKQEGIFRVNCMDCLDRTNVVQAAIARVVMEQQLKKLGVMPPEQPLPVKCNRIYQIMWANNGDSISRQYAGTAALKGDFTRTGERKLAGVMKDGVNSANRYYLNRFKDAYRQAVIDLMQGIPVTEDLYSIFTKEKEHEALHKENQRSHQELISQLLQSYMKLLLPDDEKFHGGWALIDCDPSLIDATHRDVDVLLLLSNSAYYVAYYDDEVDKVNQYQRLSLENLEKIEIGPEPTLFGKPKFSCMRLHYRYKEASGYFHTLRAVMRNPEEDGKDTLQCIAEMLQITKQAMGSDLPIIEKKLERKSSKPHEDIIGIRSQNQGSLAQGKNFLMSKFSSLNQKVKQTKSNVNIGNLRKLGNFTKPEMKVNFLKPNLKVNLWKSDSSLETMENTGVMDKVQAESDGDMSSDNDSYHSDEFLTNSKSDEDRQLANSLESVGPIDYVLPSCGIIASAPRLGSRSQSLSSTDSSVHAPSEITVAHGSGLGKGQESPLKKSPSAGDVHILTGFAKPMDIYCHRFVQDAQNKVTHLSETRSVSQQASQERNQMTNQVSNETQSESTEQTPSRPSQLDVSLSATGPQFLSVEPAHSVASQKTPTSASSMLELETGLHVTPSPSESSSSRAVSPFAKIRSSMVQVASITQAGLTHGINFAVSKVQKSPPEPEIINQVQQNELKKMFIQCQTRIIQI

SEQ ID NO: 41141 - protein, 375 aa, Homo sapiens
MELFQAKDHYILQQGERALWCSRRDGGLQLRPATDLLLAWNPICLGLVEGVIGKIQLHSDLPWWLILIRQKALVGKLPGDHEVCKVTKIAVLSLSEMEPQDLELELCKKHHFGINKPEKIIPSPDDSKFLLKTFTHIKSNVSAPNKKKVKESKEKEKLERRLLEELLKMFMDSESFYYSLTYDLTNSVQRQSTGERDGRPLWQKVDDRFFWNKYMIQDLTEIGTPDVDFWIIPMIQGFVQIEELVVNYTESSDDEKSSPETPPQESTCVDDIHPRFLVALISRRSRHRAGMRYKRRGVDKNGNVANYVETEQLIHVHNHTLSFVQTRGSVPVFWSQVGYRYNPRPRLDRSEKETVAYFCAHFEEQLNIYKKQQQK

SEQ ID NO: 41142 - protein, 219 aa, Homo sapiens
MELFQAKDHYILQQGERALWCSRRDGGLQLRPATDLLLAWNPICLGLVEGVIGKIQLHSDLPWWLILIRQKALVGKLPGDHEVCKVTKIAVLSLSEMEPQDLELELCKKHHFGINKPEKIIPSPDDSKFLLKTFTHIKSNVSAPNKKKVKESKEKEKLERRLLEELLKMFMDSESFYYSLTYDLTNSVQRQSTGERDGRPLWQKVPLTARRAGFALGKK

SEQ ID NO: 41143 - protein, 522 aa, Homo sapiens
MCHDVIFMAWLKQQFSECTLIDATHRDVDVLLLLSNSAYYVAYYDDEVDKVNQYQRLSLENLEKIEIGPEPTLFGKPKFSCMRLHYRYKEASGYFHTLRAVMRNPEEDGKDTLQCIAEMLQITKQAMGSDLPIIEKKLERKSSKPHEDIIGIRSQNQGSLAQGKNFLMSKFSSLNQKVKQTKSNVNIGNLRKLGNFTKPEMKVNFLKPNLKVNLWKSDSSLETMENTGVMDKVQAESDGDMSSDNDSYHSDEFLTNSKSDEDRQLANSLESVGPIDYVLPSCGIIASAPRLGSRSQSLSSTDSSVHAPSEITVAHGSGLGKGQESPLKKSPSAGDVHILTGFAKPMDIYCHRFVQDAQNKVTHLSETRSVSQQASQERNQMTNQVSNETQSESTEQTPSRPSQLDVSLSATGPQFLSVEPAHSVASQKTPTSASSMLELETGLHVTPSPSESSSSRAVSPFAKIRSSMVQVASITQAGLTHGINFAVSKVQKSPPEPEIINQVQQNELKKMFIQCQTRIIQI

SEQ ID NO: 41144 - protein, 660 aa, Homo sapiens
MLVCYSVLACEILWDLPCSIMGSPLGHFTWDKYLKETCSVPAPVHCFKQSYTPPSNEFKISMKLEAQDPRNTTSTCIATVVGLTGARLRLRLDGSDNKNDFWRLVDSAEIQPIGNCEKNGGMLQPPLGFRLNASSWPMFLLKTLNGAEMAPIRIFHKEPPSPSHNFFKMGMKLEAVDRKNPHFICPATIGEVRGSEVLVTFDGWRGAFDYWCRFDSRDIFPVGWCSLTGDNLQPPGTKVVIPKNPYPASDVNTEKPSIHSSTKTVLEHQPGQRGRKPGKKRGRTPKTLISHPISAPSKTAEPLKFPKKRGPKPGSKRKPRTLLNPPPASPTTSTPEPDTSTVPQDAATIPSSAMQAPTVCIYLNKNGSTGPHLDKKKVQQLPDHFGPARASVVLQQAVQACIDCAYHQKTVFSFLKQGHGGEVISAVFDREQHTLNLPAVNSITYVLRFLEKLCHNLRSDNLFGNQPFTQTHLSLTAIEYSHSHDRYLPGETFVLGNSLARSLEPHSDSMDSASNPTNLVSTSQRHRPLLSSCGLPPSTASAVRRLCSRGVLKGSNERRDMESFWKLNRSPGSDRYLESRDASRLSGRDPSSWTVEDVMQFVREADPQLGPHADLFRKHEIDGKALLLLRSDMMMKYMGLKLGPALKLSYHIDRLKQGKF

SEQ ID NO: 41145 - protein, 648 aa, Homo sapiens
MQPNVIDWSDVRKHKYGHLSESASQYQEAADILDLGHFTWDKYLKETCSVPAPVHCFKQSYTPPSNEFKISMKLEAQDPRNTTSTCIATVVGLTGARLRLRLDGSDNKNDFWRLVDSAEIQPIGNCEKNGGMLQPPLGFRLNASSWPMFLLKTLNGAEMAPIRIFHKEPPSPSHNFFKMGMKLEAVDRKNPHFICPATIGEVRGSEVLVTFDGWRGAFDYWCRFDSRDIFPVGWCSLTGDNLQPPGTKVVIPKNPYPASDVNTEKPSIHSSTKTVLEHQPGQRGRKPGKKRGRTPKTLISHPISAPSKTAEPLKFPKKRGPKPGSKRKPRTLLNPPPASPTTSTPEPDTSTVPQDAATIPSSAMQAPTVCIYLNKNGSTGPHLDKKKVQQLPDHFGPARASVVLQQAVQACIDCAYHQKTVFSFLKQGHGGEVISAVFDREQHTLNLPAVNSITYVLRFLEKLCHNLRSDNLFGNQPFTQTHLSLTAIEYSHSHDRYLPGETFVLGNSLARSLEPHSDSMDSASNPTNLVSTSQRHRPLLSSCGLPPSTASAVRRLCSRGSDRYLESRDASRLSGRDPSSWTVEDVMQFVREADPQLGPHADLFRKHEIDGKALLLLRSDMMMKYMGLKLGPALKLSYHIDRLKQGKF

SEQ ID NO: 41146 - protein, 599 aa, Homo sapiens
MKLEAQDPRNTTSTCIATVVGLTGARLRLRLDGSDNKNDFWRLVDSAEIQPIGNCEKNGGMLQPPLGFRLNASSWPMFLLKTLNGAEMAPIRIFHKEPPSPSHNFFKMGMKLEAVDRKNPHFICPATIGEVRGSEVLVTFDGWRGAFDYWCRFDSRDIFPVGWCSLTGDNLQPPGTKVVIPKNPYPASDVNTEKPSIHSSTKTVLEHQPGQRGRKPGKKRGRTPKTLISHPISAPSKTAEPLKFPKKRGPKPGSKRKPRTLLNPPPASPTTSTPEPDTSTVPQDAATIPSSAMQAPTVCIYLNKNGSTGPHLDKKKVQQLPDHFGPARASVVLQQAVQACIDCAYHQKTVFSFLKQGHGGEVISAVFDREQHTLNLPAVNSITYVLRFLEKLCHNLRSDNLFGNQPFTQTHLSLTAIEYSHSHDRYLPGETFVLGNSLARSLEPHSDSMDSASNPTNLVSTSQRHRPLLSSCGLPPSTASAVRRLCSRGVLKGSNERRDMESFWKLNRSPGSDRYLESRDASRLSGRDPSSWTVEDVMQFVREADPQLGPHADLFRKHEIDGKALLLLRSDMMMKYMGLKLGPALKLSYHIDRLKQGKF

SEQ ID NO: 41147 - protein, 591 aa, Homo sapiens
MQSYTPPSNEFKISMKLEAQDPRNTTSTCIATVVGLTGARLRLRLDGSDNKNDFWRLVDSAEIQPIGNCEKNGGMLQPPLGFRLNASSWPMFLLKTLNGAEMAPIRIFHKEPPSPSHNFFKMGMKLEAVDRKNPHFICPATIGEVRGSEVLVTFDGWRGAFDYWCRFDSRDIFPVGWCSLTGDNLQPPGTKVVIPKNPYPASDVNTEKPSIHSSTKTVLEHQPGQRGRKPGKKRGRTPKTLISHPISAPSKTAEPLKFPKKRGPKPGSKRKPRTLLNPPPASPTTSTPEPDTSTVPQDAATIPSSAMQAPTVCIYLNKNGSTGPHLDKKKVQQLPDHFGPARASVVLQQAVQACIDCAYHQKTVFSFLKQGHGGEVISAVFDREQHTLNLPAVNSITYVLRFLEKLCHNLRSDNLFGNQPFTQTHLSLTAIEYSHSHDRYLPGETFVLGNSLARSLEPHSDSMDSASNPTNLVSTSQRHRPLLSSCGLPPSTASAVRRLCSRGSDRYLESRDASRLSGRDPSSWTVEDVMQFVREADPQLGPHADLFRKHEIDGKALLLLRSDMMMKYMGLKLGPALKLSYHIDRLKQGKF

SEQ ID NO: 41148 - protein, 577 aa, Homo sapiens
MKLEAQDPRNTTSTCIATVVGLTGARLRLRLDGSDNKNDFWRLVDSAEIQPIGNCEKNGGMLQPPLGFRLNASSWPMFLLKTLNGAEMAPIRIFHKEPPSPSHNFFKMGMKLEAVDRKNPHFICPATIGEVRGSEVLVTFDGWRGAFDYWCRFDSRDIFPVGWCSLTGDNLQPPGTKVVIPKNPYPASDVNTEKPSIHSSTKTVLEHQPGQRGRKPGKKRGRTPKTLISHPISAPSKTAEPLKFPKKRGPKPGSKRKPRTLLNPPPASPTTSTPEPDTSTVPQDAATIPSSAMQAPTVCIYLNKNGSTGPHLDKKKVQQLPDHFGPARASVVLQQAVQACIDCAYHQKTVFSFLKQGHGGEVISAVFDREQHTLNLPAVNSITYVLRFLEKLCHNLRSDNLFGNQPFTQTHLSLTAIEYSHSHDRYLPGETFVLGNSLARSLEPHSDSMDSASNPTNLVSTSQRHRPLLSSCGLPPSTASAVRRLCSRGSDRYLESRDASRLSGRDPSSWTVEDVMQFVREADPQLGPHADLFRKHEIDGKALLLLRSDMMMKYMGLKLGPALKLSYHIDRLKQGKF

SEQ ID NO: 41149 - protein, 480 aa, Homo sapiens
MQSYTPPSNEFKISMKLEAQDPRNTTSTCIATVVGLTGARLRLRLDGSDNKNDFWRLVDSAEIQPIGNCEKNGGMLQPPLVVIPKNPYPASDVNTEKPSIHSSTKTVLEHQPGQRGRKPGKKRGRTPKTLISHPISAPSKTAEPLKFPKKRGPKPGSKRKPRTLLNPPPASPTTSTPEPDTSTVPQDAATIPSSAMQAPTVCIYLNKNGSTGPHLDKKKVQQLPDHFGPARASVVLQQAVQACIDCAYHQKTVFSFLKQGHGGEVISAVFDREQHTLNLPAVNSITYVLRFLEKLCHNLRSDNLFGNQPFTQTHLSLTAIEYSHSHDRYLPGETFVLGNSLARSLEPHSDSMDSASNPTNLVSTSQRHRPLLSSCGLPPSTASAVRRLCSRGSDRYLESRDASRLSGRDPSSWTVEDVMQFVREADPQLGPHADLFRKHEIDGKALLLLRSDMMMKYMGLKLGPALKLSYHIDRLKQGKF

SEQ ID NO: 41150 - protein, 235 aa, Homo sapiens
MAEKVNNFPPLPKFIPLKPCFYQDFEADIPPQHVSMTKRLYYLWMLNSVTLAVNLVGCLAWLIGGGGATNFGLAFLWLILFTPCSYVCWFRPIYKAFKTDSSFSFMAFFFTFMAQLVISIIQAVGIPGWGVCGWIATISFFGTNIGSAVVMLIPTVMFTVMAVFSFIALSMVHKFYRGSGGSFSKAQEEWTTGAWKNPHVQQAAQNAAMGAAQGAMNQPQTQYSATPNYTYSNEM

SEQ ID NO: 41151 - protein, 243 aa, Homo sapiens
MAEKVNNFPPLPKFIPLKPCFYQDFEADIPPQHVSMTKRLYYLWMLNSVTLAVNLVGCLAWLIGGGGATNFGLAFLWLILFTPCSYVCWFRPIYKAFKTDSSFSFMAFFFTFMAQLVISIIQAVGIPGWGVCPTLASSCSGWIATISFFGTNIGSAVVMLIPTVMFTVMAVFSFIALSMVHKFYRGSGGSFSKAQEEWTTGAWKNPHVQQAAQNAAMGAAQGAMNQPQTQYSATPNYTYSNEM

SEQ ID NO: 41152 - protein, 164 aa, Homo sapiens
MFLPRLRGRYSSPACQHDQAPLLPLDVTDSSFSFMAFFFTFMAQLVISIIQAVGIPGWGVCGWIATISFFGTNIGSAVVMLIPTVMFTVMAVFSFIALSMVHKFYRGSGGSFSKAQEEWTTGAWKNPHVQQAAQNAAMGAAQGAMNQPQTQYSATPNYTYSNEM

SEQ ID NO: 41153 - protein, 414 aa, Homo sapiens
MQSQRIPGRKRGRPSLHSTPMKMAVHNLYSASAGSLPAVKIPKKRGRKPGYKIKSRVLMTPLALSPPRSTPEPDLSSIPQDAATVPSLAAPQALTVCLYINKQANAGPYLERKKVQQLPEHFGPERPSAVLQQAVQACIDCAHQQKLVFSLVKQGYGGEMVSVSASFDGKQHLRSLPVVNSIGYVLRFLAKLCRSLLCDDLFSHQPFPRGCSASEKVQEKEEGRMESVKTVTTEEYLVNPVGMNRYSVDTSASTFNHRGSLHPSSSLYCKRQNSGDSHLGGGPAATAGGPRTSPMSSGGPSAPGLRPPASSPKRNTTSLEGNRCASSPSQDAQDARRPRSRNPSAWTVEDVVWFVKDADPQALGPHVELFRKHEIDGNALLLLKSDMVMKYLGLKLGPALKLCYHIDKLKQAKF

SEQ ID NO: 41154 - protein, 356 aa, Homo sapiens
MTPLALSPPRSTPEPDLSSIPQDAATVPSLAAPQALTVCLYINKQANAGPYLERKKVQQLPEHFGPERPSAVLQQAVQACIDCAHQQKLVFSLVKQGYGGEMVSVSASFDGKQHLRSLPVVNSIGYVLRFLAKLCRSLLCDDLFSHQPFPRGCSASEKVQEKEEGRMESVKTVTTEEYLVNPVGMNRYSVDTSASTFNHRGSLHPSSSLYCKRQNSGDSHLGGGPAATAGGPRTSPMSSGGPSAPGLRPPASSPKRNTTSLEGNRCASSPSQDAQDARRPRSRNPSAWTVEDVVWFVKDADPQALGPHVELFRKHEIDGNALLLLKSDMVMKYLGLKLGPALKLCYHIDKLKQAKF

SEQ ID NO: 41155 - protein, 305 aa, Homo sapiens
MPCQRTAWIGCDRQRTPPFHWREIKSRVLMTPLALSPPRSTPEPDLSSIPQDAATVPSLAAPQALTVCLYINKQANAGPYLERKKVQQLPEHFGPERPSAVLQQAVQACIDCAHQQKLVFSLVKQGYGGEMVSVSASFDGKQHLRSLPVVNSIGYVLRFLAKLCRSLLCDDLFSHQPFPRGCSASEKVQEKEEGRMESVKTVTTEEYLVNPVGMNRYSVDTSASTFNHRGSLHPSSSLYCKRQNSGDSHLGGGPAATAGGPRTSPMSSGGPSAPGLRPPASSPKRNTTSLEGNRCGNVMHASASH

SEQ ID NO: 41156 - protein, 222 aa, Homo sapiens
MNEVKESLRSIEQKYKLFQQQQLTFTAALEHCRENAHDKIRPISSIGQVQSYMEHYCNSSTDRRVLLMFLDICSELNKLCQHFEAVHSGTPVTNNLLEKCKTLVSQSNDLSSLRAKYPHDVVNHLSCDEARNHYGGVVSLIPLILDLMKEWIAHSEKLPRKVLQHVSEPQAHQESTRGAARPAQAIGTQPRATKHKCRQLTKASLKPRGCSKPPWRPPGGKL

SEQ ID NO: 41157 - protein, 168 aa, Homo sapiens
MNEVKESLRSIEQKYKLFQQQQLTFTAALEHCRENAHDKIRPISSIGQVQSYMEHYCNSSTDRRVLLMFLDICSELNKLCQHFEAVHSGTPVTNNLLEKCKTLVSQSNDLSSLRAKYPHDVVNHLSCDEARNHYGGVVSLIPLILDLMKEWIAHSEKLPRKVLQHGTT

SEQ ID NO: 41158 - protein, 218 aa, Homo sapiens
MGRLLALVVGAALVSSACGGCVEVDSETEAVYGMTFKILCISCKRRSETNAETFTEWTFRQKGTEEFVKILRYENEVLQLEEDERFEGRVVWNGSRGTKDLQDLSIFITNVTYNHSGDYECHVYRLLFFENYEHNTSVVKKIHIEVVDKANRDMASIVSEIMMYVLIVVLTIWLVAEMIYCYKKIAAATETAAQENASEYLAITSESKENCTGVQVAE

SEQ ID NO: 41159 - protein, 268 aa, Homo sapiens
MGRLLALVVGAALVSSACGGCVEVDSETEAVYGMTFKILCISCKRRSETNAETFTEWTFRQKGTEEFVKILRYENEVLQLEEDERFEGRVVWNGSRGTKDLQDLSIFITNVTYNHSGDYECHVYRLLFFENYEHNTSVVKKIHIEVVDKGESGAACPFTVTHRRARWRDRWQAVDRTGWLCAWPANRPQQRAEGEGSSPSCPLQLWPLFLSSPRRGQSMPVPHRRSGYRTQLCHLCCMTSGRCLLSLSQRVVLGLPGIIIRCVSRGVV

SEQ ID NO: 41160 - protein, 346 aa, Homo sapiens
MVEKEEAGGGISEEEAAQYDRQIRLWGLEAQKRLRASRVLLVGLKGLGAEIAKNLILAGVKGLTMLDHEQVTPEDPGAQFLIRTGSVGRNRAEASLERAQNLNPMVDVKVDTEDIEKKPESFFTQFDAVCLTCCSRDVIVKVDQICHKNSIKFFTGDVFGYHGYTFANLGEHEFVEEKTKVAKVSQGVEDGPDTKRAKLDSSETTMVKKKVVFCPVKEALEVDWSSEKAKAALKRTTSDYFLLQVLLKFRTDKGRDPSSDTYEEDSELLLQIRNDVLDSLGISPDLLPEDFVRYCFSEMAPVCAVVGGILAQEIVKALSQRDPPHNNFFFFDGMKGNGIVECLGPK

SEQ ID NO: 41161 - protein, 266 aa, Homo sapiens
MVEKEEAGGGISEEEAAQYDRQIRLWGLEAQKRLRASRVLLVGLKGLGAEIAKNLILAGVKGLTMLDHEQVTPEDPGAQFLIRTGSVGRNRAEASLERAQNLNPMVDVKVDTEDIEKKPESFFTQFDAVCLTCCSRDVIVKVDQICHKNSIKFFTGDVFGYHGYTFANLGEHEFVEEKTKVAKVSQGVEDGPDTKRAKLDSSETTMVKKKVVFCPVKEALEVDWSSEKAKAALKRTTSDYFLLQGTASPRWPQCVRWLEGFWHRKL

SEQ ID NO: 41162 - protein, 299 aa, Homo sapiens
MVEKEEAGGGISEEEAAQYDRQIRLWGLEAQKRLRASRVLLVGLKGLGAEIAKNLILAGVKGLTMLDHEQVTPEDPGAQFLIRTGSVGRNRAEASLERAQNLNPMVDVKVDTEDIEKKPESFFTQFDAVCLTCCSRDVIVKVDQICHKNSIKFFTGDVFGYHGYTFANLGEHEFVEEKTKVAKVSQGVEDGPDTKRAKLDSSETTMVKKKVVFCPVKEALEVDWSSEKAKAALKRTTSDYFLLQGPVSAGPSSQQLLLLRWHEGEWDCGVPWPQVNSRFGSPRDANCSMPTCIPCPLPS

SEQ ID NO: 41163 - protein, 215 aa, Homo sapiens
MHRDAWLPRPAFSLTGLSLFFSLVPPGRSMEVTVPATLNVLNGSDARLPCTFNSCYTVNHKQFSLNWTYQECNNCSEEMFLQFRMKIINLKLERFQDRVEFSGNPSKYDVSVMLRNVQPEDEGIYNCYIMNPPDRHRGHGKIHLQVLMEEPPERDSTVAVIVGASVGGFLAVVILVLMVVKCVRRKKEQKLSTDDLKTEEEGKTDGEGNPDDGAK

SEQ ID NO: 41164 - protein, 695 aa, Homo sapiens
MNQSGTNQSSLSDSNQAGINQPSTNSLGMNQMDMNQGSASLYEMNQVDMKQPSMSQAGMRQSGTNLPDINQPDMKQPDTWQLGRSQPGMLQQELSQLVLSKAGISQPDPSQPGPSQSGPSQSRMRQIGTNQSGMSQPVMQQLDSQSGGSQPSMRQVGTSQLGTSQIGMSQPGTWQTGLSQPVLRQPNMSPPGMWQPGVQQPGISQQVPSHPDMSQPGMSQQVPSQPGIRQPDTSQSCKNQTDMSQPDANQSSLSDSNQTGIIQPSPSLLGMNQMDMNQWSASLYEMNQVDMKQPSMSQAGMRQSGTNLPDINQPGMKQPGTWQLGRSQPGMWPQSLSELVLSEASISQPGPPQRAPSQSGPRQSSTSQAGTNQSGISQPVMWQLDMRQSGGSQPSMRQVGTSQSGTSQIGMSQPGTWQTGLSQPVPRQPNKSPPGMWQRGMWQPGMSQQVPSQLGMRQPGTSQSSKNQTGMSHPGRGQPGIWEPGPSQPGLSQQDLNQLVLSQPGLSQPGRSQPSVSQMGMRQTSMDYFQIRHAEAGDCPEILRLIKELAACENMLDAMELTAADLLRDGFGDNPLFYCLIAEVNDQQKPSGKLTVGFAMYYFTYDSWTGKVLYLEDFYVTQAYQGLGIGAEMLKRLSQIAITTQCNCMHFLVVIWNQASINYYTSRGALDLSSEEGWHLFRFNREELLDMAWEE

SEQ ID NO: 41165 - protein, 632 aa, Homo sapiens
MNQSGTNQSSLSDSNQAGINQPSTNSLGMNQMDMNQGSASLYEMNQVDMKQPSMSQAGMRQSGTNLPDINQPDMKQPDTWQLGRSQPGMLQQELSQLVLSKAGISQPDPSQPGPSQSGPSQSRMRQIGTNQSGMSQPVMQQLDSQSGGSQPSMRQVGTSQLGTSQIGMSQPGTWQTGLSQPVLRQPNMSPPGMWQPGVQQPGISQQVPSHPDMSQPGMSQQVPSQPGIRQPDTSQSCKNQTDMSQPDANQSSLSDSNQTGIIQPSPSLLGMNQMDMNQWSASLYEMNQVDMKQPSMSQAGMRQSGTNLPDINQPGMKQPGTWQLGRSQPGMWPQSLSELVLSEASISQPGPPQRAPSQSGPRQSSTSQAGTNQSGISQPVMWQLDMRQSGGSQPSMRQVGTSQSGTSQIGMSQPGTWQTGLSQPVPRQPNKSPPGMWQRGMWQPGMSQQVPSQLGMRQPGTSQSSKNQTGMSHPGRGQPGIWEPGPSQPGLSQQDLNQLVLSQPGLSQPGRSQPSVSQMGMRQTSMDYFQIRHAEAGDCPEILRLIKELAACENMLDAMELTAADLLRDGFGDNPLFYCLIAEVNDQQKPSGKLTVGFAMYYFTYDSWTGKVLYLEDFYVTQAYQDSHHNSM

SEQ ID NO: 41166 - protein, 640 aa, Homo sapiens
MALSRGLPRELAEAVAGGRVLVVGAGGIGCELLKNLVLTGFSHIDLIDLDTIDVSNLNRQFLFQKKHVGRSKAQVAKESVLQFYPKANIVAYHDSIMNPDYNVEFFRQFILVMNALDNRAARNHVNRMCLAADVPLIESGTAGYLGQVTTIKKGVTECYECHPKPTQRTFPGCTIRNTPSEPIHCIVWAKYLFNQLFGEEDADQEVSPDRADPEAAWEPTEAEARARASNEDGDIKRISTKEWAKSTGYDPVKLFTKLFKDDIRYLLTMDKLWRKRKPPVPLDWAEVQSQGEETNASDQQNEPQLGLKDQQVLDVKSYARLFSKSIETLRVHLAEKGDGAELIWDKDDPSAMDFVTSAANLRMHIFSMNMKSRFDIKSMAGNIIPAIATTNAVIAGLIVLEGLKILSGKIDQCRTIFLNKQPNPRKKLLVPCALDPPNPNCYVCASKPEVTVRLNVHKVTVLTLQDKIVKEKFAMVAPDVQIEDGKGTILISSEEGETEANNHKKLSEFGIRNGSRLQADDFLQDYTLLINILHSEDLGKDVEFEVVGDAPEKVGPKQAEDAAKSITNGSDDGAQPSTSTAQEQDDVLIVDSDEEDSSNNADVSEEERSRKRKLDEKENLSAKRSRIEQKEELDDVIALD

SEQ ID NO: 41167 - protein, 544 aa, Homo sapiens
MNPDYNVEFFRQFILVMNALDNRAARNHVNRMCLAADVPLIESGTAGYLGQVTTIKKGVTECYECHPKPTQRTFPGCTIRNTPSEPIHCIVWAKYLFNQLFGEEDADQEVSPDRADPEAAWEPTEAEARARASNEDGDIKRISTKEWAKSTGYDPVKLFTKLFKDDIRYLLTMDKLWRKRKPPVPLDWAEVQSQGEETNASDQQNEPQLGLKDQQVLDVKSYARLFSKSIETLRVHLAEKGDGAELIWDKDDPSAMDFVTSAANLRMHIFSMNMKSRFDIKSMAGNIIPAIATTNAVIAGLIVLEGLKILSGKIDQCRTIFLNKQPNPRKKLLVPCALDPPNPNCYVCASKPEVTVRLNVHKVTVLTLQDKIVKEKFAMVAPDVQIEDGKGTILISSEEGETEANNHKKLSEFGIRNGSRLQADDFLQDYTLLINILHSEDLGKDVEFEVVGDAPEKVGPKQAEDAAKSITNGSDDGAQPSTSTAQEQDDVLIVDSDEEDSSNNADVSEEERSRKRKLDEKENLSAKRSRIEQKEELDDVIALD

SEQ ID NO: 41168 - protein, 179 aa, Homo sapiens
MLSLDFLDDVRRMNKRQLYYQVLNFGMIVSSALMIWKGLMVITGSESPIVVVLSGSMEPAFHRGDLLFLTNRVEDPIRVGEIVVFRIEGREIPIVHRVLKIHEKQNGHIKFLTKGDNNAVDDRGLYKQGQHWLEKKDVVGRARGFVPYIGIVTILMNDYPKFKYAVLFLLGLFVLVHRE

SEQ ID NO: 41169 - protein, 153 aa, Homo sapiens
MIVSSALMIWKGLMVITGSESPIVVVLSGSMEPAFHRGDLLFLTNRVEDPIRVGEIVVFRIEGREIPIVHRVLKIHEKQNGHIKFLTKGDNNAVDDRGLYKQGQHWLEKKDVVGRARGFVPYIGIVTILMNDYPKFKYAVLFLLGLFVLVHRE

SEQ ID NO: 41170 - protein, 185 aa, Homo sapiens
MLSLDFLDDVRRMNKRQLYYQVLNFGMIVSSALMIWKGLMVITGSESPIVVVLSGSMEPAFHRGDLLFLTNRVEDPIRVGEIVVFRIEGREIPIVHRVLKIHEKQNGHIKFLTKGDNNAVDDRGLYKQGQHWLEKKDVVGRARGMQFSFCWVYSCWFIVSKKPALLFLGRCHSFRYWMFGVDTGL

SEQ ID NO: 41171 - protein, 164 aa, Homo sapiens
MLSLDFLDDVRRMNKRQLYYQVLNFGMIVSSALMIWKGLMVITGSESPIVVVLSGSMEPAFHRGDLLFLTNRVEDPIRVGEIVVFRIEGREIPIVHRVLKIHEKQNGHIKFLTKGDNNAVDDRGLYKQGQHWLEKKDVVGRARGFYQENSSVEDRNYLFLILEL

SEQ ID NO: 41172 - protein, 915 aa, Homo sapiens
MAETLSGLGDSGAAGAAALSSASSETGTRRLSDLRVIDLRAELRKRNVDSSGNKSVLMERLKKAIEDEGGNPDEIEITSEGNKKTSKRSSKGRKPEEEGVEDNGLEENSGDGQEDVETSLENLQDIDIMDISVLDEAEIDNGSVADCVEDDDADNLQESLSDSRELVEGEMKELPEQLQEHAIEDKETINNLDTSSSDFTILQEIEEPSLEPENEKILDILGETCKSEPVKEESSELEQPFAQDTSSVGPDRKLAEEEDLFDSAHPEEGDLDLASESTAHAQSSKADSLLAVVKREPAEQPGDGERTDCEPVGLEPAVEQSSAASELAEASSEELAEAPTEAPSPEARDSKEDGRKFDFDACNEVPPAPKESSTSEGADQKMSSPEDDSDTKRLSKEEKGRSSCGRNFWVSGLSSTTRATDLKNLFSKYGKVVGAKVVTNARSPGARCYGFVTMSTAEEATKCINHLHKTELHGKMISVEKAKNEPVGKKTSDKRDSDGKKEKSSNSDRSTNLKRDDKCDRKDDAKKGDDGSGEKSKDQDDQKPGPSERSRATKSGSRGTERTVVMDKSKGVPVISVKTSGSKERASKSQDRKSASREKRSVVSFDKVKEPRKSRDSESHSRVRERSEREQRMQAQWEREERERLEIARERLAFQRQRLERERMERERLERERMHVEHERRREQERIHREREELRRQQELRYEQERRPAVRRPYDLDRRDDAYWPEAKRAALDERYHSDFNRQDRFHDFDHRDRGRYPDHSVDRREGSRSMMGEREGQHYPERHGGPERHGRDSRDGWGGYGSDKRMSEGRGLPPPPRRDWGDHGRREDDRSWQGTADGGMMDRDHKRWQGGERSMSGHSGPGHMMNRGGMSGRGSFAPGGASRGHPIPHGGMQGGFGGQSRGSRPSDARFTRRY

SEQ ID NO: 41173 - protein, 848 aa, Homo sapiens
MAETLSGLGDSGAAGAAALSSASSETGTRRLSDLRVIDLRAELRKRNVDSSGNKSVLMERLKKAIEDEGGNPDEIEITSEGNKKTSKRSSKGRKPEEEGVEDNGLEENSGDGQIEDKETINNLDTSSSDFTILQEIEEPSLEPENEKILDILGETCKSEPVKEESSELEQPFAQDTSSVGPDRKLAEEEDLFDSAHPEEGDLDLASESTAHAQSSKADSLLAVVKREPAEQPGDGERTDCEPVGLEPAVEQSSAASELAEASSEELAEAPTEAPSPEARDSKEDGRKFDFDACNEVPPAPKESSTSEGADQKMSSPEDDSDTKRLSKEEKGRSSCGRNFWVSGLSSTTRATDLKNLFSKYGKVVGAKVVTNARSPGARCYGFVTMSTAEEATKCINHLHKTELHGKMISVEKAKNEPVGKKTSDKRDSDGKKEKSSNSDRSTNLKRDDKCDRKDDAKKGDDGSGEKSKDQDDQKPGPSERSRATKSGSRGTERTVVMDKSKGVPVISVKTSGSKERASKSQDRKSASREKRSVVSFDKVKEPRKSRDSESHSRVRERSEREQRMQAQWEREERERLEIARERLAFQRQRLERERMERERLERERMHVEHERRREQERIHREREELRRQQELRYEQERRPAVRRPYDLDRRDDAYWPEAKRAALDERYHSDFNRQDRFHDFDHRDRGRYPDHSVDRREGSRSMMGEREGQHYPERHGGPERHGRDSRDGWGGYGSDKRMSEGRGLPPPPRGRRDWGDHGRREDDRSWQGTADGGMMDRDHKRWQGGERSMSGHSGPGHMMNRGGMSGRGSFAPGGASRGHPIPHGGMQGGFGGQSRGSRPSDARFTRRY

SEQ ID NO: 41174 - protein, 917 aa, Homo sapiens
MAETLSGLGDSGAAGAAALSSASSETGTRRLSDLRVIDLRAELRKRNVDSSGNKSVLMERLKKAIEDEGGNPDEIEITSEGNKKTSKRSSKGRKPEEEGVEDNGLEENSGDGQEDVETSLENLQDIDIMDISVLDEAEIDNGSVADCVEDDDADNLQESLSDSRELVEGEMKELPEQLQEHAIEDKETINNLDTSSSDFTILQEIEEPSLEPENEKILDILGETCKSEPVKEESSELEQPFAQDTSSVGPDRKLAEEEDLFDSAHPEEGDLDLASESTAHAQSSKADSLLAVVKREPAEQPGDGERTDCEPVGLEPAVEQSSAASELAEASSEELAEAPTEAPSPEARDSKEDGRKFDFDACNEVPPAPKESSTSEGADQKMSSPEDDSDTKRLSKEEKGRSSCGRNFWVSGLSSTTRATDLKNLFSKYGKVVGAKVVTNARSPGARCYGFVTMSTAEEATKCINHLHKTELHGKMISVEKAKNEPVGKKTSDKRDSDGKKEKSSNSDRSTNLKRDDKCDRKDDAKKGDDGSGEKSKDQDDQKPGPSERSRATKSGSRGTERTVVMDKSKGVPVISVKTSGSKERASKSQDRKSASREKRSVVSFDKVKEPRKSRDSESHSRVRERSEREQRMQAQWEREERERLEIARERLAFQRQRLERERMERERLERERMHVEHERRREQERIHREREELRRQQELRYEQERRPAVRRPYDLDRRDDAYWPEAKRAALDERYHSDFNRQDRFHDFDHRDRGRYPDHSVDRREGSRSMMGEREGQHYPERHGGPERHGRDSRDGWGGYGSDKRMSEGRGLPPPPRGRRDWGDHGRREDDRSWQGTADGGMMDRDHKRWQGGERSMSGHSGPGHMMNRGGMSGRGSFAPGGASRGHPIPHGGMQGGFGGQSRGSRPSDARFTRRY

SEQ ID NO: 41175 - protein, 916 aa, Homo sapiens
MAETLSGLGDSGAAGAAALSSASSETGTRRLSDLRVIDLRAELRKRNVDSSGNKSVLMERLKKAIEDEGGNPDEIEITSEGNKKTSKRSSKGRKPEEEGVEDNGLEENSGDGQEDVETSLENLQDIDIMDISVLDEAEIDNGSVADCVEDDDADNLQESLSDSRELVEGEMKELPEQLQEHAIEDKETINNLDTSSSDFTILQEIEEPSLEPENEKILDILGETCKSEPVKEESSELEQPFAQDTSSVGPDRKLAEEEDLFDSAHPEEGDLDLASESTAHAQSSKADSLLAVVKREPAEQPGDGERTDCEPVGLEPAVEQSSAASELAEASSEELAEAPTEAPSPEARDSKEDGRKFDFDACNEVPPAPKESSTSEGADQKMSSPEDDSDTKRLSKEEKGRSSCGRNFWVSGLSSTTRATDLKNLFSKYGKVVGAKVVTNARSPGARCYGFVTMSTAEEATKCINHLHKTELHGKMISVEKAKNEPVGKKTSDKRDSDGKKEKSSNSDRSTNLKRDDKCDRKDDAKKGDDGSGEKSKDQDDQKPGPSERSRATKSGSRGTERTVVMDKSKGVPVISVKTSGSKERASKSQDRKSASREKRSVVSFDKVKEPRKSRDSESHRVRERSEREQRMQAQWEREERERLEIARERLAFQRQRLERERMERERLERERMHVEHERRREQERIHREREELRRQQELRYEQERRPAVRRPYDLDRRDDAYWPEAKRAALDERYHSDFNRQDRFHDFDHRDRGRYPDHSVDRREGSRSMMGEREGQHYPERHGGPERHGRDSRDGWGGYGSDKRMSEGRGLPPPPRGRRDWGDHGRREDDRSWQGTADGGMMDRDHKRWQGGERSMSGHSGPGHMMNRGGMSGRGSFAPGGASRGHPIPHGGMQGGFGGQSRGSRPSDARFTRRY

SEQ ID NO: 41176 - protein, 202 aa, Homo sapiens
MFTELRSKLSPPRGRAGAVRAGFGERRDVDATAHFSFCRTLLEHTVSAESIPCHLPRTPGTSLTWHDSRSQRAASSRPIKLLQQPGTDTPQGRLYSDHYGLYHTSPSLGGLTRPVVLWSQQDVCKWLKKHCPHNYLVYVEAFSQHAITGRALLRLNAEKLQRMGLAQEAQRQEVLQQVLRLQVREEGRSLQLLSQASFGKMS

SEQ ID NO: 41177 - protein, 1030 aa, Homo sapiens
MRSEALLLYFTLLHFAGAGFPEDSEPISISHGNYTKQYPVFVGHKPGRNTTQRHRLDIQMIMIMNGTLYIAARDHIYTVDIDTSHTEEIYCSKKLTWKSRQADVDTCRMKGKHKDECHNFIKVLLKKNDDALFVCGTNAFNPSCRNYKMDTLEPFGDEFSGMARCPYDAKHANVALFADGKLYSATVTDFLAIDAVIYRSLGESPTLRTVKHDSKWLKEPYFVQAVDYGDYIYFFFREIAVEYNTMGKVVFPRVAQVCKNDMGGSQRVLEKQWTSFLKARLNCSVPGDSHFYFNILQAVTDVIRINGRDVVLATFSTPYNSIPGSAVCAYDMLDIASVFTGRFKEQKSPDSTWTPVPDERVPKPRPGCCAGSSSLERYATSNEFPDDTLNFIKTHPLMDEAVPSIFNRPWFLRTMVRYRLTKIAVDTAAGPYQNHTVVFLGSEKGIILKFLARIGNSGFLNDSLFLEEMSVYNSEKCSYDGVEDKRIMGMQLDRASSSLYVAFSTCVIKVPLGRCERYGKCKKTCIASRDPYCGWIKEGGACSHLSPNSRLTFEQDIERGNTDGLGDCHNSFVALNGHSSSLLPSTTTSDSTAQEGYESRGGMLDWKHLLDSPDSTDPLGAVSSHNHQDKKGVIRESYLKGHDQLVPVTLLAIAVILAFVMGAVFSGITVYCVCDHRRKDVAVVQRKEKELTHSRRGSMSSVTKLSGLFGDTQSKDPKPEAILTPLMHNGKLATPGNTAKMLIKADQHHLDLTALPTPESTPTLQQKRKPSRGSREWERNQNLINACTKDMPPMGSPVIPTDLPLRASPSHIPSVVVLPITQQGYQHEYVDQPKMSEVAQMALEDQAATLEYKTIKEHLSSKSPNHGVNLVENLDSLPPKVPQREASLGPPGASLSQTGLSKRLEMHHSSSYGVDYKRSYPTNSLTRSHQATTLKRNNTNSSNSSHLSRNQSFGRGDNPPPAPQRVDSIQVHSSQPSGQAVTVSRQPSLNAYNSLTRSGLKRTPSLKPDVPPKPSFAPLSTSMKPNDACT

SEQ ID NO: 41178 - protein, 1047 aa, Homo sapiens
MRSEALLLYFTLLHFAGAGFPEDSEPISISHGNYTKQYPVFVGHKPGRNTTQRHRLDIQMIMIMNGTLYIAARDHIYTVDIDTSHTEEIYCSKKLTWKSRQADVDTCRMKGKHKDECHNFIKVLLKKNDDALFVCGTNAFNPSCRNYKMDTLEPFGDEFSGMARCPYDAKHANVALFADGKLYSATVTDFLAIDAVIYRSLGESPTLRTVKHDSKWLKEPYFVQAVDYGDYIYFFFREIAVEYNTMGKVVFPRVAQVCKNDMGGSQRVLEKQWTSFLKARLNCSVPGDSHFYFNILQAVTDVIRINGRDVVLATFSTPYNSIPGSAVCAYDMLDIASVFTGRFKEQKSPDSTWTPVPDERVPKPRPGCCAGSSSLERYATSNEFPDDTLNFIKTHPLMDEAVPSIFNRPWFLRTMVRYRLTKIAVDTAAGPYQNHTVVFLGSEKGIILKFLARIGNSGFLNDSLFLEEMSVYNSEKCSYDGVEDKRIMGMQLDRASSSLYVAFSTCVIKVPLGRCERYGKCKKTCIASRDPYCGWIKEGGACSHLSPNSRLTFEQDIERGNTDGLGDCHNSFVALNDISTPLPDNEMSYNTVYGHSSSLLPSTTTSDSTAQEGYESRGGMLDWKHLLDSPDSTDPLGAVSSHNHQDKKGVIRESYLKGHDQLVPVTLLAIAVILAFVMGAVFSGITVYCVCDHRRKDVAVVQRKEKELTHSRRGSMSSVTKLSGLFGDTQSKDPKPEAILTPLMHNGKLATPGNTAKMLIKADQHHLDLTALPTPESTPTLQQKRKPSRGSREWERNQNLINACTKDMPPMGSPVIPTDLPLRASPSHIPSVVVLPITQQGYQHEYVDQPKMSEVAQMALEDQAATLEYKTIKEHLSSKSPNHGVNLVENLDSLPPKVPQREASLGPPGASLSQTGLSKRLEMHHSSSYGVDYKRSYPTNSLTRSHQATTLKRNNTNSSNSSHLSRNQSFGRGDNPPPAPQRVDSIQVHSSQPSGQAVTVSRQPSLNAYNSLTRSGLKRTPSLKPDVPPKPSFAPLSTSMKPNDACT

SEQ ID NO: 41179 - protein, 93 aa, Homo sapiens
MNAKVVVVLVLVLTALCLSDGKPVSLSYRCPCRFFESHVARANVKHLKILNTPNCALQIVARLKNNNRQVCIDPKLKWIQEYLEKALNKRFKM

SEQ ID NO: 41180 - protein, 89 aa, Homo sapiens
MNAKVVVVLVLVLTALCLSDGKPVSLSYRCPCRFFESHVARANVKHLKILNTPNCALQIVARLKNNNRQVCIDPKLKWIQEYLEKALNK

SEQ ID NO: 41181 - protein, 119 aa, Homo sapiens
MNAKVVVVLVLVLTALCLSDGKPVSLSYRCPCRFFESHVARANVKHLKILNTPNCALQIVARLKNNNRQVCIDPKLKWIQEYLEKALNKGRREEKVGKKEKIGKKKRQKKRKAAQKRKN

SEQ ID NO: 41182 - protein, 140 aa, Homo sapiens
MNAKVVVVLVLVLTALCLSDGKPVSLSYRCPCRFFESHVARANVKHLKILNTPNCALQIVARLKNNNRQVCIDPKLKWIQEYLEKALNNLISAAPAGKRVIAGARALHPSPPRACPTARALCEIRLWPPPEWSWPSPGDV

SEQ ID NO: 41183 - protein, 90 aa, Homo sapiens
MNAKVVVVLVLVLTALCLSDGKPVSLSYRCPCRFFESHVARANVKHLKILNTPNCALQIVARLKNNNRQVCIDPKLKWIQEYLEKALNNC

SEQ ID NO: 41184 - protein, 100 aa, Homo sapiens
MNAKVVVVLVLVLTALCLSDGKPVSLSYRCPCRFFESHVARANVKHLKILNTPNCALQIVARLKNNNRQVCIDPKLKWIQEYLEKALNKIWLYGNAETSR

SEQ ID NO: 41185 - protein, 103 aa, Homo sapiens
MNAKVVVVLVLVLTALCLSDGKPVSLSYRCPCRFFESHYCTCLIRVSFHGATPLTQGSWVLYSLSCAGGETGLREPGPMVSPRVESHQEGRLGVPGPVNLGKA

SEQ ID NO: 41186 - protein, 904 aa, Homo sapiens
MQASPLQTSQPTPPEELHAAAYVFTNDGQQMRSDEVNLVATGHQSKKKHSRKSKRHSSSKRRKSMSSWLDKQEDAAVTHSICEERINNGQPVADNVLSTAPPWPDATIAHNIREERMENGQSRTDKVLSTAPPQLVHMAAAGIPSMSTRDLHSTVTHNIREERMENGQPQPDNVLSTGPTGLINMAATPIPAMSARDLYATVTHNVCEQKMENVQPAPDNVLLTLRPRRINMTDTGISPMSTRDPYATITYNVPEEKMEKGQPQPDNILSTASTGLINVAGAGTPAISTNGLYSTVPHNVCEEKMENDQPQPNNVLSTVQPVIIYLTATGIPGMNTRDQYATITHNVCEERVVNNQPLPSNALSTVLPGLAYLATADMPAMSTRDQHATIIHNLREEKKDNSQPTPDNVLSAVTPELINLAGAGIPPMSTRDQYATVNHHVHEARMENGQRKQDNVLSNVLSGLINMAGASIPAMSSRDLYATITHSVREEKMESGKPQTDKVISNDAPQLGHMAAGGIPSMSTKDLYATVTQNVHEERMENNQPQPSYDLSTVLPGLTYLTVAGIPAMSTRDQYATVTHNVHEEKIKNGQAASDNVFSTVPPAFINMAATGVSSMSTRDQYAAVTHNIREEKINNSQPAPGNILSTAPPWLRHMAAAGISSTITRDLYVTATHSVHEEKMTNGQQAPDNSLSTVPPGCINLSGAGISCRSTRDLYATVIHDIQEEEMENDQTPPDGFLSNSDSPELINMTGHCMPPNALDSFSHDFTSLSKDELLYKPDSNEFAVGTKNYSVSAGDPPVTVMSLVETVPNTPQISPAMAKKINDDIKYQLMKEVRRFGQNYERIFILLEEVQGSMKVKRQFVEFTIKEAARFKKVVLIQQLEKALKEIDSHCHLRKVKHMRKR

SEQ ID NO: 41187 - protein, 1584 aa, Homo sapiens
MSKQVSLPEMIKDWTKEHVKKWVNEDLKINEQYGQILLSEEVTGLVLQELTEKDLVEMGLPWGPALLIKRSYNKLNSKSPESDNHDPGQLDNSKPSKTEHQKNPKHTKKEEENSMSSNIDYDPREIRDIKQEESILMKENVLDEVANAKHKKKGKLKPEQLTCMPYPFDQFHDSHRYIEHYTLQPETGALNLIDPIHEFKALTNTETATEVDIKMKFSNEVFRFASACMNSRTNGTIHFGVKDKPHGEIVGVKITSKAAFIDHFNVMIKKYFEESEINEAKKCIREPRFVEVLLQNNTPSDRFVIEVDTIPKHSICNDKYFYIQMQICKDKIWKQNQNLSLFVREGASSRDILANSKQRDVDFKAFLQNLKSLVASRKEAEEEYGMKAMKKESEGLKLVKLLIGNRDSLDNSYYDWYILVTNKCHPNQIKHLDFLKEIKWFAVLEFDPESMINGVVKAYKESRVANLHFPNQYEDKTTNMWEKISTLNLYQQPSWIFCNGRSDLKSETYKPLEPHLWQRERASEVRKLILFLTDENIMTRGKFLVVFLLLSSVESPGDPLIETFWAFYQALKGMENMLCISVNSHIYQRWKDLLQTRMKMEDELTNHSISTLNIELVNSTILKLKSVTRSSRRFLPARGSSSVILEKKKEDVLTALEILCENECTETDIEKDKSKFLEFKKSKEEHFYRGGKVSWWNFYFSSENYSSDFVKRDSYEKLKDLIHCWAESPKPIFAKIINLYHHPGCGGTTLAMHVLWDLKKNFRCAVLKNKTTDFAEIAEQVINLVTYRAKSHQDYIPVLLLVDDFEEQENVYFLQNAIHSVLAEKDLRYEKTLVIILNCMRSRNPDESAKLADSIALNYQLSSKEQRAFGAKLKEIEKQHKNCENFYSFMIMKSNFDETYIENVVRNILKGQDVDSKEAQLISFLALLSSYVTDSTISVSQCEIFLGIIYTSTPWEPESLEDKMGTYSTLLIKTEVAEYGRYTGVRIIHPLIALYCLKELERSYHLDKCQIALNILEENLFYDSGIGRDKFQHDVQTLLLTRQRKVYGDETDTLFSPLMEALQNKDIEKVLSAGSRRFPQNAFICQALARHFYIKEKDFNTALDWARQAKMKAPKNSYISDTLGQVYKSEIKWWLDGNKNCRSITVNDLTHLLEAAEKASRAFKESQRQTDSKNYETENWSPQKSQRRYDMYNTACFLGEIEVGLYTIQILQLTPFFHKENELSKKHMVQFLSGKWTIPPDPRNECYLALSKFTSHLKNLQSDLKRCFDFFIDYMVLLKMRYTQKEIAEIMLSKKVSRCFRKYTELFCHLDPCLLQSKESQLLQEENCRKKLEALRADRFAGLLEYLNPNYKDATTMESIVNEYAFLLQQNSKKPMTNEKQNSILANIILSCLKPNSKLIQPLTTLKKQLREVLQFVGLSHQYPGPYFLACLLFWPENQELDQDSKLIEKYVSSLNRSFRGQYKRMCRSKQASTLFYLGKRKGLNSIVHKAKIEQYFDKAQNTNSLWHSGDVWKKNEVKDLLRRLTGQAEGKLISVEYGTEEKIKIPVISVYSGPLRSGRNIERVSFYLGFSIEGPLAYDIEVI

SEQ ID NO: 41188 - protein, 406 aa, Homo sapiens
MSKQVSLPEMIKDWTKEHVKKWVNEDLKINEQYGQILLSEEVTGLVLQELTEKDLVEMGLPWGPALLIKRSYNKLNSKSPESDNHDPGQLDNSKPSKTEHQKNPKHTKKEEENSMSSNIDYDPREIRDIKQEESILMKENVLDEVANAKHKKKLEALRADRFAGLLEYLNPNYKDATTMESIVNEYAFLLQQNSKKPMTNEKQNSILANIILSCLKPNSKLIQPLTTLKKQLREVLQFVGLSHQYPGPYFLACLLFWPENQELDQDSKLIEKYVSSLNRSFRGQYKRMCRSKQASTLFYLGKRKGLNSIVHKAKIEQYFDKAQNTNSLWHSGDVWKKNEVKDLLRRLTGQAEGKLISVEYGTEEKIKIPVISVYSGPLRSGRNIERVSFYLGFSIEGPLAYDIEVI

SEQ ID NO: 41189 - protein, 611 aa, Homo sapiens
MSVQVVSAAAAAKVPEVELKDLSPSEAESQLGLSTAAVGAMAPPAGGGDPEAPAPAAERPPVPGPGSGPAAALSPAAGKVPQASAMKRSDPHHQHQRHRDGGEALVSPDGTVTEAPRTVKKQIQFADQKQEFNKRPTKIGRRSLSRSISQSSTDSYSSAASYTDSSDDETSPRDKQQKNSKGSSDFCVKNIKQAEFGRREIEIAEQEMPALMALRKRAQGEKPLAGAKIVGCTHITAQTAVLMETLGALGAQCRWAACNIYSTLNEVAAALAESGFPVFAWKGESEDDFWWCIDRCVNVEGWQPNMILDDGGDLTHWIYKKYPNMFKKIKGIVEESVTGVHRLYQLSKAGKLCVPAMNVNDSVTKQKFDNLYCCRESILDGLKRTTDMMFGGKQVVVCGYGEVGKGCCAALKAMGSIVYVTEIDPICALQACMDGFRLVKLNEVIRQVDIVITCTGNKNVVTREHLDRMKNSCIVCNMGHSNTEIDVASLRTPELTWERVRSQVDHVIWPDGKRIVLLAEGRLLNLSCSTVPTFVLSITATTQALALIELYNAPEGRYKQDVYLLPKKMDEYVASLHLPTFDAHLTELTDEQAKYLGLNKNGPFKPNYYRY

SEQ ID NO: 41190 - protein, 610 aa, Homo sapiens
MSVQVVSAAAAAKVPEVELKDLSPSEAESQLGLSTAAVGAMAPPAGGGDPEAPAPAAERPPVPGPGSGPAAALSPAAGKVPQASAMKRSDPHHQHQRHRDGGEALVSPDGTVTEAPRTVKKIQFADQKQEFNKRPTKIGRRSLSRSISQSSTDSYSSAASYTDSSDDETSPRDKQQKNSKGSSDFCVKNIKQAEFGRREIEIAEQEMPALMALRKRAQGEKPLAGAKIVGCTHITAQTAVLMETLGALGAQCRWAACNIYSTLNEVAAALAESGFPVFAWKGESEDDFWWCIDRCVNVEGWQPNMILDDGGDLTHWIYKKYPNMFKKIKGIVEESVTGVHRLYQLSKAGKLCVPAMNVNDSVTKQKFDNLYCCRESILDGLKRTTDMMFGGKQVVVCGYGEVGKGCCAALKAMGSIVYVTEIDPICALQACMDGFRLVKLNEVIRQVDIVITCTGNKNVVTREHLDRMKNSCIVCNMGHSNTEIDVASLRTPELTWERVRSQVDHVIWPDGKRIVLLAEGRLLNLSCSTVPTFVLSITATTQALALIELYNAPEGRYKQDVYLLPKKMDEYVASLHLPTFDAHLTELTDEQAKYLGLNKNGPFKPNYYRY

SEQ ID NO: 41191 - protein, 508 aa, Homo sapiens
MLGSKKKYIVNGNSGIKAQIQFADQKQEFNKRPTKIGRRSLSRSISQSSTDSYSSAASYTDSSDDETSPRDKQQKNSKGSSDFCVKNIKQAEFGRREIEIAEQEMPALMALRKRAQGEKPLAGAKIVGCTHITAQTAVLMETLGALGAQCRWAACNIYSTLNEVAAALAESGFPVFAWKGESEDDFWWCIDRCVNVEGWQPNMILDDGGDLTHWIYKKYPNMFKKIKGIVEESVTGVHRLYQLSKAGKLCVPAMNVNDSVTKQKFDNLYCCRESILDGLKRTTDMMFGGKQVVVCGYGEVGKGCCAALKAMGSIVYVTEIDPICALQACMDGFRLVKLNEVIRQVDIVITCTGNKNVVTREHLDRMKNSCIVCNMGHSNTEIDVASLRTPELTWERVRSQVDHVIWPDGKRIVLLAEGRLLNLSCSTVPTFVLSITATTQALALIELYNAPEGRYKQDVYLLPKKMDEYVASLHLPTFDAHLTELTDEQAKYLGLNKNGPFKPNYYRY

SEQ ID NO: 41192 - protein, 508 aa, Homo sapiens
MEKWDGNEGTSAFHMPEWMIQFADQKQEFNKRPTKIGRRSLSRSISQSSTDSYSSAASYTDSSDDETSPRDKQQKNSKGSSDFCVKNIKQAEFGRREIEIAEQEMPALMALRKRAQGEKPLAGAKIVGCTHITAQTAVLMETLGALGAQCRWAACNIYSTLNEVAAALAESGFPVFAWKGESEDDFWWCIDRCVNVEGWQPNMILDDGGDLTHWIYKKYPNMFKKIKGIVEESVTGVHRLYQLSKAGKLCVPAMNVNDSVTKQKFDNLYCCRESILDGLKRTTDMMFGGKQVVVCGYGEVGKGCCAALKAMGSIVYVTEIDPICALQACMDGFRLVKLNEVIRQVDIVITCTGNKNVVTREHLDRMKNSCIVCNMGHSNTEIDVASLRTPELTWERVRSQVDHVIWPDGKRIVLLAEGRLLNLSCSTVPTFVLSITATTQALALIELYNAPEGRYKQDVYLLPKKMDEYVASLHLPTFDAHLTELTDEQAKYLGLNKNGPFKPNYYRY

SEQ ID NO: 41193 - protein, 173 aa, Homo sapiens
MCTNIVYEWLKALQLPQYAESFVDNGYDDLEVCKQIGDPDLDAIGVLAPAHRRRILEAVRRLREQDANAAGLYFTLEPQPAPPGPPADAVPTGRRGEPCGGPAQGTRGDSRGHTTAPRSRELVSYPKLKLKIMIRDKLVRDGIHLSKPPYSRKVPMAGILEYLMNWPKSSQSR

SEQ ID NO: 41194 - protein, 626 aa, Homo sapiens
MQRADSEQPSKRPRCDDSPRTPSNTPSAEADWSPGLELHPDYKTWGPEQVCSFLRRGGFEEPVLLKNIRENEITGALLPCLDESRFENLGVSSLGERKKLLSYIQRLVQIHVDTMKVINDPIHGHIELHPLLVRIIDTPQFQRLRYIKQLGGGYYVFPGASHNRFEHSLGVGYLAGCLVHALGEKQPELQISERDVLCVQIAGLCHDLGHGPFSHMFDGRFIPLARPEVKWTHEQGSVMMFEHLINSNGIKPVMEQYGLIPEEDICFIKEQIVGPLESPVEDSLWPYKGRPENKSFLYEIVSNKRNGIDVDKWDYFARDCHHLGIQNNFDYKRFIKFARVCEVDNELRICARDKEVGNLYDMFHTRNSLHRRAYQHKVGNIIDTMITDAFLKADDYIEITGAGGKKYRISTAIDDMEAYTKLTDNIFLEILYSTDPKLKDAREILKQIEYRNLFKYVGETQPTGQIKIKREDYESLPKEVASAKPKVLLDVKLKAEDFIVDVINMDYGMQEKNPIDHVSFYCKTAPNRAIRITKNQVSQLLPEKFAEQLIRVYCKKVDRKSLYAARQYFVQWCADRNFTKPQDGDVIAPLITPQKKEWNDSTSVQNPTRLREASKSRVQLFKDDPM

SEQ ID NO: 41195 - protein, 556 aa, Homo sapiens
MQRADSEQPSKRPRCDDSPRTPSNTPSAEADWSPGLELHPDYKTWGPEQVCSFLRRGGFEEPVLLKNIRENEITGALLPCLDESRFENLGVSSLGERKKLLSYIQRLVQIHVDTMKVINDPIHGHIELHPLLVRIIDTPQFQRLRYIKQLGGGYYVFPGASHNRFEHSLGVGYLAGCLVHALGEKQPELQISERDVLCVQIAGLCHDLGHGPFSHMFDGRFIPLARPEVKWTHEQGSVMMFEHLINSNGIKPVMEQYGLIPEEDICFIKEQIVGPLESPVEDSLEVGNLYDMFHTRNSLHRRAYQHKVGNIIDTMITDAFLKADDYIEITGAGGKKYRISTAIDDMEAYTKLTDNIFLEILYSTDPKLKDAREILKQIEYRNLFKYVGETQPTGQIKIKREDYESLPKEVASAKPKVLLDVKLKAEDFIVDVINMDYGMQEKNPIDHVSFYCKTAPNRAIRITKNQVSQLLPEKFAEQLIRVYCKKVDRKSLYAARQYFVQWCADRNFTKPQDGDVIAPLITPQKKEWNDSTSVQNPTRLREASKSRVQLFKDDPM

SEQ ID NO: 41196 - protein, 591 aa, Homo sapiens
MQRADSEQPSKRPRCDDSPRTPSNTPSAEADWSPGLELHPDYKTWGPEQVCSFLRRGGFEEPVLLKNIRENEITGALLPCLDESRFENLGVSSLGERKKLLSYIQRLVQIHVDTMKVINDPIHGHIELHPLLVRIIDTPQFQRLRYIKQLGGGYYVFPGASHNRFEHSLGVGYLAGCLVHALGEKQPELQISERDVLCVQIAGLCHDLGHGPFSHMFDGRFIPLARPEVKWTHEQGSVMMFEHLINSNGIKPVMEQYGLIPEEDICFIKEQIVGPLESPVEDSLWPYKGRPENKSFLYEIVSNKRNGIDVDKWDYFARDCHHLGIQNNFDYKRFIKFARVCEVDNELRICARDKEVGNLYDMFHTRNSLHRRAYQHKVGNIIDTMITDAFLKADDYIEITGAGGKKYRISTAIDDMEAYTKLTDNIFLEILYSTDPKLKDAREILKQIEYRNLFKYVGETQPTGQIKIKREDYESLPKEVASAKPKVLLDVKLKAEDFIVDVSQLLPEKFAEQLIRVYCKKVDRKSLYAARQYFVQWCADRNFTKPQDGDVIAPLITPQKKEWNDSTSVQNPTRLREASKSRVQLFKDDPM

SEQ ID NO: 41197 - protein, 215 aa, Homo sapiens
MVLLTMIARVADGLPLAASMQEDEQSGRDLQQYQSQAKQLFRKLNEQSPTRCTLEAGAMTFHYIIEQGVCYLVLCEAAFPKKLAFAYLEDLHSEFDEQHGKKVPTVSRPYSFIEFDTFIQKTKKLYIDSRARRNLGSINTELQDVQRIMVANIEEVLQRGEALSALDSKANNLSSLSKKYRQDAKYLNMRSTYAKLAAVAVFFIMLIVYVRFWWL

SEQ ID NO: 41198 - protein, 473 aa, Homo sapiens
MGAVLGVFSLASWVPCLCSGASCLLCSCCPNSKNSTVTRLIYAFILLLSTVVSYIMQRKEMETYLKKIPGFCEGGFKIHEADINADKDCDVLVGYKAVYRISFAMAIFFFVFSLLMFKVKTSKDLRAAVHNGFWFFKIAALIGIMVGSFYIPGGYFSSVWFVVGMIGAALFILIQLVLLVDFAHSWNESWVNRMEEGNPRLWYAALLSFTSAFYILSIICVGLLYTYYTKPDGCTENKFFISINLILCVVASIISIHPKIQEHQPRSGLLQSSLITLYTMYLTWSAMSNEPDRSCNPNLMSFITRITAPTLAPGNSTAVVPTPTPPSKSGSLLDSDNFIGLFVFVLCLLYSSIRTSTNSQVDKLTLSGSDSVILGDTTTSGASDEEDGQPRRAVDNEKEGVQYSYSLFHLMLCLASLYIMMTLTSWYSPDAKFQSMTSKWPAVWVKISSSWVCLLLYVWTLVAPLVLTSRDFS

SEQ ID NO: 41199 - protein, 418 aa, Homo sapiens
MQRKEMETYLKKIPGFCEGGFKIHEADINADKDCDVLVGYKAVYRISFAMAIFFFVFSLLMFKVKTSKDLRAAVHNGFWFFKIAALIGIMVGSFYIPGGYFSSVWFVVGMIGAALFILIQLVLLVDFAHSWNESWVNRMEEGNPRLWYAALLSFTSAFYILSIICVGLLYTYYTKPDGCTENKFFISINLILCVVASIISIHPKIQEHQPRSGLLQSSLITLYTMYLTWSAMSNEPDRSCNPNLMSFITRITAPTLAPGNSTAVVPTPTPPSKSGSLLDSDNFIGLFVFVLCLLYSSIRTSTNSQVDKLTLSGSDSVILGDTTTSGASDEEDGQPRRAVDNEKEGVQYSYSLFHLMLCLASLYIMMTLTSWYSPDAKFQSMTSKWPAVWVKISSSWVCLLLYVWTLVAPLVLTSRDFS

SEQ ID NO: 41200 - protein, 373 aa, Homo sapiens
MLKRKPSNVSEKEKHQKPKRSSSFGNFDRFRNNSLSKPDDSTEAHEGDPTNGSGEQSKTSNNGGGLGKKMRAISWTMKKKVGKKYIKALSEEKDEEDGENAHPYRNSDPVIGTHTEKVSLKASDSMDSLYSGQSSSSGITSCSDGTSNRDSFRLDDDGPYSGPFCGRARVHTDFTPSPYDTDSLKIKKGDIIDIICKTPMGMWTGMLNNKVGNFKFIYVDVISEEEAAPKKIKANRRSNSKKSKTLQEFLERIHLQEYTSTLLLNGYETLEDLKDIKESHLIELNIENPDDRRRLLSAAENFLEEEIIQEQENEPEPLSLSSDISLNKSQLDDCPRDSGCYISSGNSDNGKEDLESENLSDMVHKIIITEPSD

SEQ ID NO: 41201 - protein, 205 aa, Homo sapiens
MLKRKPSNVSEKEKHQKPKKGDIIDIICKTPMGMWTGMLNNKVGNFKFIYVDVISEEEAAPKKIKANRRSNSKKSKTLQEFLERIHLQEYTSTLLLNGYETLEDLKDIKESHLIELNIENPDDRRRLLSAAENFLEEEIIQEQENEPEPLSLSSDISLNKSQLDDCPRDSGCYISSGNSDNGKEDLESENLSDMVHKIIITEPSD

SEQ ID NO: 41202 - protein, 441 aa, Homo sapiens
MEIRLDTLSASLGRSSTLNNCNLEDKLAWYEGEAYMWHHWKPFPENPLWTCLDFQIAQVGPWDHCSSCIRHTRLKSSCSDMDLLHSWRSSSFGNFDRFRNNSLSKPDDSTEAHEGDPTNGSGEQSKTSNNGGGLGKKMRAISWTMKKKVGKKYIKALSEEKDEEDGENAHPYRNSDPVIGTHTEKVSLKASDSMDSLYSGQSSSSGITSCSDGTSNRDSFRLDDDGPYSGPFCGRARVHTDFTPSPYDTDSLKIKKGDIIDIICKTPMGMWTGMLNNKVGNFKFIYVDVISEEEAAPKKIKANRRSNSKKSKTLQEFLERIHLQEYTSTLLLNGYETLEDLKDIKESHLIELNIENPDDRRRLLSAAENFLEEEIIQEQENEPEPLSLSSDISLNKSQLDDCPRDSGCYISSGNSDNGKEDLESENLSDMVHKIIITEPSD

SEQ ID NO: 41203 - protein, 405 aa, Homo sapiens
MEPGAGGRNTARAQRAGSPNTPPPREQERKLEQEKLSGVVKSVHRRLRKKYREVGDFDKIWREHCEDEETLCEYAVAMKNLADNHWAKTCEGEGRIEWCCSVCREYFQNGGKRKALEKDEKRAVLATKTTPALNMHESSQLEGHLTNLSFTNPEFITELLQASGKIRLLDVGSCFNPFLKFEEFLTVGIDIVPAVESVYKCDFLNLQLQQPLQLAQDAIDAFLKQLKNPIDSLPGELFHVVVFSLLLSYFPSPYQRWICCKKAHELLVLNGLLLIITPDSSHQNRHAMMMKSWKIAIESLGFKRFKYSKFSHMHLMAFRKISLKTTSDLVSRNYPGMLYIPQDFNSIEDEEYSNPSCYVRSDIEDEQLAYGFTELPDAPYDSDSGESQASSIPFYELEDPILLLS

SEQ ID NO: 41204 - protein, 1630 aa, Homo sapiens
MLKCIPLWRCNRHVESVDKRHCSLQAVPEEIYRYSRSLEELLLDANQLRELPKPFFRLLNLRKLGLSDNEIQRLPPEVANFMQLVELDVSRNDIPEIPESIKFCKALEIADFSGNPLSRLPDGFTQLRSLAHLALNDVSLQALPGDVGNLANLVTLELRENLLKSLPASLSFLVKLEQLDLGGNDLEVLPDTLGALPNLRELWLDRNQLSALPPELGNLRRLVCLDVSENRLEELPAELGGLVLLTDLLLSQNLLRRLPDGIGQLKQLSILKVDQNRLCEVTEAIGDCENLSELILTENLLMALPRSLGKLTKLTNLNVDRNHLEALPPEIGGCVALSVLSLRDNRLAVLPPELAHTTELHVLDVAGNRLQSLPFALTHLNLKALWLAENQAQPMLRFQTEDDARTGEKVLTCYLLPQQPPPSLEDAGQQGSLSETWSDAPPSRVSVIQFLEAPIGDEDAEEAAAEKRGLQRRATPHPSELKVMKRSIEGRRSEACPCQPDSGSPLPAEEEKRLSAESGLSEDSRPSASTVSEAEPEGPSAEAQGGSQQEATTAGGEEDAEEDYQEPTVHFAEDALLPGDDREIEEGQPEAPWTLPGGRQRLIRKDTPHYKKHFKISKLPQPEAVVALLQGMQPDGEGPVAPGGWHNGPHAPWAPRAQKEEEEEEEGSPQEEEVEEEEENRAEEEEASTEEEDKEGAVVSAPSVKGVSFDQANNLLIEPARIEEEELTLTILRQTGGLGISIAGGKGSTPYKGDDEGIFISRVSEEGPAARAGVRVGDKLLEVNGVALQGAEHHEAVEALRGAGTAVQMRVWRERMVEPENAVTITPLRPEDDYSPRERRGGGLRLPLLPPESPGPLRQRHVACLARSERGLGFSIAGGKGSTPYRAGDAGIFVSRIAEGGAAHRAGTLQVGDRVLSINGVDVTEARHDHAVSLLTAASPTIALLLEREAGGPLPPSPLPHSSPPTAAVATTSITTATPGVPGLPSLAPSLLAAALEGPYPVEEIRLPRAGGPLGLSIVGGSDHSSHPFGVQEPGVFISKVLPRGLAARSGLRVGDRILAVNGQDVRDATHQEAVSALLRPCLELSLLVRRDPAPPGLRELCIQKAPGERLGISIRGGARGHAGNPRDPTDEGIFISKVSPTGAAGRDGRLRVGLRLLEVNQQSLLGLTHGEAVQLLRSVGDTLTVLVCDGFEASTDAALEVSPGVIANPFAAGIGHRNSLESISSIDRELSPEGPGKEKELPGQTLHWGPEATEAAGRGLQPLKLDYRALAAVPSAGSVQRVPSGAAGGKMAESPCSPSGQQPPSPPSPDELPANVKQAYRAFAAVPTSHPPEDAPAQPPTPGPAASPEQLSFRERQKYFELEVRVPQAEGPPKRVSLVGADDLRKMQEEEARKLQQKRAQMLREAAEAGAEARLALDGETLGEEEQEDEQPPWASPSPTSRQSPASPPPLGGGAPVRTAKAERRHQERLRVQSPEPPAPERALSPAELRALEAEKRALWRAARMKSLEQDALRAQMVLSRSQEGRGTRGPLERLAEAPSPAPTPSPTPVEDLGPQTSTSPGRLSPDFAEELRSLEPSPSPGPQEEDGEVALVLLGRPSPGAVGPEDVALCSSRRPVRPGRRGLGPVPS

SEQ ID NO: 41205 - protein, 1549 aa, Homo sapiens
MQLVELDVSRNDIPEIPESIKFCKALEIADFSGNPLSRLPDGFTQLRSLAHLALNDVSLQALPGDVGNLANLVTLELRENLLKSLPASLSFLVKLEQLDLGGNDLEVLPDTLGALPNLRELWLDRNQLSALPPELGNLRRLVCLDVSENRLEELPAELGGLVLLTDLLLSQNLLRRLPDGIGQLKQLSILKVDQNRLCEVTEAIGDCENLSELILTENLLMALPRSLGKLTKLTNLNVDRNHLEALPPEIGGCVALSVLSLRDNRLAVLPPELAHTTELHVLDVAGNRLQSLPFALTHLNLKALWLAENQAQPMLRFQTEDDARTGEKVLTCYLLPQQPPPSLEDAGQQGSLSETWSDAPPSRVSVIQFLEAPIGDEDAEEAAAEKRGLQRRATPHPSELKVMKRSIEGRRSEACPCQPDSGSPLPAEEEKRLSAESGLSEDSRPSASTVSEAEPEGPSAEAQGGSQQEATTAGGEEDAEEDYQEPTVHFAEDALLPGDDREIEEGQPEAPWTLPGGRQRLIRKDTPHYKKHFKISKLPQPEAVVALLQGMQPDGEGPVAPGGWHNGPHAPWAPRAQKEEEEEEEGSPQEEEVEEEEENRAEEEEASTEEEDKEGAVVSAPSVKGVSFDQANNLLIEPARIEEEELTLTILRQTGGLGISIAGGKGSTPYKGDDEGIFISRVSEEGPAARAGVRVGDKLLEVNGVALQGAEHHEAVEALRGAGTAVQMRVWRERMVEPENAVTITPLRPEDDYSPRERRGGGLRLPLLPPESPGPLRQRHVACLARSERGLGFSIAGGKGSTPYRAGDAGIFVSRIAEGGAAHRAGTLQVGDRVLSINGVDVTEARHDHAVSLLTAASPTIALLLEREAGGPLPPSPLPHSSPPTAAVATTSITTATPGVPGLPSLAPSLLAAALEGPYPVEEIRLPRAGGPLGLSIVGGSDHSSHPFGVQEPGVFISKVLPRGLAARSGLRVGDRILAVNGQDVRDATHQEAVSALLRPCLELSLLVRRDPAPPGLRELCIQKAPGERLGISIRGGARGHAGNPRDPTDEGIFISKVSPTGAAGRDGRLRVGLRLLEVNQQSLLGLTHGEAVQLLRSVGDTLTVLVCDGFEASTDAALEVSPGVIANPFAAGIGHRNSLESISSIDRELSPEGPGKEKELPGQTLHWGPEATEAAGRGLQPLKLDYRALAAVPSAGSVQRVPSGAAGGKMAESPCSPSGQQPPSPPSPDELPANVKQAYRAFAAVPTSHPPEDAPAQPPTPGPAASPEQLSFRERQKYFELEVRVPQAEGPPKRVSLVGADDLRKMQEEEARKLQQKRAQMLREAAEAGAEARLALDGETLGEEEQEDEQPPWASPSPTSRQSPASPPPLGGGAPVRTAKAERRHQERLRVQSPEPPAPERALSPAELRALEAEKRALWRAARMKSLEQDALRAQMVLSRSQEGRGTRGPLERLAEAPSPAPTPSPTPVEDLGPQTSTSPGRLSPDFAEELRSLEPSPSPGPQEEDGEVALVLLGRPSPGAVGPEDVALCSSRRPVRPGRRGLGPVPS

SEQ ID NO: 41206 - protein, 1655 aa, Homo sapiens
MLKCIPLWRCNRHVESVDKRHCSLQAVPEEIYRYSRSLEELLLDANQLRELPKPFFRLLNLRKLGLSDNEIQRLPPEVANFMQLVELDVSRNDIPEIPESIKFCKALEIADFSGNPLSRLPDGFTQLRSLAHLALNDVSLQALPGDVGNLANLVTLELRENLLKSLPASLSFLVKLEQLDLGGNDLEVLPDTLGALPNLRELWLDRNQLSALPPELGNLRRLVCLDVSENRLEELPAELGGLVLLTDLLLSQNLLRRLPDGIGQLKQLSILKVDQNRLCEVTEAIGDCENLSELILTENLLMALPRSLGKLTKLTNLNVDRNHLEALPPEIGGCVALSVLSLRDNRLAVLPPELAHTTELHVLDVAGNRLQSLPFALTHLNLKALWLAENQAQPMLRFQTEDDARTGEKVLTCYLLPQQPPPSLEDAGQQGSLSETWSDAPPSRVSVIQFLEAPIGDEDAEEAAAEKRGLQRRATPHPSELKVMKRSIEGRRSEACPCQPDSGSPLPAEEEKRLSAESGLSEDSRPSASTVSEAEPEGPSAEAQGGSQQEATTAGGEEDAEEDYQEPTVHFAEDALLPGDDREIEEGQPEAPWTLPGGRQRLIRKDTPHYKKHFKISKLPQPEAVVALLQGMQPDGEGPVAPGGWHNGPHAPWAPRAQKEEEEEEEGSPQEEEVEEEEENRAEEEEASTEEEDKEGAVVSAPSVKGVSFDQANNLLIEPARIEEEELTLTILRQTGGLGISIAGGKGSTPYKGDDEGIFISRVSEEGPAARAGVRVGDKLLEVNGVALQGAEHHEAVEALRGAGTAVQMRVWRERMVEPENAVTITPLRPEDDYSPRERRGGGLRLPLLPPESPGPLRQRHVACLARSERGLGFSIAGGKGSTPYRAGDAGIFVSRIAEGGAAHRAGTLQVGDRVLSINGVDVTEARHDHAVSLLTAASPTIALLLEREAGGPLPPSPLPHSSPPTAAVATTSITTATPGVPGLPSLAPSLLAAALEGPYPVEEIRLPRAGGPLGLSIVGGSDHSSHPFGVQEPGVFISKVLPRGLAARSGLRVGDRILAVNGQDVRDATHQEAVSALLRPCLELSLLVRRDPAPPGLRELCIQKAPGERLGISIRGGARGHAGNPRDPTDEGIFISKVSPTGAAGRDGRLRVGLRLLEVNQQSLLGLTHGEAVQLLRSVGDTLTVLVCDGFEASTDAALEVSPGVIANPFAAGIGHRNSLESISSIDRELSPEGPGKEKELPGQTLHWGPEATEAAGRGLQPLKLDYRALAAVPSAGSVQRVPSGAAGGKMAESPCSPSGQQPPSPPSPDELPANVKQAYRAFAAVPTSHPPEDAPAQPPTPGPAASPEQLSFRERQKYFELEVRVPQAEGPPKRVSLVGADDLRKMQEEEARKLQQKRAQMLREAAEAGAEARLALDGETLGEEEQEDEQPPWASPSPTSRQSPASPPPLGGGAPVRTAKAERRHQERLRVQSPEPPAPERALSPAELRALEAEKRALWRAARMKSLEQDALRAQMVLSRSQEGRGTRGPLERLAEAPSPAPTPSPTPVEDLGPQTSTSPGRLPLSGKKFDYRAFAALPSSRPVYDIQSPDFAEELRSLEPSPSPGPQEEDGEVALVLLGRPSPGAVGPEDVALCSSRRPVRPGRRGLGPVPS

SEQ ID NO: 41207 - protein, 659 aa, Homo sapiens
MASTVSPSTIAETPEPPPLSDHIRNAADISVIVIYFLVVMAVGLWAMLKTNRGTIGGFFLAGRDMAWWPMGASLFASNIGSNHYVGLAGTGAASGVATVTFEWTSSVMLLILGWIFVPIYIKSGVMTMPEYLKKRFGGERLQVYLSILSLFICVVLLISADIFAGAIFIKLALGLDLYLAIFILLAMTAVYTTTGGLASVIYTDTLQTIIMLIGSFILMGFAFNEVGGYESFTEKYVNATPSVVEGDNLTISASCYTPRADSFHIFRDAVTGDIPWPGIIFGMPITALWYWCTNQVIVQRCLCGKDMSHVKAACIMCAYLKLLPMFLMVMPGMISRILYTDMVACVVPSECVKHCGVDVGCTNYAYPTMVLELMPQGLRGLMLSVMLASLMSSLTSIFNSASTLFTIDLYTKMRKQASEKELLIAGRIFVLLLTVVSIVWVPLVQVSQNGQLIHYTESISSYLGPPIAAVFVLAIFCKRVNEQGAFWGLMVGLAMGLIRMITEFAYGTGSCLAPSNCPKIICGVHYLYFSIVLFFGSMLVTLGISLLTKPIPDVHLYRLCWVLRNSTEERIDIDAEEKSQEETDDGVEEDYPEKSRGCLKKAYDLFCGLQKGPKLTKEEEEALSKKLTDTSERPSWRTIVNINAILLLAVVVFIHGYYA

SEQ ID NO: 41208 - protein, 483 aa, Homo sapiens
MSVTKSTEGPQGAVAIKLDLMSPPESAKKLENKDSTFLDESPSESAGLKKTKGITVFQALIHLVKGNMGTGILGLPLAVKNAGILMGPLSLLVMGFIACHCMHILVKCAQRFCKRLNKPFMDYGDTVMHGLEANPNAWLQNHAHWGRHIVSFFLIITQLGFCCVYIVFLADNLKQVVEAVNSTTNNCYSNETVILTPTMDSRLYMLSFLPFLVLLVLIRNLRILTIFSMLANISMLVSLVIIIQYITQEIPDPSRLPLVASWKTYPLFFGTAIFSFESIGVVLPLENKMKNARHFPAILSLGMSIVTSLYIGMAALGYLRFGDDIKASISLNLPNCWLYQSVKLLYIAGILCTYALQFYVPAEIIIPFAISRVSTRWALPLDLSIRLVMVCLTCLLAILIPRLDLVISLVGSVSGTALALIIPPLLEVTTFYSEGMSPLTIFKDALISILGFVGFVVGTYQALDELLKSEDSHPFSNSTTFVR

SEQ ID NO: 41209 - protein, 285 aa, Homo sapiens
MDSRLYMLSFLPFLVLLVLIRNLRILTIFSMLANISMLVSLVIIIQYITQEIPDPSRLPLVASWKTYPLFFGTAIFSFESIGVVLPLENKMKNARHFPAILSLGMSIVTSLYIGMAALGYLRFGDDIKASISLNLPNCWLYQSVKLLYIAGILCTYALQFYVPAEIIIPFAISRVSTRWALPLDLSIRLVMVCLTCLLAILIPRLDLVISLVGSVSGTALALIIPPLLEVTTFYSEGMSPLTIFKDALISILGFVGFVVGTYQALDELLKSEDSHPFSNSTTFVR

SEQ ID NO: 41210 - protein, 207 aa, Homo sapiens
MNDTAVLPLENKMKNARHFPAILSLGMSIVTSLYIGMAALGYLRFGDDIKASISLNLPNCWLYQSVKLLYIAGILCTYALQFYVPAEIIIPFAISRVSTRWALPLDLSIRLVMVCLTCLLAILIPRLDLVISLVGSVSGTALALIIPPLLEVTTFYSEGMSPLTIFKDALISILGFVGFVVGTYQALDELLKSEDSHPFSNSTTFVR

SEQ ID NO: 41211 - protein, 145 aa, Homo sapiens
  MOD_RES (48)..(48): Selenocysteine
MSLLLPPLALLLLLAALVAPATAATAYRPDWNRLSGLTRARVETCGGXQLNRLKEVKAFVTQDIPFYHNLVMKHLPGADPELVLLGRRYEELERIPLSEMTREEINALVQELGFYRKAAPDAQVPPEYVWAPAKPPEETSDHADL

SEQ ID NO: 41212 - protein, 414 aa, Homo sapiens
MAAAPPSYCFVAFPPRAKDGLVVFGKNSARPRDEVQEVVYFSAADHEPESKVECTYISIDQVPRTYAIMISRPAWLWGAEMGANEHGVCIANEAINTREPAAEIEALLGMDLVRLGLERGETAKEALDVIVSLLEEHGQGGNYFEDANSCHSFQSAYLIVDRDEAWVLETIGKYWAAEKVTEGVRCICSQLSLTTKMDAEHPELRSYAQSQGWWTGEGEFNFSEVFSPVEDHLDCGAGKDSLEKQEESITVQTMMNTLRDKASGVCIDSEFFLTTASGVSVLPQNRSSPCIHYFTGTPDPSRSIFKPFIFVDDVKLVPKTQSPCFGDDDPAKKEPRFQEKPDRRHELYKAHEWARAIIESDQEQGRKLRSTMLELEKQGLEAMEEILTSSEPLDPAEVGDLFYDCVDTEIKFFK

SEQ ID NO: 41213 - protein, 434 aa, Homo sapiens
MVQDGTFKTRDSTWTCESTRMAAAPPSYCFVAFPPRAKDGLVVFGKNSARPRDEVQEVVYFSAADHEPESKVECTYISIDQVPRTYAIMISRPAWLWGAEMGANEHGVCIANEAINTREPAAEIEALLGMDLVRLGLERGETAKEALDVIVSLLEEHGQGGNYFEDANSCHSFQSAYLIVDRDEAWVLETIGKYWAAEKVTEGVRCICSQLSLTTKMDAEHPELRSYAQSQGWWTGEGEFNFSEVFSPVEDHLDCGAGKDSLEKQEESITVQTMMNTLRDKASGVCIDSEFFLTTASGVSVLPQNRSSPCIHYFTGTPDPSRSIFKPFIFVDDVKLVPKTQSPCFGDDDPAKKEPRFQEKPDRRHELYKAHEWARAIIESDQEQGRKLRSTMLELEKQGLEAMEEILTSSEPLDPAEVGDLFYDCVDTEIKFFK

SEQ ID NO: 41214 - protein, 346 aa, Homo sapiens
MISRPAWLWGAEMGANEHGVCIANEAINTREPAAEIEALLGMDLVRLGLERGETAKEALDVIVSLLEEHGQGGNYFEDANSCHSFQSAYLIVDRDEAWVLETIGKYWAAEKVTEGVRCICSQLSLTTKMDAEHPELRSYAQSQGWWTGEGEFNFSEVFSPVEDHLDCGAGKDSLEKQEESITVQTMMNTLRDKASGVCIDSEFFLTTASGVSVLPQNRSSPCIHYFTGTPDPSRSIFKPFIFVDDVKLVPKTQSPCFGDDDPAKKEPRFQEKPDRRHELYKAHEWARAIIESDQEQGRKLRSTMLELEKQGLEAMEEILTSSEPLDPAEVGDLFYDCVDTEIKFFK

SEQ ID NO: 41215 - protein, 338 aa, Homo sapiens
MAGSHPYLNPPDSTHPSPPSAPPSLRWHQCCQPSDATNGLLVALLGGGLPAGFVGPLSHMAYQASNLPSLELLICRCLFHLPIALLLKLRGDPLLGPPDIRGRAYFYALLNVLSIGCAYSAVQVVPAGNAATVRKGSSTVCSAVLTLCLESQGLSGYDWCGLLGSILGLIIIVGPGLWTLQEGITGVYTALGYGQAFVGGLALSLGLLVYRSLHFPSCLPTVAFLSGLVGLLGSVPGLFVLQPPVLPSDLPSWSCVGAVGILALVSFTCVSYAVTKAHPALVCAVLHSEVVVALILQYYMLHETVAPSDIVGAGVVLGSIAIITAWNLSCEREGKVEE

SEQ ID NO: 41216 - protein, 414 aa, Homo sapiens [sequence omitted]

SEQ ID NO: 41217 - protein, 375 aa, Homo sapiens
MDALQLANSAFAVDLFKQLCEKEPLGNVLFSPICLSTSLSLAQVGAKGDTANEIGQVLHFENVKDVPFGFQTVTSDVNKLSSFYSLKLIKRLYVDKSLNLSTEFISSTKRPYAKELETVDFKDKLEETKGQINNSIKDLTDGHFENILADNSVNDQTKILVVNAAYFVGKWMKKFSESETKECPFRVNKTDTKPVQMMNMEATFCMGNIDSINCKIIELPFQNKHLSMFILLPKDVEDESTGLEKIEKQLNSESLSQWTNPSTMANAKVKLSIPKFKVEKMIDPKACLENLGLKHIFSEDTSDFSGMSETKGVALSNVIHKVCLEITEDGGDSIEVPGARILQHKDELNADHPFIYIIRHNKTRNIIFFGKFCSP

SEQ ID NO: 41218 - protein, 231 aa, Homo sapiens
MDALQLANSAFAVDLFKQLCEKEPLGNVLFSPICLSTSLSLAQVGAKGDTANEIGQVLHFENVKDVPFGFQTVTSDVNKLSSFYSLKLIKRLYVDKSLNLSTEFISSTKRPYAKELETVDFKDKLEETKGQINNSIKDLTDGHFENILADNSVNDQTKILVVNAAYFVGKWMKKFSESETKECPFRVNKVCGAACSSKRSPIIDVKNDRDRVGHKSIPMRNLRARPAKCLS

SEQ ID NO: 41219 - protein, 347 aa, Homo sapiens
MSVAGLKKQFHKASQLFSEKISGAEGTKLDDEFLDMERKIDVTNKVVAEILSKTTEYLQPNPAYRAKLGMLNTVSKIRGQVKTTGYPQTEGLLGDCMLKYGKELGEDSTFGNALIEVGESMKLMAEVKDSLDINVKQTFIDPLQLLQDKDLKEIGHHLKKLEGRRLDYDYKKKRVGKIPDEEVRQAVEKFEESKELAERSMFNFLENDVEQVSQLAVFIEAALDYHRQSTEILQELQSKLQMRISAASSVPRREYKPRPVKRSSSELNGVSTTSVVKTTGSNIPMDQPCCRGLYDFEPENQGELGFKEGDIITLTNQIDENWYEGMIHGESGFFPINYVEVIVPLPQ

SEQ ID NO: 41220 - protein, 278 aa, Homo sapiens
MLNTVSKIRGQVKTTGYPQTEGLLGDCMLKYGKELGEDSTFGNALIEVGESMKLMAEVKDSLDINVKQTFIDPLQLLQDKDLKEIGHHLKKLEGRRLDYDYKKKRVGKIPDEEVRQAVEKFEESKELAERSMFNFLENDVEQVSQLAVFIEAALDYHRQSTEILQELQSKLQMRISAASSVPRREYKPRPVKRSSSELNGVSTTSVVKTTGSNIPMDQPCCRGLYDFEPENQGELGFKEGDIITLTNQIDENWYEGMIHGESGFFPINYVEVIVPLPQ

SEQ ID NO: 41221 - protein, 355 aa, Homo sapiens
MDGIFAGIICNQANRCLTWTSQQLFSEKISGAEGTKLDDEFLDMERKIDVTNKVVAEILSKTTEYLQPNPAYRAKLGMLNTVSKIRGQVKTTGYPQTEGLLGDCMLKYGKELGEDSTFGNALIEVGESMKLMAEVKDSLDINVKQTFIDPLQLLQDKDLKEIGHHLKKLEGRRLDYDYKKKRVGKIPDEEVRQAVEKFEESKELAERSMFNFLENDVEQVSQLAVFIEAALDYHRQSTEILQELQSKLQMRISAASSVPRREYKPRPVKRSSSELNGVSTTSVVKTTGSNIPMDQPCCRGLYDFEPENQGELGFKEGDIITLTNQIDENWYEGMIHGESGFFPINYVEVIVPLPQ

SEQ ID NO: 41222 - protein, 340 aa, Homo sapiens
MSVAGLKKQFHKASQLFSEKISGAEGTKLDDEFLDMERKIDVTNKVVAEILSKTTEYLQPNPAYRAKLGMLNTVSKIRGQVKTTGYPQTEGLLGDCMLKYGKELGEDSTFGNALIEVGESMKLMAEVKDSLDINVKQTFIDPLQLLQDKDLKEIGHHLKKLEGRRLDYDYKKKRVGKIPDEEVRQAVEKFEESKELAERSMFNFLENDVEQVSQLAVFIEAALDYHRQSTEILQELQSKLQMRISAASSVPRREYKPRPVKRSSSELNGVSTTSVVKTTGSNIPMDQPCCRGLYDFEPENQGELGFKEGDGTFRKIKRETKIKMCRKKIVNIYKLKDQQH

SEQ ID NO: 41223 - protein, 317 aa, Homo sapiens
MYNMMETELKPPGPQQTSGGGGGNSTAAAAGGNQKNSPDRVKRPMNAFMVWSRGQRRKMAQENPKMHNSEISKRLGAEWKLLSETEKRPFIDEAKRLRALHMKEHPDYKYRPRRKTKTLMKKDKYTLPGGLLAPGGNSMASGVGVGAGLGAGVNQRMDSYAHMNGWSNGSYSMMQDQLGYPQHPGLNAHGAAQMQPMHRYDVSALQYNSMTSSQTYMNGSPTYSMSYSQQGTPGMALGSMGSVVKSEASSSPPVVTSSSHSRAPCQAGDLRDMISMYLPGAEVPEPAAPSRLHMSQHYQSGPVPGTAINGTLPLSHM

SEQ ID NO: 41224 - protein, 282 aa, Homo sapiens
MAVPETRPNHTIYINNLNEKIKKDELKKSLYAIFSQFGQILDILVSRSLKMRGQAFVIFKEVSSATNALRSMQGFPFYDKPMRIQYAKTDSDIIAKMKGTFVERDRKREKRKPKSQETPATKKAVQGGGATPVVGAVQGPVPGMPPMTQAPRIMHHMPGQPPYMPPPGMIPPPGLAPGQIPPGAMPPQQLMPGQMPPAQPLSENPPNHILFLTNLPEETNELMLSMLFNQFPGFKEVRLVPGRHDIAFVEFDNEVQAGAARDALQGFKITQNNAMKISFAKK

SEQ ID NO: 41225 - protein, 549 aa, Homo sapiens
MDVVEVAGSWWAQEREDIIMKYEKGHRAGLPEDKGPKPFRSYNNNVDHLGIVHETELPPLTAREAKQIRREISRKSKWVDMLGDWEKYKSSRKLIDRAYKGMPMNIRGPMWSVLLNIEEMKLKNPGRYQIMKEKGKRSSEHIQRIDRDISGTLRKHMFFRDRYGTKQRELLHILLAYEEYNPEVGYCRDLSHIAALFLLYLPEEDAFWALVQLLASERHSLQGFHSPNGGTVQGLQDQQEHVVATSQPKTMGHQDKKDLCGQCSPLGCLIRILIDGISLGLTLRLWDVYLVEGEQALMPITRIAFKVQQKRLTKTSRCGPWARFCNRFVDTWARDEDTVLKHLRASMKKLTRKQGDLPPPAKPEQGSSASRPVPASRGGKTLCKGDRQAPPGPPARFPRPIWSASPPRAPRSSTPCPGGAVREDTYPVGTQGVPSPALAQGGPQGSWRFLQWNSMPRLPTDLDVEGPWFRHYDFRQSCWVRAISQEDQLAPCWQAEHPAERVRSAFAAPSTDSDQGTPFRARDEQQCAPTSGPCLCGLHLESSQFPPGF

SEQ ID NO: 41226 - protein, 790 aa, Homo sapiens
MNIMNTEQSQNSIVSRIKVFEGQTNIETSGLPKKPEITPRSLPPKPTVSSGKPSVAPKPAANRASGEWDSGTENRLKVTSKEGLTPYPPLQEAGSIPVTKPELPKKPNPGLIRSVNPEIPGRGPLAESSDSGKKVPTPAPRPLLLKKSVSSENPTYPSAPLKPVTVPPRLAGASQAKAYKSLGEGPPANPPVPVLQSKPLVDIDLISFDDDVLPTPSGNLAEESVGSEMVLDPFQLPAKTEPIKERAVQPAPTRKPTVIRIPAKPGKCLHEDPQSPPPLPAEKPIGNTFSTVSGKLSNVERTRNLESNHPGQTGGFVRVPPRLPPRPVNGKTIPTQQPPTKVPPERPPPPKLSATRRSNKKLPFNRSSSDMDLQKKQSNLATGLSKAKSQVFKNQDPVLPPRPKPGHPLYSKYMLSVPHGIANEDIVSQNPGELSCKRGDVLVMLKQTENNYLECQKGEDTGRVHLSQMKIITPLDEHLRSRPNDPSHAQKPVDSGAPHAVVLHDFPAEQVDDLNLTSGEIVYLLEKIDTDWYRGNCRNQIGIFPANYVKVIIDIPEGGNGKRECVSSHCVKGSRCVARFEYIGEQKDELSFSEGEIIILKEYVNEEWARGEVRGRTGIFPLNFVEPVEDYPTSGANVLSTKVPLKTKKEDSGSNSQVNSLPAEWCEALHSFTAETSDDLSFKRGDRIQILERLDSDWCRGRLQDREGIFPAVFVRPCPAEAKSMLAIVPKGRKAKALYDFRGENEDELSFKAGDIITELESVDDDWMSGELMGKSGIFPKNYIQFLQIS

SEQ ID NO: 41227 - protein, 767 aa, Homo sapiens
MNIMNTEQSQNSIVSRIKVFEGQTNIETSGLPKKPEITPRSLPPKPTVSSGKPSVAPKPAANRASGEWDSGTENRLKVTSKEGLTPYPPLQEAGSIPVTKPELPKKPNPGLIRSVNPEIPGRGPLAESSDSGKKVPTPAPRPLLLKKSVSSENPTYPSAPLKPVTVPPRLAGASQAKAYKSLGEGPPANPPVPVLQSKPLVDIDLISFDDDVLPTPSGNLAEESVGSEMVLDPFQLPAKTEPIKERAVQPAPTRKPTVIRIPAKPGKCLHEDPQSPPPLPAEKPIGNTFSTVSGKLSNVERTRNLESNHPGQTGGFVRVPPRLPPRPVNGKTIPTQQPPTKVPPERPPPPKLSATRRSNKKLPFNRSSSDMDLQKKQSNLATGLSKAKSQVFKNQDPVLPPRPKPGHPLYSKYMRGDVLVMLKQTENNYLECQKGEDTGRVHLSQMKIITPLDEHLRSRPNDPSHAQKPVDSGAPHAVVLHDFPAEQVDDLNLTSGEIVYLLEKIDTDWYRGNCRNQIGIFPANYVKVIIDIPEGGNGKRECVSSHCVKGSRCVARFEYIGEQKDELSFSEGEIIILKEYVNEEWARGEVRGRTGIFPLNFVEPVEDYPTSGANVLSTKVPLKTKKEDSGSNSQVNSLPAEWCEALHSFTAETSDDLSFKRGDRIQILERLDSDWCRGRLQDREGIFPAVFVRPCPAEAKSMLAIVPKGRKAKALYDFRGENEDELSFKAGDIITELESVDDDWMSGELMGKSGIFPKNYIQFLQIS

SEQ ID NO: 41228 - protein, 731 aa, Homo sapiens
MNIMNTEQSQNSIVSRIKVFEGQTNIETSGLPKKPEITPRSLPPKPTVSSGKPSVAPKPAANRASGEWDSGTENRLKVTSKEGLTPYPPLQEAGSIPVTKPELPKKPNPGLIRSVNPEIPGRGPLAESSDSGKKVPTPAPRPLLLKKSVSSENPTYPSAPLKPVTVPPRLAGASQAKAYKSLGEGPPANPPVPVLQSKPLVDIDLISFDDDVLPTPSGNLAEESVGSEMVLGLHEDPQSPPPLPAEKPIGNTFSTVSGKLSNVERTRNLESNHPGQTGGFVRVPPRLPPRPVNGKTIPTQQPPTKVPPERPPPPKLSATRRSNKKLPFNRSSSDMDLQKKQSNLATGLSKAKSQVFKNQDPVLPPRPKPGHPLYSKYMRGDVLVMLKQTENNYLECQKGEDTGRVHLSQMKIITPLDEHLRSRPNDPSHAQKPVDSGAPHAVVLHDFPAEQVDDLNLTSGEIVYLLEKIDTDWYRGNCRNQIGIFPANYVKVIIDIPEGGNGKRECVSSHCVKGSRCVARFEYIGEQKDELSFSEGEIIILKEYVNEEWARGEVRGRTGIFPLNFVEPVEDYPTSGANVLSTKVPLKTKKEDSGSNSQVNSLPAEWCEALHSFTAETSDDLSFKRGDRIQILERLDSDWCRGRLQDREGIFPAVFVRPCPAEAKSMLAIVPKGRKAKALYDFRGENEDELSFKAGDIITELESVDDDWMSGELMGKSGIFPKNYIQFLQIS

SEQ ID NO: 41229 - protein, 420 aa, Homo sapiens
MDLQKKQSNLATGLSKAKSQVFKNQDPVLPPRPKPGHPLYSKYMLSVPHGIANEDIVSQNPGELSCKRGDVLVMLKQTENNYLECQKGEDTGRVHLSQMKIITPLDEHLRSRPNDPSHAQKPVDSGAPHAVVLHDFPAEQVDDLNLTSGEIVYLLEKIDTDWYRGNCRNQIGIFPANYVKVIIDIPEGGNGKRECVSSHCVKGSRCVARFEYIGEQKDELSFSEGEIIILKEYVNEEWARGEVRGRTGIFPLNFVEPVEDYPTSGANVLSTKVPLKTKKEDSGSNSQVNSLPAEWCEALHSFTAETSDDLSFKRGDRIQILERLDSDWCRGRLQDREGIFPAVFVRPCPAEAKSMLAIVPKGRKAKALYDFRGENEDELSFKAGDIITELESVDDDWMSGELMGKSGIFPKNYIQFLQIS

SEQ ID NO: 41230 - protein, 397 aa, Homo sapiens
MDLQKKQSNLATGLSKAKSQVFKNQDPVLPPRPKPGHPLYSKYMRGDVLVMLKQTENNYLECQKGEDTGRVHLSQMKIITPLDEHLRSRPNDPSHAQKPVDSGAPHAVVLHDFPAEQVDDLNLTSGEIVYLLEKIDTDWYRGNCRNQIGIFPANYVKVIIDIPEGGNGKRECVSSHCVKGSRCVARFEYIGEQKDELSFSEGEIIILKEYVNEEWARGEVRGRTGIFPLNFVEPVEDYPTSGANVLSTKVPLKTKKEDSGSNSQVNSLPAEWCEALHSFTAETSDDLSFKRGDRIQILERLDSDWCRGRLQDREGIFPAVFVRPCPAEAKSMLAIVPKGRKAKALYDFRGENEDELSFKAGDIITELESVDDDWMSGELMGKSGIFPKNYIQFLQIS

SEQ ID NO: 41231 - protein, 433 aa, Homo sapiens
MRAEGLGGLERFCSPGKGRGLRALQPFQVGDLLFSCPAYAYVLTVNERGNHCEYCFTRKEGLSKCGRCKQAFYCNVECQKEDWPMHKLECSPMVVFGENWNPSETVRLTARILAKQKIHPERTPSEKLLAVKEFESHLDKLDNEKKDLIQSDIAALHHFYSKHLGFPDNDSLVVLFAQVNCNGFTIEDEELSHLGSAIFPDVALMNHSCCPNVIVTYKGTLAEVRAVQEIKPGEEVFTSYIDLLYPTEDRNDRLRDSYFFTCECQECTTKDKDKAKVEIRKLSDPPKAEAIRDMVRYARNVIEEFRRAKHYKSPSELLEICELSQEKMSSVFEDSNVYMLHMMYQAMGVCLYMQDWEGALQYGQKIIKPYSKHYPLYSLNVASMWLKLGRLYMGLEHKAAGEKALKKAIAIMEVAHGKDHPYISEIKQEIESH

SEQ ID NO: 41232 - protein, 272 aa, Homo sapiens
MRAEGLGGLERFCSPGKGRGLRALQPFQVGDLLFSCPAYAYVLTVNERGNHCEYCFTRKEGLSKCGRCKQAFYCNVECQKEDWPMHKLECSPMVVFGENWNPSETVRLTARILAKQKIHPERTPSEKLLAVKEFESHLDKLDNEKKDLIQSDIAALHHFYSKHLGFPDNDSLVVLFAQVNCNGFTIEDEELSHLGSAIFPDVALMNHSCCPNVIVTYKGTLAEVRAVQEIKPGEEVFTSYIDLLYPTEDRNDRLRDSYFFTCECQECTTKDK

SEQ ID NO: 41233 - protein, 581 aa, Homo sapiens; identical to SEQ ID NO: 270

SEQ ID NO: 41234 - protein, 331 aa, Homo sapiens
MGGSAGRELDAGRKPKLTRTQSAFSPVSFSPLFTGETVSLVDVDISQRGLTSPHPPTPPPPPRRSLSLLDDISGTLPTSVLVAPMGSSLQSFPLPPPPPPHAPDAFPRIAPIRAAESLHSQPPQHLQCPLYRPDSSSFAASLRELEKCGWYWGPMNWEDAEMKLKGKPDGSFLVRDSSDPRYILSLSFRSQGITHHTRMEHYRGTFSLWCHPKFEDRCQSVVEFIKRAIMHSKNGKFLYFLRSRVPGLPPTPVQLLYPVSRFSNVKSLQHLCRFRIRQLVRIDHIPDLPLPKPLISYIRKFYYYDPQEEVYLSLKEAQLISKQKQEVEPST

SEQ ID NO: 41235 - protein, 169 aa, Homo sapiens
MARGGDTGCTGPSETSASGAAAIALPGLEGPATDAQCQTLPLTVLKSRSPSPRSLPPALSCPPPQPAMLEHLSSLPTQMDYKGQKLAEQMFQGIILFSAIVGFIYGYVAEQFGWTVYIVMAGFAFSCLLTLPPWPIYRRHPLKWLPVQESSTDDKKPGERKIKRHAKNN

SEQ ID NO: 41236 - protein, 413 aa, Homo sapiens
MKEVVYWSPKKVADWLLENAMPEYCEPLEHFTGQDLINLTQEDFKKPPLCRVSSDNGQRLLDMIETLKMEHHLEAHKNGHANGHLNIGVDIPTPDGSFSIKIKPNGMPNGYRKEMIKIPMPELERSQYPMEWGKTFLAFLYALSCFVLTTVMISVVHERVPPKEVQPPLPDTFFDHFNRVQWAFSICEINGMILVGLWLIQWLLLKYKSIISRRFFCIVGTLYLYRCITMYVTTLPVPGMHFNCSPKLFGDWEAQLRRIMKLIAGGGLSITGSHNMCGDYLYSGHTVMLTLTYLFIKEYSPRRLWWYHWICWLLSVVGIFCILLAHDHYTVDVVVAYYITTRLFWWYHTMANQQVLKEASQMNLLARVWWYRPFQYFEKNVQGIVPRSYHWPFPWPVVHLSRQVKYSRLVNDT

SEQ ID NO: 41237 - protein, 214 aa, Homo sapiens
MTRMFLNNPSIISRRFFCIVGTLYLYRCITMYVTTLPVPGMHFNCSPKLFGDWEAQLRRIMKLIAGGGLSITGSHNMCGDYLYSGHTVMLTLTYLFIKEYSPRRLWWYHWICWLLSVVGIFCILLAHDHYTVDVVVAYYITTRLFWWYHTMANQQVLKEASQMNLLARVWWYRPFQYFEKNVQGIVPRSYHWPFPWPVVHLSRQVKYSRLVNDT

SEQ ID NO: 41238 - protein, 522 aa, Homo sapiens
MASGGGGCSASERLPPPFPGLEPESEGAAGGSEPEAGDSDTEGEDIFTGAAVVSKHQSPKITTSLLPINNGSKENGIHEEQDQEPQDLFADATVELSLDSTQNNQKKVLAKTLISLPPQEATNSSKPQPTYEELEEEEQEDQFDLTVGITDPEKIGDGMNAYVAYKVTTQTSLPLFRSKQFAVKRRFSDFLGLYEKLSEKHSQNGFIVPPPPEKSLIGMTKVKVGKEDSSSAEFLEKRRAALERYLQRIVNHPTMLQDPDVREFLEKEELPRAVGTQTLSGAGLLKMFNKATDAVSKMTIKMNESDIWFEEKLQEVECEEQRLRKLHAVVETLVNHRKELALNTAQFAKSLAMLGSSEDNTALSRALSQLAEVEEKIEQLHQEQANNDFFLLAELLSDYIRLLAIVRAAFDQRMKTWQRWQDAQATLQKKREAEARLLWANKPDKLQQAKDEILEWESRVTQYERDFERISTVVRKEVIRFEKEKSKDFKNHVIKYLETLLYSQQQLAKYWEAFLPEAKAIS

SEQ ID NO: 41239 - protein, 457 aa, Homo sapiens
MASGGGGCSASERLPPPFPGLEPESEGAAGGSEPEAGDSDTEGEDIFTGAAVVSKHQSPKITTSLLPINNGSKENGIHEEQDQEPQDLFAGDGMNAYVAYKVTTQTSLPLFRSKQFAVKRRFSDFLGLYEKLSEKHSQNGFIVPPPPEKSLIGMTKVKVGKEDSSSAEFLEKRRAALERYLQRIVNHPTMLQDPDVREFLEKEELPRAVGTQTLSGAGLLKMFNKATDAVSKMTIKMNESDIWFEEKLQEVECEEQRLRKLHAVVETLVNHRKELALNTAQFAKSLAMLGSSEDNTALSRALSQLAEVEEKIEQLHQEQANNDFFLLAELLSDYIRLLAIVRAAFDQRMKTWQRWQDAQATLQKKREAEARLLWANKPDKLQQAKDEILEWESRVTQYERDFERISTVVRKEVIRFEKEKSKDFKNHVIKYLETLLYSQQQLAKYWEAFLPEAKAIS

SEQ ID NO: 41240 - protein, 557 aa, Homo sapiens
MASGGGGCSASERLPPPFPGLEPESEGAAGGSEPEAGDSDTEGEDIFTGAAVVSKHQSPKITTSLLPINNGSKENGIHEEQDQEPQDLFADATVELSLDSTQNNQKKVLAKTLISLPPQEATNSSKPQPTYEELEEEEQEDQFDLTVGITDPEKIGDGMNAYVAYKVTTQTSLPLFRSKQFAVKRRFSDFLGLYEKLSEKHSQNGFIVPPPPEKSLIGMTKVKVGKEDSSSAEFLEKRRAALERYLQRIVNHPTMLQDPDVREFLEKEELPRAVGTQTLSGAGLLKMFNKATDAVSKMTIKMNESDIWFEEKLQEVECEEQRLRKLHAVVETLVNHRKELALNTAQFAKSLAMLGSSEDNTALSRALSQLAEVEEKIEQLHQEQANNDFFLLAELLSDYIRLLAIVRAAFDQRMKTWQRWQDAQATLQKKREAEARLLWANKPDKLQQAKDEILEWESRVTQYERDFERISTVVRKEVIRFEKEKSKDFKNHVIKYLETLLYSQQQAGEQLGIRSGILLTKKLPRYSKFFSTVHKFCAAASLWKWGFFLSAYLSYLF

SEQ ID NO: 41241 - protein, 411 aa, Homo sapiens
MSLLDGLASSPRAPLQSSKARMKKLPKKSQNEKYRLKYLRLRKAAKATVFENAAICDEIARLEEKFLKAKEERRYLLKKLLQLQALTEGEVQAAAPSHSSSLPLTYGVASSVGTIQGAGPISGPSTGAEEPFGKKTKKEKKEKGKENNKLEVLKKTCKKKKMAGGARKLVQPIALDPSGRPVFPIGLGGLTVYSLGEIITDRPGFHDESAIYPVGYCSTRIYASMKCPDQKCLYTCQIKDGGVQPQFEIVPEDDPQNAIVSSSADACHAELLRTISTTMGKLMPNLLPAGADFFGFSHPAIHNLIQSCPGARKCINYQWVKFDVCKPGDGQLPEGLPENDAAMSFEAFQRQIFDEDQNDPLLPGSLDLPELQPAAFVSSYQPMYLTHEPLVDTHLQHLKSPSQGSPIQSSD

SEQ ID NO: 41242 - protein, 260 aa, Homo sapiens
MVWPALWELYRELGLFQGPALGLRNHLGRKLRRRKKKKAKRTTNWKIITDRPGFHDESAIYPVGYCSTRIYASMKCPDQKCLYTCQIKDGGVQPQFEIVPEDDPQNAIVSSSADACHAELLRTISTTMGKLMPNLLPAGADFFGFSHPAIHNLIQSCPGARKCINYQWVKFDVCKPGDGQLPEGLPENDAAMSFEAFQRQIFDEDQNDPLLPGSLDLPELQPAAFVSSYQPMYLTHEPLVDTHLQHLKSPSQGSPIQSSD

SEQ ID NO: 41243 - protein, 187 aa, Homo sapiens
MKCPDQKCLYTCQIKDGGVQPQFEIVPEDDPQNAIVSSSADACHAELLRTISTTMGKLMPNLLPAGADFFGFSHPAIHNLIQSCPGARKCINYQWVKFDVCKPGDGQLPEGLPENDAAMSFEAFQRQIFDEDQNDPLLPGSLDLPELQPAAFVSSYQPMYLTHEPLVDTHLQHLKSPSQGSPIQSSD

SEQ ID NO: 41244 - protein, 179 aa, Homo sapiens
MQRQNFRPPTPPYPGPGGGGWGSGSSFRGTPGGGGPRPPSPRDGYGSPHHTPPYGPRSRPYGSSHSPRHGGSFPGGRFGSPSPGGYPGSYSRSPAGSQQQFGYSPGQQQTHPQGSPRTSTPFGSGRVREKRMSNELENYFKPSMLEDPWAGLEPVSVVDISQQYSNTQTFTGKKGRYFC

SEQ ID NO: 41245 - protein, 266 aa, Homo sapiens
MGSKTLPAPVPIHPSLQLTNYSFLQAVNGLPTVPSDHLPNLYGFSALHAVHLHQWTLGYPAMHLPRSSFSKVPGTVSSLVDARFQLPAFPWFPHVIQPKPEITAGGSVPALKTKPRFDFANLALAATQEDPAKLGRGEGPGSPAGGLGALLDVTKLSPEKKPTRGRLPSKTKKEFVCKFCGRHFTKSYNLLIHERTHTDERPYTCDICHKAFRRQDHLRDHRYIHSKEKPFKCQECGKGFCQSRTLAVHKTLHSQVKELKTSKIKC

SEQ ID NO: 41246 - protein, 520 aa, Homo sapiens
MVARVGLLLRALQLLLWGHLDAQPAERGGQELRKEAEAFLEKYGYLNEQVPKAPTSTRFSDAIRAFQWVSQLPVSGVLDRATLRQMTRPRCGVTDTNSYAAWAERISDLFARHRTKMRRKKRFAKQGNKWYKQHLSYRLVNWPEHLPEPAVRGAVRAAFQLWSNVSALEFWEAPATGPADIRLTFFQGDHNDGLGNAFDGPGGALAHAFLPRRGEAHFDQDERWSLSRRRGRNLFVVLAHEIGHTLGLTHSPAPRALMAPYYKRLGRDALLSWDDVLAVQSLYGKPLGGSVAVQLPGKLFTDFETWDSYSPQGRRPETQGPKYCHSSFDAITVDRQQQLYIFKGSHFWEVAADGNVSEPRPLQERWVGLPPNIEAAAVSLNDGDFYFFKGGRCWRFRGPKPVWGLPQLCRAGGLPRHPDAALFFPPLRRLILFKGARYYVLARGGLQVEPYYPRSLQDWGGIPEEVSGALPRPDGSIIFFRDDRYWRLDQAKLQATTSGRWATELPWMGCWHANSGSALF

SEQ ID NO: 41247 - protein, 130 aa, Homo sapiens
MVARVGLLLRALQLLLWGHLDAQPAERGGQELRKEAEAFLEKYGYLNEQVPKAPTSTRFSDAIRAFQWVSQLPVSGVLDRATLRQMTRPRCGVTDTNSYAAWAERISDLFARHRTKMRRKKRFAKQGEHC

SEQ ID NO: 41248 - protein, 1148 aa, Homo sapiens
MESLLLPVLLLLAILWTQAAALINLKYSVEEEQRAGTVIANVAKDAREAGFALDPRQASAFRVVSNSAPHLVDINPSSGLLVTKQKIDRDLLCRQSPKCIISLEVMSSSMEICVIKVEIKDLNDNAPSFPAAQIELEISEAASPGTRIPLDSAYDPDSGSFGVQTYELTPNELFGLEIKTRGDGSRFAELVVEKSLDRETQSHYSFRITALDGGDPPRLGTVGLSIKVTDSNDNNPVFSESTYAVSVPENSPPNTPVIRLNASDPDEGTNGQVVYSFYGYVNDRTRELFQIDPHSGLVTVTGALDYEEGHVYELDVQAKDLGPNSIPAHCKVTVSVLDTNDNPPVINLLSVNSELVEVSESAPPGYVIALVRVSDRDSGLNGRVQCRLLGNVPFRLQEYESFSTILVDGRLDREQHDQYNLTIQARDGGVPMLQSAKSFTVLITDENDNHPHFSKPYYQVIVQENNTPGAYLLSVSARDPDLGLNGSVSYQIVPSQVRDMPVFTYVSINPNSGDIYALRSFNHEQTKAFEFKVLAKDGGLPSLQSNATVRVIILDVNDNTPVITAPPLINGTAEVYIPRNSGIGYLVTVVKAEDYDEGENGRVTYDMTEGDRGFFEIDQVNGEVRTTRTFGESSKSSYELIVVAHDHGKTSLSASALVLIYLSPALDAQESMGSVNLSLIFIIALGSIAGILFVTMIFVAIKCKRDNKEIRTYNCSNCLTITCLLGCFIKGQNSKCLHCISVSPISEEQDKKTEEKVSLRGKRIAEYSYGHQKKSSKKKKISKNDIRLVPRDVEETDKMNVVSCSSLTSSLNYFDYHQQTLPLGCRRSESTFLNVENQNTRNTSANHIYHHSFNSQGPQQPDLIINGVPLPETENYSFDSNYVNSRAHLIKSSSTFKDLEGNSLKDSGHEESDQTDSEHDVQRSLYCDTAVNDVLNTSVTSMGSQMPDHDQNEGFHCREECRILGHSDRCWMPRNPMPIRSKSPEHVRNIIALSIEATAADVEAYDDCGPTKRTFATFGKDVSDHPAEERPTLKGKRTVDVTICSPKVNSVIREAGNGCEAISPVTSPLHLKSSLPTKPSVSYTIALAPPARDLEQYVNNVNNGPTRPSEAEPRGADSEKVMHEVSPILKEGRNKESPGVKRLKDIVL

SEQ ID NO: 41249 - protein, 1101 aa, Homo sapiens
MESLLLPVLLLLAILWTQAAALINLKYSVEEEQRAGTVIANVAKDAREAGFALDPRQASAFRVVSNSAPHLVDINPSSGLLVTKQKIDRDLLCRQSPKCIISLEVMSSSMEICVIKVEIKDLNDNAPSFPAAQIELEISEAASPGTRIPLDSAYDPDSGSFGVQTYELTPNELFGLEIKTRGDGSRFAELVVEKSLDRETQSHYSFRITALDGGDPPRLGTVGLSIKVTDSNDNNPVFSESTYAVSVPENSPPNTPVIRLNASDPDEGTNGQVVYSFYGYVNDRTRELFQIDPHSGLVTVTGALDYEEGHVYELDVQAKDLGPNSIPAHCKVTVSVLDTNDNPPVINLLSVNSELVEVSESAPPGYVIALVRVSDRDSGLNGRVQCRLLGNVPFRLQEYESFSTILVDGRLDREQHDQYNLTIQARDGGVPMLQSAKSFTVLITDENDNHPHFSKPYYQVIVQENNTPGAYLLSVSARDPDLGLNGSVSYQIVPSQVRDMPVFTYVSINPNSGDIYALRSFNHEQTKAFEFKVLAKDGGLPSLQSNATVRVIILDVNDNTPVITAPPLINGTAEVYIPRNSGIGYLVTVVKAEDYDEGENGRVTYDMTEGDRGFFEIDQVNGEVRTTRTFGESSKSSYELIVVAHDHGKTSLSASALVLIYLSPALDAQESMGSVNLSLIFIIALGSIAGILFVTMIFVAIKCKRDNKEIRTYNCRIAEYSYGHQKKSSKKKKISKNDIRLVPRDVEETDKMNVVSCSSLTSSLNYFDYHQQTLPLGCRRSESTFLNVENQNTRNTSANHIYHHSFNSQGPQQPDLIINGVPLPETENYSFDSNYVNSRAHLIKSSSTFKDLEGNSLKDSGHEESDQTDSEHDVQRSLYCDTAVNDVLNTSVTSMGSQMPDHDQNEGFHCREECRILGHSDRCWMPRNPMPIRSKSPEHVRNIIALSIEATAADVEAYDDCGPTKRTFATFGKDVSDHPAEERPTLKGKRTVDVTICSPKVNSVIREAGNGCEAISPVTSPLHLKSSLPTKPSVSYTIALAPPARDLEQYVNNVNNGPTRPSEAEPRGADSEKVMHEVSPILKEGRNKESPGVKRLKDIVL

SEQ ID NO: 41250 - protein, 1100 aa, Homo sapiens
MESLLLPVLLLLAILWTQAAALINLKYSVEEEQRAGTVIANVAKDAREAGFALDPRQASAFRVVSNSAPHLVDINPSSGLLVTKQKIDRDLLCRQSPKCIISLEVMSSSMEICVIKVEIKDLNDNAPSFPAAQIELEISEAASPGTRIPLDSAYDPDSGSFGVQTYELTPNELFGLEIKTRGDGSRFAELVVEKSLDRETQSHYSFRITALDGGDPPRLGTVGLSIKVTDSNDNNPVFSESTYAVSVPENSPPNTPVIRLNASDPDEGTNGQVVYSFYGYVNDRTRELFQIDPHSGLVTVTGALDYEEGHVYELDVQAKDLGPNSIPAHCKVTVSVLDTNDNPPVINLLSVNSELVEVSESAPPGYVIALVRVSDRDSGLNGRVQCRLLGNVPFRLQEYESFSTILVDGRLDREQHDQYNLTIQARDGGVPMLQSAKSFTVLITDENDNHPHFSKPYYQVIVQENNTPGAYLLSVSARDPDLGLNGSVSYQIVPSQVRDMPVFTYVSINPNSGDIYALRSFNHEQTKAFEFKVLAKDGGLPSLQSNATVRVIILDVNDNTPVITAPPLINGTAEVYIPRNSGIGYLVTVVKAEDYDEGENGRVTYDMTEGDRGFFEIDQVNGEVRTTRTFGESSKSSYELIVVAHDHGKTSLSASALVLIYLSPALDAQESMGSVNLSLIFIIALGSIAGILFVTMIFVAIKCKRDNKEIRTYNCRIAEYSYGHQKKSSKKKKISKNDIRLVPRDVEETDKMNVVSCSSLTSSLNYFDYHQQTLPLGCRRSESTFLNVENQNTRNTSANHIYHHSFNSQGPQQPDLIINGVPLPETENYSFDSNYVNSRAHLIKSSTFKDLEGNSLKDSGHEESDQTDSEHDVQRSLYCDTAVNDVLNTSVTSMGSQMPDHDQNEGFHCREECRILGHSDRCWMPRNPMPIRSKSPEHVRNIIALSIEATAADVEAYDDCGPTKRTFATFGKDVSDHPAEERPTLKGKRTVDVTICSPKVNSVIREAGNGCEAISPVTSPLHLKSSLPTKPSVSYTIALAPPARDLEQYVNNVNNGPTRPSEAEPRGADSEKVMHEVSPILKEGRNKESPGVKRLKDIVL

SEQ ID NO: 41251 - protein, 1325 aa, Homo sapiens
MLPVYQEVKPNPLQDANLCSRVFFWWLNPLFKIGHKRRLEEDDMYSVLPEDRSQHLGEELQGFWDKEVLRAENDAQKPSLTRAIIKCYWKSYLVLGIFTLIEESAKVIQPIFLGKIINYFENYDPMDSVALNTAYAYATVLTFCTLILAILHHLYFYHVQCAGMRLRVAMCHMIYRKALRLSNMAMGKTTTGQIVNLLSNDVNKFDQVTVFLHFLWAGPLQAIAVTALLWMEIGISCLAGMAVLIILLPLQSCFGKLFSSLRSKTATFTDARIRTMNEVITGIRIIKMYAWEKSFSNLITNLRKKEISKILRSSCLRGMNLASFFSASKIIVFVTFTTYVLLGSVITASRVFVAVTLYGAVRLTVTLFFPSAIERVSEAIVSIRRIQTFLLLDEISQRNRQLPSDGKKMVHVQDFTAFWDKASETPTLQGLSFTVRPGELLAVVGPVGAGKSSLLSAVLGELAPSHGLVSVHGRIAYVSQQPWVFSGTLRSNILFGKKYEKERYEKVIKACALKKDLQLLEDGDLTVIGDRGTTLSGGQKARVNLARAVYQDADIYLLDDPLSAVDAEVSRHLFELCICQILHEKITILVTHQLQYLKAASQILILKDGKMVQKGTYTEFLKSGIDFGSLLKKDNEESEQPPVPGTPTLRNRTFSESSVWSQQSSRPSLKDGALESQDTENVPVTLSEENRSEGKVGFQAYKNYFRAGAHWIVFIFLILLNTAAQVAYVLQDWWLSYWANKQSMLNVTVNGGGNVTEKLDLNWYLGIYSGLTVATVLFGIARSLLVFYVLVNSSQTLHNKMFESILKAPVLFFDRNPIGRILNRFSKDIGHLDDLLPLTFLDFIQTLLQVVGVVSVAVAVIPWIAIPLVPLGIIFIFLRRYFLETSRDVKRLESTTRSPVFSHLSSSLQGLWTIRAYKAEERCQELFDAHQDLHSEAWFLFLTTSRWFAVRLDAICAMFVIIVAFGSLILAKTLDAGQVGLALSYALTLMGMFQWCVRQSAEVENMMISVERVIEYTDLEKEAPWEYQKRPPPAWPHEGVIIFDNVNFMYSPGGPLVLKHLTALIKSQEKVGIVGRTGAGKSSLISALFRLSEPEGKIWIDKILTTEIGLHDLRKKMSIIPQEPVLFTGTMRKNLDPFNEHTDEELWNALQEVQLKETIEDLPGKMDTELAESGSNFSVGQRQLVCLARAILRKNQILIIDEATANVDPRTDELIQKKIREKFAHCTVLTIAHRLNTIIDSDKIMVLDSGRLKEYDEPYVLLQNKESLFYKMVQQLGKAEAAALTETAKQVYFKRNYPHIGHTDHMVTNTSNGQPSTLTIFETAL

SEQ ID NO: 41252 - protein, 1278 aa, Homo sapiens
MLPVYQEVKPNPLQDANLCSRVFFWWLNPLFKIGHKRRLEEDDMYSVLPEDRSQHLGEELQGFWDKEVLRAENDAQKPSLTRAIIKCYWKSYLVLGIFTLIEESAKVIQPIFLGKIINYFENYDPMDSVALNTAYAYATVLTFCTLILAILHHLYFYHVQCAGMRLRVAMCHMIYRKALRLSNMAMGKTTTGQIVNLLSNDVNKFDQVTVFLHFLWAGPLQAIAVTALLWMEIGISCLAGMAVLIILLPLQSCFGKLFSSLRSKTATFTDARIRTMNEVITGIRIIKMYAWEKSFSNLITNLRKKEISKILRSSCLRGMNLASFFSASKIIVFVTFTTYVLLGSVITASRVFVAVTLYGAVRLTVTLFFPSAIERVSEAIVSIRRIQTFLLLDEISQRNRQLPSDGKKMVHVQDFTAFWDKASETPTLQGLSFTVRPGELLAVVGPVGAGKSSLLSAVLGELAPSHGLVSVHGRIAYVSQQPWVFSGTLRSNILFGKKYEKERYEKVIKACALKKDLQLLEDGDLTVIGDRGTTLSGGQKARVNLARAVYQDADIYLLDDPLSAVDAEVSRHLFELCICQILHEKITILVTHQLQYLKAASQILILKDGKMVQKGTYTEFLKSGIDFGSLLKKDNEESEQPPVPGTPTLRNRTFSESSVWSQQSSRPSLKDGALESQDVAYVLQDWWLSYWANKQSMLNVTVNGGGNVTEKLDLNWYLGIYSGLTVATVLFGIARSLLVFYVLVNSSQTLHNKMFESILKAPVLFFDRNPIGRILNRFSKDIGHLDDLLPLTFLDFIQTLLQVVGVVSVAVAVIPWIAIPLVPLGIIFIFLRRYFLETSRDVKRLESTTRSPVFSHLSSSLQGLWTIRAYKAEERCQELFDAHQDLHSEAWFLFLTTSRWFAVRLDAICAMFVIIVAFGSLILAKTLDAGQVGLALSYALTLMGMFQWCVRQSAEVENMMISVERVIEYTDLEKEAPWEYQKRPPPAWPHEGVIIFDNVNFMYSPGGPLVLKHLTALIKSQEKVGIVGRTGAGKSSLISALFRLSEPEGKIWIDKILTTEIGLHDLRKKMSIIPQEPVLFTGTMRKNLDPFNEHTDEELWNALQEVQLKETIEDLPGKMDTELAESGSNFSVGQRQLVCLARAILRKNQILIIDEATANVDPRTDELIQKKIREKFAHCTVLTIAHRLNTIIDSDKIMVLDSGRLKEYDEPYVLLQNKESLFYKMVQQLGKAEAAALTETAKQVYFKRNYPHIGHTDHMVTNTSNGQPSTLTIFETAL

SEQ ID NO: 41253 - protein, 859 aa, Homo sapiens
MLPVYQEVKPNPLQDANLCSRVFFWWLNPLFKIGHKRRLEEDDMYSVLPEDRSQHLGEELQGFWDKEVLRAENDAQKPSLTRAIIKCYWKSYLVLGIFTLIEESAKVIQPIFLGKIINYFENYDPMDSVALNTAYAYATVLTFCTLILAILHHLYFYHVQCAGMRLRVAMCHMIYRKALRLSNMAMGKTTTGQIVNLLSNDVNKFDQVTVFLHFLWAGPLQAIAVTALLWMEIGISCLAGMAVLIILLPLQSCFGKLFSSLRSKTATFTDARIRTMNEVITGIRIIKMYAWEKSFSNLITNLRKKEISKILRSSCLRGMNLASFFSASKIIVFVTFTTYVLLGSVITASRVFVAVTLYGAVRLTVTLFFPSAIERVSEAIVSIRRIQTFLLLDEISQRNRQLPSDGKKMVHVQDFTAFWDKASETPTLQGLSFTVRPGELLAVVGPVGAGKSSLLSAVLGELAPSHGLVSVHGRIAYVSQQPWVFSGTLRSNILFGKKYEKERYEKVIKACALKKDLQLLEDGDLTVIGDRGTTLSGGQKARVNLARAVYQDADIYLLDDPLSAVDAEVSRHLFELCICQILHEKITILVTHQLQYLKAASQILILKDGKMVQKGTYTEFLKSGIDFGSLLKKDNEESEQPPVPGTPTLRNRTFSESSVWSQQSSRPSLKDGALESQDTENVPVTLSEENRSEGKVGFQAYKNYFRAGAHWIVFIFLILLNTAAQVAYVLQDWWLSYWANKQSMLNVTVNGGGNVTEKLDLNWYLGIYSGLTVATVLFGIARSLLVFYVLVNSSQTLHNKMFESILKAPVLFFDRNPIGRILNRFSKDIGHLDDLLPLTFLDFIQRWDLAVLSWLVSNS

SEQ ID NO: 41254 - protein, 784 aa, Homo sapiens
MLPVYQEVKPNPLQDANLCSRVFFWWLNPLFKIGHKRRLEEDDMYSVLPEDRSQHLGEELQGFWDKEVLRAENDAQKPSLTRAIIKCYWKSYLVLGIFTLIEALRLSNMAMGKTTTGQIVNLLSNDVNKFDQVTVFLHFLWAGPLQAIAVTALLWMEIGISCLAGMAVLIILLPLQSCFGKLFSSLRSKTATFTDARIRTMNEVITGIRIIKMYAWEKSFSNLITNLRKKEISKILRSSCLRGMNLASFFSASKIIVFVTFTTYVLLGSVITASRVFVAVTLYGAVRLTVTLFFPSAIERVSEAIVSIRRIQTFLLLDEISQRNRQLPSDGKKMVHVQDFTAFWDKASETPTLQGLSFTVRPGELLAVVGPVGAGKSSLLSAVLGELAPSHGLVSVHGRIAYVSQQPWVFSGTLRSNILFGKKYEKERYEKVIKACALKKDLQLLEDGDLTVIGDRGTTLSGGQKARVNLARAVYQDADIYLLDDPLSAVDAEVSRHLFELCICQILHEKITILVTHQLQYLKAASQILILKDGKMVQKGTYTEFLKSGIDFGSLLKKDNEESEQPPVPGTPTLRNRTFSESSVWSQQSSRPSLKDGALESQDTENVPVTLSEENRSEGKVGFQAYKNYFRAGAHWIVFIFLILLNTAAQVAYVLQDWWLSYWANKQSMLNVTVNGGGNVTEKLDLNWYLGIYSGLTVATVLFGIARSLLVFYVLVNSSQTLHNKMFESILKAPVLFFDRNPIGRILNRFSKDIGHLDDLLPLTFLDFIQRWDLAVLSWLVSNS

SEQ ID NO: 41255 - protein, 517 aa, Homo sapiens
MAQPVHSLCSAFGLQCCLLFLLASWGAGATTFQEYQKTGELSTSDHIFPLTPGLVYSIPFDHIVLHSGQRPPELPKSTEIHEQKRHCNTTRHSKPTDKPTGNSKTIDHKSSTDNHEAPPTSEENSSNQGKDPMIRNQRSVDPADSTTTHKESAGKKHITPAPKSKINCRKSTTGKSTVTRKSDKTGRPLEKSMSTLDKTSTSSHKTTTSFHNSGNSQTKQKSTSFPEKITAASKTTYKTTGTPEESEKTEDSRTTVASDKLLTKTTKNIQETISANELTQSLAEPTEHGGRTANENNTPSPAEPTENRERTANENKKTICTKGKNTPVPEKPTENLGNTTLTTETIKAPVKSTENPEKTAAVTKTIKPSVKVTGDKSLTTTSSHLNKTEVTHQVPTGSFTLITSRTKLSSITSEATGNESHPYLNKDGSQKGIHAGQMGENDSFPAWAIVIVVLVAVILLLVFLGLIFLVSYMMRTRRTLTQNTQYNDAEDEGGPNSYPVYLMEQQNLGMGQIPSPR

SEQ ID NO: 41256 - protein, 235 aa, Homo sapiens
MTQVTEKSTEHPEKTTSTTEKTTRTPEKPTLYSEKTICTKGKNTPVPEKPTENLGNTTLTTETIKAPVKSTENPEKTAAVTKTIKPSVKVTGDKSLTTTSSHLNKTEVTHQVPTGSFTLITSRTKLSSITSEATGNESHPYLNKDGSQKGIHAGQMGENDSFPAWAIVIVVLVAVILLLVFLGLIFLVSYMMRTRRTLTQNTQYNDAEDEGGPNSYPVYLMEQQNLGMGQIPSPR

SEQ ID NO: 41257 - protein, 444 aa, Homo sapiens
MSGTKLEDSPPCRNWSSASELNETQEPFLNPTDYDDEEFLRYLWREYLHPKEYEWVLIAGYIIVFVVALIGNVLVCVAVWKNHHMRTVTNYFIVNLSLADVLVTITCLPATLVVDITETWFFGQSLCKVIPYLQTVSVSVSVLTLSCIALDRWYAICHPLMFKSTAKRARNSIVIIWIVSCIIMIPQAIVMECSTVFPGLANKTTLFTVCDERWGGEIYPKMYHICFFLVTYMAPLCLMVLAYLQIFRKLWCRQIPGTSSVVQRKWKPLQPVSQPRGPGQPTKSRMSAVAAEIKQIRARRKTARMLMIVLLVFAICYLPISILNVLKRVFGMFAHTEDRETVYAWFTFSHWLVYANSAANPIIYNFLSGKFREEFKAAFSCCCLGVHHRQEDRLTRGRTSTESRKSLTTQISNFDNISKLSEQVVLTSISTLPAANGAGPLQNW

SEQ ID NO: 41258 - protein, 962 aa, Homo sapiens
MHFILDPEDPGAPQASTEGKPKHRRLRGGVVMAAPPARPDHTRLLQICLLLGVLVEIRAEQILYSVFEEQEEGSVVGNIAKDLGLAPRELAERGVRIVSRGRTQLFALNPRSGTLVTAGRIDREELCDRSPNCVTNLEILLEDTVKILRVEVEIIDVNDNPPSFGTEQREIKVAENENPGARFPLPEAFDPDVGVNSLQGYQLNSNGYFSLDVQSGADGIKYPELVLERALDREEEAVHHLVLTAFDGGDPVRSGTARILIILVDTNDNAPVFTQPEYHVSVRENVPVGTRLLTVKATDPDEGANGDVTYSFRKVRDKISQLFQLNSLSGDITILGGLDYEDSGFYDIDVEAHDGPGLRARSKVLVTVLDENDNAPEVTVTSLTSSVQESSSPGTVIALFNVHDSDSGGNGLVTCSIPDNLPFTLEKTYGNYYRLLTHRTLDREEVSEYNITVTATDQGTPPLSTETHISLQVMDINDNPPTFPHASYSAYIPENNPRGASILSMTAQDPDSGDNARITYSLAEDTFQGAPLSSYVSINSNTGILYALCSFDYEQFRDLQLLMTASDSGDPPLSSNVSLSLFVLDQNDNVPEILYPTFPTDGSTGVELAPRSADSGYLVTKVVAVDRDSGQNAWLSYSLLKSSEPGLFAVGLHTGEVRTARALLDRDALKQRLVVVVQDHGQPPLSATVTLTVAVADSIPDVLADLGSLKPSADPDDSGLTLYLVVAVAAVSCVFLAFVTVLLALKLRRWHKSRLLHAEGSRLAGVPASHFVGVDGVRAFLQTYSHEVSLTADSRKSHLIFSQPSYADTLISRESCEKSEPLLITQDLLETKGDPNLQQAPPNTDWRFSQAQRPGTSGSQNGDDTGTWPNNQFDTEMLQAMILASASEAADGSSTLGGGAGTMGLSARYGPQFTLQHVPDYRQNVYIPGSNATLTNAAGKRDGKAPAGGNGNKKKSGKKEKK

SEQ ID NO: 41259 - protein, 851 aa, Homo sapiens
MHFILDPEDPGAPQASTEGKPKHRRLRGGVVMAAPPARPDHTRLLQICLLLGVLVEIRAEQILYSVFEEQEEGSVVGNIAKDLGLAPRELAERGVRIVSRGRTQLFALNPRSGTLVTAGRIDREELCDRSPNCVTNLEILLEDTVKILRVEVEIIDVNDNPPSFGTEQREIKVAENENPGARFPLPEAFDPDVGVNSLQGYQLNSNGYFSLDVQSGADGIKYPELVLERALDREEEAVHHLVLTAFDGGDPVRSGTARILIILVDTNDNAPVFTQPEYHVSVRENVPVGTRLLTVKATDPDEGANGDVTYSFRKVRDKISQLFQLNSLSGDITILGGLDYEDSGFYDIDVEAHDGPGLRARSKVLVTVLDENDNAPEVTVTSLTSSVQESSSPGTVIALFNVHDSDSGGNGLVTCSIPDNLPFTLEKTYGNYYRLLTHRTLDREEVSEYNITVTATDQGTPPLSTETHISLQVMDINDNPPTFPHASYSAYIPENNPRGASILSMTAQDPDSGDNARITYSLAEDTFQGAPLSSYVSINSNTGILYALCSFDYEQFRDLQLLMTASDSGDPPLSSNVSLSLFVLDQNDNVPEILYPTFPTDGSTGVELAPRSADSGYLVTKVVAVDRDSGQNAWLSYSLLKSSEPGLFAVGLHTGEVRTARALLDRDALKQRLVVVVQDHGQPPLSATVTLTVAVADSIPDVLADLGSLKPSADPDDSGLTLYLVVAVAAVSCVFLAFVTVLLALKLRRWHKSRLLHAEGSRLAGVPASHFVGVDGVRAFLQTYSHEVSLTADSRKSHLIFSQPSYADTLISRESCEKSEPLLITQDLLETKGDPNLQVSQSYNRSYHTEI

SEQ ID NO: 41260 - protein, 293 aa, Homo sapiens
MATNESVSIFSSASLAVEYVDSLLPENPLQEPFKNAWNYMLNNYTKFQIATWGSLIVHEALYFLFCLPGFLFQFIPYMKKYKIQKDKPETWENQWKCFKVLLFNHFCIQLPLICGTYYFTEYFNIPYDWERMPRWYFLLARCFGCAVIEDTWHYFLHRLLHHKRIYKYIHKVHHEFQAPFGMEAEYAHPLETLILGTGFFIGIVLLCDHVILLWAWVTIRLLETIDVHSGYDIPLNPLNLIPFYAGSRHHDFHHMNFIGNYASTFTWWDRIFGTDSQYNAYNEKRKKFEKKTE

SEQ ID NO: 41261 - protein, 162 aa, Homo sapiens
MPRWYFLLARCFGCAVIEDTWHYFLHRLLHHKRIYKYIHKVHHEFQAPFGMEAEYAHPLETLILGTGFFIGIVLLCDHVILLWAWVTIRLLETIDVHSGYDIPLNPLNLIPFYAGSRHHDFHHMNFIGNYASTFTWWDRIFGTDSQYNAYNEKRKKFEKKTE

SEQ ID NO: 41262 - protein, 518 aa, Homo sapiens
MAENHAQNKAKLISETRRRFEAEYVTDKSDKYDARDVERLQQDDNWVESYLSWRHNIVDETLKMLDESFQWRKEISVNDLNESSIPRWLLEIGVIYLHGYDKEGNKLFWIRVKYHVKDQKTILDKKKLIAFWLERYAKRENGKPVTVMFDLSETGINSIDMDFVRFIINCFKVYYPKYLSKIVIFDMPWLMNAAFKIVKTWLGPEAVSLLKFTSKNEVQDYVSVEYLPPHMGGTDPFKYSYPPLVDDDFQTPLCENGPITSEDETSSKEDIESDGKETLETISNEEQTPLLKKINPTESTSKAEENEKVDSKVKAFKKPLSVFKGPLLHISPAEELYFGSTESGEKKTLIVLTNVTKNIVAFKVRTTAPEKYRVKPSNSSCDPGASVDIVVSPHGGLTVSAQDRFLIMAAEMEQSSGTGPAELTQFWKEVPRNKVMEHRLRCHTVESSKPNTLTLKDNAFNMSDKTSEDICLQLSRLLESNRKLEDQVQRCIWFQQLLLSLTMLLLAFVTSFFYLLYS

SEQ ID NO: 41263 - protein, 455 aa, Homo sapiens
MLDESFQWRKEISVNDLNESSIPRWLLEIGVIYLHGYDKEGNKLFWIRVKYHVKDQKTILDKKKLIAFWLERYAKRENGKPVTVMFDLSETGINSIDMDFVRFIINCFKVYYPKYLSKIVIFDMPWLMNAAFKIVKTWLGPEAVSLLKFTSKNEVQDYVSVEYLPPHMGGTDPFKYSYPPLVDDDFQTPLCENGPITSEDETSSKEDIESDGKETLETISNEEQTPLLKKINPTESTSKAEENEKVDSKVKAFKKPLSVFKGPLLHISPAEELYFGSTESGEKKTLIVLTNVTKNIVAFKVRTTAPEKYRVKPSNSSCDPGASVDIVVSPHGGLTVSAQDRFLIMAAEMEQSSGTGPAELTQFWKEVPRNKVMEHRLRCHTVESSKPNTLTLKDNAFNMSDKTSEDICLQLSRLLESNRKLEDQVQRCIWFQQLLLSLTMLLLAFVTSFFYLLYS

SEQ ID NO: 41264 - protein, 254 aa, Homo sapiens
MAAYKLVLIRHGESAWNLENRFSGWYDADLSPAGHEEAKRGGQALRDAGYEFDICFTSVQKRAIRTLWTVLDAIDQMWLPVVRTWRLNERHYGGLTGLNKAETAAKHGEAQVKIWRRSYDVPPPPMEPDHPFYSNISKDRRYADLTEDQLPSCESLKDTIARALPFWNEEIVPQIKEGKRVLIAAHGNSLRGIVKHLEGLSEEAIMELNLPTGIPIVYELDKNLKPIKPMQFLGDEETVRKAMEAVAAQGKAKK

SEQ ID NO: 41265 - protein, 527 aa, Homo sapiens
MAQTLQMEIPNFGNSILECLNEQRLQGLYCDVSVVVKGHAFKAHRAVLAASSSYFRDLFNNSRSAVVELPAAVQPQSFQQILSFCYTGRLSMNVGDQFLLMYTAGFLQIQEIMEKGTEFFLKVSSPSCDSQGLHAEEAPSSEPQSPVAQTSGWPACSTPLPLVSRVKTEQQESDSVQCMPVAKRLWDSGQKEAGGGGNGSRKMAKFSTPDLAANRPHQPPPPQQAPVVAAAQPAVAAGAGQPAGGVAAAGGVVSGPSTSERTSPGTSSAYTSDSPGSYHNEEDEEEDGGEEGMDEQYRQICNMYTMYSMMNVGQTAEKVEALPEQVAPESRNRIRVRQDLASLPAELINQIGNRCHPKLYDEGDPSEKLELVTGTNVYITRAQLMNCHVSAGTRHKVLLRRLLASFFDRNTLANSCGTGIRSSTNDPRRKPLDSRVLHAVKYYCQNFAPNFKESEMNAIAADMCTNARRVVRKSWMPKVKVLKAEDDAYTTFISETGKIEPDMMGVEHGFETASHEGEAGPSAEALQ

SEQ ID NO: 41266 - protein, 359 aa, Homo sapiens
MRTADREARPGLPSLLLLLLAGAGLSAASPPAAPRFNVSLDSVPELRWLPVLRHYDLDLVRAAMAQVIGDRVPKWVHVLIGKVVLELERFLPQPFTGEIRGMCDFMNLSLADCLLVNLAYESSVFCTSIVAQDSRGHIYHGRNLDYPFGNVLRKLTVDVQFLKNGQIAFTGTTFIGYVGLWTGQSPHKFTVSGDERDKGWWWENAIAALFRRHIPVSWLIRATLSESENFEAAVGKLAKTPLIADVYYIVGGTSPREGVVITRNRDGPADIWPLDPLNGAWFRVETNYDHWKPAPKEDDRRTSAIKALNATGQANLSLEALFQILSVVPVYNNFTIYTTVMSAGSPDKYMTRIRNPSRK

SEQ ID NO: 41267 - protein, 323 aa, Homo sapiens
MRTADREARPGLPSLLLLLLAGAGLSAASPPAAPRFNVSLDSVPELRWLPVLRHYDLDLVRAAMAQVIGDRVPKWVHVLIGKVVLELERFLPQPFTGEIRGMCDFMNLSLADCLLVNLAYESSVFCTSIVAQDSRGHIYHGRNLDYPFGNVLRKLTVDVQFLKNGQIAFTGTTFIGYVGLWTGQSPHKFTVSGDERDKGWWWENAIAALFRRHIPVSWLIRATLSESENFEAAVGKLAKTPLIADVYYIVGGTSPREGVVITRNRDGPADIWPLDPLNGAWFRVETNYDHWKPAPKEDDRRTSAIKALNATGQANLSLEALFQ

SEQ ID NO: 41268 - protein, 199 aa, Homo sapiens
MRTADREARPGLPSLLLLLLAGAGLSAASPPAAPRFNVSLDSVPELRWLPVLRHYDLDLVRAAMAQVIGDRVPKWVHVLIGKVVLELERFLPQPFTGEIRGMCDFMNLSLADCLLVNLAYESSVFCTSIVAQDSRGHIYHGRNLDYPFGNVLRKLTVDVQFLKNGQIAFTGTTFIGYVGLWTGQSPHKFTVSGDERDPE

SEQ ID NO: 41269 - protein, 600 aa, Homo sapiens
MADANKAEVPGATGGDSPHLQPAEPPGEPRREPHPAEAEKQQPQHSSSSNGVKMENDESAKEEKSDLKEKSTGSKKANRFHPYSKDKNSGAGEKKGPNRNRVFISNIPYDMKWQAIKDLMREKVGEVTYVELFKDAEGKSRGCGVVEFKDEEFVKKALETMNKYDLSGRPLNIKEDPDGENARRALQRTGGSFPGGHVPDMGSGLMNLPPSILNNPNIPPEVISNLQAGRLGSTIFVANLDFKVGWKKLKEVFSIAGTVKRADIKEDKDGKSRGMGTVTFEQAIEAVQAISMFNGQFLFDRPMHVKMDDKSVPHEEYRSHDGKTPQLPRGLGGIGMGLGPGGQPISASQLNIGGVMGNLGPGGMGMDGPGFGGMNRIGGGIGFGGLEAMNSMGGFGGVGRMGELYRGAMTSSMERDFGRGDIGINQGFGDSFGRLGSAMIGGFAGRIGSSNMGPVGSGISGGMGSMNSVTGGMGMGLDRMSSSFDRMGPGIGAILERSIDMDRGFLSGPMGSGMRERIGSKGNQIFVRNLPFDLTWQKLKEKFSQCGHVMFAEIKMENGKSKGCGTVRFDSPESAEKACRIMNGIKISGREIDVRLDRNA

SEQ ID NO: 41270 - protein, 576 aa, Homo sapiens
MADANKAEVPGATGGDSPHLQPAEPPGEPRREPHPAEAEKQQPQHSSSSNGVKMENDESAKEEKSDLKEKSTGSKKANRFHPYSKDKNSGAGEKKGPNRNRVFISNIPYDMKWQAIKDLMREKVGEVTYVELFKDAEGKSRGCGVVEFKDEEFVKKALETMNKYDLSGRPLNIKEDPDGENARRALQRTGGSFPGGHVPDMGSGLMNLPPSILNNPNIPPEVISNLQAGRLGSTIFVANLDFKVGWKKLKEVFSIAGTVKRADIKEDKDGKSRGMGTVTFEQAIEAVQAISMFNGQFLFDRPMHVKMDDKSVPHEEYRSHDGKTPQLPRGLGGIGMGLGPGGQPISASQLNIGGVMGNLGPGGMGMDGPGFGGMNRIGGGIGFGGLEAMNSMGGFGGVGRMGELYRGAMTSSMERDFGRGDIGINQGFGDSFGRLGGGMGSMNSVTGGMGMGLDRMSSSFDRMGPGIGAILERSIDMDRGFLSGPMGSGMRERIGSKGNQIFVRNLPFDLTWQKLKEKFSQCGHVMFAEIKMENGKSKGCGTVRFDSPESAEKACRIMNGIKISGREIDVRLDRNA

SEQ ID NO: 41271 - protein, 188 aa, Homo sapiens
MNSMGGFGGVGRMGELYRGAMTSSMERDFGRGDIGINQGFGDSFGRLGGGMGSMNSVTGGMGMGLDRMSSSFDRMGPGIGAILERSIDMDRGFLSGPMGSGMRERIGSKGNQIFVRNLPFDLTWQKLKEKFSQCGHVMFAEIKMENGKSKGCGTVRFDSPESAEKACRIMNGIKISGREIDVRLDRNA

SEQ ID NO: 41272 - protein, 128 aa, Homo sapiens
MADANKAEVPGATGGDSPHLQPAEPPGEPRREPHPAEAEKQQPQHSSSSNGVKMENDESAKEEKSDLKEKSTGSKKANRFHPYSKDKNSGAGEKKGPNRNRVFISNIPYDMKWQAIKDLMREKGLWCG

SEQ ID NO: 41273 - protein, 344 aa, Homo sapiens
MAAIYGGVEGGGTRSEVLLVSEDGKILAEADGLSTNHWLIGTDKCVERINEMVNRAKRKAGVDPLVPLRSLGLSLSGGDQEDAGRILIEELRDRFPYLSESYLITTDAAGSIATATPDGGVVLISGTGSNCRLINPDGSESGCGGWGHMMGDEGSAYWIAHQAVKIVFDSIDNLEAAPHDIGYVKQAMFHYFQVPDRLGILTHLYRDFDKCRFAGFCRKIAEGAQQGDPLSRYIFRKAGEMLGRHIVAVLPEIDPVLFQGKIGLPILCVGSVWKSWELLKEGFLLALTQGREIQAQNFFSSFTLMKLRHSSALGGASLGARHIGHLLPMDYSANAIAFYSYTFS

SEQ ID NO: 41274 - protein, 390 aa, Homo sapiens
MRTRTGSQLAAREVTGSGAVPRQLEGRRCQAGRDANGGTSSDGSSSMAAIYGGVEGGGTRSEVLLVSEDGKILAEADGLSTNHWLIGTDKCVERINEMVNRAKRKAGVDPLVPLRSLGLSLSGGDQEDAGRILIEELRDRFPYLSESYLITTDAAGSIATATPDGGVVLISGTGSNCRLINPDGSESGCGGWGHMMGDEGSAYWIAHQAVKIVFDSIDNLEAAPHDIGYVKQAMFHYFQVPDRLGILTHLYRDFDKCRFAGFCRKIAEGAQQGDPLSRYIFRKAGEMLGRHIVAVLPEIDPVLFQGKIGLPILCVGSVWKSWELLKEGFLLALTQGREIQAQNFFSSFTLMKLRHSSALGGASLGARHIGHLLPMDYSANAIAFYSYTFS

SEQ ID NO: 41275 - protein, 226 aa, Homo sapiens
MLLRLVSNSWPQVILPPRPPKVLGLQAPRRARKRAEGTASSNVFSMFDQSQIQEFKESLALSPRLERNGMISAHCNLCLTGSSNSPASASQAFTIMDQNRDGFIDKEDLRDTFAALGRINVKNEELEAMVKEAPGPINFTVFLTMFGEKLKGTDPEETILHAFKVFDTEGKGFVKADVIKEKLMTQADRFSEEEVKQMFAAFPPDVCGNLDYRNLCYVITHGEEKD

SEQ ID NO: 41276 - protein, 477 aa, Homo sapiens
MMEKNTSEGPACSPEETASESAKVPTAEPPGEVAVSESTREEQVPKPQAPAPQAPTASTATKPAPPSEDVPSAPLLLTLDDVSSSSVTVSWEPPERLGRLGLQGYVLELCREGASEWVPVSARPMMVTQQTVRNLALGDKFLLRVSAVSSAGAGPPAMLDQPIHIRENIEAPKIRVPRHLRQTYIRQVGETVNLQIPFQGKPKPQATWTHNGHALDSQRVSMRTGDQDSILFIRSAQRSDSGRYELTVRVEDLEAKAVIDILVIEKPGPPSSIRLLDVWGCNAALQWTPPQDTGNTELLGYMVQKADKKTGQWFTVLERYHPTTCTISDLIIGNSYSFRVFSENLCGLSTSATVTKELAHIQKADIAAKPKGFIERDFSEAPSFTQPLADHTSTPGYSTQLFCSVRASPKPKIIWMKNKMEIQGNPKYRALSEQGVCTLEIRKPSPFDSGVYTCKAINVLGEASVDCRLEVKASAAH

SEQ ID NO: 41277 - protein, 1914 aa, Homo sapiens
MGDVKLVASSHISKTSLSVDPSRVDSMPLTEAPAFILPPRNLCIKEGATAKFEGRVRGYPEPQVTWHRNGQPITSGGRFLLDCGIRGTFSLVIHAVHEEDRGKYTCEATNGSGARQVTVELTVEGSFAKQLGQPVVSKTLGDRFSAPAVETRPSIWGECPPKFATKLGRVVVKEGQMGRFSCKITGRPQPQVTWLKGNVPLQPSARVSVSEKNGMQVLEIHGVNQDDVGVYTCLVVNGSGKASMSAELSIQGLDSANRSFVRETKATNSDVRKEVTNVISKESKLDSLEAAAKSKNCSSPQRGGSPPWAANSQPQPPRESKLESCKDSPRTAPQTPVLQKTSSSITLQAARVQPEPRAPGLGVLSPSGEERKRPAPPRPATFPTRQPGLGSQDVVSKAANRRIPMEGQRDSAFPKFESKPQSQEVKENQTVKFRCEVSGIPKPEVAWFLEGTPVRRQEGSIEVYEDAGSHYLCLLKARTRDSGTYSCTASNAQGQLSCSWTLQVERLAVMEVAPSFSSVLKDCAVIEGQDFVLQCSVRGTPVPRITWLLNGQPIQYARSTCEAGVAELHIQDALPEDHGTYTCLAENALGQVSCSAWVTVHEKKSSRKSEYLLPVAPSKPTAPIFLQGLSDLKVMDGSQVTMTVQVSGNPPPEVIWLHNGNEIQESEDFHFEQRGTQHSLCIQEVFPEDTGTYTCEAWNSAGEVRTQAVLTVQEPHDGTQPWFISKPRSVTASLGQSVLISCAIAGDPFPTVHWLRDGKALCKDTGHFEVLQNEDVFTLVLKKVQPWHAGQYEILLKNRVGECSCQVSLMLQNSSARALPRGREPASCEDLCGGGVGADGGGSDRYGSLRPGWPARGQGWLEEEDGEDVRGVLKRRVETRQHTEEAIRQQEVEQLDFRDLLGKKVSTKTLSEDDLKEIPAEQMDFRANLQRQVKPKTVSEEERKVHSPQQVDFRSVLAKKGTSKTPVPEKVPPPKPATPDFRSVLGGKKKLPAENGSSSAETLNAKAVESSKPLSNAQPSGPLKPVGNAKPAETLKPMGNAKPAETLKPMGNAKPDENLKSASKEELKKDVKNDVNCKRGHAGTTDNEKRSESQGTAPAFKQKLQDVHVAEGKKLLLQCQVSSDPPATIIWTLNGKTLKTTKFIILSQEGSLCSVSIEKALPEDRGLYKCVAKNDAGQAECSCQVTVDDAPASENTKAPEMKSRRPKSSLPPVLGTESDATVKKKPAPKTPPKAAMPPQIIQFPEDQKVRAGESVELFGKVTGTQPITCTWMKFRKQIQESEHMKVENSENGSKLTILAARQEHCGCYTLLVENKLGSRQAQVNLTVVDKPDPPAGTPCASDIRSSSLTLSWYGSSYDGGSAVQSYSIEIWDSANKTWKELATCRSTSFNVQDLLPDHEYKFRVRAINVYGTSEPSQESELTTVGEKPEEPKDEVEVSDDDEKEPEVDYRTVTINTEQKVSDFYDIEERLGSGKFGQVFRLVEKKTRKVWAGKFFKAYSAKEKENIRQEISIMNCLHHPKLVQCVDAFEEKANIVMVLEIVSGGELFERIIDEDFELTERECIKYMRQISEGVEYIHKQGIVHLDLKPENIMCVNKTGTRIKLIDFGLARRLENAGSLKVLFGTPEFVAPEVINYEPIGYATDMWSIGVICYILVSGLSPFMGDNDNETLANVTSATWDFDDEAFDEISDDAKDFISNLLKKDMKNRLDCTQCLQHPWLMKDTKNMEAKKLSKDRMKKYMARRKWQKTGNAVRAIGRLSSMAMISGLSGRKSSTGSPTSPLNAEKLESEEDVSQAFLEAVAEEKPHVKPYFSKTIRDLEVVEGSAARFDCKIEGYPDPEVVWFKDDQSIRESRHFQIDYDEDGNCSLIISDVCGDDDAKYTCKAVNSLGEATCTAELIVETMEEGEGEGEEEEE

SEQ ID NO: 41278 - protein, 1845 aa, Homo sapiens
MGDVKLVASSHISKTSLSVDPSRVDSMPLTEAPAFILPPRNLCIKEGATAKFEGRVRGYPEPQVTWHRNGQPITSGGRFLLDCGIRGTFSLVIHAVHEEDRGKYTCEATNGSGARQVTVELTVEGSFAKQLGQPVVSKTLGDRFSAPAVETRPSIWGECPPKFATKLGRVVVKEGQMGRFSCKITGRPQPQVTWLKGNVPLQPSARVSVSEKNGMQVLEIHGVNQDDVGVYTCLVVNGSGKASMSAELSIQGLDSANRSFVRETKATNSDVRKEVTNVISKESKLDSLEAAAKSKNCSSPQRGGSPPWAANSQPQPPRESKLESCKDSPRTAPQTPVLQKTSSSITLQAARVQPEPRAPGLGVLSPSGEERKRPAPPRPATFPTRQPGLGSQDVVSKAANRRIPMEGQRDSAFPKFESKPQSQEVKENQTVKFRCEGLAVMEVAPSFSSVLKDCAVIEGQDFVLQCSVRGTPVPRITWLLNGQPIQYARSTCEAGVAELHIQDALPEDHGTYTCLAENALGQVSCSAWVTVHEKKSSRKSEYLLPVAPSKPTAPIFLQGLSDLKVMDGSQVTMTVQVSGNPPPEVIWLHNGNEIQESEDFHFEQRGTQHSLCIQEVFPEDTGTYTCEAWNSAGEVRTQAVLTVQEPHDGTQPWFISKPRSVTASLGQSVLISCAIAGDPFPTVHWLRDGKALCKDTGHFEVLQNEDVFTLVLKKVQPWHAGQYEILLKNRVGECSCQVSLMLQNSSARALPRGREPASCEDLCGGGVGADGGGSDRYGSLRPGWPARGQGWLEEEDGEDVRGVLKRRVETRQHTEEAIRQQEVEQLDFRDLLGKKVSTKTLSEDDLKEIPAEQMDFRANLQRQVKPKTVSEEERKVHSPQQVDFRSVLAKKGTSKTPVPEKVPPPKPATPDFRSVLGGKKKLPAENGSSSAETLNAKAVESSKPLSNAQPSGPLKPVGNAKPAETLKPMGNAKPAETLKPMGNAKPDENLKSASKEELKKDVKNDVNCKRGHAGTTDNEKRSESQGTAPAFKQKLQDVHVAEGKKLLLQCQVSSDPPATIIWTLNGKTLKTTKFIILSQEGSLCSVSIEKALPEDRGLYKCVAKNDAGQAECSCQVTVDDAPASENTKAPEMKSRRPKSSLPPVLGTESDATVKKKPAPKTPPKAAMPPQIIQFPEDQKVRAGESVELFGKVTGTQPITCTWMKFRKQIQESEHMKVENSENGSKLTILAARQEHCGCYTLLVENKLGSRQAQVNLTVVDKPDPPAGTPCASDIRSSSLTLSWYGSSYDGGSAVQSYSIEIWDSANKTWKELATCRSTSFNVQDLLPDHEYKFRVRAINVYGTSEPSQESELTTVGEKPEEPKDEVEVSDDDEKEPEVDYRTVTINTEQKVSDFYDIEERLGSGKFGQVFRLVEKKTRKVWAGKFFKAYSAKEKENIRQEISIMNCLHHPKLVQCVDAFEEKANIVMVLEIVSGGELFERIIDEDFELTERECIKYMRQISEGVEYIHKQGIVHLDLKPENIMCVNKTGTRIKLIDFGLARRLENAGSLKVLFGTPEFVAPEVINYEPIGYATDMWSIGVICYILVSGLSPFMGDNDNETLANVTSATWDFDDEAFDEISDDAKDFISNLLKKDMKNRLDCTQCLQHPWLMKDTKNMEAKKLSKDRMKKYMARRKWQKTGNAVRAIGRLSSMAMISGLSGRKSSTGSPTSPLNAEKLESEEDVSQAFLEAVAEEKPHVKPYFSKTIRDLEVVEGSAARFDCKIEGYPDPEVVWFKDDQSIRESRHFQIDYDEDGNCSLIISDVCGDDDAKYTCKAVNSLGEATCTAELIVETMEEGEGEGEEEEE

SEQ ID NO: 41279 - protein, 1863 aa, Homo sapiens
MGDVKLVASSHISKTSLSVDPSRVDSMPLTEAPAFILPPRNLCIKEGATAKFEGRVRGYPEPQVTWHRNGQPITSGGRFLLDCGIRGTFSLVIHAVHEEDRGKYTCEATNGSGARQVTVELTVEGSFAKQLGQPVVSKTLGDRFSAPAVETRPSIWGECPPKFATKLGRVVVKEGQMGRFSCKITGRPQPQVTWLKGNVPLQPSARVSVSEKNGMQVLEIHGVNQDDVGVYTCLVVNGSGKASMSAELSIQGLDSANRSFVRETKATNSDVRKEVTNVISKESKLDSLEAAAKSKNCSSPQRGGSPPWAANSQPQPPRESKLESCKDSPRTAPQTPVLQKTSSSITLQAARVQPEPRAPGLGVLSPSGEERKRPAPPRPATFPTRQPGLGSQDVVSKAANRRIPMEGQRDSAFPKFESKPQSQEVKENQTVKFRCEVSGIPKPEVAWFLEGTPVRRQEGSIEVYEDAGSHYLCLLKARTRDSGTYSCTASNAQGQLSCSWTLQVERLAVMEVAPSFSSVLKDCAVIEGQDFVLQCSVRGTPVPRITWLLNGQPIQYARSTCEAGVAELHIQDALPEDHGTYTCLAENALGQVSCSAWVTVHEKKSSRKSEYLLPVAPSKPTAPIFLQGLSDLKVMDGSQVTMTVQVSGNPPPEVIWLHNGNEIQESEDFHFEQRGTQHSLCIQEVFPEDTGTYTCEAWNSAGEVRTQAVLTVQEPHDGTQPWFISKPRSVTASLGQSVLISCAIAGDPFPTVHWLRDGKALCKDTGHFEVLQNEDVFTLVLKKVQPWHAGQYEILLKNRVGECSCQVSLMLQNSSARALPRGREPASCEDLCGGGVGADGGGSDRYGSLRPGWPARGQGWLEEEDGEDVRGVLKRRVETRQHTEEAIRQQEVEQLDFRDLLGKKVSTKTLSEDDLKEIPAEQMDFRANLQRQVKPKTVSEEERKVHSPQQVDFRSVLAKKGTSKTPVPEKVPPPKPATPDFRSVLGGKKKLPAENGSSSAETLNAKAVESSKPLSNAQPSGPLKPVGNAKPAETLKPMGNAKPAETLKPMGNAKPDENLKSASKEELKKDVKNDVNCKRGHAGTTDNEKRSESQGTAPAFKQKLQDVHVAEGKKLLLQCQVSSDPPATIIWTLNGKTLKTTKFIILSQEGSLCSVSIEKALPEDRGLYKCVAKNDAGQAECSCQVTVDDAPASENTKAPEMKSRRPKSSLPPVLGTESDATVKKKPAPKTPPKAAMPPQIIQFPEDQKVRAGESVELFGKVTGTQPITCTWMKFRKQIQESEHMKVENSENGSKLTILAARQEHCGCYTLLVENKLGSRQAQVNLTVVDKPDPPAGTPCASDIRSSSLTLSWYGSSYDGGSAVQSYSIEIWDSANKTWKELATCRSTSFNVQDLLPDHEYKFRVRAINVYGTSEPSQESELTTVGEKPEEPKDEVEVSDDDEKEPEVDYRTVTINTEQKVSDFYDIEERLGSGKFGQVFRLVEKKTRKVWAGKFFKAYSAKEKENIRQEISIMNCLHHPKLVQCVDAFEEKANIVMVLEIVSGGELFERIIDEDFELTERECIKYMRQISEGVEYIHKQGIVHLDLKPENIMCVNKTGTRIKLIDFGLARRLENAGSLKVLFGTPEFVAPEVINYEPIGYATDMWSIGVICYILNRLDCTQCLQHPWLMKDTKNMEAKKLSKDRMKKYMARRKWQKTGNAVRAIGRLSSMAMISGLSGRKSSTGSPTSPLNAEKLESEEDVSQAFLEAVAEEKPHVKPYFSKTIRDLEVVEGSAARFDCKIEGYPDPEVVWFKDDQSIRESRHFQIDYDEDGNCSLIISDVCGDDDAKYTCKAVNSLGEATCTAELIVETMEEGEGEGEEEEE

SEQ ID NO: 41280 - protein, 1794 aa, Homo sapiens
MGDVKLVASSHISKTSLSVDPSRVDSMPLTEAPAFILPPRNLCIKEGATAKFEGRVRGYPEPQVTWHRNGQPITSGGRFLLDCGIRGTFSLVIHAVHEEDRGKYTCEATNGSGARQVTVELTVEGSFAKQLGQPVVSKTLGDRFSAPAVETRPSIWGECPPKFATKLGRVVVKEGQMGRFSCKITGRPQPQVTWLKGNVPLQPSARVSVSEKNGMQVLEIHGVNQDDVGVYTCLVVNGSGKASMSAELSIQGLDSANRSFVRETKATNSDVRKEVTNVISKESKLDSLEAAAKSKNCSSPQRGGSPPWAANSQPQPPRESKLESCKDSPRTAPQTPVLQKTSSSITLQAARVQPEPRAPGLGVLSPSGEERKRPAPPRPATFPTRQPGLGSQDVVSKAANRRIPMEGQRDSAFPKFESKPQSQEVKENQTVKFRCEGLAVMEVAPSFSSVLKDCAVIEGQDFVLQCSVRGTPVPRITWLLNGQPIQYARSTCEAGVAELHIQDALPEDHGTYTCLAENALGQVSCSAWVTVHEKKSSRKSEYLLPVAPSKPTAPIFLQGLSDLKVMDGSQVTMTVQVSGNPPPEVIWLHNGNEIQESEDFHFEQRGTQHSLCIQEVFPEDTGTYTCEAWNSAGEVRTQAVLTVQEPHDGTQPWFISKPRSVTASLGQSVLISCAIAGDPFPTVHWLRDGKALCKDTGHFEVLQNEDVFTLVLKKVQPWHAGQYEILLKNRVGECSCQVSLMLQNSSARALPRGREPASCEDLCGGGVGADGGGSDRYGSLRPGWPARGQGWLEEEDGEDVRGVLKRRVETRQHTEEAIRQQEVEQLDFRDLLGKKVSTKTLSEDDLKEIPAEQMDFRANLQRQVKPKTVSEEERKVHSPQQVDFRSVLAKKGTSKTPVPEKVPPPKPATPDFRSVLGGKKKLPAENGSSSAETLNAKAVESSKPLSNAQPSGPLKPVGNAKPAETLKPMGNAKPAETLKPMGNAKPDENLKSASKEELKKDVKNDVNCKRGHAGTTDNEKRSESQGTAPAFKQKLQDVHVAEGKKLLLQCQVSSDPPATIIWTLNGKTLKTTKFIILSQEGSLCSVSIEKALPEDRGLYKCVAKNDAGQAECSCQVTVDDAPASENTKAPEMKSRRPKSSLPPVLGTESDATVKKKPAPKTPPKAAMPPQIIQFPEDQKVRAGESVELFGKVTGTQPITCTWMKFRKQIQESEHMKVENSENGSKLTILAARQEHCGCYTLLVENKLGSRQAQVNLTVVDKPDPPAGTPCASDIRSSSLTLSWYGSSYDGGSAVQSYSIEIWDSANKTWKELATCRSTSFNVQDLLPDHEYKFRVRAINVYGTSEPSQESELTTVGEKPEEPKDEVEVSDDDEKEPEVDYRTVTINTEQKVSDFYDIEERLGSGKFGQVFRLVEKKTRKVWAGKFFKAYSAKEKENIRQEISIMNCLHHPKLVQCVDAFEEKANIVMVLEIVSGGELFERIIDEDFELTERECIKYMRQISEGVEYIHKQGIVHLDLKPENIMCVNKTGTRIKLIDFGLARRLENAGSLKVLFGTPEFVAPEVINYEPIGYATDMWSIGVICYILNRLDCTQCLQHPWLMKDTKNMEAKKLSKDRMKKYMARRKWQKTGNAVRAIGRLSSMAMISGLSGRKSSTGSPTSPLNAEKLESEEDVSQAFLEAVAEEKPHVKPYFSKTIRDLEVVEGSAARFDCKIEGYPDPEVVWFKDDQSIRESRHFQIDYDEDGNCSLIISDVCGDDDAKYTCKAVNSLGEATCTAELIVETMEEGEGEGEEEEE

SEQ ID NO: 41281 - protein, 1841 aa, Homo sapiens
MGDVKLVASSHISKTSLSVDPSRVDSMPLTEAPAFILPPRNLCIKEGATAKFEGRVRGYPEPQVTWHRNGQPITSGGRFLLDCGIRGTFSLVIHAVHEEDRGKYTCEATNGSGARQVTVELTVEGSFAKQLGQPVVSKTLGDRFSAPAVETRPSIWGECPPKFATKLGRVVVKEGQMGRFSCKITGRPQPQVTWLKGNVPLQPSARVSVSEKNGMQVLEIHGVNQDDVGVYTCLVVNGSGKASMSAELSIQGLDSANRSFVRETKATNSDVRKEVTNVISKESKLDSLEAAAKSKNCSSPQRGGSPPWAANSQPQPPRESKLESCKDSPRTAPQTPVLQKTSSSITLQAARVQPEPRAPGLGVLSPSGEERKRPAPPRPATFPTRQPGLGSQDVVSKAANRRIPMEGQRDSAFPKFESKPQSQEVKENQTVKFRCEVSGIPKPEVAWFLEGTPVRRQEGSIEVYEDAGSHYLCLLKARTRDSGTYSCTASNAQGQLSCSWTLQVERLAVMEVAPSFSSVLKDCAVIEGQDFVLQCSVRGTPVPRITWLLNGQPIQYARSTCEAGVAELHIQDALPEDHGTYTCLAENALGQVSCSAWVTVHEKKSSRKSEYLLPVAPSKPTAPIFLQGLSDLKVMDGSQVTMTVQVSGNPPPEVIWLHNGNEIQESEDFHFEQRGTQHSLCIQEVFPEDTGTYTCEAWNSAGEVRTQAVLTVQEPHDGTQPWFISKPRSVTASLGQSVLISCAIAGDPFPTVHWLRDGKALCKDTGHFEVLQNEDVFTLVLKKVQPWHAGQYEILLKNRVGECSCQVSLMLQNSSARALPRGREPASCEDLCGGGVGADGGGSDRYGSLRPGWPARGQGWLEEEDGEDVRGVLKRRVETRQHTEEAIRQQEVEQLDFRDLLGKKVSTKTLSEDDLKEIPAEQMDFRANLQRQVKPKTVSEEERKVHSPQQVDFRSVLAKKGTSKTPVPEKVPPPKPATPDFRSVLGGKKKLPAENGSSSAETLNAKAVESSKPLSNAQPSGPLKPVGNAKPAETLKPMGNAKPAETLKPMGNAKPDENLKSASKEELKKDVKNDVNCKRGHAGTTDNEKRSESQGTAPAFKQKLQDVHVAEGKKLLLQCQVSSDPPATIIWTLNGKTLKTTKFIILSQEGSLCSVSIEKALPEDRGLYKCVAKNDAGQAECSCQVTVDDAPASENTKAPEMKSRRPKSSLPPVLGTESDATVKKKPAPKTPPKAAMPPQIIQFPEDQKVRAGESVELFGKVTGTQPITCTWMKFRKQIQESEHMKVENSENGSKLTILAARQEHCGCYTLLVENKLGSRQAQVNLTVVDKPDPPAGTPCASDIRSSSLTLSWYGSSYDGGSAVQSYSIEIWDSANKTWKELATCRSTSFNVQDLLPDHEYKFRVRAINVYGTSEPSQESELTTVGEKPEEPKDEVEVSDDDEKEPEVDYRTVTINTEQKVSDFYDIEERLGSLFERIIDEDFELTERECIKYMRQISEGVEYIHKQGIVHLDLKPENIMCVNKTGTRIKLIDFGLARRLENAGSLKVLFGTPEFVAPEVINYEPIGYATDMWSIGVICYILVSGLSPFMGDNDNETLANVTSATWDFDDEAFDEISDDAKDFISNLLKKDMKNRLDCTQCLQHPWLMKDTKNMEAKKLSKDRMKKYMARRKWQKTGNAVRAIGRLSSMAMISGLSGRKSSTGSPTSPLNAEKLESEEDVSQAFLEAVAEEKPHVKPYFSKTIRDLEVVEGSAARFDCKIEGYPDPEVVWFKDDQSIRESRHFQIDYDEDGNCSLIISDVCGDDDAKYTCKAVNSLGEATCTAELIVETMEEGEGEGEEEEE

SEQ ID NO: 41282 - protein, 1913 aa, Homo sapiens
MGDVKLVASSHISKTSLSVDPSRVDSMPLTEAPAFILPPRNLCIKEGATAKFEGRVRGYPEPQVTWHRNGQPITSGGRFLLDCGIRGTFSLVIHAVHEEDRGKYTCEATNGSGARQVTVELTVEGSFAKQLGQPVVSKTLGDRFSAPAVETRPSIWGECPPKFATKLGRVVVKEGQMGRFSCKITGRPQPQVTWLKGNVPLQPSARVSVSEKNGMQVLEIHGVNQDDVGVYTCLVVNGSGKASMSAELSIQGLDSANRSFVRETKATNSDVRKEVTNVISKESKLDSLEAAAKSKNCSSPQRGGSPPWAANSQPQPPRESKLESCKDSPRTAPQTPVLQKTSSSITLQAARVQPEPRAPGLGVLSPSGEERKRPAPPRPATFPTRQPGLGSQDVVSKAANRRIPMEGQRDSAFPKFESKPQSQEVKENQTVKFRCEVSGIPKPEVAWFLEGTPVRRQEGSIEVYEDAGSHYLCLLKARTRDSGTYSCTASNAQGQLSCSWTLQVERLAVMEVAPSFSSVLKDCAVIEGQDFVLQCSVRGTPVPRITWLLNGQPIQYARSTCEAGVAELHIQDALPEDHGTYTCLAENALGQVSCSAWVTVHEKKSSRKSEYLLPVAPSKPTAPIFLQGLSDLKVMDGSQVTMTVQVSGNPPPEVIWLHNGNEIQESEDFHFEQRGTQHSLCIQEVFPEDTGTYTCEAWNSAGEVRTQAVLTVQEPHDGTQPWFISKPRSVTASLGQSVLISCAIAGDPFPTVHWLRDGKALCKDTGHFEVLQNEDVFTLVLKKVQPWHAGQYEILLKNRVGECSCQVSLMLQNSSARALPRGREPASCEDLCGGGVGADGGGSDRYGSLRPGWPARGQGWLEEEDGEDVRGVLKRRVETRQHTEEAIRQQEVEQLDFRDLLGKKVSTKTLSEDDLKEIPAEQMDFRANLQRQVKPKTVSEEERKVHSPQQVDFRSVLAKKGTSKTPVPEKVPPPKPATPDFRSVLGGKKKLPAENGSSSAETLNAKAVESSKPLSNAQPSGPLKPVGNAKPAETLKPMGNAKPAETLKPMGNAKPDENLKSASKEELKKDVKNDVNCKRGHAGTTDNEKRSESQGTAPAFKQKLQDVHVAEGKKLLLQCQVSSDPPATIIWTLNGKTLKTTKFIILSQEGSLCSVSIEKALPEDRGLYKCVAKNDAGQAECSCQVTVDDAPASENTKAPEMKSRRPKSSLPPVLGTESDATVKKKPAPKTPPKAAMPPQIIQFPEDQKVRAGESVELFGKVTGTQPITCTWMKFRKQIQESEHMKVENSENGSKLTILAARQEHCGCYTLLVENKLGSRQAQVNLTVVDKPDPPAGTPCASDIRSSSLTLSWYGSSYDGGSAVQSYSIEIWDSANKTWKELATCRSTSFNVQDLLPDHEYKFRVRAINVYGTSEPSQESELTTVGEKPEEPKDEVEVSDDDEKEPEVDYRTVTINTEQKVSDFYDIEERLGSGKFGQVFRLVEKKTRKVWAGKFFKAYSAKEKENIRQEISIMNCLHHPKLVQCVDAFEEKANIVMVLEIVSGGELFERIIDEDFELTERECIKYMRQISEGVEYIHKQGIVHLDLKPENIMCVNKTGTRIKLIDFGLARRLENAGSLKVLFGTPEFVAPEVINYEPIGYATDMWSIGVICYILVSGLSPFMGDNDNETLANVTSATWDFDDEAFDEISDDAKDFISNLLKKDMKNRLDCTQCLQHPWLMKDTKNMEAKKLSKDRMKKYMARRKWQKTGNAVRAIGRLSSMAMISGLSGRKSSTGSPTSPLNAEKLESEDVSQAFLEAVAEEKPHVKPYFSKTIRDLEVVEGSAARFDCKIEGYPDPEVVWFKDDQSIRESRHFQIDYDEDGNCSLIISDVCGDDDAKYTCKAVNSLGEATCTAELIVETMEEGEGEGEEEEE

SEQ ID NO: 41283 - protein, 992 aa, Homo sapiens
MDFRANLQRQVKPKTVSEEERKVHSPQQVDFRSVLAKKGTSKTPVPEKVPPPKPATPDFRSVLGGKKKLPAENGSSSAETLNAKAVESSKPLSNAQPSGPLKPVGNAKPAETLKPMGNAKPAETLKPMGNAKPDENLKSASKEELKKDVKNDVNCKRGHAGTTDNEKRSESQGTAPAFKQKLQDVHVAEGKKLLLQCQVSSDPPATIIWTLNGKTLKTTKFIILSQEGSLCSVSIEKALPEDRGLYKCVAKNDAGQAECSCQVTVDDAPASENTKAPEMKSRRPKSSLPPVLGTESDATVKKKPAPKTPPKAAMPPQIIQFPEDQKVRAGESVELFGKVTGTQPITCTWMKFRKQIQESEHMKVENSENGSKLTILAARQEHCGCYTLLVENKLGSRQAQVNLTVVDKPDPPAGTPCASDIRSSSLTLSWYGSSYDGGSAVQSYSIEIWDSANKTWKELATCRSTSFNVQDLLPDHEYKFRVRAINVYGTSEPSQESELTTVGEKPEEPKDEVEVSDDDEKEPEVDYRTVTINTEQKVSDFYDIEERLGSGKFGQVFRLVEKKTRKVWAGKFFKAYSAKEKENIRQEISIMNCLHHPKLVQCVDAFEEKANIVMVLEIVSGGELFERIIDEDFELTERECIKYMRQISEGVEYIHKQGIVHLDLKPENIMCVNKTGTRIKLIDFGLARRLENAGSLKVLFGTPEFVAPEVINYEPIGYATDMWSIGVICYILVSGLSPFMGDNDNETLANVTSATWDFDDEAFDEISDDAKDFISNLLKKDMKNRLDCTQCLQHPWLMKDTKNMEAKKLSKDRMKKYMARRKWQKTGNAVRAIGRLSSMAMISGLSGRKSSTGSPTSPLNAEKLESEEDVSQAFLEAVAEEKPHVKPYFSKTIRDLEVVEGSAARFDCKIEGYPDPEVVWFKDDQSIRESRHFQIDYDEDGNCSLIISDVCGDDDAKYTCKAVNSLGEATCTAELIVETMEEGEGEGEEEEE

SEQ ID NO: 41284 - protein, 154 aa, Homo sapiens
MAMISGLSGRKSSTGSPTSPLNAEKLESEEDVSQAFLEAVAEEKPHVKPYFSKTIRDLEVVEGSAARFDCKIEGYPDPEVVWFKDDQSIRESRHFQIDYDEDGNCSLIISDVCGDDDAKYTCKAVNSLGEATCTAELIVETMEEGEGEGEEEEE

SEQ ID NO: 41285 - protein, 714 aa, Homo sapiens
MKSRRPKSSLPPVLGTESDATVKKKPAPKTPPKAAMPPQIIQFPEDQKVRAGESVELFGKVTGTQPITCTWMKFRKQIQESEHMKVENSENGSKLTILAARQEHCGCYTLLVENKLGSRQAQVNLTVVDKPDPPAGTPCASDIRSSSLTLSWYGSSYDGGSAVQSYSIEIWDSANKTWKELATCRSTSFNVQDLLPDHEYKFRVRAINVYGTSEPSQESELTTVGEKPEEPKDEVEVSDDDEKEPEVDYRTVTINTEQKVSDFYDIEERLGSGKFGQVFRLVEKKTRKVWAGKFFKAYSAKEKENIRQEISIMNCLHHPKLVQCVDAFEEKANIVMVLEIVSGGELFERIIDEDFELTERECIKYMRQISEGVEYIHKQGIVHLDLKPENIMCVNKTGTRIKLIDFGLARRLENAGSLKVLFGTPEFVAPEVINYEPIGYATDMWSIGVICYILVSGLSPFMGDNDNETLANVTSATWDFDDEAFDEISDDAKDFISNLLKKDMKNRLDCTQCLQHPWLMKDTKNMEAKKLSKDRMKKYMARRKWQKTGNAVRAIGRLSSMAMISGLSGRKSSTGSPTSPLNAEKLESEEDVSQAFLEAVAEEKPHVKPYFSKTIRDLEVVEGSAARFDCKIEGYPDPEVVWFKDDQSIRESRHFQIDYDEDGNCSLIISDVCGDDDAKYTCKAVNSLGEATCTAELIVETMEEGEGEGEEEEE

SEQ ID NO: 41286 - protein, 153 aa, Homo sapiens
MAMISGLSGRKSSTGSPTSPLNAEKLESEDVSQAFLEAVAEEKPHVKPYFSKTIRDLEVVEGSAARFDCKIEGYPDPEVVWFKDDQSIRESRHFQIDYDEDGNCSLIISDVCGDDDAKYTCKAVNSLGEATCTAELIVETMEEGEGEGEEEEE

SEQ ID NO: 41287 - protein, 991 aa, Homo sapiens
MDFRANLQRQVKPKTVSEEERKVHSPQQVDFRSVLAKKGTSKTPVPEKVPPPKPATPDFRSVLGGKKKLPAENGSSSAETLNAKAVESSKPLSNAQPSGPLKPVGNAKPAETLKPMGNAKPAETLKPMGNAKPDENLKSASKEELKKDVKNDVNCKRGHAGTTDNEKRSESQGTAPAFKQKLQDVHVAEGKKLLLQCQVSSDPPATIIWTLNGKTLKTTKFIILSQEGSLCSVSIEKALPEDRGLYKCVAKNDAGQAECSCQVTVDDAPASENTKAPEMKSRRPKSSLPPVLGTESDATVKKKPAPKTPPKAAMPPQIIQFPEDQKVRAGESVELFGKVTGTQPITCTWMKFRKQIQESEHMKVENSENGSKLTILAARQEHCGCYTLLVENKLGSRQAQVNLTVVDKPDPPAGTPCASDIRSSSLTLSWYGSSYDGGSAVQSYSIEIWDSANKTWKELATCRSTSFNVQDLLPDHEYKFRVRAINVYGTSEPSQESELTTVGEKPEEPKDEVEVSDDDEKEPEVDYRTVTINTEQKVSDFYDIEERLGSGKFGQVFRLVEKKTRKVWAGKFFKAYSAKEKENIRQEISIMNCLHHPKLVQCVDAFEEKANIVMVLEIVSGGELFERIIDEDFELTERECIKYMRQISEGVEYIHKQGIVHLDLKPENIMCVNKTGTRIKLIDFGLARRLENAGSLKVLFGTPEFVAPEVINYEPIGYATDMWSIGVICYILVSGLSPFMGDNDNETLANVTSATWDFDDEAFDEISDDAKDFISNLLKKDMKNRLDCTQCLQHPWLMKDTKNMEAKKLSKDRMKKYMARRKWQKTGNAVRAIGRLSSMAMISGLSGRKSSTGSPTSPLNAEKLESEDVSQAFLEAVAEEKPHVKPYFSKTIRDLEVVEGSAARFDCKIEGYPDPEVVWFKDDQSIRESRHFQIDYDEDGNCSLIISDVCGDDDAKYTCKAVNSLGEATCTAELIVETMEEGEGEGEEEEE

SEQ ID NO: 41288 - protein, 1004 aa, Homo sapiens
MWEKMETKTIVYDLDTSGGLMEQIQALLAPPKTDEAEKRSRKPEKEPRRSGRATNHDSCDSCKEGGDLLCCDHCPAAFHLQCCNPPLSEEMLPPGEWMCHRCTVRRKKREQKKELGHVNGLVDKSGKRTTSPSSDTDLLDRSASKTELKAIAHARILERRASRPGTPTSSASTETPTSEQNDVDEDIIDVDEEPVAAEPDYVQPQLRRPFELLIAAAMERNPTQFQLPNELTCTTALPGSSKRRRKEETTGKNVKKTQHELDHNGLVPLPVKVCFTCNRSCRVAPLIQCDYCPLLFHMDCLEPPLTAMPLGRWMCPNHIEHVVLNQKNMTLSNRCQVFDRFQDTVSQHVVKVDFLNRIHKKHPPNRRVLQSVKRRSLKVPDAIKSQYQFPPPLIAPAAIRDGELICNGIPEESQMHLLNSEHLATQAEQQEWLCSVVALQCSILKHLSAKQMPSHWDSEQTEKADIKPVIVTDSSVTTSLQTADKTPTPSHYPLSCPSGISTQNSLSCSPPHQSPALEDIGCSSCAEKSKKTPCGTANGPVNTEVKANGPHLYSSPTDSTDPRRLPGANTPLPGLSHRQGWPRPLTPPAAGGLQNHTVGIIVKTENATGPSSCPQRSLVPVPSLPPSIPSSCASIENTSTLQRKTVQSQIGPPLTDSRPLGSPPNATRVLTPPQAAGDGILATTANQRFSSPAPSSDGKVSPGTLSIGSALTVPSFPANSTAMVDLTNSLRAFMDVNGEIEINMLDEKLIKFLALQRIHQLFPSRVQPSPGSVGTHQLASGGHHIEVQRKEVQARAVFYPLLGLGGAVNMCYRTLYIGTGADMDVCLTNYGHCNYVSGKHACIFYDENTKHYELLNYSEHGTTVDNVLYSCDFSEKTPPTPPSSIVAKVQSVIRRRRHQKQDEEPSEEAAMMSSQAQGPQRRPCNCKASSSSLIGGSGAGWEGTALLHHGSYIKLGCLQFVFSITEFATKQPKGDASLLQDGVLAEKLSLKPHQGPVLRSNSVP

SEQ ID NO: 41289 - protein, 704 aa, Homo sapiens
MWEKMETKTIVYDLDTSGGLMEQIQALLAPPKTDEAEKRSRKPEKEPRRSGRATNHDSCDSCKEGGDLLCCDHCPAAFHLQCCNPPLSEEMLPPGEWMCHRCTVRRKKREQKKELGHVNGLVDKSGKRTTSPSSDTDLLDRSASKTELKAIAHARILERRASRPGTPTSSASTETPTSEQNDVDEDIIDVDEEPVAAEPDYVQPQLRRPFELLIAAAMERNPTQFQLPNELTCTTALPGSSKRRRKEETTGKNVKKTQHELDHNGLVPLPVKVCFTCNRSCRVAPLIQCDYCPLLFHMDCLEPPLTAMPLGRWMCPNHIEHVVLNQKNMTLSNRCQVFDRFQDTVSQHVVKVDFLNRIHKKHPPNRRVLQSVKRRSLKVPDAIKSQYQFPPPLIAPAAIRDGELICNGIPEESQMHLLNSEHLATQAEQQEWLCSVVALQCSILKHLSAKQMPSHWDSEQTEKADIKPVIVTDSSVTTSLQTADKTPTPSHYPLSCPSGISTQNSLSCSPPHQSPALEDIGCSSCAEKSKKTPCGTANGPVNTEVKANGPHLYSSPTDSTDPRRLPGANTPLPGLSHRQGWPRPLTPPAAGGLQNHTVGIIVKTENATGPSSCPQRSLVPVPSLPPSIPSSCASIENTSTLQRKTVQSQIGPPLTDSRPLGSPPNATRVLTPPQAAGDGILATTANQRFSSPAPSSGECCSALG

SEQ ID NO: 41290 - protein, 849 aa, Homo sapiens
MWEKMETKTIVYDLDTSGGLMEQIQALLAPPKTDEAEKRSRKPEKEPRRSGRATNHDSCDSCKEGGDLLCCDHCPAAFHLVVYQDFVAPISLFHGTFHDGPTCSFAQKREQKKELGHVNGLVDKSGKRTTSPSSDTDLLDRSASKTELKAIAHARILERRASRPGTPTSSASTETPTSEQNDVDEDIIDVDEEPVAAEPDYVQPQLRRPFELLIAAAMERNPTQFQLPNELTCTTALPGSSKRRRKEETTGKNVKKTQHELDHNGLVPLPVKVCFTCNRSCRVAPLIQCDYCPLLFHMDCLEPPLTAMPLGRWMCPNHIEHVVLNQKNMTLSNRCQVFDRFQDTVSQHVVKVDFLNRIHKKHPPNRRVLQSVKRRSLKVPDAIKSQYQFPPPLIAPAAIRDGELICNGIPEESQMHLLNSEHLATQAEQQEWLCSVVALQCSILKHLSAKQMPSHWDSEQTEKADIKPVIVTDSSVTTSLQTADKTPTPSHYPLSCPSGISTQNSLSCSPPHQSPALEDIGCSSCAEKSKKTPCGTANGPVNTEVKANGPHLYSSPTDSTDPRRLPGANTPLPGLSHRQGWPRPLTPPAAGGLQNHTVGIIVKTENATGPSSCPQRSLVPVPSLPPSIPSSCASIENTSTLQRKTVQSQIGPPLTDSRPLGSPPNATRVLTPPQAAGDGILATTANQRFSSPAPSSDGKVSPGTLSIGSALTVPSFPANSTAMVDLTNSLRAFMDVNGEIEINMLDEKLIKFLALQRIHQLFPSRVQPSPGSVGTHQLASGGHHIEGAHVHTCHHIIRSPLYVCEWSPCLHGESELPVSQTSLCAFHGLNKAPWFFSEESRNKMATTAF

SEQ ID NO: 41291 - protein, 590 aa, Homo sapiens
MHLLNSEHLATQAEQQEWLCSVVALQCSILKHLSAKQMPSHWDSEQTEKADIKPVIVTDSSVTTSLQTADKTPTPSHYPLSCPSGISTQNSLSCSPPHQSPALEDIGCSSCAEKSKKTPCGTANGPVNTEVKANGPHLYSSPTDSTDPRRLPGANTPLPGLSHRQGWPRPLTPPAAGGLQNHTVGIIVKTENATGPSSCPQRSLVPVPSLPPSIPSSCASIENTSTLQRKTVQSQIGPPLTDSRPLGSPPNATRVLTPPQAAGDGILATTANQRFSSPAPSSDGKVSPGTLSIGSALTVPSFPANSTAMVDLTNSLRAFMDVNGEIEINMLDEKLIKFLALQRIHQLFPSRVQPSPGSVGTHQLASGGHHIEVQRKEVQARAVFYPLLGLGGAVNMCYRTLYIGTGADMDVCLTNYGHCNYVSGKHACIFYDENTKHYELLNYSEHGTTVDNVLYSCDFSEKTPPTPPSSIVAKVQSVIRRRRHQKQDEEPSEEAAMMSSQAQGPQRRPCNCKASSSSLIGGSGAGWEGTALLHHGSYIKLGCLQFVFSITEFATKQPKGDASLLQDGVLAEKLSLKPHQGPVLRSNSVP

SEQ ID NO: 41292 - protein, 849 aa, Homo sapiens
MWEKMETKTIVYDLDTSGGLMEQIQALLAPPKTDEAEKRSRKPEKEPRRSGRATNHDSCDSCKEGGDLLCCDHCPAAFHLQCCNPPLSEEMLPPGEWMCHRCTVRRKKREQKKELGHVNGLVDKSGKRTTSPSSDTDLLDRSASKTELKAIAHARILERRASRPGTPTSSASTETPTSEQNDVDEDIIDVDEEPVAAEPDYVQPQLRRPFELLIAAAMERNPTQFQLPNELTCTTALPGSSKRRRKEETTGKNVKKTQHELDHNGLVPLPVKVCFTCNRSCRVAPLIQCDYCPLLFHMDCLEPPLTAMPLGRWMCPNHIEHVVLNQKNMTLSNRCQVFDRFQDTVSQHVVKVDFLNRIHKKHPPNRRVLQSVKRRSLKVPDAIKSQYQFPPPLIAPAAIRDGELICNGIPEESQMHLLNSEHLATQAEQQEWLCSVVALQCSILKHLSAKQMPSHWDSEQTEKADIKPVIVTDSSVTTSLQTADKTPTPSHYPLSCPSGISTQNSLSCSPPHQSPALEDIGCSSCAEKSKKTPCGTANGPVNTEVKANGPHLYSSPTDSTDPRRLPGANTPLPGLSHRQGWPRPLTPPAAGGLQNHTVGIIVKTENATGPSSCPQRSLVPVPSLPPSIPSSCASIENTSTLQRKTVQSQIGPPLTDSRPLGSPPNATRVLTPPQAAGDGILATTANQRFSSPAPSSDGKVSPGTLSIGSALTVPSFPANSTAMVDLTNSLRAFMDVNGEIEINMLDEKLIKFLALQRIHQLFPSRVQPSPGSVGTHQLASGGHHIEGAHVHTCHHIIRSPLYVCEWSPCLHGESELPVSQTSLCAFHGLNKAPWFFSEESRNKMATTAF

SEQ ID NO: 41293 - protein, 224 aa, Homo sapiens
MELYETSPYFYQEPRFYDGENYLPVHLQGFEPPGYERTELTLSPEAPGPLEDKGLGTPEHCPGQCLPWACKVCKRKSVSVDRRRAATLREKRRLKKVNEAFEALKRSTLLNPNQRLPKVEILRSAIQYIERLQALLSSLNQEERDLRYRGGGGPQPGVPSECSSHSASCSPEWGSALEFSANPGDHLLTADPTDAHNLHSLTSIVDSITVEDVSVAFPDETMPN

SEQ ID NO: 41294 - protein, 1060 aa, Homo sapiens
MNRSRAIVQRGRVLPPPAPLDTTNLAGRRTLQGRAKMASVPVYCLCRLPYDVTRFMIECDMCQDWFHGSCVGVEEEKAADIDLYHCPNCEVLHGPSIMKKRRGSSKGHDTHKGKPVKTGSPTFVRELRSRTFDSSDEVILKPTGNQLTVEFLEENSFSVPILVLKKDGLGMTLPSPSFTVRDVEHYVGSDKEIDVIDVTRQADCKMKLGDFVKYYYSGKREKVLNVISLEFSDTRLSNLVETPKIVRKLSWVENLWPEECVFERPNVQKYCLMSVRDSYTDFHIDFGGTSVWYHVLKGEKIFYLIRPTNANLTLFECWSSSSNQNEMFFGDQVDKCYKCSVKQGQTLFIPTGWIHAVLTPVDCLAFGGNFLHSLNIEMQLKAYEIEKRLSTADLFRFPNFETICWYVGKHILDIFRGLRENRRHPASYLVHGGKALNLAFRAWTRKEALPDHEDEIPETVRTVQLIKDLAREIRLVEDIFQQNVGKTSNIFGLQRIFPAGSIPLTRPAHSTSVSMSRLSLPSKNGSKKKGLKPKELFKKAERKGKESSALGPAGQLSYNLMDTYSHQALKTGSFQKAKFNITGACLNDSDDDSPDLDLDGNESPLALLMSNGSTKRVKSLSKSRRTKIAKKVDKARLMAEQVMEDEFDLDSDDELQIDERLGKEKATLIIRPKFPRKLPRAKPCSDPNRVREPGEVEFDIEEDYTTDEDMVEGVEGKLGNGSGAGGILDLLKASRQVGGPDYAALTEAPASPSTQEAIQGMLCMANLQSSSSSPATSSLQAWWTGGQDRSSGSSSSGLGTVSNSPASQRTPGKRPIKRPAYWRTESEEEEENASLDEQDSLGACFKDAEYIYPSLESDDDDPALKSRPKKKKNSDDAPWSPKARVTPTLPKQDRPVREGTRVASIETGLAAAAAKLAQQELQKAQKKKYIKKKPLLKEVEQPRPQDSNLSLTVPAPTVAATPQLVTSSSPLPPPEPKQEALSGSLADHEYTARPNAFGMAQANRSTTPMAPGVFLTQRRPSVGSQSNQAGQGKRPKKGLATAKQRLGRILKIHRNGKLLL

SEQ ID NO: 41295 - protein, 1024 aa, Homo sapiens
MASVPVYCLCRLPYDVTRFMIECDMCQDWFHGSCVGVEEEKAADIDLYHCPNCEVLHGPSIMKKRRGSSKGHDTHKGKPVKTGSPTFVRELRSRTFDSSDEVILKPTGNQLTVEFLEENSFSVPILVLKKDGLGMTLPSPSFTVRDVEHYVGSDKEIDVIDVTRQADCKMKLGDFVKYYYSGKREKVLNVISLEFSDTRLSNLVETPKIVRKLSWVENLWPEECVFERPNVQKYCLMSVRDSYTDFHIDFGGTSVWYHVLKGEKIFYLIRPTNANLTLFECWSSSSNQNEMFFGDQVDKCYKCSVKQGQTLFIPTGWIHAVLTPVDCLAFGGNFLHSLNIEMQLKAYEIEKRLSTADLFRFPNFETICWYVGKHILDIFRGLRENRRHPASYLVHGGKALNLAFRAWTRKEALPDHEDEIPETVRTVQLIKDLAREIRLVEDIFQQNVGKTSNIFGLQRIFPAGSIPLTRPAHSTSVSMSRLSLPSKNGSKKKGLKPKELFKKAERKGKESSALGPAGQLSYNLMDTYSHQALKTGSFQKAKFNITGACLNDSDDDSPDLDLDGNESPLALLMSNGSTKRVKSLSKSRRTKIAKKVDKARLMAEQVMEDEFDLDSDDELQIDERLGKEKATLIIRPKFPRKLPRAKPCSDPNRVREPGEVEFDIEEDYTTDEDMVEGVEGKLGNGSGAGGILDLLKASRQVGGPDYAALTEAPASPSTQEAIQGMLCMANLQSSSSSPATSSLQAWWTGGQDRSSGSSSSGLGTVSNSPASQRTPGKRPIKRPAYWRTESEEEEENASLDEQDSLGACFKDAEYIYPSLESDDDDPALKSRPKKKKNSDDAPWSPKARVTPTLPKQDRPVREGTRVASIETGLAAAAAKLAQQELQKAQKKKYIKKKPLLKEVEQPRPQDSNLSLTVPAPTVAATPQLVTSSSPLPPPEPKQEALSGSLADHEYTARPNAFGMAQANRSTTPMAPGVFLTQRRPSVGSQSNQAGQGKRPKKGLATAKQRLGRILKIHRNGKLLL

SEQ ID NO: 41296 - protein, 959 aa, Homo sapiens
MNRSRAIVQRGRVLPPPAPLDTTNLAGRRTLQGRAKMASVPVYCLCRLPYDVTRFMIECDMCQDWFHGSCVGVEEEKAADIDLYHCPNCEVLHGPSIMKKRRGSSKGHDTHKGKPVKTGSPTFVRELRSRTFDSSDEVILKPTGNQLTVEFLEENSFSVPILVLKKDGLGMTLPSPSFTVRDVEHYVGSDKEIDVIDVTRQADCKMKLGDFVKYYYSGKREKVLNVISLEFSDTRLSNLVETPKIVRKLSWVENLWPEECVFERPNVQKYCLMSVRDSYTDFHIDFGGTSVWYHVLKGEKIFYLIRPTNANLTLFECWSSSSNQNEMFFGDQVDKCYKCSVKQGQTLFIPTGWIHAVLTPVDCLAFGGNFLHSLNIEMQLKAYEIEKRLSTADLFRFPNFETICWYVGKHILDIFRGLRENRRHPASYLVHGGKALNLAFRAWTRKEALPDHEDEIPETVRTVQLIKDLAREIRLVEFNITGACLNDSDDDSPDLDLDGNESPLALLMSNGSTKRVKSLSKSRRTKIAKKVDKARLMAEQVMEDEFDLDSDDELQIDERLGKEKATLIIRPKFPRKLPRAKPCSDPNRVREPGEVEFDIEEDYTTDEDMVEGVEGKLGNGSGAGGILDLLKASRQVGGPDYAALTEAPASPSTQEAIQGMLCMANLQSSSSSPATSSLQAWWTGGQDRSSGSSSSGLGTVSNSPASQRTPGKRPIKRPAYWRTESEEEEENASLDEQDSLGACFKDAEYIYPSLESDDDDPALKSRPKKKKNSDDAPWSPKARVTPTLPKQDRPVREGTRVASIETGLAAAAAKLAQQELQKAQKKKYIKKKPLLKEVEQPRPQDSNLSLTVPAPTVAATPQLVTSSSPLPPPEPKQEALSGSLADHEYTARPNAFGMAQANRSTTPMAPGVFLTQRRPSVGSQSNQAGQGKRPKKGLATAKQRLGRILKIHRNGKLLL

SEQ ID NO: 41297 - protein, 948 aa, Homo sapiens
MASVPVYCLCRLPYDVTRFMIECDMCQDWFHGSCVGVEEEKAADIDLYHCPNCEVLHGPSIMKKRRGSSKGHDTHKGKPVKTGSPTFVRELRSRTFDSSDEVILKPTGNQLTVEFLEENSFSVPILVLKKDGLGMTLPSPSFTVRDVEHYVGSDKEIDVIDVTRQADCKMKLGDFVKYYYSGKREKVLNVISLEFSDTRLSNLVETPKIVRKLSWVENLWPEECVFERPNVQKYCLMSVRDSYTDFHIDFGGTSVWYHVLKGEKIFYLIRPTNANLTLFECWSSSSNQNEMFFGDQVDKCYKCSVKQGQTLFIPTGWIHAVLTPVDCLAFGGNFLHSLNIEMQLKAYEIEKRLSTADLFRFPNFETICWYVGKHILDIFRGLRENRRHPASYLVHGGKALNLAFRAWTRKEALPDHEDEIPETVRTVQLIKDLAREIRLVEFNITGACLNDSDDDSPDLDLDGNESPLALLMSNGSTKRVKSLSKSRRTKIAKKVDKARLMAEQVMEDEFDLDSDDELQIDERLGKEKATLIIRPKFPRKLPRAKPCSDPNRVREPGEVEFDIEEDYTTDEDMVEGVEGKLGNGSGAGGILDLLKASRQVGGPDYAALTEAPASPSTQEAIQGMLCMANLQSSSSSPATSSLQAWWTGGQDRSSGSSSSGLGTVSNSPASQRTPGKRPIKRPAYWRTESEEEEENASLDEQDSLGACFKDAEYIYPSLESDDDDPALKSRPKKKKNSDDAPWSPKARVTPTLPKQDRPVREGTRVASIETGLAAAAAKLAQQELQKAQKKKYIKKKPLLKEVEQPRPQDSNLSLTVPAPTVAATPQLVTSSSPLPPPEPKQEALSGSLADHEYTARPNAFGMAQANRSTTPMAPGVFLTQRRPSVGSQSNQAGQGKRPKKGLATAKQRLGRILKIHRNGKLLLRQVIVQAECRQAIHEPKLKRRDAHP

SEQ ID NO: 41298 - protein, 878 aa, Homo sapiens
MASVPVYCLCRLPYDVTRFMIECDMCQDWFHGSCVGVEEEKAADIDLYHCPNCEVLHGPSIMKKRRGSSKGHDTHKGKPVKTGSPTFVRELRSRTFDSSDEVILKPTGNQLTVEFLEENSFSVPILVLKKDGLGMTLPSPSFTVRDVEHYVGSDKEIDVIDVTRQADCKMKLGDFVKYYYSGKREKVLNVISLEFSDTRLSNLVETPKIVRKLSWVENLWPEECVFERPNVQKYCLMSVRDSYTDFHIDFGGTSVWYHVLKGEKIFYLIRPTNANLTLFECWSSSSNQNEMFFGDQVDKCYKCSVKQGQTLFIPTGWIHAVLTPVDCLAFGGNFLHSLNIEMQLKAYEIEKRLSTADLFRFPNFETICWYVGKHILDIFRGLRENRRHPASYLVHGGKALNLAFRAWTRKEALPDHEDEIPETVRTVQLIKDLAREIRLVEDIFQQNVGKTSNIFGLQRIFPAGSIPLTRPAHSTSVSMSRLSLPSKNGSKKKGLKPKELFKKAERKGKESSALGPAGQLSYNLMDTYSHQALKTGSFQKAKFNITGACLNDSDDDSPDLDLDGNESPLALLMSNGSTKRVKSLSKSRRTKIAKKVDKARLMAEQVMEDEFDLDSDDELQIDERLGKEKATLIIRPKFPRKLPRAKPCSDPNRVREPGEVEFDIEEDYTTDEDMVEGVEGYQTATPAPAQGASEAPASPSTQEAIQGMLCMANLQSSSSSPATSSLQAWWTGGQDRSSGSSSSGLGTVSNSPASQRTPGKRPIKRPAYWRTESEEEEENASLDEQDSLGACFKDAEYIYPSLESDDDDPALKSRPKKKKNSDDAPWSPKARVTPTLPKQDRPVREGTRVASIETGLAAAAAKLAQQVKKMKLSLTDSG

SEQ ID NO: 41299 - protein, 921 aa, Homo sapiens
MLRNERQFKEEKLAEQLKQAEELRQYKVLVHAQERELTQLREKLREGRDASRSLNEHLQALLTPDEPDKSQGQDLQEQLAEGCRLAQHLVQKLSPENDNDDDEDVQVEVAEKVQKSSAPREMQKAEEKEVPEDSLEECAITCSNSHGPYDSNQPHRKTKITFEEDKVDSTLIGSSSHVEWEDAVHIIPENESDDEEEEEKGPVSPRNLQESEEEEVPQESWDEGYSTLSIPPEMLASYKSYSSTFHSLEEQQVCMAVDIGRHRWDQVKKEDHEATGPRLSRELLDEKGPEVLQDSLDRCYSTPSGCLELTDSCQPYRSAFYVLEQQRVGLAVNMDEIEKYQEVEEDQDPSCPRLSRELLDEKEPEVLQDSLGRCYSTPSGYLELPDLGQPYSSAVYSLEEQYLGLALDVDRIKKDQEEEEDQGPPCPRLSRELLEVVEPEVLQDSLDRCYSTPSSCLEQPDSCQPYGSSFYALEEKHVGFSLDVGEIEKKGKGKKRRGRRSKKERRRGRKEGEEDQNPPCPRLSRELLDEKGPEVLQDSLDRCYSTPSGCLELTDSCQPYRSAFYILEQQRVGLAVDMDEIEKYQEVEEDQDPSCPRLSGELLDEKEPEVLQESLDRCYSTPSGCLELTDSCQPYRSAFYILEQQRVGLAVDMDEIEKYQEVEEDQDPSCPRLSRELLDEKEPEVLQDSLGRCYSTPSGYLELPDLGQPYSSAVYSLEEQYLGLALDVDRIKKDQEEEEDQGPPCPRLSRELLEVVEPEVLQDSLDRCYSTPSSCLEQPDSCQPYGSSFYALEEKHVGFSLDVGEIEKKGKGKKRRGRRSKKERRRGRKEGEEDQNPPCPRLNSMLMEVEEPEVLQDSLDICYSTPSMYFELPDSFQHYRSVFYSFEEEHISFALYVDNRFFTLTVTSLHLVFQMGVIFPQ

SEQ ID NO: 41300 - protein, 983 aa, Homo sapiens
MDTEPNPGTSSVSTTTSSTTTTTITTSSSRMQQPQISVYSGSDRHAVQVIQQALHRPPSSAAQYLQQMYAAQQQHLMLHTAALQQQHLSSSQLQSLAAVQASLSSGRPSTSPTGSVTQQSSMSQTSINLSTSPTPAQLISRSQASSSTSGSITQQTMLLGSTSPTLTASQAQMYLRAQMLIFTPATTVAAVQSDIPVVSSSSSSSCQSAATQVQNLTLRSQKLGVLSSSQNGPPKSTSQTQSLTICHNKTTVTSSKISQRDPSPESNKKGESPSLESRSTAVTRTSSIHQLIAPASYSPIQPHSLIKHQQIPLHSPPSKVSHHQLILQQQQQQIQPITLQNSTQDPPPSQHCIPLQNHGLPPAPSNAQSQHCSPIQSHPSPLTVSPNQSQSAQQSVVVSPPPPHSPSQSPTIIIHPQALIQPHPLVSSALQPGPNLQQSTANQVQATAQLNLPSHLPLPASPVVHIGPVQQSALVSPGQQIVSPSHQQYSSLQSSPIPIASPPQMSTSPPAQIPPLPLQSMQSLQVQPEILSQGQVLVQNALVSEEELPAAEALVQLPFQTLPPPQTVAVNLQVQPPAPVDPPVVYQVEDVCEEEMPEESDECVRMDRTPPPPTLSPAAITVGRGEDLTSEHPLLEQVELPAVASVSASVIKSPSDPSHVSVPPPPLLLPAATTRSNSTSMHSSIPSIENKPPQAIVKPQILTHVIEGFVIQEGLEPFPVSRSSLLIEQPVKKRPLLDNQVINSVCVQPELQNNTKHADNSSDTEMEDMIAEETLEEMDSELLKCEFCGKMGYANEFLRSKRFCTMSCAKRYNVSCSKKFALSRWNRKPDNQSLGHRGRRPSGPDGAAREHILRQLPITYPSAEEDLASHEDSVPSAMTTRLRRQSERERERELRDVRIRKMPENSDLLPVAQTEPSIWTVDDVWAFIHSLPGCQDIADEFRAQEIDGQALLLLKEDHLMSAMNIKLGPALKICARINSLKES

SEQ ID NO: 41301 - protein, 964 aa, Homo sapiens
MDTEPNPGTSSVSTTTSSTTTTTITTSSSRMQQPQISVYSGSDRHAVQVIQQALHRPPSSAAQYLQQMYAAQQQHLMLHTAALQQQHLSSSQLQSLAAVQASLSSGRPSTSPTGSVTQQSSMSQASSSTSGSITQQTMLLGSTSPTLTASQAQMYLRAQMLIFTPATTVAAVQSDIPVVSSSSSSSCQSAATQVQNLTLRSQKLGVLSSSQNGPPKSTSQTQSLTICHNKTTVTSSKISQRDPSPESNKKGESPSLESRSTAVTRTSSIHQLIAPASYSPIQPHSLIKHQQIPLHSPPSKVSHHQLILQQQQQQIQPITLQNSTQDPPPSQHCIPLQNHGLPPAPSNAQSQHCSPIQSHPSPLTVSPNQSQSAQQSVVVSPPPPHSPSQSPTIIIHPQALIQPHPLVSSALQPGPNLQQSTANQVQATAQLNLPSHLPLPASPVVHIGPVQQSALVSPGQQIVSPSHQQYSSLQSSPIPIASPPQMSTSPPAQIPPLPLQSMQSLQVQPEILSQGQVLVQNALVSEEELPAAEALVQLPFQTLPPPQTVAVNLQVQPPAPVDPPVVYQVEDVCEEEMPEESDECVRMDRTPPPPTLSPAAITVGRGEDLTSEHPLLEQVELPAVASVSASVIKSPSDPSHVSVPPPPLLLPAATTRSNSTSMHSSIPSIENKPPQAIVKPQILTHVIEGFVIQEGLEPFPVSRSSLLIEQPVKKRPLLDNQVINSVCVQPELQNNTKHADNSSDTEMEDMIAEETLEEMDSELLKCEFCGKMGYANEFLRSKRFCTMSCAKRYNVSCSKKFALSRWNRKPDNQSLGHRGRRPSGPDGAAREHILRQLPITYPSAEEDLASHEDSVPSAMTTRLRRQSERERERELRDVRIRKMPENSDLLPVAQTEPSIWTVDDVWAFIHSLPGCQDIADEFRAQEIDGQALLLLKEDHLMSAMNIKLGPALKICARINSLKES

SEQ ID NO: 41302 - protein, 333 aa, Homo sapiens
MAEAEFKDHSTAMDTEPNPGTSSVSTTTSSTTTTTITTSSSRMQQPQISVYSGSDRHAVQVIQQALHRPPSSAAQYLQQMYAAQQQHLMLHTAALQQQHLSSSQLQSLAAVQASLSSGRPSTSPTGSVTQQSSMSQTSINLSTSPTPAQLISRSQASSSTSGSITQQTMLLGSTSPTLTASQAQMYLRAQMLIFTPATTVAAVQSDIPVVSSSSSSSCQSAATQVQNLTLRSQKLGVLSSSQNGPPKSTSQTQSLTICHNKTTVTSSKISQRDPSPESNKKGESPSLESRSTAVTRTSSIHQLIAPGGIKLLLKIVVLFIFLADRAKQRMFMT

SEQ ID NO: 41303 - protein, 186 aa, Homo sapiens
MDTEPNPGTSSVSTTTSSTTTTTITTSSSRMQQPQISVYSGSDRHAVQALHRPPSSAAQYLQQMYAAQQQHLMLHTAALQQQHLSSSQLQSLAAVQASLSSGRPSTSPTGSVTQQSSMSQTSINLSTSPTPAQLISRSQASSSTSGSITQQTMLLGSTSPTLTASQAQMYLRAQMVRYELPNFFSV

SEQ ID NO: 41304 - protein, 151 aa, Homo sapiens
MAEAEFKDHSTAMDTEPNPGTSSVSTTTSSTTTTTITTSSSRMQQPQISVYSGSDRHAVQVIQQALHRPPSSAAQYLQQMYAAQQQHLMLHTAALQQQHLSSSQLQSLAAVQASLSSGRPSTSPTGSVTQQSSMSQTSVSSLNFFFLDLKF

SEQ ID NO: 41305 - protein, 135 aa, Homo sapiens
MDTEPNPGTSSVSTTTSSTTTTTITTSSSRMQQPQISVYSGSDRHAVQALHRPPSSAAQYLQQMYAAQQQHLMLHTAALQQQHLSSSQLQSLAAVQASLSSGRPSTSPTGSVTQQSSMSQTSVSSLNFFFLDLKF

SEQ ID NO: 41306 - protein, 995 aa, Homo sapiens
MAEAEFKDHSTAMDTEPNPGTSSVSTTTSSTTTTTITTSSSRMQQPQISVYSGSDRHAVQVIQQALHRPPSSAAQYLQQMYAAQQQHLMLHTAALQQQHLSSSQLQSLAAVQASLSSGRPSTSPTGSVTQQSSMSQTSINLSTSPTPAQLISRSQASSSTSGSITQQTMLLGSTSPTLTASQAQMYLRAQMLIFTPATTVAAVQSDIPVVSSSSSSSCQSAATQVQNLTLRSQKLGVLSSSQNGPPKSTSQTQSLTICHNKTTVTSSKISQRDPSPESNKKGESPSLESRSTAVTRTSSIHQLIAPASYSPIQPHSLIKHQQIPLHSPPSKVSHHQLILQQQQQQIQPITLQNSTQDPPPSQHCIPLQNHGLPPAPSNAQSQHCSPIQSHPSPLTVSPNQSQSAQQSVVVSPPPPHSPSQSPTIIIHPQALIQPHPLVSSALQPGPNLQQSTANQVQATAQLNLPSHLPLPASPVVHIGPVQQSALVSPGQQIVSPSHQQYSSLQSSPIPIASPPQMSTSPPAQIPPLPLQSMQSLQVQPEILSQGQVLVQNALVSEEELPAAEALVQLPFQTLPPPQTVAVNLQVQPPAPVDPPVVYQVEDVCEEEMPEESDECVRMDRTPPPPTLSPAAITVGRGEDLTSEHPLLEQVELPAVASVSASVIKSPSDPSHVSVPPPPLLLPAATTRSNSTSMHSSIPSIENKPPQAIVKPQILTHVIEGFVIQEGLEPFPVSRSSLLIEQPVKKRPLLDNQVINSVCVQPELQNNTKHADNSSDTEMEDMIAEETLEEMDSELLKCEFCGKMGYANEFLRSKRFCTMSCAKRYNVSCSKKFALSRWNRKPDNQSLGHRGRRPSGPDGAAREHILRQLPITYPSAEEDLASHEDSVPSAMTTRLRRQSERERERELRDVRIRKMPENSDLLPVAQTEPSIWTVDDVWAFIHSLPGCQDIADEFRAQEIDGQALLLLKEDHLMSAMNIKLGPALKICARINSLKES

SEQ ID NO: 41307 - protein, 670 aa, Homo sapiens
MVVSAGPLSSEKAEMNILEINEKLRPQLAEKKQQFRNLKEKCFLTQLAGFLANRQKKYKYEECKDLIKFMLRNERQFKEEKLAEQLKQAEELRQYKVLVHAQERELTQLREKLREGRDASRSLNEHLQALLTPDEPDKSQGQDLQEQLAEGCRLTQHLVQKLSPENDNDDDEDVQVEVAEKVQKSSAPREMQKAEEKEVPEDSLEECAITCSNSHGPYDSNQPHKKTKITFEEDKVDSTLIGSSSHVEWEDAVHIIPENESDDEEEEEKGPVSPRNLQESEEEEVPQESWDEGYSTLSIPPEMLASYQSYSSTFHSLEEQQVCMAVDIGRHRWDQVKKEDQEATGPRLSRELLDEKEPEVLQDSLDRCYSTPSGCLELTDSCQPYRSAFYVLEQQRVGLAIDMDEIEKYQEVEEDQDPSCPRLSRELLDEKEPEVLQDSLDRCYSTPSDYLELPDLGQPYSSAVYSLEEQYLGLALDVDRIKKDQEEEEDQGPPCPRLSRELLEVVEPEVLQDSLDRCYSTPSSCLEQPDSCQPYGSSFYALEEKHVGFSLDVGEIEKKGKGKKRRGRRSKKKRRRGRKEGEDDNPPCPRLYGVLMEVEEPEVLQDSLDRCYSTPSMYFEQPDSFQHYRSVFYSFEEEHISFALYVDNRFFTLTVTSLHLVFQMGVIFPQ

SEQ ID NO: 41308 - protein, 1141 aa, Homo sapiens
MPEPTKKEENEVPAPAPPPEEPSKEKEAGTTPAKDWTLVETPPGEEQAKQNANSQLSILFIEKPQGGTVKVGEDITFIAKVKAEDLLRKPTIKWFKGKWMDLASKAGKHLQLKETFERHSRVYTFEMQIIKAKDNFAGNYRCEVTYKDKFDSCSFDLEVHESTGTTPNIDIRSAFKRSGEGQEDAGELDFSGLLKRREVKQQEEEPQVDVWELLKNAKPSEYEKIAFQYGITDLRGMLKRLKRMRREEKKSAAFAKILDPAYQVDKGGRVRFVVELADPKLEVKWYKNGQEIRPSTKYIFEHKGCQRILFINNCQMTDDSEYYVTAGDEKCSTELFVREPPIMVTKQLEDTTAYCGERVELECEVSEDDANVKWFKNGEEIIPGPKSRYRIRVEGKKHILIIEGATKADAAEYSVMTTGGQSSAKLSVDLKPLKILTPLTDQTVNLGKEICLKCEISENIPGKWTKNGLPVQESDRLKVVHKGRIHKLVIANALTEDEGDYVFAPDAYNVTLPAKVHVIDPPKIILDGLDADNTVTVIAGNKLRLEIPISGEPPPKAMWSRGDKAIMEGSGRIRTESYPDSSTLVIDIAERDDSGVYHINLKNEAGEAHASIKVKVVDFPDPPVAPTVTEVGDDWCIMNWEPPAYDGGSPILGYFIERKKKQSSRWMRLNFDLCKETTFEPKKMIEGVAYEVRIFAVNAIGISKPSMPSRPFVPLAVTSPPTLLTVDSVTDTTVTMRWRPPDHIGAAGLDGYVLEYCFEGSTSAKQSDENGEAAYDLPAEDWIVANKDLIDKTKFTITGLPTDAKIFVRVKAVNAAGASEPKYYSQPILVKEIIEPPKIRIPRHLKQTYIRRVGEAVNLVIPFQGKPRPELTWKKDGAEIDKNQINIRNSETDTIIFIRKAERSHSGKYDLQVKVDKFVETASIDIQIIDRPGPPQIVKIEDVWGENVALTWTPPKDDGNAAITGYTIQKADKKSMEWFTVIEHYHRTSATITELVIGNEYYFRVFSENMCGLSEDATMTKESAVIARDGKIYKNPVYEDFDFSEAPMFTQPLVNTYAIAGYNATLNCSVRGNPKPKITWMKNKVAIVDDPRYRMFSNQGVCTLEIRKPSPYDGGTYCCKAVNDLGTVEIECKLEVKVIAQ

SEQ ID NO: 41309 - protein, 1148 aa, Homo sapiens
MPEPTKKEENEVPAPAPPPEEPSKEKEAGTTPAKDEEEVSPPSALPPGLGSRALERKDSDWTLVETPPGEEQAKQNANSQLSILFIEKPQGGTVKVGEDITFIAKVKAEDLLRKPTIKWFKGKWMDLASKAGKHLQLKETFERHSRVYTFEMQIIKAKDNFAGNYRCEVTYKDKFDSCSFDLEVHESTGTTPNIDIRSAFKRSGEGQEDAGELDFSGLLKRREVKQQEEEPQVDVWELLKNAKPSEYEKIAFQYGITDLRGMLKRLKRMRREEKKSAAFAKILDPAYQVDKGGRVRFVVELADPKLEVKWYKNGQEIRPSTKYIFEHKGCQRILFINNCQMTDDSEYYVTAGDEKCSTELFVREPPIMVTKQLEDTTAYCGERVELECEVSEDDANVKWFKNGEEIIPGPKSRYRIRVEGKKHILIIEGATKADAAEYSVMTTGGQSSAKLSVDLKPLKILTPLTDQTVNLGKEICLKCEISENIPGKWTKNGLPVQESDRLKVVHKGRIHKLVIANALTEDEGDYVFAPDAYNVTLPAKVHVIDPPKIILDGLDADNTVTVIAGNKLRLEIPISGEPPPKAMWSRGDKAIMEGSGRIRTESYPDSSTLVIDIAERDDSGVYHINLKNEAGEAHASIKVKVVDFPDPPVAPTVTEVGDDWCIMNWEPPAYDGGSPILGYFIERKKKQSSRWMRLNFDLCKETTFEPKKMIEGVAYEVRIFAVNAIGISKPSMPSRPFVPLAVTSPPTLLTVDSVTDTTVTMRWRPPDHIGAAGLDGYVLEYCFEGTEDWIVANKDLIDKTKFTITGLPTDAKIFVRVKAVNAAGASEPKYYSQPILVKEIIEPPKIRIPRHLKQTYIRRVGEAVNLVIPFQGKPRPELTWKKDGAEIDKNQINIRNSETDTIIFIRKAERSHSGKYDLQVKVDKFVETASIDIQIIDRPGPPQIVKIEDVWGENVALTWTPPKDDGNAAITGYTIQKADKKSMEWFTVIEHYHRTSATITELVIGNEYYFRVFSENMCGLSEDATMTKESAVIARDGKIYKNPVYEDFDFSEAPMFTQPLVNTYAIAGYNATLNCSVRGNPKPKITWMKNKVAIVDDPRYRMFSNQGVCTLEIRKPSPYDGGTYCCKAVNDLGTVEIECKLEVKVIAQ

SEQ ID NO: 41310 - protein, 1123 aa, Homo sapiens
MPEPTKKEENEVPAPAPPPEEPSKEKEAGTTPAKDWTLVETPPGEEQAKQNANSQLSILFIEKPQGGTVKVGEDITFIAKVKAEDLLRKPTIKWFKGKWMDLASKAGKHLQLKETFERHSRVYTFEMQIIKAKDNFAGNYRCEVTYKDKFDSCSFDLEVHESTGTTPNIDIRSAFKRSGEGQEDAGELDFSGLLKRREVKQQEEEPQVDVWELLKNAKPSEYEKIAFQYGITDLRGMLKRLKRMRREEKKSAAFAKILDPAYQVDKGGRVRFVVELADPKLEVKWYKNGQEIRPSTKYIFEHKGCQRILFINNCQMTDDSEYYVTAGDEKCSTELFVREPPIMVTKQLEDTTAYCGERVELECEVSEDDANVKWFKNGEEIIPGPKSRYRIRVEGKKHILIIEGATKADAAEYSVMTTGGQSSAKLSVDLKPLKILTPLTDQTVNLGKEICLKCEISENIPGKWTKNGLPVQESDRLKVVHKGRIHKLVIANALTEDEGDYVFAPDAYNVTLPAKVHVIDPPKIILDGLDADNTVTVIAGNKLRLEIPISGEPPPKAMWSRGDKAIMEGSGRIRTESYPDSSTLVIDIAERDDSGVYHINLKNEAGEAHASIKVKVVDFPDPPVAPTVTEVGDDWCIMNWEPPAYDGGSPILGYFIERKKKQSSRWMRLNFDLCKETTFEPKKMIEGVAYEVRIFAVNAIGISKPSMPSRPFVPLAVTSPPTLLTVDSVTDTTVTMRWRPPDHIGAAGLDGYVLEYCFEGTEDWIVANKDLIDKTKFTITGLPTDAKIFVRVKAVNAAGASEPKYYSQPILVKEIIEPPKIRIPRHLKQTYIRRVGEAVNLVIPFQGKPRPELTWKKDGAEIDKNQINIRNSETDTIIFIRKAERSHSGKYDLQVKVDKFVETASIDIQIIDRPGPPQIVKIEDVWGENVALTWTPPKDDGNAAITGYTIQKADKKSMEWFTVIEHYHRTSATITELVIGNEYYFRVFSENMCGLSEDATMTKESAVIARDGKIYKNPVYEDFDFSEAPMFTQPLVNTYAIAGYNATLNCSVRGNPKPKITWMKNKVAIVDDPRYRMFSNQGVCTLEIRKPSPYDGGTYCCKAVNDLGTVEIECKLEVKVIAQ

SEQ ID NO: 41311 - protein, 1171 aa, Homo sapiens
MPEPTKKEENEVPAPAPPPEEPSKEKEAGTTPAKDEEEVSPPSALPPGLGSRALERKDSDWTLVETPPGEEQAKQNANSQLSILFIEKPQGGTVKVGEDITFIAKVKAEDLLRKPTIKWFKGKWMDLASKAGKHLQLKETFERHSRVYTFEMQIIKAKDNFAGNYRCEVTYKDKFDSCSFDLEVHESTGTTPNIDIRSAFKRSGEGQEDAGELDFSGLLKRREVKQQEEEPQVDVWELLKNAKPSEYEKIAFQYGITDLRGMLKRLKRMRREEKKSAAFAKILDPAYQVDKGGRVRFVVELADPKLEVKWYKNGQEIRPSTKYIFEHKGCQRILFINNCQMTDDSEYYVTAGDEKCSTELFVREPPIMVTKQLEDTTAYCGERVELECEVSEDDANVKWFKNGEEIIPGPKSRYRIRVEGKKHILIIEGATKADAAEYSVMTTGGQSSAKLSVDLKPLKILTPLTDQTVNLGKEICLKCEISENIPGKWTKNGLPVQESDRLKVVHKGRIHKLVIANALTEDEGDYVFAPDAYNVTLPAKVHVIDPPKIILDGLDADNTVTVIAGNKLRLEIPISGEPPPKAMWSRGDKAIMEGSGRIRTESYPDSSTLVIDIAERDDSGVYHINLKNEAGEAHASIKVKVVDFPDPPVAPTVTEVGDDWCIMNWEPPAYDGGSPILGYFIERKKKQSSRWMRLNFDLCKETTFEPKKMIEGVAYEVRIFAVNAIGISKPSMPSRPFVPLAVTSPPTLLTVDSVTDTTVTMRWRPPDHIGAAGLDGYVLEYCFEGTEDWIVANKDLIDKTKFTITGLPTDAKIFVRVKAVNAAGASEPKYYSQPILVKEIIEPPKIRIPRHLKQTYIRRVGEAVNLVIPFQGKPRPELTWKKDGAEIDKNQINIRNSETDTIIFIRKAERSHSGKYDLQVKVDKFVETASIDIQIIDRPGPPQIVKIEDVWGENVALTWTPPKDDGNAAITGYTIQKADKKSMEWFTVIEHYHRTSATITELVIGNEYYFRVFSENMCGLSEDATMTKESAVIARDGKIYKNPVYEDFDFSEAPMFTQPLVNTYAIAGYNATLNCSVRGNPKPKITWMKNKVAIVDDPRYRMFSNQGVCTLEIRKPSPYDGGTYCCKAVNDLGTVEIECKLEVKVIYQGVNTPGQPVFLEGQQQSLHNKDF

SEQ ID NO: 41312 - protein, 1120 aa, Homo sapiens
MPEPTKKEDWTLVETPPGEEQAKQNANSQLSILFIEKPQGGTVKVGEDITFIAKVKAEDLLRKPTIKWFKGKWMDLASKAGKHLQLKETFERHSRVYTFEMQIIKAKDNFAGNYRCEVTYKDKFDSCSFDLEVHESTGTTPNIDIRSAFKRSGEGQEDAGELDFSGLLKRREVKQQEEEPQVDVWELLKNAKPSEYEKIAFQYGITDLRGMLKRLKRMRREEKKSAAFAKILDPAYQVDKGGRVRFVVELADPKLEVKWYKNGQEIRPSTKYIFEHKGCQRILFINNCQMTDDSEYYVTAGDEKCSTELFVREPPIMVTKQLEDTTAYCGERVELECEVSEDDANVKWFKNGEEIIPGPKSRYRIRVEGKKHILIIEGATKADAAEYSVMTTGGQSSAKLSVDLKPLKILTPLTDQTVNLGKEICLKCEISENIPGKWTKNGLPVQESDRLKVVHKGRIHKLVIANALTEDEGDYVFAPDAYNVTLPAKVHVIDPPKIILDGLDADNTVTVIAGNKLRLEIPISGEPPPKAMWSRGDKAIMEGSGRIRTESYPDSSTLVIDIAERDDSGVYHINLKNEAGEAHASIKVKVVDFPDPPVAPTVTEVGDDWCIMNWEPPAYDGGSPILGYFIERKKKQSSRWMRLNFDLCKETTFEPKKMIEGVAYEVRIFAVNAIGISKPSMPSRPFVPLAVTSPPTLLTVDSVTDTTVTMRWRPPDHIGAAGLDGYVLEYCFEGTEDWIVANKDLIDKTKFTITGLPTDAKIFVRVKAVNAAGASEPKYYSQPILVKEIIEPPKIRIPRHLKQTYIRRVGEAVNLVIPFQGKPRPELTWKKDGAEIDKNQINIRNSETDTIIFIRKAERSHSGKYDLQVKVDKFVETASIDIQIIDRPGPPQIVKIEDVWGENVALTWTPPKDDGNAAITGYTIQKADKKSMEWFTVIEHYHRTSATITELVIGNEYYFRVFSENMCGLSEDATMTKESAVIARDGKIYKNPVYEDFDFSEAPMFTQPLVNTYAIAGYNATLNCSVRGNPKPKITWMKNKVAIVDDPRYRMFSNQGVCTLEIRKPSPYDGGTYCCKAVNDLGTVEIECKLEVKVIYQGVNTPGQPVFLEGQQQSLHNKDF

SEQ ID NO: 41313 - protein, 1173 aa, Homo sapiens
MPEPTKKEENEVPAPAPPPEEPSKEKEAGTTPAKDWTLVETPPGEEQAKQNANSQLSILFIEKPQGGTVKVGEDITFIAKVKAEDLLRKPTIKWFKGKWMDLASKAGKHLQLKETFERHSRVYTFEMQIIKAKDNFAGNYRCEVTYKDKFDSCSFDLEVHESTGTTPNIDIRSAFKRSGEGQEDAGELDFSGLLKRREVKQQEEEPQVDVWELLKNAKPSEYEKIAFQYGITDLRGMLKRLKRMRREEKKSAAFAKILDPAYQVDKGGRVRFVVELADPKLEVKWYKNGQEIRPSTKYIFEHKGCQRILFINNCQMTDDSEYYVTAGDEKCSTELFVREPPIMVTKQLEDTTAYCGERVELECEVSEDDANVKWFKNGEEIIPGPKSRYRIRVEGKKHILIIEGATKADAAEYSVMTTGGQSSAKLSVDLKPLKILTPLTDQTVNLGKEICLKCEISENIPGKWTKNGLPVQESDRLKVVHKGRIHKLVIANALTEDEGDYVFAPDAYNVTLPAKVHVIDPPKIILDGLDADNTVTVIAGNKLRLEIPISGEPPPKAMWSRGDKAIMEGSGRIRTESYPDSSTLVIDIAERDDSGVYHINLKNEAGEAHASIKVKVVDFPDPPVAPTVTEVGDDWCIMNWEPPAYDGGSPILGYFIERKKKQSSRWMRLNFDLCKETTFEPKKMIEGVAYEVRIFAVNAIGISKPSMPSRPFVPLAVTSPPTLLTVDSVTDTTVTMRWRPPDHIGAAGLDGYVLEYCFEGSTSAKQSDENGEAAYDLPAEDWIVANKDLIDKTKFTITGLPTDAKIFVRVKAVNAAGASEPKYYSQPILVKEIIEPPKIRIPRHLKQTYIRRVGEAVNLVIPFQGKPRPELTWKKDGAEIDKNQINIRNSETDTIIFIRKAERSHSGKYDLQVKVDKFVETASIDIQIIDRPGPPQIVKIEDVWGENVALTWTPPKDDGNAAITGYTIQKADKKSMEWFTVIEHYHRTSATITELVIGNEYYFRVFSENMCGLSEDATMTKESAVIARDGKIYKNPVYEDFDFSEAPMFTQPLVNTYAIAGYNATLNCSVRGNPKPKITWMKNKVAIVDDPRYRMFSNQGVCTLEIRKPSPYDGGTYCCKAVNDLGTVEIECKLEVKVIYQGVNTPGQPVFLEGQQQVGSPSADSSCKAYLQT

SEQ ID NO: 41314 - protein, 1139 aa, Homo sapiens
MPEPTKKEDEEEVSPPSALPPDWTLVETPPGEEQAKQNANSQLSILFIEKPQGGTVKVGEDITFIAKVKAEDLLRKPTIKWFKGKWMDLASKAGKHLQLKETFERHSRVYTFEMQIIKAKDNFAGNYRCEVTYKDKFDSCSFDLEVHESTGTTPNIDIRSAFKRSGEGQEDAGELDFSGLLKRREVKQQEEEPQVDVWELLKNAKPSEYEKIAFQYGITDLRGMLKRLKRMRREEKKSAAFAKILDPAYQVDKGGRVRFVVELADPKLEVKWYKNGQEIRPSTKYIFEHKGCQRILFINNCQMTDDSEYYVTAGDEKCSTELFVREPPIMVTKQLEDTTAYCGERVELECEVSEDDANVKWFKNGEEIIPGPKSRYRIRVEGKKHILIIEGATKADAAEYSVMTTGGQSSAKLSVDLKPLKILTPLTDQTVNLGKEICLKCEISENIPGKWTKNGLPVQESDRLKVVHKGRIHKLVIANALTEDEGDYVFAPDAYNVTLPAKVHVIDPPKIILDGLDADNTVTVIAGNKLRLEIPISGEPPPKAMWSRGDKAIMEGSGRIRTESYPDSSTLVIDIAERDDSGVYHINLKNEAGEAHASIKVKVVDFPDPPVAPTVTEVGDDWCIMNWEPPAYDGGSPILGYFIERKKKQSSRWMRLNFDLCKETTFEPKKMIEGVAYEVRIFAVNAIGISKPSMPSRPFVPLAVTSPPTLLTVDSVTDTTVTMRWRPPDHIGAAGLDGYVLEYCFEGTEDWIVANKDLIDKTKFTITGLPTDAKIFVRVKAVNAAGASEPKYYSQPILVKEIIEPPKIRIPRHLKQTYIRRVGEAVNLVIPFQGKPRPELTWKKDGAEIDKNQINIRNSETDTIIFIRKAERSHSGKYDLQVKVDKFVETASIDIQIIDRPGPPQIVKIEDVWGENVALTWTPPKDDGNAAITGYTIQKADKKSMEWFTVIEHYHRTSATITELVIGNEYYFRVFSENMCGLSEDATMTKESAVIARDGKIYKNPVYEDFDFSEAPMFTQPLVNTYAIAGYNATLNCSVRGNPKPKITWMKNKVAIVDDPRYRMFSNQGVCTLEIRKPSPYDGGTYCCKAVNDLGTVEIECKLEVKGGLSFCRLLLQGVPPNIIDSYLRDLHSSNPEEY

SEQ ID NO: 41315 - protein, 1134 aa, Homo sapiens
MPEPTKKEEPSKEKEAGTTPAKDWTLVETPPGEEQAKQNANSQLSILFIEKPQGGTVKVGEDITFIAKVKAEDLLRKPTIKWFKGKWMDLASKAGKHLQLKETFERHSRVYTFEMQIIKAKDNFAGNYRCEVTYKDKFDSCSFDLEVHESTGTTPNIDIRSAFKRSGEGQEDAGELDFSGLLKRREVKQQEEEPQVDVWELLKNAKPSEYEKIAFQYGITDLRGMLKRLKRMRREEKKSAAFAKILDPAYQVDKGGRVRFVVELADPKLEVKWYKNGQEIRPSTKYIFEHKGCQRILFINNCQMTDDSEYYVTAGDEKCSTELFVREPPIMVTKQLEDTTAYCGERVELECEVSEDDANVKWFKNGEEIIPGPKSRYRIRVEGKKHILIIEGATKADAAEYSVMTTGGQSSAKLSVDLKPLKILTPLTDQTVNLGKEICLKCEISENIPGKWTKNGLPVQESDRLKVVHKGRIHKLVIANALTEDEGDYVFAPDAYNVTLPAKVHVIDPPKIILDGLDADNTVTVIAGNKLRLEIPISGEPPPKAMWSRGDKAIMEGSGRIRTESYPDSSTLVIDIAERDDSGVYHINLKNEAGEAHASIKVKVVDFPDPPVAPTVTEVGDDWCIMNWEPPAYDGGSPILGYFIERKKKQSSRWMRLNFDLCKETTFEPKKMIEGVAYEVRIFAVNAIGISKPSMPSRPFVPLAVTSPPTLLTVDSVTDTTVTMRWRPPDHIGAAGLDGYVLEYCFEGTEDWIVANKDLIDKTKFTITGLPTDAKIFVRVKAVNAAGASEPKYYSQPILVKEIIEPPKIRIPRHLKQTYIRRVGEAVNLVIPFQGKPRPELTWKKDGAEIDKNQINIRNSETDTIIFIRKAERSHSGKYDLQVKVDKFVETASIDIQIIDRPGPPQIVKIEDVWGENVALTWTPPKDDGNAAITGYTIQKADKKSMEWFTVIEHYHRTSATITELVIGNEYYFRVFSENMCGLSEDATMTKESAVIARDGKIYKNPVYEDFDFSEAPMFTQPLVNTYAIAGYNATLNCSVRGNPKPKITWMKNKVAIVDDPRYRMFSNQGVCTLEIRKPSPYDGGTYCCKAVNDLGTVEIECKLEVKVIYQGVNTPGQPVFLEGQQQSLHNKDF

SEQ ID NO: 41316 - protein, 1127 aa, Homo sapiens
MPEPTKKEENEVPAPAPPPEEPSKEKEAGTTPAKDWTLVETPPGEEQAKQNANSQLSILFIEKPQGGTVKVGEDITFIAKVKAEDLLRKPTIKWFKGKWMDLASKAGKHLQLKETFERHSRVYTFEMQIIKAKDNFAGNYRCEVTYKDKFDSCSFDLEVHESTGTTPNIDIRSAFKRREVKQQEEEPQVDVWELLKNAKPSEYEKIAFQYGITDLRGMLKRLKRMRREEKKSAAFAKILDPAYQVDKGGRVRFVVELADPKLEVKWYKNGQEIRPSTKYIFEHKGCQRILFINNCQMTDDSEYYVTAGDEKCSTELFVREPPIMVTKQLEDTTAYCGERVELECEVSEDDANVKWFKNGEEIIPGPKSRYRIRVEGKKHILIIEGATKADAAEYSVMTTGGQSSAKLSVDLKPLKILTPLTDQTVNLGKEICLKCEISENIPGKWTKNGLPVQESDRLKVVHKGRIHKLVIANALTEDEGDYVFAPDAYNVTLPAKVHVIDPPKIILDGLDADNTVTVIAGNKLRLEIPISGEPPPKAMWSRGDKAIMEGSGRIRTESYPDSSTLVIDIAERDDSGVYHINLKNEAGEAHASIKVKVVDFPDPPVAPTVTEVGDDWCIMNWEPPAYDGGSPILGYFIERKKKQSSRWMRLNFDLCKETTFEPKKMIEGVAYEVRIFAVNAIGISKPSMPSRPFVPLAVTSPPTLLTVDSVTDTTVTMRWRPPDHIGAAGLDGYVLEYCFEGTEDWIVANKDLIDKTKFTITGLPTDAKIFVRVKAVNAAGASEPKYYSQPILVKEIIEPPKIRIPRHLKQTYIRRVGEAVNLVIPFQGKPRPELTWKKDGAEIDKNQINIRNSETDTIIFIRKAERSHSGKYDLQVKVDKFVETASIDIQIIDRPGPPQIVKIEDVWGENVALTWTPPKDDGNAAITGYTIQKADKKSMEWFTVIEHYHRTSATITELVIGNEYYFRVFSENMCGLSEDATMTKESAVIARDGKIYKNPVYEDFDFSEAPMFTQPLVNTYAIAGYNATLNCSVRGNPKPKITWMKNKVAIVDDPRYRMFSNQGVCTLEIRKPSPYDGGTYCCKAVNDLGTVEIECKLEVKVIYQGVNTPGQPVFLEGQQQSLHNKDF

SEQ ID NO: 41317 - protein, 1146 aa, Homo sapiens
MPEPTKKEENEVPAPAPPPEEPSKEKEAGTTPAKDWTLVETPPGEEQAKQNANSQLSILFIEKPQGGTVKVGEDITFIAKVKAEDLLRKPTIKWFKGKWMDLASKAGKHLQLKETFERHSRVYTFEMQIIKAKDNFAGNYRCEVTYKDKFDSCSFDLEVHESTGTTPNIDIRSAFKRSGEGQEDAGELDFSGLLKRREVKQQEEEPQVDVWELLKNAKPSEYEKIAFQYGITDLRGMLKRLKRMRREEKKSAAFAKILDPAYQVDKGGRVRFVVELADPKLEVKWYKNGQEIRPSTKYIFEHKGCQRILFINNCQMTDDSEYYVTAGDEKCSTELFVREPPIMVTKQLEDTTAYCGERVELECEVSEDDANVKWFKNGEEIIPGPKSRYRIRVEGKKHILIIEGATKADAAEYSVMTTGGQSSAKLSVDLKPLKILTPLTDQTVNLGKEICLKCEISENIPGKWTKNGLPVQESDRLKVVHKGRIHKLVIANALTEDEGDYVFAPDAYNVTLPAKVHVIDPPKIILDGLDADNTVTVIAGNKLRLEIPISGEPPPKAMWSRGDKAIMEGSGRIRTESYPDSSTLVIDIAERDDSGVYHINLKNEAGEAHASIKVKVVDFPDPPVAPTVTEVGDDWCIMNWEPPAYDGGSPILGYFIERKKKQSSRWMRLNFDLCKETTFEPKKMIEGVAYEVRIFAVNAIGISKPSMPSRPFVPLAVTSPPTLLTVDSVTDTTVTMRWRPPDHIGAAGLDGYVLEYCFEGTEDWIVANKDLIDKTKFTITGLPTDAKIFVRVKAVNAAGASEPKYYSQPILVKEIIEPPKIRIPRHLKQTYIRRVGEAVNLVIPFQGKPRPELTWKKDGAEIDKNQINIRNSETDTIIFIRKAERSHSGKYDLQVKVDKFVETASIDIQIIDRPGPPQIVKIEDVWGENVALTWTPPKDDGNAAITGYTIQKADKKSMEWFTVIEHYHRTSATITELVIGNEYYFRVFSENMCGLSEDATMTKESAVIARDGKIYKNPVYEDFDFSEAPMFTQPLVNTYAIAGYNATLNCSVRGNPKPKITWMKNKVAIVDDPRYRMFSNQGVCTLEIRKPSPYDGGTYCCKAVNDLGTVEIECKLEVKVIYQGVNTPGQPVFLEGQQQSLHNKDF

SEQ ID NO: 41318 - protein, 187 aa, Homo sapiens
MPVDLSKWSGPLSLQEVDEQPQHPLHVTYAGAAVDELGKVLTPTQVKNRPTSISWDGLDSGKLYTLVLTDPDAPSRKDPKYREWHHFLVVNMKGNDISSGTVLSDYVGSGPPKGTGLHRYVWLVYEQDRPLKCDEPILSNRSGDHRGKFKVASFRKKYELRAPVAGTCYQAEWDDYVPKLYEQLSGK

SEQ ID NO: 41319 - protein, 228 aa, Homo sapiens
MERVKMINVQRLLEAAEFLERRERECEHGYASSFPSMPSPRLQHSKPPRRLSRAQKHSSGSSNTSTANRSTHNELEKNRRAHLRLCLERLKVLIPLGPDCTRHTTLGLLNKAKAHIKKLEEAERKSQHQLENLEREQRFLKWRLEQLQGPQEMERIRMDSIGSTISSDRSDSEREEIEVDVESTEFSHGEVDNISTTSISDIDDHSSLPSIGSDEGYSSASVKLSFTS

SEQ ID NO: 41320 - protein, 192 aa, Homo sapiens
MPSPRLQHSKPPRRLSRAQKHSSGSSNTSTANRSTHNELEKNRRAHLRLCLERLKVLIPLGPDCTRHTTLGLLNKAKAHIKKLEEAERKSQHQLENLEREQRFLKWRLEQLQGPQEMERIRMDSIGSTISSDRSDSEREEIEVDVESTEFSHGEVDNISTTSISDIDDHSSLPSIGSDEGYSSASVKLSFTS

SEQ ID NO: 41321 - protein, 295 aa, Homo sapiens
MGKRGRPRKEARCEGAGLAPAAPPAVPPAVAAPQPPALPEDPAGAKPRCPFSDIFNTSENSMEKHINTFLQNVQILLEAASYLEQIEKENKKCEHGYASSFPSMPSPRLQHSKPPRRLSRAQKHSSGSSNTSTANRSTHNELEKNRRAHLRLCLERLKVLIPLGPDCTRHTTLGLLNKAKAHIKKLEEAERKSQHQLENLEREQRFLKWRLEQLQGPQEMERIRMDSIGSTISSDRSDSEREEIEVDVESTEFSHGEVDNISTTSISDIDDHSSLPSIGSDEGYSSASVKLSFTS

SEQ ID NO: 41322 - protein, 182 aa, Homo sapiens
MPSPRLQHSKPPRRLSRAQKHSSGSSNTSTANRRAHLRLCLERLKVLIPLGPDCTRHTTLGLLNKAKAHIKKLEEAERKSQHQLENLEREQRFLKWRLEQLQGPQEMERIRMDSIGSTISSDRSDSEREEIEVDVESTEFSHGEVDNISTTSISDIDDHSSLPSIGSDEGYSSASVKLSFTS

SEQ ID NO: 41323 - protein, 417 aa, Homo sapiens
MSLSNKLTLDKLDVKGKRVVMRVDFNVPMKNNQITNNQRIKAAVPSIKFCLDNGAKSVVLMSHLGRPDGVPMPDKYSLEPVAVELKSLLGKDVLFLKDCVGPEVEKACANPAAGSVILLENLRFHVEEEGKGKDASGNKVKAEPAKIEAFRASLSKLGDVYVNDAFGTAHRAHSSMVGVNLPQKAGGFLMKKELNYFAKALESPERPFLAILGGAKVADKIQLINNMLDKVNEMIIGGGMAFTFLKVLNNMEIGTSLFDEEGAKIVKDLMSKAEKNGVKITLPVDFVTADKFDENAKTGQATVASGIPAGWMGLDCGPESSKKYAEAVTRAKQIVWNGPVGVFEWEAFARGTKALMDEVVKATSRGCITIIGGGDTATCCAKWNTEDKVSHVSTGGGASLELLEGKVLPGVDALSNI

SEQ ID NO: 41324 - protein, 389 aa, Homo sapiens
MKNNQITNNQRIKAAVPSIKFCLDNGAKSVVLMSHLGRPDGVPMPDKYSLEPVAVELKSLLGKDVLFLKDCVGPEVEKACANPAAGSVILLENLRFHVEEEGKGKDASGNKVKAEPAKIEAFRASLSKLGDVYVNDAFGTAHRAHSSMVGVNLPQKAGGFLMKKELNYFAKALESPERPFLAILGGAKVADKIQLINNMLDKVNEMIIGGGMAFTFLKVLNNMEIGTSLFDEEGAKIVKDLMSKAEKNGVKITLPVDFVTADKFDENAKTGQATVASGIPAGWMGLDCGPESSKKYAEAVTRAKQIVWNGPVGVFEWEAFARGTKALMDEVVKATSRGCITIIGGGDTATCCAKWNTEDKVSHVSTGGGASLELLEGKVLPGVDALSNI

SEQ ID NO: 41325 - protein, 526 aa, Homo sapiens
MSLVEAISLWNEGVLAADKKDWKGALDAFSAVQDPHSRICFNIGCMYTILKNMTEAEKAFTRSINRDKHLAVAYFQRGMLYYQTEKYDLAIKDLKEALIQLRGNQLIDYKILGLQFKLFACEVLYNIAFMYAKKEEWKKAEEQLALATSMKSEPRHSKIDKAMECVWKQKLYEPVVIPVGKLFRPNERQVAQLAKKDYLGKATVVASVVDQDSFSGFAPLQPQAAEPPPRPKTPEIFRALEGEAHRVLFGFVPETKEELQVMPGNIVFVLKKGNDNWATVMFNGQKGLVPCNYLEPVELRIHPQQQPQEESSPQSDIPAPPSSKAPGRPQLSPGQKQKEEPKEVKLSVPMPYTLKVHYKYTVVMKTQPGLPYSQVRDMVSKKLELRLEHTKLSYRPRDSNELVPLSEDSMKDAWGQVKNYCLTLWCENTVGDQGFPDEPKESEKADANNQTTEPQLKKGSQVEALFSYEATQPEDLEFQEGDIILVLSKVNEEWLEGECKGKVGIFPKVFVEDCATTDLESTRREV

SEQ ID NO: 41326 - protein, 420 aa, Homo sapiens
MSLVEAISLWNEGVLAADKKDWKGALDAFSAVQDPHSRICFNIGCMYTILKNMTEAEKAFTRSINRDKHLAVAYFQRGMLYYQTEKYDLAIKDLKEALIQLRGNQLIDYKILGLQFKLFACEVVASVVDQDSFSGFAPLQPQAAEPPPRPKTPEIFRALEGEAHRVLFGFVPETKEELQVMPGNIVFVLKKGNDNWATVMFNGQKGLVPCNYLEPVELRIHPQQQPQEESSPQSDIPAPPSSKAPGRPQLSPGQKQKEEPKEVKLSVPMPYTLKVHYKYTVVMKTQPGLPYSQVRDMVSKKLELRLEHTKLSYRPRDSNELVPLSEDSMKDAWGQVKNYCLTLWCENTVGDQGFPDEPKESEKADANNQTTEPQLKKGSQVEALFSYEATQPEDLEFQEGDIILVLSKVNEEWLEGECKG

SEQ ID NO: 41327 - protein, 481 aa, Homo sapiens
MSLVEAISLWNEGVLAADKKDWKGALDAFSAVQDPHSRICFNIGCMYTILKNMTEAEKAFTRSINRDKHLAVAYFQRGMLYYQTEKYDLAIKDLKEALIQLRGNQLIDYKILGLQFKLFACEKQKLYEPVVIPVGKLFRPNERQVAQLAKKDYLGKATVVASVVDQDSFSGFAPLQPQAAEPPPRPKTPEIFRALEGEAHRVLFGFVPETKEELQVMPGNIVFVLKKGNDNWATVMFNGQKGLVPCNYLEPVELRIHPQQQPQEESSPQSDIPAPPSSKAPGRPQLSPGQKQKEEPKEVKLSVPMPYTLKVHYKYTVVMKTQPGLPYSQVRDMVSKKLELRLEHTKLSYRPRDSNELVPLSEDSMKDAWGQVKNYCLTLWCENTVGDQGFPDEPKESEKADANNQTTEPQLKKGSQVEALFSYEATQPEDLEFQEGDIILVLSKVNEEWLEGECKGKVGIFPKVFVEDCATTDLESTRREV

SEQ ID NO: 41328 - protein, 445 aa, Homo sapiens
MSLVEAISLWNEGVLAADKKDWKGALDAFSAVQDPHSRICFNIGCMYTILKNMTEAEKAFTRSINRDKHLAVAYFQRGMLYYQTEKYDLAIKDLKEALIQLRGNQLIDYKILGLQFKLFACEVVASVVDQDSFSGFAPLQPQAAEPPPRPKTPEIFRALEGEAHRVLFGFVPETKEELQVMPGNIVFVLKKGNDNWATVMFNGQKGLVPCNYLEPVELRIHPQQQPQEESSPQSDIPAPPSSKAPGRPQLSPGQKQKEEPKEVKLSVPMPYTLKVHYKYTVVMKTQPGLPYSQVRDMVSKKLELRLEHTKLSYRPRDSNELVPLSEDSMKDAWGQVKNYCLTLWCENTVGDQGFPDEPKESEKADANNQTTEPQLKKGSQVEALFSYEATQPEDLEFQEGDIILVLSKVNEEWLEGECKGKVGIFPKVFVEDCATTDLESTRREV

SEQ ID NO: 41329 - protein, 248 aa, Homo sapiens
MGLSRVRAVFFDLDNTLIDTAGASRRGMLEVIKLLQSKYHYKEEAEIICDKVQVKLSKECFHPYNTCITDLRTSHWEEAIQETKGGAANRKLAEECYFLWKSTRLQHMTLAEDVKAMLTELRKEVRLLLLTNGDRQTQREKIEACACQSYFDAVVVGGEQREEKPAPSIFYYCCNLLGVQPGDCVMVGDTLETDIQGGLNAGLKATVWINKNGIVPLKSSPVPHYMVSSVLELPALLQSIDCKVSMST

SEQ ID NO: 41330 - protein, 1334 aa, Homo sapiens
MSEAMDQPAGGPGNPRPGEGDDGSMEPGTCQELLHRLRELEAENSALAQANENQRETYERCLDEVANHVVQALLNQKDLREECIKLKKRVFDLERQNQMLSALFQQKLQLTTGSLPQIPLTPLQPPSEPPASPSLSSTEGPAAPLPLGHCAGQREVCWEQQLRPGGPGPPAAPPPALDALSPFLRKKAQILEVLRALEETDPLLLCSPATPWRPPGQGPGSPEPINGELCGPPQPEPSPWAPCLLLGPGNLGGLLHWERLLGGLGGEEDTGRPWGPSRGPPQAQGTSSGPNCAPGSSSSSSSDEAGDPNEAPSPDTLLGALARRQLNLGQLLEDTESYLQAFLAGAAGPLNGDHPGPGQSSSPDQAPPQLSKSKGLPKSAWGGGTPEAHRPGFGATSEGQGPLPFLSMFMGAGDAPLGSRPGHPHSSSQVKSKLQIGPPSPGEAQGPLLPSPARGLKFLKLPPTSEKSPSPGGPQLSPQLPRNSRIPCRNSGSDGSPSPLLARRGLGGGELSPEGAQGLPTSPSPCYTTPDSTQLRPPQSALSTTLSPGPVVSPCYENILDLSRSTFRGPSPEPPPSPLQVPTYPQLTLEVPQAPEVLRSPGVPPSPCLPESYPYGSPQEKSLDKAGSESPHPGRRTPGNSSKKPSQGSGRRPGDPGSTPLRDRLAALGKLKTGPEGALGSEKNGVPARPGTEKTRGPGKSGESAGDMVPSIHRPLEQLEAKGGIRGAVALGTNSLKQQEPGLMGDPGARVYSSHSMGARVDLEPVSPRSCLTKVELAKSRLAGALCPQVPRTPAKVPTSAPSLGKPNKSPHSSPTKLPSKSPTKVVPRPGAPLVTKESPKPDKGKGPPWADCGSTTAQSTPLVPGPTDPSQGPEGLAPHSAIEEKVMKGIEENVLRLQGQERAPGAEVKHRNTSSIASWFGLKKSKLPALNRRTEATKNKEGAGGGSPLRREVKMEARKLEAESLNISKLMAKAEDLRRALEEEKAYLSSRARPRPGGPAPGPNTGLGQVQGQLAGMYQGADTFMQQLLNRVDGKELPSKSWREPKPEYGDFQPVSSDPKSPWPACGPRNGLVGPLQGCGKPPGKPSSEPGRREETPSEDSLAEPVPTSHFTACGSLTRTLDSGIGTFPPPDHGSSGTPSKNLPKTKPPRLDPPPGVPPARPPPLTKVPRRAHTLEREVPGIEELLVSGRHPSMPAFPALLPAAPGHRGHETCPDDPCEDPGPTPPVQLAKNWTFPNTRAAGSSSDPLMCPPRQLEGLPRTPMALPVDRKRSQEPSRPSPTPQGPPFGGSRTPSTSDMAEEGRVASGGPPGLETSESLSDSLYDSLSSCGSQG

SEQ ID NO: 41331 - protein, 1289 aa, Homo sapiens
MSEAMDQPAGGPGNPRPGEGDDGSMEPGTCQELLHRLRELEAENSALAQANENQRETYERCLDEVANHVVQALLNQKDLREECIKLKKRVFDLERQNQMLSALFQQKLQLTTGSLPQIPLTPLQPPSEPPASPSLSSTEGPAAPLPLGHCAGQREVCWEQQLRPGGPGPPAAPPPALDALSPFLRKKAQILEVLRALEETDPLLLCSPATPWRPPGQGPGSPEPINGELCGPPQPEPSPWAPCLLLGPGNLGGLLHWERLLGGLGGEEDTGRPWGPSRGPPQAQGTSSGPNCAPGSSSSSSSDEAGDPNEAPSPDTLLGALARRQLNLGQLLEDTESYLQAFLAGAAGPLNGDHPGPGQSSSPDQAPPQLSKSKGLPKSAWGGGTPEAHRPGFGATSEGQGPLPFLSMFMGAGDAPLGSRPGHPHSSSQVKSKLQIGPPSPGEAQGPLLPSPARGLKFLKLPPTSEKSPSPGGPQLSPQLPRNSRIPCRNSGSDGSPSPLLARRGLGGGELSPEGAQGLPTSPSPCYTTPDSTQLRPPQSALSTTLSPGPVVSPCYENILDLSRSTFRGPSPEPPPSPLQVPTYPQLTLEVPQAPEVLRSPGVPPSPCLPESYPYGSPQEKSLDKAGSESPHPGRRTPGNSSKKPSQGSGRRPGDPGSTPLRDRLAALGKLKTGPEGALGSEKNGVPARPGTEKTRGPGKSGESAGDMVPSIHRPLEQLEAKGGIRGAVALGTNSLKQQEPGLMGDPGARVYSSHSMGARVDLEPVSPRSCLTKVELAKSRLAGALCPQVPRTPAKVPTSAPSLGKPNKSPHSSPTKLPSKSPTKVVPRPGAPLVTKESPKPDKGKGPPWADCGSTTAQSTPLVPGPTDPSQGPEGLAPHSAIEEKVMKGIEENVLRLQGQERAPGAEVKHRNTSSIASWFGLKKSKLPALNRRTEATKNKEGAGGGSPLRREVKMEARKLEAESLNISKLMAKAEDLRRALEEEKAYLSSRARPRPGGPAPGPNTGLGQVQGQLAGMYQGADTFMQQLLNRVDGKELPSKSWREPKPEYGDFQPVSSDPKSPWPACGPRNGLVGPLQGCGKPPGKPSSEPGRREETPSEDSLAEPVPTSHFTACGSLTRTLDSGIGTFPPPDHGSSGTPSKNLPKTKPPRLDPPPGVPPARPPPLTKVPRRAHTLEREVPGIEELLVSGRHPSMPAFPALLPAAPGHRGHETCPDDPCEDPGPTPPVQLAKNWTFPNTRAAGSSSDPLMCPPRQLEGLPRTPMVRIAAEERERTREQEGVMWGDQFLQ

SEQ ID NO: 41332 - protein, 112 aa, Homo sapiens
MSEAMDQPAGGPGNPRPGEGDDGSMEPGTCQELLHRLRELEAENSALAQANENQRETYERCLDEVCGSVVGLGGCGSSAPGRSWGQLMALPRGFLSPGCQPCGTGVAEPEGE

SEQ ID NO: 41333 - protein, 127 aa, Homo sapiens
MTAAATATVLKEGVLEKRSGGLLQLWKRKRCVLTERGLQLFEAKGTGGRPKELSFARIKAVECVESTGRHIYFTLVTEGGGEIDFRCPLEDPGWNAQITLGLVKFKNQQAIQTVRARQSLGTGTLVS

SEQ ID NO: 41334 - protein, 102 aa, Homo sapiens
MTTATPLGDTTFFSLNMTTRGEDFLYKSSGAIVAAVVVVVIIIFTVVLILLKMYNRKMRTRRELEPKGPKPTAPSAVGPNSNGSQHPATVTFSPVDVQVETR

SEQ ID NO: 41335 - protein, 869 aa, Homo sapiens
MRELVNIPLVHILTLVAFSGTEKLPKAPVITTPLETVDALVEEVATFMCAVESYPQPEISWTRNKILIKLFDTRYSIRENGQLLTILSVEDSDDGIYCCTANNGVGGAVESCGALQVKMKPKITRPPINVKIIEGLKAVLPCTTMGNPKPSVSWIKGDSPLRENSRIAVLESGSLRIHNVQKEDAGQYRCVAKNSLGTAYSKVVKLEVEVFARILRAPESHNVTFGSFVTLHCTATGIPVPTITWIENGNAVSSGSIQESVKDRVIDSRLQLFITKPGLYTCIATNKHGEKFSTAKAAATISIAEWSKPQKDNKGYCAQYRGEVCNAVLAKDALVFLNTSYADPEEAQELLVHTAWNELKVVSPVCRPAAEALLCNHIFQECSPGVVPTPIPICREYCLAVKELFCAKEWLVMEEKTHRGLYRSEMHLLSVPECSKLPSMHWDPTACARLPHLDYNKENLKTFPPMTSSKPSVDIPNLPSSSSSSFSVSPTYSMTVIISIMSSFAIFVLLTITTLYCCRRRKQWKNKKRESAAVTLTTLPSELLLDRLHPNPMYQRMPLLLNPKLLSLEYPRNNIEYVRDIGEGAFGRVFQARAPGLLPYEPFTMVAVKMLKEEASADMQADFQREAALMAEFDNPNIVKLLGVCAVGKPMCLLFEYMAYGDLNEFLRSMSPHTVCSLSHSDLSMRAQVSSPGPPPLSCAEQLCIARQVAAGMAYLSERKFVHRDLATRNCLVGENMVVKIADFGLSRNIYSADYYKANENDAIPIRWMPPESIFYNRYTTESDVWAYGVVLWEIFSYGLQPYYGMAHEEVIYYVRDGNILSCPENCPVELYNLMRLCWSKLPADRPSFTSIHRILERMCERAEGTVSV

SEQ ID NO: 41336 - protein, 783 aa, Homo sapiens
MRELVNIPLVHILTLVAFSGTEKLPKAPVITTPLETVDALVEEVATFMCAVESYPQPEISWTRNKILIKLFDTRYSIRENGQLLTILSVEDSDDGIYCCTANNGVGGAVESCGALQVKMKPKITRPPINVKIIEGLKAVLPCTTMGNPKPSVSWIKGDSPLRENSRIAVLESGSLRIHNVQKEDAGQYRCVAKNSLGTAYSKVVKLEVEEESEPEQDTKVFARILRAPESHNVTFGSFVTLHCTATGIPVPTITWIENGNAVSSGSIQESVKDRVIDSRLQLFITKPGLYTCIATNKHGEKFSTAKAAATISIAEWREYCLAVKELFCAKEWLVMEEKTHRGLYRSEMHLLSVPECSKLPSMHWDPTACARLPHLAFPPMTSSKPSVDIPNLPSSSSSSFSVSPTYSMTVIISIMSSFAIFVLLTITTLYCCRRRKQWKNKKRESAAVTLTTLPSELLLDRLHPNPMYQRMPLLLNPKLLSLEYPRNNIEYVRDIGEGAFGRVFQARAPGLLPYEPFTMVAVKMLKEEASADMQADFQREAALMAEFDNPNIVKLLGVCAVGKPMCLLFEYMAYGDLNEFLRSMSPHTVCSLSHSDLSMRAQVSSPGPPPLSCAEQLCIARQVAAGMAYLSERKFVHRDLATRNCLVGENMVVKIADFGLSRNIYSADYYKANENDAIPIRWMPPESIFYNRYTTESDVWAYGVVLWEIFSYGLQPYYGMAHEEVIYYVRDGNILSCPENCPVELYNLMRLCWSKLPADRPSFTSIHRILERMCERAEGTVSV

SEQ ID NO: 41337 - protein, 773 aa, Homo sapiens
MRELVNIPLVHILTLVAFSGTEKLPKAPVITTPLETVDALVEEVATFMCAVESYPQPEISWTRNKILIKLFDTRYSIRENGQLLTILSVEDSDDGIYCCTANNGVGGAVESCGALQVKMKPKITRPPINVKIIEGLKAVLPCTTMGNPKPSVSWIKGDSPLRENSRIAVLESGSLRIHNVQKEDAGQYRCVAKNSLGTAYSKVVKLEVEVFARILRAPESHNVTFGSFVTLHCTATGIPVPTITWIENGNAVSSGSIQESVKDRVIDSRLQLFITKPGLYTCIATNKHGEKFSTAKAAATISIAEWREYCLAVKELFCAKEWLVMEEKTHRGLYRSEMHLLSVPECSKLPSMHWDPTACARLPHLAFPPMTSSKPSVDIPNLPSSSSSSFSVSPTYSMTVIISIMSSFAIFVLLTITTLYCCRRRKQWKNKKRESAAVTLTTLPSELLLDRLHPNPMYQRMPLLLNPKLLSLEYPRNNIEYVRDIGEGAFGRVFQARAPGLLPYEPFTMVAVKMLKEEASADMQADFQREAALMAEFDNPNIVKLLGVCAVGKPMCLLFEYMAYGDLNEFLRSMSPHTVCSLSHSDLSMRAQVSSPGPPPLSCAEQLCIARQVAAGMAYLSERKFVHRDLATRNCLVGENMVVKIADFGLSRNIYSADYYKANENDAIPIRWMPPESIFYNRYTTESDVWAYGVVLWEIFSYGLQPYYGMAHEEVIYYVRDGNILSCPENCPVELYNLMRLCWSKLPADRPSFTSIHRILERMCERAEGTVSV

SEQ ID NO: 41338 - protein, 1464 aa, Homo sapiens
MSGMGENTSDPSRAETRKRKECPDQLGPSPKRNTEKRNREQENKYIEELAELIFANFNDIDNFNFKPDKCAILKETVKQIRQIKEQEKAAAANIDEVQKSDVSSTGQGVIDKDALGPMMLEALDGFFFVVNLEGNVVFVSENVTQYLRYNQEELMNKSVYSILHVGDHTEFVKNLLPKSIVNGGSWSGEPPRRNSHTFNCRMLVKPLPDSEEEGHDNQEAHQKYETMQCFAVSQPKSIKEEGEDLQSCLICVARRVPMKERPVLPSSESFTTRQDLQGKITSLDTSTMRAAMKPGWEDLVRRCIQKFHAQHEGESVSYAKRHHHEVLRQGLAFSQIYRFSLSDGTLVAAQTKSKLIRSQTTNEPQLVISLHMLHREQNVCVMNPDLTGQTMGKPLNPISSNSPAHQALCSGNPGQDMTLSSNINFPINGPKEQMGMPMGRFGGSGGMNHVSGMQATTPQGSNYALKMNSPSQSSPGMNPGQPTSMLSPRHRMSPGVAGSPRIPPSQFSPAGSLHSPVGVCSSTGNSHSYTNSSLNALQALSEGHGVSLGSSLASPDLKMGNLQNSPVNMNPPPLSKMGSLDSKDCFGLYGEPSEGTTGQAESSCHPGEQKETNDPNLPPAVSSERADGQSRLHDSKGQTKLLQLLTTKSDQMEPSPLASSLSDTNKDSTGSLPGSGSTHGTSLKEKHKILHRLLQDSSSPVDLAKLTAEATGKDLSQESSSTAPGSEVTIKQEPVSPKKKENALLRYLLDKDDTKDIGLPEITPKLERLDSKTDPASNTKLIAMKTEKEEMSFEPGDQPGSELDNLEEILDDLQNSQLPQLFPDTRPGAPAGSVDKQAIINDLMQLTAENSPVTPVGAQKTALRISQSTFNNPRPGQLGRLLPNQNLPLDITLQSPTGAGPFPPIRNSSPYSVIPQPGMMGNQGMIGNQGNLGNSSTGMIGNSASRPTMPSGEWAPQSSAVRVTCAATTSAMNRPVQGGMIRNPAASIPMRPSSQPGQRQTLQSQVMNIGPSELEMNMGGPQYSQQQAPPNQTAPWPESILPIDQASFASQNRQPFGSSPDDLLCPHPAAESPSDEGALLDQLYLALRNFDGLEEIDRALGIPELVSQSQAVDPEQFSSQDSNIMLEQKAPVFPQQYASQAQMAQGSYSPMQDPNFHTMGQRPSYATLRMQPRPGLRPTGLVQNQPNQLRLQLQHRLQAQQNRQPLMNQISNVSNVNLTLRPGVPTQAPINAQMLAQRQREILNQHLRQRQMHQQQQVQQRTLMMRGQGLNMTPSMVAPSGMPATMSNPRIPQANAQQFPFPPNYGISQQPDPGFTGATTPQSPLMSPRMAHTQSPMMQQSQANPAYQAPSDINGWAQGNMGGNSMFSQQSPPHFGQQANTSMYSNNMNINVSMATNTGGMSSMNQMTGQISMTSVTSVPTSGLSSMGPEQVNDPALRGGNLFPNQLPGMDMIKQEGDTTRKYC

SEQ ID NO: 41339 - protein, 640 aa, Homo sapiens
MGTRSSPEEGTPPPLVPECDVEVQPQGHPEESREQEASEVLAEPSSRGGAEQQAEEEEVGEGSSTESSRDAPEATPPIAMAATPPASTSSREGVRGAARRLQGQQLEALTRVALMEQRVKELQRQRKELRIEMEVEVALLRGELAGERVAARREEEQLRELLEQQAASEQRGRQQREQEQRRLSQERDRLEGLRQRLRKAQGQLDSQPEDQRERLLQGVQEMREQLDVAQRAYEDLEFQQLERESRQEEEDRDSPGPQVPDPKVQELQASMAQHRRGALQHRIRVLEEQLKSLGEQMAAESRGLSRKKEEALQALSQERSRLLELNCLQGTPGGDFSEPNPALTKLLFTQKTDRQLLVLQDAVAHSAATPTSSCLFSVHSSLQGSIGLQRTGSLPRKRGERGSQRGSPRPLSFHCTESLEASALPPAVGDSGRYPLYQLLNCGRGNSCGAIHPDIAHMERLLQQAMAERERLLKAREGTRRGTEGSSGPAVPAITAPPTPPHPPGPRILDLRQHLEGWGHNPENCPHVQVSGCCCRGPLVKMGGRIKTWRKRWFCFDRQARRLAYYADKEETKLKGVIYFQAIEEVYYDHLRCAFKSPNPRLTFCVKTYERLFYMVAPSPEAMRIWMDVIVTAADENHAP

SEQ ID NO: 41340 - protein, 279 aa, Homo sapiens
MGTRSSPEEGTPPPLVPECDVEVQPQGHPEESREQEASEVLAEPSSRGGAEQQAEEEEVGEGSSTESSRDAPEATPPIAMAATPPASTSSREGVRGAARRLQGQQLEALTRVALMEQRVKELQRQRKELRIEMEVEVALLRGELAGERVAARREEEQLRELLEQQAASEQRGRQQREQEQRRLSQERDRLEGLRQRLRKAQGQLDSQPEDQRERLLQGVQEMREQLDVAQRAYEDLEFQQLERESRQEEEDRDSPGPQVPDPKVQELQASMAQHRVSHA

SEQ ID NO: 41341 - protein, 369 aa, Homo sapiens
MKLEASCGTATSEVPKPEKKTARDAEPSSETRPQEVEAEPRSGSGPEAEAEPLDFVVATEREFEEVLAISGGIYGGLDYLPSRYHSWLRDPDRTVVLAKRNGGVIALESVNVIDAGETVLVEGLRVAPWERGKGVAGLLQRFCSQLVKRQHPGVKVARLTRDDQLGPRELKKYRLITKQGILLVRFNASALLAGLGARLAALRTSGTFSPLPTEAVSEAGGDVARLLLSPSVQRDVLPGGTIIQDWQPYRPSESNLRLLAAKGLEWRVDSRARPRVLTLCTRPFPIPHGGDGTWRYLNIDAFGSDGAQVQSQLLWHLQRQAPRLVGLNVMCQLFLEPQLWSQLADFCQVGLGLELVKGYTEQYLLEADI

SEQ ID NO: 41342 - protein, 112 aa, Homo sapiens
MKLEASCGTATSEVPKPEKKTARDAEPSSETRPQEVEAEPRSGSGPEAEAEPLDFVVATEREFEEVLAISGGIYGGLDYLPSRYHSWLRDPDRTVVLAKRNGGVVSPGARPR

SEQ ID NO: 41343 - protein, 98 aa, Homo sapiens
MAHEHGHEHGHHKMELPDYRQWKIEGTPLETIQKKLAAKGLRDPWGRNEAWRYMGGFAKSVSFSDVFFKGFKWGFAAFVVAVGAEYYLESLNKDKKHH

SEQ ID NO: 41344 - protein, 418 aa, Homo sapiens
MQALVLLLCIGALLGHSSCQNPASPPEEGSPDPDSTGALVEEEDPFFKVPVNKLAAAVSNFGYDLYRVRSSTSPTTNVLLSPLSVATALSALSLGAEQRTESIIHRALYYDLISSPDIHGTYKELLDTVTAPQKNLKSASRIVFEKKLRIKSSFVAPLEKSYGTRPRVLTGNPRLDLQEINNWVQAQMKGKLARSTKEIPDEISILLLGVAHFKGQWVTKFDSRKTSLEDFYLDEERTVRVPMMSDPKAVLRYGLDSDLSCKIAQLPLTGSMSIIFFLPLKVTQNLTLIEESLTSEFIHDIDRELKTVQAVLTVPKLKLSYEGEVTKSLQEMKLQSLFDSPDFSKITGKPIKLTQVEHRAGFEWNEDGAGTTPSPGLQPAHLTFPLDYHLNQPFIFVLRDTDTGALLFIGKILDPRGP

SEQ ID NO: 41345 - protein, 594 aa, Homo sapiens
MVLLHVLFEHAVGYALLALKEVEEISLLQPQVEESVLNLGKFHSIVRLVAFCPFASSQVALENANAVSEGVVHEDLRLLLETHLPSKKKKVLLGVGDPKIGAAIQEELGYNCQTGGVIAEILRGVRLHFHNLVKGLTDLSACKAQLGLGHSYSRAKVKFNVNRVDNMIIQSISLLDQLDKDINTFSMRVREWYGYHFPELVKIINDNATYCRLAQFIGNRRELNEDKLEKLEELTMDGAKAKAILDASRSSMGMDISAIDLINIESFSSRVVSLSEYRQSLHTYLRSKMSQVAPSLSALIGEAVGARLIAHAGSLTNLAKYPASTVQILGAEKALFRALKTRGNTPKYGLIFHSTFIGRAAAKNKGRISRYLANKCSIASRIDCFSEVPTSVFGEKLREQVEERLSFYETGEIPRKNLDVMKEAMVQAEEAAAEITRKLEKQEKKRLKKEKKRLAALALASSENSSSTPEECEEMSEKPKKKKKQKPQEVPQENGMEDPSISFSKPKKKKSFSKEELMSSDLEETAGSTSIPKRKKSTPKEETVNDPEEAGHRSGSKKKRKFSKEEPVSSGPEEAVGKSSSKKKKKFHKASQED

SEQ ID NO: 41346 - protein, 189 aa, Homo sapiens
MAAMSLLRRVSVTAVAALSGRPLGTRLGFGGFLTRGFPKAAAPVRHSGDHGKRLFVIRPSRFYDRRFLKLLRFYIALTGIPVAIFITLVNVFIGQAELAEIPEGYVPEHWEYYKHPISRWIARNFYDSPEKIYERTMAVLQIEAEKAELRVKELEVRKLMHVRGDGPWYYYETIDKELIDHSPKATPDN

SEQ ID NO: 41347 - protein, 137 aa, Homo sapiens
MAAMSLLRRVSVTAVAALSGRPLGTRLGFGGFLTRGFPKAAGQAELAEIPEGYVPEHWEYYKHPISRWIARNFYDSPEKIYERTMAVLQIEAEKAELRVKELEVRKLMHVRGDGPWYYYETIDKELIDHSPKATPDN

SEQ ID NO: 41348 - protein, 529 aa, Homo sapiens
MLVLFETSVGYAIFKVLNEKKLQEVDSLWKEFETPEKANKIVKLKHFEKFQDTAEALAAFTALMEGKINKQLKKVLKKIVKEAHEPLAVADAKLGGVIKEKLNLSCIHSPVVNELMRGIRSQMDGLIPGVEPREMAAMCLGLAHSLSRYRLKFSADKVDTMIVQAISLLDDLDKELNNYIMRCREWYGWHFPELGKIISDNLTYCKCLQKVGDRKNYASAKLSELLPEEVEAEVKAAAEISMGTEVSEEDICNILHLCTQVIEISEYRTQLYEYLQNRMMAIAPNVTVMVGELVGARLIAHAGSLLNLAKHAASTVQILGAEKALFRALKSRRDTPKYGLIYHASLVGQTSPKHKGKISRMLAAKTVLAIRYDAFGEDSSSAMGVENRAKLEARLRTLEDRGIRKISGTGKALAKTEKYEHKSEVKTYDPSGDSTLPTCSKKRKIEQVDKEDEITEKKAKKAKIKVKVEEEEEEKVAEEEETSVKKKKKRGKKKHIKEEPLSEEEPCTSTAIASPEKKKKKKKKRENED

SEQ ID NO: 41349 - protein, 321 aa, Homo sapiens
MAAAEAGGDDARCVRLSAERAQALLADVDTLLFDCDGVLWRGETAVPGAPEALRALRARGKRLGFITNNSSKTRAAYAEKLRRLGFGGPAGPGASLEVFGTAYCTALYLRQRLAGAPAPKAYVLGSPALAAELEAVGVASVGVGPEPLQGEGPGDWLHAPLEPDVRAVVVGFDPHFSYMKLTKALRYLQQPGCLLVGTNMDNRLPLENGRFIAGTGCLVRAVEMAAQRQADIIGKPSRFIFDCVSQEYGINPERTVMVGDRLDTDILLGATCGLKTILTLTGVSTLGDVKNNQESDCVSKKKMVPDFYVDSIADLLPALQG

SEQ ID NO: 41350 - protein, 140 aa, Homo sapiens
MDSRIPYDDYPVVFLPAYENPPAWIPPHERVHHPDYNNELTQFLPRTITLKKPPGAQLGFNIRGGKASQLGIFISKVIPDSDAHRAGLQEGDQVLAVNDVDFQDIEHSKAVEILKTAREISMRVRFFPYNYHRQKERTVH

SEQ ID NO: 41351 - protein, 171 aa, Homo sapiens
MGWSCCLKLAGLLSLLNHFLSVLIHSSRALPEDSRIPYDDYPVVFLPAYENPPAWIPPHERVHHPDYNNELTQFLPRTITLKKPPGAQLGFNIRGGKASQLGIFISKVIPDSDAHRAGLQEGDQVLAVNDVDFQDIEHSKAVEILKTAREISMRVRFFPYNYHRQKERTVH

SEQ ID NO: 41352 - protein, 817 aa, Homo sapiens
MMKTEPRGPGGPLRSASPHRSAYEAGIQALKPPDAPGPDEAPKGAHHKKYGSNVHRIKSMFLQMGTTAGPSGEAGGGAGLAEAPRASERGVRLSLPRASSLNENVDHSALLKLGTSVSERVSRFDSKPAPSAQPAPPPHPPSRLQETRKLFERSAPAAAGGDKEAAARRLLRQERAGLQDRKLDVVVRFNGSTEALDKLDADAVSPTVSQLSAVFEKADSRTGLHRGPGLPRAAGVPQVNSKLVSKRSRVFQPPPPPPPAPSGDAPAEKERCPAGQQPPQHRVAPARPPPKPREVRKIKPVEVEESGESEAESAPGEVIQAEVTVHAALENGSTVATAASPAPEEPKAQAAPEKEAAAVAPPERGVGNGRAPDVAPEEVDESKKEDFSEADLVDVSAYSGLGEDSAGSALEEDDEDDEEDGEPPYEPESGCVEIPGLSEEEDPAPSRKIHFSTAPIQVFSTYSNEDYDRRNEDVDPMAASAEYELEKRVERLELFPVELEKDSEGLGISIIGMGAGADMGLEKLGIFVKTVTEGGAAHRDGRIQVNDLLVEVDGTSLVGVTQSFAASVLRNTKGRVRFMIGRERPGEQSEVAQLIQQTLEQERWQREMMEQRYAQYGEDDEETGEYATDEDEELSPTFPGGEMAIEVFELAENEDALSPVDMEPEKLVHKFKELQIKHAVTEAEIQQLKRKLQSLEQEKGRWRVEKAQLEQSVEENKERMEKLEGYWGEAQSLCQAVDEHLRETQAQYQALERKYSKAKRLIKDYQQKEIEFLKKETAQRRVLEESELARKEEMDKLLDKISELEGNLQTLRNSNST

SEQ ID NO: 41353 - protein, 968 aa, Homo sapiens
MAEDDPYLGRPEQMFHLDPSLTHTIFNPEVFQPQMALPTDGPYLQILEQPKQRGFRFRYVCEGPSHGGLPGASSEKNKKSYPQVKICNYVGPAKVIVQLVTNGKNIHLHAHSLVGKHCEDGICTVTAGPKDMVVGFANLGILHVTKKKVFETLEARMTEACIRGYNPGLLVHPDLAYLQAEGGGDRQLGDREKELIRQAALQQTKEMDLSVVRLMFTAFLPDSTGSFTRRLEPVVSDAIYDSKAPNASNLKIVRMDRTAGCVTGGEEIYLLCDKVQKDDIQIRFYEEEENGGVWEGFGDFSPTDVHRQFAIVFKTPKYKDINITKPASVFVQLRRKSDLETSEPKPFLYYPEIKDKEEVQRKRQKLMPNFSDSFGGGSGAGAGGGGMFGSGGGGGGTGSTGPGYSFPHYGFPTYGGITFHPGTTKSNAGMKHGTMDTESKKDPEGCDKSDDKNTVNLFGKVIETTEQDQEPSEATVGNGEVTLTYATGTKEESAGVQDNLFLEKAMQLAKRHANALFDYAVTGDVKMLLAVQRHLTAVQDENGDSVLHLAIIHLHSQLVRDLLEVTSGLISDDIINMRNDLYQTPLHLAVITKQEDVVEDLLRAGADLSLLDRLGNSVLHLAAKEGHDKVLSILLKHKKAALLLDHPNGDGLNAIHLAMMSNSLPCLLLLVAAGADVNAQEQKSGRTALHLAVEHDNISLAGCLLLEGDAHVDSTTYDGTTPLHIAAGRGSTRLAALLKAAGADPLVENFEPLYDLDDSWENAGEDEGVVPGTTPLDMATSWQVFDILNGKPYEPEFTSDDLLAQGDMKQLAEDVKLQLYKLLEIPDPDKNWATLAQKLGLGILNNAFRLSPAPSKTLMDNYEVSGGTVRELVEALRQMGYTEAIEVIQAASSPVKTTSQAHSLPLSPASTRQQIDELRDSDSVCDSGVETSFRKLSFTESLTSGASLLTLNKMPHDYGQEGPLEGKI

SEQ ID NO: 41354 - protein, 969 aa, Homo sapiens
MAEDDPYLGRPEQMFHLDPSLTHTIFNPEVFQPQMALPTADGPYLQILEQPKQRGFRFRYVCEGPSHGGLPGASSEKNKKSYPQVKICNYVGPAKVIVQLVTNGKNIHLHAHSLVGKHCEDGICTVTAGPKDMVVGFANLGILHVTKKKVFETLEARMTEACIRGYNPGLLVHPDLAYLQAEGGGDRQLGDREKELIRQAALQQTKEMDLSVVRLMFTAFLPDSTGSFTRRLEPVVSDAIYDSKAPNASNLKIVRMDRTAGCVTGGEEIYLLCDKVQKDDIQIRFYEEEENGGVWEGFGDFSPTDVHRQFAIVFKTPKYKDINITKPASVFVQLRRKSDLETSEPKPFLYYPEIKDKEEVQRKRQKLMPNFSDSFGGGSGAGAGGGGMFGSGGGGGGTGSTGPGYSFPHYGFPTYGGITFHPGTTKSNAGMKHGTMDTESKKDPEGCDKSDDKNTVNLFGKVIETTEQDQEPSEATVGNGEVTLTYATGTKEESAGVQDNLFLEKAMQLAKRHANALFDYAVTGDVKMLLAVQRHLTAVQDENGDSVLHLAIIHLHSQLVRDLLEVTSGLISDDIINMRNDLYQTPLHLAVITKQEDVVEDLLRAGADLSLLDRLGNSVLHLAAKEGHDKVLSILLKHKKAALLLDHPNGDGLNAIHLAMMSNSLPCLLLLVAAGADVNAQEQKSGRTALHLAVEHDNISLAGCLLLEGDAHVDSTTYDGTTPLHIAAGRGSTRLAALLKAAGADPLVENFEPLYDLDDSWENAGEDEGVVPGTTPLDMATSWQVFDILNGKPYEPEFTSDDLLAQGDMKQLAEDVKLQLYKLLEIPDPDKNWATLAQKLGLGILNNAFRLSPAPSKTLMDNYEVSGGTVRELVEALRQMGYTEAIEVIQAASSPVKTTSQAHSLPLSPASTRQQIDELRDSDSVCDSGVETSFRKLSFTESLTSGASLLTLNKMPHDYGQEGPLEGKI

SEQ ID NO: 41355 - protein, 788 aa, Homo sapiens
MNGLCCMALDREKELIRQAALQQTKEMDLSVVRLMFTAFLPDSTGSFTRRLEPVVSDAIYDSKAPNASNLKIVRMDRTAGCVTGGEEIYLLCDKVQKDDIQIRFYEEEENGGVWEGFGDFSPTDVHRQFAIVFKTPKYKDINITKPASVFVQLRRKSDLETSEPKPFLYYPEIKDKEEVQRKRQKLMPNFSDSFGGGSGAGAGGGGMFGSGGGGGGTGSTGPGYSFPHYGFPTYGGITFHPGTTKSNAGMKHGTMDTESKKDPEGCDKSDDKNTVNLFGKVIETTEQDQEPSEATVGNGEVTLTYATGTKEESAGVQDNLFLEKAMQLAKRHANALFDYAVTGDVKMLLAVQRHLTAVQDENGDSVLHLAIIHLHSQLVRDLLEVTSGLISDDIINMRNDLYQTPLHLAVITKQEDVVEDLLRAGADLSLLDRLGNSVLHLAAKEGHDKVLSILLKHKKAALLLDHPNGDGLNAIHLAMMSNSLPCLLLLVAAGADVNAQEQKSGRTALHLAVEHDNISLAGCLLLEGDAHVDSTTYDGTTPLHIAAGRGSTRLAALLKAAGADPLVENFEPLYDLDDSWENAGEDEGVVPGTTPLDMATSWQVFDILNGKPYEPEFTSDDLLAQGDMKQLAEDVKLQLYKLLEIPDPDKNWATLAQKLGLGILNNAFRLSPAPSKTLMDNYEVSGGTVRELVEALRQMGYTEAIEVIQAASSPVKTTSQAHSLPLSPASTRQQIDELRDSDSVCDSGVETSFRKLSFTESLTSGASLLTLNKMPHDYGQEGPLEGKI

SEQ ID NO: 41356 - protein, 233 aa, Homo sapiens
MDNQGVIYSDLNLPPNPKRQQRKPKGNKNSILATEQEITYAELNLQKASQDFQGNDKTYHCKDLPSAPEKLIVGILGIICLILMASVVTIVVIPSTLIQRHNNSSLNTRTQKARHCGHCPEEWITYSNSCYYIGKERRTWEESLLACTSKNSSLLSIDNEEEMKFLSIISPSSWIGVFRNSSHHPWVTMNGLAFKHEIKDSDNAELNCAVLQVNRLKSAQCGSSIIYHCKHKL

SEQ ID NO: 41357 - protein, 215 aa, Homo sapiens
MDNQGVIYSDLNLPPNPKRQQRKPKGNKNSILATEQEITYAELNLQKASQDFQGNDKTYHCKDLPSAPEKLIVGILGIICLILMASVVTIVVIPSRHCGHCPEEWITYSNSCYYIGKERRTWEESLLACTSKNSSLLSIDNEEEMKFLSIISPSSWIGVFRNSSHHPWVTMNGLAFKHEIKDSDNAELNCAVLQVNRLKSAQCGSSIIYHCKHKL

SEQ ID NO: 41358 - protein, 114 aa, Homo sapiens
MIARRNPEPLRFLPDEARSLPPPKLTDPRLLYIGFLGYCSGLIDNLIRRRPIATAGLHRQLLYITAFFFAGYYLVKREDYLYAVRDREMFGYMKLHPEDFPEEDVYCCGAERRG

SEQ ID NO: 41359 - protein, 333 aa, Homo sapiens
MAASAHGSVWGPLRLGIPGLCCRRPPLGLYARMRRLPGPEVSGRSVAAASGPGAWGTDHYCLELLRKRDYEGYLCSLLLPAESRSSVFALRAFNVELAQVKDSVSEKTIGLMRMQFWKKTVEDIYCDNPPHQPVAIELWKAVKRHNLTKRWLMKIVDEREKNLDDKAYRNIKELENYAENTQSSLLYLTLEILGIKDLHADHAASHIGKAQGIVTCLRATPYHGSRRKVFLPMDICMLHGVSQEDFLRRNQDKNVRDVIYDIASQAHLHLKHARSFHKTVPVKAFPAFLQTVSLEDFLKKIQRVDFDIFHPSLQQKNTLLPLYLYIQSWRKTY

SEQ ID NO: 41360 - protein, 281 aa, Homo sapiens
MPISISHSSWLVQRKRDYEGYLCSLLLPAESRSSVFALRAFNVELAQVKDSVSEKTIGLMRMQFWKKTVEDIYCDNPPHQPVAIELWKAVKRHNLTKRWLMKIVDEREKNLDDKAYRNIKELENYAENTQSSLLYLTLEILGIKDLHADHAASHIGKAQGIVTCLRATPYHGSRRKVFLPMDICMLHGVSQEDFLRRNQDKNVRDVIYDIASQAHLHLKHARSFHKTVPVKAFPAFLQTVSLEDFLKKIQRVDFDIFHPSLQQKNTLLPLYLYIQSWRKTY

SEQ ID NO: 41361 - protein, 121 aa, Homo sapiens
MAASAHGSVWGPLRLGIPGLCCRRPPLGLYARMRRLPGPEVSGRSVAAASGPGAWGTDHYCLELLRKRDYEGYLCSLLLPAESRSSVFALRAFNVELAQAGLLLLLSCCTVCHWDLNTKHC

SEQ ID NO: 41362 - protein, 395 aa, Homo sapiens
MAAEASESGPALHELMREAEISLLECKVCFEKFGHRQQRRPRNLSCGHVVCLACVAALAHPRTLALECPFCRRACRGCDTSDCLPVLHLIELLGSALRQSPAAHRAAPSAPGALTCHHTFGGWGTLVNPTGLALCPKTGRVVVVHDGRRRVKIFDSGGGCAHQFGEKGDAAQDIRYPVDVTITNDCHVVVTDAGDRSIKVFDFFGQIKLVIGGQFSLPWGVETTPQNGIVVTDAEAGSLHLLDVDFAEGVLRRTERLQAHLCNPRGVAVSWLTGAIAVLEHPLALGTGVCSTRVKVFSSSMQLVGQVDTFGLSLYFPSKITASAVTFDHQGNVIVADTSGPAILCLGKPEEFPVPKPMVTHGLSHPVALTFTKENSLLVLDTASHSIKVYKVDWG

SEQ ID NO: 41363 - protein, 324 aa, Homo sapiens
MFPSPALTPTPFSVKDILNLEQQQRSLAAAGELSARLEATLAPSSCMLAAFKPEAYAGPEAAAPGLPELRAELGRAPSPAKCASAFPAAPAFYPRAYSDPDPAKDPRAEKKELCALQKAVELEKTEADNAERPRARRRRKPRVLFSQAQVYELERRFKQQRYLSAPERDQLASVLKLTSTQVKIWFQNRRYKCKRQRQDQTLELVGLPPPPPPPARRIAVPVLVRDGKPCLGDSAPYAPAYGVGLNPYGYNAYPAYPGYGGAACSPGYSCTAAYPAGPSPAQPATAAANNNFVNFGVGDLNAVQSPGIPQSNSGVSTLHGIRAW

SEQ ID NO: 41364 - protein, 151 aa, Homo sapiens
MFPSPALTPTPFSVKDILNLEQQQRSLAAAGELSARLEATLAPSSCMLAAFKPEAYAGPEAAAPGLPELRAELGRAPSPAKCASAFPAAPAFYPRAYSDPDPAKDPRAEKKGCELPRGQRPPVLFSSALSQPDFLQMLSETCRWLPVHLAE

SEQ ID NO: 41365 - protein, 112 aa, Homo sapiens
MFPSPALTPTPFSVKDILNLEQQQRSLAAAGELSARLEATLAPSSCMLAAFKPEAYAGPEAAAPGLPELRAELGRAPSPAKCASAFPAAPAFYPRAYSDPDPAKDPRAEKKA

SEQ ID NO: 41366 - protein, 1146 aa, Homo sapiens
MGPAPAGEQLRGATGEPEVMEPALEGTGKEGKKASSRKRTLAEPPAKGLLQPVKLSRAELYKEPTNEELNRLRETEILFHSSLLRLQVEELLKEVRLSEKKKDRIDAFLREVNQRVVRVPSVPETELTDQAWLPAGVRVPLHQVPYAVKGCFRFLPPAQVTVVGSYLLGTCIRPDINVDVALTMPREILQDKDGLNQRYFRKRALYLAHLAHHLAQDPLFGSVCFSYTNGCHLKPSLLLRPRGKDERLVTVRLHPCPPPDFFRPCRLLPTKNNVRSAWYRGQSPAGDGSPEPPTPRYNTWVLQDTVLESHLQLLSTILSSAQGLKDGVALLKVWLRQRELDKGQGGFTGFLVSMLVVFLVSTRKIHTTMSGYQVLRSVLQFLATTDLTVNGISLCLSSDPSLPALADFHQAFSVVFLDSSGHLNLCADVTASTYHQVQHEARLSMMLLDSRADDGFHLLLMTPKPMIRAFDHVLHLRPLSRLQAACHRLKLWPELQDNGGDYVSAALGPLTTLLEQGLGARLNLLAHSRPPVPEWDISQDPPKHKDSGTLTLGLLLRPEGLTSVLELGPEADQPEAAKFRQFWGSRSELRRFQDGAIREAVVWEAASMSQKRLIPHQVVTHLLALHADIPETCVHYVGGPLDALIQGLKETSSTGEEALVAAVRCYDDLSRLLWGLEGLPLTVSAVQGAHPVLRYTEVFPPTPVRPAFSFYETLRERSSLLPRLDKPCPAYVEPMTVVCHLEGSGQWPQDAEAVQRVRAAFQLRLAELLTQQHGLQCRATATHTDVLKDGFVFRIRVAYQREPQILKEVQSPEGMISLRDTAASLRLERDTRQLPLLTSALHGLQQQHPAFSGVARLAKRWVRAQLLGEGFADESLDLVAAALFLHPEPFTPPSSPQVGFLRFLFLVSTFDWKNNPLFVNLNNELTVEEQVEIRSGFLAARAQLPVMVIVTPQDRKNSVWTQDGPSAQILQQLVVLAAEALPMLEKQLMDPRGPGDIRTVFRPPLDIYDVLIRLSPRHIPRHRQAVDSPAASFCRGLLSQPGPSSLMPVLGYDPPQLYLTQLREAFGDLALFFYDQHGGEVIGVLWKPTSFQPQPFKASSTKGRMVMSRGGELVMVPNVEAILEDFAVLGEGLVQTVEARSERWTV

SEQ ID NO: 41367 - protein, 1007 aa, Homo sapiens
MGPAPAGEQLRGATGEPEVMEPALEGTGKEGKKASSRKRTLAEPPAKGLLQPVKLSRAELYKEPTNEELNRLRETEILFHSSLLRLQVEELLKEVRLSEKKKDRIDAFLREVNQRVVRVPSVPETELTDQAWLPAGVRVPLHQVPYAVKGCFRFLPPAQVTVVGSYLLGTCIRPDINVDVALTMPREILQDKDGLNQRYFRKRALYLAHLAHHLAQDPLFGSVCFSYTNGCHLKPSLLLRPRGKDERLVTVRLHPCPPPDFFRPCRLLPTKNNVRSAWYRGQSPAGDGSPEPPTPRYNTWVLQDTVLESHLQLLSTILSSAQGLKDGVALLKVWLRQRELDKGQGGFTGFLVSMLVVFLVSTRKIHTTMSGYQVLRSVLQFLATTDLTVNGISLCLSSDPSLPALADFHQAFSVVFLDSSGHLNLCADVTASTYHQVQHEARLSMMLLDSRADDGFHLLLMTPKPMIRAFDHVLHLRPLSRLQAACHRLKLWPELQDNGGDYVSAALGPLTTLLEQGLGARLNLLAHSRPPVPEWDISQDPPKHKDSGTLTLGLLLRPEGLTSVLELGPEADQPEAAKFRQFWGSRSELRRFQDGAIREAVVWEAASMSQKRLIPHQVVTHLLALHADIPETCVHYVGGPLDALIQGLKETSSTGEEALVAAVRCYDDLSRLLWGLEGLPLTVSAVQGAHPVLRYTEVFPPTPVRPAFSFYETLRERSSLLPRLDKPCPAYVEPMTVVCHLEGSGQWPQDAEAVQRVRAAFQLRLAELLTQQHGLQCRATATHTDVLKDGFVFRIRVAYQREPQILKEVQSPEGMISLRDTAASLRLERDTRQLPLLTSALHGLQQQHPAFSGVARLAKRWVRAQLLGEGFADESLDLVAAALFLHPEPFTPPSSPQVGFLRFLFLVSTFDWKNNPLFVNLNNELTVEEQVEIRSGFLAARAQLPVMVIVTPQDRKNSVWTQDGPSAQILQQLVVLAAEALPMLEKQLMDPRGPGDIRWDPAKMWPF

SEQ ID NO: 41368 - protein, 699 aa, Homo sapiens
MGPAPAGEQLRGATGEPEVMEPALEGTGKEGKKASSRKRTLAEPPAKGLLQPVKLSRAELYKEPTNEELNRLRETEILFHSSLLRLQVEELLKEVRLSEKKKDRIDAFLREVNQRVVRVPSVPETELTDQAWLPAGVRVPLHQVPYAVKGCFRFLPPAQVTVVGSYLLGTCIRPDINVDVALTMPREILQDKDGLNQRYFRKRALYLAHLAHHLAQDPLFGSVCFSYTNGCHLKPSLLLRPRGKDERLVTVRLHPCPPPDFFRPCRLLPTKNNVRSAWYRGQSPAGDGSPEPPTPRYNTWVLQDTVLESHLQLLSTILSSAQGLKDGVALLKVWLRQRELDKGQGGFTGFLVSMLVVFLVSTRKIHTTMSGYQVLRSVLQFLATTDLTVNGISLCLSSDPSLPALADFHQAFSVVFLDSSGHLNLCADVTASTYHQVQHEARLSMMLLDSRADDGFHLLLMTPKPMIRAFDHVLHLRPLSRLQAACHRLKLWPELQDNGGDYVSAALGPLTTLLEQGLGARLNLLAHSRPPVPEWDISQDPPKHKDSGTLTLGLLLRPEGLTSVLELGPEADQPEAAKFRQFWGSRSELRRFQDGAIREAVVWEAASMSQKRLIPHQVVTHLLALHADIPETCVHYVGGPLDALIQGLKEASSTKGRMVMSRGGELVMVPNVEAILEDFAVLGEGLVQTVEARSERWTV

SEQ ID NO: 41369 - protein, 1143 aa, Homo sapiens
MGPAPAGEQLRGATGEPEVMEPALEGTGKEGKKASSRKRTLAEPPAKGLLQPVKLSRAELYKEPTNEELNRLRETEILFHSSLLRLQVEELLKEVRLSEKKKDRIDAFLREVNQRVVRVPSVPETELTDQAWLPAGVRVPLHQVPYAVKGCFRFLPPAQVTVVGSYLLGTCIRPDINVDVALTMPREILQDKDGLNQRYFRKRALYLAHLAHHLAQDPLFGSVCFSYTNGCHLKPSLLLRPRGKDERLVTVRLHPCPPPDFFRPCRLLPTKNNVRSAWYRGQSPAGDGSPEPPTPRYNTWVLQDTVLESHLQLLSTILSSAQGLKDGVALLKVWLRQRELDKGQGGFTGFLVSMLVVFLVSTRKIHTTMSGYQVLRSVLQFLDLTVNGISLCLSSDPSLPALADFHQAFSVVFLDSSGHLNLCADVTASTYHQVQHEARLSMMLLDSRADDGFHLLLMTPKPMIRAFDHVLHLRPLSRLQAACHRLKLWPELQDNGGDYVSAALGPLTTLLEQGLGARLNLLAHSRPPVPEWDISQDPPKHKDSGTLTLGLLLRPEGLTSVLELGPEADQPEAAKFRQFWGSRSELRRFQDGAIREAVVWEAASMSQKRLIPHQVVTHLLALHADIPETCVHYVGGPLDALIQGLKETSSTGEEALVAAVRCYDDLSRLLWGLEGLPLTVSAVQGAHPVLRYTEVFPPTPVRPAFSFYETLRERSSLLPRLDKPCPAYVEPMTVVCHLEGSGQWPQDAEAVQRVRAAFQLRLAELLTQQHGLQCRATATHTDVLKDGFVFRIRVAYQREPQILKEVQSPEGMISLRDTAASLRLERDTRQLPLLTSALHGLQQQHPAFSGVARLAKRWVRAQLLGEGFADESLDLVAAALFLHPEPFTPPSSPQVGFLRFLFLVSTFDWKNNPLFVNLNNELTVEEQVEIRSGFLAARAQLPVMVIVTPQDRKNSVWTQDGPSAQILQQLVVLAAEALPMLEKQLMDPRGPGDIRTVFRPPLDIYDVLIRLSPRHIPRHRQAVDSPAASFCRGLLSQPGPSSLMPVLGYDPPQLYLTQLREAFGDLALFFYDQHGGEVIGVLWKPTSFQPQPFKASSTKGRMVMSRGGELVMVPNVEAILEDFAVLGEGLVQTVEARSERWTV

SEQ ID NO: 41370 - protein, 968 aa, Homo sapiens
MVNSSRVQPQQPGDAKRPPAPRAPDPGRLMAGCAAVGASLAAPGGLCEQRGLEIEMQRIRQAAARDPPAGAAASPSPPLSSCSRQAWSRDNPGFEAEEEEEEVEGEEGGMVVEMDVEWRPGSRRSAASSAVSSVGARSRGLGGYHGAGHPSGRRRRREDQGPPCPSPVGGGDPLHRHLPLEGQPPRVAWAERLVRGLRGLWGTRLMEESSTNREKYLKSVLRELVTYLLFLIVLCILTYGMMSSNVYYYTRMMSQLFLDTPVSKTEKTNFKTLSSMEDFWKFTEGSLLDGLYWKMQPSNQTEADNRSFIFYENLLLGVPRIRQLRVRNGSCSIPQDLRDEIKECYDVYSVSSEDRAPFGPRNGTAWIYTSEKDLNGSSHWGIIATYSGAGYYLDLSRTREETAAQVASLKKNVWLDRGTRATFIDFSVYNANINLFCVVRLLVEFPATGGVIPSWQFQPLKLIRYVTTFDFFLAACEIIFCFFIFYYVVEEILEIRIHKLHYFRSFWNCLDVVIVVLSVVAIGINIYRTSNVEVLLQFLEDQNTFPNFEHLAYWQIQFNNIAAVTVFFVWIKLFKFINFNRTMSQLSTTMSRCAKDLFGFAIMFFIIFLAYAQLAYLVFGTQVDDFSTFQECIFTQFRIILGDINFAEIEEANRVLGPIYFTTFVFFMFFILLNMFLAIINDTYSEVKSDLAQQKAEMELSDLIRKGYHKALVKLKLKKNTVDDISESLRQGGGKLNFDELRQDLKGKGHTDAEIEAIFTKYDQDGDQELTEHEHQQMRDDLEKEREDLDLDHSSLPRPMSSRSFPRSLDDSEEDDDEDSGHSSRRRGSISSGVSYEEFQVLVRRVDRMEHSIGSIVSKIDAVIVKLEIMERAKLKRREVLGRLLDGVAEDERLGRDSEIHREQMERLVREELERWESDDAASQISHGLGTPVGLNGQPRPRSSRPSSSQSTEGMEGAGGNGSSNVHV

SEQ ID NO: 41371 - protein, 483 aa, Homo sapiens
MVNSSRVQPQQPGDAKRPPAPRAPDPGRLMAGCAAVGASLAAPGGLCEQRGLEIEMQRIRQAAARDPPAGAAASPSPPLSSCSRQAWSRDNPGFEAEEEEEEVEGEEGGMVVEMDVEWRPGSRRSAASSAVSSVGARSRGLGGYHGAGHPSGRRRRREDQGPPCPSPVGGGDPLHRHLPLEGQPPRVAWAERLVRGLRGLWGTRLMEESSTNREKYLKSVLRELVTYLLFLIVLCILTYGMMSSNVYYYTRMMSQLFLDTPVSKTEKTNFKTLSSMEDFWKFTEGSLLDGLYWKMQPSNQTEADNRSFIFYENLLLGVPRIRQLRVRNGSCSIPQDLRDEIKECYDVYSVSSEDRAPFGPRNGTAWIYTSEKDLNGSSHWGIIATYSGAGYYLDLSRTREETAAQVASLKKNVWLDRGTRATFIDFSVYNANINLFCVVRLLVEFPATGGVIPSWQFQPLKLIRYVTTFDFFLAAFICSSYGD

SEQ ID NO: 41372 - protein, 912 aa, Homo sapiens
MVNSSRVQPQQPGDAKRPPAPRAPDPGRLMAGCAAVGASLAAPGGLCEQRGLEIEMQRIRQAAARDPPAGAAASPSPPLSSCSRQAWSRDNPGFEAEEEEEEVEGEEGGMVVEMDVEWRPGSRRSAASSAVSSVGARSRGLGGYHGAGHPSGRRRRREDQGPPCPSPVGGGDPLHRHLPLEGQPPRVAWAERLVRGLRGLWGTRLMEESSTNREKYLKSVLRELVTYLLFLIVLCILTYGMMSSNVYYYTRMMSQLFLDTPVSKTEKTNFKTLSSMEDFWKFTEGSLLDGLYWKMQPSNQTEADNRSFIFYENLLLGVPRIRQLRVRNGSCSIPQDLRDEIKECYDVYSVSSEDRAPFGPRNGTAWIYTSEKDLNGSSHWGIIATYSGAGYYLDLSRTREETAAQVASLKKNVWLDRGTRATFIDFSVYNANINLFCVVRLLVEFPATGGVIPSWQFQPLKLIRYVTTFDFFLAACEIIFCFFIFYYVVEEILEIRIHKLHYFRSFWNCLDVVIVVLFKFINFNRTMSQLSTTMSRCAKDLFGFAIMFFIIFLAYAQLAYLVFGTQVDDFSTFQECIFTQFRIILGDINFAEIEEANRVLGPIYFTTFVFFMFFILLNMFLAIINDTYSEVKSDLAQQKAEMELSDLIRKGYHKALVKLKLKKNTVDDISESLRQGGGKLNFDELRQDLKGKGHTDAEIEAIFTKYDQDGDQELTEHEHQQMRDDLEKEREDLDLDHSSLPRPMSSRSFPRSLDDSEEDDDEDSGHSSRRRGSISSGVSYEEFQVLVRRVDRMEHSIGSIVSKIDAVIVKLEIMERAKLKRREVLGRLLDGVAEDERLGRDSEIHREQMERLVREELERWESDDAASQISHGLGTPVGLNGQPRPRSSRPSSSQSTEGMEGAGGNGSSNVHV

SEQ ID NO: 41373 - protein, 646 aa, Homo sapiens
MVNSSRVQPQQPGDAKRPPAPRAPDPGRLMAGCAAVGASLAAPGGLCEQRGLEIEMQRIRQAAARDPPAGAAASPSPPLSSCSRQAWSRDNPGFEAEEEEEEVEGEEGGMVVEMDVEWRPGSRRSAASSAVSSVGARSRGLGGYHGAGHPSGRRRRREDQGPPCPSPVGGGDPLHRHLPLEGQPPRVAWAERLVRGLRGLWGTRLMEESSTNREKYLKSVLRELVTYLLFLIVLCILTYGMMSSNVYYYTRMMSQLFLDTPVSKTEKTNFKTLSSMEDFWKFTEGSLLDGLYWKMQPSNQTEADNRSFIFYENLLLGVPRIRQLRVRNGSCSIPQDLRDEIKECYDVYSVSSEDRAPFGPRNGTAWIYTSEKDLNGSSHWGIIATYSGAGYYLDLSRTREETAAQVASLKKNVWLDRGTRATFIDFSVYNANINLFCVVRLLVEFPATGGVIPSWQFQPLKLIRYVTTFDFFLAACEIIFCFFIFYYVVEEILEIRIHKLHYFRSFWNCLDVVIVVLSVVAIGINIYRTSNVEVLLQFLEDQNTFPNFEHLAYWQIQFNNIAAVTVFFVWIKLFKFINFNRTMSQLSTTMSRCAKDLFGFAIMFFIIFLAYAQLAYLVFGTQVDDFSTFQECIICSWRSSMIRTLK

SEQ ID NO: 41374 - protein, 874 aa, Homo sapiens
MVNSSRVQPQQPGDAKRPPAPRAPDPGRLMAGCAAVGASLAAPGGLCEQRGLEIEMQRIRQAAARDPPAGAAASPSPPLSSCSRQAWSRDNPGFEAEEEEEEVEGEEGGMVVEMDVEWRPGSRRSAASSAVSSVGARSRGLGGYHGAGHPSGRRRRREDQGPPCPSPVGGGDPLHRHLPLEGQPPRVAWAERLVRGLRGLWGTRLMEESSTNREKYLKSVLRELVTYLLFLIVLCILTYGMMSSNVYYYTRMMSQLFLDTPVSKTEKTNFKTLSSMEDFWKFTEGSLLDGLYWKMQPSNQTEADNRSFIFYENLLLGVPRIRQLRVRNGSCSIPQDLRDEIKECYDVYSVSSEDRAPFGPRNGTAWIYTSEKDLNGSSHWGIIATYSGAGYYLDLSRTREETAAQVASLKKNVWLDRGTRATFIDFSVYNANINLFCVVRLLVEFPATGGVIPSWQFQPLKLIRYVTTFDFFLAACEIIFCFFIFYYVVEEILEIRIHKLHYFRSFWNCLDVVIVVLSVVAIGINIYRTSNVEVLLQFLEDQNTFPNFEHLAYWQIQFNNIAAVTVFFVWIKLFKFINFNRTMSQLSTTMSRCAKDLFGFAIMFFIIFLAYAQLAYLVFGTQVDDFSTFQECIFTQFRIILGDINFAEIEEANRVLGPIYFTTFVFFMFFILLNMFLAIINDTYSEVKSDLAQQKAEMELSDLIRKGYHKALVKLKLKKNTVDDISESLRQGGGKLNFDELRQDLKGLVRRVDRMEHSIGSIVSKIDAVIVKLEIMERAKLKRREVLGRLLDGVAEDERLGRDSEIHREQMERLVREELERWESDDAASQISHGLGTPVGLNGQPRPRSSRPSSSQSTEGMEGAGGNGSSNVHV

SEQ ID NO: 41375 - protein, 549 aa, Homo sapiens
MARTLRPSPLCPGGGKAQLSSASLLGAGLLLQPPTPPPLLLLLFPLLLFSRLCGALAGPIIVEPHVTAVWGKNVSLKCLIEVNETITQISWEKIHGKSSQTVAVHHPQYGFSVQGEYQGRVLFKNYSLNDATITLHNIGFSDSGKYICKAVTFPLGNAQSSTTVTVLVEPTVSLIKGPDSLIDGGNETVAAICIAATGKPVAHIDWEGDLGEMESTTTSFPNETATIISQYKLFPTRFARGRRITCVVKHPALEKDIRYSFILDIQYAPEVSVTGYDGNWFVGRKGVNLKCNADANPPPFKSVWSRLDGQWPDGLLASDNTLHFVHPLTFNYSGVYICKVTNSLGQRSDQKVIYISDPPTTTTLQPTIQWHPSTADIEDLATEPKKLPFPLSTLATIKDDTIATIIASVVGGALFIVLVSVLAGIFCYRRRRTFRGDYFAKNYIPPSDMQKESQIDVLQQDELDSYPDSVKKENKNPVNNLIRKDYLEEPEKTQWNNVENLNRFERPMDYYEDLKMGMKFVSDEHYDENEDDLVSHVDGSVISRREWYV

SEQ ID NO: 41376 - protein, 366 aa, Homo sapiens
MARTLRPSPLCPGGGKAQLSSASLLGAGLLLQPPTPPPLLLLLFPLLLFSRLCGALAGPIIVEPHVTAVWGKNVSLKCLIEVNETITQISWEKIHGKSSQTVAVHHPQYGFSVQGEYQGRVLFKNYSLNDATITLHNIGFSDSGKYICKAVTFPLGNAQSSTTVTVLVEPTVSLIKGPDSLIDGGNETVAAICIAATGKPVAHIDWEGDLGEMESTTTSFPNETATIISQYKLFPTRFARGRRITCVVKHPALEKDIRYSFILDIQYAPEVSVTGYDGNWFVGRKGVNLKCNADANPPPFKSVWSRLDGQWPDGLLASDNTLHFVHPLTFNYSGVYICKVTNSLGQRSDQKVIYISAYNSVASLNC

SEQ ID NO: 41377 - protein, 487 aa, Homo sapiens
MAEGWRWCFVRRTPGLLRGPLLPRSFSGNPRALAGPIIVEPHVTAVWGKNVSLKCLIEVNETITQISWEKIHGKSSQTVAVHHPQYGFSVQGEYQGRVLFKNYSLNDATITLHNIGFSDSGKYICKAVTFPLGNAQSSTTVTVLVEPTVSLIKGPDSLIDGGNETVAAICIAATGKPVAHIDWEGDLGEMESTTTSFPNETATIISQYKLFPTRFARGRRITCVVKHPALEKDIRYSFILDIQYAPEVSVTGYDGNWFVGRKGVNLKCNADANPPPFKSVWSRLDGQWPDGLLASDNTLHFVHPLTFNYSGVYICKVTNSLGQRSDQKVIYISDVPFKQTSSIAVAGAVIGAVLALFIIAIFVTVLLTPRKKRPSYLDKVIDLPPTHKPPPLYEERSPPLPQKDLFQPEHLPLQTQFKEREVGNLQHSNGLNSRSFDYEDENPVGEDGIQQMYPLYNQMCYQDRSPGKHHQNNDPKRVYIDPREHYV

SEQ ID NO: 41378 - protein, 810 aa, Homo sapiens
MPMDLILVVWFCVCTARTVVGFGMDPDLQMDIVTELDLVNTTLGVAQVSGMHNASKAFLFQDIEREIHAAPHVSEKLIQLFRNKSEFTILATVQQKPSTSGVILSIRELEHSYFELESSGLRDEIRYHYIHNGKPRTEALPYRMADGQWHKVALSVSASHLLLHVDCNRIYERVIDPPDTNLPPGINLWLGQRNQKHGLFKGIIQDGKIIFMPNGYITQCPNLNHTCPTCSDFLSLVQGIMDLQELLAKMTAKLNYAETRLSQLENCHCEKTCQVSGLLYRDQDSWVDGDHCRNCTCKSGAVECRRMSCPPLNCSPDSLPVHIAGQCCKVCRPKCIYGGKVLAEGQRILTKSCRECRGGVLVKITEMCPPLNCSEKDHILPENQCCRVCRGHNFCAEGPKCGENSECKNWNTKATCECKSGYISVQGDSAYCEDIDECAAKMHYCHANTVCVNLPGLYRCDCVPGYIRVDDFSCTEHDECGSGQHNCDENAICTNTVQGHSCTCKPGYVGNGTICRAFCEEGCRYGGTCVAPNKCVCPSGFTGSHCEKDIDECSEGIIECHNHSRCVNLPGWYHCECRSGFHDDGTYSLSGESCIDIDECALRTHTCWNDSACINLAGGFDCLCPSGPSCSGDCPHEGGLKHNGQVWTLKEDRCSVCSCKDGKIFCRRTACDCQNPSADLFCCPECDTRVTSQCLDQNGHKLYRSGDNWTHSCQQCRCLEGEVDCWPLTCPNLSCEYTAILEGECCPRCVSDPCLADNITYDIRKTCLDSYGVSRLSGSVWTMAGSPCTTCKCKNGRVCCSVDFECLQNN

SEQ ID NO: 41379 - protein, 763 aa, Homo sapiens
MPMDLILVVWFCVCTARTVVGFGMDPDLQMDIVTELDLVNTTLGVAQVSGMHNASKAFLFQDIEREIHAAPHVSEKLIQLFRNKSEFTILATVQQKPSTSGVILSIRELEHSYFELESSGLRDEIRYHYIHNGKPRTEALPYRMADGQWHKVALSVSASHLLLHVDCNRIYERVIDPPDTNLPPGINLWLGQRNQKHGLFKGIIQDGKIIFMPNGYITQCPNLNHTCPTCSDFLSLVQGIMDLQELLAKMTAKLNYAETRLSQLENCHCEKTCQVSGLLYRDQDSWVDGDHCRNCTCKSGAVECRRMSCPPLNCSPDSLPVHIAGQCCKVCRPKCIYGGKVLAEGQRILTKSCRECRGGVLVKITEMCPPLNCSEKDHILPENQCCRVCRGHNFCAEGPKCGENSECKNWNTKATCECKSGYISVQGDSAYCEDIDECAAKMHYCHANTVCVNLPGLYRCDCVPGYIRVDDFSCTEHDECGSGQHNCDENAICTNTVQGHSCTCKPGYVGNGTICRAFCEEGCRYGGTCVAPNKCVCPSGFTGSHCEKDIDECALRTHTCWNDSACINLAGGFDCLCPSGPSCSGDCPHEGGLKHNGQVWTLKEDRCSVCSCKDGKIFCRRTACDCQNPSADLFCCPECDTRVTSQCLDQNGHKLYRSGDNWTHSCQQCRCLEGEVDCWPLTCPNLSCEYTAILEGECCPRCVSDPCLADNITYDIRKTCLDSYGVSRLSGSVWTMAGSPCTTCKCKNGRVCCSVDFECLQNN

SEQ ID NO: 41380 - protein, 286 aa, Homo sapiens
MAARVLRARGAAWAGGLLQRAAPCSLLPRLRTWTSSSNRSREDSWLKSLFVRKVDPRKDAHSNLLAKKETSNLYKLQFHNVKPECLEAYNKICQEVLPKIHEDKHYPCTLVGTWNTWYGEQDQAVHLWRYEGGYPALTEVMNKLRENKEFLEFRKARSDMLLSRKNQLLLEFSFWNEPVPRSGPNIYELRSYQLRPGTMIEWGNYWARAIRFRQDGNEAVGGFFSQIGQLYMVHHLWAYRDLQTREDIRNAAWHKHGWEELVYYTVPLIQEMESRIMIPLKTSPLQ

SEQ ID NO: 41381 - protein, 247 aa, Homo sapiens
MAARVLRARGAAWAGGLLQRAAPCSLLPRLRTWTSSSNRSREDSWLKSLFVRKVDPRKDAHSNLLAKKETSNLYKLQFKRCCQRFTKINTTLVLWWGLGTRGMASRTKLEFLEFRKARSDMLLSRKNQLLLEFSFWNEPVPRSGPNIYELRSYQLRPGTMIEWGNYWARAIRFRQDGNEAVGGFFSQIGQLYMVHHLWAYRDLQTREDIRNAAWHKHGWEELVYYTVPLIQEMESRIMIPLKTSPLQ

SEQ ID NO: 41382 - protein, 1732 aa, Homo sapiens
MFFKGGSWLWLYIRTSIILGSELNSPAPHGQNNCYQLNRFQCSFEEAQHYCHVQRGFLAHIWNKEVQDLIRDYLEEGKKWWIGQNVMPLKKHQDNKYPADVAANGPPKPLSCTYLSRNFIRISSKGDKCLLKYYFICQTGDFLDGDAHYERNGNNSHLYQRHKKTKRGVAIARDKMPPGPGHLPTTCHYPLPAHLSKTLCHPISQFPSVLSSITSQVTSAASEPSSQPLPVITQLTMPVSVTHAGQSLAETTSSPKEEGHPNTFTSYLQVSLQKASGQVIDEIAGNFSRAVHGLQALNKLQEACEFLQKLTALTPRFSKPAQVNLINSLIYLSEELLRIPFQNNNSLGFKVPPTVCPFHSLNNVTKAGEGSWLESKRHTEPVEDILEMSLVEFGNIGEAFLEQNQSPESSVTLTSANATLLLSRQNISTLPLSSYTLGHPAPVRLGFPSALALKELLNKHPGVNVQITGLAFNPFKDLDNRNIVGSIGSVLLSANRKLLQVHDLMEDIEIMLWRNVSLETHPTSLNMSTHQLTITVNVTSLEKSLIVSIDPDSPLLMTLYLGFQYQPNCTHFHLNITLPKDKVWQKDEEYTWVLNPEHLQHGIGTYYITAVLSERQEGAQQTPSLVSVITAVTQCYYWEIHNQTWSSAGCQVGPQSTILRTQCLCNHLTFFASDFFVVPRTVNVEDTIKLFLRVTNNPVGVSLLASLLGFYVITVVWARKKDQADMQKVKVTVLADNDPSAQFHYLIQVYTGYRRSAATTAKVVITLYGSEGRSEPHHLCDPQKTVFERGGLDVFLLTTWTSLGNLHSLRLWHDNSGVSPSWYVSQVIVCDMAVKRKWHFLCNCWLAVDLGDCELDRVFIPVSKRELFSFRHLFSSMIVEKFTQDYLWLSIATRHPWNQFTRVQRLSCCMTLLLCNMVINVMFWKINSTTAKRDEQMRPFAVAWSELLVSIHTAVILFPINLVIGRLFPLIEPQETLPLFPPIQASCLSDASVEPLSATMVVEELKETVRFLLRRNTYLLSKCEQPPWSSWDITKLVKLLSSLVSSHLEGQGCHQQGERHWARVVPENHHHFCCYLHRVLQRLKSHLGTLGLTQGHQSCDFLDAASQLQKLQELLETHILPTEQEPSREVTSFAILSSEEGKKPISNGLSKWLTSVCWLLLGFTSLASAFFTALYSLELSKDQATSWMISIILSVLQNIFISQPVKVVFFTFLYSLMMSRMPRLNKENEQQTKRILALLAKCSSSVPGSRDKNNPVYVAPAINSPTKHPERTLKKKKLFKLTGDILVQILFLTLLMTAIYSAKNSNRFYLHQAIWKTFSHQFSEIKLLQDFYPWANHILLPSLYGDYRGKNAVLEPSHCKCGVQLIFQIPRTKTYEKVDEGQLAFCDNGHTCGRPKSLFPGLHLRRFSYICSPRPMVLIPTDELHERLTSKNENGFSYIMRGAFFTSLRLESFTSLQMSKKGCVWSIISQVIYYLLVCYYAFIQGCQLKQQKWRFFTGKRNILDTSIILISFILLGLDMKSISLHKKNMARYRDDQDRFISFYEAVKVNSAATHLVGFPVLLATVQLWNLLRHSPRLRVISRTLSRAWDEVVGFLLIILILLTGYAIAFNLLFGCSISDYRTFFSSAVTVVGLLMGISHQEEVFALDPVLGTFLILTSVILMVLVVINLFVSAILMAFGKERKSLKKEAALIDTLLQKLSNLLGISWPQKTSSEQAATTAVGSDTEVLDELP

SEQ ID NO: 41383 - protein, 87 aa, Homo sapiens
MAGASLGARFYRQIKRHPGIIPMIGLICLGMGSAALYLLRLALRSPDVCWDRKNNPEPWNRLSPNDQYKFLAVSTDYKKLKKDRPDF

SEQ ID NO: 41384 - protein, 661 aa, Homo sapiens
MEGAAAPVAGDRPDLGLGAPGSPREAVAGATAALEPRKPHGVKRHHHKHNLKHRYELQETLGKGTYGKVKRATERFSGRVVAIKSIRKDKIKDEQDMVHIRREIEIMSSLNHPHIISIYEVFENKDKIVIIMEYASKGELYDYISERRRLSERETRHFFRQIVSAVHYCHKNGVVHRDLKLENILLDDNCNIKIADFGLSNLYQKDKFLQTFCGSPLYASPEIVNGRPYRGPEVDSWALGVLLYTLVYGTMPFDGFDHKNLIRQISSGEYREPTQPSDARGLIRWMLMVNPDRRATIEDIANHWWVNWGYKSSVCDCDALHDSESPLLARIIDWHHRSTGLQADTEAKMKGLAKPTTSEVMLERQRSLKKSKKENDFAQSGQDAVPESPSKLSSKRPKGILKKRSNSEHRSHSTGFIEGVVGPALPSTFKMEQDLCRTGVLLPSSPEAEVPGKLSPKQSATMPKKGILKKTQQRESGYYSSPERSESSELLDSNDVMGSSIPSPSPPDPARVTSHSLSCRRKGILKHSSKYSAGTMDPALVSPEMPTLESLSEPGVPAEGLSRSYSRPSSVISDDSVLSSDSFDLLDLQENRPARQRIRSCVSAENFLQIQDFEGLQNRPRPQYLKRYRNRLADSSFSLLTDMDDVTQVYKQALEICSKLN

SEQ ID NO: 41385 - protein, 208 aa, Homo sapiens
MEGAAAPVAGDRPDLGLGAPGSPREAVAGATAALEPRKPHGVKRHHHKHNLKHRYELQETLGKGTYGKVKRATERFSGRVVAIKSIRKDKIKDEQDMVHIRREIEIMSSLNHPHIISIYEVFENKDKIVIIMEYASKGELYDYISERRRLSERETRHFFRQIVSAVHYCHKNGVVHRDLKLKKTSRENQVTTLPQSAVSLRSCWTVMM

SEQ ID NO: 41386 - protein, 1730 aa, Homo sapiens
MNVQPCSRCGYGVYPAEKISCIDQIWHKACFHCEVCKMMLSVNNFVSHQKKPYCHAHNPKNNTFTSVYHTPLNLNVRTFPEAISGIHDQEDGEQCKSVFHWDMKSKDKEGAPNRQPLANERAYWTGYGEGNAWCPGALPDPEIVRMVEARKSLGEEYTEDYEQPRGKGSFPAMITPAYQRAKKANQLASQVEYKRGHDERISRFSTVVDTPELLRSKAGAQLQSDVRYTEDYEQQRGKGSFPAMITPAYQIAKRANELASDVRYHQQYQKEMRGMAGPAIGAEGILTRECADQYGQGYPEEYEEHRGKGSFPAMITPAYQNAKKAHELASDIKYRQDFNKMKGAAHYHSLPAQDNLVLKQAQSVNKLVSEVEYKKDLESSRGHSINYCETPQFRNVSKISKFTSDNKYKENYQNHMRGRYEGVGMDRRTLHAMKVGSLASNVAYKADYKHDIVDYNYPATLTPSYQTAMKLVPLKDANYRQSIDKLKYSSVTDTPQIVQAKINAQQLSHVNYRADYEKNKLNYTLPQDVPQLVKAKTNAKLFSEVKYKEGWEKTKGKGFEMKLDAMSLLAAKASGELASNIKYKEEYEKTKGKAMGTADSRLLHSLQIAKMSSEVEYKKGFEESKTRFHLPMDMVNIRHAKKAQTLASDLDYRKKLHEYTVLPEDMKTQWAKKAYGLQSELQYKADLAWMKGVGWLTEGSLNLEQAKKAGQLVSEKNYRQRVDELKFTSVTDSSQMEHAKKSQELQSGVAYKAGNEQSVHQYTISKDEPLFLQARANAANLSEKLYKSSWENQKAKGFELRLDSLTFLAAKAKRDLASEVKYKEDYERSRGKLIGAKDVQGDSQMSHSLQMSKLQSELEYKKGFEDTKSQCHVSLDMVHLVHARKAQHLATDVGYKTAEHHFTALPTDMKVEWAKKAYGLQSDNQYRADVKWMKGMGWVATGSLNVEQAKKAGELISEKKYRQHPDALKFTSIKDTPEMVQARISYTQAVDRLYREQGENIKHHYTPTADLPEVLLAKLNAMNISETRYKESWSKLRDGGYKLRLDALPFQAAKASGEIISDYKYKEAFEKMKGQMLGSRSLEDDISLAHSVYATSLQSDVNYKKGFEHSKAQFHLPLDMAALVHAKKAQTLASNQDYKHPLPQYTSLAEDLRLSCAKKAHKLQSENLYRSDLNFMRGVACVIPGTLEIEGRKKASELISESKYRQHPHSFKYTAVTDTPNLLHAKFSNQITNERLYKAAGEDARHEYTMTLGLPEFIRAKTNAANLSDARYKESWRNLRAQGYKLTIEALPFQAARASGDIASDFLYRHDFVKERGKLIGPQSVRDDPRIQHCRRMGQLQSELQYRRGATSSQAQFHLPMDMVHLVHAKNAQALASDHDYRTQYHKFTALPEDLKMAWAKKAHALQSELRYKSDLIGMKGIGWLALRSPQMESAKKAGELISETKYRKKPDSIKFTTVVDSPDLVHAKNSYMHCNERMYRSGDAESLHRYTLIPDHPDFTRARLNALHLSDKVYRNSWEQTRAGSYDFRLDAIPFQTARASREIASDFRYKEAFLRDRGLQIGYRSVDDDPRMKHFLNVGRLQSDNEYKKDFAKSRSQFHSSTDQPGLLQAKRSQQLASDVHYRQPLPQPTCDPEQLGLRHAQKAHQLQSDVKYKSDLNLTRGVGWTPPGSYKVEMARRAAELANARGLGLQGAYRGAEAVEAGDHQSGEVNPDATEILHVKKKKALLL

SEQ ID NO: 41387 - protein, 1738 aa, Homo sapiens
MNVQPCSRCGYGVYPAEKISCIDQIWHKACFHCEVCKMMLSVNNFVSHQKKPYCHAHNPKNNTFTSVYHTPLNLNVRTFPEAISGIHDQEDGEQCKSVFHWDMKSKDKEGAPNRQPLANERAYWTGYGEGNAWCPGALPDPEIVRMVEARKSLGEEYTEDYEQPRGKGSFPAMITPAYQRAKKANQLASQVEYKRGHDERISRFSTVVDTPELLRSKAGAQLQSDVRYTEDYEQQRGKGSFPAMITPAYQIAKRANELASDVRYHQQYQKEMRGMAGPAIGAEGILTRECADQYGQGYPEEYEEHRGKGSFPAMITPAYQNAKKAHELASDIKYRQDFNKMKGAAHYHSLPAQDNLVLKQAQSVNKLVSEVEYKKDLESSRGHSINYCETPQFRNVSKISKFTSDNKYKENYQNHMRGRYEGVGMDRRTLHAMKVGSLASNVAYKADYKHDIVDYNYPATLTPSYQTAMKLVPLKDANYRQSIDKLKYSSVTDTPQIVQAKINAQQLSHVNYRADYEKNKLNYTLPQDVPQLVKAKTNAKLFSEVKYKEGWEKTKGKGFEMKLDAMSLLAAKASGELASNVHLLLSLKIKYKEEYEKTKGKAMGTADSRLLHSLQIAKMSSEVEYKKGFEESKTRFHLPMDMVNIRHAKKAQTLASDLDYRKKLHEYTVLPEDMKTQWAKKAYGLQSELQYKADLAWMKGVGWLTEGSLNLEQAKKAGQLVSEKNYRQRVDELKFTSVTDSSQMEHAKKSQELQSGVAYKAGNEQSVHQYTISKDEPLFLQARANAANLSEKLYKSSWENQKAKGFELRLDSLTFLAAKAKRDLASEVKYKEDYERSRGKLIGAKDVQGDSQMSHSLQMSKLQSELEYKKGFEDTKSQCHVSLDMVHLVHARKAQHLATDVGYKTAEHHFTALPTDMKVEWAKKAYGLQSDNQYRADVKWMKGMGWVATGSLNVEQAKKAGELISEKKYRQHPDALKFTSIKDTPEMVQARISYTQAVDRLYREQGENIKHHYTPTADLPEVLLAKLNAMNISETRYKESWSKLRDGGYKLRLDALPFQAAKASGEIISDYKYKEAFEKMKGQMLGSRSLEDDISLAHSVYATSLQSDVNYKKGFEHSKAQFHLPLDMAALVHAKKAQTLASNQDYKHPLPQYTSLAEDLRLSCAKKAHKLQSENLYRSDLNFMRGVACVIPGTLEIEGRKKASELISESKYRQHPHSFKYTAVTDTPNLLHAKFSNQITNERLYKAAGEDARHEYTMTLGLPEFIRAKTNAANLSDARYKESWRNLRAQGYKLTIEALPFQAARASGDIASDFLYRHDFVKERGKLIGPQSVRDDPRIQHCRRMGQLQSELQYRRGATSSQAQFHLPMDMVHLVHAKNAQALASDHDYRTQYHKFTALPEDLKMAWAKKAHALQSELRYKSDLIGMKGIGWLALRSPQMESAKKAGELISETKYRKKPDSIKFTTVVDSPDLVHAKNSYMHCNERMYRSGDAESLHRYTLIPDHPDFTRARLNALHLSDKVYRNSWEQTRAGSYDFRLDAIPFQTARASREIASDFRYKEAFLRDRGLQIGYRSVDDDPRMKHFLNVGRLQSDNEYKKDFAKSRSQFHSSTDQPGLLQAKRSQQLASDVHYRQPLPQPTCDPEQLGLRHAQKAHQLQSDVKYKSDLNLTRGVGWTPPGSYKVEMARRAAELANARGLGLQGAYRGAEAVEAGDHQSGEVNPDATEILHVKKKKALLL

SEQ ID NO: 41388 - protein, 1703 aa, Homo sapiens
MNVQPCSRCGYGVYPAEKISCIDQIWHKACFHCEVCKMMLSVNNFVSHQKKPYCHAHNPKNNTFTSVYHTPLNLNVRTFPEAISGIHDQEDGEQCKSVFHWDMKSKDKEGAPNRQPLANERAYWTGYGEGNAWCPGALPDPEIVRMVEARKSLGEEYTEDYEQPRGKGSFPAMITPAYQRAKKANQLASQVEYKRGHDERISRFSTVVDTPELLRSKAGAQLQSDVRYTEDYEQQRGKGSFPAMITPAYQIAKRANELASDVRYHQQYQKEMRGMAGPAIGAEGILTRECADQYGQGYPEEYEEHRGKGSFPAMITPAYQNAKKAHELASDIKYRQDFNKMKGAAHYHSLPAQDNLVLKQAQSVNKLVSENKYKENYQNHMRGRYEGVGMDRRTLHAMKVGSLASNVAYKADYKHDIVDYNYPATLTPSYQTAMKLVPLKDANYRQSIDKLKYSSVTDTPQIVQAKINAQQLSHVNYRADYEKNKLNYTLPQDVPQLVKAKTNAKLFSEVKYKEGWEKTKGKGFEMKLDAMSLLAAKASGELASNVHLLLSLKIKYKEEYEKTKGKAMGTADSRLLHSLQIAKMSSEVEYKKGFEESKTRFHLPMDMVNIRHAKKAQTLASDLDYRKKLHEYTVLPEDMKTQWAKKAYGLQSELQYKADLAWMKGVGWLTEGSLNLEQAKKAGQLVSEKNYRQRVDELKFTSVTDSSQMEHAKKSQELQSGVAYKAGNEQSVHQYTISKDEPLFLQARANAANLSEKLYKSSWENQKAKGFELRLDSLTFLAAKAKRDLASEVKYKEDYERSRGKLIGAKDVQGDSQMSHSLQMSKLQSELEYKKGFEDTKSQCHVSLDMVHLVHARKAQHLATDVGYKTAEHHFTALPTDMKVEWAKKAYGLQSDNQYRADVKWMKGMGWVATGSLNVEQAKKAGELISEKKYRQHPDALKFTSIKDTPEMVQARISYTQAVDRLYREQGENIKHHYTPTADLPEVLLAKLNAMNISETRYKESWSKLRDGGYKLRLDALPFQAAKASGEIISDYKYKEAFEKMKGQMLGSRSLEDDISLAHSVYATSLQSDVNYKKGFEHSKAQFHLPLDMAALVHAKKAQTLASNQDYKHPLPQYTSLAEDLRLSCAKKAHKLQSENLYRSDLNFMRGVACVIPGTLEIEGRKKASELISESKYRQHPHSFKYTAVTDTPNLLHAKFSNQITNERLYKAAGEDARHEYTMTLGLPEFIRAKTNAANLSDARYKESWRNLRAQGYKLTIEALPFQAARASGDIASDFLYRHDFVKERGKLIGPQSVRDDPRIQHCRRMGQLQSELQYRRGATSSQAQFHLPMDMVHLVHAKNAQALASDHDYRTQYHKFTALPEDLKMAWAKKAHALQSELRYKSDLIGMKGIGWLALRSPQMESAKKAGELISETKYRKKPDSIKFTTVVDSPDLVHAKNSYMHCNERMYRSGDAESLHRYTLIPDHPDFTRARLNALHLSDKVYRNSWEQTRAGSYDFRLDAIPFQTARASREIASDFRYKEAFLRDRGLQIGYRSVDDDPRMKHFLNVGRLQSDNEYKKDFAKSRSQFHSSTDQPGLLQAKRSQQLASDVHYRQPLPQPTCDPEQLGLRHAQKAHQLQSDVKYKSDLNLTRGVGWTPPGSYKVEMARRAAELANARGLGLQGAYRGAEAVEAGDHQSGEVNPDATEILHVKKKKALLL

SEQ ID NO: 41389 - protein, 1695 aa, Homo sapiens
MNVQPCSRCGYGVYPAEKISCIDQIWHKACFHCEVCKMMLSVNNFVSHQKKPYCHAHNPKNNTFTSVYHTPLNLNVRTFPEAISGIHDQEDGEQCKSVFHWDMKSKDKEGAPNRQPLANERAYWTGYGEGNAWCPGALPDPEIVRMVEARKSLGEEYTEDYEQPRGKGSFPAMITPAYQRAKKANQLASQVEYKRGHDERISRFSTVVDTPELLRSKAGAQLQSDVRYTEDYEQQRGKGSFPAMITPAYQIAKRANELASDVRYHQQYQKEMRGMAGPAIGAEGILTRECADQYGQGYPEEYEEHRGKGSFPAMITPAYQNAKKAHELASDIKYRQDFNKMKGAAHYHSLPAQDNLVLKQAQSVNKLVSENKYKENYQNHMRGRYEGVGMDRRTLHAMKVGSLASNVAYKADYKHDIVDYNYPATLTPSYQTAMKLVPLKDANYRQSIDKLKYSSVTDTPQIVQAKINAQQLSHVNYRADYEKNKLNYTLPQDVPQLVKAKTNAKLFSEVKYKEGWEKTKGKGFEMKLDAMSLLAAKASGELASNIKYKEEYEKTKGKAMGTADSRLLHSLQIAKMSSEVEYKKGFEESKTRFHLPMDMVNIRHAKKAQTLASDLDYRKKLHEYTVLPEDMKTQWAKKAYGLQSELQYKADLAWMKGVGWLTEGSLNLEQAKKAGQLVSEKNYRQRVDELKFTSVTDSSQMEHAKKSQELQSGVAYKAGNEQSVHQYTISKDEPLFLQARANAANLSEKLYKSSWENQKAKGFELRLDSLTFLAAKAKRDLASEVKYKEDYERSRGKLIGAKDVQGDSQMSHSLQMSKLQSELEYKKGFEDTKSQCHVSLDMVHLVHARKAQHLATDVGYKTAEHHFTALPTDMKVEWAKKAYGLQSDNQYRADVKWMKGMGWVATGSLNVEQAKKAGELISEKKYRQHPDALKFTSIKDTPEMVQARISYTQAVDRLYREQGENIKHHYTPTADLPEVLLAKLNAMNISETRYKESWSKLRDGGYKLRLDALPFQAAKASGEIISDYKYKEAFEKMKGQMLGSRSLEDDISLAHSVYATSLQSDVNYKKGFEHSKAQFHLPLDMAALVHAKKAQTLASNQDYKHPLPQYTSLAEDLRLSCAKKAHKLQSENLYRSDLNFMRGVACVIPGTLEIEGRKKASELISESKYRQHPHSFKYTAVTDTPNLLHAKFSNQITNERLYKAAGEDARHEYTMTLGLPEFIRAKTNAANLSDARYKESWRNLRAQGYKLTIEALPFQAARASGDIASDFLYRHDFVKERGKLIGPQSVRDDPRIQHCRRMGQLQSELQYRRGATSSQAQFHLPMDMVHLVHAKNAQALASDHDYRTQYHKFTALPEDLKMAWAKKAHALQSELRYKSDLIGMKGIGWLALRSPQMESAKKAGELISETKYRKKPDSIKFTTVVDSPDLVHAKNSYMHCNERMYRSGDAESLHRYTLIPDHPDFTRARLNALHLSDKVYRNSWEQTRAGSYDFRLDAIPFQTARASREIASDFRYKEAFLRDRGLQIGYRSVDDDPRMKHFLNVGRLQSDNEYKKDFAKSRSQFHSSTDQPGLLQAKRSQQLASDVHYRQPLPQPTCDPEQLGLRHAQKAHQLQSDVKYKSDLNLTRGVGWTPPGSYKVEMARRAAELANARGLGLQGAYRGAEAVEAGDHQSGEVNPDATEILHVKKKKALLL

SEQ ID NO: 41390 - protein, 437 aa, Homo sapiens
MDGNDNVTLLFAPLLRDNYTLAPNASSLGPGTDLALAPASSAGPGPGLSLGPGPSFGFSPGPTPTPEPTTSGLAGGAASHGPSPFPRPWAPHALPFWDTPLNHGLNVFVGAALCITMLGLGCTVDVNHFGAHVRRPVGALLAALCQFGLLPLLAFLLALAFKLDEVAAVAVLLCGCCPGGNLSNLMSLLVDGDMNLSIIMTISSTLLALVLMPLCLWIYSWAWINTPIVQLLPLGTVTLTLCSTLIPIGLGVFIRYKYSRVADYIVKVSLWSLLVTLVVLFIMTGTMLGPELLASIPAAVYVIAIFMPLAGYASGYGLATLFHLPPNCKRTVCLETGSQNVQLCTAILKLAFPPQFIGSMYMFPLLYALFQSAEAGIFVLIYKMYGSEMLHKRDPLDEDEDTDISYKKLKEEEMADTSYGTVKAENIIMMETAQTSL

SEQ ID NO: 41391 - protein, 415 aa, Homo sapiens
MFADLDYDIEEDKLGIPTVPGKVTLQKDAQNLIGISIGGGAQYCPCLYIVQVFDNTPAALDGTVAAGDEITGVNGRSIKGKTKVEVAKMIQEVKGEVTIHYNKLQADPKQGMSLDIVLKKVKHRLVENMSSGTADALGLSRAILCNDGLVKRLEELERTAELYKGMTEHTKNLLRAFYELSQTHRAFGDVFSVIGVREPQPAASEAFVKFADAHRSIEKFGIRLLKTIKPMLTDLNTYLNKAIPDTRLTIKKYLDVKFEYLSYCLKVKEMDDEEYSCIALGEPLYRVSTGNYEYRLILRCRQEARARFSQMRKDVLEKMELLDQKHVQDIVFQLQRLVSTMSKYYNDCYAVLRDADVFPIEVDLAHTTLAYGLNQEEFTDGEEEEEEEDTAAGEPSRDTRGAAGPLDKGGSWCDS

SEQ ID NO: 41392 - protein, 364 aa, Homo sapiens
MFADLDYDIEEDKLGIPTVPGKVTLQKDAQNLIGISIGGGAQYCPCLYIVQVFDNTPAALDGTVAAGDEITGVNGRSIKGKTKVEVAKMIQEVKGEVTIHYNKLQADPKQGMSLDIVLKKVKHRLVENMSSGTADALGLSRAILCNDGLVKRLEELERTAELYKGMTEHTKNLLRAFYELSQTHRAFGDVFSVIGVREPQPAASEAFVKFADAHRSIEKFGIRLLKTIKPMLTDLNTYLNKAIPDTRLTIKKYLDVKFEYLSYCLKVKEMDDEEYSCIVSVGGGGGLVLPPTWSARDSRWLRPTRERPGGLGWTLVPGDLGPSSQSRSLGLGVLGTRPGTTPSVWGTLGGKSDFLHSYEALLSV

SEQ ID NO: 41393 - protein, 850 aa, Homo sapiens
MRQVCCSALPPPPLEKGRCSSYSDSSSSSSERSSSSSSSSSESGSSSRSSSNNSSISRPAAPPEPRPQQQPQPRSPAARRAAARSRAAAAGGMRRDPAPGFSMLLFGVSLACYSPSLKSVQDQAYKAPVVVEGKVQGLVPAGGSSSNSTREPPASGRVALVKVLDKWPLRSGGLQREQVISVGSCVPLERNQRYIFFLEPTEQPLVFKTAFAPLDTNGKNLKKEVGKILCTDCATRPKLKKMKSQTGQVGEKQSLKCEAAAGNPQPSYRWFKDGKELNRSRDIRIKYGNGRKNSRLQFNKVKVEDAGEYVCEAENILGKDTVRGRLYVNSVSTTLSSWSGHARKCNETAKSYCVNGGVCYYIEGINQLSCKCPNGFFGQRCLEKLPLRLYMPDPKQKAEELYQKRVLTITGICVALLVVGIVCVVAYCKTKKQRKQMHNHLRQNMCPAHQNRSLANGPSHPRLDPEEIQMADYISKNVPATDHVIRRETETTFSGSHSCSPSHHCSTATPTSSHRHESHTWSLERSESLTSDSQSGIMLSSVGTSKCNSPACVEARARRAAAYNLEERRRATAPPYHDSVDSLRDSPHSERYVSALTTPARLSPVDFHYSLATQVPTFEITSPNSAHAVSLPPAAPISYRLAEQQPLLRHPAPPGPGPGPGPGPGPGADMQRSYDSYYYPAAGPGPRRGTCALGGSLGSLPASPFRIPEDDEYETTQECAPPPPPRPRARGASRRTSAGPRRWRRSRLNGLAAQRARAARDSLSLSSGSGGGSASASDDDADDADGALAAESTPFLGLRGAHDALRSDSPPLCPAADSRTYYSLDSHSTRASSRHSRGPPPRAKQDSAPL

SEQ ID NO: 41394 - protein, 844 aa, Homo sapiens
MRQVCCSALPPPPLEKGRCSSYSDSSSSSSERSSSSSSSSSESGSSSRSSSNNSSISRPAAPPEPRPQQQPQPRSPAARRAAARSRAAAAGGMRRDPAPGFSMLLFGVSLACYSPSLKSVQDQAYKAPVVVEGKVQGLVPAGGSSSNSTREPPASGRVALVKVLDKWPLRSGGLQREQVISVGSCVPLERNQRYIFFLEPTEQPLVFKTAFAPLDTNGKNLKKEVGKILCTDCATRPKLKKMKSQTGQVGEKQSLKCEAAAGNPQPSYRWFKDGKELNRSRDIRIKYGNGRKNSRLQFNKVKVEDAGEYVCEAENILGKDTVRGRLYVNSVSTTLSSWSGHARKCNETAKSYCVNGGVCYYIEGINQLSCKCPVGYTGDRCQQFAMVNFSKAEELYQKRVLTITGICVALLVVGIVCVVAYCKTKKQRKQMHNHLRQNMCPAHQNRSLANGPSHPRLDPEEIQMADYISKNVPATDHVIRRETETTFSGSHSCSPSHHCSTATPTSSHRHESHTWSLERSESLTSDSQSGIMLSSVGTSKCNSPACVEARARRAAAYNLEERRRATAPPYHDSVDSLRDSPHSERYVSALTTPARLSPVDFHYSLATQVPTFEITSPNSAHAVSLPPAAPISYRLAEQQPLLRHPAPPGPGPGPGPGPGPGADMQRSYDSYYYPAAGPGPRRGTCALGGSLGSLPASPFRIPEDDEYETTQECAPPPPPRPRARGASRRTSAGPRRWRRSRLNGLAAQRARAARDSLSLSSGSGGGSASASDDDADDADGALAAESTPFLGLRGAHDALRSDSPPLCPAADSRTYYSLDSHSTRASSRHSRGPPPRAKQDSAPL

SEQ ID NO: 41395 - protein, 858 aa, Homo sapiens
MRQVCCSALPPPPLEKGRCSSYSDSSSSSSERSSSSSSSSSESGSSSRSSSNNSSISRPAAPPEPRPQQQPQPRSPAARRAAARSRAAAAGGMRRDPAPGFSMLLFGVSLACYSPSLKSVQDQAYKAPVVVEGKVQGLVPAGGSSSNSTREPPASGRVALVKVLDKWPLRSGGLQREQVISVGSCVPLERNQRYIFFLEPTEQPLVFKTAFAPLDTNGKNLKKEVGKILCTDCATRPKLKKMKSQTGQVGEKQSLKCEAAAGNPQPSYRWFKDGKELNRSRDIRIKYGNGRKNSRLQFNKVKVEDAGEYVCEAENILGKDTVRGRLYVNSVSTTLSSWSGHARKCNETAKSYCVNGGVCYYIEGINQLSCKCPNGFFGQRCLEKLPLRLYMPDPKQKHLGFELKEAEELYQKRVLTITGICVALLVVGIVCVVAYCKTKKQRKQMHNHLRQNMCPAHQNRSLANGPSHPRLDPEEIQMADYISKNVPATDHVIRRETETTFSGSHSCSPSHHCSTATPTSSHRHESHTWSLERSESLTSDSQSGIMLSSVGTSKCNSPACVEARARRAAAYNLEERRRATAPPYHDSVDSLRDSPHSERYVSALTTPARLSPVDFHYSLATQVPTFEITSPNSAHAVSLPPAAPISYRLAEQQPLLRHPAPPGPGPGPGPGPGPGADMQRSYDSYYYPAAGPGPRRGTCALGGSLGSLPASPFRIPEDDEYETTQECAPPPPPRPRARGASRRTSAGPRRWRRSRLNGLAAQRARAARDSLSLSSGSGGGSASASDDDADDADGALAAESTPFLGLRGAHDALRSDSPPLCPAADSRTYYSLDSHSTRASSRHSRGPPPRAKQDSAPL

SEQ ID NO: 41396 - protein, 852 aa, Homo sapiens
MRQVCCSALPPPPLEKGRCSSYSDSSSSSSERSSSSSSSSSESGSSSRSSSNNSSISRPAAPPEPRPQQQPQPRSPAARRAAARSRAAAAGGMRRDPAPGFSMLLFGVSLACYSPSLKSVQDQAYKAPVVVEGKVQGLVPAGGSSSNSTREPPASGRVALVKVLDKWPLRSGGLQREQVISVGSCVPLERNQRYIFFLEPTEQPLVFKTAFAPLDTNGKNLKKEVGKILCTDCATRPKLKKMKSQTGQVGEKQSLKCEAAAGNPQPSYRWFKDGKELNRSRDIRIKYGNGRKNSRLQFNKVKVEDAGEYVCEAENILGKDTVRGRLYVNSVSTTLSSWSGHARKCNETAKSYCVNGGVCYYIEGINQLSCKCPVGYTGDRCQQFAMVNFSKHLGFELKEAEELYQKRVLTITGICVALLVVGIVCVVAYCKTKKQRKQMHNHLRQNMCPAHQNRSLANGPSHPRLDPEEIQMADYISKNVPATDHVIRRETETTFSGSHSCSPSHHCSTATPTSSHRHESHTWSLERSESLTSDSQSGIMLSSVGTSKCNSPACVEARARRAAAYNLEERRRATAPPYHDSVDSLRDSPHSERYVSALTTPARLSPVDFHYSLATQVPTFEITSPNSAHAVSLPPAAPISYRLAEQQPLLRHPAPPGPGPGPGPGPGPGADMQRSYDSYYYPAAGPGPRRGTCALGGSLGSLPASPFRIPEDDEYETTQECAPPPPPRPRARGASRRTSAGPRRWRRSRLNGLAAQRARAARDSLSLSSGSGGGSASASDDDADDADGALAAESTPFLGLRGAHDALRSDSPPLCPAADSRTYYSLDSHSTRASSRHSRGPPPRAKQDSAPL

SEQ ID NO: 41397 - protein, 426 aa, Homo sapiens
MRQVCCSALPPPPLEKGRCSSYSDSSSSSSERSSSSSSSSSESGSSSRSSSNNSSISRPAAPPEPRPQQQPQPRSPAARRAAARSRAAAAGGMRRDPAPGFSMLLFGVSLACYSPSLKSVQDQAYKAPVVVEGKVQGLVPAGGSSSNSTREPPASGRVALVKVLDKWPLRSGGLQREQVISVGSCVPLERNQRYIFFLEPTEQPLVFKTAFAPLDTNGKNLKKEVGKILCTDCATRPKLKKMKSQTGQVGEKQSLKCEAAAGNPQPSYRWFKDGKELNRSRDIRIKYGNGRKNSRLQFNKVKVEDAGEYVCEAENILGKDTVRGRLYVNSVSTTLSSWSGHARKCNETAKSYCVNGGVCYYIEGINQLSCKCPNGFFGQRCLEKLPLRLYMPDPKQSVLWDTPGTGVSSSQWSTSPKPRSCTRRGS

SEQ ID NO: 41398 - protein, 422 aa, Homo sapiens
MRQVCCSALPPPPLEKGRCSSYSDSSSSSSERSSSSSSSSSESGSSSRSSSNNSSISRPAAPPEPRPQQQPQPRSPAARRAAARSRAAAAGGMRRDPAPGFSMLLFGVSLACYSPSLKSVQDQAYKAPVVVEGKVQGLVPAGGSSSNSTREPPASGRVALVKVLDKWPLRSGGLQREQVISVGSCVPLERNQRYIFFLEPTEQPLVFKTAFAPLDTNGKNLKKEVGKILCTDCATRPKLKKMKSQTGQVGEKQSLKCEAAAGNPQPSYRWFKDGKELNRSRDIRIKYGNGRKNSRLQFNKVKVEDAGEYVCEAENILGKDTVRGRLYVNSVSTTLSSWSGHARKCNETAKSYCVNGGVCYYIEGINQLSCKCPNGFFGQRCLEKLPLRLYMPDPKQSVLWDTPGTGVSSSQWSTSPSTLDLN

SEQ ID NO: 41399 - protein, 617 aa, Homo sapiens
MKSQTGQVGEKQSLKCEAAAGNPQPSYRWFKDGKELNRSRDIRIKYGNGRKNSRLQFNKVKVEDAGEYVCEAENILGKDTVRGRLYVNSVSTTLSSWSGHARKCNETAKSYCVNGGVCYYIEGINQLSCKCPNGFFGQRCLEKLPLRLYMPDPKQKHLGFELKEAEELYQKRVLTITGICVALLVVGIVCVVAYCKTKKQRKQMHNHLRQNMCPAHQNRSLANGPSHPRLDPEEIQMADYISKNVPATDHVIRRETETTFSGSHSCSPSHHCSTATPTSSHRHESHTWSLERSESLTSDSQSGIMLSSVGTSKCNSPACVEARARRAAAYNLEERRRATAPPYHDSVDSLRDSPHSERYVSALTTPARLSPVDFHYSLATQVPTFEITSPNSAHAVSLPPAAPISYRLAEQQPLLRHPAPPGPGPGPGPGPGPGADMQRSYDSYYYPAAGPGPRRGTCALGGSLGSLPASPFRIPEDDEYETTQECAPPPPPRPRARGASRRTSAGPRRWRRSRLNGLAAQRARAARDSLSLSSGSGGGSASASDDDADDADGALAAESTPFLGLRGAHDALRSDSPPLCPAADSRTYYSLDSHSTRASSRHSRGPPPRAKQDSAPL

SEQ ID NO: 41400 - protein, 647 aa, Homo sapiens
MSESRRRGRGRGKKHPEGRKREREPDPGEKATRPKLKKMKSQTGQVGEKQSLKCEAAAGNPQPSYRWFKDGKELNRSRDIRIKYGNGRKNSRLQFNKVKVEDAGEYVCEAENILGKDTVRGRLYVNSVSTTLSSWSGHARKCNETAKSYCVNGGVCYYIEGINQLSCKCPNGFFGQRCLEKLPLRLYMPDPKQKAEELYQKRVLTITGICVALLVVGIVCVVAYCKTKKQRKQMHNHLRQNMCPAHQNRSLANGPSHPRLDPEEIQMADYISKNVPATDHVIRRETETTFSGSHSCSPSHHCSTATPTSSHRHESHTWSLERSESLTSDSQSGIMLSSVGTSKCNSPACVEARARRAAAYNLEERRRATAPPYHDSVDSLRDSPHSERYVSALTTPARLSPVDFHYSLATQVPTFEITSPNSAHAVSLPPAAPISYRLAEQQPLLRHPAPPGPGPGPGPGPGPGADMQRSYDSYYYPAAGPGPRRGTCALGGSLGSLPASPFRIPEDDEYETTQECAPPPPPRPRARGASRRTSAGPRRWRRSRLNGLAAQRARAARDSLSLSSGSGGGSASASDDDADDADGALAAESTPFLGLRGAHDALRSDSPPLCPAADSRTYYSLDSHSTRASSRHSRGPPPRAKQDSAPL

SEQ ID NO: 41401 - protein, 356 aa, Homo sapiens
MDTQGPVSQPFQQPEKPGRVRRRKTRRERNKALVGSRRPLAHHDPPVAIRDPPVVPTASKLVVITQGRLSREHRGLFNHEVKSLDVARLLSSGTLVPGSPTLPAKPSPSPGRAQEPAPRSRDKENQVPGGSGPGPPSSPELSGVGQLLAELQCQLSLPQAFPRRNLIQDARDAIVHTLQACHGCVPDLALVLRGCQPPLPGAKPGVSERKMTPFWINSPDQVPEQERQRKQQGTKEFTFPMPYTSSMPTAHRGSLAPPRGPWPPYFPSLSSPSGTAWGPPTAFDLLKSIWLVATPPPPRPWGVGLPQPLPQPSSPLLPRTSVLDWSPSPPSPLPSLSWVVAQSSPEAWSFPPMRLY

SEQ ID NO: 41402 - protein, 235 aa, Homo sapiens
MDTQGPVSQPFQQPEKPGRVRRRKTRRERNKALVGSRRPLAHHDPPVAIRDPPVVPTASKLVVITQGRLSREHRGLFNHEVKSLDVARLLSSGTLVPGSPTLPAKPSPSPGRAQEPAPRSRDKENQVPGGSGPGPPSSPELSGVGQLLAELQCQLSLPQAFPRRNLIQDARDAIVHTLQACHGCVPDLALVLRGCQPPLPGERPSCPCTPLSFVGSSSASLYASFLCARGQAWGL

SEQ ID NO: 41403 - protein, 615 aa, Homo sapiens
MFARGSRRRRSGRAPPEAEDPDRGQPCNSCREQCPGFLLHGWRKICQHCKCPREEHAVHAVPVDLERIMCRLISDFQRHSISDDDSGCASEEYAWVPPGLKPEQVYQFFSCLPEDKVPYVNSPGEKYRIKQLLHQLPPHDSEAQYCTALEEEEKKELRAFSQQRKRENLGRGIVRIFPVTITGAICEECGKQIGGGDIAVFASRAGLGACWHPQCFVCTTCQELLVDLIYFYHVGKVYCGRHHAECLRPRCQACDEIIFSPECTEAEGRHWHMDHFCCFECEASLGGQRYVMRQSRPHCCACYEARHAEYCDGCGEHIGLDQGQMAYEGQHWHASDRCFCCSRCGRALLGRPFLPRRGLIFCSRACSLGSEPTAPGPSRRSWSAGPVTAPLAASTASFSAVKGASETTTKGTSTELAPATGPEEPSRFLRGAPHRHSMPELGLRSVPEPPPESPGQPNLRPDDSAFGRQSTPRVSFRDPLVSEGGPRRTLSAPPAQRRRPRSPPPRAPSRRRHHHHNHHHHHNRHPSRRRHYQCDAGSGSDSESCSSSPSSSSSESSEDDGFFLGERIPLPPHLCRPMPAQDTAMETFNSPSLSLPRDSRAGMPRQARDKNCIVA

SEQ ID NO: 41404 - protein, 534 aa, Homo sapiens
MCRLISDFQRHSISDDDSGCASEEYAWVPPGLKPEQVTRGQPSTLAVQWVHTNAHTHTHTQAQYCTALEEEEKKELRAFSQQRKRENLGRGIVRIFPVTITGAICEECGKQIGGGDIAVFASRAGLGACWHPQCFVCTTCQELLVDLIYFYHVGKVYCGRHHAECLRPRCQACDEIIFSPECTEAEGRHWHMDHFCCFECEASLGGQRYVMRQSRPHCCACYEARHAEYCDGCGEHIGLDQGQMAYEGQHWHASDRCFCCSRCGRALLGRPFLPRRGLIFCSRACSLGSEPTAPGPSRRSWSAGPVTAPLAASTASFSAVKGASETTTKGTSTELAPATGPEEPSRFLRGAPHRHSMPELGLRSVPEPPPESPGQPNLRPDDSAFGRQSTPRVSFRDPLVSEGGPRRTLSAPPAQRRRPRSPPPRAPSRRRHHHHNHHHHHNRHPSRRRHYQCDAGSGSDSESCSSSPSSSSSESSEDDGFFLGERIPLPPHLCRPMPAQDTAMETFNSPSLSLPRDSRAGMPRQARDKNCIVA

SEQ ID NO: 41405 - protein, 1158 aa, Homo sapiens
MTHGEELGSDVHQDSIVLTYLEGLLMHQAAGGSGTAVDKKSAGHNEEDQNFNISGSAFPTCQSNGPVLNTHTYQGSGMLHLKKARLLQSSEDWNAAKRKRLSDSIMNLNVKKEALLAGMVDSVPKGKQDSTLLASLLQSFSSRLQTVALSQQIRQSLKEQGYALSHDSLKVEKDLRCYGVASSHLKTLLKKSKVKDQKPDTNLPDVTKNLIRDRFAESPHHVGQSGTKVMSEPLSCAARLQAVASMVEKRASPATSPKPSVACSQLALLLSSEAHLQQYSREHALKTQNANQAASERLAAMARLQENGQKDVGSYQLPKGMSSHLNGQARTSSSKLMASKSSATVFQNPMGIIPSSPKNAGYKNSLERNNIKQAANNSLLLHLLKSQTIPKPMNGHSHSERGSIFEESSTPTTIDEYSDNNPSFTDDSSGDESSYSNCVPIDLSCKHRTEKSESDQPVSLDNFTQSLLNTWDPKVPDVDIKEDQDTSKNSKLNSHQKVTLLQLLLGHKNEENVEKNTSPQGVHNDVSKFNTQNYARTSVIESPSTNRTTPVSTPPLLTSSKAGSPINLSQHSLVIKWNSPPYVCSTQSEKLTNTASNHSMDLTKSKDPPGEKPAQNEGAQNSATFSASKLLQNLAQCGMQSSMSVEEQRPSKQLLTGNTDKPIGMIDRLNSPLLSNKTNAVEENKAFSSQPTGPEPGLSGSEIENLLERRTVLQLLLGNPNKGKSEKKEKTPLRDESTQEHSERALSEQILMVKIKSEPCDDLQIPNTNVHLSHDAKSAPFLGMAPAVQRSAPALPVSEDFKSEPVSPQDFSFSKNGLLSRLLRQNQDSYLADDSDRSHRNNEMALLESKNLCMVPKKRKLYTEPLENPFKKMKNNIVDAANNHSAPEVLYGSLLNQEELKFSRNDLEFKYPAGHGSASESEHRSWARESKSFNVLKQLLLSENCVRDLSPHRSNSVADSKKKGHKNNVTNSKPEFSISSLNGLMYSSTQPSSCMDNRTFSYPGVVKTPVSPTFPEHLGCAGSRPESGLLNGCSMPSEKGPIKWVITDAEKNEYEKDSPRLTKTNPILYYMLQKGGNSVTSRETQDKDIWREASSAESVSQVTAKEELLPTAETKASFFNLRSPYNSHMGNNASRPHSANGEVYGLLGSVLTIKKESE

SEQ ID NO: 41406 - protein, 230 aa, Homo sapiens
MKLIVGIGGMTNGGKTTLTNSLLRALPNCCVIHQDDFFKPQDQIAVGEDGFKQWDVLESLDMEAMLDTVQAWLSSPQKFARAHGVSVQPEASDTHILLLEGFLLYSYKPLVDLYSRRYFLTVPYEECKWRRSTRNYTVPDPPGLFDGHVWPMYQKYRQEMEANGVEVVYLDGMKSREELFREVLEDIQNSLLNRSQESAPSPARPARTQGPGRGCGHRTARPAASQQDSM

SEQ ID NO: 41407 - protein, 235 aa, Homo sapiens
MKLIVGIGGMTNGGKTTLTNSLLRALPNCCVIHQDDFFKAPLFQPQDQIAVGEDGFKQWDVLESLDMEAMLDTVQAWLSSPQKFARAHGVSVQPEASDTHILLLEGFLLYSYKPLVDLYSRRYFLTVPYEECKWRRSTRNYTVPDPPGLFDGHVWPMYQKYRQEMEANGVEVVYLDGMKSREELFREVLEDIQNSLLNRSQESAPSPARPARTQGPGRGCGHRTARPAASQQDSM

SEQ ID NO: 41408 - protein, 241 aa, Homo sapiens
MFYSGLLTEGGRKETDMREAASLRQQRRMKQAVQFIHKDSADLLPLDGLKKLGSSKDMQPHNILQRRLMETNLSKLRSGPRVPWASKTNKLNQAKSEGLKKSEEDDMILVSCQCAGKDVKALVDTGCLYNLISLACVDRLGLKEHVKSHKHEGEKLSLPRHLKVVGQIEHLVITLGSLRLDCPAAVVDDNEKNLSLGLQTLRSLKCIINLDKHRLIMGKTDKEEIPFVETVSLNEDNTSEA

SEQ ID NO: 41409 - protein, 1582 aa, Homo sapiens
MAGPGGWRDREVTDLGHLPDPTGIFSLDKTIGLGTYGRIYLGLHEKTGAFTAVKVMNARKTPLPEIGRRVRVNKYQKSVGWRYSDEEEDLRTELNLLRKYSFHKNIVSFYGAFFKLSPPGQRHQLWMVMELCAAGSVTDVVRMTSNQSLKEDWIAYICREILQGLAHLHAHRVIHRDIKGQNVLLTHNAEVKLVDFGVSAQVSRTNGRRNSFIGTPYWMAPEVIDCDEDPRRSYDYRSDVWSVGITAIEMAEGAPPLCNLQPLEALFVILRESAPTVKSSGWSRKFHNFMEKCTIKNFLFRPTSANMLQHPFVRDIKNERHVVESLTRHLTGIIKKRQKKGIPLIFEREEAIKEQYTVRRFRGPSCTHELLRLPTSSRCRPLRVLHGEPSQPRWLPDREEPQVQALQQLQGAARVFMPLQALDSAPKPLKGQAQAPQRLQGAARVFMPLQAQVKAKASKPLQMQIKAPPRLRRAARVLMPLQAQVRAPRLLQVQSQVSKKQQAQTQTSEPQDLDQVPEEFQGQDQVPEQQRQGQAPEQQQRHNQVPEQELEQNQAPEQPEVQEQAAEPAQAETEAEEPESLRVNAQVFLPLLSQDHHVLLPLHLDTQVLIPVEGQTEGSPQAQAWTLEPPQAIGSVQALIEGLSRDLLRAPNSNNSKPLGPLQTLMENLSSNRFYSQPEQAREKKSKVSTLRQALAKRLSPKRFRAKSSWRPEKLELSDLEARRQRRQRRWEDIFNQHEEELRQVDKDKEDESSDNDEVFHSIQAEVQIEPLKPYISNPKKIEVQERSPSVPNNQDHAHHVKFSSSVPQRSLLEQAQKPIDIRQRSSQNRQNWLAASESSSEEESPVTGRRSQSSPPYSTIDQKLLVDIHVPDGFKVGKISPPVYLTNEWVGYNALSEIFRNDWLTPAPVIQPPEEDGDYVELYDASADTDGDDDDESNDTFEDTYDHANGNDDLDNQVDQANDVCKDHDDDNNKFVDDVNNNYYEAPSCPRASYGRDGSCKQDGYDGSRGKEEAYRGYGSHTANRSHGGSAASEDNAAIGDQEEHAANIGSERRGSEGDGGKGVVRTSEESGALGLNGEENCSETDGPGLKRPASQDFEYLQEEPGGGNEASNAIDSGAAPSAPDHESDNKDISESSTQSDFSANHSSPSKGSGMSADANFASAILYAGFVEVPEESPKQPSEVNVNPLYVSPACKKPLIHMYEKEFTSEICCGSLWGVNLLLGTRSNLYLMDRSGKADITKLIRRRPFRQIQVLEPLNLLITISGHKNRLRVYHLTWLRNKILNNDPESKRRQEEMLKTEEACKAIDKLTGCEHFSVLQHEETTYIAIALKSSIHLYAWAPKSFDESTAIKVCIDQSADSEGDYMSYQAYIRILAKIQAADPVNRFKRPDELLHLLKLKVFPTLDHKPVTVDLAIGSEKRLKIFFSSADGYHLIDAESEVMSDVTLPKNPLEIIIPQNIIILPDCLGIGMMLTFNAEALSVEANEQLFKKILEMWKDIPSSIAFECTQRTTGWGQKAIEVRSLQSRVLESELKRRSIKKLRFLCTRGDKLFFTSTLRNHHSRVYFMTLGKLEELQSNYDV

SEQ ID NO: 41410 - protein, 1250 aa, Homo sapiens
MFFSFVKKGIPLIFEREEAIKEQYTVRRFRGPSCTHELLRLPTSSRCRPLRVLHGEPSQPRWLPDREEPQVQALQQLQGAARVFMPLQALDSAPKPLKGQAQAPQRLQGAARVFMPLQAQVKAKASKPLQMQIKAPPRLRRAARVLMPLQAQVRAPRLLQVQSQVSKKQQAQTQTSEPQDLDQVPEEFQGQDQVPEQQRQGQAPEQQQRHNQVPEQELEQNQAPEQPEVQEQAAEPAQAETEAEEPESLRVNAQVFLPLLSQDHHVLLPLHLDTQVLIPVEGQTEGSPQAQAWTLEPPQAIGSVQALIEGLSRDLLRAPNSNNSKPLGPLQTLMENLSSNRFYSQPEQAREKKSKVSTLRQALAKRLSPKRFRAKSSWRPEKLELSDLEARRQRRQRRWEDIFNQHEEELRQVDKDKEDESSDNDEVFHSIQAEVQIEPLKPYISNPKKIEVQERSPSVPNNQDHAHHVKFSSSVPQRSLLEQAQKPIDIRQRSSQNRQNWLAASESSSEEESPVTGRRSQSSPPYSTIDQKLLVDIHVPDGFKVGKISPPVYLTNEWVGYNALSEIFRNDWLTPAPVIQPPEEDGDYVELYDASADTDGDDDDESNDTFEDTYDHANGNDDLDNQVDQANDVCKDHDDDNNKFVDDVNNNYYEAPSCPRASYGRDGSCKQDGYDGSRGKEEAYRGYGSHTANRSHGGSAASEDNAAIGDQEEHAANIGSERRGSEGDGGKGVVRTSEESGALGLNGEENCSETDGPGLKRPASQDFEYLQEEPGGGNEASNAIDSGAAPSAPDHESDNKDISESSTQSDFSANHSSPSKGSGMSADANFASAILYAGFVEVPEESPKQPSEVNVNPLYVSPACKKPLIHMYEKEFTSEICCGSLWGVNLLLGTRSNLYLMDRSGKADITKLIRRRPFRQIQVLEPLNLLITISGHKNRLRVYHLTWLRNKILNNDPESKRRQEEMLKTEEACKAIDKLTGCEHFSVLQHEETTYIAIALKSSIHLYAWAPKSFDESTAIKVCIDQSADSEGDYMSYQAYIRILAKIQAADPVNRFKRPDELLHLLKLKVFPTLDHKPVTVDLAIGSEKRLKIFFSSADGYHLIDAESEVMSDVTLPKNPLEIIIPQNIIILPDCLGIGMMLTFNAEALSVEANEQLFKKILEMWKDIPSSIAFECTQRTTGWGQKAIEVRSLQSRVLESELKRRSIKKLRFLCTRGDKLFFTSTLRNHHSRVYFMTLGKLEELQSNYDV

SEQ ID NO: 41411 - protein, 188 aa, Homo sapiens
MAGPGGWRDREVTDLGHLPDPTGIFSLDKTIGLGTYGRIYLGLHEKTGAFTAVKVMNARKTPLPEIGRRVRVNKYQKSVGWRYSDEEEDLRTELNLLRKYSFHKNIVSFYGAFFKLSPPGQRHQLWMVMELCAAGSVTDVVRMTSNQSLKEDWIAYICREILQPKVIFLGTGCSDSSLKKELCLKHQN

SEQ ID NO: 41412 - protein, 767 aa, Homo sapiens
MGRRSRGRRLQQQQRPEDAEDGAEGGGKRGEAGWEGGYPEIVKENKLFEHYYQELKIVPEGEWGQFMDALREPLPATLRITGYKSHAKEILHCLKNKYFKELEDLEVDGQKVEVPQPLSWYPEELAWHTNLSRKILRKSPHLEKFHQFLVSETESGNISRQEAVSMIPPLLLNVRPHHKILDMCAAPGSKTTQLIEMLHADMNVPFPEGFVIANDVDNKRCYLLVHQAKRLSSPCIMVVNHDASSIPRLQIDVDGRKEILFYDRILCDVPCSGDGTMRKNIDVWKKWTTLNSLQLHGLQLRIATRGAEQLAEGGRMVYSTCSLNPIEDEAVIASLLEKSEGALELADVSNELPGLKWMPGITQWKVMTKDGQWFTDWDAVPHSRHTQIRPTMFPPKDPEKLQAMHLERCLRILPHHQNTGGFFVAVLVKKSSMPWNKRQPKLQGKSAETRESTQLSPADLTEGKPTDPSKLESPSFTGTGDTEIAHATEDLENNGSKKDGVCGPPPSKKMKLFGFKEDPFVFIPEDDPLFPPIEKFYALDPSFPRMNLLTRTTEGKKRQLYMVSKELRNVLLNNSEKMKVINTGIKVWCRNNSGEEFDCAFRLAQEGIYTLYPFINSRIITVSMEDVKILLTQENPFFRKLSSETYSQAKDLAKGSIVLKYEPDSANPDALQCPIVLCGWRGKASIRTFVPKNERLHYLRMMGLEVLGEKKKEGVILTNESAASTGQPDNDVTEGQRAGEPNSPDAEEANSPDVTAGCDPAGVHPPR

SEQ ID NO: 41413 - protein, 732 aa, Homo sapiens
MGRRSRGRRLQQQQRPEDAEDGAEGGGKRGEAGWEGGYPEIVKENKLFEHYYQELKIVPEGEWGQFMDALREPLPATLRITGYKRYPEELAWHTNLSRKILRKSPHLEKFHQFLVSETESGNISRQEAVSMIPPLLLNVRPHHKILDMCAAPGSKTTQLIEMLHADMNVPFPEGFVIANDVDNKRCYLLVHQAKRLSSPCIMVVNHDASSIPRLQIDVDGRKEILFYDRILCDVPCSGDGTMRKNIDVWKKWTTLNSLQLHGLQLRIATRGAEQLAEGGRMVYSTCSLNPIEDEAVIASLLEKSEGALELADVSNELPGLKWMPGITQWKVMTKDGQWFTDWDAVPHSRHTQIRPTMFPPKDPEKLQAMHLERCLRILPHHQNTGGFFVAVLVKKSSMPWNKRQPKLQGKSAETRESTQLSPADLTEGKPTDPSKLESPSFTGTGDTEIAHATEDLENNGSKKDGVCGPPPSKKMKLFGFKEDPFVFIPEDDPLFPPIEKFYALDPSFPRMNLLTRTTEGKKRQLYMVSKELRNVLLNNSEKMKVINTGIKVWCRNNSGEEFDCAFRLAQEGIYTLYPFINSRIITVSMEDVKILLTQENPFFRKLSSETYSQAKDLAKGSIVLKYEPDSANPDALQCPIVLCGWRGKASIRTFVPKNERLHYLRMMGLEVLGEKKKEGVILTNESAASTGQPDNDVTEGQRAGEPNSPDAEEANSPDVTAGCDPAGVHPPR

SEQ ID NO: 41414 - protein, 531 aa, Homo sapiens
MVVNHDASSIPRLQIDVDGRKEILFYDRILCDVPCSGDGTMRKNIDVWKKWTTLNSLQLHGLQLRIATRGAEQLAEGGRMVYSTCSLNPIEDEAVIASLLEKSEGALELADVSNELPGLKWMPGITQWKVMTKDGQWFTDWDAVPHSRHTQIRPTMFPPKDPEKLQAMHLERCLRILPHHQNTGGFFVAVLVKKSSMPWNKRQPKLQGKSAETRESTQLSPADLTEGKPTDPSKLESPSFTGTGDTEIAHATEDLENNGSKKDGVCGPPPSKKMKLFGFKEDPFVFIPEDDPLFPPIEKFYALDPSFPRMNLLTRTTEGKKRQLYMVSKELRNVLLNNSEKMKVINTGIKVWCRNNSGEEFDCAFRLAQEGIYTLYPFINSRIITVSMEDVKILLTQENPFFRKLSSETYSQAKDLAKGSIVLKYEPDSANPDALQCPIVLCGWRGKASIRTFVPKNERLHYLRMMGLEVLGEKKKEGVILTNESAASTGQPDNDVTEGQRAGEPNSPDAEEANSPDVTAGCDPAGVHPPR

SEQ ID NO: 41415 - protein, 718 aa, Homo sapiens
MLNSTGELEFSNEEDPEIISQLTSLPLSGGKSSAGVPEKTGYPDSVYVMAANIFQGIRIEKSAQKVLIKYGNEPLRSLSESEDQSFQRLSYELAFSALKYQDILETILIDSCIFPSTTIPDHLSSLIIVMLYDFQDRKFQTRVLSDNEEPISEVQEVENLLNSFKIKLAAALARCRIKHDALSIYHILPETVRKQELRASTLPLYAWINTCKISPEEVYNNLKRRGYNKVKSVLHIDDKVFAVDQHCYDVLIFPSHLKNDLINIDLFKDYKLIFQDKSRSLAVHSVKALLNMDDDVLMVNTGSWYTVSHMSILTNNNTSKVFVCGVQSQAKDPDLKTLFTKIGCKNIEILHEKFINIESKDHRLQKVKVILLLPRCSGLGVSNPVEFILNEHEDTEFLKDHSQGGISVDKLHVLAQQQYEQLTHAMKFTKAQAVVYCTCSVFPEENEAVVKKALEFQDLGNKGQPYRLSPPVLPLCSLKEIQLSTDKFFRMEPSEITNGCFLSILTRERDPSETVSVNDVLARAAAKGLLDGIELGKSSKREKKKKKSKTSLTKGATTDNGIQMKIAEFLNRETKASANLSETVTKPPLPQKNTAQVGASSQTRKPNKLAPHPAVPAFVKNTCPSRPRERQTHFLRPRPEDRMVALKPIKIVLPPVFMPFSSPQGIRSRMPTQHLYCRWVAPKALVPTCLPTHSLSRKEEKPKDDTPSSLLRPPRRWL

SEQ ID NO: 41416 - protein, 475 aa, Homo sapiens
MLNSTGELEFSNEEDPEIISQLTSLPLSGGKSSAGVPEKTGYPDSVYVMAANIFQGIRIEKSAQKVLIKYGNEPLRSLSESEDQSFQRLSYELAFSALKYQDILETILIDSCIFPSTTIPDHLSSLIIVMLYDFQDRKFQTRVLSDNEEPISEVQEVENLLNSFKIKLAAALARCRIKHDALSIYHILPETVRKQELRASTLPLYAWINTCKISPEEVYNNLKRRGYNKVKSVLHIDDKVFAVDQHCYDVLIFPSHLKNDLINIDLFKDYKLIFQDKSRSLAVHSVKALLNMDDDVLMVNTGSWYTVSHMSILTNNNTSKVFVCGVQSQAKDPDLKTLFTKIGCKNIEILHEKFINIESKDHRLQKVKVILLLPRCSGLGVSNPVEFILNEHEDTEFLKDHSQGGISVDKLHVLAQQQYEQLTHAMKFTKAQAVVYCTCSVFPEENEAVVKKALEFQDLGNKGQPYSGTLLRQCL

SEQ ID NO: 41417 - protein, 277 aa, Homo sapiens
MLNSTGELEFSNEEDPEIISQLTSLPLSGGKSSAGVPEKTGYPDSVYVMAANIFQGIRIEKSAQKVLIKYGNEPLRSLSESEDQSFQRLSYELAFSALKYQDILETILIDSCIFPSTTIPDHLSSLIIVMLYDFQDRKFQTRVLSDNEEPISEVQEVENLLNSFKIKLAAALARCRIKHDALSIYHILPETVRKQELRASTLPLYAWINTCKISPEEVYNNLKRRGYNKVKSVLHIDDKVFAVDQHCYDVLIFPSHLKNDLINIDLFKDYKLIFQVN

SEQ ID NO: 41418 - protein, 414 aa, Homo sapiens
MRLRFWLLIWLLLGFISHQPTPVINSLAVYRHRETDFGVGVRDHPGQHGKTPSPQKLDNLIIIIIGFLRRYTFNVLFCTSCLCVSFLKTIFWSRNGHDGSMDVQQRAWRSNRSRQKGLRSICMHTKKRVSSFRGNKIGLKDVITLRRHVETKVRAKIRKRKVTTKINRHDKINGKRKTARKQKMFQRAQELRRRAEDYHKCKIPPSARKPLCNWVRMAAAEHCHSSGLPYWLYLTAETLKNRMGRQPPPPTQQHSITDNSLSLKTPPECLLTPLPPSVDDNIKECPLAPLPPSPLPPSVDDNLKECLFVPLPPSPLPPSVDDNLKECLFVPLPPSPLPPSVDDNLKTPPLATQEAEVEKPPKPKRWRVDEVEQSPKPKRQREAEAQQLPKPKRRRLSKLRTRHCTQAWAIRINP

SEQ ID NO: 41419 - protein, 429 aa, Homo sapiens
MPMRVPEEVTLRNPGSSGRKERPEAGTGSWLGRTRNQVINSLAVYRHRETDFGVGVRDHPGQHGKTPSPQKLDNLIIIIIGFLRRYTFNILFCTSCLCVSFLKTIFWSRNGHDGSMDVQQRAWRSNRSRQKGLRSICMHTKKRVSSFRGNKIGLKDVITLRRHVETKVRAKIRKRKVTTKINRHDKINGKRKTARKQKMFQRAQELRRRAEDYHKCKIPPSARKPLCNWVRMAAAEHRHSSGLPYWLYLTAETLKNRMGRQPPPPTQQHSITDNSLSLKTPPECLLTPLPPSVDDNIKECPLAPLPPSPLPPSVDDNLKECLFVPLPPSPLPPSVDDNLKECLFVPLPPSPLPPSVDDNLKTPPLATQEAEVEKPPKPKRWRVDEVEQSPKPKRQREAEAQQLPKPKRRRLSKLRTRHCTQAWAIRINP

SEQ ID NO: 41420 - protein, 170 aa, Homo sapiens
MKTLFLGVTLGLAAALSFTLEEEDITGTWYVKAMVVDKDFPEDRRPRKVSPVKVTALGGGNLEATFTFMREDRCIQKKILMRKTEEPGKFSAYGGRKLIYLQELPGTDDYVFYCKDQRRGGLRYMGKLVGRNPNTNLEALEEFKKLVQHKGLSEEDIFMPLQTGSCVLEH

SEQ ID NO: 41421 - protein, 146 aa, Homo sapiens
MKTLFLGVTLGLAAALSFTLEEEDITGTWYVKAMVVDKDFPEDRRPRKVSPVKVTALGGGNLEATFTFMREDRCIQKKILMRKTEEPGKFSAYGGRKLIYLQELPGTDDYVFYCKDQRRGGLRYMGKLVGPCRCPHVGSPGHLTCR

SEQ ID NO: 41422 - protein, 147 aa, Homo sapiens
MKTLFLGVTLGLAAALSFTLEEEDEGESVHPEENPDAEDGGAWQIQRLWGQEAHIPAGAARDGRLRLLLQRPAPWGPALHGKACGICSLQGRAAVPTLAHLATSPAGRNPNTNLEALEEFKKLVQHKGLSEEDIFMPLQTGSCVLEH

SEQ ID NO: 41423 - protein, 228 aa, Homo sapiens
MKTLFLGVTLGLAAALSFTLEEEDITGTWYVKAMVVDKDFPEDRRPRKVSPVKVTALGGGNLEATFTFMREDRCIQKKILMRKTEEPGKFSAYGGRKLIYLQELPGTDDYVFYCKDQRRGGLRYMGKLVASAPCRAVPLSPRRLTWPPHLQVGILIPTWRPWKNLRNWCSTRDSRRRTFSCPCRREAAFSNTRQPPGLHLQSPPYHQTQSPDHLDLPSSHDPSLLPPT

SEQ ID NO: 41424 - protein, 327 aa, Homo sapiens
MEWRNHSGRVSEFVLLGFPAPAPLQVLLFALLLLAYVLVLTENTLIIMAIRNHSTLHKPMYFFLANMSFLEIWYVTVTIPKMLAGFVGSKQDHGQLISFEGCMTQLYFFLGLGCTECVLLAVMAYDRYMAICYPLHYPVIVSGRLCVQMAAGSWAGGFGISMVKVFLISGLSYCGPNIINHFFCDVSPLLNLSCTDMSTAELTDFILAIFILLGPLSVTGASYVAITGAVMHIPSAAGRYKAFSTCASHLTVVIIFYAASIFIYARPKALSAFDTNKLVSVLYAVIVPLLNPIIYCLRNQEVKRALCCTLHLYQHQDPDPKKASRNV

SEQ ID NO: 41425 - protein, 324 aa, Homo sapiens
MEARNQTAISKFLLLGLIEDPELQPVLFSLFLSMYLVTILGNLLILLAVISDSHLHTPMYFFLSNLSFLDICLSTTTIPKMLVNIQAQNRSITYSGCLTQICFVLFFAGLENCLLAAMAYDRYVAICHPLRYTVIMNPRLCGLLILLSLLTSVVNALLLSLMVLRLSFCTDLEIPLFFCELAQVIQLTCSDTLINNILIYFAACIFGGVPLSGIILSYTQITSCVLRMPSASGKHKAVSTCGSHLSIVLLFYGAGLGVYISSVVTDSPRKTAVASVMYSVFPQMVNPFIYSLRNKDMKGTLRKFIGRIPSLLWCAICFGFRFLE

SEQ ID NO: 41426 - protein, 263 aa, Homo sapiens [sequence omitted]

SEQ ID NO: 41427 - protein, 421 aa, Homo sapiens
MGFLSPIYVIFFFFGVKVHCQYETYQWDEDYDQEPDDDYQTGFPFRQNVDYGVPFHQYTLGCVSECFCPTNFPSSMYCDNRKLKTIPNIPMHIQQLYLQFNEIEAVTANSFINATHLKEINLSHNKIKSQKIDYGVFAKLPNLLQLHLEHNNLEEFPFPLPKSLERLLLGYNEISKLQTNAMDGLVNLTMLDLCYNYLHDSLLKDKIFAKMEKLMQLNLCSNRLESMPPGLPSSLMYLSLENNSISSIPEKYFDKLPKLHTLRMSHNKLQDIPYNIFNLPNIVELSVGHNKLKQAFYIPRNLEHLYLQNNEIEKMNLTVMCPSIDPLHYHHLTYIRVDQNKLKEPISSYIFFCFPHIHTIYYGEQRSTNGQTIQLKTQVFRRFPDDDDESEDHDDPDNAHESPEQEGAEGHFDLHYYENQE

SEQ ID NO: 41428 - protein, 309 aa, Homo sapiens
MKRKNFTEVSEFIFLGFSSFGKHQITLFVVFLTVYILTLVANIIIVTIICIDHHLHTPMYFFLSMLASSETVYTLVIVPRMLLSLIFHNQPISLAGCATQMFFFVILATNNCFLLTAMGYDRYVAICRPLRYTVIMSKGLCAQLVCGSFGIGLTMAVLHVTAMFNLPFCGTVVDHFFCDIYPVMKLSCIDTTINEIINYGVSSFVIFVPIGLIFISYVLVISSILQIASAEGRKKTFATCVSHLTVVIVHCGCASIAYLKPKSESSIEKDLVLSVTYTIITPLLNPVVYSLRNKEVKDALCRVVGRNIS

SEQ ID NO: 41429 - protein, 343 aa, Homo sapiens
MMKKNQTMISEFLLLGLPIQPEQQNLFYALFLAVYLTTLLGNLLVIVLIRLDSHLHMPMYLCLSNLSFSDLCFSSVTMPKLLQNMQSQNPSIPFADCLAQMYFHLFYGVLESFLLVVMAYHCYVAICFPLHYTTIMSPKCCLGLLTLSWLLTTAHATLHTLLMARLSFCAENVIPHFFCDTSTLLKLACSNTQVNGWVMFFMGGLILVIPFLLLIMSCARIVSTILRVPSTGGIQKAFSTCGPHLSVVSLFYGTIIGLYLCPLTNHNTVKDTVMAVMYTGVTHMLNPFIYSLRNRDMRGNPGQSLQHKENFFVFKIVIVGILPLLNLVGVVKLIMKYHSKSVA

SEQ ID NO: 41430 - protein, 317 aa, Homo sapiens
MGTDNQTWVSEFILLGLSSDWDTRVSLFVLFLVMYVVTVLGNCLIVLLIRLDSRLHTPMYFFLTNLSLVDVSYATSVVPQLLAHFLAEHKAIPFQSCAAQLFFSLALGGIEFVLLAVMAYDRYVAVCDALRYSAIMHGGLCARLAITSWVSGFISSPVQTAITFQLPMCRNKFIDHISCELLAVVRLACVDTSSNEVTIMVSSIVLLMTPFCLVLLSYIQIISTILKIQSREGRKKAFHTCASHLTVVALCYGVAIFTYIQPHSSPSVLQEKLFSVFYAILTPMLNPMIYSLRNKEVKGAWQKLLWKFSGLTSKLAT

SEQ ID NO: 41431 - protein, 747 aa, Homo sapiens
MQGGEPVSTMKVSESEGKLEGQATAVTPNKNSSCGGGISSSSSSRGGSAKGWQYSDHMENVYGYLMKYTNLVTGWQYRFFVLNNEAGLLEYFVNEQSRNQKPRGTLQLAGAVISPSDEDSHTFTVNAASGEQYKLRATDAKERQHWVSRLQICTQHHTEAIGKNNPPLKSRSFSLASSSNSPISQRRPSQNAISFFNVGHSKLQSLSKRTNLPPDHLVEVREMMSHAEGQQRDLIRRIECLPTSGHLSSLDQDLLMLKATSMATMNCLNDCFHILQLQHASHQKGSLPSGTTIEWLEPKISLSNHYKNGADQPFATDQSKPVAVPEEQPVAESGLLAREPEEINADDEIEDTCDHKEDDLGAVEEQRSVILHLLSQLKLGMDLTRVVLPTFILEKRSLLEMYADFMSHPDLFIAITNGATAEDRMIRFVEYYLTSFHEGRKGAIAKKPYNPIIGETFHCSWKMPKSEVASSVFSSSSTQGVTNHAPLSGESLTQVGSDCYTVRFVAEQVSHHPPVSGFYAECTERKMCVNAHVWTKSKFLGMSIGVTMVGEGILSLLEHGEEYTFSLPCAYARSILTVPWVELGGKVSVNCAKTGYSASITFHTKPFYGGKLHRVTAEVKHNITNTVVCRVQGEWNSVLEFTYSNGETKYVDLTKLAVTKKRVRPLEKQDPFESRRLWKNVTDSLRESEIDKATEHKHTLEERQRTEERHRTETGTPWKTKYFIKEGDGWVYHKPLWKIIPTTQPAE

SEQ ID NO: 41432 - protein, 310 aa, Homo sapiens
MEEENATLLTEFVLTGFLYQPQWKIPLFLAFLVIYLITIMGNLGLIAVIWKDPHLHIPMYLLLGNLAFVDALLSSSVTLKMLINFLAKSKMISLSECKIQLFSFAISVTTECFLLATMAYDRYVAICKPLLYPAIMTNGLCIRLLILSYVGGLLHALIHEGFLFRLTFCNSNIIQHFYCDIIPLLKISYTDSSINFLMVFIFAGSIQVFTIGTVLISYIFVLYTILKKKSVKGMRKAFSTCGAHLLSVSLYYGPLAFMYMGSASPQADDQDMMESLFYTVIVPLLNPMIYSLRNKQVIASFTKMFKRNDV

SEQ ID NO: 41433 - protein, 320 aa, Homo sapiens
MSSCNFTHATFVLIGIPGLEKAHFWVGFPLLSMYVVAMFGNCIVVFIVRTERSLHAPMYLFLCMLAAIDLALSTSTMPKILALFWFDSREISFEACLTQMFFIHALSAIESTILLAMAFDRYVAICHPLRHAAVLNNTVTAQIGIVAVVRGSLFFFPLPLLIKRLAFCHSNVLSHSYCVHQDVMKLAYADTLPNVVYGLTAILLVMGVDVMFISLSYFLIIRTVLQLPSKSERAKAFGTCVSHIGVVLAFYVPLIGLSVVHRFGNSLHPIVRVVMGDIYLLLPPVINPIIYGAKTKQIRTRVLAMFKISCDKDLQAVGGK

SEQ ID NO: 41434 - protein, 312 aa, Homo sapiens
MDGENHSVVSEFLFLGLTHSWEIQLLLLVFSSVLYVASITGNIFIVFSVTTDPHLHSPMYFLLASLSFIDLGACSVTSPKMIYDLFRKRKVISFGGCIAQIFFIHVIGGVEMVLLIAMAFDRYVALCKPLHYLTIMSPRMCLSFLAVAWTLGVSHSLFQLAFLVNLAFCGPNVLDSFYCDLPRLLRLACTDTYRLQFMVTVNSGFICVGTFFILLISYVFILFTVWKHSSGGSSKALSTLSAHSTVVLLFFGPPMFVYTRPHPNSQMDKFLAIFDAVLTPFLNPVVYTFRNKEMKAAIKRVCKQLVIYKKIS

SEQ ID NO: 41435 - protein, 307 aa, Homo sapiens
MLNTTSVTEFLLLGVTDIQELQPFLFVVFLTIYFISVTGNGAVLMIVISDPRLHSLMYFFLGNLSYLDICYSTVTLPKMLQNFLSTHKAISFLGCISQLHFFHSLGSTESMLFAVMAFDLSVAICKPLRYTVIMNPQLCTQMAITIWVIGFFHALLHSVMTSRLNFCGSNRIHHFLCDIKPLLKLACGNTELNQWLLSTVTGTIAMGPFFLTLLSYFYIITYLFFKTRSCSMLCKALSTCASHFMVVILFYAPVLFTYIHPALESFMDQDRIVAIMYTVVTPVLNPLIYTLRNKEVKGALGRVIRRL

SEQ ID NO: 41436 - protein, 323 aa, Homo sapiens
MDKSNSSVVSEFVLLGLCSSQKLQLFYFCFFSVLYTVIVLGNLLIILTVTSDTSLHSPMYFLLGNLSFVDICQASFATPKMIADFLSAHETISFSGCIAQIFFIHLFTGGEMVLLVSMAYDRYVAICKPLYYVVIMSRRTCTVLVMISWAVSLVHTLSQLSFTVNLPFCGPNVVDSFFCDLPRVTKLACLDSYIIEILIVVNSGILSLSTFSLLVSSYIIILVTVWLKSSAAMAKAFSTLASHIAVVILFFGPCIFIYVWPFTISPLDKFLAIFYTVFTPVLNPIIYTLRNRDMKAAVRKIVNHYLRPRRISEMSLVVRTSFH

SEQ ID NO: 41437 - protein, 313 aa, Homo sapiens
MGQTNVTSWRDFVFLGFSSSGELQLLLFALFLSLYLVTLTSNVFIIIAIRLDSHLHTPMYLFLSFLSFSETCYTLGIIPRMLSGLAGGDQAISYVGCAAQMFFSASWACTNCFLLAAMGFDRYVAICAPLHYASHMNPTLCAQLVITSFLTGYLFGLGMTLVIFHLSFCSSHEIQHFFCDTPPVLSLACGDTGPSELRIFILSLLVLLVSFFFITISYAYILAAILRIPSAEGQKKAFSTCASHLTVVIIHYGCASFVYLRPKASYSLERDQLIAMTYTVVTPLLNPIVYSLRNRAIQTALRNAFRGRLLGKG

SEQ ID NO: 41438 - protein, 321 aa, Homo sapiens
MSGDNSSSLTPGFFILNGVPGLEATHIWISLPFCFMYIIAVVGNCGLICLISHEEALHRPMYYFLALLSFTDVTLCTTMVPNMLCIFWFNLKEIDFNACLAQMFFVHMLTGMESGVLMLMALDRYVAICYPLRYATILTNPVIAKAGLATFLRNVMLIIPFTLLTKRLPYCRGNFIPHTYCDHMSVAKVSCGNFKVNAIYGLMVALLIGVFDICCISVSYTMILQAVMSLSSADARHKAFSTCTSHMCSIVITYVAAFFTFFTHRFVGHNIPNHIHIIVANLYLLLPPTMNPIVYGVKTKQIQEGVIKFLLGDKVSFTYDK

SEQ ID NO: 41439 - protein, 344 aa, Homo sapiens
MLSLKLPQLLQVHQVPRVFWEDGIMSGYRRPTSSALDCVLSSFQMTNETVNIWTHFLPTWYFLWRLLALAGGPGFRAEPYHWPLLVFLLPACLYPFASCCAHTFSSMSPRMRHICYFLDYGALSLYSLGCAFPYAAYSMPASWLHGHLHQFFVPAAALNSFLCTGLSCYSRFLELESPGLSKVLRTGAFAYPFLFDNLPLFYRLGLCWGRGHGCGQEALSTSHGYHLFCALLTGFLFASHLPERLAPGRFDYIGHSHQLFHICAVLGTHFQLEAVLADMGSRRAWLATQEPALGLAGTVATLVLAAAGNLLIIAAFTATLLRAPSTCPLLQGGPLEGGTQAKQQ

SEQ ID NO: 41440 - protein, 351 aa, Homo sapiens
MSPRMRHICYFLDYGALSLYSLGCAFPYAAYSMPASWLHGHLHQFFVPAAALNSFLCTGLSCYSRFLELESPGLSKVLRTGAFAYPFLFDNLPLFYRLGLCWGRGHGCGQEALSTSHGYHLFCALLTGFLFASHLPERLAPGRFDYIGEGTPGPAREEAGADAFPEHRMNWATATSYSTSVQCWAPTSSWRQCWLIWDHAEPGWPHRNLPWAWQAQWPHWSWLQLGTYSLLLLSQPPCFGPPVHALCCRVAHWRGVPRPNNSEAPSLTLSWRGQRPGPSADEEPRFGPNQVGTHLSLEPTGAEERGHRREGREEEGCLGGLAECERDREGALDGSGRSAEGLRGEMHACPG

SEQ ID NO: 41441 - protein, 238 aa, Homo sapiens
MSPRMRHICYFLDYGALSLYSLGCAFPYAAYSMPASWLHGHLHQFFVPAAALNSFLCTGLSCYSRFLELESPGLSKVLRTGAFAYPFLFDNLPLFYRLGLCWGRGHGCGQEALSTSHGYHLFCALLTGFLFASHLPERLAPGRFDYIGHSHQLFHICAVLGTHFQLEAVLADMGSRRAWLATQEPALGLAGTVATLVLAAAGNLLIIAAFTATLLRAPSTCPLLQGGPLEGGTQAKQQ

SEQ ID NO: 41442 - protein, 320 aa, Homo sapiens
MSGYRRPTSSALDCVLSSFQMTNETVNIWTHFLPTWYFLWRLLALAGGPGFRAEPYHWPLLVFLLPACLYPFASCCAHTFSSMSPRMRHICYFLDYGALSLYSLGCAFPYAAYSMPASWLHGHLHQFFVPAAALNSFLCTGLSCYSRFLELESPGLSKVLRTGAFAYPFLFDNLPLFYRLGLCWGRGHGCGQEALSTSHGYHLFCALLTGFLFASHLPERLAPGRFDYIGHSHQLFHICAVLGTHFQLEAVLADMGSRRAWLATQEPALGLAGTVATLVLAAAGNLLIIAAFTATLLRAPSTCPLLQGGPLEGGTQAKQQ

SEQ ID NO: 41443 - protein, 341 aa, Homo sapiens
MLSLKLPQLLQVHQVFWEDGIMSGYRRPTSSALDCVLSSFQMTNETVNIWTHFLPTWYFLWRLLALAGGPGFRAEPYHWPLLVFLLPACLYPFASCCAHTFSSMSPRMRHICYFLDYGALSLYSLGCAFPYAAYSMPASWLHGHLHQFFVPAAALNSFLCTGLSCYSRFLELESPGLSKVLRTGAFAYPFLFDNLPLFYRLGLCWGRGHGCGQEALSTSHGYHLFCALLTGFLFASHLPERLAPGRFDYIGHSHQLFHICAVLGTHFQLEAVLADMGSRRAWLATQEPALGLAGTVATLVLAAAGNLLIIAAFTATLLRAPSTCPLLQGGPLEGGTQAKQQ

SEQ ID NO: 41444 - protein, 329 aa, Homo sapiens
MTLVSFFSFLSKPLIMLLSNSSWRLSQPSFLLVGIPGLEESQHWIALPLGILYLLALVGNVTILFIIWMDPSLHQSMYLFLSMLAAIDLVLASSTAPKALAVLLVHAHEIGYIVCLIQMFFIHAFSSMESGVLVAMALDCYVAICHPLHHSTILHPGVIGCIGMVVLVRGLLLLIPFPILLGKLIFCQATIIGHAYCEHMAVVKLACSETTVNRAYGLTMALLVIGLDVLAIGVSYAHILQAVLKVPGSEARLKAFSTCGSHICVILVFYVPGIFSFLTHRFGHHVPHHVHVLLATWYLLMPPALNPLVYGVKTQQIRQRVLRVFTQKD

SEQ ID NO: 41445 - protein, 317 aa, Homo sapiens
MLTFHNVCSVPSSFWLTGIPGLESLHVWLSIPFGSMYLVAVVGNVTILAVVKIERSLHQPMYFFLCMLAAIDLVLSTSTIPKLLGIFWFGACDIGLDACLGQMFLIHCFATVESGIFLAMAFDRYVAICNPLRHSMVLTYTVVGRLGLVSLLRGVLYIGPLPLMIRLRLPLYKTHVISHSYCEHMAVVALTCGDSRVNNVYGLSIGFLVLILDSVAIAASYVMIFRAVMGLATPEARLKTLGTCASHLCAILIFYVPIAVSSLIHRFGQCVPPPVHTLLANFYLLIPPILNPIVYAVRTKQIRESLLQIPRIEMKIR

SEQ ID NO: 41446 - protein, 307 aa, Homo sapiens
METGNLTWVSDFVFLGLSQTRELQRFLFLMFLFVYITTVMGNILIIITVTSDSQLHTPMYFLLRNLAVLDLCFSSVTAPKMLVDLLSEKKTISYQGCMGQIFFFHFLGGAMVFFLSVMAFDRLIAISRPLRYVTVMNTQLWVGLVVATWVGGFVHSIVQLALMLPLPFCGPNILDNFYCDVPQVLRLACTDTSLLEFLKISNSGLLDVVWFFLLLMSYLFILVMLRSHPGEARRKAASTCTTHIIVVSMIFVPSIYLYARPFTPFPMDKLVSIGHTVMTPMLNPMIYTLRNQDMQAAVRRLGRHRLV

SEQ ID NO: 41447 - protein, 3336 aa, Homo sapiens
MEVEQEQRRRKVEAGRTKLAHFRQRKTKGDSSHSEKKTAKRKGSAVDASVQEESPVTKEDSALCGGGDICKSTSCDDTPDGAGGAFAAQPEDCDGEKREDLEQLQQKQVNDHPPEQCGMFTVSDHPPEQHGMFTVGDHPPEQRGMFTVSDHPPEQHGMFTVSDHPPEQRGMFTISDHQPEQRGMFTVSDHTPEQRGIFTISDHPAEQRGMFTKECEQECELAITDLESGREDEAGLHQSQAVHGLELEALRLSLSNMHTAQLELTQANLQKEKETALTELREMLNSRRAQELALLQSRQQHELELLREQHAREKEEVVLRCGQEAAELKEKLQSEMEKNAQIVKTLKEDWESEKDLCLENLRKELSAKHQSEMEDLQNQFQKELAEQRAELEKIFQDKNQAERALRNLESHHQAAIEKLREDLQSEHGRCLEDLEFKFKESEKEKQLELENLQASYEDLKAQSQEEIRRLWSQLDSARTSRQELSELHEQLLARTSRVEDLEQLKQREKTQHESELEQLRIYFEKKLRDAEKTYQEDLTLLQQRLQGAREDALLDSVEVGLSCVGLEEKPEKGRKDHVDELEPERHKESLPRFQAELEESHRHQLEALESPLCIQHEGHVSDRCCVETSALGHEWRLEPSEGHSQELPWVHLQGVQDGDLEADTERAARVLGLETEHKVQLSLLQTELKEEIELLKIENRNLYGKLQHETRLKDDLEKVKHNLIEDHQKELNNAKQKTELMKQEFQRKETDWKVMKEELQREAEEKLTLMLLELREKAESEKQTIINKFELREAEMRQLQDQQAAQILDLERSLTEQQGRLQQLEQDLTSDDALHCSQCGREPPTAQDGELAALHVKEDCALQLMLARSRFLEERKEITEKFSAEQDAFLQEAQEQHARELQLLQERHQQQLLSVTAELEARHQAALGELTASLESKQGALLAARVAELQTKHAADLGALETRHLSSLDSLESCYLSEFQTIREEHRQALELLRADFEEQLWKKDSLHQTILTQELEKLKRKHEGELQSVRDHLRTEVSTELAGTVAHELQGVHQGEFGSEKKTALHEKEETLRLQSAQAQPFHQEEKESLSLQLQKKNHQVQQLKDQVLSLSHEIEECRSELEVLQQRRERENREGANLLSMLKADVNLSHSERGALQDALRRLLGLFGETLRAAVTLRSRIGERVGLCLDDAGAGLALSTAPALEETWSDVALPELDRTLSECAEMSSVAEISSHMRESFLMSPESVRECEQPIRRVFQSLSLAVDGLMEMALDSSRQLEEARQIHSRFEKEFSFKNEETAQVVRKHQELLECLKEESAAKAELALELHKTQGTLEGFKVETADLKEVLAGKEDSEHRLVLELESLRRQLQQAAQEQAALREECTRLWSRGEATATDAEAREAALRKEVEDLTKEQSETRKQAEKDRSALLSQMKILESELEEQLSQHRGCAKQAEAVTALEQQVASLDKHLRNQRQFMDEQAAEREHEREEFQQEIQRLEGQLRQAAKPQPWGPRDSQQAPLDGEVELLQQKLREKLDEFNELAIQKESADRQVLMQEEEIKRLEEMNINIRKKVAQLQEEVEKQKNIVKGLEQDKEVLKKQQMSSLLLASTLQSTLDAGRCPEPPSGSPPEGPEIQLEVTQRALLRRESEVLDLKEQLEKMKGDLESKNEEILHLNLKLDMQNSQTAVSLRELEEENTSLKVIYTRSSEIEELKATIENLQENQKRLQKEKAEEIEQLHEVIEKLQHELSLMGPVVHEVSDSQAGSLQSELLCSQAGGPRGQALQGELEAALEAKEALSRLLADQERRHSQALEALQQRLQGAEEAAELQLAELERNVALREAEVEDMASRIQEFEAALKAKEATIAERNLEIDALNQRKAAHSAELEAVLLALARIRRALEQQPLAAGAAPPELQWLRAQCARLSRQLQVLHQRFLRCQVELDRRQARRATAHTRVPGAHPQPRMDGGAKAQVTGDVEASHDAALEPVVPDPQGDLQPVLVTLKDAPLCKQEGVMSVLTVCQRQLQSELLLVKNEMRLSLEDGGKGKEKVLEDCQLPKVDLVAQVKQLQEKLNRLLYSMTFQNVDAADTKSLWPMASAHLLESSWSDDSCDGEEPDISPHIDTCDANTATGGVTDVIKNQAIDACDANTTPGGVTDVIKNWDSLIPDEMPDSPIQEKSECQDMSLSSPTSVLGGSRHQSHTAEAGPRKSPVGMLDLSSWSSPEVLRKDWTLEPWPSLPVTPHSGALSLCSADTSLGDRADTSLPQTQGPGLLCSPGVSAAALALQWAESPPADDHHVQRTAVEKDVEDFITTSFDSQETLSSPPPGLEGKADRSEKSDGSGFGARLSPGSGGPEAQTAGPVTPASISGRFQPLPEAMKEKEVRPKHVKALLQMVRDESHQILALSEGLAPPSGEPHPPRKEDEIQDISLHGGKTQEVPTACPDWRGDLLQVVQEAFEKEQEMQGVELQPRLSGSDLGGHSSLLERLEKIIREQGDLQEKSLEHLRLPDRSSLLSEIQALRAQLRMTHLQNQEKLQHLRTALTSAEARGSQQEHQLRRQVELLAYKVEQEKCIAGDLQKTLSEEQEKANSVQKLLAAEQTVVRDLKSDLCESRQKSEQLSRSLCEVQQEVLQLRSMLSSKENELKAALQELESEQGKGRALQSQLEEEQLRHLQRESQSAKALEELRASLETQRAQSSRLCVALKHEQTAKDNLQKELRIEHSRCEALLAQERSQLSELQKDLAAEKSRTLELSEALRHERLLTEQLSQRTQEACVHQDTQAHHALLQKLKEEKSRVVDLQAMLEKVQQQALHSQQQLEAEAQKHCEALRREKEVSATLKSTVEALHTQKRELRCSLEREREKPAWLQAELEQSHPRLKEQEGRKAARRSAEARQSPAAAEQWRKWQRDKEKLRELELQRQRDLHKIKQLQQTVRDLESKDEVPGSRLHLGSARRAAGSDADHLREQQRELEAMRQRLLSAARLLTSFTSQAVDRTVNDWTSSNEKAVMSLLHTLEELKSDLSRPTSSQKKMAAELQFQFVDVLLKDNVSLTKALSTVTQEKLELSRAVSKLEKLLKHHLQKGCSPSRSERSAWKPDETAPQSSLRRPDPGRLPPAASEEAHTSNVKMEKLYLHYLRAESFRKALIYQKKYLLLLIGGFQDSEQETLSMIAHLGVFPSKAERKITSRPFTRFRTAVRVVIAILRLRFLVKKWQEVDRKGALAQGKAPRPGPRARQPQSPPRTRESPPTRDVPSGHTRDPARGRRLAAAASPHSGGRATPSPNSRLERSLTASQDPEHSLTEYIHHLEVIQQRLGGVLPDSTSKKSCHPMIKQ

SEQ ID NO: 41448 - protein, 3139 aa, Homo sapiens
MFTVSDHPPEQHGMFTVGDHPPEQRGMFTVSDHPPEQHGMFTVSDHPPEQRGMFTISDHQPEQRGMFTVSDHTPEQRGIFTISDHPAEQRGMFTKECEQECELAITDLESGREDEAGLHQSQAVHGLELEALRLSLSNMHTAQLELTQANLQKEKETALTELREMLNSRRAQELALLQSRQQHELELLREQHAREKEEVVLRCGQEAAELKEKLQSEMEKNAQIVKTLKEDWESEKDLCLENLRKELSAKHQSEMEDLQNQFQKELAEQRAELEKIFQDKNQAERALRNLESHHQAAIEKLREDLQSEHGRCLEDLEFKFKESEKEKQLELENLQASYEDLKAQSQEEIRRLWSQLDSARTSRQELSELHEQLLARTSRVEDLEQLKQREKTQHESELEQLRIYFEKKLRDAEKTYQEDLTLLQQRLQGAREDALLDSVEVGLSCVGLEEKPEKGRKDHVDELEPERHKESLPRFQAELEESHRHQLEALESPLCIQHEGHVSDRCCVETSALGHEWRLEPSEGHSQELPWVHLQGVQDGDLEADTERAARVLGLETEHKVQLSLLQTELKEEIELLKIENRNLYGKLQHETRLKDDLEKVKHNLIEDHQKELNNAKQKTELMKQEFQRKETDWKVMKEELQREAEEKLTLMLLELREKAESEKQTIINKFELREAEMRQLQDQQAAQILDLERSLTEQQGRLQQLEQDLTSDDALHCSQCGREPPTAQDGELAALHVKEDCALQLMLARSRFLEERKEITEKFSAEQDAFLQEAQEQHARELQLLQERHQQQLLSVTAELEARHQAALGELTASLESKQGALLAARVAELQTKHAADLGALETRHLSSLDSLESCYLSEFQTIREEHRQALELLRADFEEQLWKKDSLHQTILTQELEKLKRKHEGELQSVRDHLRTEVSTELAGTVAHELQGVHQGEFGSEKKTALHEKEETLRLQSAQAQPFHQEEKESLSLQLQKKNHQVQQLKDQVLSLSHEIEECRSELEVLQQRRERENREGANLLSMLKADVNLSHSERGALQDALRRLLGLFGETLRAAVTLRSRIGERVGLCLDDAGAGLALSTAPALEETWSDVALPELDRTLSECAEMSSVAEISSHMRESFLMSPESVRECEQPIRRVFQSLSLAVDGLMEMALDSSRQLEEARQIHSRFEKEFSFKNEETAQVVRKHQELLECLKEESAAKAELALELHKTQGTLEGFKVETADLKEVLAGKEDSEHRLVLELESLRRQLQQAAQEQAALREECTRLWSRGEATATDAEAREAALRKEVEDLTKEQSETRKQAEKDRSALLSQMKILESELEEQLSQHRGCAKQAEAVTALEQQVASLDKHLRNQRQFMDEQAAEREHEREEFQQEIQRLEGQLRQAAKPQPWGPRDSQQAPLDGEVELLQQKLREKLDEFNELAIQKESADRQVLMQEEEIKRLEEMNINIRKKVAQLQEEVEKQKNIVKGLEQDKEVLKKQQMSSLLLASTLQSTLDAGRCPEPPSGSPPEGPEIQLEVTQRALLRRESEVLDLKEQLEKMKGDLESKNEEILHLNLKLDMQNSQTAVSLRELEEENTSLKVIYTRSSEIEELKATIENLQENQKRLQKEKAEEIEQLHEVIEKLQHELSLMGPVVHEVSDSQAGSLQSELLCSQAGGPRGQALQGELEAALEAKEALSRLLADQERRHSQALEALQQRLQGAEEAAELQLAELERNVALREAEVEDMASRIQEFEAALKAKEATIAERNLEIDALNQRKAAHSAELEAVLLALARIRRALEQQPLAAGAAPPELQWLRAQCARLSRQLQVLHQRFLRCQVELDRRQARRATAHTRVPGAHPQPRMDGGAKAQVTGDVEASHDAALEPVVPDPQGDLQPVLVTLKDAPLCKQEGVMSVLTVCQRQLQSELLLVKNEMRLSLEDGGKGKEKVLEDCQLPKVDLVAQVKQLQEKLNRLLYSMTFQNVDAADTKSLWPMASAHLLESSWSDDSCDGEEPDISPHIDTCDANTATGGVTDVIKNQAIDACDANTTPGGVTDVIKNWDSLIPDEMPDSPIQEKSECQDMSLSSPTSVLGGSRHQSHTAEAGPRKSPVGMLDLSSWSSPEVLRKDWTLEPWPSLPVTPHSGALSLCSADTSLGDRADTSLPQTQGPGLLCSPGVSAAALALQWAESPPADDHHVQRTAVEKDVEDFITTSFDSQETLSSPPPGLEGKADRSEKSDGSGFGARLSPGSGGPEAQTAGPVTPASISGRFQPLPEAMKEKEVRPKHVKALLQMVRDESHQILALSEGLAPPSGEPHPPRKEDEIQDISLHGGKTQEVPTACPDWRGDLLQVVQEAFEKEQEMQGVELQPRLSGSDLGGHSSLLERLEKIIREQGDLQEKSLEHLRLPDRSSLLSEIQALRAQLRMTHLQNQEKLQHLRTALTSAEARGSQQEHQLRRQVELLAYKVEQEKCIAGDLQKTLSEEQEKANSVQKLLAAEQTVVRDLKSDLCESRQKSEQLSRSLCEVQQEVLQLRSMLSSKENELKAALQELESEQGKGRALQSQLEEEQLRHLQRESQSAKALEELRASLETQRAQSSRLCVALKHEQTAKDNLQKELRIEHSRCEALLAQERSQLSELQKDLAAEKSRTLELSEALRHERLLTEQLSQRTQEACVHQDTQAHHALLQKLKEEKSRVVDLQAMLEKVQQQALHSQQQLEAEAQKHCEALRREKERELELQRQRDLHKIKQLQQTVRDLESKDEVPGSRLHLGSARRAAGSDADHLREQQRELEAMRQRLLSAARLLTSFTSQAVDRTVNDWTSSNEKAVMSLLHTLEELKSDLSRPTSSQKKMAAELQFQFVDVLLKDNVSLTKALSTVTQEKLELSRAVSKLEKLLKHHLQKGCSPSRSERSAWKPDETAPQSSLRRPDPGRLPPAASEEAHTSNVKMEKLYLHYLRAESFRKALIYQKKYLLLLIGGFQDSEQETLSMIAHLGVFPSKAERKITSRPFTRFRTAVRVVIAILRLRFLVKKWQEVDRKGALAQGKAPRPGPRARQPQSPPRTRESPPTRDVPSGHTRDPARGRRLAAAASPHSGGRATPSPNSRLERSLTASQDPEHSLTEYIHHLEVIQQRLGGVLPDSTSKKSCHPMIKQ

SEQ ID NO: 41449 - protein, 3371 aa, Homo sapiens
MSPCGRKMGEGRQQRRAPVGKLLLLPGRRDTPHGRSGSSGARTQRSLLWLLVHVWLWAASGSSAQLFNLTLSVDEGLPPDTLVGDIRAGLPAAQQQEGSGFFLSEDSDDSPLLDDFHVHPDTGIIRTARRLDRERRDHYSFVAATLLGAVVQVEIRVNDVNDHSPRFPLDSLQLDVSELSPPGTAFRLPVAHDPDAGLFSTQGYTLVQPSDLPKDPAGPFFQLRYRTPGPLPSPLLPGSSSPLEPLDLVLLRRLDREEAAAHRLQIEAWDGGRPRRTGLLSVELRVLDENDNPPVFEQDEYRAAVREDAQPGAEVCRVRATDRDLGPNGFVRYSVRARQVPGAGSGGGALGDAAYFAVEELSGVVRVWRPLDREAQAWHQLVVEARDGGAEPEVATVRVSIAVLDVNDNRPAIHVLFLTEGGVARVSEGARPGDYVARVSVSDADGDWEKEDEATGELGVGLGDGSISLSLEGGEGDFALLPGGPPGVFFLCVEGPLDRESRDLYELLLVATDAGSPPLSTEETLLLRVADLNDQPPLFSQQHYKASVSEAAAPGTVVMWVSASDADEAGSDHAWLRYTVVQLSAPCNLGSLQSKMVHTAECGPSFAIDSESGAISTIRTLDREVQEAVELKVVAQDLGEPPLSATCLVSITVDDVNDNEPIFWRQVYNATIAEHAPVGHCFLQVTASDADSGLYGFIEYSLYDGFLSYEAPQAFRIDPHDGQICVSQDIDRERDPATYDLLVEAKDGGGLSAQAFVRVDLEDVNDNHPVFNPSTYVTSISDETQPGTEIINVLATDQDSGIYGTVAYELIPGNVSSLFTIDSTTGIIYLTLPLSHLESTTLSLMVSAQDGGGLTAVINADVTIHIFQTTLAPAEFERPKYTFLVYEDVPEDSPIGTVKAREPLNSSEPIFYRISSGDLGGKFSIHPRLGTIRTRKPLDHETQPVVVLTVQAQLGSAPACSSTEVNITVMDVNDNHPAFLRTSDEIRISQTTPPGTALYLARAEDRDSGRNGLIRYSIASPQPGVFAIDRALGVLFLNGSLGAGEQRELTLTLRAEDQGVHPQAALLVLTVVIEKREHSPSWTFEHLVYQVEVSESLSPMTQMLQTQAHPLGPQRAASPLRYSLEPSVDSAMFGIRPYTGWIYLRRQFDYESTQTYNFRVFAWIPEDGFLQNVSTTVIVRVWDENDNSPTFLHDVLFLKVEESPVPQGVIGKITAIDMDSGKNGQLLYFLLSDGKFFKMNPNTGELINWVALDREHRGHHEMTVLVTDRGSPPRNATMAVYVSVTDINDNRPFFPQCLPGKELHVKVLEGQPVNMLVTTVFAKDPDEGNNAEVTYSVSSEDSSDHFKIDANNGEIRTTTILSYDYRPSYRMSVIATDQGVPPLQGQAVVNIQVIPLSKGRAIMSQNIRHLIIPENLKPTKIMSLIKSSDHLQQHYNGKLHFSIVADDKDGHFEIDSSTGDLFLSKELDYETTSHYLFRVITTDHSKNLSLSSTVFLSIDVEDQNDHSPSFQDELIVISVEENVPIGTLVYVFNAKDDDGSFLNSRIQYYIESHNPGTNPFLIHPSFGTLVTVSRLDRESIPTVILTVTASDQAVNVTDRRLRSLTAQIVILDVNDHNPTFISFPNAHVKEDVTVGSLVHHITAHDPDEGRNGKVTYSILSGNENMTFMLDESSGLLTTTCPLDYEMKTQHILTVLALDDGTPALSSSQTLTVTVLDVNDEAPVFKQHLYEASVKENQNPGEFVTRVEALDRDSGVNSKLQFEIMPGASFELFEINSDTGEVVTTTILDREIQEVFTLRVLVRDGGFPSLSSTTTILCTVEDENDHAPEFIVSSYDIEVLENQEPEVVYTVLASDMDAGNNRAVEYHIIDGNTDECFTINEMSGELSTTRALDREQISNFTLVILCSDLGDPPRSSVIHLQVRVLDANDHSPSFPTLYYQSSVREDAEVGTVVLVLSAVDKDEGLNGQTEYFLTDEASGAFTIDPMSGTLKTSNTLDREARSQHTFSAVARDCSIQGSRSTTVIIKVYVTDVNDNDPVLEQNPFDVFLSPESPTNQTTVIVRADDLDLGPNGTVVFSFAETQSMFSIDKYTGEIQFQQNPSSEYFPIWLQLKVTDQGIPARTTTGLLVIHMEGEDVKISFSHHLYKGLVTENCEAGTSIVTVKAFAPDSIQDSMKYSIFSGNEDGVLSLCSKSGQLTVKEPKFLDFEVRNEVQLIVLAESSGHRAYCKVAVLIQDENDNSPCFEQSIYQASVSESQLYNAHVIQVFATDLDSGLNGLIEYSILSGNQEEAFQIDALSGVITTKAILDYELTSSYSLIVQATDKGMPRLSNTTVIKVQVTDINDNAPAFLPSEAVEITEDSLPGVIVTHVSVHDVDLNSAFIFSFAKESNPGTKFAIDQNTGVVVLVKTLDFEEMTEYELLIQISDSVHYTEGALVVRVLDVNDNPPVFSQDFYQVTVPESIPVGYSVLTLSATDLESNENISYRILSSSKEFSIDPKNGTIFTISPVLLLDTISTTQFLVEASDGGNPDLRALTLVEIGIEDMNNYAPEFTVKSYNLSLSEDALVGSTLVTFSNIDHDWTRENTYVEYSIISGNSQNNFHVETKFFHSEYPYKQVGYLVLLHSLDREASASHELVILASDSGCPPLSSTAVISIQVLDVNDNPPNFSSLSYHTHVKESTPLGSHITVVSANDRDTGSHAEIIYNIISGNEKGHFYLEENTGVLYLIKPLDYEKMTKFTLTVQASDAEKKHFSFAVVFVSVLDDNDHAPQFMFSSFSCIVPENLPISSTICSINALDFDAGPYGELTYSIVSPCFLTHGMSYDHDLFLIDPLTGDIHAKQILDYENGNKYCLTVQAKDKGDATASLVVWVDIEGIDEFEPIFTQDQYFFTLPEKNKDRQLIGRVEASDADAGIDGVILYSLGTSSPFFSVNKTNGNIYLIRALPLIKSQLNKEDTLEMKIIAHSPKSDSKFASCTVFVNVSFSSEGTPLAVFASSFSISLVVSFLVFLILICILIVMILRHKQKDTINNYEEKKTSSLDADLRVTRDASVLKAFQKTDDCSNEVVPVDATPEWLSLISIMEKDIVNLYRHSNSSGHCSVEGETAEDKEIQRINEHPYRKCSDSALSDHESRVPDSGIPRDSDQLSCLSGETDVMVTAETAEASQTFGEGDQGEGCSTTCAQNNVLPQTVQKREAKESILADVRKESVFISGDQEVRCAALSTQTTSDHDGKDNYHWNYLLSWEPKFQPLASVFNDIAKLKDEHLHMPGIPKEKKSFVFPPPLITAVAQPGIKAVPPRMPAVNLGQVPPKHPRSPIPYHLGSLPEGMTPNFSPSLSLLTMQPPALSPLLREGELLGTHISGTCHELKAEDEVQI

SEQ ID NO: 41450 - protein, 1369 aa, Homo sapiens
MSPCGRKMGEGRQQRRAPVGKLLLLPGRRDTPHGRSGSSGARTQRSLLWLLVHVWLWAASGSSAQLFNLTLSVDEGLPPDTLVGDIRAGLPAAQQQEGSGFFLSEDSDDSPLLDDFHVHPDTGIIRTARRLDRERRDHYSFVAATLLGAVVQVEIRVNDVNDHSPRFPLDSLQLDVSELSPPGTAFRLPVAHDPDAGLFSTQGYTLVQPSDLPKDPAGPFFQLRYRTPGPLPSPLLPGSSSPLEPLDLVLLRRLDREEAAAHRLQIEAWDGGRPRRTGLLSVELRVLDENDNPPVFEQDEYRAAVREDAQPGAEVCRVRATDRDLGPNGFVRYSVRARQVPGAGSGGGALGDAAYFAVEELSGVVRVWRPLDREAQAWHQLVVEARDGGAEPEVATVRVSIAVLDVNDNRPAIHVLFLTEGGVARVSEGARPGDYVARVSVSDADGDWEKEDEATGELGVGLGDGSISLSLEGGEGDFALLPGGPPGVFFLCVEGPLDRESRDLYELLLVATDAGSPPLSTEETLLLRVADLNDQPPLFSQQHYKASVSEAAAPGTVVMWVSASDADEAGSDHAWLRYTVVQLSAPCNLGSLQSKMVHTAECGPSFAIDSESGAISTIRTLDREVQEAVELKVVAQDLGEPPLSATCLVSITVDDVNDNEPIFWRQVYNATIAEHAPVGHCFLQVTASDADSGLYGFIEYSLYDGFLSYEAPQAFRIDPHDGQICVSQDIDRERDPATYDLLVEAKDGGGLSAQAFVRVDLEDVNDNHPVFNPSTYVTSISDETQPGTEIINVLATDQDSGIYGTVAYELIPGNVSSLFTIDSTTGIIYLTLPLSHLESTTLSLMVSAQDGGGLTAVINADVTIHIFQTTLAPAEFERPKYTFLVYEDVPEDSPIGTVKAREPLNSSEPIFYRISSGDLGGKFSIHPRLGTIRTRKPLDHETQPVVVLTVQAQLGSAPACSSTEVNITVMDVNDNHPAFLRTSDEIRISQTTPPGTALYLARAEDRDSGRNGLIRYSIASPQPGVFAIDRALGVLFLNGSLGAGEQRELTLTLRAEDQGVHPQAALLVLTVVIEKREHSPSWTFEHLVYQVEVSESLSPMTQMLQTQAHPLGPQRAASPLRYSLEPSVDSAMFGIRPYTGWIYLRRQFDYESTQTYNFRVFAWIPEDGFLQNVSTTVIVRVWDENDNSPTFLHDVLFLKVEESPVPQGVIGKITAIDMDSGKNGQLLYFLLSDGKFFKMNPNTGELINWVALDREHRGHHEMTVLVTDRGSPPRNATMAVYVSVTDINDNRPFFPQCLPGKELHVKVLEGQPVNMLVTTVFAKDPDEGNNAEVTYSVSSARPMPLKGKTAFGKQSCKKQTNKQTNKILT

SEQ ID NO: 41451 - protein, 364 aa, Homo sapiens
MSSAPRSPTPRPRRMKKDESFLGKLGGTLARKRRAREVSDLQEEGKNAINSPMSPALVDVHPEDTQLEENEERTMIDPTSKEDPKFKELVKVLLDWINDVLVEERIIVKQLEEDLYDGQVLQKLLEKLAGCKLNVAEVTQSEIGQKQKLQTVLEAVHDLLRPRGWALRWSVDSIHGKNLVAILHLLVSLAMHFRAPIRLPEHVTVQVVVVRKREGLLHSSHISEELTTTTEMMMGRFERDAFDTLFDHAPDKLSVVKKSLITFVNKHLNKLNLEVTELETQFADGVYLVLLMGLLEDYFVPLHHFYLTPESFDQKVHNVSFAFELMLDGGLKKPKARPEDVVNLDLKSTLRVLYNLFTKYKNVE

SEQ ID NO: 41452 - protein, 397 aa, Homo sapiens
MHHVFKDHQRGEKRGFLSPENKNCRRLELRRGCSCSWGLCSQALMASLAGSLLPGSDRSGVETSEYAQGGVSDLQEEGKNAINSPMSPALVDVHPEDTQLEENEERTMIDPTSKEDPKFKELVKVLLDWINDVLVEERIIVKQLEEDLYDGQVLQKLLEKLAGCKLNVAEVTQSEIGQKQKLQTVLEAVHDLLRPRGWALRWSVDSIHGKNLVAILHLLVSLAMHFRAPIRLPEHVTVQVVVVRKREGLLHSSHISEELTTTTEMMMGRFERDAFDTLFDHAPDKLSVVKKSLITFVNKHLNKLNLEVTELETQFADGVYLVLLMGLLEDYFVPLHHFYLTPESFDQKVHNVSFAFELMLDGGLKKPKARPEDVVNLDLKSTLRVLYNLFTKYKNVE

SEQ ID NO: 41453 - protein, 327 aa, Homo sapiens
MSDLQEEGKNAINSPMSPALVDVHPEDTQLEENEERTMIDPTSKEDPKFKELVKVLLDWINDVLVEERIIVKQLEEDLYDGQVLQKLLEKLAGCKLNVAEVTQSEIGQKQKLQTVLEAVHDLLRPRGWALRWSVDSIHGKNLVAILHLLVSLAMHFRAPIRLPEHVTVQVVVVRKREGLLHSSHISEELTTTTEMMMGRFERDAFDTLFDHAPDKLSVVKKSLITFVNKHLNKLNLEVTELETQFADGVYLVLLMGLLEDYFVPLHHFYLTPESFDQKVHNVSFAFELMLDGGLKKPKARPEDVVNLDLKSTLRVLYNLFTKYKNVE

SEQ ID NO: 41454 - protein, 663 aa, Homo sapiens
MAPKRVVQLSLKMPTHAVCVVGVEAHVDIHSDVPKGANSFRVSGSSGVEVFMVYNRTRVKEPIGKARWPLDTDADMVVSVGTASKELKDFKVRVSYFGEQEDQALGRSVLYLTGVDISLEVDTGRTGKVKRSQGDKKTWRWGPEGYGAILLVNCDRDNHRSAEPDLTHSWLMSLADLQDMSPMLLSCNGPDKLFDSHKLVLNVPFSDSKRVRVFCARGGNSLSDYKQVLGPQCLSYEVERQPGEQEIKFYVEGLTFPDADFLGLVSLSVSLVDPGTLPEVTLFTDTVGFRMAPWIMTPNTQPPEELYVCRVMDTHGSNEKFLEDMSYLTLKANCKLTICPQVENRNDRWIQDEMEFGYIEAPHKSFPVVFDSPRNRGLKDFPYKRILGPDFGYVTREIPLPGPSSLDSFGNLDVSPPVTVGGTEYPLGRILIGSSFPKSGGRQMARAVRNFLKAQQVQAPVELYSDWLSVGHVDEFLTFVPTSDQKGFRLLLASPSACLKLFQEKKEEGYGEAAQFDGLKHQAKRSINEMLADRHLQRDNLHAQKCIDWNRNVLKRELGLAESDIVDIPQLFFLKNFYAEAFFPDMVNMVVLGKYLGIPKPYGPIINGRCCLEEKVQSLLEPLGLHCIFIDDYLSYHELQGEIHCGTNVRRKPFPFKWWNMVP

SEQ ID NO: 41455 - protein, 854 aa, Homo sapiens
MGMCSRQERIQKDIDVVIQKSRAEKDCLFADFRYSDSTFTFTYVGGPRSVSYSVHVSEDYPDNTYVSSSENDEDVLVTTEPIPVIFHRIATELRKTNDINCCLSIKSKLQKENGEESRQNSTVEEDSEGDNDSEEFYYGGQVNYDGELHKHPQLEADLSAVREIYGPHAVSLREYGAIDDVDIDLHIDVSFLDEEIAVAWEVIRTEPIIVRLHCSLTQYLNGPVPTVDVFQISTKERFGLGHQLKKIMQTFVTQQWKQSKEKSNCLHNKKLSEKKVKSPLHLFSTLRRSPSYPPPGCGKSKSKLKSEQDGISKTHKLLRRTCSSTVKTDDVCVTKSHRTFGRSLSSDPRAEQAMTAIKSHKLLNRPCPAAVKSEECLTLKSHRLLTRSCSGDPRCEHNTNLKPHKLLSRSYSSNLRMEELYGLKNHKLLSKSYSSAPKSSKTELFKEPNAEGRRLSLTSGLIGILTPSSSSSSQLAPNGAKCIPVRDRGFLVQTIEFAEQRIPVLNEYCVVCDEPHVFQNGPMLRPTVCERELCVFAFQTLGVMNEAADEIATGAQVVDLLVSMCRSALESPRKVVIFEPYPSVVDPNDPQMLAFNPRKKNYDRVMKALDSITSIREMTQAPYLEIKKQMDKQDPLAHPLLQWVISSNRSHIVKLPVNRQLKFMHTPHQFLLLSSPPAKESNFRAAKKLFGSTFAFHGSHIENWHSILRNGLVVASNTRLQLHGAMYGSGIYLSPMSSISFGYSGMNKKQKVSAKDEPASSSKSSNTSQSQKKGQQSQFLQSRNLKCIALCEVITSSDLHKHGEIWVVPNTDHVCTRFFFVYEDGQVGDANINTQEGGIHKEILRVIGNQTATG

SEQ ID NO: 41456 - protein, 812 aa, Homo sapiens
MGMCSRQERIQKDIDVVIQKSRAEKDCLFADFRYSDSTFTFTYVGGPRSVSYSVHVSEDYPDNTYVSSSENDEDVLVTTEPIPVIFHRIATELRKTNDINCCLSIKSKLQKENGEESRQNSTVEEDSEGDNDSEEFYYGGQVNYDGELHKHPQLEADLSAVREIYGPHAVSLREYGAIDDVDIDLHIDVSFLDEEIAVAWEVIRTEPIIVRLHCSLTQYLNGPVPTVDVFQISTKERFGLGHQLKKIMQTFVTQQWKQSKEKSNCLHNKKLSEKKVKSPLHLFSTLRRSPSYPPPGCGKSKSKLKSEQDGISKTHKLLRRTCSSTVKTDDVCVTKSHRTFGRSLSSDPRAEQAMTAIKSHKLLNRPCPAAVKSEECLTLKSHRLLTRSCSGDPRCEHNTNLKPHKLLSRSYSSNLRMEELYGLKNHKLLSKSYSSAPKSSKTELFKEPNAEGRRLSLTSGLIGILTPSSSSSSQLAPNGAKCIPVRDRGFLVQTIEFAEQRIPVLNEYCVVCDEPHVFQNGPMLRPTVCERELCVFAFQTLGVMNEAADEIATGAQKKNYDRVMKALDSITSIREMTQAPYLEIKKQMDKQDPLAHPLLQWVISSNRSHIVKLPVNRQLKFMHTPHQFLLLSSPPAKESNFRAAKKLFGSTFAFHGSHIENWHSILRNGLVVASNTRLQLHGAMYGSGIYLSPMSSISFGYSGMNKKQKVSAKDEPASSSKSSNTSQSQKKGQQSQFLQSRNLKCIALCEVITSSDLHKHGEIWVVPNTDHVCTRFFFVYEDGQVGDANINTQEGGIHKEILRVIGNQTATG

SEQ ID NO: 41457 - protein, 372 aa, Homo sapiens
MATSPQKSPSVPKSPTPKSPPSRKKDDSFLGKLGGTLARRKKAKEVSELQEEGMNAINLPLSPIPFELDPEDTMLEENEVRTMVDPNSRSDPKLQELMKVLIDWINDVLVGERIIVKDLAEDLYDGQVLQKLFEKLESEKLNVAEVTQSEIAQKQKLQTVLEKINETLKLPPRSIKWNVDSVHAKSLVAILHLLVALSQYFRAPIRLPDHVSIQVVVVQKREGILQSRQIQEEITGNTEALSGRHERDAFDTLFDHAPDKLNVVKKTLITFVNKHLNKLNLEVTELETQFADGVYLVLLMGLLEGYFVPLHSFFLTPDSFEQKVLNVSFAFELMQDGGLEKPKPRPEDIVNCDLKSTLRVLYNLFTKYRNVE

SEQ ID NO: 41458 - protein, 182 aa, Homo sapiens
MATSPQKSPSVPKSPTPKSPPSRKKDDSFLGKLGGTLARRKKAKEVSELQEEGMNAINLPLSPIPFELDPEDTMLEENEVRTMVDPNSRSDPKLQELMKVLIDWINDVLVGERIIVKDLAEDLYDGQVLQKLFGRRVECCNGCVFNCRWLDHLLVARRSYSQFTVAYLEMDYKCVEHGITAQ

SEQ ID NO: 41459 - protein, 773 aa, Homo sapiens
MKMRGEKRRDKVNPKSSQRKLNWIPSFPTYDYFNQVTLQLLDGFMITLSTDGVIICVAENISSLLGHLPAEIVGKKLLSLLPDEEKDEVYQKIILKFPLLNSETHIEFCCHLKRGNVEHGDSSAYENVKFIVNVRDICNEFPVVFSGLFSSHLCADFAACVPQEDRLYLVGNVCILRTQLLQQLYTSKAVSDEAVLTQDSDEEPFVGELSSSQGQRGHTSMKAVYVEPAAAAAAAAISDDQIDIAEVEQYGPQENVHMFVDSDSTYCSSTVFLDTMPESPALSLQDFRGEPEVNPLYRADPVDLEFSVDQVDSVDQEGPMDQQDPENPVAPLDQAGLMDPVDPEDSVDLGAAGASAQPLQPSSPVAYDIISQELELMKKLKEQLEERTWLLHDAIQNQQNALELMMDHLQKQPNTLRHVVIPDLQSSEAVPKKQQKQHAGQVKRPLPHPKDVKCFCGLSLSNSLKNTGELQEPCVAFNQQQLVQQEQHLKEQQRQLREQLQQLREQRKVQKQKKMQEKKKLQEQKMQEKKKLQEQRRQKKKKLQERKKWQGQMLQKEPEEEQQKQQLQEQPLKHNVIVGNERVQICLQNPRDVSVPLCNHPVRFLQAQPIVPVQRAAEQQPSGFYQDENCGQQEDESQSFYPEAYQGPPVNQLPLIDTSNSEAISSSSIPQFPITSDSTISTLETPQDYIRLWQELSDSLGPVVQVNTWSCDEQGTLHGQPTYHQVQVSEVGVEGPPDPQAFQGPAAYQPDQMRSAEQTRLMPAEQRDSNKPC

SEQ ID NO: 41460 - protein, 639 aa, Homo sapiens
MKMRGEKRRDKVNPKSSQRKLNWIPSFPTYDYFNQVTLQLLDGFMITLSTDGVIICVAENISSLLGHLPAEIVGKKLLSLLPDEEKDEVYQKIILKFPLLNSETHIEFCCHLKRGNVEHGDSSAYENVKFIVNVRDICNEFPVVFSGLFSSHLCADFAACVPQEDRLYLVGNVCILRTQLLQQLYTSKAVSDEAVLTQDSDEEPFVGELSSSQGQRGHTSMKAVYVEPAAAAAAAAISDDQIDIAEVEQYGPQENVHMFVDSDSTYCSSTVFLDTMPESPALSLQDFRGEPEVNPLYRADPVDLEFSVDQVDSVDQEGPMDQQDPENPVAPLDQAGLMDPVDPEDSVDLGAAGASAQPLQPSSPVAYDIISQELELMKKLKEQLEERTWLLHDAIQNQQNALELMMDHLQKQPNTLRHVVIPDLQSSEAVPKKQQKQHAGQVKRPLPHPKDVKCFCGLSLSNSLKNTGELQEPCVAFNQQQLVQQEQHLKEQQRQLREQLQQLREQRKVQKQKKMQEKKKLQEQKMQEKKKLQEQRRQKKKKLQERKKWQGQMLQKEPEEEQQKQQLQEQPLKHNVIVGNERVQICLQNPRDVSVPLCNHPVRFLQAQPIVPVQRAAEQQPSGFYQDENCGQQEDESQR

SEQ ID NO: 41461 - protein, 932 aa, Homo sapiens
MAAPQSRPRRGELILLCALLGTLWEIGRGQIRYSVPEETDKGSFVGNISKDLGLDPRKLAKHGVRIVSRGRTQLFALNPRSGSLITAGRIDREELCAQSPRCLININTLVEDKGKLFGVEIEIIDINDNNPKFQVEDLEVKINEIAVPGARYPLPEAVDPDVGVNSLQSYQLSPNHHFSLDVQTGDNGAINPELVLERALDREEEAAHHLVLTASDGGKPPRSSTVRIHVTVLDTNDNAPVFPHPIYRVKVLENMPPGTRLLTVTASDPDEGINGKVAYKFRKINEKQTPLFQLNENTGEISIAKSLDYEECSFYEMEIQAEDVGALLGRTKLLISVEDVNDNRPEVIITSLFSPVLENSLPGTVIAFLSVHDQDSGKNGQVVCYTRDNLPFKLEKSIGNYYRLVTRKYLDRENVSIYNITVMASDLGTPPLSTETQIALHVADINDNPPTFPHASYSAYILENNLRGASIFSLTAHDPDSQENAQVTYSVTEDTLQGAPLSSYISINSDTGVLYALQSFDYEQIRDLQLLVTASDSGDPPLSSNMSLSLFVLDQNDNAPEILYPALPTDGSTGVELAPRSAERGYLVTKVVAVDRDSGQNAWLSYRLLKASEPGLFSVGLHTGEVRTARALLDRDALKQSLVVAVQDHGQPPLSATVTLTVAVADSIPEVLTELGSLKPSVDPNDSSLTLYLVVAVAAISCVFLAFVAVLLGLRLRRWHKSRLLQDSGGRLVGVPASHFVGVEEVQAFLQTYSQEVSLTADSRKSHLIFPQPNYADMLISQEGCEKNDSLLTSVDFHEYKNEADHGQQAPPNTDWRFSQAQRPGTSGSQNGDDTGTWPNNQFDTEMLQAMILASASEAADGSSTLGGGAGTMGLSARYGPQFTLQHVPDYRQNVYIPGSNATLTNAAGKRDGKAPAGGNGNKKKSGKKEKK

SEQ ID NO: 41462 - protein, 820 aa, Homo sapiens
MAAPQSRPRRGELILLCALLGTLWEIGRGQIRYSVPEETDKGSFVGNISKDLGLDPRKLAKHGVRIVSRGRTQLFALNPRSGSLITAGRIDREELCAQSPRCLININTLVEDKGKLFGVEIEIIDINDNNPKFQVEDLEVKINEIAVPGARYPLPEAVDPDVGVNSLQSYQLSPNHHFSLDVQTGDNGAINPELVLERALDREEEAAHHLVLTASDGGKPPRSSTVRIHVTVLDTNDNAPVFPHPIYRVKVLENMPPGTRLLTVTASDPDEGINGKVAYKFRKINEKQTPLFQLNENTGEISIAKSLDYEECSFYEMEIQAEDVGALLGRTKLLISVEDVNDNRPEVIITSLFSPVLENSLPGTVIAFLSVHDQDSGKNGQVVCYTRDNLPFKLEKSIGNYYRLVTRKYLDRENVSIYNITVMASDLGTPPLSTETQIALHVADINDNPPTFPHASYSAYILENNLRGASIFSLTAHDPDSQENAQVTYSVTEDTLQGAPLSSYISINSDTGVLYALQSFDYEQIRDLQLLVTASDSGDPPLSSNMSLSLFVLDQNDNAPEILYPALPTDGSTGVELAPRSAERGYLVTKVVAVDRDSGQNAWLSYRLLKASEPGLFSVGLHTGEVRTARALLDRDALKQSLVVAVQDHGQPPLSATVTLTVAVADSIPEVLTELGSLKPSVDPNDSSLTLYLVVAVAAISCVFLAFVAVLLGLRLRRWHKSRLLQDSGGRLVGVPASHFVGVEEVQAFLQTYSQEVSLTADSRKSHLIFPQPNYADMLISQEGCEKNDSLLTSVDFHEYKNEADHGQVSLVLCLLLISR

SEQ ID NO: 41463 - protein, 1237 aa, Homo sapiens
MDLRDFYLLAALIACLRLDSAIAQELIYTIREELPENVPIGNIPKDLNISHINAATGTSASLVYRLVSKAGDAPLVKVSSSTGEIFTTSNRIDREKLCAGASYAEENECFFELEVVILPNDFFRLIKIKIIVKDTNDNAPMFPSPVINISIPENTLINSRFPIPSATDPDTGFNGVQHYELLNGQSVFGLDIVETPEGEKWPQLIVQQNLDREQKDTYVMKIKVEDGGTPQKSSTAILQVTVSDVNDNRPVFKEGQVEVHIPENAPVGTSVIQLHATDADIGSNAEIRYIFGAQVAPATKRLFALNNTTGLITVQRSLDREETAIHKVTVLASDGSSTPARATVTINVTDVNDNPPNIDLRYIISPINGTVYLSEKDPVNTKIALITVSDKDTDVNGKVICFIEREVPFHLKAVYDNQYLLETSSLLDYEGTKEFSFKIVASDSGKPSLNQTALVRVKLEDENDNPPIFNQPVIELSVSENNRRGLYLTTISATDEDSGKNADIVYQLGPNASFFDLDRKTGVLTASRVFDREEQERFIFTVTARDNGTPPLQSQAAVIVTVLDENDNSPKFTHNHFQFFVSENLPKYSTVGVITVTDADAGENKAVTLSILNDNDNFVLDPYSGVIKSNVSFDREQQSSYTFDVKATDGGQPPRSSTAKVTINVMDVNDNSPVVISPPSNTSFKLVPLSAIPGSVVAEVFAVDVDTGMNAELKYTIVSGNNKGLFRIDPVTGNITLEEKPAPTDVGLHRLVVNISDLGYPKSLHTLVLVFLYVNDTAGNASYIYDLIRRTMETPLDRNIGDSSQPYQNEDYLTIMIAIIAGAMVVIVVIFVTVLVRCRHASRFKAAQRSKQGAEWMSPNQENKQNKKKKRKKRKSPKSSLLNFVTIEESKPDDAVHEPINGTISLPAELEEQSIGRFDWGPAPPTTFKPNSPDLAKHYKSASPQPAFHLKPDTPVSVKKHHVIQELPLDNTFVGGCDTLSKRSSTSSDHFSASECSSQGGFKTKGPLHTRQCNSHSKSDNIPVTPQKCPSSTGFHIQENEESHYESQRRVTFHLPDGSQESCSDSGLGDHEPVGSGTLISHPLPLVQPQDEFYDQASPDKRTEADGNSDPNSDGPLGPRGLAEATEMCTQECLVLGHSDNCWMPPGLGPYQHPKSPLSTFAPQKEWVKKDKLVNGHTLTRAWKEDSNRNQFNDRKQYGSNEGHFNNGSHMTDIPLANLKSYKQAGGATESPKEHQL

SEQ ID NO: 41464 - protein, 1203 aa, Homo sapiens
MDLRDFYLLAALIACLRLDSAIAQELIYTIREELPENVPIGNIPKDLNISHINAATGTSASLVYRLVSKAGDAPLVKVSSSTGEIFTTSNRIDREKLCAGASYAEENECFFELEVVILPNDFFRLIKIKIIVKDTNDNAPMFPSPVINISIPENTLINSRFPIPSATDPDTGFNGVQHYELLNGQSVFGLDIVETPEGEKWPQLIVQQNLDREQKDTYVMKIKVEDGGTPQKSSTAILQVTVSDVNDNRPVFKEGQVEVHIPENAPVGTSVIQLHATDADIGSNAEIRYIFGAQVAPATKRLFALNNTTGLITVQRSLDREETAIHKVTVLASDGSSTPARATVTINVTDVNDNPPNIDLRYIISPINGTVYLSEKDPVNTKIALITVSDKDTDVNGKVICFIEREVPFHLKAVYDNQYLLETSSLLDYEGTKEFSFKIVASDSGKPSLNQTALVRVKLEDENDNPPIFNQPVIELSVSENNRRGLYLTTISATDEDSGKNADIVYQLGPNASFFDLDRKTGVLTASRVFDREEQERFIFTVTARDNGTPPLQSQAAVIVTVLDENDNSPKFTHNHFQFFVSENLPKYSTVGVITVTDADAGENKAVTLSILNDNDNFVLDPYSGVIKSNVSFDREQQSSYTFDVKATDGGQPPRSSTAKVTINVMDVNDNSPVVISPPSNTSFKLVPLSAIPGSVVAEVFAVDVDTGMNAELKYTIVSGNNKGLFRIDPVTGNITLEEKPAPTDVGLHRLVVNISDLGYPKSLHTLVLVFLYVNDTAGNASYIYDLIRRTMETPLDRNIGDSSQPYQNEDYLTIMIAIIAGAMVVIVVIFVTVLVRCRHASRFKAAQRSKQGAEWMSPNQENKQNKKKKRKKRKSPKSSLLNFVTIEESKPDDAVHEPINGTISLPAELEEQSIGRFDWGPAPPTTFKPNSPDLAKHYKSASPQPAFHLKPDTPVSVKKHHVIQELPLDNTFVGGCDTLSKRSSTSSDHFSASECSSQGGFKTKGPLHTRQSQRRVTFHLPDGSQESCSDSGLGDHEPVGSGTLISHPLPLVQPQDEFYDQASPDKRTEADGNSDPNSDGPLGPRGLAEATEMCTQECLVLGHSDNCWMPPGLGPYQHPKSPLSTFAPQKEWVKKDKLVNGHTLTRAWKEDSNRNQFNDRKQYGSNEGHFNNGSHMTDIPLANLKSYKQAGGATESPKEHQL

SEQ ID NO: 41465 - protein, 111 aa, Homo sapiens
MVRTKADSVPGTYRKVVAARAPRKVLGSSTSATNSTSVSSRKAENKYAGGNPVCVRPTPKWQKGIGEFFRLSPKDSEKENQIPEEAGSSGLGKAKRKACPLQPDHTNDEKE

SEQ ID NO: 41466 - protein, 65 aa, Homo sapiens
MVRTKADSVPGTYRKVVAARAPRKVLGSSTSATNSTSVSSRKEHVLCNLITQMMKKNRTFSFIFE

SEQ ID NO: 41467 - protein, 337 aa, Homo sapiens
MNEPLDYLANASDFPDYAAAFGNCTDENIPLKMHYLPVIYGIIFLVGFPGNAVVISTYIFKMRPWKSSTIIMLNLACTDLLYLTSLPFLIHYYASGENWIFGDFMCKFIRFSFHFNLYSSILFLTCFSIFRYCVIIHPMSCFSIHKTRCAVVACAVVWIISLVAVIPMTFLITSTNRTNRSACLDLTSSDELNTIKWYNLILTATTFCLPLVIVTLCYTTIIHTLTHGLQTDSCLKQKARRLTILLLLAFYVCFLPFHILRVIRIESRLLSISCSIENQIHEAYIVSRPLAALNTFGNLLLYVVVSDNFQQAVCSTVRCKVSGNLEQAKKISYSNNP

SEQ ID NO: 41468 - protein, 570 aa, Homo sapiens
MRRLGPFHPRVHWAAPPSLSSGLHRLLFLRGTRIPSSTTLSPPRHDSLSLDGGTVNPPRVREPTGREAFGPSPASSDWLPARWRNGRGGRPRARLCSGWTAAEEARRNPTLGGLLGRQRLLLRMGGGRLGAPMERHGRASATSVSSAGEQAAGDPEGRRQEPLRRRASSASVPAVGASAEGTRRDRLGSYSGPTSVSRQRVESLRKKRPLFPWFGLDIGGTLVKLVYFEPKDITAEEEEEEVESLKSIRKYLTSNVAYGSTGIRDVHLELKDLTLCGRKGNLHFIRFPTHDMPAFIQMGRDKNFSSLHTVFCATGGGAYKFEQDFLTIGDLQLCKLDELDCLIKGILYIDSVGFNGRSQCYYFENPADSEKCQKLPFDLKNPYPLLLVNIGSGVSILAVYSKDNYKRVTGTSLGGGTFFGLCCLLTGCTTFEEALEMASRGDSTKVDKLVRDIYGGDYERFGLPGWAVASSFGNMMSKEKREAVSKEDLARATLITITNNIGSIARMCALNENINQVVFVGNFLRINTIAMRLLAYALDYWSKGQLKALFSEHEGYFGAVGALLELLKIP

SEQ ID NO: 41469 - protein, 279 aa, Homo sapiens
MPAFIQMGRDKNFSSLHTVFCATGGGAYKFEQDFLTIGDLQLCKLDELDCLIKGILYIDSVGFNGRSQCYYFENPADSEKCQKLPFDLKNPYPLLLVNIGSGVSILAVYSKDNYKRVTGTSLGGGTFFGLCCLLTGCTTFEEALEMASRGDSTKVDKLVRDIYGGDYERFGLPGWAVASSFGNMMSKEKREAVSKEDLARATLITITNNIGSIARMCALNENINQVVFVGNFLRINTIAMRLLAYALDYWSKGQLKALFSEHEGYFGAVGALLELLKIP

SEQ ID NO: 41470 - protein, 447 aa, Homo sapiens
MGGGRLGAPMERHGRASATSVSSAGEQAAGDPEGRRQEPLRRRASSASVPAVGASAEGTRRDRLGSYSGPTSVSRQRVESLRKKRPLFPWFGLDIGGTLVKLVYFEPKDITAEEEEEEVESLKSIRKYLTSNVAYGSTGIRDVHLELKDLTLCGRKGNLHFIRFPTHDMPAFIQMGRDKNFSSLHTVFCATGGGAYKFEQDFLTIGDLQLCKLDELDCLIKGILYIDSVGFNGRSQCYYFENPADSEKCQKLPFDLKNPYPLLLVNIGSGVSILAVYSKDNYKRVTGTSLGGGTFFGLCCLLTGCTTFEEALEMASRGDSTKVDKLVRDIYGGDYERFGLPGWAVASSFGNMMSKEKREAVSKEDLARATLITITNNIGSIARMCALNENINQVVFVGNFLRINTIAMRLLAYALDYWSKGQLKALFSEHEGYFGAVGALLELLKIP

SEQ ID NO: 41471 - protein, 460 aa, Homo sapiens
MGGLLGRQRLLLRMGGGRLGAPMERHGRASATSVSSAGEQAAGDPEGRRQEPLRRRASSASVPAVGASAEGTRRDRLGSYSGPTSVSRQRVESLRKKRPLFPWFGLDIGGTLVKLVYFEPKDITAEEEEEEVESLKSIRKYLTSNVAYGSTGIRDVHLELKDLTLCGRKGNLHFIRFPTHDMPAFIQMGRDKNFSSLHTVFCATGGGAYKFEQDFLTIGDLQLCKLDELDCLIKGILYIDSVGFNGRSQCYYFENPADSEKCQKLPFDLKNPYPLLLVNIGSGVSILAVYSKDNYKRVTGTSLGGGTFFGLCCLLTGCTTFEEALEMASRGDSTKVDKLVRDIYGGDYERFGLPGWAVASSFGNMMSKEKREAVSKEDLARATLITITNNIGSIARMCALNENINQVVFVGNFLRINTIAMRLLAYALDYWSKGQLKALFSEHEGYFGAVGALLELLKIP

SEQ ID NO: 41472 - protein, 773 aa, Homo sapiens
MAECGASGSGSSGDSLDKSITLPPDEIFRNLENAKRFAIDIGGSLTKLAYYSTVQHKVAKVRSFDHSGKDTEREHEPPYEISVQEEITARLHFIKFENTYIEACLDFIKDHLVNTETKVIQATGGGAYKFKDLIEEKLRLKVDKEDVMTCLIKGCNFVLKNIPHEAFVYQKDSDPEFRFQTNHPHIFPYLLVNIGSGVSIVKVETEDRFEWVGGSSIGGGTFWGLGALLTKTKKFDELLHLASRGQHSNVDMLVRDVYGGAHQTLGLSGNLIASSFGKSATADQEFSKEDMAKSLLHMISNDIGQLACLHARLHSLDRVYFGGFFIRGHPVTMRTITYSINFFSKGEVQALFLRHEGYLGAIGAFLKGAEQDNPNQYSWGENYAGSSGLMSASPELGPAQRARSGTFDLLEMDRLERPLVDLPLLLDPPSYVPDTVDLTDDALARKYWLTCFEEALDGVVKRAVASQPDSVDAAERAEKFRQKYWNKLQTLRQQPFAYGTLTVRSLLDTREHCLNEFNFPDPYSKVKQRENGVALRCFPGVVRSLDALGWEERQLALVKGLLAGNVFDWGAKAVSAVLESDPYFGFEEAKRKLQERPWLVDSYSEWLQRLKGPPHKCALIFADNSGIDIILGVFPFVRELLLRGTEVILACNSGPALNDVTHSESLIVAERIAGMDPVVHSALQEERLLLVQTGSSSPCLDLSRLDKGLAALVRERGADLVVIEGMGRAVHTNYHAALRCESLKLAVIKNAWLAERLGGRLFSVIFKYEVPAE

SEQ ID NO: 41473 - protein, 113 aa, Homo sapiens
MLVLFLLGTVFLLCPYWGELHDPIKATEIMCYECKKYHLGLCYGVMTSCSLKHKQSCAVENFYILTRKGQSMYHYSKLSCMTSCEDINFLGFTKRVELICCDHSNYCNLPEGV

SEQ ID NO: 41474 - protein, 70 aa, Homo sapiens
MLVLFLLGTVFLLCPYWGELHDPIKGQSMYHYSKLSCMTSCEDINFLGFTKRVELICCDHSNYCNLPEGV

SEQ ID NO: 41475 - protein, 511 aa, Homo sapiens [sequence omitted]

SEQ ID NO: 41476 - protein, 69 aa, Homo sapiens
MESTGSVGEAPGGPRVLVVGGGIAGLGAAQRLCGHSAFPHLRVLEATARAGGRIRSERCFGAIKDSQTA

SEQ ID NO: 41477 - protein, 325 aa, Homo sapiens
MESTGSVGEAPGGPRVLVVGGGIAGLGAAQRLCGHSAFPHLRVLEATARAGGRIRSERCFGGVVEVGAHWIHGPSRGNPVFQLAAEYGLLGEKELSQENQLVETGGHVGLPSVSYASSGASVSLQLVAEMATLFYGLIDQTREFLHAAETPVPSVGEYLKKEIGQHVAGWTEDEETRKLKLAVLNSFFNLECCVSGTHSMDLVALAPFGEYTVLPGLDCTFSKGYQGLTNCMMAALPEDTVVFEKPVKTIHWNGSFQEAAFPGETFPVSVECEDGDRFPAHHVIVTVPLGLSTFSVGSLPDLSLSSWRLCRMKKYFCVSPKCSGE

SEQ ID NO: 41478 - protein, 486 aa, Homo sapiens
MESTGSVGEAPGGPRVLVVGGGIAGLGAAQRLCGHSAFPHLRVLEATARAGGRIRSERCFGGVVEVGAHWIHGPSRGNPVFQLAAEYGLLGEKELSQENQLVETGGHVGLPSVSYASSGASVSLQLVAEMATLFYGLIDQTREFLHAAETPVPSVGEYLKKEIGQHVAGWTEDEETRKLKLAVLNSFFNLECCVSGTHSMDLVALAPFGEYTVLPGLDCTFSKGYQGLTNCMMAALPEDTVVFEKPVKTIHWNGSFQEAAFPGETFPVSVECEDGDRFPAHHVIVTVPLGFLREHLDTFFDPPLPAEKAEAIRKIGFGTNNKIFLEFEEPFWEPDCQLIQLVWEDTSPLEDAAPELQDAWFRKLIGFVVLPAFASVHVLCGFIAGLESEFMETLSDEEVLLCLTQVLRRVTAPDPVCGGSHTSHVLLHDARGSAVGMEGGRPPPQSVGPAGAAAQAQALAGPSLLCSTRVGGRLGPSFLLTDFSLA

SEQ ID NO: 41479 - protein, 509 aa, Homo sapiens
MGVQAGLFGMLGFLGVALGGSPALRWYRTSCHLTKAVPGNPLGYLSFLAKDAQGLALIHARWDAHRRLQSCSWEDEPELTAAYGALCAHETAWGSFIHTPGPELQRALATLQSQWEACRALEESPAGARKKRAAGQSGVPGGGHQREKRGWTMPGTLWCGVGDSAGNSSELGVFQGPDLCCREHDRCPQNISPLQYNYGIRNYRFHTISHCDCDTRFQQCLQNQHDSISDIVGVAFFNVLEIPCFVLEEQEACVAWYWWGGCRMYGTVPLARLQPRTFYNASWSSRATSPTPSSRSPAPPKPRQKQHLRKGPPHQKGSKRPSKANTTALQDPMVSPRLDVAPTGLQGPQGGLKPQGARWVCRSFRRHLDQCEHQIGPREIEFQLLNSAQEPLFHCNCTRRLARFLRLHSPPEVTNMLWELLGTTCFKLAPPLDCVEGKNCSRDPRAIRVSARHLRRLQQRRHQLQDKGTDERQPWPSEPLRGPMSFYNQCLQLTQAARRPDRQQKSWSQ

SEQ ID NO: 41480 - protein, 359 aa, Homo sapiens
MAGHLASDFAFSPPPGGGGDGPWGAEPGWVDPLTWLSFQGPPGGPGIGPGVGPGSEVWGIPPCPPPYELCGGMAYCGPQVGVGLVPQGGLETSQPESEAGVGVESNSNGASPEPCTVPPGAVKLEKEKLEQNPEKSQDIKALQKELEQFAKLLKQKRITLGYTQADVGLILGVLFGKVFSQKTICRFEALQLSFKNMCKLRPLLQKWVEEADNNENLQEICKAETLMQARKRKRTSIENRVRGNLENLFLQCPKPTLQISHIAQQLGLEKDVVRVWFCNRRQKGKRSSSDYAQREDFEAAGSPFSGGPVSFPPAPGPHFGTPGYGSPHFTALYSSVPFPEGEVFPPVSVITLGSPMHSN

SEQ ID NO: 41481 - protein, 149 aa, Homo sapiens
MKVIAILTLLLFCSPTHSSFWQFQRRVKHITGRSAFFSYYGYGCYCGLGDKGIPVDDTDRHSPSSPSPYEKLKEFSCQPVLNSYQFHIVNGAVVCGCTLGPGASCHCRLKACECDKQSVHCFKESLPTYEKNFKQFSSQPRCGRHKPWC

SEQ ID NO: 41482 - protein, 144 aa, Homo sapiens
MKTLLLLAVIMIFGLLQAHGNLVNFHRMIKLTTGKEAALSYGFYGCHCGVGGRGSPKDATDRCCVTHDCCYKRLEKRGCGTKFLSYKFSNSGSRITCAKQDSCRSQLCECDKAAATCFARNKTTYNKKYQYYSNKHCRGSTPRC

SEQ ID NO: 41483 - protein, 469 aa, Homo sapiens
MDVENEQILNVNPADPDNLSDSLFSGDEENAGTEEIKNEINGNWISASSINEARINAKAKRRLRKNSSRDSGRGDSVSDSGSDALRSGLTVPTSPKGRLLDRRSRSGKGRGLPKKGGAGGKGVWGTPGQVYDVEEVDVKDPNYDDDQENCVYETVVLPLDERAFEKTLTPIIQEYFEHGDTNEVAEMLRDLNLGEMKSGVPVLAVSLALEGKASHREMTSKLLSDLCGTVMSTTDVEKSFDKLLKDLPELALDTPRAPQLVGQFIARAVGDGILCNTYIDSYKGTVDCVQARAALDKATVLLSMSKGGKRKDSVWGSGGGQQSVNHLVKEIDMLLKEYLLSGDISEAEHCLKELEVPHFHHELVYEAIIMVLESTGESTFKMILDLLKSLWKSSTITVDQMKRGYERIYNEIPDINLDVPHSYSVLERFVEECFQAGIISKQLRDLCPSRGRKRFVSEGDGGRLKPESY

SEQ ID NO: 41484 - protein, 458 aa, Homo sapiens
MTKYPDNLSDSLFSGDEENAGTEEIKNEINGNWISASSINEARINAKAKRRLRKNSSRDSGRGDSVSDSGSDALRSGLTVPTSPKGRLLDRRSRSGKGRGLPKKGGAGGKGVWGTPGQVYDVEEVDVKDPNYDDDQENCVYETVVLPLDERAFEKTLTPIIQEYFEHGDTNEVAEMLRDLNLGEMKSGVPVLAVSLALEGKASHREMTSKLLSDLCGTVMSTTDVEKSFDKLLKDLPELALDTPRAPQLVGQFIARAVGDGILCNTYIDSYKGTVDCVQARAALDKATVLLSMSKGGKRKDSVWGSGGGQQSVNHLVKEIDMLLKEYLLSGDISEAEHCLKELEVPHFHHELVYEAIIMVLESTGESTFKMILDLLKSLWKSSTITVDQMKRGYERIYNEIPDINLDVPHSYSVLERFVEECFQAGIISKQLRDLCPSRGRKRFVSEGDGGRLKPESY

SEQ ID NO: 41485 - protein, 609 aa, Homo sapiens
MWRLPGARAALRVIRTAVEKLSRAEAGSQTAAGAMERAVVRCVPSEPKLSLSFALADGSHKNMQRDQSEPLGRVLSRIATNALKGHAKAAAAKKSRKSRPNASGGAACSGPGPEPAVFCEPVVKLYYREEAVAEDVLNVDAWQDGAVLQIGDVKYKVERNPPAFTELQLPRYIMAGFPVCPKLSLEFGDPASSLFRWYKEAKPGAAEPEVGVPSSLSPSSPSSSWTETDVEERVYTPSNADIGLRLKLHCTPGDGQRFGHSRELESVCVVEAGPGTCTFDHRHLYTKKVTEDALIRTVSYNILADTYAQTEFSRTVLYPYCAPYALELDYRQNLIQKELTGYNADVICLQEVDRAVFSDSLVPALEAFGLEGVFRIKQHEGLATFYRKSKFSLLSQHDISFYEALESDPLHKELLEKLVLYPSAQEKVLQRSSVLQVSVLQSTKDSSKRICVANTHLYWHPKGGYIRLIQMAVALAHIRHVSCDLYPGIPVIFCGDFNSTPSTGMYHFVINGSIPEDHEDWASNGEEERCNMSLTHFFKLKSACGEPAYTNYVGGFHGCLDYIFIDLNALEVEQVIPLPSHEEVTTHQALPSVSHPSDHIALVCDLKWK

SEQ ID NO: 41486 - protein, 535 aa, Homo sapiens
MWRLPGARAALRVIRTAVEKLSRAEAGSQTAAGAMERAVVRCVPSEPKLSLSFALADGSHKNMQRDQSEPLGRVLSRIATNALKGHAKAAAAKKSRKSRPNASGGAACSGPGPEPAVFCEPVVKLYYREEAVAEDVLNVDAWQDGAVLQIGDVKYKVERNPPAFTELQLPRYIMAGFPVCPKLSLEFGDPASSLFRWYKEAKPGAAEPEVGVPSSLSPSSPSSSWTETDVEERVYTPSNADIGLRLKLHCTPGDGQRFGHSRELESVCVVEAGPGTCTFDHRHLYTKKVTEDALIRTVSYNILADTYAQTEFSRTVLYPYCAPYALELDYRQNLIQKELTGYNADVICLQEVDRAVFSDSLVPALEAFGLEGVFRIKQHEGLATFYRKSKFSLLSQHDISFYEALESDPLHKELLEKLVLYPSAQEKVLQRSSVLQVSVLQSTKDSSKRICVANTHLYWHPKGGYIRLIQMAVALAHIRHVSCDLYPGIPVIFCGDFNSTPSTGMYHFVINGSIPEDHEDWASNGEGGFGGNFLL

SEQ ID NO: 41487 - protein, 479 aa, Homo sapiens
MDETSPLVSPERAQPPDYTFPSGSGAHFPQVPGGAVRVAAAAGSGPSPPGSPGHDRERQPLLDRARGAAAQGQTQTVAAQAQALAAQAAAAAHAAQAHRERNEFPEDPEFEAVVRQAELAIERCIFPERIYQGSSGSYFVKDPQGRIIAVFKPKNEEPYGHLNPKWTKWLQKLCCPCCFGRDCLVLNQGYLSEAGASLVDQKLELNIVPRTKVVYLASETFNYSAIDRVKSRGKRLALEKVPKVGQRFNRIGLPPKVGSFQLFVEGYKDADYWLRRFEAEPLPENTNRQLLLQFERLVVLDYIIRNTDRGNDNWLIKYDCPMDSSSSRDTDWVVVKEPVIKVAAIDNGLAFPLKHPDSWRAYPFYWAWLPQAKVPFSQEIKDLILPKISDPNFVKDLEEDLYELFKKDPGFDRGQFHKQIAVMRGQILNLTQALKDNKSPLHLVQMPPVIVETARSHQRSSSESYTQSFQSRKPFFSWW

SEQ ID NO: 41488 - protein, 749 aa, Homo sapiens
MSFIDPYQHIIVEHQYSHKFTVVVLRATKVTKGAFGDMLDTPDPYVELFISTTPDSRKRTRHFNNDINPVWNETFEFILDPNQENVLEITLMDANYVMDETLGTATFTVSSMKVGEKKEVPFIFNQVTEMVLEMSLEVCSCPDLRFSMALCDQEKTFRQQRKEHIRESMKKLLGPKNSEGLHSARDVPVVAILGSGGGFRAMVGFSGVMKALYESGILDCATYVAGLSGSTWYMSTLYSHPDFPEKGPEEINEELMKNVSHNPLLLLTPQKVKRYVESLWKKKSSGQPVTFTDIFGMLIGETLIHNRMNTTLSSLKEKVNTAQCPLPLFTCLHVKPDVSELMFADWVEFSPYEIGMAKYGTFMAPDLFGSKFFMGTVVKKYEENPLHFLMGVWGSAFSILFNRVLGVSGSQSRGSTMEEELENITTKHIVSNDSSDSDDESHEPKGTENEDAGSDYQSDNQASWIHRMIMALVSDSALFNTREGRAGKVHNFMLGLNLNTSYPLSPLSDFATQDSFDDDELDAAVADPDEFERIYEPLDVKSKKIHVVDSGLTFNLPYPLILRPQRGVDLIISFDFSARPSDSSPPFKELLLAEKWAKMNKLPFPKIDPYVFDREGLKECYVFKPKNPDMEKDCPTIIHFVLANINFRKYRAPGVPRETEEEKEIADFDIFDDPESPFSTFNFQYPNQAFKRLHDLMHFNTLNNIDVIKEAMVESIEYRRQNPSRCSVSLSNVEARRFFNKEFLSKPKA

SEQ ID NO: 41489 - protein, 430 aa, Homo sapiens
MDEQPRLMHSHAGVGMAGHPGLSQHLQDGAGGTEGEGGRKQDIGDILQQIMTITDQSLDEAQARKHALNCHRMKPALFNVLCEIKEKTVLSIRGAQEEEPTDPQLMRLDNMLLAEGVAGPEKGGGSAAAAAAAAASGGAGSDNSVEHSDYRAKLSQIRQIYHTELEKYEQACNEFTTHVMNLLREQSRTRPISPKEIERMVSIIHRKFSSIQMQLKQSTCEAVMILRSRFLDARRKRRNFNKQATEILNEYFYSHLSNPYPSEEAKEELAKKCGITVSQVSNWFGNKRIRYKKNIGKFQEEANIYAAKTAVTATNVSAHGSQANSPSTPNSAGSSSSFNMSNSGDLFMSVQSLNGDSYQGAQVGANVQSQVDTLRHVISQTGGYSDGLAASQMYSPQGISANGGWQDATTPSSVTSPTEGPGSVHSDTSN

SEQ ID NO: 41490 - protein, 347 aa, Homo sapiens
MDEQPRLMHSHAGVGMAGHPGLSQHLQDGAGGTEGEGGRKQDIGDILQQIMTITDQSLDEAQARKHALNCHRMKPALFNVLCEIKEKTVLSIRGAQEEEPTDPQLMRLDNMLLAEGVAGPEKGGGSAAAAAAAAASGGAGSDNSVEHSDYRAKLSQIRQIYHTELEKYEQACNEFTTHVMNLLREQSRTRPISPKEIERMVSIIHRKFSSIQMQLKQSTCEAVMILRSRFLDARRKRRNFNKQATEILNEYFYSHLSNPYPSEEAKEELAKKCGITVSQVSNWFGNKRIRYKKNIGKFQEEANIYAAKTAVTATNVSAHGSQANSPSTPNSAGGYPSPCYQPDRRIQ

SEQ ID NO: 41491 - protein, 420 aa, Homo sapiens
MDEQPRLMHSHAGVGMAGHPGLSQHLQDGAGGTEGEGGRKQDIGDILQQIMTITDQSLDEAQARKHALNCHRMKPALFNVLCEIKEKTVLSIRGAQEEEPTDPQLMRLDNMLLAEGVAGPEKGGGSAAAAAAAAASGGAGSDNSVEHSDYRAKLSQIRQIYHTELEKYEQACNEFTTHVMNLLREQSRTRPISPKEIERMVSIIHRKFSSIQMQLKQSTCEAVMILRSRFLDARRKRRNFNKQATEILNEYFYSHLSNPYPSEEAKEELAKKCGITVSQVSNWFGNKRIRYKKNIGKFQEEANIYAAKTAVTATNVSAHGSQANSPSTPNSAGSSSSFNMSNSGDLFMSVQSLNGDSYQGAQVGANVQSQVDTLRHVISQTGGYSDGLAASQMYSPQGISHLPRHPRQAHYHFRLPTWHP

SEQ ID NO: 41492 - protein, 591 aa, Homo sapiens
MFGKRKKRVEISAPSNFEHRVHTGFDQHEQKFTGLPRQWQSLIEESARRPKPLVDPACITSIQPGAPKTIVRGSKGAKDGALTLLLDEFENMSVTRSNSLRRDSPPPPARARQENGMPEEPATTARGGPGKAGSRGRFAGHSEAGGGSGDRRRAGPEKRPKSSREGSGGPQESSRDKRPLSGPDVGTPQPAGLASGAKLAAGRPFNTYPRADTDHPSRGAQGEPHDVAPNGPSAGGLAIPQSSSSSSRPPTRARGAPSPGVLGPHASEPQLAPPACTPAAPAVPGPPGPRSPQREPQRVSHEQFRAALQLVVDPGDPRSYLDNFIKIGEGSTGIVCIATVRSSGKLVAVKKMDLRKQQRRELLFNEVVIMRDYQHENVVEMYNSYLVGDELWVVMEFLEGGALTDIVTHTRMNEEQIAAVCLAVLQALSVLHAQGVIHRDIKSDSILLTHDGRVKLSDFGFCAQVSKEVPRRKSLVGTPYWMAPELISRLPYGPEVDIWSLGIMVIEMVDGEPPYFNEPPLKAMKMIRDNLPPRLKNLHKVSPSLKGFLDRLLVRDPAQRATAAELLKHPFLAKAGPPASIVPLMRQNRTR

SEQ ID NO: 41493 - protein, 426 aa, Homo sapiens
MFGKRKKRVEISAPSNFEHRVHTGFDQHEQKFTGLPRQWQSLIEESARRPKPLVDPACITSIQPGAPKTIVRGSKGAKDGALTLLLDEFENMSVTRSNSLRRDSPPPPARARQENGMPEKPPGPRSPQREPQRVSHEQFRAALQLVVDPGDPRSYLDNFIKIGEGSTGIVCIATVRSSGKLVAVKKMDLRKQQRRELLFNEVVIMRDYQHENVVEMYNSYLVGDELWVVMEFLEGGALTDIVTHTRMNEEQIAAVCLAVLQALSVLHAQGVIHRDIKSDSILLTHDGRVKLSDFGFCAQVSKEVPRRKSLVGTPYWMAPELISRLPYGPEVDIWSLGIMVIEMVDGEPPYFNEPPLKAMKMIRDNLPPRLKNLHKVSPSLKGFLDRLLVRDPAQRATAAELLKHPFLAKAGPPASIVPLMRQNRTR

SEQ ID NO: 41494 - protein, 438 aa, Homo sapiens
MFGKRKKRVEISAPSNFEHRVHTGFDQHEQKFTGLPRQWQSLIEESARRPKPLVDPACITSIQPGAPKGEPHDVAPNGPSAGGLAIPQSSSSSSRPPTRARGAPSPGVLGPHASEPQLAPPACTPAAPAVPGPPGPRSPQREPQRVSHEQFRAALQLVVDPGDPRSYLDNFIKIGEGSTGIVCIATVRSSGKLVAVKKMDLRKQQRRELLFNEVVIMRDYQHENVVEMYNSYLVGDELWVVMEFLEGGALTDIVTHTRMNEEQIAAVCLAVLQALSVLHAQGVIHRDIKSDSILLTHDGRVKLSDFGFCAQVSKEVPRRKSLVGTPYWMAPELISRLPYGPEVDIWSLGIMVIEMVDGEPPYFNEPPLKAMKMIRDNLPPRLKNLHKVSPSLKGFLDRLLVRDPAQRATAAELLKHPFLAKAGPPASIVPLMRQNRTR

SEQ ID NO: 41495 - protein, 501 aa, Homo sapiens
MFGKRKKRVEISAPSNFEHRVHTGFDQHEQKFTGLPRQWQSLIEESARRPKPLVDPACITSIQPGAPKTIVRGSKGAKDGALTLLLDEFENMSVTRSNSLRRDSPPPPARARQENGMPEEPATTARGGPGKGEPHDVAPNGPSAGGLAIPQSSSSSSRPPTRARGAPSPGVLGPHASEPQLAPPACTPAAPAVPGPPGPRSPQREPQRVSHEQFRAALQLVVDPGDPRSYLDNFIKIGEGSTGIVCIATVRSSGKLVAVKKMDLRKQQRRELLFNEVVIMRDYQHENVVEMYNSYLVGDELWVVMEFLEGGALTDIVTHTRMNEEQIAAVCLAVLQALSVLHAQGVIHRDIKSDSILLTHDGRVKLSDFGFCAQVSKEVPRRKSLVGTPYWMAPELISRLPYGPEVDIWSLGIMVIEMVDGEPPYFNEPPLKAMKMIRDNLPPRLKNLHKVSPSLKGFLDRLLVRDPAQRATAAELLKHPFLAKAGPPASIVPLMRQNRTR

SEQ ID NO: 41496 - protein, 856 aa, Homo sapiens
MGTTASTAQQTVSAGTPFEGLQGSGTMDSRHSVSIHSFQSTSLHNSKAKSIIPNKVAPVVITYNCKEEFQIHDELLKAHYTLGRLSDNTPEHYLVQGRYFLVRDVTEKMDVLGTVGSCGAPNFRQVQGGLTVFGMGQPSLSGFRRVLQKLQKDGHRECVIFCVREEPVLFLRADEDFVSYTPRDKQNLHENLQGLGPGVRVESLELAIRKEIHDFAQLSENTYHVYHNTEDLWGEPHAVAIHGEDDLHVTEEVYKRPLFLQPTYRYHRLPLPEQGSPLEAQLDAFVSVLRETPSLLQLRDAHGPPPALVFSCQMGVGRTNLGMVLGTLILLHRSGTTSQPEAAPTQAKPLPMEQFQVIQSFLRMVPQGRRMVEEVDRAITACAELHDLKEVVLENQKKLEGIRPESPAQGSGSRHSVWQRALWSLERYFYLILFNYYLHEQYPLAFALSFSRWLCAHPELYRLPVTLSSAGPVAPRDLIARGSLREDDLVSPDALSTVREMDVANFRRVPRMPIYGTAQPSAKALGSILAYLTDAKRRLRKVVWVSLREEAVLECDGHTYSLRWPGPPVAPDQLETLEAQLKAHLSEPPPGKEGPLTYRFQTCLTMQEVFSQHRRACPGLTYHRIPMPDFCAPREEDFDQLLEALRAALSKDPGTGFVFSCLSGQGRTTTAMVVAVLAFWHIQGFPEVGEEELVSVPDAKFTKGEFQVVMKVVQLLPDGHRVKKEVDAALDTVSETMTPMHYHLREIIICTYRQAKAAKEAQEMRRLQLRSLQYLERYVCLILFNAYLHLEKADSWQRPFSTWMQEVASKAGIYEILNELGFPELESGEDQPFSRLRYRWQEQSCSLEPSAPEDLL

SEQ ID NO: 41497 - protein, 2034 aa, Homo sapiens
MGSQVLQILRQGVWASLTGGWFFDPHQSTFSNCFHLYVWIFLLIFPFLLYMVLPPSLMVAGVYCLVVAVIFATIKTVNYRLHAMFDQGEIVEKRSSTMGELEEEPAQGDSNPPRDPGVEMTVFRKVSSTPPVRCSSQHSVFGFNQVSELLPRMEDSGPLRDIKELVREQGSNNVIVTSADREMLKLSSQEKLIGDLPQTPPGAVPDPSLASTDSSEPSPLAGDGAPWSGSSMADTPMSPLLKGSLSQELSKSFLTLTQPDRALVRTSSRREQRRGAGGYQPLDRRGSGEPTPQKAGSSDSCFSGTDRETLSSFKSEKTNSTHLDSPPGGPAPEGSDTDPPSEAELPASPDAGVPSDDTLRSFDTVIGAGTPPGLAEPLLVVRPKDLALLRPSKRQPPLRRHSPPGRAPRRPLLEGGGFFEDEDTSEGSELSPASSLRSQRRYSTDSSSSTSCYSPESSRGAAGGPRKRRAPHGAEEGTAVPPKRPYGTQRTPSTASAKTHARVLSMDGAGGDVLRPPLAGCKAELEAQVGVEQAASEPVVLPAEARRGPAANQPGWRGELQEEGAVGGAAEETGRRDRSSSVRRTQAIRRRHNAGSNPTPPASVMGSPPSSLQEAQRGRAASHSRALTLPSALHFASSLLLTRAGANVHEACTFDDTSEGAVHYFYDESGVRRSYTFGLAGGGYENPVGQQGEQTANGAWDRHSHSSSFHSADVPEATGGLNLLQPRPVVLQGMQVRRVPLEIPEEQTLMEEAPPRAQHSYKYWLLPGRWTSVRYERLALLALLDRTRGVLENIFGVGLSSLVAFLGYLLLLKGFFTDIWVFQFCLVIASCQYSLLKSVQPDAASPMHGHNWVIAYSRPVYFCICCLLIWLLDALGSAQPFPPVSLYGLTLFSASFFFCARDVATVFTLCFPFVFLLGLLPQVNTCLMYLLEQIDMHGFGGTAATSPLTAVFSLSRSLLAAALLYGFCLGAIKTPWPEQHVPVLFSVFCGLLVALSYHLSRQSSDPTVLWSLIRSKLFPELEERSLETARAEPPDPLPDKMRQSVREVLHSDLVMCVVIAVLTFAISASTVFIALKSVLGFVLYALAGAVGFFTHYLLPQLRKQLPWFCLSQPVLKPLEYSQYEVRGAAQVMWFEKLYAGLQCVEKYLIYPAVVLNALTVDAHTVVSHPDKYCFYCRALLMTVAGLKLLRSAFCCPPQQYLTLAFTVLLFHFDYPRLSQGFLLDYFLMSLLCSKLWDLLYKLRFVLTYIAPWQITWGSAFHAFAQPFAVPHSAMLFVQALLSGLFSTPLNPLLGSAVFIMSYARPLKFWERDYNTKRVDHSNTRLVTQLDRNPGADDNNLNSIFYEHLTRSLQHTLCGDLVLGRWGNYGPGDCFVLASDYLNALVHLIEVGNGLVTFQLRGLEFRGTYCQQREVEAITEGVEEDEGCCCCEPGHLPRVLSFNAAFGQRWLAWEVTASKYVLEGYSISDNNAASMLQVFDLRKILITYYVKSIIYYVSRSPKLEVWLSHEGITAALRPVRVPGYADSDPTFSLSVDEDYDLRLSGLSLPSFCAVHLEWIQYCASRRSQPVDQDWNSPLVTLCFGLCVLGRRALGTASHSMSASLEPFLYGLHALFKGDFRITSPRDEWVFADMDLLHRVVAPGVRMALKLHQDHFTSPDEYEEPAALYDAIAANEERLVISHEGDPAWRSAILSNTPSLLALRHVLDDASDEYKIIMLNRRHLSFRVIKVNRECVRGLWAGQQQELVFLRNRNPERGSIQNAKQALRNMINSSCDQPLGYPIYVSPLTTSLAGSHPQLRALWGGPISLGAIAHWLLRTWERLHKGCGAGCNSGGNVDDSDCSGGGGLTSLSNNPPVAHPTPENTAGNGDQPLPPGPGWGPRSSLSGSGDGRPPPLLQWPPPRLPGPPPASPIPTEGPRTSRPPGPGLLSSEGPSGKWSLGGRKGLGGSDGEPASGSPKGGTPKSQAPLDLSLSLSLSLSPDVSTEASPPRASQDIPCLDSSAPESGTPMGALGDWPAPIEERESPAAQPLLEHQY

SEQ ID NO: 41498 - protein, 982 aa, Homo sapiens
MGSQVLQILRQGVWASLTGGWFFDPHQSTFSNCFHLYVWIFLLIFPFLLYMVLPPSLMVAGVYCLVVAVIFATIKTVNYRLHAMFDQGEIVEKRSSTMGELEEEPAQGDSNPPRDPGVEMTVFRKVSSTPPVRCSSQHSVFGFNQVSELLPRMEDSGPLRDIKELVREQGSNNVIVTSADREMLKLSSQEKLIGDLPQTPPGAVPDPSLASTDSSEPSPLAGDGAPWSGSSMADTPMSPLLKGSLSQELSKSFLTLTQPDRALVRTSSRREQRRGAGGYQPLDRRGSGEPTPQKAGSSDSCFSGTDRETLSSFKSEKTNSTHLDSPPGGPAPEGSDTDPPSEAELPASPDAGVPSDDTLRSFDTVIGAGTPPGLAEPLLVVRPKDLALLRPSKRQPPLRRHSPPGRAPRRPLLEGGGFFEDEDTSEGSELSPASSLRSQRRYSTDSSSSTSCYSPESSRGAAGGPRKRRAPHGAEEGTAVPPKRPYGTQRTPSTASAKTHARVLSMDGAGGDVLRPPLAGCKAELEAQVGVEQAASEPVVLPAEARRGPAANQPGWRGELQEEGAVGGAAEETGRRDRSSSVRRTQAIRRRHNAGSNPTPPASVMGSPPSSLQEAQRGRAASHSRALTLPSALHFASSLLLTRAGANVHEACTFDDTSEGAVHYFYDESGVRRSYTFGLAGGGYENPVGQQGEQTANGAWDRHSHSSSFHSADVPEATGGLNLLQPRPVVLQGMQVRRVPLEIPEEQTLMEEAPPRAQHSYKYWLLPGRWTSVRYERLALLALLDRTRGVLENIFGVGLSSLVAFLGYLLLLKGFFTDIWVFQFCLVIASCQYSLLKSVQPDAASPMHGHNWVIAYSRPVYFCICCLLIWLLDALGSAQPFPPVSLYGLTLFSASFFFCARDVATVFTLCFPFVFLLGLLPQVNTCPRPRSPPEALPCLHICFALTQFGNSNCPAEVHSPDPFPTLVRVAGFSKPLSGISLC

SEQ ID NO: 41499 - protein, 921 aa, Homo sapiens
MWKPGAESWPLHTGAAQVMWFEKLYAGLQCVEKYLIYPAVVLNALTVDAHTVVSHPDKYCFYCRALLMTVAGLKLLRSAFCCPPQQYLTLAFTVLLFHFDYPRLSQGFLLDYFLMSLLCSKLWDLLYKLRFVLTYIAPWQITWGSAFHAFAQPFAVPHSAMLFVQALLSGLFSTPLNPLLGSAVFIMSYARPLKFWERDYNTKRVDHSNTRLVTQLDRNPGADDNNLNSIFYEHLTRSLQHTLCGDLVLGRWGNYGPGDCFVLASDYLNALVHLIEVGNGLVTFQLRGLEFRGTYCQQREVEAITEGVEEDEGCCCCEPGHLPRVLSFNAAFGQRWLAWEVTASKYVLEGYSISDNNAASMLQVFDLRKILITYYVKSIIYYVSRSPKLEVWLSHEGITAALRPVRVPGYADSDPTFSLSVDEDYDLRLSGLSLPSFCAVHLEWIQYCASRRSQPVDQDWNSPLVTLCFGLCVLGRRALGTASHSMSASLEPFLYGLHALFKGDFRITSPRDEWVFADMDLLHRVVAPGVRMALKLHQDHFTSPDEYEEPAALYDAIAANEERLVISHEGDPAWRSAILSNTPSLLALRHVLDDASDEYKIIMLNRRHLSFRVIKVNRECVRGLWAGQQQELVFLRNRNPERGSIQNAKQALRNMINSSCDQPLGYPIYVSPLTTSLAGSHPQLRALWGGPISLGAIAHWLLRTWERLHKGCGAGCNSGGNVDDSDCSGGGGLTSLSNNPPVAHPTPENTAGNGDQPLPPGPGWGPRSSLSGSGDGRPPPLLQWPPPRLPGPPPASPIPTEGPRTSRPPGPGLLSSEGPSGKWSLGGRKGLGGSDGEPASGSPKGGTPKSQAPLDLSLSLSLSLSPDVSTEASPPRASQDIPCLDSSAPESGTPMGALGDWPAPIEERESPAAQPLLEHQY

SEQ ID NO: 41500 - protein, 369 aa, Homo sapiens
MPVVTTDAESETGIPKSLSNEPPSETMEEIEHTCPQPRLTLTAPAPFADETNCQCQAPHEKLTIAQARLGTPADRPVRVYADGIFDLFHSGHARALMQAKTLFPNSYLLVGVCSDDLTHKFKGFTVMNEAERYEALRHCRYVDEVIRDAPWTLTPEFLEKHKIDFVAHDDIPYSSAGSDDVYKHIKEAGMFVPTQRTEGISTSDIITRIVRDYDVYARRNLQRGYTAKELNVSFINEKRYRFQNQVDKMKEKVKNVEERSKEFVNRVEEKSHDLIQKWEEKSREFIGNFLELFGPDGAWKQMFQERSSRMLQALSPKQSPVSSPTRSRSPSRSPSPTFSWLPLKTSPPSSPKAASASISSMSEGDEDEK

SEQ ID NO: 41501 - protein, 330 aa, Homo sapiens
MPVVTTDAESETGIPKSLSNEPPSETMEEIEHTCPQPRLTLTAPAPFADETNCQCQAPHEKLTIAQARLGTPADRPVRVYADGIFDLFHSGHARALMQAKTLFPNSYLLVGVCSDDLTHKFKGFTVMNEAERYEALRHCRYVDEVIRDAPWTLTPEFLEKHKIDFVAHDDIPYSSAGSDDVYKHIKEAGMFVPTQRTEGISTSDIITRIVRDYDVYARRNLQRGYTAKELNVSFINEKRYRFQNQVDKMKEKVKNVEERSKEFVNRVEEKSHDLIQKWEEKSREFIGNFLELFGPDGAWKQMFQERSSRMLQALSPKQSPLKSWARCRDF

SEQ ID NO: 41502 - protein, 351 aa, Homo sapiens
MVGNQECIMEEDNRAPQLWRKTLTAPAPFADETNCQCQAPHEKLTIAQARLGTPADRPVRVYADGIFDLFHSGHARALMQAKTLFPNSYLLVGVCSDDLTHKFKGFTVMNEAERYEALRHCRYVDEVIRDAPWTLTPEFLEKHKIDFVAHDDIPYSSAGSDDVYKHIKEAGMFVPTQRTEGISTSDIITRIVRDYDVYARRNLQRGYTAKELNVSFINEKRYRFQNQVDKMKEKVKNVEERSKEFVNRVEEKSHDLIQKWEEKSREFIGNFLELFGPDGAWKQMFQERSSRMLQALSPKQSPVSSPTRSRSPSRSPSPTFSWLPLKTSPPSSPKAASASISSMSEGDEDEK

SEQ ID NO: 41503 - protein, 351 aa, Homo sapiens
MVGHQECIMEEDNRAPQLWRKTLTAPAPFADETNCQCQAPHEKLTIAQARLGTPADRPVRVYADGIFDLFHSGHARALMQAKTLFPNSYLLVGVCSDDLTHKFKGFTVMNEAERYEALRHCRYVDEVIRDAPWTLTPEFLEKHKIDFVAHDDIPYSSAGSDDVYKHIKEAGMFVPTQRTEGISTSDIITRIVRDYDVYARRNLQRGYTAKELNVSFINEKRYRFQNQVDKMKEKVKNVEERSKEFVNRVEEKSHDLIQKWEEKSREFIGNFLELFGPDGAWKQMFQERSSRMLQALSPKQSPVSSPTRSRSPSRSPSPTFSWLPLKTSPPSSPKAASASISSMSEGDEDEK

SEQ ID NO: 41504 - protein, 367 aa, Homo sapiens
MDAQCSAKVNARKRRKEAPGPNGATEEDGVPSKVQRCAVGLRQPAPFSDEIEVDFSKPYVRVTMEEASRGTPCERPVRVYADGIFDLFHSGHARALMQAKNLFPNTYLIVGVCSDELTHNFKGFTVMNENERYDAVQHCRYVDEVVRNAPWTLTPEFLAEHRIDFVAHDDIPYSSAGSDDVYKHIKEAGMFAPTQRTEGISTSDIITRIVRDYDVYARRNLQRGYTAKELNVSFINEKKYHLQERVDKVKKKVKDVEEKSKEFVQKVEEKSIDLIQKWEEKSREFIGSFLEMFGPEGALKHMLKEGKGRMLQAISPKQSPSSSPTRERSPSPSFRWPFSGKTSPPCSPANLSRHKAAAYDISEDEED

SEQ ID NO: 41505 - protein, 164 aa, Homo sapiens
MVNSVVFFEITRDGKPLGRISIKLFADKIPKTAENFRALSTGEKGFRYKGSCFHRIIPGFMCQGGDFTRPNGTGDKSIYGEKFDDENLIRKHTGSGILSMANAGPNTNGSQFFICAAKTEWLDGKHVAFGKVKERVNIVEATEHFGYRNSKTSKKITIADCGQF

SEQ ID NO: 41506 - protein, 164 aa, Homo sapiens
MVNSVVFFDITVDGKPLGRISIKLFADKIPKTAENFRALSTGEKGFRYKGSCFHRIIPGFMCQGGDFTRPNGTDDKSIYGEKFDDENLIRKHTGSGILSMVNAGPNTNGSQLFICTAKTEWLDGKHVAFGKVKERVNIVEAMEHFGYRNSKTSKKITIADCGQF

SEQ ID NO: 41507 - protein, 341 aa, Homo sapiens
MGTLPWLLAFFILGLQAWDTPTIVSRKEWGARPLACRALLTLPVAYIITDQLPGMQCQQQSVCSQMLRGLQSHSVYTIGWCDVAYNFLVGDDGRVYEGVGWNIQGLHTQGYNNISLGIAFFGNKIGSSPSPAALSAAEGLISYAIQKGHLSPRYIQPLLLKEETCLDPQHPVMPRKVCPNIIKRSAWEARETHCPKMNLPAKYVIIIHTAGTSCTVSTDCQTVVRNIQSFHMDTRNFCDIGYHFLVGQDGGVYEGVGWHIQGSHTYGFNDIALGIAFIGYFVEKPPNAAALEAAQDLIQCAVVEGYLTPNYLLMGHSDVVNILSPGQALYNIISTWPHFKH

SEQ ID NO: 41508 - protein, 588 aa, Homo sapiens
MGGLEKKKYERGSATNYITRNKARKKLQLSLADFRRLCILKGIYPHEPKHKKKVNKGSTAARTFYLIKDIRFLLHEPIVNKFREYKVFVRKLRKAYGKSEWNTVERLKDNKPNYKLDHIIKERYPTFIDALRDLDDALSMCFLFSTFPRTGKCHVQTIQLCRRLTVEFMHYIIAARALRKVFLSIKGIYYQAEVLGQPIVWITPYAFSHDHPTDVDYRVMATFTEFYTTLLGFVNFRLYQLLNLHYPPKLEGQAQAEAKAGEGTYALDSESCMEKLAALSASLARVVVPATEEEAEVDEFPTDGEMSAQEEDRRKELEAQEKHKKLFEGLKFFLNREVPREALAFIIRSFGGEVSWDKSLCIGATYDVTDSRITHQIVDRPGQQTSVIGRCYVQPQWVFDSVNARLLLPVAEYFSGVQLPPHLSPFVTEKEGDYVPPEKLKLLALQRGEDPGNLNESEEEEEEDDNNEGDGDEEGENEEEEEDAEAGSEKEEEARLAALEEQRMEGKKPRVMAGTLKLEDKQRLAQEEESEAKRLAIMMMKKREKYLYQKIMFGKRRKIREANKLAEKRKAHDEAVRSEKKAKKARPE

SEQ ID NO: 41509 - protein, 583 aa, Homo sapiens
MGGLEKKKYERGSATNYITRNKARKKLQLSLADFRRLCILKGIYPHEPKHKKKVNKGSTAARTFYLIKDIRFLLHEPIVNKFREYKVFVRKLRKAYGKSEWNTVERLKDNKPNYKLDHIIKERYPTFIDALRDLDDALSMCFLFSTFPRTGKCHVQTIQLCRRLTVEFMHYIIAARALRKVFLSIKGIYYQAEVLGQPIVWITPYAFSHDHPTDVDYRVMATFTEFYTTLLGFVNFRLYQLLNLHYPPKLEGQAQAEAKAGEGTYALDSESCMEKLAALSASLARVVVPATEEEAEVDEFPTDGEEDRRKELEAQEKHKKLFEGLKFFLNREVPREALAFIIRSFGGEVSWDKSLCIGATYDVTDSRITHQIVDRPGQQTSVIGRCYVQPQWVFDSVNARLLLPVAEYFSGVQLPPHLSPFVTEKEGDYVPPEKLKLLALQRGEDPGNLNESEEEEEEDDNNEGDGDEEGENEEEEEDAEAGSEKEEEARLAALEEQRMEGKKPRVMAGTLKLEDKQRLAQEEESEAKRLAIMMMKKREKYLYQKIMFGKRRKIREANKLAEKRKAHDEAVRSEKKAKKARPE

SEQ ID NO: 41510 - protein, 809 aa, Homo sapiens
MYEALPGPAPENEDGLVKVKEEDPTWEQVCNSQEGSSHTQEICRLRFRHFCYQEAHGPQEALAQLRELCHQWLRPEMHTKEQIMELLVLEQFLTILPKELQPCVKTYPLESGEEAVTVLENLETGSGDTGQQASVYIQGQDMHPMVAEYQGVSLECQSLQLLPGITTLKCEPPQRPQGNPQEVSGPVPHGSAHLQEKNPRDKAVVPVFNPVRSQTLVKTEEETAQAVAAEKWSHLSLTRRNLCGNSAQETVMSLSPMTEEIVTKDRLFKAKQETSEEMEQSGEASGKPNRECAPQIPCSTPIATERTVAHLNTLKDRHPGDLWARMHISSLEYAAGDITRKGRKKDKARVSELLQGLSFSGDSDVEKDNEPEIQPAQKKLKVSCFPEKSWTKRDIKPNFPSWSALDSGLLNLKSEKLNPVELFELFFDDETFNLIVNETNNYASQKNVSLEVTVQEMRCVFGVLLLSGFMRHPRREMYWEVSDTDQNLVRDAIRRDRFELIFSNLHFADNGHLDQKDKFTKLRPLIKQMNKNFLLYAPLEEYYCFDKSMCECFDSDQFLNGKPIRIGYKIWCGTTTQGYLVWFEPYQEESTMKVDEDPDLGLGGNLVMNFADVLLERGQYPYHLCFDSFFTSVKLLSALKKKGVRATGTIRENRTEKCPLMNVEHMKKMKRGYFDFRIEENNEIILCRWYGDGIISLCSNAVGIEPVNEVSCCDADNEEIPQISQPSIVKVYDECKEGVAKMDQIISKYRVRIRSKKWYSILVSYMIDVAMNNAWQLHRACNPGASLDPLDFRRFVAHFYLEHNAHLSD

SEQ ID NO: 41511 - protein, 585 aa, Homo sapiens
MSNPRKRSIPMRDSNTGLEQLLAEDSFDESDFSEIDDSDNFSDSALEADKIRPLSHLESDGKSSTSSDSGRSMKWSARAMIPRQRYDFTGTPGRKVDVSDITDPLQYFELFFTEELVSKITRETNAQAALLASKPPGPKGFSRMDKWKDTDNDELKVFFAVMLLQGIVQKPELEMFWSTRPLLDTPYLRQIMTGERFLLLFRCLHFVNNSSISAGQSKAQISLQKIKPVFDFLVNKFSTVYTPNRNIAVDESLMLFKGPLAMKQYLPTKRVRFGLKLYVLCESQSGYVWNALVHTGPGMNLKDSADGLKSSRIVLTLVNDLLGQGYCVFLDNFNISPMLFRELHQNRTDAVGTARLNRKQIPNDLKKRIAKGTTVARFCGELMALKWCDGKEVTMLSTFHNDTVIEVNNRNGKKTKRPRVIVDYNENMGAVDSADQMLTSYPSERKRHKVWYKKFFHHLLHITVLNSYILFKKDNPEHTMSHINFRLALIERMLEKHHKPGQQHLRGRPCSDDVTPLRLSGRHFPKSIPATSGKQNPTGRCKICCSQYDKDGKKIRKETRYFCAECDVPLCVVPCFEIYHTKKNY

SEQ ID NO: 41512 - protein, 553 aa, Homo sapiens
MTRGGPGGRPGLPQPPPLLLLLLLLPLLLVTAEPPKPAGVYYATAYWMPAEKTVQVKNVMDKNGDAYGFYNNSVKTTGWGILEIRAGYGSQTLSNEIIMFVAGFLEGYLTAPHMNDHYTNLYPQLITKPSIMDKVQDFMEKQDKWTRKNIKEYKTDSFWRHTGYVMAQIDGLYVGAKKRAILEGTKPMTLFQIQFLNSVGDLLDLIPSLSPTKNGSLKVFKRWDMGHCSALIKVLPGFENILFAHSSWYTYAAMLRIYKHWDFNVIDKDTSSSRLSFSSYPGFLESLDDFYILSSGLILLQTTNSVFNKTLLKQVIPETLLSWQRVRVANMMADSGKRWADIFSKYNSGTYNNQYMVLDLKKVKLNHSLDKGTLYIVEQIPTYVEYSEQTDVLRKGYWPSYNVPFHEKIYNWSGYPLLVQKLGLDYSYDLAPRAKIFRRDQGKVTDTASMKYIMRYNNYKKDPYSRGDPCNTICCREDLNSPNPSPGGCYDTKVADIYLASQYTSYAISGPTVQGGLPVFRWDRFNKTLHQGMPEVYNFDFITMKPILKLDIK

SEQ ID NO: 41513 - protein, 353 aa, Homo sapiens
MEDGVLKEGFLVKRGHIVHNWKARWFILRQNTLVYYKLEGGRRVTPPKGRILLDGCTITCPCLEYENRPLLIKLKTQTSTEYFLEACSREERDAWAFEITGAIHAGQPGKVQQLHSLRNSFKLPPHISLHRIVDKMHDSNTGIRSSPNMEQGSTYKKTFLGSSLVDWLISNSFTASRLEAVTLASMLMEENFLRPVGVRSMGAIRSGDLAEQFLDDSTALYTFAESYKKKISPKEEISLSTVELSGTVVKQGYLAKQGHKRKNWKVRRFVLRKDPAFLHYYDPSKEENRPVGGFSLRGSLVSALEDNGVPTGVKGNVQGNLFKVITKDDTHYYIQASSKAERAEWIEAIKKLT

SEQ ID NO: 41514 - protein, 581 aa, Homo sapiens
MAVRQALGRGLQLGRALLLRFTGKPGRAYGLGRPGPAAGCVRGERPGWAAGPGAEPRRVGLGLPNRLRFFRQSVAGLAARLQRQFVVRAWGCAGPCGRAVFLAFGLGLGLIEEKQAESRRAVSACQEIQAIFTQKSKPGPDPLDTRRLQGFRLEEYLIGQSIGKGCSAAVYEATMPTLPQNLEVTKSTGLLPGRGPGTSAPGEGQERAPGAPAFPLAIKMMWNISAGSSSEAILNTMSQELVPASRVALAGEYGAVTYRKSKRGPKQLAPHPNIIRVLRAFTSSVPLLPGALVDYPDVLPSRLHPEGLGHGRTLFLVMKNYPCTLRQYLCVNTPSPRLAAMMLLQLLEGVDHLVQQGIAHRDLKSDNILVELDPDGCPWLVIADFGCCLADESIGLQLPFSSWYVDRGGNGCLMAPEVSTARPGPRAVIDYSKADAWAVGAIAYEIFGLVNPFYGQGKAHLESRSYQEAQLPALPESVPPDVRQLVRALLQREASKRPSARVAANVLHLSLWGEHILALKNLKLDKMVGWLLQQSAATLLANRLTEKCCVETKMKMLFLANLECETLCQAALLLCSWRAAL

SEQ ID NO: 41515 - protein, 274 aa, Homo sapiens
MCGSQRPSPLSTSYPCTLRQYLCVNTPSPRLAAMMLLQLLEGVDHLVQQGIAHRDLKSDNILVELDPDGCPWLVIADFGCCLADESIGLQLPFSSWYVDRGGNGCLMAPEVSTARPGPRAVIDYSKADAWAVGAIAYEIFGLVNPFYGQGKAHLESRSYQEAQLPALPESVPPDVRQLVRALLQREASKRPSARVAANVLHLSLWGEHILALKNLKLDKMVGWLLQQSAATLLANRLTEKCCVETKMKMLFLANLECETLCQAALLLCSWRAAL

SEQ ID NO: 41516 - protein, 463 aa, Homo sapiens
MSEEEAAQIPRSSVWEQDQQNVVQRVVALPLVRATCTAVCDVYSAAKDRHPLLGSACRLAENCVCGLTTRALDHAQPLLEHLQPQLATMNSLACRGLDKLEEKLPFLQQPSETVVTSAKDVVASSVTGVVDLARRGRRWSVELKRSVSHAVDVVLEKSEELVDHFLPMTEEELAALAAEAEGPEVGSVEDQRRQQGYFVRLGSLSARIRHLAYEHSVGKLRQSKHRAQDTLAQLQETLELIDHMQCGVTPTAPACPGKVHELWGEWGQRPPESRRRSQAELETLVLSRSLTQELQGTVEALESSVRGLPAGAQEKVAEVRRSVDALQTAFADARCFRDVPAAALAEGRGRVAHAHACVDELLELVVQAVPLPWLVGPFAPILVERPEPLPDLADLVDEVIGGPDPRWAHLDWPAQQRAWEAEHRDGSGNGDGDRMGVAGDICEQEPETPSCPVKHTLMPELDF

SEQ ID NO: 41517 - protein, 463 aa, Homo sapiens
MPLTLLQDWCRGEHLNTRRCMLILGIPEDCGEDEFEETLQEACRHLGRYRVIGRMFRREENAQAILLELAQDIDYALLPREIPGKGGPWEVIVKPRNSDGEFLNRLNRFLEEERRTVSDMNRVLGSDTNCSAPRVTISPEFWTWAQTLGAAVQPLLEQMLYRELRVFSGNTISIPGALAFDAWLEHTTEMLQMWQVPEGEKRRRLMECLRGPALQVVSGLRASNASITVEECLAALQQVFGPVESHKIAQVKLCKAYQEAGEKVSSFVLRLEPLLQRAVENNVVSRRNVNQTRLKRVLSGATLPDKLRDKLKLMKQRRKPPGFLALVKLLREEEEWEATLGPDRESLEGLEVAPRPPARITGVGAVPLPASGNSFDARPSQGYRRRRGRGQHRRGGVARAGSRGSRKRKRHTFCYSCGEDGHIRVQCINPSNLLLVKQKKQAAVESGNGNWAWDKSHPKSKAK

SEQ ID NO: 41518 - protein, 455 aa, Homo sapiens
MPLTLLQDWCRGEHLNTRRCMLILGIPEDCGEDEFEETLQEACRHLGRYRVIGRMFRREENAQAILLELAQDIDYALLPREIPGKGGPWEVIVKPRNSDGEFLNRLNRFLEEERRTVSDMNRVLGSDTNCSAPRVTISPEFWTWAQTLGAAVQPLLEQMLYRELRVFSGNTISIPGALAFDAWLEHTTEMLQMWQVPEGEKRRRLMECLRGPALQVVSGLRASNASITVEECLAALQQVFGPVESHKIAQVKLCKAYQEAGEKVSSFVLRLEPLLQRAVENNVVSRRNVNQTRLKRVLSGATLPDKLRDKLKLMKQRRKPPGFLALVKLLREEEEWEATLGPDRESLEGLEVAPRPPARITGVGAVPLPASGNSFDARPSQGYRRRRGRGQHRRGGVARAGSRGSRKRKRHTFCYSCGEDGHIRVQCINPSNLLLAKETKEILEGGEREAQTNSR

SEQ ID NO: 41519 - protein, 385 aa, Homo sapiens
MAAVVAATALKGRGARNARVLRGILAGATANKASHNRTRALQSHSSPEGKEEPEPLSPELEYIPRKRGKNPMKAVGLAWYSLYTRTWLGYLFYRQQLRRARNRYPKGHSKTQPRLFNGVKVLPIPVLSDNYSYLIIDTQAQLAVAVDPSDPRAVQASIEKEGVTLVAILCTHKHWDHSGGNRDLSRRHRDCRVYGSPQDGIPYLTHPLCHQDVVSVGRLQIRALATPGHTQGHLVYLLDGEPYKGPSCLFSGDLLFLSGCGRTFEGNAETMLSSLDTVLGLGDDTLLWPGHEYAEENLGFAGVVEPENLARERKMQWVQRQRLERKGTCPSTLGEERSYNPFLRTHCLALQEALGPGPGPTGDDDYSRAQLLEELRRLKDMHKSK

SEQ ID NO: 41520 - protein, 142 aa, Homo sapiens
MAAVVAATALKGRGARNARVLRGILAGATANKASHNRTRALQSHSSPEGKEEPEPLSPELEYIPRKRGKNPMKAVGLAWAIGFPCGILLFILTKREVDKDRVKQMKARQNMRLSNTGEYESQRFRASSQSAPSPDVGSGVQT

SEQ ID NO: 41521 - protein, 361 aa, Homo sapiens
MAWQGWPAAWQWVAGCWLLLVLVLVLLVSPRGCRARRGLRGLLMAHSQRLLFRIGYSLYTRTWLGYLFYRQQLRRARNRYPKGHSKTQPRLFNGVKVLPIPVLSDNYSYLIIDTQAQLAVAVDPSDPRAVQASIEKEGVTLVAILCTHKHWDHSGGNRDLSRRHRDCRVYGSPQDGIPYLTHPLCHQDVVSVGRLQIRALATPGHTQGHLVYLLDGEPYKGPSCLFSGDLLFLSGCGRTFEGNAETMLSSLDTVLGLGDDTLLWPGHEYAEENLGFAGVVEPENLARERKMQWVQRQRLERKGTCPSTLGEERSYNPFLRTHCLALQEALGPGPGPTGDDDYSRAQLLEELRRLKDMHKSK

SEQ ID NO: 41522 - protein, 325 aa, Homo sapiens
MPSSVHHTKRQMMSIYCYWYSLYTRTWLGYLFYRQQLRRARNRYPKGHSKTQPRLFNGVKVLPIPVLSDNYSYLIIDTQAQLAVAVDPSDPRAVQASIEKEGVTLVAILCTHKHWDHSGGNRDLSRRHRDCRVYGSPQDGIPYLTHPLCHQDVVSVGRLQIRALATPGHTQGHLVYLLDGEPYKGPSCLFSGDLLFLSGCGRTFEGNAETMLSSLDTVLGLGDDTLLWPGHEYAEENLGFAGVVEPENLARERKMQWVQRQRLERKGTCPSTLGEERSYNPFLRTHCLALQEALGPGPGPTGDDDYSRAQLLEELRRLKDMHKSK

SEQ ID NO: 41523 - protein, 881 aa, Homo sapiens
MAAPGAPAEYGYIRTVLGQQILGQLDSSSLALPSEAKLKLAGSSGRGGQTVKSLRIQEQVQQTLARKGRSSVGNGNLHRTSSVPEYVYNLHLVENDFVGGRSPVPKTYDMLKAGTTATYEGRWGRGTAQYSSQKSVEERSLRHPLRRLEISPDSSPERAHYTHSDYQYSQRSQAGHTLHHQESRRAALLVPPRYARSEIVGVSRAGTTSRQRHFDTYHRQYQHGSVSDTVFDSIPANPALLTYPRPGTSRSMGNLLEKENYLTAGLTVGQVRPLVPLQPVTQNRASRSSWHQSSFHSTRTLREAGPSVAVDSSGRRAHLTVGQAAAGGSGNLLTERSTFTDSQLGNADMEMTLERAVSMLEADHMLPSRISAAATFIQHECFQKSEARKRVNQLRGILKLLQLLKVQNEDVQRAVCGALRNLVFEDNDNKLEVAELNGVPRLLQVLKQTRDLETKKQITDHTVNLRSRNGWPGAVAHACNPSTLGGQGGRITRSGVRDQPDQHGLLWNLSSNDKLKNLMITEALLTLTENIIIPFSGWPEGDYPKANGLLDFDIFYNVTGCLRNMSSAGADGRKAMRRCDGLIDSLVHYVRGTIADYQPDDKATENCVCILHNLSYQLEAELPEKYSQNIYIQNRNIQTDNNKSIGCFGSRSRKVKEQYQDVPMPEEKSNPKGVEWLWHSIVIRMYLSLIAKSVRNYTQEASLGALQNLTAGSGPMPTSVAQTVVQKESGLQHTRKMLHVGDPSVKKTAISLLRNLSRNLSLQNEIAKETLPDLVSIIPDTVPSTDLLIETTASACYTLNNIIQNSYQNARDLLNTGGIQKIMAISAGDAYASNKASKAASVLLYSLWAHTELHHAYKKAQFKKTDFVNSRTAKAYHSLKD

SEQ ID NO: 41524 - protein, 837 aa, Homo sapiens
MAAPGAPAEYGYIRTVLGQQILGQLDSSSLALPSEAKLKLAGSSGRGGQTVKSLRIQEQVQQTLARKGRSSVGNGNLHRTSSVPEYVYNLHLVENDFVGGRSPVPKTYDMLKAGTTATYEGRWGRGTAQYSSQKSVEERSLRHPLRRLEISPDSSPERAHYTHSDYQYSQRSQAGHTLHHQESRRAALLVPPRYARSEIVGVSRAGTTSRQRHFDTYHRQYQHGSVSDTVFDSIPANPALLTYPRPGTSRSMGNLLEKENYLTAGLTVGQVRPLVPLQPVTQNRASRSSWHQSSFHSTRTLREAGPSVAVDSSGRRAHLTVGQAAAGGSGNLLTERSTFTDSQLGNADMEMTLERAVSMLEADHMLPSRISAAATFIQHECFQKSEARKRVNQLRGILKLLQLLKVQNEDVQRAVCGALRNLVFEDNDNKLEVAELNGVPRLLQVLKQTRDLETKKQITGLLWNLSSNDKLKNLMITEALLTLTENIIIPFSGWPEGDYPKANGLLDFDIFYNVTGCLRNMSSAGADGRKAMRRCDGLIDSLVHYVRGTIADYQPDDKATENCVCILHNLSYQLEAELPEKYSQNIYIQNRNIQTDNNKSIGCFGSRSRKVKEQYQDVPMPEEKSNPKGVEWLWHSIVIRMYLSLIAKSVRNYTQEASLGALQNLTAGSGPMPTSVAQTVVQKESGLQHTRKMLHVGDPSVKKTAISLLRNLSRNLSLQNEIAKETLPDLVSIIPDTVPSTDLLIETTASACYTLNNIIQNSYQNARDLLNTGGIQKIMAISAGDAYASNKASKAASVLLYSLWAHTELHHAYKKAQFKKTDFVNSRTAKAYHSLKD

SEQ ID NO: 41525 - protein, 1102 aa, Homo sapiens
MELENYKQPVVLREDNCRRRRRMKPRSAAASLSSMELIPIEFVLPTSQRKCKSPETALLHVAGHGNVEQMKAQVWLRALETSVAADFYHRLGPHHFLLLYQKKGQWYEIYDKYQVVQTLDCLRYWKATHRSPGQIHLVQRHPPSEESQAFQRQLTALIGYDVTDVSNVHDDELEFTRRGLVTPRMAEVASRDPKLYAMHPWVTSKPLPEYLWKKIANNCIFIVIHRSTTSQTIKVSPDDTPGAILQSFFTKMAKKKSLMDIPESQSEQDFVLRVCGRDEYLVGETPIKNFQWVRHCLKNGEEIHVVLDTPPDPALDEVRKEEWPLVDDCTGVTGYHEQLTIHGKDHESVFTVSLWDCDRKFRVKIRGIDIPVLPRNTDLTVFVEANIQHGQQVLCQRRTSPKPFTEEVLWNVWLEFSIKIKDLPKGALLNLQIYCGKAPALSSKASAESPSSESKGKVQLLYYVNLLLIDHRFLLRRGEYVLHMWQISGKGEDQGSFNADKLTSATNPDKENSMSISILLDNYCHPIALPKHQPTPDPEGDRVRAEMPNQLRKQLEAIIATDPLNPLTAEDKELLWHFRYESLKHPKAYPKLFSSVKWGQQEIVAKTYQLLARREVWDQSALDVGLTMQLLDCNFSDENVRAIAVQKLESLEDDDVLHYLLQLVQAVKFEPYHDSALARFLLKRGLRNKRIGHFLFWFLRSEIAQSRHYQQRFAVILEAYLRGCGTAMLHDFTQQVQVIEMLQKVTLDIKSLSAEKYDVSSQVISQLKQKLENLQNSQLPESFRVPYDPGLKAGALAIEKCKVMASKKKPLWLEFKCADPTALSNETIGIIFKHGDDLRQDMLILQILRIMESIWETESLDLCLLPYGCISTGDKIGMIEIVKDATTIAKIQQSTVGNTGAFKDEVLNHWLKEKSPTEEKFQAAVERFVYSCAGYCVATFVLGIGDRHNDNIMITETGNLFHIDFGHILGNYKSFLGINKERVPFVLTPDFLFVMGTSGKKTSPHFQKFQDICVKAYLALRHHTNLLIILFSMMLMTGMPQLTSKEDIEYIRDALTVGKNEEDAKKYFLDQIEVCRDKGWTVQFNWFLHLVLGIKQGEKHSA

SEQ ID NO: 41526 - protein, 264 aa, Homo sapiens [sequence omitted]

SEQ ID NO: 41527 - protein, 216 aa, Homo sapiens
MGKAAAAVAFGAEVGVRLALFAAFLVTELLPPFQRLIQPEEMWLYRNPYVEAEYFPTKPMFVIAFLSPLSLIFLAKFLKKADTRDSRQACLAASLALALNGVFTNTIKLIVGRPRPDFFYRCFPDGLAHSDLMCTGDKDVVNEGRKSFPSGHSSFAFAGLAFASFYLAGKLHCFTPQGRGKSWRFCAFLSPLLFAAVIALSRTCDYKHHWQGPFKW

SEQ ID NO: 41528 - protein, 223 aa, Homo sapiens
MWLYRNPYVEAEYFPTKPMFVIAFLSPLSLIFLAKFLKKADTRDSRQACLAASLALALNGVFTNTIKLIVGRPRPDFFYRCFPDGLAHSDLMCTGDKDVVNEGRKSFPSGHSSFAFAGLAFASFYLAGKLHCFTPQGRGKSWRFCAFLSPLLFAAVIALSRTCDYKHHWQDVLVGSMIGMTFAYVCYRQYYPPLTDAECHKPFQDKLVLSTAQKPGDSYCFDI

SEQ ID NO: 41529 - protein, 176 aa, Homo sapiens
MGKAAAAVAFGAEVGVRLALFAAFLVTELLPPFQRLIQPEEMWLYRNPYVEAEYFPTKPMFVIAFLSPLSLIFLAKFLKKADTRDSRQACLAASLALALNGVFTNTIKLIVGRPRPDFFYRCFPDGLAHSDLMCTGDKDVVNEGRKSFPSGHSSCMNIIWTLPYACFHIIEFNLES

SEQ ID NO: 41530 - protein, 253 aa, Homo sapiens
MMMGCGESELKSADGEEAAAVPGPPPEPQVPQLRAPVPEPGLDLSLSPRPDSPQPRHGSPGRRKGRAERRGAARQRRQVRFRLTPPSPVRSEPQPAVPQELEMPVLKSSLALGLELRAAAGSHFDAAKAVEEQLRKSFQIRCGLEESVSEGLNVPRSKRLFRDLVSLQVPEEQVLNAALREKLALLPPQARAPHPKEPPGPGPDMTILCDPETLFYESPHLTLDGLPPLRLQLRPRPSEDTFLMHRTLRRWEA

SEQ ID NO: 41531 - protein, 317 aa, Homo sapiens
MSCTRMIQVLDPRPLTSSVMPVDVAMRLCLAHSPPVKSFLGPYDEFQRRHFVNKLKPLKSCLNIKHKAKSQNDWKCSHNQAKKRVVFADSKGLSLTAIHVFSDLPEEPAWDLQFDLLDLNDISSALKHHEEKNLILDFPQPSTDYLSFRSHFQKNFVCLENCSLQERTVTGTVKVKNVSFEKKVQIRITFDSWKNYTDVDCVYMKNVYGGTDSDTFSFAIDLPPVIPTEQKIEFCISYHANGQVFWDNNDGQNYRIVHVQWKPDGVQTQMAPQDCAFHQTSPKTELESTIFGSPRLASGLFPEWQSWGRMENLASYR

SEQ ID NO: 41532 - protein, 820 aa, Homo sapiens
MLRLGLCAAALLCVCRPGAVRADCWLIEGDKGYVWLAICSQNQPPYETIPQHINSTVHDLRLNENKLKAVLYSSLNRFGNLTDLNLTKNEISYIEDGAFLGQSSLQVLQLGYNKLSNLTEGMLRGMSRLQFLFVQHNLIEVVTPTAFSECPSLISIDLSSNRLSRLDGATFASLASLMVCELAGNPFNCECDLFGFLAWLVVFNNVTKNYDRLQCESPREFAGYPLLVPRPYHSLNAITVLQAKCRNGSLPARPVSHPTPYSTDAQREPDENSGFNPDEILSVEPPASSTTDASAGPAIKLHHVTFTSATLVVIIPHPYSKMYILVQYNNSYFSDVMTLKNKKEIVTLDKLRAHTEYTFCVTSLRNSRRFNHTCLTFTTRDPVPGDLAPSTSTTTHYIMTILGCLFGMVIVLGAVYYCLRKRRMQEEKQKSVNVKKTILEMRYGADVDAGSIVHAAQKLGEPPVLPVSRMASIPSMIGEKLPTAKGLEAGLDTPKVATKGNYIEVRTGAGGDGLARPEDDLPDLENGQGSAAEISTIAKEVDKVNQIINNCIDALKLDSASFLGGGSSSGDPELAFECQSLPAAAAASSATGPGALERPSFLSPPYKESSHHPLQRQLSADAAVTRKTCSVSSSGSIKSAKVFSLDVPDHPAATGLAKGDSKYIEKGSPLNSPLDRLPLVPAGSGGGSGGGGGIHHLEVKPAYHCSEHRHSFPALYYEEGADSLSQRVSFLKPLTRSKRDSTYSQLSPRHYYSGYSSSPEYSSESTHKIWERFRPYKKHHREEVYMAAGHALRKKVQFAKDEDLHDILDYWKGVSAQQKL

SEQ ID NO: 41533 - protein, 370 aa, Homo sapiens
MSHPSPQAKPSNPSNPRVFFDVDIGGERVGRIVLELFADIVPKTAENFRALCTGEKGIGHTTGKPLHFKGCPFHRIIKKFMIQGGDFSNQNGTGGESIYGEKFEDENFHYKHDREGLLSMANAGRNTNGSQFFITTVPTPHLDGKHVVFGQVIKGIGVARILENVEVKGEKPAKLCVIAECGELKEGDDGGIFPKDGSGDSHPDFPEDADIDLKDVDKILLITEDLKNIGNTFFKSQNWEMAIKKYAEVLRYVDSSKAVIETADRAKLQPIALSCVLNIGACKLKMSNWQGAIDSCLEALELDPSNTKALYRRAQGWQGLKEYDQALADLKKAQGIAPEDKAIQAELLKVKQKIKAQKDKEKAVYAKMFA

SEQ ID NO: 41534 - protein, 727 aa, Homo sapiens
MQQKTKLFLQALKYSIPHLGKCMQKQHLNHYNFADHCYNRIKLKKYHLTKCLQNKPKISELARNIPSRSFSCKDLQPVKQENEKPLPENMDAFEKVRTKLETQPQEEYEIINVEVKHGGFVYYQEGCCLVRSKDEEADNDNYEVLFNLEELKLDQPFIDCIRVAPDEKYVAAKIRTEDSEASTCVIIKLSDQPVMEASFPNVSSFEWVKDEEDEDVLFYTFQRNLRCHDVYRATFGDNKRNERFYTEKDPSYFVFLYLTKDSRFLTINIMNKTTSEVWLIDGLSPWDPPVLIQKRIHGVLYYVEHRDDELYILTNVGEPTEFKLMRTAADTPAIMNWDLFFTMKRNTKVIDLDMFKDHCVLFLKHSNLLYVNVIGLADDSVRSLKLPPWACGFIMDTNSDPKNCPFQLCSPIRPPKYYTYKFAEGKLFEETGHEDPITKTSRVLRLEAKSKDGKLVPMTVFHKTDSEDLQKKPLLVHVYGAYGMDLKMNFRPERRVLVDDGWILAYCHVRGGGELGLQWHADGRLTKKLNGLADLEACIKTLHGQGFSQPSLTTLTAFSAGGVLAGALCNSNPELVRAVTLEAPFLDVLNTMMDTTLPLTLEELEEWGNPSSDEKHKNYIKRYCPYQNIKPQHYPSIHITAYENDERVPLKGIVSYTEKLKEAIAEHAKDTGEGYQTPNIILDIQPGGNHVIEDSHKKITAQIKFLYEELGLDSTSVFEDLKKYLKF

SEQ ID NO: 41535 - protein, 661 aa, Homo sapiens
MQQKTKLFLQALKYSIPHLGKCMQKQHLNHYNFADHCYNRIKLKKYHLTKCLQNKPKISELARNIPSRSFSCKDLQPVKQENEKPLPENMDAFEKVRTKLETQPQEEYEIINVEVKHGGFVYYQEGCCLVRSKDEEADNDNYEVLFNLEELKLDQPFIDCIRVAPDEKYVAAKIRTEDSEASTCVIIKLSDQPVMEASFPNVSSFEWVKDEEDEDVLFYTFQRNLRCHDVYRATFGDNKRNERFYTEKDPSYFVFLYLTKDSRFLTINIMNKTTSEVWLIDGLSPWDPPVLIQKRIHGVLYYVEHRDDELYILTNVGEPTEFKLMRTAADTPAIMNWDLFFTMKRNTKVIDLDMFKDHCVLFLKHSNLLYVNVIGLADDSVRSLKDGKLVPMTVFHKTDSEDLQKKPLLVHVYGAYGMDLKMNFRPERRVLVDDGWILAYCHVRGGGELGLQWHADGRLTKKLNGLADLEACIKTLHGQGFSQPSLTTLTAFSAGGVLAGALCNSNPELVRAVTLEAPFLDVLNTMMDTTLPLTLEELEEWGNPSSDEKHKNYIKRYCPYQNIKPQHYPSIHITAYENDERVPLKGIVSYTEKLKEAIAEHAKDTGEGYQTPNIILDIQPGGNHVIEDSHKKITAQIKFLYEELGLDSTSVFEDLKKYLKF

SEQ ID NO: 41536 - protein, 665 aa, Homo sapiens
MQQKTKLFLQALKYSIPHLGKCMQKQHLNHYNFADHCYNRIKLKKYHLTKCLQNKPKISELARNIPSRSFSCKDLQPVKQENEKPLPENMDAFEKVRTKLETQPQEEYEIINVEVKHGGFVYYQEGCCLVRSKDEEADNDNYEVLFNLEELKLDQPFIDCIRVAPDEKYVAAKIRTEDSEASTCVIIKLSDQPVMEASFPNVSSFEWVKDEEDEDVLFYTFQRNLRCHDVYRATFGDNKRNERFYTEKDPSYFVFLYLTKDSRFLTINIMNKTTSEVWLIDGLSPWDPPVLIQKRIHGVLYYVEHRDDELYILTNVGEPTEFKLPPWACGFIMDTNSDPKNCPFQLCSPIRPPKYYTYKFAEGKLFEETGHEDPITKTSRVLRLEAKSKDGKLVPMTVFHKTDSEDLQKKPLLVHVYGAYGMDLKMNFRPERRVLVDDGWILAYCHVRGGGELGLQWHADGRLTKKLNGLADLEACIKTLHGQGFSQPSLTTLTAFSAGGVLAGALCNSNPELVRAVTLEAPFLDVLNTMMDTTLPLTLEELEEWGNPSSDEKHKNYIKRYCPYQNIKPQHYPSIHITAYENDERVPLKGIVSYTEKLKEAIAEHAKDTGEGYQTPNIILDIQPGGNHVIEDSHKKITAQIKFLYEELGLDSTSVFEDLKKYLKF

SEQ ID NO: 41537 - protein, 638 aa, Homo sapiens
MDAFEKVRTKLETQPQEEYEIINVEVKHGGFVYYQEGCCLVRSKDEEADNDNYEVLFNLEELKLDQPFIDCIRVAPDEKYVAAKIRTEDSEASTCVIIKLSDQPVMEASFPNVSSFEWVKDEEDEDVLFYTFQRNLRCHDVYRATFGDNKRNERFYTEKDPSYFVFLYLTKDSRFLTINIMNKTTSEVWLIDGLSPWDPPVLIQKRIHGVLYYVEHRDDELYILTNVGEPTEFKLMRTAADTPAIMNWDLFFTMKRNTKVIDLDMFKDHCVLFLKHSNLLYVNVIGLADDSVRSLKLPPWACGFIMDTNSDPKNCPFQLCSPIRPPKYYTYKFAEGKLFEETGHEDPITKTSRVLRLEAKSKDGKLVPMTVFHKTDSEDLQKKPLLVHVYGAYGMDLKMNFRPERRVLVDDGWILAYCHVRGGGELGLQWHADGRLTKKLNGLADLEACIKTLHGQGFSQPSLTTLTAFSAGGVLAGALCNSNPELVRAVTLEAPFLDVLNTMMDTTLPLTLEELEEWGNPSSDEKHKNYIKRYCPYQNIKPQHYPSIHITAYENDERVPLKGIVSYTEKLKEAIAEHAKDTGEGYQTPNIILDIQPGGNHVIEDSHKKITAQIKFLYEELGLDSTSVFEDLKKYLKF

SEQ ID NO: 41538 - protein, 179 aa, Homo sapiens
MPSKSLVMEYLAHPSTLGLAVGVACGMCLGWSLRVCFGMLPKSKTSKTHTDTESEASILGDSGEYKMILVVRNDLKMGKGKVAAQCSHAAVSAYKQIQRRNPEMLKQWEYCGQPKVVVKAPDEETLIALLAHAKMLGLTVSLIQDAGRTQIAPGSQTVLGIGPGPADLIDKVTGHLKLY

SEQ ID NO: 41539 - protein, 197 aa, Homo sapiens
MDVGSKEVLMESPPDYSAAPRGRFGIPCCPVHLKRLLIVVVVVVLIVVVIVGALLMGLHMSQKHTEMVLEMSIGAPEAQQRLALSEHLVTTATFSIGSTGLVVYDYQQLLIAYKPAPGTCCYIMKIAPESIPSLEALNRKVHNFQMECSLQAKPAVPTSKLGQAEGRDAGSAPSGGDPAFLGMAVNTLCGEVPLYYI

SEQ ID NO: 41540 - protein, 191 aa, Homo sapiens [sequence omitted]

SEQ ID NO: 41541 - protein, 480 aa, Homo sapiens
MAASVVCRAATAGAQVLLRARRSPALLRTPALRSTATFAQALQFVPETQVSLLDNGLRVASEQSSQPTCTVGVWIDVGSRFETEKNNGAGYFLEHLAFKGTKNRPGSALEKEVESMGAHLNAYSTREHTAYYIKALSKDLPKAVELLGDIVQNCSLEDSQIEKERDVILREMQENDASMRDVVFNYLHATAFQGTPLAQAVEGPSENVRKLSRADLTEYLSTHYKAPRMVLAAAGGVEHQQLLDLAQKHLGGIPWTYAEDAVPTLTPCRFTGSEIRHRDDALPFAHVAIAVEGPGWASPDNVALQVANAIIGHYDCTYGGGVHLSSPLASGAVANKLCQSFQTFSICYAETGLLGAHFVCDRMKIDDMMFVLQGQWMRLCTSATESEVARGKNILRNALVSHLDGTTPVCEDIGRSLLTYGRRIPLAEWESRIAEVDASVVREICSKYIYDQCPAVAGYGPIEQLPDYNRIRSGMFWLRF

SEQ ID NO: 41542 - protein, 523 aa, Homo sapiens
MPSVMEKPSAGSGILSRSRAKTVPNGGQPHSEDDSSEEEHSHDSMIRVGTNYQAVIPECKPESPARYSNKELKGMLVWSPNHCVSDAKLDKYIAMAKEKHGYNIEQALGMLLWHKHDVEKSLADLANFTPFPDEWTVEDKVLFEQAFGFHGKCFQRIQQMLPDKLIPSLVKYYYSWKKTRSRTSVMDRQARRLGGRKDKEDSDELEEGRGGVSEGEPDPADPKREPLPSRPLNARPGPGKKEVQVSQYRHHPLRTRRRPPKGMYLSPEGLTAVSGSPDLANLTLRGLDSQLISLKRQVQSMKQTNSSLRQALEGGIDPLRPPEANTKFNSRWTTDEQLLAVQAIRRYGKDFGAIAEVIGNKTLTQVKTFFVSYRRRFNLEEVLQEWEAEQDGAPGAPVPMEEARRGAPLPAPALEEDDEVQITSVSTSVPRSVPPAPPPPPPPTSLSQPPPLLRPPLPTAPTLLRQPPPLQQGRFLQPRLAPNQPPPPLIRPALAAPRHSARPGPQPPPTLIGTPLEPPAPSL

SEQ ID NO: 41543 - protein, 123 aa, Homo sapiens [sequence omitted]

SEQ ID NO: 41544 - protein, 446 aa, Homo sapiens
MEMEQEKMTMNKELSPDAAAYCCSACHGDETWSYNHPIRGRAKSRSLSASPALGSTKEFRRTRSLHGPCPVTTFGPKACVLQNPQTIMHIQDPASQRLTWNKSPKSVLVIKKMRDASLLQPFKELCTHLMEENMIVYVEKKVLEDPAIASDESFGAVKKKFCTFREDYDDISNQIDFIICLGGDGTLLYASSLFQGSVPPVMAFHLGSLGFLTPFSFENFQSQVTQVIEGNAAVVLRSRLKVRVVKELRGKKTAVHNGLGENGSQAAGLDMDVGKQAMQYQVLNEVVIDRGPSSYLSNVDVYLDGHLITTVQGDGVIVSTPTGSTAYAAAAGASMIHPNVPAIMITPICPHSLSFRPIVVPAGVELKIMLSPEARNTAWVSFDGRKRQEIRHGDSISITTSCYPLPSICVRDPVSDWFESLAQCLHWNVRKKQAHFEEEEEEEEEG

SEQ ID NO: 41545 - protein, 591 aa, Homo sapiens
MEMEQEKMTMNKELSPDAAAYCCSACHGDETWSYNHPIRGRAKSRSLSASPALGSTKEFRRTRSLHGPCPVTTFGPKACVLQNPQTIIATPLSLASQLLPSPAVSHSGQGGVTGQVHVLPQPSDQGVLSGPRAARGQTAPQEEAVTQEEVEALVCGHTQRWVPGPVYDAAAGGSGWAQLSLRAGMGVGQATGHIQDPASQRLTWNKSPKSVLVIKKMRDASLLQPFKELCTHLMEARGAGGKGAWGAHGVGGASIHITAPRVGSAGGMSRLALCFQENMIVYVEKKVLEDPAIASDESFGAVKKKFCTFREDYDDISNQIDFIICLGGDGTLLYASSLFQGSVPPVMAFHLGSLGFLTPFSFENFQSQVTQVIEGNAAVVLRSRLKVRVVKELRGKKTAVHNGLGENGSQAAGLDMDVGKQAMQYQVLNEVVIDRGPSSYLSNVDVYLDGHLITTVQGDGVIVSTPTGSTAYAAAAGASMIHPNVPAIMITPICPHSLSFRPIVVPAGVELKIMLSPEARNTAWVSFDGRKRQEIRHGDSISITTSCYPLPSICVRDPVSDWFESLAQCLHWNVRKKQAHFEEEEEEEEEG

SEQ ID NO: 41546 - protein, 423 aa, Homo sapiens
MEMEQEKMTMGRPRVRQAWPGCCGHTGRLPAGRGYLASHMCDPAGAELIGDGMSDPTPPSNACTMHIQDPASQRLTWNKSPKSVLVIKKMRDASLLQPFKELCTHLMEENMIVYVEKKVLEDPAIASDESFGAVKKKFCTFREDYDDISNQIDFIICLGGDGTLLYASSLFQGSVPPVMAFHLGSLGFLTPFSFENFQSQVTQVIEGNAAVVLRSRLKVRVVKELRGKKTAVHNGLGENGSQAAGLDMDVGKQAMQYQVLNEVVIDRGPSSYLSNVDVYLDGHLITTVQGDGVIVSTPTGSTAYAAAAGASMIHPNVPAIMITPICPHSLSFRPIVVPAGVELKIMLSPEARNTAWVSFDGRKRQEIRHGDSISITTSCYPLPSICVRDPVSDWFESLAQCLHWNVRKKQAHFEEEEEEEEEG

SEQ ID NO: 41547 - protein, 2488 aa, Homo sapiens
MPAILVASKMKSGLPKPVHSAAPILHVPPARAGPQPCYLKLGSKVEVSKTTYPSQIPLKSQVLQGLQEPAGEGLPLRKSGSVENGFDTQIYTDWANHYLAKSGHKRLIRDLQQDVTDGVLLAQIIQVVANEKIEDINGCPKNRSQMIENIDACLNFLAAKGINIQGLSAEEIRNGNLKAILGLFFSLSRYKQQQQQPQKQHLSSPLPPAVSQVAGAPSQCQAGTPQQQVPVTPQAPCQPHQPAPHQQSKAQAEMQSSASSKDSSQSKIIRFTLGQKKISRLPGPTARVSAAGSEAKTRGGSTTANNRRSQSFNNYDKSKPVTSPPPPPSSHEKEPLASSASSHPGMSDNAPASLESGSSSTPTNCSTSSAIPQPGAATKPWRSKSLSVKHSATVSMLSVKPPGPEAPRPTPEAMKPAPNNQKSMLEKLKLFNSKGGSKAGEGPGSRDTSCERLETLPSFEESEELEAASRMLTTVGPASSSPKIALKGIAQRTFSRALTNKKSSLKGNEKEKEKQQREKDKEKSKDLAKRASVTERLDLKEEPKEDPSGAAVPEMPKKSSKIASFIPKGGKLNSAKKEPMAPSHSGIPKPGMKSMPGKSPSAPAPSKEGERSRSGKLSSGLPQQKPQLDGRHSSSSSSLASSEGKGPGGTTLNHSISSQTVSGSVGTTQTTGSNTVSVQLPQPQQQYNHPNTATVAPFLYRSQTDTEGNVTAESSSTGVSVEPSHFTKTGQPALEELTGEDPEARRLRTVKNIADLRQNLEETMSSLRGTQVTHSTLETTFDTNVTTEMSGRSILSLTGRPTPLSWRLGQSSPRLQAGDAPSMGNGYPPRANASRFINTESGRYVYSAPLRRQLASRGSSVCHVDVSDKAGDEMDLEGISMDAPGYMSDGDVLSKNIRTDDITSGYMTDGGLGLYTRRLNRLPDGMAVVRETLQRNTSLGLGDADSWDDSSSVSSGISDTIDNLSTDDINTSSSISSYANTPASSRKNLDVQTDAEKHSQVERNSLWSGDDVKKSDGGSDSGIKMEPGSKWRRNPSDVSDESDKSTSGKKNPVISQTGSWRRGMTAQVGITMPRTKPSAPAGALKTPGTGKTDDAKVSEKGRLSPKASQVKRSPSDAGRSSGDESKKPLPSSSRTPTANANSFGFKKQSGSAAGLAMITASGVTVTSRSATLGKIPKSSALVSRSAGRKSSMDGAQNQDDGYLALSSRTNLQYRSLPRPSKSNSRNGAGNRSSTSSIDSNISSKSAGLPVPKLREPSKTALGSSLPGLVNQTDKEKGISSDNESVASCNSVKVNPAAQPVSSPAQTSLQPGAKYPDVASPTLRRLFGGKPTKQVPIATAENMKNSVVISNPHATMTQQGNLDSPSGSGVLSSGSSSPLYSKNVDLNQSPLASSPSSAHSAPSNSLTWGTNASSSSAVSKDGLGFQSVSSLHTSCESIDISLSSGGVPSHNSSTGLIASSKDDSLTPFVRTNSVKTTLSESPLSSPAASPKFCRSTLPRKQDSDPHLDRNTLPKKGLRYTPTSQLRTQEDAKEWLRSHSAGGLQDTAANSPFSSGSSVTSPSGTRFNFSQLASPTTVTQMSLSNPTMLRTHSLSNADGQYDPYTDSRFRNSSMSLDEKSRTMSRSGSFRDGFEEESWEKSSVDNFVSRLHSSLHFSLPLFHHARYELVHGSSLSLVSSTSSVYSTPEEKCQSEIRKLRRELDASQEKVSALTTQLTANAHLVAAFEQSLGNMTIRLQSLTMTAEQKDSELNELRKTIELLKKQNAAAQAAINGVINTPELNCKGNGTAQSADLRIRRQHSSDSVSSINSATSHSSVGSNIESDSKKKKRKNWVNELRSSFKQAFGKKKSPKSASSHSDIEEMTDSSLPSSPKLPHNGSTGSTPLLRNSHSNSLISECMDSEAETVMQLRNELRDKEMKLTDIRLEALSSAHQLDQLREAMNRMQSEIEKLKAENDRLKSESQGSGCSRAPSQVSISASPRQSMGLSQHSLNLTESTSLDMLLDDTGECSARKEGGRHVKIVVSFQEEMKWKEDSRPHLFLIGCIGVSGKTKWDVLDGVVRRLFKEYIIHVDPVSQLGLNSDSVLGYSIGEIKRSNTSETPELLPCGYLVGENTTISVTVKGLAENSLDSLVFESLIPKPILQRYVSLLIEHRRIILSGPSGTGKTYLANRLSEYIVLREGRELTDGVIATFNVDHKSSKELRQYLSNLADQCNSENNAVDMPLVIILDNLHHVSSLGEIFNGLLNCKYHKCPYIIGTMNQATSSTPNLQLHHNFRWVLCANHTEPVKGFLGRFLRRKLMETEISGRVRNMELVKIIDWIPKVWHHLNRFLEAHSSSDVTIGPRLFLSCPIDVDGSRVWFTDLWNYSIIPYLLEAVREGLQLYGRRAPWEDPAKWVMDTYPWAASPQQHEWPPLLQLRPEDVGFDGYSMPREGSTSKQMPPSDAEGDPLMNMLMRLQEAANYSSPQSYDSDSNSNSHHDDILDSSLESTL

SEQ ID NO: 41548 - protein, 2432 aa, Homo sapiens
MPAILVASKMKSGLPKPVHSAAPILHVPPARAGPQPCYLKLGSKVEVSKTTYPSQIPLKSQVLQGLQEPAGEGLPLRKSGSVENGFDTQIYTDWANHYLAKSGHKRLIRDLQQDVTDGVLLAQIIQVVANEKIEDINGCPKNRSQMIENIDACLNFLAAKGINIQGLSAEEIRNGNLKAILGLFFSLSRYKQQQQQPQKQHLSSPLPPAVSQVAGAPSQCQAGTPQQQVPVTPQAPCQPHQPAPHQQSKAQAEMQSRLPGPTARVSAAGSEAKTRGGSTTANNRRSQSFNNYDKSKPVTSPPPPPSSHEKEPLASSASSHPGMSDNAPASLESGSSSTPTNCSTSSAIPQPGAATKPWRSKSLSVKHSATVSMLSVKPPGPEAPRPTPEAMKPAPNNQKSMLEKLKLFNSKGGSKAGEGPGSRDTSCERLETLPSFEESEELEAASRMLTTVGPASSSPKIALKGIAQRTFSRALTNKKSSLKGNEKEKEKQQREKDKEKSKDLAKRASVTERLDLKEEPKEDPSGAAVPEMPKKSSKIASFIPKGGKLNSAKKEPMAPSHSGIPKPGMKSMPGKSPSAPAPSKEGERSRSGKLSSGLPQQKPQLDGRHSSSSSSLASSEGKGPGGTTLNHSISSQTVSGSVGTTQTTGSNTVSVQLPQPQQQYNHPNTATVAPFLYRSQTDTEGNVTAESSSTGVSVEPSHFTKTGQPALEELTGEDPEARRLRTVKNIADLRQNLEETMSSLRGTQVTHSTLETTFDTNVTTEMSGRSILSLTGRPTPLSWRLGQSSPRLQAGDAPSMGNGYPPRANASRFINTESGRYVYSAPLRRQLASRGSSVCHVDVSDKAGDEMDLEGISMDAPGYMSDGDVLSKNIRTDDITSGYMTDGGLGLYTRRLNRLPDGMAVVRETLQRNTSLGLGDADSWDDSSSVSSGISDTIDNLSTDDINTSSSISSYANTPASSRKNLDVQTDAEKHSQVERNSLWSGDDVKKSDGGSDSGIKMEPGSKWRRNPSDVSDESDKSTSGKKNPVISQTGSWRRGMTAQVGITMPRTKPSAPAGALKTPGTGKTDDAKVSEKGRLSPKASQVKRSPSDAGRSSGDESKKPLPSSSRTPTANANSFGFKKQSGSAAGLAMITASGVTVTSRSATLGKIPKSSALVSRSAGRKSSMDGAQNQDDGYLALSSRTNLQYRSLPRPSKSNSRNGAGNRSSTSSIDSNISSKSAGLPVPKLREPSKTALGSSLPGLVNQTDKEKGISSDNESVASCNSVKVNPAAQPVSSPAQTSLQPGAKYPDVASPTLRRLFGGKPTKQVPIATAENMKNSVVISNPHATMTQQGNLDSPSGSGVLSSGSSSPLYSKNVDLNQSPLASSPSSAHSAPSNSLTWGTNASSSSAVSKDGLGFQSVSSLHTSCESIDISLSSGGVPSHNSSTGLIASSKDDSLTPFVRTNSVKTTLSESPLSSPAASPKFCRSTLPRKQDSDPHLDRNTLPKKGLRYTPTSQLRTQEDAKEWLRSHSAGGLQDTAANSPFSSGSSVTSPSGTRFNFSQLASPTTVTQMSLSNPTMLRTHSLSNADGQYDPYTDSRFRNSSMSLDEKSRTMSRSGSFRDGFEEVHGSSLSLVSSTSSVYSTPEEKCQSEIRKLRRELDASQEKVSALTTQLTANAHLVAAFEQSLGNMTIRLQSLTMTAEQKDSELNELRKTIELLKKQNAAAQAAINGVINTPELNCKGNGTAQSADLRIRRQHSSDSVSSINSATSHSSVGSNIESDSKKKKRKNWVNELRSSFKQAFGKKKSPKSASSHSDIEEMTDSSLPSSPKLPHNGSTGSTPLLRNSHSNSLISECMDSEAETVMQLRNELRDKEMKLTDIRLEALSSAHQLDQLREAMNRMQSEIEKLKAENDRLKSESQGSGCSRAPSQVSISASPRQSMGLSQHSLNLTESTSLDMLLDDTGECSARKEGGRHVKIVVSFQEEMKWKEDSRPHLFLIGCIGVSGKTKWDVLDGVVRRLFKEYIIHVDPVSQLGLNSDSVLGYSIGEIKRSNTSETPELLPCGYLVGENTTISVTVKGLAENSLDSLVFESLIPKPILQRYVSLLIEHRRIILSGPSGTGKTYLANRLSEYIVLREGRELTDGVIATFNVDHKSSKELRQYLSNLADQCNSENNAVDMPLVIILDNLHHVSSLGEIFNGLLNCKYHKCPYIIGTMNQATSSTPNLQLHHNFRWVLCANHTEPVKGFLGRFLRRKLMETEISGRVRNMELVKIIDWIPKVWHHLNRFLEAHSSSDVTIGPRLFLSCPIDVDGSRVWFTDLWNYSIIPYLLEAVREGLQLYGRRAPWEDPAKWVMDTYPWAASPQQHEWPPLLQLRPEDVGFDGYSMPREGSTSKQMPPSDAEGDPLMNMLMRLQEAANYSSPQSYDSDSNSNSHHDDILDSSLESTL

SEQ ID NO: 41549 - protein, 2429 aa, Homo sapiens
MPAILVASKMKSGLPKPVHSAAPILHVPPARAGPQPCYLKLGSKVEVSKTTYPSQIPLKSQVLQGLQEPAGEGLPLRKSGSVENGFDTQIYTDWANHYLAKSGHKRLIRDLQQDVTDGVLLAQIIQVVANEKIEDINGCPKNRSQMIENIDACLNFLAAKGINIQGLSAEEIRNGNLKAILGLFFSLSRYKQQQQQPQKQHLSSPLPPAVSQVAGAPSQCQAGTPQQQVPVTPQAPCQPHQPAPHQQSKAQAEMQSRLPGPTARVSAAGSEAKTRGGSTTANNRRSQSFNNYDKSKPVTSPPPPPSSHEKEPLASSASSHPGMSDNAPASLESGSSSTPTNCSTSSAIPQPGAATKPWRSKSLSVKHSATVSMLSVKPPGPEAPRPTPEAMKPAPNNQKSMLEKLKLFNSKGGSKAGEGPGSRDTSCERLETLPSFEESEELEAASRMLTTVGPASSSPKIALKGIAQRTFSRALTNKKSSLKGNEKEKEKQQREKDKEKSKDLAKRASVTERLDLKEEPKEDPSGAAVPEMPKKSSKIASFIPKGGKLNSAKKEPMAPSHSGIPKPGMKSMPGKSPSAPAPSKEGERSRSGKLSSGLPQQKPQLDGRHSSSSSSLASSEGKGPGGTTLNHSISSQTVSGSVGTTQTTGSNTVSVQLPQPQQQYNHPNTATVAPFLYRSQTDTEGNVTAESSSTGVSVEPSHFTKTGQPALEELTGEDPEARRLRTVKNIADLRQNLEETMSSLRGTQVTHSTLETTFDTNVTTEMSGRSILSLTGRPTPLSWRLGQSSPRLQAGDAPSMGNGYPPRANASRFINTESGRYVYSAPLRRQLASRGSSVCHVDVSDKAGDEMDLEGISMDAPGYMSDGDVLSKNIRTDDITSGYMTDGGLGLYTRRLNRLPDGMAVVRETLQRNTSLGLGDADSWDDSSSVSSGISDTIDNLSTDDINTSSSISSYANTPASSRKNLDVQTDAEKHSQVERNSLWSGDDVKKSDGGSDSGIKMEPGSKWRRNPSDVSDESDKSTSGKKNPVISQTGSWRRGMTAQVGITMPRTKPSAPAGALKTPGTGKTDDAKVSEKGRLSPKASQVKRSPSDAGRSSGDESKKPLPSSSRTPTANANSFGFKKQSGSAAGLAMITASGVTVTSRSATLGKIPKSSALVSRSAGRKSSMDGAQNQDDGYLALSSRTNLQYRSLPRPSKSNSRNGAGNRSSTSSIDSNISSKSAGLPVPKLREPSKTALGSSLPGLVNQTDKEKGISSDNESVASCNSVKVNPAAQPVSSPAQTSLQPGAKYPDVASPTLRRLFGGKPTKQVPIATAENMKNSVVISNPHATMTQQGNLDSPSGSGVLSSGSSSPLYSKNVDLNQSPLASSPSSAHSAPSNSLTWGTNASSSSAVSKDGLGFQSVSSLHTSCESIDISLSSGGVPSHNSSTGLIASSKDDSLTPFVRTNSVKTTLSESPLSSPAASPKFCRSTLPRKQDSDPHLDRNTLPKKGLRYTPTSQLRTQEDAKEWLRSHSAGGLQDTAANSPFSSGSSVTSPSGTRFNFSQLASPTTVTQMSLSNPTMLRTHSLSNADGQYDPYTDSRFRNSSMSLDEKSRTMSRSGSFRDGFEEVHGSSLSLVSSTSSVYSTPEEKCQSEIRKLRRELDASQEKVSALTTQLTANAHLVAAFEQSLGNMTIRLQSLTMTAEQKDSELNELRKTIELLKKQNAAAQAAINGVINTPELNCKGNGTAQSADLRIRRQHSSDSVSSINSATSHSSVGSNIESDSKKKKRKNWLRSSFKQAFGKKKSPKSASSHSDIEEMTDSSLPSSPKLPHNGSTGSTPLLRNSHSNSLISECMDSEAETVMQLRNELRDKEMKLTDIRLEALSSAHQLDQLREAMNRMQSEIEKLKAENDRLKSESQGSGCSRAPSQVSISASPRQSMGLSQHSLNLTESTSLDMLLDDTGECSARKEGGRHVKIVVSFQEEMKWKEDSRPHLFLIGCIGVSGKTKWDVLDGVVRRLFKEYIIHVDPVSQLGLNSDSVLGYSIGEIKRSNTSETPELLPCGYLVGENTTISVTVKGLAENSLDSLVFESLIPKPILQRYVSLLIEHRRIILSGPSGTGKTYLANRLSEYIVLREGRELTDGVIATFNVDHKSSKELRQYLSNLADQCNSENNAVDMPLVIILDNLHHVSSLGEIFNGLLNCKYHKCPYIIGTMNQATSSTPNLQLHHNFRWVLCANHTEPVKGFLGRFLRRKLMETEISGRVRNMELVKIIDWIPKVWHHLNRFLEAHSSSDVTIGPRLFLSCPIDVDGSRVWFTDLWNYSIIPYLLEAVREGLQLYGRRAPWEDPAKWVMDTYPWAASPQQHEWPPLLQLRPEDVGFDGYSMPREGSTSKQMPPSDAEGDPLMNMLMRLQEAANYSSPQSYDSDSNSNSHHDDILDSSLESTL

SEQ ID NO: 41550 - protein, 2365 aa, Homo sapiens
MESVSESSQQQKRKPVIHGLEDQKRIYTDWANHYLAKSGHKRLIRDLQQDVTDGVLLAQIIQVVANEKIEDINGCPKNRSQMIENIDACLNFLAAKGINIQGLSAEEIRNGNLKAILGLFFSLSRYKQQQQQPQKQHLSSPLPPAVSQVAGAPSQCQAGTPQQQVPVTPQAPCQPHQPAPHQQSKAQAEMQSRLPGPTARVSAAGSEAKTRGGSTTANNRRSQSFNNYDKSKPVTSPPPPPSSHEKEPLASSASSHPGMSDNAPASLESGSSSTPTNCSTSSAIPQPGAATKPWRSKSLSVKHSATVSMLSVKPPGPEAPRPTPEAMKPAPNNQKSMLEKLKLFNSKGGSKAGEGPGSRDTSCERLETLPSFEESEELEAASRMLTTVGPASSSPKIALKGIAQRTFSRALTNKKSSLKGNEKEKEKQQREKDKEKSKDLAKRASVTERLDLKEEPKEDPSGAAVPEMPKKSSKIASFIPKGGKLNSAKKEPMAPSHSGIPKPGMKSMPGKSPSAPAPSKEGERSRSGKLSSGLPQQKPQLDGRHSSSSSSLASSEGKGPGGTTLNHSISSQTVSGSVGTTQTTGSNTVSVQLPQPQQQYNHPNTATVAPFLYRSQTDTEGNVTAESSSTGVSVEPSHFTKTGQPALEELTGEDPEARRLRTVKNIADLRQNLEETMSSLRGTQVTHSTLETTFDTNVTTEMSGRSILSLTGRPTPLSWRLGQSSPRLQAGDAPSMGNGYPPRANASRFINTESGRYVYSAPLRRQLASRGSSVCHVDVSDKAGDEMDLEGISMDAPGYMSDGDVLSKNIRTDDITSGYMTDGGLGLYTRRLNRLPDGMAVVRETLQRNTSLGLGDADSWDDSSSVSSGISDTIDNLSTDDINTSSSISSYANTPASSRKNLDVQTDAEKHSQVERNSLWSGDDVKKSDGGSDSGIKMEPGSKWRRNPSDVSDESDKSTSGKKNPVISQTGSWRRGMTAQVGITMPRTKPSAPAGALKTPGTGKTDDAKVSEKGRLSPKASQVKRSPSDAGRSSGDESKKPLPSSSRTPTANANSFGFKKQSGSAAGLAMITASGVTVTSRSATLGKIPKSSALVSRSAGRKSSMDGAQNQDDGYLALSSRTNLQYRSLPRPSKSNSRNGAGNRSSTSSIDSNISSKSAGLPVPKLREPSKTALGSSLPGLVNQTDKEKGISSDNESVASCNSVKVNPAAQPVSSPAQTSLQPGAKYPDVASPTLRRLFGGKPTKQVPIATAENMKNSVVISNPHATMTQQGNLDSPSGSGVLSSGSSSPLYSKNVDLNQSPLASSPSSAHSAPSNSLTWGTNASSSSAVSKDGLGFQSVSSLHTSCESIDISLSSGGVPSHNSSTGLIASSKDDSLTPFVRTNSVKTTLSESPLSSPAASPKFCRSTLPRKQDSDPHLDRNTLPKKGLRYTPTSQLRTQEDAKEWLRSHSAGGLQDTAANSPFSSGSSVTSPSGTRFNFSQLASPTTVTQMSLSNPTMLRTHSLSNADGQYDPYTDSRFRNSSMSLDEKSRTMSRSGSFRDGFEEVHGSSLSLVSSTSSVYSTPEEKCQSEIRKLRRELDASQEKVSALTTQLTANAHLVAAFEQSLGNMTIRLQSLTMTAEQKDSELNELRKTIELLKKQNAAAQAAINGVINTPELNCKGNGTAQSADLRIRRQHSSDSVSSINSATSHSSVGSNIESDSKKKKRKNWLRSSFKQAFGKKKSPKSASSHSDIEEMTDSSLPSSPKLPHNGSTGSTPLLRNSHSNSLISECMDSEAETVMQLRNELRDKEMKLTDIRLEALSSAHQLDQLREAMNRMQSEIEKLKAENDRLKSESQGSGCSRAPSQVSISASPRQSMGLSQHSLNLTESTSLDMLLDDTGECSARKEGGRHVKIVVSFQEEMKWKEDSRPHLFLIGCIGVSGKTKWDVLDGVVRRLFKEYIIHVDPVSQLGLNSDSVLGYSIGEIKRSNTSETPELLPCGYLVGENTTISVTVKGLAENSLDSLVFESLIPKPILQRYVSLLIEHRRIILSGPSGTGKTYLANRLSEYIVLREGRELTDGVIATFNVDHKSSKELRQYLSNLADQCNSENNAVDMPLVIILDNLHHVSSLGEIFNGLLNCKYHKCPYIIGTMNQATSSTPNLQLHHNFRWVLCANHTEPVKGFLGRFLRRKLMETEISGRVRNMELVKIIDWIPKVWHHLNRFLEAHSSSDVTIGPRLFLSCPIDVDGSRVWFTDLWNYSIIPYLLEAVREGLQLYGRRAPWEDPAKWVMDTYPWAASPQQHEWPPLLQLRPEDVGFDGYSMPREGSTSKQMPPSDAEGDPLMNMLMRLQEAANYSSPQSYDSDSNSNSHHDDILDSSLESTL

SEQ ID NO: 41551 - protein, 1493 aa, Homo sapiens
MLWPRNLTSWDDSSSVSSGISDTIDNLSTDDINTSSSISSYANTPASSRKNLDVQTDAEKHSQVERNSLWSGDDVKKSDGGSDSGIKMEPGSKWRRNPSDVSDESDKSTSGKKNPVISQTGSWRRGMTAQVGITMPRTKPSAPAGALKTPGTGKTDDAKVSEKGRLSPKASQVKRSPSDAGRSSGDESKKPLPSSSRTPTANANSFGFKKQSGSAAGLAMITASGVTVTSRSATLGKIPKSSALVSRSAGRKSSMDGAQNQDDGYLALSSRTNLQYRSLPRPSKSNSRNGAGNRSSTSSIDSNISSKSAGLPVPKLREPSKTALGSSLPGLVNQTDKEKGISSDNESVASCNSVKVNPAAQPVSSPAQTSLQPGAKYPDVASPTLRRLFGGKPTKQVPIATAENMKNSVVISNPHATMTQQGNLDSPSGSGVLSSGSSSPLYSKNVDLNQSPLASSPSSAHSAPSNSLTWGTNASSSSAVSKDGLGFQSVSSLHTSCESIDISLSSGGVPSHNSSTGLIASSKDDSLTPFVRTNSVKTTLSESDPHLDRNTLPKKGLRYTPTSQLRTQEDAKEWLRSHSAGGLQDTAANSPFSSGSSVTSPSGTRFNFSQLASPTTVTQMSLSNPTMLRTHSLSNADGQYDPYTDSRFRNSSMSLDEKSRTMSRSGSFRDGFEEVHGSSLSLVSSTSSVYSTPEEKCQSEIRKLRRELDASQEKVSALTTQLTANAHLVAAFEQSLGNMTIRLQSLTMTAEQKDSELNELRKTIELLKKQNAAAQAAINGVINTPELNCKGNGTAQSADLRIRRQHSSDSVSSINSATSHSSVGSNIESDSKKKKRKNWLRSSFKQAFGKKKSPKSASSHSDIEEMTDSSLPSSPKLPHNGSTGSTPLLRNSHSNSLISECMDSEAETVMQLRNELRDKEMKLTDIRLEALSSAHQLDQLREAMNRMQSEIEKLKAENDRLKSESQGSGCSRAPSQVSISASPRQSMGLSQHSLNLTESTSLDMLLDDTGECSARKEGGRHVKIVVSFQEEMKWKEDSRPHLFLIGCIGVSGKTKWDVLDGVVRRLFKEYIIHVDPVSQLGLNSDSVLGYSIGEIKRSNTSETPELLPCGYLVGENTTISVTVKGLAENSLDSLVFESLIPKPILQRYVSLLIEHRRIILSGPSGTGKTYLANRLSEYIVLREGRELTDGVIATFNVDHKSSKELRQYLSNLADQCNSENNAVDMPLVIILDNLHHVSSLGEIFNGLLNCKYHKCPYIIGTMNQATSSTPNLQLHHNFRWVLCANHTEPVKGFLGRFLRRKLMETEISGRVRNMELVKIIDWIPKVWHHLNRFLEAHSSSDVTIGPRLFLSCPIDVDGSRVWFTDLWNYSIIPYLLEAVREGLQLYGRRAPWEDPAKWVMDTYPWAASPQQHEWPPLLQLRPEDVGFDGYSMPREGSTSKQMPPSDAEGDPLMNMLMRLQEAANYSSPQSYDSDSNSNSHHDDILDSSLESTL

SEQ ID NO: 41552 - protein, 874 aa, Homo sapiens
MSLSNPTMLRTHSLSNADGQYDPYTDSRFRNSSMSLDEKSRTMSRSGSFRDGFEEVHGSSLSLVSSTSSVYSTPEEKCQSEIRKLRRELDASQEKVSALTTQLTANAHLVAAFEQSLGNMTIRLQSLTMTAEQKDSELNELRKTIELLKKQNAAAQAAINGVINTPELNCKGNGTAQSADLRIRRQHSSDSVSSINSATSHSSVGSNIESDSKKKKRKNWLRSSFKQAFGKKKSPKSASSHSDIEEMTDSSLPSSPKLPHNGSTGSTPLLRNSHSNSLISECMDSEAETVMQLRNELRDKEMKLTDIRLEALSSAHQLDQLREAMNRMQSEIEKLKAENDRLKSESQGSGCSRAPSQVSISASPRQSMGLSQHSLNLTESTSLDMLLDDTGECSARKEGGRHVKIVVSFQEEMKWKEDSRPHLFLIGCIGVSGKTKWDVLDGVVRRLFKEYIIHVDPVSQLGLNSDSVLGYSIGEIKRSNTSETPELLPCGYLVGENTTISVTVKGLAENSLDSLVFESLIPKPILQRYVSLLIEHRRIILSGPSGTGKTYLANRLSEYIVLREGRELTDGVIATFNVDHKSSKELRQYLSNLADQCNSENNAVDMPLVIILDNLHHVSSLGEIFNGLLNCKYHKCPYIIGTMNQATSSTPNLQLHHNFRWVLCANHTEPVKGFLGRFLRRKLMETEISGRVRNMELVKIIDWIPKVWHHLNRFLEAHSSSDVTIGPRLFLSCPIDVDGSRVWFTDLWNYSIIPYLLEAVREGLQLYGRRAPWEDPAKWVMDTYPWAASPQQHEWPPLLQLRPEDVGFDGYSMPREGSTSKQMPPSDAEGDPLMNMLMRLQEAANYSSPQSYDSDSNSNSHHDDILDSSLESTL

SEQ ID NO: 41553 - protein, 592 aa, Homo sapiens
MDSEAETVMQLRNELRDKEMKLTDIRLEALSSAHQLDQLREAMNRMQSEIEKLKAENDRLKSESQGSGCSRAPSQVSISASPRQSMGLSQHSLNLTESTSLDMLLDDTGECSARKEGGRHVKIVVSFQEEMKWKEDSRPHLFLIGCIGVSGKTKWDVLDGVVRRLFKEYIIHVDPVSQLGLNSDSVLGYSIGEIKRSNTSETPELLPCGYLVGENTTISVTVKGLAENSLDSLVFESLIPKPILQRYVSLLIEHRRIILSGPSGTGKTYLANRLSEYIVLREGRELTDGVIATFNVDHKSSKELRQYLSNLADQCNSENNAVDMPLVIILDNLHHVSSLGEIFNGLLNCKYHKCPYIIGTMNQATSSTPNLQLHHNFRWVLCANHTEPVKGFLGRFLRRKLMETEISGRVRNMELVKIIDWIPKVWHHLNRFLEAHSSSDVTIGPRLFLSCPIDVDGSRVWFTDLWNYSIIPYLLEAVREGLQLYGRRAPWEDPAKWVMDTYPWAASPQQHEWPPLLQLRPEDVGFDGYSMPREGSTSKQMPPSDAEGDPLMNMLMRLQEAANYSSPQSYDSDSNSNSHHDDILDSSLESTL

SEQ ID NO: 41554 - protein, 2408 aa, Homo sapiens
MLWPRNLTQIYTDWANHYLAKSGHKRLIRDLQQDVTDGVLLAQIIQVVANEKIEDINGCPKNRSQMIENIDACLNFLAAKGINIQGLSAEEIRNGNLKAILGLFFSLSRYKQQQQQPQKQHLSSPLPPAVSQVAGAPSQCQAGTPQQQVPVTPQAPCQPHQPAPHQQSKAQAEMQSSASSKDSSQSKIIRFTLGQKKISRLPGPTARVSAAGSEAKTRGGSTTANNRRSQSFNNYDKSKPVTSPPPPPSSHEKEPLASSASSHPGMSDNAPASLESGSSSTPTNCSTSSAIPQPGAATKPWRSKSLSVKHSATVSMLSVKPPGPEAPRPTPEAMKPAPNNQKSMLEKLKLFNSKGGSKAGEGPGSRDTSCERLETLPSFEESEELEAASRMLTTVGPASSSPKIALKGIAQRTFSRALTNKKSSLKGNEKEKEKQQREKDKEKSKDLAKRASVTERLDLKEEPKEDPSGAAVPEMPKKSSKIASFIPKGGKLNSAKKEPMAPSHSGIPKPGMKSMPGKSPSAPAPSKEGERSRSGKLSSGLPQQKPQLDGRHSSSSSSLASSEGKGPGGTTLNHSISSQTVSGSVGTTQTTGSNTVSVQLPQPQQQYNHPNTATVAPFLYRSQTDTEGNVTAESSSTGVSVEPSHFTKTGQPALEELTGEDPEARRLRTVKNIADLRQNLEETMSSLRGTQVTHSTLETTFDTNVTTEMSGRSILSLTGRPTPLSWRLGQSSPRLQAGDAPSMGNGYPPRANASRFINTESGRYVYSAPLRRQLASRGSSVCHVDVSDKAGDEMDLEGISMDAPGYMSDGDVLSKNIRTDDITSGYMTDGGLGLYTRRLNRLPDGMAVVRETLQRNTSLGLGDADSWDDSSSVSSGISDTIDNLSTDDINTSSSISSYANTPASSRKNLDVQTDAEKHSQVERNSLWSGDDVKKSDGGSDSGIKMEPGSKWRRNPSDVSDESDKSTSGKKNPVISQTGSWRRGMTAQVGITMPRTKPSAPAGALKTPGTGKTDDAKVSEKGRLSPKASQVKRSPSDAGRSSGDESKKPLPSSSRTPTANANSFGFKKQSGSAAGLAMITASGVTVTSRSATLGKIPKSSALVSRSAGRKSSMDGAQNQDDGYLALSSRTNLQYRSLPRPSKSNSRNGAGNRSSTSSIDSNISSKSAGLPVPKLREPSKTALGSSLPGLVNQTDKEKGISSDNESVASCNSVKVNPAAQPVSSPAQTSLQPGAKYPDVASPTLRRLFGGKPTKQVPIATAENMKNSVVISNPHATMTQQGNLDSPSGSGVLSSGSSSPLYSKNVDLNQSPLASSPSSAHSAPSNSLTWGTNASSSSAVSKDGLGFQSVSSLHTSCESIDISLSSGGVPSHNSSTGLIASSKDDSLTPFVRTNSVKTTLSESPLSSPAASPKFCRSTLPRKQDSDPHLDRNTLPKKGLRYTPTSQLRTQEDAKEWLRSHSAGGLQDTAANSPFSSGSSVTSPSGTRFNFSQLASPTTVTQMSLSNPTMLRTHSLSNADGQYDPYTDSRFRNSSMSLDEKSRTMSRSGSFRDGFEEESWEKSSVDNFVSRLHSSLHFSLPLFHHARYELVHGSSLSLVSSTSSVYSTPEEKCQSEIRKLRRELDASQEKVSALTTQLTANAHLVAAFEQSLGNMTIRLQSLTMTAEQKDSELNELRKTIELLKKQNAAAQAAINGVINTPELNCKGNGTAQSADLRIRRQHSSDSVSSINSATSHSSVGSNIESDSKKKKRKNWVNELRSSFKQAFGKKKSPKSASSHSDIEEMTDSSLPSSPKLPHNGSTGSTPLLRNSHSNSLISECMDSEAETVMQLRNELRDKEMKLTDIRLEALSSAHQLDQLREAMNRMQSEIEKLKAENDRLKSESQGSGCSRAPSQVSISASPRQSMGLSQHSLNLTESTSLDMLLDDTGECSARKEGGRHVKIVVSFQEEMKWKEDSRPHLFLIGCIGVSGKTKWDVLDGVVRRLFKEYIIHVDPVSQLGLNSDSVLGYSIGEIKRSNTSETPELLPCGYLVGENTTISVTVKGLAENSLDSLVFESLIPKPILQRYVSLLIEHRRIILSGPSGTGKTYLANRLSEYIVLREGRELTDGVIATFNVDHKSSKELRQYLSNLADQCNSENNAVDMPLVIILDNLHHVSSLGEIFNGLLNCKYHKCPYIIGTMNQATSSTPNLQLHHNFRWVLCANHTEPVKGFLGRFLRRKLMETEISGRVRNMELVKIIDWIPKVWHHLNRFLEAHSSSDVTIGPRLFLSCPIDVDGSRVWFTDLWNYSIIPYLLEAVREGLQLYGRRAPWEDPAKWVMDTYPWAASPQQHEWPPLLQLRPEDVGFDGYSMPREGSTSKQMPPSDAEGDPLMNMLMRLQEAANYSSPQSYDSDSNSNSHHDDILDSSLESTL

SEQ ID NO: 41555 - protein, 2414 aa, Homo sapiens
MAGTSAASSWGGGKQIYTDWANHYLAKSGHKRLIRDLQQDVTDGVLLAQIIQVVANEKIEDINGCPKNRSQMIENIDACLNFLAAKGINIQGLSAEEIRNGNLKAILGLFFSLSRYKQQQQQPQKQHLSSPLPPAVSQVAGAPSQCQAGTPQQQVPVTPQAPCQPHQPAPHQQSKAQAEMQSSASSKDSSQSKIIRFTLGQKKISRLPGPTARVSAAGSEAKTRGGSTTANNRRSQSFNNYDKSKPVTSPPPPPSSHEKEPLASSASSHPGMSDNAPASLESGSSSTPTNCSTSSAIPQPGAATKPWRSKSLSVKHSATVSMLSVKPPGPEAPRPTPEAMKPAPNNQKSMLEKLKLFNSKGGSKAGEGPGSRDTSCERLETLPSFEESEELEAASRMLTTVGPASSSPKIALKGIAQRTFSRALTNKKSSLKGNEKEKEKQQREKDKEKSKDLAKRASVTERLDLKEEPKEDPSGAAVPEMPKKSSKIASFIPKGGKLNSAKKEPMAPSHSGIPKPGMKSMPGKSPSAPAPSKEGERSRSGKLSSGLPQQKPQLDGRHSSSSSSLASSEGKGPGGTTLNHSISSQTVSGSVGTTQTTGSNTVSVQLPQPQQQYNHPNTATVAPFLYRSQTDTEGNVTAESSSTGVSVEPSHFTKTGQPALEELTGEDPEARRLRTVKNIADLRQNLEETMSSLRGTQVTHSTLETTFDTNVTTEMSGRSILSLTGRPTPLSWRLGQSSPRLQAGDAPSMGNGYPPRANASRFINTESGRYVYSAPLRRQLASRGSSVCHVDVSDKAGDEMDLEGISMDAPGYMSDGDVLSKNIRTDDITSGYMTDGGLGLYTRRLNRLPDGMAVVRETLQRNTSLGLGDADSWDDSSSVSSGISDTIDNLSTDDINTSSSISSYANTPASSRKNLDVQTDAEKHSQVERNSLWSGDDVKKSDGGSDSGIKMEPGSKWRRNPSDVSDESDKSTSGKKNPVISQTGSWRRGMTAQVGITMPRTKPSAPAGALKTPGTGKTDDAKVSEKGRLSPKASQVKRSPSDAGRSSGDESKKPLPSSSRTPTANANSFGFKKQSGSAAGLAMITASGVTVTSRSATLGKIPKSSALVSRSAGRKSSMDGAQNQDDGYLALSSRTNLQYRSLPRPSKSNSRNGAGNRSSTSSIDSNISSKSAGLPVPKLREPSKTALGSSLPGLVNQTDKEKGISSDNESVASCNSVKVNPAAQPVSSPAQTSLQPGAKYPDVASPTLRRLFGGKPTKQVPIATAENMKNSVVISNPHATMTQQGNLDSPSGSGVLSSGSSSPLYSKNVDLNQSPLASSPSSAHSAPSNSLTWGTNASSSSAVSKDGLGFQSVSSLHTSCESIDISLSSGGVPSHNSSTGLIASSKDDSLTPFVRTNSVKTTLSESPLSSPAASPKFCRSTLPRKQDSDPHLDRNTLPKKGLRYTPTSQLRTQEDAKEWLRSHSAGGLQDTAANSPFSSGSSVTSPSGTRFNFSQLASPTTVTQMSLSNPTMLRTHSLSNADGQYDPYTDSRFRNSSMSLDEKSRTMSRSGSFRDGFEEESWEKSSVDNFVSRLHSSLHFSLPLFHHARYELVHGSSLSLVSSTSSVYSTPEEKCQSEIRKLRRELDASQEKVSALTTQLTANAHLVAAFEQSLGNMTIRLQSLTMTAEQKDSELNELRKTIELLKKQNAAAQAAINGVINTPELNCKGNGTAQSADLRIRRQHSSDSVSSINSATSHSSVGSNIESDSKKKKRKNWVNELRSSFKQAFGKKKSPKSASSHSDIEEMTDSSLPSSPKLPHNGSTGSTPLLRNSHSNSLISECMDSEAETVMQLRNELRDKEMKLTDIRLEALSSAHQLDQLREAMNRMQSEIEKLKAENDRLKSESQGSGCSRAPSQVSISASPRQSMGLSQHSLNLTESTSLDMLLDDTGECSARKEGGRHVKIVVSFQEEMKWKEDSRPHLFLIGCIGVSGKTKWDVLDGVVRRLFKEYIIHVDPVSQLGLNSDSVLGYSIGEIKRSNTSETPELLPCGYLVGENTTISVTVKGLAENSLDSLVFESLIPKPILQRYVSLLIEHRRIILSGPSGTGKTYLANRLSEYIVLREGRELTDGVIATFNVDHKSSKELRQYLSNLADQCNSENNAVDMPLVIILDNLHHVSSLGEIFNGLLNCKYHKCPYIIGTMNQATSSTPNLQLHHNFRWVLCANHTEPVKGFLGRFLRRKLMETEISGRVRNMELVKIIDWIPKVWHHLNRFLEAHSSSDVTIGPRLFLSCPIDVDGSRVWFTDLWNYSIIPYLLEAVREGLQLYGRRAPWEDPAKWVMDTYPWAASPQQHEWPPLLQLRPEDVGFDGYSMPREGSTSKQMPPSDAEGDPLMNMLMRLQEAANYSSPQSYDSDSNSNSHHDDILDSSLESTL

SEQ ID NO: 41556 - protein, 2417 aa, Homo sapiens
MSVMLWRWEQNNTTMKLQIYTDWANHYLAKSGHKRLIRDLQQDVTDGVLLAQIIQVVANEKIEDINGCPKNRSQMIENIDACLNFLAAKGINIQGLSAEEIRNGNLKAILGLFFSLSRYKQQQQQPQKQHLSSPLPPAVSQVAGAPSQCQAGTPQQQVPVTPQAPCQPHQPAPHQQSKAQAEMQSSASSKDSSQSKIIRFTLGQKKISRLPGPTARVSAAGSEAKTRGGSTTANNRRSQSFNNYDKSKPVTSPPPPPSSHEKEPLASSASSHPGMSDNAPASLESGSSSTPTNCSTSSAIPQPGAATKPWRSKSLSVKHSATVSMLSVKPPGPEAPRPTPEAMKPAPNNQKSMLEKLKLFNSKGGSKAGEGPGSRDTSCERLETLPSFEESEELEAASRMLTTVGPASSSPKIALKGIAQRTFSRALTNKKSSLKGNEKEKEKQQREKDKEKSKDLAKRASVTERLDLKEEPKEDPSGAAVPEMPKKSSKIASFIPKGGKLNSAKKEPMAPSHSGIPKPGMKSMPGKSPSAPAPSKEGERSRSGKLSSGLPQQKPQLDGRHSSSSSSLASSEGKGPGGTTLNHSISSQTVSGSVGTTQTTGSNTVSVQLPQPQQQYNHPNTATVAPFLYRSQTDTEGNVTAESSSTGVSVEPSHFTKTGQPALEELTGEDPEARRLRTVKNIADLRQNLEETMSSLRGTQVTHSTLETTFDTNVTTEMSGRSILSLTGRPTPLSWRLGQSSPRLQAGDAPSMGNGYPPRANASRFINTESGRYVYSAPLRRQLASRGSSVCHVDVSDKAGDEMDLEGISMDAPGYMSDGDVLSKNIRTDDITSGYMTDGGLGLYTRRLNRLPDGMAVVRETLQRNTSLGLGDADSWDDSSSVSSGISDTIDNLSTDDINTSSSISSYANTPASSRKNLDVQTDAEKHSQVERNSLWSGDDVKKSDGGSDSGIKMEPGSKWRRNPSDVSDESDKSTSGKKNPVISQTGSWRRGMTAQVGITMPRTKPSAPAGALKTPGTGKTDDAKVSEKGRLSPKASQVKRSPSDAGRSSGDESKKPLPSSSRTPTANANSFGFKKQSGSAAGLAMITASGVTVTSRSATLGKIPKSSALVSRSAGRKSSMDGAQNQDDGYLALSSRTNLQYRSLPRPSKSNSRNGAGNRSSTSSIDSNISSKSAGLPVPKLREPSKTALGSSLPGLVNQTDKEKGISSDNESVASCNSVKVNPAAQPVSSPAQTSLQPGAKYPDVASPTLRRLFGGKPTKQVPIATAENMKNSVVISNPHATMTQQGNLDSPSGSGVLSSGSSSPLYSKNVDLNQSPLASSPSSAHSAPSNSLTWGTNASSSSAVSKDGLGFQSVSSLHTSCESIDISLSSGGVPSHNSSTGLIASSKDDSLTPFVRTNSVKTTLSESPLSSPAASPKFCRSTLPRKQDSDPHLDRNTLPKKGLRYTPTSQLRTQEDAKEWLRSHSAGGLQDTAANSPFSSGSSVTSPSGTRFNFSQLASPTTVTQMSLSNPTMLRTHSLSNADGQYDPYTDSRFRNSSMSLDEKSRTMSRSGSFRDGFEEESWEKSSVDNFVSRLHSSLHFSLPLFHHARYELVHGSSLSLVSSTSSVYSTPEEKCQSEIRKLRRELDASQEKVSALTTQLTANAHLVAAFEQSLGNMTIRLQSLTMTAEQKDSELNELRKTIELLKKQNAAAQAAINGVINTPELNCKGNGTAQSADLRIRRQHSSDSVSSINSATSHSSVGSNIESDSKKKKRKNWVNELRSSFKQAFGKKKSPKSASSHSDIEEMTDSSLPSSPKLPHNGSTGSTPLLRNSHSNSLISECMDSEAETVMQLRNELRDKEMKLTDIRLEALSSAHQLDQLREAMNRMQSEIEKLKAENDRLKSESQGSGCSRAPSQVSISASPRQSMGLSQHSLNLTESTSLDMLLDDTGECSARKEGGRHVKIVVSFQEEMKWKEDSRPHLFLIGCIGVSGKTKWDVLDGVVRRLFKEYIIHVDPVSQLGLNSDSVLGYSIGEIKRSNTSETPELLPCGYLVGENTTISVTVKGLAENSLDSLVFESLIPKPILQRYVSLLIEHRRIILSGPSGTGKTYLANRLSEYIVLREGRELTDGVIATFNVDHKSSKELRQYLSNLADQCNSENNAVDMPLVIILDNLHHVSSLGEIFNGLLNCKYHKCPYIIGTMNQATSSTPNLQLHHNFRWVLCANHTEPVKGFLGRFLRRKLMETEISGRVRNMELVKIIDWIPKVWHHLNRFLEAHSSSDVTIGPRLFLSCPIDVDGSRVWFTDLWNYSIIPYLLEAVREGLQLYGRRAPWEDPAKWVMDTYPWAASPQQHEWPPLLQLRPEDVGFDGYSMPREGSTSKQMPPSDAEGDPLMNMLMRLQEAANYSSPQSYDSDSNSNSHHDDILDSSLESTL

SEQ ID NO: 41557 - protein, 2425 aa, Homo sapiens
MESVSESSQQQKRKPVIHGLEDQKRQIYTDWANHYLAKSGHKRLIRDLQQDVTDGVLLAQIIQVVANEKIEDINGCPKNRSQMIENIDACLNFLAAKGINIQGLSAEEIRNGNLKAILGLFFSLSRYKQQQQQPQKQHLSSPLPPAVSQVAGAPSQCQAGTPQQQVPVTPQAPCQPHQPAPHQQSKAQAEMQSSASSKDSSQSKIIRFTLGQKKISRLPGPTARVSAAGSEAKTRGGSTTANNRRSQSFNNYDKSKPVTSPPPPPSSHEKEPLASSASSHPGMSDNAPASLESGSSSTPTNCSTSSAIPQPGAATKPWRSKSLSVKHSATVSMLSVKPPGPEAPRPTPEAMKPAPNNQKSMLEKLKLFNSKGGSKAGEGPGSRDTSCERLETLPSFEESEELEAASRMLTTVGPASSSPKIALKGIAQRTFSRALTNKKSSLKGNEKEKEKQQREKDKEKSKDLAKRASVTERLDLKEEPKEDPSGAAVPEMPKKSSKIASFIPKGGKLNSAKKEPMAPSHSGIPKPGMKSMPGKSPSAPAPSKEGERSRSGKLSSGLPQQKPQLDGRHSSSSSSLASSEGKGPGGTTLNHSISSQTVSGSVGTTQTTGSNTVSVQLPQPQQQYNHPNTATVAPFLYRSQTDTEGNVTAESSSTGVSVEPSHFTKTGQPALEELTGEDPEARRLRTVKNIADLRQNLEETMSSLRGTQVTHSTLETTFDTNVTTEMSGRSILSLTGRPTPLSWRLGQSSPRLQAGDAPSMGNGYPPRANASRFINTESGRYVYSAPLRRQLASRGSSVCHVDVSDKAGDEMDLEGISMDAPGYMSDGDVLSKNIRTDDITSGYMTDGGLGLYTRRLNRLPDGMAVVRETLQRNTSLGLGDADSWDDSSSVSSGISDTIDNLSTDDINTSSSISSYANTPASSRKNLDVQTDAEKHSQVERNSLWSGDDVKKSDGGSDSGIKMEPGSKWRRNPSDVSDESDKSTSGKKNPVISQTGSWRRGMTAQVGITMPRTKPSAPAGALKTPGTGKTDDAKVSEKGRLSPKASQVKRSPSDAGRSSGDESKKPLPSSSRTPTANANSFGFKKQSGSAAGLAMITASGVTVTSRSATLGKIPKSSALVSRSAGRKSSMDGAQNQDDGYLALSSRTNLQYRSLPRPSKSNSRNGAGNRSSTSSIDSNISSKSAGLPVPKLREPSKTALGSSLPGLVNQTDKEKGISSDNESVASCNSVKVNPAAQPVSSPAQTSLQPGAKYPDVASPTLRRLFGGKPTKQVPIATAENMKNSVVISNPHATMTQQGNLDSPSGSGVLSSGSSSPLYSKNVDLNQSPLASSPSSAHSAPSNSLTWGTNASSSSAVSKDGLGFQSVSSLHTSCESIDISLSSGGVPSHNSSTGLIASSKDDSLTPFVRTNSVKTTLSESPLSSPAASPKFCRSTLPRKQDSDPHLDRNTLPKKGLRYTPTSQLRTQEDAKEWLRSHSAGGLQDTAANSPFSSGSSVTSPSGTRFNFSQLASPTTVTQMSLSNPTMLRTHSLSNADGQYDPYTDSRFRNSSMSLDEKSRTMSRSGSFRDGFEEESWEKSSVDNFVSRLHSSLHFSLPLFHHARYELVHGSSLSLVSSTSSVYSTPEEKCQSEIRKLRRELDASQEKVSALTTQLTANAHLVAAFEQSLGNMTIRLQSLTMTAEQKDSELNELRKTIELLKKQNAAAQAAINGVINTPELNCKGNGTAQSADLRIRRQHSSDSVSSINSATSHSSVGSNIESDSKKKKRKNWVNELRSSFKQAFGKKKSPKSASSHSDIEEMTDSSLPSSPKLPHNGSTGSTPLLRNSHSNSLISECMDSEAETVMQLRNELRDKEMKLTDIRLEALSSAHQLDQLREAMNRMQSEIEKLKAENDRLKSESQGSGCSRAPSQVSISASPRQSMGLSQHSLNLTESTSLDMLLDDTGECSARKEGGRHVKIVVSFQEEMKWKEDSRPHLFLIGCIGVSGKTKWDVLDGVVRRLFKEYIIHVDPVSQLGLNSDSVLGYSIGEIKRSNTSETPELLPCGYLVGENTTISVTVKGLAENSLDSLVFESLIPKPILQRYVSLLIEHRRIILSGPSGTGKTYLANRLSEYIVLREGRELTDGVIATFNVDHKSSKELRQYLSNLADQCNSENNAVDMPLVIILDNLHHVSSLGEIFNGLLNCKYHKCPYIIGTMNQATSSTPNLQLHHNFRWVLCANHTEPVKGFLGRFLRRKLMETEISGRVRNMELVKIIDWIPKVWHHLNRFLEAHSSSDVTIGPRLFLSCPIDVDGSRVWFTDLWNYSIIPYLLEAVREGLQLYGRRAPWEDPAKWVMDTYPWAASPQQHEWPPLLQLRPEDVGFDGYSMPREGSTSKQMPPSDAEGDPLMNMLMRLQEAANYSSPQSYDSDSNSNSHHDDILDSSLESTL

SEQ ID NO: 41558 - protein, 2424 aa, Homo sapiens
MQECDSKFFLPSGSNSGFTLLSNQQIYTDWANHYLAKSGHKRLIRDLQQDVTDGVLLAQIIQVVANEKIEDINGCPKNRSQMIENIDACLNFLAAKGINIQGLSAEEIRNGNLKAILGLFFSLSRYKQQQQQPQKQHLSSPLPPAVSQVAGAPSQCQAGTPQQQVPVTPQAPCQPHQPAPHQQSKAQAEMQSSASSKDSSQSKIIRFTLGQKKISRLPGPTARVSAAGSEAKTRGGSTTANNRRSQSFNNYDKSKPVTSPPPPPSSHEKEPLASSASSHPGMSDNAPASLESGSSSTPTNCSTSSAIPQPGAATKPWRSKSLSVKHSATVSMLSVKPPGPEAPRPTPEAMKPAPNNQKSMLEKLKLFNSKGGSKAGEGPGSRDTSCERLETLPSFEESEELEAASRMLTTVGPASSSPKIALKGIAQRTFSRALTNKKSSLKGNEKEKEKQQREKDKEKSKDLAKRASVTERLDLKEEPKEDPSGAAVPEMPKKSSKIASFIPKGGKLNSAKKEPMAPSHSGIPKPGMKSMPGKSPSAPAPSKEGERSRSGKLSSGLPQQKPQLDGRHSSSSSSLASSEGKGPGGTTLNHSISSQTVSGSVGTTQTTGSNTVSVQLPQPQQQYNHPNTATVAPFLYRSQTDTEGNVTAESSSTGVSVEPSHFTKTGQPALEELTGEDPEARRLRTVKNIADLRQNLEETMSSLRGTQVTHSTLETTFDTNVTTEMSGRSILSLTGRPTPLSWRLGQSSPRLQAGDAPSMGNGYPPRANASRFINTESGRYVYSAPLRRQLASRGSSVCHVDVSDKAGDEMDLEGISMDAPGYMSDGDVLSKNIRTDDITSGYMTDGGLGLYTRRLNRLPDGMAVVRETLQRNTSLGLGDADSWDDSSSVSSGISDTIDNLSTDDINTSSSISSYANTPASSRKNLDVQTDAEKHSQVERNSLWSGDDVKKSDGGSDSGIKMEPGSKWRRNPSDVSDESDKSTSGKKNPVISQTGSWRRGMTAQVGITMPRTKPSAPAGALKTPGTGKTDDAKVSEKGRLSPKASQVKRSPSDAGRSSGDESKKPLPSSSRTPTANANSFGFKKQSGSAAGLAMITASGVTVTSRSATLGKIPKSSALVSRSAGRKSSMDGAQNQDDGYLALSSRTNLQYRSLPRPSKSNSRNGAGNRSSTSSIDSNISSKSAGLPVPKLREPSKTALGSSLPGLVNQTDKEKGISSDNESVASCNSVKVNPAAQPVSSPAQTSLQPGAKYPDVASPTLRRLFGGKPTKQVPIATAENMKNSVVISNPHATMTQQGNLDSPSGSGVLSSGSSSPLYSKNVDLNQSPLASSPSSAHSAPSNSLTWGTNASSSSAVSKDGLGFQSVSSLHTSCESIDISLSSGGVPSHNSSTGLIASSKDDSLTPFVRTNSVKTTLSESPLSSPAASPKFCRSTLPRKQDSDPHLDRNTLPKKGLRYTPTSQLRTQEDAKEWLRSHSAGGLQDTAANSPFSSGSSVTSPSGTRFNFSQLASPTTVTQMSLSNPTMLRTHSLSNADGQYDPYTDSRFRNSSMSLDEKSRTMSRSGSFRDGFEEESWEKSSVDNFVSRLHSSLHFSLPLFHHARYELVHGSSLSLVSSTSSVYSTPEEKCQSEIRKLRRELDASQEKVSALTTQLTANAHLVAAFEQSLGNMTIRLQSLTMTAEQKDSELNELRKTIELLKKQNAAAQAAINGVINTPELNCKGNGTAQSADLRIRRQHSSDSVSSINSATSHSSVGSNIESDSKKKKRKNWVNELRSSFKQAFGKKKSPKSASSHSDIEEMTDSSLPSSPKLPHNGSTGSTPLLRNSHSNSLISECMDSEAETVMQLRNELRDKEMKLTDIRLEALSSAHQLDQLREAMNRMQSEIEKLKAENDRLKSESQGSGCSRAPSQVSISASPRQSMGLSQHSLNLTESTSLDMLLDDTGECSARKEGGRHVKIVVSFQEEMKWKEDSRPHLFLIGCIGVSGKTKWDVLDGVVRRLFKEYIIHVDPVSQLGLNSDSVLGYSIGEIKRSNTSETPELLPCGYLVGENTTISVTVKGLAENSLDSLVFESLIPKPILQRYVSLLIEHRRIILSGPSGTGKTYLANRLSEYIVLREGRELTDGVIATFNVDHKSSKELRQYLSNLADQCNSENNAVDMPLVIILDNLHHVSSLGEIFNGLLNCKYHKCPYIIGTMNQATSSTPNLQLHHNFRWVLCANHTEPVKGFLGRFLRRKLMETEISGRVRNMELVKIIDWIPKVWHHLNRFLEAHSSSDVTIGPRLFLSCPIDVDGSRVWFTDLWNYSIIPYLLEAVREGLQLYGRRAPWEDPAKWVMDTYPWAASPQQHEWPPLLQLRPEDVGFDGYSMPREGSTSKQMPPSDAEGDPLMNMLMRLQEAANYSSPQSYDSDSNSNSHHDDILDSSLESTL

SEQ ID NO: 41559 - protein, 2419 aa, Homo sapiens
MAIDLYCGLACLWGIHEPRQIYTDWANHYLAKSGHKRLIRDLQQDVTDGVLLAQIIQVVANEKIEDINGCPKNRSQMIENIDACLNFLAAKGINIQGLSAEEIRNGNLKAILGLFFSLSRYKQQQQQPQKQHLSSPLPPAVSQVAGAPSQCQAGTPQQQVPVTPQAPCQPHQPAPHQQSKAQAEMQSSASSKDSSQSKIIRFTLGQKKISRLPGPTARVSAAGSEAKTRGGSTTANNRRSQSFNNYDKSKPVTSPPPPPSSHEKEPLASSASSHPGMSDNAPASLESGSSSTPTNCSTSSAIPQPGAATKPWRSKSLSVKHSATVSMLSVKPPGPEAPRPTPEAMKPAPNNQKSMLEKLKLFNSKGGSKAGEGPGSRDTSCERLETLPSFEESEELEAASRMLTTVGPASSSPKIALKGIAQRTFSRALTNKKSSLKGNEKEKEKQQREKDKEKSKDLAKRASVTERLDLKEEPKEDPSGAAVPEMPKKSSKIASFIPKGGKLNSAKKEPMAPSHSGIPKPGMKSMPGKSPSAPAPSKEGERSRSGKLSSGLPQQKPQLDGRHSSSSSSLASSEGKGPGGTTLNHSISSQTVSGSVGTTQTTGSNTVSVQLPQPQQQYNHPNTATVAPFLYRSQTDTEGNVTAESSSTGVSVEPSHFTKTGQPALEELTGEDPEARRLRTVKNIADLRQNLEETMSSLRGTQVTHSTLETTFDTNVTTEMSGRSILSLTGRPTPLSWRLGQSSPRLQAGDAPSMGNGYPPRANASRFINTESGRYVYSAPLRRQLASRGSSVCHVDVSDKAGDEMDLEGISMDAPGYMSDGDVLSKNIRTDDITSGYMTDGGLGLYTRRLNRLPDGMAVVRETLQRNTSLGLGDADSWDDSSSVSSGISDTIDNLSTDDINTSSSISSYANTPASSRKNLDVQTDAEKHSQVERNSLWSGDDVKKSDGGSDSGIKMEPGSKWRRNPSDVSDESDKSTSGKKNPVISQTGSWRRGMTAQVGITMPRTKPSAPAGALKTPGTGKTDDAKVSEKGRLSPKASQVKRSPSDAGRSSGDESKKPLPSSSRTPTANANSFGFKKQSGSAAGLAMITASGVTVTSRSATLGKIPKSSALVSRSAGRKSSMDGAQNQDDGYLALSSRTNLQYRSLPRPSKSNSRNGAGNRSSTSSIDSNISSKSAGLPVPKLREPSKTALGSSLPGLVNQTDKEKGISSDNESVASCNSVKVNPAAQPVSSPAQTSLQPGAKYPDVASPTLRRLFGGKPTKQVPIATAENMKNSVVISNPHATMTQQGNLDSPSGSGVLSSGSSSPLYSKNVDLNQSPLASSPSSAHSAPSNSLTWGTNASSSSAVSKDGLGFQSVSSLHTSCESIDISLSSGGVPSHNSSTGLIASSKDDSLTPFVRTNSVKTTLSESPLSSPAASPKFCRSTLPRKQDSDPHLDRNTLPKKGLRYTPTSQLRTQEDAKEWLRSHSAGGLQDTAANSPFSSGSSVTSPSGTRFNFSQLASPTTVTQMSLSNPTMLRTHSLSNADGQYDPYTDSRFRNSSMSLDEKSRTMSRSGSFRDGFEEESWEKSSVDNFVSRLHSSLHFSLPLFHHARYELVHGSSLSLVSSTSSVYSTPEEKCQSEIRKLRRELDASQEKVSALTTQLTANAHLVAAFEQSLGNMTIRLQSLTMTAEQKDSELNELRKTIELLKKQNAAAQAAINGVINTPELNCKGNGTAQSADLRIRRQHSSDSVSSINSATSHSSVGSNIESDSKKKKRKNWVNELRSSFKQAFGKKKSPKSASSHSDIEEMTDSSLPSSPKLPHNGSTGSTPLLRNSHSNSLISECMDSEAETVMQLRNELRDKEMKLTDIRLEALSSAHQLDQLREAMNRMQSEIEKLKAENDRLKSESQGSGCSRAPSQVSISASPRQSMGLSQHSLNLTESTSLDMLLDDTGECSARKEGGRHVKIVVSFQEEMKWKEDSRPHLFLIGCIGVSGKTKWDVLDGVVRRLFKEYIIHVDPVSQLGLNSDSVLGYSIGEIKRSNTSETPELLPCGYLVGENTTISVTVKGLAENSLDSLVFESLIPKPILQRYVSLLIEHRRIILSGPSGTGKTYLANRLSEYIVLREGRELTDGVIATFNVDHKSSKELRQYLSNLADQCNSENNAVDMPLVIILDNLHHVSSLGEIFNGLLNCKYHKCPYIIGTMNQATSSTPNLQLHHNFRWVLCANHTEPVKGFLGRFLRRKLMETEISGRVRNMELVKIIDWIPKVWHHLNRFLEAHSSSDVTIGPRLFLSCPIDVDGSRVWFTDLWNYSIIPYLLEAVREGLQLYGRRAPWEDPAKWVMDTYPWAASPQQHEWPPLLQLRPEDVGFDGYSMPREGSTSKQMPPSDAEGDPLMNMLMRLQEAANYSSPQSYDSDSNSNSHHDDILDSSLESTL

SEQ ID NO: 41560 - protein, 750 aa, Homo sapiens
MLRAKNQLFLLSPHYLRQVKESSGSRLIQQRLLHQQQPLHPEWAALAKKQLKGKNPEDLIWHTPEGISIKPLYSKRDTMDLPEELPGVKPFTRGPYPTMYTFRPWTIRQYAGFSTVEESNKFYKDNIKAGQQGLSVAFDLATHRGYDSDNPRVRGDVGMAGVAIDTVEDTKILFDGIPLEKMSVSMTMNGAVIPVLANFIVTGEEQGVPKEKLTGTIQNDILKEFMVRNTYIFPPEPSMKIIADIFEYTAKHMPKFNSISISGYHMQEAGADAILELAYTLADGLEYSRTGLQAGLTIDEFAPRLSFFWGIGMNFYMEIAKMRAGRRLWAHLIEKMFQPKNSKSLLLRAHCQTSGWSLTEQDPYNNIVRTAIEAMAAVFGGTQSLHTNSFDEALGLPTVKSARIARNTQIIIQEESGIPKVADPWGGSYMMECLTNDVYDAALKLINEIEEMGGMAKAVAEGIPKLRIEECAARRQARIDSGSEVIVGVNKYQLEKEDAVEVLAIDNTSVRNRQIEKLKKIKSSRDQALAERCLAALTECAASGDGNILALAVDASRARCTVGEITDALKKVFGEHKANDRMVSGAYRQEFGESKEITSAIKRVHKFMEREGRRPRLLVAKMGQDGHDRGAKVIATGFADLGFDVDIGPLFQTPREVAQQAVDADVHAVGISTLAAGHKTLVPELIKELNSLGRPDILVMCGGVIPPQDYEFLFEVGVSNVFGPGTRIPKAAVQVLDDIEKCLEKKQQSV

SEQ ID NO: 41561 - protein, 2514 aa, Homo sapiens
MSGSTQPVAQTWRATEPRYPPHSLSYPVQIARTHTDVGLLEYQHHSRDYASHLSPGSIIQPQRRRPSLLSEFQPGNERSQELHLRPESHSYLPELGKSEMEFIESKRPRLELLPDPLLRPSPLLATGQPAGSEDLTKDRSLTGKLEPVSPPSPPHTDPELELVPPRLSKEELIQNMDRVDREITMVEQQISKLKKKQQQLEEEAAKPPEPEKPVSPPPIESKHRSLVQIIYDENRKKAEAAHRILEGLGPQVELPLYNQPSDTRQYHENIKINQAMRKKLILYFKRRNHARKQWEQKFCQRYDQLMEAWEKKVERIENNPRRRAKESKVREYYEKQFPEIRKQRELQERMQSRVGQRGSGLSMSAARSEHEVSEIIDGLSEQENLEKQMRQLAVIPPMLYDADQQRIKFINMNGLMADPMKVYKDRQVMNMWSEQEKETFREKFMQHPKNFGLIASFLERKTVAECVLYYYLTKKNENYKSLVRRSYRRRGKSQQQQQQQQQQQQQQQQQPMPRSSQEEKDEKEKEKEAEKEEEKPEVENDKEDLLKEKTDDTSGEDNDEKEAVASKGRKTANSQGRRKGRITRSMANEANSEEAITPQQSAELASMELNESSRWTEEEMETAKKGLLEHGRNWSAIARMVGSKTVSQCKNFYFNYKKRQNLDEILQQHKLKMEKERNARRKKKKAPAAASEEAAFPPVVEDEEMEASGVSGNEEEMVEEAEALHASGNEVPRGECSGPATVNNSSDTESIPSPHTEAAKDTGQNGPKPPATLGADGPPPGPPTPPPEDIPAPTEPTPASEATGAPTPPPAPPSPSAPPPVVPKEEKEEETAAAPPVEEGEEQKPPAAEELAVDTGKAEEPVKSECTEEAEEGPAKGKDAEAAEATAEGALKAEKKEGGSGRATTAKSSGAPQDSDSSATCSADEVDEAEGGDKNRLLSPRPSLLTPTGDPRANASPQKPLDLKQLKQRAAAIPPIQVTKVHEPPREDAAPTKPAPPAPPPPQNLQPESDAPQQPGSSPRGKSRSPAPPADKEAFAAEAQKLPGDPPCWTSGLPFPVPPREVIKASPHAPDPSAFSYAPPGHPLPLGLHDTARPVLPRPPTISNPPPLISSAKHPSVLERQIGAISQGMSVQLHVPYSEHAKAPVGPVTMGLPLPMDPKKLAPFSGVKQEQLSPRGQAGPPESLGVPTAQEASVLRGTALGSVPGGSITKGIPSTRVPSDSAITYRGSITHGTPADVLYKGTITRIIGEDSPSRLDRGREDSLPKGHVIYEGKKGHVLSYEGGMSVTQCSKEDGRSSSGPPHETAAPKRTYDMMEGRVGRAISSASIEGLMGRAIPPERHSPHHLKEQHHIRGSITQGIPRSYVEAQEDYLRREAKLLKREGTPPPPPPSRDLTEAYKTQALGPLKLKPAHEGLVATVKEAGRSIHEIPREELRHTPELPLAPRPLKEGSITQGTPLKYDTGASTTGSKKHDVRSLIGSPGRTFPPVHPLDVMADARALERACYEESLKSRPGTASSSGGSIARGAPVIVPELGKPRQSPLTYEDHGAPFAGHLPRGSPVTTREPTPRLQEGSLSSSKASQDRKLTSTPREIAKSPHSTVPEHHPHPISPYEHLLRGVSGVDLYRSHIPLAFDPTSIPRGIPLDAAAAYYLPRHLAPNPTYPHLYPPYLIRGYPDTAALENRQTIINDYITSQQMHHNAATAMAQRADMLRGLSPRESSLALNYAAGPRGIIDLSQVPHLPVLVPPTPGTPATAMDRLAYLPTAPQPFSSRHSSSPLSPGGPTHLTKPTTTSSSERERDRDRERDRDREREKSILTSTTTVEHAPIWRPGTEQSSGSSGGGGGSSSRPASHSHAHQHSPISPRTQDALQQRPSVLHNTGMKGIITAVEPSTPTVLRSTSTSSPVRPAATFPPATHCPLGGTLDGVYPTLMEPVLLPKEAPRVARPERPRADTGHAFLAKPPARSGLEPASSPSKGSEPRPLVPPVSGHATIARTPAKNLAPHHASPDPPAPPASASDPHREKTQSKPFSIQELELRSLGYHGSSYSPEGVEPVSPVSSPSLTHDKGLPKHLEELDKSHLEGELRPKQPGPVKLGGEAAHLPHLRPLPESQPSSSPLLQTAPGVKGHQRVVTLAQHISEVITQDYTRHHPQQLSAPLPAPLYSFPGASCPVLDLRRPPSDLYLPPPDHGAPARGSPHSEGGKRSPEPNKTSVLGGGEDGIEPVSPPEGMTEPGHSRSAVYPLLYRDGEQTEPSRMGSKSPGNTSQPPAFFSKLTESNSAMVKSKKQEINKKLNTHNRNEPEYNISQPGTEIFNMPAITGTGLMTYRSQAVQEHASTNMGLEAIIRKALMGKYDQWEESPPLSANAFNPLNASASLPAAMPITAADGRSDHTLTSPGGGGKAKVSGRPSSRKAKSPAPGLASGDRPPSVSSVHSEGDCNRRTPLTNRVWEDRPSSAGSTPFPYNPLIMRLQAGVMASPPPPGLPAGSGPLAGPHHAWDEEPKPLLCSQYETLSDSE

SEQ ID NO: 41562 - protein, 766 aa, Homo sapiens
MAQRADMLRGLSPRESSLALNYAAGPRGIIDLSQVPHLPVLVPPTPGTPATAMDRLAYLPTAPQPFSSRHSSSPLSPGGPTHLTKPTTTSSSERERDRDRERDRDREREKSILTSTTTVEHAPIWRPGTEQSSGSSGGGGGSSSRPASHSHAHQHSPISPRTQDALQQRPSVLHNTGMKGIITAVEPSTPTVLRSTSTSSPVRPAATFPPATHCPLGGTLDGVYPTLMEPVLLPKEAPRVARPERPRADTGHAFLAKPPARSGLEPASSPSKGSEPRPLVPPVSGHATIARTPAKNLAPHHASPDPPAPPASASDPHREKTQSKPFSIQELELRSLGYHGSSYSPEGVEPVSPVSSPSLTHDKGLPKHLEELDKSHLEGELRPKQPGPVKLGGEAAHLPHLRPLPESQPSSSPLLQTAPGVKGHQRVVTLAQHISEVITQDYTRHHPQQLSAPLPAPLYSFPGASCPVLDLRRPPSDLYLPPPDHGAPARGSPHSEGGKRSPEPNKTSVLGGGEDGIEPVSPPEGMTEPGHSRSAVYPLLYRDGEQTEPSRMGSKSPGNTSQPPAFFSKLTESNSAMVKSKKQEINKKLNTHNRNEPEYNISQPGTEIFNMPAITGTGLMTYRSQAVQEHASTNMGLEAIIRKALMGGGGKAKVSGRPSSRKAKSPAPGLASGDRPPSVSSVHSEGDCNRRTPLTNRVWEDRPSSAGSTPFPYNPLIMRLQAGVMASPPPPGLPAGSGPLAGPHHAWDEEPKPLLCSQYETLSDSE

SEQ ID NO: 41563 - protein, 2497 aa, Homo sapiens
MSGSTQPVAQTWRATEPRYPPHSLSYPVQIARTHTDVGLLEYQHHSRDYASHLSPGSIIQPQRRRPSLLSEFQPGNERSQELHLRPESHSYLPELGKSEMEFIESKRPRLELLPDPLLRPSPLLATGQPAGSEDLTKDRSLTGKLEPVSPPSPPHTDPELELVPPRLSKEELIQNMDRVDREITMVEQQISKLKKKQQQLEEEAAKPPEPEKPVSPPPIESKHRSLVQIIYDENRKKAEAAHRILEGLGPQVELPLYNQPSDTRQYHENIKINQAMRKKLILYFKRRNHARKQWEQKFCQRYDQLMEAWEKKVERIENNPRRRAKESKVREYYEKQFPEIRKQRELQERMQSRVGQRGSGLSMSAARSEHEVSEIIDGLSEQENLEKQMRQLAVIPPMLYDADQQRIKFINMNGLMADPMKVYKDRQVMNMWSEQEKETFREKFMQHPKNFGLIASFLERKTVAECVLYYYLTKKNENYKSLVRRSYRRRGKSQQQQQQQQQQQQQQQQQPMPRSSQEEKDEKEKEKEAEKEEEKPEVENDKEDLLKEKTDDTSGEDNDEKEAVASKGRKTANSQGRRKGRITRSMANEANSEEAITPQQSAELASMELNESSRWTEEEMETAKKGLLEHGRNWSAIARMVGSKTVSQCKNFYFNYKKRQNLDEILQQHKLKMEKERNARRKKKKAPAAASEEAAFPPVVEDEEMEASGVSGNEEEMVEEAEATVNNSSDTESIPSPHTEAAKDTGQNGPKPPATLGADGPPPGPPTPPPEDIPAPTEPTPASEATGAPTPPPAPPSPSAPPPVVPKEEKEEETAAAPPVEEGEEQKPPAAEELAVDTGKAEEPVKSECTEEAEEGPAKGKDAEAAEATAEGALKAEKKEGGSGRATTAKSSGAPQDSDSSATCSADEVDEAEGGDKNRLLSPRPSLLTPTGDPRANASPQKPLDLKQLKQRAAAIPPIQVTKVHEPPREDAAPTKPAPPAPPPPQNLQPESDAPQQPGSSPRGKSRSPAPPADKEAFAAEAQKLPGDPPCWTSGLPFPVPPREVIKASPHAPDPSAFSYAPPGHPLPLGLHDTARPVLPRPPTISNPPPLISSAKHPSVLERQIGAISQGMSVQLHVPYSEHAKAPVGPVTMGLPLPMDPKKLAPFSGVKQEQLSPRGQAGPPESLGVPTAQEASVLRGTALGSVPGGSITKGIPSTRVPSDSAITYRGSITHGTPADVLYKGTITRIIGEDSPSRLDRGREDSLPKGHVIYEGKKGHVLSYEGGMSVTQCSKEDGRSSSGPPHETAAPKRTYDMMEGRVGRAISSASIEGLMGRAIPPERHSPHHLKEQHHIRGSITQGIPRSYVEAQEDYLRREAKLLKREGTPPPPPPSRDLTEAYKTQALGPLKLKPAHEGLVATVKEAGRSIHEIPREELRHTPELPLAPRPLKEGSITQGTPLKYDTGASTTGSKKHDVRSLIGSPGRTFPPVHPLDVMADARALERACYEESLKSRPGTASSSGGSIARGAPVIVPELGKPRQSPLTYEDHGAPFAGHLPRGSPVTTREPTPRLQEGSLSSSKASQDRKLTSTPREIAKSPHSTVPEHHPHPISPYEHLLRGVSGVDLYRSHIPLAFDPTSIPRGIPLDAAAAYYLPRHLAPNPTYPHLYPPYLIRGYPDTAALENRQTIINDYITSQQMHHNAATAMAQRADMLRGLSPRESSLALNYAAGPRGIIDLSQVPHLPVLVPPTPGTPATAMDRLAYLPTAPQPFSSRHSSSPLSPGGPTHLTKPTTTSSSERERDRDRERDRDREREKSILTSTTTVEHAPIWRPGTEQSSGSSGGGGGSSSRPASHSHAHQHSPISPRTQDALQQRPSVLHNTGMKGIITAVEPSTPTVLRSTSTSSPVRPAATFPPATHCPLGGTLDGVYPTLMEPVLLPKEAPRVARPERPRADTGHAFLAKPPARSGLEPASSPSKGSEPRPLVPPVSGHATIARTPAKNLAPHHASPDPPAPPASASDPHREKTQSKPFSIQELELRSLGYHGSSYSPEGVEPVSPVSSPSLTHDKGLPKHLEELDKSHLEGELRPKQPGPVKLGGEAAHLPHLRPLPESQPSSSPLLQTAPGVKGHQRVVTLAQHISEVITQDYTRHHPQQLSAPLPAPLYSFPGASCPVLDLRRPPSDLYLPPPDHGAPARGSPHSEGGKRSPEPNKTSVLGGGEDGIEPVSPPEGMTEPGHSRSAVYPLLYRDGEQTEPSRMGSKSPGNTSQPPAFFSKLTESNSAMVKSKKQEINKKLNTHNRNEPEYNISQPGTEIFNMPAITGTGLMTYRSQAVQEHASTNMGLEAIIRKALMGKYDQWEESPPLSANAFNPLNASASLPAAMPITAADGRSDHTLTSPGGGGKAKVSGRPSSRKAKSPAPGLASGDRPPSVSSVHSEGDCNRRTPLTNRVWEDRPSSAGSTPFPYNPLIMRLQAGVMASPPPPGLPAGSGPLAGPHHAWDEEPKPLLCSQYETLSDSE

SEQ ID NO: 41564 - protein, 2451 aa, Homo sapiens
MSGSTQPVAQTWRATEPRYPPHSLSYPVQIARTHTDVGLLEYQHHSRDYASHLSPGSIIQPQRRRPSLLSEFQPGNERSQELHLRPESHSYLPELGKSEMEFIESKRPRLELLPDPLLRPSPLLATGQPAGSEDLTKDRSLTGKLEPVSPPSPPHTDPELELVPPRLSKEELIQNMDRVDREITMVEQQISKLKKKQQQLEEEAAKPPEPEKPVSPPPIESKHRSLVQIIYDENRKKAEAAHRILEGLGPQVELPLYNQPSDTRQYHENIKINQAMRKKLILYFKRRNHARKQWEQKFCQRYDQLMEAWEKKVERIENNPRRRAKESKVREYYEKQFPEIRKQRELQERMQSRVGQRGSGLSMSAARSEHEVSEIIDGLSEQENLEKQMRQLAVIPPMLYDADQQRIKFINMNGLMADPMKVYKDRQVMNMWSEQEKETFREKFMQHPKNFGLIASFLERKTVAECVLYYYLTKKNENYKSLVRRSYRRRGKSQQQQQQQQQQQQQQQQQPMPRSSQEEKDEKEKEKEAEKEEEKPEVENDKEDLLKEKTDDTSGEDNDEKEAVASKGRKTANSQGRRKGRITRSMANEANSEEAITPQQSAELASMELNESSRWTEEEMETAKKGLLEHGRNWSAIARMVGSKTVSQCKNFYFNYKKRQNLDEILQQHKLKMEKERNARRKKKKAPAAASEEAAFPPVVEDEEMEASGVSGNEEEMVEEAEATVNNSSDTESIPSPHTEAAKDTGQNGPKPPATLGADGPPPGPPTPPPEDIPAPTEPTPASEATGAPTPPPAPPSPSAPPPVVPKEEKEEETAAAPPVEEGEEQKPPAAEELAVDTGKAEEPVKSECTEEAEEGPAKGKDAEAAEATAEGALKAEKKEGGSGRATTAKSSGAPQDSDSSATCSADEVDEAEGGDKNRLLSPRPSLLTPTGDPRANASPQKPLDLKQLKQRAAAIPPIQVTKVHEPPREDAAPTKPAPPAPPPPQNLQPESDAPQQPGSSPRGKSRSPAPPADKEAFAAEAQKLPGDPPCWTSGLPFPVPPREVIKASPHAPDPSAFSYAPPGHPLPLGLHDTARPVLPRPPTISNPPPLISSAKHPSVLERQIGAISQGMSVQLHVPYSEHAKAPVGPVTMGLPLPMDPKKLAPFSGVKQEQLSPRGQAGPPESLGVPTAQEASVLRGTALGSVPGGSITKGIPSTRVPSDSAITYRGSITHGTPADVLYKGTITRIIGEDSPSRLDRGREDSLPKGHVIYEGKKGHVLSYEGGMSVTQCSKEDGRSSSGPPHETAAPKRTYDMMEGRVGRAISSASIEGLMGRAIPPERHSPHHLKEQHHIRGSITQGIPRSYVEAQEDYLRREAKLLKREGTPPPPPPSRDLTEAYKTQALGPLKLKPAHEGLVATVKEAGRSIHEIPREELRHTPELPLAPRPLKEGSITQGTPLKYDTGASTTGSKKHDVRSLIGSPGRTFPPVHPLDVMADARALERACYEESLKSRPGTASSSGGSIARGAPVIVPELGKPRQSPLTYEDHGAPFAGHLPRGSPVTTREPTPRLQEGSLSSSKASQDRKLTSTPREIAKSPHSTVPEHHPHPISPYEHLLRGVSGVDLYRSHIPLAFDPTSIPRGIPLDAAAAYYLPRHLAPNPTYPHLYPPYLIRGYPDTAALENRQTIINDYITSQQMHHNAATAMAQRADMLRGLSPRESSLALNYAAGPRGIIDLSQVPHLPVLVPPTPGTPATAMDRLAYLPTAPQPFSSRHSSSPLSPGGPTHLTKPTTTSSSERERDRDRERDRDREREKSILTSTTTVEHAPIWRPGTEQSSGSSGGGGGSSSRPASHSHAHQHSPISPRTQDALQQRPSVLHNTGMKGIITAVEPSTPTVLRSTSTSSPVRPAATFPPATHCPLGGTLDGVYPTLMEPVLLPKEAPRVARPERPRADTGHAFLAKPPARSGLEPASSPSKGSEPRPLVPPVSGHATIARTPAKNLAPHHASPDPPAPPASASDPHREKTQSKPFSIQELELRSLGYHGSSYSPEGVEPVSPVSSPSLTHDKGLPKHLEELDKSHLEGELRPKQPGPVKLGGEAAHLPHLRPLPESQPSSSPLLQTAPGVKGHQRVVTLAQHISEVITQDYTRHHPQQLSAPLPAPLYSFPGASCPVLDLRRPPSDLYLPPPDHGAPARGSPHSEGGKRSPEPNKTSVLGGGEDGIEPVSPPEGMTEPGHSRSAVYPLLYRDGEQTEPSRMGSKSPGNTSQPPAFFSKLTESNSAMVKSKKQEINKKLNTHNRNEPEYNISQPGTEIFNMPAITGTGLMTYRSQAVQEHASTNMGLEAIIRKALMGGGGKAKVSGRPSSRKAKSPAPGLASGDRPPSVSSVHSEGDCNRRTPLTNRVWEDRPSSAGSTPFPYNPLIMRLQAGVMASPPPPGLPAGSGPLAGPHHAWDEEPKPLLCSQYETLSDSE

SEQ ID NO: 41565 - protein, 398 aa, Homo sapiens
MGTCDIVTEANISSGPESNTTGITAFSMPSWQLALWATAYLALVLVAVTGNAIVIWIILAHRRMRTVTNYFIVNLALADLCMAAFNAAFNFVYASHNIWYFGRAFCYFQNLFPITAMFVSIYSMTAIAADRYMAIVHPFQPRLSAPSTKAVIAGIWLVALALASPQCFYSTVTMDQGATKCVVAWPEDSGGKTLLLYHLVVIALIYFLPLAVMFVAYSVIGLTLWRRAVPGHQAHGANLRHLQAMKKFVKTMVLVVLTFAICWLPYHLYFILGSFQEDIYCHKFIQQVYLALFWLAMSSTMYNPIIYCCLNHRFRSGFRLAFRCCPWVTPTKEDKLELTPTTSLSTRVNRCHTKETLFMAGDTAPSEATSGEAGRPQDGSGLWFGYGLLAPTKTHVEI

SEQ ID NO: 41566 - protein, 812 aa, Homo sapiens
MGRKLDPTKEKRGPGRKARKQKGAETELVRFLPAVSDENSKRLSSRARKRAAKRRLGSVEAPKTNKSPEAKPLPGKLPKGISAGAVQTAGKKGPQSLFNAPRGKKRPAPGSDEEEEEEDSEEDGMVNHGDLWGSEDDADTVDDYGADSNSEDEEEGEALLPIERAARKQKAREAAAGIQWSEEETEDEEEEKEVTPESGPPKVEEADGGLQINVDEEPFVLPPAGEMEQDAQAPDLQRVHKRIQDIVGILRDFGAQREEGRSRSEYLNRLKKDLAIYYSYGDFLLGKLMDLFPLSELVEFLEANEVPRPVTLRTNTLKTRRRDLAQALINRGVNLDPLGKWSKTGLVVYDSSVPIGATPEYLAGHYMLQGASSMLPVMALAPQEHERILDMCCAPGGKTSYMAQLMKNTGVILANDANAERLKSVVGNLHRLGVTNTIISHYDGRQFPKVVGGFDRVLLDAPCSGTGVISKDPAVKTNKDEKDILRCAHLQKELLLSAIDSVNATSKTGGYLVYCTCSITVEENEWVVDYALKKRNVRLVPTGLDFGQEGFTRFRERRFHPSLRSTRRFYPHTHNMDGFFIAKFKKFSNSIPQSQTGNSETATPTNVDLPQVIPKSENSSQPAKKAKGAAKTKQQLQKQQHPKKASFQKLNGISKGADSELSTVPSVTKTQASSSFQDSSQPAGKAEGIREPKVTGKLKQRSPKLQSSKKVAFLRQNAPPKGTDTQTPAVLSPSKTQATLKPKDHHQPLGRAKGVEKQQLPEQPFEKAAFQKQNDTPKGPQPPTVSPIRSSRPPPAKRKKSQSRGNSQLLLS

SEQ ID NO: 41567 - protein, 808 aa, Homo sapiens
MGRKLDPTKEKRGPGRKARKQKGAETELVRFLPAVSDENSKRLSSRARKRAAKRRLGSVEAPKTNKSPEAKPLPGKLPKGAVQTAGKKGPQSLFNAPRGKKRPAPGSDEEEEEEDSEEDGMVNHGDLWGSEDDADTVDDYGADSNSEDEEEGEALLPIERAARKQKAREAAAGIQWSEEETEDEEEEKEVTPESGPPKVEEADGGLQINVDEEPFVLPPAGEMEQDAQAPDLQRVHKRIQDIVGILRDFGAQREEGRSRSEYLNRLKKDLAIYYSYGDFLLGKLMDLFPLSELVEFLEANEVPRPVTLRTNTLKTRRRDLAQALINRGVNLDPLGKWSKTGLVVYDSSVPIGATPEYLAGHYMLQGASSMLPVMALAPQEHERILDMCCAPGGKTSYMAQLMKNTGVILANDANAERLKSVVGNLHRLGVTNTIISHYDGRQFPKVVGGFDRVLLDAPCSGTGVISKDPAVKTNKDEKDILRCAHLQKELLLSAIDSVNATSKTGGYLVYCTCSITVEENEWVVDYALKKRNVRLVPTGLDFGQEGFTRFRERRFHPSLRSTRRFYPHTHNMDGFFIAKFKKFSNSIPQSQTGNSETATPTNVDLPQVIPKSENSSQPAKKAKGAAKTKQQLQKQQHPKKASFQKLNGISKGADSELSTVPSVTKTQASSSFQDSSQPAGKAEGIREPKVTGKLKQRSPKLQSSKKVAFLRQNAPPKGTDTQTPAVLSPSKTQATLKPKDHHQPLGRAKGVEKQQLPEQPFEKAAFQKQNDTPKGPQPPTVSPIRSSRPPPAKRKKSQSRGNSQLLLS

SEQ ID NO: 41568 - protein, 628 aa, Homo sapiens
MGRKLDPTKEKRGPGRKARKQKGAETELVRFLPAVSDENSKRLSSRARKRAAKRRLGSVEAPKTNKSPEAKPLPGKLPKGAVQTAGKKGPQSLFNAPRGKKRPAPGSDEEEEEEDSEEDGMVNHGDLWGSEDDADTVDDYGADSNSEDEEEGEALLPIERAARKQKAREAAAGIQWSEEETEDEEEEKEVTPESGPPKVEEADGGLQINVDEEPFVLPPAGEMEQDAQAPDLQRVHKRIQDIVGILRDFGAQREEGRSRSEYLNRLKKDLAIYYSYGDFLLGKLMDLFPLSELVEFLEANEVPRPVTLRTNTLKTRRRDLAQALINRGVNLDPLGKWSKTGLVVYDSSVPIGATPEYLAGHYMLQGASSMLPVMALAPQEHERILDMCCAPGGKTSYMAQLMKNTGVILANDANAERLKSVVGNLHRLGVTNTIISHYDGRQFPKVVGGFDRVLLDAPCSGTGVISKDPAVKTNKDEKDILRCAHLQKELLLSAIDSVNATSKTGGYLVYCTCSITVEENEWVVDYALKKRNVRLVPTGLDFGQEGFTRFRERRFHPSLRSTRRFYPHTHNMDGFFIAKFKKFSNSIPQSQTDGVLLCRSGWTAVVQSQLIATSTFQVQAILVPQTPK

SEQ ID NO: 41569 - protein, 845 aa, Homo sapiens
MGRKLDPTKEKRGPGRKARKQKGAETELVRFLPAVSDENSKRLSSRARKRAAKRRLGSVEAPKTNKSPEAKPLPGKLPKGISAGAVQTAGKKGPQSLFNAPRGKKRPAPGSDEEEEEEDSEEDGMVNHGDLWGSEDDADTVDDYGADSNSEDEEEGEAAGVQWLGLGSLQPPPPGFKQFSCLSFPSSWDLQLLPIERAARKQKAREAAAGIQWSEEETEDEEEEKEVTPESGPPKVEEADGGLQINVDEEPFVLPPAGEMEQDAQAPDLQRVHKRIQDIVGILRDFGAQREEGRSRSEYLNRLKKDLAIYYSYGDFLLGKLMDLFPLSELVEFLEANEVPRPVTLRTNTLKTRRRDLAQALINRGVNLDPLGKWSKTGLVVYDSSVPIGATPEYLAGHYMLQGASSMLPVMALAPQEHERILDMCCAPGGKTSYMAQLMKNTGVILANDANAERLKSVVGNLHRLGVTNTIISHYDGRQFPKVVGGFDRVLLDAPCSGTGVISKDPAVKTNKDEKDILRCAHLQKELLLSAIDSVNATSKTGGYLVYCTCSITVEENEWVVDYALKKRNVRLVPTGLDFGQEGFTRFRERRFHPSLRSTRRFYPHTHNMDGFFIAKFKKFSNSIPQSQTGNSETATPTNVDLPQVIPKSENSSQPAKKAKGAAKTKQQLQKQQHPKKASFQKLNGISKGADSELSTVPSVTKTQASSSFQDSSQPAGKAEGIREPKVTGKLKQRSPKLQSSKKVAFLRQNAPPKGTDTQTPAVLSPSKTQATLKPKDHHQPLGRAKGVEKQQLPEQPFEKAAFQKQNDTPKGPQPPTVSPIRSSRPPPAKRKKSQSRGNSQLLLS

SEQ ID NO: 41570 - protein, 137 aa, Homo sapiens
MGAHLVRRYLGDASVEPDPLQMPTFPPDYGFPERKEREMVATQQEMMDAQLRLQLRDYCAHHLIRLLKCKRDSFPNFLACKQERHDWDYCEHRDYVMRMKEFERERRLLQRKKRREKKAAELAKGQGPGEVDPKVAL

SEQ ID NO: 41571 - protein, 396 aa, Homo sapiens
MLPSLQESMDGDEKELESSEEGGSAEERRLEPPSSSHYCLYSYRGSRLAQQRGDSEDGSPSGTNAETPSGDDFSLSLADTNLPSEVEPELRSFIAKRLSRGAVFEGLGNVASVELKIPGYRVGCYYCLFQNEKLLPETVTIDSERNPSEYVVCFLGGSEKGLELFRLELDKYIQGLKNNMNCEARGLESHIKSYLSSWFEDVVCPIQRVVLLFQEKLTFLLHAALSYTPVEVKESDEKTKRDINRFLSVASLQGLIHEGTMTSLCMAMTEEQHKSVVIDCSSSQPQFCNAGSNRFCEDWMQAFLNGAKGGNPFLFRQVLENFKLKAIQDTNNLKRFIRQAEMNHYALFKCYMFLKNCGSGDILLKIVKVEHEEMPEAKNVIAVLEEFMKEALDQSF

SEQ ID NO: 41572 - protein, 153 aa, Homo sapiens
MAAGLFGLSARRLLAAAATRGLPAARVRWESSFSRTVVAPSAVAGKRPPEPTTPWQEDPEPEDENLYEKNPDSHGYDKDPVLDVWNMRLVFFFGVSIILVLGSTFVAYLPDYRMKEWSRREAERLVKYREANGLPIMESNCFDPSKIQLPEDE

SEQ ID NO: 41573 - protein, 163 aa, Homo sapiens
MAAGLFGLSARRLLAAAATRGLPAARVRWESSFSRTVVAPSAVAGKRPPEPTTPWQEDPEPEDENLYEKNPDSHGYDKDPVLDVWNMRLVFFFGVSIILVLGSTFVAYLPDYRCTGCPRAWDGMKEWSRREAERLVKYREANGLPIMESNCFDPSKIQLPEDE

SEQ ID NO: 41574 - protein, 6669 aa, Homo sapiens
MADDEDYEEVVEYYTEEVVYEEVPGETITKIYETTTTRTSDYEQSETSKPALAQPALAQPASAKPVERRKVIRKKVDPSKFMTPYIAHSQKMQDLFSPNKYKEKFEKTKGQPYASTTDTPELRRIKKVQDQLSEVKYRMDGDVAKTICHVDEKAKDIEHAKKVSQQVSKVLYKQNWEDTKDKYLLPPDAPELVQAVKNTAMFSKKLYTEDWEADKSLFYPYNDSPELRRVAQAQKALSDVAYKKGLAEQQAQFTPLADPPDIEFAKKVTNQVSKQKYKEDYENKIKGKWSETPCFEVANARMNADNISTRKYQEDFENMKDQIYFMQTETPEYKMNKKAGVAASKVKYKEDYEKNKGKADYNVLPASENPQLRQLKAAGDALSDKLYKENYEKTKAKSINYCETPKFKLDTVLQNFSSDKKYKDSYLKDILGHYVGSFEDPYHSHCMKVTAQNSDKNYKAEYEEDRGKGFFPQTITQEYEAIKKLDQCKDHTYKVHPDKTKFTQVTDSPVLLQAQVNSKQLSDLNYKAKHESEKFKCHIPPDTPAFIQHKVNAYNLSDNLYKQDWEKSKAKKFDIKVDAIPLLAAKANTKNTSDVMYKKDYEKNKGKMIGVLSINDDPKMLHSLKVAKNQSDRLYKENYEKTKAKSMNYCETPKYQLDTQLKNFSEARYKDLYVKDVLGHYVGSMEDPYHTHCMKVAAQNSDKSYKAEYEEDKGKCYFPQTITQEYEAIKKLDQCKDHTYKVHPDKTKFTAVTDSPVLLQAQLNTKQLSDLNYKAKHEGEKFKCHIPADAPQFIQHRVNAYNLSDNVYKQDWEKSKAKKFDIKVDAIPLLAAKANTKNTSDVMYKKDYEKSKGKMIGALSINDDPKMLHSLKTAKNQSDREYRKDYEKSKTIYTAPLDMLQVTQAKKSQAIASDVDYKHILHSYSYPPDSINVDLAKKAYALQSDVEYKADYNSWMKGCGWVPFGSLEMEKAKRASDILNEKKYRQHPDTLKFTSIEDAPITVQSKINQAQRSDIAYKAKGEEIIHKYNLPPDLPQFIQAKVNAYNISENMYKADLKDLSKKGYDLRTDAIPIRAAKAARQAASDVQYKKDYEKAKGKMVGFQSLQDDPKLVHYMNVAKIQSDREYKKDYEKTKSKYNTPHDMFNVVAAKKAQDVVSNVNYKHSLHHYTYLPDAMDLELSKNMMQIQSDNVYKEDYNNWMKGIGWIPIGSLDVEKVKKAGDALNEKKYRQHPDTLKFTSIVDSPVMVQAKQNTKQVSDILYKAKGEDVKHKYTMSPDLPQFLQAKCNAYNISDVCYKRDWYDLIAKGNNVLGDAIPITAAKASRNIASDYKYKEAYEKSKGKHVGFRSLQDDPKLVHYMNVAKLQSDREYKKNYENTKTSYHTPGDMVSITAAKMAQDVATNVNYKQPLHHYTYLPDAMSLEHTRNVNQIQSDNVYKDEYNSFLKGIGWIPIGSLEVEKVKKAGDALNERKYRQHPDTVKFTSVPDSMGMVLAQHNTKQLSDLNYKVEGEKLKHKYTIDPELPQFIQAKVNALNMSDAHYKADWKKTIAKGYDLRPDAIPIVAAKSSRNIASDCKYKEAYEKAKGKQVGFLSLQDDPKLVHYMNVAKIQSDREYKKGYEASKTKYHTPLDMVSVTAAKKSQEVATNANYRQSYHHYTLLPDALNVEHSRNAMQIQSDNLYKSDFTNWMKGIGWVPIESLEVEKAKKAGEILSEKKYRQHPEKLKFTYAMDTMEQALNKSNKLNMDKRLYTEKWNKDKTTIHVMPDTPDILLSRVNQITMSDKLYKAGWEEEKKKGYDLRPDAIAIKAARASRDIASDYKYKKAYEQAKGKHIGFRSLEDDPKLVHFMQVAKMQSDREYKKGYEKSKTSFHTPVDMLSVVAAKKSQEVATNANYRNVIHTYNMLPDAMSFELAKNMMQIQSDNQYKADYADFMKGIGWLPLGSLEAEKNKKAMEIISEKKYRQHPDTLKYSTLMDSMNMVLAQNNAKIMNEHLYKQAWEADKTKVHIMPDIPQIILAKANAINMSDKLYKLSLEESKKKGYDLRPDAIPIKAAKASRDIASDYKYKYNYEKGKGKMVGFRSLEDDPKLVHSMQVAKMQSDREYKKNYENTKTSYHTPADMLSVTAAKDAQANITNTNYKHLIHKYILLPDAMNIELTRNMNRIQSDNEYKQDYNEWYKGLGWSPAGSLEVEKAKKATEYASDQKYRQHPSNFQFKKLTDSMDMVLAKQNAHTMNKHLYTIDWNKDKTKIHVMPDTPDILQAKQNQTLYSQKLYKLGWEEALKKGYDLPVDAISVQLAKASRDIASDYKYKQGYRKQLGHHVGFRSLQDDPKLVLSMNVAKMQSEREYKKDFEKWKTKFSSPVDMLGVVLAKKCQELVSDVDYKNYLHQWTCLPDQNDVVQAKKVYELQSENLYKSDLEWLRGIGWSPLGSLEAEKNKRASEIISEKKYRQPPDRNKFTSIPDAMDIVLAKTNAKNRSDRLYREAWDKDKTQIHIMPDTPDIVLAKANLINTSDKLYRMGYEELKRKGYDLPVDAIPIKAAKASREIASEYKYKEGFRKQLGHHIGARNIEDDPKMMWSMHVAKIQSDREYKKDFEKWKTKFSSPVDMLGVVLAKKCQTLVSDVDYKNYLHQWTCLPDQSDVIHARQAYDLQSDNLYKSDLQWLKGIGWMTSGSLEDEKNKRATQILSDHVYRQHPDQFKFSSLMDSIPMVLAKNNAITMNHRLYTEAWDKDKTTVHIMPDTPEVLLAKQNKVNYSEKLYKLGLEEAKRKGYDMRVDAIPIKAAKASRDIASEFKYKEGYRKQLGHHIGARAIRDDPKMMWSMHVAKIQSDREYKKDFEKWKTKFSSPVDMLGVVLAKKCQTLVSDVDYKNYLHQWTCLPDQSDVIHARQAYDLQSDNMYKSDLQWMRGIGWVSIGSLDVEKCKRATEILSDKIYRQPPDRFKFTSVTDSLEQVLAKNNAITMNKRLYTEAWDKDKTQIHIMPDTPEIMLARQNKINYSETLYKLANEEAKKKGYDLRSDAIPIVAAKASRDVISDYKYKDGYRKQLGHHIGARNIEDDPKMMWSMHVAKIQSDREYKKDFEKWKTKFSSPVDMLGVVLAKKCQTLVSDVDYKNYLHEWTCLPDQNDVIHARQAYDLQSDNIYKSDLQWLRGIGWVPIGSMDVVKCKRAAEILSDNIYRQPPDKLKFTSVTDSLEQVLAKNNALNMNKRLYTEAWDKDKTQVHIMPDTPEIMLARQNKINYSESLYRQAMEEAKKEGYDLRSDAIPIVAAKASRDIASDYKYKEAYRKQLGHHIGARAVHDDPKIMWSLHIAKVQSDREYKKDFEKYKTRYSSPVDMLGIVLAKKCQTLVSDVDYKHPLHEWICLPDQNDIIHARKAYDLQSDNLYKSDLEWMKGIGWVPIDSLEVVRAKRAGELLSDTIYRQRPETLKFTSITDTPEQVLAKNNALNMNKRLYTEAWDNDKKTIHVMPDTPEIMLAKLNRINYSDKLYKLALEESKKEGYDLRLDAIPIQAAKASRDIASDYKYKEGYRKQLGHHIGARNIKDDPKMMWSIHVAKIQSDREYKKEFEKWKTKFSSPVDMLGVVLAKKCQILVSDIDYKHPLHEWTCLPDQNDVIQARKAYDLQSDAIYKSDLEWLRGIGWVPIGSVEVEKVKRAGEILSDRKYRQPADQLKFTCITDTPEIVLAKNNALTMSKHLYTEAWDADKTSIHVMPDTPDILLAKSNSANISQKLYTKGWDESKMKDYDLRADAISIKSAKASRDIASDYKYKEAYEKQKGHHIGAQSIEDDPKIMCAIHAGKIQSEREYKKEFQKWKTKFSSPVDMLSILLAKKCQTLVTDIDYRNYLHEWTCMPDQNDIIQAKKAYDLQSDALYKADLEWLRGIGWMPQGSPEVLRVKNAQNIFCDSVYRTPVVNLKYTSIVDTPEVVLAKSNAENISIPKYREVWDKDKTSIHIMPDTPEINLARANALNVSNKLYREGWDEMKAGCDVRLDAIPIQAAKASREIASDYKYKLDHEKQKGHYVGTLTARDDNKIRWALIADKLQNEREYRLDWAKWKAKIQSPVDMLSILHSKNSQALVSDMDYRNYLHQWTCMPDQNDVIQAKKAYELQSDNVYKADLEWLRGIGWMPNDSVSVNHAKHAADIFSEKKYRTKIETLNFTPVDDRVDYVTAKQSGEILDDIKYRKDWNATKSKYTLTETPLLHTAQEAARILDQYLYKEGWERQKATGYILPPDAVPFVHAHHCNDVQSELKYKAEHVKQKGHYVGVPTMRDDPKLVWFEHAGQIQNERLYKEDYHKTKAKINIPADMVSVLAAKQGQTLVSDIDYRNYLHQWMCHPDQNDVIQARKAYDLQSDNVYRADLEWLRGIGWIPLDSVDHVRVTKNQEMMSQIKYKKNALENYPNFRSVVDPPEIVLAKINSVNQSDVKYKETFNKAKGKYTFSPDTPHISHSKDMGKLYSTILYKGAWEGTKAYGYTLDERYIPIVGAKHADLVNSELKYKETYEKQKGHYLAGKVIGEFPGVVHCLDFQKMRSALNYRKHYEDTKANVHIPNDMMNHVLAKRCQYILSDLEYRHYFHQWTSLLEEPNVIRVRNAQEILSDNVYKDDLNWLKGIGCYVWDTPQILHAKKSYDLQSQLQYTAAGKENLQNYNLVTDTPLYVTAVQSGINASEVKYKENYHQIKDKYTTVLETVDYDRTRNLKNLYSSNLYKEAWDRVKATSYILPSSTLSLTHAKNQKHLASHIKYREEYEKFKALYTLPRSVDDDPNTARCLRVGKLNIDRLYRSVYEKNKMKIHIVPDMVEMVTAKDSQKKVSEIDYRLRLHEWICHPDLQVNDHVRKVTDQISDIVYKDDLNWLKGIGCYVWDTPEILHAKHAYDLRDDIKYKAHMLKTRNDYKLVTDTPVYVQAVKSGKQLSDAVYHYDYVHSVRGKVAPTTKTVDLDRALHAYKLQSSNLYKTSLRTLPTGYRLPGDTPHFKHIKDTRYMSSYFKYKEAYEHTKAYGYTLGPKDVPFVHVRRVNNVTSERLYRELYHKLKDKIHTTPDTPEIRQVKKTQEAVSELIYKSDFFKMQGHMISLPYTPQVIHCRYVGDITSDIKYKEDLQVLKGFGCFLYDTPDMVRSRHLRKLWSNYLYTDKARKMRDKYKVVLDTPEYRKVQELKTHLSELVYRAAGKKQKSIFTSVPDTPDLLRAKRGQKLQSQYLYVELATKERPHHHAGNQTTALKHAKDVKDMVSEKKYKIQYEKMKDKYTPVPDTPILIRAKRAYWNASDLRYKETFQKTKGKYHTVKDALDIVYHRKVTDDISKIKYKENYMSQLGIWRSIPDRPEHFHHRAVTDTVSDVKYKEDLTWLKGIGCYAYDTPDFTLAEKNKTLYSKYKYKEVFERTKSDFKYVADSPINRHFKYATQLMNEKKYRADYEQRKDKYHLVVDEPRHLLAKTAGDQISQIKYRKNYEKSKDKFTSIVDTPEHLRTTKVNKQISDILYKLEYNKAKPRGYTTIHDTPMLLHVRKVKDEVSDLKYKEVYQRNKSNCTIEPDAVHIKAAKDAYKVNTNLDYKKQYEANKAHWKWTPDRPDFLQAAKSSLQQSDFEYKLDREFLKGCKLSVTDDKNTVLALRNTLIESDLKYKEKHVKERGTCHAVPDTPQILLAKTVSNLVSENKYKDHVKKHLAQGSYTTLPETRDTVHVKEVTKHVSDTNYKKKFVKEKGKSNYSIMLEPPEVKHAMEVAKKQSDVAYRKDAKENLHYTTVADRPDIKKATQAAKQASEVEYRAKHRKEGSHGLSMLGRPDIEMAKKAAKLSSQVKYRENFDKEKGKTPKYNPKDSQLYKVMKDANNLASEVKYKADLKKLHKPVTDMKESLIMNHVLNTSQLASSYQYKKKYEKSKGHYHTIPDNLEQLHLKEATELQSIVKYKEKYEKERGKPMLDFETPTYITAKESQQMQSGKEYRKDYEESIKGRNLTGLEVTPALLHVKYATKIASEKEYRKDLEESIRGKGLTEMEDTPDMLRAKNATQILNEKEYKRDLELEVKGRGLNAMANETPDFMRARNATDIASQIKYKQSAEMEKANFTSVVDTPEIIHAQQVKNLSSQKKYKEDAEKSMSYYETVLDTPEIQRVRENQKNFSLLQYQCDLKNSKGKITVVQDTPEILRVKENQKNFSSVLYKEDVSPGTAIGKTPEMMRVKQTQDHISSVKYKEAIGQGTPIPDLPEVKRVKETQKHISSVMYKENLGTGIPTTVTPEIERVKRNQENFSSVLYKENLGKGIPTPITPEMERVKRNQENFSSVLYKENMGKGTPLAVTPEMERVKHNQENISSVLYKENVGKATATPVTPEMQRVKRNQENISSVLYKENLGKATPTPFTPEMERVKRNQENFSSVLYKENMRKATPTPVTPEMERAKRNQENISSVLYSDSFRKQIQGKAAYVLDTPEMRRVRETQRHISTVKYHEDFEKHKGCFTPVVTDPITERVKKNMQDFSDINYRGIQRKVVEMEQKRNDQDQETITGLRVWRTNPGSVFDYDPAEDNIQSRSLHMINVQAQRRSREQSRSASALSISGGEEKSEHSEAPDHHLSTYSDGGVFAVSTAYKHAKTTELPQQRSSSVATQQTTVSSIPSHPSTAGKIFRAMYDYMAADADEVSFKDGDAIINVQAIDEGWMYGTVQRTGRTGMLPANYVEAI

SEQ ID NO: 41575 - protein, 8525 aa, Homo sapiens
MADDEDYEEVVEYYTEEVVYEEVPGETITKIYETTTTRTSDYEQSETSKPALAQPALAQPASAKPVERRKVIRKKVDPSKFMTPYIAHSQKMQDLFSPNKYKEKFEKTKGQPYASTTDTPELRRIKKVQDQLSEVKYRMDGDVAKTICHVDEKAKDIEHAKKVSQQVSKVLYKQNWEDTKDKYLLPPDAPELVQAVKNTAMFSKKLYTEDWEADKSLFYPYNDSPELRRVAQAQKALSDVAYKKGLAEQQAQFTPLADPPDIEFAKKVTNQVSKQKYKEDYENKIKGKWSETPCFEVANARMNADNISTRKYQEDFENMKDQIYFMQTETPEYKMNKKAGVAASKVKYKEDYEKNKGKADYNVLPASENPQLRQLKAAGDALSDKLYKENYEKTKAKSINYCETPKFKLDTVLQNFSSDKKYKDSYLKDILGHYVGSFEDPYHSHCMKVTAQNSDKNYKAEYEEDRGKGFFPQTITQEYEAIKKLDQCKDHTYKVHPDKTKFTQVTDSPVLLQAQVNSKQLSDLNYKAKHESEKFKCHIPPDTPAFIQHKVNAYNLSDNLYKQDWEKSKAKKFDIKVDAIPLLAAKANTKNTSDVMYKKDYEKNKGKMIGVLSINDDPKMLHSLKVAKNQSDRLYKENYEKTKAKSMNYCETPKYQLDTQLKNFSEARYKDLYVKDVLGHYVGSMEDPYHTHCMKVAAQNSDKSYKAEYEEDKGKCYFPQTITQEYEAIKKLDQCKDHTYKVHPDKTKFTAVTDSPVLLQAQLNTKQLSDLNYKAKHEGEKFKCHIPADAPQFIQHRVNAYNLSDNVYKQDWEKSKAKKFDIKVDAIPLLAAKANTKNTSDVMYKKDYEKSKGKMIGALSINDDPKMLHSLKTAKNQSDREYRKDYEKSKTIYTAPLDMLQVTQAKKSQAIASDVDYKHILHSYSYPPDSINVDLAKKAYALQSDVEYKADYNSWMKGCGWVPFGSLEMEKAKRASDILNEKKYRQHPDTLKFTSIEDAPITVQSKINQAQRSDIAYKAKGEEIIHKYNLPPDLPQFIQAKVNAYNISENMYKADLKDLSKKGYDLRTDAIPIRAAKAARQAASDVQYKKDYEKAKGKMVGFQSLQDDPKLVHYMNVAKIQSDREYKKDYEKTKSKYNTPHDMFNVVAAKKAQDVVSNVNYKHSLHHYTYLPDAMDLELSKNMMQIQSDNVYKEDYNNWMKGIGWIPIGSLDVEKVKKAGDALNEKKYRQHPDTLKFTSIVDSPVMVQAKQNTKQVSDILYKAKGEDVKHKYTMSPDLPQFLQAKCNAYNISDVCYKRDWYDLIAKGNNVLGDAIPITAAKASRNIASDYKYKEAYEKSKGKHVGFRSLQDDPKLVHYMNVAKLQSDREYKKNYENTKTSYHTPGDMVSITAAKMAQDVATNVNYKQPLHHYTYLPDAMSLEHTRNVNQIQSDNVYKDEYNSFLKGIGWIPIGSLEVEKVKKAGDALNERKYRQHPDTVKFTSVPDSMGMVLAQHNTKQLSDLNYKVEGEKLKHKYTIDPELPQFIQAKVNALNMSDAHYKADWKKTIAKGYDLRPDAIPIVAAKSSRNIASDCKYKEAYEKAKGKQVGFLSLQDDPKLVHYMNVAKIQSDREYKKGYEASKTKYHTPLDMVSVTAAKKSQEVATNANYRQSYHHYTLLPDALNVEHSRNAMQIQSDNLYKSDFTNWMKGIGWVPIESLEVEKAKKAGEILSEKKYRQHPEKLKFTYAMDTMEQALNKSNKLNMDKRLYTEKWNKDKTTIHVMPDTPDILLSRVNQITMSDKLYKAGWEEEKKKGYDLRPDAIAIKAARASRDIASDYKYKKAYEQAKGKHIGFRSLEDDPKLVHFMQVAKMQSDREYKKGYEKSKTSFHTPVDMLSVVAAKKSQEVATNANYRNVIHTYNMLPDAMSFELAKNMMQIQSDNQYKADYADFMKGIGWLPLGSLEAEKNKKAMEIISEKKYRQHPDTLKYSTLMDSMNMVLAQNNAKIMNEHLYKQAWEADKTKVHIMPDIPQIILAKANAINMSDKLYKLSLEESKKKGYDLRPDAIPIKAAKASRDIASDYKYKYNYEKGKGKMVGFRSLEDDPKLVHSMQVAKMQSDREYKKNYENTKTSYHTPADMLSVTAAKDAQANITNTNYKHLIHKYILLPDAMNIELTRNMNRIQSDNEYKQDYNEWYKGLGWSPAGSLEVEKAKKATEYASDQKYRQHPSNFQFKKLTDSMDMVLAKQNAHTMNKHLYTIDWNKDKTKIHVMPDTPDILQAKQNQTLYSQKLYKLGWEEALKKGYDLPVDAISVQLAKASRDIASDYKYKQGYRKQLGHHVGFRSLQDDPKLVLSMNVAKMQSEREYKKDFEKWKTKFSSPVDMLGVVLAKKCQELVSDVDYKNYLHQWTCLPDQNDVVQAKKVYELQSENLYKSDLEWLRGIGWSPLGSLEAEKNKRASEIISEKKYRQPPDRNKFTSIPDAMDIVLAKTNAKNRSDRLYREAWDKDKTQIHIMPDTPDIVLAKANLINTSDKLYRMGYEELKRKGYDLPVDAIPIKAAKASREIASEYKYKEGFRKQLGHHIGARNIEDDPKMMWSMHVAKIQSDREYKKDFEKWKTKFSSPVDMLGVVLAKKCQTLVSDVDYKNYLHQWTCLPDQSDVIHARQAYDLQSDNLYKSDLQWLKGIGWMTSGSLEDEKNKRATQILSDHVYRQHPDQFKFSSLMDSIPMVLAKNNAITMNHRLYTEAWDKDKTTVHIMPDTPEVLLAKQNKVNYSEKLYKLGLEEAKRKGYDMRVDAIPIKAAKASRDIASEFKYKEGYRKQLGHHIGARAIRDDPKMMWSMHVAKIQSDREYKKDFEKWKTKFSSPVDMLGVVLAKKCQTLVSDVDYKNYLHQWTCLPDQSDVIHARQAYDLQSDNMYKSDLQWMRGIGWVSIGSLDVEKCKRATEILSDKIYRQPPDRFKFTSVTDSLEQVLAKNNAITMNKRLYTEAWDKDKTQIHIMPDTPEIMLARMNKINYSESLYKLANEEAKKKGYDLRSDAIPIVAAKASRDIISDYKYKDGYCKQLGHHIGARNIEDDPKMMWSMHVAKIQSDREYKKDFEKWKTKFSSPVDMLGVVLAKKCQTLVSDVDYKNYLHEWTCLPDQSDVIHARQAYDLQSDNIYKSDLQWLRGIGWVPIGSMDVVKCKRATEILSDNIYRQPPDKLKFTSVTDSLEQVLAKNNALNMNKRLYTEAWDKDKTQIHIMPDTPEIMLARQNKINYSETLYKLANEEAKKKGYDLRSDAIPIVAAKASRDVISDYKYKDGYRKQLGHHIGARNIEDDPKMMWSMHVAKIQSDREYKKDFEKWKTKFSSPVDMLGVVLAKKCQTLVSDVDYKNYLHEWTCLPDQNDVIHARQAYDLQSDNIYKSDLQWLRGIGWVPIGSMDVVKCKRAAEILSDNIYRQPPDKLKFTSVTDSLEQVLAKNNALNMNKRLYTEAWDKDKTQVHIMPDTPEIMLARQNKINYSESLYRQAMEEAKKEGYDLRSDAIPIVAAKASRDIASDYKYKEAYRKQLGHHIGARAVHDDPKIMWSLHIAKVQSDREYKKDFEKYKTRYSSPVDMLGIVLAKKCQTLVSDVDYKHPLHEWICLPDQNDIIHARKAYDLQSDNLYKSDLEWMKGIGWVPIDSLEVVRAKRAGELLSDTIYRQRPETLKFTSITDTPEQVLAKNNALNMNKRLYTEAWDNDKKTIHVMPDTPEIMLAKLNRINYSDKLYKLALEESKKEGYDLRLDAIPIQAAKASRDIASDYKYKEGYRKQLGHHIGARNIKDDPKMMWSIHVAKIQSDREYKKEFEKWKTKFSSPVDMLGVVLAKKCQILVSDIDYKHPLHEWTCLPDQNDVIQARKAYDLQSDAIYKSDLEWLRGIGWVPIGSVEVEKVKRAGEILSDRKYRQPADQLKFTCITDTPEIVLAKNNALTMSKHLYTEAWDADKTSIHVMPDTPDILLAKSNSANISQKLYTKGWDESKMKDYDLRADAISIKSAKASRDIASDYKYKEAYEKQKGHHIGAQSIEDDPKIMCAIHAGKIQSEREYKKEFQKWKTKFSSPVDMLSILLAKKCQTLVTDIDYRNYLHEWTCMPDQNDIIQAKKAYDLQSDSVYKADLEWLRGIGWMPEGSVEMNRVKVAQDLVNERLYRTRPEALSFTSIVDTPEVVLAKANSLQISEKLYQEAWNKDKSNITIPSDTPEMLQAHINALQISNKLYQKDWNDAKQKGYDIRADAIEIKHAKASREIASEYKYKEGYRKQLGHHMGFRTLQDDPKSVWAIHAAKIQSDREYKKAYEKSKGIHNTPLDMMSIVQAKKCQVLVSDIDYRNYLHQWTCLPDQNDVIQAKKAYDLQSDNLYKSDLEWLKGIGWLPEGSVEVMRVKNAQNLLNERLYRIKPEALKFTSIVDTPEVIQAKINAVQISEPLYRDAWEKEKANVNVPADTPLMLQSKINALQISNKRYQQAWEDVKMTGYDLRADAIGIQHAKASRDIASDYLYKTAYEKQKGHYIGCRSAKEDPKLVWAANVLKMQNDRLYKKAYNDHKAKISIPVDMVSISAAKEGQALASDVDYRHYLHHWSCFPDQNDVIQARKAYDLQSDSVYKADLEWLRGIGWMPEGSVEMNRVKVAQDLVNERLYRTRPEALSFTSIVDTPEVVLAKANSLQISEKLYQEAWNKDKSNITIPSDTPEMLQAHINALQISNKLYQKDWNDTKQKGYDIRADAIEIKHAKASREIASEYKYKEGYRKQLGHHMGFRTLQDDPKSVWAIHAAKIQSDREYKKAYEKSKGIHNTPLDMMSIVQAKKCQVLVSDIDYRNYLHQWTCLPDQNDVIQAKKAYDLQSDNLYKSDLEWLKGIGWLPEGSVEVMRVKNAQNLLNERLYRIKPEALKFTSIVDTPEVIQAKINAVQISEPLYRNAWEKEKANVNVPADTPLMLQSKINALQISNKRYQQAWEDVKMTGYDLRADAIGIQHAKASRDIASDYLYKTAYEKQKGHYIGCRSAKEDPKLVWAANVLKMQNDRLYKKAYNDHKAKISIPVDMVSISAAKEGQALASDVDYRHYLHHWSCFPDQNDVIQARKAYDLQSDSVYKADLEWLRGIGWMPEGSVEMNRVKVAQDLVNERLYRTRPEALSFTSIVDTPEVVLAKANSLQISEKLYQEAWNKDKSNITIPSDTPEMLQAHINALQISNKLYQKDWNDTKQKGYDIRADAIEIKHAKASREIASEYKYKEGYRKQLGHHMGFRTLQDDPKSVWAIHAAKIQSDREYKKAYEKSKGIHNTPLDMMSIVQAKKCQVLVSDIDYRNYLHQWTCLPDQNDVIQAKKAYDLQSDNLYKSDLEWLKGIGWLPEGSVEVMRVKNAQNLLNERLYRIKPEALKFTSIVDTPEVIQAKINAVQISEPLYRDAWEKEKANVNVPADTPLMLQSKINALQISNKRYQQAWEDVKMTGYDLRADAIGIQHAKASRDIASDYLYKTAYEKQKGHYIGCRSAKEDPKLVWAANVLKMQNDRLYKKAYNDHKAKISIPVDMVSISAAKEGQALASDVDYRHYLHRWSCFPDQNDVIQARKAYDLQSDALYKADLEWLRGIGWMPQGSPEVLRVKNAQNIFCDSVYRTPVVNLKYTSIVDTPEVVLAKSNAENISIPKYREVWDKDKTSIHIMPDTPEINLARANALNVSNKLYREGWDEMKAGCDVRLDAIPIQAAKASREIASDYKYKLDHEKQKGHYVGTLTARDDNKIRWALIADKLQNEREYRLDWAKWKAKIQSPVDMLSILHSKNSQALVSDMDYRNYLHQWTCMPDQNDVIQAKKAYELQSDNVYKADLEWLRGIGWMPNDSVSVNHAKHAADIFSEKKYRTKIETLNFTPVDDRVDYVTAKQSGEILDDIKYRKDWNATKSKYTLTETPLLHTAQEAARILDQYLYKEGWERQKATGYILPPDAVPFVHAHHCNDVQSELKYKAEHVKQKGHYVGVPTMRDDPKLVWFEHAGQIQNERLYKEDYHKTKAKINIPADMVSVLAAKQGQTLVSDIDYRNYLHQWMCHPDQNDVIQARKAYDLQSDNVYRADLEWLRGIGWIPLDSVDHVRVTKNQEMMSQIKYKKNALENYPNFRSVVDPPEIVLAKINSVNQSDVKYKETFNKAKGKYTFSPDTPHISHSKDMGKLYSTILYKGAWEGTKAYGYTLDERYIPIVGAKHADLVNSELKYKETYEKQKGHYLAGKVIGEFPGVVHCLDFQKMRSALNYRKHYEDTKANVHIPNDMMNHVLAKRCQYILSDLEYRHYFHQWTSLLEEPNVIRVRNAQEILSDNVYKDDLNWLKGIGCYVWDTPQILHAKKSYDLQSQLQYTAAGKENLQNYNLVTDTPLYVTAVQSGINASEVKYKENYHQIKDKYTTVLETVDYDRTRNLKNLYSSNLYKEAWDRVKATSYILPSSTLSLTHAKNQKHLASHIKYREEYEKFKALYTLPRSVDDDPNTARCLRVGKLNIDRLYRSVYEKNKMKIHIVPDMVEMVTAKDSQKKVSEIDYRLRLHEWICHPDLQVNDHVRKVTDQISDIVYKDDLNWLKGIGCYVWDTPEILHAKHAYDLRDDIKYKAHMLKTRNDYKLVTDTPVYVQAVKSGKQLSDAVYHYDYVHSVRGKVAPTTKTVDLDRALHAYKLQSSNLYKTSLRTLPTGYRLPGDTPHFKHIKDTRYMSSYFKYKEAYEHTKAYGYTLGPKDVPFVHVRRVNNVTSERLYRELYHKLKDKIHTTPDTPEIRQVKKTQEAVSELIYKSDFFKMQGHMISLPYTPQVIHCRYVGDITSDIKYKEDLQVLKGFGCFLYDTPDMVRSRHLRKLWSNYLYTDKARKMRDKYKVVLDTPEYRKVQELKTHLSELVYRAAGKKQKSIFTSVPDTPDLLRAKRGQKLQSQYLYVELATKERPHHHAGNQTTALKHAKDVKDMVSEKKYKIQYEKMKDKYTPVPDTPILIRAKRAYWNASDLRYKETFQKTKGKYHTVKDALDIVYHRKVTDDISKIKYKENYMSQLGIWRSIPDRPEHFHHRAVTDTVSDVKYKEDLTWLKGIGCYAYDTPDFTLAEKNKTLYSKYKYKEVFERTKSDFKYVADSPINRHFKYATQLMNERKYKSSAKMFLQHGCNEILRPDMLTALYNSHMWSQIKYRKNYEKSKDKFTSIVDTPEHLRTTKVNKQISDILYKLEYNKAKPRGYTTIHDTPMLLHVRKVKDEVSDLKYKEVYQRNKSNCTIEPDAVHIKAAKDAYKVNTNLDYKKQYEANKAHWKWTPDRPDFLQAAKSSLQQSDFEYKLDREFLKGCKLSVTDDKNTVLALRNTLIESDLKYKEKHVKERGTCHAVPDTPQILLAKTVSNLVSENKYKDHVKKHLAQGSYTTLPETRDTVHVKEVTKHVSDTNYKKKFVKEKGKSNYSIMLEPPEVKHAMEVAKKQSDVAYRKDAKENLHYTTVADRPDIKKATQAAKQASEVEYRAKHRKEGSHGLSMLGRPDIEMAKKAAKLSSQVKYRENFDKEKGKTPKYNPKDSQLYKVMKDANNLASEVKYKADLKKLHKPVTDMKESLIMNHVLNTSQLASSYQYKKKYEKSKGHYHTIPDNLEQLHLKEATELQSIVKYKEKYEKERGKPMLDFETPTYITAKESQQMQSGKEYRKDYEESIKGRNLTGLEVTPALLHVKYATKIASEKEYRKDLEESIRGKGLTEMEDTPDMLRAKNATQILNEKEYKRDLELEVKGRGLNAMANETPDFMRARNATDIASQIKYKQSAEMEKANFTSVVDTPEIIHAQQVKNLSSQKKYKEDAEKSMSYYETVLDTPEIQRVRENQKNFSLLQYQCDLKNSKGKITVVQDTPEILRVKENQKNFSSVLYKEDVSPGTAIGKTPEMMRVKQTQDHISSVKYKEAIGQGTPIPDLPEVKRVKETQKHISSVMYKENLGTGIPTTVTPEIERVKRNQENFSSVLYKENLGKGIPTPITPEMERVKRNQENFSSILYKENLSKGTPLPVTPEMERVKLNQENFSSVLYKENVGKGIPIPITPEMERVKHNQENFSSVLYKENLGTGIPIPITPEMQRVKHNQENLSSVLYKENMGKGTPLPVTPEMERVKHNQENISSVLYKENMGKGTPLPVTPEMERVKHNQENISSVLYKENMGKGTPLAVTPEMERVKHNQENISSVLYKENVGKATATPVTPEMQRVKRNQENISSVLYKENLGKATPTPFTPEMERVKRNQENFSSVLYKENMRKATPTPVTPEMERAKRNQENISSVLYSDSFRKQIQGKAAYVLDTPEMRRVRETQRHISTVKYHEDFEKHKGCFTPVVTDPITERVKKNMQDFSDINYRGIQRKVVEMEQKRNDQDQETITGLRVWRTNPGSVFDYDPAEDNIQSRSLHMINVQAQRRSREQSRSASALSISGGEEKSEHSEAPDHHLSTYSDGGVFAVSTAYKHAKTTELPQQRSSSVATQQTTVSSIPSHPSTAGKIFRAMYDYMAADADEVSFKDGDAIINVQAIDEGWMYGTVQRTGRTGMLPANYVEAI

SEQ ID NO: 41576 - protein, 8525 aa, Homo sapiens
MADDEDYEEVVEYYTEEVVYEEVPGETITKIYETTTTRTSDYEQSETSKPALAQPALAQPASAKPVERRKVIRKKVDPSKFMTPYIAHSQKMQDLFSPNKYKEKFEKTKGQPYASTTDTPELRRIKKVQDQLSEVKYRMDGDVAKTICHVDEKAKDIEHAKKVSQQVSKVLYKQNWEDTKDKYLLPPDAPELVQAVKNTAMFSKKLYTEDWEADKSLFYPYNDSPELRRVAQAQKALSDVAYKKGLAEQQAQFTPLADPPDIEFAKKVTNQVSKQKYKEDYENKIKGKWSETPCFEVANARMNADNISTRKYQEDFENMKDQIYFMQTETPEYKMNKKAGVAASKVKYKEDYEKNKGKADYNVLPASENPQLRQLKAAGDALSDKLYKENYEKTKAKSINYCETPKFKLDTVLQNFSSDKKYKDSYLKDILGHYVGSFEDPYHSHCMKVTAQNSDKNYKAEYEEDRGKGFFPQTITQEYEAIKKLDQCKDHTYKVHPDKTKFTQVTDSPVLLQAQVNSKQLSDLNYKAKHESEKFKCHIPPDTPAFIQHKVNAYNLSDNLYKQDWEKSKAKKFDIKVDAIPLLAAKANTKNTSDVMYKKDYEKNKGKMIGVLSINDDPKMLHSLKVAKNQSDRLYKENYEKTKAKSMNYCETPKYQLDTQLKNFSEARYKDLYVKDVLGHYVGSMEDPYHTHCMKVAAQNSDKSYKAEYEEDKGKCYFPQTITQEYEAIKKLDQCKDHTYKVHPDKTKFTAVTDSPVLLQAQLNTKQLSDLNYKAKHEGEKFKCHIPADAPQFIQHRVNAYNLSDNVYKQDWEKSKAKKFDIKVDAIPLLAAKANTKNTSDVMYKKDYEKSKGKMIGALSINDDPKMLHSLKTAKNQSDREYRKDYEKSKTIYTAPLDMLQVTQAKKSQAIASDVDYKHILHSYSYPPDSINVDLAKKAYALQSDVEYKADYNSWMKGCGWVPFGSLEMEKAKRASDILNEKKYRQHPDTLKFTSIEDAPITVQSKINQAQRSDIAYKAKGEEIIHKYNLPPDLPQFIQAKVNAYNISENMYKADLKDLSKKGYDLRTDAIPIRAAKAARQAASDVQYKKDYEKAKGKMVGFQSLQDDPKLVHYMNVAKIQSDREYKKDYEKTKSKYNTPHDMFNVVAAKKAQDVVSNVNYKHSLHHYTYLPDAMDLELSKNMMQIQSDNVYKEDYNNWMKGIGWIPIGSLDVEKVKKAGDALNEKKYRQHPDTLKFTSIVDSPVMVQAKQNTKQVSDILYKAKGEDVKHKYTMSPDLPQFLQAKCNAYNISDVCYKRDWYDLIAKGNNVLGDAIPITAAKASRNIASDYKYKEAYEKSKGKHVGFRSLQDDPKLVHYMNVAKLQSDREYKKNYENTKTSYHTPGDMVSITAAKMAQDVATNVNYKQPLHHYTYLPDAMSLEHTRNVNQIQSDNVYKDEYNSFLKGIGWIPIGSLEVEKVKKAGDALNERKYRQHPDTVKFTSVPDSMGMVLAQHNTKQLSDLNYKVEGEKLKHKYTIDPELPQFIQAKVNALNMSDAHYKADWKKTIAKGYDLRPDAIPIVAAKSSRNIASDCKYKEAYEKAKGKQVGFLSLQDDPKLVHYMNVAKIQSDREYKKGYEASKTKYHTPLDMVSVTAAKKSQEVATNANYRQSYHHYTLLPDALNVEHSRNAMQIQSDNLYKSDFTNWMKGIGWVPIESLEVEKAKKAGEILSEKKYRQHPEKLKFTYAMDTMEQALNKSNKLNMDKRLYTEKWNKDKTTIHVMPDTPDILLSRVNQITMSDKLYKAGWEEEKKKGYDLRPDAIAIKAARASRDIASDYKYKKAYEQAKGKHIGFRSLEDDPKLVHFMQVAKMQSDREYKKGYEKSKTSFHTPVDMLSVVAAKKSQEVATNANYRNVIHTYNMLPDAMSFELAKNMMQIQSDNQYKADYADFMKGIGWLPLGSLEAEKNKKAMEIISEKKYRQHPDTLKYSTLMDSMNMVLAQNNAKIMNEHLYKQAWEADKTKVHIMPDIPQIILAKANAINMSDKLYKLSLEESKKKGYDLRPDAIPIKAAKASRDIASDYKYKYNYEKGKGKMVGFRSLEDDPKLVHSMQVAKMQSDREYKKNYENTKTSYHTPADMLSVTAAKDAQANITNTNYKHLIHKYILLPDAMNIELTRNMNRIQSDNEYKQDYNEWYKGLGWSPAGSLEVEKAKKATEYASDQKYRQHPSNFQFKKLTDSMDMVLAKQNAHTMNKHLYTIDWNKDKTKIHVMPDTPDILQAKQNQTLYSQKLYKLGWEEALKKGYDLPVDAISVQLAKASRDIASDYKYKQGYRKQLGHHVGFRSLQDDPKLVLSMNVAKMQSEREYKKDFEKWKTKFSSPVDMLGVVLAKKCQELVSDVDYKNYLHQWTCLPDQNDVVQAKKVYELQSENLYKSDLEWLRGIGWSPLGSLEAEKNKRASEIISEKKYRQPPDRNKFTSIPDAMDIVLAKTNAKNRSDRLYREAWDKDKTQIHIMPDTPDIVLAKANLINTSDKLYRMGYEELKRKGYDLPVDAIPIKAAKASREIASEYKYKEGFRKQLGHHIGARNIEDDPKMMWSMHVAKIQSDREYKKDFEKWKTKFSSPVDMLGVVLAKKCQTLVSDVDYKNYLHQWTCLPDQSDVIHARQAYDLQSDNLYKSDLQWLKGIGWMTSGSLEDEKNKRATQILSDHVYRQHPDQFKFSSLMDSIPMVLAKNNAITMNHRLYTEAWDKDKTTVHIMPDTPEVLLAKQNKVNYSEKLYKLGLEEAKRKGYDMRVDAIPIKAAKASRDIASEFKYKEGYRKQLGHHIGARAIRDDPKMMWSMHVAKIQSDREYKKDFEKWKTKFSSPVDMLGVVLAKKCQTLVSDVDYKNYLHQWTCLPDQSDVIHARQAYDLQSDNMYKSDLQWMRGIGWVSIGSLDVEKCKRATEILSDKIYRQPPDRFKFTSVTDSLEQVLAKNNAITMNKRLYTEAWDKDKTQIHIMPDTPEIMLARMNKINYSESLYKLANEEAKKKGYDLRSDAIPIVAAKASRDIISDYKYKDGYCKQLGHHIGARNIEDDPKMMWSMHVAKIQSDREYKKDFEKWKTKFSSPVDMLGVVLAKKCQTLVSDVDYKNYLHEWTCLPDQSDVIHARQAYDLQSDNIYKSDLQWLRGIGWVPIGSMDVVKCKRATEILSDNIYRQPPDKLKFTSVTDSLEQVLAKNNALNMNKRLYTEAWDKDKTQIHIMPDTPEIMLARQNKINYSETLYKLANEEAKKKGYDLRSDAIPIVAAKASRDVISDYKYKDGYRKQLGHHIGARNIEDDPKMMWSMHVAKIQSDREYKKDFEKWKTKFSSPVDMLGVVLAKKCQTLVSDVDYKNYLHEWTCLPDQNDVIHARQAYDLQSDNIYKSDLQWLRGIGWVPIGSMDVVKCKRAAEILSDNIYRQPPDKLKFTSVTDSLEQVLAKNNALNMNKRLYTEAWDKDKTQVHIMPDTPEIMLARQNKINYSESLYRQAMEEAKKEGYDLRSDAIPIVAAKASRDIASDYKYKEAYRKQLGHHIGARAVHDDPKIMWSLHIAKVQSDREYKKDFEKYKTRYSSPVDMLGIVLAKKCQTLVSDVDYKHPLHEWICLPDQNDIIHARKAYDLQSDNLYKSDLEWMKGIGWVPIDSLEVVRAKRAGELLSDTIYRQRPETLKFTSITDTPEQVLAKNNALNMNKRLYTEAWDNDKKTIHVMPDTPEIMLAKLNRINYSDKLYKLALEESKKEGYDLRLDAIPIQAAKASRDIASDYKYKEGYRKQLGHHIGARNIKDDPKMMWSIHVAKIQSDREYKKEFEKWKTKFSSPVDMLGVVLAKKCQILVSDIDYKHPLHEWTCLPDQNDVIQARKAYDLQSDAIYKSDLEWLRGIGWVPIGSVEVEKVKRAGEILSDRKYRQPADQLKFTCITDTPEIVLAKNNALTMSKHLYTEAWDADKTSIHVMPDTPDILLAKSNSANISQKLYTKGWDESKMKDYDLRADAISIKSAKASRDIASDYKYKEAYEKQKGHHIGAQSIEDDPKIMCAIHAGKIQSEREYKKEFQKWKTKFSSPVDMLSILLAKKCQTLVTDIDYRNYLHEWTCMPDQNDIIQAKKAYDLQSDSVYKADLEWLRGIGWMPEGSVEMNRVKVAQDLVNERLYRTRPEALSFTSIVDTPEVVLAKANSLQISEKLYQEAWNKDKSNITIPSDTPEMLQAHINALQISNKLYQKDWNDAKQKGYDIRADAIEIKHAKASREIASEYKYKEGYRKQLGHHMGFRTLQDDPKSVWAIHAAKIQSDREYKKAYEKSKGIHNTPLDMMSIVQAKKCQVLVSDIDYRNYLHQWTCLPDQNDVIQAKKAYDLQSDNLYKSDLEWLKGIGWLPEGSVEVMRVKNAQNLLNERLYRIKPEALKFTSIVDTPEVIQAKINAVQISEPLYRDAWEKEKANVNVPADTPLMLQSKINALQISNKRYQQAWEDVKMTGYDLRADAIGIQHAKASRDIASDYLYKTAYEKQKGHYIGCRSAKEDPKLVWAANVLKMQNDRLYKKAYNDHKAKISIPVDMVSISAAKEGQALASDVDYRHYLHHWSCFPDQNDVIQARKAYDLQSDSVYKADLEWLRGIGWMPEGSVEMNRVKVAQDLVNERLYRTRPEALSFTSIVDTPEVVLAKANSLQISEKLYQEAWNKDKSNITIPSDTPEMLQAHINALQISNKLYQKDWNDTKQKGYDIRADAIEIKHAKASREIASEYKYKEGYRKQLGHHMGFRTLQDDPKSVWAIHAAKIQSDREYKKAYEKSKGIHNTPLDMMSIVQAKKCQVLVSDIDYRNYLHQWTCLPDQNDVIQAKKAYDLQSDNLYKSDLEWLKGIGWLPEGSVEVMRVKNAQNLLNERLYRIKPEALKFTSIVDTPEVIQAKINAVQISEPLYRNAWEKEKANVNVPADTPLMLQSKINALQISNKRYQQAWEDVKMTGYDLRADAIGIQHAKASRDIASDYLYKTAYEKQKGHYIGCRSAKEDPKLVWAANVLKMQNDRLYKKAYNDHKAKISIPVDMVSISAAKEGQALASDVDYRHYLHHWSCFPDQNDVIQARKAYDLQSDSVYKADLEWLRGIGWMPEGSVEMNRVKVAQDLVNERLYRTRPEALSFTSIVDTPEVVLAKANSLQISEKLYQEAWNKDKSNITIPSDTPEMLQAHINALQISNKLYQKDWNDTKQKGYDIRADAIEIKHAKASREIASEYKYKEGYRKQLGHHMGFRTLQDDPKSVWAIHAAKIQSDREYKKAYEKSKGIHNTPLDMMSIVQAKKCQVLVSDIDYRNYLHQWTCLPDQNDVIQAKKAYDLQSDNLYKSDLEWLKGIGWLPEGSVEVMRVKNAQNLLNERLYRIKPEALKFTSIVDTPEVIQAKINAVQISEPLYRDAWEKEKANVNVPADTPLMLQSKINALQISNKRYQQAWEDVKMTGYDLRADAIGIQHAKASRDIASDYLYKTAYEKQKGHYIGCRSAKEDPKLVWAANVLKMQNDRLYKKAYNDHKAKISIPVDMVSISAAKEGQALASDVDYRHYLHRWSCFPDQNDVIQARKAYDLQSDALYKADLEWLRGIGWMPQGSPEVLRVKNAQNIFCDSVYRTPVVNLKYTSIVDTPEVVLAKSNAENISIPKYREVWDKDKTSIHIMPDTPEINLARANALNVSNKLYREGWDEMKAGCDVRLDAIPIQAAKASREIASDYKYKLDHEKQKGHYVGTLTARDDNKIRWALIADKLQNEREYRLDWAKWKAKIQSPVDMLSILHSKNSQALVSDMDYRNYLHQWTCMPDQNDVIQAKKAYELQSDNVYKADLEWLRGIGWMPNDSVSVNHAKHAADIFSEKKYRTKIETLNFTPVDDRVDYVTAKQSGEILDDIKYRKDWNATKSKYTLTETPLLHTAQEAARILDQYLYKEGWERQKATGYILPPDAVPFVHAHHCNDVQSELKYKAEHVKQKGHYVGVPTMRDDPKLVWFEHAGQIQNERLYKEDYHKTKAKINIPADMVSVLAAKQGQTLVSDIDYRNYLHQWMCHPDQNDVIQARKAYDLQSDNVYRADLEWLRGIGWIPLDSVDHVRVTKNQEMMSQIKYKKNALENYPNFRSVVDPPEIVLAKINSVNQSDVKYKETFNKAKGKYTFSPDTPHISHSKDMGKLYSTILYKGAWEGTKAYGYTLDERYIPIVGAKHADLVNSELKYKETYEKQKGHYLAGKVIGEFPGVVHCLDFQKMRSALNYRKHYEDTKANVHIPNDMMNHVLAKRCQYILSDLEYRHYFHQWTSLLEEPNVIRVRNAQEILSDNVYKDDLNWLKGIGCYVWDTPQILHAKKSYDLQSQLQYTAAGKENLQNYNLVTDTPLYVTAVQSGINASEVKYKENYHQIKDKYTTVLETVDYDRTRNLKNLYSSNLYKEAWDRVKATSYILPSSTLSLTHAKNQKHLASHIKYREEYEKFKALYTLPRSVDDDPNTARCLRVGKLNIDRLYRSVYEKNKMKIHIVPDMVEMVTAKDSQKKVSEIDYRLRLHEWICHPDLQVNDHVRKVTDQISDIVYKDDLNWLKGIGCYVWDTPEILHAKHAYDLRDDIKYKAHMLKTRNDYKLVTDTPVYVQAVKSGKQLSDAVYHYDYVHSVRGKVAPTTKTVDLDRALHAYKLQSSNLYKTSLRTLPTGYRLPGDTPHFKHIKDTRYMSSYFKYKEAYEHTKAYGYTLGPKDVPFVHVRRVNNVTSERLYRELYHKLKDKIHTTPDTPEIRQVKKTQEAVSELIYKSDFFKMQGHMISLPYTPQVIHCRYVGDITSDIKYKEDLQVLKGFGCFLYDTPDMVRSRHLRKLWSNYLYTDKARKMRDKYKVVLDTPEYRKVQELKTHLSELVYRAAGKKQKSIFTSVPDTPDLLRAKRGQKLQSQYLYVELATKERPHHHAGNQTTALKHAKDVKDMVSEKKYKIQYEKMKDKYTPVPDTPILIRAKRAYWNASDLRYKETFQKTKGKYHTVKDALDIVYHRKVTDDISKIKYKENYMSQLGIWRSIPDRPEHFHHRAVTDTVSDVKYKEDLTWLKGIGCYAYDTPDFTLAEKNKTLYSKYKYKEVFERTKSDFKYVADSPINRHFKYATQLMNEKKYRADYEQRKDKYHLVVDEPRHLLAKTAGDQISQIKYRKNYEKSKDKFTSIVDTPEHLRTTKVNKQISDILYKLEYNKAKPRGYTTIHDTPMLLHVRKVKDEVSDLKYKEVYQRNKSNCTIEPDAVHIKAAKDAYKVNTNLDYKKQYEANKAHWKWTPDRPDFLQAAKSSLQQSDFEYKLDREFLKGCKLSVTDDKNTVLALRNTLIESDLKYKEKHVKERGTCHAVPDTPQILLAKTVSNLVSENKYKDHVKKHLAQGSYTTLPETRDTVHVKEVTKHVSDTNYKKKFVKEKGKSNYSIMLEPPEVKHAMEVAKKQSDVAYRKDAKENLHYTTVADRPDIKKATQAAKQASEVEYRAKHRKEGSHGLSMLGRPDIEMAKKAAKLSSQVKYRENFDKEKGKTPKYNPKDSQLYKVMKDANNLASEVKYKADLKKLHKPVTDMKESLIMNHVLNTSQLASSYQYKKKYEKSKGHYHTIPDNLEQLHLKEATELQSIVKYKEKYEKERGKPMLDFETPTYITAKESQQMQSGKEYRKDYEESIKGRNLTGLEVTPALLHVKYATKIASEKEYRKDLEESIRGKGLTEMEDTPDMLRAKNATQILNEKEYKRDLELEVKGRGLNAMANETPDFMRARNATDIASQIKYKQSAEMEKANFTSVVDTPEIIHAQQVKNLSSQKKYKEDAEKSMSYYETVLDTPEIQRVRENQKNFSLLQYQCDLKNSKGKITVVQDTPEILRVKENQKNFSSVLYKEDVSPGTAIGKTPEMMRVKQTQDHISSVKYKEAIGQGTPIPDLPEVKRVKETQKHISSVMYKENLGTGIPTTVTPEIERVKRNQENFSSVLYKENLGKGIPTPITPEMERVKRNQENFSSILYKENLSKGTPLPVTPEMERVKLNQENFSSVLYKENVGKGIPIPITPEMERVKHNQENFSSVLYKENLGTGIPIPITPEMQRVKHNQENLSSVLYKENMGKGTPLPVTPEMERVKHNQENISSVLYKENMGKGTPLPVTPEMERVKHNQENISSVLYKENMGKGTPLAVTPEMERVKHNQENISSVLYKENVGKATATPVTPEMQRVKRNQENISSVLYKENLGKATPTPFTPEMERVKRNQENFSSVLYKENMRKATPTPVTPEMERAKRNQENISSVLYSDSFRKQIQGKAAYVLDTPEMRRVRETQRHISTVKYHEDFEKHKGCFTPVVTDPITERVKKNMQDFSDINYRGIQRKVVEMEQKRNDQDQETITGLRVWRTNPGSVFDYDPAEDNIQSRSLHMINVQAQRRSREQSRSASALSISGGEEKSEHSEAPDHHLSTYSDGGVFAVSTAYKHAKTTELPQQRSSSVATQQTTVSSIPSHPSTAGKIFRAMYDYMAADADEVSFKDGDAIINVQAIDEGWMYGTVQRTGRTGMLPANYVEAI

SEQ ID NO: 41577 - protein, 6669 aa, Homo sapiens
MADDEDYEEVVEYYTEEVVYEEVPGETITKIYETTTTRTSDYEQSETSKPALAQPALAQPASAKPVERRKVIRKKVDPSKFMTPYIAHSQKMQDLFSPNKYKEKFEKTKGQPYASTTDTPELRRIKKVQDQLSEVKYRMDGDVAKTICHVDEKAKDIEHAKKVSQQVSKVLYKQNWEDTKDKYLLPPDAPELVQAVKNTAMFSKKLYTEDWEADKSLFYPYNDSPELRRVAQAQKALSDVAYKKGLAEQQAQFTPLADPPDIEFAKKVTNQVSKQKYKEDYENKIKGKWSETPCFEVANARMNADNISTRKYQEDFENMKDQIYFMQTETPEYKMNKKAGVAASKVKYKEDYEKNKGKADYNVLPASENPQLRQLKAAGDALSDKLYKENYEKTKAKSINYCETPKFKLDTVLQNFSSDKKYKDSYLKDILGHYVGSFEDPYHSHCMKVTAQNSDKNYKAEYEEDRGKGFFPQTITQEYEAIKKLDQCKDHTYKVHPDKTKFTQVTDSPVLLQAQVNSKQLSDLNYKAKHESEKFKCHIPPDTPAFIQHKVNAYNLSDNLYKQDWEKSKAKKFDIKVDAIPLLAAKANTKNTSDVMYKKDYEKNKGKMIGVLSINDDPKMLHSLKVAKNQSDRLYKENYEKTKAKSMNYCETPKYQLDTQLKNFSEARYKDLYVKDVLGHYVGSMEDPYHTHCMKVAAQNSDKSYKAEYEEDKGKCYFPQTITQEYEAIKKLDQCKDHTYKVHPDKTKFTAVTDSPVLLQAQLNTKQLSDLNYKAKHEGEKFKCHIPADAPQFIQHRVNAYNLSDNVYKQDWEKSKAKKFDIKVDAIPLLAAKANTKNTSDVMYKKDYEKSKGKMIGALSINDDPKMLHSLKTAKNQSDREYRKDYEKSKTIYTAPLDMLQVTQAKKSQAIASDVDYKHILHSYSYPPDSINVDLAKKAYALQSDVEYKADYNSWMKGCGWVPFGSLEMEKAKRASDILNEKKYRQHPDTLKFTSIEDAPITVQSKINQAQRSDIAYKAKGEEIIHKYNLPPDLPQFIQAKVNAYNISENMYKADLKDLSKKGYDLRTDAIPIRAAKAARQAASDVQYKKDYEKAKGKMVGFQSLQDDPKLVHYMNVAKIQSDREYKKDYEKTKSKYNTPHDMFNVVAAKKAQDVVSNVNYKHSLHHYTYLPDAMDLELSKNMMQIQSDNVYKEDYNNWMKGIGWIPIGSLDVEKVKKAGDALNEKKYRQHPDTLKFTSIVDSPVMVQAKQNTKQVSDILYKAKGEDVKHKYTMSPDLPQFLQAKCNAYNISDVCYKRDWYDLIAKGNNVLGDAIPITAAKASRNIASDYKYKEAYEKSKGKHVGFRSLQDDPKLVHYMNVAKLQSDREYKKNYENTKTSYHTPGDMVSITAAKMAQDVATNVNYKQPLHHYTYLPDAMSLEHTRNVNQIQSDNVYKDEYNSFLKGIGWIPIGSLEVEKVKKAGDALNERKYRQHPDTVKFTSVPDSMGMVLAQHNTKQLSDLNYKVEGEKLKHKYTIDPELPQFIQAKVNALNMSDAHYKADWKKTIAKGYDLRPDAIPIVAAKSSRNIASDCKYKEAYEKAKGKQVGFLSLQDDPKLVHYMNVAKIQSDREYKKGYEASKTKYHTPLDMVSVTAAKKSQEVATNANYRQSYHHYTLLPDALNVEHSRNAMQIQSDNLYKSDFTNWMKGIGWVPIESLEVEKAKKAGEILSEKKYRQHPEKLKFTYAMDTMEQALNKSNKLNMDKRLYTEKWNKDKTTIHVMPDTPDILLSRVNQITMSDKLYKAGWEEEKKKGYDLRPDAIAIKAARASRDIASDYKYKKAYEQAKGKHIGFRSLEDDPKLVHFMQVAKMQSDREYKKGYEKSKTSFHTPVDMLSVVAAKKSQEVATNANYRNVIHTYNMLPDAMSFELAKNMMQIQSDNQYKADYADFMKGIGWLPLGSLEAEKNKKAMEIISEKKYRQHPDTLKYSTLMDSMNMVLAQNNAKIMNEHLYKQAWEADKTKVHIMPDIPQIILAKANAINMSDKLYKLSLEESKKKGYDLRPDAIPIKAAKASRDIASDYKYKYNYEKGKGKMVGFRSLEDDPKLVHSMQVAKMQSDREYKKNYENTKTSYHTPADMLSVTAAKDAQANITNTNYKHLIHKYILLPDAMNIELTRNMNRIQSDNEYKQDYNEWYKGLGWSPAGSLEVEKAKKATEYASDQKYRQHPSNFQFKKLTDSMDMVLAKQNAHTMNKHLYTIDWNKDKTKIHVMPDTPDILQAKQNQTLYSQKLYKLGWEEALKKGYDLPVDAISVQLAKASRDIASDYKYKQGYRKQLGHHVGFRSLQDDPKLVLSMNVAKMQSEREYKKDFEKWKTKFSSPVDMLGVVLAKKCQELVSDVDYKNYLHQWTCLPDQNDVVQAKKVYELQSENLYKSDLEWLRGIGWSPLGSLEAEKNKRASEIISEKKYRQPPDRNKFTSIPDAMDIVLAKTNAKNRSDRLYREAWDKDKTQIHIMPDTPDIVLAKANLINTSDKLYRMGYEELKRKGYDLPVDAIPIKAAKASREIASEYKYKEGFRKQLGHHIGARNIEDDPKMMWSMHVAKIQSDREYKKDFEKWKTKFSSPVDMLGVVLAKKCQTLVSDVDYKNYLHQWTCLPDQSDVIHARQAYDLQSDNLYKSDLQWLKGIGWMTSGSLEDEKNKRATQILSDHVYRQHPDQFKFSSLMDSIPMVLAKNNAITMNHRLYTEAWDKDKTTVHIMPDTPEVLLAKQNKVNYSEKLYKLGLEEAKRKGYDMRVDAIPIKAAKASRDIASEFKYKEGYRKQLGHHIGARAIRDDPKMMWSMHVAKIQSDREYKKDFEKWKTKFSSPVDMLGVVLAKKCQTLVSDVDYKNYLHQWTCLPDQSDVIHARQAYDLQSDNMYKSDLQWMRGIGWVSIGSLDVEKCKRATEILSDKIYRQPPDRFKFTSVTDSLEQVLAKNNALNMNKRLYTEAWDKDKTQIHIMPDTPEIMLARQNKINYSETLYKLANEEAKKKGYDLRSDAIPIVAAKASRDVISDYKYKDGYRKQLGHHIGARNIEDDPKMMWSMHVAKIQSDREYKKDFEKWKTKFSSPVDMLGVVLAKKCQTLVSDVDYKNYLHEWTCLPDQNDVIHARQAYDLQSDNIYKSDLQWLRGIGWVPIGSMDVVKCKRAAEILSDNIYRQPPDKLKFTSVTDSLEQVLAKNNALNMNKRLYTEAWDKDKTQVHIMPDTPEIMLARQNKINYSESLYRQAMEEAKKEGYDLRSDAIPIVAAKASRDIASDYKYKEAYRKQLGHHIGARAVHDDPKIMWSLHIAKVQSDREYKKDFEKYKTRYSSPVDMLGIVLAKKCQTLVSDVDYKHPLHEWICLPDQNDIIHARKAYDLQSDNLYKSDLEWMKGIGWVPIDSLEVVRAKRAGELLSDTIYRQRPETLKFTSITDTPEQVLAKNNALNMNKRLYTEAWDNDKKTIHVMPDTPEIMLAKLNRINYSDKLYKLALEESKKEGYDLRLDAIPIQAAKASRDIASDYKYKEGYRKQLGHHIGARNIKDDPKMMWSIHVAKIQSDREYKKEFEKWKTKFSSPVDMLGVVLAKKCQILVSDIDYKHPLHEWTCLPDQNDVIQARKAYDLQSDAIYKSDLEWLRGIGWVPIGSVEVEKVKRAGEILSDRKYRQPADQLKFTCITDTPEIVLAKNNALTMSKHLYTEAWDADKTSIHVMPDTPDILLAKSNSANISQKLYTKGWDESKMKDYDLRADAISIKSAKASRDIASDYKYKEAYEKQKGHHIGAQSIEDDPKIMCAIHAGKIQSEREYKKEFQKWKTKFSSPVDMLSILLAKKCQTLVTDIDYRNYLHEWTCMPDQNDIIQAKKAYDLQSDALYKADLEWLRGIGWMPQGSPEVLRVKNAQNIFCDSVYRTPVVNLKYTSIVDTPEVVLAKSNAENISIPKYREVWDKDKTSIHIMPDTPEINLARANALNVSNKLYREGWDEMKAGCDVRLDAIPIQAAKASREIASDYKYKLDHEKQKGHYVGTLTARDDNKIRWALIADKLQNEREYRLDWAKWKAKIQSPVDMLSILHSKNSQALVSDMDYRNYLHQWTCMPDQNDVIQAKKAYELQSDNVYKADLEWLRGIGWMPNDSVSVNHAKHAADIFSEKKYRTKIETLNFTPVDDRVDYVTAKQSGEILDDIKYRKDWNATKSKYTLTETPLLHTAQEAARILDQYLYKEGWERQKATGYILPPDAVPFVHAHHCNDVQSELKYKAEHVKQKGHYVGVPTMRDDPKLVWFEHAGQIQNERLYKEDYHKTKAKINIPADMVSVLAAKQGQTLVSDIDYRNYLHQWMCHPDQNDVIQARKAYDLQSDNVYRADLEWLRGIGWIPLDSVDHVRVTKNQEMMSQIKYKKNALENYPNFRSVVDPPEIVLAKINSVNQSDVKYKETFNKAKGKYTFSPDTPHISHSKDMGKLYSTILYKGAWEGTKAYGYTLDERYIPIVGAKHADLVNSELKYKETYEKQKGHYLAGKVIGEFPGVVHCLDFQKMRSALNYRKHYEDTKANVHIPNDMMNHVLAKRCQYILSDLEYRHYFHQWTSLLEEPNVIRVRNAQEILSDNVYKDDLNWLKGIGCYVWDTPQILHAKKSYDLQSQLQYTAAGKENLQNYNLVTDTPLYVTAVQSGINASEVKYKENYHQIKDKYTTVLETVDYDRTRNLKNLYSSNLYKEAWDRVKATSYILPSSTLSLTHAKNQKHLASHIKYREEYEKFKALYTLPRSVDDDPNTARCLRVGKLNIDRLYRSVYEKNKMKIHIVPDMVEMVTAKDSQKKVSEIDYRLRLHEWICHPDLQVNDHVRKVTDQISDIVYKDDLNWLKGIGCYVWDTPEILHAKHAYDLRDDIKYKAHMLKTRNDYKLVTDTPVYVQAVKSGKQLSDAVYHYDYVHSVRGKVAPTTKTVDLDRALHAYKLQSSNLYKTSLRTLPTGYRLPGDTPHFKHIKDTRYMSSYFKYKEAYEHTKAYGYTLGPKDVPFVHVRRVNNVTSERLYRELYHKLKDKIHTTPDTPEIRQVKKTQEAVSELIYKSDFFKMQGHMISLPYTPQVIHCRYVGDITSDIKYKEDLQVLKGFGCFLYDTPDMVRSRHLRKLWSNYLYTDKARKMRDKYKVVLDTPEYRKVQELKTHLSELVYRAAGKKQKSIFTSVPDTPDLLRAKRGQKLQSQYLYVELATKERPHHHAGNQTTALKHAKDVKDMVSEKKYKIQYEKMKDKYTPVPDTPILIRAKRAYWNASDLRYKETFQKTKGKYHTVKDALDIVYHRKVTDDISKIKYKENYMSQLGIWRSIPDRPEHFHHRAVTDTVSDVKYKEDLTWLKGIGCYAYDTPDFTLAEKNKTLYSKYKYKEVFERTKSDFKYVADSPINRHFKYATQLMNEKKYRADYEQRKDKYHLVVDEPRHLLAKTAGDQISQIKYRKNYEKSKDKFTSIVDTPEHLRTTKVNKQISDILYKLEYNKAKPRGYTTIHDTPMLLHVRKVKDEVSDLKYKEVYQRNKSNCTIEPDAVHIKAAKDAYKVNTNLDYKKQYEANKAHWKWTPDRPDFLQAAKSSLQQSDFEYKLDREFLKGCKLSVTDDKNTVLALRNTLIESDLKYKEKHVKERGTCHAVPDTPQILLAKTVSNLVSENKYKDHVKKHLAQGSYTTLPETRDTVHVKEVTKHVSDTNYKKKFVKEKGKSNYSIMLEPPEVKHAMEVAKKQSDVAYRKDAKENLHYTTVADRPDIKKATQAAKQASEVEYRAKHRKEGSHGLSMLGRPDIEMAKKAAKLSSQVKYRENFDKEKGKTPKYNPKDSQLYKVMKDANNLASEVKYKADLKKLHKPVTDMKESLIMNHVLNTSQLASSYQYKKKYEKSKGHYHTIPDNLEQLHLKEATELQSIVKYKEKYEKERGKPMLDFETPTYITAKESQQMQSGKEYRKDYEESIKGRNLTGLEVTPALLHVKYATKIASEKEYRKDLEESIRGKGLTEMEDTPDMLRAKNATQILNEKEYKRDLELEVKGRGLNAMANETPDFMRARNATDIASQIKYKQSAEMEKANFTSVVDTPEIIHAQQVKNLSSQKKYKEDAEKSMSYYETVLDTPEIQRVRENQKNFSLLQYQCDLKNSKGKITVVQDTPEILRVKENQKNFSSVLYKEDVSPGTAIGKTPEMMRVKQTQDHISSVKYKEAIGQGTPIPDLPEVKRVKETQKHISSVMYKENLGTGIPTTVTPEIERVKRNQENFSSVLYKENLGKGIPTPITPEMERVKRNQENFSSVLYKENMGKGTPLAVTPEMERVKHNQENISSVLYKENVGKATATPVTPEMQRVKRNQENISSVLYKENLGKATPTPFTPEMERVKRNQENFSSVLYKENMRKATPTPVTPEMERAKRNQENISSVLYSDSFRKQIQGKAAYVLDTPEMRRVRETQRHISTVKYHEDFEKHKGCFTPVVTDPITERVKKNMQDFSDINYRGIQRKVVEMEQKRNDQDQETITGLRVWRTNPGSVFDYDPAEDNIQSRSLHMINVQAQRRSREQSRSASALSISGGEEKSEHSEAPDHHLSTYSDGGVFAVSTAYKHAKTTELPQQRSSSVATQQTTVSSIPSHPSTAGKIFRAMYDYMAADADEVSFKDGDAIINVQAIDEGWMYGTVQRTGRTGMLPANYVEAI

SEQ ID NO: 41578 - protein, 184 aa, Homo sapiens
MATALALRSLYRARPSLRCPPVELPWAPRRGHRLSPADDELYQRTRISLLQREAAQAMYIDSYNSRGFMINGNRVLGPCALLPHSVVQWNVGSHQDITEDSFSLFWLLEPRIEIVVVGTGDRTERLQSQVLQAMRQRGIAVEVQDTPNACATFNFLCHEGRVTGAALIPPPGGTSLTSLGQAAQ

SEQ ID NO: 41579 - protein, 127 aa, Homo sapiens
MYIDSYNSRGFMINGNRVLGPCALLPHSVVQWNVGSHQDITEDSFSLFWLLEPRIEIVVVGTGDRTERLQSQVLQAMRQRGIAVEVQDTPNACATFNFLCHEGRVTGAALIPPPGGTSLTSLGQAAQ

SEQ ID NO: 41580 - protein, 299 aa, Homo sapiens
MEELEQGLLMQPWAWLQLAENSLLAKVFITKQGYALLVSDLQQVWHEQVDTSVVSQRAKELNKRLTAPPAAFLCHLDNLLRPLLKDAAHPSEATFSCDCVADALILRVRSELSGLPFYWNFHCMLASPSLVSQHLIRPLMGMSLALQCQVRELATLLHMKDLEIQDYQESGATLIRDRLKTEPFEENSFLEQFMIEKLPEACSIGDGKPFVMNLQDLYMAVTTQEVQVGQKHQGAGDPHTSNSASLQGIDSQCVNQPEQLVSSAPTLSAPEKESTGTSGPLQRPQLSKVKRKKPRGLFS

SEQ ID NO: 41581 - protein, 316 aa, Homo sapiens
MEELEQGLLMQPWAWLQLAENSLLAKVFITKQGYALLVSDLQQVWHEQVDTSVVSQRAKELNKRLTAPPAAFLCHLDNLLRPLLKDAAHPSEATFSCDCVADALILRVRSELSGLPFYWNFHCMLASPSLVSQHLIRPLMGMSLALQCQVRELATLLHMKDLEIQDYQESGATLIRDRLKTEPFEENSFLEQFMIEKLPEACSIGDGKPFVMNLQDLYMAVTTQEVQVGQKHQGAGDPHTSNSASLQGIDSQCVNQPEQLVSSAPTLSAPEKESTALCRDLSCQRSRGRSQGVSSVNLLWPQLLRMDLENSFQASP

SEQ ID NO: 41582 - protein, 1462 aa, Homo sapiens
MGAQDRPQCHFDIEINREPVGRIMFQLFSDICPKTCKNFLCLCSGEKGLGKTTGKKLCYKGSTFHRVVKNFMIQGGDFSEGNGKGGESIYGGYFKDENFILKHDRAFLLSMANRGKHTNGSQFFITTKPAPHLDGVHVVFGLVISGFEVIEQIENLKTDAASRPYADVRVIDCGVLATKSIKDVFEKKRKKPTHSEGSDSSSNSSSSSESSSESELEHERSRRRKHKRRPKVKRSKKRRKEASSSEEPRNKHAMNPKGHSERSDTNEKRSVDSSAKREKPVVRPEEIPPVPENRFLLRRDMPVVTAEPEPKIPDVAPIVSDQKPSVSKSGRKIKGRGTIRYHTPPRSRSCSESDDDDSSETPPHWKEEMQRLRAYRPPSGEKWSKGDKLSDPCSSRWDERSLSQRSRSWSYNGYYSDLSTARHSGHHKKRRKEKKVKHKKKGKKQKHCRRHKQTKKRRILIPSDIESSKSSTRRMKSSCDRERSSRSSSLSSHHSSKRDWSKSDKDVQSSLTHSSRDSYRSKSHSQSYSRGSSRSRTASKSSSHSRSRSKSRSSSKSGHRKRASKSPRKTASQLSENKPVKTEPLRATMAQNENVVVQPVVAENIPVIPLSDSPPPSRWKPGQKPWKPSYERIQEMKAKTTHLLPIQSTYSLANIKETGSSSSYHKREKNSESDQSTYSKYSDRSSESSPRSRSRSSRSRSYSRSYTRSRSLASSHSRSRSPSSRSHSRNKYSDHSQCSRSSSYTSISSDDGRRAKRRLRSSGKKNSVSHKKHSSSSEKTLHSKYVKGRDRSSCVRKYSESRSSLDYSSDSEQSSVQATQSAQEKEKQGQMERTHNKQEKNRGEEKSKSERECPHSKKRTLKENLSDHLRNGSKPKRKNYAGSKWDSESNSERDVTKNSKNDSHPSSDKEEGEATSDSESEVSEIHIKVKPTTKSSTNTSLPDDNGAWKSSKQRTSTSDSEGSCSNSENNRGKPQKHKHGSKENLKREHTKKVKEKLKGKKDKKHKAPKRKQAFHWQPPLEFGEEEEEEIDDKQVTQESKEKKVSENNETIKDNILKTEKSSEEDLSGKHDTVTVSSDLDQFTKDDSKLSISPTALNTEENVACLQNIQHVEESVPNGVEDVLQTDDNMEICTPDRSSPAKVEETSPLGNARLDTPDINIVLKQDMATEHPQAEVVKQESSMSESKVLGEVGKQDSSSASLASAGESTGKKEVAEKSQINLIDKKWKPLQGVGNLAAPNAATSSAVEVKVLTTVPEMKPQGLRIEIKSKNKVRPGSLFDEVRKTARLNRRPRNQESSSDEQTPSRDDDSQSRSPSRSRSKSETKSRHRTRSVSYSHSRSRSRSSTSSYRSRSYSRSRSRGWYSRGRTRSRSSSYRSYKSHRTSSRSRSRSSSYDPHSRSRSYTYDSYYSRSRSRSRSQRSDSYHRGRSYNRRSRSCRSYGSDSESDRSYSHHRSPSESSRYS

SEQ ID NO: 41583 - protein, 169 aa, Homo sapiens
MGWSQDLFRALWRSLSREVKEHVGTDQFGNKYYYIPQYKNWRGQTIREKRIVEAANKKEVDYEAGDIPTEWEAWIRRTRKTPPTMEEILKNEKHREEIKIKSQDFYEKEKLLSKETSEELLPPPVQTQIKGHASAPYFGKEEPSVAPSSTGKTFQPGSWMPRDGKSHNQ

SEQ ID NO: 41584 - protein, 301 aa, Homo sapiens
MLLSPVTSTPFSVKDILRLERERSCPAASPHPRVRKSPENFQYLRMDAEPRGSEVHNAGGGGGDRKLDGSEPPGGPCEAVLEMDAERMGEPQPGLNAASPLGGGTRVPERGVGNSGDSVRGGRSEQPKARQRRKPRVLFSQAQVLALERRFKQQRYLSAPEREHLASALQLTSTQVKIWFQNRRYKCKRQRQDKSLELAGHPLTPRRVAVPVLVRDGKPCLGPGPGAPAFPSPYSAAVSPYSCYGGYSGAPYGAGYGTCYAGAPSGPAPHTPLASAGFGHGGQNATPQGHLAATLQGVRAW

SEQ ID NO: 41585 - protein, 457 aa, Homo sapiens
MLLRAAWRRAAVAVTAAPGPKPAAPTRGLRLRVGDRAPQSAVPADTAAAPEVGPVLRPLYMDVQATTPLDPRVLDAMLPYLINYYGNPHSRTHAYGWESEAAMERARQQVASLIGADPREIIFTSGATESNNIAIKGVARFYRSRKKHLITTQTEHKCVLDSCRSLEAEGFQVTYLPVQKSGIIDLKELEAAIQPDTSLVSVMTVNNEIGVKQPIAEIGRICSSRKVYFHTDAAQAVGKIPLDVNDMKIDLMSISGHKIYGPKGVGAIYIRRRPRVRVEALQSGGGQERGMRSGTVPTPLVVGLGAACEVAQQEMEYDHKRISKLSERLIQNIMKSLPDVVMNGDPKHHYPGCINLSFAYVEGESLLMALKDVALSSGSACTSASLEPSYVLRAIGTDEDLAHSSIRFGIGRFTTEEEVDYTVEKCIQHVKRLREMSPLWEMVQDGIDLKSIKWTQH

SEQ ID NO: 41586 - protein, 397 aa, Homo sapiens
MDVQATTPLDPRVLDAMLPYLINYYGNPHSRTHAYGWESEAAMERARQQVASLIGADPREIIFTSGATESNNIAIKGVARFYRSRKKHLITTQTEHKCVLDSCRSLEAEGFQVTYLPVQKSGIIDLKELEAAIQPDTSLVSVMTVNNEIGVKQPIAEIGRICSSRKVYFHTDAAQAVGKIPLDVNDMKIDLMSISGHKIYGPKGVGAIYIRRRPRVRVEALQSGGGQERGMRSGTVPTPLVVGLGAACEVAQQEMEYDHKRISKLSERLIQNIMKSLPDVVMNGDPKHHYPGCINLSFAYVEGESLLMALKDVALSSGSACTSASLEPSYVLRAIGTDEDLAHSSIRFGIGRFTTEEEVDYTVEKCIQHVKRLREMSPLWEMVQDGIDLKSIKWTQH

SEQ ID NO: 41587 - protein, 406 aa, Homo sapiens
MLLRAAWRRAAVAVTAAPGPKPAAPTRGLRLRVGDRAPQSAVPADTAAAPEVGPVLRPLYMDVQATTPLDPRVLDAMLPYLINYYGNPHSRTHAYGWESEAAMERARQQVASLIGADPREIIFTSGATESNNIAIKELEAAIQPDTSLVSVMTVNNEIGVKQPIAEIGRICSSRKVYFHTDAAQAVGKIPLDVNDMKIDLMSISGHKIYGPKGVGAIYIRRRPRVRVEALQSGGGQERGMRSGTVPTPLVVGLGAACEVAQQEMEYDHKRISKLSERLIQNIMKSLPDVVMNGDPKHHYPGCINLSFAYVEGESLLMALKDVALSSGSACTSASLEPSYVLRAIGTDEDLAHSSIRFGIGRFTTEEEVDYTVEKCIQHVKRLREMSPLWEMVQDGIDLKSIKWTQH

SEQ ID NO: 41588 - protein, 321 aa, Homo sapiens
MSEQSKDLSDPNFAAEAPNSEVHSSPGVSEGVPPSATLAEPQSPPLGPTAAPQAAPPPQAPNDEGDPKALQQAAEEGRAHQAPSAAQPGPAPPAPAQLVQKAHELMWYVLVKDQKKMIIWFPDMVKDVIGSYKKWCRSILRRTSLILARVFGLHLRLTSLHTMEFALVKALEPEELDRVALSNRMPMTGLLLMILSLIYVKGRGARESAVWNVLRILGLRPWKKHSTFGDVRKLITEEFVQMNYLKYQRVPYVEPPEYEFFWGSRASREITKMQIMEFLARVFKKDPQAWPSRYREALEEARALREANPTAHYPRSSVSED

SEQ ID NO: 41589 - protein, 510 aa, Homo sapiens
MPLSLGAEMWGPEAWLLLLLLLASFTGRCPAGELETSDVVTVVLGQDAKLPCFYRGDSGEQVGQVAWARVDAGEGAQELALLHSKYGLHVSPAYEGRVEQPPPPRNPLDGSVLLRNAVQADEGEYECRVSTFPAGSFQARLRLRVLVPPLPSLNPGPALEEGQGLTLAASCTAEGSPAPSVTWDTEVKGTTSSRSFKHSRSAAVTSEFHLVPSRSMNGQPLTCVVSHPGLLQDQRITHILHVSFLAEASVRGLEDQNLWHIGREGAMLKCLSEGQPPPSYNWTRLDGPLPSGVRVDGDTLGFPPLTTEHSGIYVCHVSNEFSSRDSQVTVDVLDPQEDSGKQVDLVSASVVVVGVIAALLFCLLVVVVVLMSRYHRRKAQQMTQKYEEELTLTRENSIRRLHSHHTDPRSQPEESVGLRAEGHPDSLKDNSSCSVMSEEPEGRSYSTLTTVREIETQTELLSPGSGRAEEEEDQDEGIKQAMNHFVQENGTLRAKPTGNGIYINGRGHLV

SEQ ID NO: 41590 - protein, 219 aa, Homo sapiens
MLKCLSEGQPPPSYNWTRLDGPLPSGVRVDGDTLGFPPLTTEHSGIYVCHVSNEFSSRDSQVTVDVLDPQEDSGKQVDLVSASVVVVGVIAALLFCLLVVVVVLMSRYHRRKAQQMTQKYEEELTLTRENSIRRLHSHHTDPRSQSEEPEGRSYSTLTTVREIETQTELLSPGSGRAEEEEDQDEGIKQAMNHFVQENGTLRAKPTGNGIYINGRGHLV

SEQ ID NO: 41591 - protein, 1894 aa, Homo sapiens
MEQRRPWPRALEVDSRSVVLLSVVWVLLAPPAAGMPQFSTFHSENRDWTFNHLTVHQGTGAVYVGAINRVYKLTGNLTIQVAHKTGPEEDNKSCYPPLIVQPCSEVLTLTNNVNKLLIIDYSENRLLACGSLYQGVCKLLRLDDLFILVEPSHKKEHYLSSVNKTGTMYGVIVRSEGEDGKLFIGTAVDGKQDYFPTLSSRKLPRDPESSAMLDYELHSDFVSSLIKIPSDTLALVSHFDIFYIYGFASGGFVYFLTVQPETPEGVAINSAGDLFYTSRIVRLCKDDPKFHSYVSLPFGCTRAGVEYRLLQAAYLAKPGDSLAQAFNITSQDDVLFAIFSKGQKQYHHPPDDSALCAFPIRAINLQIKERLQSCYQGEGNLELNWLLGKDVQCTKAPVPIDDNFCGLDINQPLGGSTPVEGLTLYTTSRDRMTSVASYVYNGYSVVFVGTKSGKLKKIRADGPPHGGVQYEMVSVLKDGSPILRDMAFSIDQRYLYVMSERQVTRVPVESCEQYTTCGECLSSGDPHCGWCALHNMCSRRDKCQQAWEPNRFAASISQCVSLAVHPSSISVSEHSRLLSLVVSDAPDLSAGIACAFGNLTEVEGQVSGSQVICISPGPKDVPVIPLDQDWFGLELQLRSKETGKIFVSTEFKFYNCSAHQLCLSCVNSAFRCHWCKYRNLCTHDPTTCSFQEGRINISEDCPQLVPTEEILIPVGEVKPITLKARNLPQPQSGQRGYECVLNIQGAIHRVPALRFNSSSVQCQNSSYQYDGMDISNLAVDFAVVWNGNFIIDNPQDLKVHLYKCAAQRESCGLCLKADRKFECGWCSGERRCTLHQHCTSPSSPWLDWSSHNVKCSNPQITEILTVSGPPEGGTRVTIHGVNLGLDFSEIAHHVQVAGVPCTPLPGEYIIAEQIVCEMGHALVGTTSGPVRLCIGECKPEFMTKSHQQYTFVNPSVLSLNPIRGPESGGTMVTITGHYLGAGSSVAVYLGNQTCEFYGRSMSEIVCVSPPSSNGLGPVPVSVSVDRAHVDSNLQFEYIDDPRVQRIEPEWSIASGHTPLTITGFNLDVIQEPRIRVKFNGKESVNVCKVVNTTTLTCLAPSLTTDYRPGLDTVERPDEFGFVFNNVQSLLIYNDTKFIYYPNPTFELLSPTGVLDQKPGSPIILKGKNLCPPASGGAKLNYTVLIGETPCAVTVSETQLLCEPPNLTGQHKVMVHVGGMVFSPGSVSVISDSLLTLPAIVSIAAGGSLLLIIVIIVLIAYKRKSRENDLTLKRLQMQMDNLESRVALECKEAFAELQTDINELTSDLDRSGIPYLDYRTYAMRVLFPGIEDHPVLRELEVQGNGQQHVEKALKLFAQLINNKVFLLTFIRTLELQRSFSMRDRGNVASLIMTGLQGRLEYATDVLKQLLSDLIDKNLENKNHPKLLLRRTESVAEKMLTNWFAFLLHKFLKECAGEPLFMLYCAIKQQMEKGPIDAITGEARYSLSEDKLIRQQIEYKTLILNCVNPDNENSPEIPVKVLNCDTITQVKEKILDAVYKNVPYSQRPRAVDMDLEWRQGRIARVVLQDEDITTKIEGDWKRLNTLMHYQVSDRSVVALVPKQTSSYNIPASASISRTSISRYDSSFRYTGSPDSLRSRAPMITPDLESGVKVWHLVKNHDHGDQKEGDRGSKMVSEIYLTRLLATKGTLQKFVDDLFETLFSTVHRGSALPLAIKYMFDFLDEQADRHSIHDTDVRHTWKSNCLPLRFWVNVIKNPQFVFDIHKGSITDACLSVVAQTFMDSCSTSEHRLGKDSPSNKLLYAKDIPSYKSWVERYYADIAKLPAISDQDMNAYLAEQSRLHAVEFNMLSALNEIYSYVSKYSEELIGALEQDEQARRQRLAYKVEQLINAMSIES

SEQ ID NO: 41592 - protein, 552 aa, Homo sapiens
MGTLGQASLFAPPGNYFWSDHSALCFAESCEGQPGKVEQMSTHRSRLLTAAPLSMEQRRPWPRALEVDSRSVVLLSVVWVLLAPPAAGMPQFSTFHSENRDWTFNHLTVHQGTGAVYVGAINRVYKLTGNLTIQVAHKTGPEEDNKSCYPPLIVQPCSEVLTLTNNVNKLLIIDYSENRLLACGSLYQGVCKLLRLDDLFILVEPSHKKEHYLSSVNKTGTMYGVIVRSEGEDGKLFIGTAVDGKQDYFPTLSSRKLPRDPESSAMLDYELHSDFVSSLIKIPSDTLALVSHFDIFYIYGFASGGFVYFLTVQPETPEGVAINSAGDLFYTSRIVRLCKDDPKFHSYVSLPFGCTRAGVEYRLLQAAYLAKPGDSLAQAFNITSQDDVLFAIFSKGQKQYHHPPDDSALCAFPIRAINLQIKERLQSCYQGEGNLELNWLLGKDVQCTKAPVPIDDNFCGLDINQPLGGSTPVEGLTLYTTSRDRMTSVASYVYNGYSVVFVGTKSGKLKKVRVYEFRCSNAIHLLSKESLLEGSYWWRFNYRQLYFLGEQR

SEQ ID NO: 41593 - protein, 284 aa, Homo sapiens
MAPRLCSISVTARRLLGGPGPRAGDVASAAAARFYSKDNEGSWFRSLFVHKVDPRKDAHSTLLSKKETSNLYKIQFHNVKPEYLDAYNSLTEAVLPKLHLDEDYPCSLVGNWNTWYGEQDQAVHLWRFSGGYPALMDCMNKLKNNKEYLEFRRERSQMLLSRRNQLLLEFSFWNEPQPRMGPNIYELRTYKLKPGTMIEWGNNWARAIKYRQENQEAVGGFFSQIGELYVVHHLWAYKDLQSREETRNAAWRKRGWDENVYYTVPLVRHMESRIMIPLKISPLQ

SEQ ID NO: 41594 - protein, 293 aa, Homo sapiens
MTGLYELVWRVLHALLCLHRTLTSWLRVRFGTWNWIWRRCCRAASAAVLAPLGFTLRKPPAVGRNRRHHRHPRGGSCLAAAHHRMRWRADGRSLEKLPVHMGLVITEVEQEPSFSDIASLVVWCMAVGISYISVYDHQGIFKRNNSRLMDEILKQQQELLGLDCSKYSPEFANSNDKDDQVLNCHLAVKVLSPEDGKADIVRAAQDFCQLVAQKQKRPTDLDVDTLASLLSSNGCPDPDLVLKFGPVDSTLGFLPWHIRLTEIVSLPSHLNISYEDFFSALRQYAACEQRLGK

SEQ ID NO: 41595 - protein, 64 aa, Homo sapiens
MFLQYYLNEQGDRVYTLKKFDPMGQQTCSAHPARFSPDDKYSRHRITIKKRFKVLMTQQPRPVL

SEQ ID NO: 41596 - protein, 128 aa, Homo sapiens
MAGSGVRQATSTASTFVKPIFSRDMNEAKRRVRELYRAWYREVPNTVHQFQLDITVKMGRDKVREMFMKNAHVTDPRVVDLLVIKGKIELEETIKVWKQRTHVMRFFHETEAPRPKDFLSKFYVGHDP

SEQ ID NO: 41597 - protein, 192 aa, Homo sapiens
MAPLGGAPRLVLLFSGKRKSGKDFVTEALQSRLGADVCAVLRLSGPLKEQYAQEHGLNFQRLLDTSTYKEAFRKDMIRWGEEKRQADPGFFCRKIVEGISQPIWLVSDTRRVSDIQWFREAYGAVTQTVRVVALEQSRQQRGWVFTPGVDDAESECGLDNFGDFDWVIENHGVEQRLEEQLENLIEFIRSRL

SEQ ID NO: 41598 - protein, 568 aa, Homo sapiens
MMGCWILNEGLSTILVLSWLGINFYLFIDTFYWYEEEESFHYTRVILGSTLAWARASALCLNFNCMLILIPVSRNLISFIRGTSICCRGPWRRQLDKNLRFHKLVAYGIAVNATIHIVAHFFNLERYHWSQSEEAQGLLAALSKLGNTPNESYLNPVRTFPTNTTTELLRTIAGVTGLVISLALVLIMTSSTEFIRQASYELFWYTHHVFIVFFLSLAIHGTGRIVRGQTQDSLSLHNITFCRDRYAEWQTVAQCPVPQFSGKEPSAWKWILGPVVLYACERIIRFWRFQQEVVITKVVSHPSGVLELHMKKRGFKMAPGQYILVQCPAISSLEWHPFTLTSAPQEDFFSVHIRAAGDWTAALLEAFGAEGQALQEPWSLPRLAVDGPFGTALTDVFHYPVCVCVAAGIGVTPFAALLKSIWYKCSEAQTPLKLSKVYFYWICRDARAFEWFADLLLSLETRMSEQGKTHFLSYHIFLTGWDENQALHIALHWDENTDVITGLKQKTFYGRPNWNNEFKQIAYNHPSSSIGVFFCGPKALSRTLQKMCHLYSSADPRGVHFYYNKESF

SEQ ID NO: 41599 - protein, 417 aa, Homo sapiens
MGPRQGRWWLLLWLPPLATLPVRGEAAAAALSVRRCKALKEKDLIRTSESDCYCYNQNSQVEWKYIWSTMQVKITSPGLFRIVYIAERHNCQYPENILSFIKCVIHNFWIPKESNEITIIINPYRETVCFSVEPVKKIFNYMIHVNRNIMDFKLFLVFVAGVFLFFYARTLSQSPTFYYSSGTVLGVLMTLVFVLLLVKRFIPKYSTFWALMVGCWFASVYIVCQLMEDLKWLWYENRIYVLGYVLIVGFFSFVVCYKHGPLADDRSRSLLMWMLRLLSLVLVYAGVAVPQFAYAAIILLMSSWSLHYPLRACSYMRWKMEQWFTSKELVVKYLTEDEYREQADAETNSALEELRRACRKPDFPSWLVVSRLHTPSKFADFVLGGSHLSPEEISLHEEQYGLGGAFLEEQLFNPSTA

SEQ ID NO: 41600 - protein, 138 aa, Homo sapiens
MQVKITSPGLFRIVYIAERHNCQYPENILSFIKCVIHNFWIPKESNEITIIINPYRETVCFSVEPVKKIFNYMIHVNRNIMDFKLFLVFVAGVFLFFYARTLSQSPTFYYSSGTVLGVLMTLVFVLLLVKRFIPKAMS

SEQ ID NO: 41601 - protein, 198 aa, Homo sapiens
MPLGLLWLGLALLGALHAQAQDSTSDLIPAPPLSKVPLQQNFQDNQFQGKWYVVGLAGNAILREDKDPQKMYATIYELKEDKSYNVTSVLFRKKKCDYWIRTFVPGCQPGEFTLGNIKSYPGLTSYLVRVVSTNYNQHAMVFFKKVSQNREYFKITLYGRTKELTSELKENFIRFSKSLGLPENHIVFPVPIDQCIDG

SEQ ID NO: 41602 - protein, 198 aa, Homo sapiens
MPLGLLWLGLALLGALHAQAQDSTSDLIPAPPLSKVPLQQNFQDNQFQGKWYVVGLAGNAILREDKDPQKMYATIYELKEDKSYNVTSVLFRKKKCDYWIRTFVPGCQPGEFTLGNIKSYPGLTSYLVRVVSTNYNQHAMVFFKKVSQNREYFKITLYGRTKELTSELKENFIRFSKSLGLPENHIVFPVPIGNGQSG

SEQ ID NO: 41603 - protein, 1121 aa, Homo sapiens
MAAATVGRDTLPEHWSYGVCRDGRVFFINDQLRCTTWLHPRTGEPVNSGHMIRSDLPRGWEEGFTEEGASYFIDHNQQTTAFRHPVTGQFSPENSEFILQEEPNPHMSKQDRNQRPSSMVSETSTAGTASTLEAKPGPKIIKSSSKVHSFGKRDQAIRRNPNVPVVVRGWLHKQDSSGMRLWKRRWFVLADYCLFYYKDSREEAVLGSIPLPSYVISPVAPEDRISRKYSFKAVHTGMRALIYNSSTAGSQAEQSGMRTYYFSADTQEDMNAWVRAMNQAAQVLSRSSLKRDMEKVERQAVPQANHTESCHECGRVGPGHTRDCPHRGHDDIVNFERQEQEGEQYRSQRDPLEGKRDRSKARSPYSPAEEDALFMDLPTGPRGQQAQPQRAEKNGMLPASYGPGEQNGTGGYQRAFPPRTNPEKHSQRKSNLAQVEHWARAQKGDSRSLPLDQTLPRQGPGQSLSFPENYQTLPKSTRHPSGGSSPPPRNLPSDYKYAQDRASHLKMSSEERRAHRDGTVWQLYEWQQRQQFRHGSPTAPICLGSPEFTDQGRSRSMLEVPRSISVPPSPSDIPPPGPPRVFPPRRPHTPAERVTVKPPDQRRSVDISLGDSPRRARGHAVKNSSHVDRRSMPSMGYMTHTVSAPSLHGKSADDTYLQLKKDLEYLDLKMTGRDLLKDRSLKPVKIAESDTDVKLSIFCEQDRVLQDLEDKIRALKENKDQLESVLEVLHRQMEQYRDQPQHLEKIAYQQKLLQEDLVHIRAELSRESTEMENAWNEYLKLENDVEQLKQTLQEQHRRAFFFQEKSQIQKDLWRIEDVTAGLSANKENFRILVESVKNPERKTVPLFPHPPVPSLSTSESKPPPQPSPPTSPVRTPLEVRLFPQLQTYVPYRPHPPQLRKVTSPLQSPTKAKPKVEDEAPPRPPLPELYSPEDQPPAVPPLPREATIIRHTSVRGLKRQSDERKRDRELGQCVNGDSRVELRSYVSEPELATLSGDMAQPSLGLVGPESRYQTLPGRGLSGSTSRLQQSSTIAPYVTLRRGLNAESSKATFPRPKSALERLYSGDHQRGKMSAEEQLERMKRHQKALVRERKRTLGQGERTGLPSSRYLSRPLPGDLGSVC

SEQ ID NO: 41604 - protein, 1122 aa, Homo sapiens
MAAATVGRDTLPEHWSYGVCRDGRVFFINDQLRCTTWLHPRTGEPVNSGHMIRSDLPRGWEEGFTEEGASYFIDHNQQTTAFRHPVTGQFSPENSEFILQEEPNPHMSKQDRNQRPSSMVSETSTAGTASTLEAKPGPKIIKSSSKVHSFGKRDQAIRRNPNVPVVVRGWLHKQDSSGMRLWKRRWFVLADYCLFYYKDSREEAVLGSIPLPSYVISPVAPEDRISRKYSFKAVHTGMRALIYNSSTAGSQAEQSGMRTYYFSADTQEDMNAWVRAMNQAAQVLSRSSLKRDMEKVERQAVPQANHTESCHECGRVGPGHTRDCPHRGHDDIVNFERQEQEGEQYRSQRDPLEGKRDRSKARSPYSPAEEDALFMDLPTGPRGQQAQPQRAEKNGMLPASYGPGEQNGTGGYQRAFPPRTNPEKHSQRKSNLAQVEHWARAQKGDSRSLPLDQTLPRQGPGQSLSFPENYQTLPKSTRHPSGGSSPPPRNLPSDYKYAQDRASHLKMSSEERRAHRDGTVWQLYEWQQRQQFRHGSPTAPICLGSPEFTDQGRSRSMLEVPRSISVPPSPSDIPPPGPPRVFPPRRPHTPAERVTVKPPDQRRSVDISLGDSPRRARGHAVKNSSHVDRRSMPSMGYMTHTVSAPSLHGKSADDTYLQLKKDLEYLDLKMTGRDLLKDRSLKPVKIAESDTDVKLSIFCEQDRVLQDLEDKIRALKENKDQLESVLEVLHRQMEQYRDQPQHLEKIAYQQKLLQEDLVHIRAELSRESTEMENAWNEYLKLENDVEQLKQTLQEQHRRAFFFQEKSQIQKDLWRIEDVTAGLSANKENFRILVESVKNPERKTVPLFPHPPVPSLSTSESKPPPQPSPPTSPVRTPLEVRLFPQLQTYVPYRPHPPQLRKVTSPLQSPTKAKPKVQEDEAPPRPPLPELYSPEDQPPAVPPLPREATIIRHTSVRGLKRQSDERKRDRELGQCVNGDSRVELRSYVSEPELATLSGDMAQPSLGLVGPESRYQTLPGRGLSGSTSRLQQSSTIAPYVTLRRGLNAESSKATFPRPKSALERLYSGDHQRGKMSAEEQLERMKRHQKALVRERKRTLGQGERTGLPSSRYLSRPLPGDLGSVC

SEQ ID NO: 41605 - protein, 696 aa, Homo sapiens
MFPKACRTLAWLPDPFLPFLLSLPLDQTLPRQGPGQSLSFPENYQTLPKSTRHPSGGSSPPPRNLPSDYKYAQDRASHLKMSSEERRAHRDGTVWQLYEWQQRQQFRHGSPTAPICLGSPEFTDQGRSRSMLEVPRSISVPPSPSDIPPPGPPRVFPPRRPHTPAERVTVKPPDQRRSVDISLGDSPRRARGHAVKNSSHVDRRSMPSMGYMTHTVSAPSLHGKSADDTYLQLKKDLEYLDLKMTGRDLLKDRSLKPVKIAESDTDVKLSIFCEQDRVLQDLEDKIRALKENKDQLESVLEVLHRQMEQYRDQPQHLEKIAYQQKLLQEDLVHIRAELSRESTEMENAWNEYLKLENDVEQLKQTLQEQHRRAFFFQEKSQIQKDLWRIEDVTAGLSANKENFRILVESVKNPERKTVPLFPHPPVPSLSTSESKPPPQPSPPTSPVRTPLEVRLFPQLQTYVPYRPHPPQLRKVTSPLQSPTKAKPKVQEDEAPPRPPLPELYSPEDQPPAVPPLPREATIIRHTSVRGLKRQSDERKRDRELGQCVNGDSRVELRSYVSEPELATLSGDMAQPSLGLVGPESRYQTLPGRGLSGSTSRLQQSSTIAPYVTLRRGLNAESSKATFPRPKSALERLYSGDHQRGKMSAEEQLERMKRHQKALVRERKRTLGQGERTGLPSSRYLSRPLPGDLGSVC

SEQ ID NO: 41606 - protein, 1040 aa, Homo sapiens
MGEEGGSASHDEEERASVLLGHSPGCEMCSQEAFQAQRSQLVELLVSGSLEGFESVLDWLLSWEVLSWEDYEGFHLLGQPLSHLARRLLDTVWNKGTWACQKLIAAAQEAQADSQSPKLHGCWDPHSLHPARDLQSHRPAIVRRLHSHVENMLDLAWERGFVSQYECDEIRLPIFTPSQRARRLLDLATVKANGLAAFLLQHVQELPVPLALPLEAATCKKYMAKLRTTVSAQSRFLSTYDGAETLCLEDIYTENVLEVWADVGMAGPPQKSPATLGLEELFSTPGHLNDDADTVLVVGEAGSGKSTLLQRLHLLWAAGQDFQEFLFVFPFSCRQLQCMAKPLSVRTLLFEHCCWPDVGQEDIFQLLLDHPDRVLLTFDGFDEFKFRFTDRERHCSPTDPTSVQTLLFNLLQGNLLKNARKVVTSRPAAVSAFLRKYIRTEFNLKGFSEQGIELYLRKRHHEPGVADRLIRLLQETSALHGLCHLPVFSWMVSKCHQELLLQEGGSPKTTTDMYLLILQHFLLHATPPDSASQGLGPSLLRGRLPTLLHLGRLALWGLGMCCYVFSAQQLQAAQVSPDDISLGFLVRAKGVVPGSTAPLEFLHITFQCFFAAFYLALSADVPPALLRHLFNCGRPGNSPMARLLPTMCIQASEGKDSSVAALLQKAEPHNLQITAAFLAGLLSREHWGLLAECQTSEKALLRRQACARWCLARSLRKHFHSIPPAAPGEAKSVHAMPGFIWLIRSLYEMQEERLARKAARGLNVGHLKLTFCSVGPTECAALAFVLQHLRRPVALQLDYNSVGDIGVEQLLPCLGVCKALYLRDNNISDRGICKLIECALHCEQLQKLALFNNKLTDGCAHSMAKLLACRQNFLALRLGNNYITAAGAQVLAEGLRGNTSLQFLGFWGNRVGDEGAQALAEALGDHQSLRWLSLVGNNIGSVGAQALALMLAKNVMLEELCLEENHLQDEGVCSLAEGLKKNSSLKILKLSNNCITYLGAEALLQALERNDTILEVWLRGNTFSLEEVDKLGCRDTRLLL

SEQ ID NO: 41607 - protein, 1013 aa, Homo sapiens
MCSQEAFQAQRSQLVELLVSGSLEGFESVLDWLLSWEVLSWEDYEGFHLLGQPLSHLARRLLDTVWNKGTWACQKLIAAAQEAQADSQSPKLHGCWDPHSLHPARDLQSHRPAIVRRLHSHVENMLDLAWERGFVSQYECDEIRLPIFTPSQRARRLLDLATVKANGLAAFLLQHVQELPVPLALPLEAATCKKYMAKLRTTVSAQSRFLSTYDGAETLCLEDIYTENVLEVWADVGMAGPPQKSPATLGLEELFSTPGHLNDDADTVLVVGEAGSGKSTLLQRLHLLWAAGQDFQEFLFVFPFSCRQLQCMAKPLSVRTLLFEHCCWPDVGQEDIFQLLLDHPDRVLLTFDGFDEFKFRFTDRERHCSPTDPTSVQTLLFNLLQGNLLKNARKVVTSRPAAVSAFLRKYIRTEFNLKGFSEQGIELYLRKRHHEPGVADRLIRLLQETSALHGLCHLPVFSWMVSKCHQELLLQEGGSPKTTTDMYLLILQHFLLHATPPDSASQGLGPSLLRGRLPTLLHLGRLALWGLGMCCYVFSAQQLQAAQVSPDDISLGFLVRAKGVVPGSTAPLEFLHITFQCFFAAFYLALSADVPPALLRHLFNCGRPGNSPMARLLPTMCIQASEGKDSSVAALLQKAEPHNLQITAAFLAGLLSREHWGLLAECQTSEKALLRRQACARWCLARSLRKHFHSIPPAAPGEAKSVHAMPGFIWLIRSLYEMQEERLARKAARGLNVGHLKLTFCSVGPTECAALAFVLQHLRRPVALQLDYNSVGDIGVEQLLPCLGVCKALYLRDNNISDRGICKLIECALHCEQLQKLALFNNKLTDGCAHSMAKLLACRQNFLALRLGNNYITAAGAQVLAEGLRGNTSLQFLGFWGNRVGDEGAQALAEALGDHQSLRWLSLVGNNIGSVGAQALALMLAKNVMLEELCLEENHLQDEGVCSLAEGLKKNSSLKILKLSNNCITYLGAEALLQALERNDTILEVWLRGNTFSLEEVDKLGCRDTRLLL

SEQ ID NO: 41608 - protein, 197 aa, Homo sapiens
MCSQEAFQAQRSQLVELLVSGSLEGFESVLDWLLSWEVLSWEDYEGFHLLGQPLSHLARRLLDTVWNKGTWACQKLIAAAQEAQADSQSPKLHGCWDPHSLHPARDLQSHRPAIVRRLHSHVENMLDLAWERGFVSQYECDEIRLPIFTPSQRARRLLDLATVKANGLAAFLLQHVQELPVPLALPLEDERTEAQKG

SEQ ID NO: 41609 - protein, 928 aa, Homo sapiens
MVKLSIVLTPQFLSHDQGQLTKELQQHVKSVTCPCEYLRKVINTLADHHHRGTDFGGSPWLHVIIAFPTSYKVVITLWIVYLWVSLLKTIFWSRNGHDGSTDVQQRAWRSNRRRQEGLRSICMHTKKRVSSFRGNKIGLKDVITLRRHVETKVRAKIRKRKVTTKINHHDKINGKRKTARKQKMFQRAQELRRRAEDYHKCKIPPSARKALCNWVRMAAAEHRHSSGLPYWPYLTAETLKNRMGHQPPPPTQQHSITDNSLSLKTPPECVLTPLPPSADDNLKTPPECVLTPLPPSADDNLKTPPECLLTPLPPSADDNLKTPPECLLTPLPPSADDNLKTPPECLLTPLPPSAPPSAPPSADDNLKTRAECLLHPLPPSADDNLKTPSERQLTPLPPSAPPSADDNIKTPAERLRGPLPPSADDNLKTPSERQLTPLPPSAPPSADDNIKTPAFHPQRMIISRHLPSVSSLPFHPQLHSQQMIISRYLLSVCGFRFHHQPMIISRHLPSVSSLPFHPQLHPQQMIISRHLPSVCGGRFHPQRMIISRHLPSVSSLPFHPQLHPQQMIISRHLPSVCGGRFHPQRMIISRHLPSVSSLPFHPQLHPQQMIISRHLPSVCGGRFHPQRMIISRHLPSVSSLPFHPQLHPQQMIISRHLPSVCGERLRGPLPPSADDNLKTPSERQLTPLPPSAPPSADDNIKTPAERLRGPLPPSADDNLKTPSERQLTPLPPSAPPSADDNIKTPAERLRGPLPPSADDNLKTPSERQLTPLPPSAPPSADDNIKTPAERLRGPLPPSADDNLKTPPLATQEAEAEKPRKPKRQRAAEMEPPPEPKRRRVGDVEPSRKPKRRRAADVEPSSPEPKRRRVGDVEPSRKPKRRRAADVEPSSPEPKRRRVGDVEPSRKPKRRRAADVEPSLPEPKRRRLS

SEQ ID NO: 41610 - protein, 519 aa, Homo sapiens
MEGVLYKWTNYLSGWQPRWFLLCGGILSYYDSPEDAWKGCKGSIQMAVCEIQVHSVDNTRMDLIIPGEQYFYLKARSVAERQRWLVALGSAKACLTDSRTQKEKEFAENTENLKTKMSELRLYCDLLVQQVDKTKEVTTTGVSNSEEGIDVGTLLKSTCNTFLKTLEECMQIANAAFTSELLYRTPPGSPQLAMLKSSKMKHPIIPIHNSLERQMELSTCENGSLNMEINGEEEILMKNKNSLYLKSAEIDCSISSEENTDDNITVQGEIRKEDGMENLKNHDNNLTQSGSDSSCSPECLWEEGKEVIPTFFSTMNTSFSDIELLEDSGIPTEAFLASCYAVVPVLDKLGPTVFAPVKMDLVGNIKKVNQKYITNKEEFTTLQKIVLHEVEADVAQVRNSATEALLWLKRGLKFLKGFLTEVKNGEKDIQTALNNAYGKTLRQHHGWVVRGVFALALRAAPSYEDFVAALTVKEGDHQKEAFSIGMQRDLSLYLPAMEKQLAILDTLYEVHGLESDEVV

SEQ ID NO: 41611 - protein, 455 aa, Homo sapiens
MEGVLYKWTNYLSGWQPRWFLLCGGILSYYDSPEDAWKGCKGSIQMAVCEIQVHSVDNTRMDLIIPGEQYFYLKARSVAERQRWLVALGSAKACLTDSRTQKEKEFAENTENLKTKMSELRLYCDLLVQQVDKTKEVTTTGVSNSEEGIDVGTLLKSTCNTFLKTLEECMQIANAAFTSELLYRTPPGSPQLAMLKSSKMKHPIIPIHNSLERQMELSTCENGSLNMEINGEEEILMKNKNSLYLKSAEIDCSISSEENTDDNITVQGEIRKEDGMENLKNHDNNLTQSGSDSSCSPECLWEEGKEVIPTFFSTMNTSFSDIELLEDSGIPTEAFLASCYAVVPVLDKLGPTVFAPVKMDLVGNIKKVNQKYITNKEEFTTLQKIVLHEVEADVAQVRNSATEALLWLKRGLKFLKGFLTEVKNGEKDIQTALNNAYGKTLRQHHGWVVRGVFAV

SEQ ID NO: 41612 - protein, 440 aa, Homo sapiens
MEGVLYKWTNYLSGWQPRWFLLCGGILSYYDSPEDAWKGCKGSIQMAVCEIQVHSVDNTRMDLIIPGEQYFYLKARSVAERQRWLVALGSAKACLTDSRTQKEKEFAENTENLKTKMSELRLYCDLLVQQVDKTKEVTTTGVSNSEEGIDVGTLLKSTCNTFLKTLEECMQIANAAFTSELLYRTPPGSPQLAMLKSSKMKHPIIPIHNSLERQMELSTCENGSLNMEINGEEEILMKNKNSLYLKSAEIDCSISSEENTDDNITVQGEIRKEDGMENLKNHDNNLTQSGSDSSCSPECLWEEGKEVIPTFFSTMNTSFSDIELLEDSGIPTEAFLASCYAVVPVLDKLGPTVFAPVKMDLVGNIKKVNQKYITNKEEFTTLQKIVLHEVEADVAQVRNSATEALLWLKRGLKFLKGFLTEVKNGEKDIQTALRNPTENT

SEQ ID NO: 41613 - protein, 1463 aa, Homo sapiens
MLLSPSLLLLLLLGAPRGCAEGVAAALTPERLLEWQDKGIFVIQSESLKKCIQAGKSVLTLENCKQANKHMLWKWVSNHGLFNIGGSGCLGLNFSAPEQPLSLYECDSTLVSLRWRCNRKMITGPLQYSVQVAHDNTVVASRKYIHKWISYGSGGGDICEYLHKDLHTIKGNTHGMPCMFPFQYNHQWHHECTREGREDDLLWCATTSRYERDEKWGFCPDPTSAEVGCDTIWEKDLNSHICYQFNLLSSLSWSEAHSSCQMQGGTLLSITDETEENFIREHMSSKTVEVWMGLNQLDEHAGWQWSDGTPLNYLNWSPEVNFEPFVEDHCGTFSSFMPSAWRSRDCESTLPYICKKYLNHIDHEIVEKDAWKYYATHCEPGWNPYNRNCYKLQKEEKTWHEALRSCQADNSALIDITSLAEVEFLVTLLGDENASETWIGLSSNKIPVSFEWSNDSSVIFTNWHTLEPHIFPNRSQLCVSAEQSEGHWKVKNCEERLFYICKKAGHVLSDAESGCQEGWERHGGFCYKIDTVLRSFDQASSGYYCPPALVTITNRFEQAFITSLISSVVKMKDSYFWIALQDQNDTGEYTWKPVGQKPEPVQYTHWNTHQPRYSGGCVAMRGRHPLGRWEVKHCRHFKAMSLCKQPVENQEKAEYEERWPFHPCYLDWESEPGLASCFKVFHSEKVLMKRTWREAEAFCEEFGAHLASFAHIEEENFVNELLHSKFNWTEERQFWIGFNKRNPLNAGSWEWSDRTPVVSSFLDNTYFGEDARNCAVYKANKTLLPLHCGSKREWICKIPRDVKPKIPFWYQYDVPWLFYQDAEYLFHTFASEWLNFEFVCSWLHSDLLTIHSAHEQEFIHSKIKALSKYGASWWIGLQEERANDEFRWRDGTPVIYQNWDTGRERTVNNQSQRCGFISSITGLWGSEECSVSMPSICKRKKVWLIEKKKDTPKQHGTCPKGWLYFNYKCLLLNIPKDPSSWKNWTHAQHFCAEEGGTLVAIESEVEQAFITMNLFGQTTSVWIGLQNDDYETWLNGKPVVYSNWSPFDIINIPSHNTTEVQKHIPLCALLSSNPNFHFTGKWYFEDCGKEGYGFVCEKMQDTSGHGVNTSDMYPMPNTLEYGNRTYKIINANMTWYAAIKTCLMHKAQLVSITDQYHQSFLTVVLNRLGYAHWIGLFTTDNGLNFDWSDGTKSSFTFWKDEESSLLGDCVFADSNGRWHSTACESFLQGAICHVPPETRQSEHPELCSETSIPWIKFKSNCYSFSTVLDSMSFEAAHEFCKKEGSNLLTIKDEAENAFLLEELFAFGSSVQMVWLNAQFDGNNETIKWFDGTPTDQSNWGIRKPDTDYFKPHHCVALRIPEGLWQLSPCQEKKGFICKMEADIHTAEALPEKGPSHSIIPLAVVLTLIVIVAICTLSFCIYKHNGGFFRRLAGFRNPYYPATNFSTVYLEENILISDLEKSDQ

SEQ ID NO: 41614 - protein, 1324 aa, Homo sapiens
MLLSPSLLLLLLLGAPRGCAEGVAAALTPERLLEWQDKGIFVIQSESLKKCIQAGKSVLTLENCKQANKHMLWKWVSNHGLFNIGGSGCLGLNFSAPEQPLSLYECDSTLVSLRWRCNRKMITGPLQYSVQVAHDNTVVASRKYIHKWISYGSGGGDICEYLHKDLHTIKGNTHGMPCMFPFQYNHQWHHECTREGREDDLLWCATTSRYERDEKWGFCPDPTSAEVGCDTIWEKDLNSHICYQFNLLSSLSWSEAHSSCQMQGGTLLSITDETEENFIREHMSSKTVEVWMGLNQLDEHAGWQWSDGTPLNYLNWSPEVNFEPFVEDHCGTFSSFMPSAWRSRDCESTLPYICKKYLNHIDHEIVEKDAWKYYATHCEPGWNPYNRNCYKLQKEEKTWHEALRSCQADNSALIDITSLAEVEFLVTLLGDENASETWIGLSSNKIPVSFEWSNDSSVIFTNWHTLEPHIFPNRSQLCVSAEQSEGHWKVKNCEERLFYICKKAGHVLSDAESGCQEGWERHGGFCYKIDTVLRSFDQASSGYYCPPALVTITNRFEQAFITSLISSVVKMKDSYFWIALQDQNDTGEYTWKPVGQKPEPVQYTHWNTHQPRYSGGCVAMRGRHPLGRWEVKHCRHFKAMSLCKQPVENQEKAEYEERWPFHPCYLDWESEPGLASCFKVFHSEKVLMKRTWREAEAFCEEFGAHLASFAHIEEENFVNELLHSKFNWTEERQFWIGFNKRNPLNAGSWEWSDRTPVVSSFLDNTYFGEDARNCAVYKANKTLLPLHCGSKREWICKIPRDVKPKIPFWYQYDVPWLFYQDAEYLFHTFASEWLNFEFVCSWLHSDLLTIHSAHEQEFIHSKIKALSKYGASWWIGLQEERANDEFRWRDGTPVIYQNWDTGRERTVNNQSQRCGFISSITGLWGSEECSVSMPSICKRKKVWLIEKKKDTPKQHGTCPKGWLYFNYKCLLLNIPKDPSSWKNWTHAQHFCAEEGGTLVAIESEVEQAFITMNLFGQTTSVWIGLQNDDYETWLNGKPVVYSNWSPFDIINIPSHNTTEVQKHIPLCALLSSNPNFHFTGKWYFEDCGKEGYGFVCEKMQDTSGHGVNTSDMYPMPNTLEYGNRTYKIINANMTWYAAIKTCLMHKAQLVSITDQYHQSFLTVVLNRLGYAHWIGLFTTDNGLNFDWSDGTKSSFTFWKDEESSLLGDCVFADSNGRWHSTACESFLQGAICHVPPETRQSEHPELCSETSIPWIKFKSNCYSFSTVLDSMSFEAAHEFCKKEGSNLLTIKDEAENAFLLEELFAFGSSVQMVWLNAQFDGNSK

SEQ ID NO: 41615 - protein, 391 aa, Homo sapiens
MSELRLCCDLLVQQVDKTKEVTTTGVSNSEEGIDVGTLLKSTCNTFLKTLEECMQIANAAFTSELLYHTPPGSPQLAMLKSSKMKHPIIPIHNSLERQTELSTCENGSLNMEINGEEEILMKNKNSLYLKSAEIDCSISSEENTDDNITVQGEIMKEDRMENLKNHDNNLSQSGSDSSCSPECLWEEGKEVIPTFFSTMNTSFSDIELLEDSGIPTEAFLASCCAVVPVLDKLGPTVFAPVKMDLVENIKKVNQKYITNKEEFTTLQKIVLHEVEADVAQVRNSATEALLWLKRGLKFLKGFLTEVKNGEKDIQTALNNAYGKTLRQHHGWVVRGVFALALRATPSYEDFVAALTVKEGDHRKEAFSIGMQRDLSLYLPAMKKQMAILDAL

SEQ ID NO: 41616 - protein, 243 aa, Homo sapiens
MSPAAPVPPDSALESPFEEMALVRGGWLWRQSSILRRWKRNWFALWLDGTLGYYHDETAQDEEDRVLIHFNVRDIKIGPECHDVQPPEGRSRDGLLTVNLREGGRLHLCAETKDDALAWKTALLEANSTPAPAGATVPPRSRRVCSKVRCVTRSWSPCKVERRIWVRVYSPYQDYYEVVPPNAHEATYVRSYYGPPYAGPGVTHVIVREDPCYSAGAPLAMGMLAGAATGAALGSLMWSPCWF

SEQ ID NO: 41617 - protein, 208 aa, Homo sapiens
MSPAAPVPPDSALESPFEEMALVRGGWLWRQSSILRRWKRNWFALWLDGTLGYYHDETAQDEEDRVLIHFNVRDIKIGPECHDVQPPEGRSRDGLLTVNLREGGRLHLCAETKDDALAWKTALLEANSTPVRVYSPYQDYYEVVPPNAHEATYVRSYYGPPYAGPGVTHVIVREDPCYSAGAPLAMGMLAGAATGAALGSLMWSPCWF

SEQ ID NO: 41618 - protein, 224 aa, Homo sapiens
MALVRGGWLWRQSSILRRWKRNWFALWLDGTLGYYHDETAQDEEDRVLIHFNVRDIKIGPECHDVQPPEGRSRDGLLTVNLREGGRLHLCAETKDDALAWKTALLEANSTPAPAGATVPPRSRRVCSKVRCVTRSWSPCKVERRIWVRVYSPYQDYYEVVPPNAHEATYVRSYYGPPYAGPGVTHVIVREDPCYSAGAPLAMGMLAGAATGAALGSLMWSPCWF

SEQ ID NO: 41619 - protein, 189 aa, Homo sapiens
MALVRGGWLWRQSSILRRWKRNWFALWLDGTLGYYHDETAQDEEDRVLIHFNVRDIKIGPECHDVQPPEGRSRDGLLTVNLREGGRLHLCAETKDDALAWKTALLEANSTPVRVYSPYQDYYEVVPPNAHEATYVRSYYGPPYAGPGVTHVIVREDPCYSAGAPLAMGMLAGAATGAALGSLMWSPCWF

SEQ ID NO: 41620 - protein, 288 aa, Homo sapiens
MQRRWVFVLLDVLCLLVASLPFAILTLVNAPYKRGFYCGDDSIRYPYRPDTITHGLMAGVTITATVILVSAGEAYLVYTDRLYSRSDFNNYVAAVYKVLGTFLFGAAVSQSLTDLAKYMIGRLRPNFLAVCDPDWSRVNCSVYVQLEKVCRGNPADVTEARLSFYSGHSSFGMYCMVFLALYVQARLCWKWARLLRPTVQFFLVAFALYVGYTRVSDYKHHWSDVLVGLLQGALVAALTVCYISDFFKARPPQHCLKEEELERKPSLSLTLTLGEADHNHYGYPHSSS

SEQ ID NO: 41621 - protein, 309 aa, Homo sapiens
MGVARGPGSRGQHPPPRQQEVCAEGPRARLHPAPPGLGASLPFAILTLVNAPYKRGFYCGDDSIRYPYRPDTITHGLMAGVTITATVILVSAGEAYLVYTDRLYSRSDFNNYVAAVYKVLGTFLFGAAVSQSLTDLAKYMIGRLRPNFLAVCDPDWSRVNCSVYVQLEKVCRGNPADVTEARLSFYSGHSSFGMYCMVFLALYVQARLCWKWARLLRPTVQFFLVAFALYVGYTRVSDYKHHWSDVLVGLLQGALVAALTVCYISDFFKARPPQHCLKEEELERKPSLSLTLTLGEADHNHYGYPHSSS

SEQ ID NO: 41622 - protein, 232 aa, Homo sapiens
MAGVTITATVILVSAGEAYLVYTDRLYSRSDFNNYVAAVYKVLGTFLFGAAVSQSLTDLAKYMIGRLRPNFLAVCDPDWSRVNCSVYVQLEKVCRGNPADVTEARLSFYSGHSSFGMYCMVFLALYVQARLCWKWARLLRPTVQFFLVAFALYVGYTRVSDYKHHWSDVLVGLLQGALVAALTVCYISDFFKARPPQHCLKEEELERKPSLSLTLTLGEADHNHYGYPHSSS

SEQ ID NO: 41623 - protein, 97 aa, Homo sapiens
MRPLLCALTGLALLRAAGSLAAAEPFSPPRGDSAQSTACDRHMAVQRRLDVMEEMVEKTVDHLGTEVKGLLGLLEELAWNLPPGPFSPAPDLLGDGF

SEQ ID NO: 41624 - protein, 506 aa, Homo sapiens
MRDPLTDCPYNKVYKNLKEFSQNGENFCKQVTSVLQQRANLEISYAKGLQKLASKLSKALQNTRKSCVSSAWAWASEGMKSTADLHQKLGKAIELEAIKPTYQVLNVQEKKRKSLDNEVEKTANLVISNWNQQIKAKKKLMVSTKKHEALFQLVESSKQSMTEKEKRKLLNKLTKSTEKLEKEDENYYQKNMAGYSTRLKWENTLENCYQSILELEKERIQLLCNNLNQYSQHISLFGQTLTTCHTQIHCAISKIDIEKDIQAVMEETAILSTENKSEFLLTDYFEEDPNSAMDKERRKSLLKPKLLRLQRDIEKASKDKEGLERMLKTYSSTSSFSDAKSQKDTAALMDENNLKLDLLEANSYKLSSMLAELEQRPQPSHPCSNSIFRWREKEHTHSYVKISRPFLMKRLENIVSKASSGGQSNPGSSTPAPGAAQLSSRLCKALYSFQARQDDELNLEKGDIVIIHEKKEGGWWFGSLNGKKGHFPAAYVEELPSNAGNTATKA

SEQ ID NO: 41625 - protein, 478 aa, Homo sapiens
MRDPLTDCPYNKVYKNLKEFSQNGENFCKQVTSVLQQSCVSSAWAWASEGMKSTADLHQKLGKAIELEAIKPTYQVLNVQEKKRKSLDNEVEKTANLVISNWNQQIKAKKKLMVSTKKHEALFQLVESSKQSMTEKEKRKLLNKLTKSTEKLEKEDENYYQKNMAGYSTRLKWENTLENCYQSILELEKERIQLLCNNLNQYSQHISLFGQTLTTCHTQIHCAISKIDIEKDIQAVMEETAILSTENKSEFLLTDYFEEDPNSAMDKERRKSLLKPKLLRLQRDIEKASKDKEGLERMLKTYSSTSSFSDAKSQKDTAALMDENNLKLDLLEANSYKLSSMLAELEQRPQPSHPCSNSIFRWREKEHTHSYVKISRPFLMKRLENIVSKASSGGQSNPGSSTPAPGAAQLSSRLCKALYSFQARQDDELNLEKGDIVIIHEKKEGGWWFGSLNGKKGHFPAAYVEELPSNAGNTATKA

SEQ ID NO: 41626 - protein, 428 aa, Homo sapiens
MKSTADLHQKLGKAIELEAIKPTYQVLNVQEKKRKSLDNEVEKTANLVISNWNQQIKAKKKLMVSTKKHEALFQLVESSKQSMTEKEKRKLLNKLTKSTEKLEKEDENYYQKNMAGYSTRLKWENTLENCYQSILELEKERIQLLCNNLNQYSQHISLFGQTLTTCHTQIHCAISKIDIEKDIQAVMEETAILSTENKSEFLLTDYFEEDPNSAMDKERRKSLLKPKLLRLQRDIEKASKDKEGLERMLKTYSSTSSFSDAKSQKDTAALMDENNLKLDLLEANSYKLSSMLAELEQRPQPSHPCSNSIFRWREKEHTHSYVKISRPFLMKRLENIVSKASSGGQSNPGSSTPAPGAAQLSSRLCKALYSFQARQDDELNLEKGDIVIIHEKKEGGWWFGSLNGKKGHFPAAYVEELPSNAGNTATKA

SEQ ID NO: 41627 - protein, 563 aa, Homo sapiens
MRDPLTDCPYNKVYKNLKEFSQNGENFCKQVTSVLQQRANLEISYAKGLQKLASKLSKALQNTRKSCVSSAWAWASEGMKSTADLHQKLGKAIELEAIKPTYQVLNVQEKKRKSLDNEVEKTANLVISNWNQQIKAKKKLMVSTKKHEALFQLVESSKQSMTEKEKRKLLNKLTKSTEKLEKEDENYYQKNMAGYSTRLKWENTLENCYQVTHSICLYAFWVKRAWGKCVSDLRYQDTFLPGNLPPLWFGYDIVKRLIMRLCSVCLQSILELEKERIQLLCNNLNQYSQHISLFGQTLTTCHTQIHCAISKIDIEKDIQAVMEETAILSTENKSEFLLTDYFEEDPNSAMDKERRKSLLKPKLLRLQRDIEKASKDKEGLERMLKTYSSTSSFSDAKSQKDTAALMDENNLKLDLLEANSYKLSSMLAELEQRPQPSHPCSNSIFRWREKEHTHSYVKISRPFLMKRLENIVSKASSGGQSNPGSSTPAPGAAQLSSRLCKALYSFQARQDDELNLEKGDIVIIHEKKEGGWWFGSLNGKKGHFPAAYVEELPSNAGNTATKA

SEQ ID NO: 41628 - protein, 1473 aa, Homo sapiens
MAGGAWGRLACYLEFLKKEELKEFQLLLANKAHSRSSSGETPAQPEKTSGMEVASYLVAQYGEQRAWDLALHTWEQMGLRSLCAQAQEGAGHSPSFPYSPSEPHLGSPSQPTSTAVLMPWIHELPAGCTQGSERRVLRQLPDTSGRRWREISASLLYQALPSSPDHESPSQESPNAPTSTAVLGSWGSPPQPSLAPREQEAPGTQWPLDETSGIYYTEIREREREKSEKGRPPWAAVVGTPPQAHTSLQPHHHPWEPSVRESLCSTWPWKNEDFNQKFTQLLLLQRPHPRSQDPLVKRSWPDYVEENRGHLIEIRDLFGPGLDTQEPRIVILQGAAGIGKSTLARQVKEAWGRGQLYGDRFQHVFYFSCRELAQSKVVSLAELIGKDGTATPAPIRQILSRPERLLFILDGVDEPGWVLQEPSSELCLHWSQPQPADALLGSLLGKTILPEASFLITARTTALQNLIPSLEQARWVEVLGFSESSRKEYFYRYFTDERQAIRAFRLVKSNKELWALCLVPWVSWLACTCLMQQMKRKEKLTLTSKTTTTLCLHYLAQALQAQPLGPQLRDLCSLAAEGIWQKKTLFSPDDLRKHGLDGAIISTFLKMGILQEHPIPLSYSFIHLCFQEFFAAMSYVLEDEKGRGKHSNCIIDLEKTLEAYGIHGLFGASTTRFLLGLLSDEGEREMENIFHCRLSQGRNLMQWVPSLQLLLQPHSLESLHCLYETRNKTFLTQVMAHFEEMGMCVETDMELLVCTFCIKFSRHVKKLQLIEGRQHRSTWSPTMVVLFRWVPVTDAYWQILFSVLKVTRNLKELDLSGNSLSHSAVKSLCKTLRRPRCLLETLRLAGCGLTAEDCKDLAFGLRANQTLTELDLSFNVLTDAGAKHLCQRLRQPSCKLQRLQLVSCGLTSDCCQDLASVLSASPSLKELDLQQNNLDDVGVRLLCEGLRHPACKLIRLGLDQTTLSDEMRQELRALEQEKPQLLIFSRRKPSVMTPTEGLDTGEMSNSTSSLKRQRLGSERAASHVAQANLKLLDVSKIFPIAEIAEESSPEVVPVELLCVPSPASQGDLHTKPLGTDDDFWGPTGPVATEVVDKEKNLYRVHFPVAGSYRWPNTGLCFVMREAVTVEIEFCVWDQFLGEINPQHSWMVAGPLLDIKAEPGAVEAVHLPHFVALQGGHVDTSLFQMAHFKEEGMLLEKPARVELHHIVLENPSFSPLGVLLKMIHNALRFIPVTSVVLLYHRVHPEEVTFHLYLIPSDCSIRKAIDDLEMKFQFVRIHKPPPLTPLYMGCRYTVSGSGSGMLEILPKELELCYRSPGEDQLFSEFYVGHLGSGIRLQVKDKKDETLVWEALVKPGDLMPATTLIPPARIAVPSPLDAPQLLHFVDQYREQLIARVTSVEVVLDKLHGQVLSQEQYERVLAENTRPSQMRKLFSLSQSWDRKCKDGLYQALKETHPHLIMELWEKGSKKGLLPLSS

SEQ ID NO: 41629 - protein, 1429 aa, Homo sapiens
MAGGAWGRLACYLEFLKKEELKEFQLLLANKAHSRSSSGETPAQPEKTSGMEVASYLVAQYGEQRAWDLALHTWEQMGLRSLCAQAQEGAGHSPSFPYSPSEPHLGSPSQPTSTAVLMPWIHELPAGCTQGSERRVLRQLPDTSGRRWREISASLLYQALPSSPDHESPSQESPNAPTSTAVLGSWGSPPQPSLAPREQEAPGTQWPLDETSGIYYTEIREREREKSEKGRPPWAAVVGTPPQAHTSLQPHHHPWEPSVRESLCSTWPWKNEDFNQKFTQLLLLQRPHPRSQDPLVKRSWPDYVEENRGHLIEIRDLFGPGLDTQEPRIVILQGAAGIGKSTLARQVKEAWGRGQLYGDRFQHVFYFSCRELAQSKVVSLAELIGKDGTATPAPIRQILSRPERLLFILDGVDEPGWVLQEPSSELCLHWSQPQPADALLGSLLGKTILPEASFLITARTTALQNLIPSLEQARWVEVLGFSESSRKEYFYRYFTDERQAIRAFRLVKSNKELWALCLVPWVSWLACTCLMQQMKRKEKLTLTSKTTTTLCLHYLAQALQAQPLGPQLRDLCSLAAEGIWQKKTLFSPDDLRKHGLDGAIISTFLKMGILQEHPIPLSYSFIHLCFQEFFAAMSYVLEDEKGRGKHSNCIIDLEKTLEAYGIHGLFGASTTRFLLGLLSDEGEREMENIFHCRLSQGRNLMQWVPSLQLLLQPHSLESLHCLYETRNKTFLTQVMAHFEEMGMCVETDMELLVCTFCIKFSRHVKKLQLIEGRQHRSTWSPTMVVLFRWVPVTDAYWQILFSVLKVTRNLKELDLSGNSLSHSAVKSLCKTLRRPRCLLETLRLAGCGLTAEDCKDLAFGLRANQTLTELDLSFNVLTDAGAKHLCQRLRQPSCKLQRLQLVSCGLTSDCCQDLASVLSASPSLKELDLQQNNLDDVGVRLLCEGLRHPACKLIRLGLDQTTLSDEMRQELRALEQEKPQLLIFSRRKPSVMTPTEGLDTGEMSNSTSSLKRQRLGSERAASHVAQANLKLLDVSKIFPIAEIAEESSPEVVPVELLCVPSPASQGDLHTKPLGTDDDFWGPTGPVATEVVDKEKNLYRVHFPVAGSYRWPNTGLCFVMREAVTVEIEFCVWDQFLGEINPQHSWMVAGPLLDIKAEPGAVEAVHLPHFVALQGGHVDTSLFQMAHFKEEGMLLEKPARVELHHIVLENPSFSPLGVLLKMIHNALRFIPVTSVVLLYHRVHPEEVTFHLYLIPSDCSIRKELELCYRSPGEDQLFSEFYVGHLGSGIRLQVKDKKDETLVWEALVKPGDLMPATTLIPPARIAVPSPLDAPQLLHFVDQYREQLIARVTSVEVVLDKLHGQVLSQEQYERVLAENTRPSQMRKLFSLSQSWDRKCKDGLYQALKETHPHLIMELWEKGSKKGLLPLSS

SEQ ID NO: 41630 - protein, 1399 aa, Homo sapiens
MAGGAWGRLACYLEFLKKEELKEFQLLLANKAHSRSSSGETPAQPEKTSGMEVASYLVAQYGEQRAWDLALHTWEQMGLRSLCAQAQEGAGHSPSFPYSPSEPHLGSPSQPTSTAVLMPWIHELPAGCTQGSERRVLRQLPDTSGRRWREISASLLYQALPSSPDHESPSQESPNAPTSTAVLGSWGSPPQPSLAPREQEAPGTQWPLDETSGIYYTEIREREREKSEKGRPPWAAVVGTPPQAHTSLQPHHHPWEPSVRESLCSTWPWKNEDFNQKFTQLLLLQRPHPRSQDPLVKRSWPDYVEENRGHLIEIRDLFGPGLDTQEPRIVILQGAAGIGKSTLARQVKEAWGRGQLYGDRFQHVFYFSCRELAQSKVVSLAELIGKDGTATPAPIRQILSRPERLLFILDGVDEPGWVLQEPSSELCLHWSQPQPADALLGSLLGKTILPEASFLITARTTALQNLIPSLEQARWVEVLGFSESSRKEYFYRYFTDERQAIRAFRLVKSNKELWALCLVPWVSWLACTCLMQQMKRKEKLTLTSKTTTTLCLHYLAQALQAQPLGPQLRDLCSLAAEGIWQKKTLFSPDDLRKHGLDGAIISTFLKMGILQEHPIPLSYSFIHLCFQEFFAAMSYVLEDEKGRGKHSNCIIDLEKTLEAYGIHGLFGASTTRFLLGLLSDEGEREMENIFHCRLSQGRNLMQWVPSLQLLLQPHSLESLHCLYETRNKTFLTQVMAHFEEMGMCVETDMELLVCTFCIKFSRHVKKLQLIEGRQHRSTWSPTMVVLFRWVPVTDAYWQILFSVLKVTRNLKELDLSGNSLSHSAVKSLCKTLRRPRCLLETLRLAGCGLTAEDCKDLAFGLRANQTLTELDLSFNVLTDAGAKHLCQRLRQPSCKLQRLQLVSCGLTSDCCQDLASVLSASPSLKELDLQQNNLDDVGVRLLCEGLRHPACKLIRLGKPSVMTPTEGLDTGEMSNSTSSLKRQRLGSERAASHVAQANLKLLDVSKIFPIAEIAEESSPEVVPVELLCVPSPASQGDLHTKPLGTDDDFWGPTGPVATEVVDKEKNLYRVHFPVAGSYRWPNTGLCFVMREAVTVEIEFCVWDQFLGEINPQHSWMVAGPLLDIKAEPGAVEAVHLPHFVALQGGHVDTSLFQMAHFKEEGMLLEKPARVELHHIVLENPSFSPLGVLLKMIHNALRFIPVTSVVLLYHRVHPEEVTFHLYLIPSDCSIRKELELCYRSPGEDQLFSEFYVGHLGSGIRLQVKDKKDETLVWEALVKPGDLMPATTLIPPARIAVPSPLDAPQLLHFVDQYREQLIARVTSVEVVLDKLHGQVLSQEQYERVLAENTRPSQMRKLFSLSQSWDRKCKDGLYQALKETHPHLIMELWEKGSKKGLLPLSS

SEQ ID NO: 41631 - protein, 1443 aa, Homo sapiens
MAGGAWGRLACYLEFLKKEELKEFQLLLANKAHSRSSSGETPAQPEKTSGMEVASYLVAQYGEQRAWDLALHTWEQMGLRSLCAQAQEGAGHSPSFPYSPSEPHLGSPSQPTSTAVLMPWIHELPAGCTQGSERRVLRQLPDTSGRRWREISASLLYQALPSSPDHESPSQESPNAPTSTAVLGSWGSPPQPSLAPREQEAPGTQWPLDETSGIYYTEIREREREKSEKGRPPWAAVVGTPPQAHTSLQPHHHPWEPSVRESLCSTWPWKNEDFNQKFTQLLLLQRPHPRSQDPLVKRSWPDYVEENRGHLIEIRDLFGPGLDTQEPRIVILQGAAGIGKSTLARQVKEAWGRGQLYGDRFQHVFYFSCRELAQSKVVSLAELIGKDGTATPAPIRQILSRPERLLFILDGVDEPGWVLQEPSSELCLHWSQPQPADALLGSLLGKTILPEASFLITARTTALQNLIPSLEQARWVEVLGFSESSRKEYFYRYFTDERQAIRAFRLVKSNKELWALCLVPWVSWLACTCLMQQMKRKEKLTLTSKTTTTLCLHYLAQALQAQPLGPQLRDLCSLAAEGIWQKKTLFSPDDLRKHGLDGAIISTFLKMGILQEHPIPLSYSFIHLCFQEFFAAMSYVLEDEKGRGKHSNCIIDLEKTLEAYGIHGLFGASTTRFLLGLLSDEGEREMENIFHCRLSQGRNLMQWVPSLQLLLQPHSLESLHCLYETRNKTFLTQVMAHFEEMGMCVETDMELLVCTFCIKFSRHVKKLQLIEGRQHRSTWSPTMVVLFRWVPVTDAYWQILFSVLKVTRNLKELDLSGNSLSHSAVKSLCKTLRRPRCLLETLRLAGCGLTAEDCKDLAFGLRANQTLTELDLSFNVLTDAGAKHLCQRLRQPSCKLQRLQLVSCGLTSDCCQDLASVLSASPSLKELDLQQNNLDDVGVRLLCEGLRHPACKLIRLGKPSVMTPTEGLDTGEMSNSTSSLKRQRLGSERAASHVAQANLKLLDVSKIFPIAEIAEESSPEVVPVELLCVPSPASQGDLHTKPLGTDDDFWGPTGPVATEVVDKEKNLYRVHFPVAGSYRWPNTGLCFVMREAVTVEIEFCVWDQFLGEINPQHSWMVAGPLLDIKAEPGAVEAVHLPHFVALQGGHVDTSLFQMAHFKEEGMLLEKPARVELHHIVLENPSFSPLGVLLKMIHNALRFIPVTSVVLLYHRVHPEEVTFHLYLIPSDCSIRKAIDDLEMKFQFVRIHKPPPLTPLYMGCRYTVSGSGSGMLEILPKELELCYRSPGEDQLFSEFYVGHLGSGIRLQVKDKKDETLVWEALVKPGDLMPATTLIPPARIAVPSPLDAPQLLHFVDQYREQLIARVTSVEVVLDKLHGQVLSQEQYERVLAENTRPSQMRKLFSLSQSWDRKCKDGLYQALKETHPHLIMELWEKGSKKGLLPLSS

SEQ ID NO: 41632 - protein, 1375 aa, Homo sapiens
MAGGAWGRLACYLEFLKKEELKEFQLLLANKAHSRSSSGETPAQPEKTSGMEVASYLVAQYGEQRAWDLALHTWEQMGLRSLCAQAQEGAGHSPSFPYSPSEPHLGSPSQPTSTAVLMPWIHELPAGCTQGSERRVLRQLPDTSGRRWREISASLLYQALPSSPDHESPSQESPNAPTSTAVLGSWGSPPQPSLAPREQEAPGTQWPLDETSGIYYTEIREREREKSEKGRPPWAAVVGTPPQAHTSLQPHHHPWEPSVRESLCSTWPWKNEDFNQKFTQLLLLQRPHPRSQDPLVKRSWPDYVEENRGHLIEIRDLFGPGLDTQEPRIVILQGAAGIGKSTLARQVKEAWGRGQLYGDRFQHVFYFSCRELAQSKVVSLAELIGKDGTATPAPIRQILSRPERLLFILDGVDEPGWVLQEPSSELCLHWSQPQPADALLGSLLGKTILPEASFLITARTTALQNLIPSLEQARWVEVLGFSESSRKEYFYRYFTDERQAIRAFRLVKSNKELWALCLVPWVSWLACTCLMQQMKRKEKLTLTSKTTTTLCLHYLAQALQAQPLGPQLRDLCSLAAEGIWQKKTLFSPDDLRKHGLDGAIISTFLKMGILQEHPIPLSYSFIHLCFQEFFAAMSYVLEDEKGRGKHSNCIIDLEKTLEAYGIHGLFGASTTRFLLGLLSDEGEREMENIFHCRLSQGRNLMQWVPSLQLLLQPHSLESLHCLYETRNKTFLTQVMAHFEEMGMCVETDMELLVCTFCIKFSRHVKKLQLIEGRQHRSTWSPTMVVLFRWVPVTDAYWQILFSVLKVTRNLKELDLSGNSLSHSAVKSLCKTLRRPRCLLETLRLAGCGLTAEDCKDLAFGLRANQTLTELDLSFNVLTDAGAKHLCQRLRQPSCKLQRLQLVSCGLTSDCCQDLASVLSASPSLKELDLQQNNLDDVGVRLLCEGLRHPACKLIRLGLDQTTLSDEMRQELRALEQEKPQLLIFSRRKPSVMTPTEGLDTGEMSNSTSSLKRQRLGSERAASHVAQANLKLLDVSKIFPIAEIAGKSHEESSPEVVPVELLCVPSPASQGDLHTKPLGTDDDFWGPTGPVATEVVDKEKNLYRVHFPVAGSYRWPNTGLCFVMREAVTVEIEFCVWDQFLGEINPQHSWMVAGPLLDIKAEPGAVEAVHLPHFVALQGGHVDTSLFQMAHFKEEGMLLEKPARVELHHIVLENPSFSPLGVLLKMIHNALRFIPVTSVVLLYHRVHPEEVTFHLYLIPSDCSIRKAIDDLEMKFQFVRIHKPPPLTPLYMGCRYTVSGSGSGMLEILPKELELCYRSPGEDQLFSEFYVGHLGSGIRLQVKDKKDETLVWEALVKPGRNTSQPWNLRCNRDARRY

SEQ ID NO: 41633 - protein, 739 aa, Homo sapiens
MAHFEEMGMCVETDMELLVCTFCIKFSRHVKKLQLIEGRQHRSTWSPTMVVLFRWVPVTDAYWQILFSVLKVTRNLKELDLSGNSLSHSAVKSLCKTLRRPRCLLETLRLAGCGLTAEDCKDLAFGLRANQTLTELDLSFNVLTDAGAKHLCQRLRQPSCKLQRLQLVSCGLTSDCCQDLASVLSASPSLKELDLQQNNLDDVGVRLLCEGLRHPACKLIRLGLDQTTLSDEMRQELRALEQEKPQLLIFSRRKPSVMTPTEGLDTGEMSNSTSSLKRQRLGSERAASHVAQANLKLLDVSKIFPIAEIAEESSPEVVPVELLCVPSPASQGDLHTKPLGTDDDFWGPTGPVATEVVDKEKNLYRVHFPVAGSYRWPNTGLCFVMREAVTVEIEFCVWDQFLGEINPQHSWMVAGPLLDIKAEPGAVEAVHLPHFVALQGGHVDTSLFQMAHFKEEGMLLEKPARVELHHIVLENPSFSPLGVLLKMIHNALRFIPVTSVVLLYHRVHPEEVTFHLYLIPSDCSIRKAIDDLEMKFQFVRIHKPPPLTPLYMGCRYTVSGSGSGMLEILPKELELCYRSPGEDQLFSEFYVGHLGSGIRLQVKDKKDETLVWEALVKPGDLMPATTLIPPARIAVPSPLDAPQLLHFVDQYREQLIARVTSVEVVLDKLHGQVLSQEQYERVLAENTRPSQMRKLFSLSQSWDRKCKDGLYQALKETHPHLIMELWEKGSKKGLLPLSS

SEQ ID NO: 41634 - protein, 409 aa, Homo sapiens
MRQELRALEQEKPQLLIFSRRKPSVMTPTEGLDTGEMSNSTSSLKRQRLGSERAASHVAQANLKLLDVSKIFPIAEIAGKSHEESSPEVVPVELLCVPSPASQGDLHTKPLGTDDDFWGPTGPVATEVVDKEKNLYRVHFPVAGSYRWPNTGLCFVMREAVTVEIEFCVWDQFLGEINPQHSWMVAGPLLDIKAEPGAVEAVHLPHFVALQGGHVDTSLFQMAHFKEEGMLLEKPARVELHHIVLENPSFSPLGVLLKMIHNALRFIPVTSVVLLYHRVHPEEVTFHLYLIPSDCSIRKAIDDLEMKFQFVRIHKPPPLTPLYMGCRYTVSGSGSGMLEILPKELELCYRSPGEDQLFSEFYVGHLGSGIRLQVKDKKDETLVWEALVKPGRNTSQPWNLRCNRDARRY

SEQ ID NO: 41635 - protein, 1278 aa, Homo sapiens
MTARGLALGLLLLLLCPAQVFSQSCVWYGECGIAYGDKRYNCEYSGPPKPLPKDGYDLVQELCPGFFFGNVSLCCDVRQLQTLKDNLQLPLQFLSRCPSCFYNLLNLFCELTCSPRQSQFLNVTATEDYVDPVTNQTKTNVKELQYYVGQSFANAMYNACRDVEAPSSNDKALGLLCGKDADACNATNWIEYMFNKDNGQAPFTITPVFSDFPVHGMEPMNNATKGCDESVDEVTAPCSCQDCSIVCGPKPQPPPPPAPWTILGLDAMYVIMWITYMAFLLVFFGAFFAVWCYRKRYFVSEYTPIDSNIAFSVNASDKGEASCCDPVSAAFEGCLRRLFTRWGSFCVRNPGCVIFFSLVFITACSSGLVFVRVTTNPVDLWSAPSSQARLEKEYFDQHFGPFFRTEQLIIRAPLTDKHIYQPYPSGADVPFGPPLDIQILHQVLDLQIAIENITASYDNETVTLQDICLAPLSPYNTNCTILSVLNYFQNSHSVLDHKKGDDFFVYADYHTHFLYCVRAPASLNDTSLLHDPCLGTFGGPVFPWLVLGGYDDQNYNNATALVITFPVNNYYNDTEKLQRAQAWEKEFINFVKNYKNPNLTISFTAERSIEDELNRESDSDVFTVVISYAIMFLYISLALGHMKSCRRLLVDSKVSLGIAGILIVLSSVACSLGVFSYIGLPLTLIVIEVIPFLVLAVGVDNIFILVQAYQRDERLQGETLDQQLGRVLGEVAPSMFLSSFSETVAFFLGALSVMPAVHTFSLFAGLAVFIDFLLQITCFVSLLGLDIKRQEKNRLDIFCCVRGAEDGTSVQASESCLFRFFKNSYSPLLLKDWMRPIVIAIFVGVLSFSIAVLNKVDIGLDQSLSMPDDSYMVDYFKSISQYLHAGPPVYFVLEEGHDYTSSKGQNMVCGGMGCNNDSLVQQIFNAAQLDNYTRIGFAPSSWIDDYFDWVKPQSSCCRVDNITDQFCNASVVDPACVRCRPLTPEGKQRPQGGDFMRFLPMFLSDNPNPKCGKGGHAAYSSAVNILLGHGTRVGATYFMTYHTVLQTSADFIDALKKARLIASNVTETMGINGSAYRVFPYSVFYVFYEQYLTIIDDTIFNLGVSLGAIFLVTMVLLGCELWSAVIMCATIAMVLVNMFGVMWLWGISLNAVSLVNLVMSCGISVEFCSHITRAFTVSMKGSRVERAEEALAHMGSSVFSGITLTKFGGIVVLAFAKSQIFQIFYFRMYLAMVLLGATHGLIFLPVLLSYIGPSVNKAKSCATEERYKGTERERLLNF

SEQ ID NO: 41636 - protein, 960 aa, Homo sapiens
MYVIMWITYMAFLLVFFGAFFAVWCYRKRYFVSEYTPIDSNIAFSVNASDKGTAWLLTSTFPSSPVLPGEASCCDPVSAAFEGCLRRLFTRWGSFCVRNPGCVIFFSLVFITACSSGLVFVRVTTNPVDLWSAPSSQARLEKEYFDQHFGPFFRTEQLIIRAPLTDKHIYQPYPSGADVPFGPPLDIQILHQVLDLQIAIENITASYDNETVTLQDICLAPLSPYNTNCTILSVLNYFQNSHSVLDHKKGDDFFVYADYHTHFLYCVRFINFVKNYKNPNLTISFTAERSIEDELNRESDSDVFTVVISYAIMFLYISLALGHMKSCRRLLVDSKVSLGIAGILIVLSSVACSLGVFSYIGLPLTLIVIEVIPFLVLAVGVDNIFILVQAYQRDERLQGETLDQQLGRVLGEVAPSMFLSSFSETVAFFLGALSVMPAVHTFSLFAGLAVFIDFLLQITCFVSLLGLDIKRQEKNRLDIFCCVRGAEDGTSVQASESCLFRFFKNSYSPLLLKDWMRPIVIAIFVGVLSFSIAVLNKVDIGLDQSLSMPDDSYMVDYFKSISQYLHAGPPVYFVLEEGHDYTSSKGQNMVCGGMGCNNDSLVQQIFNAAQLDNYTRIGFAPSSWIDDYFDWVKPQSSCCRVDNITDQFCNASVVDPACVRCRPLTPEGKQRPQGGDFMRFLPMFLSDNPNPKCGKGGHAAYSSAVNILLGHGTRVGATYFMTYHTVLQTSADFIDALKKARLIASNVTETMGINGSAYRVFPYSVFYVFYEQYLTIIDDTIFNLGVSLGAIFLVTMVLLGCELWSAVIMCATIAMVLVNMFGVMWLWGISLNAVSLVNLVMSCGISVEFCSHITRAFTVSMKGSRVERAEEALAHMGSSVFSGITLTKFGGIVVLAFAKSQIFQIFYFRMYLAMVLLGATHGLIFLPVLLSYIGPSVNKAKSCATEERYKGTERERLLNF

SEQ ID NO: 41637 - protein, 373 aa, Homo sapiens
MSPCPPQQSRNRVIQLSTSELGEMELTWQEIMSITELQGLNAPSEPSFEPQAPAPYLGPPPPTTYCPCSIHPDSGFPLPPPPYELPASTSHVPDPPYSYGNMAIPVSKPLSLSGLLSEPLQDPLALLDIGLPAGPPKPQEDPESDSGLSLNYSDAESLELEGTEAGRRRSEYVEMYPVEYPYSLMPNSLAHSNYTLPAAETPLALEPSSGPVRAKPTARGEAGSRDERRALAMKIPFPTDKIVNLPVDDFNELLARYPLTESQLALVRDIRRRGKNKVAAQNCRKRKLETIVQLERELERLTNERERLLRARGEADRTLEVMRQQLTELYRDIFQHLRDESGNSYSPEEYALQQAADGTIFLVPRGTKMEATD

SEQ ID NO: 41638 - protein, 309 aa, Homo sapiens
MDEKVFTKELDQWIEQLNECKQLSESQVKSLCEKAKEILTKESNVQEVRCPVTVCGDVHGQFHDLMELFRIGGKSPDTNYLFMGDYVDRGYYSVETVTLLVALKVRYRERITILRGNHESRQITQVYGFYDECLRKYGNANVWKYFTDLFDYLPLTALVDGQIFCLHGGLSPSIDTLDHIRALDRLQEVPHEGPMCDLLWSDPDDRGGWGISPRGAGYTFGQDISETFNHANGLTLVSRAHQLVMEGYNWCHDRNVVTIFSAPNYCYRCGNQAAIMELDDTLKYSFLQFDPAPRRGEPHVTRRTPDYFL

SEQ ID NO: 41639 - protein, 255 aa, Homo sapiens
MDEKVFTKELDQWIEQLNECKQLSESQVKSLCEKAKEILTKESNVQEVRCPVTVCGDVHGQFHDLMELFRIGGKSPDTNYLFMGDYVDRGYYSVETVTLLVALKVRYRERITILRGNHESRQITQVYGFYDECLRKYGNANVWKYFTDLFDYLPLTALVDGQIFCLHGGLSPSIDTLDHIRALDRLQEVPHEGYNWCHDRNVVTIFSAPNYCYRCGNQAAIMELDDTLKYSFLQFDPAPRRGEPHVTRRTPDYFL

SEQ ID NO: 41640 - protein, 249 aa, Homo sapiens
MVDRLANSEANTRRISIVENCFGAAGQPLTIPGRVLIGEGVLTKLCRKKPKARQFFLFNDILVYGNIVIQKKKYNKQHIIPLENVTIDSIKDEGDLRNGWLIKTPTKSFAVYAATATEKSEWMNHINKCVTDLLSKSGKTPSNEHAAVWVPDSEATVCMRCQKAKFTPVNRRHHCRKCGFVVCGPCSEKRFLLPSQSSKPVRICDFCYDLLSAGDMATCQPARSDSYSQSLKSPLNDMSDDDDDDDSSD

SEQ ID NO: 41641 - protein, 208 aa, Homo sapiens
MGNAQERPSETIDRERKRLVETLQADSGLLLDALLARGVLTGPEYEALDALPDAERRVRRLLLLVQGKGEAACQELLRCAQRTAGAPDPAWDWQHVGPGYRDRSYDPPCPGHWTPEAPGSGTTCPGLPRASDPDEAGGPEGSEAVQSGTPEEPEPELEAEASKEAEPEPEPEPELEPEAEAEPEPELEPEPDPEPEPDFEERDESEDS

SEQ ID NO: 41642 - protein, 219 aa, Homo sapiens
MGNAQERPSETIDRERKRLVETLQADSGLLLDALLARGVLTGPEYEALDALPDAERRVRRLLLLVQGKGEAACQELLRCAQRTAGAPDPAWDWQHATGTAAMTLHAQATGRRRHPARGPHAPGCPELQTLTRPGALRAPRRCNPGPRRSQSQSWKLRPLKRLNRSRSQSQSWNPRLKQNQSRNWSQNRTQSPSPTSRKGTSPKIPEGQSSDRRCPAHAG

SEQ ID NO: 41643 - protein, 270 aa, Homo sapiens
MPVLGKAGEERRATADAWGQKEEPEEETGQSVWRGRRTPSSPCWPPGPVLAEPSGGWDRAPTMGNAQERPSETIDRERKRLVETLQADSGLLLDALLARGVLTGPEYEALDALPDAERRVRRLLLLVQGKGEAACQELLRCAQRTAGAPDPAWDWQHVGPGYRDRSYDPPCPGHWTPEAPGSGTTCPGLPRASDPDEAGGPEGSEAVQSGTPEEPEPELEAEASKEAEPEPEPEPELEPEAEAEPEPELEPEPDPEPEPDFEERDESEDS

SEQ ID NO: 41644 - protein, 508 aa, Homo sapiens
MVAEAGSMPAASSVKKPFGLRSKMGKWCRHCFPWCRGSGKSNVGTSGDHDDSAMKTLRSKMGKWCRHCFPWCRGSSKSNVGTSGDHDDSAMKTLRSKMGKWCCHCFPCCRGSGKSKVGPWGDYDDSAFMEPRYHVRREDLDKLHRAAWWGKVPRKDLIVMLKDTDMNKKDKQKRTALHLASANGNSEVVKLLLDRRCQLNILDNKKRTALTKAVQCREDECALMLLEHGTDPNIPDEYGNTALHYAIYNEDKLMAKALLLYGADIESKNKHGLTPLLLGVHEQKQQVVKFLIKKKANLNALDRYGRTALILAVCCGSASIVSLLLEQNIDVSSQDLSGQTAREYAVSSHHNVICQLLSDYKEKQMLKVSSENSNPEQDLKLTSEEESQRLKGSENSQPEEMSQEPEINKGGDRKVEEEMKKHGSTHMGFPENLPNGATADNGDDGLIPPRKSRTPESQQFPDTENEQYHSDEQNDTQKQLSEEQNTGILQDEILIHEEKQIEVAENEF

SEQ ID NO: 41645 - protein, 486 aa, Homo sapiens
MVAEAGSMPAASSVKKPFGLRSKMGKWCRHCFPWCRGSGKSNVGTSGDHDDSAMKTLRSKMGKWCRHCFPWCRGSSKSNVGTSGDHDDSAMKTLRSKMGKWCCHCFPCCRGSGKSKVGPWGDYDDSAFMEPRYHVRREDLDKLHRAAWWGKVPRKDLIVMLKDTDMNKKDKQKRTALHLASANGNSEVVKLLLDRRCQLNILDNKKRTALTKAVQCREDECALMLLEHGTDPNIPDEYGNTALHYAIYNEDKLMAKALLLYGADIESKNKHGLTPLLLGVHEQKQQVVKFLIKKKANLNALDRYGRTALILAVCCGSASIVSLLLEQNIDVSSQDLSGQTAREYAVSSHHNVICQLLSDYKEKQMLKVSSENSNPEQDLKLTSEEESQRLKGSENSQPEEMSQEPEINKGGDRKVEEEMKKHGSTHMGFPENLPNGATADNGDDGLIPPRKSRTPESQQFPDTENEQYHRDFSGHPNFPTTLPIKQ

SEQ ID NO: 41646 - protein, 322 aa, Homo sapiens
MVAEAGSMPAASSVKKPFGLRSKMGKWCRHCFPWCRGSGKSNVGTSGDHDDSAMKTLRSKMGKWCRHCFPWCRGSSKSNVGTSGDHDDSAMKTLRSKMGKWCCHCFPCCRGSGKSKVGPWGDYDDSAFMEPRYHVRREDLDKLHRAAWWGKVPRKDLIVMLKDTDMNKKDKQKRTALHLASANGNSEVVKLLLDRRCQLNILDNKKRTALTKAVQCREDECALMLLEHGTDPNIPDEYGNTALHYAIYNEDKLMAKALLLYGADIESKNKIESHSVSQAGVQWCDHSSLQPRPPEAQMVLQPQPQLFFSFFLFIFIFIFIFF

SEQ ID NO: 41647 - protein, 545 aa, Homo sapiens
MVAEAGSMPAASSVKKPFGLRSKMGKWCRHCFAWCRGSGKSNVGTSGDHDDSAMKTLRSKMGKWCCHCFPWCRGSGKSNVGTSGDHDDSAMKTLRSKMGKWCCHCFPCCRGSGKSNVGTSGDHDDSAMKTLRSKMGKWCCHCFPCCRGSGKNKVGPWGDYDDSAFMEPRYHVRREDLDKLHRAAWWGKVPRKDLIVMLKDTDMNKKDKQKRTALHLASANGNSEVVKLLLDRRCQLNILDNKKRTALTKAVQCQEDECALMLLEHGTDPNIPDEYGNTALHYAIYNEDKLMAKALLLYGADIESKNKHGLTPLLLGVHEQKQQVVKFLIKKKANLNALDRYGRTALILAVCCGSASIVSLLLEQNIDVSSQDLSGQTAREYAVSSRHNVICQLLSDYKEKQILKVSSENSNPEQDLKLTSEEESQRLKGSENSQPEEMSQEPEINKGGDRKVEEEMKKHGSTHMGFPENLTNGATADNGDDGLIPPRKSRTPESQQFPDTENEQYHSDEQNDTQKQLSEEQNTGILQDEILIHEEKQIEVAENEF

SEQ ID NO: 41648 - protein, 288 aa, Homo sapiens
MVAEAGSMPAASSVKKPFGLRSKMGKWCRHCFAWCRGSGKSNVGTSGDHDDSAMKTLRSKMGKWCCHCFPWCRGSGKSNVGTSGDHDDSAMKTLRSKMGKWCCHCFPCCRGSGKSNVGTSGDHDDSAMKTLRSKMGKWCCHCFPCCRGSGKNKVGPWGDYDDSAFMEPRYHVRREDLDKLHRAAWWGKVPRKDLIVMLKDTDMNKKDKQKRTALHLASANGNSEVVKLLLDRRCQLNILDNKKRTALTKAVQCQEDECALMLLEHGTDPNIPDEYGNTALHYAIYNED

SEQ ID NO: 41649 - protein, 1075 aa, Homo sapiens
MVAEVDSMPAASSVKKPFVLRSKMGKWCRHCFPCCRGSGKSNVGTSGDQDDSTMKTLRSKMGKWCCHCFPCCRGSGKSNVGTSGDHDDSAMKTLRSKMGKWCCHCFPCCRGSGKSNVGAWGDYDDSAFVEPRYHVRREDLDKLHRAAWWGKVARKDLIVMLRDTDVNKQDKQKRTALHLASANGNSGVVKLLLDRRCQLNVLDNKKRTALTKAVQCQEDECALMLLEHGTDPNIPDEYGNTTLHYAIYNEDKLMAKALLLYGADIESKNKHGLTPLLLGVHEQKQQVVKFLIKKKANLNALDRYGRTALILAVCCGSASIVSLLLEQNIDVSSQDLSGQTAREYAVSSHHHVICQLLSDYKEKQMLKISSENSNPEQDLKLTSEEESQRFKGSENSQPEKMSQEPEINKDGDREVEEEMKKHESNNVGLLENLSNGVTAGNGDDGLIPQRKSRTPENQQFPDNESEEYHRICELVSDYKEKQMPKYSSENSNPEQDLKLTSEEESQRLKGSENGQPEKRSQEPEINKDGDRELENFMAIEEMKKHGSTHVGFPENLTNGATAGNGDDGLIPPRKSRTPESQQFPDTENEEYHSDEQNDTQKQFCEEQNTGILHDEILIHEEKQIEVVEKMNSELSLSCKKEKDFLHENSTLREEIAMLRLELDTMKHQSQLRKKKYLEDIESVKKKNDNLLKALQLNELTMDDDTAVLVIDNGSGMCKAGFAGDDAPRAVFPSIVGRPRQQGMMGGMHQKESYVGKEAQSKRGILTLKYPMEHGIITNWDDMEKIWHHTFYNELRVAPEEHPILLTEAPLNPKANREKMTQIMFETFNTPAMYVAIQAMLSLYTSGRTTGIVMDSGDGVTHTVPIYDGNALPHATLRLDLAGRELTDYLMKILTERGYRFTTMAEREIVRDIKEKLCYVALDFEQEMAMAASSSSLEKSYELPDGQVITIGNEWFRCPEALFQPCFLGMESCGIHETTFNSIMKSDVDIRKDLYTNTVLSGGTTMYPGMAHRMQKEIAALAPSMLKIRIIAPPKRKYSVWVGGSILASLSTFQQMWISKQEYDESGPSIVHRKCF

SEQ ID NO: 41650 - protein, 1191 aa, Homo sapiens
MERPLENGDESPDSQGHATDWRFAVCSFRDAWEEEEPASQMHVKDPGPPRPPAGATQDEELQGSPLSRKFQLPPAADESGDAQRGTVESSSVLSEGPGPSGVESLLCPMSSHLSLAQGESDTPGVGLVGDPGPSRAMPSGLSPGALDSDPVGLGDPLSEISKLLEAAPSGSGLPKPADCLLAQDLCWELLASGMATLPGTRDVQGRAVLLLCAHSPAWLQSECSSQELIRLLLYLRSIPRPEVQALGLTVLVDARICAPSSSLFSGLSQLQEAAPGAVYQVLLVGSTLLKEVPSGLQLEQLPSQSLLTHIPTAGLPTSLGGGLPYCHQAWLDFRRRLEALLQNCQAACALLQGAIESVKAVPQPMEPGEVGQLLQQTEVLMQQVLDSPWLAWLQCQGGRELTWLKQEVPEVTLSPDYRTAMDKADELYDRVDGLLHQLTLQSNQRIQALELVQTLEARESGLHQIEVWLQQVGWPALEEAGEPSLDMLLQAQGSFQELYQVAQEQVRQGEKFLQPLTGWEAAELDPPGARFLALRAQLTEFSRALAQRCQRLADAERLFQLFREALTWAEEGQRVLAELEQERPGVVLQQLQLHWTRHPDLPPAHFRKMWALATGLGSEAIRQECRWAWARCQDTWLALDQKLEASLKLPPVGSTASLCVSQVPAAPAHPPLRKAYSFDRNLGQSLSEPACHCHHAATIAACRRPEAGGGALPQASPTVPPPGSSDPRSLNRLQLVLAEMVATEREYVRALEYTMENYFPELDRPDVPQGLRGQRAHLFGNLEKLRDFHCHFFLRELEACTRHPPRVAYAFLRHRVQFGMYALYSKNKPRSDALMSSYGHTFFKDKQQALGDHLDLASYLLKPIQRMGKYALLLQELARACGGPTQELSALREAQSLVHFQLRHGNDLLAMDAIQGCDVNLKEQGQLVRQDEFVVRTGRHKSVRRIFLFEELLLFSKPRHGPTGVDTFAYKRSFKMADLGLTECCGNSNLRFEIWFRRRKARDTFVLQASSLAIKQAWTADISHLLWRQAVHNKEVRMAEMVSMGVGNKAFRDIAPSEEAINDRTVNYVLKCREVRSRASIAVAPFDHDSLYLGASNSLPGDPASCSVLGSLNLHLYRDPALLGLRCPLYPSFPEEAALEAEAELGGQPSLTAEDSEISSQCPSASGSSGSDSSCVSGQALGRGLEDLPCV

SEQ ID NO: 41651 - protein, 1110 aa, Homo sapiens
MERPLENGDESPDSQGHATDWRFAVCSFRDAWEEEEPASQMHVKDPGPPRPPAGATQDEELQGSPLSRKFQLPPAADESGDAQRGTVESSSVLSEGPGPSGVESLLCPMSSHLSLAQGTRDVQGRAVLLLCAHSPAWLQSECSSQELIRLLLYLRSIPRPEVQALGLTVLVDARICAPSSSLFSGLSQLQEAAPGAVYQVLLVGSTLLKEVPSGLQLEQLPSQSLLTHIPTAGLPTSLGGGLPYCHQAWLDFRRRLEALLQNCQAACALLQGAIESVKAVPQPMEPGEVGQLLQQTEVLMQQVLDSPWLAWLQCQGGRELTWLKQEVPEVTLSPDYRTAMDKADELYDRVDGLLHQLTLQSNQRIQALELVQTLEARESGLHQIEVWLQQVGWPALEEAGEPSLDMLLQAQGSFQELYQVAQEQVRQGEKFLQPLTGWEAAELDPPGARFLALRAQLTEFSRALAQRCQRLADAERLFQLFREALTWAEEGQRVLAELEQERPGVVLQQLQLHWTRHPDLPPAHFRKMWALATGLGSEAIRQECRWAWARCQDTWLALDQKLEASLKLPPVGSTASLCVSQVPAAPAHPPLRKAYSFDRNLGQSLSEPACHCHHAATIAACRRPEAGGGALPQASPTVPPPGSSDPRSLNRLQLVLAEMVATEREYVRALEYTMENYFPELDRPDVPQGLRGQRAHLFGNLEKLRDFHCHFFLRELEACTRHPPRVAYAFLRHRVQFGMYALYSKNKPRSDALMSSYGHTFFKDKQQALGDHLDLASYLLKPIQRMGKYALLLQELARACGGPTQELSALREAQSLVHFQLRHGNDLLAMDAIQGCDVNLKEQGQLVRQDEFVVRTGRHKSVRRIFLFEELLLFSKPRHGPTGVDTFAYKRSFKMADLGLTECCGNSNLRFEIWFRRRKARDTFVLQASSLAIKQAWTADISHLLWRQAVHNKEVRMAEMVSMGVGNKAFRDIAPSEEAINDRTVNYVLKCREVRSRASIAVAPFDHDSLYLGASNSLPGDPASCSVLGSLNLHLYRDPALLGLRCPLYPSFPEEAALEAEAELGGQPSLTAEDSEISSQCPSASGSSGSDSSCVSGQALGRGLEDLPCV

SEQ ID NO: 41652 - protein, 193 aa, Homo sapiens
MERPLENGDESPDSQGHATDWRFAVCSFRDAWEEEEPASQMHVKDPGPPRPPAGATQDEELQGSPLSRKFQLPPAADESGDAQRGTVESSSVLSEGPGPSGVESLLCPMSSHLSLAQGESDTPGVGLVGDPGPSRAMPSGLSPGALDSDPVGLGDPLSEISKLLEAGKEGWAREVWEGNGDAWRDECQDFGGL

SEQ ID NO: 41653 - protein, 1038 aa, Homo sapiens
MVAEVDSMPAASSVKKPFVLRSKMGKWCRHCFPCCRGSGKSNVGTSGDQDDSTMKTLRSKMGKWCCHCFPCCRGSGKSNVGAWGDYDDSAFVEPRYHVRREDLDKLHRAAWWGKVARKDLIVMLRDTDVNKQDKQKRTALHLASANGNSGVVKLLLDRRCQLNVLDNKKRTALTKAVQCQEDECALMLLEHGTDPNIPDEYGNTTLHYAIYNEDKLMAKALLLYGADIESKNKHGLTPLLLGVHEQKQQVVKFLIKKKANLNALDRYGRTALILAVCCGSASIVSLLLEQNIDVSSQDLSGQTAREYAVSSHHHVICQLLSDYKEKQMLKISSENSNPEQDLKLTSEEESQRFKGSENSQPEKMSQEPEINKDGDREVEEEMKKHESNNVGLLENLSNGVTAGNGDDGLIPQRKSRTPENQQFPDNESEEYHRICELVSDYKEKQMPKYSSENSNPEQDLKLTSEEESQRLKGSENGQPEKRSQEPEINKDGDRELENFMAIEEMKKHGSTHVGFPENLTNGATAGNGDDGLIPPRKSRTPESQQFPDTENEEYHSDEQNDTQKQFCEEQNTGILHDEILIHEEKQIEVVEKMNSELSLSCKKERDFLHENSMLREEIAMLRLELDTMKHQSQLRKKKYLEDIESVKKKNDNLLKALQLNELTMDDDTAVLVIDNGSGMCKAGFAGDDAPRAVFPSIVGCPRQQGMMGGMHQKESYVGKEAQSKRGILTLKYPMEHGIITNWDDMEKIWHHTFYNELRVAPEEHPILLTEAPLNPKANREKMTQIMFETFNTPAMYVAIQAMLSLYTSGRTTGIVMDSGDGVTHTVPIYDGNALPHATLRLDLAGRELTDYLMKILTERGYRFTTMAEREIVRDIKEKLCYVALDFEQEMAMVASSSSLEKSYELPDGQVITISNEWFRCPEALFQPCFLGMESCGIHETTFNSIMKSDVDIRKDLYTNTVLSGGTTMYPGMAHRMQKEIAALAPSMMKIRIIAPPKRKYSVWVGGSILASLSTFQQMWISKQEYDESGPSIVHRKCF

SEQ ID NO: 41654 - protein, 508 aa, Homo sapiens
MVAEAGSMPAASSVKKPFGLRSKMGKWCRHCFPWCRGSGKSNVGTSGDHDDSAMKTLRSKMGKWCRHCFPWCRGSGKSNVGTSGDHDDSAMKTLRSKMGKWCCHCFPCCRGSGKSKVGPWGDYDDSAFMEPRYHVRREDLDKLHRAAWWGKVPRKDLIVMLKDTDMNKKDKQKRTALHLASANGNSEVVKLLLDRRCQLNILDNKKRTALTKAVQCQEDECALMLLEHGTDPNIPDEYGNTALHYAIYNEDKLMAKALLLYGADIESKNKHGLTPLLLGVHEQKQQVVKFLIKKKANLNALDRYGRTVLILAVCCGSASIVSLLLEQNIDVSSQDLSGQTAREYAVSSRHNVICQLLSDYKEKQILKVSSENSNPEQDLKLTSEEESQRLKGSENSQPEEMSQEPEINKGGDRKVEEEMKKHGSTHMGFPENLPNGATADNGDDGLIPPRKSRTPESQQFPDTENEQYHSDEQNDTQKQLSEEQNTGILQDEILIHEEKQIEVAENEF

SEQ ID NO: 41655 - protein, 1006 aa, Homo sapiens
MHYDGHVRFDLPPQGSVLARNVSTRSCPPRTSPAVDLEEEEEESSVDGKGDRKSTGLKLSKKKARRRHTDDPSKECFTLKFDLNVDIETEIVPAMKKKSLGEVLLPVFERKGIALGKVDIYLDQSNTPLSLTFEAYRFGGHYLRVKAPAKPGDEGKVEQGMKDSKSLSLPILRPAGTGPPALERVDAQSRRESLDILAPGRRRKNMSEFLGEASIPGQEPPTPSSCSLPSGSSGSTNTGDSWKNRAASRFSGFFSSGPSTSAFGREVDKMEQLEGKLHTYSLFGLPRLPRGLRFDHDSWEEEYDEDEDEDNACLRLEDSWRELIDGHEKLTRRQCHQQEAVWELLHTEASYIRKLRVIINLFLCCLLNLQESGLLCEVEAERLFSNIPEIAQLHRRLWASVMAPVLEKARRTRALLQPGDFLKGFKMFGSLFKPYIRYCMEEEGCMEYMRGLLRDNDLFRAYITWAEKHPQCQRLKLSDMLAKPHQRLTKYPLLLKSVLRKTEEPRAKEAVVAMIGSVERFIHHVNACMRQRQERQRLAAVVSRIDAYEVVESSSDEVDKLLKEFLHLDLTAPIPGASPEETRQLLLEGSLRMKEGKDSKMDVYCFLFTDLLLVTKAVKKAERTRVIRPPLLVDKIVCRELRDPGSFLLIYLNEFHSAVGAYTFQASGQALCRGWVDTIYNAQNQLQQLRAQEPPGSQQPLQSLEEEEDEQEEEEEEEEEEEEGEDSGTSAASSPTIMRKSSGSPDSQHCASDGSTETLAMVVVEPGDTLSSPEFDSGPFSSQSDETSLSTTASSATPTSELLPLGPVDGRSCSMDSAYGTLSPTSLQDFVAPGPMAELVPRAPESPRVPSPPPSPRLRRRTPVQLLSCPPHLLKSKSEASLLQLLAGAGTHGTPSAPSRSLSELCLAVPAPGIRTQGSPQEAGPSWDCRGAPSPGSGPGLVGCLAGEPAGSHRKRCGDLPSGASPRVQPEPPPGVSAQHRKLTLAQLYRIRTTLLLNSTLTASEV

SEQ ID NO: 41656 - protein, 1043 aa, Homo sapiens
MDKGRAAKVCHHADCQQLHRRGPLNLCEACDSKFHSTMHYDGHVRFDLPPQGSVLARNVSTRSCPPRTSPAVDLEEEEEESSVDGKGDRKSTGLKLSKKKARRRHTDDPSKECFTLKFDLNVDIETEIVPAMKKKSLGEVLLPVFERKGIALGKVDIYLDQSNTPLSLTFEAYRFGGHYLRVKAPAKPGDEGKVEQGMKDSKSLSLPILRPAGTGPPALERVDAQSRRESLDILAPGRRRKNMSEFLGEASIPGQEPPTPSSCSLPSGSSGSTNTGDSWKNRAASRFSGFFSSGPSTSAFGREVDKMEQLEGKLHTYSLFGLPRLPRGLRFDHDSWEEEYDEDEDEDNACLRLEDSWRELIDGHEKLTRRQCHQQEAVWELLHTEASYIRKLRVIINLFLCCLLNLQESGLLCEVEAERLFSNIPEIAQLHRRLWASVMAPVLEKARRTRALLQPGDFLKGFKMFGSLFKPYIRYCMEEEGCMEYMRGLLRDNDLFRAYITWAEKHPQCQRLKLSDMLAKPHQRLTKYPLLLKSVLRKTEEPRAKEAVVAMIGSVERFIHHVNACMRQRQERQRLAAVVSRIDAYEVVESSSDEVDKLLKEFLHLDLTAPIPGASPEETRQLLLEGSLRMKEGKDSKMDVYCFLFTDLLLVTKAVKKAERTRVIRPPLLVDKIVCRELRDPGSFLLIYLNEFHSAVGAYTFQASGQALCRGWVDTIYNAQNQLQQLRAQEPPGSQQPLQSLEEEEDEQEEEEEEEEEEEEGEDSGTSAASSPTIMRKSSGSPDSQHCASDGSTETLAMVVVEPGDTLSSPEFDSGPFSSQSDETSLSTTASSATPTSELLPLGPVDGRSCSMDSAYGTLSPTSLQDFVAPGPMAELVPRAPESPRVPSPPPSPRLRRRTPVQLLSCPPHLLKSKSEASLLQLLAGAGTHGTPSAPSRSLSELCLAVPAPGIRTQGSPQEAGPSWDCRGAPSPGSGPGLVGCLAGEPAGSHRKRCGDLPSGASPRVQPEPPPGVSAQHRKLTLAQLYRIRTTLLLNSTLTASEV

SEQ ID NO: 41657 - protein, 930 aa, Homo sapiens
MHYDGHVRFDLPPQGSVLARNVSTRSCPPRTSPAVDLEEEEEESSVDGKGDRKSTGLKLSKKKARRRHTDDPSKECFTLKFDLNVDIETEIVPAMKKKSLGEVLLPVFERKGIALGKVDIYLDQSNTPLSLTFEAYRFGGHYLRVKAPAKPGDEGKVEQGMKDSKSLSLPILRPAGTGPPALERVDAQSRRESLDILAPGRRRKNMSEFLGEASIPGQEPPTPSSCSLPSGSSGSTNTGDSWKNRAASRFSGFFSSGPSTSAFGREVDKMEQLEGKLHTYSLFGLPRLPRGLRFDHDSWEEEYDEDEDEDNACLRLEDSWRELIDGHEKLTRRQCHQQEAVWELLHTEASYIRKLRVIINLFLCCLLNLQESGLLCEVEAERLFSNIPEIAQLHRRLWASVMAPVLEKARRTRALLQPGDFLKGFKMFGSLFKPYIRYCMEEEGCMEYMRGLLRDNDLFRAYITWAEKHPQCQRLKLSDMLAKPHQRLTKYPLLLKSVLRKTEEPRAKEAVVAMIGSVERFIHHVNACMRQRQERQRLAAVVSRIDAYEVVESSSDEVDKLLKEFLHLDLTAPIPGASPEETRQLLLEGSLRMKEGKDSKMDVYCFLFTDLLLVTKAVKKAERTRVIRPPLLVDKIVCRELRDPGSFLLIYLNEFHSAVGAYTFQASGQALCRGWVDTIYNAQNQLQQLRAQEPPGSQQPLQSLEEEEDEQEEEEEEEEEEEEGEDSGTSAASSPTIMRKSSGSPDSQHCASDGSTETLAMVVVEPGDTLSSPEFDSGPFSSQSDETSLSTTASSATPTSELLPLGPVDGRSCSMDSAYGTLSPTSLQDFVAPGPMAELVPRAPESPRVPSPPPSPRLRRRTPVQLLSCPPHLLKSKSEASLLQLLAGAGTHGTPSAPSRSLSELCLAVPAPAQEADPGPALPNQDHPAA

SEQ ID NO: 41658 - protein, 1075 aa, Homo sapiens
MGTGPGVSGRLAASRPGPGLPLRDSEPSWAGGRARDGESQVCHHADCQQLHRRGPLNLCEACDSKFHSTMHYDGHVRFDLPPQGSVLARNVSTRSCPPRTSPAVDLEEEEEESSVDGKGDRKSTGLKLSKKKARRRHTDDPSKECFTLKFDLNVDIETEIVPAMKKKSLGEVLLPVFERKGIALGKVDIYLDQSNTPLSLTFEAYRFGGHYLRVKAPAKPGDEGKVEQGMKDSKSLSLPILRPAGTGPPALERVDAQSRRESLDILAPGRRRKNMSEFLGEASIPGQEPPTPSSCSLPSGSSGSTNTGDSWKNRAASRFSGFFSSGPSTSAFGREVDKMEQLEGKLHTYSLFGLPRLPRGLRFDHDSWEEEYDEDEDEDNACLRLEDSWRELIDGHEKLTRRQCHQQEAVWELLHTEASYIRKLRVIINLFLCCLLNLQESGLLCEVEAERLFSNIPEIAQLHRRLWASVMAPVLEKARRTRALLQPGDFLKGFKMFGSLFKPYIRYCMEEEGCMEYMRGLLRDNDLFRAYITWAEKHPQCQRLKLSDMLAKPHQRLTKYPLLLKSVLRKTEEPRAKEAVVAMIGSVERFIHHVNACMRQRQERQRLAAVVSRIDAYEVVESSSDEVDKLLKEFLHLDLTAPIPGASPEETRQLLLEGSLRMKEGKDSKMDVYCFLFTDLLLVTKAVKKAERTRVIRPPLLVDKIVCRELRDPGSFLLIYLNEFHSAVGAYTFQASGQALCRGWVDTIYNAQNQLQQLRAQEPPGSQQPLQSLEEEEDEQEEEEEEEEEEEEGEDSGTSAASSPTIMRKSSGSPDSQHCASDGSTETLAMVVVEPGDTLSSPEFDSGPFSSQSDETSLSTTASSATPTSELLPLGPVDGRSCSMDSAYGTLSPTSLQDFVAPGPMAELVPRAPESPRVPSPPPSPRLRRRTPVQLLSCPPHLLKSKSEASLLQLLAGAGTHGTPSAPSRSLSELCLAVPAPGIRTQGSPQEAGPSWDCRGAPSPGSGPGLVGCLAGEPAGSHRKRCGDLPSGASPRVQPEPPPGVSAQHRKLTLAQLYRIRTTLLLNSTLTASEV

SEQ ID NO: 41659 - protein, 478 aa, Homo sapiens [sequence omitted]

SEQ ID NO: 41660 - protein, 436 aa, Homo sapiens
MLWNFKPHARAYRYVGHKDVVTSVQFSPHGNLLASASRDRTVRLWIPDKRGKFSEFKAHTAPVRSVDFSADGQFLATASEDKSIKVWSMYRQRFLYSLYRHTHWVRCAKFSPDGRLIVSCSEDKTIKIWDTTNKQCVNNFSDSVGFANFVDFNPSGTCIASAGSDQTVKVWDVRVNKLLQHYQVHSGGVNCISFHPSGNYLITASSDGTLKILDLLEGRLIYTLQGHTGPVFTVSFSKGGELFASGGADTQVLLWRTNFDELHCKGLTKRNLKRLHFDSPPHLLDIYPRTPHPHEEKVETVEINPKLEVIDLQISTPPVMDILSFDSTTTTETSGRTLPDKGEEACGYFLNPSLMSPECLPTTTKKKTEDMSDLPCESQRSIPLAVTDALEHIMEQLNVLTQTVSILEQRLTLTEDKLKDCLENQQKLFSAVQQKS

SEQ ID NO: 41661 - protein, 149 aa, Homo sapiens
MRYNEKELQALSRQPAEMAAELGMRGPKKGSVLKRRLVKLVVNFLFYFRTDEAEPVGALLLERCRVVREEPGTFSISFIEDPERKYHFECSSEEQCQEWMEALRRASYEFMRRSLIFYRNEIRKVTGKDPLEQFGISEEARFQLSGLQA

SEQ ID NO: 41662 - protein, 613 aa, Homo sapiens
MAQSRVLLLLLLLPPQLHLGPVLAVRAPGFGRSGGHSLSPEENEFAEEEPVLVLSPEEPGPGPAAVSCPRDCACSQEGVVDCGGIDLREFPGDLPEHTNHLSLQNNQLEKIYPEELSRLHRLETLNLQNNRLTSRGLPEKAFEHLTNLNYLYLANNKLTLAPRFLPNALISVDFAANYLTKIYGLTFGQKPNLRSVYLHNNKLADAGLPDNMFNGSSNVEVLILSSNFLRHVPKHLPPALYKLHLKNNKLEKIPPGAFSELSSLRELYLQNNYLTDEGLDNETFWKLSSLEYLDLSSNNLSRVPAGLPRSLVLLHLEKNAIRSVDANVLTPIRSLEYLLLHSNQLREQGIHPLAFQGLKRLHTVHLYNNALERVPSGLPRRVRTLMILHNQITGIGREDFATTYFLEELNLSYNRITSPQVHRDAFRKLRLLRSLDLSGNRLHTLPPGLPRNVHVLKVKRNELAALARGALVGMAQLRELYLTSNRLRSRALGPRAWVDLAHLQLLDIAGNQLTEIPEGLPESLEYLYLQNNKISAVPANAFDSTPNLKGIFLRFNKLAVGSVVDSAFRRLKHLQVLDIEGNLEFGDISKDRGRLGKEKEEEEEEEEEEEETR

SEQ ID NO: 41663 - protein, 642 aa, Homo sapiens
MEGEEAEQPAWFRQPWRPGASDSAPPAGTMAQSRVLLLLLLLPPQLHLGPVLAVRAPGFGRSGGHSLSPEENEFAEEEPVLVLSPEEPGPGPAAVSCPRDCACSQEGVVDCGGIDLREFPGDLPEHTNHLSLQNNQLEKIYPEELSRLHRLETLNLQNNRLTSRGLPEKAFEHLTNLNYLYLANNKLTLAPRFLPNALISVDFAANYLTKIYGLTFGQKPNLRSVYLHNNKLADAGLPDNMFNGSSNVEVLILSSNFLRHVPKHLPPALYKLHLKNNKLEKIPPGAFSELSSLRELYLQNNYLTDEGLDNETFWKLSSLEYLDLSSNNLSRVPAGLPRSLVLLHLEKNAIRSVDANVLTPIRSLEYLLLHSNQLREQGIHPLAFQGLKRLHTVHLYNNALERVPSGLPRRVRTLMILHNQITGIGREDFATTYFLEELNLSYNRITSPQVHRDAFRKLRLLRSLDLSGNRLHTLPPGLPRNVHVLKVKRNELAALARGALVGMAQLRELYLTSNRLRSRALGPRAWVDLAHLQLLDIAGNQLTEIPEGLPESLEYLYLQNNKISAVPANAFDSTPNLKGIFLRFNKLAVGSVVDSAFRRLKHLQVLDIEGNLEFGDISKDRGRLGKEKEEEEEEEEEEEETR

SEQ ID NO: 41664 - protein, 661 aa, Homo sapiens
MEGARARGAQLRLGERVRPVGRRSAPGRSRFRQPWRPGASDSAPPAGTMAQSRVLLLLLLLPPQLHLGPVLAVRAPGFGRSGGHSLSPEENEFAEEEPVLVLSPEEPGPGPAAVSCPRDCACSQEGVVDCGGIDLREFPGDLPEHTNHLSLQNNQLEKIYPEELSRLHRLETLNLQNNRLTSRGLPEKAFEHLTNLNYLYLANNKLTLAPRFLPNALISVDFAANYLTKIYGLTFGQKPNLRSVYLHNNKLADAGLPDNMFNGSSNVEVLILSSNFLRHVPKHLPPALYKLHLKNNKLEKIPPGAFSELSSLRELYLQNNYLTDEGLDNETFWKLSSLEYLDLSSNNLSRVPAGLPRSLVLLHLEKNAIRSVDANVLTPIRSLEYLLLHSNQLREQGIHPLAFQGLKRLHTVHLYNNALERVPSGLPRRVRTLMILHNQITGIGREDFATTYFLEELNLSYNRITSPQVHRDAFRKLRLLRSLDLSGNRLHTLPPGLPRNVHVLKVKRNELAALARGALVGMAQLRELYLTSNRLRSRALGPRAWVDLAHLQLLDIAGNQLTEIPEGLPESLEYLYLQNNKISAVPANAFDSTPNLKGIFLRFNKLAVGSVVDSAFRRLKHLQVLDIEGNLEFGDISKDRGRLGKEKEEEEEEEEEEEETR

SEQ ID NO: 41665 - protein, 519 aa, Homo sapiens
MEGARARGAQLRLGERVRPVGRRSAPGRSRFRQPWRPGASDSAPPAGTMAQSRVLLLLLLLPPQLHLGPVLAVRAPGFGRSGGHSLSPEENEFAEEEPVLVLSPEEPGPGPAAVSCPRDCACSQEGVVDCGGIDLREFPGDLPEHTNHLSLQNNKLEKIPPGAFSELSSLRELYLQNNYLTDEGLDNETFWKLSSLEYLDLSSNNLSRVPAGLPRSLVLLHLEKNAIRSVDANVLTPIRSLEYLLLHSNQLREQGIHPLAFQGLKRLHTVHLYNNALERVPSGLPRRVRTLMILHNQITGIGREDFATTYFLEELNLSYNRITSPQVHRDAFRKLRLLRSLDLSGNRLHTLPPGLPRNVHVLKVKRNELAALARGALVGMAQLRELYLTSNRLRSRALGPRAWVDLAHLQLLDIAGNQLTEIPEGLPESLEYLYLQNNKISAVPANAFDSTPNLKGIFLRFNKLAVGSVVDSAFRRLKHLQVLDIEGNLEFGDISKDRGRLGKEKEEEEEEEEEEEETR

SEQ ID NO: 41666 - protein, 4243 aa, Homo sapiens
MGHLWLLGIWGLCGLLLCAADPSTDGSQIIPKVTEIIPKYGSINGATRLTIRGEGFSQANQFNYGVDNAELGNSVQLISSFQSITCDVEKDASHSTQITCYTRAMPEDSYTVRVSVDGVPVTENNTCKGHINSWECTFNAKSFRTPTIRSITPLSGTPGTLITIQGRIFTDVYGSNIALSSNGKNVRILRVYIGGMPCELLIPQSDNLYGLKLDHPNGDMGSMVCKTTGTFIGHHNVSFILDNDYGRSFPQKMAYFVSSLNKIAMFQTYAEVTMIFPSQGSIRGGTTLTISGRFFDQTDFPVRVLVGGEPCDILNVTENSICCKTPPKPHILKTVYPGGRGLKLEVWNNSRPIRLEEILEYNEKTPGYMGASWVDSASYIWLMEQDTFVARFSGFLVAPDSDVYRFYIKGDDRYAIYFSQTGLPEDKVRIAYHSANANSYFSSPTQRSDDIHLQKGKEYYIEILLQEYRLSAFVDVGLYQYRNVYTEQQTGDAVNEEQVIKSQSTILQEVQVITLENWETTNAINEVQKIKVTSPCVEANSCSLYQYRLIYNMEKTVFLPADASEFILQSALNDLWSIKPDTVQVIRTQNPQSYVYMVTFISTRGDFDLLGYEVVEGNNVTLDITEQTKGKPNLETFTLNWDGIASKPLTLWSSEAEFQGAVEEMVSTKCPPQIANFEEGFVVKYFRDYETDFNLEHINRGQKTAETDAYCGRYSLKNPAVLFDSADVKPNRRPYGDILLFPYNQLCLAYKGFLANYIGLKFQYQDNSKITRSTDTQFTYNFAYGNNWTYTCIDLLDLVRTKYTGTNVSLQRISLHKASESQSFYVDVVYIGHTSTISTLDEMPKRRLPALANKGIFLEHFQVNQTKTNGPTMTNQYSVTMTSYNCSYNIPMMAVSFGQIITHETENEFVYRGNNWPGESKIHIQRIQAASPPLSGSFDIQAYGHILKGLPAAVSAADLQFALQSLEGMGRISVTREGTCAGYAWNIKWRSTCGKQNLLQINDSNIIGEKANMTVTRIKEGGLFRQHVLGDLLRTPSQQPQVEVYVNGIPAKCSGDCGFTWDSNITPLVLAISPSQGSYEEGTILTIVGSGFSPSSAVTVSVGPVGCSLLSVDEKELKCQILNGSAGHAPVAVSMADVGLAQNVGGEEFYFVYQSQISHIWPDSGSIAGGTLLTLSGFGFNENSKVLVGNETCNVIEGDLNRITCRTPKKTEGTVDISVTTNGFQATARDAFSYNCLQTPIITDFSPKVRTILGEVNLTIKGYNFGNELTQNMAVYVGGKTCQILHWNFTDIRCLLPKLSPGKHDIYVEVRNWGFASTRDKLNSSIQYVLEVTSMFPQRGSLFGGTEITIRGFGFSTIPAENTVLLGSIPCNVTSSSENVIKCILHSTGNIFRITNNGKDSVHGLGYAWSPPVLNVSVGDTVAWHWQTHPFLRGIGYRIFSVSSPGSVIYDGKGFTSGRQKSTSGSFSYQFTSPGIHYYSSGYVDEAHSIFLQGVINVLPAETRHIPLHLFVGRSEATYAYGGPENLHLGSSVAGCLATEPLCSLNNTRVKNSKRLLFEVSSCFSPSISNITPSTGTVNELITIIGHGFSNLPWANKVTIGSYPCVVEESSEDSITCHIDPQNSMDVGIRETVTLTVYNLGTAINTLSNEFDRRFVLLPNIDLVLPNAGSTTGMTSVTIKGSGFAVSSAGVKVLMGHFPCKVLSVNYTAIECETSPAAQQLVDVDLLIHGVPAQCQGNCTFSYLESITPYITGVFPNSVIGSVKVLIEGEGLGTVLEDIAVFIGNQQFRAIEVNENNITALVTPLPVGHHSVSVVVGSKGLALGNLTVSSPPVASLSPTSGSIGGGTTLVITGNGFYPGNTTVTIGDEPCQIISINPNEVYCRTPAGTTGMVDVKIFVNTIAYPPLLFTYALEDTPFLRGIIPSRGPPGTEIEITGSNFGFEILEISVMINNIQCNVTMANDSVVQCIVGDHAGGTFPVMMHHKTKGSAMSTVVFEYPLNIQNINPSQGSFGGGQTMTVTGTGFNPQNSIILVCGSECAIDRLRSDYTTLLCEIPSNNGTGAEQACEVSVVNGKDLSQSMTPFTYAVSLTPLITAVSPKRGSTAGGTRLTVVGSGFSENMEDVHITIAEAKCDVEYSNKTHIICMTDAHTLSGWAPVCVHIRGVGMAKLDNADFLYVDAWSSNFSWGGKSPPEEGSLVVITKGQTILLDQSTPILKMLLIQGGTLIFDEADIELQAENILITDGGVLQIGTETSPFQHKAVITLHGHLRSPELPVYGAKTLAVREGILDLHGVPVPVTWTRLAHTAKAGERILILQEAVTWKPGDNIVIASTGHRHSQGENEKMTIASVSADGINITLSNPLNYTHLGITVTLPDGTLFEARAEVGILTRNILIRGSDNVEWNNKIPACPDGFDTGEFATQTCLQGKFGEEIGSDQFGGCVMFHAPVPGANMVTGRIEYVEVFHAGQAFRLGRYPIHWHLLGDLQFKSYVRGCAIHQAYNRAVTIHNTHHLLVERNIIYDIKGGAFFIEDGIEHGNILQYNLAVFVQQSTSLLNDDVTPAAFWVTNPNNTIRHNAVAGGTHFGFWYRMNNHPDGPSYDRNICQKRVPLGEFFNNTVHSQGWFGMWIFEEYFPMQTGSCTSTVPAPAIFNSLTTWNCQKGAEWVNGGALQFHNFVMVNNYEAGIETKRILAPYVGGWGETNGAVIKNAKIVGHLDELGMGSAFCTAKGLVLPFSEGLTVSSVHFMNFDRPNCVALGVTSISGVCNDRCGGWSAKFVDVQYSHTPNKAGFRWEHEMVMIDVDGSLTGHKGHTVIPHSSLLDPSHCTQEAEWSIGFPGSVCDASVSFHRLAFNQPSPVSLLEKDVVLSDSFGTSIIPFQKKRLTHMSGWMALIPNANHINWYFKGVDHITNISYTSTFYGFKEEDYVIISHNFTQNPDMFNIIDMRNGSSNPLNWNTSKNGDWHLEANTSTLYYLVSGRNDLHQSQLISGNLDPDVKDVVINFQAYCCILQDCFPVHPPSRKPIPKKRPATYNLWSNDSFWQSSRENNYTVPHPGANVIIPEGTWIVADIDMPSMERLIIWGVLELEDKYNVGAAESSYREVVLNATYISLQGGRLIGGWEDNPFKGDLKIVLRGNHTTQDWALPEGPNQGAKVLGVFGELDLHGIPHSIYKTKLSETAFAGSKVLSLMDAVDWQEGEEIVITTTSYDFHQTETRSIVKILHDHKILILNDSLSYTHFAEKYHVPGTGESYTLAADVGILSRNIKIVGEDYPGWSEDSFGARVLVGSFTENMMTFKGNARISNVEFYHSGQEGFRDSTDPRYAVTFLNLGQIQEHGSSYIRGCAFHHGFSPAIGVFGTDGLDIDDNIIHFTVGEGIRIWGNANRVRGNLIALSVWPGTYQNRKDLSSTLWHAAIEINRGTNTVLQNNVVAGFGRAGYRIDGEPCPGQFNPVEKWFDNEAHGGLYGIYMNQDGLPGCSLIQGFTIWTCWDYGIYFQTTESVHIYNVTLVDNGMAIFPMIYMPAAISHKISSKNVQIKSSLIVGSSPGFNCSDVLTNDDPNIELTAAHRSPRSPSGGRSGICWPTFASAHNMAPRKPHAGIMSYNAISGLLDISGSTFVGFKNVCSGETNVIFITNPLNEDLQHPIHVKNIKLVDTTEQSKIFIHRPDISKVNPSDCVDMVCDAKRKSFLRDIDGSFLGNAGSVIPQAEYEWDGNSQVGIGDYRIPKAMLTFLNGSRIPVTEKAPHKGIIRDSTCKYLPEWQSYQCFGMEYAMMVIESLDPDTETRRLSPVAIMGNGYVDLINGPQDHGWCAGYTCQRRLSLFHSIVALNKSYEVYFTGTSPQNLRLMLLNVDHNKAVLVGIFFSTLQRLDVYVNNLLVCPKTTIWNAQQKHCELNNHLYKDQFLPNLDSTVLGENYFDGTYQMLYLLVKGTIPVEIHTATVIFVSFQLSVATEDDFYTSHNLVKNLALFLKIPSDKIRISKIRGKSLRRKRSMGFIIEIEIGDPPIQFISNGTTGQMQLSELQEIAGSLGQAVILGNISSILGFNISSMSITNPLPSPSDSGWIKVTAQPVERSAFPVHHVAFVSSLLVITQPVAAQPGQPFPQQPSVKATDSDGNCVSVGITALTLRAILKDSNNNQVNGLSGNTTIPFSSCWANYTDLTPLRTGKNYKIEFILDNVVGVESRTFSLLAESVSSSGSSSSSNSKASTVGTYAQIMTVVISCLVGRMWLLEIFMAAVSTLNITLRSY

SEQ ID NO: 41667 - protein, 521 aa, Homo sapiens
MSEPKAIDPKLSTTDRVVKAVPFPPSHRLTAKEVFDNDGKPRVDILKAHLMKEGRLEESVALRIITEGASILRQEKNLLDIDAPVTVCGDIHGQFFDLMKLFEVGGSPANTRYLFLGDYVDRGYFSIECVLYLWALKILYPKTLFLLRGNHECRHLTEYFTFKQECKIKYSERVYDACMDAFDCLPLAALMNQQFLCVHGGLSPEINTLDDIRKLDRFKEPPAYGPMCDILWSDPLEDFGNEKTQEHFTHNTVRGCSYFYSYPAVCEFLQHNNLLSILRAHEAQDAGYRMYRKSQTTGFPSLITIFSAPNYLDVYNNKAAVLKYENNVMNIRQFNCSPHPYWLPNFMDVFTWSLPFVGEKVTEMLVNVLNICSDDELGSEEDGFDGATAAARKEVIRNKIRAIGKMARVFSVLREESESVLTLKGLTPTGMLPSGVLSGGKQTLQSATVEAIEADEAIKGFSPQHKITSFEEAKGLDRINERMPPRRDAMPSDANLNSINKALTSETNGTDSNGSNSSNIQ

SEQ ID NO: 41668 - protein, 511 aa, Homo sapiens
MSEPKAIDPKLSTTDRVVKAVPFPPSHRLTAKEVFDNDGKPRVDILKAHLMKEGRLEESVALRIITEGASILRQEKNLLDIDAPVTVCGDIHGQFFDLMKLFEVGGSPANTRYLFLGDYVDRGYFSIECVLYLWALKILYPKTLFLLRGNHECRHLTEYFTFKQECKIKYSERVYDACMDAFDCLPLAALMNQQFLCVHGGLSPEINTLDDIRKLDRFKEPPAYGPMCDILWSDPLEDFGNEKTQEHFTHNTVRGCSYFYSYPAVCEFLQHNNLLSILRAHEAQDAGYRMYRKSQTTGFPSLITIFSAPNYLDVYNNKAAVLKYENNVMNIRQFNCSPHPYWLPNFMDVFTWSLPFVGEKVTEMLVNVLNICSDDELGSEEDGFDGATAAARKEVIRNKIRAIGKMARVFSVLREESESVLTLKGLTPTGMLPSGVLSGGKQTLQSAIKGFSPQHKITSFEEAKGLDRINERMPPRRDAMPSDANLNSINKALTSETNGTDSNGSNSSNIQ

SEQ ID NO: 41669 - protein, 469 aa, Homo sapiens
MSEPKAIDPKLSTTDRVVKAVPFPPSHRLTAKEVFDNDGKPRVDILKAHLMKEGRLEESVALRIITEGASILRQEKNLLDIDAPVTVCGDIHGQFFDLMKLFEVGGSPANTRYLFLGDYVDRGYFSIECVLYLWALKILYPKTLFLLRGNHECRHLTEYFTFKQECKIKYSERVYDACMDAFDCLPLAALMNQQFLCVHGGLSPEINTLDDIRKLDRFKEPPAYGPMCDILWSDPLEDFGNEKTQEHFTHNTVRGCSYFYSYPAVCEFLQHNNLLSILRAHEAQDAGYRMYRKSQTTGFPSLITIFSAPNYLDVYNNKVTEMLVNVLNICSDDELGSEEDGFDGATAAARKEVIRNKIRAIGKMARVFSVLREESESVLTLKGLTPTGMLPSGVLSGGKQTLQSAIKGFSPQHKITSFEEAKGLDRINERMPPRRDAMPSDANLNSINKALTSETNGTDSNGSNSSNIQ

SEQ ID NO: 41670 - protein, 289 aa, Homo sapiens
MSEPKAIDPKLSTTDRVVKAVPFPPSHRLTAKEVFDNDGKPRVDILKAHLMKEGRLEESVALRIITEGASILRQEKNLLDIDAPVTAAVLKYENNVMNIRQFNCSPHPYWLPNFMDVFTWSLPFVGEKVTEMLVNVLNICSDDELGSEEDGFDGATAAARKEVIRNKIRAIGKMARVFSVLREESESVLTLKGLTPTGMLPSGVLSGGKQTLQSATVEAIEADEAIKGFSPQHKITSFEEAKGLDRINERMPPRRDAMPSDANLNSINKALTSETNGTDSNGSNSSNIQ

SEQ ID NO: 41671 - protein, 454 aa, Homo sapiens
MSEPKAIDPKLSTTDRVVKVCGDIHGQFFDLMKLFEVGGSPANTRYLFLGDYVDRGYFSIECVLYLWALKILYPKTLFLLRGNHECRHLTEYFTFKQECKIKYSERVYDACMDAFDCLPLAALMNQQFLCVHGGLSPEINTLDDIRKLDRFKEPPAYGPMCDILWSDPLEDFGNEKTQEHFTHNTVRGCSYFYSYPAVCEFLQHNNLLSILRAHEAQDAGYRMYRKSQTTGFPSLITIFSAPNYLDVYNNKAAVLKYENNVMNIRQFNCSPHPYWLPNFMDVFTWSLPFVGEKVTEMLVNVLNICSDDELGSEEDGFDGATAAARKEVIRNKIRAIGKMARVFSVLREESESVLTLKGLTPTGMLPSGVLSGGKQTLQSATVEAIEADEAIKGFSPQHKITSFEEAKGLDRINERMPPRRDAMPSDANLNSINKALTSETNGTDSNGSNSSNIQ

SEQ ID NO: 41672 - protein, 1056 aa, Homo sapiens
MLSVVENGLDPQAAIPVIKKKLVGSVKALQKQYVSLDTVVTSEDGDANTMCSALEAVFIHGLHAKHIRAEAGGKRKKSAHQKPLPQPVFWPLLKAVTHKHIISELEHLTFVNTDVGRCRAWLRLALNDGLMECYLKLLLQEQARLHEYYQPTALLRDAEEGEFLLSFLQGLTSLSFELSYKSAILNEWTLTPLALSGLCPLSELDPLSTSGAELQRKESLDSISHSSGSEDIEVHHSGHKIRRNQKLTASSLSLDTASSSQLSCSLNSDSCLLQENGSKSPDHCEEPMSCDSDLGTANAEDSDRSLQEVLLEFSKAQVNSVPTNGLSQETEIPTPQASLSLHGLNTSTYLHCEAPAEPLPAQAASGTQDGVHVQEPRPQAPSPLDLQQPVESTSGQQPSSTVSETAREVGQGNGLQKAQAHDGAGLKLVVSSPTSPKNKSWISEDDFYRPSREQPLESASDHPIASYRGTPGSRPGLHRHFSQEPRKNCSLGALDQACVPSPGRRQAQAAPSQGHKSFRVVHRRQMGLSNPFRGLMKLGTVERRGAMGIWKELFCELSPLEFRLYLSNEEHTCVENCSLLRCESVGPAHSDGRFELVFSGKKLALRASSQDEAEDWLDRVREALQKVRPQQEDEWVNVQYPDQPEEPPEAPQGCLSPSDLLSEPAALQGTQFDWSSAQVPEPDAIKESLLYLYMDRTWMPYIFSLSLEALKCFRIRNNEKMLSDSHGVETIRDILPDTSLGGPSFFKIITAKAVLKLQAGNAEEAALWRDLVRKVLASYLETAEEAVTLGGSLDENCQEVLKFATRENGFLLQYLVAIPMEKGLDSQGCFCAGCSRQIGFSFVRPKLCAFSGLYYCDICHQDDASVIPARIIHNWDLTKRPICRQALKFLTQIRAQPLINLQMVNASLYEHVERMHLIGRRREQLKLLGDYLGLCRSGALKELSKRLNHRNYLLESPHRFSVADLQQIADGVYEGFLKALIEFASQHVYHCDLCTQRGFICQICQHHDIIFPFEFDTTVRCAECKTVFHQSCQAVVKKGCPRCARRRKYQEQNIFA

SEQ ID NO: 41673 - protein, 383 aa, Homo sapiens
MERRARSSSRESRGRGGRTPHKENKRAKAERSGGGRGRQEAGPEPSGSGRAGTPGEPRAPAATVVDVDEVRGSGEEGTEVVALLESERPEEGTKSSGLGACEWLLVLISLLFIIMTFPFSIWFCVKVVQEYERVIIFRLGHLLPGRAKGPGLFFFLPCLDTYHKVDLRLQTLEIPFHEIVTKDMFIMEIDAICYYRMENASLLLSSLAHVSKAVQFLVQTTMKRLLAHRSLTEILLERKSIAQDAKVALDSVTCIWGIKVERIEIKDVRLPAGLQHSLAVEAEAQRQAKVRMIAAEAEKAASESLRMAAEILSGTPAAVQLRYLHTLQSLSTEKPSTVVLPLPFDLLNCLSSPSNRTQGSLPFPSPSKPVEPLNPKKKDSPML

SEQ ID NO: 41674 - protein, 315 aa, Homo sapiens
MERRARSSSRESRGRGGRTPHKENKRAKAERSGGGRGRQEAGPEPSGSGRAGTPGEPRAPAATVVDVDEVRGSGEEGTEVVALLESERPEEGTKSSGLGACEWLLVLISLLFIIMTFPFSIWFCVKVVQEYERVIIFRLGHLLPGRAKGPGLFFFLPCLDTYHKVDLRLQTLEIPFHEVALDSVTCIWGIKVERIEIKDVRLPAGLQHSLAVEAEAQRQAKVRMIAAEAEKAASESLRMAAEILSGTPAAVQLRYLHTLQSLSTEKPSTVVLPLPFDLLNCLSSPSNRTQGSLPFPSPSKPVEPLNPKKKDSPML

SEQ ID NO: 41675 - protein, 524 aa, Homo sapiens
MAAPEPARAAPPPPPPPPPPPGADRVVKAVPFPPTHRLTSEEVFDLDGIPRVDVLKNHLVKEGRVDEEIALRIINEGAAILRREKTMIEVEAPITVCGDIHGQFFDLMKLFEVGGSPANTRYLFLGDYVDRGYFSIECVLYLWVLKILYPSTLFLLRGNHECRHLTEYFTFKQECKIKYSERVYEACMEAFDSLPLAALLNQQFLCVHGGLSPEIHTLDDIRRLDRFKEPPAFGPMCDLLWSDPSEDFGNEKSQEHFSHNTVRGCSYFYNYPAVCEFLQNNNLLSIIRAHEAQDAGYRMYRKSQTTGFPSLITIFSAPNYLDVYNNKAAVLKYENNVMNIRQFNCSPHPYWLPNFMDVFTWSLPFVGEKVTEMLVNVLSICSDDELMTEGEDQFDGSAAARKEIIRNKIRAIGKMARVFSVLREESESVLTLKGLTPTGMLPSGVLAGGRQTLQSATVEAIEAEKAIRGFSPPHRICSFEEAKGLDRINERMPPRKDAVQQDGFNSLNTAHATENHGTGNHTAQ

SEQ ID NO: 41676 - protein, 514 aa, Homo sapiens
MAAPEPARAAPPPPPPPPPPPGADRVVKAVPFPPTHRLTSEEVFDLDGIPRVDVLKNHLVKEGRVDEEIALRIINEGAAILRREKTMIEVEAPITVCGDIHGQFFDLMKLFEVGGSPANTRYLFLGDYVDRGYFSIEHVLGTEDISINPHNNINECVLYLWVLKILYPSTLFLLRGNHECRHLTEYFTFKQECKIKYSERVYEACMEAFDSLPLAALLNQQFLCVHGGLSPEIHTLDDIRRLDRFKEPPAFGPMCDLLWSDPSEDFGNEKSQEHFSHNTVRGCSYFYNYPAVCEFLQNNNLLSIIRAHEAQDAGYRMYRKSQTTGFPSLITIFSAPNYLDVYNNKAAVLKYENNVMNIRQFNCSPHPYWLPNFMDVFTWSLPFVGEKVTEMLVNVLSICSDDELMTEGEDQFDGSAAARKEIIRNKIRAIGKMARVFSVLREESESVLTLKGLTPTGMLPSGVLAGGRQTLQSGNDVMQLAVPQMDWGTPHSFANNSHNACREFLLFFSSCLSS

SEQ ID NO: 41677 - protein, 515 aa, Homo sapiens
MAAPEPARAAPPPPPPPPPPPGADRVVKAVPFPPTHRLTSEEVFDLDGIPRVDVLKNHLVKEGRVDEEIALRIINEGAAILRREKTMIEVEAPITVCGDIHGQFFDLMKLFEVGGSPANTRYLFLGDYVDRGYFSIECVLYLWVLKILYPSTLFLLRGNHECRHLTEYFTFKQECKIKYSERVYEACMEAFDSLPLAALLNQQFLCVHGGLSPEIHTLDDIRRLDRFKEPPAFGPMCDLLWSDPSEDFGNEKSQEHFSHNTVRGCSYFYNYPAVCEFLQNNNLLSIIRAHEAQDAGYRMYRKSQTTGFPSLITIFSAPNYLDVYNNKAAVLKYENNVMNIRQFNCSPHPYWLPNFMDVFTWSLPFVGEKVTEMLVNVLSICSDDELMTEGEDQFDVGSAAARKEIIRNKIRAIGKMARVFSVLREESESVLTLKGLTPTGMLPSGVLAGGRQTLQSAIRGFSPPHRICSFEEAKGLDRINERMPPRKDAVQQDGFNSLNTAHATENHGTGNHTAQ

SEQ ID NO: 41678 - protein, 525 aa, Homo sapiens
MAAPEPARAAPPPPPPPPPPPGADRVVKAVPFPPTHRLTSEEVFDLDGIPRVDVLKNHLVKEGRVDEEIALRIINEGAAILRREKTMIEVEAPITVCGDIHGQFFDLMKLFEVGGSPANTRYLFLGDYVDRGYFSIECVLYLWVLKILYPSTLFLLRGNHECRHLTEYFTFKQECKIKYSERVYEACMEAFDSLPLAALLNQQFLCVHGGLSPEIHTLDDIRRLDRFKEPPAFGPMCDLLWSDPSEDFGNEKSQEHFSHNTVRGCSYFYNYPAVCEFLQNNNLLSIIRAHEAQDAGYRMYRKSQTTGFPSLITIFSAPNYLDVYNNKAAVLKYENNVMNIRQFNCSPHPYWLPNFMDVFTWSLPFVGEKVTEMLVNVLSICSDDELMTEGEDQFDVGSAAARKEIIRNKIRAIGKMARVFSVLREESESVLTLKGLTPTGMLPSGVLAGGRQTLQSATVEAIEAEKAIRGFSPPHRICSFEEAKGLDRINERMPPRKDAVQQDGFNSLNTAHATENHGTGNHTAQ

SEQ ID NO: 41679 - protein, 1019 aa, Homo sapiens
MEPGEVKDRILENISLSVKKLQSYFAACEDEIPAIRNHDKVLQRLCEHLDHALLYGLQDLSSGYWVLVVHFTRREAIKQIEVLQHVATNLGRSRAWLYLALNENSLESYLRLFQENLGLLHKYYVKNALVCSHDHLTLFLTLVSGLEFIRFELDLDAPYLDLAPYMPDYYKPQYLLDFEDRLPSSVHGSDSLSLNSFNSVTSTNLEWDDSAIAPSSEDYDFGDVFPAVPSVPSTDWEDGDLTDTVSGPRSTASDLTSSKASTRSPTQRQNPFNEEPAETVSSSDTTPVHTTSQEKEEAQALDPPDACTELEVIRVTKKKKIGKKKKSRSDEEASPLHPACSQKKCAKQGDGDSRNGSPSLGRDSPDTMLASPQEEGEGPSSTTESSERSEPGLLIPEMKDTSMERLGQPLSKVIDQLNGQLDPSTWCSRAEPPDQSFRTGSPGDAPERPPLCDFSEGLSAPMDFYRFTVESPSTVTSGGGHHDPAGLGQPLHVPSSPEAAGQEEEGGGGEGQTPRPLEDTTREAQELEAQLSLVREGPVSEPEPGTQEVLCQLKRDQPSPCLSSAEDSGVDEGQGSPSEMVHSSEFRVDNNHLLLLMIHVFRENEEQLFKMIRMSTGHMEGNLQLLYVLLTDCYVYLLRKGATEKPYLVEEAVSYNELDYVSVGLDQQTVKLVCTNRRKQFLLDTADVALAEFFLASLKSAMIKGCREPPYPSILTDATMEKLALAKFVAQESKCEASAVTVRFYGLVHWEDPTDESLGPTPCHCSPPEGTITKEGMLHYKAGTSYLGKEHWKTCFVVLSNGILYQYPDRTDVIPLLSVNMGGEQCGGCRRANTTDRPHAFQVILSDRPCLELSAESEAEMAEWMQHLCQAVSKGVIPQGVAPSPCIPCCLVLTDDRLFTCHEDCQTSFFRSLGTAKLGDISAVSTEPGKEYCVLEFSQDSQQLLPPWVIYLSCTSELDRLLSALNSGWKTIYQVDLPHTAIQEASNKKKFEDALSLIHSAWQRSDSLCRGRASRDPWC

SEQ ID NO: 41680 - protein, 999 aa, Homo sapiens
MEPGEVKDRILENISLSVKKLQSYFAACEDEIPAIRNHDKVLQRLCEHLDHALLYGLQDLSSGYWVLVVHFTRREAIKQIEVLQHVATNLGRSRAWLYLALNENSLESYLRLFQENLGLLHKYYVKNALVCSHDHLTLFLTLVSGLEFIRFELDLDAPYLDLAPYMPDYYKPQYLLDFEDRLPSSVHGSDSLSLNSFNSVTSTNLEWDDSAIAPSSEDGDLTDTVSGPRSTASDLTSSKASTRSPTQRQNPFNEEPAETVSSSDTTPVHTTSQEKEEAQALDPPDACTELEVIRVTKKKKIGKKKKSRSDEEASPLHPACSQKKCAKQGDGDSRNGSPSLGRDSPDTMLASPQEEGEGPSSTTESSERSEPGLLIPEMKDTSMERLGQPLSKVIDQLNGQLDPSTWCSRAEPPDQSFRTGSPGDAPERPPLCDFSEGLSAPMDFYRFTVESPSTVTSGGGHHDPAGLGQPLHVPSSPEAAGQEEEGGGGEGQTPRPLEDTTREAQELEAQLSLVREGPVSEPEPGTQEVLCQLKRDQPSPCLSSAEDSGVDEGQGSPSEMVHSSEFRVDNNHLLLLMIHVFRENEEQLFKMIRMSTGHMEGNLQLLYVLLTDCYVYLLRKGATEKPYLVEEAVSYNELDYVSVGLDQQTVKLVCTNRRKQFLLDTADVALAEFFLASLKSAMIKGCREPPYPSILTDATMEKLALAKFVAQESKCEASAVTVRFYGLVHWEDPTDESLGPTPCHCSPPEGTITKEGMLHYKAGTSYLGKEHWKTCFVVLSNGILYQYPDRTDVIPLLSVNMGGEQCGGCRRANTTDRPHAFQVILSDRPCLELSAESEAEMAEWMQHLCQAVSKGVIPQGVAPSPCIPCCLVLTDDRLFTCHEDCQTSFFRSLGTAKLGDISAVSTEPGKEYCVLEFSQDSQQLLPPWVIYLSCTSELDRLLSALNSGWKTIYQVDLPHTAIQEASNKKKFEDALSLIHSAWQRSDSLCRGRASRDPWC

SEQ ID NO: 41681 - protein, 327 aa, Homo sapiens
MTVVSVPQREPLVLGGRLAPLGFSSRGYFGALPMVTTAPPPLPRIPDPRALPPTLFLPHFLGGDGPCLTPQPRAPAALPNRSLAVAGGTPRAAPKKRRKKKVRASPAGQLPSRFHQYQQHRPSLEGGRSPATGPSGAQEVPGPAAALAPSPAAAAGTEGASPDLAPLRPAAPGQTPLRKEVLKSKMGKSEKIALPHGQLVHGIHLYEQPKINRQKSKYNLPLTKITSAKRNENNFWQDSVSSDRIQKQEKKPFKNTENIKNSHLKKSAFLTEVSQKENYAGAKFSDPPSPSVLPKPPSHWMGSTVENSNQNRELMAVHLKTLLKVQT

SEQ ID NO: 41682 - protein, 248 aa, Homo sapiens
MTVVSVPQREPLVLGGRLAPLGFSSRGYFGALPMVTTAPPPLPRIPDPRALPPTLFLPHFLGGDGPCLTPQPRAPAALPNRSLAVAGGTPRAAPKKRRKKKVLKSKMGKSEKIALPHGQLVHGIHLYEQPKINRQKSKYNLPLTKITSAKRNENNFWQDSVSSDRIQKQEKKPFKNTENIKNSHLKKSAFLTEVSQKENYAGAKFSDPPSPSVLPKPPSHWMGSTVENSNQNRELMAVHLKTLLKVQT

SEQ ID NO: 41683 - protein, 558 aa, Homo sapiens
MRCALALSALLLLLSTPPLLPSSPSPSPSPSQNATQTTTDSSNKTAPTPASSVTIMATDTAQQSTVPTSKANEILASVKATTLGVSSDSPGTTTLAQQVSGPVNTTVARGGGSGNPTTTIESPKSTKSADTTTVATSTATAKPNTTSSQNGAEDTTNSGGKSSHSVTTDLTSTKAEHLTTPHPTSPLSPRQPTSTHPVATPTSSGHDHLMKISSSSSTVAIPGYTFTSPGMTTTLLETVFHHVSQAGLELLTSGDLPTLASQSAGITASSVISQRTQQTSSQMPASSTAPSSQETVQPTSPATALRTPTLPETMSSSPTAASTTHRYPKTPSPTVAHESNWAKCEDLETQTQSEKQLVLNLTGNTLCAGGASDEKLISLICRAVKATFNPAQDKCGIRLASVPGSQTVVVKEITIHTKLPAKDVYERLKDKWDELKEAGVSDMKLGDQGPPEEAEDRFSMPLIITIVCMASFLLLVAALYGCCHQRLSQRKDQQRLTEELQTVENGYHDNPTLEVMETSSEMQEKKVVSLNGELGDSWIVPLDNLTKDDLDEEEDTHL

SEQ ID NO: 41684 - protein, 526 aa, Homo sapiens
MRCALALSALLLLLSTPPLLPSSPSPSPSPSQNATQTTTDSSNKTAPTPASSVTIMATDTAQQSTVPTSKANEILASVKATTLGVSSDSPGTTTLAQQVSGPVNTTVARGGGSGNPTTTIESPKSTKSADTTTVATSTATAKPNTTSSQNGAEDTTNSGGKSSHSVTTDLTSTKAEHLTTPHPTSPLSPRQPTSTHPVATPTSSGHDHLMKISSSSSTVAIPGYTFTSPGMTTTLPSSVISQRTQQTSSQMPASSTAPSSQETVQPTSPATALRTPTLPETMSSSPTAASTTHRYPKTPSPTVAHESNWAKCEDLETQTQSEKQLVLNLTGNTLCAGGASDEKLISLICRAVKATFNPAQDKCGIRLASVPGSQTVVVKEITIHTKLPAKDVYERLKDKWDELKEAGVSDMKLGDQGPPEEAEDRFSMPLIITIVCMASFLLLVAALYGCCHQRLSQRKDQQRLTEELQTVENGYHDNPTLEVMETSSEMQEKKVVSLNGELGDSWIVPLDNLTKDDLDEEEDTHL

SEQ ID NO: 41685 - protein, 761 aa, Homo sapiens
MEALEVDDISPALEVTEEFFSTLDSNLEKAVQQAEVYGIQEVPELVGHEVLSNITDNGAMRNVTSLGKGGMIWDHCKSRLLETKAQNVFPAKEQFMVQRGTTPDNLSWMEQKEASTFNFFNICQRRRDRPRSVNDLLDETSTFKPGHARSRSDITQVDWRVVLKTTPLQQQQQQQPLLQGPHVTRPSFLLPSPNKIEDAQGNTEHKQTFPNILKKGYLEIRKDHDSYWQSCYAELSPYNLYFYSLDSSGNQNLYATYQLSHFQSISVLGNLEARMVDTVLYDNTQLQLKAESPWEALDWGQKLWEVVHAAVPGYMGRQNELTISPGLGHHDDYTQNHSFQKKTSGLLPPSPVLDSSKQYQNILKSGTLYRLTVQNNWKAFTFVLSRAYLMAFQPGKLDEDPLLSYNVDVCLAVQMDNLDGCDSCFQVIFPQDVLRLRAETRQRAQEWMEALKIAANVARSSEQNLQVTLRNKPKDQMGGHELRKNKRQSVTTSFLSILTTLSLERGLTAQSFKCAGCQRSIGLSNGKAKVCNYSGWYYCSSCHVDDSFLIPARIVHNWDTSKYKVSKQAKEFLEYVYEEPLIDIQQENAMLYHHAEPLAAVLRLRQRLKSLRAYLFSCRAAVAEDLRRRIFPREYLLQQIHLYSLADLQQVIEGKLAPFLGKVIKFATSHVYSCSLCSQKGFICEICNNGEILYPFEDISTSRCESCGAVFHSECKEKSVPCPRCVRRELQKKQKSFWQRLNMDESLEEACTMFELSYQNT

SEQ ID NO: 41686 - protein, 717 aa, Homo sapiens
MEALEVDDISPALEVTEEFFSTLDSNLEKAVQQAEVYGIQEVPELVGHEVLSNITDNGAMRNVTSLGKGGMIWDHCKSRLLETKAQNVFPAKEQFMVQRGTTPDNLSWMEQKEASTFNFFNICQRRRDRPRSVNDLLDETSTFKPGHARSRSDITQVDWRVVLKTTPLQQQQQQQPLLQGPHVTRPSFLLPSPNKIEDAQGNTEHKQTFPNILKKGYLEIRKDHDSYWQSCYAELSPYNLYFYSLDSSGNQNLYATYQLSHFQSISVLGNLEARMVDTVLYDNTQLQLKAESPWEALDWGQKLWEVVHAAVPGYMGRQNELTISPGLGHHDDYTQNHSFQKKTSGLLPPSPVLDSSKQYQNILKSGTLYRLTVQNNWKAFTFVLSRAYLMAFQPGKLDEDPLLSYNVDVCLAVQMDNLDGCDSCFQVIFPQDVLRLRAETRQRAQEWMEALKIAANVARSSEQNLQVTLRNKPKDQMGGHELRKNKRQSVTTSFLSILTTLSLERGLTAQSFKCAGCQRSIGLSNGKAKVCNYSGWYYCSSCHVDDSFLIPARIVHNWDTSKYKVSKQAKEFLEYVYEEPLIDIQQENAMLYHHAEPLAAVLRLRQRLKSLRAYLFSCRAAVAEDLRRRIFPREYLLQQIHLYSLADLQQVIEGKLAPFLGKVIKFATSHVYSCSLCSQKGFICEICNNGEILYPFEDISTSRFGDPYADLLQGYVA

SEQ ID NO: 41687 - protein, 523 aa, Homo sapiens
MEALEVDDISPALEVTEEFFSTLDSNLEKAVQQAEVYGIQEVPELVGHEVLSNITDNGAMRNVTSLGKGGMIWDHCKSRLLETKAQNVFPAKEQFMVQRGTTPDNLSWMEQKEASTFNFFNICQRRRDRPRSVNDLLDETSTFKPGHARSRSDITQVDWRVVLKTTPLQQQQQQQPLLQGPHVTRPSFLLPSPNKIEDAQGNTEHKQTFPNILKKGYLEIRKDHDSYWQSCYAELSPYNLYFYSLDSSGNQNLYATYQLSHFQSISVLGNLEARMVDTVLYDNTQLQLKAESPWEALDWGQKLWEVVHAAVPGYMGRQNELTISPGLGHHDDYTQNHSFQKKTSGLLPPSPVLDSSKQYQNILKSGTLYRLTVQNNWKAFTFVLSRAYLMAFQPGKLDEDPLLSYNVDVCLAVQMDNLDGCDSCFQVIFPQDVLRLRAETRQRAQEWMEALKIAANVARSSEQNLQVTLRNKPKDQMGGHELRKNKRQSVTTSFLSILTTLSLERGLTAQSFKCAGMKQIFSL

SEQ ID NO: 41688 - protein, 512 aa, Homo sapiens
MSGRRFHLSTTDRVIKAVPFPPTQRLTFKEVFENGKPKVDVLKNHLVKEGRLEEEVALKIINDGAAILRQEKTMIEVDAPITVCGDIHGQFFDLMKLFEVGGSPSNTRYLFLGDYVDRGYFSIECVLYLWSLKINHPKTLFLLRGNHECRHLTDYFTFKQECRIKYSEQVYDACMETFDCLPLAALLNQQFLCVHGGMSPEITSLDDIRKLDRFTEPPAFGPVCDLLWSDPSEDYGNEKTLEHYTHNTVRGCSYFYSYPAVCEFLQNNNLLSIIRAHEAQDAGYRMYRKSQATGFPSLITIFSAPNYLDVYNNKAAVLKYENNVMNIRQFNCSPHPYWLPNFMDVFTWSLPFVGEKVTEMLVNVLNICSDDELISDDEAEGSTTVRKEIIRNKIRAIGKMARVFSILRQESESVLTLKGLTPTGTLPLGVLSGGKQTIETATVEAVEAREAIRGFSLQHKIRSFEEARGLDRINERMPPRKDSIHAGGPMKSVTSAHSHAAHRSDQGKKAHS

SEQ ID NO: 41689 - protein, 502 aa, Homo sapiens
MSGRRFHLSTTDRVIKAVPFPPTQRLTFKEVFENGKPKVDVLKNHLVKEGRLEEEVALKIINDGAAILRQEKTMIEVDAPITVCGDIHGQFFDLMKLFEVGGSPSNTRYLFLGDYVDRGYFSIECVLYLWSLKINHPKTLFLLRGNHECRHLTDYFTFKQECRIKYSEQVYDACMETFDCLPLAALLNQQFLCVHGGMSPEITSLDDIRKLDRFTEPPAFGPVCDLLWSDPSEDYGNEKTLEHYTHNTVRGCSYFYSYPAVCEFLQNNNLLSIIRAHEAQDAGYRMYRKSQATGFPSLITIFSAPNYLDVYNNKAAVLKYENNVMNIRQFNCSPHPYWLPNFMDVFTWSLPFVGEKVTEMLVNVLNICSDDELISDDEAEGSTTVRKEIIRNKIRAIGKMARVFSILRQESESVLTLKGLTPTGTLPLGVLSGGKQTIETAIRGFSLQHKIRSFEEARGLDRINERMPPRKDSIHAGGPMKSVTSAHSHAAHRSDQGKKAHS

SEQ ID NO: 41690 - protein, 521 aa, Homo sapiens
MSGRRFHLSTTDRVIKAVPFPPTQRLTFKEVFENGKPKVDVLKNHLVKEGRLEEEVALKIINDGAAILRQEKTMIEVDAPITVCGDIHGQFFDLMKLFEVGGSPSNTRYLFLGDYVDRGYFSIECVLYLWSLKINHPKTLFLLRGNHECRHLTDYFTFKQECRIKYSEQVYDACMETFDCLPLAALLNQQFLCVHGGMSPEITSLDDIRKLDRFTEPPAFGPVCDLLWSDPSEDYGNEKTLEHYTHNTVRGCSYFYSYPAVCEFLQNNNLLSIIRAHEAQDAGYRMYRKSQATGFPSLITIFSAPNYLDVYNNKAAVLKYENNVMNIRQFNCSPHPYWLPNFMDVFTWSLPFVGEKVTEMLVNVLNICSDDELISDDEAEDHYIPSYQKGSTTVRKEIIRNKIRAIGKMARVFSILRQESESVLTLKGLTPTGTLPLGVLSGGKQTIETATVEAVEAREAIRGFSLQHKIRSFEEARGLDRINERMPPRKDSIHAGGPMKSVTSAHSHAAHRSDQGKKAHS

SEQ ID NO: 41691 - protein, 139 aa, Homo sapiens
MGGGERYNIPAPQSRNVSKNQQQLNRQKTKEQNSQMKIVHKKKERGHGYNSSAAAWQAMQNGGKNKNFPNNQSWNSSLSGPRLLFKSQANQNYAGAKFSEPPSPSVLPKPPSHWVPVSFNPSDKEIMTFQLKTLLKVQV

SEQ ID NO: 41692 - protein, 120 aa, Homo sapiens
MLASAPRLNSADRPMKTSVLRQRKGSVRKQHLLSWAWQAMQNGGKNKNFPNNQSWNSSLSGPRLLFKSQANQNYAGAKFSEPPSPSVLPKPPSHWVPVSFNPSDKEIMTFQLKTLLKVQV

SEQ ID NO: 41693 - protein, 187 aa, Homo sapiens
MVCSPVTLRIAPPDRRFSRSAIPEQIISSTLSSPSSNAPDPCAKETVLSALKEKKKKRTVEEEDQIFLDGQENKRSCLVDGLTDASSAFKVPRPGPDTLQFTVDVFHFANDSRNMIYITCHLKVTLAEQDPDELNKACSFSKPSNSWFPVEGLADICQCCNKGDCGTPSHSRRQPRVVSQWSTSASL

SEQ ID NO: 41694 - protein, 115 aa, Homo sapiens
MVCSPVTLRIAPPDRRFSRSAIPEQIISSTLSSPSSNAPDPCAKETVLSALKEKKKKRTVEEEDQIFLDGQENKRSCLVDGLTDASSAFKVPRPGPDTLQFTVDVFHFANDSRNM

SEQ ID NO: 41695 - protein, 490 aa, Homo sapiens
MEEEGVKEAGEKPRGAQMVDKAGWIKKSSGGLLGFWKDRYLLLCQAQLLVYENEDDQKCVETVELGSYEKCQDLRALLKRKHRFILLRSPGNKVSDIKFQAPTGEEKESWIKALNEGINRGKNKAFDEVKVDKSCALEHVTRDRVRGGQRRRPPTRVHLKEVASAASDGLLRLDLDVPDSGPPVFAPSNHVSEAQPRETPRPLMPPTKPFLAPETTSPGDRVETPVGERAPTPVSASSEVSPESQEDSETPAEEDSGSEQPPNSVLPDKLKVSWENPSPQEAPAAESAEPSQAPCSETSEAAPREGGKPPTPPPKILSEKLKASMGEMQASGPPAPGTVQVSVNGMDDSPEPAKPSQAEGTPGTPPKDATTSTALPPWDLPPQFHPRCSSLGDLLGEGPRHPLQPRERLYRAQLEVKVASEQTEKLLNKVLGSEPAPVSAETLLSQAVEQLRQATQVLQEMRDLGELSQEAPGLREKRKELVTLYRRSAP

SEQ ID NO: 41696 - protein, 440 aa, Homo sapiens
MEEEDDQKCVETVELGSYEKCQDLRALLKRKHRFILLRSPGNKVSDIKFQAPTGEEKESWIKALNEGINRGKNKAFDEVKVDKSCALEHVTRDRVRGGQRRRPPTRVHLKEVASAASDGLLRLDLDVPDSGPPVFAPSNHVSEAQPRETPRPLMPPTKPFLAPETTSPGDRVETPVGERAPTPVSASSEVSPESQEDSETPAEEDSGSEQPPNSVLPDKLKVSWENPSPQEAPAAESAEPSQAPCSETSEAAPREGGKPPTPPPKILSEKLKASMGEMQASGPPAPGTVQVSVNGMDDSPEPAKPSQAEGTPGTPPKDATTSTALPPWDLPPQFHPRCSSLGDLLGEGPRHPLQPRERLYRAQLEVKVASEQTEKLLNKVLGSEPAPVSAETLLSQAVEQLRQATQVLQEMRDLGELSQEAPGLREKRKELVTLYRRSAP

SEQ ID NO: 41697 - protein, 465 aa, Homo sapiens
MAGGKQFTFSYENEVCKQDYFIKSPPSQLFSSVTSWKKRFFILSKAGEKSFSLSYYKDHHHRGSIEIDQNSSVEVGISSQEKMQSVQKMFKCHPDEVMSIRTTNREYFLIGHDREKIKDWVSFMSSFRQDIKATQQNTEEELSLGNKRTLFYSSPLLGPSSTSEAVGSSSPRNGLQDKHLMEQSSPGFRQTHLQDLSEATQDVKEENHYLTPRSVLLELDNIIASSDSGESIETDGPDQVSGRIECHYEPMESSFFKETSHESVDSSKEEPQTLPETQDGDLHLQEQGSGIDWCLSPADVEAQTTNDQKGNIPDESQVEKLNVFLSPPDVINYLALTEATGRICVSQWEGPPRLGCIFCHGDHLLAVNDLKPQSLEEVSLFLTRSIQKEDSFRILSYQVAFGEGTELRDRAPGFRTSDRHDVAKRACMESDWCRDSKTAPSTNLCLSFLFCKIMTNDGAGCWIIK

SEQ ID NO: 41698 - protein, 462 aa, Homo sapiens
MAGGKQFTFSYENEVCKQDYFIKSPPSQLFSSVTSWKKRFFILSKAGEKSFSLSYYKDHHHRGSIEIDQNSSVEVGISSQEKMQSVQKMFKCHPDEVMSIRTTNREYFLIGHDREKIKDWVSFMSSFRQDIKATQQNTEEELSLGNKRTLFYSSPLLGPSSTSEAVGSSSPRNGLQDKHLMEQSSPGFRQTHLQDLSEATQDVKEENHYLTPRSVLLELDNIIASSDSGESIETDGPDQVSGRIECHYEPMESSFFKETSHESVDSSKEEPQTLPETQDGDLHLQEQGSGIDWCLSPADVEAQTTNDQKGSASLTVVQLSILINNIPDESQVEKLNVFLSPPDVINYLALTEATGRICVSQWEGPPRLGCIFCHGDHLLAVNDLKPQSLEEVSLFLTRSIQKEKLKLTIGRIPNSETFHAASCMCPSKCQSAAPSQLDKPRLNRAPKRSPAIKKSQQKGARE

SEQ ID NO: 41699 - protein, 448 aa, Homo sapiens
MAGGKQFTFSYENEVCKQDYFIKSPPSQLFSSVTSWKKRFFILSKAGEKSFSLSYYKDHHHRGSIEIDQNSSVEVGISSQEKMQSVQKMFKCHPDEVMSIRTTNREYFLIGHDREKIKDWVSFMSSFRQDIKATQQNTEEELSLGNKRTLFYSSPLLGPSSTSEAVGSSSPRNGLQDKHLMEQSSPGFRQTHLQDLSEATQDVKEENHYLTPRSVLLELDNIIASSDSGESIETDGPDQVSGRIECHYEPMESSFFKETSHESVDSSKEEPQTLPETQDGDLHLQEQGSGIDWCLSPADVEAQTTNDQKGNIPDESQVEKLNVFLSPPDVINYLALTEATGRICVSQWEGPPRLGCIFCHGDHLLAVNDLKPQSLEEVSLFLTRSIQKEKLKLTIGRIPNSETFHAASCMCPSKCQSAAPSQLDKPRLNRAPKRSPAIKKSQQKGARE

SEQ ID NO: 41700 - protein, 366 aa, Homo sapiens
MQSVQKMFKCHPDEVMSIRTTNREYFLIGHDREKIKDWVSFMSSFRQDIKATQQNTEEELSLGNKRTLFYSSPLLGPSSTSEAVGSSSPRNGLQDKHLMEQSSPGFRQTHLQDLSEATQDVKEENHYLTPRSVLLELDNIIASSDSGESIETDGPDQVSGRIECHYEPMESSFFKETSHESVDSSKEEPQTLPETQDGDLHLQEQGSGIDWCLSPADVEAQTTNDQKGNIPDESQVEKLNVFLSPPDVINYLALTEATGRICVSQWEGPPRLGCIFCHGDHLLAVNDLKPQSLEEVSLFLTRSIQKEKLKLTIGRIPNSETFHAASCMCPSKCQSAAPSQLDKPRLNRAPKRSPAIKKSQQKGARE

SEQ ID NO: 41701 - protein, 363 aa, Homo sapiens
MEPKPQKSPGKQFTFSYENEVCKQDYFIKSPPSQLFSSVTSWKKRFFILSKAGEKSFSLSYYKDHHHRGSIEIDQNSSVEVGISSQEKMQSVQKMFKCHPDEVMSIRTTNREYFLIGHDREKIKDWVSFMSSFRQDIKATQQNTEEELSLGNKRTLFYSSPLLGPSSTSEAVGSSSPRNGLQDKHLMEQSSPGFRQTHLQDLSEATQDVKEENHYLTPRSVLLELDNIIASSDSGESIETDGPDQVSGRIECHYEPMESSFFKETSHESVDSSKEEPQTLPETQDGDLHLQEQGSGIDWCLSPADVEAQTTNDQKGSASLTVVQLSILINNIPDESQVEKLNVFLSPPDVINYLALTEATGRI

SEQ ID NO: 41702 - protein, 589 aa, Homo sapiens
MSSSYWSETSSSSCGTQQLPEVLQCQPQHYHCYHQSSQAQQPPEKNVVYERVRTYSGPMNKVVQALDPFNSREVLSPLKTTSSYQNLVWSDHSQELHSPTLKISTCAPSTLHITQNTEQELHSPTVKLTTYPQTTIRKYVVQNPEQEPLSQFLRGSHFFPGNNVIYEKTIRKVEKLNTDQGCHPQAQCHHHIIQQPQVIHSAHWQQPDSSQQIQAITGNNPISTHIGNELCHSGSSQICEQVIIQDDGPEKLDPRYFGELLADLSRKNTDLYHCLLEHLQRIGGSKQDFESTDESEDIESLIPKGLSEFTKQQIRYILQMRGMSDKSLRLVLSTFSNIREELGHLQNDMTSLENDKMRLEKDLSFKDTQLKEYEELLASVRANNHQQQQGLQDSSSKCQALEENNLSLRHTLSDMEYRLKELEYCKRNLEQENQNLRMQVSETCTGPMLQAKMDEIGNHYTEMVKNLRMEKDREICRLRSQLNQYHKDVSKREGSCSDFQFKLHELTSLLEEKDSLIKRQSEELSKLRQEIYSSHNQPSTGGRTTITTKKYRTQYPILGLLYDDYEYIPPGSETQTIVIEKTEDKYTCP

SEQ ID NO: 41703 - protein, 595 aa, Homo sapiens
MSSSYWSETSSSSCGTQQLPEVLQCQPQHYHCYHQSSQAQQPPEKNVVYERVRTYSGPMNKVVQALDPFNSREVLSPLKTTSSYQNLVWSDHSQELHSPTLKISTCAPSTLHITQNTEQELHSPTVKLTTYPQTTIRKYVVQNPEQEPLSQFLRGSHFFPGNNVIYEKTIRKVEKLNTDQGCHPQAQCHHHIIQQPQVIHSAHWQQPDSSQQIQAITGNNPISTHIGNELCHSGSSQICEQVIIQDDGPEKLDPRYFGELLADLSRKNTDLYHCLLEHLQRIGGSKQDFESTDESEDIESLIPKGLSEFTKQQIRYILQMRGMSDKSLRLVLSTFSNIREELGHLQNDMTSLENDKMRLEKDLSFKDTQLKEYEELLASVRANNHQQQQGLQDSSSKCQALEENNLSLRHTLSDMEYRLKELEYCKRNLEQENQNLRMQVSETCTGPMLQAKMDEIGNHYTEMVKNLRMEKDREICRLRSQLNQYHKDVSKREGSCSDFQFKLHELTSLLEEKDSLIKRQSEELSKLRQEIYSSHNQPSTGGRTTITTKKYRTQYPILGLLYDDYEYIPPGSETQTIVIEKTEDKYTCVSSLGHF

SEQ ID NO: 41704 - protein, 306 aa, Homo sapiens
MSSSYWSETSSSSCGTQQLPEVLQCQPQHYHCYHQSSQAQQPPEKNVVYERVRTYSGPMNKVVQALDPFNSREVLSPLKTTSSYQNLVWSDHSQELHSPTLKISTCAPSTLHITQNTEQELHSPTVKLTTYPQTTIRKYVVQNPEQEPLSQFLRGSHFFPGNNVIYEKTIRKVEKLNTDQGCHPQAQCHHHIIQQPQVIHSAHWQQPDSSQQIQAITGNNPISTHIGNELCHSGSSQICEQVIIQDDGPEKLDPRYFGELLADLSRKNTDLYHCLLEHLQRIGRKQSLSSTYTIRHGIQTKRTGIL

SEQ ID NO: 41705 - protein, 567 aa, Homo sapiens
MMAAVPPGLEPWNRVRIPKAGNRSAVTVQNPGAALDLCIAAVIKECHLVILSLKSQTLDAETDVLCAVLYSNHNRMGRHKPHLALKQVEQCLKRLKNMNLEGSIQDLFELFSSNENQPLTTKVCVVPSQPVVELVLMKVLGACKLLLRLLDCCCKTFLLTVKHLGLQEFIILNLVMVGLVSRLWVLYKGVLKRLILLYEPLFGLLQEVARIQPMPYFKDFTFPSDITEFLGQPYFEAFKKKMPIAFAAKGINKLLNKLFLINEQSPRASEETLLGISKKAKQMKINVQNNVDLGQPVKNKRVFKEESSEFDVRAFCNQLKHKATQETSFDFKCSQSRLKTTKYSSQKVIGTPHAKSFVQRFREAESFTQLSEEIQMAVVWCRSKKLKAQAIFLGNKLLKSNRLKHLEAQGTSLPKKLECIKTSICNHLLRGSGIKTSKHHLRQRRSQNKFLRRQRKPQRKLQSTLLREIQQFSQGTRKSATDTSAKWRLSHCTVHRTDLYPNSKQLLNSGVSMPVIQTKEKMIHENLRGIHENETDSWTVMQINKNSTSGTIKETDDIDDIFALMGV

SEQ ID NO: 41706 - protein, 497 aa, Homo sapiens
MMAAVPPGLEPWNRVRIPKAGNRSAVTVQNPGAALDLCIAAVIKECHLVILSLKSQTLDAETDVLCAVLYSNHNRMGRHKPHLALKQVEQCLKRLKNMNLEGSIQDLFELFSSKVLYKGVLKRLILLYEPLFGLLQEVARIQPMPYFKDFTFPSDITEFLGQPYFEAFKKKMPIAFAAKGINKLLNKLFLINEQSPRASEETLLGISKKAKQMKINVQNNVDLGQPVKNKRVFKEESSEFDVRAFCNQLKHKATQETSFDFKCSQSRLKTTKYSSQKVIGTPHAKSFVQRFREAESFTQLSEEIQMAVVWCRSKKLKAQAIFLGNKLLKSNRLKHLEAQGTSLPKKLECIKTSICNHLLRGSGIKTSKHHLRQRRSQNKFLRRQRKPQRKLQSTLLREIQQFSQGTRKSATDTSAKWRLSHCTVHRTDLYPNSKQLLNSGVSMPVIQTKEKMIHENLRGIHENETDSWTVMQINKNSTSGTIKETDDIDDIFALMGV

SEQ ID NO: 41707 - protein, 630 aa, Homo sapiens
MSTNNALRVFWKSREWNMKTSTFDSDEDILLLPKRKRFRKKKSRPVRHTKRHEEEQVYEQGTTLPCSICKHEIDLTGIFLHKKQHVALATLGFQWMGRKKPQPSVIAVQRQFMISKLLSSFMFTEKTLQSINNAFELLWKKQIPAYYKIFDNIDRSVIYSQKICHLLIKGVGICEDRNSTWKADMNDKFTVVSNFGNKPNVCFFGLFDGHHGASAAELTSMELPVLLLHQLSKFDPSYQMTTDEQQIINSFYTVFREEYAAIEDLFSAINKTEAVRCEYEDTHKAFAKAFWRMDRLLGLGRKEVSRVQWSGCSAVTCILEGKPKSPYAHKNWKRKNTHDGLAESSPSQEMPKIISGILHVANTGNVQAVLCRNGKGFCLTKEHTTRNTNERRRILQNGAVISSNEPYGLVEGQVKTTRGLGFHGNLKLKKSIIPAPQTISVPIDDLCQFLIVATNGLWEVLDKEEVTALAMTTFHMYKETYCPIIPNKSPSKGPLLFSTSEPNLTKSQSNIHVLFQYKSVSEVRVSTTNSKENLSDSNYSKYCIYNPENVETFPAETTHRKPCSEKVTDRPTSVNDVATNEKESDTKSFYEGAAEYVSHELVNAALLAGSRDNITVMVIFLNGSEYQLLT

SEQ ID NO: 41708 - protein, 368 aa, Homo sapiens
MSTNNALRVFWKSREWNMKTSTFDSDEDILLLPKRKRFRKKKSRPVRHTKRHEEEQVYEQGTTLPCSICKHEIDLTGIFLHKKQHVALATLGFQWMGRKKPQPSVIAVQRQFMISKLLSSFMFTEKTLQSINNAFELLWKKQIPAYYKIFDNIDRSVIYSQKICHLLIKGVGICEDRNSTWKADMNDKFTVVSNFGNKPNVCFFGLFDGHHGASAAELTSMELPVLLLHQLSKFDPSYQMTTDEQQIINSFYTVFREEYAAIEDLFSAINKTEAVRCEYEDTHKAFAKAFWRMDRLLGLGRKEVSRVQWSGCSAVTCILEGKPKSPYAHKNWKRKNTHDGLAESSPSQEMPKIISGILHVANTGMYIE

SEQ ID NO: 41709 - protein, 376 aa, Homo sapiens
MSTNNALRVFWKSREWNMKTSTFDSDEDILLLPKRKRFRKKKSRPVRHTKRHEEEQVYEQGTTLPCSICKHEIDLTGIFLHKKQHVALATLGFQWMGRKKPQPSVIAVQRQFMISKLLSSFMFTEKTLQSINNAFELLWKKQIPAYYKIFDNIDRSVIYSQKICHLLIKGVGICEDRNSTWKADMNDKFTVVSNFGNKPNVCFFGLFDGHHGASAAELTSMELPVLLLHQLSKFDPSYQMTTDEQQIINSFYTVFREEYAAIEDLFSAINKTEAVRCEYEDTHKAFAKAFWRMDRLLGLGRKEVSRVQWSGCSAVTCILEGKPKSPYAHKNWKRKNTHDGLAESSPSQEMPKIISGILHVANTGTRRNEHLPEYYG

SEQ ID NO: 41710 - protein, 115 aa, Homo sapiens
MNFALILMINTLLALLLMIITFWLPQLNGYMEKSTPYECGFDPMSPARVPFSMKFFLVAITFLLFDLEIALLLPLPWALQTTNLPLMVMSSLLLIIILALSLAYEWLQKGLDWTE

SEQ ID NO: 41711 - protein, 435 aa, Homo sapiens
MAAPLVLVLVVAVTVRAALFRSSLAEFISERVEVVSPLSSWKRVVEGLSLLDLGVSPYSGAVFHETPLIIYLFHFLIDYAELVFMITDALTAIALYFAIQDFNKVVFKKQKLLLELDQYAPDVAELIRTPMEMRYIPLKVALFYLLNPYTILSCVAKSTCAINNTLIAFFILTTIKGSAFLSAIFLALATYQSLYPLTLFVPGLLYLLQRQYIPVKMKSKAFWIFSWEYAMMYVGSLVVIICLSFFLLSSWDFIPAVYGFILSVPDLTPNIGLFWYFFAEMFEHFSLFFVCVFQINVFFYTIPLAIKLKEHPIFFMFIQIAVIAIFKSYPTVGDVALYMAFFPVWNHLYRFLRNIFVLTCIIIVCSLLFPVLWHLWIYAGSANSNFFYAITLTFNVGQILLISDYFYAFLRREYYLTHGLYLTAKDGTEAMLVLK

SEQ ID NO: 41712 - protein, 415 aa, Homo sapiens
MAAPLVLVLVVAVTVRAALFRSSLAEFISERVEVVSPLSSWKRVVEGLSLLDLGVSPYSGAVFHEITDALTAIALYFAIQDFNKVVFKKQKLLLELDQYAPDVAELIRTPMEMRYIPLKVALFYLLNPYTILSCVAKSTCAINNTLIAFFILTTIKGSAFLSAIFLALATYQSLYPLTLFVPGLLYLLQRQYIPVKMKSKAFWIFSWEYAMMYVGSLVVIICLSFFLLSSWDFIPAVYGFILSVPDLTPNIGLFWYFFAEMFEHFSLFFVCVFQINVFFYTIPLAIKLKEHPIFFMFIQIAVIAIFKSYPTVGDVALYMAFFPVWNHLYRFLRNIFVLTCIIIVCSLLFPVLWHLWIYAGSANSNFFYAITLTFNVGQILLISDYFYAFLRREYYLTHGLYLTAKDGTEAMLVLK

SEQ ID NO: 41713 - protein, 510 aa, Homo sapiens
MAAELVEAKNMVMSFRVSDLQMLLGFVGRSKSGLKHELVTRALQLVQFDCSPELFKKIKELYETRYAKKNSEPAPQPHRPLDPLTMHSTYDRAGAVPRTPLAGPNIDYPVLYGKYLNGLGRLPAKTLKPEVRLVKLPFFNMLDELLKPTELVPQNNEKLQESPCIFALTPRQVELIRNSRELQPGVKAVQVVLRICYSDTSCPQEDQYPPNIAVKVNHSYCSVPGYYPSNKPGVEPKRPCRPINLTHLMYLSSATNRITVTWGNYGKSYSVALYLVRQLTSSELLQRLKTIGVKHPELCKALVKEKLRLDPDSEIATTGVRVSLICPLVKMRLSVPCRAETCAHLQCFDAVFYLQMNEKKPTWMCPVCDKPAPYDQLIIDGLLSKILSECEDADEIEYLVDGSWCPIRAEKERSCSPQGAILVLGPSDANGLLPAPSVNGSGALGSTGGGGPVGSMENGKPGADVVDLTLDSSSSSEDEEEEEEEEEDEDEEGPRPKRRCPFQKGLVPAC

SEQ ID NO: 41714 - protein, 493 aa, Homo sapiens
MWPQDPSRKEVLRFAVSCRILTLMLQALFNAIIPDHHAEAFSPPRLAPSGFVDQLVEGLLGGLSHWDAEHFLFIAEHGYLYEHNFAFFPGFPLALLVGTELLRPLRGLLSLRSCLLISVASLNFLFFMLAAVALHDLGCLVLHCPHQSFYAALLFCLSPANVFLAAGYSEALFALLTFSAMGQLERGRVWTSVLLFAFATGVRSNGLVSVGFLMHSQCQGFFSSLTMLNPLRQLFKLMASLFLSVFTLGLPFALFQYYAYTQFCLPGSARPIPEPLVQLAVDKGYRIAEGNEPPWCFWDVPLIYSYIQDVYWNVGFLKYYELKQVPNFLLAAPVAILVAWATWTYVTTHPWLCLTLGLQRSKNNKTLEKPDLGFLSPQVFVYVVHAAVLLLFGGLCMHVQVLTRFLGSSTPIMYWFPAHLLQDQEPLLRSLKTVPWKPLAEDSPPGQKVPRNPIMGLLYHWKTCSPVTRYILGYFLTYWLLGLLLHCNFLPWT

SEQ ID NO: 41715 - protein, 130 aa, Homo sapiens
MAAVLGALGATRRLLAALRGQSLGLAAMSSGTHRLTAEERNQAILDLKAAGWSELSERDAIYKEFSFHNFNQAFGFMSRVALQAEKMNHHPEWFNVYNKVQITLTSHDCGELTKKDVKLAKFIEKAAASV

SEQ ID NO: 41716 - protein, 2849 aa, Homo sapiens
MAEEAAQNISDDQERCLQAACCLSFGGELSVSTDKSWGLHLCSCSPPGGGLWVEVYANHVLLMSDGKCGCPWCALNGKAEDRESQSPSSSASRQKNIWKTTSEAALSVVNEKTQAVVNEKTQAPLDCDNSADRIPHKPFIIIARAWSSGGPRFHHRRLCATGTADSTFSALLQLQGTTSAAAPCSLKMEASCCVLRLLCCAEDVATGLLPGTVTMETPTKVARPTQTSSQRVPLWPISHFPTSPRSSHGLPPGIPRTPSFTASQSGSEILYPPTQHPPVAILARNSDNFMNPVLNCSLEVEARAPPNLGFRVHMASGEALCLMMDFGDSSGVEMRLHNMSEAMAVTAYHQYSKGIFFHLLHFQLDMSTYKEAETQNTTLNVYLCQSENSCLEDSDPSNLGYELISAFVTKGVYMLKAVIYNEFHGTEVELGPYYVEIGHEAVSAFMNSSSVHEDEVLVFADSQVNQKSTVVIHHFPSIPSYNVSFISQTQVGDSQAWHSMTVWYKMQSVSVYTNGTVFATDTDITFTAVTKETIPLEFEWYFGEDPPVRTTSRSIKKRLSIPQWYRVMVKASNRMSSVVSEPHVIRVQKKIVANRLTSPSSALVNASVAFECWINFGTDVAYLWDFGDGTVSLGSSSSSHVYSREGEFTVEVLAFNNVSASTLRQQLFIVCEPCQPPLVKNMGPGKVQIWRSQPVRLGVTFEAAVFCDISQGLSYTWNLMDSEGLPVSLPAAVDTHRQTLILPSHTLEYGNYTALAKVQIEGSVVYSNYCVGLEVRAQAPVSVISEGTHLFFSRTTSSPIVLRGTQSFDPDDPGATLRYHWECATAGSPAHPCFDSSTAHQLDAAAPTVSFEAQWLSDSYDQFLVMLRVSSGGRNSSETRVFLSPYPDSAFRFVHISWVSFKDTFVNWNDELSLQAMCEDCSEIPNLSYSWDLFLVNATEKNRIEVPFCRVVGLLGSLGLGAISESSQLNLLPTEPGTADPDATTTPFSREPSPVTLGQPATSAPRGTPTEPMTGVYWIPPAGDSAVLGEAPEEGSLDLEPGPQSKGSLMTGRSERSQPTHSPDPHLSDFEAYYSDIQEAIPSGGRQPAKDTSFPGSGPSLSAEESPGDGDNLVDPSLSAGRAEPVLMIDWPKALLGRAVFQGYSSSGITEQTVTIKPYSLSSGETYVLQVSVASKHGLLGKAQLYLTVNPAPRDMACQVQPHHGLEAHTVFSVFCMSGKPDFHYEFSYQIGNTSKHTLYHGRDTQYYFVLPAGEHLDNYKVMVSTEITDGKGSKVQPCTVVVTVLPRYHGNDCLGEDLYNSSLKNLSTLQLMGSYTEIRNYITVITRILSRLSKEDKTASCNQWSRIQDALISSVCRLAFVDQEEMIGSVLMLRDLVSFSNKLGFMSAVLILKYTRALLAQGQFSGPFVIDKGVRLELIGLISRVWEVSEQENSKEEVYRHEEGITVISDLLLGCLSLNHVSTGQMEFRTLLHYNLQSSVQSLGSVQVHLPGDLAGHSPAGAETQSPCYISQLILFKKNPYPGSQAPGQIGGVVGLNLYTCSSRRPINRQWLRKPVMVEFGEEDGLDNRRNKTTFVLLRDKVNLHQFTELSENPQESLQIEIEFSKPVTRAFPVMLLVRFSEKPTPSDFLVKQIYFWDESIVQIYIPAASQKDASVGYLSLLDADYDRKPPNRYLAKAVNYTVHFQWIRCLFWDKREWKSERFSPQPGTSPEKVNCSYHRLAAFALLRRKLKASFEVSDISKLQSHPENLLPSIFIMGSVILYGFLVAKSRQVDHHEKKKAGYIFLQEASLPGHQLYAVVIDTGFRAPARLTSKVYIVLCGDNGLSETKELSCPEKPLFERNSRHTFILSAPAQLGLLRKIRLWHDSRGPSPGWFISHVMVKELHTGQGWFFPAQCWLSAGRHDGRVERELTCLQGGLGFRKLFYCKFTEYLEDFHVWLSVYSRPSSSRYLHTPRLTVSFSLLCVYACLTALVAAGGQEQPHLDVSPTLGSFRVGLLCTLLASPGAQLLSLLFRLSKEAPGSARVEPHSPLRGGAQTEAPHGPNSWGRIPDAQEPRKQPASAILSGSGRAQRKAASDNGTACPAPKLQVHGADHSRTSLMGKSHCCPPHTQAPSSGLEGLMPQWSRALQPWWSSAVWAICGTASLACSLGTGFLAYRFGQEQCVQWLHLLSLSVVCCIFITQPLMVCLMALGFAWKRRADNHFFTESLCEATRDLDSELAERSWTRLPFSSSCSIPDCAGEVEKVLAARQQARHLRWAHPPSKAQLRGTRQRMRRESRTRAALRDISMDILMLLLLLCVIYGRFSQDEYSLNQAIRKEFTRNARNCLGGLRNIADWWDWSLTTLLDGLYPGGTPSARVPGAQPGALGGKCYLIGSSVIRQLKVFPRHLCKPPRPFSALIEDSIPTCSPEVGGPENPYLIDPENQNVTLNGPGGCGTREDCVLSLGRTRTEAHTALSRLRASMWIDRSTRAVSVHFTLYNPPTQLFTSVSLRVEILPTGSLVPSSLVESFSIFRSDSALQYHLMLPQLVFLALSLIHLCVQLYRMMDKGVLSYWRKPRNWLELSVVGVSLTYYAVSGHLVTLAGDVTNQFHRGLCRAFMDLTLMASWNQRARWLRGILLFLFTLKCVYLPGIQNTMASCSSMMRHSLPSIFVAGLVGALMLAALSHLHRFLLSMWVLPPGTFTDAFPGLLFHFPRRSQKDCLLGLSKSDQRAMACYFGILLIVSATLCFGMLRGFLMTLPQKRKSFQSKSFVRLKDVTAYMWEKVLTFLRLETPKLEEAEMVENHNYYLDEFANLLDELLMKINGLSDSLQLPLLEKTSNNTGEARTEESPLVDISSYQAAEPADIKDF

SEQ ID NO: 41717 - protein, 2573 aa, Homo sapiens
MAEEAAQNISDDQERCLQAACCLSFGGELSVSTDKSWGLHLCSCSPPGGGLWVEVYANHVLLMSDGKCGCPWCALNGKAEDRESQSPSSSASRQKNIWKTTSEAALSVVNEKTQAVVNEKTQAPLDCDNSADRIPHKPFIIIARAWSSGGPRFHHRRLCATGTADSTFSALLQLQGTTSAAAPCSLKMEASCCVLRLLCCAEDVATGLLPGTVTMETPTKVARPTQTSSQRVPLWPISHFPTSPRSSHGLPPGIPRTPSFTASQSGSEILYPPTQHPPVAILARNSDNFMNPVLNCSLEVEARAPPNLGFRVHMASGEALCLMMDFGDSSGVEMRLHNMSEAMAVTAYHQYSKGIFFHLLHFQLDMSTYKEAETQNTTLNVYLCQSENSCLEDSDPSNLGYELISAFVTKGVYMLKAVIYNEFHGTEVELGPYYVEIGHEAVSAFMNSSSVHEDEVLVFADSQVNQKSTVVIHHFPSIPSYNVSFISQTQVGDSQAWHSMTVWYKMQSVSVYTNGTVFATDTDITFTAVTKETIPLEFEWYFGEDPPVRTTSRSIKKRLSIPQWYRVMVKASNRMSSVVSEPHVIRVQKKIVANRLTSPSSALVNASVAFECWINFGTDVAYLWDFGDGTVSLGSSSSSHVYSREGEFTVEVLAFNNVSASTLRQQLFIVCEPCQPPLVKNMGPGKVQIWRSQPVRLGVTFEAAVFCDISQGLSYTWNLMDSEGLPVSLPAAVDTHRQTLILPSHTLEYGNYTALAKVQIEGSVVYSNYCVGLEVRAQAPVSVISEGTHLFFSRTTSSPIVLRGTQSFDPDDPGATLRYHWECATAGSPAHPCFDSSTAHQLDAAAPTVSFEAQWLSDSYDQFLVMLRVSSGGRNSSETRVFLSPYPDSAFRFVHISWVSFKDTFVNWNDELSLQAMCEDCSEIPNLSYSWDLFLVNATEKNRIEVPFCRVVGLLGSLGLGAISESSQLNLLPTEPGTADPDATTTPFSREPSPVTLGQPATSAPRGTPTEPMTGVYWIPPAGDSAVLGEAPEEGSLDLEPGPQSKGSLMTGRSERSQPTHSPDPHLSDFEAYYSDIQEAIPSGGRQPAKDTSFPGSGPSLSAEESPGDGDNLVDPSLSAGRAEPVLMIDWPKALLGRAVFQGYSSSGITEQTVTIKPYSLSSGETYVLQVSVASKHGLLGKAQLYLTVNPAPRDMACQVQPHHGLEAHTVFSVFCMSGKPDFHYEFSYQIGNTSKHTLYHGRDTQYYFVLPAGEHLDNYKVMVSTEITDGKGSKVQPCTVVVTVLPRYHGNDCLGEDLYNSSLKNLSTLQLMGSYTEIRNYITVITRILSRLSKEDKTASCNQWSRIQDALISSVCRLAFVDQEEMIGSVLMLRDLVSFSNKLGFMSAVLILKYTRALLAQGQFSGPFVIDKGVRLELIGLISRVWEVSEQENSKEEVYRHEEGITVISDLLLGCLSLNHVSTGQMEFRTLLHYNLQSSVQSLGSVQVHLPGDLAGHSPAGAETQSPCYISQLILFKKNPYPGSQAPGQIGGVVGLNLYTCSSRRPINRQWLRKPVMVEFGEEDGLDNRRNKTTFVLLRDKVNLHQFTELSENPQESLQIEIEFSKPVTRAFPVMLLVRFSEKPTPSDFLVKQIYFWDESIVQIYIPAASQKDASVGYLSLLDADYDRKPPNRYLAKAVNYTVHFQWIRCLFWDKREWKSERFSPQPGTSPEKVNCSYHRLAAFALLRRKLKASFEVSDISKLQSHPENLLPSIFIMGSVILYGFLVAKSRQVDHHEKKKAGYIFLQEASLPGHQLYAVVIDTGFRAPARLTSKVYIVLCGDNGLSETKELSCPEKPLFERNSRHTFILSAPAQLGLLRKIRLWHDSRGPSPGWFISHVMVKELHTGQGWFFPAQCWLSAGRHDGRVERELTCLQGGLGFRKLFYCKFTEYLEDFHVWLSVYSRPSSSRYLHTPRLTVSFSLLCVYACLTALVAAGGQEQPHLDVSPTLGSFRVGLLCTLLASPGAQLLSLLFRLSKEAPGSARVEPHSPLRGGAQTEAPHGPNSWGRIPDAQEPRKQPASAILSGSGRAQRKAASDNGTACPAPKLQVHGADHSRTSLMGKSHCCPPHTQAPSSGLEGLMPQWSRALQPWWSSAVWAICGTASLACSLGTGFLAYRFGQEQCVQWLHLLSLSVVCCIFITQPLMVCLMALGFAWKRRADNHFFTESLCEATRDLDSELAERSWTRLPFSSSCSIPDCAGEVEKVLAARQQARHLRWAHPPSKAQLRGTRQRMRRESRTRAALRDISMDILMLLLLLCVIYGRFSQDEYSLNQAIRKEFTRNARNCLGGLRNIADWWDWSLTTLLDGLYPGGTPSARVPGAQPGALGGKCYLIGSSVIRQLKVFPRHLCKPPRPFSALIEDSIPTCSPEVGGPENPYLIDPENQNVTLNGPGGCGTREDCVLSLGRTRTEAHTALSRLRASMWIDRSTRAVSVHFTLYNPPTQLFTSVSLRVEILPTGSLVPSSLVESFSIFRSDSALQYHLMLPQLVFLALSLIHLCVQLYRMMDKGVLSYWRKPRNWLEVASLVSFSFEK

SEQ ID NO: 41718 - protein, 2459 aa, Homo sapiens
MSAVGLVLLVLALRLRATTVKPEEGSFCSNSQVAFRDACYEFVPLGRTFRDAQSWCEGQGGHLVFIQDEGTQWFLQKHISQDREWWIGLTWNLARNGTTEGPGTWLDTSNVTYSNWHGGQAAAAPDTCGHIGRGPSSEWVTSDCAQTFAFMCEFRVGQSLACEGLNATVHCGLGQVIQVQDAVYGRQNPHFCTQDAGRPSDLEQGCSWANVKEEVAGQCQELQSCQVAADETYFGNLCPTQGSYLWVQYQCREALQLMVSSESFIFDNVTISLTWLLSPYIGNLSCIISTGDSHTFDPYNPPSVSSNVTHQFTSPGEFTVFAECTTSEWHVTAQRQVTVRDKMETLSVTACSGLSQSGAGPLCQAVFGDPLWIQVELDGGTGVTYTVLLGDITLAESTTQKGSLPYNLILDRETQKLMGPGRHRLEIQATGNTTTSTISRNITVHLVELLSGLQASWASDHLELGQDLLITISLAQGTPEELTFEVAGLNATFSHEQVSFGEPFGICRLAVPVEGTFLVTMLVRNAFSNLSLEIGNITITAPSGLQEPSGMNAEGKSKDKGDMEVYIQPGPYVDPFTTVTLGWPDNDKELRFQWSCGSCWALWSSCVERQLLRTDQRELVVPASCLPPPDSAVTLRLAVLRGQELENRAEQCLYVSAPWELRPRVSCERNCRPVNASKDILLRVTMGEDSPVAMFSWYLDNTPTEQAEPLLDACRLRGFWPRSLTLLQSNTSTLLLNSSFLQSRGEVIRIRATALTRHAYGEDTYVISTVPPREVPACTIAPEEGTVLTSFAIFCNASTALGPLEFCFCLESGSCLHCGPEPALPSVYLPLGEENNDFVLTVVISATNRAGDTQQTQAMAKVALGDTCVEDVAFQAAVSEKIPTALQGEGGPEQLLQLAKAVSSMLNQEHESQGSGQSLSIDVRQKVREHVLGSLSAVTTGLEDVQRVQELAEVLREVTCRSKELTPSAQWEASLALQHASEALLTVSAKARPEDQRRQAATRDLFQAVGSVLEASLSNRPEEPAEASSSQIATVLRLLRVMEHVQTTLLLGKLPGGLPAMLATPSISVYTNRIQPWSWQGSSLRPDAADSATFMLPAASSLSSLEGGQEPVDIKIMSFPKSPFPARSHFDVSGTVGGLRVTSPSGQLIPVKNLSENIEILLPRHSQRHSQPTVLNLTSPEALWVNVTSGEATLGIQLHWRPDIALTLSLGYGYHPNKSSYDAQTHLVPMVAPDELPTWILSPQDLRFGEGVYYLTVVPESDLEPAPGRDLTVGITTFLSHCVFWDEVQETWDDSGCQVGPRTSPYQTHCLCNHLTFFGSTFLVMSNAINIHQTAELFATFEDNPVVVTTVGCLCVVYVLVVIWARRKDAQDQAKVKVTVLEDNDPFAQYHYLVTVYTGHRRGAATSSKVTVTLYGLDGEREPHHLADPDTPVFERGAVDAFLLSTLFPLGELRSLRLWHDNSGDRPSWYVSRVLVYDLVMDRKWYFLCNSWLSINVGDCVLDKVFPVATEQDRKQFSHLFFMKTSAGFQDGHIWYSIFSRCARSSFTRVQRVSCCFSLLLCTMLTSIMFWGVPKDPAEQKMDLGKIEFTWQEVMIGLESSILMFPINLLIVQIFQNTRPRVAKEQNTGKWDRGSPNLTPSPQPMEDGLLTPEAVTKDVSRIVSSLFKALKVPSPALGWDSVNLMDINSLLALVEDVIYPQNTSGQVFWEEAKKREDPVTLTLGSSEMKEKSQCPKPKAARSGPWKDSAYRQCLYLQLEHVEQELRLVGPRGFSQPHSHAQALRQLQTLKGGLGVQPGTWAPAHASALQVSKPPQGLPWWCILVGWLLVAATSGVAAFFTMLYGLHYGRASSLRWLISMAVSFVESMFVTQPLKVLGFAAFFALVLKRVDDEEDTVAPLPGHLLGPDPYALFRARRNSSRDVYQPPLTAAIEKMKTTHLKEQKAFALIREILAYLGFLWMLLLVAYGQRDPSAYHLNRHLQHSFTRGFSGVLGFREFFKWANTTLVSNLYGHPPGFITDGNSKLVGSAQIRQVRVQESSCPLAQQPQAYLNGCRAPYSLDAEDMADYGEGWNATTLSEWQYQSQDQRQGYPIWGKLTVYRGGGYVVPLGTDRQSTSRILRYLFDNTWLDALTRAVFVESTVYNANVNLFCIVTLTLETSALGTFFTHAALQSLRLYPFTDGWHPFVVAAELIYFLFLLYYMVVQGKRMSKETWGYFCSKWNLLELAIILASWSALAVFVKRAVLAERDLQRCRNHREEGISFSETAAADAALGYIIAFLVLLSTVKLWHLLRLNPKMNMITAALRRAWGDISGFMIVILTMLLAYSIASNLIFGWKLRSYKTLFDAAETMVSLQLGIFNYEEVLDYSPVLGSFLIGSCIVFMTFVVLNLFISVILVAFSEEQKYYQLSEEGEIVDLLLMKILSFLGIKSKREEPGSSREQPGSLSQTRHSRPAQALPKD

SEQ ID NO: 41719 - protein, 1774 aa, Homo sapiens
MGEDSPVAMFSWYLDNTPTEQAEPLLDACRLRGFWPRSLTLLQSNTSTLLLNSSFLQSRGEVIRIRATALTRHAYGEDTYVISTVPPREVPACTIAPEEGTVLTSFAIFCNASTALGPLEFCFCLESGSCLHCGPEPALPSVYLPLGEENNDFVLTVVISATNRAGDTQQTQAMAKVALGDTCVEDVAFQAAVSEKIPTALQGEGGPEQLLQLAKAVSSMLNQEHESQGSGQSLSIDVRQKVREHVLGSLSAVTTGLEDVQRVQELAEVLREVTCRSKELTPSAQWEASLALQHASEALLTVSAKARPEDQRRQAATRDLFQAVGSVLEASLSNRPEEPAEASSSQIATVLRLLRVMEHVQTTLLLGKLPGGLPAMLATPSISVYTNRIQPWSWQGSSLRPDAADSATFMLPAASSLSSLEGGQEPVDIKIMSFPKSPFPARSHFDVSGTVGGLRVTSPSGQLIPVKNLSENIEILLPRHSQRHSQPTVLNLTSPEALWVNVTSGEATLGIQLHWRPDIALTLSLGYGYHPNKSSYDAQTHLVPMVAPDELPTWILSPQDLRFGEGVYYLTVVPESDLEPAPGRDLTVGITTFLSHCVFWDEVQETWDDSGCQVGPRTSPYQTHCLCNHLTFFGSTFLVMSNAINIHQTAELFATFEDNPVVVTTVGCLCVVYVLVVIWARRKDAQDQAKVKVTVLEDNDPFAQYHYLVTVYTGHRRGAATSSKVTVTLYGLDGEREPHHLADPDTPVFERGAVDAFLLSTLFPLGELRSLRLWHDNSGDRPSWYVSRVLVYDLVMDRKWYFLCNSWLSINVGDCVLDKVFPVATEQDRKQFSHLFFMKTSAGFQDGHIWYSIFSRCARSSFTRVQRVSCCFSLLLCTMLTSIMFWGVPKDPAEQKMDLGKIEFTWQEVMIGLESSILMFPINLLIVQIFQNTRPRVAKEQNTGKWDRGSPNLTPSPQPMEDGLLTPEAVTKDVSRIVSSLFKALKVPSPALGWDSVNLMDINSLLALVEDVIYPQNTSGQVFWEEAKKREDPVTLTLGSSEMKEKSQCPKPKAARSGPWKDSAYRQCLYLQLEHVEQELRLVGPRGFSQPHSHAQALRQLQTLKGGLGVQPGTWAPAHASALQVSKPPQGLPWWCILVGWLLVAATSGVAAFFTMLYGLHYGRASSLRWLISMAVSFVESMFVTQPLKVLGFAAFFALVLKRVDDEEDTVAPLPGHLLGPDPYALFRARRNSSRDVYQPPLTAAIEKMKTTHLKEQKAFALIREILAYLGFLWMLLLVAYGQRDPSAYHLNRHLQHSFTRGFSGVLGFREFFKWANTTLVSNLYGHPPGFITDGNSKLVGSAQIRQVRVQESSCPLAQQPQAYLNGCRAPYSLDAEDMADYGEGWNATTLSEWQYQSQDQRQGYPIWGKLTVYRGGGYVVPLGTDRQSTSRILRYLFDNTWLDALTRAVFVESTVYNANVNLFCIVTLTLETSALGTFFTHAALQSLRLYPFTDGWHPFVVAAELIYFLFLLYYMVVQGKRMSKETWGYFCSKWNLLELAIILASWSALAVFVKRAVLAERDLQRCRNHREEGISFSETAAADAALGYIIAFLVLLSTVKLWHLLRLNPKMNMITAALRRAWGDISGFMIVILTMLLAYSIASNLIFGWKLRSYKTLFDAAETMVSLQLGIFNYEEVLDYSPVLGSFLIGSCIVFMTFVVLNLFISVILVAFSEEQKYYQLSEEGEIVDLLLMKILSFLGIKSKREEPGSSREQPGSLSQTRHSRPAQALPKD

SEQ ID NO: 41720 - protein, 991 aa, Homo sapiens
MSAVGLVLLVLALRLRATTVKPEEGSFCSNSQVAFRDACYEFVPLGRTFRDAQSWCEGQGGHLVFIQDEGTQWFLQKHISQDREWWIGLTWNLARNGTTEGPGTWLDTSNVTYSNWHGGQAAAAPDTCGHIGRGPSSEWVTSDCAQTFAFMCEFRVGQSLACEGLNATVHCGLGQVIQVQDAVYGRQNPHFCTQDAGRPSDLEQGCSWANVKEEVAGQCQELQSCQVAADETYFGNLCPTQGSYLWVQYQCREALQLMVSSESFIFDNVTISLTWLLSPYIGNLSCIISTGDSHTFDPYNPPSVSSNVTHQFTSPGEFTVFAECTTSEWHVTAQRQVTVRDKMETLSVTACSGLSQSGAGPLCQAVFGDPLWIQVELDGGTGVTYTVLLGDITLAESTTQKGSLPYNLILDRETQKLMGPGRHRLEIQATGNTTTSTISRNITVHLVELLSGLQASWASDHLELGQDLLITISLAQGTPEELTFEVAGLNATFSHEQVSFGEPFGICRLAVPVEGTFLVTMLVRNAFSNLSLEIGNITITAPSGLQEPSGMNAEGKSKDKGDMEVYIQPGPYVDPFTTVTLGWPDNDKELRFQWSCGSCWALWSSCVERQLLRTDQRELVVPASCLPPPDSAVTLRLAVLRGQELENRAEQCLYVSAPWELRPRVSCERNCRPVNASKDILLRVTMGEDSPVAMFSWYLDNTPTEQAEPLLDACRLRGFWPRSLTLLQSNTSTLLLNSSFLQSRGEVIRIRATALTRHAYGEDTYVISTVPPREVPACTIAPEEGTVLTSFAIFCNASTALGPLEFCFCLESGSCLHCGPEPALPSVYLPLGEENNDFVLTVVISATNRAGDTQQTQAMAKVALGDTCVEDVAFQAAVSEKIPTALQGEGGPEQLLQLAKAVSSMLNQEHESQGSGQSLSIDVRQKVREHVLGSLSAVTTGLEDVQRVQELAEVLREVTCRSKELTPSAQGSCMGDSWEGAPPAAHVSHAR

SEQ ID NO: 41721 - protein, 306 aa, Homo sapiens
MGEDSPVAMFSWYLDNTPTEQAEPLLDACRLRGFWPRSLTLLQSNTSTLLLNSSFLQSRGEVIRIRATALTRHAYGEDTYVISTVPPREVPACTIAPEEGTVLTSFAIFCNASTALGPLEFCFCLESGSCLHCGPEPALPSVYLPLGEENNDFVLTVVISATNRAGDTQQTQAMAKVALGDTCVEDVAFQAAVSEKIPTALQGEGGPEQLLQLAKAVSSMLNQEHESQGSGQSLSIDVRQKVREHVLGSLSAVTTGLEDVQRVQELAEVLREVTCRSKELTPSAQGSCMGDSWEGAPPAAHVSHAR

SEQ ID NO: 41722 - protein, 240 aa, Homo sapiens
MGEDSPVAMFSWYLDNTPTEQAEPLLDACRLRGFWPRSLTLLQSNTSTLLLNSSFLQSRGEVIRIRATGSCLHCGPEPALPSVYLPLGEENNDFVLTVVISATNRAGDTQQTQAMAKVALGDTCVEDVAFQAAVSEKIPTALQGEGGPEQLLQLAKAVSSMLNQEHESQGSGQSLSIDVRQKVPVGSWGAPFIPFLWGPRVCVRPFGLWIKVHGSGEKPVVSPKRLTPPPSLVFWVSDIK

SEQ ID NO: 41723 - protein, 628 aa, Homo sapiens
MESLVFARRSGPTPSAAELARPLAEGLIKSPKPLMKKQAVKRHHHKHNLRHRYEFLETLGKGTYGKVKKARESSGRLVAIKSIRKDKIKDEQDLMHIRREIEIMSSLNHPHIIAIHEVFENSSKIVIVMEYASRGDLYDYISERQQLSEREARHFFRQIVSAVHYCHQNRVVHRDLKLENILLDANGNIKIADFGLSNLYHQGKFLQTFCGSPLYASPEIVNGKPYTGPEVDSWSLGVLLYILVHGTMPFDGHDHKILVKQISNGAYREPPKPSDACGLIRWLLMVNPTRRATLEDVASHWWVNWGYATRVGEQEAPHEGGHPGSDSARASMADWLRRSSRPLLENGAKVCSFFKQHAPGGGSTTPGLERQHSLKKSRKENDMAQSLHSDTADDTAHRPGKSNLKLPKGILKKKVSASAEGVQEDPPELSPIPASPGQAAPLLPKKGILKKPRQRESGYYSSPEPSESGELLDAGDVFVSGDPKEQKPPQASGLLLHRKGILKLNGKFSQTALELAAPTTFGSLDELAPPRPLARASRPSGAVSEDSILSSESFDQLDLPERLPEPPLRGCVSVDNLTGLEEPPSEGPGSCLRRWRQDPLGDSCFSLTDCQEVTATYRQALRVCSKLT

SEQ ID NO: 41724 - protein, 129 aa, Homo sapiens
MADSGDAGSSGPWWKSLTNSRKKSKEAAVGVPPPAQPAPGEPTPPAPPSPDWTSSSRENQHPNLLGGAGEPPKPDKLYGDKSGSSRRNLKISRSGRFKEKRKVRATLLPEAGRSPEEAGFPGDPHEDKQ

SEQ ID NO: 41725 - protein, 626 aa, Homo sapiens; identical to SEQ ID NO: 187

SEQ ID NO: 41726 - protein, 443 aa, Homo sapiens; identical to SEQ ID NO: 188

SEQ ID NO: 41727 - protein, 637 aa, Homo sapiens; identical to SEQ ID NO: 189

SEQ ID NO: 41728 - protein, 480 aa, Homo sapiens
MERDEPPPSGGGGGGGSAGFLEPPAALPPPPRNGFCQDELAELDPGTISVSDDRAEQRTCLICGDRATGLHYGIISCEGCKGFFKRSICNKRVYRCSRDKNCVMSRKQRNRCQYCRLLKCLQMGMNRKAIREDGMPGGRNKSIGPVQISEEEIERIMSGQEFEEEANHWSNHGDSDHSSPGNRASESNQPSPGSTLSSSRSVELNGFMAFREQYMGMSVPPHYQYIPHLFSYSGHSPLLPQQARSLDPQSYSLIHQLLSAEDLEPLGTPMLIEDGYAVTQAELFALLCRLADELLFRQIAWIKKLPFFCELSIKDYTCLLSSTWQELILLSSLTVYSKQIFGELADVTAKYSPSDEELHRFSDEGMEVIERLIYLYHKFHQLKVSNEEYACMKAINFLNQDIRGLTSASQLEQLNKRYWYICQDFTEYKYTHQPNRFPDLMMCLPEIRYIAGKMVNVPLEQLPLLFKVVLHSCKTSVGKE

SEQ ID NO: 41729 - protein, 476 aa, Homo sapiens
MERDEPPPSGGGGGGGSAGFLEPPAALPPPPRNGFCQDELAELDPGTNDRAEQRTCLICGDRATGLHYGIISCEGCKGFFKRSICNKRVYRCSRDKNCVMSRKQRNRCQYCRLLKCLQMGMNRKAIREDGMPGGRNKSIGPVQISEEEIERIMSGQEFEEEANHWSNHGDSDHSSPGNRASESNQPSPGSTLSSSRSVELNGFMAFREQYMGMSVPPHYQYIPHLFSYSGHSPLLPQQARSLDPQSYSLIHQLLSAEDLEPLGTPMLIEDGYAVTQAELFALLCRLADELLFRQIAWIKKLPFFCELSIKDYTCLLSSTWQELILLSSLTVYSKQIFGELADVTAKYSPSDEELHRFSDEGMEVIERLIYLYHKFHQLKVSNEEYACMKAINFLNQDIRGLTSASQLEQLNKRYWYICQDFTEYKYTHQPNRFPDLMMCLPEIRYIAGKMVNVPLEQLPLLFKVVLHSCKTSVGKE

SEQ ID NO: 41730 - protein, 454 aa, Homo sapiens
MERDEPPPPRNGFCQDELAELDPGTNDRAEQRTCLICGDRATGLHYGIISCEGCKGFFKRSICNKRVYRCSRDKNCVMSRKQRNRCQYCRLLKCLQMGMNRKAIREDGMPGGRNKSIGPVQISEEEIERIMSGQEFEEEANHWSNHGDSDHSSPGNRASESNQPSPGSTLSSSRSVELNGFMAFREQYMGMSVPPHYQYIPHLFSYSGHSPLLPQQARSLDPQSYSLIHQLLSAEDLEPLGTPMLIEDGYAVTQAELFALLCRLADELLFRQIAWIKKLPFFCELSIKDYTCLLSSTWQELILLSSLTVYSKQIFGELADVTAKYSPSDEELHRFSDEGMEVIERLIYLYHKFHQLKVSNEEYACMKAINFLNQDIRGLTSASQLEQLNKRYWYICQDFTEYKYTHQPNRFPDLMMCLPEIRYIAGKMVNVPLEQLPLLFKVVLHSCKTSVGKE

SEQ ID NO: 41731 - protein, 479 aa, Homo sapiens
MERDEPPPSGGGGGGGSAGFLEPPAALPPPPRNGFCQDELAELDPGTISVSDDRAEQRTCLICGDRATGLHYGIISCEGCKGFFKRSICNKRVYRCSRDKNCVMSRKQRNRCQYCRLLKCLQMGMNRKAIREDGMPGGRNKSIGPVQISEEEIERIMSGQEFEEEANHWSNHGDSDHSSPGNRASESNQPSPGSTLSSRSVELNGFMAFREQYMGMSVPPHYQYIPHLFSYSGHSPLLPQQARSLDPQSYSLIHQLLSAEDLEPLGTPMLIEDGYAVTQAELFALLCRLADELLFRQIAWIKKLPFFCELSIKDYTCLLSSTWQELILLSSLTVYSKQIFGELADVTAKYSPSDEELHRFSDEGMEVIERLIYLYHKFHQLKVSNEEYACMKAINFLNQDIRGLTSASQLEQLNKRYWYICQDFTEYKYTHQPNRFPDLMMCLPEIRYIAGKMVNVPLEQLPLLFKVVLHSCKTSVGKE

SEQ ID NO: 41732 - protein, 475 aa, Homo sapiens
MERDEPPPSGGGGGGGSAGFLEPPAALPPPPRNGFCQDELAELDPGTNDRAEQRTCLICGDRATGLHYGIISCEGCKGFFKRSICNKRVYRCSRDKNCVMSRKQRNRCQYCRLLKCLQMGMNRKAIREDGMPGGRNKSIGPVQISEEEIERIMSGQEFEEEANHWSNHGDSDHSSPGNRASESNQPSPGSTLSSRSVELNGFMAFREQYMGMSVPPHYQYIPHLFSYSGHSPLLPQQARSLDPQSYSLIHQLLSAEDLEPLGTPMLIEDGYAVTQAELFALLCRLADELLFRQIAWIKKLPFFCELSIKDYTCLLSSTWQELILLSSLTVYSKQIFGELADVTAKYSPSDEELHRFSDEGMEVIERLIYLYHKFHQLKVSNEEYACMKAINFLNQDIRGLTSASQLEQLNKRYWYICQDFTEYKYTHQPNRFPDLMMCLPEIRYIAGKMVNVPLEQLPLLFKVVLHSCKTSVGKE

SEQ ID NO: 41733 - protein, 266 aa, Homo sapiens
MQGSTRRMGVMTDVHRRFLQLLMTHGVLEEWDVKRLQTHCYKVHDRNATVDKLEDFINNINSVLESLYIEIKRGVTEDDGRPIYALVNLATTSISKMATDFAENELDLFRKALELIIDSETGFASSTNILNLVDQLKGKKMRKKEAEQVLQKFVQNKWLIEKEGEFTLHGRAILEMEQYIRETYPDAVKICNICHSLLIQGQSCETCGIRMHLPCVAKYFQSNAEPRCPHCNDYWPHEIPKVFDPEKERESGVLKSNKKSLRSRQH

SEQ ID NO: 41734 - protein, 295 aa, Homo sapiens
MPFPPMPPPPAPAPGAQAARQLPRRPCAAGDKKKRPPQRPEGLLSSSWPSATLKRPPARRGPGLDRTQPPAPPGVSPQALPSRARAPATCAPPRPAGSGHSPARTTYAATSAGTGTTAAGTSSGAGPCPDSAARFCLNLTPEAVLVIQKRHLEKQLLARPRRPFPSPSAEPRRLLAPCLPARAAGPRRGGPASDPDAPPTAGQGRRAPPPGAQLLHGGLQVPQLSPRPGALRPMLKVSLLNERHRYDDVEYEEEPEAVDEGLVRKCTEWLRGVESAAAARGRAGALDSRRHLSTL

SEQ ID NO: 41735 - protein, 253 aa, Homo sapiens
MAAARATTPADGEEPAPEAEALAAARERSSRFLSGLELVKQGAEARVFRGRFQGRAAVIKHRFPKGYRHPALEARLGRRRTVQEARALLRCRRAGISAPVVFFVDYASNCLYMEEIEGSVTVRDYIQSTMETEKTPQGLSNLAKTIGQVLARMHDEDLIHGDLTTSNMLLKPPLEQLNIVLIDFGLSFISALPEDKGVDLYVLEKAFLSTHPNTETVFEAFLKSYSTSSKKARPVLKKLDEVRLRGRKRSMVG

SEQ ID NO: 41736 - protein, 412 aa, Homo sapiens
MLPQNKDQVLPQTSVLPGRPTWGFSQLVDSSPHNLQPLSPHQGLPPSQPPFSSTQSRRPSSPPPASPSPGFQFGSCDSNSDFAPHPYSPSLPSSPTFFHQNYLSLPRPRASSPSNHWLYPSPPLTPSFSPSQPQNSSLPHSPCQSPSHPEELHSSTLTSPGPSPPSHRLHSNRQTWRWHQYRDTGSGSPGVVERCVPSEKDPAQFRDPGALAQALVVQLGHRRIAHDLRLLLLQHLWLGRTGQAPVVEYPICLVCLRPRSPSCPLPRYRTGPRLLAFPQLLPCVQGQESGPLRIGIGFGLRLPQGQARALHLLPEKRPKEAGPQGKATQACGHQLPASQPPAAQARADPVPGTPSQTRSFRSAGLQSPNSPRCFSGPPPRAPKQVTTSLKPRPCPGPKRPVSLELILQKSSV

SEQ ID NO: 41737 - protein, 368 aa, Homo sapiens
MTRGFAPILPVEFHKMGSFRRPRPRFMSSPVLSDLPRFQAARQALQLSSSSAWNSVQTAVINVFKGGGLQSNELYALNENIRRLLKSELGSFITDYFQNQLLAKGLFFVEEKIKLCEGENRIEVLAEVWDHFFTETLPTLQAIFYPVQGQELTIRQISLLGFRDLVLLKVKLGDLLLLAQSKLPSSIVQMLLILQSVHEPTGPSESYLQLEELVKQVVSPFLGISGDRSFSGPTYTLARRHSRVRPKVTVLNYASPITAVSRPLNEMVLTPLTEQEGEAYLEKCGSVRRHTVANAHSDIQLLAMATMMHSGLGEEASSENKCLLLPPSFPPPHRQCSSEPNITDNPDGLEEGARGSQEGSELNCASLS

SEQ ID NO: 41738 - protein, 139 aa, Homo sapiens
MPVFSRAPARRHSRVRPKVTVLNYASPITAVSRPLNEMVLTPLTEQEGEAYLEKCGSVRRHTVANAHSDIQLLAMATMMHSGLGEEASSENKCLLLPPSFPPPHRQCSSEPNITDNPDGLEEGARGSQEGSELNCASLS

SEQ ID NO: 41739 - protein, 240 aa, Homo sapiens
MRLLKSELGSFITDYFQNQLLAKGLFFVEEKIKLCEGENRIEVLAEVWDHFFTETLPTLQAIFYPVQSVHEPTGPSESYLQLEELVKQVVSPFLGISGDRSFSGPTYTLARRHSRVRPKVTVLNYASPITAVSRPLNEMVLTPLTEQEGEAYLEKCGSVRRHTVANAHSDIQLLAMATMMHSGLGEEASSENKCLLLPPSFPPPHRQCSSEPNITDNPDGLEEGARGSQEGSELNCASLS

SEQ ID NO: 41740 - protein, 205 aa, Homo sapiens
MTRGFAPILPVEFHKMGSFRRPRPRFMSSPVLSDLPRFQAARQALQLSSSSAWNSVQTAVINVFKGGGLQSNELYALNENIRRLLKSELGSFITDYFQNQLLAKGLFFVEEKIKLCEGENRIEVLAEVWDHFFTETLPTLQAIFYPVQGQELTIRQISLLGFRDLVLLKVKLGDLLLLAQSKLPSSIVQMLLILQPGGTPGSGPR

SEQ ID NO: 41741 - protein, 274 aa, Homo sapiens
MVGRRALIVLAHSERTSFNYAMKEAAAAALKKKGWEVVESDLYAMNFNPIISRKDITGKLKDPANFQYPAESVLAYKEGHLSPDIVAEQKKLEAADLVIFQFPLQWFGVPAILKGWFERVFIGEFAYTYAAMYDKGPFRSKKAVLSITTGGSGSMYSLQGIHGDMNVILWPIQSGILHFCGFQVLEPQLTYSIGHTPADARIQILEGWKKRLENIWDETPLYFAPSSLFDLNFQAGFLMKKEVQDEEKNKKFGLSVGHHLGKSIPTDNQIKARK

SEQ ID NO: 41742 - protein, 240 aa, Homo sapiens
MVGRRALIVLAHSERTSFNYAMKEAAAAALKKKGWEVVESDLYAMNFNPIISRKDITGKLKDPANFQYPAESVLAYKEGHLSPDIVAEQKKLEAADLVIFQFPLQWFGVPAILKGWFERVFIGEFAYTYAAMYDKGPFRSGILHFCGFQVLEPQLTYSIGHTPADARIQILEGWKKRLENIWDETPLYFAPSSLFDLNFQAGFLMKKEVQDEEKNKKFGLSVGHHLGKSIPTDNQIKARK

SEQ ID NO: 41743 - protein, 236 aa, Homo sapiens
MVGRRALIVLAHSERTSFNYAMKEAAAAALKKKGWEVVESDLYAMNFNPIISRKDITGKLKDPANFQYPAESVLAYKEGHLSPDIVAEQKKLEAADLVIFQSKKAVLSITTGGSGSMYSLQGIHGDMNVILWPIQSGILHFCGFQVLEPQLTYSIGHTPADARIQILEGWKKRLENIWDETPLYFAPSSLFDLNFQAGFLMKKEVQDEEKNKKFGLSVGHHLGKSIPTDNQIKARK

SEQ ID NO: 41744 - protein, 1330 aa, Homo sapiens
MGTASSLVSPAGGEVIEDTYGAGGGEACEIPVEVKPKARLLRNSFRRGAGAAAGAGPGSLPRGVGAGGLLGASFKSTGSSVPELEYAAAEYERLRKEYEIFRVSKNQELLSMGRREAKLDTENKRLRAELQALQKTYQKILREKESALEAKYQAMERAATFEHDRDKVKRQFKIFRETKENEIQDLLRAKRELESKLQRLQAQGIQVFDPGESDSDDNCTDVTAAGTQCEYWTGGALGSEPSIGSMIQLQQSFRGPEFAHSSIDVEGPFANVNRDDWDIAVASLLQVTPLFSHSLWSNTVRCYLIYTDETQPEMDLFLKDYSPKLKRMCETMGYFFHAVYFPIDVENQYLTVRKWEIEKSSLVILFIHLTLPSLLLEDCEEAFLKNPEGKPRLIFHRLEDGKVSSDSVQQLIDQVSNLNKTSKAKIIDHSGDPAEGVYKTYICVEKIIKQDILGFENTDLETKDLGSEDSIPEEDDFGDVLWDIHDEQEQMETFQQASNSAHELGFEKYYQRLNDLVAAPAPIPPLLVSGGPGSGKSLLLSKWIQLQQKNSPNTLILSHFVGRPMSTSSESSLIIKRLTLKLMQHSWSVSALTLDPAKLLEEFPRWLEKLSARHQGSIIIVIDSIDQVQQVEKHMKWLIDPLPVNVRVIVSVNVETCPPAWRLWPTLHLDPLSPKDAKSIIIAECHSVDIKLSKEQEKKLERHCRSATTCNALYVTLFGKMIARAGRAGNLDKILHQCFQCQDTLSLYRLVLHSIRESMANDVDKELMKQILCLVNVSHNGVSESELMELYPEMSWTFLTSLIHSLYKMCLLTYGCGLLRFQHLQAWETVRLEYLEGPTVTSSYRQKLINYFTLQLSQDRVTWRSADELPWLFQQQGSKQKLHDCLLNLFVSQNLYKRGHFAELLSYWQFVGKDKSAMATEYFDSLKQYEKNCEGEDNMSCLADLYETLGRFLKDLGLLSQAIVPLQRSLEIRETALDPDHPRVAQSLHQLASVYVQWKKFGNAEQLYKQALEISENAYGADHPYTARELEALATLYQKQNKYEQAEHFRKKSFKIHQKAIKKKGNLYGFALLRRRALQLEELTLGKDTPDNARTLNELGVLYYLQNNLETADQFLKRSLEMRERVLGPDHPDCAQSLNNLAALCNEKKQYDKAEELYERALDIRRRALAPDHPSLAYTVKHLAILYKKMGKLDKAVPLYELAVEIRQKSFGPKHPSVATALVNLAVLYSQMKKHVEALPLYERALKIYEDSLGRMHPRVGETLKNLAVLSYEGGDFEKAAELYKRAMEIKEAETSLLGGKAPSRHSSSGDTFSLKTAHSPNVFLQQGQR

SEQ ID NO: 41745 - protein, 637 aa, Homo sapiens
MIARAGRAGNLDKILHQCFQCQDTLSLYRLVLHSIRESMANDVDKELMKQILCLVNVSHNGVSESELMELYPEMSWTFLTSLIHSLYKMCLLTYGCGLLRFQHLQAWETVRLEYLEGPTVTSSYRQKLINYFTLQLSQDRVTWRSADELPWLFQQQGSKQKLHDCLLNLFVSQNLYKRGHFAELLSYWQFVGKDKSAMATEYFDSLKQYEKNCEGEDNMSCLADLYETLGRFLKDLGLLSQAIVPLQRSLEIRETALDPDHPRVAQSLHQLASVYVQWKKFGNAEQLYKQALEISENAYGADHPYTARELEALATLYQKQNKYEQAEHFRKKSFKIHQKAIKKKGNLYGFALLRRRALQLEELTLGKDTPDNARTLNELGVLYYLQNNLETADQFLKRSLEMRERVLGPDHPDCAQSLNNLAALCNEKKQYDKAEELYERALDIRRRALAPDHPSLAYTVKHLAILYKKMGKLDKAVPLYELAVEIRQKSFGPKHPSVATALVNLAVLYSQMKKHVEALPLYERALKIYEDSLGRMHPRVGETLKNLAVLSYEGGDFEKAAELYKRAMEIKEAETSLLGGKAPSRHSSSGDTFSLKTAHSPNVFLQQGQRKVQSNLLSPEGLSNICAQEKTTRFTSS

SEQ ID NO: 41746 - protein, 636 aa, Homo sapiens
MGTASSLVSPAGGEVIEDTYGAGGGEACEIPVEVKPKARLLRNSFRRGAGAAAGAGPGSLPRGVGAGGLLGASFKSTGSSVPELEYAAAEYERLRKEYEIFRVSKNQELLSMGRREAKLDTENKRLRAELQALQKTYQKILREKESALEAKYQAMERAATFEHDRDKVKRQFKIFRETKENEIQDLLRAKRELESKLQRLQAQGIQVFDPGESDSDDNCTDVTAAGTQCEYWTGGALGSEPSIGSMIQLQQSFRGPEFAHSSIDVEGPFANVNRDDWDIAVASLLQVTPLFSHSLWSNTVRCYLIYTDETQPEMDLFLKDYSPKLKRMCETMGYFFHAVYFPIDVENQYLTVRKWEIEKSSLVILFIHLTLPSLLLEDCEEAFLKNPEGKPRLIFHRLEDGKVSSDSVQQLIDQVSNLNKTSKAKIIDHSGDPAEGVYKTYICVEKIIKQDILGFENTDLETKDLGSEDSIPEEDDFGDVLWDIHDEQEQMETFQQASNSAHELGFEKYYQRLNDLVAAPAPIPPLLVSGGPGSGKSLLLSKWIQLQQKNSPNTLILSHFVGRPMSTSSESSLIIKRLTLKLMQHSWSVSALTLDPAKLLEEFPRWLEKLSARHQGSIIIVIDSIDQVQVVAYTSS

SEQ ID NO: 41747 - protein, 181 aa, Homo sapiens
MGTASSLVSPAGGEVIEDTYGAGGGEACEIPVEVKPKARLLRNSFRRGAGAAAGAGPGSLPRGVGAGGLLGASFKSTGSSVPELEYAAAEYERLRKEYEIFRVSKNQELLSMGRREAKLDTENKRLRAELQVTPGWAATPGDPWEARPSCSLSKPSGFESSAETAHFNLRGHILFESEMIP

SEQ ID NO: 41748 - protein, 239 aa, Homo sapiens
MGTASSLVSPAGGEVIEDTYGAGGGEACEIPVEVKPKARLLRNSFRRGAGAAAGAGPGSLPRGVGAGGLLGASFKSTGSSVPELEYAAAEYERLRKEYEIFRVSKNQELLSMGRREAKLDTENKRLRAELQALQKTYQKILREKESALEAKYQAMERAATFEHDRDKVKRQFKIFRETKENEIQDLLRAKRELESKLQRLQAQGIQVFDPGESDSDDNCTDVTVSLESDQHPGIFIANF

SEQ ID NO: 41749 - protein, 704 aa, Homo sapiens
MGTASSLVSPAGGEVIEDTYGAGGGEACEIPVEVKPKARLLRNSFRRGAGAAAGAGPGSLPRGVGAGGLLGASFKSTGSSVPELEYAAAEYERLRKEYEIFRVSKNQELLSMGRREAKLDTENKRLRAELQALQKTYQKILREKESALEAKYQAMERAATFEHDRDKVKRQFKIFRETKENEIQDLLRAKRELESKLQRLQAQGIQVFDPGESDSDDNCTDVTAAGTQCEYWTGGALGSEPSIGSMIQLQQSFRGPEFAHSSIDVEGPFANVNRDDWDIAVASLLQVTPLFSHSLWSNTVRCYLIYTDETQPEMDLFLKDYSPKLKRMCETMGYFFHAVYFPIDVENQYLTVRKWEIEKSSLVILFIHLTLPSLLLEDCEEAFLKNPEGKPRLIFHRLEDGKVSSDSVQQLIDQVSNLNKTSKAKIIDHSGDPAEGVYKTYICVEKIIKQDILGFENTDLETKDLGSEDSIPEEDDFGDVLWDIHDEQEQMETFQQASNSAHELGFEKYYQRLNDLVAAPAPIPPLLVSGGPGSGKSLLLSKWIQLQQKNSPNTLILSHFVGRPMSTSSESSLIIKRLTLKLMQHSWSVSALTLDPAKLLEEFPRWLEKLSARHQGSIIIVIDSIDQVQQVEKHMKWLIDPLPVNVRVIVSVNVETCPPAWRLWPTLHLDPLSPKDAKSIIIAECHSVDIKLSKEQCWESRQFR

SEQ ID NO: 41750 - protein, 150 aa, Homo sapiens
MGTASSLVSPAGGEVIEDTYGAGGGEACEIPVEVKPKARLLRNSFRRGAGAAAGAGPGSLPRGVGAGGLLGASFKSTGSSVPELEYAAAEYERLRKEYEIFRVSKNQELLSMGRREAKLDTENKRLRAELQGLAAVARSRLTATWNSWAQ

SEQ ID NO: 41751 - protein, 1050 aa, Homo sapiens
MVKLSIVLTPQFLSHDQGQLTKELQQHVKSVTCPCEYLRKVINTLADHHHRGTDFGGSPWLHVIIAFPTSYKVVITLWIVYLWVSLLKTIFWSRNGHDGSTDVQQRAWRSNRRRQEGLRSICMHTKKRVSSFRGNKIGLKDVITLRRHVETKVRAKIRKRKVTTKINHHDKINGKRKTARKQKMFQRAQELRRRAEDYHKCKIPPSARKALCNWVRMAAAEHRHSSGLPYWPYLTAETLKNRMGHQPPPPTQQHSITDNSLSLKTPPECLLTPLPPSADDNLKTPPECVLTPLPPSADDNLKTPPECVLTPLPPSADDNLKTPPECLLTPLPPSADDNLKTPPECLLTPLPPSALPSAPPSADDNLKTRAECLLHPLPPSADDNLKTPSERQLTPLPPSAPPSADDNIKTPAERLRGPLPPSADDNLKTPSERQLTPLPPSAPPSADDNIKTPAERLRGPLPPSADDNLKTPSERQLTPLPPSAPPSADDNIKTPAERLRGPLPPSADDNLKTPSERQLTALPPSADDNIKTPAERLRGPLPPSADDNLKTPSERQLTPLPPSAPPSADDNIKTPAFHPQRMIISRHLPSVSSLPFHPQLHPQQMIISRHLPSVCGGRFHPQQMIISRHLPSVSSLPFHPQLHPQQMIISRHLPSVCGGRFHPQRMIISRHLPSVSSLPFHPQLHPQQMIISRHLPSVCGGRFHPQQMIISRHLPSVSSLPFHPQLHPQQMIISRHLPSVCGGRFHPQRMIISRHLPSVSSLPFHPQLHPQQMIISRHLPSVCGERLRGPLPPSADDNLKTPSERQLTPLPPSAPPSADDNIKTPAERLRGPLPPSADDNLKTPSERQLTPLPPSAPPSADDNIKTPAERLRGPLPPSADDNLKTPSERQLTPLPPSAPPSADDNIKTPAERLRGPLPPSADDNLKTPPLATQEAEAEKPRKPKRQRAAEMEPPPEPKRRRVGDVEPSRKPKRRRAADVEPSSPEPKRRRVGDVEPSRKPKRRRAADVEPSSPEPKRRRVGDVEPSRKPKRRRAADVEPSLPEPKRRRLS

SEQ ID NO: 41752 - protein, 678 aa, Homo sapiens
MVKLSIVLTPQFLSHDQGQLTKELQQHVKSVTCPCEYLRKVINTLADHHHRGTDFGGSPWLHVIIAFPTSYKVVITLWIVYLWVSLLKTIFWSRNGHDGSTDVQQRAWRSNRRRQEGLRSICMHTKKRVSSFRGNKIGLKDVITLRRHVETKVRAKIRKRKVTTKINHHDKINGKRKTARKQKMFQRAQELRRRAEDYHKCKIPPSARKALCNWVRMAAAEHRHSSGLPYWPYLTAETLKNRMGHQPPPPTQQHSITDNSLSLKTPPECLLTPLPPSADDNLKTPPECVLTPLPPSADDNLKTPPECVLTPLPPSADDNLKTPPECLLTPLPPSADDNLKTPPECLLTPLPPSALPSAPPSADDNLKTRAECLLHPLPPSADDNLKTPSERQLTPLPPSAPPSADDNIKTPAERLRGPLPPSADDNLKTPSERQLTPLPPSAPPSADDNIKTPAERLRGPLPPSADDNLKTPSERQLTPLPPSAPPSADDNIKTPAERLRGPLPPSADDNLKTPSERQLTPLPPSAPPSADDNIKTPAERLRGPLPPSADDNLKTPPLATQEAEAEKPRKPKRQRAAEMEPPPEPKRRRVGDVEPSRKPKRRRAADVEPSSPEPKRRRVGDVEPSRKPKRRRAADVEPSSPEPKRRRVGDVEPSRKPKRRRAADVEPSLPEPKRRRLS

SEQ ID NO: 41753 - protein, 739 aa, Homo sapiens
MFCCLGYEWLSGGCKTWHSAWVINTLADHHHRGTDFGGSPWLHVIIAFPTSYKVVITLWIVYLWVSLLKTIFWSRNGHDGSTDVQQRAWRSNRRRQEGLRSICMHTKKRVSSFRGNKIGLKDVITLRRHVETKVRAKIRKRKVTTKINHHDKINGKRKTARKQKMFQRAQELRRRAEDYHKCKIPPSARKALCNWVRMAAAEHRHSSGLPYWPYLTAETLKNRMGHQPPPPTQQHSITDNSLSLKTPPECLLTPLPPSADDNLKTPPECVLTPLPPSADDNLKTPPECVLTPLPPSADDNLKTPPECLLTPLPPSADDNLKTPPECLLTPLPPSALPSAPPSADDNLKTRAECLLHPLPPSADDNLKTPSERQLTPLPPSAPPSADDNIKTPAERLRGPLPPSADDNLKTPSERQLTPLPPSAPPSADDNIKTPAERLRGPLPPSADDNLKTPSERQLTPLPPSAPPSADDNIKTPAERLRGPLPPSADDNLKTPSERQLTALPPSADDNIKTPAERLRGPLPPSADDNLKTPSERQLTPLPPSAPPSADDNIKTPAERLRGPLPPSADDNLKTPSERQLTPLPPSAPPSADDNIKTPAERLRGPLPPSADDNLKTPPLATQEAEAEKPRKPKRQRAAEMEPPPEPKRRRVGDVEPSRKPKRRRAADVEPSSPEPKRRRVGDVEPSRKPKRRRAADVEPSSPEPKRRRVGDVEPSRKPKRRRAADVEPSLPEPKRRRLS

SEQ ID NO: 41754 - protein, 420 aa, Homo sapiens
MAAAEHRHSSGLPYWPYLTAETLKNRMGHQPPPPTQQHSITDNSLSLKTPPECLLTPLPPSADDNLKTPPECVLTPLPPSADDNLKTPPECVLTPLPPSADDNLKTPPECLLTPLPPSADDNLKTPPECLLTPLPPSALPSAPPSADDNLKTRAECLLHPLPPSADDNLKTPSERQLTPLPPSAPPSADDNIKTPAERLRGPLPPSADDNLKTPSERQLTPLPPSAPPSADDNIKTPAERLRGPLPPSADDNLKTPSERQLTPLPPSAPPSADDNIKTPAERLRGPLPPSADDNLKTPPLATQEAEAEKPRKPKRQRAAEMEPPPEPKRRRVGDVEPSRKPKRRRAADVEPSSPEPKRRRVGDVEPSRKPKRRRAADVEPSSPEPKRRRVGDVEPSRKPKRRRAADVEPSLPEPKRRRLS

SEQ ID NO: 41755 - protein, 848 aa, Homo sapiens
MVKLSIVLTPQFLSHDQGQLTKELQQHVKSVTCPCEYLRKVINTLADHHHRGTDFGGSPWLHVIIAFPTSYKVVITLWIVYLWVSLLKTIFWSRNGHDGSTDVQQRAWRSNRRRQEGLRSICMHTKKRVSSFRGNKIGLKDVITLRRHVETKVRAKIRKRKVTTKINHHDKINGKRKTARKQKMFQRAQELRRRAEDYHKCKIPPSARKALCNWVRMAAAEHRHSSGLPYWPYLTAETLKNRMGHQPPPPTQQHSITDNSLSLKTPPECLLTPLPPSADDNLKTPPECVLTPLPPSADDNLKTPPECLLTPLPPSALPSAPPSADDNLKTRAECLLHPLPPSADDNLKTPSERQLTPLPPSAPPSADDNIKTPAFHPQRMIISRHLPSVSSLPFHPQLHPQQMIISRHLPSVCGGRFHPQQMIISRHLPSVSSLPFHPQLHPQQMIISRHLPSVCGGRFHPQRMIISRHLPSVSSLPFHPQLHPQQMIISRHLPSVCGGRFHPQQMIISRHLPSVSSLPFHPQLHPQQMIISRHLPSVCGGRFHPQRMIISRHLPSVSSLPFHPQLHPQQMIISRHLPSVCGGRFHPQRMIISRHLPSVSSLPFHPQLHPQQMIISRHLPSVCGERLRGPLPPSADDNLKTPSERQLTPLPPSAPPSADDNIKTPAERLRGPLPPSADDNLKTPSERQLTPLPPSAPPSADDNIKTPAERLRGPLPPSADDNLKTPPLATQEAEAEKPRKPKRQRAAEMEPPPEPKRRRVGDVEPSRKPKRRRAADVEPSSPEPKRRRVGDVEPSRKPKRRRAADVEPSSPEPKRRRVGDVEPSRKPKRRRAADVEPSLPEPKRRRLS

SEQ ID NO: 41756 - protein, 1022 aa, Homo sapiens
MVKLSIVLTPQFLSHDQGQLTKELQQHVKSVTCPCEYLRKVINTLADHHHRGTDFGGSPWLHVIIAFPTSYKVVITLWIVYLWVSLLKTIFWSRNGHDGSTDVQQRAWRSNRRRQEGLRSICMHTKKRVSSFRGNKIGLKDVITLRRHVETKVRAKIRKRKVTTKINHHDKINGKRKTARKQKMFQRAQELRRRAEDYHKCKIPPSARKALCNWVRMAAAEHRHSSGLPYWPYLTAETLKNRMGHQPPPPTQQHSITDNSLSLKTPPECLLTPLPPSADDNLKTPPECVLTPLPPSADDNLKTPPECVLTPLPPSADDNLKTPPECLLTPLPPSADDNLKTPPECLLTPLPPSALPSAPPSADDNLKTRAECLLHPLPPSADDNLKTPSERQLTPLPPSAPPSADDNIKTPAERLRGPLPPSADDNLKTPSERQLTPLPPSAPPSADDNIKTPAERLRGPLPPSADDNLKTPSERQLTPLPPSAPPSADDNIKTPAERLRGPLPPSADDNLKTPSERQLTALPPSADDNIKTPAERLRGPLPPSADDNLKTPSERQLTPLPPSAPPSADDNIKTPAFHPQRMIISRHLPSVSSLPFHPQLHPQQMIISRHLPSVCGGRFHPQQMIISRHLPSVSSLPFHPQLHPQQMIISRHLPSVCGGRFHPQRMIISRHLPSVSSLPFHPQLHPQQMIISRHLPSVCGGRFHPQQMIISRHLPSVSSLPFHPQLHPQQMIISRHLPSVCGGRFHPQRMIISRHLPSVSSLPFHPQLHPQQMIISRHLPSVCGERLRGPLPPSADDNLKTPSERQLTPLPPSAPPSADDNIKTPAERLRGPLPPSADDNLKTPSERQLTPLPPSAPPSADDNIKTPAERLRGPLPPSADDNLKTPSERQLTPLPPSAPPSADDNIKTPAERLRGPLPPSADDNLKTPPLATQEAEAEKPRKPKRQRAADVEPSSPEPKRRRVGDVEPSRKPKRRRAADVEPSSPEPKRRRVGDVEPSRKPKRRRAADVEPSLPEPKRRRLS

SEQ ID NO: 41757 - protein, 89 aa, Homo sapiens
MISSVKLNLILVLSLSTMHVFWCYPVPSSKVSGKSDYFLILLNSCPTRLDRSKELAFLKPILEKMFVKRSFRNGVGTGMKKTSFQRAKS

SEQ ID NO: 41758 - protein, 325 aa, Homo sapiens
MTTIILEVDNHTVTTRFILLGFPTRPAFQLLFFSIFLATYLLTLLENLLIILAIHSDGQLHKPMYFFLSHLSFLEMWYVTVISPKMLVDFLSHDKSISFNGCMTQLYFFVTFVCTEYILLAIMAFDRYVAICNPLRYPVIMTNQLCGTLAGGCWFCGLMTAMIKMVFIAQLHYCGMPQINHYFCDISPLLNVSCEDASQAEMVDFFLALMVIAIPLCVVVASYAAILATILRIPSAQGRQKAFSTCASHLTVVILFYSMTLFTYARPKLMYAYNSNKVVSVLYTVIVPLLNPIIYCLRNHEVKAALRKTIHCRGSGPQGNGAFSS

SEQ ID NO: 41759 - protein, 1426 aa, Homo sapiens
MNDWHRIFTQNVLVPPHPQRARQPWKESTAFQCVLKWLDGPVIRQGVLEVLSEVECHLRVSFFDVTYRHFFGRTWKTTVKPTKRPPSRIVFNEPLYFHTSLNHPHIVAVVEVVAEGKKRDGSLQTLSCGFGILRIFSNQPDSPISASQDKRLRLYHGTPRALLHPLLQDPAEQNRHMTLIENCSLQYTLKPHPALEPAFHLLPENLLVSGLQQIPGLLPAHGESGDALRKPRLQKPITGHLDDLFFTLYPSLEKFEEELLELHVQDHFQEGCGPLDGGALEILERRLRVGVHNGLGFVQRPQVVVLVPEMDVALTRSASFSRKVVSSSKTSSGSQALVLRSRLRLPEMVGHPAFAVIFQLEYVFSSPAGVDGNAASVTSLSNLACMHMVRWAVWNPLLEADSGRVTLPLQGGIQPNPSHCLVYKVPSASMSSEEVKQVESGTLRFQFSLGSEEHLDAPTEPVSGPKVERRPSRKPPTSPSSPPAPVPRVLAAPQNSPVGPGLSISQLAASPRSPTQHCLARPTSQLPHGSQASPAQAQEFPLEAGISHLEADLSQTSLVLETSIAEQLQELPFTPLHAPIVVGTQTRSSAGQPSRASMVLLQSSGFPEILDANKQPAEAVSATEPVTFNPQKEESDCLQSNEMVLQFLAFSRVAQDCRGTSWPKTVYFTFQFYRFPPATTPRLQLVQLDEAGQPSSGALTHILVPVSRDGTFDAGSPGFQLRYMVGPGFLKPGERRCFARYLAVQTLQIDVWDGDSLLLIGSAAVQMKHLLRQGRPAVQASHELEVVATEYEQDNMVVSGDMLGFGRVKPIGVHSVVKGRLHLTLANVGHPCEQKVRGCSTLPPSRSRVISNDGASRFSGGSLLTTGSSRRKHVVQAQKLADVDSELAAMLLTHARQGKGPQDVSRESDATRRRKLERMRSVRLQEAGGDLGRRGTSVLAQQSVRTQHLRDLQVIAAYRERTKAESIASLLSLAITTEHTLHATLGVAEFFEFVLKNPHNTQHTVTVEIDNPELSVIVDSQEWRDFKGAAGLHTPVEEDMFHLRGSLAPQLYLRPHETAHVPFKFQSFSAGQLAMVQASPGLSNEKGMDAVSPWKSSAVPTKHAKVLFRASGGKPIAVLCLTVELQPHVVDQVFRFYHPELSFLKKAIRLPPWHTFPGAPVGMLGEDPPVHVRCSDPNVICETQNVGPGEPRDIFLKVASGPSPEIKDFFVIIYSDRWLATPTQTWQVYLHSLQRVDVSCVAGQLTRLSLVLRGTQTVRKVRAFTSHPQELKTDPKGVFVLPPRGVQDLHVGVRPLRAGSRFVHLNLVDVDCHQLVASWLVCLCCRQPLISKAFEIMLAAGEGKGVNKRITYTNPYPSRRTFHLHSDHPELLRFREDSFQVGGGETYTIGLQFAPSQRVGEEEILIYINDHEDKNEEAFCVKVIYQ

SEQ ID NO: 41760 - protein, 911 aa, Homo sapiens
MNDWHRIFTQNVLVPPHPQRARQPWKESTAFQCVLKWLDGPVIRQGVLEVLSEVECHLRVSFFDVTYRHFFGRTWKTTVKPTKRPPSRIVFNEPLYFHTSLNHPHIVAVVEVVAEGKKRDGSLQTLSCGFGILRIFSNQPDSPISASQDKRLRLYHGTPRALLHPLLQDPAEQNRHMTLIENCSLQYTLKPHPALEPAFHLLPENLLVSGLQQIPGLLPAHGESGDALRKPRLQKPITGHLDDLFFTLYPSLEKFEEELLELHVQDHFQEGCGPLDGGALEILERRLRVGVHNGLGFVQRPQVVVLVPEMDVALTRSASFSRKVVSSSKTSSGSQALVLRSRLRLPEMVGHPAFAVIFQLEYVFSSPAGVDGNAASVTSLSNLACMHMVRWAVWNPLLEADSGRVTLPLQGGIQPNPSHCLVYKVPSASMSSEEVKQVESGTLRFQFSLGSEEHLDAPTEPVSGPKVERRPSRKPPTSPSSPPAPVPRVLAAPQNSPVGPGLSISQLAASPRSPTQHCLARPTSQLPHGSQASPAQAEFPLEAGISHLEADLSQTSLVLETSIAEQLQELPFTPLHAPIVVGTQTRSSAGQPSRASMVLLQSSGFPEILDANKQPAEAVSATEPVTFNPQKEESDCLQSNEMVLQFLAFSRVAQDCRGTSWPKTVYFTFQFYRFPPATTPRLQLVQLDEAGQPSSGALTHILVPVSRDGTFDAGSPGFQLRYMVGPGFLKPGERRCFARYLAVQTLQIDVWDGDSLLLIGSAAVQMKHLLRQGRPAVQASHELEVVATEYEQDNMVVSGDMLGFGRVKPIGVHSVVKGRLHLTLANVGHPCEQKVRGCSTLPPSRSRVISNDGASRFSGGSLLTTGSSRRWALQATVLFGEVGTLPVAFVSGWLLICKGRRNGEKVRRNID

SEQ ID NO: 41761 - protein, 477 aa, Homo sapiens
MIAFLLTSVLMIPHAGGHPLDTPHLPQELPPGLPNNINITFFSGMFKNVESVAEIFDCLGPHFTWLQAVFTNFPVLIQFVNGMKCVAGLCPRDFEDYGCTCRFEMEGLPVDESDSCCFQHRRCYEEAAEMDCLQDPAKLSTEVNCVSKKIICESKDNCEHLLCTCDKAAIECLARSSLNSSLNLLDTSFCLAQTPETTIKEDLTTLLPRVVPVEPTDTSLTALSGEEAGHDQEGVGAARATSPPGSAEIVATRVTAKIVTLVPAGIKSLGLAVSSVENDPEETTEKACDRFTFLHLGSGDNMQVMPQLGEMLFCLTSRCPEEFESYGCYCGQEGRGEPRDDLDRCCLSHHCCLEQVRRLGCLLERLPWSPVVCVDHTPKCGGQSLCEKLLCACDQTAAECMTSASFNQSLKSPSRLGCPGQPAACEDSLHPVPAAPTLGSSSEEDSEEDPPQEDLGRAKRFLRKSLGPLGIGPLHGR

SEQ ID NO: 41762 - protein, 493 aa, Homo sapiens
MIAFLLTSVLMIPHAGGHPLDTPHLPQELPPGLPNNINITFFSGMFKNVESVAEIFDCLGPHFTWLQAVFTNFPVLIQFVNGMKCVAGLCPRDFEDYGCTCRFEMEGLPVDESDSCCFQHRRCYEEAAEMDCLQDPAKLSTEVNCVSKKIICESKDNCEHLLCTCDKAAIECLARSSLNSSLNLLDTSFCLAQTPETTIKEDLTTLLPRVVPVEPTDTSLTALSGEVAAETEADRLITLSKKKAGHDQEGVGAARATSPPGSAEIVATRVTAKIVTLVPAGIKSLGLAVSSVENDPEETTEKACDRFTFLHLGSGDNMQVMPQLGEMLFCLTSRCPEEFESYGCYCGQEGRGEPRDDLDRCCLSHHCCLEQVRRLGCLLERLPWSPVVCVDHTPKCGGQSLCEKLLCACDQTAAECMTSASFNQSLKSPSRLGCPGQPAACEDSLHPVPAAPTLGSSSEEDSEEDPPQEDLGRAKRFLRKSLGPLGIGPLHGR

SEQ ID NO: 41763 - protein, 237 aa, Homo sapiens
MLGGSLGSRLLRGVGGSHGRFGARGVREGGAAMAAGESMAQRMVWVDLEMTGLDIEKDQIIEMACLITDSDLNILAEGPNLIIKQPDELLDSMSDWCKEHHGKSGLTKAVKESTITLQQAEYEFLSFVRQQTPPGLCPLAGNSVHEDKKFLDKYMPQFMKHLHYRIIDVSTVKELCRRWYPEEYEFAPKKAASHRALDDISESIKELQFYRNNIFKKKIDEKKRKIIENGENEKTVS

SEQ ID NO: 41764 - protein, 199 aa, Homo sapiens
MAQRMVWVDLEMTGLDIEKDQIIEMACLITDSDLNILAEGPNLIIKQPDELLDSMSDWCKEHHGKSGLTKAVKESTITLQQAEYEFLSFVRQQTPPGLCPLAGNSVHEDKKFLDKYMPQFMKHLHYRIIDVSTVKELCRRWYPEEYEFAPKKAASHRALDDISESIKELQFYRNNIFKKKIDEKKRKIIENGENEKTVS

SEQ ID NO: 41765 - protein, 205 aa, Homo sapiens
MAAGESMAQRMVWVDLEMTGLDIEKDQIIEMACLITDSDLNILAEGPNLIIKQPDELLDSMSDWCKEHHGKSGLTKAVKESTITLQQAEYEFLSFVRQQTPPGLCPLAGNSVHEDKKFLDKYMPQFMKHLHYRIIDVSTVKELCRRWYPEEYEFAPKKAASHRALDDISESIKELQFYRNNIFKKKIDEKKRKIIENGENEKTVS

SEQ ID NO: 41766 - protein, 347 aa, Homo sapiens
MGNWTAAVTEFVLLGFSLSREVELLLLVLLLPTFLLTLLGNLLIISTVLSCSRLHTPMYFFLCNLSILDILFTSVISPKVLANLGSRDKTISFAGCITQCYFYFFLGTVEFLLLTVMSYDRYATICCPLRYTTIMRPSVCIGTVVFSWVGGFLSVLFPTILISQLPFCGSNIINHFFCDSGPLLALACADTTAIELMDFMLSSMVILCCIVLVAYSYTYIILTIVRIPSASGRKKAFNTCASHLTIVIIPSGITVFIYVTPSQKEYLEINKIPLVLSSVVTPFLNPFIYTLRNDTVQGVLRDVWVRVRGVFEKRMRAVLRSRLSSNKDHQGRACSSPPCVYSVKLQC

SEQ ID NO: 41767 - protein, 451 aa, Homo sapiens
MGNLLGGVSFREPTTVEDCDSTWQTDSEPEPEEPGPGGGSEGPGQESEQPAQPPEQAGGRPGASPAPDEDAEAAGAEQGGDSTEATAKPKRSFYAARDLYKYRHQYPNFKDIRYQNDLSNLRFYKNKIPFKPDGVYIEEVLSKWKGDYEKLEHNHTYIQWLFPLREQGLNFYAKELTTYEIEEFKKTKEAIRRFLLAYKMMLEFFGIKLTDKTGNVARAVNWQERFQHLNESQHNYLRITRILKSLGELGYESFKSPLVKFILHEALVENTIPNIKQSALEYFVYTIRDRRERRKLLRFAQKHYTPSENFIWGPPRKEQSEGSKAQKMSSPLASSHNSQTSMHKKAKDSKNSSSAVHLNSKTAEDKKVAPKEPVEETDRPSPEPSNEAAKPRNTEKDSNAENMNSQPEKTVTTPTEKKESVSPENNEEGGNDNQDNENPGNTNCHDVVLVQ

SEQ ID NO: 41768 - protein, 319 aa, Homo sapiens
MAHINCTQATEFILVGLTDHQELKMPLFVLFLSIYLFTVVGNLGLILLIRADTSLNTPMYFFLSNLAFVDFCYSSVITPKMLGNFLYKQNVISFDACATQLGCFLTFMVSESLLLASMAYDRYVAICNPLLYMVVMTPGICIQLVAVPYSYSFLMALFHTILTFRLSYCHSNIVNHFYCDDMPLLRLTCSDTRFKQLWILACAGITFICSVLIVFVSYMFIIFAILRMSSAEGRRKAFSTCSSHMLAVTIFYGTLIFMYLQPSSSHSLDADKMASVFYTVIIPMLNPLIYSLRNKDVKDALKKVIINRNHAFIFLKLRK

SEQ ID NO: 41769 - protein, 1898 aa, Homo sapiens
MLLSGGDPPAQEWFMVQTKSKPRVQRQRLQVQRIFRVKLNAFQSRPDTPYFWLQLEGPRENMGKAKEYLKGLCSPELWKEVRYPPILHCAFLGAQGLFLDCLCWSTLAYLVPGPPGSLMVGGLTESFIMTQNWLEELVGRLRWGPAPLLTPRGIWEAEVTRAFGALVWIRGDQHAGDLLQLPPAVQELLLSLVRDAAGKEDIIEWLSRFGISDSHSDPEVLICPPQQQKEAPAMVSVGESPGPFVDMGTLQNRGPENSKRLSSLGATGSLITAQSTPQEAANQLVRVGSNNQDGMDSAQEEGTVQATSSQDSTNHTQALLKQRQVQKIEDKLLFQPPVSALGVCPPWKAWTPGPAFGPLWPGAIAATFWRINELHSLHLAWLLSQACFNFPFWQRPLGPIQLKLPGQNPLPLNLEWKQKELAPLPSAESPAGRPDGGLGGEAALQNCPRPEISPKVTSLLVVPGSSDVKDKVSSDLPQIGPPLTSTPQLQAGGEPGDQGSMQLDFKGLEEGPAPVLPTGQGKPVAQGGLTDQSVPGAQTVPETLKVPMAAAVPKAENPSRTQVPSAAPKLPTSRMMLAVHTEPAAPEVPLAPTKPTAQLMATAQKTVVNQPVLVAQVEPTTPKTPQAQKMPVAKTSPAGPKTPKAQAGPAATVSKAPAASKAPAAPKVPVTPRVSRAPKTPAAQKVPTDAGPTLDVARLLSEVQPTSRASVSLLKGQGQAGRQGPQSSGTLALSSKHQFQMEGLLGAWEGAPRQPPRHLQANSTVTSFQRYHEALNTPFELNLSGEPGNQGLRRVVIDGSSVAMVHGLQHFFSCRGIAMAVQFFWNRGHREVTVFVPTWQLKKNRRVRESHFLTKLHSLKMLSITPSQLENGKKITTYDYRFMVKLAEETDGIIVTNEQIHILMNSSKKLMVKDRLLPFTFAGNLFMVPDDPLGRDGPTLDEFLKKPNRLDTDIGNFLKVWKTLPPSSASVTELSDDADSGPLESLPNMEEVREEKEERQDEEQRQGQGTQKAAEEDDLDSSLASVFRVECPSLSEEILRCLSLHDPPDGALDIDLLPGAASPYLGIPWDGKAPCQQVLAHLAQLTIPSNFTALSFFMGFMDSHRDAIPDYEALVGPLHSLLKQKPDWQWDQEHEEAFLALKRALVSALCLMAPNSQLPFRLEVTVSHVALTAILHQEHSGRKHPIAYTSKPLLPDEESQGPQSGGDSPYAVAWALKHFSRCIGDTPVVLDLSYASRTTADPEVREGRRVSKAWLIRWSLLVQDKGKRALELALLQGLLGENRLLTPAASMPRFFQVLPPFSDLSTFVCIHMSGYCFYREDEWCAGFGLYVLSPTSPPVSLSFSCSPYTPTYAHLAAVACGLERFGQSPLPVVFLTHCNWIFSLLWELLPLWRARGFLSSDGAPLPHPSLLSYIISLTSGLSSLPFIYRTSYRGSLFAVTVDTLAKQGAQGGGQWWSLPKDVPAPTVSPHAMGKRPNLLALQLSDSTLADIIARLQAGQKLSGSSPFSSAFNSLSLDKESGLLMFKGDKKPRVWVVPTQLRRDLIFSVHDIPLGAHQRPEETYKKLRLLGWWPGMQEHVKDYCRSCLFCIPRNLIGSELKVIESPWPLRSTAPWSNLQIEVVGPVTISEEGHKHVLIVADPNTRWVEAFPLKPYTHTAVAQVLLQHVFARWGVPVRLEAAQGPQFARHVLVSCGLALGAQVASLSRDLQFPCLTSSGAYWEFKRALKEFIFLHGKKWAASLPLLHLAFRASSTDATPFKVLTGGESRLTEPLWWEMSSANIEGLKMDVFLLQLVGELLELHWRVADKASEKAENRRFKRESQEKEWNVGDQVLLLSLPRNGSSAKWVGPFYIGDRLSLSLYRIWGFPTPEKLGCIYPSSLMKAFAKSGTPLSFKVLEQ

SEQ ID NO: 41770 - protein, 150 aa, Homo sapiens
MGKRPNLLALQLSDSTLADIIARLQAGQKLSGSSPFSSAFNSLSLDKESGLLMFKGDKKPRVWVVPTQLRRDLIFSVHDIPLGAHQRPEETYKKLRLLGWWPGMQEHVKDYCRSCLFCIPRNLIGSELKVIESPASVLRGQGVCNRSGTR

SEQ ID NO: 41771 - protein, 672 aa, Homo sapiens
MSDPEGETLRSTFPSYMAEGERLYLCGEFSKAAQSFSNALYLQDGDKNCLVARSKCFLKMGDLERSLKDAEASLQSDPAFCKGILQKAETLYTMGDFEFALVFYHRGYKLRPDREFRVGIQKAQEAINNSVGSPSSIKLENKGDLSFLSKQAENIKAQQKPQPMKHLLHPTKGEPKWKASLKSEKTVRQLLGELYVDKEYLEKLLLDEDLIKGTMKGGLTVEDLIMTGINYLDTHSNFWRQQKPIYARERDRKLMQEKWLRDHKRRPSQTAHYILKSLEDIDMLLTSGSAEGSLQKAEKVLKKVLEWNKEEVPNKDELVGNLYSCIGNAQIELGQMEAALQSHRKDLEIAKEYDLPDAKSRALDNIGRVFARVGKFQQAIDTWEEKIPLAKTTLEKTWLFHEIGRCYLELDQAWQAQNYGEKSQQCAEEEGDIEWQLNASVLVAQAQVKLRDFESAVNNFEKALERAKLVHNNEAQQAIISALDDANKGIIRELRKTNYVENLKEKSEGEASLYEDRIITREKDMRRVRDEPEKVVKQWDHSEDEKETDEDDEAFGEALQSPASGKQSVEAGKARSDLGAVAKGLSGELGTRSGETGRKLLEAGRRESREIYRRPSGELEQRLSGEFSRQEPEELKKLSEVGRREPEELGKTQFGEIGETKKTGNEMEKEYE

SEQ ID NO: 41772 - protein, 292 aa, Homo sapiens
MSDPEGETLRSTFPSYMAEGERLYLCGEFSKAAQSFSNALYLQDGDKNCLVARSKCFLKMGDLERSLKDAEASLQSDPAFCKGILQKAETLYTMGDFEFALVFYHRGYKLRPDREFRVGIQKAQEAINNSVGSPSSIKLENKGDLSFLSKQAENIKAQQKPQPMKHLLHPTKGEPKWKASLKSEKTVRQLLGELYVDKEYLEKLLLDEVTFLMQNREPLTTLAEFLPELGNSSKPLTRGKKRSLWQKPPWRRPGCSTRSAAATWSWTRPGRPRIMARSPSSVPRRKGTLSGN

SEQ ID NO: 41773 - protein, 316 aa, Homo sapiens
MAPENFTRVTEFILTGVSSCPELQIPLFLVFLVLYGLTMAGNLGIITLTSVDSRLQTPMYFFLQHLALINLGNSTVIAPKMLINFLVKKKTTSFYECATQLGGFLFFIVSEVIMLALMAYDRYVAICNPLLYMVVVSRRLCLLLVSLTYLYGFSTAIVVSSYVFSVSYCSSNIINHFYCDNVPLLALSCSDTYLPETVVFISAATNVVGSLIIVLVSYFNIVLSILKICSSEGRKKAFSTCASHMMAVTIFYGTLLFMYVQPRSNHSLDTDDKMASVFYTLVIPMLNPLIYSLRNKDVKTALQRFMTNLCYSFKTM

SEQ ID NO: 41774 - protein, 316 aa, Homo sapiens
MENVTTMNEFLLLGLTGVQELQPFFFGIFLIIYLINLIGNGSILVMVVLEPQLHSPMYFFLGNLSCLDISYSSVTLPKLLVNLVCSRRAISFLGCITQLHFFHFLGSTEAILLAIMAFDRFVAICNPLRYTVIMNPQVCILLAAAAWLISFFYALMHSVMTAHLSFCGSQKLNHFFYDVKPLLELACSDTLLNQWLLSIVTGSISMGAFFLTLLSCFYVIGFLLFKNRSCRILHKALSTCASHFMVVCLFYGPVGFTYIRPASATSMIQDRIMAIMYSAVTPVLNPLIYTLRNKEVMMALKKIFGRKLFKDWQQHH

SEQ ID NO: 41775 - protein, 308 aa, Homo sapiens
MAMDNVTAVFQFLLIGISNYPQWRDTFFTLVLIIYLSTLLGNGFMIFLIHFDPNLHTPIYFFLSNLSFLDLCYGTASMPQALVHCFSTHPYLSYPRCLAQTSVSLALATAECLLLAAMAYDRVVAISNPLRYSVVMNGPVCVCLVATSWGTSLVLTAMLILSLRLHFCGANVINHFACEILSLIKLTCSDTSLNEFMILITSIFTLLLPFGFVLLSYIRIAMAIIRIRSLQGRLKAFTTCGSHLTVVTIFYGSAISMYMKTQSKSYPDQDKFISVFYGALTPMLNPLIYSLRKKDVKRAIRKVMLKRT

SEQ ID NO: 41776 - protein, 309 aa, Homo sapiens
MGAKNNVTEFVLFGLFESREMQHTCFVVFFLFHVLTVLGNLLVIITINARKTLKSPMYFFLSQLSFADICYPSTTIPKMIADTFVEHKIISFNGCMTQLFSAHFFGGTEIFLLTAMAYDRYVAICRPLHYTAIMDCRKCGLLAGASWLAGFLHSILQTLLTVQLPFCGPNEIDNFFCDVHPLLKLACADTYMVGLIVVANSGMISLASFFILIISYVIILLNLRSQSSEDRRKAVSTCGSHVITVLLVLMPPMFMYIRPSTTLAADKLIILFNIVMPPLLNPLIYTLRNNDVKNAMRKLFRVKRSLGEK

SEQ ID NO: 41777 - protein, 312 aa, Homo sapiens
MPSINDTHFYPPFFLLLGIPGLDTLHIWISFPFCIVYLIAIVGNMTILFVIKTEHSLHQPMFYFLAMLSMIDLGLSTSTIPKMLGIFWFNLQEISFGGCLLQMFFIHMFTGMETVLLVVMAYDRFVAICNPLQYTMILTNKTISILASVVVGRNLVLVTPFVFLILRLPFCGHNIVPHTYCEHRGLAGLACAPIKINIIYGLMVISYIIVDVILIASSYVLILRAVFRLPSQDVRLKAFNTCGSHVCVMLCFYTPAFFSFMTHRFGQNIPHYIHILLANLYVVVPPALNPVIYGVRTKQIREQIVKIFVQKE

SEQ ID NO: 41778 - protein, 305 aa, Homo sapiens
MVATNNVTEIIFVGFSQNWSEQRVISVMFLLMYTAVVLGNGLIVVTILASKVLTSPMYFFLSYLSFVEICYCSVMAPKLIFDSFIKRKVISLKGCLTQMFSLHFFGGTEAFLLMVMAYDRYVAICKPLHYMAIMNQRMCGLLVRIAWGGGLLHSVGQTFLIFQLPFCGPNIMDHYFCDVHPVLELACADTFFISLLIITNGGSISVVSFFVLMASYLIILHFLRSHNLEGQHKALSTCASHVTVVDLFFIPCSLVYIRPCVTLPADKIVAVFYTVVTPLLNPVIYSFRNAEVKNAMRRFIGGKVI

SEQ ID NO: 41779 - protein, 314 aa, Homo sapiens
MGDVNQSVASDFILVGLFSHSGSRQLLFSLVAVMFVIGLLGNTVLLFLIRVDSRLHTPMYFLLSQLSLFDIGCPMVTIPKMASDFLRGEGATSYGGGAAQIFFLTLMGVAEGVLLVLMSYDRYVAVCQPLQYPVLMRRQVCLLMMGSSWVVGVLNASIQTSITLHFPYCASRIVDHFFCEVPALLKLSCADTCAYEMALSTSGVLILMLPLSLIATSYGHVLQAVLSMRSEEARHKAVTTCSSHITVVGLFYGAAVFMYMVPCAYHSPQQDNVVSLFYSLVTPTLNPLIYSLRNPEVWMALVKVLSRAGLRQMC

SEQ ID NO: 41780 - protein, 313 aa, Homo sapiens
MASPSNDSTAPVSEFLLICFPNFQSWQHWLSLPLSLLFLLAMGANTTLLITIQLEASLHQPLYYLLSLLSLLDIVLCLTVIPKVLAIFWFDLRSISFPACFLQMFIMNSFLTMESCTFMVMAYDRYVAICHPLRYPSIITDQFVARAVVFVIARNAFVSLPVPMLSARLRYCAGNIIKNCICSNLSVSKLSCDDITFNQLYQFVAGWTLLGSDLILIVISYSFILKVVLRIKAEGAVAKALSTCGSHFILILFFSTVLLVLVITNLARKRIPPDVPILLNILHHLIPPALNPIVYGVRTKEIKQGIQNLLKRL

SEQ ID NO: 41781 - protein, 398 aa, Homo sapiens
MSRKQAAKSRPGSGSRKAEAERKRDERAARRALAKERRNRPESGGGGGCEEEFVSFANQLQALGLKLREVPGDGNCLFRALGDQLEGHSRNHLKHRQETVDYMIKQREDFEPFVEDDIPFEKHVASLAKPGTFAGNDAIVAFARNHQLNVVIHQLNAPLWQIRGTEKSSVRELHIAYRYGEHYDSVRRINDNSEAPAHLQTDFQMLHQDESNKREKIKTKGMDSEDDLRDEVEDAVQKVCNATGCSDFNLIVQNLEAENYNIESAIIAVLRMNQGKRNNAEENLEPSGRVLKQCGPLWEEGGSGARIFGNQGLNEGRTENNKAQASPSEENKANKNQLAKVTNKQRREQQWMEKKKRQEERHRHKALESRGSHRDNNRSEAEANTQVTLVKTFAALNI

SEQ ID NO: 41782 - protein, 422 aa, Homo sapiens [sequence omitted]

SEQ ID NO: 41783 - protein, 436 aa, Homo sapiens
MQNSHSGVNQLGGVFVNGRPLPDSTRQKIVELAHSGARPCDISRILQTHADAKVQVLDNQNVSNGCVSKILGRYYETGSIRPRAIGGSKPRVATPEVVSKIAQYKRECPSIFAWEIRDRLLSEGVCTNDNIPSVSSINRVLRNLASEKQQMGADGMYDKLRMLNGQTGSWGTRPGWYPGTSVPGQPTQDGCQQQEGGGENTNSISSNGEDSDEAQMRLQLKRKLQRNRTSFTQEQIEALEKEFERTHYPDVFARERLAAKIDLPEARIQVWFSNRRAKWRREEKLRNQRRQASNTPSHIPISSSFSTSVYQPIPQPTTPVSSFTSGSMLGRTDTALTNTYSALPPMPSFTMANNLPMQPPVPSQTSSYSCMLPTSPSVNGRSYDTYTPPHMQTHMNSQPMGTSGTTSTGLISPGVSVPVQVPGSEPDMSQYWPRLQ

SEQ ID NO: 41784 - protein, 1288 aa, Homo sapiens
MGCTPSHSDLVNSVAKSGIQFLKKPKAIRPGCQGGSERGSIPLLVKNSTCYDAGEGLAEEQPSPRRNQTTAKGLCQLMGDPASGKRKDMEGLIPGTKTSSSQLNKSQSHMAKDIPFKTQGSHGSQGADFSGDESEESSTQDTSKWKRTAKCHTSSTQSHCYQTIHPAHEPEGKVDFPEPLVKAHQQAYTYLHSSLSKYEAILCIIHQATQTRELLQPMVSFLLLCFEEISQLLGEISKDGEVLLQEVREDLAWPLKKREPQEQPNLLQQLLQYTVSKLQVLNGTVASLTGSFLEGSSSYLHSTATHLENKLSTKRNVDERLLRALRQLESLASGCGDPGVQGLPLCSEDSGIGADNESVQSVDKLGKQTSWDLAPEPEEWKSVTSPHTEARQSGHTWQQSPFCLGSGRPQDCLLSGAPMAKVQPRAQDEARSPCLSSTSPENITSPPLKLGTSTPCDSFGIGVSVEPHLSKTSRPMDASSLSDSEDSSPEEEEEDKMSSMSLCAWQEKTPHSRPQSSPADRESPFQARTRRLRSLQAQEMILKMKESISERIKFVPVPCGHQDWSEEEEGRTVVPPRPSTVSGSRRAPERQTRSQSESCLQSHVEDPTFQELRRVQRDLSQKLEAFYALGAKGQGQSQEQILQPRAAAVWPNGTCRVSPSNTTSRLKASLTKNFSILPSQDKSILQKCNPHPEDEQGKAGKLPNAIPSGEVSEAAKATDWNVRGCPTRTSVKKLIETFSPTESLRMLGDSKDAGASPCLRNCIMPPRFPKYTGLAPLYPKPQISPASGRESLKMGIGWKPLAPIFPPLPKAEAAKSEELSCEMEGNLEHLPPPPMEVLMDKSFASLESPESSKSTENSPKETQEPGPGEAGPTRRTWASPKLRASVSPLDLLPSKSTASLTKPHSTGPGSGRSSCQPRKPALDLSSPPATSQSPEVKGGTWSQAEKATSLYRQPRKAIAWHHSGPPSGQNRTSESSLARPRQSRERSPPVGRKASPTRTHWVPQADKRRRSLPSSYRPAQPSPSAVQTPPSPPVSPRVLSPPTTKRRTSPPHQPKLPNPPPESAPAQCKVPSPPTQHPEASPPFSIPSPSPPMSPSQEHKETRDSEDSQAVIAKVSGNTHSIFCPATSSLFEAKPPLSTAHPLTPPSLPPEAGGPLGNPAECWKNSSGPWLRADSQRRAALCALNPLPFLRRTASDRQPGGRPQPPTLDPTSTSYESQLGQNSSSEESPKKDTEPGSSPCSPELQGGTRRASPPEFCVLGHGLQPEPRTGHIQDKSQPEAQPQQEEVS

SEQ ID NO: 41785 - protein, 176 aa, Homo sapiens
MTMCSGARLALLVYGIIMHSSVYSSPAAAGLRFPGIRPEEEAYGEDGNPLPDFDGSEPPGAGSPASAPRAAAAWYRPAGRRDVAHGILNEAYRKVLDQLSAGKHLQSLVARGVGGSLGGGAGDDAEPLSKRHSDGIFTDSYSRYRKQMAVKKYLAAVLGKRYKQRVKNKGRRIAYL

SEQ ID NO: 41786 - protein, 932 aa, Homo sapiens
MAAQPRGGDYRGFFLLSILLGTPWEAWAGRILYSVSEETDKGSFVGDIAKDLGLEPRELAERGVRIISRGRTQLFALNQRSGSLVTAGRIDREEICAQSARCLVNFNILMEDKMNLYPIDVEIIDINDNVPRFLTEEINVKIMENTAPGVRFPLSEAGDPDVGTNSLQSYQLSPNRHFSLAVQSGDDETKYPELVLERVLDREEERVHHLVLTASDGGDPPRSSTAHIQVTVVDVNDHTPVFSLPQYQVTVPENVPVGTRLLTVHAIDLDEGVNGEVTYSFRKITPKLPKMFHLNSLTGEISTLEGLDYEETAFYEMEVQAQDGPGSLTKAKVLITVLDVNDNAPEVTMTSLSSSIPEDTPLGTVIALFYLQDRDSGKNGEVTCTIPENLPFKLEKSIDNYYRLVTTKNLDRETLSLYNITLKATDGGTPPLSRETHIFMQVADTNDNPPTFPHSSYSVYIAENNPRGASIFLVTAQDHDSEDNAQITYSLAEDTIQGAPVSSYVSINSDTGVLYALQSFDYEQLRELQLRVTAHDSGDPPLSSNMSLSLFVLDQNDNPPEILYPALPTDGSTGMELAPRSAEPGYLVTKVVAVDKDSGQNAWLSYLLLKASEPGLFAVGLYTGEVRTARALLDRDALKQSLVVAVQDHGQPPLSATVTLTVAVADSIPEVLADLGSLEPSDGPYNYDLTLYLVVAVATVSCVFLAFVLVLLALRLRRWHKSRLLQASEGGLANVPTSHFVGMDGVQAFLQTYSHEVSLTADSRKSHLIFPQPNYVDMLISQESCEKNDSLLTSVDFQECKENLPSIQQAPPNTDWRFSQAQRPGTSGSQNGDDTGTWPNNQFDTEMLQAMILASASEAADGSSTLGGGAGTMGLSARYGPQFTLQHVPDYRQNVYIPGSNATLTNAAGKRDGKAPAGGNGNKKKSGKKEKK

SEQ ID NO: 41787 - protein, 817 aa, Homo sapiens
MAAQPRGGDYRGFFLLSILLGTPWEAWAGRILYSVSEETDKGSFVGDIAKDLGLEPRELAERGVRIISRGRTQLFALNQRSGSLVTAGRIDREEICAQSARCLVNFNILMEDKMNLYPIDVEIIDINDNVPRFLTEEINVKIMENTAPGVRFPLSEAGDPDVGTNSLQSYQLSPNRHFSLAVQSGDDETKYPELVLERVLDREEERVHHLVLTASDGGDPPRSSTAHIQVTVVDVNDHTPVFSLPQYQVTVPENVPVGTRLLTVHAIDLDEGVNGEVTYSFRKITPKLPKMFHLNSLTGEISTLEGLDYEETAFYEMEVQAQDGPGSLTKAKVLITVLDVNDNAPEVTMTSLSSSIPEDTPLGTVIALFYLQDRDSGKNGEVTCTIPENLPFKLEKSIDNYYRLVTTKNLDRETLSLYNITLKATDGGTPPLSRETHIFMQVADTNDNPPTFPHSSYSVYIAENNPRGASIFLVTAQDHDSEDNAQITYSLAEDTIQGAPVSSYVSINSDTGVLYALQSFDYEQLRELQLRVTAHDSGDPPLSSNMSLSLFVLDQNDNPPEILYPALPTDGSTGMELAPRSAEPGYLVTKVVAVDKDSGQNAWLSYLLLKASEPGLFAVGLYTGEVRTARALLDRDALKQSLVVAVQDHGQPPLSATVTLTVAVADSIPEVLADLGSLEPSDGPYNYDLTLYLVVAVATVSCVFLAFVLVLLALRLRRWHKSRLLQASEGGLANVPTSHFVGMDGVQAFLQTYSHEVSLTADSRKSHLIFPQPNYVDMLISQESCEKNDSLLTSVDFQECKENLPSIQVSPALPLFP

SEQ ID NO: 41788 - protein, 423 aa, Homo sapiens
MLCHRGGQLIVPIIPLCPEHSCRGRRLQNLLSGPWPKQPMELHNLSSPSPSLSSSVLPPSFSPSPSSAPSAFTTVGGSSGGPCHPTSSSLVSAFLAPILALEFVLGLVGNSLALFIFCIHTRPWTSNTVFLVSLVAADFLLISNLPLRVDYYLLHETWRFGAAACKVNLFMLSTNRTASVVFLTAIALNRYLKVVQPHHVLSRASVGAAARVAGGLWVGILLLNGHLLLSTFSGPSCLSYRVGTKPSASLRWHQALYLLEFFLPLALILFAIVSIGLTIRNRGLGGQAGPQRAMRVLAMVVAVYTICFLPSIIFGMASMVAFWLSACRSLDLCTQLFHGSLAFTYLNSVLDPVLYCFSSPNFLHQSRALLGLTRGRQGPVSDESSYQPSRQWRYREASRKAEAIGKLKVQGEVSLEKEGSSQG

SEQ ID NO: 41789 - protein, 392 aa, Homo sapiens
MGVNQSVGFPPVTGPHLVGCGDVMEGQNLQGSFFRLFYPCQKAEETMEQPLWIPRYEYCTGLAEYLQFNKRCGGLLFNLAVGSCRLPVSWNGPFKTKDSGYPLIIFSHGLGAFRTLYSAFCMELASRGFVVAVPEHRDRSAATTYFCKQAPEENQPTNESLQEEWIPFRRVEEGEKEFHVRNPQVHQRVSECLRVLKILQEVTAGQTVFNILPGGLDLMTLKGNIDMSRVAVMGHSFGGATAILALAKETQFRCAVALDAWMFPLERDFYPKARGPVFFINTEKFQTMESVNLMKKICAQHEQSRIITVLGSVHRSQTDFAFVTGNLIGKFFSTETRGSLDPYEGQEVMVRAMLAFLQKHLDLKEDYNQWNNLIEGIGPSLTPGAPHHLSSL

SEQ ID NO: 41790 - protein, 215 aa, Homo sapiens
MGVRLRVWPAAPHSISRCPRPLGAVLSILLAGGSRKGTPTARCLGQRTKEKRVGGRSLRSEAGSGPCPTAGAQPTAPSSAWPPRLRPRTCPQMSGELPRVRPTRVGLSSLGSGPGHPPSGTRMCGERARNRRGRARRLTPEQPRIGASAGPGPPLPPARPRCSGSCHLPRPPQHLSPPQPGRVRMGAAEGSRRADTHHARRRRRARLPAPRSAST

SEQ ID NO: 41791 - protein, 259 aa, Homo sapiens
MASPQGGQIAIAMRLRNQLQSVYKMDPLRNEEEVRVKIKDLNEHIVCCLCAGYFVDATTITECLHTFCKSCIVKYLQTSKYCPMCNIKIHETQPLLNLKLDRVMQDIVYKLVPGLQDSEEKRIREFYQSRGLDRVTQPTGEEPALSNLGLPFSSFDHSKAHYYRYDEQLNLCLERLSSGKDKNKSVLQNKYVRCSVRAEVRHLRRVLCHRLMLNPQHVQLLFDNEVLPDHMTMKQIWLSRWFGKPSPLLLQYSVKEKRR

SEQ ID NO: 41792 - protein, 176 aa, Homo sapiens
MCNIKIHETQPLLNLKLDRVMQDIVYKLVPGLQDSEEKRIREFYQSRGLDRVTQPTGEEPALSNLGLPFSSFDHSKAHYYRYDEQLNLCLERLSSGKDKNKSVLQNKYVRCSVRAEVRHLRRVLCHRLMLNPQHVQLLFDNEVLPDHMTMKQIWLSRWFGKPSPLLLQYSVKEKRR

SEQ ID NO: 41793 - protein, 98 aa, Homo sapiens
MNKHFLFLFLLYCLIVAVTSLQCITCHLRTRTDRCRRGFGVCTAQKGEACMLLRIYQRNTLQISYMVCQKFCRDMTFDLRNRTYVHTCCNYNYCNFKL

SEQ ID NO: 41794 - protein, 1178 aa, Homo sapiens
MLKFRTVHGGLRLLGIRRTSTAPAASPNVRRLEYKPIKKVMVANRGEIAIRVFRACTELGIRTVAIYSEQDTGQMHRQKADEAYLIGRGLAPVQAYLHIPDIIKVAKENNVDAVHPGYGFLSERADFAQACQDAGVRFIGPSPEVVRKMGDKVEARAIAIAAGVPVVPGTDAPITSLHEAHEFSNTYGFPIIFKAAYGGGGRGMRVVHSYEELEENYTRAYSEALAAFGNGALFVEKFIEKPRHIEVQILGDQYGNILHLYERDCSIQRRHQKVVEIAPAAHLDPQLRTRLTSDSVKLAKQVGYENAGTVEFLVDRHGKHYFIEVNSRLQVEHTVTEEITDVDLVHAQIHVAEGRSLPDLGLRQENIRINGCAIQCRVTTEDPARSFQPDTGRIEVFRSGEGMGIRLDNASAFQGAVISPHYDSLLVKVIAHGKDHPTAATKMSRALAEFRVRGVKTNIAFLQNVLNNQQFLAGTVDTQFIDENPELFQLRPAQNRAQKLLHYLGHVMVNGPTTPIPVKASPSPTDPVVPAVPIGPPPAGFRDILLREGPEGFARAVRNHPGLLLMDTTFRDAHQSLLATRVRTHDLKKIAPYVAHNFSKLFSMENWGGATFDVAMRFLYECPWRRLQELRELIPNIPFQMLLRGANAVGYTNYPDNVVFKFCEVAKENGMDVFRVFDSLNYLPNMLLGMEAAGSAGGVVEAAISYTGDVADPSRTKYSLQYYMGLAEELVRAGTHILCIKDMAGLLKPTACTMLVSSLRDRFPDLPLHIHTHDTSGAGVAAMLACAQAGADVVDVAADSMSGMTSQPSMGALVACTRGTPLDTEVPMERVFDYSEYWEGARGLYAAFDCTATMKSGNSDVYENEIPGGQYTNLHFQAHSMGLGSKFKEVKKAYVEANQMLGDLIKVTPSSKIVGDLAQFMVQNGLSRAEAEAQAEELSFPRSVVEFLQGYIGVPHGGFPEPFRSKVLKDLPRVEGRPGASLPPLDLQALEKELVDRHGEEVTPEDVLSAAMYPDVFAHFKDFTATFGPLDSLNTRLFLQGPKIAEEFEVELERGKTLHIKALAVSDLNRAGQRQVFFELNGQLRSILVKDTQAMKEMHFHPKALKDVKGQIGAPMPGKVIDIKVVAGAKVAKGQPLCVLSAMKMETVVTSPMEGTVRKVHVTKDMTLEGDDLILEIE

SEQ ID NO: 41795 - protein, 529 aa, Homo sapiens
MLKFRTVHGGLRLLGIRRTSTAPAASPNVRRLEYKPIKKVMVANRGEIAIRVFRACTELGIRTVAIYSEQDTGQMHRQKADEAYLIGRGLAPVQAYLHIPDIIKVAKENNVDAVHPGYGFLSERADFAQACQDAGVRFIGPSPEVVRKMGDKVEARAIAIAAGVPVVPGTDAPITSLHEAHEFSNTYGFPIIFKAAYGGGGRGMRVVHSYEELEENYTRAYSEALAAFGNGALFVEKFIEKPRHIEVQILGDQYGNILHLYERDCSIQRRHQKVVEIAPAAHLDPQLRTRLTSDSVKLAKQVGYENAGTVEFLVDRHGKHYFIEVNSRLQVEHTVTEEITDVDLVHAQIHVAEGRSLPDLGLRQENIRINGCAIQCRVTTEDPARSFQPDTGRIEVFRSGEGMGIRLDNASAFQGAVISPHYDSLLVKVIAHGKDHPTAATKMSRALAEFRVRGVKVRRHQAQPLAAALGRPCGQEARRPQAAVTAPTGPGSPTLVRVPPAARVLSSRLGGPSQTTPETSTEVSPTILL

SEQ ID NO: 41796 - protein, 680 aa, Homo sapiens
MNFETSRCATLQYCPDPYIQRFVETPAHFSWKESYYRSTMSQSTQTNEFLSPEVFQHIWDFLEQPICSVQPIDLNFVDEPSEDGATNKIEISMDCIRMQDSDLSDPMWPQYTNLGLLNSMDQQIQNGSSSTSPYNTDHAQNSVTAPSPYAQPSSTFDALSPSPAIPSNTDYPGPHSFDVSFQQSSTAKSATWTYSTELKKLYCQIAKTCPIQIKVMTPPPQGAVIRAMPVYKKAEHVTEVVKRCPNHELSREFNEGQIAPPSHLIRVEGNSHAQYVEDPITGRQSVLVPYEPPQVGTEFTTVLYNFMCNSSCVGGMNRRPILIIVTLETRDGQVLGRRCFEARICACPGRDRKADEDSIRKQQVSDSTKNGDGTKRPFRQNTHGIQMTSIKKRRSPDDELLYLPVRGRETYEMLLKIKESLELMQYLPQHTIETYRQQQQQQHQHLLQKQTSIQSPSSYGNSSPPLNKMNSMNKLPSVSQLINPQQRNALTPTTIPDGMGANIPMMGTHMPMAGDMNGLSPTQALPPPLSMPSTSHCTPPPPYPTDCSIVSFLARLGCSSCLDYFTTQGLTTIYQIEHYSMDDLASLKIPEQFRHAIWKGILDHRQLHEFSSPSHLLRTPSSASTVSVGSSETRGERVIDAVRFTLRQTISFPPRDEWNDFNFDMDARRNKQQRIKEEGE

SEQ ID NO: 41797 - protein, 586 aa, Homo sapiens
MLYLENNAQTQFSEPQYTNLGLLNSMDQQIQNGSSSTSPYNTDHAQNSVTAPSPYAQPSSTFDALSPSPAIPSNTDYPGPHSFDVSFQQSSTAKSATWTYSTELKKLYCQIAKTCPIQIKVMTPPPQGAVIRAMPVYKKAEHVTEVVKRCPNHELSREFNEGQIAPPSHLIRVEGNSHAQYVEDPITGRQSVLVPYEPPQVGTEFTTVLYNFMCNSSCVGGMNRRPILIIVTLETRDGQVLGRRCFEARICACPGRDRKADEDSIRKQQVSDSTKNGDGTKRPFRQNTHGIQMTSIKKRRSPDDELLYLPVRGRETYEMLLKIKESLELMQYLPQHTIETYRQQQQQQHQHLLQKQTSIQSPSSYGNSSPPLNKMNSMNKLPSVSQLINPQQRNALTPTTIPDGMGANIPMMGTHMPMAGDMNGLSPTQALPPPLSMPSTSHCTPPPPYPTDCSIVSFLARLGCSSCLDYFTTQGLTTIYQIEHYSMDDLASLKIPEQFRHAIWKGILDHRQLHEFSSPSHLLRTPSSASTVSVGSSETRGERVIDAVRFTLRQTISFPPRDEWNDFNFDMDARRNKQQRIKEEGE

SEQ ID NO: 41798 - protein, 555 aa, Homo sapiens
MNFETSRCATLQYCPDPYIQRFVETPAHFSWKESYYRSTMSQSTQTNEFLSPEVFQHIWDFLEQPICSVQPIDLNFVDEPSEDGATNKIEISMDCIRMQDSDLSDPMWPQYTNLGLLNSMDQQIQNGSSSTSPYNTDHAQNSVTAPSPYAQPSSTFDALSPSPAIPSNTDYPGPHSFDVSFQQSSTAKSATWTYSTELKKLYCQIAKTCPIQIKVMTPPPQGAVIRAMPVYKKAEHVTEVVKRCPNHELSREFNEGQIAPPSHLIRVEGNSHAQYVEDPITGRQSVLVPYEPPQVGTEFTTVLYNFMCNSSCVGGMNRRPILIIVTLETRDGQVLGRRCFEARICACPGRDRKADEDSIRKQQVSDSTKNGDGTKRPFRQNTHGIQMTSIKKRRSPDDELLYLPVRGRETYEMLLKIKESLELMQYLPQHTIETYRQQQQQQHQHLLQKQTSIQSPSSYGNSSPPLNKMNSMNKLPSVSQLINPQQRNALTPTTIPDGMGANIPMMGTHMPMAGDMNGLSPTQALPPPLSMPSTSHCTPPPPYPTDCSIVRIWQV

SEQ ID NO: 41799 - protein, 461 aa, Homo sapiens
MLYLENNAQTQFSEPQYTNLGLLNSMDQQIQNGSSSTSPYNTDHAQNSVTAPSPYAQPSSTFDALSPSPAIPSNTDYPGPHSFDVSFQQSSTAKSATWTYSTELKKLYCQIAKTCPIQIKVMTPPPQGAVIRAMPVYKKAEHVTEVVKRCPNHELSREFNEGQIAPPSHLIRVEGNSHAQYVEDPITGRQSVLVPYEPPQVGTEFTTVLYNFMCNSSCVGGMNRRPILIIVTLETRDGQVLGRRCFEARICACPGRDRKADEDSIRKQQVSDSTKNGDGTKRPFRQNTHGIQMTSIKKRRSPDDELLYLPVRGRETYEMLLKIKESLELMQYLPQHTIETYRQQQQQQHQHLLQKQTSIQSPSSYGNSSPPLNKMNSMNKLPSVSQLINPQQRNALTPTTIPDGMGANIPMMGTHMPMAGDMNGLSPTQALPPPLSMPSTSHCTPPPPYPTDCSIVRIWQV

SEQ ID NO: 41800 - protein, 487 aa, Homo sapiens
MNFETSRCATLQYCPDPYIQRFVETPAHFSWKESYYRSTMSQSTQTNEFLSPEVFQHIWDFLEQPICSVQPIDLNFVDEPSEDGATNKIEISMDCIRMQDSDLSDPMWPQYTNLGLLNSMDQQIQNGSSSTSPYNTDHAQNSVTAPSPYAQPSSTFDALSPSPAIPSNTDYPGPHSFDVSFQQSSTAKSATWTYSTELKKLYCQIAKTCPIQIKVMTPPPQGAVIRAMPVYKKAEHVTEVVKRCPNHELSREFNEGQIAPPSHLIRVEGNSHAQYVEDPITGRQSVLVPYEPPQVGTEFTTVLYNFMCNSSCVGGMNRRPILIIVTLETRDGQVLGRRCFEARICACPGRDRKADEDSIRKQQVSDSTKNGDGTKRPFRQNTHGIQMTSIKKRRSPDDELLYLPVRGRETYEMLLKIKESLELMQYLPQHTIETYRQQQQQQHQHLLQKHLLSACFRNELVEPRRETPKQSDVFFRHSKPPNRSVYP

SEQ ID NO: 41801 - protein, 393 aa, Homo sapiens
MLYLENNAQTQFSEPQYTNLGLLNSMDQQIQNGSSSTSPYNTDHAQNSVTAPSPYAQPSSTFDALSPSPAIPSNTDYPGPHSFDVSFQQSSTAKSATWTYSTELKKLYCQIAKTCPIQIKVMTPPPQGAVIRAMPVYKKAEHVTEVVKRCPNHELSREFNEGQIAPPSHLIRVEGNSHAQYVEDPITGRQSVLVPYEPPQVGTEFTTVLYNFMCNSSCVGGMNRRPILIIVTLETRDGQVLGRRCFEARICACPGRDRKADEDSIRKQQVSDSTKNGDGTKRPFRQNTHGIQMTSIKKRRSPDDELLYLPVRGRETYEMLLKIKESLELMQYLPQHTIETYRQQQQQQHQHLLQKHLLSACFRNELVEPRRETPKQSDVFFRHSKPPNRSVYP

SEQ ID NO: 41802 - protein, 510 aa, Homo sapiens
MNFETSRCATLQYCPDPYIQRFVETPAHFSWKESYYRSTMSQSTQTNEFLSPEVFQHIWDFLEQPICSVQPIDLNFVDEPSEDGATNKIEISMDCIRMQDSDLSDPMWPQYTNLGLLNSMDQQIQNGSSSTSPYNTDHAQNSVTAPSPYAQPSSTFDALSPSPAIPSNTDYPGPHSFDVSFQQSSTAKSATWTYSTELKKLYCQIAKTCPIQIKVMTPPPQGAVIRAMPVYKKAEHVTEVVKRCPNHELSREFNEGQIAPPSHLIRVEGNSHAQYVEDPITGRQSVLVPYEPPQVGTEFTTVLYNFMCNSSCVGGMNRRPILIIVTLETRDGQVLGRRCFEARICACPGRDRKADEDSIRKQQVSDSTKNGDGTKRPFRQNTHGIQMTSIKKRRSPDDELLYLPVRGRETYEMLLKIKESLELMQYLPQHTIETYRQQQQQQHQHLLQKQTSIQSPSSYGNSSPPLNKMNSMNKLPSVSQLINPQQRNALTPTTIPDGMGANRSGKSENP

SEQ ID NO: 41803 - protein, 416 aa, Homo sapiens
MLYLENNAQTQFSEPQYTNLGLLNSMDQQIQNGSSSTSPYNTDHAQNSVTAPSPYAQPSSTFDALSPSPAIPSNTDYPGPHSFDVSFQQSSTAKSATWTYSTELKKLYCQIAKTCPIQIKVMTPPPQGAVIRAMPVYKKAEHVTEVVKRCPNHELSREFNEGQIAPPSHLIRVEGNSHAQYVEDPITGRQSVLVPYEPPQVGTEFTTVLYNFMCNSSCVGGMNRRPILIIVTLETRDGQVLGRRCFEARICACPGRDRKADEDSIRKQQVSDSTKNGDGTKRPFRQNTHGIQMTSIKKRRSPDDELLYLPVRGRETYEMLLKIKESLELMQYLPQHTIETYRQQQQQQHQHLLQKQTSIQSPSSYGNSSPPLNKMNSMNKLPSVSQLINPQQRNALTPTTIPDGMGANRSGKSENP

SEQ ID NO: 41804 - protein, 595 aa, Homo sapiens
MNFETSRCATLQYCPDPYIQRFVETPAHFSWKESYYRSTMSQSTQTNEFLSPEVFQHIWDFLEQPICSVQPIDLNFVDEPSEDGATNKIEISMDCIRMQDSDLSDPMWYSTELKKLYCQIAKTCPIQIKVMTPPPQGAVIRAMPVYKKAEHVTEVVKRCPNHELSREFNEGQIAPPSHLIRVEGNSHAQYVEDPITGRQSVLVPYEPPQVGTEFTTVLYNFMCNSSCVGGMNRRPILIIVTLETRDGQVLGRRCFEARICACPGRDRKADEDSIRKQQVSDSTKNGDGTKRPFRQNTHGIQMTSIKKRRSPDDELLYLPVRGRETYEMLLKIKESLELMQYLPQHTIETYRQQQQQQHQHLLQKQTSIQSPSSYGNSSPPLNKMNSMNKLPSVSQLINPQQRNALTPTTIPDGMGANIPMMGTHMPMAGDMNGLSPTQALPPPLSMPSTSHCTPPPPYPTDCSIVSFLARLGCSSCLDYFTTQGLTTIYQIEHYSMDDLASLKIPEQFRHAIWKGILDHRQLHEFSSPSHLLRTPSSASTVSVGSSETRGERVIDAVRFTLRQTISFPPRDEWNDFNFDMDARRNKQQRIKEEGE

SEQ ID NO: 41805 - protein, 501 aa, Homo sapiens
MLYLENNAQTQFSEYSTELKKLYCQIAKTCPIQIKVMTPPPQGAVIRAMPVYKKAEHVTEVVKRCPNHELSREFNEGQIAPPSHLIRVEGNSHAQYVEDPITGRQSVLVPYEPPQVGTEFTTVLYNFMCNSSCVGGMNRRPILIIVTLETRDGQVLGRRCFEARICACPGRDRKADEDSIRKQQVSDSTKNGDGTKRPFRQNTHGIQMTSIKKRRSPDDELLYLPVRGRETYEMLLKIKESLELMQYLPQHTIETYRQQQQQQHQHLLQKQTSIQSPSSYGNSSPPLNKMNSMNKLPSVSQLINPQQRNALTPTTIPDGMGANIPMMGTHMPMAGDMNGLSPTQALPPPLSMPSTSHCTPPPPYPTDCSIVSFLARLGCSSCLDYFTTQGLTTIYQIEHYSMDDLASLKIPEQFRHAIWKGILDHRQLHEFSSPSHLLRTPSSASTVSVGSSETRGERVIDAVRFTLRQTISFPPRDEWNDFNFDMDARRNKQQRIKEEGE

SEQ ID NO: 41806 - protein, 676 aa, Homo sapiens
MNFETSRCATLQYCPDPYIQRFVETPAHFSWKESYYRSTMSQSTQTNEFLSPEVFQHIWDFLEQPICSVQPIDLNFVDEPSEDGATNKIEISMDCIRMQDSDLSDPMWPQYTNLGLLNSMDQQIQNGSSSTSPYNTDHAQNSVTAPSPYAQPSSTFDALSPSPAIPSNTDYPGPHSFDVSFQQSSTAKSATWTYSTELKKLYCQIAKTCPIQIKVMTPPPQGAVIRAMPVYKKAEHVTEVVKRCPNHELSREFNEGQIAPPSHLIRVEGNSHAQYVEDPITGRQSVLVPYEPPQVGTEFTTVLYNFMCNSSCVGGMNRRPILIIVTLETRDGQVLGRRCFEARICACPGRDRKADEDSIRKQQVSDSTKNGDAFRQNTHGIQMTSIKKRRSPDDELLYLPVRGRETYEMLLKIKESLELMQYLPQHTIETYRQQQQQQHQHLLQKQTSIQSPSSYGNSSPPLNKMNSMNKLPSVSQLINPQQRNALTPTTIPDGMGANIPMMGTHMPMAGDMNGLSPTQALPPPLSMPSTSHCTPPPPYPTDCSIVSFLARLGCSSCLDYFTTQGLTTIYQIEHYSMDDLASLKIPEQFRHAIWKGILDHRQLHEFSSPSHLLRTPSSASTVSVGSSETRGERVIDAVRFTLRQTISFPPRDEWNDFNFDMDARRNKQQRIKEEGE

SEQ ID NO: 41807 - protein, 582 aa, Homo sapiens
MLYLENNAQTQFSEPQYTNLGLLNSMDQQIQNGSSSTSPYNTDHAQNSVTAPSPYAQPSSTFDALSPSPAIPSNTDYPGPHSFDVSFQQSSTAKSATWTYSTELKKLYCQIAKTCPIQIKVMTPPPQGAVIRAMPVYKKAEHVTEVVKRCPNHELSREFNEGQIAPPSHLIRVEGNSHAQYVEDPITGRQSVLVPYEPPQVGTEFTTVLYNFMCNSSCVGGMNRRPILIIVTLETRDGQVLGRRCFEARICACPGRDRKADEDSIRKQQVSDSTKNGDAFRQNTHGIQMTSIKKRRSPDDELLYLPVRGRETYEMLLKIKESLELMQYLPQHTIETYRQQQQQQHQHLLQKQTSIQSPSSYGNSSPPLNKMNSMNKLPSVSQLINPQQRNALTPTTIPDGMGANIPMMGTHMPMAGDMNGLSPTQALPPPLSMPSTSHCTPPPPYPTDCSIVSFLARLGCSSCLDYFTTQGLTTIYQIEHYSMDDLASLKIPEQFRHAIWKGILDHRQLHEFSSPSHLLRTPSSASTVSVGSSETRGERVIDAVRFTLRQTISFPPRDEWNDFNFDMDARRNKQQRIKEEGE

SEQ ID NO: 41808 - protein, 344 aa, Homo sapiens
MAAAGARPVELGFAESAPAWRLRSEQFPSKVGGRPAWLGAAGLPGPQALACELCGRPLSFLLQVYAPLPGRPDAFHRCIFLFCCREQPCCAGLRVFRNQLPRKNDFYSYEPPSENPPPETGESVCLQLKSGAHLCRVCGCLGPKTCSRCHKAYYCSKEHQTLDWRLGHKQACAQPDHLDHIIPDHNFLFPEFEIVIETEDEIMPEVVEKEDYSEIIGSMGEALEEELDSMAKHESREDKIFQKFKTQIALEPEQILRYGRGIAPIWISGENIPQEKDIPDCPCGAKRILEFQVMPQLLNYLKADRLGKSIDWGILAVFTCAESCSLGTGYTEEFVWKQDVTDTP

SEQ ID NO: 41809 - protein, 195 aa, Homo sapiens
MAAAGARPVELGFAESAPAWRLRSEQFPSKVYAPLPGRPDAFHRCIFLFCCREQPCCAGLRVFRNQLPRKNDFYSYEPPSENPPPETGESVCLQLKSGAHLCRVCGCLGPKTCSRCHKAYYCSKEHQTLDWRLGHKQACAQPDHLDHIIPDHNFLFPEFEIVIETEDEIMPEVVEKEDYSEIIGSMGKQFQDFIH

SEQ ID NO: 41810 - protein, 311 aa, Homo sapiens
MAAAGARPVELGFAESAPAWRLRSEQFPSKVYAPLPGRPDAFHRCIFLFCCREQPCCAGLRVFRNQLPRKNDFYSYEPPSENPPPETGESVCLQLKSGAHLCRVCGCLGPKTCSRCHKAYYCSKEHQTLDWRLGHKQACAQPDHLDHIIPDHNFLFPEFEIVIETEDEIMPEVVEKEDYSEIIGSMGEALEEELDSMAKHESREDKIFQKFKTQIALEPEQILRYGRGIAPIWISGENIPQEKDIPDCPCGAKRILEFQVMPQLLNYLKADRLGKSIDWGILAVFTCAESCSLGTGYTEEFVWKQDVTDTP

SEQ ID NO: 41811 - protein, 228 aa, Homo sapiens
MAAAGARPVELGFAESAPAWRLRSEQFPSKVGGRPAWLGAAGLPGPQALACELCGRPLSFLLQVYAPLPGRPDAFHRCIFLFCCREQPCCAGLRVFRNQLPRKNDFYSYEPPSENPPPETGESVCLQLKSGAHLCRVCGCLGPKTCSRCHKAYYCSKEHQTLDWRLGHKQACAQPDHLDHIIPDHNFLFPEFEIVIETEDEIMPEVVEKEDYSEIIGSMGKQFQDFIH

SEQ ID NO: 41812 - protein, 188 aa, Homo sapiens
MAAAGARPVELGFAESAPAWRLRSEQFPSKVYAPLPGRPDAFHRCIFLFCCREQPCCAGLRVFRNQLPRKNDFYSYEPPSENPPPETGESVCLQLKSGAHLCRVCGCLGPKTCSRCHKAYYCSKEHQTLDWRLGHKQACAQPDHLDHIIPDHNFLFPEFEIVIETEDEIMPEVVEKEDYSEIIGSMGI

SEQ ID NO: 41813 - protein, 165 aa, Homo sapiens
MGPLPVCLPIMLLLLLPSLLLLLLLPGPGSGEASRILRVHRRGILELAGTVGCVGPRTPIAYMKYGCFCGLGGHGQPRDAIDWCCHGHDCCYTRAEEAGCSPKTERYSWQCVNQSVLCGPAENKCQELLCKCDQEIANCLAQTEYNLKYLFYPQFLCEPDSPKCD

SEQ ID NO: 41814 - protein, 358 aa, Homo sapiens
MAAVLKPVLLGLRDAPVHGSPTGPGAWTASKLGGIPDALPTVAAPRPVCQRCGQPLALVVQVYCPLEGSPFHRLLHVFACACPGCSTGGARSWKVFRSQCLQVPEREAQDAQKQGNSLAAEDWCEGADDWGSDTEEGPSPQFTLDFGNDASSAKDVDWTARLQDLRLQDAVLGAAHPVPPGLPLFLPYYICVADEDDYRDFVNLDHAHSLLRDYQQREGIAMDQLLSQSLPNDGDEKYEKTIIKSGDQTFYKFMKRIAACQEQILRYSWSGEPLFLTCPTSEVTELPACSQCGGQRIFEFQLMPALVSMLKSANLGLSVEFGTILVYTCEKSCWPPNHQTPMEEFCIIQEDPDELLFK

SEQ ID NO: 41815 - protein, 534 aa, Homo sapiens
MIWYILIIGILLPQSLAHPGFFTSIGQMTDLIHTEKDLVTSLKDYIKAEEDKLEQIKKWAEKLDRLTSTATKDPEGFVGHPVNAFKLMKRLNTEWSELENLVLKDMSDGFISNLTIQRQYFPNDEDQVGAAKALLRLQDTYNLDTDTISKGNLPGVKHKSFLTAEDCFELGKVAYTEADYYHTELWMEQALRQLDEGEISTIDKVSVLDYLSYAVYQQGDLDKALLLTKKLLELDPEHQRANGNLKYFEYIMAKEKDVNKSASDDQSDQKTTPKKKGVAVDYLPERQKYEMLCRGEGIKMTPRRQKKLFCRYHDGNRNPKFILAPAKQEDEWDKPRIIRFHDIISDAEIEIVKDLAKPRLRRATISNPITGDLETVHYRISKSAWLSGYENPVVSRINMRIQDLTGLDVSTAEELQVANYGVGGQYEPHFDFARKDEPDAFKELGTGNRIATWLFYMSDVSAGGATVFPEVGASVWPKKGTAVFWYNLFASGEGDYSTRHAACPVLVGNKWVSNKWLHERGQEFRRPCTLSELE

SEQ ID NO: 41816 - protein, 534 aa, Homo sapiens
MIWYILIIGILLPQSLAHPGFFTSIGQMTDLIHTEKDLVTSLKDYIKAEEDKLEQIKKWAEKLDRLTSTATKDPEGFVGHPVNAFKLMKRLNTEWSELENLVLKDMSDGFISNLTIQRQYFPNDEDQVGAAKALLRLQDTYNLDTDTISKGNLPGVKHKSFLTAEDCFELGKVAYTEADYYHTELWMEQALRQLDEGEISTIDKVSVLDYLSYAVYQQGDLDKALLLTKKLLELDPEHQRANGNLKYFEYIMAKEKDVNKSASDDQSDQKTTPKKKGVAVDYLPERQKYEMLCRGEGIKMTPRRQKKLFCRYHDGNRNPKFILAPAKQEDEWDKPRIIRFHDIISDAEIEIVKDLAKPRLSRATVHDPETGKLTTAQYRVSKSAWLSGYENPVVSRINMRIQDLTGLDVSTAEELQVANYGVGGQYEPHFDFARKDEPDAFKELGTGNRIATWLFYMSDVSAGGATVFPEVGASVWPKKGTAVFWYNLFASGEGDYSTRHAACPVLVGNKWVSNKWLHERGQEFRRPCTLSELE

SEQ ID NO: 41817 - protein, 516 aa, Homo sapiens
MIWYILIIGILLPQSLAHPGFFTSIGQMTDLIHTEKDLVTSLKDYIKAEEDKLEQIKKWAEKLDRLTSTATKDPEGFVGHPVNAFKLMKRLNTEWSELENLVLKDMSDGFISNLTIQRQYFPNDEDQVGAAKALLRLQDTYNLDTDTISKGNLPGVKHKSFLTAEDCFELGKVAYTEADYYHTELWMEQALRQLDEGEISTIDKVSVLDYLSYAVYQQGDLDKALLLTKKLLELDPEHQRANGNLKYFEYIMAKEKDVNKSASDDQSDQKTTPKKKGVAVDYLPERQKYEMLCRGEGIKMTPRRQKKLFCRYHDGNRNPKFILAPAKQEDEWDKPRIIRFHDIISDAEIEIVKDLAKPRLSRATVHDPETGKLTTAQYRVSKSAWLSGYENPVVSRINMRIQDLTGLDVSTAEELQKDEPDAFKELGTGNRIATWLFYMSDVSAGGATVFPEVGASVWPKKGTAVFWYNLFASGEGDYSTRHAACPVLVGNKWVSNKWLHERGQEFRRPCTLSELE

SEQ ID NO: 41818 - protein, 254 aa, Homo sapiens
MSLARGHGDTAASTAAPLSEEGEVTSGLQALAVEDTGGPSASAGKAEDEGEGGREETEREGSGGEEAQGEVPSAGGEEPAEEDSEDWCVPCSDEEVELPADGQPWMPPPSEIQRLYELLAAHGTLELQAEILPRRPPTPEAQSEEERSDEEPEAKEEEEEKPHMPTEFDFDDEPVTPKDSLIDRRRTPGSSARSQKREARLDKVLSDMKRHKKLEEQILRTGRDLFSLDSEDPSPASPPLRSSGSSLFPRQRKY

SEQ ID NO: 41819 - protein, 589 aa, Homo sapiens
MVGQMYCYPGSHLARALTRALALALVLALLVGPFLSGLAGAIPAPGGRWARDGQVPPASRSRSVLLDVSAGQLLMVDGRHPDAVAWANLTNAIRETGWAFLELGTSGQYNDSLQAYAAGVVEAAVSEELIYMHWMNTVVNYCGPFEYEVGYCERLKSFLEANLEWMQEEMESNPDSPYWHQVRLTLLQLKGLEDSYEGRVSFPAGKFTIKPLGFLLLQLSGDLEDLELALNKTKIKPSLGSGSCSALIKLLPGQSDLLVAHNTWNNYQHMLRVIKKYWLQFREGPWGDYPLVPGNKLVFSSYPGTIFSCDDFYILGSGLVTLETTIGNKNPALWKYVRPRGCVLEWVRNIVANRLASDGATWADIFKRFNSGTYNNQWMIVDYKAFIPGGPSPGSRVLTILEQIPGMVVVADKTSELYQKTYWASYNIPSFETVFNASGLQALVAQYGDWFSYDGSPRAQIFRRNQSLVQDMDSMVRLMRYNDFLHDPLSLCKACNPQPNGENAISARSDLNPANGSYPFQALRQRSHGGIDVKVTSMSLARILSLLAASGPTWDQVPPFQWSTSPFSGLLHMGQPDLWKFAPVKVSWD

SEQ ID NO: 41820 - protein, 557 aa, Homo sapiens
MVGQMYCYPGSHLARALTRALALALVLALLVGPFLSGLAGAIPAPGGRWARDGQVPPASRSRSVLLDVSAGQLLMVDGRHPDAVAWANLTNAIRETGWAFLELGTSGQYNDSLQAYAAGVVEAAVSEELIYMHWMNTVVNYCGPFEYEVGYCERLKSFLEANLEWMQEEMESNPDSPYWHQVRLTLLQLKGLEDSYEGRVSFPAGKFTIKPLGFLLLQLSGDLEDLELALNKTKIKPSLGSGSCSALIKLLPGQSDLLVAHNTWNNYQHMLRVIKKYWLQFREGPWGDYPLVPGNKLVFSSYPGTIFSCDDFYILGSGLVTLETTIGNKNPALWKYVRPRGCVLEWVRNIVANRLASDGATWADIFKRFNSGTGMVVVADKTSELYQKTYWASYNIPSFETVFNASGLQALVAQYGDWFSYDGSPRAQIFRRNQSLVQDMDSMVRLMRYNDFLHDPLSLCKACNPQPNGENAISARSDLNPANGSYPFQALRQRSHGGIDVKVTSMSLARILSLLAASGPTWDQVPPFQWSTSPFSGLLHMGQPDLWKFAPVKVSWD

SEQ ID NO: 41821 - protein, 278 aa, Homo sapiens
MELWPCLAAALLLLLLLVQLSRAAEFYAKVALYCALCFTVSAVASLVCLLRHGGRTVENMSIIGWFVRSFKYFYGLRFEVRDPRRLQEARPCVIVSNHQSILDMMGLMEVLPERCVQIAKRELLFLGPVGLIMYLGGVFFINRQRSSTAMTVMADLGERMVRENLKVWIYPEGTRNDNGDLLPFKKGAFYLAVQAQVPIVPVVYSSFSSFYNTKKKFFTSGTVTVQVLEAIPTSGLTAADVPALVDTCHRAMRTTFLHISKTPQENGATAGSGVQPAQ

SEQ ID NO: 41822 - protein, 246 aa, Homo sapiens
MELWPCLAAALLLLLLLVQLSRAAEFYAKVALYCALCFTVSAVASLVCLLRHGGRTVENMSIIGWFVRSFKYFYGLRFEVRDPRRLQEARPCVIVSNHQSILDMMGLMEVLPERCVQIAKRELLFLGPVGLIMYLGGVFFINRQRSSTAMTVMADLGERMVRENVPIVPVVYSSFSSFYNTKKKFFTSGTVTVQVLEAIPTSGLTAADVPALVDTCHRAMRTTFLHISKTPQENGATAGSGVQPAQ

SEQ ID NO: 41823 - protein, 1290 aa, Homo sapiens
MAGAASPCANGCGPGAPSDAEVLHLCRSLEVGTVMTLFYSKKSQRPERKTFQVKLETRQITWSRGADKIEGAIDIREIKEIRPGKTSRDFDRYQEDPAFRPDQSHCFVILYGMEFRLKTLSLQATSEDEVNMWIKGLTWLMEDTLQAPTPLQIERWLRKQFYSVDRNREDRISAKDLKNMLSQVNYRVPNMRFLRERLTDLEQRSGDITYGQFAQLYRSLMYSAQKTMDLPFLEASTLRAGERPELCRVSLPEFQQFLLDYQGELWAVDRLQVQEFMLSFLRDPLREIEEPYFFLDEFVTFLFSKENSVWNSQLDAVCPDTMNNPLSHYWISSSHNTYLTGDQFSSESSLEAYARCLRMGCRCIELDCWDGPDGMPVIYHGHTLTTKIKFSDVLHTIKEHAFVASEYPVILSIEDHCSIAQQRNMAQYFKKVLGDTLLTKPVEISADGLPSPNQLKRKILIKHKKLAEGSAYEEVPTSMMYSENDISNSIKNGILYLEDPVNHEWYPHYFVLTSSKIYYSEETSSDQGNEDEEEPKEVSSSTELHSNEKWFHGKLGAGRDGRHIAERLLTEYCIETGAPDGSFLVRESETFVGDYTLSFWRNGKVQHCRIHSRQDAGTPKFFLTDNLVFDSLYDLITHYQQVPLRCNEFEMRLSEPVPQTNAHESKEWYHASLTRAQAEHMLMRVPRDGAFLVRKRNEPNSYAISFRAEGKIKHCRVQQEGQTVMLGNSEFDSLVDLISYYEKHPLYRKMKLRYPINEEALEKIGTAEPDYGALYEGRNPGFYVEANPMPTFKCAVKALFDYKAQREDELTFIKSAIIQNVEKQEGGWWRGDYGGKKQLWFPSNYVEEMVNPVALEPEREHLDENSPLGDLLRGVLDVPACQIAIRPEGKNNRLFVFSISMASVAHWSLDVAADSQEELQDWVKKIREVAQTADARLTEGKIMERRKKIALELSELVVYCRPVPFDEEKIGTERACYRDMSSFPETKAEKYVNKAKGKKFLQYNRLQLSRIYPKGQRLDSSNYDPLPMWICGSQLVALNFQTPDKPMQMNQALFMTGRHCGYVLQPSTMRDEAFDPFDKSSLRGLEPCAISIEVLGARHLPKNGRGIVCPFVEIEVAGAEYDSTKQKTEFVVDNGLNPVWPAKPFHFQISNPEFAFLRFVVYEEDMFSDQNFLAQATFPVKGLKTGYRAVPLKNNYSEDLELASLLIKIDIFPAKENGDLSPFSGTSLRERGSDASGQLFHGRAREGSFESRYQQPFEDFRISQEHLADHFDSRERRAPRRTRVNGDNRL

SEQ ID NO: 41824 - protein, 1291 aa, Homo sapiens
MAGAASPCANGCGPGAPSDAEVLHLCRSLEVGTVMTLFYSKKSQRPERKTFQVKLETRQITWSRGADKIEGAIDIREIKEIRPGKTSRDFDRYQEDPAFRPDQSHCFVILYGMEFRLKTLSLQATSEDEVNMWIKGLTWLMEDTLQAPTPLQIERWLRKQFYSVDRNREDRISAKDLKNMLSQVNYRVPNMRFLRERLTDLEQRSGDITYGQFAQLYRSLMYSAQKTMDLPFLEASTLRAGERPELCRVSLPEFQQFLLDYQGELWAVDRLQVQEFMLSFLRDPLREIEEPYFFLDEFVTFLFSKENSVWNSQLDAVCPDTMNNPLSHYWISSSHNTYLTGDQFSSESSLEAYARCLRMGCRCIELDCWDGPDGMPVIYHGHTLTTKIKFSDVLHTIKEHAFVASEYPVILSIEDHCSIAQQRNMAQYFKKVLGDTLLTKPVEISADGLPSPNQLKRKILIKHKKLAEGSAYEEVPTSMMYSENDISNSIKNGILYLEDPVNHEWYPHYFVLTSSKIYYSEETSSDQGNEDEEEPKEVSSSTELHSNEKWFHGKLGAGRDGRHIAERLLTEYCIETGAPDGSFLVRESETFVGDYTLSFWRNGKVQHCRIHSRQDAGTPKFFLTDNLVFDSLYDLITHYQQVPLRCNEFEMRLSEPVPQTNAHESKEWYHASLTRAQAEHMLMRVPRDGAFLVRKRNEPNSYAISFRAEGKIKHCRVQQEGQTVMLGNSEFDSLVDLISYYEKHPLYRKMKLRYPINEEALEKIGTAEPDYGALYEGRNPGFYVEANPMPTFKCAVKALFDYKAQREDELTFIKSAIIQNVEKQEGGWWRGDYGGKKQLWFPSNYVEEMVNPVALEPEREHLDENSPLGDLLRGVLDVPACQIAIRPEGKNNRLFVFSISMASVAHWSLDVAADSQEELQDWVKKIREVAQTADARLTEGKIMERRKKIALELSELVVYCRPVPFDEEKIGTERACYRDMSSFPETKAEKYVNKAKGKKFLQYNRLQLSRIYPKGQRLDSSNYDPLPMWICGSQLVALNFQTPDKPMQMNQALFMTGRHCGYVLQPSTMRDEAFDPFDKSSLRGLEPCAISIEVLGARHLPKNGRGIVCPFVEIEVAGAEYDSTKQKTEFVVDNGLNPVWPAKPFHFQISNPEFAFLRFVVYEEDMFSDQNFLAQATFPVKGLKTGYRAVPLKNNYSEDLELASLLIKIDIFPAKQENGDLSPFSGTSLRERGSDASGQLFHGRAREGSFESRYQQPFEDFRISQEHLADHFDSRERRAPRRTRVNGDNRL

SEQ ID NO: 41825 - protein, 291 aa, Homo sapiens
MERNSSLWKNLIDEHPVCTTWKQEAEGAIYHLASILFVVGFMGGSGFFGLLYVFSLLGLGFLCSAVWAWVDVCAADIFSWNFVLFVICFMQFVHIAYQVRSITFAREFQVLYSSLFQPLGISLPVFRTIALSSEVVTLEKEHCYAMQGKTSIDKLSLLVSGRIRVTVDGEFLHYIFPLQFLDSPEWDSLRPTEEGIFQVTLTAETDCRYVSWRRKKLYLLFAQHRYISRLFSVLIGSDIADKLYALNDRVYIGKRYHYDIRLPNFYQMSTPEIRRSPLTQHFQNSRRYCDK

SEQ ID NO: 41826 - protein, 434 aa, Homo sapiens
MSADGAEADGSTQVTVEEPVQQPSVVDRVASMPLISSTCDMVSAAYASTKESYPHIKTVCDAAEKGVRTLTAAAVSGAQPILSKLEPQIASASEYAHRGLDKLEENLPILQQPTEKVLADTKELVSSKVSGAQEMVSSAKDTVATQLSEAVDATRGAVQSGVDKTKSVVTGGVQSVMGSRLGQMVLSGVDTVLGKSEEWADNHLPLTDAELARIATSLDGFDVASVQQQRQEQSYFVRLGSLSERLRQHAYEHSLGKLRATKQRAQEALLQLSQVLSLMETVKQGVDQKLVEGQEKLHQMWLSWNQKQLQGPEKEPPKPEQVESRALTMFRDIAQQLQATCTSLGSSIQGLPTNVKDQVQQARRQVEDLQATFSSIHSFQDLSSSILAQSRERVASAREALDHMVEYVAQNTPVTWLVGPFAPGITEKAPEEKK

SEQ ID NO: 41827 - protein, 251 aa, Homo sapiens
MVLSGVDTVLGKSEEWADNHLPLTDAELARIATSLDGFDVASVQQQRQEQSYFVRLGSLSERLRQHAYEHSLGKLRATKQRAQEALLQLSQVLSLMETVKQGVDQKLVEGQEKLHQMWLSWNQKQLQGPEKEPPKPEQVESRALTMFRDIAQQLQATCTSLGSSIQGLPTNVKDQVQQARRQVEDLQATFSSIHSFQDLSSSILAQSRERVASAREALDHMVEYVAQNTPVTWLVGPFAPGITEKAPEEKK

SEQ ID NO: 41828 - protein, 433 aa, Homo sapiens
MSADGAEADGSTQVTVEEPVQQPSVVDRVASMPLISSTCDMVSAAYASTKESYPHIKTVCDAAEKGVRTLTAAAVSGAQPILSKLEPQIASASEYAHRGLDKLEENLPILQQPTEKVLADTKELVSSKVSGAQEMVSSAKDTVATQLSEAVDATRGAVQSGVDKTKSVVTGGVQSVMGSRLGQMVLSGVDTVLGKSEEWADNHLPLTDAELARIATSLDGFDVASVQQQRQEQSYFVRLGSLSERLRQHAYEHSLGKLRATKQRAQEALLQLSQVLSLMETVKQGVDQKLVEGQEKLHQMWLSWNQKQLQGPEKEPPKPEVESRALTMFRDIAQQLQATCTSLGSSIQGLPTNVKDQVQQARRQVEDLQATFSSIHSFQDLSSSILAQSRERVASAREALDHMVEYVAQNTPVTWLVGPFAPGITEKAPEEKK

SEQ ID NO: 41829 - protein, 422 aa, Homo sapiens
MSADGAEADGSTQVTVEEPVQQPSVVDRVASMPLISSTCDMVSAAYASTKESYPHIKTVCDAAEKGVRTLTAAAVSGAQPILSKLEPQIASASEYAHRGLDKLEENLPILQQPTEKVSGAQEMVSSAKDTVATQLSEAVDATRGAVQSGVDKTKSVVTGGVQSVMGSRLGQMVLSGVDTVLGKSEEWADNHLPLTDAELARIATSLDGFDVASVQQQRQEQSYFVRLGSLSERLRQHAYEHSLGKLRATKQRAQEALLQLSQVLSLMETVKQGVDQKLVEGQEKLHQMWLSWNQKQLQGPEKEPPKPEQVESRALTMFRDIAQQLQATCTSLGSSIQGLPTNVKDQVQQARRQVEDLQATFSSIHSFQDLSSSILAQSRERVASAREALDHMVEYVAQNTPVTWLVGPFAPGITEKAPEEKK

SEQ ID NO: 41830 - protein, 248 aa, Homo sapiens
MASRWQNMGTSVRRRSLQHQEQLEDSKELQPVVSHQETSVGALGSLCRQFQRRLPLRAVNLNLRAGPSWKRLETPEPGQQGLQAAARSAKSALGAVSQRIQESCQSGTKWLVETQVKARRRKRGAQKGSGSPTHSLSQKSTRLSGAAPAHSAADPWEKEHHRLSVRMGSHAHPLRRSRREAAFRSPYSSTEPLCSPSESDSDLEPVGAGIQHLQKLSQELDEAIMAEERKQALSDRQGFILKDVYASP

SEQ ID NO: 41831 - protein, 238 aa, Homo sapiens
MASRWQNMGTSVRRRSLQHQEQLEDSKELQPVVSHQETSVGALGSLCRQFQRRLPLRAVNLNLRAGPSWKRLETPEPGQQGLQAAARSAKSALGAVSQRIQESCQSGTKWLVETQVKARRRKRGAQKGSGSPTHSLSQKSTRLSGAAPAHSAADPWEKEHHRLSVRMGSHAHPLRRSRREAAFRSPYSSTEPLCSPSESDSDLEPVGAGIQHLQKLSQELDEAIMAEESGDIVSLIHD

SEQ ID NO: 41832 - protein, 472 aa, Homo sapiens
MMQHASPAPALTMMATQNVPPPPYQDSPQMTATAQPPSKAQAVHISAPSAAASTPVPSAPIDPQAQLEADKRAVYRHPLFPLLTLLFEKCEQATQGSECITSASFDVDIENFVHQQEQEHKPFFSDDPELDNLMVKAIQVLRIHLLELEKVNELCKDFCNRYITCLKTKMHSDNLLRNDLGGPYSPNQPSINLHSQDLLQNSPNSMSGVSNNPQGIVVPASALQQGNIAMTTVNSQVVSGGALYQPVTMVTSQGQVVTQAIPQGAIQIQNTQVNLDLTSLLDNEDKKSKNKRGVLPKHATNIMRSWLFQHLMHPYPTEDEKRQIAAQTNLTLLQVNNWFINARRRILQPMLDASNPDPAPKAKKIKSQHRPTQRFWPNSIAAGVLQQQGGAPGTNPDGSINLDNLQSLSSDSATMAMQQAMMAAHDDSLDGTEEEDEDEMEEEEEEELEEEVDELQTTNVSDLGLEHSDSLE

SEQ ID NO: 41833 - protein, 408 aa, Homo sapiens
MSRPHPTRTAHRHPLFPLLTLLFEKCEQATQGSECITSASFDVDIENFVHQQEQEHKPFFSDDPELDNLMVKAIQVLRIHLLELEKVNELCKDFCNRYITCLKTKMHSDNLLRNDLGGPYSPNQPSINLHSQDLLQNSPNSMSGVSNNPQGIVVPASALQQGNIAMTTVNSQVVSGGALYQPVTMVTSQGQVVTQAIPQGAIQIQNTQVNLDLTSLLDNEDKKSKNKRGVLPKHATNIMRSWLFQHLMHPYPTEDEKRQIAAQTNLTLLQVNNWFINARRRILQPMLDASNPDPAPKAKKIKSQHRPTQRFWPNSIAAGVLQQQGGAPGTNPDGSINLDNLQSLSSDSATMAMQQAMMAAHDDSLDGTEEEDEDEMEEEEEEELEEEVDELQTTNVSDLGLEHSDSLE

SEQ ID NO: 41834 - protein, 4303 aa, Homo sapiens
MPPAAPARLALALGLGLWLGALAGGPGRGCGPCEPPCLCGPAPGAACRVNCSGRGLRTLGPALRIPADATALDVSHNLLRALDVGLLANLSALAELDISNNKISTLEEGIFANLFNLSEINLSGNPFECDCGLAWLPRWAEEQQVRVVQPEAATCAGPGSLAGQPLLGIPLLDSGCGEEYVACLPDNSSGTVAAVSFSAAHEGLLQPEACSAFCFSTGQGLAALSEQGWCLCGAAQPSSASFACLSLCSGPPPPPAPTCRGPTLLQHVFPASPGATLVGPHGPLASGQLAAFHIAAPLPVTATRWDFGDGSAEVDAAGPAASHRYVLPGRYHVTAVLALGAGSALLGTDVQVEAAPAALELVCPSSVQSDESLDLSIQNRGGSGLEAAYSIVALGEEPARAVHPLCPSDTEIFPGNGHCYRLVVEKAAWLQAQEQCQAWAGAALAMVDSPAVQRFLVSRVTRSLDVWIGFSTVQGVEVGPAPQGEAFSLESCQNWLPGEPHPATAEHCVRLGPTGWCNTDLCSAPHSYVCELQPGGPVQDAENLLVGAPSGDLQGPLTPLAQQDGLSAPHEPVEVMVFPGLRLSREAFLTTAEFGTQELRRPAQLRLQVYRLLSTAGTPENGSEPESRSPDNRTQLAPACMPGGRWCPGANICLPLDASCHPQACANGCTSGPGLPGAPYALWREFLFSVPAGPPAQYSVTLHGQDVLMLPGDLVGLQHDAGPGALLHCSPAPGHPGPRAPYLSANASSWLPHLPAQLEGTWACPACALRLLAATEQLTVLLGLRPNPGLRLPGRYEVRAEVGNGVSRHNLSCSFDVVSPVAGLRVIYPAPRDGRLYVPTNGSALVLQVDSGANATATARWPGGSVSARFENVCPALVATFVPGCPWETNDTLFSVVALPWLSEGEHVVDVVVENSASRANLSLRVTAEEPICGLRATPSPEARVLQGVLVRYSPVVEAGSDMVFRWTINDKQSLTFQNVVFNVIYQSAAVFKLSLTASNHVSNVTVNYNVTVERMNRMQGLQVSTVPAVLSPNATLALTAGVLVDSAVEVAFLWTFGDGEQALHQFQPPYNESFPVPDPSVAQVLVEHNVMHTYAAPGEYLLTVLASNAFENLTQQVPVSVRASLPSVAVGVSDGVLVAGRPVTFYPHPLPSPGGVLYTWDFGDGSPVLTQSQPAANHTYASRGTYHVRLEVNNTVSGAAAQADVRVFEELRGLSVDMSLAVEQGAPVVVSAAVQTGDNITWTFDMGDGTVLSGPEATVEHVYLRAQNCTVTVGAASPAGHLARSLHVLVFVLEVLRVEPAACIPTQPDARLTAYVTGNPAHYLFDWTFGDGSSNTTVRGCPTVTHNFTRSGTFPLALVLSSRVNRAHYFTSICVEPEVGNVTLQPERQFVQLGDEAWLVACAWPPFPYRYTWDFGTEEAAPTRARGPEVTFIYRDPGSYLVTVTASNNISAANDSALVEVQEPVLVTSIKVNGSLGLELQQPYLFSAVGRGRPASYLWDLGDGGWLEGPEVTHAYNSTGDFTVRVAGWNEVSRSEAWLNVTVKRRVRGLVVNASRTVVPLNGSVSFSTSLEAGSDVRYSWVLCDRCTPIPGGPTISYTFRSVGTFNIIVTAENEVGSAQDSIFVYVLQLIEGLQVVGGGRYFPTNHTVQLQAVVRDGTNVSYSWTAWRDRGPALAGSGKGFSLTVLEAGTYHVQLRATNMLGSAWADCTMDFVEPVGWLMVAASPNPAAVNTSVTLSAELAGGSGVVYTWSLEEGLSWETSEPFTTHSFPTPGLHLVTMTAGNPLGSANATVEVDVQVPVSGLSIRASEPGGSFVAAGSSVPFWGQLATGTNVSWCWAVPGGSSKRGPHVTMVFPDAGTFSIRLNASNAVSWVSATYNLTAEEPIVGLVLWASSKVVAPGQLVHFQILLAAGSAVTFRLQVGGANPEVLPGPRFSHSFPRVGDHVVSVRGKNHVSWAQAQVRIVVLEAVSGLQVPNCCEPGIATGTERNFTARVQRGSRVAYAWYFSLQKVQGDSLVILSGRDVTYTPVAAGLLEIQVRAFNALGSENRTLVLEVQDAVQYVALQSGPCFTNRSAQFEAATSPSPRRVAYHWDFGDGSPGQDTDEPRAEHSYLRPGDYRVQVNASNLVSFFVAQATVTVQVLACREPEVDVVLPLQVLMRRSQRNYLEAHVDLRDCVTYQTEYRWEVYRTASCQRPGRPARVALPGVDVSRPRLVLPRLALPVGHYCFVFVVSFGDTPLTQSIQANVTVAPERLVPIIEGGSYRVWSDTRDLVLDGSESYDPNLEDGDQTPLSFHWACVASTQREAGGCALNFGPRGSSTVTIPRERLAAGVEYTFSLTVWKAGRKEEATNQTVLIRSGRVPIVSLECVSCKAQAVYEVSRSSYVYLEGRCLNCSSGSKRGRWAARTFSNKTLVLDETTTSTGSAGMRLVLRRGVLRDGEGYTFTLTVLGRSGEEEGCASIRLSPNRPPLGGSCRLFPLGAVHALTTKVHFECTGWHDAEDAGAPLVYALLLRRCRQGHCEEFCVYKGSLSSYGAVLPPGFRPHFEVGLAVVVQDQLGAAVVALNRSLAITLPEPNGSATGLTVWLHGLTASVLPGLLRQADPQHVIEYSLALVTVLNEYERALDVAAEPKHERQHRAQIRKNITETLVSLRVHTVDDIQQIAAALAQCMGPSRELVCRSCLKQTLHKLEAMMLILQAETTAGTVTPTAIGDSILNITGDLIHLASSDVRAPQPSELGAESPSRMVASQAYNLTSALMRILMRSRVLNEEPLTLAGEEIVAQGKRSDPRSLLCYGGAPGPGCHFSIPEAFSGALANLSDVVQLIFLVDSNPFPFGYISNYTVSTKVASMAFQTQAGAQIPIERLASERAITVKVPNNSDWAARGHRSSANSANSVVVQPQASVGAVVTLDSSNPAAGLHLQLNYTLLDGHYLSEEPEPYLAVYLHSEPRPNEHNCSASRRIRPESLQGADHRPYTFFISPGSRDPAGSYHLNLSSHFRWSALQVSVGLYTSLCQYFSEEDMVWRTEGLLPLEETSPRQAVCLTRHLTAFGASLFVPPSHVRFVFPEPTADVNYIVMLTCAVCLVTYMVMAAILHKLDQLDASRGRAIPFCGQRGRFKYEILVKTGWGRGSGTTAHVGIMLYGVDSRSGHRHLDGDRAFHRNSLDIFRIATPHSLGSVWKIRVWHDNKGLSPAWFLQHVIVRDLQTARSAFFLVNDWLSVETEANGGLVEKEVLAASDAALLRFRRLLVAELQRGFFDKHIWLSIWDRPPRSRFTRIQRATCCVLLICLFLGANAVWYGAVGDSAYSTGHVSRLSPLSVDTVAVGLVSSVVVYPVYLAILFLFRMSRSKVAGSPSPTPAGQQVLDIDSCLDSSVLDSSFLTFSGLHAEQAFVGQMKSDLFLDDSKSLVCWPSGEGTLSWPDLLSDPSIVGSNLRQLARGQAGHGLGPEEDGFSLASPYSPAKSFSASDEDLIQQVLAEGVSSPAPTQDTHMETDLLSSLSSTPGEKTETLALQRLGELGPPSPGLNWEQPQAARLSRTGLVEGLRKRLLPAWCASLAHGLSLLLVAVAVAVSGWVGASFPPGVSVAWLLSSSASFLASFLGWEPLKVLLEALYFSLVAKRLHPDEDDTLVESPAVTPVSARVPRVRPPHGFALFLAKEEARKVKRLHGMLRSLLVYMLFLLVTLLASYGDASCHGHAYRLQSAIKQELHSRAFLAITRSEELWPWMAHVLLPYVHGNQSSPELGPPRLRQVRLQEALYPDPPGPRVHTCSAAGGFSTSDYDVGWESPHNGSGTWAYSAPDLLGAWSWGSCAVYDSGGYVQELGLSLEESRDRLRFLQLHNWLDNRSRAVFLELTRYSPAVGLHAAVTLRLEFPAAGRALAALSVRPFALRRLSAGLSLPLLTSVCLLLFAVHFAVAEARTWHREGRWRVLRLGAWARWLLVALTAATALVRLAQLGAADRQWTRFVRGRPRRFTSFDQVAQLSSAARGLAASLLFLLLVKAAQQLRFVRQWSVFGKTLCRALPELLGVTLGLVVLGVAYAQLAILLVSSCVDSLWSVAQALLVLCPGTGLSTLCPAESWHLSPLLCVGLWALRLWGALRLGAVILRWRYHALRGELYRPAWEPQDYEMVELFLRRLRLWMGLSKVKEFRHKVRFEGMEPLPSRSSRGSKVSPDVPPPSAGSDASHPSTSSSQLDGLSVSLGRLGTRCEPEPSRLQAVFEALLTQFDRLNQATEDVYQLEQQLHSLQGRRSSRAPAGSSRGPSPGLRPALPSRLARASRGVDLATGPSRTPLRAKNKVHPSST

SEQ ID NO: 41835 - protein, 4292 aa, Homo sapiens
MPPAAPARLALALGLGLWLGALAGGPGRGCGPCEPPCLCGPAPGAACRVNCSGRGLRTLGPALRIPADATALDVSHNLLRALDVGLLANLSALAELDISNNKISTLEEGIFANLFNLSEINLSGNPFECDCGLAWLPRWAEEQQVRVVQPEAATCAGPGSLAGQPLLGIPLLDSGCGEEYVACLPDNSSGTVAAVSFSAAHEGLLQPEACSAFCFSTGQGLAALSEQGWCLCGAAQPSSASFACLSLCSGPPPPPAPTCRGPTLLQHVFPASPGATLVGPHGPLASGQLAAFHIAAPLPVTATRWDFGDGSAEVDAAGPAASHRYVLPGRYHVTAVLALGAGSALLGTDVQVEAAPAALELVCPSSVQSDESLDLSIQNRGGSGLEAAYSIVALGEEPARAVHPLCPSDTEIFPGNGHCYRLVVEKAAWLQAQEQCQAWAGAALAMVDSPAVQRFLVSRVTRSLDVWIGFSTVQGVEVGPAPQGEAFSLESCQNWLPGEPHPATAEHCVRLGPTGWCNTDLCSAPHSYVCELQPGGPVQDAENLLVGAPSGDLQGPLTPLAQQDGLSAPHEPVEVMVFPGLRLSREAFLTTAEFGTQELRRPAQLRLQVYRLLSTAGTPENGSEPESRSPDNRTQLAPACMPGGRWCPGANICLPLDASCHPQACANGCTSGPGLPGAPYALWREFLFSVPAGPPAQYSVTLHGQDVLMLPGDLVGLQHDAGPGALLHCSPAPGHPGPRAPYLSANASSWLPHLPAQLEGTWACPACALRLLAATEQLTVLLGLRPNPGLRLPGRYEVRAEVGNGVSRHNLSCSFDVVSPVAGLRVIYPAPRDGRLYVPTNGSALVLQVDSGANATATARWPGGSVSARFENVCPALVATFVPGCPWETNDTLFSVVALPWLSEGEHVVDVVVENSASRANLSLRVTAEEPICGLRATPSPEARVLQGVLVRYSPVVEAGSDMVFRWTINDKQSLTFQNVVFNVIYQSAAVFKLSLTASNHVSNVTVNYNVTVERMNRMQGLQVSTVPAVLSPNATLALTAGVLVDSAVEVAFLWTFGDGEQALHQFQPPYNESFPVPDPSVAQVLVEHNVMHTYAAPGEYLLTVLASNAFENLTQQVPVSVRASLPSVAVGVSDGVLVAGRPVTFYPHPLPSPGGVLYTWDFGDGSPVLTQSQPAANHTYASRGTYHVRLEVNNTVSGAAAQADVRVFEELRGLSVDMSLAVEQGAPVVVSAAVQTGDNITWTFDMGDGTVLSGPEATVEHVYLRAQNCTVTVGAASPAGHLARSLHVLVFVLEVLRVEPAACIPTQPDARLTAYVTGNPAHYLFDWTFGDGSSNTTVRGCPTVTHNFTRSGTFPLALVLSSRVNRAHYFTSICVEPEVGNVTLQPERQFVQLGDEAWLVACAWPPFPYRYTWDFGTEEAAPTRARGPEVTFIYRDPGSYLVTVTASNNISAANDSALVEVQEPVLVTSIKVNGSLGLELQQPYLFSAVGRGRPASYLWDLGDGGWLEGPEVTHAYNSTGDFTVRVAGWNEVSRSEAWLNVTVKRRVRGLVVNASRTVVPLNGSVSFSTSLEAGSDVRYSWVLCDRCTPIPGGPTISYTFRSVGTFNIIVTAENEVGSAQDSIFVYVLQLIEGLQVVGGGRYFPTNHTVQLQAVVRDGTNVSYSWTAWRDRGPALAGSGKGFSLTVLEAGTYHVQLRATNMLGSAWADCTMDFVEPVGWLMVAASPNPAAVNTSVTLSAELAGGSGVVYTWSLEEGLSWETSEPFTTHSFPTPGLHLVTMTAGNPLGSANATVEVDVQVPVSGLSIRASEPGGSFVAAGSSVPFWGQLATGTNVSWCWAVPGGSSKRGPHVTMVFPDAGTFSIRLNASNAVSWVSATYNLTAEEPIVGLVLWASSKVVAPGQLVHFQILLAAGSAVTFRLQVGGANPEVLPGPRFSHSFPRVGDHVVSVRGKNHVSWAQAQVRIVVLEAVSGLQVPNCCEPGIATGTERNFTARVQRGSRVAYAWYFSLQKVQGDSLVILSGRDVTYTPVAAGLLEIQVRAFNALGSENRTLVLEVQDAVQYVALQSGPCFTNRSAQFEAATSPSPRRVAYHWDFGDGSPGQDTDEPRAEHSYLRPGDYRVQVNASNLVSFFVAQATVTVQVLACREPEVDVVLPLQVLMRRSQRNYLEAHVDLRDCVTYQTEYRWEVYRTASCQRPGRPARVALPGVDVSRPRLVLPRLALPVGHYCFVFVVSFGDTPLTQSIQANVTVAPERLVPIIEGGSYRVWSDTRDLVLDGSESYDPNLEDGDQTPLSFHWACVASTQREAGGCALNFGPRGSSTVTIPRERLAAGVEYTFSLTVWKAGRKEEATNQTVLIRSGRVPIVSLECVSCKAQAVYEVSRSSYVYLEGRCLNCSSGSKRGRWAARTFSNKTLVLDETTTSTGSAGMRLVLRRGVLRDGEGYTFTLTVLGRSGEEEGCASIRLSPNRPPLGGSCRLFPLGAVHALTTKVHFECTALVYALLLRRCRQGHCEEFCVYKGSLSSYGAVLPPGFRPHFEVGLAVVVQDQLGAAVVALNRSLAITLPEPNGSATGLTVWLHGLTASVLPGLLRQADPQHVIEYSLALVTVLNEYERALDVAAEPKHERQHRAQIRKNITETLVSLRVHTVDDIQQIAAALAQCMGPSRELVCRSCLKQTLHKLEAMMLILQAETTAGTVTPTAIGDSILNITGDLIHLASSDVRAPQPSELGAESPSRMVASQAYNLTSALMRILMRSRVLNEEPLTLAGEEIVAQGKRSDPRSLLCYGGAPGPGCHFSIPEAFSGALANLSDVVQLIFLVDSNPFPFGYISNYTVSTKVASMAFQTQAGAQIPIERLASERAITVKVPNNSDWAARGHRSSANSANSVVVQPQASVGAVVTLDSSNPAAGLHLQLNYTLLDGHYLSEEPEPYLAVYLHSEPRPNEHNCSASRRIRPESLQGADHRPYTFFISPGSRDPAGSYHLNLSSHFRWSALQVSVGLYTSLCQYFSEEDMVWRTEGLLPLEETSPRQAVCLTRHLTAFGASLFVPPSHVRFVFPEPTADVNYIVMLTCAVCLVTYMVMAAILHKLDQLDASRGRAIPFCGQRGRFKYEILVKTGWGRGSGTTAHVGIMLYGVDSRSGHRHLDGDRAFHRNSLDIFRIATPHSLGSVWKIRVWHDNKGLSPAWFLQHVIVRDLQTARSAFFLVNDWLSVETEANGGLVEKEVLAASDAALLRFRRLLVAELQRGFFDKHIWLSIWDRPPRSRFTRIQRATCCVLLICLFLGANAVWYGAVGDSAYSTGHVSRLSPLSVDTVAVGLVSSVVVYPVYLAILFLFRMSRSKVAGSPSPTPAGQQVLDIDSCLDSSVLDSSFLTFSGLHAEAFVGQMKSDLFLDDSKSLVCWPSGEGTLSWPDLLSDPSIVGSNLRQLARGQAGHGLGPEEDGFSLASPYSPAKSFSASDEDLIQQVLAEGVSSPAPTQDTHMETDLLSSLSSTPGEKTETLALQRLGELGPPSPGLNWEQPQAARLSRTGLVEGLRKRLLPAWCASLAHGLSLLLVAVAVAVSGWVGASFPPGVSVAWLLSSSASFLASFLGWEPLKVLLEALYFSLVAKRLHPDEDDTLVESPAVTPVSARVPRVRPPHGFALFLAKEEARKVKRLHGMLRSLLVYMLFLLVTLLASYGDASCHGHAYRLQSAIKQELHSRAFLAITRSEELWPWMAHVLLPYVHGNQSSPELGPPRLRQVRLQEALYPDPPGPRVHTCSAAGGFSTSDYDVGWESPHNGSGTWAYSAPDLLGAWSWGSCAVYDSGGYVQELGLSLEESRDRLRFLQLHNWLDNRSRAVFLELTRYSPAVGLHAAVTLRLEFPAAGRALAALSVRPFALRRLSAGLSLPLLTSVCLLLFAVHFAVAEARTWHREGRWRVLRLGAWARWLLVALTAATALVRLAQLGAADRQWTRFVRGRPRRFTSFDQVAQLSSAARGLAASLLFLLLVKAAQQLRFVRQWSVFGKTLCRALPELLGVTLGLVVLGVAYAQLAILLVSSCVDSLWSVAQALLVLCPGTGLSTLCPAESWHLSPLLCVGLWALRLWGALRLGAVILRWRYHALRGELYRPAWEPQDYEMVELFLRRLRLWMGLSKVKEFRHKVRFEGMEPLPSRSSRGSKVSPDVPPPSAGSDASHPSTSSSQLDGLSVSLGRLGTRCEPEPSRLQAVFEALLTQFDRLNQATEDVYQLEQQLHSLQGRRSSRAPAGSSRGPSPGLRPALPSRLARASRGVDLATGPSRTPLRAKNKVHPSST

SEQ ID NO: 41836 - protein, 4302 aa, Homo sapiens
MPPAAPARLALALGLGLWLGALAGGPGRGCGPCEPPCLCGPAPGAACRVNCSGRGLRTLGPALRIPADATALDVSHNLLRALDVGLLANLSALAELDISNNKISTLEEGIFANLFNLSEINLSGNPFECDCGLAWLPRWAEEQQVRVVQPEAATCAGPGSLAGQPLLGIPLLDSGCGEEYVACLPDNSSGTVAAVSFSAAHEGLLQPEACSAFCFSTGQGLAALSEQGWCLCGAAQPSSASFACLSLCSGPPPPPAPTCRGPTLLQHVFPASPGATLVGPHGPLASGQLAAFHIAAPLPVTATRWDFGDGSAEVDAAGPAASHRYVLPGRYHVTAVLALGAGSALLGTDVQVEAAPAALELVCPSSVQSDESLDLSIQNRGGSGLEAAYSIVALGEEPARAVHPLCPSDTEIFPGNGHCYRLVVEKAAWLQAQEQCQAWAGAALAMVDSPAVQRFLVSRVTRSLDVWIGFSTVQGVEVGPAPQGEAFSLESCQNWLPGEPHPATAEHCVRLGPTGWCNTDLCSAPHSYVCELQPGGPVQDAENLLVGAPSGDLQGPLTPLAQQDGLSAPHEPVEVMVFPGLRLSREAFLTTAEFGTQELRRPAQLRLQVYRLLSTAGTPENGSEPESRSPDNRTQLAPACMPGGRWCPGANICLPLDASCHPQACANGCTSGPGLPGAPYALWREFLFSVPAGPPAQYSVTLHGQDVLMLPGDLVGLQHDAGPGALLHCSPAPGHPGPRAPYLSANASSWLPHLPAQLEGTWACPACALRLLAATEQLTVLLGLRPNPGLRLPGRYEVRAEVGNGVSRHNLSCSFDVVSPVAGLRVIYPAPRDGRLYVPTNGSALVLQVDSGANATATARWPGGSVSARFENVCPALVATFVPGCPWETNDTLFSVVALPWLSEGEHVVDVVVENSASRANLSLRVTAEEPICGLRATPSPEARVLQGVLVRYSPVVEAGSDMVFRWTINDKQSLTFQNVVFNVIYQSAAVFKLSLTASNHVSNVTVNYNVTVERMNRMQGLQVSTVPAVLSPNATLALTAGVLVDSAVEVAFLWTFGDGEQALHQFQPPYNESFPVPDPSVAQVLVEHNVMHTYAAPGEYLLTVLASNAFENLTQQVPVSVRASLPSVAVGVSDGVLVAGRPVTFYPHPLPSPGGVLYTWDFGDGSPVLTQSQPAANHTYASRGTYHVRLEVNNTVSGAAAQADVRVFEELRGLSVDMSLAVEQGAPVVVSAAVQTGDNITWTFDMGDGTVLSGPEATVEHVYLRAQNCTVTVGAASPAGHLARSLHVLVFVLEVLRVEPAACIPTQPDARLTAYVTGNPAHYLFDWTFGDGSSNTTVRGCPTVTHNFTRSGTFPLALVLSSRVNRAHYFTSICVEPEVGNVTLQPERQFVQLGDEAWLVACAWPPFPYRYTWDFGTEEAAPTRARGPEVTFIYRDPGSYLVTVTASNNISAANDSALVEVQEPVLVTSIKVNGSLGLELQQPYLFSAVGRGRPASYLWDLGDGGWLEGPEVTHAYNSTGDFTVRVAGWNEVSRSEAWLNVTVKRRVRGLVVNASRTVVPLNGSVSFSTSLEAGSDVRYSWVLCDRCTPIPGGPTISYTFRSVGTFNIIVTAENEVGSAQDSIFVYVLQLIEGLQVVGGGRYFPTNHTVQLQAVVRDGTNVSYSWTAWRDRGPALAGSGKGFSLTVLEAGTYHVQLRATNMLGSAWADCTMDFVEPVGWLMVAASPNPAAVNTSVTLSAELAGGSGVVYTWSLEEGLSWETSEPFTTHSFPTPGLHLVTMTAGNPLGSANATVEVDVQVPVSGLSIRASEPGGSFVAAGSSVPFWGQLATGTNVSWCWAVPGGSSKRGPHVTMVFPDAGTFSIRLNASNAVSWVSATYNLTAEEPIVGLVLWASSKVVAPGQLVHFQILLAAGSAVTFRLQVGGANPEVLPGPRFSHSFPRVGDHVVSVRGKNHVSWAQAQVRIVVLEAVSGLQVPNCCEPGIATGTERNFTARVQRGSRVAYAWYFSLQKVQGDSLVILSGRDVTYTPVAAGLLEIQVRAFNALGSENRTLVLEVQDAVQYVALQSGPCFTNRSAQFEAATSPSPRRVAYHWDFGDGSPGQDTDEPRAEHSYLRPGDYRVQVNASNLVSFFVAQATVTVQVLACREPEVDVVLPLQVLMRRSQRNYLEAHVDLRDCVTYQTEYRWEVYRTASCQRPGRPARVALPGVDVSRPRLVLPRLALPVGHYCFVFVVSFGDTPLTQSIQANVTVAPERLVPIIEGGSYRVWSDTRDLVLDGSESYDPNLEDGDQTPLSFHWACVASTQREAGGCALNFGPRGSSTVTIPRERLAAGVEYTFSLTVWKAGRKEEATNQTVLIRSGRVPIVSLECVSCKAQAVYEVSRSSYVYLEGRCLNCSSGSKRGRWAARTFSNKTLVLDETTTSTGSAGMRLVLRRGVLRDGEGYTFTLTVLGRSGEEEGCASIRLSPNRPPLGGSCRLFPLGAVHALTTKVHFECTGWHDAEDAGAPLVYALLLRRCRQGHCEEFCVYKGSLSSYGAVLPPGFRPHFEVGLAVVVQDQLGAAVVALNRSLAITLPEPNGSATGLTVWLHGLTASVLPGLLRQADPQHVIEYSLALVTVLNEYERALDVAAEPKHERQHRAQIRKNITETLVSLRVHTVDDIQQIAAALAQCMGPSRELVCRSCLKQTLHKLEAMMLILQAETTAGTVTPTAIGDSILNITGDLIHLASSDVRAPQPSELGAESPSRMVASQAYNLTSALMRILMRSRVLNEEPLTLAGEEIVAQGKRSDPRSLLCYGGAPGPGCHFSIPEAFSGALANLSDVVQLIFLVDSNPFPFGYISNYTVSTKVASMAFQTQAGAQIPIERLASERAITVKVPNNSDWAARGHRSSANSANSVVVQPQASVGAVVTLDSSNPAAGLHLQLNYTLLDGHYLSEEPEPYLAVYLHSEPRPNEHNCSASRRIRPESLQGADHRPYTFFISPGSRDPAGSYHLNLSSHFRWSALQVSVGLYTSLCQYFSEEDMVWRTEGLLPLEETSPRQAVCLTRHLTAFGASLFVPPSHVRFVFPEPTADVNYIVMLTCAVCLVTYMVMAAILHKLDQLDASRGRAIPFCGQRGRFKYEILVKTGWGRGSGTTAHVGIMLYGVDSRSGHRHLDGDRAFHRNSLDIFRIATPHSLGSVWKIRVWHDNKGLSPAWFLQHVIVRDLQTARSAFFLVNDWLSVETEANGGLVEKEVLAASDAALLRFRRLLVAELQRGFFDKHIWLSIWDRPPRSRFTRIQRATCCVLLICLFLGANAVWYGAVGDSAYSTGHVSRLSPLSVDTVAVGLVSSVVVYPVYLAILFLFRMSRSKVAGSPSPTPAGQQVLDIDSCLDSSVLDSSFLTFSGLHAEAFVGQMKSDLFLDDSKSLVCWPSGEGTLSWPDLLSDPSIVGSNLRQLARGQAGHGLGPEEDGFSLASPYSPAKSFSASDEDLIQQVLAEGVSSPAPTQDTHMETDLLSSLSSTPGEKTETLALQRLGELGPPSPGLNWEQPQAARLSRTGLVEGLRKRLLPAWCASLAHGLSLLLVAVAVAVSGWVGASFPPGVSVAWLLSSSASFLASFLGWEPLKVLLEALYFSLVAKRLHPDEDDTLVESPAVTPVSARVPRVRPPHGFALFLAKEEARKVKRLHGMLRSLLVYMLFLLVTLLASYGDASCHGHAYRLQSAIKQELHSRAFLAITRSEELWPWMAHVLLPYVHGNQSSPELGPPRLRQVRLQEALYPDPPGPRVHTCSAAGGFSTSDYDVGWESPHNGSGTWAYSAPDLLGAWSWGSCAVYDSGGYVQELGLSLEESRDRLRFLQLHNWLDNRSRAVFLELTRYSPAVGLHAAVTLRLEFPAAGRALAALSVRPFALRRLSAGLSLPLLTSVCLLLFAVHFAVAEARTWHREGRWRVLRLGAWARWLLVALTAATALVRLAQLGAADRQWTRFVRGRPRRFTSFDQVAQLSSAARGLAASLLFLLLVKAAQQLRFVRQWSVFGKTLCRALPELLGVTLGLVVLGVAYAQLAILLVSSCVDSLWSVAQALLVLCPGTGLSTLCPAESWHLSPLLCVGLWALRLWGALRLGAVILRWRYHALRGELYRPAWEPQDYEMVELFLRRLRLWMGLSKVKEFRHKVRFEGMEPLPSRSSRGSKVSPDVPPPSAGSDASHPSTSSSQLDGLSVSLGRLGTRCEPEPSRLQAVFEALLTQFDRLNQATEDVYQLEQQLHSLQGRRSSRAPAGSSRGPSPGLRPALPSRLARASRGVDLATGPSRTPLRAKNKVHPSST

SEQ ID NO: 41837 - protein, 114 aa, Homo sapiens
MAAIPSSGSLVATHDYYRRRLGSTSSNSSCSSTECPGEAIPHPPGLPKADPGHWWASFFFGKSTLPFMATVLESAEHSEPPQASSSMTACGLARDAPRKQPGGQSSTASAGPPS

SEQ ID NO: 41838 - protein, 70 aa, Homo sapiens
MAAIPSSGSLVATHDYYRRRLGSTSSNSSCSSTECPGEAIPHPPGLPKADPGHWWASFFFGKSTLPPPTL

SEQ ID NO: 41839 - protein, 799 aa, Homo sapiens
MARTAPVEPPLRHSAPPSPAAGEPRTSVEAAVAPRRVLFADEALGLPLAQLRRYRPWGGPGAGKMAAAAGQDGGGGGGADEDDDGEDGDEGEEEEEACPEPSPLCPVPAGGGFYLVPTFSLPPAPGRLERLGRVMVELEALLPPPGAVPGGAGVWVPGGRPPVLRGLVRVLNRSFEKAVHVRASHDGWASFCDHPARYVPRSPPWAGAGGTGAGDPILDPGLGLGPGQASASSPDDGGRTDRFAFQLPFAEGAGDGARLDFVVRYETPEGTFWANNHGRNYTVLLRIAPAPTPTDAEGLPQQQQLPQLEPQPECQGPVEAEARQLKSCMKPVRRRPAEEELKTKNMDDNTFAMAEHPDVQESVGPLVAPTPLRPWPQMTLQVSDVPMTGNPAEEGDVPRSSPPVAFTEVLQAPAIRIPPSSPLCGLGGSPRDQASGPDASEGATGPFLEPSQQQAEATWGVSSENGGGLEAVSGSEELLGEDTIDQELEQLYLSHLSRLRAAVAAGGAGGGGEGSTDGGMSPSHPLGILTDRDLILKWPGPERALNSALAEEITLHYARLGRGVELIKDTEDPDDEGEGEEGLSVTPSSPEGDSPKESPPEILSGARSVVATMGDVWLPWAEGSGCDGPVVLGTEGQFIGDPEKGMGKDTSSLHMNRVIAGVTESLGEAGTEAQIEVTSEWAGSLDPISGKEPASPVLLQGQNPTLLSPLGAEVCLSSVARPHVSSQDEKDAGPSLEPPKKSPTLAVPAECVCALPPQLRGPLTQTLGVLAGLVVVPVALNSGVSLLVLALCLSLAWFS

SEQ ID NO: 41840 - protein, 453 aa, Homo sapiens
MDDNTFAMEHPDVQESVGPLVAPTPLRPWPQMTLQVSDVPMTGNPAEEGDVPRSSPPVAFTEVLQAPAIRIPPSSPLCGLGGSPRDQASGPDASEGATGPFLEPSQQQAEATWGVSSENGGGLEAVSGSEELLGEDTIDQELEQLYLSHLSRLRAAVAAGGAGGGGEGSTDGGMSPSHPLGILTDRDLILKWPGPERALNSALAEEITLHYARLGRGVELIKDTEDPDDEGEGEEGLSVTPSSPEGDSPKESPPEILSGARSVVATMGDVWLPWAEGSGCDGPVVLGTEGQFIGDPEKGMGKDTSSLHMNRVIAGVTESLGEAGTEAQIEVTSEWAGSLDPISGKEPASPVLLQGQNPTLLSPLGAEVCLSSVARPHVSSQDEKDAGPSLEPPKKSPTLAVPAECVCALPPQLRGPLTQTLGVLAGLVVVPVALNSGVSLLVLALCLSLAWFS

SEQ ID NO: 41841 - protein, 155 aa, Homo sapiens
MMSTEQMQPLELSEDRLDKLDPRCSHLDDLSDQFIKDCDLKKKPRKGKNVQATLNVESDQKKPRRKDTPALHIPPFIPGVFSEHLIKRYDVQERHPKGKMIPVLHNTDLEQKKPRRKDTPALHMSPFAAGVTLLRDERPKAIVEDDEKDGDKIAI

SEQ ID NO: 41842 - protein, 104 aa, Homo sapiens
MMSTEQMQPLELSEDRLDKLDPRCSHLGVFSEHLIKRYDVQERHPKGKMIPVLHNTDLEQKKPRRKDTPALHMSPFAAGVTLLRDERPKAIVEDDEKDGDKIAI

SEQ ID NO: 41843 - protein, 301 aa, Homo sapiens
MATTKRVLYVGGLAEEVDDKVLHAAFIPFGDITDIQIPLDYETEKHRGFAFVEFELAEDAAAAIDNMNESELFGRTIRVNLAKPMRIKEGSSRPVWSDDDWLKKFSGKTLEENKEEEGSEPPKAETQEGEPIAKKARSNPQVYMDIKIGNKPAGRIQMLLRSDVVPMTAENFRCLCTHEKGFGFKGSSFHRIIPQFMCQGGDFTNHNGTGGKSIYGKKFDDENFILKHTGPGLLSMANSGPNTNGSQFFLTCDKTDWLDGKHVVFGEVTEGLDVLRQIEAQGSKDGKPKQKVIIADCGEYV

SEQ ID NO: 41844 - protein, 296 aa, Homo sapiens
MATTKRVLYVGGLAEEVDDKVLHAAFIPFGDITDIQIPLDYETEKHRGFAFVEFELAEDAAAAIDNMNESELFGRTIRVNLAKPMRIKEGSSRPVWSDDDWLKKFSGKTLEENKEEEGSEPPKAETQEGEPIAKKARSNPQVYMDIKIGNKPAGRIQMLLRSDVVPMTAENFRCLCTHEKGFGFKGSSFHRIIPQFMCQGGDFTNHNGTGGKSIYGKKFDDENFILKHTGPGLLSMANSGPNTNGSQFFLTCDKTDWLDGKHVVFGEVTEGLDVLRQIEKQEESAITSQPRSWKLT

SEQ ID NO: 41845 - protein, 314 aa, Homo sapiens
MATTKRVLYVGGLAEEVDDKVLHAAFIPFGDITDIQIPLDYETEKHRGFAFVEFELAEDAAAAIDNMNESELFGRTIRVNLAKPMRIKEGSSRPVWSDDDWLKKFSGKTLEENKEEEGSEPPKAETQEGEPIAKKARSNPQVYMDIKIGNKPAGRIQMLLRSDVVPMTAENFRCLCTHEKGFGFKGSSFHRIIPQFMCQGGDFTNHNGTGGKSIYGKKFDDENFILKHTGPGLLSMANSGPNTNGSQFFLTCDKTDWLDGKHVVFGEVTEGLDVLRQIEVAPDTKASKARGSRKNKDGQERNWGKSQKVESHTI

SEQ ID NO: 41846 - protein, 166 aa, Homo sapiens
MAAIPPDSWQPPNVYLETSMGIIVLELYWKHAPKTCKNFAELARRGYYNGTKFHRIIKDFMIQGGDPTGTGRGGASIYGKQFEDELHPDLKFTGAGILAMANAGPDTNGSQFFVTLAPTQWLDGKHTIFGRVCQGIGMVNRVGMVETNSQDRPVDDVKIIKAYPSG

SEQ ID NO: 41847 - protein, 520 aa, Homo sapiens
MGKRQHQKDKMYITCAEYTHFYGGKKPDLPQTNFRRLPFDHCSLSLQPFVYPVCTPDGIVFDLLNIVPWLKKYGTNPSNGEKLDGRSLIKLNFSKNSEGKYHCPVLFTVFTNNTHIVAVRTTGNVYAYEAVEQLNIKAKNFRDLLTDEPFSRQDIITLQDPTNLDKFNVSNFYHVKNNMKIIDPDEEKAKQDPSYYLKNTNAETRETLQELYKEFKGDEILAATMKAPEKKKVDKLNAAHYSTGKVSASFTSTAMVPETTHEAAAIDEDVLRYQFVKKKGYVRLHTNKGDLNLELHCDLTPKTCENFIRLCKKHYYDGTIFHRSIRNFVIQGGDPTGTGTGGESYWGKPFKDEFRPNLSHTGRGILSMANSGPNSNRSQFFITFRSCAYLDKKHTIFGRVVGGFDVLTAMENVESDPKTDRPKEEIRIDATTVFVDPYEEADAQIAQERKTQLKVAPETKVKSSQPQAGSQGPQTFRQGVGKYINPAATKRAAEEEPSTSATVPMSKKKPSRGFGDFSSW

SEQ ID NO: 41848 - protein, 527 aa, Homo sapiens
MGKRQHQKDKMYITCAEYTHFYGGKKPDLPQTNFRRLPFDHCSLSLQPFVYPVCTPDGIVFDLLNIVPWLKKYGTNPSNGEKLDGRSLIKLNFSKNSEGKYHCPVLFTVFTNNTHIVAVRTTGNVYAYEAVEQLNIKAKNFRDLLTDEPFSRQDIITLQDPTNLDKFNVSNFYHVKNNMKIIDPDEEKAKQDPSYYLKNTNAETRETLQELYKEFKGDEILAATMKAPEKKKVDKLNAAHYSTGKVSASFTSTAMVPETTHEAAAIDEDVLRYQFVKKKGYVRLHTNKGDLNLELHCDLTPKTCENFIRLCKKHYYDGTIFHRSIRNFVIQGGDPTGTGTGGESYWGKPFKDEFRPNLSHTGRGILSMANSGPNSNRSQFFITFRSCAYLDKKHTIFGRVVGGFDVLTAMENVESDPKTDRPKEEIRIDATTVFVDPYEEADAQIAQERKTQLKVAPETKVKSSQPQAGSQGPQTFRQGVGKYINPAATEQQRKSPQPVPLSPCPRRSPVGVLGTSAPGSSRLPDDH

SEQ ID NO: 41849 - protein, 657 aa, Homo sapiens
MRRAVCFPALCLLLNLHAAGCFSGNNDHFLAINQKKSGKPVFIYKHSQDIEKSLDIAPQKIYRHSYHSSSEAQVSKRHQIVNSAFPRPAYDPSLNLLAMDGQDLEVENLPIPAANVIVVTLQMDVNKLNITLLRIFRQGVAAALGLLPQQVHINRLIGKKNSIELFVSPINRKTGISDALPSEEVLRSLNINVLHQSLSQFGITEVSPEKNVLQGQHEADKIWSKEGFYAVVIFLSIFVIIVTCLMILYRLKERFQLSLRQDKEKNQEIHLSPITLQPALSEAKTVHSMVQPEQAPKVLNVVVDPQGRGAPEIKATTATSVCPSPFKMKPIGLQERRGSNVSLTLDMSSLGNIEPFVSIPTPREKVAMEYLQSASRILTRSQLRDVVASSHLLQSEFMEIPMNFVDPKEIDIPRHGTKNRYKTILPNPLSRVCLRPKNVTDSLSTYINANYIRGYSGKEKAFIATQGPMINTVDDFWQMVWQEDSPVIVMITKLKEKNEKCVLYWPEKRGIYGKVEVLVISVNECDNYTIRNLVLKQGSHTQHVKHYWYTSWPDHKTPDSAQPLLQLMLDVEEDRLASQGRGPVVVHCSAGIGRTGCFIATSIGCQQLKEEGVVDALSIVCQLRMDRGGMVQTSEQYEFVHHALCLYESRLSAETVQ

SEQ ID NO: 41850 - protein, 412 aa, Homo sapiens
MILYRLKERFQLSLRQDKEKNQEIHLSPITLQPALSEAKTVHSMVQPEQAPKVLNVVVDPQGRGAPEIKATTATSVCPSPFKMKPIGLQERRGSNVSLTLDMSSLGNIEPFVSIPTPREKVAMEYLQSASRILTRSQLRDVVASSHLLQSEFMEIPMNFVDPKEIDIPRHGTKNRYKTILPNPLSRVCLRPKNVTDSLSTYINANYIRGYSGKEKAFIATQGPMINTVDDFWQMVWQEDSPVIVMITKLKEKNEKCVLYWPEKRGIYGKVEVLVISVNECDNYTIRNLVLKQGSHTQHVKHYWYTSWPDHKTPDSAQPLLQLMLDVEEDRLASQGRGPVVVHCSAGIGRTGCFIATSIGCQQLKEEGVVDALSIVCQLRMDRGGMVQTSEQYEFVHHALCLYESRLSAETVQ

SEQ ID NO: 41851 - protein, 451 aa, Homo sapiens
MNQKNVLQGQHEADKIWSKEGFYAVVIFLSIFVIIVTCLMILYRLKERFQLSLRQDKEKNQEIHLSPITLQPALSEAKTVHSMVQPEQAPKVLNVVVDPQGRGAPEIKATTATSVCPSPFKMKPIGLQERRGSNVSLTLDMSSLGNIEPFVSIPTPREKVAMEYLQSASRILTRSQLRDVVASSHLLQSEFMEIPMNFVDPKEIDIPRHGTKNRYKTILPNPLSRVCLRPKNVTDSLSTYINANYIRGYSGKEKAFIATQGPMINTVDDFWQMVWQEDSPVIVMITKLKEKNEKCVLYWPEKRGIYGKVEVLVISVNECDNYTIRNLVLKQGSHTQHVKHYWYTSWPDHKTPDSAQPLLQLMLDVEEDRLASQGRGPVVVHCSAGIGRTGCFIATSIGCQQLKEEGVVDALSIVCQLRMDRGGMVQTSEQYEFVHHALCLYESRLSAETVQ

SEQ ID NO: 41852 - protein, 545 aa, Homo sapiens
MQSISKQTLQMDVNKLNITLLRIFRQGVAAALGLLPQQVHINRLIGKKNSIELFVSPINRKTGISDALPSEEVLRSLNINVLHQSLSQFGITEVSPEKNVLQGQHEADKIWSKEGFYAVVIFLSIFVIIVTCLMILYRLKERFQLSLRQDKEKNQEIHLSPITLQPALSEAKTVHSMVQPEQAPKVLNVVVDPQGRGAPEIKATTATSVCPSPFKMKPIGLQERRGSNVSLTLDMSSLGNIEPFVSIPTPREKVAMEYLQSASRILTRSQLRDVVASSHLLQSEFMEIPMNFVDPKEIDIPRHGTKNRYKTILPNPLSRVCLRPKNVTDSLSTYINANYIRGYSGKEKAFIATQGPMINTVDDFWQMVWQEDSPVIVMITKLKEKNEKCVLYWPEKRGIYGKVEVLVISVNECDNYTIRNLVLKQGSHTQHVKHYWYTSWPDHKTPDSAQPLLQLMLDVEEDRLASQGRGPVVVHCSAGIGRTGCFIATSIGCQQLKEEGVVDALSIVCQLRMDRGGMVQTSEQYEFVHHALCLYESRLSAETVQ

SEQ ID NO: 41853 - protein, 1338 aa, Homo sapiens
MSPVLHFYVRPSGHEGAAPGHTRRKLQGKLPELQGVETELCYNVNWTAEALPSAEETKKLMWLFGCPLLLDDVARESWLLPGSNDLLLEVGPRLNFSTPTSTNIVSVCRATGLGPVDRVETTRRYRLSFAHPPSAEVEAIALATLHDRMTEQHFPHPIQSFSPESMPEPLNGPINILGEGRLALEKANQELGLALDSWDLDFYTKRFQELQRNPSTVEAFDLAQSNSEHSRHWFFKGQLHVDGQKLVHSLFESIMSTQESSNPNNVLKFCDNSSAIQGKEVRFLRPEDPTRPSRFQQQQGLRHVVFTAETHNFPTGVCPFSGATTGTGGRIRDVQCTGRGAHVVAGTAGYCFGNLHIPGYNLPWEDPSFQYPGNFARPLEVAIEASNGASDYGNKFGEPVLAGFARSLGLQLPDGQRREWIKPIMFSGGIGSMEADHISKEAPEPGMEVVKVGGPVYRIGVGGGAASSVQVQGDNTSDLDFGAVQRGDPEMEQKMNRVIRACVEAPKGNPICSLHDQGAGGNGNVLKELSDPAGAIIYTSRFQLGDPTLNALEIWGAEYQESNALLLRSPNRDFLTHVSARERCPACFVGTITGDRRIVLVDDRECPVRRNGQGDAPPTPLPTPVDLELEWVLGKMPRKEFFLQRKPPMLQPLALPPGLSVHQALERVLRLPAVASKRYLTNKVDRSVGGLVAQQQCVGPLQTPLADVAVVALSHEELIGAATALGEQPVKSLLDPKVAARLAVAEALTNLVFALVTDLRDVKCSGNWMWAAKLPGEGAALADACEAMVAVMAALGVAVDGGKDSLSMAARVGTETVRAPGSLVISAYAVCPDITATVTPDLKHPEGRGHLLYVALSPGQHRLGGTALAQCFSQLGEHPPDLDLPENLVRAFSITQGLLKDRLLCSGHDVSDGGLVTCLLEMAFAGNCGLQVDVPVPRVDVLSVLFAEEPGLVLEVQEPDLAQVLKRYRDAGLHCLELGHTGEAGPHAMVRVSVNGAVVLEEPVGELRALWEETSFQLDRLQAEPRCVAEEERGLRERMGPSYCLPPTFPKASVPREPGGPSPRVAILREEGSNGDREMADAFHLAGFEVWDVTMQDLCSGAIGLDTFRGVAFVGGFSYADVLGSAKGWAAAVTFHPRAGAELRRFRKRPDTFSLGVCNGCQLLALLGWVGGDPNEDAAEMGPDSQPARPGLLLRHNLSGRYESRWASVRVGPGPALMLRGMEGAVLPVWSAHGEGYVAFSSPELQAQIEARGLAPLHWADDDGNPTEQYPLNPNGSPGGVAGICSCDGRHLAVMPHPERAVRPWQWAWRPPPFDTLTTSPWLQLFINARNWTLEGSC

SEQ ID NO: 41854 - protein, 593 aa, Homo sapiens [sequence omitted]

SEQ ID NO: 41855 - protein, 597 aa, Homo sapiens
MTSRRWFHPNITGVEAENLLLTRGVDGSFLARPSKSNPGDFTLSVRRNGAVTHIKIQNTGDYYDLYGGEKFATLAELVQYYMEHHGQLKEKNGDVIELKYPLNCADPTSERWFHGHLSGKEAEKLLTEKGKHGSFLVRESQSHPGDFVLSVRTGDDKGESNDGKSKVTHVMIRCQELKYDVGGGERFDSLTDLVEHYKKNPMVETLGTVLQLKQPLNTTRINAAEIESRVRELSKLAETTDKVKQGFWEEFETLQQQECKLLYSRKEGQRQENKNKNRYKNILPFDHTRVVLHDGDPNEPVSDYINANIIMPEFETKCNNSKPKKSYIATQGCLQNTVNDFWRMVFQENSRVIVMTTKEVERGKSKCVKYWPDEYALKEYGVMRVRNVKESAAHDYTLRELKLSKVGQALLQGNTERTVWQYHFRTWPDHGVPSDPGGVLDFLEEVHHKQESIMDAGPVVVHCSAGIGRTGTFIVIDILIDIIREKGVDCDIDVPKTIQMVRSQRSGMVQTEAQYRFIYMAVQHYIETLQRRIEEEQKSKRKGHEYTNIKYSLADQTSGDQSPLPPCTPTPPCAEMREDSARVYENVGLMQQQKSFR

SEQ ID NO: 41856 - protein, 460 aa, Homo sapiens
MTSRRWFHPNITGVEAENLLLTRGVDGSFLARPSKSNPGDFTLSVRRNGAVTHIKIQNTGDYYDLYGGEKFATLAELVQYYMEHHGQLKEKNGDVIELKYPLNCADPTSERWFHGHLSGKEAEKLLTEKGKHGSFLVRESQSHPGDFVLSVRTGDDKGESNDGKSKVTHVMIRCQELKYDVGGGERFDSLTDLVEHYKKNPMVETLGTVLQLKQPLNTTRINAAEIESRVRELSKLAETTDKVKQGFWEEFETLQQQECKLLYSRKEGQRQENKNKNRYKNILPFDHTRVVLHDGDPNEPVSDYINANIIMPEFETKCNNSKPKKSYIATQGCLQNTVNDFWRMVFQENSRVIVMTTKEVERGKSKCVKYWPDEYALKEYGVMRVRNVKESAAHDYTLRELKLSKVGQGNTERTVWQYHFRTWPDHGVPSDPGGVLDFLEEVHHKQESIMDAGPVVVHCR

SEQ ID NO: 41857 - protein, 226 aa, Homo sapiens
MAAPAPVTRQVSGAAALVPAPSGPDSGQPLAAAVAELPVLDARGQRVPFGALFRERRAVVVFVRHFLCYICKEYVEDLAKIPRSFLQEANVTLIVIGQSSYHHIEPFCKLTGYSHEIYVDPEREIYKRLGMKRGEEIASSGQSPHIKSNLLSGSLQSLWRAVTGPLFDFQGDPAQQGGTLILGPGNNIHFIHRDRNRLDHKPINSVLQLVGVQHVNFTNRPSVIHV

SEQ ID NO: 41858 - protein, 291 aa, Homo sapiens
MTGKTQTSNVTNKNDPKSINSRVFIGNLNTAIVKKVDIEAIFSKYGKIVGCSVHKGYAFVQYMSERHARAAVAGENARVIAGQPLDINMAGEPKPYRPKPGNKRPLSALYRLESKEPFLSVGGYVFDYDYYRDDFYNRLFDYHGRVPPPPRAVIPLKRPRVAVTTTRRGKGVFSMKGGSRSTASGSTGSKLKSDELQTIKKELTQIKTKIDSLLGRLEKIEKQQKAEAEAQKKQLEESLVLIQEECVSEIADHSTEEPAEGGPDADGEEMTDGIEEDFDEDGGHELFLQIK

SEQ ID NO: 41859 - protein, 218 aa, Homo sapiens
MTMYKSKRRHQRYINMAGEPKPYRPKPGNKRPLSALYRLESKEPFLSVGGYVFDYDYYRDDFYNRLFDYHGRVPPPPRAVIPLKRPRVAVTTTRRGKGVFSMKGGSRSTASGSTGSKLKSDELQTIKKELTQIKTKIDSLLGRLEKIEKQQKAEAEAQKKQLEESLVLIQEECVSEIADHSTEEPAEGGPDADGEEMTDGIEEDFDEDGGHELFLQIK

SEQ ID NO: 41860 - protein, 304 aa, Homo sapiens
MSKRRRLKQGEPIMTGKTQTSNVTNKNDPKSINSRVFIGNLNTAIVKKVDIEAIFSKYGKIVGCSVHKGYAFVQYMSERHARAAVAGENARVIAGQPLDINMAGEPKPYRPKPGNKRPLSALYRLESKEPFLSVGGYVFDYDYYRDDFYNRLFDYHGRVPPPPRAVIPLKRPRVAVTTTRRGKGVFSMKGGSRSTASGSTGSKLKSDELQTIKKELTQIKTKIDSLLGRLEKIEKQQKAEAEAQKKQLEESLVLIQEECVSEIADHSTEEPAEGGPDADGEEMTDGIEEDFDEDGGHELFLQIK

SEQ ID NO: 41861 - protein, 344 aa, Homo sapiens
MSGEPELIELRELAPAGRAGKGRTRLERANALRIARGTACNPTRQLVPGRGHRFQPAGPATHTWCDLCGDFIWGVVRKGLQCARLSADCKFTCHYRCRALVCLDCCGPRDLGWEPAVERDTNVDEPVEWETPDLSQAEIEQKIKEYNAQINSNLFMSLNKDGSYTGFIKVQLKLVRPVSVPSSKKPPSLQDARRGPGRGTSVRRRTSFYLPKDAVKHLHVLSRTRAREVIEALLRKFLVVDDPRKFALFERAERHGQVYLRKLLDDEQPLRLRLLAGPSDKALSFVLKENDSGEVNWDAFSMPELHNFLRILQREEEEHLRQILQKYSYCRQKIQEALHACPLG

SEQ ID NO: 41862 - protein, 340 aa, Homo sapiens
MSGEPELIELRELAPAGRAGKGRTRLERANALRIARGTACNPTRQLVPGRGHRFQPAGPATHTWCDLCGDFIWGVVRKGLQCAHCKFTCHYRCRALVCLDCCGPRDLGWEPAVERDTNVDEPVEWETPDLSQAEIEQKIKEYNAQINSNLFMSLNKDGSYTGFIKVQLKLVRPVSVPSSKKPPSLQDARRGPGRGTSVRRRTSFYLPKDAVKHLHVLSRTRAREVIEALLRKFLVVDDPRKFALFERAERHGQVYLRKLLDDEQPLRLRLLAGPSDKALSFVLKENDSGEVNWDAFSMPELHNFLRILQREEEEHLRQILQKYSYCRQKIQEALHACPLG

SEQ ID NO: 41863 - protein, 189 aa, Homo sapiens
MSLNKDGSYTGFIKVQLKLVRPVSVPSSKKPPSLQDARRGPGRGTSVRRRTSFYLPKDAVKHLHVLSRTRAREVIEALLRKFLVVDDPRKFALFERAERHGQVYLRKLLDDEQPLRLRLLAGPSDKALSFVLKENDSGEVNWDAFSMPELHNFLRILQREEEEHLRQILQKYSYCRQKIQEALHACPLG

SEQ ID NO: 41864 - protein, 270 aa, Homo sapiens
MGEAEAPSFEMTWSSTTSSGYCSQEDSDSELEQYFTARTSLARRPRRDQDEPVEWETPDLSQAEIEQKIKEYNAQINSNLFMSLNKDGSYTGFIKVQLKLVRPVSVPSSKKPPSLQDARRGPGRGTSVRRRTSFYLPKDAVKHLHVLSRTRAREVIEALLRKFLVVDDPRKFALFERAERHGQVYLRKLLDDEQPLRLRLLAGPSDKALSFVLKENDSGEVNWDAFSMPELHNFLRILQREEEEHLRQILQKYSYCRQKIQEALHACPLG

SEQ ID NO: 41865 - protein, 344 aa, Homo sapiens
MSGEPELIELRELAPAGRAGKGRTRLERANALRIARGTACNPTRQLVPGRGHRFQPAGPATHTWCDLCGDFIWGVVRKGLQCAHCKFTCHYRCRALVCLDCCGPRDLGWEPAVERDTNVPILQDEPVEWETPDLSQAEIEQKIKEYNAQINSNLFMSLNKDGSYTGFIKVQLKLVRPVSVPSSKKPPSLQDARRGPGRGTSVRRRTSFYLPKDAVKHLHVLSRTRAREVIEALLRKFLVVDDPRKFALFERAERHGQVYLRKLLDDEQPLRLRLLAGPSDKALSFVLKENDSGEVNWDAFSMPELHNFLRILQREEEEHLRQILQKYSYCRQKIQEALHACPLG

SEQ ID NO: 41866 - protein, 92 aa, Homo sapiens
MSGEPELIELRELAPAGRAGKGRTRLERANALRIARGTACNPTRQLVPGRGHRFQPAGPATHTWCDLCGDFIWGVVRKGLQCARRACGVGDT

SEQ ID NO: 41867 - protein, 152 aa, Homo sapiens
MSGEPELIELRELAPAGRAGKGRTRLERANALRIARGTACNPTRQLVPGRGHRFQPAGPATHTWCDLCGDFIWGVVRKGLQCAQQGRFLHRLHQGSAEAGAPCLCALQQEATLLAGCPAGPRTGHKCQAPHFLLPAQGCCQAPACAVTHKGT

SEQ ID NO: 41868 - protein, 75 aa, Homo sapiens
MGEAEAPSFEMTWSSTTSSGYCSQEDSDSELEQYFTARTSLARRPRRDQDEPVEWETPDLSQAEIEQKIKEYNAQ

SEQ ID NO: 41869 - protein, 228 aa, Homo sapiens
MAEDKTKPSELDQGKYDADDNVKIICLGDSAVGKSKLMERFLMDGFQPQQLSTYALTLYKHTATVDGRTILVDFWDTAGQERFQSMHASYYHKAHACIMVFDVQRKVTYRNLSTWYTELREFRPEIPCIVVANKIDDINVTQKSFNFAKKFSLPLYFVSAADGTNVVKLFNDAIRLAVSYKQNSQDFMDEIFQELENFSLEQEEEDVPDQEQSSSIETPSEEAASPHS

SEQ ID NO: 41870 - protein, 229 aa, Homo sapiens
MAEDKTKPSELDQGKYDADDNVKIICLGDSAVGKSKLMERFLMDGFQPQQLSTYALTLYKHTATVDGRTILVDFWDTAGQERFQSMHASYYHKAHACIMVFDVQRKVTYRNLSTWYTELREFRPEIPCIVVANKIDADINVTQKSFNFAKKFSLPLYFVSAADGTNVVKLFNDAIRLAVSYKQNSQDFMDEIFQELENFSLEQEEEDVPDQEQSSSIETPSEEAASPHS

SEQ ID NO: 41871 - protein, 238 aa, Homo sapiens
MAEDKTKPSELDQGKYDADDNVKIICLGDSAVGKSKLMERFLMDGFQPQQLSTYALTLYKHTATVDGRTILVDFWDTAGQERFQSMHASYYHKAHACIMVFDVQRKVTYRNLSTWYTELREFRPEIPCIVVANKIDDINVTQKSFNFAKKFSLPLYFVSAADGTNVVKVWLTAEVASKLFNDAIRLAVSYKQNSQDFMDEIFQELENFSLEQEEEDVPDQEQSSSIETPSEEAASPHS

SEQ ID NO: 41872 - protein, 421 aa, Homo sapiens
MSPKRIAKRRSPPADAIPKSKKVKVSHRSHSTEPGLVLTLGQGDVGQLGLGENVMERKKPALVSIPEDVVQAEAGGMHTVCLSKSGQVYSFGCNDEGALGRDTSVEGSEMVPGKVELQEKVVQVSAGDSHTAALTDDGRVFLWGSFRDNNGVIGLLEPMKKSMVPVQVQLDVPVVKVASGNDHLVMLTADGDLYTLGCGEQGQLGRVPELFANRGGRQGLERLLVPKCVMLKSRGSRGHVRFQDAFCGAYFTFAISHEGHVYGFGLSNYHQLGTPGTESCFIPQNLTSFKNSTKSWVGFSGGQHHTVCMDSEGKAYSLGRAEYGRLGLGEGAEEKSIPTLISRLPAVSSVACGASVGYAVTKDGRVFAWGMGTNYQLGTGQDEDAWSPVEMMGKQLENRVVLSVSSGGQHTVLLVKDKEQS

SEQ ID NO: 41873 - protein, 452 aa, Homo sapiens
MSPKRIAKRRSPPADAIPKSKKVKDTRAAASRRVPGARSCQGACGPSPPDQKTRPVSHRSHSTEPGLVLTLGQGDVGQLGLGENVMERKKPALVSIPEDVVQAEAGGMHTVCLSKSGQVYSFGCNDEGALGRDTSVEGSEMVPGKVELQEKVVQVSAGDSHTAALTDDGRVFLWGSFRDNNGVIGLLEPMKKSMVPVQVQLDVPVVKVASGNDHLVMLTADGDLYTLGCGEQGQLGRVPELFANRGGRQGLERLLVPKCVMLKSRGSRGHVRFQDAFCGAYFTFAISHEGHVYGFGLSNYHQLGTPGTESCFIPQNLTSFKNSTKSWVGFSGGQHHTVCMDSEGKAYSLGRAEYGRLGLGEGAEEKSIPTLISRLPAVSSVACGASVGYAVTKDGRVFAWGMGTNYQLGTGQDEDAWSPVEMMGKQLENRVVLSVSSGGQHTVLLVKDKEQS

SEQ ID NO: 41874 - protein, 201 aa, Homo sapiens
MNPGYDCLFKLLLIGDSGVGKSCLLLRFADDPYTESYISTIGVDFKIQTIELDGKTIKLQIWDTAGQERFWTITSSYYRGAHGFLVVYDVTDQESYANVKQWLQEIDRHASENVNKLLVGNKSDLTTKKVVDNTTAKEFADSLGIPFLETSAKNATNVEQAFMTMAAEIKKQMGPGAASGGERPNLKIDSTPVKPAGGGCC

SEQ ID NO: 41875 - protein, 215 aa, Homo sapiens
MATAPYNYSYIFKYIIIGDMGVGKSCLLHQFTEKKFMADCPHTIGVEFGTRIIEVSGQKIKLQIWDTAGQERFRAVTRSYYRGAAGALMVYDITRRSTYNHLSSWLTDARNLTNPNTVIILIGNKADLEAQRDVTYEEAKQFAEENGLLFLEASAKTGENVEDAFLEAAKKIYQNIQDGSLDLNAAESGVQHKPSAPQGGRLTSEPQPQREGCGC

SEQ ID NO: 41876 - protein, 318 aa, Homo sapiens
MWLPLLLGALLWAVLWLLRDRQSLPASNAFVFITGCDSGFGRLLALQLDQRGFRVLASCLTPSGAEDLQRVASSRLHTTLLDITDPQSVQQAAKWVEMHVKEAGLFGLVNNAGVAGIIGPTPWLTRDDFQRVLNVNTMGPIGVTLALLPLLQQARGRVINITSVLGRLAANGGGYCVSKFGLEAFSDSLRRDVAHFGIRVSIVEPGFFRTPVTNLESLEKTLQACWARLPPATQAHYGGAFLTKYLKMQQRIMNLICDPDLTKVSRCLEHALTARHPRTRYSPGWDAKLLWLPASYLPASLVDAVLTWVLPKPAQAVY

SEQ ID NO: 41877 - protein, 221 aa, Homo sapiens
MSDSEEESQDRQLKIVVLGDGASGKTSLTTCFAQETFGKQYKQTIGLDFFLRRITLPGNLNVTLQIWDIGGQTIGGKMLDKYIYGAQGVLLVYDITNYQSFENLEDWYTVVKKVSEESETQPLVALVGNKIDLEHMRTIKPEKHLRFCQENGFSSHFVSAKTGDSVFLCFQKVAAEILGIKLNKAEIEQSQRVVKADIVNYNQEPMSRTVNPPRSSMCAVQ

SEQ ID NO: 41878 - protein, 220 aa, Homo sapiens
MSDSEEESQDRQLKIVVLGDGASGKTSLTTCFAQETFGKQYKQTIGLDFFLRRITLPGNLNVTLQIWDIGGQTIGGKMLDKYIYGAQGVLLVYDITNYQSFENLEDWYTVVKKVSEESETQPLVALVGNKIDLEHMRTIKPEKHLRFCQENGFSSHFVSAKTGDSVFLCFQKVAAEILGIKLNKAEIEQSQRIVRAEIVKYPEEENQHTTSTQSRICSVQ

SEQ ID NO: 41879 - protein, 204 aa, Homo sapiens
MSDSEEESQDRQLKIVVLGDGASGKTSLTTCFAQETFGKQYKQTIGLDFFLRRITLPGNLNVTLQIWDIGGQTIGGKMLDKYIYGAQGVLLVYDITNYQSFENLEDWYTVVKKVSEESETQPLVALVGNKIDLEHMRTIKPEKHLRFCQENGFSSHFVSAKTGDSVFLCFQKVAAEILGIKLNKAEIEQSQGHFIIFISSTNRE

SEQ ID NO: 41880 - protein, 465 aa, Homo sapiens
MPKKAKPTGSGKEEGPAPCKQMKLEAAGGPSALNFDSPSSLFESLISPIKTETFFKEFWEQKPLLIQRDDPALATYYGSLFKLTDLKSLCSRGMYYGRDVNVCRCVNGKKKVLNKDGKAHFLQLRKDFDQKRATIQFHQPQRFKDELWRIQEKLECYFGSLVGSNVYITPAGSQGLPPHYDDVEVFILQLEGEKHWRLYHPTVPLAREYSVEAEERIGRPVHEFMLKPGDLLYFPRGTIHQADTPAGLAHSTHVTISTYQNNSWGDFLLDTISGLVFDTAKEDVELRTGIPRQLLLQVESTTVATRRLSGFLRTLADRLEGTKELLSSDMKKDFIMHRLPPYSAGDGAELSTPGGKLPRLDSVVRLQFKDHIVLTVLPDQDQSDEAQEKMVYIYHSLKNSRETHMMGNEEETEFHGLRFPLSHLDALKQIWNSPAISVKDLKLTTDEEKESLVLSLWTECLIQVV

SEQ ID NO: 41881 - protein, 280 aa, Homo sapiens
MPKKAKPTGSGKEEGPAPCKQMKLEAAGGPSALNFDSPSSLFESLISPIKTETFFKEFWEQKPLLIQRDDPALATYYGSLFKLTDLKSLCSRGMYYGRDVNVCRCVNGKKKVLNKDGKAHFLQLRKDFDQKRATIQFHQPQRFKDELWRIQEKLECYFGSLVGSNVYITPAGSQGLPPHYDDVEVFILQLEGEKHWRLYHPTVPLAREYSVEAEERIGRPVHEFMLKPGDLLYFPRGTIHQADTPAGLAHSTHVTISTYQNNDAGARMRRCDLRAIAPQK

SEQ ID NO: 41882 - protein, 211 aa, Homo sapiens
MLLQVPCNSWGDFLLDTISGLVFDTAKEDVELRTGIPRQLLLQVESTTVATRRLSGFLRTLADRLEGTKELLSSDMKKDFIMHRLPPYSAGDGAELSTPGGKLPRLDSVVRLQFKDHIVLTVLPDQDQSDEAQEKMVYIYHSLKNSRETHMMGNEEETEFHGLRFPLSHLDALKQIWNSPAISVKDLKLTTDEEKESLVLSLWTECLIQVV

SEQ ID NO: 41883 - protein, 464 aa, Homo sapiens
MPKKAKPTGSGKEEGPAPCKQMKLEAAGGPSALNFDSPSSLFESLISPIKTETFFKEFWEQKPLLIQRDDPALATYYGSLFKLTDLKSLCSRGMYYGRDVNVCRCVNGKKKVLNKDGKAHFLQLRKDFDQKRATIQFHQPQRFKDELWRIQEKLECYFGSLVGSNVYITPAGSQGLPPHYDDVEVFILQLEGEKHWRLYHPTVPLAREYSVEAEERIGRPVHEFMLKPGDLLYFPRGTIHQADTPAGLAHSTHVTISTYQNNSWGDFLLDTISGLVFDTAKEDVELRTGIPRQLLLVESTTVATRRLSGFLRTLADRLEGTKELLSSDMKKDFIMHRLPPYSAGDGAELSTPGGKLPRLDSVVRLQFKDHIVLTVLPDQDQSDEAQEKMVYIYHSLKNSRETHMMGNEEETEFHGLRFPLSHLDALKQIWNSPAISVKDLKLTTDEEKESLVLSLWTECLIQVV

SEQ ID NO: 41884 - protein, 248 aa, Homo sapiens
MRLIQNMCTIAEYPAPGNAAASDCCVGAAGRRLVKIAVVGASGVGKTALVVRFLTKRFIGDYERNAGNLYTRQVQIEGETLALQVQDTPGIQVHENSLSCSEQLNRCIRWADAVVIVFSITDYKSYELISQLHQHVQQLHLGTRLPVVVVANKADLLHIKQVDPQLGLQLASMLGCSFYEVSVSENYNDVYSAFHVLCKEVSHKQQPSSTPEKRRTSLIPRPKSPNMQDLKRRFKQALSAKVRTVTSV

SEQ ID NO: 41885 - protein, 754 aa, Homo sapiens
MIVFLVFKHLFSLRLITMFFLLHFIVLINVKDFALTQGSMITPSCQKGYFPCGNLTKCLPRAFHCDGKDDCGNGADEENCGDTSGWATIFGTVHGNANSVALTQECFLKQYPQCCDCKETELECVNGDLKSVPMISNNVTLLSLKKNKIHSLPDKVFIKYTKLKKIFLQHNCIRHISRKAFFGLCNLQILYLNHNCITTLRPGIFKDLHQLTWLILDDNPITRISQRLFTGLNSLFFLSMVNNYLEALPKQMCAQMPQLNWVDLEGNRIKYLTNSTFLSCDSLTVLFLPRNQIGFVPEKTFSSLKNLGELDLSSNTITELSPHLFKDLKLLQKLNLSSNPLMYLHKNQFESLKQLQSLDLERIEIPNINTRMFQPMKNLSHIYFKNFRYCSYAPHVRICMPLTDGISSFEDLLANNILRIFVWVIAFITCFGNLFVIGMRSFIKAENTTHAMSIKILCCADCLMGVYLFFVGIFDIKYRGQYQKYALLWMESVQCRLMGFLAMLSTEVSVLLLTYLTLEKFLVIVFPFSNIRPGKRQTSVILICIWMAGFLIAVIPFWNKDYFGNFYGKNGVCFPLYYDQTEDIGSKGYSLGIFLGVNLLAFLIIVFSYITMFCSIQKTALQTTEVRNCFGREVAVANRFFFIVFSDAICWIPVFVVKILSLFRVEIPDTMTSWIVIFFLPVNSALNPILYTLTTNFFKDKLKQLLHKHQRKSIFKIKKKSLSTSIVWIEDSSSLKLGVLNKITLGDSIMKPVS

SEQ ID NO: 41886 - protein, 730 aa, Homo sapiens
MIVFLVFKHLFSLRLITMFFLLHFIVLINVKDFALTQGSMITPSCQKGYFPCGNLTKCLPRAFHCDGKDDCGNGADEENCGDTSGWATIFGTVHGNANSVALTQECFLKQYPQCCDCKETELECVNGDLKSVPMISNNVTLLSLKKNKIHSLPDKVFIKYTKLKKIFLQHNCIRHISRKAFFGLCNLQILYLNHNCITTLRPGIFKDLHQLTWLILDDNPITRISQRLFTGLNSLFFLSMVNNYLEALPKQMCAQMPQLNWVDLEGNRIKYLTNSTFLSCDSLTVLDLSSNTITELSPHLFKDLKLLQKLNLSSNPLMYLHKNQFESLKQLQSLDLERIEIPNINTRMFQPMKNLSHIYFKNFRYCSYAPHVRICMPLTDGISSFEDLLANNILRIFVWVIAFITCFGNLFVIGMRSFIKAENTTHAMSIKILCCADCLMGVYLFFVGIFDIKYRGQYQKYALLWMESVQCRLMGFLAMLSTEVSVLLLTYLTLEKFLVIVFPFSNIRPGKRQTSVILICIWMAGFLIAVIPFWNKDYFGNFYGKNGVCFPLYYDQTEDIGSKGYSLGIFLGVNLLAFLIIVFSYITMFCSIQKTALQTTEVRNCFGREVAVANRFFFIVFSDAICWIPVFVVKILSLFRVEIPDTMTSWIVIFFLPVNSALNPILYTLTTNFFKDKLKQLLHKHQRKSIFKIKKKSLSTSIVWIEDSSSLKLGVLNKITLGDSIMKPVS

SEQ ID NO: 41887 - protein, 103 aa, Homo sapiens
MMGSKMASASRVVQVVKPHTPLIRFPDRRDNPKPNVSEALRSAGLPSHSSVISQHSKGSKSPDLLMYQGPPDTAEIIKTLPQKYRRKLVSQEEMEFIQRGGPE

SEQ ID NO: 41888 - protein, 1388 aa, Homo sapiens
MSIPLHSLRFNNTMREENVEPQNKQMAFCRPMTETRADVQILHSHVQLPIVSTSASDPGGTSTQLMTSPVFDTMSAPLMGVPNSGALSPPLMPASDSGALSPLLMPASDSGALSPLLMPALDSGTLSPLLSTSEYGVMSPGMMTIPDFGTMSATLMVAPDSAEISPLAMPAPSSGVVCTPIMSTSSSEAMSTPLMLAPDSGELSPILMQDMNPGVMSTQPVPAPSSEAMSPLQITDEDTEAMSKVLMTALASGEISSLLMSGTDSEAISSLIMSAVASGGTSPQPTSTQNSGGIPTPLMSDLDSGIMSSLLMSSPGSEVMSTPLLSVPDAGEMSTLPKPAPDAEAMSPALMTALPSGVMPTQTMPAPGSGAMSPWSTQNVDSEMMSNPPVRATASGVMSAPPVRALDSGAMSTPLMGAPASGNMSTLQKTVPASGAMTTSLMTVPSSGVMSTEQMSATASRVMSAQLTMAKTSGAMPTGSMKAVAKQYKRATASGKMSTPLRRAPTSGAMSTQPVTATASETMSMPQLTVPASGSMSMLQMRAPVSEAMSMPQMRTMASGLTSAAQMKAMTSGAMSTPLMTAQTSGSTSTLLMRDTASGVMSCPQMRSLASGALSKPLMTPKASGTMFTEKMTTTASEAMPTLLMRDTVSGALSMPQMTDTASGGLSASLMRDTASGAMSTSQMTATVSGGMSMPLMRAQDPGVMPASLMRAKVSGKMLSQPMSTQDPGGMSMSPMKSMTAGGMQMNSPTSDVMSTPTVRAWTSETMSTPLMRTSDPGERPSLLTRASSSGEMSLPLMRAPASGEIATPLRSPAYGAMSAPQMTATASGMMSSMPQVKAPISGAMSMPLTRSTASGGMSMPLMRAPDSRVTSTSQMMPTASGDMCTLPVRAPASGGVSSPLVRAPASGTMSTPLRRPSACETVSTELMRASASGHMSTAQTTAMVSGGMSKPLMRAPASGTMPMPLMSAMASGEMSMPLMETMASGATSTLQTSVANSRSMSLSQTTYTVSGRMATAPIRASASGARSTSFMRASVSGSMPMPLPRATASGCGMGMSMPQMTATDSRGMSTPLMRASGPGTMSTPQTAFGVMSTPEIKATDSGEASTSHINITASGSKPTSHMTATTPETAKPPPKEVPSFGMLTPALCYLLEEQEAARGSCSVEEEMEIDEEKQMKGFLDDSERMAFLVSLHLGAAERWFILQMEVGEPLSHENKSFLRRSQGIYDSLSEIDILSAVLCHPKQGQKSVRQYATDFLLLARHLSWSDAILRTRFLEGLSEAVTTKMGRIFLKVAGSLKELIDRSLYTECQLAEEKDSPGNSSQVLPTACKRNNEEAMGNELSSQQQTEEHQHVSKRCYYLKEHGDPQEGLHDHLGQSTGHHQKAHTNK

SEQ ID NO: 41889 - protein, 159 aa, Homo sapiens
MPKFYCDYCDTYLTHDSPSVRKTHCSGRKHKENVKDYYQKWMEEQAQSLIDKTTAAFQQGKIPPTPFSAPPPAGAMIPPPPSLPGPPRPGMMPAPHMGGPPMMPMMGPPPPGMMPVGPAPGMRPPMGGHMPMMPGPPMMRPPARPMMVPTRPGMTRPDR

SEQ ID NO: 41890 - protein, 242 aa, Homo sapiens
MAAPAVKVARGWSGLALGVRRAVLQLPGLTQVRWSRYSPEFKDPLIDKEYYRKPVEELTEEEKYVRELKKTQLIKAAPAGKTSSVFEDPVISKFTNMMMIGGNKVLARSLMIQTLEAVKRKQFEKYHAASAEEQATIERNPYTIFHQALKNCEPMIGLVPILKGGRFYQVPVPLPDRRRRFLAMKWMITECRDKKHQRTLMPEKLSHKLLEAFHNQGPVIKRKHDLHKMAEANRALAHYRWW

SEQ ID NO: 41891 - protein, 225 aa, Homo sapiens
MCTSLTTCEWKKVFYEKMEVAKPADSWELIIDPNLKPSELAPGWKQYLEQHASGRFHCSWCWHTWQSAHVVILFHMFLDRAQRAGSVRMRVFKQLCYECGTARLDESSMLEENIEGLVDNLITSLREQCYEEDGGQYRIHVASRPDSGPHRAEFCEACQEGIVHWKPSEKLLEEEVTTYTSEASKPRAQAGSGYNFLSLRWCLFWASLCLLVVYLQFSFLSPAFF

SEQ ID NO: 41892 - protein, 403 aa, Homo sapiens
MSGRVGDLSPRQKEALAKFRENVQDVLPALPNPDDYFLLRWLRARSFDLQKSEAMLRKHVEFRKQKDIDNIISWQPPEVIQQYLSGGMCGYDLDGCPVWYDIIGPLDAKGLLFSASKQDLLRTKMRECELLLQECAHQTTKLGRKVETITIIYDCEGLGLKHLWKPAVEAYGEFLCMFEENYPETLKRLFVVKAPKLFPVAYNLIKPFLSEDTRKKIMVLGANWKEVLLKHISPDQVPVEYGGTMTDPDGNPKCKSKINYGGDIPRKYYVRDQVKQQYEHSVQISRGSSHQVEYEILFPGCVLRWQFMSDGADVGFGIFLKTKMGERQRAGEMTEVLPNQRYNSHLVPEDGTLTCSDPGIYVLRFDNTYSFIHAKKVNFTVEVLLPDKASEEKMKQLGAGTPK

SEQ ID NO: 41893 - protein, 392 aa, Homo sapiens
MSGRVGDLSPRQKEALAKFRENVQDVLPALPNPDDYFLLRWLRARSFDLQKSEAMLRKHVEFRKQKDIDNIISWQPPEVIQQYLSGGMCGYDLDGCPVWYDIIGPLDAKGLLFSASKQDLLRTKMRECELLLQECAHQTTKLGRKVETITIIYDCEGLGLKHLWKPAVEAYGEFLCMFEENYPETLKRLFVVKAPKLFPVAYNLIKPFLSEDTRKKIMVLGANWKEVLLKHISPDQVPVEYGGTMTDPDGNPKCKSKINYGGDIPRKYYVRDQVKQQYEHSVQISRGSSHQVEYEILFPGCVLRWQFMSDGADVGFGIFLKTKMGERQRAGEMTEVLPNQRYNSHLVPEDGTLTCSDPGICKYLCLGNALKPHVQLSACEVPLPPWIFGSEC

SEQ ID NO: 41894 - protein, 320 aa, Homo sapiens
MSGRVGDLSPRQKEALAKFRENVQDVLPALPNPDDYFLLRWLRARSFDLQKSEAMLRKLGRKVETITIIYDCEGLGLKHLWKPAVEAYGEFLCMFEENYPETLKRLFVVKAPKLFPVAYNLIKPFLSEDTRKKIMVLGANWKEVLLKHISPDQVPVEYGGTMTDPDGNPKCKSKINYGGDIPRKYYVRDQVKQQYEHSVQISRGSSHQVEYEILFPGCVLRWQFMSDGADVGFGIFLKTKMGERQRAGEMTEVLPNQRYNSHLVPEDGTLTCSDPGIYVLRFDNTYSFIHAKKVNFTVEVLLPDKASEEKMKQLGAGTPK

SEQ ID NO: 41895 - protein, 130 aa, Homo sapiens
MSVVRSSVHARWIVGKVIGTKMQKTAKVRVTRLVLDPYLLKYFNKRKTYFAHDALQQCTVGDIVLLRALPVPRAKHVKHELAEIVFKVGKVIDPVTGKPCAGTTYLESPLSSETTQLSKNLEELNISSAQ

SEQ ID NO: 41896 - protein, 246 aa, Homo sapiens
MVVDFWTWEQTFQELIQEAKPRATWTLKLDGNLQLDCLAQGWKQYQQRAFGWFRCSSCQRSWASAQVQILCHTYWEHWTSQGQVRMRLFGQRCQKCSWSQYEMPEFSSDSTMRILSNLVQHILKKYYGNGTRKSPEMPVILEVSLEGSHDTANCEACTLGICGQGLKSCMTKPSKSLLPHLKTGNSSPGIGAVYLANQAKNQSAEAKEAKGSGYEKLGPSRDPDPLNICVFILLLVFIVVKCFTSE

SEQ ID NO: 41897 - protein, 4870 aa, Homo sapiens
MAEGGEGGEDEIQFLRTEDEVVLQCIATIHKEQRKFCLAAEGLGNRLCFLEPTSEAKYIPPDLCVCNFVLEQSLSVRALQEMLANTGENGGEGAAQGGGHRTLLYGHAVLLRHSFSGMYLTCLTTSRSQTDKLAFDVGLREHATGEACWWTIHPASKQRSEGEKVRIGDDLILVSVSSERYLHLSVSNGNIQVDASFMQTLWNVHPTCSGSSIEEGYLLGGHVVRLFHGHDECLTIPSTDQNDSQHRRIFYEAGGAGTRARSLWRVEPLRISWSGSNIRWGQAFRLRHLTTGHYLALTEDQGLILQDRAKSDTKSTAFSFRASKELKEKLDSSHKRDIEGMGVPEIKYGDSVCFVQHIASGLWVTYKAQDAKTSRLGPLKRKVILHQEGHMDDGLTLQRCQREESQAARIIRNTTALFSQFVSGNNRTAAPITLPIEEVLQTLQDLIAYFQPPEEEMRHEDKQNKLRSLKNRQNLFKEEGMLALVLNCIDRLNVYNSVAHFAGIAREESGMAWKEILNLLYKLLAALIRGNRNNCAQFSNNLDWLISKLDRLESSSGILEVLHCILTESPEALNLIAEGHIKSIISLLDKHGRNHKVLDILCSLCLCNGVAVRANQNLICDNLLPRRNLLLQTRLINDVTSIRPNIFLGVAEGSAQYKKWYFELIIDQVDPFLTAEPTHLRVGWASSSGYAPYPGGGEGWGGNGVGDDLYSYGFDGLHLWSGRIPRAVASINQHLLRSDDVVSCCLDLGVPSISFRINGQPVQGMFENFNTDGLFFPVMSFSAGVKVRFLMGGRHGEFKFLPPSGYAPCYEALLPKEKMRLEPVKEYKRDADGIRDLLGTTQFLSQASFIPCPVDTSQVILPPHLEKIRDRLAENIHELWGMNKIELGWTFGKIRDDNKRQHPCLVEFSKLPETEKNYNLQMSTETLKTLLALGCHIAHVNPAAEEDLKKVKLPKNYMMSNGYKPAPLDLSDVKLLPPQEILVDKLAENAHNVWAKDRIKQGWTYGIQQDLKNKRNPRLVPYALLDERTKKSNRDSLREAVRTFVGYGYNIEPSDQELADSAVEKVSIDKIRFFRVERSYAVRSGKWYFEFEVVTGGDMRVGWARPGCRPDVELGADDQAFVFEGNRGQRWHQGSGYFGRTWQPGDVVGCMINLDDASMIFTLNGELLITNKGSELAFADYEIENGFVPICCLGLSQIGRMNLGTDASTFKFYTMCGLQEGFEPFAVNMNRDVAMWFSKRLPTFVNVPKDHPHIEVMRIDGTMDSPPCLKVTHKTFGTQNSNADMIYCRLSMPVECHSSFSHSPCLDSEAFQKRKQMQEILSHTTTQCYYAIRIFAGQDPSCVWVGWVTPDYHLYSEKFDLNKNCTVTVTLGDERGRVHESVKRSNCYMVWGGDIVASSQRSNRSNVDLEIGCLVDLAMGMLSFSANGKELGTCYQVEPNTKVFPAVFLQPTSTSLFQFELGKLKNAMPLSAAIFRSEEKNPVPQCPPRLDVQTIQPVLWSRMPNSFLKVETERVSERHGWVVQCLEPLQMMALHIPEENRCVDILELCEQEDLMRFHYHTLRLYSAVCALGNSRVAYALCSHVDLSQLFYAIDNKYLPGLLRSGFYDLLISIHLASAKERKLMMKNEYIIPITSTTRNIRLFPDESKRHGLPGVGLRTCLKPGFRFSTPCFVVTGEDHQKQSPEIPLESLRTKALSMLTEAVQCSGAHIRDPVGGSVEFQFVPVLKLIGTLLVMGVFDDDDVRQILLLIDPSVFGEHSAGTEEGAEKEEVTQVEEKAVEAGEKAGKEAPVKGLLQTRLPESVKLQMCELLSYLCDCELQHRVEAIVAFGDIYVSKLQANQKFRYNELMQALNMSAALTARKTKEFRSPPQEQINMLLNFQLGENCPCPEEIREELYDFHEDLLLHCGVPLEEEEEEEEDTSWTGKLCALVYKIKGPPKPEKEQPTEEEERCPTTLKELISQTMICWAQEDQIQDSELVRMMFNLLRRQYDSIGELLQALRKTYTISHTSVSDTINLLAALGQIRSLLSVRMGKEEELLMINGLGDIMNNKVFYQHPNLMRVLGMHETVMEVMVNVLGTEKSQIAFPKMVASCCRFLCYFCRISRQNQKAMFEHLSYLLENSSVGLASPSMRGSTPLDVAASSVMDNNELALSLEEPDLEKVVTYLAGCGLQSCPMLLAKGYPDVGWNPIEGERYLSFLRFAVFVNSESVEENASVVVKLLIRRPECFGPALRGEGGNGLLAAMQGAIKISENPALDLPSQGYKREVSTGDDEEEEEIVHMGNAIMSFYSALIDLLGRCAPEMHLIQTGKGEAIRIRSILRSLVPTEDLVGIISIPLKLPSLNKDGSVSEPDMAANFCPDHKAPMVLFLDRVYGIKDQTFLLHLLEVGFLPDLRASASLDTVSLSTTEAALALNRYICSAVLPLLTRCAPLFAGTEHCTSLIDSTLQTIYRLSKGRSLTKAQRDTIEECLLAICNHLRPSMLQQLLRRLVFDVPQLNEYCKMPLKLLTNHYEQCWKYYCLPSGWGSYGLAVEEELHLTEKLFWGIFDSLSHKKYDPDLFRMALPCLSAIAGALPPDYLDTRITATLEKQISVDADGNFDPKPINTMNFSLPEKLEYIVTKYAEHSHDKWACDKSQSGWKYGISLDENVKTHPLIRPFKTLTEKEKEIYRWPARESLKTMLAVGWTVERTKEGEALVQQRENEKLRSVSQANQGNSYSPAPLDLSNVVLSRELQGMVEVVAENYHNIWAKKKKLELESKGGGSHPLLVPYDTLTAKEKFKDREKAQDLFKFLQVNGIIVSRGMKDMELDASSMEKRFAYKFLKKILKYVDSAQEFIAHLEAIVSSGKTEKSPRDQEIKFFAKVLLPLVDQYFTSHCLYFLSSPLKPLSSSGYASHKEKEMVAGLFCKLAALVRHRISLFGSDSTTMVSCLHILAQTLDTRTVMKSGSELVKAGLRAFFENAAEDLEKTSENLKLGKFTHSRTQIKGVSQNINYTTVALLPILTSIFEHVTQHQFGMDLLLGDVQISCYHILCSLYSLGTGKNIYVERQRPALGECLASLAAAIPVAFLEPTLNRYNPLSVFNTKTPRERSILGMPDTVEDMCPDIPQLEGLMKEINDLAESGARYTEMPHVIEVILPMLCNYLSYWWERGPENLPPSTGPCCTKVTSEHLSLILGNILKIINNNLGIDEASWMKRIAVYAQPIISKARPDLLRSHFIPTLEKLKKKAVKTVQEEEQLKADGKGDTQEAELLILDEFAVLCRDLYAFYPMLIRYVDNNRSNWLKSPDADSDQLFRMVAEVFILWCKSHNFKREEQNFVIQNEINNLAFLTGDSKSKMSKAMQVKSGGQDQERKKTKRRGDLYSIQTSLIVAALKKMLPIGLNMCTPGDQELISLAKSRYSHRDTDEEVREHLRNNLHLQEKSDDPAVKWQLNLYKDVLKSEEPFNPEKTVERVQRISAAVFHLEQVEQPLRSKKAVWHKLLSKQRKRAVVACFRMAPLYNLPRHRSINLFLHGYQRFWIETEEYSFEEKLVQDLAKSPKVEEEEEEETEKQPDPLHQIILYFSRNALTERSKLEDDPLYTSYSSMMAKSCQSGEDEEEDEDKEKTFEEKEMEKQKTLYQQARLHERGAAEMVLQMISASKGEMSPMVVETLKLGIAILNGGNAGVQQKMLDYLKEKKDAGFFQSLSGLMQSCSVLDLNAFERQNKAEGLGMVTEEGTLIVRERGEKVLQNDEFTRDLFRFLQLLCEGHNSDFQNFLRTQMGNTTTVNVIISTVDYLLRLQESISDFYWYYSGKDIIDESGQHNFSKALAVTKQIFNSLTEYIQGPCIGNQQSLAHSRLWDAVVGFLHVFANMQMKLSQDSSQIELLKELLDLLQDMVVMLLSLLEGNVVNGTIGKQMVDTLVESSTNVEMILKFFDMFLKLKDLTSSDTFKEYDPDGKGIISKKEFQKAMEGQKQYTQSEIDFLLSCAEADENDMFNYVDFVDRFHEPAKDIGFNVAVLLTNLSEHMPNDSRLKCLLDPAESVLNYFEPYLGRIEIMGGAKKIERVYFEISESSRTQWEKPQVKESKRQFIFDVVNEGGEQEKMELFVNFCEDTIFEMQLASQISESDSADRPEEEEEDEDSSYVLEIAGEEEEDGSLEPASAFAMACASVKRNVTDFLKRATLKNLRKQYRNVKKMTAKELVKVLFSFFWMLFVGLFQLLFTILGGIFQILWSTVFGGGLVEGAKNIRVTKILGDMPDPTQFGIHDDTMEAERAEVMEPGITTELVHFIKGEKGDTDIMSDLFGLHPKKEGSLKHGPEVGLGDLSEIIGKDEPPTLESTVQKKRKAQAAEMKAANEAEGKVESEKADMEDGEKEDKDKEEEQAEYLWTEVTKKKKRRCGQKVEKPEAFTANFFKGLEIYQTKLLHYLARNFYNLRFLALFVAFAINFILLFYKVTEEPLEEETEDVANLWNSFNDEEEEEAMVFFVLQESTGYMAPTLRALAIIHTIISLVCVVGYYCLKVPLVVFKREKEIARKLEFDGLYITEQPSEDDIKGQWDRLVINTPSFPNNYWDKFVKRKVINKYGDLYGAERIAELLGLDKNALDFSPVEETKAEAASLVSWLSSIDMKYHIWKLGVVFTDNSFLYLAWYTTMSVLGHYNNFFFAAHLLDIAMGFKTLRTILSSVTHNGKQLVLTVGLLAVVVYLYTVVAFNFFRKFYNKSEDDDEPDMKCDDMMTCYLFHMYVGVRAGGGIGDEIEDPAGDPYEMYRIVFDITFFFFVIVILLAIIQGLIIDAFGELRDQQEQVREDMETKCFICGIGNDYFDTTPHGFETHTLQEHNLANYLFFLMYLINKDETEHTGQESYVWKMYQERCWDFFPAGDCFRKQYEDQLG

SEQ ID NO: 41898 - protein, 4865 aa, Homo sapiens
MAEGGEGGEDEIQFLRTEDEVVLQCIATIHKEQRKFCLAAEGLGNRLCFLEPTSEAKYIPPDLCVCNFVLEQSLSVRALQEMLANTGENGGEGAAQGGGHRTLLYGHAVLLRHSFSGMYLTCLTTSRSQTDKLAFDVGLREHATGEACWWTIHPASKQRSEGEKVRIGDDLILVSVSSERYLHLSVSNGNIQVDASFMQTLWNVHPTCSGSSIEEGYLLGGHVVRLFHGHDECLTIPSTDQNDSQHRRIFYEAGGAGTRARSLWRVEPLRISWSGSNIRWGQAFRLRHLTTGHYLALTEDQGLILQDRAKSDTKSTAFSFRASKELKEKLDSSHKRDIEGMGVPEIKYGDSVCFVQHIASGLWVTYKAQDAKTSRLGPLKRKVILHQEGHMDDGLTLQRCQREESQAARIIRNTTALFSQFVSGNNRTAAPITLPIEEVLQTLQDLIAYFQPPEEEMRHEDKQNKLRSLKNRQNLFKEEGMLALVLNCIDRLNVYNSVAHFAGIAREESGMAWKEILNLLYKLLAALIRGNRNNCAQFSNNLDWLISKLDRLESSSGILEVLHCILTESPEALNLIAEGHIKSIISLLDKHGRNHKVLDILCSLCLCNGVAVRANQNLICDNLLPRRNLLLQTRLINDVTSIRPNIFLGVAEGSAQYKKWYFELIIDQVDPFLTAEPTHLRVGWASSSGYAPYPGGGEGWGGNGVGDDLYSYGFDGLHLWSGRIPRAVASINQHLLRSDDVVSCCLDLGVPSISFRINGQPVQGMFENFNTDGLFFPVMSFSAGVKVRFLMGGRHGEFKFLPPSGYAPCYEALLPKEKMRLEPVKEYKRDADGIRDLLGTTQFLSQASFIPCPVDTSQVILPPHLEKIRDRLAENIHELWGMNKIELGWTFGKIRDDNKRQHPCLVEFSKLPETEKNYNLQMSTETLKTLLALGCHIAHVNPAAEEDLKKVKLPKNYMMSNGYKPAPLDLSDVKLLPPQEILVDKLAENAHNVWAKDRIKQGWTYGIQQDLKNKRNPRLVPYALLDERTKKSNRDSLREAVRTFVGYGYNIEPSDQELADSAVEKVSIDKIRFFRVERSYAVRSGKWYFEFEVVTGGDMRVGWARPGCRPDVELGADDQAFVFEGNRGQRWHQGSGYFGRTWQPGDVVGCMINLDDASMIFTLNGELLITNKGSELAFADYEIENGFVPICCLGLSQIGRMNLGTDASTFKFYTMCGLQEGFEPFAVNMNRDVAMWFSKRLPTFVNVPKDHPHIEVMRIDGTMDSPPCLKVTHKTFGTQNSNADMIYCRLSMPVECHSSFSHSPCLDSEAFQKRKQMQEILSHTTTQCYYAIRIFAGQDPSCVWVGWVTPDYHLYSEKFDLNKNCTVTVTLGDERGRVHESVKRSNCYMVWGGDIVASSQRSNRSNVDLEIGCLVDLAMGMLSFSANGKELGTCYQVEPNTKVFPAVFLQPTSTSLFQFELGKLKNAMPLSAAIFRSEEKNPVPQCPPRLDVQTIQPVLWSRMPNSFLKVETERVSERHGWVVQCLEPLQMMALHIPEENRCVDILELCEQEDLMRFHYHTLRLYSAVCALGNSRVAYALCSHVDLSQLFYAIDNKYLPGLLRSGFYDLLISIHLASAKERKLMMKNEYIIPITSTTRNIRLFPDESKRHGLPGVGLRTCLKPGFRFSTPCFVVTGEDHQKQSPEIPLESLRTKALSMLTEAVQCSGAHIRDPVGGSVEFQFVPVLKLIGTLLVMGVFDDDDVRQILLLIDPSVFGEHSAGTEEGAEKEEVTQVEEKAVEAGEKAGKEAPVKGLLQTRLPESVKLQMCELLSYLCDCELQHRVEAIVAFGDIYVSKLQANQKFRYNELMQALNMSAALTARKTKEFRSPPQEQINMLLNFQLGENCPCPEEIREELYDFHEDLLLHCGVPLEEEEEEEEDTSWTGKLCALVYKIKGPPKPEKEQPTEEEERCPTTLKELISQTMICWAQEDQIQDSELVRMMFNLLRRQYDSIGELLQALRKTYTISHTSVSDTINLLAALGQIRSLLSVRMGKEEELLMINGLGDIMNNKVFYQHPNLMRVLGMHETVMEVMVNVLGTEKSQIAFPKMVASCCRFLCYFCRISRQNQKAMFEHLSYLLENSSVGLASPSMRGSTPLDVAASSVMDNNELALSLEEPDLEKVVTYLAGCGLQSCPMLLAKGYPDVGWNPIEGERYLSFLRFAVFVNSESVEENASVVVKLLIRRPECFGPALRGEGGNGLLAAMQGAIKISENPALDLPSQGYKREVSTGDDEEEEEIVHMGNAIMSFYSALIDLLGRCAPEMHLIQTGKGEAIRIRSILRSLVPTEDLVGIISIPLKLPSLNKDGSVSEPDMAANFCPDHKAPMVLFLDRVYGIKDQTFLLHLLEVGFLPDLRASASLDTVSLSTTEAALALNRYICSAVLPLLTRCAPLFAGTEHCTSLIDSTLQTIYRLSKGRSLTKAQRDTIEECLLAICNHLRPSMLQQLLRRLVFDVPQLNEYCKMPLKLLTNHYEQCWKYYCLPSGWGSYGLAVEEELHLTEKLFWGIFDSLSHKKYDPDLFRMALPCLSAIAGALPPDYLDTRITATLEKQISVDADGNFDPKPINTMNFSLPEKLEYIVTKYAEHSHDKWACDKSQSGWKYGISLDENVKTHPLIRPFKTLTEKEKEIYRWPARESLKTMLAVGWTVERTKEGEALVQQRENEKLRSVSQANQGNSYSPAPLDLSNVVLSRELQGMVEVVAENYHNIWAKKKKLELESKGGGSHPLLVPYDTLTAKEKFKDREKAQDLFKFLQVNGIIVSRGMKDMELDASSMEKRFAYKFLKKILKYVDSAQEFIAHLEAIVSSGKTEKSPRDQEIKFFAKVLLPLVDQYFTSHCLYFLSSPLKPLSSSGYASHKEKEMVAGLFCKLAALVRHRISLFGSDSTTMVSCLHILAQTLDTRTVMKSGSELVKAGLRAFFENAAEDLEKTSENLKLGKFTHSRTQIKGVSQNINYTTVALLPILTSIFEHVTQHQFGMDLLLGDVQISCYHILCSLYSLGTGKNIYVERQRPALGECLASLAAAIPVAFLEPTLNRYNPLSVFNTKTPRERSILGMPDTVEDMCPDIPQLEGLMKEINDLAESGARYTEMPHVIEVILPMLCNYLSYWWERGPENLPPSTGPCCTKVTSEHLSLILGNILKIINNNLGIDEASWMKRIAVYAQPIISKARPDLLRSHFIPTLEKLKKKAVKTVQEEEQLKADGKGDTQEAELLILDEFAVLCRDLYAFYPMLIRYVDNNRSNWLKSPDADSDQLFRMVAEVFILWCKSHNFKREEQNFVIQNEINNLAFLTGDSKSKMSKSGGQDQERKKTKRRGDLYSIQTSLIVAALKKMLPIGLNMCTPGDQELISLAKSRYSHRDTDEEVREHLRNNLHLQEKSDDPAVKWQLNLYKDVLKSEEPFNPEKTVERVQRISAAVFHLEQVEQPLRSKKAVWHKLLSKQRKRAVVACFRMAPLYNLPRHRSINLFLHGYQRFWIETEEYSFEEKLVQDLAKSPKVEEEEEEETEKQPDPLHQIILYFSRNALTERSKLEDDPLYTSYSSMMAKSCQSGEDEEEDEDKEKTFEEKEMEKQKTLYQQARLHERGAAEMVLQMISASKGEMSPMVVETLKLGIAILNGGNAGVQQKMLDYLKEKKDAGFFQSLSGLMQSCSVLDLNAFERQNKAEGLGMVTEEGTLIVRERGEKVLQNDEFTRDLFRFLQLLCEGHNSDFQNFLRTQMGNTTTVNVIISTVDYLLRLQESISDFYWYYSGKDIIDESGQHNFSKALAVTKQIFNSLTEYIQGPCIGNQQSLAHSRLWDAVVGFLHVFANMQMKLSQDSSQIELLKELLDLLQDMVVMLLSLLEGNVVNGTIGKQMVDTLVESSTNVEMILKFFDMFLKLKDLTSSDTFKEYDPDGKGIISKKEFQKAMEGQKQYTQSEIDFLLSCAEADENDMFNYVDFVDRFHEPAKDIGFNVAVLLTNLSEHMPNDSRLKCLLDPAESVLNYFEPYLGRIEIMGGAKKIERVYFEISESSRTQWEKPQVKESKRQFIFDVVNEGGEQEKMELFVNFCEDTIFEMQLASQISESDSADRPEEEEEDEDSSYVLEIAGEEEEDGSLEPASAFAMACASVKRNVTDFLKRATLKNLRKQYRNVKKMTAKELVKVLFSFFWMLFVGLFQLLFTILGGIFQILWSTVFGGGLVEGAKNIRVTKILGDMPDPTQFGIHDDTMEAERAEVMEPGITTELVHFIKGEKGDTDIMSDLFGLHPKKEGSLKHGPEVGLGDLSEIIGKDEPPTLESTVQKKRKAQAAEMKAANEAEGKVESEKADMEDGEKEDKDKEEEQAEYLWTEVTKKKKRRCGQKVEKPEAFTANFFKGLEIYQTKLLHYLARNFYNLRFLALFVAFAINFILLFYKVTEEPLEEETEDVANLWNSFNDEEEEEAMVFFVLQESTGYMAPTLRALAIIHTIISLVCVVGYYCLKVPLVVFKREKEIARKLEFDGLYITEQPSEDDIKGQWDRLVINTPSFPNNYWDKFVKRKVINKYGDLYGAERIAELLGLDKNALDFSPVEETKAEAASLVSWLSSIDMKYHIWKLGVVFTDNSFLYLAWYTTMSVLGHYNNFFFAAHLLDIAMGFKTLRTILSSVTHNGKQLVLTVGLLAVVVYLYTVVAFNFFRKFYNKSEDDDEPDMKCDDMMTCYLFHMYVGVRAGGGIGDEIEDPAGDPYEMYRIVFDITFFFFVIVILLAIIQGLIIDAFGELRDQQEQVREDMETKCFICGIGNDYFDTTPHGFETHTLQEHNLANYLFFLMYLINKDETEHTGQESYVWKMYQERCWDFFPAGDCFRKQYEDQLG

SEQ ID NO: 41899 - protein, 3859 aa, Homo sapiens
MAEGGEGGEDEIQFLRTEDEVVLQCIATIHKEQRKFCLAAEGLGNRLCFLEPTSEAKYIPPDLCVCNFVLEQSLSVRALQEMLANTGENGGEGAAQGGGHRTLLYGHAVLLRHSFSGMYLTCLTTSRSQTDKLAFDVGLREHATGEACWWTIHPASKQRSEGEKVRIGDDLILVSVSSERYLHLSVSNGNIQVDASFMQTLWNVHPTCSGSSIEEGYLLGGHVVRLFHGHDECLTIPSTDQNDSQHRRIFYEAGGAGTRARSLWRVEPLRISWSGSNIRWGQAFRLRHLTTGHYLALTEDQGLILQDRAKSDTKSTAFSFRASKELKEKLDSSHKRDIEGMGVPEIKYGDSVCFVQHIASGLWVTYKAQDAKTSRLGPLKRKVILHQEGHMDDGLTLQRCQREESQAARIIRNTTALFSQFVSGNNRTAAPITLPIEEVLQTLQDLIAYFQPPEEEMRHEDKQNKLRSLKNRQNLFKEEGMLALVLNCIDRLNVYNSVAHFAGIAREESGMAWKEILNLLYKLLAALIRGNRNNCAQFSNNLDWLISKLDRLESSSGILEVLHCILTESPEALNLIAEGHIKSIISLLDKHGRNHKVLDILCSLCLCNGVAVRANQNLICDNLLPRRNLLLQTRLINDVTSIRPNIFLGVAEGSAQYKKWYFELIIDQVDPFLTAEPTHLRVGWASSSGYAPYPGGGEGWGGNGVGDDLYSYGFDGLHLWSGRIPRAVASINQHLLRSDDVVSCCLDLGVPSISFRINGQPVQGMFENFNTDGLFFPVMSFSAGVKVRFLMGGRHGEFKFLPPSGYAPCYEALLPKEKMRLEPVKEYKRDADGIRDLLGTTQFLSQASFIPCPVDTSQVILPPHLEKIRDRLAENIHELWGMNKIELGWTFGKIRDDNKRQHPCLVEFSKLPETEKNYNLQMSTETLKTLLALGCHIAHVNPAAEEDLKKVKLPKNYMMSNGYKPAPLDLSDVKLLPPQEILVDKLAENAHNVWAKDRIKQGWTYGIQQDLKNKRNPRLVPYALLDERTKKSNRDSLREAVRTFVGYGYNIEPSDQELADSAVEKVSIDKIRFFRVERSYAVRSGKWYFEFEVVTGGDMRVGWARPGCRPDVELGADDQAFVFEGNRGQRWHQGSGYFGRTWQPGDVVGCMINLDDASMIFTLNGELLITNKGSELAFADYEIENGFVPICCLGLSQIGRMNLGTDASTFKFYTMCGLQEGFEPFAVNMNRDVAMWFSKRLPTFVNVPKDHPHIEVMRIDGTMDSPPCLKVTHKTFGTQNSNADMIYCRLSMPVECHSSFSHSPCLDSEAFQKRKQMQEILSHTTTQCYYAIRIFAGQDPSCVWVGWVTPDYHLYSEKFDLNKNCTVTVTLGDERGRVHESVKRSNCYMVWGGDIVASSQRSNRSNVDLEIGCLVDLAMGMLSFSANGKELGTCYQVEPNTKVFPAVFLQPTSTSLFQFELGKLKNAMPLSAAIFRSEEKNPVPQCPPRLDVQTIQPVLWSRMPNSFLKVETERVSERHGWVVQCLEPLQMMALHIPEENRCVDILELCEQEDLMRFHYHTLRLYSAVCALGNSRVAYALCSHVDLSQLFYAIDNKYLPGLLRSGFYDLLISIHLASAKERKLMMKNEYIIPITSTTRNIRLFPDESKRHGLPGVGLRTCLKPGFRFSTPCFVVTGEDHQKQSPEIPLESLRTKALSMLTEAVQCSGAHIRDPVGGSVEFQFVPVLKLIGTLLVMGVFDDDDVRQILLLIDPSVFGEHSAGTEEGAEKEEVTQVEEKAVEAGEKAGKEAPVKGLLQTRLPESVKLQMCELLSYLCDCELQHRVEAIVAFGDIYVSKLQANQKFRYNELMQALNMSAALTARKTKEFRSPPQEQINMLLNFQLGENCPCPEEIREELYDFHEDLLLHCGVPLEEEEEEEEDTSWTGKLCALVYKIKGPPKPEKEQPTEEEERCPTTLKELISQTMICWAQEDQIQDSELVRMMFNLLRRQYDSIGELLQALRKTYTISHTSVSDTINLLAALGQIRSLLSVRMGKEEELLMINGLGDIMNNKVFYQHPNLMRVLGMHETVMEVMVNVLGTEKSQIAFPKMVASCCRFLCYFCRISRQNQKAMFEHLSYLLENSSVGLASPSMRGSTPLDVAASSVMDNNELALSLEEPDLEKVVTYLAGCGLQSCPMLLAKGYPDVGWNPIEGERYLSFLRFAVFVNSESVEENASVVVKLLIRRPECFGPALRGEGGNGLLAAMQGAIKISENPALDLPSQGYKREVSTGDDEEEEEIVHMGNAIMSFYSALIDLLGRCAPEMHLIQTGKGEAIRIRSILRSLVPTEDLVGIISIPLKLPSLNKDGSVSEPDMAANFCPDHKAPMVLFLDRVYGIKDQTFLLHLLEVGFLPDLRASASLDTVSLSTTEAALALNRYICSAVLPLLTRCAPLFAGTEHCTSLIDSTLQTIYRLSKGRSLTKAQRDTIEECLLAICNHLRPSMLQQLLRRLVFDVPQLNEYCKMPLKLLTNHYEQCWKYYCLPSGWGSYGLAVEEELHLTEKLFWGIFDSLSHKKYDPDLFRMALPCLSAIAGALPPDYLDTRITATLEKQISVDADGNFDPKPINTMNFSLPEKLEYIVTKYAEHSHDKWACDKSQSGWKYGISLDENVKTHPLIRPFKTLTEKEKEIYRWPARESLKTMLAVGWTVERTKEGEALVQQRENEKLRSVSQANQGNSYSPAPLDLSNVVLSRELQGMVEVVAENYHNIWAKKKKLELESKGGGSHPLLVPYDTLTAKEKFKDREKAQDLFKFLQVNGIIVSRGMKDMELDASSMEKRFAYKFLKKILKYVDSAQEFIAHLEAIVSSGKTEKSPRDQEIKFFAKVLLPLVDQYFTSHCLYFLSSPLKPLSSSGYASHKEKEMVAGLFCKLAALVRHRISLFGSDSTTMVSCLHILAQTLDTRTVMKSGSELVKAGLRAFFENAAEDLEKTSENLKLGKFTHSRTQIKGVSQNINYTTVALLPILTSIFEHVTQHQFGMDLLLGDVQISCYHILCSLYSLGTGKNIYVERQRPALGECLASLAAAIPVAFLEPTLNRYNPLSVFNTKTPRERSILGMPDTVEDMCPDIPQLEGLMKEINDLAESGARYTEMPHVIEVILPMLCNYLSYWWERGPENLPPSTGPCCTKVTSEHLSLILGNILKIINNNLGIDEASWMKRIAVYAQPIISKARPDLLRSHFIPTLEKLKKKAVKTVQEEEQLKADGKGDTQEAELLILDEFAVLCRDLYAFYPMLIRYVDNNRSNWLKSPDADSDQLFRMVAEVFILWCKSHNFKREEQNFVIQNEINNLAFLTGDSKSKMSKAMQVKSGGQDQERKKTKRRGDLYSIQTSLIVAALKKMLPIGLNMCTPGDQELISLAKSRYSHRDTDEEVREHLRNNLHLQEKSDDPAVKWQLNLYKDVLKSEEPFNPEKTVERVQRISAAVFHLEQVEQPLRSKKAVWHKLLSKQRKRAVVACFRMAPLYNLPRHRSINLFLHGYQRFWIETEEYSFEEKLVQDLAKSPKVEEEEEEETEKQPDPLHQIILYFSRNALTERSKLEDDPLYTSYSSMMAKSCQSGEDEEEDEDKEKTFEEKEMEKQKTLYQQARLHERGAAEMVLQMISASKGEMSPMVVETLKLGIAILNGGNAGVQQKMLDYLKEKKDAGFFQSLSGLMQSCSVLDLNAFERQNKAEGLGMVTEEGTLIVRERGEKVLQNDEFTRDLFRFLQLLCEGHNSDFQNFLRTQMGNTTTVNVIISTVDYLLRLQESISDFYWYYSGKDIIDESGQHNFSKALAVTKQIFNSLTEYIQGPCIGNQQSLAHSRLWDAVVGFLHVFANMQMKLSQGMW

SEQ ID NO: 41900 - protein, 92 aa, Homo sapiens
MTKLEEHLEGIVNIFHQYSVRKGHFDTLSKGELKQLLTKELANTIKNIKDKAVIDEIFQGLDANQDEQVDFQEFISLVAIALKAAHYHTHKE

SEQ ID NO: 41901 - protein, 98 aa, Homo sapiens
MAAEPLTELEESIETVVTTFFTFARQEGRKDSLSVNEFKELVTQQLPHLLKDVGSLDEKMKSLDVNQDSELKFNEYWRLIGELAKEIRKKKDLKIRKK

SEQ ID NO: 41902 - protein, 351 aa, Homo sapiens
MAVSSEQHELSHFKRTQTKKEKFNCSEYGNRSCPENERSLGVRVAMYSFMAGSIFITIFGNLAMIISISYFKQLHTPTNFLILSMAITDFLLGFTIMPYSMIRSVENCWYFGLTFCKIYYSFDLMLSITSIFHLCSVAIDRFYAICYPLLYSTKITIPVIKRLLLLCWSVPGAFAFGVVFSEAYADGIEGYDILVACSSSCPVMFNKLWGTTLFMAGFFTPGSMMVGIYGKIFAVSRKHAHAINNLRENQNNQVKKDKKAAKTLGIVIGVFLLCWFPCFFTILLDPFLNFSTPVVLFDALTWFGYFNSTCNPLIYGFFYPWFRRALKYILLGKIFSSCFHNTILCMQKESE

SEQ ID NO: 41903 - protein, 306 aa, Homo sapiens
MYSFMAGSIFITIFGNLAMIISISYFKQLHTPTNFLILSMAITDFLLGFTIMPYSMIRSVENCWYFGLTFCKIYYSFDLMLSITSIFHLCSVAIDRFYAICYPLLYSTKITIPVIKRLLLLCWSVPGAFAFGVVFSEAYADGIEGYDILVACSSSCPVMFNKLWGTTLFMAGFFTPGSMMVGIYGKIFAVSRKHAHAINNLRENQNNQVKKDKKAAKTLGIVIGVFLLCWFPCFFTILLDPFLNFSTPVVLFDALTWFGYFNSTCNPLIYGFFYPWFRRALKYILLGKIFSSCFHNTILCMQKESE

SEQ ID NO: 41904 - protein, 1279 aa, Homo sapiens
MTLTERLREKISRAFYNHGLLCASYPIPIILFTGFCILACCYPLLKLPLPGTGPVEFTTPVKDYSPPPVDSDRKQGEPTEQPEWYVGAPVAYVQQIFVKSSVFPWHKNLLAVDVFRSPLSRAFQLVEEIRNHVLRDSSGIRSLEELCLQVTDLLPGLRKLRNLLPEHGCLLLSPGNFWQNDWERFHADPDIIGTIHQHEPKTLQTSATLKDLLFGVPGKYSGVSLYTRKRMVSYTITLVFQHYHAKFLGSLRARLMLLHPSPNCSLRAESLVHVHFKEEIGVAELIPLVTTYIILFAYIYFSTRKIDMVKSKWGLALAAVVTVLSSLLMSVGLCTLFGLTPTLNGGEIFPYLVVVIGLENVLVLTKSVVSTPVDLEVKLRIAQGLSSESWSIMKNMATELGIILIGYFTLVPAIQEFCLFAVVGLVSDFFLQMLFFTTVLSIDIRRMELADLNKRLPPEACLPSAKPVGQPTRYERQLAVRPSTPHTITLQPSSFRNLRLPKRLRVVYFLARTRLAQRLIMAGTVVWIGILVYTDPAGLRNYLAAQVTEQSPLGEGALAPMPVPSGMLPPSHPDPAFSIFPPDAPKLPENQTSPGESPERGGPAEVVHDSPVPEVTWGPEDEELWRKLSFRHWPTLFSYYNITLAKRYISLLPVIPVTLRLNPREALEGRHPQDGRSAWPPPGPIPAGHWEAGPKGPGGVQAHGDVTLYKVAALGLATGIVLVLLLLCLYRVLCPRNYGQLGGGPGRRRRGELPCDDYGYAPPETEIVPLVLRGHLMDIECLASDGMLLVSCCLAGHVCVWDAQTGDCLTRIPRPGRQRRDSGVGSGLEAQESWERLSDGGKAGPEEPGDSPPLRHRPRGPPPPSLFGDQPDLTCLIDTNFSAQPRSSQPTQPEPRHRAVCGRSRDSPGYDFSCLVQRVYQEEGLAAVCTPALRPPSPGPVLSQAPEDEGGSPEKGSPSLAWAPSAEGSIWSLELQGNLIVVGRSSGRLEVWDAIEGVLCCSSEEVSSGITALVFLDKRIVAARLNGSLDFFSLETHTALSPLQFRGTPGRGSSPASPVYSSSDTVACHLTHTVPCAHQKPITALKAAAGRLVTGSQDHTLRVFRLEDSCCLFTLQGHSGAITTVYIDQTMVLASGGQDGAICLWDVLTGSRVSHVFAHRGDVTSLTCTTSCVISSGLDDLISIWDRSTGIKFYSIQQDLGCGASLGVISDNLLVTGGQGCVSFWDLNYGDLLQTVYLGKNSEAQPARQILVLDNAAIVCNFGSELSLVYVPSVLEKLD

SEQ ID NO: 41905 - protein, 905 aa, Homo sapiens
MTLTERLREKISRAFYNHGLLCASYPIPIILIGYFTLVPAIQEFCLFAVVGLVSDFFLQMLFFTTVLSIDIRRMELADLNKRLPPEACLPSAKPVGQPTRYERQLAVRPSTPHTITLQPSSFRNLRLPKRLRVVYFLARTRLAQRLIMAGTVVWIGILVYTDPAGLRNYLAAQVTEQSPLGEGALAPMPVPSGMLPPSHPDPAFSIFPPDAPKLPENQTSPGESPERGGPAEVVHDSPVPEVTWGPEDEELWRKLSFRHWPTLFSYYNITLAKRYISLLPVIPVTLRLNPREALEGRHPQDGRSAWPPPGPIPAGHWEAGPKGPGGVQAHGDVTLYKVAALGLATGIVLVLLLLCLYRVLCPRNYGQLGGGPGRRRRGELPCDDYGYAPPETEIVPLVLRGHLMDIECLASDGMLLVSCCLAGHVCVWDAQTGDCLTRIPRPGQRRDSGVGSGLEAQESWERLSDGGKAGPEEPGDSPPLRHRPRGPPPPSLFGDQPDLTCLIDTNFSAQPRSSQPTQPEPRHRAVCGRSRDSPGYDFSCLVQRVYQEEGLAAVCTPALRPPSPGPVLSQAPEDEGGSPEKGSPSLAWAPSAEGSIWSLELQGNLIVVGRSSGRLEVWDAIEGVLCCSSEEVSSGITALVFLDKRIVAARLNGSLDFFSLETHTALSPLQFRGTPGRGSSPASPVYSSSDTVACHLTHTVPCAHQKPITALKAAAGRLVTGSQDHTLRVFRLEDSCCLFTLQGHSGAITTVYIDQTMVLASGGQDGAICLWDVLTGSRVSHVFAHRGDVTSLTCTTSCVISSGLDDLISIWDRSTGIKFYSIQQDLGCGASLGVISDNLLVTGGQGCVSFWDLNYGDLLQTVYLGKNSEAQPARQILVLDNAAIVCNFGSELSLVYVPSVLEKLD

SEQ ID NO: 41906 - protein, 771 aa, Homo sapiens
MTLTERLREKISRAFYNHGLLCASYPIPIILFTGFCILACCYPLLKLPLPGTGPVEFTTPVKDYSPPPVDSDRKQGEPTEQPEWYVGAPVAYVQQIFVKSSVFPWHKNLLAVDVFRSPLSRAFQLVEEIRNHVLRDSSGIRSLEELCLQVTDLLPGLRKLRNLLPEHGCLLLSPGNFWQNDWERFHADPDIIGTIHQHEPKTLQTSATLKDLLFGVPGKYSGVSLYTRKRMVSYTITLVFQHYHAKFLGSLRARLMLLHPSPNCSLRAESLVHVHFKEEIGVAELIPLVTTYIILFAYIYFSTRKIDMVKSKWGLALAAVVTVLSSLLMSVGLCTLFGLTPTLNGGEIFPYLVVVIGLENVLVLTKSVVSTPVDLEVKLRIAQGLSSESWSIMKNMATELGIILIGYFTLVPAIQEFCLFAVVGLVSDFFLQMLFFTTVLSIDIRRMELADLNKRLPPEACLPSAKPVGQPTRYERSSGRLEVWDAIEGVLCCSSEEVSSGITALVFLDKRIVAARLNGSLDFFSLETHTALSPLQFRGTPGRGSSPASPVYSSSDTVACHLTHTVPCAHQKPITALKAAAGRLVTGSQDHTLRVFRLEDSCCLFTLQGHSGAITTVYIDQTMVLASGGQDGAICLWDVLTGSRVSHVFAHRGDVTSLTCTTSCVISSGLDDLISIWDRSTGIKFYSIQQDLGCGASLGVISDNLLVTGGQGCVSFWDLNYGDLLQTVYLGKNSEAQPARQILVLDNAAIVCNFGSELSLVYVPSVLEKLD

SEQ ID NO: 41907 - protein, 886 aa, Homo sapiens
MKNMATELGIILIGYFTLVPAIQEFCLFAVVGLVSDFFLQMLFFTTVLSIDIRRMELADLNKRLPPEACLPSAKPVGQPTRYERQLAVRPSTPHTITLQPSSFRNLRLPKRLRVVYFLARTRLAQRLIMAGTVVWIGILVYTDPAGLRNYLAAQVTEQSPLGEGALAPMPVPSGMLPPSHPDPAFSIFPPDAPKLPENQTSPGESPERGGPAEVVHDSPVPEVTWGPEDEELWRKLSFRHWPTLFSYYNITLAKRYISLLPVIPVTLRLNPREALEGRHPQDGRSAWPPPGPIPAGHWEAGPKGPGGVQAHGDVTLYKVAALGLATGIVLVLLLLCLYRVLCPRNYGQLGGGPGRRRRGELPCDDYGYAPPETEIVPLVLRGHLMDIECLASDGMLLVSCCLAGHVCVWDAQTGDCLTRIPRPGQRRDSGVGSGLEAQESWERLSDGGKAGPEEPGDSPPLRHRPRGPPPPSLFGDQPDLTCLIDTNFSAQPRSSQPTQPEPRHRAVCGRSRDSPGYDFSCLVQRVYQEEGLAAVCTPALRPPSPGPVLSQAPEDEGGSPEKGSPSLAWAPSAEGSIWSLELQGNLIVVGRSSGRLEVWDAIEGVLCCSSEEVSSGITALVFLDKRIVAARLNGSLDFFSLETHTALSPLQFRGTPGRGSSPASPVYSSSDTVACHLTHTVPCAHQKPITALKAAAGRLVTGSQDHTLRVFRLEDSCCLFTLQGHSGAITTVYIDQTMVLASGGQDGAICLWDVLTGSRVSHVFAHRGDVTSLTCTTSCVISSGLDDLISIWDRSTGIKFYSIQQDLGCGASLGVISDNLLVTGGQGCVSFWDLNYGDLLQTVYLGKNSEAQPARQILVLDNAAIVCNFGSELSLVYVPSVLEKLD

SEQ ID NO: 41908 - protein, 1139 aa, Homo sapiens
MSRRFTVTSLPPAGPARSPDPESRRHSVADPRHLPGEDVKGDGNPKESSPFINSTDTEKGKEYDGKNMALFEEEMDTSPMVSSLLSGLANYTNLPQGSREHEEAENNEGGKKKPVQAPRMGTFMGVYLPCLQNIFGVILFLRLTWVVGIAGIMESFCMVFICCSCTMLTAISMSAIATNGVVPAGGSYYMISRSLGPEFGGAVGLCFYLGTTFAGAMYILGTIEILLAYLFPAMAIFKAEDASGEAAAMLNNMRVYGTCVLTCMATVVFVGVKYVNKFALVFLGCVILSILAIYAGVIKSAFDPPNFPICLLGNRTLSRHGFDVCAKLAWEGNETVTTRLWGLFCSSRFLNATCDEYFTRNNVTEIQGIPGAASGLIKENLWSSYLTKGVIVERSGMTSVGLADGTPIDMDHPYVFSDMTSYFTLLVGIYFPSVTGIMAGSNRSGDLRDAQKSIPTGTILAIATTSAVYISSVVLFGACIEGVVLRDKFGEAVNGNLVVGTLAWPSPWVIVIGSFFSTCGAGLQSLTGAPRLLQAISRDGIVPFLQVFGHGKANGEPTWALLLTACICEIGILIASLDEVAPILSMFFLMCYMFVNLACAVQTLLRTPNWRPRFRYYHWTLSFLGMSLCLALMFICSWYYALVAMLIAGLIYKYIEYRGAEKEWGDGIRGLSLSAARYALLRLEEGPPHTKNWRPQLLVLVRVDQDQNVVHPQLLSLTSQLKAGKGLTIVGSVLEGTFLENHPQAQRAEESIRRLMEAEKVKGFCQVVISSNLRDGVSHLIQSGGLGGLQHNTVLVGWPRNWRQKEDHQTWRNFIELVRETTAGHLALLVTKNVSMFPGNPERFSEGSIDVWWIVHDGGMLMLLPFLLRHHKVWRKCKMRIFTVAQMDDNSIQMKKDLTTFLYHLRITAEVEVVEMHESDISAYTYEKTLVMEQRSQILKQMHLTKNEREREIQSITDESRGSIRRKNPANTRLRLNVPEETAGDSEEKPEEEVQLIHDQSAPSCPSSSPSPGEEPEGEGETDPEKVHLTWTKDKSVAEKNKGPSPVSSEGIKDFFSMKPEWENLNQSNVRRMHTAVRLNEVIVKKSRDAKLVLLNMPGPPRNRNGDENYMEFLEVLTEHLDRVMLVRGGGREVITIYS

SEQ ID NO: 41909 - protein, 1116 aa, Homo sapiens
MLNNLTDCEDGDGGANPGDGNPKESSPFINSTDTEKGKEYDGKNMALFEEEMDTSPMVSSLLSGLANYTNLPQGSREHEEAENNEGGKKKPVQAPRMGTFMGVYLPCLQNIFGVILFLRLTWVVGIAGIMESFCMVFICCSCTMLTAISMSAIATNGVVPAGGSYYMISRSLGPEFGGAVGLCFYLGTTFAGAMYILGTIEILLAYLFPAMAIFKAEDASGEAAAMLNNMRVYGTCVLTCMATVVFVGVKYVNKFALVFLGCVILSILAIYAGVIKSAFDPPNFPICLLGNRTLSRHGFDVCAKLAWEGNETVTTRLWGLFCSSRFLNATCDEYFTRNNVTEIQGIPGAASGLIKENLWSSYLTKGVIVERSGMTSVGLADGTPIDMDHPYVFSDMTSYFTLLVGIYFPSVTGIMAGSNRSGDLRDAQKSIPTGTILAIATTSAVYISSVVLFGACIEGVVLRDKFGEAVNGNLVVGTLAWPSPWVIVIGSFFSTCGAGLQSLTGAPRLLQAISRDGIVPFLQVFGHGKANGEPTWALLLTACICEIGILIASLDEVAPILSMFFLMCYMFVNLACAVQTLLRTPNWRPRFRYYHWTLSFLGMSLCLALMFICSWYYALVAMLIAGLIYKYIEYRGAEKEWGDGIRGLSLSAARYALLRLEEGPPHTKNWRPQLLVLVRVDQDQNVVHPQLLSLTSQLKAGKGLTIVGSVLEGTFLENHPQAQRAEESIRRLMEAEKVKGFCQVVISSNLRDGVSHLIQSGGLGGLQHNTVLVGWPRNWRQKEDHQTWRNFIELVRETTAGHLALLVTKNVSMFPGNPERFSEGSIDVWWIVHDGGMLMLLPFLLRHHKVWRKCKMRIFTVAQMDDNSIQMKKDLTTFLYHLRITAEVEVVEMHESDISAYTYEKTLVMEQRSQILKQMHLTKNEREREIQSITDESRGSIRRKNPANTRLRLNVPEETAGDSEEKPEEEVQLIHDQSAPSCPSSSPSPGEEPEGEGETDPEKVHLTWTKDKSVAEKNKGPSPVSSEGIKDFFSMKPEWENLNQSNVRRMHTAVRLNEVIVKKSRDAKLVLLNMPGPPRNRNGDENYMEFLEVLTEHLDRVMLVRGGGREVITIYS

SEQ ID NO: 41910 - protein, 298 aa, Homo sapiens
MGIPGLEGLHTWISIPFSFMYIVAVAGNIFLIFLIMTERSLHEPMYLFLSMLASADFLLATAAAPKVLAILWFHSMDISFGSCVSQMFFIHFIFVAESAILLAMAFDRYVAICYPLRYTILTSSAVRKIGIAAVVRSFFICCPFIFLVYRLTYCGRNIIPHSYCEHIARLACGNINVNIIYGLTVALLSTGLDIVLIIISYTMILHSVFQISSWAARFKALSTCGSHICVIFMFYTPAFFSFLAHRFGGKTIPHHIHILVGSLYVLVPPMLNPIIYGVKTKQIKDRVILLFSPISVCC

SEQ ID NO: 41911 - protein, 345 aa, Homo sapiens
MHFLSQNDLNINLIPHLCLHRHSVIAGAFTIHRHMKIFNSPSNSSTFTGFILLGFPCPREGQILLFVLFTVVYLLTLMGNGSIICAVHWDQRLHAPMYILLANFSFLEICYVTSTVPSMLANFLSDTKIISFSGCFLQFYFFFSLGSTECFFLAVMAFDRYLAICRPLRYPTIMTRRLCTNLVVNCWVLGFIWFLIPIVNISQMSFCGSRIIDHFLCDPAPLLTLTCKKGPVIELVFSVLSPLPVFMLFLFIVGSYALVVRAVLRVPSAAGRRKAFSTCGSHLAVVSLFYGSVLVMYGSPPSKNEAGKQKTVTLFYSVVTPLLNPVIYSLRNKDMRKALKKFWGT

SEQ ID NO: 41912 - protein, 317 aa, Homo sapiens
MSQVTNTTQEGIYFILTDIPGFEASHIWISIPVCCLYTISIMGNTTILTVIRTEPSVHQRMYLFLSMLALTDLGLTLTTLPTVMQLLWFNVRRISSEACFAQFFFLHGFSFMESSVLLAMSVDCYVAICCPLHYASILTNEVIGRTGLAIICCCVLAVLPSLFLLKRLPFCHSHLLSRSYCLHQDMIRLVCADIRLNSWYGFALALLIIIVDPLLIVISYTLILKNILGTATWAERLRALNNCLSHILAVLVLYIPMVGVSMTHRFAKHASPLVHVIMANIYLLAPPVMNPIIYSVKNKQIQWGMLNFLSLKNMHSR

SEQ ID NO: 41913 - protein, 359 aa, Homo sapiens
MSYSIYKSTVNIPLSHGVVHSFCHNMNCNFMHIFKFVLDFNMKNVTEVTLFVLKGFTDNLELQTIFFFLFLAIYLFTLMGNLGLILVVIRDSQLHKPMYYFLSMLSSVDACYSSVITPNMLVDFTTKNKVISFLGCVAQVFLACSFGTTECFLLAAMAYDRYVAIYNPLLYSVSMSPRVYMPLINASYVAGILHATIHTVATFSLSFCGANEIRRVFCDIPPLLAISYSDTHTNQLLLFYFVGSIELVTILIVLISYGLILLAILKMYSAEGRRKVFSTCGAHLTGVSIYYGTILFMYVRPSSSYASDHDMIVSIFYTIVIPLLNPVIYSLRNKDVKDSMKKMFGKNQVINKVYFHTKK

SEQ ID NO: 41914 - protein, 320 aa, Homo sapiens
MPSASAMIIFNLSSYNPGPFILVGIPGLEQFHVWIGIPFCIIYIVAVVGNCILLYLIVVEHSLHEPMFFFLSMLAMTDLILSTAGVPKALSIFWLGAREITFPGCLTQMFFLHYNFVLDSAILMAMAFDHYVAICSPLRYTTILTPKTIIKSAMGISFRSFCIILPDVFLLTCLPFCRTRIIPHTYCEHIGVAQLACADISINFWYGFCVPIMTVISDVILIAVSYAHILCAVFGLPSQDACQKALGTCGSHVCVILMFYTPAFFSILAHRFGHNVSRTFHIMFANLYIVIPPALNPMVYGVKTKQIRDKVILLFSKGTG

SEQ ID NO: 41915 - protein, 313 aa, Homo sapiens
MEEENATLLTEFVLTGFLYQPQWKIPLFLAFLVIYLITIMGNLGLIAVIWKDPHLHIPMYLLLGNLAFVDAWISSTVTPKMLNNFLAKSKMISLSECKIQFFSFAISVTTECFLLATMAYDRYVAICKPLLYPAIMTNGLCIRLLILSYVGGILHALIHEGFLFRLTFCNSNIVHHIYCDTIPLSKISCTDSSINFLMVFIFSGSIQVFSIVTILVSYTFVLFAILKKKSDKGVRKAFSTCGAHLFSVSLYYGPLLFIYVGPASPQADDQDMVEPLFYTVIIPLLNPIIYSLRNKQVTVSFTKMLKKHVKVSY

SEQ ID NO: 41916 - protein, 1340 aa, Homo sapiens
MFRVGFLIISSSSSLSPLLLVSVVRVNTTNCHKCLLSGTYIFAVLLVCVVFHSGAQEKNYTIREEIPENVLIGNLLKDLNLSLIPNKSLTTTMQFKLVYKTGDVPLIRIEEDTGEIFTTGARIDREKLCAGIPRDEHCFYEVEVAILPDEIFRLVKIRFLIEDINDNAPLFPATVINISIPENSAINSKYTLPAAVDPDVGINGVQNYELIKSQNIFGLDVIETPEGDKMPQLIVQKELDREEKDTYVMKVKVEDGGFPQRSSTAILQVSVTDTNDNHPVFKETEIEVSIPENAPVGTSVTQLHATDADIGENAKIHFSFSNLVSNIARRLFHLNATTGLITIKEPLDREETPNHKLLVLASDGGLMPARAMVLVNVTDVNDNVPSIDIRYIVNPVNDTVVLSENIPLNTKIALITVTDKDADHNGRVTCFTDHEIPFRLRPVFSNQFLLENAAYLDYESTKEYAIKLLAADAGKPPLNQSAMLFIKVKDENDNAPVFTQSFVTVSIPENNSPGIQLMKVSATDADSGPNAEINYLLGPDAPPEFSLDRRTGMLTVVKKLDREKEDKYLFTILAKDNGVPPLTSNVTVFVSIIDQNDNSPVFTHNEYKFYVPENLPRHGTVGLITVTDPDYGDNSAVTLSILDENDDFTIDSQTGVIRPNISFDREKQESYTFYVKAEDGGRVSRSSSAKVTINVVDVNDNKPVFIVPPYNYSYELVLPSTNPGTVVFQVIAVDNDTGMNAEVRYSIVGGNTRDLFAIDQETGNITLMEKCDVTDLGLHRVLVKANDLGQPDSLFSVVIVNLFVNESVTNATLINELVRKSIEAPVTPNTEIADVSSPTSDYVKILVAAVAGTITVVVVIFITAVVRCRQAPHLKAAQKNMQNSEWATPNPENRQMIMMKKKKKKKKHSPKNLLLNVVTIEETKADDVDSDGNRVTLDLPIDLEEQTMGKYNWVTTPTTFKPDSPDLARHYKSASPQPAFQIQPETPLNLKHHIIQELPLDNTFVACDSISNCSSSSSDPYSVSDCGYPVTTFEVPVSVHTRPSQRRVTFHLPEGSQESSSDGGLGDHDAGSLTSTSHGLPLGYPQEEYFDRATPSNRTEGDGNSDPESTFIPGLKKEITVQPTVEEASDNCTQECLIYGHSDACWMPASLDHSSSSQAQASALCHSPPLSQASTQHHSPPVTQTIVLCHSPPVTQTIALCHSPPPIQVSALHHSPPLVQGTALHHSPPSAQASALCYSPPLAQAAAISHSSSLPQVIALHRSQAQSSVSLQQGWVQGANGLCSVDQGVQGSATSQFYTMSERLHPSDDSIKVIPLTTFAPRQQARPSRGDSPIMETHPL

SEQ ID NO: 41917 - protein, 1048 aa, Homo sapiens
MFRVGFLIISSSSSLSPLLLVSVVRVNTTNCHKCLLSGTYIFAVLLVCVVFHSGAQEKNYTIREEIPENVLIGNLLKDLNLSLIPNKSLTTTMQFKLVYKTGDVPLIRIEEDTGEIFTTGARIDREKLCAGIPRDEHCFYEVEVAILPDEIFRLVKIRFLIEDINDNAPLFPATVINISIPENSAINSKYTLPAAVDPDVGINGVQNYELIKSQNIFGLDVIETPEGDKMPQLIVQKELDREEKDTYVMKVKVEDGGFPQRSSTAILQVSVTDTNDNHPVFKETEIEVSIPENAPVGTSVTQLHATDADIGENAKIHFSFSNLVSNIARRLFHLNATTGLITIKEPLDREETPNHKLLVLASDGGLMPARAMVLVNVTDVNDNVPSIDIRYIVNPVNDTVVLSENIPLNTKIALITVTDKDADHNGRVTCFTDHEIPFRLRPVFSNQFLLENAAYLDYESTKEYAIKLLAADAGKPPLNQSAMLFIKVKDENDNAPVFTQSFVTVSIPENNSPGIQLMKVSATDADSGPNAEINYLLGPDAPPEFSLDRRTGMLTVVKKLDREKEDKYLFTILAKDNGVPPLTSNVTVFVSIIDQNDNSPVFTHNEYKFYVPENLPRHGTVGLITVTDPDYGDNSAVTLSILDENDDFTIDSQTGVIRPNISFDREKQESYTFYVKAEDGGRVSRSSSAKVTINVVDVNDNKPVFIVPPYNYSYELVLPSTNPGTVVFQVIAVDNDTGMNAEVRYSIVGGNTRDLFAIDQETGNITLMEKCDVTDLGLHRVLVKANDLGQPDSLFSVVIVNLFVNESVTNATLINELVRKSIEAPVTPNTEIADVSSPTSDYVKILVAAVAGTITVVVVIFITAVVRCRQAPHLKAAQKNMQNSEWATPNPENRQMIMMKKKKKKKKHSPKNLLLNVVTIEETKADDVDSDGNRVTLDLPIDLEEQTMGKYNWVTTPTTFKPDSPDLARHYKSASPQPAFQIQPETPLNLKHHIIQELPLDNTFVACDSISNCSSSSSDPYSVSDCGYPVTTFEVPVSVHTRPTDSRT

SEQ ID NO: 41918 - protein, 1037 aa, Homo sapiens
MTVGFNSDISSVVRVNTTNCHKCLLSGTYIFAVLLVCVVFHSGAQEKNYTIREEIPENVLIGNLLKDLNLSLIPNKSLTTTMQFKLVYKTGDVPLIRIEEDTGEIFTTGARIDREKLCAGIPRDEHCFYEVEVAILPDEIFRLVKIRFLIEDINDNAPLFPATVINISIPENSAINSKYTLPAAVDPDVGINGVQNYELIKSQNIFGLDVIETPEGDKMPQLIVQKELDREEKDTYVMKVKVEDGGFPQRSSTAILQVSVTDTNDNHPVFKETEIEVSIPENAPVGTSVTQLHATDADIGENAKIHFSFSNLVSNIARRLFHLNATTGLITIKEPLDREETPNHKLLVLASDGGLMPARAMVLVNVTDVNDNVPSIDIRYIVNPVNDTVVLSENIPLNTKIALITVTDKDADHNGRVTCFTDHEIPFRLRPVFSNQFLLENAAYLDYESTKEYAIKLLAADAGKPPLNQSAMLFIKVKDENDNAPVFTQSFVTVSIPENNSPGIQLMKVSATDADSGPNAEINYLLGPDAPPEFSLDRRTGMLTVVKKLDREKEDKYLFTILAKDNGVPPLTSNVTVFVSIIDQNDNSPVFTHNEYKFYVPENLPRHGTVGLITVTDPDYGDNSAVTLSILDENDDFTIDSQTGVIRPNISFDREKQESYTFYVKAEDGGRVSRSSSAKVTINVVDVNDNKPVFIVPPYNYSYELVLPSTNPGTVVFQVIAVDNDTGMNAEVRYSIVGGNTRDLFAIDQETGNITLMEKCDVTDLGLHRVLVKANDLGQPDSLFSVVIVNLFVNESVTNATLINELVRKSIEAPVTPNTEIADVSSPTSDYVKILVAAVAGTITVVVVIFITAVVRCRQAPHLKAAQKNMQNSEWATPNPENRQMIMMKKKKKKKKHSPKNLLLNVVTIEETKADDVDSDGNRVTLDLPIDLEEQTMGKYNWVTTPTTFKPDSPDLARHYKSASPQPAFQIQPETPLNLKHHIIQELPLDNTFVACDSISNCSSSSSDPYSVSDCGYPVTTFEVPVSVHTRPTDSRT

SEQ ID NO: 41919 - protein, 1053 aa, Homo sapiens
MFRVGFLIISSSSSLSPLLLVSVVRVNTTNCHKCLLSGTYIFAVLLVCVVFHSGAQEKNYTIREEIPENVLIGNLLKDLNLSLIPNKSLTTTMQFKLVYKTGDVPLIRIEEDTGEIFTTGARIDREKLCAGIPRDEHCFYEVEVAILPDEIFRLVKIRFLIEDINDNAPLFPATVINISIPENSAINSKYTLPAAVDPDVGINGVQNYELIKSQNIFGLDVIETPEGDKMPQLIVQKELDREEKDTYVMKVKVEDGGFPQRSSTAILQVSVTDTNDNHPVFKETEIEVSIPENAPVGTSVTQLHATDADIGENAKIHFSFSNLVSNIARRLFHLNATTGLITIKEPLDREETPNHKLLVLASDGGLMPARAMVLVNVTDVNDNVPSIDIRYIVNPVNDTVVLSENIPLNTKIALITVTDKDADHNGRVTCFTDHEIPFRLRPVFSNQFLLENAAYLDYESTKEYAIKLLAADAGKPPLNQSAMLFIKVKDENDNAPVFTQSFVTVSIPENNSPGIQLMKVSATDADSGPNAEINYLLGPDAPPEFSLDRRTGMLTVVKKLDREKEDKYLFTILAKDNGVPPLTSNVTVFVSIIDQNDNSPVFTHNEYKFYVPENLPRHGTVGLITVTDPDYGDNSAVTLSILDENDDFTIDSQTGVIRPNISFDREKQESYTFYVKAEDGGRVSRSSSAKVTINVVDVNDNKPVFIVPPYNYSYELVLPSTNPGTVVFQVIAVDNDTGMNAEVRYSIVGGNTRDLFAIDQETGNITLMEKCDVTDLGLHRVLVKANDLGQPDSLFSVVIVNLFVNESVTNATLINELVRKSIEAPVTPNTEIADVSSPTSDYVKILVAAVAGTITVVVVIFITAVVRCRQAPHLKAAQKNMQNSEWATPNPENRQMIMMKKKKKKKKHSPKNLLLNVVTIEETKADDVDSDGNRVTLDLPIDLEEQTMGKYNWVTTPTTFKPDSPDLARHYKSASPQPAFQIQPETPLNLKHHIIQELPLDNTFVACDSISNCSSSSSDPYSVSDCGYPVTTFEVPVSVHTRPVGIQVSNTTF

SEQ ID NO: 41920 - protein, 68 aa, Homo sapiens
MSELNTKTSPATNQAAGQEEKGKAGNVKKAEEEEEIDIDLTAPETEKAALAIQGKFRRFQKRKKDPSS

SEQ ID NO: 41921 - protein, 684 aa, Homo sapiens
MWVLLRSGYPLRILLPLRGEWMGRRGLPRNLAPGPPRRRYRKETLQALDMPVLPVTATEIRQYLRGHGIPFQDGHSCLRALSPFAESSQLKGQTGVTTSFSLFIDKTTGHFLCMTSLAEGSWEDFQASVEGRGDGAREGFLLSKAPEFEDSEEVRRIWNRAIPLWELPDQEEVQLADTMFGLTKVTDDTLKRFSVRYLRPARSLVFPWFSPGGSGLRGLKLLEAKCQGDGVSYEETTIPRPSAYHNLFGLPLISRRDAEVVLTSRELDSLALNQSTGLPTLTLPRGTTCLPPALLPYLEQFRRIVFWLGDDLRSWEAAKLFARKLNPKRCFLVRPGDQQPRPLEALNGGFNLSRILRTALPAWHKSIVSFRQLREEVLGELSNVEQAAGLRWSRFPDLNRILKGHRKGELTVFTGPTGSGKTTFISEYALDLCSQGVNTLWGSFEISNVRLARVMLTQFAEGRLEDQLDKYDHWADRFEDLPLYFMTFHGQQSIRTVIDTMQHAVYVYDICHVIIDNLQFMMGHEQLSTDRIAAQDYIIGVFRKFATDNNCHVTLVIHPRKEDDDKELQTASIFGSAKASQEADNVLILQDRKLVTGPGKRYLQVSKNRFDGDVGVFPLEFNKNSLTFSIPPKNKARLKKIKDDTGPVAKKPSSGKKGATTQNSEICSGQAPTPDQPDTSKRSK

SEQ ID NO: 41922 - protein, 582 aa, Homo sapiens
MWVLLRSGYPLRILLPLRGEWMGRRGLPRNLAPGPPRRRYRKETLQALDMPVLPVTATEIRQYLRGHGIPFQDGHSCLRALSPFAESSQLKGQTGVTTSFSLFIDKTTGHFLCMTSLAEGSWEDFQASVEGRGDGAREGFLLSKAPEFEDSEEVRRIWNRAIPLWELPDQEEVQLADTMFGLTKVTDDTLKRFSVRYLRPARSLVFPWFSPGGSGLRGLKLLEAKCQGDGVSYEETTIPRPSAYHNLFGLPLISRRDAEVVLTSRELDSLALNQSTGLPTLTLPRGTTCLPPALLPYLEQFRRIVFWLGDDLRSWEAAKLFARKLNPKRCFLVRPGDQQPRPLEALNGGFNLSRILRTALPAWHKSIVSFRQLREEVLGELSNVEQAAGLRWSRFPDLNRILKGHRKGELTVFTGPTGSGKTTFISEYALDLCSQGVNTLWGSFEISNVRLARVMLTQFAEGRLEDQLDKYDHWADRFEDLPLYFMTFHGQQSIRTVIDTMQHAVYVYDICHVIIDNLQFMMGHEQLSTDRIAAQDYIIGVFRKFATDNNCHVTLVIHPRKEDDDKELQTASIFGSAKVSGL

SEQ ID NO: 41923 - protein, 531 aa, Homo sapiens
MWVLLRSGYPLRILLPLRGEWMGRRGLPRNLAPGPPRRRYRKETLQALDMPVLPVTATEIRQYLRGHGIPFQDGHSCLRALSPFAESSQLKGQTGVTTSFSLFIDKTTGHFLCMTSLAEGSWEDFQASVEGRGDGAREGFLLSKAPEFEDSEEVRRIWNRAIPLWELPDQEEVQLADTMFGLTKVTDDTLKRFSVRYLRPARSLVFPWFSPGGSGLRGLKLLEAKCQGDGVSYEETTIPRPSAYHNLFGLPLISRRDAEVVLTSRELDSLALNQSTGLPTLTLPRGTTCLPPALLPYLEQFRRIVFWLGDDLRSWEAAKLFARKLNPKRCFLVRPGDQQPRPLEALNGGFNLSRILRTALPAWHKSIVSFRQLREEVLGELSNVEQAAGLRWSRFPDLNRILKGHRKGELTVFTGPTGSGKTTFISEYALDLCSQGVNTLWGSFEISNVRLARVMLTQFAEGRLEDQLDKYDHWADRFEDLPLYFMTFHGQQSIRTVIDTMQHAVYVYDICHVIIDNLQFMMGHEQLSTDR

SEQ ID NO: 41924 - protein, 183 aa, Homo sapiens
MPLVRYRKVVILGYRCVGKTSLAHQFVEGEFSEGYDPTVENTYSKIVTLGKDEFHLHLVDTAGQDEYSILPYSFIIGVHGYVLVYSVTSLHSFQVIESLYQKLHEGHGKTRVPVVLVGNKADLSPEREVQAVEGKKLAESWGATFMESSARENQLTQGIFTKVIQEIARVENSYGQERRCHLM

SEQ ID NO: 41925 - protein, 68 aa, Homo sapiens
MPLVRYRKVVILGYRCVVRKDRGCECGWMIWIQLSHCSPQGRHLWHINLWKASSRKATILQWRILTAR

SEQ ID NO: 41926 - protein, 544 aa, Homo sapiens; identical to SEQ ID NO: 3614

SEQ ID NO: 41927 - protein, 747 aa, Homo sapiens
MWGFLKRPVVVTADINLSLVALTGMGLLSRLWRLTYPRAVVFDEVYYGQYISFYMKQIFFLDDSGPPFGHMVLALGGYLGGFDGNFLWNRIGAEYSSNVPVWSLRLLPALAGALSVPMAYQIVLELHFSHCAAMGAALLMLIENALITQSRLMLLESVLIFFNLLAVLSYLKFFNCQKHSPFSLSWWFWLTLTGVACSCAVGIKYMGVFTYVLVLGVAAVHAWHLLGDQTLSNVGADVQCCMRPACMGQMQMSQGVCVFCHLLARAVALLVIPVVLYLLFFYVHLILVFRSGPHDQIMSSAFQASLEGGLARITQGQPLEVAFGSQVTLRNVFGKPVPCWLHSHQDTYPMIYENGRGSSHQQQVTCYPFKDVNNWWIVKDPRRHQLVVSSPPRPVRHGDMVQLVHGMTTRSLNTHDVAAPLSPHSQEVSCYIDYNISMPAQNLWRLEIVNRGSDTDVWKTILSEVRFVHVNTSAVLKLSGAHLPDWGYRQLEIVGEKLSRGYHGSTVWNVEEHRYGASQEQRERERELHSPAQVDVSRNLSFMARFSELQWRMLALRSDDSEHKYSSSPLEWVTLDTNIAYWLHPRTSAQIHLLGNIVIWVSGSLALAIYALLSLWYLLRRRRNVHDLPQDAWLRWVLAGALCAGGWAVNYLPFFLMEKTLFLYHYLPALTFQILLLPVVLQHISDHLCRSQLQRSIFSALVVAWYSSACHVSNTLRPLTYGDKSLSPHELKALRWKDSWDILIRKH

SEQ ID NO: 41928 - protein, 725 aa, Homo sapiens
MWGFLKRPVVVTADINLSLVALTGMGLLSRLWRLTYPRAVVFDEVYYGQYISFYMKQIFFLDDSGPPFGHMVLALGGYLGGFDGNFLWNRIGAEYSSNVPVWSLRLLPALAGALSVPMAYQIVLELHFSHCAAMGAALLMLIENALITQSRLMLLESVLIFFNLLAVLSYLKFFNCQKHSPFSLSWWFWLTLTGVACSCAVGIKYMGVFTYVLVLGVAAVHAWHLLGDQTLSNVCVFCHLLARAVALLVIPVVLYLLFFYVHLILVFRSGPHDQIMSSAFQASLEGGLARITQGQPLEVAFGSQVTLRNVFGKPVPCWLHSHQDTYPMIYENGRGSSHQQQVTCYPFKDVNNWWIVKDPRRHQLVVSSPPRPVRHGDMVQLVHGMTTRSLNTHDVAAPLSPHSQEVSCYIDYNISMPAQNLWRLEIVNRGSDTDVWKTILSEVRFVHVNTSAVLKLSGAHLPDWGYRQLEIVGEKLSRGYHGSTVWNVEEHRYGASQEQRERERELHSPAQVDVSRNLSFMARFSELQWRMLALRSDDSEHKYSSSPLEWVTLDTNIAYWLHPRTSAQIHLLGNIVIWVSGSLALAIYALLSLWYLLRRRRNVHDLPQDAWLRWVLAGALCAGGWAVNYLPFFLMEKTLFLYHYLPALTFQILLLPVVLQHISDHLCRSQLQRSIFSALVVAWYSSACHVSNTLRPLTYGDKSLSPHELKALRWKDSWDILIRKH

SEQ ID NO: 41929 - protein, 671 aa, Homo sapiens
MKQIFFLDDSGPPFGHMVLALGGYLGGFDGNFLWNRIGAEYSSNVPVWSLRLLPALAGALSVPMAYQIVLELHFSHCAAMGAALLMLIENALITQSRLMLLESVLIFFNLLAVLSYLKFFNCQKHSPFSLSWWFWLTLTGVACSCAVGIKYMGVFTYVLVLGVAAVHAWHLLGDQTLSNVCVFCHLLARAVALLVIPVVLYLLFFYVHLILVFRSGPHDQIMSSAFQASLEGGLARITQGQPLEVAFGSQVTLRNVFGKPVPCWLHSHQDTYPMIYENGRGSSHQQQVTCYPFKDVNNWWIVKDPRRHQLVVSSPPRPVRHGDMVQLVHGMTTRSLNTHDVAAPLSPHSQEVSCYIDYNISMPAQNLWRLEIVNRGSDTDVWKTILSEVRFVHVNTSAVLKLSGAHLPDWGYRQLEIVGEKLSRGYHGSTVWNVEEHRYGASQEQRERERELHSPAQVDVSRNLSFMARFSELQWRMLALRSDDSEHKYSSSPLEWVTLDTNIAYWLHPRTSAQIHLLGNIVIWVSGSLALAIYALLSLWYLLRRRRNVHDLPQDAWLRWVLAGALCAGGWAVNYLPFFLMEKTLFLYHYLPALTFQILLLPVVLQHISDHLCRSQLQRSIFSALVVAWYSSACHVSNTLRPLTYGDKSLSPHELKALRWKDSWDILIRKH

SEQ ID NO: 41930 - protein, 608 aa, Homo sapiens
MAYQIVLELHFSHCAAMGAALLMLIENALITQSRLMLLESVLIFFNLLAVLSYLKFFNCQKHSPFSLSWWFWLTLTGVACSCAVGIKYMGVFTYVLVLGVAAVHAWHLLGDQTLSNVCVFCHLLARAVALLVIPVVLYLLFFYVHLILVFRSGPHDQIMSSAFQASLEGGLARITQGQPLEVAFGSQVTLRNVFGKPVPCWLHSHQDTYPMIYENGRGSSHQQQVTCYPFKDVNNWWIVKDPRRHQLVVSSPPRPVRHGDMVQLVHGMTTRSLNTHDVAAPLSPHSQEVSCYIDYNISMPAQNLWRLEIVNRGSDTDVWKTILSEVRFVHVNTSAVLKLSGAHLPDWGYRQLEIVGEKLSRGYHGSTVWNVEEHRYGASQEQRERERELHSPAQVDVSRNLSFMARFSELQWRMLALRSDDSEHKYSSSPLEWVTLDTNIAYWLHPRTSAQIHLLGNIVIWVSGSLALAIYALLSLWYLLRRRRNVHDLPQDAWLRWVLAGALCAGGWAVNYLPFFLMEKTLFLYHYLPALTFQILLLPVVLQHISDHLCRSQLQRSIFSALVVAWYSSACHVSNTLRPLTYGDKSLSPHELKALRWKDSWDILIRKH

SEQ ID NO: 41931 - protein, 1024 aa, Homo sapiens
MSNAKERKHAKKMRNQPTNVTLSSGFVADRGVKHHSGGEKPFQAQKQEPHPGTSRQRQTRVNPHSLPDPEVNEQSSSKGMFRKKGGWKAGPEGTSQEIPKYITASTFAQARAAEISAMLKAVTQKSSNSLVFQTLPRHMRRRAMSHNVKRLPRRLQEIAQKEAEKAVHQKKEHSKNKCHKARRCHMNRTLEFNRRQKKNIWLETHIWHAKRFHMVKKWGYCLGERPTVKSHRACYRAMTNRCLLQDLSYYCCLELKGKEEEILKALSGMCNIDTGLTFAAVHCLSGKRQGSLVLYRVNKYPREMLGPVTFIWKSQRTPGDPSESRQLWIWLHPTLKQDILEEIKAACQCVEPIKSAVCIADPLPTPSQEKSQTELPDEKIGKKRKRKDDGENAKPIKKIIGDGTRDPCLPYSWISPTTGIIISDLTMEMNRFRLIGPLSHSILTEAIKAASVHTVGEDTEETPHRWWIETCKKPDSVSLHCRQEAIFELLGGITSPAEIPAGTILGLTVGDPRINLPQKKSKALPNPEKCQDNEKVRQLLLEGVPVECTHSFIWNQDICKSVTENKISDQDLNRMRSELLVPGSQLILGPHESKIPILLIQQPGKVTGEDRLGWGSGWDVLLPKGWGMAFWIPFIYRGVRVGGLKESAVHSQYKRSPNVPGDFPDCPAGMLFAEEQAKNLLEKYKRRPPAKRPNYVKLGTLAPFCCPWEQLTQDWESRVQAYEEPSVASSPNGKESDLRRSEVPCAPMPKKTHQPSDEVGTSIEHPREAEEVMDAGCQESAGPERITDQEASENHVAATGSHLCVLRSRKLLKQLSAWCGPSSEDSRGGRRAPGRGQQGLTREACLSILGHFPRALVWVSLSLLSKGSPEPHTMICVPAKEDFLQLHEDWHYCGPQESKHSDPFRSKILKQKEKKKREKRQKPGRASSDGPAGEEPVAGQEALTLGLWSGPLPRVTLHCSRTLLGFVTQGDFSMAVGCGEALGFVSLTGLLDMLSSQPAAQRGLVLLRPPASLQYRFARIAIEV

SEQ ID NO: 41932 - protein, 448 aa, Homo sapiens
MALTLLEDWCKGMDMDPRKALLIVGIPMECSEVEIQDTVKAGLQPLCAYRVLGRMFRREDNAKAVFIELADTVNYTTLPSHIPGKGGSWEVVVKPRNPDDEFLSRLNYFLKDEGRSMTDVARALGCCSLPAESLDAEVMPQVRSPPLEPPKESMWYRKLKVFSGTASPSPGEETFEDWLEQVTEIMPIWQVSEVEKRRRLLESLRGPALSIMRVLQANNDSITVEQCLDALKQIFGDKEDFRASQFRFLQTSPKIGEKVSTFLLRLEPLLQKAVHKSPLSVRSTDMIRLKHLLARVAMTPALRGKLELLDQRGCPPNFLELMKLIRDEEEWENTEAVMKNKEKPSGRGRGASGRQARAEASVSAPQATVQARSFSDSSPQTIQGGLPPLVKRRRLLGSESTRGEDHGQATYPKAENQTPGREGPQAAGEELGNEAGAGAMSHPKPWET

SEQ ID NO: 41933 - protein, 1068 aa, Homo sapiens
MPPRPSSGELWGIHLMPPRILVECLLPNGMIVTLECLREATLITIKHELFKEARKYPLHQLLQDESSYIFVSVTQEAEREEFFDETRRLCDLRLFQPFLKVIEPVGNREEKILNREIGFAIGMPVCEFDMVKDPEVQDFRRNILNVCKEAVDLRDLNSPHSRAMYVYPPNVESSPELPKHIYNKLDKGQIIVVIWVIVSPNNDKQKYTLKINHDCVPEQVIAEAIRKKTRSMLLSSEQLKLCVLEYQGKYILKVCGCDEYFLEKYPLSQYKYIRSCIMLGRMPNLMLMAKESLYSQLPMDCFTMPSYSRRISTATPYMNGETSTKSLWVINSALRIKILCATYVNVNIRDIDKIYVRTGIYHGGEPLCDNVNTQRVPCSNPRWNEWLNYDIYIPDLPRAARLCLSICSVKGRKGAKEEHCPLAWGNINLFDYTDTLVSGKMALNLWPVPHGLEDLLNPIGVTGSNPNKETPCLELEFDWFSSVVKFPDMSVIEEHANWSVSREAGFSYSHAGLSNRLARDNELRENDKEQLKAISTRDPLSEITEQEKDFLWSHRHYCVTIPEILPKLLLSVKWNSRDEVAQMYCLVKDWPPIKPEQAMELLDCNYPDPMVRGFAVRCLEKYLTDDKLSQYLIQLVQVLKYEQYLDNLLVRFLLKKALTNQRIGHFFFWHLKSEMHNKTVSQRFGLLLESYCRACGMYLKHLNRQVEAMEKLINLTDILKQEKKDETQKVQMKFLVEQMRRPDFMDALQGFLSPLNPAHQLGNLRLEECRIMSSAKRPLWLNWENPDIMSELLFQNNEIIFKNGDDLRQDMLTLQIIRIMENIWQNQGLDLRMLPYGCLSIGDCVGLIEVVRNSHTIMQIQCKGGLKGALQFNSHTLHQWLKDKNKGEIYDAAIDLFTRSCAGYCVATFILGIGDRHNSNIMVKDDGQLFHIDFGHFLDHKKKKFGYKRERVPFVLTQDFLIVISKGAQECTKTREFERFQEMCYKAYLAIRQHANLFINLFSMMLGSGMPELQSFDDIAYIRKTLALDKTEQEALEYFMKQMNDAHHGGWTTKMDWIFHTIKQHALN

SEQ ID NO: 41934 - protein, 1186 aa, Homo sapiens
MDISTRSKDPGSAERTAQKRKFPSPPHSSNGHSPQDTSTSPIKKKKKPGLLNSNNKEQSELRHGPFYYMKQPLTTDPVDVVPQDGRNDFYCWVCHREGQVLCCELCPRVYHAKCLRLTSEPEGDWFCPECEKITVAECIETQSKAMTMLTIEQLSYLLKFAIQKMKQPGTDAFQKPVPLEQHPDYAEYIFHPMDLCTLEKNAKKKMYGCTEAFLADAKWILHNCIIYNGGNHKLTQIAKVVIKICEHEMNEIEVCPECYLAACQKRDNWFCEPCSNPHPLVWAKLKGFPFWPAKALRDKDGQVDARFFGQHDRAWVPINNCYLMSKEIPFSVKKTKSIFNSAMQEMEVYVENIRRKFGVFNYSPFRTPYTPNSQYQMLLDPTNPSAGTAKIDKQEKVKLNFDMTASPKILMSKPVLSGGTGRRISLSDMPRSPMSTNSSVHTGSDVEQDAEKKATSSHFSASEESMDFLDKSTASPASTKTGQAGSLSGSPKPFSPQLSAPITTKTDKTSTTGSILNLNLDRSKAEMDLKELSESVQQQSTPVPLISPKRQIRSRFQLNLDKTIESCKAQLGINEISEDVYTAVEHSDSEDSEKSDSSDSEYISDDEQKSKNEPEDTEDKEGCQMDKEPSAVKKKPKPTNPVEIKEELKSTSPASEKADPGAVKDKASPEPEKDFSEKAKPSPHPIKDKLKGKDETDSPTVHLGLDSDSESELVIDLGEDHSGREGRKNKKEPKEPSPKQDVVGKTPPSTTVGSHSPPETPVLTRSSAQTSAAGATATTSTSSTVTVTAPAPAATGSPVKKQRPLLPKETAPAVQRVVWNSSSKFQTSSQKWHMQKMQRQQQQQQQQNQQQQPQSSQGTRYQTRQAVKAVQQKEITQSPSTSTITLVTSTQSSPLVTSSGSMSTLVSSVNADLPIATASADVAADIAKYTSKMMDAIKGTMTEIYNDLSKNTTGSTIAEIRRLRIEIEKLQWLHQQELSEMKHNLELTMAEMRQSLEQERDRLIAEVKKQLELEKQQAVDETKKKQWCANCKKEAIFYCCWNTSYCDYPCQQAHWPEHMKSCTQSATAPQQEADAEVNTETLNKSSQGSSSSTQSAPSETASASKEKETSAEKSKESGSTLDLSGSRETPSSILLGSNQGSDHSRSNKSSWSSSDEKRGSTRSDHNTSTSTKSLLPKESRLDTFWD

SEQ ID NO: 41935 - protein, 614 aa, Homo sapiens
MDLKELSESVQQQSTPVPLISPKRQIRSRFQLNLDKTIESCKAQLGINEISEDVYTAVEHSDSEDSEKSDSSDSEYISDDEQKSKNEPEDTEDKEGCQMDKEPSAVKKKPKPTNPVEIKEELKSTSPASEKADPGAVKDKASPEPEKDFSEKAKPSPHPIKDKLKGKDETDSPTVHLGLDSDSESELVIDLGEDHSGREGRKNKKEPKEPSPKQDVVGKTPPSTTVGSHSPPETPVLTRSSAQTSAAGATATTSTSSTVTVTAPAPAATGSPVKKQRPLLPKETAPAVQRVVWNSSTVQQKEITQSPSTSTITLVTSTQSSPLVTSSGSMSTLVSSVNADLPIATASADVAADIAKYTSKMMDAIKGTMTEIYNDLSKNTTGSTIAEIRRLRIEIEKLQWLHQQELSEMKHNLELTMAEMRQSLEQERDRLIAEVKKQLELEKQQAVDETKKKQWCANCKKEAIFYCCWNTSYCDYPCQQAHWPEHMKSCTQSATAPQQEADAEVNTETLNKSSQGSSSSTQSAPSETASASKEKETSAEKSKESGSTLDLSGSRETPSSILLGSNQGSDHSRSNKSSWSSSDEKRGSTRSDHNTSTSTKSLLPKESRLDTFWD

SEQ ID NO: 41936 - protein, 995 aa, Homo sapiens
MTMLTIEQLSYLLKFAIQKMKQPGTDAFQKPVPLEQHPDYAEYIFHPMDLCTLEKNAKKKMYGCTEAFLADAKWILHNCIIYNGGNHKLTQIAKVVIKICEHEMNEIEVCPECYLAACQKRDNWFCEPCSNPHPLVWAKLKGFPFWPAKALRDKDGQVDARFFGQHDRAWVPINNCYLMSKEIPFSVKKTKSIFNSAMQEMEVYVENIRRKFGVFNYSPFRTPYTPNSQYQMLLDPTNPSAGTAKIDKQEKVKLNFDMTASPKILMSKPVLSGGTGRRISLSDMPRSPMSTNSSVHTGSDVEQDAEKKATSSHFSASEESMDFLDKSTASPASTKTGQAGSLSGSPKPFSPQLSAPITTKTDKTSTTGSILNLNLDRSKAEMDLKELSESVQQQSTPVPLISPKRQIRSRFQLNLDKTIESCKAQLGINEISEDVYTAVEHSDSEDSEKSDSSDSEYISDDEQKSKNEPEDTEDKEGCQMDKEPSAVKKKPKPTNPVEIKEELKSTSPASEKADPGAVKDKASPEPEKDFSEKAKPSPHPIKDKLKGKDETDSPTVHLGLDSDSESELVIDLGEDHSGREGRKNKKEPKEPSPKQDVVGKTPPSTTVGSHSPPETPVLTRSSAQTSAAGATATTSTSSTVTVTAPAPAATGSPVKKQRPLLPKETAPAVQRVVWNSSTVQQKEITQSPSTSTITLVTSTQSSPLVTSSGSMSTLVSSVNADLPIATASADVAADIAKYTSKMMDAIKGTMTEIYNDLSKNTTGSTIAEIRRLRIEIEKLQWLHQQELSEMKHNLELTMAEMRQSLEQERDRLIAEVKKQLELEKQQAVDETKKKQWCANCKKEAIFYCCWNTSYCDYPCQQAHWPEHMKSCTQSATAPQQEADAEVNTETLNKSSQGSSSSTQSAPSETASASKEKETSAEKSKESGSTLDLSGSRETPSSILLGSNQGSDHSRSNKSSWSSSDEKRGSTRSDHNTSTSTKSLLPKESRLDTFWD

SEQ ID NO: 41937 - protein, 764 aa, Homo sapiens
MLLDPTNPSAGTAKIDKQEKVKLNFDMTASPKILMSKPVLSGGTGRRISLSDMPRSPMSTNSSVHTGSDVEQDAEKKATSSHFSASEESMDFLDKSTASPASTKTGQAGSLSGSPKPFSPQLSAPITTKTDKTSTTGSILNLNLDRSKAEMDLKELSESVQQQSTPVPLISPKRQIRSRFQLNLDKTIESCKAQLGINEISEDVYTAVEHSDSEDSEKSDSSDSEYISDDEQKSKNEPEDTEDKEGCQMDKEPSAVKKKPKPTNPVEIKEELKSTSPASEKADPGAVKDKASPEPEKDFSEKAKPSPHPIKDKLKGKDETDSPTVHLGLDSDSESELVIDLGEDHSGREGRKNKKEPKEPSPKQDVVGKTPPSTTVGSHSPPETPVLTRSSAQTSAAGATATTSTSSTVTVTAPAPAATGSPVKKQRPLLPKETAPAVQRVVWNSSTVQQKEITQSPSTSTITLVTSTQSSPLVTSSGSMSTLVSSVNADLPIATASADVAADIAKYTSKMMDAIKGTMTEIYNDLSKNTTGSTIAEIRRLRIEIEKLQWLHQQELSEMKHNLELTMAEMRQSLEQERDRLIAEVKKQLELEKQQAVDETKKKQWCANCKKEAIFYCCWNTSYCDYPCQQAHWPEHMKSCTQSATAPQQEADAEVNTETLNKSSQGSSSSTQSAPSETASASKEKETSAEKSKESGSTLDLSGSRETPSSILLGSNQGSDHSRSNKSSWSSSDEKRGSTRSDHNTSTSTKSLLPKESRLDTFWD

SEQ ID NO: 41938 - protein, 1181 aa, Homo sapiens
MHPQSLAEEEIKTEQEVVEGMDISTRSKDPGSAERTAQKRKFPSPPHSSNGHSPQDTSTSPIKKKKKPGLLNSNNKEQDGRNDFYCWVCHREGQVLCCELCPRVYHAKCLRLTSEPEGDWFCPECEKITVAECIETQSKAMTMLTIEQLSYLLKFAIQKMKQPGTDAFQKPVPLEQHPDYAEYIFHPMDLCTLEKNAKKKMYGCTEAFLADAKWILHNCIIYNGGNHKLTQIAKVVIKICEHEMNEIEVCPECYLAACQKRDNWFCEPCSNPHPLVWAKLKGFPFWPAKALRDKDGQVDARFFGQHDRAWVPINNCYLMSKEIPFSVKKTKSIFNSAMQEMEVYVENIRRKFGVFNYSPFRTPYTPNSQYQMLLDPTNPSAGTAKIDKQEKVKLNFDMTASPKILMSKPVLSGGTGRRISLSDMPRSPMSTNSSVHTGSDVEQDAEKKATSSHFSASEESMDFLDKSTASPASTKTGQAGSLSGSPKPFSPQLSAPITTKTDKTSTTGSILNLNLDRSKAEMDLKELSESVQQQSTPVPLISPKRQIRSRFQLNLDKTIESCKAQLGINEISEDVYTAVEHSDSEDSEKSDSSDSEYISDDEQKSKNEPEDTEDKEGCQMDKEPSAVKKKPKPTNPVEIKEELKSTSPASEKADPGAVKDKASPEPEKDFSEKAKPSPHPIKDKLKGKDETDSPTVHLGLDSDSESELVIDLGEDHSGREGRKNKKEPKEPSPKQDVVGKTPPSTTVGSHSPPETPVLTRSSAQTSAAGATATTSTSSTVTVTAPAPAATGSPVKKQRPLLPKETAPAVQRVVWNSSSKFQTSSQKWHMQKMQRQQQQQQQQNQQQQPQSSQGTRYQTRQAVKAVQQKEITQSPSTSTITLVTSTQSSPLVTSSGSMSTLVSSVNADLPIATASADVAADIAKYTSKMMDAIKGTMTEIYNDLSKNTTGSTIAEIRRLRIEIEKLQWLHQQELSEMKHNLELTMAEMRQSLEQERDRLIAEVKKQLELEKQQAVDETKKKQWCANCKKEAIFYCCWNTSYCDYPCQQAHWPEHMKSCTQSATAPQQEADAEVNTETLNKSSQGSSSSTQSAPSETASASKEKETSAEKSKESGSTLDLSGSRETPSSILLGSNQGSDHSRSNKSSWSSSDEKRGSTRSDHNTSTSTKSLLPKESRLDTFWD

SEQ ID NO: 41939 - protein, 1023 aa, Homo sapiens
MTMLTIEQLSYLLKFAIQKMKQPGTDAFQKPVPLEQHPDYAEYIFHPMDLCTLEKNAKKKMYGCTEAFLADAKWILHNCIIYNGGNHKLTQIAKVVIKICEHEMNEIEVCPECYLAACQKRDNWFCEPCSNPHPLVWAKLKGFPFWPAKALRDKDGQVDARFFGQHDRAWVPINNCYLMSKEIPFSVKKTKSIFNSAMQEMEVYVENIRRKFGVFNYSPFRTPYTPNSQYQMLLDPTNPSAGTAKIDKQEKVKLNFDMTASPKILMSKPVLSGGTGRRISLSDMPRSPMSTNSSVHTGSDVEQDAEKKATSSHFSASEESMDFLDKSTASPASTKTGQAGSLSGSPKPFSPQLSAPITTKTDKTSTTGSILNLNLDRSKAEMDLKELSESVQQQSTPVPLISPKRQIRSRFQLNLDKTIESCKAQLGINEISEDVYTAVEHSDSEDSEKSDSSDSEYISDDEQKSKNEPEDTEDKEGCQMDKEPSAVKKKPKPTNPVEIKEELKSTSPASEKADPGAVKDKASPEPEKDFSEKAKPSPHPIKDKLKGKDETDSPTVHLGLDSDSESELVIDLGEDHSGREGRKNKKEPKEPSPKQDVVGKTPPSTTVGSHSPPETPVLTRSSAQTSAAGATATTSTSSTVTVTAPAPAATGSPVKKQRPLLPKETAPAVQRVVWNSSTVQQKEITQSPSTSTITLVTSTQSSPLVTSSGSMSTLVSSVNADLPIATASADVAADIAKYTSKMMDAIKGTMTEIYNDLSKNTTGSTIAEIRRLRIEIEKLQWLHQQELSEMKHNLELTMAEMRQSLEQERDRLIAEVKKQLELEKQQAVDETKKKQWCANCKKEAIFYCCWNTSYCDYPCQQAHWPEHMKSCTQSATAPQQEADAEVNTETLNKSSQGSSSSTQSAPSETASASKEKETSAEKSKESGSTLDLSGSRETPSSILLGSNQGSVSKRCDKQPAYAPTTTDHQPHPNYPAQKYHSRSNKSSWSSSDEKRGSTRSDHNTSTSTKSLLPKESRLDTFWD

SEQ ID NO: 41940 - protein, 1234 aa, Homo sapiens
MHPQSLAEEEIKTEQEVVEGMDISTRSKDPGSAERTAQKRKFPSPPHSSNGHSPQDTSTSPIKKKKKPGLLNSNNKEQSELRHGPFYYMKQPLTTDPVDVVPQDGRNDFYCWVCHREGQVLCCELCPRVYHAKCLRLTSEPEGDWFCPECEKITVAECIETQSKAMTMLTIEQLSYLLKFAIQKMKQPGTDAFQKPVPLEQHPDYAEYIFHPMDLCTLEKNAKKKMYGCTEAFLADAKWILHNCIIYNGGNHKLTQIAKVVIKICEHEMNEIEVCPECYLAACQKRDNWFCEPCSNPHPLVWAKLKGFPFWPAKALRDKDGQVDARFFGQHDRAWVPINNCYLMSKEIPFSVKKTKSIFNSAMQEMEVYVENIRRKFGVFNYSPFRTPYTPNSQYQMLLDPTNPSAGTAKIDKQEKVKLNFDMTASPKILMSKPVLSGGTGRRISLSDMPRSPMSTNSSVHTGSDVEQDAEKKATSSHFSASEESMDFLDKSTASPASTKTGQAGSLSGSPKPFSPQLSAPITTKTDKTSTTGSILNLNLDRSKAEMDLKELSESVQQQSTPVPLISPKRQIRSRFQLNLDKTIESCKAQLGINEISEDVYTAVEHSDSEDSEKSDSSDSEYISDDEQKSKNEPEDTEDKEGCQMDKEPSAVKKKPKPTNPVEIKEELKSTSPASEKADPGAVKDKASPEPEKDFSEKAKPSPHPIKDKLKGKDETDSPTVHLGLDSDSESELVIDLGEDHSGREGRKNKKEPKEPSPKQDVVGKTPPSTTVGSHSPPETPVLTRSSAQTSAAGATATTSTSSTVTVTAPAPAATGSPVKKQRPLLPKETAPAVQRVVWNSSSKFQTSSQKWHMQKMQRQQQQQQQQNQQQQPQSSQGTRYQTRQAVKAVQQKEITQSPSTSTITLVTSTQSSPLVTSSGSMSTLVSSVNADLPIATASADVAADIAKYTSKMMDAIKGTMTEIYNDLSKNTTGSTIAEIRRLRIEIEKLQWLHQQELSEMKHNLELTMAEMRQSLEQERDRLIAEVKKQLELEKQQAVDETKKKQWCANCKKEAIFYCCWNTSYCDYPCQQAHWPEHMKSCTQSATAPQQEADAEVNTETLNKSSQGSSSSTQSAPSETASASKEKETSAEKSKESGSTLDLSGSRETPSSILLGSNQGSVSKRCDKQPAYAPTTTDHQPHPNYPAQKYHSRSNKSSWSSSDEKRGSTRSDHNTSTSTKSLLPKESRLDTFWD

SEQ ID NO: 41941 - protein, 1107 aa, Homo sapiens
MHPQSLAEEEIKTEQEVVEGMDISTRSKDPGSAERTAQKRKFPSPPHSSNGHSPQDTSTSPIKKKKKPGLLNSNNKEQSELRHGPFYYMKQPLTTDPVDVVPQDGRNDFYCWVCHREGQVLCCELCPRVYHAKCLRLTSEPEGDWFCPECEKITVAECIETQSKAMTMLTIEQLSYLLKFAIQKMKQPGTDAFQKPVPLEQHPDYAEYIFHPMDLCTLEKNAKKKMYGCTEAFLADAKWILHNCIIYNGGNHKLTQIAKVVIKICEHEMNEIEVCPECYLAACQKRDNWFCEPCSNPHPLVWAKLKGFPFWPAKALRDKDGQVDARFFGQHDRAWVPINNCYLMSKEIPFSVKKTKSIFNSAMQEMEVYVENIRRKFGVFNYSPFRTPYTPNSQYQMLLDPTNPSAGTAKIDKQEKVKLNFDMTASPKILMSKPVLSGGTGRRISLSDMPRSPMSTNSSVHTGSDVEQDAEKKATSSHFSASEESMDFLDKSTASPASTKTGQAGSLSGSPKPFSPQLSAPITTKTDKTSTTGSILNLNLDRSKAEMDLKELSESVQQQSTPVPLISPKRQIRSRFQLNLDKTIESCKAQLGINEISEDVYTAVEHSDSEDSEKSDSSDSEYISDDEQKSKNEPEDTEDKEGCQMDKEPSAVKKKPKPTNPVEIKEELKSTSPASEKADPGAVKDKASPEPEKDFSEKAKPSPHPIKDKLKGKDETDSPTVHLGLDSDSESELVIDLGEDHSGREGRKNKKEPKEPSPKQDAVQQKEITQSPSTSTITLVTSTQSSPLVTSSGSMSTLVSSVNADLPIATASADVAADIAKYTSKMMDAIKGTMTEIYNDLSKNTTGSTIAEIRRLRIEIEKLQWLHQQELSEMKHNLELTMAEMRQSLEQERDRLIAEVKKQLELEKQQAVDETKKKQWCANCKKEAIFYCCWNTSYCDYPCQQAHWPEHMKSCTQSATAPQQEADAEVNTETLNKSSQGSSSSTQSAPSETASASKEKETSAEKSKESGSTLDLSGSRETPSSILLGSNQGSVSKRCDKQPAYAPTTTDHQPHPNYPAQKYHSRSNKSSWSSSDEKRGSTRSDHNTSTSTKSLLPKESRLDTFWD

SEQ ID NO: 41942 - protein, 1168 aa, Homo sapiens
MDISTRSKDPGSAERTAQKRKFPSPPHSSNGHSPQDTSTSPIKKKKKPGLLNSNNKEQSELRHGPFYYMKQPLTTDPVDVVPQDGRNDFYCWVCHREGQVLCCELCPRVYHAKCLRLTSEPEGDWFCPECEKITVAECIETQSKAMTMLTIEQLSYLLKFAIQKMKQPGTDAFQKPVPLEQHPDYAEYIFHPMDLCTLEKNAKKKMYGCTEAFLADAKWILHNCIIYNGGNHKLTQIAKVVIKICEHEMNEIEVCPECYLAACQKRDNWFCEPCSNPHPLVWAKLKGFPFWPAKALRDKDGQVDARFFGQHDRAWVPINNCYLMSKEIPFSVKKTKSIFNSAMQEMEVYVENIRRKFGVFNYSPFRTPYTPNSQYQMLLDPTNPSAGTAKIDKQEKVKLNFDMTASPKILMSKPVLSGGTGRRISLSDMPRSPMSTNSSVHTGSDVEQDAEKKATSSHFSASEESMDFLDKSTASPASTKTGQAGSLSGSPKPFSPQLSAPITTKTDKTSTTGSILNLNLDRSKAEMDLKELSESVQQQSTPVPLISPKRQIRSRFQLNLDKTIESCKAQLGINEISEDVYTAVEHSDSEDSEKSDSSDSEYISDDEQKSKNEPEDTEDKEGCQMDKEPSAVKKKPKPTNPVEIKEELKSTSPASEKADPGAVKDKASPEPEKDFSEKAKPSPHPIKDKLKGKDETDSPTVHLGLDSDSESELVIDLGEDHSGREGRKNKKEPKEPSPKQDVVGKTPPSTTVGSHSPPETPVLTRSSAQTSAAGATATTSTSSTVTVTAPAPAATGSPVKKQRPLLPKETAPAVQRVVWNSSTVQQKEITQSPSTSTITLVTSTQSSPLVTSSGSMSTLVSSVNADLPIATASADVAADIAKYTSKMMDAIKGTMTEIYNDLSKNTTGSTIAEIRRLRIEIEKLQWLHQQELSEMKHNLELTMAEMRQSLEQERDRLIAEVKKQLELEKQQAVDETKKKQWCANCKKEAIFYCCWNTSYCDYPCQQAHWPEHMKSCTQSATAPQQEADAEVNTETLNKSSQGSSSSTQSAPSETASASKEKETSAEKSKESGSTLDLSGSRETPSSILLGSNQGSVSKRCDKQPAYAPTTTDHQPHPNYPAQKYHSRSNKSSWSSSDEKRGSTRSDHNTSTSTKSLLPKESRLDTFWD

SEQ ID NO: 41943 - protein, 1206 aa, Homo sapiens
MHPQSLAEEEIKTEQEVVEGMDISTRSKDPGSAERTAQKRKFPSPPHSSNGHSPQDTSTSPIKKKKKPGLLNSNNKEQSELRHGPFYYMKQPLTTDPVDVVPQDGRNDFYCWVCHREGQVLCCELCPRVYHAKCLRLTSEPEGDWFCPECEKITVAECIETQSKAMTMLTIEQLSYLLKFAIQKMKQPGTDAFQKPVPLEQHPDYAEYIFHPMDLCTLEKNAKKKMYGCTEAFLADAKWILHNCIIYNGGNHKLTQIAKVVIKICEHEMNEIEVCPECYLAACQKRDNWFCEPCSNPHPLVWAKLKGFPFWPAKALRDKDGQVDARFFGQHDRAWVPINNCYLMSKEIPFSVKKTKSIFNSAMQEMEVYVENIRRKFGVFNYSPFRTPYTPNSQYQMLLDPTNPSAGTAKIDKQEKVKLNFDMTASPKILMSKPVLSGGTGRRISLSDMPRSPMSTNSSVHTGSDVEQDAEKKATSSHFSASEESMDFLDKSTASPASTKTGQAGSLSGSPKPFSPQLSAPITTKTDKTSTTGSILNLNLDRSKAEMDLKELSESVQQQSTPVPLISPKRQIRSRFQLNLDKTIESCKAQLGINEISEDVYTAVEHSDSEDSEKSDSSDSEYISDDEQKSKNEPEDTEDKEGCQMDKEPSAVKKKPKPTNPVEIKEELKSTSPASEKADPGAVKDKASPEPEKDFSEKAKPSPHPIKDKLKGKDETDSPTVHLGLDSDSESELVIDLGEDHSGREGRKNKKEPKEPSPKQDVVGKTPPSTTVGSHSPPETPVLTRSSAQTSAAGATATTSTSSTVTVTAPAPAATGSPVKKQRPLLPKETAPAVQRVVWNSSSKFQTSSQKWHMQKMQRQQQQQQQQNQQQQPQSSQGTRYQTRQAVKAVQQKEITQSPSTSTITLVTSTQSSPLVTSSGSMSTLVSSVNADLPIATASADVAADIAKYTSKMMDAIKGTMTEIYNDLSKNTTGSTIAEIRRLRIEIEKLQWLHQQELSEMKHNLELTMAEMRQSLEQERDRLIAEVKKQLELEKQQAVDETKKKQWCANCKKEAIFYCCWNTSYCDYPCQQAHWPEHMKSCTQSATAPQQEADAEVNTETLNKSSQGSSSSTQSAPSETASASKEKETSAEKSKESGSTLDLSGSRETPSSILLGSNQGSDHSRSNKSSWSSSDEKRGSTRSDHNTSTSTKSLLPKESRLDTFWD

SEQ ID NO: 41944 - protein, 1214 aa, Homo sapiens
MDISTRSKDPGSAERTAQKRKFPSPPHSSNGHSPQDTSTSPIKKKKKPGLLNSNNKEQSELRHGPFYYMKQPLTTDPVDVVPQDGRNDFYCWVCHREGQVLCCELCPRVYHAKCLRLTSEPEGDWFCPECEKITVAECIETQSKAMTMLTIEQLSYLLKFAIQKMKQPGTDAFQKPVPLEQHPDYAEYIFHPMDLCTLEKNAKKKMYGCTEAFLADAKWILHNCIIYNGGNHKLTQIAKVVIKICEHEMNEIEVCPECYLAACQKRDNWFCEPCSNPHPLVWAKLKGFPFWPAKALRDKDGQVDARFFGQHDRAWVPINNCYLMSKEIPFSVKKTKSIFNSAMQEMEVYVENIRRKFGVFNYSPFRTPYTPNSQYQMLLDPTNPSAGTAKIDKQEKVKLNFDMTASPKILMSKPVLSGGTGRRISLSDMPRSPMSTNSSVHTGSDVEQDAEKKATSSHFSASEESMDFLDKSTASPASTKTGQAGSLSGSPKPFSPQLSAPITTKTDKTSTTGSILNLNLDRSKAEMDLKELSESVQQQSTPVPLISPKRQIRSRFQLNLDKTIESCKAQLGINEISEDVYTAVEHSDSEDSEKSDSSDSEYISDDEQKSKNEPEDTEDKEGCQMDKEPSAVKKKPKPTNPVEIKEELKSTSPASEKADPGAVKDKASPEPEKDFSEKAKPSPHPIKDKLKGKDETDSPTVHLGLDSDSESELVIDLGEDHSGREGRKNKKEPKEPSPKQDVVGKTPPSTTVGSHSPPETPVLTRSSAQTSAAGATATTSTSSTVTVTAPAPAATGSPVKKQRPLLPKETAPAVQRVVWNSSSKFQTSSQKWHMQKMQRQQQQQQQQNQQQQPQSSQGTRYQTRQAVKAVQQKEITQSPSTSTITLVTSTQSSPLVTSSGSMSTLVSSVNADLPIATASADVAADIAKYTSKMMDAIKGTMTEIYNDLSKNTTGSTIAEIRRLRIEIEKLQWLHQQELSEMKHNLELTMAEMRQSLEQERDRLIAEVKKQLELEKQQAVDETKKKQWCANCKKEAIFYCCWNTSYCDYPCQQAHWPEHMKSCTQSATAPQQEADAEVNTETLNKSSQGSSSSTQSAPSETASASKEKETSAEKSKESGSTLDLSGSRETPSSILLGSNQGSVSKRCDKQPAYAPTTTDHQPHPNYPAQKYHSRSNKSSWSSSDEKRGSTRSDHNTSTSTKSLLPKESRLDTFWD

SEQ ID NO: 41945 - protein, 1160 aa, Homo sapiens
MHPQSLAEEEIKTEQEVVEGMDISTRSKDPGSAERTAQKRKFPSPPHSSNGHSPQDTSTSPIKKKKKPGLLNSNNKEQSELRHGPFYYMKQPLTTDPVDVVPQDGRNDFYCWVCHREGQVLCCELCPRVYHAKCLRLTSEPEGDWFCPECEKITVAECIETQSKAMTMLTIEQLSYLLKFAIQKMKQPGTDAFQKPVPLEQHPDYAEYIFHPMDLCTLEKNAKKKMYGCTEAFLADAKWILHNCIIYNGGNHKLTQIAKVVIKICEHEMNEIEVCPECYLAACQKRDNWFCEPCSNPHPLVWAKLKGFPFWPAKALRDKDGQVDARFFGQHDRAWVPINNCYLMSKEIPFSVKKTKSIFNSAMQEMEVYVENIRRKFGVFNYSPFRTPYTPNSQYQMLLDPTNPSAGTAKIDKQEKVKLNFDMTASPKILMSKPVLSGGTGRRISLSDMPRSPMSTNSSVHTGSDVEQDAEKKATSSHFSASEESMDFLDKSTASPASTKTGQAGSLSGSPKPFSPQLSAPITTKTDKTSTTGSILNLNLDRSKAEMDLKELSESVQQQSTPVPLISPKRQIRSRFQLNLDKTIESCKAQLGINEISEDVYTAVEHSDSEDSEKSDSSDSEYISDDEQKSKNEPEDTEDKEGCQMDKEPSAVKKKPKPTNPVEIKEELKSTSPASEKADPGAVKDKASPEPEKDFSEKAKPSPHPIKDKLKGKDETDSPTVHLGLDSDSESELVIDLGEDHSGREGRKNKKEPKEPSPKQDVVGKTPPSTTVGSHSPPETPVLTRSSAQTSAAGATATTSTSSTVTVTAPAPAATGSPVKKQRPLLPKETAPAVQRVVWNSSTVQQKEITQSPSTSTITLVTSTQSSPLVTSSGSMSTLVSSVNADLPIATASADVAADIAKYTSKMMDAIKGTMTEIYNDLSKNTTGSTIAEIRRLRIEIEKLQWLHQQELSEMKHNLELTMAEMRQSLEQERDRLIAEVKKQLELEKQQAVDETKKKQWCANCKKEAIFYCCWNTSYCDYPCQQAHWPEHMKSCTQSATAPQQEADAEVNTETLNKSSQGSSSSTQSAPSETASASKEKETSAEKSKESGSTLDLSGSRETPSSILLGSNQGSDHSRSNKSSWSSSDEKRGSTRSDHNTSTSTKSLLPKESRLDTFWD

SEQ ID NO: 41946 - protein, 1188 aa, Homo sapiens
MHPQSLAEEEIKTEQEVVEGMDISTRSKDPGSAERTAQKRKFPSPPHSSNGHSPQDTSTSPIKKKKKPGLLNSNNKEQSELRHGPFYYMKQPLTTDPVDVVPQDGRNDFYCWVCHREGQVLCCELCPRVYHAKCLRLTSEPEGDWFCPECEKITVAECIETQSKAMTMLTIEQLSYLLKFAIQKMKQPGTDAFQKPVPLEQHPDYAEYIFHPMDLCTLEKNAKKKMYGCTEAFLADAKWILHNCIIYNGGNHKLTQIAKVVIKICEHEMNEIEVCPECYLAACQKRDNWFCEPCSNPHPLVWAKLKGFPFWPAKALRDKDGQVDARFFGQHDRAWVPINNCYLMSKEIPFSVKKTKSIFNSAMQEMEVYVENIRRKFGVFNYSPFRTPYTPNSQYQMLLDPTNPSAGTAKIDKQEKVKLNFDMTASPKILMSKPVLSGGTGRRISLSDMPRSPMSTNSSVHTGSDVEQDAEKKATSSHFSASEESMDFLDKSTASPASTKTGQAGSLSGSPKPFSPQLSAPITTKTDKTSTTGSILNLNLDRSKAEMDLKELSESVQQQSTPVPLISPKRQIRSRFQLNLDKTIESCKAQLGINEISEDVYTAVEHSDSEDSEKSDSSDSEYISDDEQKSKNEPEDTEDKEGCQMDKEPSAVKKKPKPTNPVEIKEELKSTSPASEKADPGAVKDKASPEPEKDFSEKAKPSPHPIKDKLKGKDETDSPTVHLGLDSDSESELVIDLGEDHSGREGRKNKKEPKEPSPKQDVVGKTPPSTTVGSHSPPETPVLTRSSAQTSAAGATATTSTSSTVTVTAPAPAATGSPVKKQRPLLPKETAPAVQRVVWNSSTVQQKEITQSPSTSTITLVTSTQSSPLVTSSGSMSTLVSSVNADLPIATASADVAADIAKYTSKMMDAIKGTMTEIYNDLSKNTTGSTIAEIRRLRIEIEKLQWLHQQELSEMKHNLELTMAEMRQSLEQERDRLIAEVKKQLELEKQQAVDETKKKQWCANCKKEAIFYCCWNTSYCDYPCQQAHWPEHMKSCTQSATAPQQEADAEVNTETLNKSSQGSSSSTQSAPSETASASKEKETSAEKSKESGSTLDLSGSRETPSSILLGSNQGSVSKRCDKQPAYAPTTTDHQPHPNYPAQKYHSRSNKSSWSSSDEKRGSTRSDHNTSTSTKSLLPKESRLDTFWD

SEQ ID NO: 41947 - protein, 1135 aa, Homo sapiens
MHPQSLAEEEIKTEQEVVEGMDISTRSKDPGSAERTAQKRKFPSPPHSSNGHSPQDTSTSPIKKKKKPGLLNSNNKEQDGRNDFYCWVCHREGQVLCCELCPRVYHAKCLRLTSEPEGDWFCPECEKITVAECIETQSKAMTMLTIEQLSYLLKFAIQKMKQPGTDAFQKPVPLEQHPDYAEYIFHPMDLCTLEKNAKKKMYGCTEAFLADAKWILHNCIIYNGGNHKLTQIAKVVIKICEHEMNEIEVCPECYLAACQKRDNWFCEPCSNPHPLVWAKLKGFPFWPAKALRDKDGQVDARFFGQHDRAWVPINNCYLMSKEIPFSVKKTKSIFNSAMQEMEVYVENIRRKFGVFNYSPFRTPYTPNSQYQMLLDPTNPSAGTAKIDKQEKVKLNFDMTASPKILMSKPVLSGGTGRRISLSDMPRSPMSTNSSVHTGSDVEQDAEKKATSSHFSASEESMDFLDKSTASPASTKTGQAGSLSGSPKPFSPQLSAPITTKTDKTSTTGSILNLNLDRSKAEMDLKELSESVQQQSTPVPLISPKRQIRSRFQLNLDKTIESCKAQLGINEISEDVYTAVEHSDSEDSEKSDSSDSEYISDDEQKSKNEPEDTEDKEGCQMDKEPSAVKKKPKPTNPVEIKEELKSTSPASEKADPGAVKDKASPEPEKDFSEKAKPSPHPIKDKLKGKDETDSPTVHLGLDSDSESELVIDLGEDHSGREGRKNKKEPKEPSPKQDVVGKTPPSTTVGSHSPPETPVLTRSSAQTSAAGATATTSTSSTVTVTAPAPAATGSPVKKQRPLLPKETAPAVQRVVWNSSTVQQKEITQSPSTSTITLVTSTQSSPLVTSSGSMSTLVSSVNADLPIATASADVAADIAKYTSKMMDAIKGTMTEIYNDLSKNTTGSTIAEIRRLRIEIEKLQWLHQQELSEMKHNLELTMAEMRQSLEQERDRLIAEVKKQLELEKQQAVDETKKKQWCANCKKEAIFYCCWNTSYCDYPCQQAHWPEHMKSCTQSATAPQQEADAEVNTETLNKSSQGSSSSTQSAPSETASASKEKETSAEKSKESGSTLDLSGSRETPSSILLGSNQGSDHSRSNKSSWSSSDEKRGSTRSDHNTSTSTKSLLPKESRLDTFWD

SEQ ID NO: 41948 - protein, 1088 aa, Homo sapiens
MHPQSLAEEEIKTEQEVVEGMDISTRSKDPGSAERTAQKRKFPSPPHSSNGHSPQDTSTSPIKKKKKPGLLNSNNKEQDGRNDFYCWVCHREGQVLCCELCPRVYHAKCLRLTSEPEGDWFCPECEKITVAECIETQSKAMTMLTIEQLSYLLKFAIQKMKQPGTDAFQKPVPLEQHPDYAEYIFHPMDLCTLEKNAKKKMYGCTEAFLADAKWILHNCIIYNGGNHKLTQIAKVVIKICEHEMNEIEVCPECYLAACQKRDNWFCEPCSNPHPLVWAKLKGFPFWPAKALRDKDGQVDARFFGQHDRAWVPINNCYLMSKEIPFSVKKTKSIFNSAMQEMEVYVENIRRKFGVFNYSPFRTPYTPNSQYQMLLDPTNPSAGTAKIDKQEKVKLNFDMTASPKILMSKPVLSGGTGRRISLSDMPRSPMSTNSSVHTGSDVEQDAEKKATSSHFSASEESMDFLDKSTDRSKAEMDLKELSESVQQQSTPVPLISPKRQIRSRFQLNLDKTIESCKAQLGINEISEDVYTAVEHSDSEDSEKSDSSDSEYISDDEQKSKNEPEDTEDKEGCQMDKEPSAVKKKPKPTNPVEIKEELKSTSPASEKADPGAVKDKASPEPEKDFSEKAKPSPHPIKDKLKGKDETDSPTVHLGLDSDSESELVIDLGEDHSGREGRKNKKEPKEPSPKQDVVGKTPPSTTVGSHSPPETPVLTRSSAQTSAAGATATTSTSSTVTVTAPAPAATGSPVKKQRPLLPKETAPAVQRVVWNSSTVQQKEITQSPSTSTITLVTSTQSSPLVTSSGSMSTLVSSVNADLPIATASADVAADIAKYTSKMMDAIKGTMTEIYNDLSKNTTGSTIAEIRRLRIEIEKLQWLHQQELSEMKHNLELTMAEMRQSLEQERDRLIAEVKKQLELEKQQAVDETKKKQWCANCKKEAIFYCCWNTSYCDYPCQQAHWPEHMKSCTQSATAPQQEADAEVNTETLNKSSQGSSSSTQSAPSETASASKEKETSAEKSKESGSTLDLSGSRETPSSILLGSNQGSDHSRSNKSSWSSSDEKRGSTRSDHNTSTSTKSLLPKESRLDTFWD

SEQ ID NO: 41949 - protein, 1163 aa, Homo sapiens
MHPQSLAEEEIKTEQEVVEGMDISTRSKDPGSAERTAQKRKFPSPPHSSNGHSPQDTSTSPIKKKKKPGLLNSNNKEQDGRNDFYCWVCHREGQVLCCELCPRVYHAKCLRLTSEPEGDWFCPECEKITVAECIETQSKAMTMLTIEQLSYLLKFAIQKMKQPGTDAFQKPVPLEQHPDYAEYIFHPMDLCTLEKNAKKKMYGCTEAFLADAKWILHNCIIYNGGNHKLTQIAKVVIKICEHEMNEIEVCPECYLAACQKRDNWFCEPCSNPHPLVWAKLKGFPFWPAKALRDKDGQVDARFFGQHDRAWVPINNCYLMSKEIPFSVKKTKSIFNSAMQEMEVYVENIRRKFGVFNYSPFRTPYTPNSQYQMLLDPTNPSAGTAKIDKQEKVKLNFDMTASPKILMSKPVLSGGTGRRISLSDMPRSPMSTNSSVHTGSDVEQDAEKKATSSHFSASEESMDFLDKSTASPASTKTGQAGSLSGSPKPFSPQLSAPITTKTDKTSTTGSILNLNLDRSKAEMDLKELSESVQQQSTPVPLISPKRQIRSRFQLNLDKTIESCKAQLGINEISEDVYTAVEHSDSEDSEKSDSSDSEYISDDEQKSKNEPEDTEDKEGCQMDKEPSAVKKKPKPTNPVEIKEELKSTSPASEKADPGAVKDKASPEPEKDFSEKAKPSPHPIKDKLKGKDETDSPTVHLGLDSDSESELVIDLGEDHSGREGRKNKKEPKEPSPKQDVVGKTPPSTTVGSHSPPETPVLTRSSAQTSAAGATATTSTSSTVTVTAPAPAATGSPVKKQRPLLPKETAPAVQRVVWNSSTVQQKEITQSPSTSTITLVTSTQSSPLVTSSGSMSTLVSSVNADLPIATASADVAADIAKYTSKMMDAIKGTMTEIYNDLSKNTTGSTIAEIRRLRIEIEKLQWLHQQELSEMKHNLELTMAEMRQSLEQERDRLIAEVKKQLELEKQQAVDETKKKQWCANCKKEAIFYCCWNTSYCDYPCQQAHWPEHMKSCTQSATAPQQEADAEVNTETLNKSSQGSSSSTQSAPSETASASKEKETSAEKSKESGSTLDLSGSRETPSSILLGSNQGSVSKRCDKQPAYAPTTTDHQPHPNYPAQKYHSRSNKSSWSSSDEKRGSTRSDHNTSTSTKSLLPKESRLDTFWD

SEQ ID NO: 41950 - protein, 1054 aa, Homo sapiens
MHPQSLAEEEIKTEQEVVEGMDISTRSKDPGSAERTAQKRKFPSPPHSSNGHSPQDTSTSPIKKKKKPGLLNSNNKEQDGRNDFYCWVCHREGQVLCCELCPRVYHAKCLRLTSEPEGDWFCPECEKITVAECIETQSKAMTMLTIEQLSYLLKFAIQKMKQPGTDAFQKPVPLEQHPDYAEYIFHPMDLCTLEKNAKKKMYGCTEAFLADAKWILHNCIIYNGGNHKLTQIAKVVIKICEHEMNEIEVCPECYLAACQKRDNWFCEPCSNPHPLVWAKLKGFPFWPAKALRDKDGQVDARFFGQHDRAWVPINNCYLMSKEIPFSVKKTKSIFNSAMQEMEVYVENIRRKFGVFNYSPFRTPYTPNSQYQMLLDPTNPSAGTAKIDKQEKVKLNFDMTASPKILMSKPVLSGGTGRRISLSDMPRSPMSTNSSVHTGSDVEQDAEKKATSSHFSASEESMDFLDKSTASPASTKTGQAGSLSGSPKPFSPQLSAPITTKTDKTSTTGSILNLNLDRSKAEMDLKELSESVQQQSTPVPLISPKRQIRSRFQLNLDKTIESCKAQLGINEISEDVYTAVEHSDSEDSEKSDSSDSEYISDDEQKSKNEPEDTEDKEGCQMDKEPSAVKKKPKPTNPVEIKEELKSTSPASEKADPGAVKDKASPEPEKDFSEKAKPSPHPIKDKLKGKDETDSPTVHLGLDSDSESELVIDLGEDHSGREGRKNKKEPKEPSPKQDAVQQKEITQSPSTSTITLVTSTQSSPLVTSSGSMSTLVSSVNADLPIATASADVAADIAKYTSKMMDAIKGTMTEIYNDLSKNTTGSTIAEIRRLRIEIEKLQWLHQQELSEMKHNLELTMAEMRQSLEQERDRLIAEVKKQLELEKQQAVDETKKKQWCANCKKEAIFYCCWNTSYCDYPCQQAHWPEHMKSCTQSATAPQQEADAEVNTETLNKSSQGSSSSTQSAPSETASASKEKETSAEKSKESGSTLDLSGSRETPSSILLGSNQGSDHSRSNKSSWSSSDEKRGSTRSDHNTSTSTKSLLPKESRLDTFWD

SEQ ID NO: 41951 - protein, 1134 aa, Homo sapiens
MHPQSLAEEEIKTEQEVVEGMDISTRSKDPGSAERTAQKRKFPSPPHSSNGHSPQDTSTSPIKKKKKPGLLNSNNKEQDGRNDFYCWVCHREGQVLCCELCPRVYHAKCLRLTSEPEGDWFCPECEKITVAECIETQSKAMTMLTIEQLSYLLKFAIQKMKQPGTDAFQKPVPLEQHPDYAEYIFHPMDLCTLEKNAKKKMYGCTEAFLADAKWILHNCIIYNGGNHKLTQIAKVVIKICEHEMNEIEVCPECYLAACQKRDNWFCEPCSNPHPLVWAKLKGFPFWPAKALRDKDGQVDARFFGQHDRAWVPINNCYLMSKEIPFSVKKTKSIFNSAMQEMEVYVENIRRKFGVFNYSPFRTPYTPNSQYQMLLDPTNPSAGTAKIDKQEKVKLNFDMTASPKILMSKPVLSGGTGRRISLSDMPRSPMSTNSSVHTGSDVEQDAEKKATSSHFSASEESMDFLDKSTDRSKAEMDLKELSESVQQQSTPVPLISPKRQIRSRFQLNLDKTIESCKAQLGINEISEDVYTAVEHSDSEDSEKSDSSDSEYISDDEQKSKNEPEDTEDKEGCQMDKEPSAVKKKPKPTNPVEIKEELKSTSPASEKADPGAVKDKASPEPEKDFSEKAKPSPHPIKDKLKGKDETDSPTVHLGLDSDSESELVIDLGEDHSGREGRKNKKEPKEPSPKQDVVGKTPPSTTVGSHSPPETPVLTRSSAQTSAAGATATTSTSSTVTVTAPAPAATGSPVKKQRPLLPKETAPAVQRVVWNSSSKFQTSSQKWHMQKMQRQQQQQQQQNQQQQPQSSQGTRYQTRQAVKAVQQKEITQSPSTSTITLVTSTQSSPLVTSSGSMSTLVSSVNADLPIATASADVAADIAKYTSKMMDAIKGTMTEIYNDLSKNTTGSTIAEIRRLRIEIEKLQWLHQQELSEMKHNLELTMAEMRQSLEQERDRLIAEVKKQLELEKQQAVDETKKKQWCANCKKEAIFYCCWNTSYCDYPCQQAHWPEHMKSCTQSATAPQQEADAEVNTETLNKSSQGSSSSTQSAPSETASASKEKETSAEKSKESGSTLDLSGSRETPSSILLGSNQGSDHSRSNKSSWSSSDEKRGSTRSDHNTSTSTKSLLPKESRLDTFWD

SEQ ID NO: 41952 - protein, 1241 aa, Homo sapiens
MVFLEEFEARSCLAEEEIKTEQEVVEGMDISTRSKDPGSAERTAQKRKFPSPPHSSNGHSPQDTSTSPIKKKKKPGLLNSNNKEQSELRHGPFYYMKQPLTTDPVDVVPQDGRNDFYCWVCHREGQVLCCELCPRVYHAKCLRLTSEPEGDWFCPECEKITVAECIETQSKAMTMLTIEQLSYLLKFAIQKMKQPGTDAFQKPVPLEQHPDYAEYIFHPMDLCTLEKNAKKKMYGCTEAFLADAKWILHNCIIYNGGNHKLTQIAKVVIKICEHEMNEIEVCPECYLAACQKRDNWFCEPCSNPHPLVWAKLKGFPFWPAKALRDKDGQVDARFFGQHDRAWVPINNCYLMSKEIPFSVKKTKSIFNSAMQEMEVYVENIRRKFGVFNYSPFRTPYTPNSQYQMLLDPTNPSAGTAKIDKQEKVKLNFDMTASPKILMSKPVLSGGTGRRISLSDMPRSPMSTNSSVHTGSDVEQDAEKKATSSHFSASEESMDFLDKSTASPASTKTGQAGSLSGSPKPFSPQLSAPITTKTDKTSTTGSILNLNLDRSKAEMDLKELSESVQQQSTPVPLISPKRQIRSRFQLNLDKTIESCKAQLGINEISEDVYTAVEHSDSEDSEKSDSSDSEYISDDEQKSKNEPEDTEDKEGCQMDKEPSAVKKKPKPTNPVEIKEELKSTSPASEKADPGAVKDKASPEPEKDFSEKAKPSPHPIKDKLKGKDETDSPTVHLGLDSDSESELVIDLGEDHSGREGRKNKKEPKEPSPKQDVVGKTPPSTTVGSHSPPETPVLTRSSAQTSAAGATATTSTSSTVTVTAPAPAATGSPVKKQRPLLPKETAPAVQRVVWNSSSKFQTSSQKWHMQKMQRQQQQQQQQNQQQQPQSSQGTRYQTRQAVKAVQQKEITQSPSTSTITLVTSTQSSPLVTSSGSMSTLVSSVNADLPIATASADVAADIAKYTSKMMDAIKGTMTEIYNDLSKNTTGSTIAEIRRLRIEIEKLQWLHQQELSEMKHNLELTMAEMRQSLEQERDRLIAEVKKQLELEKQQAVDETKKKQWCANCKKEAIFYCCWNTSYCDYPCQQAHWPEHMKSCTQSATAPQQEADAEVNTETLNKSSQGSSSSTQSAPSETASASKEKETSAEKSKESGSTLDLSGSRETPSSILLGSNQGSVSKRCDKQPAYAPTTTDHQPHPNYPAQKYHSRSNKSSWSSSDEKRGSTRSDHNTSTSTKSLLPKESRLDTFWD

SEQ ID NO: 41953 - protein, 1186 aa, Homo sapiens
MFSSLQKSFNLAEEEIKTEQEVVEGMDISTRSKDPGSAERTAQKRKFPSPPHSSNGHSPQDTSTSPIKKKKKPGLLNSNNKEQDGRNDFYCWVCHREGQVLCCELCPRVYHAKCLRLTSEPEGDWFCPECEKITVAECIETQSKAMTMLTIEQLSYLLKFAIQKMKQPGTDAFQKPVPLEQHPDYAEYIFHPMDLCTLEKNAKKKMYGCTEAFLADAKWILHNCIIYNGGNHKLTQIAKVVIKICEHEMNEIEVCPECYLAACQKRDNWFCEPCSNPHPLVWAKLKGFPFWPAKALRDKDGQVDARFFGQHDRAWVPINNCYLMSKEIPFSVKKTKSIFNSAMQEMEVYVENIRRKFGVFNYSPFRTPYTPNSQYQMLLDPTNPSAGTAKIDKQEKVKLNFDMTASPKILMSKPVLSGGTGRRISLSDMPRSPMSTNSSVHTGSDVEQDAEKKATSSHFSASEESMDFLDKSTASPASTKTGQAGSLSGSPKPFSPQLSAPITTKTDKTSTTGSILNLNLDRSKAEMDLKELSESVQQQSTPVPLISPKRQIRSRFQLNLDKTIESCKAQLGINEISEDVYTAVEHSDSEDSEKSDSSDSEYISDDEQKSKNEPEDTEDKEGCQMDKEPSAVKKKPKPTNPVEIKEELKSTSPASEKADPGAVKDKASPEPEKDFSEKAKPSPHPIKDKLKGKDETDSPTVHLGLDSDSESELVIDLGEDHSGREGRKNKKEPKEPSPKQDVVGKTPPSTTVGSHSPPETPVLTRSSAQTSAAGATATTSTSSTVTVTAPAPAATGSPVKKQRPLLPKETAPAVQRVVWNSSSKFQTSSQKWHMQKMQRQQQQQQQQNQQQQPQSSQGTRYQTRQAVKAVQQKEITQSPSTSTITLVTSTQSSPLVTSSGSMSTLVSSVNADLPIATASADVAADIAKYTSKMMDAIKGTMTEIYNDLSKNTTGSTIAEIRRLRIEIEKLQWLHQQELSEMKHNLELTMAEMRQSLEQERDRLIAEVKKQLELEKQQAVDETKKKQWCANCKKEAIFYCCWNTSYCDYPCQQAHWPEHMKSCTQSATAPQQEADAEVNTETLNKSSQGSSSSTQSAPSETASASKEKETSAEKSKESGSTLDLSGSRETPSSILLGSNQGSDHSRSNKSSWSSSDEKRGSTRSDHNTSTSTKSLLPKESRLDTFWD

SEQ ID NO: 41954 - protein, 1115 aa, Homo sapiens
MDISTRSKDPGSAERTAQKRKFPSPPHSSNGHSPQDTSTSPIKKKKKPGLLNSNNKEQDGRNDFYCWVCHREGQVLCCELCPRVYHAKCLRLTSEPEGDWFCPECEKITVAECIETQSKAMTMLTIEQLSYLLKFAIQKMKQPGTDAFQKPVPLEQHPDYAEYIFHPMDLCTLEKNAKKKMYGCTEAFLADAKWILHNCIIYNGGNHKLTQIAKVVIKICEHEMNEIEVCPECYLAACQKRDNWFCEPCSNPHPLVWAKLKGFPFWPAKALRDKDGQVDARFFGQHDRAWVPINNCYLMSKEIPFSVKKTKSIFNSAMQEMEVYVENIRRKFGVFNYSPFRTPYTPNSQYQMLLDPTNPSAGTAKIDKQEKVKLNFDMTASPKILMSKPVLSGGTGRRISLSDMPRSPMSTNSSVHTGSDVEQDAEKKATSSHFSASEESMDFLDKSTASPASTKTGQAGSLSGSPKPFSPQLSAPITTKTDKTSTTGSILNLNLDRSKAEMDLKELSESVQQQSTPVPLISPKRQIRSRFQLNLDKTIESCKAQLGINEISEDVYTAVEHSDSEDSEKSDSSDSEYISDDEQKSKNEPEDTEDKEGCQMDKEPSAVKKKPKPTNPVEIKEELKSTSPASEKADPGAVKDKASPEPEKDFSEKAKPSPHPIKDKLKGKDETDSPTVHLGLDSDSESELVIDLGEDHSGREGRKNKKEPKEPSPKQDVVGKTPPSTTVGSHSPPETPVLTRSSAQTSAAGATATTSTSSTVTVTAPAPAATGSPVKKQRPLLPKETAPAVQRVVWNSSTVQQKEITQSPSTSTITLVTSTQSSPLVTSSGSMSTLVSSVNADLPIATASADVAADIAKYTSKMMDAIKGTMTEIYNDLSKNTTGSTIAEIRRLRIEIEKLQWLHQQELSEMKHNLELTMAEMRQSLEQERDRLIAEVKKQLELEKQQAVDETKKKQWCANCKKEAIFYCCWNTSYCDYPCQQAHWPEHMKSCTQSATAPQQEADAEVNTETLNKSSQGSSSSTQSAPSETASASKEKETSAEKSKESGSTLDLSGSRETPSSILLGSNQGSDHSRSNKSSWSSSDEKRGSTRSDHNTSTSTKSLLPKESRLDTFWD

SEQ ID NO: 41955 - protein, 1161 aa, Homo sapiens
MHPQSLAEEEIKTEQEVVEGMDISTRSKDPGSAERTAQKRKFPSPPHSSNGHSPQDTSTSPIKKKKKPGLLNSNNKEQSELRHGPFYYMKQPLTTDPVDVVPQDGRNDFYCWVCHREGQVLCCELCPRVYHAKCLRLTSEPEGDWFCPECEKITVAECIETQSKAMTMLTIEQLSYLLKFAIQKMKQPGTDAFQKPVPLEQHPDYAEYIFHPMDLCTLEKNAKKKMYGCTEAFLADAKWILHNCIIYNGGNHKLTQIAKVVIKICEHEMNEIEVCPECYLAACQKRDNWFCEPCSNPHPLVWAKLKGFPFWPAKALRDKDGQVDARFFGQHDRAWVPINNCYLMSKEIPFSVKKTKSIFNSAMQEMEVYVENIRRKFGVFNYSPFRTPYTPNSQYQMLLDPTNPSAGTAKIDKQEKVKLNFDMTASPKILMSKPVLSGGTGRRISLSDMPRSPMSTNSSVHTGSDVEQDAEKKATSSHFSASEESMDFLDKSTASPASTKTGQAGSLSGSPKPFSPQLSAPITTKTDKTSTTGSILNLNLDRSKAEMDLKELSESVQQQSTPVPLISPKRQIRSRFQLNLDKTIESCKAQLGINEISEDVYTAVEHSDSEDSEKSDSSDSEYISDDEQKSKNEPEDTEDKEGCQMDKEPSAVKKKPKPTNPVEIKEELKSTSPASEKADPGAVKDKASPEPEKDFSEKAKPSPHPIKDKLKGKDETDSPTVHLGLDSDSESELVIDLGEDHSGREGRKNKKEPKEPSPKQDVVGKTPPSTTVGSHSPPETPVLTRSSAQTSAAGATATTSTSSTVTVTAPAPAATGSPVKKQRPLLPKETAPAVQRVVWNSSTVQQKEITQSPSTSTITLVTSTQSSPLVTSSGSMSTLVSSVNADLPIATASADVAADIAKYTSKIRRLRIEIEKLQWLHQQELSEMKHNLELTMAEMRQSLEQERDRLIAEVKKQLELEKQQAVDETKKKQWCANCKKEAIFYCCWNTSYCDYPCQQAHWPEHMKSCTQSATAPQQEADAEVNTETLNKSSQGSSSSTQSAPSETASASKEKETSAEKSKESGSTLDLSGSRETPSSILLGSNQGSVSKRCDKQPAYAPTTTDHQPHPNYPAQKYHSRSNKSSWSSSDEKRGSTRSDHNTSTSTKSLLPKESRLDTFWD

SEQ ID NO: 41956 - protein, 1105 aa, Homo sapiens
MDISTRSKDPGSAERTAQKRKFPSPPHSSNGHSPQDTSTSPIKKKKKPGLLNSNNKEQDGRNDFYCWVCHREGQVLCCELCPRVYHAKCLRLTSEPEGDWFCPECETDAFQKPVPLEQHPDYAEYIFHPMDLCTLEKNAKKKMYGCTEAFLADAKWILHNCIIYNGGNHKLTQIAKVVIKICEHEMNEIEVCPECYLAACQKRDNWFCEPCSNPHPLVWAKLKGFPFWPAKALRDKDGQVDARFFGQHDRAWVPINNCYLMSKEIPFSVKKTKSIFNSAMQEMEVYVENIRRKFGVFNYSPFRTPYTPNSQYQMLLDPTNPSAGTAKIDKQEKVKLNFDMTASPKILMSKPVLSGGTGRRISLSDMPRSPMSTNSSVHTGSDVEQDAEKKATSSHFSASEESMDFLDKSTASPASTKTGQAGSLSGSPKPFSPQLSAPITTKTDKTSTTGSILNLNLDRSKAEMDLKELSESVQQQSTPVPLISPKRQIRSRFQLNLDKTIESCKAQLGINEISEDVYTAVEHSDSEDSEKSDSSDSEYISDDEQKSKNEPEDTEDKEGCQMDKEPSAVKKKPKPTNPVEIKEELKSTSPASEKADPGAVKDKASPEPEKDFSEKAKPSPHPIKDKLKGKDETDSPTVHLGLDSDSESELVIDLGEDHSGREGRKNKKEPKEPSPKQDVVGKTPPSTTVGSHSPPETPVLTRSSAQTSAAGATATTSTSSTVTVTAPAPAATGSPVKKQRPLLPKETAPAVQRVVWNSSTVQQKEITQSPSTSTITLVTSTQSSPLVTSSGSMSTLVSSVNADLPIATASADVAADIAKYTSKMMDAIKGTMTEIYNDLSKNTTGSTIAEIRRLRIEIEKLQWLHQQELSEMKHNLELTMAEMRQSLEQERDRLIAEVKKQLELEKQQAVDETKKKQWCANCKKEAIFYCCWNTSYCDYPCQQAHWPEHMKSCTQSATAPQQEADAEVNTETLNKSSQGSSSSTQSAPSETASASKEKETSAEKSKESGSTLDLSGSRETPSSILLGSNQGSVSKRCDKQPAYAPTTTDHQPHPNYPAQKYHSRSNKSSWSSSDEKRGSTRSDHNTSTSTKSLLPKESRLDTFWD

SEQ ID NO: 41957 - protein, 1070 aa, Homo sapiens
MCFSFIMPPAMADILDIWAVDSQIASDGSIPVDFLLPTGIYIQLEVPREATISYIKQMLWKQVHNYPMFNLLMDIDSYMFACVNQTAVYEELEDETRRLCDVRPFLPVLKLVTRSCDPGEKLDSKIGVLIGKGLHEFDSLKDPEVNEFRRKMRKFSEEKILSLVGLSWMDWLKQTYPPEHEPSIPENLEDKLYGGKLIVAVHFENCQDVFSFQVSPNMNPIKVNELAIQKRLTIHGKEDEVSPYDYVLQVSGRVEYVFGDHPLIQFQYIRNCVMNRALPHFILVECCKIKKMYEQEMIAIEAAINRNSSNLPLPLPPKKTRIISHVWENNNPFQIVLVKGNKLNTEETVKVHVRAGLFHGTELLCKTIVSSEVSGKNDHIWNEPLEFDINICDLPRMARLCFAVYAVLDKVKTKKSTKTINPSKYQTIRKAGKVHYPVAWVNTMVFDFKGQLRTGDIILHSWSSFPDELEEMLNPMGTVQTNPYTENATALHVKFPENKKQPYYYPPFDKIIEKAAEIASSDSANVSSRGGKKFLPVLKEILDRDPLSQLCENEMDLIWTLRQDCREIFPQSLPKLLLSIKWNKLEDVAQLQALLQIWPKLPPREALELLDFNYPDQYVREYAVGCLRQMSDEELSQYLLQLVQVLKYEPFLDCALSRFLLERALGNRRIGQFLFWHLRSEVHIPAVSVQFGVILEAYCRGSVGHMKVLSKQVEALNKLKTLNSLIKLNAVKLNRAKGKEAMHTCLKQSAYREALSDLQSPLNPCVILSELYVEKCKYMDSKMKPLWLVYNNKVFGEDSVGVIFKNGDDLRQDMLTLQMLRLMDLLWKEAGLDLRMLPYGCLATGDRSGLIEVVSTSETIADIQLNSSNVAAAAAFNKDALLNWLKEYNSGDDLDRAIEEFTLSCAGYCVASYVLGIGDRHSDNIMVKKTGQLFHIDFGHILGNFKSKFGIKRERVPFILTYDFIHVIQQGKTGNTEKFGRFRQCCEDAYLILRRHGNLFITLFALMLTAGLPELTSVKDIQYLKDSLALGKSEEEALKQFKQKFDEALRESWTTKVNWMAHTVRKDYRS

SEQ ID NO: 41958 - protein, 271 aa, Homo sapiens
MASKDAQNQRRGLPGFLPGAPDPDQSLPASSNPGNQAWQLSLPLPSSFLPTVSLPPGLEYLSQLDLIIIHQQVELLGMILGTETSNKYEIKNSLGQRIYFAVEESICFNRTFCSTLRSCTLRITDNSGREVITVNRPLRCNSCWCPCYLQELEIQAPPGTIVGYVTQKWDPFLPKFTIQNANKEDILKIVGPCVTCGCFGDVDFEVKTINEKLTIGKISKYWSGFVNDVFTNADNFGIHVPADLDVTVKAAMIGACFLFDFMFFEHSLAGL

SEQ ID NO: 41959 - protein, 259 aa, Homo sapiens
MASKDAQNQRRGLPGFLPGAPDPDQSLPASSNPGNQAWQLSLPLPSSFLPTLDLIIIHQQVELLGMILGTETSNKYEIKNSLGQRIYFAVEESICFNRTFCSTLRSCTLRITDNSGREVITVNRPLRCNSCWCPCYLQELEIQAPPGTIVGYVTQKWDPFLPKFTIQNANKEDILKIVGPCVTCGCFGDVDFEVKTINEKLTIGKISKYWSGFVNDVFTNADNFGIHVPADLDVTVKAAMIGACFLFDFMFFEHSLAGL

SEQ ID NO: 41960 - protein, 1894 aa, Homo sapiens
MKAMPWNWTCLLSHLLMVGMGSSTLLTRQPAPLSQKQRSFVTFRGEPAEGFNHLVVDERTGHIYLGAVNRIYKLSSDLKVLVTHETGPDEDNPKCYPPRIVQTCNEPLTTTNNVNKMLLIDYKENRLIACGSLYQGICKLLRLEDLFKLGEPYHKKEHYLSGVNESGSVFGVIVSYSNLDDKLFIATAVDGKPEYFPTISSRKLTKNSEADGMFAYVFHDEFVASMIKIPSDTFTIIPDFDIYYVYGFSSGNFVYFLTLQPEMVSPPGSTTKEQVYTSKLVRLCKEDTAFNSYVEVPIGCERSGVEYRLLQAAYLSKAGAVLGRTLGVHPDDDLLFTVFSKGQKRKMKSLDESALCIFILKQINDRIKERLQSCYRGEGTLDLAWLKVKDIPCSSALLTIDDNFCGLDMNAPLGVSDMVRGIPVFTEDRDRMTSVIAYVYKNHSLAFVGTKSGKLKKIRVDGPRGNALQYETVQVVDPGPVLRDMAFSKDHEQLYIMSERQLTRVPVESCGQYQSCGECLGSGDPHCGWCVLHNTCTRKERCERSKEPRRFASEMKQCVRLTVHPNNISVSQYNVLLVLETYNVPELSAGVNCTFEDLSEMDGLVVGNQIQCYSPAAKEVPRIITENGDHHVVQLQLKSKETGMTFASTSFVFYNCSVHNSCLSCVESPYRCHWCKYRHVCTHDPKTCSFQEGRVKLPEDCPQLLRVDKILVPVEVIKPITLKAKNLPQPQSGQRGYECILNIQGSEQRVPALRFNSSSVQCQNTSYSYEGMEINNLPVELTVVWNGHFNIDNPAQNKVHLYKCGAMRESCGLCLKADPDFACGWCQGPGQCTLRQHCPAQESQWLELSGAKSKCTNPRITEIIPVTGPREGGTKVTIRGENLGLEFRDIASHVKVAGVECSPLVDGYIPAEQIVCEMGEAKPSQHAGFVEICVAVCRPEFMARSSQLYYFMTLTLSDLKPSRGPMSGGTQVTITGTNLNAGSNVVVMFGKQPCLFHRRSPSYIVCNTTSSDEVLEMKVSVQVDRAKIHQDLVFQYVEDPTIVRIEPEWSIVSGNTPIAVWGTHLDLIQNPQIRAKHGGKEHINICEVLNATEMTCQAPALALGPDHQSDLTERPEEFGFILDNVQSLLILNKTNFTYYPNPVFEAFGPSGILELKPGTPIILKGKNLIPPVAGGNVKLNYTVLVGEKPCTVTVSDVQLLCESPNLIGRHKVMARVGGMEYSPGMVYIAPDSPLSLPAIVSIAVAGGLLIIFIVAVLIAYKRKSRESDLTLKRLQMQMDNLESRVALECKEAFAELQTDIHELTSDLDGAGIPFLDYRTYTMRVLFPGIEDHPVLRDLEVPGYRQERVEKGLKLFAQLINNKVFLLSFIRTLESQRSFSMRDRGNVASLIMTVLQSKLEYATDVLKQLLADLIDKNLESKNHPKLLLRRTESVAEKMLTNWFTFLLYKFLKECAGEPLFSLFCAIKQQMEKGPIDAITGEARYSLSEDKLIRQQIDYKTLVLSCVSPDNANSPEVPVKILNCDTITQVKEKILDAIFKNVPCSHRPKAADMDLEWRQGSGARMILQDEDITTKIENDWKRLNTLAHYQVPDGSVVALVSKQVTAYNAVNNSTVSRTSASKYENMIRYTGSPDSLRSRTPMITPDLESGVKMWHLVKNHEHGDQKEGDRGSKMVSEIYLTRLLATKGTLQKFVDDLFETIFSTAHRGSALPLAIKYMFDFLDEQADKHGIHDPHVRHTWKSNCLPLRFWVNMIKNPQFVFDIHKNSITDACLSVVAQTFMDSCSTSEHRLGKDSPSNKLLYAKDIPSYKNWVERYYSDIGKMPAISDQDMNAYLAEQSRMHMNEFNTMSALSEIFSYVGKYSEEILGPLDHDDQCGKQKLAYKLEQVITLMSLDS

SEQ ID NO: 41961 - protein, 492 aa, Homo sapiens
MKAMPWNWTCLLSHLLMVGMGSSTLLTRQPAPLSQKQRSFVTFRGEPAEGFNHLVVDERTGHIYLGAVNRIYKLSSDLKVLVTHETGPDEDNPKCYPPRIVQTCNEPLTTTNNVNKMLLIDYKENRLIACGSLYQGICKLLRLEDLFKLGEPYHKKEHYLSGVNESGSVFGVIVSYSNLDDKLFIATAVDGKPEYFPTISSRKLTKNSEADGMFAYVFHDEFVASMIKIPSDTFTIIPDFDIYYVYGFSSGNFVYFLTLQPEMVSPPGSTTKEQVYTSKLVRLCKEDTAFNSYVEVPIGCERSGVEYRLLQAAYLSKAGAVLGRTLGVHPDDDLLFTVFSKGQKRKMKSLDESALCIFILKQINDRIKERLQSCYRGEGTLDLAWLKVKDIPCSSALLTIDDNFCGLDMNAPLGVSDMVRGIPVFTEDRDRMTSVIAYVYKNHSLAFVGTKSGKLKKMPGTSLCPTLELQTGPRSHRATVTLELLFSSCSSN

SEQ ID NO: 41962 - protein, 522 aa, Homo sapiens
MKAMPWNWTCLLSHLLMVGMGSSTLLTRQPAPLSQKQRSFVTFRGEPAEGFNHLVVDERTGHIYLGAVNRIYKLSSDLKVLVTHETGPDEDNPKCYPPRIVQTCNEPLTTTNNVNKMLLIDYKENRLIACGSLYQGICKLLRLEDLFKLGEPYHKKEHYLSGVNESGSVFGVIVSYSNLDDKLFIATAVDGKPEYFPTISSRKLTKNSEADGMFAYVFHDEFVASMIKIPSDTFTIIPDFDIYYVYGFSSGNFVYFLTLQPEMVSPPGSTTKEQVYTSKLVRLCKEDTAFNSYVEVPIGCERSGVEYRLLQAAYLSKAGAVLGRTLGVHPDDDLLFTVFSKGQKRKMKSLDESALCIFILKQINDRIKERLQSCYRGEGTLDLAWLKVKDIPCSSALLTIDDNFCGLDMNAPLGVSDMVRGIPVFTEDRDRMTSVIAYVYKNHSLAFVGTKSGKLKKSFGTGPQGGITQEWIGVEGDPPGANIASQEQMLCVYLQCSSHKAISDQRVQPLLCCFLNVPGNSS

SEQ ID NO: 41963 - protein, 344 aa, Homo sapiens
MDLEWRQGSGARMILQDEDITTKIENDWKRLNTLAHYQVPDGSVVALVSKQVTAYNAVNNSTVSRTSASKYENMIRYTGSPDSLRSRTPMITPDLESGVKMWHLVKNHEHGDQKEGDRGSKMVSEIYLTRLLATKGTLQKFVDDLFETIFSTAHRGSALPLAIKYMFDFLDEQADKHGIHDPHVRHTWKSNCLPLRFWVNMIKNPQFVFDIHKNSITDACLSVVAQTFMDSCSTSEHRLGKDSPSNKLLYAKDIPSYKNWVERYYSDIGKMPAISDQDMNAYLAEQSRMHMNEFNTMSALSEIFSYVGKYSEEILGPLDHDDQCGKQKLAYKLEQVITLMSLDS

SEQ ID NO: 41964 - protein, 1317 aa, Homo sapiens
MEEEKDDSPQLTGIAVGALLALALVGVLILFMFRRLRQFRQAQPTPQYRFRKRDKVMFYGRKIMRKVTTLPNTLVENTALPRQRARKRTKVLSLAKRILRFKKEYPALQPKEPPPSLLEADLTEFDVKNSHLPSEVLYMLKNVRVLGHFEKPLFLELCKHIVFVQLQEGEHVFQPREPDPSICVVQDGRLEVCIQDTDGTEVVVKEVLAGDSVHSLLSILDIITGHAAPYKTVSVRAAIPSTILRLPAAAFHGVFEKYPETLVRVVQIIMVRLQRVTFLALHNYLGLTTELFNAESQAIPLVSVASVAAGKAKKQVFYGEEERLKKPPRLQESCDSDHGGGRPAAAGPLLKRSHSVPAPSIRKQILEELEKPGAGDPDPSAPQGGPGSATSDLGMACDRARVFLHSDEHPGSSVASKSRKSVMVAEIPSTVSQHSESHTDETLASRKSDAIFRAAKKDLLTLMKLEDSSLLDGRVALLHVPAGTVVSRQGDQDASILFVVSGLLHVYQRKIGSQEDTCLFLTRPGEMVGQLAVLTGEPLIFTVKANRDCSFLSISKAHFYEIMRKQPTVVLGVAHTVVKRMSSFVRQIDFALDWVEVEAGRAIYRQGDKSDCTYIMLSGRLRSVIRKDDGKKRLAGEYGRGDLVGVVETLTHQARATTVHAVRDSELAKLPAGALTSIKRRYPQVVTRLIHLLGEKILGSLQQGPVTGHQLGLPTEGSKWDLGNPAVNLSTVAVMPVSEEVPLTAFALELEHALSAIGPTLLLTSDNIKRRLGSAALDSVHEYRLSSWLGQQEDTHRIVLYQADGTLTPWTQRCVRQADCILIVGLGDQEPTVGELERMLESTAVRAQKQLILLHREEGPAPARTVEWLNMRSWCSGHLHLCCPRRVFSRRSLPKLVEMYKHVFQRPPDRHSDFSRLARVLTGNAIALVLGGGGARGCAQVGVLKALAECGIPVDMVGGTSIGAFVGALYSEERNYSQMRIRAKQWAEGMTSLMKAALDLTYPITSMFSGAGFNSSIFSVFKDQQIEDLWIPYFAITTDITASAMRVHTDGSLWWYVRASMSLSGYMPPLCDPKDGHLLMDGGYINNLPADVARSMGAKVVIAIDVGSRDETDLTNYGDALSGWWLLWKRWNPLATKVKVLNMAEIQTRLAYVCCVRQLEVVKSSDYCEYLRPPIDSYSTLDFGKFNEICEVGYQHGRTVFDIWGRSGVLEKMLRDQQGPSKKPASAVLTCPNASFTDLAEIVSRIEPAKPAMVDDESDYQTEYEEELLDVPRDAYADFQSTSAQQGSDLEDESSLRHRHPSLAFPKLSEGSSDQDG

SEQ ID NO: 41965 - protein, 458 aa, Homo sapiens
MEEEKDDSPQADFCLGTALHSWGLWFTEEGSPSTMLTGIAVGALLALALVGVLILFMFRRLRQFRQAQPTPQYRFRKRDKVMFYGRKIMRKVTTLPNTLVENTALPRQRARKRTKVLSLAKRILRFKKEYPALQPKEPPPSLLEADLTEFDVKNSHLPSEVLYMLKNVRVLGHFEKPLFLELCKHIVFVQLQEGEHVFQPREPDPSICVVQDGRLEVCIQDTDGTEVVVKEVLAGDSVHSLLSILDIITGHAAPYKTVSVRAAIPSTILRLPAAAFHGVFEKYPETLVRVVQIIMVRLQRVTFLALHNYLGLTTELFNAESQAIPLVSVASVAAGKAKKQVFYGEEERLKKPPRLQESCDSDHGGGRPAAAGPLLKRSHSVPAPSIRKQILEELEKPGAGDPDPSAPQARVLCLLPQCLGGLPPTDTSVYSSASSDCCGCSMPVLCIMGHKPHVTVDT

SEQ ID NO: 41966 - protein, 1254 aa, Homo sapiens
MEEEKDDSPQLTGIAVGALLALALVGVLILFMFRRLRQFRQAQPTPQYRFRKRDKVMFYGRKIMRKVTTLPNTLVENTALPRQRARKRTKVLSLAKRILRFKKEYPALQPKEPPPSLLEADLTEFDVKNSHLPSEVLYMLKNVRVLGHFEKPLFLELCKHIVFVQLQEGEHVFQPREPDPSICVVQDGRLEVCIQDTDGTEVVVKEVLAGDSVHSLLSILDIITGHAAPYKTVSVRAAIPSTILRLPAAAFHGVFEKYPETLVRVVQIIMVRLQRVTFLALHNYLGLTTELFNAESQAIPLVSVASVAAGKAKKQVFYGEEERLKKPPRLQESCDSDHGGGRPAAAGPLLKRSHSVPAPSIRKQILEELEKPGAGDPDPSAPQGGPGSATSDLGMACDRARVFLHSDEHPGSSVASKSRKSVMVAEIPSTVSQHSESHTDETLASRKSDAIFRAAKKDLLTLMKLEDSSLLDGRVALLHVPAGTVVSRQGDQDASILFVVSGLLHVYQRKIGSQEDTCLFLTRPGEMVGQLAVLTGEPLIFTVKANRDCSFLSISKAHFYEIMRKQPTVVLGVAHTVVKRMSSFVRQIDFALDWVEVEAGRAIYRQGDKSDCTYIMLSGRLRSVIRKDDGKKRLAGEYGRGDLVGVVETLTHQARATTVHAVRDSELAKLPAGALTSIKRRYPQVVTRLIHLLGEKILGSLQQGPVTGHQLGLPTEGSKWDLGNPAVNLSTVAVMPVSEEVPLTAFALELEHALSAIGPTLLLTSDNIKRRLGSAALDSVHEYRLSSWLGQQEDTHRIVLYQADGTLTPWTQRCVRQADCILIVGLGDQEPTVGELERMLESTAVRAQKQLILLHREEGPAPARTVEWLNMRSWCSGHLHLCCPRRVFSRRSLPKLVEMYKHVFQRPPDRHSDFSRLARVLTGNAIALVLGGGGARGCAQVGVLKALAECGIPVDMVGGTSIGAFVGALYSEERNYSQMRIRAKQWAEGMTSLMKAALDLTYPITSMFSGAGFNSSIFSVFKDQQIEDLWIPYFAITTDITASAMRVHTDGSLWWYVRASMSLSGYMPPLCDPKDGHLLMDGGYINNLPADVARSMGAKVVIAIDVGSRDETDLTNYGDALSGWWLLWKRWNPLATKVKVLNMAEIQTRLAYVCCVRQLEVVKSSDYCEYLRPPIDSYSTLDFGKFNEICVPDESDYQTEYEEELLDVPRDAYADFQSTSAQQGSDLEDESSLRHRHPSLAFPKLSEGSSDQDG

SEQ ID NO: 41967 - protein, 1268 aa, Homo sapiens
MEEEKDDSPQLTGIAVGALLALALVGVLILFMFRRLRQFRQAQPTPQYRFRKRDKVMFYGRKIMRKVTTLPNTLVENTALPRQRARKRTKVLSLAKRILRFKKEYPALQPKEPPPSLLEADLTEFDVKNSHLPSEVLYMLKNVRVLGHFEKPLFLELCKHIVFVQLQEGEHVFQPREPDPSICVVQDGRLEVCIQDTDGTEVVVKEVLAGDSVHSLLSILDIITGHAAPYKTVSVRAAIPSTILRLPAAAFHGVFEKYPETLVRVVQIIMVRLQRVTFLALHNYLGLTTELFNAESQAIPLVSVASVAAGKAKKQVFYGEEERLKKPPRLQESCDSDHGGGRPAAAGPLLKRSHSVPAPSIRKQILEELEKPGAGDPDPSAPQGGPGSATSDLGMACDRARVFLHSDEHPGSSVASKSRKSVMVAEIPSTVSQHSESHTDETLASRKSDAIFRAAKKDLLTLMKLEDSSLLDGRVALLHVPAGTVVSRQGDQDASILFVVSGLLHVYQRKIGSQEDTCLFLTRPGEMVGQLAVLTGEPLIFTVKANRDCSFLSISKAHFYEIMRKQPTVVLGVAHTVVKRMSSFVRQIDFALDWVEVEAGRAIYRQGDKSDCTYIMLSGRLRSVIRKDDGKKRLAGEYGRGDLVGVVETLTHQARATTVHAVRDSELAKLPAGALTSIKRRYPQVVTRLIHLLGEKILGSLQQGPVTGHQLGLPTEGSKWDLGNPAVNLSTVAVMPVSEEVPLTAFALELEHALSAIGPTLLLTSDNIKRRLGSAALDSVHEYRLSSWLGQQEDTHRIVLYQADGTLTPWTQRCVRQADCILIVGLGDQEPTVGELERMLESTAVRAQKQLILLHREEGPAPARTVEWLNMRSWCSGHLHLCCPRRVFSRRSLPKLVEMYKHVFQRPPDRHSDFSRLARVLTGNAIALVLGGGGARGCAQVGVLKALAECGIPVDMVGGTSIGAFVGALYSEERNYSQMRIRAKQWAEGMTSLMKAALDLTYPITSMFSGAGFNSSIFSVFKDQQIEDLWIPYFAITTDITASAMRVHTDGSLWWYVRASMSLSGYMPPLCDPKDGHLLMDGGYINNLPADVARSMGAKVVIAIDVGSRDETDLTNYGDALSGWWLLWKRWNPLATKVKVLNMAEIQTRLAYVCCVRQLEVVKSSDYCEYLRPPIDSYSTLDFGKFNEICEVGYQHGRTVFDIWGRSGVLEKMLRDQQGPSKKPASAVLTCPNASFTDLAEIVSRIEPAKPAMVDGEWRRKTKPWRRA

SEQ ID NO: 41968 - protein, 1342 aa, Homo sapiens
MEEEKDDSPQADFCLGTALHSWGLWFTEEGSPSTMLTGIAVGALLALALVGVLILFMFRRLRQFRQAQPTPQYRFRKRDKVMFYGRKIMRKVTTLPNTLVENTALPRQRARKRTKVLSLAKRILRFKKEYPALQPKEPPPSLLEADLTEFDVKNSHLPSEVLYMLKNVRVLGHFEKPLFLELCKHIVFVQLQEGEHVFQPREPDPSICVVQDGRLEVCIQDTDGTEVVVKEVLAGDSVHSLLSILDIITGHAAPYKTVSVRAAIPSTILRLPAAAFHGVFEKYPETLVRVVQIIMVRLQRVTFLALHNYLGLTTELFNAESQAIPLVSVASVAAGKAKKQVFYGEEERLKKPPRLQESCDSDHGGGRPAAAGPLLKRSHSVPAPSIRKQILEELEKPGAGDPDPSAPQGGPGSATSDLGMACDRARVFLHSDEHPGSSVASKSRKSVMVAEIPSTVSQHSESHTDETLASRKSDAIFRAAKKDLLTLMKLEDSSLLDGRVALLHVPAGTVVSRQGDQDASILFVVSGLLHVYQRKIGSQEDTCLFLTRPGEMVGQLAVLTGEPLIFTVKANRDCSFLSISKAHFYEIMRKQPTVVLGVAHTVVKRMSSFVRQIDFALDWVEVEAGRAIYRQGDKSDCTYIMLSGRLRSVIRKDDGKKRLAGEYGRGDLVGVVETLTHQARATTVHAVRDSELAKLPAGALTSIKRRYPQVVTRLIHLLGEKILGSLQQGPVTGHQLGLPTEGSKWDLGNPAVNLSTVAVMPVSEEVPLTAFALELEHALSAIGPTLLLTSDNIKRRLGSAALDSVHEYRLSSWLGQQEDTHRIVLYQADGTLTPWTQRCVRQADCILIVGLGDQEPTVGELERMLESTAVRAQKQLILLHREEGPAPARTVEWLNMRSWCSGHLHLCCPRRVFSRRSLPKLVEMYKHVFQRPPDRHSDFSRLARVLTGNAIALVLGGGGARGCAQVGVLKALAECGIPVDMVGGTSIGAFVGALYSEERNYSQMRIRAKQWAEGMTSLMKAALDLTYPITSMFSGAGFNSSIFSVFKDQQIEDLWIPYFAITTDITASAMRVHTDGSLWWYVRASMSLSGYMPPLCDPKDGHLLMDGGYINNLPADVARSMGAKVVIAIDVGSRDETDLTNYGDALSGWWLLWKRWNPLATKVKVLNMAEIQTRLAYVCCVRQLEVVKSSDYCEYLRPPIDSYSTLDFGKFNEICEVGYQHGRTVFDIWGRSGVLEKMLRDQQGPSKKPASAVLTCPNASFTDLAEIVSRIEPAKPAMVDDESDYQTEYEEELLDVPRDAYADFQSTSAQQGSDLEDESSLRHRHPSLAFPKLSEGSSDQDG

SEQ ID NO: 41969 - protein, 425 aa, Homo sapiens
MPYVDRQNRICGFLDIEEHENSGKFLRRYFILDTQANCLLWYMDNPQNLAMGAGAVGALQLTYISKVSIATPKQKPKTPFCFVINALSQRYFLQANDQKDMKDWVEALNQASKITVPKGGGLPMTTEVLKSLAAPPALEKKPQVAYKTEIIGGVVVHTPISQNGGDGQEGSEPGSHTILRRSQSYIPTSGCRASTGPPLIKSGYCVKQGNVRKSWKRRFFALDDFTICYFKCEQDREPLRTIFLKDVLKTHECLVKSGDLLMRDNLFEIITSSRTFYVQADSPEDMHSWIKEIGAAVQALKCHPRETSFSRSISLTRPGSSSLSSGPNSILCRGRPPLEEKKALCKAPSVASSWQPWTPVPQAGEKLLPPGDTSEDSLFTPRPGEGAPPGVLPSSRIRHRSEPQHPKEKPFMFNLDDENIRTSDV

SEQ ID NO: 41970 - protein, 846 aa, Homo sapiens
MKMADRSGKIIPGQVYIEVEYDYEYEAKDRKIVIKQGERYILVKKTNDDWWQVKPDENSKAFYVPAQYVKEVTRKALMPPVKQVAGLPNNSTKIMQSLHLQRSTENVNKLPELSSFGKPSSSVQGTGLIRDANQNFGPSYNQGQTVNLSLDLTHNNGKFNNDSHSPKVSSQNRTRSFGHFPGPEFLDVEKTSFSQEQSCDSAGEGSERIHQDSESGDELSSSSTEQIRATTPPNQGRPDSPVYANLQELKISQSALPPLPGSPAIQINGEWETHKDSSGRCYYYNRGTQERTWKPPRWTRDASISKGDFQNPGDQELLSSEENYYSTSYSQSDSQCGSPPRGWSEELDERGHTLYTSDYTNEKWLKHVDDQGRQYYYSADGSRSEWELPKYNASSQQQREIIKSRSLDRRLQEPIVLTKWRHSTIVLDTNDKESPTASKPCFPENESSPSSPKHQDTASSPKDQEKYGLLNVTKIAENGKKVRKNWLSSWAVLQGSSLLFTKTQGSSTSWFGSNQSKPEFTVDLKGATIEMASKDKSSKKNVFELKTRQGTELLIQSDNDTVINDWFKVLSSTINNQAVETDEGIEEEIPDSPGIEKHDKEKEQKDPKKLRSFKVSSIDSSEQKKTKKNLKKFLTRRPTLQAVREKGYIKDQVFGSNLANLCQRENGTVPKFVKLCIEHVEEHGLDIDGIYRVSGNLAVIQKLRFAVNHDEKLDLNDSKWEDIHVITGALKMFFRELPEPLFTFNHFNDFVNAIKQEPRQRVAAVKDLIRQLPKPNQDTMQILFRHLRRVIENGEKNRMTYQSIAIVFGPTLLKPEKETGNIAVHTVYQNQIVELILLELSSIFGR

SEQ ID NO: 41971 - protein, 816 aa, Homo sapiens
MKMADRSGKIIPGQVYIEVEYDYEYEAKDRKIVIKQGERYILVKKTNDDWWQVKPDENSKAFYVPAQYVKEVTRKALMPPVKQVAGLPNNSTKIMQSLHLQRSTENVNKLPELSSFGKPSSSVQGTGLIRDANQNFGPSYNQGQTVNLSLDLTHNNGKFNNDSHSPKVSSQNRTRSFGHFPGPEFLDVEKTSFSQEQSCDSAGEGSERIHQDSESGDELSSSSTEQIRATTPPNQGRPDSPVYANLQELKISQSALPPLPGSPAIQINGEWETHKDSSGRCYYYNRGTQERTWKPPRWTRDASISKGDFQNPGDQELLSSEENYYSTSYSQSDSQCGSPPRGWSEELDERGHTLYTSDYTNEKWLKHVDDQGRQYYYSADGSRSEWELPKYNASSQQQREIIKSRSLDRRLQEPIVLTKWRHSTIVLDTNDKDQEKYGLLNVTKIAENGKKVRKNWLSSWAVLQGSSLLFTKTQGSSTSWFGSNQSKPEFTVDLKGATIEMASKDKSSKKNVFELKTRQGTELLIQSDNDTVINDWFKVLSSTINNQAVETDEGIEEEIPDSPGIEKHDKEKEQKDPKKLRSFKVSSIDSSEQKKTKKNLKKFLTRRPTLQAVREKGYIKDQVFGSNLANLCQRENGTVPKFVKLCIEHVEEHGLDIDGIYRVSGNLAVIQKLRFAVNHDEKLDLNDSKWEDIHVITGALKMFFRELPEPLFTFNHFNDFVNAIKQEPRQRVAAVKDLIRQLPKPNQDTMQILFRHLRRVIENGEKNRMTYQSIAIVFGPTLLKPEKETGNIAVHTVYQNQIVELILLELSSIFGR

SEQ ID NO: 41972 - protein, 794 aa, Homo sapiens
MKMADRSGKIIPGQVYIEVEYDYEYEAKDRKIVIKQGERYILVKKTNDDWWQVKPDENSKAFYVPAQYVKEVTRKALMPPVKQVAGLPNNSTKIMQSLHLQRSTENVNKLPELSSFGKPSSSVQGTGLIRDANQNFGPSYNQGQTVNLSLDLTHNNGKFNNDSHSPKVSSQNRTRSFGHFPGPEFLDVEKTSFSQEQSCDSAGEGSERIHQDSESGDELSSSSTEQIRATTPPNQGRPDSPVYANLQELKISQSALPPLPGSPAIQINGEWETHKDSSGRCYYYNRGTQERTWKPPRWTRDASISKGDFQNPGDQEWLKHVDDQGRQYYYSADGSRSEWELPKYNASSQQQREIIKSRSLDRRLQEPIVLTKWRHSTIVLDTNDKESPTASKPCFPENESSPSSPKHQDTDQEKYGLLNVTKIAENGKKVRKNWLSSWAVLQGSSLLFTKTQGSSTSWFGSNQSKPEFTVDLKGATIEMASKDKSSKKNVFELKTRQGTELLIQSDNDTVINDWFKVLSSTINNQAVETDEGIEEEIPDSPGIEKHDKEKEQKDPKKLRSFKVSSIDSSEQKKTKKNLKKFLTRRPTLQAVREKGYIKDQVFGSNLANLCQRENGTVPKFVKLCIEHVEEHGLDIDGIYRVSGNLAVIQKLRFAVNHDEKLDLNDSKWEDIHVITGALKMFFRELPEPLFTFNHFNDFVNAIKQEPRQRVAAVKDLIRQLPKPNQDTMQILFRHLRRVIENGEKNRMTYQSIAIVFGPTLLKPEKETGNIAVHTVYQNQIVELILLELSSIFGR

SEQ ID NO: 41973 - protein, 841 aa, Homo sapiens
MKMADRSGKIIPGQVYIEVEYDYEYEAKDRKIVIKQGERYILVKKTNDDWWQVKPDENSKAFYVPAQYVKEVTRKALMPPVKQVAGLPNNSTKIMQSLHLQRSTENVNKLPELSSFGKPSSSVQGTGLIRDANQNFGPSYNQGQTVNLSLDLTHNNGKFNNDSHSPKVSSQNRTRSFGHFPGPEFLDVEKTSFSQEQSCDSAGEGSERIHQDSESGDELSSSSTEQIRATTPPNQGRPDSPVYANLQELKISQSALPPLPGSPAIQINGEWETHKDSSGRCYYYNRGTQERTWKPPRWTRDASISKGDFQNPGDQELLSSEENYYSTSYSQSDSQCGSPPRGWSEELDERGHTLYTSDYTNEKWLKHVDDQGRQYYYSADGSRSEWELPKYNASSQQQREIIKSRSLDRRLQEPIVLTKWRHSTIVLDTNDKESPTASKPCFPENESSPSSPKHQDTDQEKYGLLNVTKIAENGKKVRKNWLSSWAVLQGSSLLFTKTQGSSTSWFGSNQSKPEFTVDLKGATIEMASKDKSSKKNVFELKTRQGTELLIQSDNDTVINDWFKVLSSTINNQAVETDEGIEEEIPDSPGIEKHDKEKEQKDPKKLRSFKVSSIDSSEQKKTKKNLKKFLTRRPTLQAVREKGYIKDQVFGSNLANLCQRENGTVPKFVKLCIEHVEEHGLDIDGIYRVSGNLAVIQKLRFAVNHDEKLDLNDSKWEDIHVITGALKMFFRELPEPLFTFNHFNDFVNAIKQEPRQRVAAVKDLIRQLPKPNQDTMQILFRHLRRVIENGEKNRMTYQSIAIVFGPTLLKPEKETGNIAVHTVYQNQIVELILLELSSIFGR

SEQ ID NO: 41974 - protein, 108 aa, Homo sapiens
MKALCLLLLPVLGLLVSSKTLCSMEEAINERIQEVAGSLIFRAISSIGLECQSVTSRGDLATCPRGFAVTGCTCGSACGSWDVRAETTCHCQCAGMDWTGARCCRVQP

SEQ ID NO: 41975 - protein, 82 aa, Homo sapiens
MKALCLLLLPVLGLLVSSKTLCSMEEAINERIQEVAGSLSFAVTGCTCGSACGSWDVRAETTCHCQCAGMDWTGARCCRVQP

SEQ ID NO: 41976 - protein, 1925 aa, Homo sapiens
MAPRAAGGAPLSARAAAASPPPFQTPPRCPVPLLLLLLLGAARAGALEIQRRFPSPTPTNNFALDGAAGTVYLAAVNRLYQLSGANLSLEAEAAVGPVPDSPLCHAPQLPQASCEHPRRLTDNYNKILQLDPGQGLVVVCGSIYQGFCQLRRRGNISAVAVRFPPAAPPAEPVTVFPSMLNVAANHPNASTVGLVLPPAAGAGGSRLLVGATYTGYGSSFFPRNRSLEDHRFENTPEIAIRSLDTRGDLAKLFTFDLNPSDDNILKIKQGAKEQHKLGFVSAFLHPSDPPPGAQSYAYLALNSEARAGDKESQARSLLARICLPHGAGGDAKKLTESYIQLGLQCAGGAGRGDLYSRLVSVFPARERLFAVFERPQGSPAARAAPAALCAFRFADVRAAIRAARTACFVEPAPDVVAVLDSVVQGTGPACERKLNIQLQPEQLDCGAAHLQHPLSILQPLKATPVFRAPGLTSVAVASVNNYTAVFLGTVNGRLLKINLNESMQVVSRRVVTVAYGEPVHHVMQFDPADSGYLYLMTSHQMARVKVAACNVHSTCGDCVGAADAYCGWCALETRCTLQQDCTNSSQQHFWTSASEGPSRCPAMTVLPSEIDVRQEYPGMILQISGSLPSLSGMEMACDYGNNIRTVARVPGPAFGHQIAYCNLLPRDQFPPFPPNQDHVTVEMSVRVNGRNIVKANFTIYDCSRTAQVYPHTACTSCLSAQWPCFWCSQQHSCVSNQSRCEASPNPTSPQDCPRTLLSPLAPVPTGGSQNILVPLANTAFFQGAALECSFGLEEIFEAVWVNESVVRCDQVVLHTTRKSQVFPLSLQLKGRPARFLDSPEPMTVMVYNCAMGSPDCSQCLGREDLGHLCMWSDGCRLRGPLQPMAGTCPAPEIHAIEPLSGPLDGGTLLTIRGRNLGRRLSDVAHGVWIGGVACEPLPDRYTVSEEIVCVTGPAPGPLSGVVTVNASKEGKSRDRFSYVLPLVHSLEPTMGPKAGGTRITIHGNDLHVGSELQVLVNDTDPCTELMRTDTSIACTMPEGALPAPVPVCVRFERRGCVHGNLTFWYMQNPVITAISPRRSPVSGGRTITVAGERFHMVQNVSMAVHHIGREPTLCKVLNSTLITCPSPGALSNASAPVDFFINGRAYADEVAVAEELLDPEEAQRGSRFRLDYLPNPQFSTAKREKWIKHHPGEPLTLVIHKEQDSLGLQSHEYRVKIGQVSCDIQIVSDRIIHCSVNESLGAAVGQLPITIQVGNFNQTIATLQLGGSETAIIVSIVICSVLLLLSVVALFVFCTKSRRAERYWQKTLLQMEEMESQIREEIRKGFAELQTDMTDLTKELNRSQGIPFLEYKHFVTRTFFPKCSSLYEERYVLPSQTLNSQGSSQAQETHPLLGEWKIPESCRPNMEEGISLFSSLLNNKHFLIVFVHALEQQKDFAVRDRCSLASLLTIALHGKLEYYTSIMKELLVDLIDASAAKNPKLMLRRTESVVEKMLTNWMSICMYSCLRETVGEPFFLLLCAIKQQINKGSIDAITGKARYTLSEEWLLRENIEAKPRNLNVSFQGCGMDSLSVRAMDTDTLTQVKEKILEAFCKNVPYSQWPRAEDVDLEWFASSTQSYILRDLDDTSVVEDGRKKLNTLAHYKIPEGASLAMSLIDKKDNTLGRVKDLDTEKYFHLVLPTDELAEPKKSHRQSHRKKVLPEIYLTRLLSTKGTLQKFLDDLFKAILSIREDKPPLAVKYFFDFLEEQAEKRGISDPDTLHIWKTNSLPLRFWVNILKNPQFVFDIDKTDHIDACLSVIAQAFIDACSISDLQLGKDSPTNKLLYAKEIPEYRKIVQRYYKQIQDMTPLSEQEMNAHLAEESRKYQNEFNTNVAMAEIYKYAKRYRPQIMAALEANPTARRTQLQHKFEQVVALMEDNIYECYSEA

SEQ ID NO: 41977 - protein, 1785 aa, Homo sapiens
MAPRAAGGAPLSARAAAASPPPFQTPPRCPVPLLLLLLLGAARAGALEIQRRFPSPTPTNNFALDGAAGTVYLAAVNRLYQLSGANLSLEAEAAVGPVPDSPLCHAPQLPQASCEHPRRLTDNYNKILQLDPGQGLVVVCGSIYQGFCQLRRRGNISAVAVRFPPAAPPAEPVTVFPSMLNVAANHPNASTVGLVLPPAAGAGGSRLLVGATYTGYGSSFFPRNRSLEDHRFENTPEIAIRSLDTRGDLAKLFTFDLNPSDDNILKIKQGAKEQHKLGFVSAFLHPSDPPPGAQSYAYLALNSEARAGDKESQARSLLARICLPHGAGGDAKKLTESYIQLGLQCAGGAGRGDLYSRLVSVFPARERLFAVFERPQGSPAARAAPAALCAFRFADVRAAIRAARTACFVEPAPDVVAVLDSVVQGTGPACERKLNIQLQPEQLDCGAAHLQHPLSILQPLKATPVFRAPGLTSVAVASVNNYTAVFLGTVNGRLLKINLNESMQVVSRRVVTVAYGEPVHHVMQFDPADSGYLYLMTSHQMARVKVAACNVHSTCGDCVGAADAYCGWCALETRCTLQQDCTNSSQQHFWTSASEGPSRCPAMTVLPSEIDVRQEYPGMILQISGSLPSLSGMEMACDYGNNIRTVARVPGPAFGHQIAYCNLLPRDQFPPFPPNQDHVTVEMSVRVNGRNIVKANFTIYDCSRTAQVYPHTACTSCLSAQWPCFWCSQQHSCVSNQSRCEASPNPTSPQDCPRTLLSPLAPVPTGGSQNILVPLANTAFFQGAALECSFGLEEIFEAVWVNESVVRCDQVVLHTTRKSQVFPLSLQLKGRPARFLDSPEPMTVMVYNCAMGSPDCSQCLGREDLGHLCMWSDGCRLRGPLQPMAGTCPAPEIHAIEPLSGPLDGGTLLTIRGRNLGRRLSDVAHGVWIGGVACEPLPDRYTVSEEIVCVTGPAPGPLSGVVTVNASKEGKSRDRFSYVLPLVHSLEPTMGPKAGGTRITIHGNDLHVGSELQVLVNDTDPCTELMRTDTSIACTMPEGALPAPVPVCVRFERRGCVHGNLTFWYMQNPVITAISPRRSPVSGGRTITVAGERFHMVQNVSMAVHHIGREPTLCKVLNSTLITCPSPGALSNASAPVDFFINGRAYADEVAVAEELLDPEEAQRGSRFRLDYLPNPQFSTAKREKWIKHHPGEPLTLVIHKEQDSLGLQSHEYRVKIGQVSCDIQIVSDRIIHCSVNESLGAAVGQLPITIQVGNFNQTIATLQLGGSETAIIVSIVICSVLLLLSVVALFVFCTKSRRAERYWQKTLLQMEEMESQIREEIRKGFAELQTDMTDLTKELNRSQGIPFLEYKHFVTRTFFPKCSSLYEERYVLPSQTLNSQGSSQAQETHPLLGEWKIPESCRPNMEEGISLFSSLLNNKHFLIVFVHALEQQKDFAVRDRCSLASLLTIALHGKLEYYTSIMKELLVDLIDASAAKNPKLMLRRTESVVEKMLTNWMSICMYSCLRETVGEPFFLLLCAIKQQINKGSIDAITGKARYTLSEEWLLRENIEAKPRNLNVSFQGCGMDSLSVRAMDTDTLTQVKEKILEAFCKNVPYSQWPRAEDVDLEWFASSTQSYILRDLDDTSVVEDGRKKLNTLAHYKIPEGASLAMSLIDKKDNTLGRVKDLDTEKYFHLVLPTDELAEPKKSHRQSHRKKVLPEIYLTRLLSTKGTLQKFLDDLFKAILSIREDKPPLAVKYFFDFLEEQAEKRGISDPDTLHIWKTNRWRPSSPVLGEHPEEPPVCL

SEQ ID NO: 41978 - protein, 253 aa, Homo sapiens
MKHINLSFAACGFLGIYHLGAASALCRHGKKLVKDVKAFAGASAGSLVASVLLTAPEKIEECNQFTYKFAEEIRRQSFGAVTPGYDFMARLRSGMESILPPSAHELAQNRLHVSITNAKTRENHLVSTFSSREDLIKVLLASSFVPIYAGLKLVEYKGQKWVDGGLTNALPILPVGRTVTISPFSGRLDISPQDKGQLDLYVNIAKQDIMLSLANLVRLNQALFPPSKRKMESLYQCGFDDTVKFLLKENWFE

SEQ ID NO: 41979 - protein, 166 aa, Homo sapiens
MARLRSGMESILPPSAHELAQNRLHVSITNAKTRENHLVSTFSSREDLIKVLLASSFVPIYAGLKLVEYKGQKWVDGGLTNALPILPVGRTVTISPFSGRLDISPQDKGQLDLYVNIAKQDIMLSLANLVRLNQALFPPSKRKMESLYQCGFDDTVKFLLKENWFE

SEQ ID NO: 41980 - protein, 300 aa, Homo sapiens
MEGVLYKWTNYLTGWQPRWFVLDNGILSYYDSQDDVCKGSKGSIKMAVCEIKVHSADNTRMELIIPGEQHFYMKAVNAAERQRWLVALGSSKACLTDTRTKKEKEISETSESLKTKMSELRLYCDLLMQQVHTIQEFVHHDENHSSPSAENMNEASSLLSATCNTFITTLEECVKIANAKFKPEMFQLHHPDPLVSPVSPSPVQMMKRSVSHPGSCSSERSSHSIKEPVSTLHRLSQRRRRTYSDTDSCSDIPLEDPDRPVHCSKNTLNGDLASATIPEESRLMAKKQSESEDTLPSFSS

SEQ ID NO: 41981 - protein, 543 aa, Homo sapiens
MASGGGGGNTGAGGGPGMGLSLGLGLGLSLGMSEATSEAEEEAATAEAVGRLATTLWLRLRGWEAVLAAAQRLLVWEKPLHSLVTAAALNGLFWLLSSSSLRPFFLLSVSLLAYFLLDLWQPRFLPDVSASSPEEPHSDSEGAGSGARPHLLSVPELCRYLAESWLTFQIHLQELLQYKRQNPAQFCVRVCSGCAVLAVLGHYVPGIMISYIVLLSILLWPLVVYHELIQRMYTRLEPLLMQLDYSMKAEANALHHKHDKRKRQGKNAPPGGDEPLAETESESEAELAGFSPVVDVKKTALALAITDSELSDEEASILESGGFSVSRATTPQLTDVSEDLDQQSLPSEPEETLSRDLGEGEEGELAPPEDLLGRPQALSRQALDSEEEEEDVAAKETLLRLSSPLHFVNTHFNGAGSPPDGVKCSPGGPVETLSPETVSGGLTALPGTLSPPLCLVGSDPAPSPSILPPVPQDSPQPLPAPEEEEALTTEDFELLDQGELEQLNAELGLEPETPPKPPDAPPLGPDIHSLVQSDQEAQAVAEP

SEQ ID NO: 41982 - protein, 663 aa, Homo sapiens
MSWLSSSQGVVLTAYHPSGKDQTVGNSHAKAGEEATSSRRYGQYTMNQESTTIKVMEKPPFDRSISQDSLDELSMEDYWIELENIKKSSENSQEDQEVVVVKEPDEGELEEEWLKEAGLSNLFGESAGDPQESIVFLSTLTRTQAAAVQKRVETVSQTLRKKNKQYQIPDVRDIFAQQRESKETAPGGTESQSLRTNENKYQGRDDEASNLVGEEKLIPPEETPAPETDINLEVSFAEQALNQKESSKEKIQKSKGDDATLPSFRLPKDKTGTTRIGDLAPQDMKKVCHLALIELTALYDVLGIELKQQKAVKIKTKDSGLFCVPLTALLEQDQRKVPGMRIPLIFQKLISRIEERGLETEGLLRIPGAAIRIKNLCQELEAKFYEGTFNWESVKQHDAASLLKLFIRELPQPLLSVEYLKAFQAVQNLPTKKQQLQALNLLVILLPDANRDTLKALLEFLQRVIDNKEKNKMTVMNVAMVMAPNLFMCHALGLKSSEQREFVMAAGTANTMHLLIKYQKLLWTIPKFIVNQVRKQNTENHKKDKRAMKKLLKKMAYDREKYEKQDKSTNDADVPQGVIRVQAPHLSKVSMAIQLTEELKASDVLARFLSQESGVAQTLKKGEVFLYEIGGNIGERCLDDDTYMKDLYQLNPNAEWVIKSKPL

SEQ ID NO: 41983 - protein, 618 aa, Homo sapiens
MNQESTTIKVMEKPPFDRSISQDSLDELSMEDYWIELENIKKSSENSQEDQEVVVVKEPDEGELEEEWLKEAGLSNLFGESAGDPQESIVFLSTLTRTQAAAVQKRVETVSQTLRKKNKQYQIPDVRDIFAQQRESKETAPGGTESQSLRTNENKYQGRDDEASNLVGEEKLIPPEETPAPETDINLEVSFAEQALNQKESSKEKIQKSKGDDATLPSFRLPKDKTGTTRIGDLAPQDMKKVCHLALIELTALYDVLGIELKQQKAVKIKTKDSGLFCVPLTALLEQDQRKVPGMRIPLIFQKLISRIEERGLETEGLLRIPGAAIRIKNLCQELEAKFYEGTFNWESVKQHDAASLLKLFIRELPQPLLSVEYLKAFQAVQNLPTKKQQLQALNLLVILLPDANRDTLKALLEFLQRVIDNKEKNKMTVMNVAMVMAPNLFMCHALGLKSSEQREFVMAAGTANTMHLLIKYQKLLWTIPKFIVNQVRKQNTENHKKDKRAMKKLLKKMAYDREKYEKQDKSTNDADVPQGVIRVQAPHLSKVSMAIQLTEELKASDVLARFLSQESGVAQTLKKGEVFLYEIGGNIGERCLDDDTYMKDLYQLNPNAEWVIKSKPL

SEQ ID NO: 41984 - protein, 309 aa, Homo sapiens
MDDKAFTKELDQWVEQLNECKQLNENQVRTLCEKAKEILTKESNVQEVRCPVTVCGDVHGQFHDLMELFRIGGKSPDTNYLFMGDYVDRGYYSVETVTLLVALKVRYPERITILRGNHESRQITQVYGFYDECLRKYGNANVWKYFTDLFDYLPLTALVDGQIFCLHGGLSPSIDTLDHIRALDRLQEVPHEGPMCDLLWSDPDDRGGWGISPRGAGYTFGQDISETFNHANGLTLVSRAHQLVMEGYNWCHDRNVVTIFSAPNYCYRCGNQAAIMELDDTLKYSFLQFDPAPRRGEPHVTRRTPDYFL

SEQ ID NO: 41985 - protein, 584 aa, Homo sapiens
MVAEVCSMPTASTVKKPFDLRSKMGKWCHHRFPCCRGSGKSNMGTSGDHDDSFMKMLRSKMGKCCRHCFPCCRGSGTSNVGTSGDHENSFMKMLRSKMGKWCCHCFPCCRGSGKSNVGAWGDYDHSAFMEPRYHIRREDLDKLHRAAWWGKVPRKDLIVMLRDTDMNKRDKEKRTALHLASANGNSEVVQLLLDRRCQLNVLDNKKRTALIKAIQCQEDECVLMLLEHGADRNIPDEYGNTALHYAIYNEDKLMAKALLLYGADIESKNKCGLTPLLLGVHEQKQQVVKFLIKKKANLNVLDRYGRTALILAVCCGSASIVNLLLEQNVDVSSQDLSGQTAREYAVSSHHHVICELLSDYKEKQMLKISSENSNPEQDLKLTSEEESQRLKVSENSQPEKMSQEPEINKDCDREVEEEIKKHGSNPVGLPENLTNGASAGNGDDGLIPQRRSRKPENQQFPDTENEEYHSDEQNDTRKQLSEEQNTGISQDEILTNKQKQIEVAEQKMNSELSLSHKKEEDLLRENSVLQEEIAMLRLELDETKHQNQLRENKILEEIESVKEKTDKLLRAMQLNEEALTKTNI

SEQ ID NO: 41986 - protein, 115 aa, Homo sapiens
MQAQAPVVVVTQPGVGPGPAPQNSNWQTGMCDCFSDCGVCLCGTFCFPCLGCQVAADMNECCLCGTSVAMRTLYRTRYGIPGSICDDYMATLCCPHCTLCQIKRDINRRRAMRTF

SEQ ID NO: 41987 - protein, 1191 aa, Homo sapiens
MEAMSPQQETLGGQPGRSSSLTGVSRLAGGSCTKKKMKTLAERRRSAPSLILDKALQKRPTTRDSPSASVDTCTFLSSLVCSNRTLLIDGRAELKRGLQRQERHLFLFNDLFVVAKIKYNNNFKIKNKIKLTDMWTASCVDEVGEGNTNAMKSFVLGWPTVNFVATFSSPEQKDKWLSLLQRYINLEKEKDYPKSIPLKIFAKDIGNCAYSKTITVMNSDTANEVINMSLPMLGITGSERDYQLWVNSGKEEAPYPLIGHEYPYGIKMSHLRDSALLTPGSKDSTTPFNLQEPFLMEQLPREMQCQFILKPSRLAAAQQLSDSGHKTFKRRRSIINWAFWRGSSTHLDNLPSSPTSPMPGQLFGISLPNICENDNLPKPVLDMLFFLNQKGPLTKGIFRQSANVKSCRELKEKLNSGVEVHLDCESIFVIASVLKDFLRNIPGSIFSSDLYDHWVSVMDQGNDEEKINTVQRLLDQLPRANVVLLRYLFGVLHNIEQHSSSNQMTAFNLAVCVAPSILWPPASSSPELENEFTKKVSLLIQFLIENCLRIFGEEITSLFREVSVRCDTRENASDISCFQLNDSSYDSLENELNEDVDAPCSDLVKKLGQGSRSMDSVLTLSDYDLDQPEVEGLLTLSDFDLAHSKDEDVQMKRPLESKPVNILVYTKIPLRDHARAPSAMCTPSYLSTAAANAAKSLRRHRRCSEPSIDYLDSKLSYLREFYQKKLRKSSCDAILSQKDEDYLKQNQPLQEEGKTCFKQSLVTGTDVSKKNATTQNTKKKSLSGSEGNHVKLFPKSKPVAISVASYSPMSSQDHSKNQPFDVNTSGYSPPHTADALKGPRTHRRCSEPNIEDQNRKLTYLRGIYSKKQHKTSCEAGLLHGEEDYLKRHKSLQMEGQKLINQSLVMGIEVGKSSATNQNTEKVLPPRLNLCPRTSYSSLSSPGTSPSGSSVSSQDSAFSQISEHSVFTPTETSSPIDCTFQAQRKREDLSPDFSNASHVSGMPGPSSGQACSRPAYTKKDTMEWHSQMHSVTLHPSTWLRNGVASLKNWSLKKKAKAARPEEEKIASPKGPLEPPPHASGVPEANSLQEEQKDLPLRAAEGLSPVQSAQRCSSSPFQDSERHCSSPFSLVESRLKLCMKSHEEIEPGSQSSSGSLPWERASASSWTLEDATSPDSGPTVVCDIEDRYLTKDI

SEQ ID NO: 41988 - protein, 1165 aa, Homo sapiens
MTFWIIINKKMKTLAERRRSAPSLILDKALQKRPTTRDSPSASVDTCTFLSSLVCSNRTLLIDGRAELKRGLQRQERHLFLFNDLFVVAKIKYNNNFKIKNKIKLTDMWTASCVDEVGEGNTNAMKSFVLGWPTVNFVATFSSPEQKDKWLSLLQRYINLEKEKDYPKSIPLKIFAKDIGNCAYSKTITVMNSDTANEVINMSLPMLGITGSERDYQLWVNSGKEEAPYPLIGHEYPYGIKMSHLRDSALLTPGSKDSTTPFNLQEPFLMEQLPREMQCQFILKPSRLAAAQQLSDSGHKTFKRRRSIINWAFWRGSSTHLDNLPSSPTSPMPGQLFGISLPNICENDNLPKPVLDMLFFLNQKGPLTKGIFRQSANVKSCRELKEKLNSGVEVHLDCESIFVIASVLKDFLRNIPGSIFSSDLYDHWVSVMDQGNDEEKINTVQRLLDQLPRANVVLLRYLFGVLHNIEQHSSSNQMTAFNLAVCVAPSILWPPASSSPELENEFTKKVSLLIQFLIENCLRIFGEEITSLFREVSVRCDTRENASDISCFQLNDSSYDSLENELNEDVDAPCSDLVKKLGQGSRSMDSVLTLSDYDLDQPEVEGLLTLSDFDLAHSKDEDVQMKRPLESKPVNILVYTKIPLRDHARAPSAMCTPSYLSTAAANAAKSLRRHRRCSEPSIDYLDSKLSYLREFYQKKLRKSSCDAILSQKDEDYLKQNQPLQEEGKTCFKQSLVTGTDVSKKNATTQNTKKKSLSGSEGNHVKLFPKSKPVAISVASYSPMSSQDHSKNQPFDVNTSGYSPPHTADALKGPRTHRRCSEPNIEDQNRKLTYLRGIYSKKQHKTSCEAGLLHGEEDYLKRHKSLQMEGQKLINQSLVMGIEVGKSSATNQNTEKVLPPRLNLCPRTSYSSLSSPGTSPSGSSVSSQDSAFSQISEHSVFTPTETSSPIDCTFQAQRKREDLSPDFSNASHVSGMPGPSSGQACSRPAYTKKDTMEWHSQMHSVTLHPSTWLRNGVASLKNWSLKKKAKAARPEEEKIASPKGPLEPPPHASGVPEANSLQEEQKDLPLRAAEGLSPVQSAQRCSSSPFQDSERHCSSPFSLVESRLKLCMKSHEEIEPGSQSSSGSLPWERASASSWTLEDATSPDSGPTVVCDIEDRYLTKDI

SEQ ID NO: 41989 - protein, 1168 aa, Homo sapiens
MSARERQPALKKKMKTLAERRRSAPSLILDKALQKRPTTRDSPSASVDTCTFLSSLVCSNRTLLIDGRAELKRGLQRQERHLFLFNDLFVVAKIKYNNNFKIKNKIKLTDMWTASCVDEVGEGNTNAMKSFVLGWPTVNFVATFSSPEQKDKWLSLLQRYINLEKEKDYPKSIPLKIFAKDIGNCAYSKTITVMNSDTANEVINMSLPMLGITGSERDYQLWVNSGKEEAPYPLIGHEYPYGIKMSHLRDSALLTPGSKDSTTPFNLQEPFLMEQLPREMQCQFILKPSRLAAAQQLSDSGHKTFKRRRSIINWAFWRGSSTHLDNLPSSPTSPMPGQLFGISLPNICENDNLPKPVLDMLFFLNQKGPLTKGIFRQSANVKSCRELKEKLNSGVEVHLDCESIFVIASVLKDFLRNIPGSIFSSDLYDHWVSVMDQGNDEEKINTVQRLLDQLPRANVVLLRYLFGVLHNIEQHSSSNQMTAFNLAVCVAPSILWPPASSSPELENEFTKKVSLLIQFLIENCLRIFGEEITSLFREVSVRCDTRENASDISCFQLNDSSYDSLENELNEDVDAPCSDLVKKLGQGSRSMDSVLTLSDYDLDQPEVEGLLTLSDFDLAHSKDEDVQMKRPLESKPVNILVYTKIPLRDHARAPSAMCTPSYLSTAAANAAKSLRRHRRCSEPSIDYLDSKLSYLREFYQKKLRKSSCDAILSQKDEDYLKQNQPLQEEGKTCFKQSLVTGTDVSKKNATTQNTKKKSLSGSEGNHVKLFPKSKPVAISVASYSPMSSQDHSKNQPFDVNTSGYSPPHTADALKGPRTHRRCSEPNIEDQNRKLTYLRGIYSKKQHKTSCEAGLLHGEEDYLKRHKSLQMEGQKLINQSLVMGIEVGKSSATNQNTEKVLPPRLNLCPRTSYSSLSSPGTSPSGSSVSSQDSAFSQISEHSVFTPTETSSPIDCTFQAQRKREDLSPDFSNASHVSGMPGPSSGQACSRPAYTKKDTMEWHSQMHSVTLHPSTWLRNGVASLKNWSLKKKAKAARPEEEKIASPKGPLEPPPHASGVPEANSLQEEQKDLPLRAAEGLSPVQSAQRCSSSPFQDSERHCSSPFSLVESRLKLCMKSHEEIEPGSQSSSGSLPWERASASSWTLEDATSPDSGPTVVCDIEDRYLTKDI

SEQ ID NO: 41990 - protein, 1155 aa, Homo sapiens
MKTLAERRRSAPSLILDKALQKRPTTRDSPSASVDTCTFLSSLVCSNRTLLIDGRAELKRGLQRQERHLFLFNDLFVVAKIKYNNNFKIKNKIKLTDMWTASCVDEVGEGNTNAMKSFVLGWPTVNFVATFSSPEQKDKWLSLLQRYINLEKEKDYPKSIPLKIFAKDIGNCAYSKTITVMNSDTANEVINMSLPMLGITGSERDYQLWVNSGKEEAPYPLIGHEYPYGIKMSHLRDSALLTPGSKDSTTPFNLQEPFLMEQLPREMQCQFILKPSRLAAAQQLSDSGHKTFKRRRSIINWAFWRGSSTHLDNLPSSPTSPMPGQLFGISLPNICENDNLPKPVLDMLFFLNQKGPLTKGIFRQSANVKSCRELKEKLNSGVEVHLDCESIFVIASVLKDFLRNIPGSIFSSDLYDHWVSVMDQGNDEEKINTVQRLLDQLPRANVVLLRYLFGVLHNIEQHSSSNQMTAFNLAVCVAPSILWPPASSSPELENEFTKKVSLLIQFLIENCLRIFGEEITSLFREVSVRCDTRENASDISCFQLNDSSYDSLENELNEDVDAPCSDLVKKLGQGSRSMDSVLTLSDYDLDQPEVEGLLTLSDFDLAHSKDEDVQMKRPLESKPVNILVYTKIPLRDHARAPSAMCTPSYLSTAAANAAKSLRRHRRCSEPSIDYLDSKLSYLREFYQKKLRKSSCDAILSQKDEDYLKQNQPLQEEGKTCFKQSLVTGTDVSKKNATTQNTKKKSLSGSEGNHVKLFPKSKPVAISVASYSPMSSQDHSKNQPFDVNTSGYSPPHTADALKGPRTHRRCSEPNIEDQNRKLTYLRGIYSKKQHKTSCEAGLLHGEEDYLKRHKSLQMEGQKLINQSLVMGIEVGKSSATNQNTEKVLPPRLNLCPRTSYSSLSSPGTSPSGSSVSSQDSAFSQISEHSVFTPTETSSPIDCTFQAQRKREDLSPDFSNASHVSGMPGPSSGQACSRPAYTKKDTMEWHSQMHSVTLHPSTWLRNGVASLKNWSLKKKAKAARPEEEKIASPKGPLEPPPHASGVPEANSLQEEQKDLPLRAAEGLSPVQSAQRCSSSPFQDSERHCSSPFSLVESRLKLCMKSHEEIEPGSQSSSGSLPWERASASSWTLEDATSPDSGPTVVCDIEDRYLTKDI

SEQ ID NO: 41991 - protein, 4074 aa, Homo sapiens
MTAWLISLMSIEVLLLAVRHLSLHIEPEEGSLAGGTWITVIFDGLELGVLYPNNGSQLEIHLVNVNMVVPALRSVPCDVFPVFLDLPVVTCRTRSVLSEAHEGLYFLEAYFGGQLVSSPNPGPRDSCTFKFSKAQTPIVHQVYPPSGVPGKLIHVYGWIITGRLETFDFDAEYIDSPVILEAQGDKWVTPCSLINRQMGSCYPIQEDHGLGTLQCHVEGDYIGSQNVSFSVFNKGKSMVHKKAWLISAKQDLFLYQTHSEILSVFPETGSLGGRTNITITGDFFDNSAQVTIAGIPCDIRHVSPRKIECTTRAPGKDVRLTTPQPGNRGLLFEVGDAVEGLELTEATPGYRWQIVPNASSPFGFWSQEGQPFRARLSGFFVAPETNNYTFWIQADSQASLHFSWSEEPRTKVKVASISVGTADWFDSWEQNRDEGTWQQKTPKLELLGGAMYYLEAEHHGIAPSRGMRIGVQIHNTWLNPDVVTTYLREKHQIRVRAQRLPEVQVLNVSGRGNFFLTWDNVSSQPIPANATAHLIQTTIEELLAVKCKLEPLWSNILLRLGFERGPEVSNSDGDLTSGTEPFCGRFSLRQPRHLVLTPPAAQKGYRLDQYTHLCLAYKGHMNKILKMIVSFTIGFQNMVKNTTCDWSLTRTSPESWQFDCTDLWETCVRCFGDLQPPPANSPVLVHQINLLPLAQETGLFYVDEIIIADTNVTVSQADSGTARPGGNLVESVSVVGSPPVYSVTSWLAGCGTELPLITARSVPTEGTEEGSGLVLVTTQRRQRTSPPLGGHFRIQLPNTVISDVPVQISAHHLHQLLQNNADDFTSRYLNASDFTVKEDLYTCYEHVWTLSWSTQIGDLPNFIRVSDENLTGVNPAAATRVVYDGGVFLGPIFGDMLATANQHTQVVVRVNDVPAHCPGSCSFQYLQGSTPCVHSVWYSIDGDINLMIYITGTGFSGDSQFLQVTVNKTSCKVIFSNQTNVVCQTDLLPVGMHRILMLVRPSGLAISATGEDLFLNVKPRLDMVEPSRAADIGGLWATIRGSSLEGVSLILFGSYSCAINVATSNSSRIQCKVPPRGKDGRIVNVTVIRGDYSAVLPRAFTYVSSLNPVIVTLSRNISNIAGGETLVIGVARLMNYTDLDVEVHVQDALAPVHTQSAWGLEVALPPLPAGLHRISVSINGVSIHSQGVDLHIQYLTEVFSIEPCCGSLLGGTILSISGIGFSRDPALVWVLVGNRSCDIVNLTEASIWCETLPAPQIPDAGAPTVPAAVEVWAGNRFFARGPSPSLVGKGFTFMYEAAATPVVTAMQGEITNSSLSLHVGGSNLSNSVILLGNLNCDVETQSFQGNVSLSGCSIPLHSLEAGIYPLQVRQKQMGFANMSVVLQQFAVMPRIMAIFPSQGSACGGTILTVRGLLLNSRRRSVRVDLSGPFTCVILSLGDHTILCQVSLEGDPLPGASFSLNVTVLVNGLTSECQGNCTLFIREEASPVMDALSTNTSGSLTTVLIRGQRLATTADEPMVFVDDQLPCNVTFFNASHVVCQTRDLAPGPHYLSVFYTRNGYACSGNVSRHFYIMPQVFHYFPKNFSLHGGSLLTIEGTGLRGQNTTSVYIDQQTCLTVNIGAELIRCIVPTGNGSVALEIEVDGLWYHIGVIGYNKAFTPELISISQSDDILTFAVAQISGAANIDIFIGMSPCVGVSGNHTVLQCVVPSLPAGEYHVRGYDCIRGWASSALVFTSRVIITAVTENFGCLGGRLVHVFGAGFSPGNVSAAVCGAPCRVLANATVSAFSCLVLPLDVSLAFLCGLKREEDSCEAARHTYVQCDLTVAMATEQLLESWPYLYICEESSQCLFVPDHWAESMFPSFSGLFISPKLERDEVLIYNSSCNITMETEAEMECETPNQPITVKITEIRKRWGQNTQGNFSLQFCRRWSRTHSWFPERLPQDGDNVTVENGQLLLLDTNTSILNLLHIKGGKLIFMAPGPIELRAHAILVSDGGELRIGSEDKPFQGRAQITLYGSSYSTPFFPYGVKFLAVRNGTLSLHGSLPEVIVTCLRATAHALDTVLALEDAVDWNPGDEVVIISGTGVKGAKPMEEIVTVETVQDTDLYLKSPLRYSHNFTENWVAGEHHILKATVALLSRSITIQGNLTNEREKLLVSCQEANAPEGNLQHCLYSMSEKMLGSRDMGARVIVQSFPEEPSQVQLKGVQFQVLGQAFHKHLSSLTLVGAMRESFIQGCTVRNSFSRGLSMCGTLGLKVDSNVFYNILGHALLVGTCTEMRYISWEAIHGRKDDWSGHGNIIRNNVIIQVSGAEGLSNPEMLTPSGIYICSPTNVIEGNRVCGAGYGYFFHLMTNQTSQAPLLSFTQNIAHSCTRYGLFVYPKFQPPWDNVTGTTLFQSFTVWESAGGAQIFRSSNLRLKNFKVYSCRDFGIDVLESDANTSVTDSLLLGHFAHKGSLCMSSGIKTPKRWELMVSNTTFVNFDLINCVAIRTCSDCSQGQGGFTVKTSQLKFTNSSNLVAFPFPHAAILEDLDGSLSGKNRSHILASMETLSASCLVNSSFGRVVHGSACGGGVLFHRMSIGLANTPEVSYDLTMTDSRNKTTTVNYVRDTLSNPRGWMALLLDQETYSLQSENLWINRSLQYSATFDNFAPGNYLLLVHTDLPPYPDILLRCGSRVGLSFPFLPSPGQNQGCDWFFNSQLRQLTYLVSGEGQVQVILRVKEGMPPTISASTSAPESALKWSLPETWQGVEEGWGGYNNTIPGPGDDVLILPNRTVLVDTDLPFFKGLYVMGTLDFPVDRSNVLSVACMVIAGGELKVGTLENPLEKEQKLLILLRASEGVFCDRMNGIHIDPGTIGVYGKVHLYSAYPKNSWTHLGADIASGNERIIVEDAVDWRPHDKIVLSSSSYEPHEAEVLTVKEVKGHHVRIYERLKHRHIGSVHVTEDGRHIRLAAEVGLLTRNIQIQPDVSCRGRLFVGSFRKSSREEFSGVLQLLNVEIQNFGSPLYSSVEFSNVSAGSWIISSTLHQSCGGGIHAAASHGVLLNDNIVFGTAGHGIDLEGQAYTVTNNLVVLMTQPAWSTIWVAGIKVNQVKDINLHGNVVAGSERLGFHIRGHKCSSCELLWSDNVAHSSLHGLHLYKESGLDNCTRISGFLAFKNFDYGAMLHVENSVEIENITLVDNTIGLLAVVYVFSAPQNSVKKVQIVLRNSVIVATSSSFDCIQDKVKPHSANLTSTDRAPSNPRGGRIGILWPVFTSEPNQWPQEPWHKVRNDHSISGIMKLQDVTFSSFVKSCYSDDLDVCILPNAENSGIMHPITAERTRMLKIKDKNKFYFPSLQPRKDLGKVVCPELDCASPRKYLFKDLDGRALGLPPPVSVFPKTEAEWTASFFNAGTFREEQKCTYQFLMQGFICKQTDQVVLILDSADAIWAIQKLYPVVSVTSGFVDVFSSVNANIPCSTSGSVSTFYSILPIRQITKVCFMDQTPQVLRFFLLGNKSTSKLLLAVFYHELQSPHVFLGESFIPPTLVQSASLLLNESIGANYFNIMDNLLYVVLQGEEPIEIRSGVSIHLALTVMVSVLEKGWEIVILERLTNFLQIGQNQIRFIHEMPGHEETLKAIADSRAKRKRNCPTVTCTSHYRRVGQRRPLMMEMNSHRASPPMTVETISKVIVIEIGDSPTVRSTGMISSLSSNKLQNLAHRVITAQQTGVLENVLNMTIGALLVTQSKGVIGYGNTSSFKTGNLIYIRPYALSILVQPSDGEVGNELPVQPQLVFLDEQNRRVESLGPPSEPWTISASLEGASDSVLKGCTQAETQDGYVSFYNLAVLISGSNWHFIFTVTSPPGVNFTARSKPFAVLPVTRKEKSTIILAASLSSVASWLALSCLVCCWLKRSKSRKTKPEEIPESQTNNQNIHIHISSKRRESQGPKKEDTVVGEDMRMKVMLGKVNQCPHQLMNGVSRRKVSRHIVREEEAAVPAPGTTGITSHGHICAPGAPAQQVYLQETGNWKEGQEQLLRYQLAGQNQLLLLCPDFRQERQQLPGQSRLSKQSGSLGLSQEKKASCGATEAFCLHSVHPETIQEQL

SEQ ID NO: 41992 - protein, 3396 aa, Homo sapiens
MTAWLISLMSIEVLLLAVRHLSLHIEPEEGSLAGGTWITVIFDGLELGVLYPNNGSQLEIHLVNVNMVVPALRSVPCDVFPVFLDLPVVTCRTRSVLSEAHEGLYFLEAYFGGQLVSSPNPGPRDSCTFKFSKAQTPIVHQVYPPSGVPGKLIHVYGWIITGRLETFDFDAEYIDSPVILEAQGDKWVTPCSLINRQMGSCYPIQEDHGLGTLQCHVEGDYIGSQNVSFSVFNKGKSMVHKKAWLISAKQDLFLYQTHSEILSVFPETGSLGGRTNITITGDFFDNSAQVTIAGIPCDIRHVSPRKIECTTRAPGKDVRLTTPQPGNRGLLFEVGDAVEGLELTEATPGYRWQIVPNASSPFGFWSQEGQPFRARLSGFFVAPETNNYTFWIQADSQASLHFSWSEEPRTKVKVASISVGTADWFDSWEQNRDEGTWQQKTPKLELLGGAMYYLEAEHHGIAPSRGMRIGVQIHNTWLNPDVVTTYLREKHQIRVRAQRLPEVQVLNVSGRGNFFLTWDNVSSQPIPANATAHLIQTTIEELLAVKCKLEPLWSNILLRLGFERGPEVSNSDGDLTSGTEPFCGRFSLRQPRHLVLTPPAAQKGYRLDQYTHLCLAYKGHMNKILKMIVSFTIGFQNMVKNTTCDWSLTRTSPESWQFDCTDLWETCVRCFGDLQPPPANSPVLVHQINLLPLAQETGLFYVDEIIIADTNVTVSQADSGTARPGGNLVESVSVVGSPPVYSVTSWLAGCGTELPLITARSVPTEGTEEGSGLVLVTTQRRQRTSPPLGGHFRIQLPNTVISDVPVQISAHHLHQLLQNNADDFTSRYLNASDFTVKEDLYTCYEHVWTLSWSTQIGDLPNFIRVSDENLTGVNPAAATRVVYDGGVFLGPIFGDMLATANQHTQVVVRVNDVPAHCPGSCSFQYLQGSTPCVHSVWYSIDGDINLMIYITGTGFSGDSQFLQVTVNKTSCKVIFSNQTNVVCQTDLLPVGMHRILMLVRPSGLAISATGEDLFLNVKPRLDMVEPSRAADIGGLWATIRGSSLEGVSLILFGSYSCAINVATSNSSRIQCKVPPRGKDGRIVNVTVIRGDYSAVLPRAFTYVSSLNPVIVTLSRNISNIAGGETLVIGVARLMNYTDLDVEVHVQDALAPVHTQSAWGLEVALPPLPAGLHRISVSINGVSIHSQGVDLHIQYLTEVFSIEPCCGSLLGGTILSISGIGFSRDPALVWVLVGNRSCDIVNLTEASIWCETLPAPQIPDAGAPTVPAAVEVWAGNRFFARGPSPSLVGKGFTFMYEAAATPVVTAMQGEITNSSLSLHVGGSNLSNSVILLGNLNCDVETQSFQGNVSLSGCSIPLHSLEAGIYPLQVRQKQMGFANMSVVLQQFAVMPRIMAIFPSQGSACGGTILTVRGLLLNSRRRSVRVDLSGPFTCVILSLGDHTILCQVSLEGDPLPGASFSLNVTVLVNGLTSECQGNCTLFIREEASPVMDALSTNTSGSLTTVLIRGQRLATTADEPMVFVDDQLPCNVTFFNASHVVCQTRDLAPGPHYLSVFYTRNGYACSGNVSRHFYIMPQVFHYFPKNFSLHGGSLLTIEGTGLRGQNTTSVYIDQQTCLTVNIGAELIRCIVPTGNGSVALEIEVDGLWYHIGVIGYNKAFTPELISISQSDDILTFAVAQISGAANIDIFIGMSPCVGVSGNHTVLQCVVPSLPAGEYHVRGYDCIRGWASSALVFTSRVIITAVTENFGCLGGRLVHVFGAGFSPGNVSAAVCGAPCRVLANATVSAFSCLVLPLDVSLAFLCGLKREEDSCEAARHTYVQCDLTVAMATEQLLESWPYLYICEESSQCLFVPDHWAESMFPSFSGLFISPKLERDEVLIYNSSCNITMETEAEMECETPNQPITVKITEIRKRWGQNTQGNFSLQFCRRWSRTHSWFPERLPQDGDNVTVENGQLLLLDTNTSILNLLHIKGGKLIFMAPGPIELRAHAILVSDGGELRIGSEDKPFQGRAQITLYGSSYSTPFFPYGVKFLAVRNGTLSLHGSLPEVIVTCLRATAHALDTVLALEDAVDWNPGDEVVIISGTGVKGAKPMEEIVTVETVQDTDLYLKSPLRYSHNFTENWVAGEHHILKATVALLSRSITIQGNLTNEREKLLVSCQEANAPEGNLQHCLYSMSEKMLGSRDMGARVIVQSFPEEPSQVQLKGVQFQVLGQAFHKHLSSLTLVGAMRESFIQGCTVRNSFSRGLSMCGTLGLKVDSNVFYNILGHALLVGTCTEMRYISWEAIHGRKDDWSGHGNIIRNNVIIQVSGAEGLSNPEMLTPSGIYICSPTNVIEGNRVCGAGYGYFFHLMTNQTSQAPLLSFTQNIAHSCTRYGLFVYPKFQPPWDNVTGTTLFQSFTVWESAGGAQIFRSSNLRLKNFKVYSCRDFGIDVLESDANTSVTDSLLLGHFAHKGSLCMSSGIKTPKRWELMVSNTTFVNFDLINCVAIRTCSDCSQGQGGFTVKTSQLKFTNSSNLVAFPFPHAAILEDLDGSLSGKNRSHILASMETLSASCLVNSSFGRVVHGSACGGGVLFHRMSIGLANTPEVSYDLTMTDSRNKTTTVNYVRDTLSNPRGWMALLLDQETYSLQSENLWINRSLQYSATFDNFAPGNYLLLVHTDLPPYPDILLRCGSRVGLSFPFLPSPGQNQGCDWFFNSQLRQLTYLVSGEGQVQVILRVKEGMPPTISASTSAPESALKWSLPETWQGVEEGWGGYNNTIPGPGDDVLILPNRTVLVDTDLPFFKGLYVMGTLDFPVDRSNVLSVACMVIAGGELKVGTLENPLEKEQKLLILLRASEGVFCDRMNGIHIDPGTIGVYGKVHLYSAYPKNSWTHLGADIASGNERIIVEDAVDWRPHDKIVLSSSSYEPHEAEVLTVKEVKGHHVRIYERLKHRHIGSVHVTEDGRHIRLAAEVGLLTRNIQIQPDVSCRGRLFVGSFRKSSREEFSGVLQLLNVEIQNFGSPLYSSVEFSNVSAGSWIISSTLHQSCGGGIHAAASHGVLLNDNIVFGTAGHGIDLEGQAYTVTNNLVVLMTQPAWSTIWVAGIKVNQVKDINLHGNVVAGSERLGFHIRGHKCSSCELLWSDNVAHSSLHGLHLYKESGLDNCTRISGFLAFKNFDYGAMLHVENSVEIENITLVDNTIGLLAVVYVFSAPQNSVKKVQIVLRNSVIVATSSSFDCIQDKVKPHSANLTSTDRAPSNPRGGRIGILWPVFTSEPNQWPQEPWHKVRNDHSISGIMKLQDVTFSSFVKSCYSDDLDVCILPNAENSGIMHPITAERTRMLKIKDKNKFYFPSLQPRKDLGKVVCPELDCASPRKYLFKDLDGRALGLPPPVSVFPKTEAEWTASFFNAVTTEQALKISE

SEQ ID NO: 41993 - protein, 1493 aa, Homo sapiens
MAELSEPEGPVDWKERCVALESQLMKFRVQASKIRELLAEKMQQLERQVIDAERQAEKAFQQVQVMEDKLKAANIQTSESETRLYNKCQDLESLIQEKDDVIQNLELQLEEQKQIRIQEAKIIEEKAAKIKEWVTVKLNELELENQNLRLINQNQTEEIRTMQSKLQEVQGKKSSTVSTLKLSEGQRLSSLTFGCFLSRARSPPQVVKSEEMSKISSKEPEFTEGKDMEEMEIPEKSVDNQVLENNRGQRTLHQTPCGSEQNRKTRTSFATDGGISQNSGAPVSDWSSDEEDGSKGRSKSRCTSTLSSHTSEEGVQCSRMGSEMYLTASDDSSSIFEEETFGIKRPEHKKLYSWQQEAQWKALNSPLGKGNSELSKKEQDSSSDELNKKFQSQRLDYSSSSSEANTPSPILTPALMPKHPNSLSGKGTQLVPSSHLPPPKLRIPNVFSISVALAKRHLSQPQLSSDRMFGTNRNAISMIRPLRPQETDLDLVDGDSTEVLENMDTSCDDGLFSYDSLDSPNSDDQEHCDSAKKVAYSKPPTPPLHRFPSWESRIYAVAKSGIRMSEAFNMESVNKNSAATLSYTTSGLYTSLIYKNMTTPVYTTLKGKATQISSSPFLDDSSGSEEEDSSRSSSRTSESDSRSRSGPGSPRAMKRGVSLSSVASESDYAIPPDAYSTDTEYSQPEQKLPKTCSSSSDNGKNEPLEKSGYLLKMSGKVKSWKRRWFVLKGGELLYYKSPSDVIRKPQGHIELSASCSILRGDNKQTVQLTTEKHTYYLTADSPNILEEWIKVLQNVLRVQAANPLSLQPEGKPTMKGLLTKVKHGYSKRVWCTLIGKTLYYFRSQEDKFPLGQIKLWEAKVEEVDRSCDSDEDYEASGRSLLSTHYTIVIHPKDQGPTYLLIGSKHEKDTWLYHLTVAAGSNNVNVGSEFEQLVCKLLNIDGEPSSQIWRHPTLCHSKEGIISPLTTLPSEALQTEAIKLFKTCQLFINAAVDSPAIDYHISLAQSALQICLTHPELQNEICCQLIKQTRRRQPQNQPGPLQGWQLLALCVGLFLPHHPFLWLLRLHLKRNADSRTEFGKYAIYCQRCVERTQQNGDREARPSRMEILSTLLRNPYHHSLPFSIPVHFMNGIYQVVGFDASTTVEEFLNTLNQDTGMRKPAQSGFALFTDDPSGRDLEHCLQGNIKICDIISKWEQASKEQQPGKCEGTRTVRLTYKNRLYFSVQARGETDREKLLLMYQTNDQIINGLFPLNKDLALEMAALLSQVEIGDFERPFSTPAGHVTNQCKVNQTLKQVIEKFYPKRYRDGCSEEQLRQLCQRLSTRWMALRGHSAADCVRIYLTVARKWPFFGAKLFLAKPITPSSLGSTFLWLAVHEDGLSLLEYNSMRLIVSYVYKSLMTFGGYQDDFMVVINNTHSKDKPTEKLLFAMAKPKILEITLLIASYINNFHQQKAAFHHLSAPALLSAQTRGPQARMMGSQPLLSSSRPTKGPTLL

SEQ ID NO: 41994 - protein, 930 aa, Homo sapiens
MSEAFNMESVNKNSAATLSYTTSGLYTSLIYKNMTTPVYTTLKGKATQISSSPFLDDSSGSEEEDSSRSSSRTSESDSRSRSGPGSPRAMKRGVSLSSVASESDYAIPPDAYSTDTEYSQPEQKLPKTCSSSSDNGKNEPLEKSGYLLKMSGKVKSWKRRWFVLKGGELLYYKSPSDVIRKPQGHIELSASCSILRGDNKQTVQLTTEKHTYYLTADSPNILEEWIKVLQNVLRVQAANPLSLQPEGKPTMKGLLTKVKHGYSKRVWCTLIGKTLYYFRSQEDKFPLGQIKLWEAKVEEVDRSCDSDEDYEASGRSLLSTHYTIVIHPKDQGPTYLLIGSKHEKDTWLYHLTVAAGSNNVNVGSEFEQLVCKLLNIDGEPSSQIWRHPTLCHSKEGIISPLTTLPSEALQTEAIKLFKTCQLFINAAVDSPAIDYHISLAQSALQICLTHPELQNEICCQLIKQTRRRQPQNQPGPLQGWQLLALCVGLFLPHHPFLWLLRLHLKRNADSRTEFGKYAIYCQRCVERTQQNGDREARPSRMEILSTLLRNPYHHSLPFSIPVHFMNGIYQVVGFDASTTVEEFLNTLNQDTGMRKPAQSGFALFTDDPSGRDLEHCLQGNIKICDIISKWEQASKEQQPGKCEGTRTVRLTYKNRLYFSVQARGETDREKLLLMYQTNDQIINGLFPLNKDLALEMAALLSQVEIGDFERPFSTPAGHVTNQCKVNQTLKQVIEKFYPKRYRDGCSEEQLRQLCQRLSTRWMALRGHSAADCVRIYLTVARKWPFFGAKLFLAKPITPSSLGSTFLWLAVHEDGLSLLEYNSMRLIVSYVYKSLMTFGGYQDDFMVVINNTHSKDKPTEKLLFAMAKPKILEITLLIASYINNFHQQKAAFHHLSAPALLSAQTRGPQARMMGSQPLLSSSRPTKGPTLL

SEQ ID NO: 41995 - protein, 796 aa, Homo sapiens
MAELSEPEGPVDWKERCVALESQLMKFRVQASKIRELLAEKMQQLERQVIDAERQAEKAFQQVQVMEDKLKAANIQTSESETRLYNKCQDLESLIQEKDDVIQNLELQLEEQKQIRIQEAKIIEEKAAKIKEWVTVKLNELELENQNLRLINQNQTEEIRTMQSKLQEVQGKKSSTVSTLKLSEGQRLSSLTFGCFLSRARSPPQVVKSEEMSKISSKEPEFTEGKDMEEMEIPEKSVDNQVLENNRGQRTLHQTPCGSEQNRKTRTSFATDGGISQNSGAPVSDWSSDEEDGSKGRSKSRCTSTLSSHTSEEGVQCSRMGSEMYLTASDDSSSIFEEETFGIKRPEHKKLYSWQQEAQWKALNSPLGKGNSELSKKEQDSSSDELNKKFQSQRLDYSSSSSEANTPSPILTPALMPKHPNSLSGKGTQLVPSSHLPPPKLRIPNVFSISVALAKRHLSQPQLSSDRMFGTNRNAISMIRPLRPQETDLDLVDGDSTEVLENMDTSCDDGLFSYDSLDSPNSDDQEHCDSAKKVAYSKPPTPPLHRFPSWESRIYAVAKSGIRMSEAFNMESVNKNSAATLSYTTSGLYTSLIYKNMTTPVYTTLKGKATQISSSPFLDDSSGSEEEDSSRSSSRTSESDSRSRSGPGSPRAMKRGVSLSSVASESDYAIPPDAYSTDTEYSQPEQKLPKTCSSSSDNGKNEPLEKSGYLLKMSGKVKSWKRRWFVLKGGELLYYKSPSDVIRKPQGHIELSASCSILRGDNKQTVQVLNFFFFFFFFVSCQTQFSIIQPNGKEIG

SEQ ID NO: 41996 - protein, 575 aa, Homo sapiens
MSSDEEKYSLPVVQNDSSRGSSVSSNLQEEYEELLHYAIVTPNIEPCASQSSHPKGELVPDVRISTIHDILHSQGNNSEVRETAIEVGKGCDFHISSHSKTDESSPVLSPRKPSHPVMDFFSSHLLADSSSPATNSSHTDAHEILVSDFLVSDENLQKMENVLDLWSSGLKTNIISELSKWRLNFIDWHRMEMRKEKEKHAAHLKQLCNQINELKELQKTFEISIGRKDEVISSLSHAIGKQKEKIELMRTFFHWRIGHVRARQDVYEGKLADQYYQRTLLKKVWKVWRSVVQKQWKDVVERACQARAEEVCIQISNDYEAKVAMLSGALENAKAEIQRMQHEKEHFEDSMKKAFMRGVCALNLEAMTIFQNRNDAGIDSTNNKKEEYGPGVQGKEHSAHLDPSAPPMPLPVTSPLLPSPPAAVGGASATAVPSAASMTSTRAASASSVHVPVSALGAGSAATAASEEMYVPRVVTSAQQKAGRTITARITGRCDFASKNRISSSLAIMGVSPPMSSVVVEKHHPVTVQTIPQATAAKYPRTIHPESSTSASRSLGTRSAHTQSLTSVHSIKVVD

SEQ ID NO: 41997 - protein, 399 aa, Homo sapiens
MDFFSSHLLADSSSPATNSSHTDAHEILVSDFLVSDENLQKMENVLDLWSSGLKTNIISELSKWRLNFIDWHRMEMRKEKEKHAAHLKQLCNQINELKELQKTFEISIGRKDEVISSLSHAIGKQKEKIELMRTFFHWRIGHVRARQDVYEGKLADQYYQRTLLKKVWKVWRSVVQKQWKDVVERACQARAEEVCIQISNDYEAKVAMLSGALENAKAEIQRMQHEKEHFEDSMKKAFMRGVCALNLEAMTIFQNRNDAGIDSTNNKKEEYGPGVQGKEHSAHLDPSAPPMPLPVTSPLLPSPPAAVGGASATAVPSAASMTSTRAASASSVHVPVSALGAGSAATAASEEMQTIPQATAAKYPRTIHPESSTSASRSLGTRSAHTQSLTSVHSIKVVD

SEQ ID NO: 41998 - protein, 550 aa, Homo sapiens
MKWEEYEELLHYAIVTPNIEPCASQSSHPKGELVPDVRISTIHDILHSQGNNSEVRETAIEVGKGCDFHISSHSKTDESSPVLSPRKPSHPVMDFFSSHLLADSSSPATNSSHTDAHEILVSDFLVSDENLQKMENVLDLWSSGLKTNIISELSKWRLNFIDWHRMEMRKEKEKHAAHLKQLCNQINELKELQKTFEISIGRKDEVISSLSHAIGKQKEKIELMRTFFHWRIGHVRARQDVYEGKLADQYYQRTLLKKVWKVWRSVVQKQWKDVVERACQARAEEVCIQISNDYEAKVAMLSGALENAKAEIQRMQHEKEHFEDSMKKAFMRGVCALNLEAMTIFQNRNDAGIDSTNNKKEEYGPGVQGKEHSAHLDPSAPPMPLPVTSPLLPSPPAAVGGASATAVPSAASMTSTRAASASSVHVPVSALGAGSAATAASEEMYVPRVVTSAQQKAGRTITARITGRCDFASKNRISSSLAIMGVSPPMSSVVVEKHHPVTVQTIPQATAAKYPRTIHPESSTSASRSLGTRSAHTQSLTSVHSIKVVD

SEQ ID NO: 41999 - protein, 774 aa, Homo sapiens
MAHEAMEYDVQVQLNHAEQQPAPAGMASSQGGPALLQPVPADVVSSQGVPSILQPAPAEVISSQATPPLLQPAPQLSVDLTEVEVLGEDTVENINPRTSEQHRQGSDGNHTIPASSLHSMTNFISGLQRLHGMLEFLRPSSSNHSVGPMRTRRRVSASRRARAGGSQRTDSARLRAPLDAYFQVSRTQPDLPATTYDSETRNPVSEELQVSSSSDSDSDSSAEYGGVVDQAEESGAVILEEQLAGVSAEQEVTCIDGGKTLPKQPSPQKSEPLLPSASMDEEEGDTCTICLEQWTNAGDHRLSALRCGHLFGYRCISTWLKGQVRKCPQCNKKARHSDIVVLYARTLRALDTSEQERMKSSLLKEQMLRKQAELESAQCRLQLQVLTDKCTRLQRRVQDLQKLTSHQSQNLQQPRGSQAWVLSCSPSSQGQHKHKYHFQKTFTVSQAGNCRIMAYCDALSCLVISQPSPQASFLPGFGVKMLSTANMKSSQYIPMHGKQIRGLAFSSYLRGLLLSASLDNTIKLTSLETNTVVQTYNAGRPVWSCCWCLDEANYIYAGLANGSILVYDVRNTSSHVQELVAQKARCPLVSLSYMPRAASAAFPYGGVLAGTLEDASFWEQKMDFSHWPHVLPLEPGGCIDFQTENSSRHCLVTYRPDKNHTTIRSVLMEMSYRLDDTGNPICSCQPVHTFFGGPTCKLLTKNAIFQSPENDGNILVCTGDEAANSALLWDAASGSLLQDLQTDQPVLDICPFEVNRNSYLATLTEKMVHIYKWE

SEQ ID NO: 42000 - protein, 111 aa, Homo sapiens
MGPSSCLLLILIPLLQLINPGSTQCSLDSVMDKKIKDVLNSLEYSPSPISKKLSCASVKSQGRPSSCPAGMAVTGCACGYGCGSWDVQLETTCHCQCSVVDWTTARCCHLT

SEQ ID NO: 42001 - protein, 422 aa, Homo sapiens
MGKAKVPASKRAPSSPVAKPGPVKTLTRKKNKKKKRFWKSKAREVSKKPASGPGAVVRPPKAPEDFSQNWKALQEWLLKQKSQAPEKPLVISQMGSKKKPKIIQQNKKETSPQVKGEEMPAGKDQEASRGSVPSGSKMDRRAPVPRTKASGTEHNKKGTKERTNGDIVPERGDIEHKKRKAKEAAPAPPTEEDIWFDDVDPADIEAAIGPEAAKIARKQLGQSEGSVSLSLVKEQAFGGLTRALALDCEMVGVGPKGEESMAARVSIVNQYGKCVYDKYVKPTEPVTDYRTAVSGIRPENLKQGEELEVVQKEVAEMLKGRILVGHALHNDLKVLFLDHPKKKIRDTQKYKPFKSQVKSGRPSLRLLSEKILGLQVQQAEHCSIQDAQAAMRLYVMVKKEWESMARDRRPLLTAPDHCSDDA

SEQ ID NO: 42002 - protein, 250 aa, Homo sapiens
MGKAKVPASKRAPSSPVAKPGPVKTLTRKKNKKKKRFWKSKAREVSKKPASGPGAVVRPPKAPEDFSQNWKALQEVPRWTGGRQYLAPRPVEQSTIRKEPRKGQMVILFQNEGTSSIRSGKLRRQPQPHPPREELEVVQKEVAEMLKGRILVGHALHNDLKVLFLDHPKKKIRDTQKYKPFKSQVKSGRPSLRLLSEKILGLQVQQAEHCSIQDAQAAMRLYVMVKKEWESMARDRRPLLTAPDHCSDDA

SEQ ID NO: 42003 - protein, 979 aa, Homo sapiens
MATQAYTELQAAPPPSQPPQAPPQAQPQPPPPPPPAAPQPPQPPTAAATPQPQYVTELQSPQPQAQPPGGQKQYVTELPAVPAPSQPTGAPTPSPAPQQYIVVTVSEGAMRASETVSEASPGSTASQTGVPTQVVQQVQGTQQRLLVQTSVQAKPGHVSPLQLTNIQVPQQALPTQRLVVQSAAPGSKGGQVSLTVHGTQQVHSPPEQSPVQANSSSSKTAGAPTGTVPQQLQVHGVQQSVPVTQERSVVQATPQAPKPGPVQPLTVQGLQPVHVAQEVQQLQQVPVPHVYSSQVQYVEGGDASYTASAIRSSTYSYPETPLYTQTASTSYYEAAGTATQVSTPATSQAVASSGSMPMYVSGSQVVASSTSTGAGASNSSGGGGSGGGGGGGGGGGGGGSGSTGGGGSGAGTYVIQGGYMLGSASQSYSHTTRASPATVQWLLDNYETAEGVSLPRSTLYCHYLLHCQEQKLEPVNAASFGKLIRSVFMGLRTRRLGTRGNSKYHYYGLRIKASSPLLRLMEDQQHMAMRGQPFSQKQRLKPIQKMEGMTNGVAVGQQPSTGLSDISAQVQQYQQFLDASRSLPDFTELDLQGKVLPEGVGPGDIKAFQVLYREHCEAIVDVMVNLQFTLVETLWKTFWRYNLSQPSEAPPLAVHDEAEKRLPKAILVLLSKFEPVLQWTKHCDNVLYQGLVEILIPDVLRPIPSALTQAIRNFAKSLESWLTHAMVNIPEEMLRVKVAAAGAFAQTLRRYTSLNHLAQAARAVLQNTAQINQMLSDLNRVDFANVQEQASWVCRCEDRVVQRLEQDFKVTLQQQNSLEQWAAWLDGVVSQVLKPYQGSAGFPKAAKLFLLKWSFYSSMVIRDLTLRSAASFGSFHLIRLLYDEYMYYLIEHRVAQAKGETPIAVMGEFANLATSLNPLDPDKDEEEEEEEESEDELPQDISLAAGGESPALGPETLEPPAKLARTDARGLFVQALPSS

SEQ ID NO: 42004 - protein, 973 aa, Homo sapiens
MDPFRPSFRGQSPIHPSQCQAVRMPGCWPQASKPLDPALGRGAPAGRGHVFGKPEEPSTQRGPAQRESVGLVSMFRGLGIETVSKTPLKREMLPSGRGILGRGLSANLVRKDREELSPTFWDPKVLAAGDSKMAETSVGWSRTLGRGSSDASLLPLGRAAGGISREVDKPPCTFSTPSRGPPQLSSPPALPQSPLHSPDRPLVLTVEHKEKELIVKQGSKGTPQSLGLNLVKIQCHNEAVYQYHVTFSPNVECKSMRFGMLKDHQAVTGNVTAFDGSILYLPVKLQQVLELKSQRKTDSAEISIKIQMTKILEPCSDLCIPFYNVVFRRVMKLLDMKLVGRNFYDPTSAMVLQQHRLQIWPGYAASIRRTDGGLFLLADVSHKVIRNDCVLDVMHAIYQQNKEHFQDECTKLLVGNIVITRYNNRTYRIDDVDWNKTPKDSFTMSDGKEITFLEYYSKNYGITVKEEDQPLLIHRPSERQDNHGMLLKGEILLLPELSFMTGIPEKMKKDFRAMKDLAQQINLSPKQHHSALECLLQRIAKNEAATNELMRWGLRLQKDVHKIEGRVLPMERINLKNTSFITSQELNWVKEVTRDPSILTIPMHFWALFYPKRAMDQARELVNMLEKIAGPIGMRMSPPAWVELKDDRIETYVRTIQSTLGAEGKIQMVVCIIMGPRDDLYGAIKKLCCVQSPVPSQVVNVRTIGQPTRLRSVAQKILLQINCKLGGELWGVDIPLKQLMVIGMDVYHDPSRGMRSVVGFVASINLTLTKWYSRVVFQMPHQEIVDSLKLCLVGSLKKFYEVNHCLPEKIVVYRDGVSDGQLKTVANYEIPQLQKCFEAFENYQPKMVVFVVQKKISTNLYLAAPQNFVTPTPGTVVDHTITSCEWVDFYLLAHHVRQGCGIPTHYVCVLNTANLSPDHMQRLTFKLCHMYWNWPGTIRVPAPCKYAHKLAFLSGHILHHEPAIQLCENLFFL

SEQ ID NO: 42005 - protein, 937 aa, Homo sapiens
MDPFRPSFRGQSPIHPSQCQAVRMPGCWPQASKPLDPALGRGAPAGRGHVFGKPEEPSTQRGPAQRESVGLVSMFRGLGIETVSKTPLKREMLPSGRGILGRGLSANLVRKDREELSPTFWDPKVLAAGDSKMAETSVGWSRTLGRGSSDASLLPLGRAAGGISREVDKPPCTFSTPSRGPPQLSSPPALPQSPLHSPDRPLVLTVEHKEKELIVKQGSKGTPQSLGLNLVKIQCHNEAVYQYHVTFSPNVECKSMRFGMLKDHQAVTGNVTAFDGSILYLPVKLQQVLELKSQRKTDSAEISIKIQMTKILEPCSDLCIPFYNVVFRRVMKLLDMKLVGRNFYDPTSAMVLQQHRLQIWPGYAASIRRTDGGLFLLADVSHKVIRNDCVLDVMHAIYQQNKEHFQDECTKLLVGNIVITRYNNRTYRIDDVDWNKTPKDSFTMSDGKEITFLEYYSKNYGITVKEEDQPLLIHRPSERQDNHGMLLKGEILLLPELSFMTGIPEKMKKDFRAMKDLAQQINLSPKQHHSALECLLQRIAKNEAATNELMRWGLRLQKDVHKIEGRVLPMERINLKNTSFITSQELNWVKEVTRDPSILTIPMHFWALFYPKRAMDQARELVNMLEKIAGPIGMRMSPPAWVELKDDRIETYVRTIQSTLGAEGKIQMVVCIIMGPRDDLYGAIKKLCCVQSPVPSQVVNVRTIGQPTRLRSVAQKILLQINCKLGGELWGVDIPLKQLMVIGMDVYHDPSRGMRSVVGFVASINLTLTKWYSRVVFQMPHQEIVDSLKLCLVGSLKKFYEVNHCLPEKIVVYRDGVSDGQLKTVANYEIPQLQKCFEAFENYQPKMVVFVVQKKISTNLYLAAPQNFVTPTPGTVVDHTITSCEWLTFKLCHMYWNWPGTIRVPAPCKYAHKLAFLSGHILHHEPAIQLCENLFFL

SEQ ID NO: 42006 - protein, 762 aa, Homo sapiens
MASNERDAISWYQKKIGAYDQQIWEKSIEQTQIKGLKNKPKKMGHIKPDLIDVDLIRGSTFAKAKPEIPWTSLTRKGLVRVVFFPLFSNWWIQVTSLRIFVWLLLLYFMQVIAIVLYLMMPIVNISEVLGPLCLMLLMGTVHCQIVSTQITRPSGNNGNRRRRKLRKTVNGDGSRENGNNSSDKVRGIETLESVPIIGGFWETIFGNRIKRVKLISNKGTETDNDPSCVHPIIKRRQCRPEIRMWQTREKAKFSDGEKCRREAFRRLGNGVSDDLSSEEDGEARTQMILLRRSVEGASSDNGCEVKNRKSILSRHLNSQVKKTTTRWCHIVRDSDSLAESEFESAAFSQGSRSGVSGGSRSLNMSRRDSESTRHDSETEDMLWDDLLHGPECRSSVTSDSEGAHVNTLHSGTKRDPKEDVFQQNHLFWLQNSSPSSDRVSAIIWEGNECKKMDMSVLEISGIIMSRVNAYQQGVGYQMLGNVVTIGLAFFPFLHRLFREKSLDQLKSISAEEILTLFCGAPPVTPIIVLSIINFFERLCLTWMFFFMMCVAERTYKQRFLFAKLFSHITSARKARKYEIPHFRLKKVENIKIWLSLRSYLKRRGPQRSVDVVVSSVFLLTLSIAFICCAQVLQGHKTFLNDAYNWEFLIWETALLLFLLRLASLGSETNKKYSNVSILLTEQINLYLKMEKKPNKKEQLTLVNNVLKLSTKLLKELDTPFRLYGLTMNPLIYNITRVVILSAVSGVISDLLGFNIRLWKIKS

SEQ ID NO: 42007 - protein, 637 aa, Homo sapiens
MASNERDAISWYQKKIGAYDQQIWEKSIEQTQIKGLKNKPKKMGHIKPDLIDVDLIRGSTFAKAKPEIPWTSLTRKGLVRVVFFPLFSNWWIQVTSLRIFVWLLLLYFMQVIAIVLYLMMPIVNISEVLGPLCLMLLMGTVHCQIVSTQITRPSGNNGNRRRRKLRKTVNGDGSRENGNNSSDKVRGIETLESVPIIGGFWETIFGNRIKRVKLISNKGTETDNDPSCVHPIIKRRQCRPEIRMWQTREKAKFSDGEKCRREAFRRLGNGVSDDLSSEEDGEARTQMILLRRSVEGASSDNGCEVKNRKSILSRHLNSQVKKTTTRWCHIVRDSDSLAESEFESAAFSQGSRSGVSGGSRSLNMSRRDSESTRHDSETEDMLWDDLLHGPECRSSVTSDSEGAHVNTLHSGTKRDPKEDVFQQNHLFWLQNSSPSSDRVSAIIWEGNECKKMDMSVLEISGIIMSRVNAYQQGVGYQMLGNVVTIGLAFFPFLHRLFREKSLDQLKSISAEEILTLFCGAPPVTPIIVLSIINFFERLCLTWMFFFMMCVAERTYKQRFLFAKLFSHITSARKARKYEIPHFRLKKVENIKIWLSLRSYLKRRGPQRSVDVVVSSVFLLTLSIAFICCAQVKVSHLL

SEQ ID NO: 42008 - protein, 760 aa, Homo sapiens
MVLKAFFPTCCVSTDSGLLVGRWVPEQSSAVVLAVLHFPFIPIQVKQLLAQVRQASQVGVAVLGTWCHCRQEPEESLGRFLESLGAVFPHEPWLRLCRERGGTFWSCEATHRQAPTAPGAPGEDQVMLIFYDQRQVLLSQLHLPTVLPDRQAGATTASTGGLAAVFDTVARSEVLFRSDRFDEGPVRLSHWQSEGVEASILAELARRASGPICLLLASLLSLVSAVSACRVFKLWPLSFLGSKLSTCEQLRHRLEHLTLIFSTRKAENPAQLMRKANTVASVLLDVALGLMLLSWLHGRSRIGHLADALVPVADHVAEELQHLLQWLMGAPAGLKMNRALDQVLGRFFLYHIHLWISYIHLMSPFVEHILWHVGLSACLGLTVALSLLSDIIALLTFHIYCFYVYGARLYCLKIHGLSSLWRLFRGKKWNVLRQRVDSCSYDLDQLFIGTLLFTILLFLLPTTALYYLVFTLLRLLVVAVQGLIHLLVDLINSLPLYSLGLRLCRPYRLADKPTALQPRGAHLPPPQLWLPPQALLGRPVPQAVPWGAHLPLEAERGQAGLRELLARLAPPHGHSQPSALPGWHQLSWRMSCALWTLLCAPEHGRPCYHTLGLEVIGSEQMWGWPARLAALHHWHCLPWDPLPTCCGHHGGEHSNPRCPEHCPMPTLCTQVQRVRPPQQPQVEGWSPWGLPSGSALAVGVEGPCQDEPPSPRHPLAPSAEQHPASGGLKQSLTPVPSGPGPSLPEPHGVYLRMFPGEVAL

SEQ ID NO: 42009 - protein, 581 aa, Homo sapiens
MVLKAFFPTCCVSTDSGLLVGRWVPEQSSAVVLAVLHFPFIPIQVKQLLAQVRQASQVGVAVLGTWCHCRQEPEESLGRFLESLGAVFPHEPWLRLCRERGGTFWSCEATHRQAPTAPGAPGEDQVMLIFYDQRQVLLSQLHLPTVLPDRQAGATTASTGGLAAVFDTVARSEVLFRSDRFDEGPVRLSHWQSEGVEASILAELARRASGPICLLLASLLSLVSAVSACRVFKLWPLSFLGSKLSTCEQLRHRLEHLTLIFSTRKAENPAQLMRKANTVASVLLDVALGLMLLSWLHGRSRIGHLADALVPVADHVAEELQHLLQWLMGAPAGLKMNRALDQVLGRFFLYHIHLWISYIHLMSPFVEHILWHVGLSACLGLTVALSLLSDIIALLTFHIYCFYVYGARLYCLKIHGLSSLWRLFRGKKWNVLRQRVDSCSYDLDQLFIGTLLFTILLFLLPTTALYYLVFTLLRLLVVAVQGLIHLLVDLINSLPLYSLGLRLCRPYRLAAGVKFRVLRHEAGRPLRLLMQINPLPYSRVVHTYRLPSCGCHPKHSWGALCRKLFLGELIYPWRQRGDKQD

SEQ ID NO: 42010 - protein, 299 aa, Homo sapiens
MVLKAFFPTCCVSTDSGLLVGRWVPEQSSAVVLAVLHFPFIPIQVKQLLAQVRQASQVGVAVLGTWCHCRQEPEESLGRFLESLGAVFPHEPWLRLCRERGGTFWSCEATHRQAPTAPGAPGEDQVMLIFYDQRQVLLSQLHLPTVLPDRQAGATTASTGGLAAVFDTVARSEVLFRSDRFDEGPVRLSHWQSEGVEASILAELARRASGPICLLLASLLSLVSAVSACRVFKLWPLSFLGSKLSTCEQLRHRLEHLTLIFSTRKAENPAQLMRCGPALVSAGLGACPLAPSPSPSAPR

SEQ ID NO: 42011 - protein, 882 aa, Homo sapiens
MPGRARTRARGRARRRESYQQEAPGGPRAPGSATTQEPPQLQSTPRPLQEEVPVVRPLQPRAARGGAGGGAQSQGVKEPGPEAGLHTAPLQERRIGGVFQDLVVNTRQDMKHVKDSKTGSEGTVVQLLANHFRVISRPQWVAYKYNVDYKPDIEDGNLRTILLDQHRRKFGERHIFDGNSLLLSRPLKERRVEWLSTTKDKNIVKITVEFSKELTPTSPDCLRYYNILFRRTFKLLDFEQVGRNYYTKKKAIQLYRHGTSLEIWLGYVTSVLQYENSITLCADVSHKLLRIETAYDFIKRTSAQAQTGNIREEVTNKLIGSIVLTKYNNKTYRVDDIDWKQNPEDTFNKSDGSKITYIDYYRQQHKEIVTVKKQPLLVSQGRWKKGLTGTQREPILLIPQLCHMTGLTDEICKDYSIVKELAKHTRLSPRRRHHTLKEFINTLQDNKKVRELLQLWDLKFDTNFLSVPGRVLKNANIVQGRRMVKANSQGDWSREIRELPLLNAMPLHSWLILYSRSSHREAMSLKGHLQSVTAPMGITMKPAEMIEVDGDANSYIDTLRKYTRPTLQMGMSCLLVFKVICILPNDDKRRYDSIKRYLCTKCPIPSQCVVKKTLEKVQARTIVTKIAQQMNCKMGGALWKVETDVQRTMFVGIDCFHDIVNRQKSIAGFVASTNAELTKWYSQCVIQKTGEELVKELEICLKAALDVWCKNESSMPHSVIVYRDGVGDGQLQALLDHEAKKMSTYLKTISPNNFTLAFIVVKKRINTRFFLKHGSNFQNPPPGTVIDVELTRNEWYDFFIVSQSVQDGTVTPTHYNVIYDTIGLSPDTVQRLTYCLCHMYYNLPGIIRVPAPCHYAHKLAYLVGQSIHQEPNRSLSTRLFYL

SEQ ID NO: 42012 - protein, 651 aa, Homo sapiens
MADSAELKQMVMSLRVSELQVLLGYAGRNKHGRKHELLTKALHLLKAGCSPAVQMKIKELYRRRFPQKIMTPADLSIPNVHSSPMPATLSPSTIPQLTYDGHPASSPLLPVSLLGPKHELELPHLTSALHPVHPDIKLQKLPFYDLLDELIKPTSLASDNSQRFRETCFAFALTPQQVQQISSSMDISGTKCDFTVQVQLRFCLSETSCPQEDHFPPNLCVKVNTKPCSLPGYLPPTKNGVEPKRPSRPINITSLVRLSTTVPNTIVVSWTAEIGRNYSMAVYLVKQLSSTVLLQRLRAKGIRNPDHSRALIKEKLTADPDSEIATTSLRVSLLCPLGKMRLTIPCRALTCSHLQCFDATLYIQMNEKKPTWVCPVCDKKAPYEHLIIDGLFMEILKYCTDCDEIQFKEDGTWAPMRSKKEVQEVSASYNGVDGCLSSTLEHQVASHHQSSNKNKKVEVIDLTIDSSSDEEEEEPSAKRTCPSLSPTSPLNNKGILSLPHQASPVSRTPSLPAVDTSYINTSLIQDYRHPFHMTPMPYDLQGLDFFPFLSGDNQHYNTSLLAAAAAAVSDDQDLLHSSRFFPYTSSQMFLDQLSAGGSTSLPTTNGSSSGSNSSLVSSNSLRESHSHTVTNRSSTDTASIFGIIPDIISLD

SEQ ID NO: 42013 - protein, 653 aa, Homo sapiens
MFTLQDSYVKQMVMSLRVSELQVLLGYAGRNKHGRKHELLTKALHLLKAGCSPAVQMKIKELYRRRFPQKIMTPADLSIPNVHSSPMPATLSPSTIPQLTYDGHPASSPLLPVSLLGPKHELELPHLTSALHPVHPDIKLQKLPFYDLLDELIKPTSLASDNSQRFRETCFAFALTPQQVQQISSSMDISGTKCDFTVQVQLRFCLSETSCPQEDHFPPNLCVKVNTKPCSLPGYLPPTKNGVEPKRPSRPINITSLVRLSTTVPNTIVVSWTAEIGRNYSMAVYLVKQLSSTVLLQRLRAKGIRNPDHSRALIKEKLTADPDSEIATTSLRVSLLCPLGKMRLTIPCRALTCSHLQCFDATLYIQMNEKKPTWVCPVCDKKAPYEHLIIDGLFMEILKYCTDCDEIQFKEDGTWAPMRSKKEVQEVSASYNGVDGCLSSTLEHQVASHHQSSNKNKKVEVIDLTIDSSSDEEEEEPSAKRTCPSLSPTSPLNNKGILSLPHQASPVSRTPSLPAVDTSYINTSLIQDYRHPFHMTPMPYDLQGLDFFPFLSGDNQHYNTSLLAAAAAAVSDDQDLLHSSRFFPYTSSQMFLDQLSAGGSTSLPTTNGSSSGSNSSLVSSNSLRESHSHTVTNRSSTDTASIFGIIPDIISLD

SEQ ID NO: 42014 - protein, 325 aa, Homo sapiens
MADSAELKQMVMSLRVSELQVLLGYAGRNKHGRKHELLTKALHLLKAGCSPAVQMKIKELYRRRFPQKIMTPADLSIPNVHSSPMPATLSPSTIPQLTYDGHPASSPLLPVSLLGPKHELELPHLTSALHPVHPDIKLQKLPFYDLLDELIKPTSLASDNSQRFRETCFAFALTPQQVQQISSSMDISGTKCDFTVQVQLRFCLSETSCPQEDHFPPNLCVKVNTKPCSLPGYLPPTKNGVEPKRPSRPINITSLVRLSTTVPNTIVVSWTAEIGRNYSMAVYLVKQLSSTVLLQRLRAKGIRNPDHSRALSTYDKLISLIQLFC

SEQ ID NO: 42015 - protein, 852 aa, Homo sapiens
MSGRARVKARGIARSPSATEVGRIQASPLPRSVDLSNNEASSSNGFLGTSRISTNDKYGISSGDAGSTFMERGVKNKQDFMDLSICTREKLAHVRNCKTGSSGIPVKLVTNLFNLDFPQDWQLYQYHVTYIPDLASRRLRIALLYSHSELSNKAKAFDGAILFLSQKLEEKVTELSSETQRGETIKMTITLKRELPSSSPVCIQVFNIIFRKILKKLSMYQIGRNFYNPSEPMEIPQHKLSLWPGFAISVSYFERKLLFSADVSYKVLRNETVLEFMTALCQRTGLSCFTQTCEKQLIGLIVLTRYNNRTYSIDDIDWSVKPTHTFQKRDGTEITYVDYYKQQYDITVSDLNQPMLVSLLKKKRNDNSEAQLAHLIPELCFLTGLTDQATSDFQLMKAVAEKTRLSPSGRQQRLARLVDNIQRNTNARFELETWGLHFGSQISLTGRIVPSEKILMQDHICQPVSAADWSKDIRTCKILNAQSLNTWLILCSDRTEYVAESFLNCLRRVAGSMGFNVDYPKIIKVQENPAAFVRAIQQYVDPDVQLVMCILPSNQKTYYDSIKKYLSSDCPVPSQCVLARTLNKQGMMMSIATKIAMQMTCKLGGELWAVEIPLKSLMVVGIDVCKDALSKDVMVVGCVASVNPRITRWFSRCILQRTMTDVADCLKVFMTGALNKWYKYNHDLPARIIVYRAGVGDGQLKTLIEYEVPQLLSSVAESSSNTSSRLSVIVVRKKCMPRFFTEMNRTVQNPPLGTVVDSEATRNEWYDFYLISQVACRGTVSPTYYNVIYDDNGLKPDHMQRLTFKLCHLYYNWPGIVSVPAPCQYAHKLTFLVAQSIHKEPSLELANHLFYL

SEQ ID NO: 42016 - protein, 495 aa, Homo sapiens
MGPRSVDLSNNEASSSNGFLGTSRISTNDKYGISSGDAGSTFMERGVKNKQDFMDLSICTREKLAHVRNCKTGSSGIPVKLVTNLFNLDFPQDWQLYQYHVTYIPDLASRRLRIALLYSHSELSNKAKAFDGAILFLSQKLEEKVTELSSETQRGETIKMTITLKRELPSSSPVCIQVFNIIFRKILKKLSMYQIGRNFYNPSEPMEIPQHKLSLWPGFAISVSYFERKLLFSADVSYKVLRNETVLEFMTALCQRTGLSCFTQTCEKQLIGLIVLTRYNNRTYSIDDIDWSVKPTHTFQKRDGTEITYVDYYKQQYDITVSDLNQPMLVSLLKKKRNDNSEAQLAHLIPELCFLTGLTDQATSDFQLMKAVAEKTRLSPSGRQQRLARLVDNIQRNTNARFELETWGLHFGSQISLTGRIVPSEKILMQDHICQPVSAADWSKDIRTCKILNAQSLNTWLILCSDRTEYVAESFLNCLRRVAGSMGFNVDYPKM

SEQ ID NO: 42017 - protein, 453 aa, Homo sapiens
MERGVKNKQDFMDLSICTREKLAHVRNCKTGSSGIPVKLVTNLFNLDFPQDWQLYQYHVTYIPDLASRRLRIALLYSHSELSNKAKAFDGAILFLSQKLEEKVTELSSETQRGETIKMTITLKRELPSSSPVCIQVFNIIFRKILKKLSMYQIGRNFYNPSEPMEIPQHKLSLWPGFAISVSYFERKLLFSADVSYKVLRNETVLEFMTALCQRTGLSCFTQTCEKQLIGLIVLTRYNNRTYSIDDIDWSVKPTHTFQKRDGTEITYVDYYKQQYDITVSDLNQPMLVSLLKKKRNDNSEAQLAHLIPELCFLTGLTDQATSDFQLMKAVAEKTRLSPSGRQQRLARLVDNIQRNTNARFELETWGLHFGSQISLTGRIVPSEKILMQDHICQPVSAADWSKDIRTCKILNAQSLNTWLILCSDRTEYVAESFLNCLRRVAGSMGFNVDYPKM

SEQ ID NO: 42018 - protein, 474 aa, Homo sapiens
MSIRAPPRLLELARQRLLRDQALAISTMEELPRELFPTLFMEAFSRRRCETLKTMVQAWPFTRLPLGSLMKSPHLESLKSVLEGVDVLLTQEVRPRQSKLQVLDLRNVDENFCDIFSGATASFPEALSQKQTADNCPGTGRQQPFMVFIDLCLKNRTLDECLTHLLEWGKQRKGLLHVCCKELQVFGMPIHSIIEVLNMVELDCIQEVEVCCPWELSTLVKFAPYLGQMRNLRKLVLFNIRASACIPPDNKGQFIARFTSQFLKLDYFQNLSMHSVSFLEGHLDQLLRCLQASLEMVVMTDCLLSESDLKHLSWCPSIRQLKELDLRGVTLTHFSPEPLTGLLEQAVATLQTLDLEDCGIMDSQLSAILPVLSRCSQLSTFSFCGNLISMAALENLLRHTVGLSKLSLELYPAPLESYDTQGALCWGRFAELGAELMNTLRDLRQPKIIVFCTVPCPRCGIRASYDLEPSHCLC

SEQ ID NO: 42019 - protein, 669 aa, Homo sapiens
MQNSHMDEYRNSSNGSTGNSSEVVVEHPTDFSTEIMNVTEMEQSPDDSPNVNASTEETEMASAVDLPVTLTETEANFPPEYEKFWKTVENNPQDFTGWVYLLQYVEQENHLMAARKAFDRFFIHYPYCYGYWKKYADLEKRHDNIKPSDEVYRRGLQAIPLSVDLWIHYINFLKETLDPGDPETNNTIRGTFEHAVLAAGTDFRSDRLWEMYINWENEQGNLREVTAIYDRILGIPTQLYSHHFQRFKEHVQNNLPRDLLTGEQFIQLRRELASVNGHSGDDGPPGDDLPSGIEDITDPAKLITEIENMRHRIIEIHQEMFNYNEHEVSKRWTFEEGIKRPYFHVKPLEKAQLKNWKEYLEFEIENGTHERVVVLFERCVISCALYEEFWIKYAKYMENHSIEGVRHVFSRACTIHLPKKPMVHMLWAAFEEQQGNINEARNILKTFEECVLGLAMVRLRRVSLERRHGNLEEAEHLLQDAIKNAKSNNESSFYAVKLARHLFKIQKNLPKSRKVLLEAIERDKENTKLYLNLLEMEYSGDLKQNEENILNCFDKAVHGSLPIKMRITFSQRKVEFLEDFGSDVNKLLNAYDEHQTLLKEQDSLKRKAENGSEEPEEKKAHTEDTTSSSTQMIDGDLQANQAVYNYSAWYQYNYQNPWNYGQYYPPPPT

SEQ ID NO: 42020 - protein, 272 aa, Homo sapiens
MENHSIEGVRHVFSRACTIHLPKKPMVHMLWAAFEEQQGNINEARNILKTFEECVLGLAMVRLRRVSLERRHGNLEEAEHLLQDAIKNAKSNNESSFYAVKLARHLFKIQKNLPKSRKVLLEAIERDKENTKLYLNLLEMEYSGDLKQNEENILNCFDKAVHGSLPIKMRITFSQRKVEFLEDFGSDVNKLLNAYDEHQTLLKEQDSLKRKAENGSEEPEEKKAHTEDTTSSSTQMIDGDLQANQAVYNYSAWYQVSLHNYNSLFIDVISIN

SEQ ID NO: 42021 - protein, 151 aa, Homo sapiens
MRRLLLVTSLVVVLLWEAGAVPAPKVPIKMQVKHWPSEQDPEKAWGARVVEPPEKDDQLVVLFPVQKPKLLTTEEKPRGQGRGPILPGTKAWMETEDTLGHVLSPEPDHDSLYHPPPEEDQGEERPRLWVMPNHQVLLGPEEDQDHIYHPQ

SEQ ID NO: 42022 - protein, 90 aa, Homo sapiens
MRRLLLVTSLVVVLLWEAGAVPAPKVPIKMQVKHWPSEQDPEKAWGARVVEPPEKDDQLVVLFPVQKPKLLTTEEKPRGTKAWMESRARP

SEQ ID NO: 42023 - protein, 152 aa, Homo sapiens
MRRLLLVTSLVVVLLWEAGAVPAPKVPIKMQVKHWPSEQDPENRAWGARVVEPPEKDDQLVVLFPVQKPKLLTTEEKPRGQGRGPILPGTKAWMETEDTLGHVLSPEPDHDSLYHPPPEEDQGEERPRLWVMPNHQVLLGPEEDQDHIYHPQ

SEQ ID NO: 42024 - protein, 142 aa, Homo sapiens
MRRLLLVTSLVVVLLWEAGAVPAPKVPIKMQVKHWPSEQDPEKAWGARVVEPPEKDDQLVVLFPVQKPKLLTTEEKPRGTKAWMETEDTLGHVLSPEPDHDSLYHPPPEEDQGEERPRLWVMPNHQVLLGPEEDQDHIYHPQ

SEQ ID NO: 42025 - protein, 1406 aa, Homo sapiens
MHQTLCLNPESLKMSACSDFVEHIWKPGSCKNCFCLRSDHQLVAGPPQPRAGSLPPPPRLPPRPENCRLEDEGVNSSPYSKPTIAVKPTMMSSEASDVWTEANLSAEVSQVIWRRAPGKLPLPKQEDAPVVYLGSFRGVQKPAGPSTSPDGNSRCPPAYTMVGLHNLEPRGERNIAFHPVSFPEEKAVHKEKPSFPYQDRPSTQESFRQKLAAFAGTTSGCHQGPGPLRESLPSEDDSDQRCSPSGDSEGGEYCSILDCCPGSPVAKAASQTAGSRGRHGGRDCSPTCWEQGKCSGPAEQEKRGPSFPKECCSQGPTAHPSCLGPKKLSLTSEAAISSDGLSCGSGSGSGSGASSPFVPHLESDYCSLMKEPAPEKQQDPGCPGVTPSRCLGLTGEPQPPAHPREATQPEPIYAESTKRKKAAPVPSKSQAKIEHAAAAQGQGQVCTGNAWAQKAASGWGRDSPDPTPQVSATITVMAAHPEEDHRTIYLSSPDSAVGVQWPRGPVSQNSEVGEEETSAGQGLSSRESHAHSASESKPKERPAIPPKLSKSSPVGSPVSPSAGGPPVSPLADLSDGSSGGSSIGPQPPSQGPADPAPSCRTNGVAISDPSRCPQPAASSASEQRRPRFQAGTWSRQCRIEEEEEVEQELLSHSWGRETKNGPTDHSNSTTWHRLHPTDGSSGQNSKVGTGMSKSASFAFEFPKDRSGIETFSPPPPPPKSRHLLKMNKSSSDLEKVSQGSAESLSPSFRGVHVSFTTGSTDSLASDSRTCSDGGPSSELAHSPTNSGKKLFAPVPFPSGSTEDVSPSGPQQPPPLPQKKIVSRAASSPDGFFWTQGSPKPGTASPKLNLSHSETNVHDESHFSYSLSPGNRHHPVFSSSDPLEKAFKGSGHWLPAAGLAGNRGGCGSPGLQCKGAPSASSSQLSVSSQASTGSTQLQLHGLLSNISSKEGTYAKLGGLYTQSLARLVAKCEDLFMGGQKKELHFNENNWSLFKLTCNKPCCDSGDAIYYCATCSEDPGSTYAVKICKAPEPKTVSYCSPSVPVHFNIQQDCGHFVASVPSSMLSSPDAPKDPVPALPTHPPAQEQDCVVVITREVPHQTASDFVRDSAASHQAEPEAYERRVCFLLLQLCNGLEHLKEHGIIHRDLCLENLLLVHCTLQAGPGPAPAPAPAPAPAAAAPPCSSAAPPAGGTLSPAAGPASPEGPREKQLPRLIISNFLKAKQKPGGTPNLQQKKSQARLAPEIVSASQYRKFDEFQTGILIYELLHQPNPFEVRAQLRERDYRQEDLPPLPALSLYSPGLQQLAHLLLEADPIKRIRIGEAKRVLQCLLWGPRRELVQQPGTSEEALCGTLHNWIDMKRALMMMKFAEKAVDRRRGVELEDWLCCQYLASAEPGALLQSLKLLQLL

SEQ ID NO: 42026 - protein, 630 aa, Homo sapiens
MLGMYVPDRFSLKSSRVQDGMGLYTARRVRKGEKFGPFAGEKRMPEDLDENMDYRLMWEVRGSKGEVLYILDATNPRHSNWLRFVHEAPSQEQKNLAAIQEGENIFYLAVEDIETDTELLIGYLDSDMEAEEEEQQIMTVIKEGEVENSRRQSTAGRKDRLGCKEDYACPQCESSFTSEDILAEHLQTLHQKPTEEKEFKCKNCGKKFPVKQALQRHVLQCTAKSSLKESSRSFQCSVCNSSFSSASSFEQHQETCRGDARFVCKADSCGKRLKSKDALKRHQENVHTGDPKKKLICSVCNKKCSSASSLQEHRKIHEIFDCQECMKKFISANQLKRHMITHSEKRPYNCEICNKSFKRLDQVGAHKVIHSEDKPYKCKLCGKGFAHRNVYKNHKKTHSEERPFQCEECKALFRTPFSLQRHLLIHNSERTFKCHHCDATFKRKDTLNVHVQVVHERHKKYRCELCNKAFVTPSVLRSHKKTHTGEKEKICPYCGQKFASSGTLRVHIRSHTGERPYQCPYCEKGFSKNDGLKMHIRTHTREKPYKCSECSKAFSQKRGLDEHKRTHTGEKPFQCDVCDLAFSLKKMLIRHKMTHNPNRPLAECQFCHKKFTRNDYLKVHMDNIHGVADS

SEQ ID NO: 42027 - protein, 599 aa, Homo sapiens
MLGMYVPDRFSLKSSRVQDGMGLYTARRVRKGEKFGPFAGEKRMPEDLDENMDYRLMWEVRGSKGEVLYILDATNPRHSNWLRFVHEAPSQEQKNLAAIQEGENIFYLAVEDIETDTELLIGYLDSDMEAEEEEQQIMTVIKEGEVENSRRQSTAGRKDRLGCKEDYACPQCESSFTSEDILAEHLQTLHQKPTEEKEFKCKNCGKKFPVKQALQRHFEQHQETCRGDARFVCKADSCGKRLKSKDALKRHQENVHTGDPKKKLICSVCNKKCSSASSLQEHRKIHEIFDCQECMKKFISANQLKRHMITHSEKRPYNCEICNKSFKRLDQVGAHKVIHSEDKPYKCKLCGKGFAHRNVYKNHKKTHSEERPFQCEECKALFRTPFSLQRHLLIHNSERTFKCHHCDATFKRKDTLNVHVQVVHERHKKYRCELCNKAFVTPSVLRSHKKTHTGEKEKICPYCGQKFASSGTLRVHIRSHTGERPYQCPYCEKGFSKNDGLKMHIRTHTREKPYKCSECSKAFSQKRGLDEHKRTHTGEKPFQCDVCDLAFSLKKMLIRHKMTHNPNRPLAECQFCHKKFTRNDYLKVHMDNIHGVADS

SEQ ID NO: 42028 - protein, 111 aa, Homo sapiens
MLGMYVPDRFSLKSSRVQDGMGLYTARRVRKGEKFGPFAGEKRMPEDLDENMDYRLMWEVRGSKGEVLYILDATNPRHSNWLRFVHEAPSQEQKNLAAIQDKNLGPAEWRG

SEQ ID NO: 42029 - protein, 501 aa, Homo sapiens
MLGMYVPDRFSLKSSRVQDGMGLYTARRVRKGEKFGPFAGEKRMPEDLDENMDYRLMWEVRGSKGEVLYILDATNPRHSNWLRFVHEAPSQEQKNLAAIQEGENIFYLAVEDIETDTELLIGYLDSDMEAEEEEQQIMTVIKEGEVENSRRQSTAGRKDRLGCKEDYACPQCESSFTSEDILAEHLQTLHQKPTEEKEFKCKNCGKKFPVKQALQRHFEQHQETCRGDARFVCKADSCGKRLKSKDALKRHQENVHTGDPKKKLICSVCNKKCSSASSLQEHRKIHEIFDCQECMKKFISANQLKRHMITHSEKRPYNCEICNKSFKRLDQVGAHKVIHSEDKPYKCKLCGKGFAHRNVYKNHKKTHSEERPFQCEECKALFRTPFSLQRHLLIHNSERTFKCHHCDATFKRKDTLNVHVQVVHERHKKYRCELCNKAFVTPSVLRSHKKTHTGEKEKICPYCGQKFASSGTLRVHIRSHTGEAVQVLRVQQGLQPEARPG

SEQ ID NO: 42030 - protein, 894 aa, Homo sapiens
MSPEKSQEESPEEDTERTERKPMVKDAFKDISIYFTKEEWAEMGDWEKTRYRNVKRNYNALITIGLRATRPAFMCHRRQAIKLQVDDTEDSDEEWTPRQQVKPPWMALRVEQRKHQKGMPKASFSNESSLKELSRTANLLNASGSEQAQKPVSPSGEASTSGQHSRLKLELRKKETERKMYSLRERKGHAYKEVSEPQDDDYLYCEMCQNFFIDSCAAHGPPTFVKDSAVDKGHPNRSALSLPPGLRIGPSGIPQAGLGVWNEASDLPLGLHFGPYEGRITEDEEAANNGYSWLITKGRNCYEYVDGKDKSWANWMRYVNCARDDEEQNLVAFQYHRQIFYRTCRVIRPGCELLVWYGDEYGQELGIKWGSKWKKELMAGREPKPEIHPCPSCCLAFSSQKFLSQHVERNHSSQNFPGPSARKLLQPENPCPGDQNQEQQYPDPHSRNDKTKGQEIKERSKLLNKRTWQREISRAFSSPPKGQMGSCRVGKRIMEEESRTGQKVNPGNTGKLFVGVGISRIAKVKYGECGQGFSVKSDVITHQRTHTGEKLYVCRECGRGFSWKSHLLIHQRIHTGEKPYVCRECGRGFSWQSVLLTHQRTHTGEKPYVCRECGRGFSRQSVLLTHQRRHTGEKPYVCRECGRGFSRQSVLLTHQRRHTGEKPYVCRECGRGFSWQSVLLTHQRTHTGEKPYVCRECGRGFSWQSVLLTHQRTHTGEKPYVCRECGRGFSNKSHLLRHQRTHTGEKPYVCRECGRGFRDKSHLLRHQRTHTGEKPYVCRECGRGFRDKSNLLSHQRTHTGEKPYVCRECGRGFSNKSHLLRHQRTHTGEKPYVCRECGRGFRNKSHLLRHQRTHTGEKPYVCRECGRGFSDRSSLCYHQRTHTGEKPYVCREDE

SEQ ID NO: 42031 - protein, 595 aa, Homo sapiens
MLKPGDPGGSAFLKVDPAYLQHWQQLFPHGGAGPLKGSGAAGLLSAPQPLQPPPPPPPPERAEPPPDSLRPRPASLSSASSTPASSSTSASSASSCAAAAAAAALAGLSALPVSQLPVFAPLAAAAVAAEPLPPKELCLGATSGPGPVKCGGGGGGGGEGRGAPRFRCSAEELDYYLYGQQRMEIIPLNQHTSDPNNRCDMCADNRNGECPMHGPLHSLRRLVGTSSAAAAAPPPELPEWLRDLPREVCLCTSTVPGLAYGICAAQRIQQGTWIGPFQGVLLPPEKVQAGAVRNTQHLWEIYDQDGTLQHFIDGGEPSKSSWMRYIRCARHCGEQNLTVVQYRSNIFYRACIDIPRGTELLVWYNDSYTSFFGIPLQCIAQDENLNVPSTVMEAMCRQDALQPFNKSSKLAPTTQQRSVVFPQTPCSRNFSLLDKSGPIESGFNQINVKNQRVLASPTSTSQLHSEFSDWHLWKCGQCFKTFTQRILLQMHVCTQNPDRPYQCGHCSQSFSQPSELRNHVVTHSSDRPFKCGYCGRAFAGATTLNNHIRTHTGEKPFKCERCERSFTQATQLSRHQRMPNECKPITESPESIEVD

SEQ ID NO: 42032 - protein, 131 aa, Homo sapiens
MEIIPLNQHTSDPNNRCDMCADNRNGECPMHGPLHSLRRLVGTSSAAAAAPPPELPEWLRDLPREVCLCTSTVPGLAYGICAAQRIQQGTWIGPFQGVLLPPEKVQAGAVRNTQHLWEIYDQDGTLQHFID

SEQ ID NO: 42033 - protein, 413 aa, Homo sapiens
MEIIPLNQHTSDPNNRCDMCADNRNGECPMHGPLHSLRRLVGTSSAAAAAPPPELPEWLRDLPREVCLCTSTVPGLAYGICAAQRIQQGTWIGPFQGVLLPPEKVQAGAVRNTQHLWEIYDQDGTLQHFIDGGEPSKSSWMRYIRCARHCGEQNLTVVQYRSNIFYRACIDIPRGTELLVWYNDSYTSFFGIPLQCIAQDENLNVPSTVMEAMCRQDALQPFNKSSKLAPTTQQRSVVFPQTPCSRNFSLLDKSGPIESGFNQINVKNQRVLASPTSTSQLHSEFSDWHLWKCGQCFKTFTQRILLQMHVCTQNPDRPYQCGHCSQSFSQPSELRNHVVTHSSDRPFKCGYCGRAFAGATTLNNHIRTHTGEKPFKCERCERSFTQATQLSRHQRMPNECKPITESPESIEVD

SEQ ID NO: 42034 - protein, 571 aa, Homo sapiens
MSREAGSCRVGTGARARSRKPKKPHYIPRPWGKPYNYKCFQCPFTCLEKSHLYNHMKYSLCKDSLSLLLDSPDWACRRGSTTPRPHAPTPDRPGESDPGRQPQGARPTGAAPAPDLVVADIHSLHCGGGPKSRAKGSPGPPPPVARATRKGPGPSGLLPESWKPGMGGDPRGVGAGDMASAGPEGSVPCYPPPAPGEFPEAHSLHLSLLGVNYPLSPGLFSYLGPSLAAAAHVPFLASASPLLPPATAFPAVQPPQRPTPAPRLYYPLLLEHTLGLPAGKAALAKAPVSPRSPSGTPAPGLLKVPVPGLGPWPRVTPRDPGQEGELERAAQSDPRRRLSLGSRLELPKASPSLTRFCSRSSLPTGSSVMLWPEDGDPGGPETPGPEGPLPLQPRGPVPGSPEHVGEDLTRALGDYARVEQRLGQLGPAGGLAPRPLREQLGKIRLELLTIHQALEQAVRPPDAPLDLSVKRAPAKGPQALGEAWGRPELGPVLTGGTPEPPGMLGPAAPQPFSGHTTKCEADSSVPPPGLPLAAPDDPVIPGSGWGTCVATRSSQTPEAVCGLQSPQGAEV

SEQ ID NO: 42035 - protein, 188 aa, Homo sapiens
MPKRKKQNHHQPPTQQQPPLPEREETGDEEDGSPIGPPSLLGPPPMANGKPGDPKSALHRGPPGSRGPLIPPLLSLPPPPWGRGPIRRGLGPRSSPYGRGWWGVNAEPPFPGPGHGGPTRGSFHKEQRNPRRLKSWSLIKNTCPPKDDPQVMEDKSDRPVCRHFAKKGHCRYEDLCAFYHPGVNGPPL

SEQ ID NO: 42036 - protein, 167 aa, Homo sapiens
MPKRKKQNHHQPPTQQQPPLPEREETGDEEDGSPIALHRGPPGSRGPLIPPLLSLPPPPWGRGPIRRGLGPRSSPYGRGWWGVNAEPPFPGPGHGGPTRGSFHKEQRNPRRLKSWSLIKNTCPPKDDPQVMEDKSDRPVCRHFAKKGHCRYEDLCAFYHPGVNGPPL

SEQ ID NO: 42037 - protein, 271 aa, Homo sapiens
MEALPLLAATTPDHGRHRRLLLLPLLLFLLPAGAVQGWETEERPRTREEECHFYAGGQVYPGEASRVSVADHSLHLSKAKISKPAPYWEGTAVIDGEFKELKLTDYRGKYLVFFFYPLDFTFVCPTEIIAFGDRLEEFRSINTEVVACSVDSQFTHLAWINTPRRQGGLGPIRIPLLSDLTHQISKDYGVYLEDSGHTLRGLFIIDDKGILRQITLNDLPVGRSVDETLRLVQAFQYTDKHGEVCPAGWKPGSETIIPDPAGKLKYFDKLN

SEQ ID NO: 42038 - protein, 105 aa, Homo sapiens
MRGATRVSIMLLLVTVSDCAVITGACERDVQCGAGTCCAISLWLRGLRMCTPLGREGEECHPGSHKVPFFRKRKHHTCPCLPNLLCSRFPDGRYRCSMDLKNINF

SEQ ID NO: 42039 - protein, 226 aa, Homo sapiens
MEAERRRQAEKPKKGRVGSNLLPERHPATGTPTTTVDSSAPPCRRLPGAGGGRSRFSPQGGQRGRPHSRRRHRTTFSPVQLEQLESAFGRNQYPDIWARESLARDTGLSEARIQVWFQNRRAKQRKQERSLLQPLAHLSPAAFSSFLPESTACPYSYAAPPPPVTCFPHPYSHALPSQPSTGGAFALSHQSEDWYPTLHPAPAGHLPCPPPPPMLPLSLEPSKSWN

SEQ ID NO: 42040 - protein, 137 aa, Homo sapiens
MGDWKVYISAVLRDQRIDDVAIVGHADNSCVWASRPGGLLAAISPQEVGVLTGPDRHTFLQAGLSVGGRRCCVIRDHLLAEGDGVLDARTKGLDARAVCVGRAPRALLVLMGRRGVHGGILNKTVHELIRGLRMQGA

SEQ ID NO: 42041 - protein, 422 aa, Homo sapiens
MQHPKPFCAPAAPQEGFSPQSLEGAEVLGNQPAPTCAEPPPAMGSLNLYHPPDPEKEVFPAPPAGFQMAPCGCFFDPRIYRIEWTTPDLGQSALYKLAASSGGPAGVPSAPGSYLLEPQPYLKAPGLPPYPHYQQAPGGPQFLLPYFPPEGPGPEALGFVGDAGPAAFVELPLPPLEEGPAPLPPPPPKENKPPPVLITLPAEPTLPPDAYSHLQGHLGHFPGPEPLAFPVKELQGSGARPGVPLYPPGLSELKVAEVKEGALLGAGKAKAPKTARALALPDKVLLEDAMKLFDCLPGASEPEGTLCEVPGPALPDSSGGNSADDIRSLCLPEELLSFDYSVPEILDTVSNVDYFFNFKALDEEQPPHPGPPATNTPAPILSGKRKASTAKKGKPGRKARQPAGPASATPPGPREDLGATPH

SEQ ID NO: 42042 - protein, 755 aa, Homo sapiens
MAGCIPEEKTYRRFLELFLGEFRGPCGGGEPEPEPEPEPEPEPESEPEPEPELVEAEAAEASVEEPGEEAATVAATEEGDQEQDPEPEEEAAVEGEEEEEGAATAAAAPGHSAVPPPPPQLPPLPPLPRPLSERITREEVEGESLDLCLQQLYKYNCPSFLAAALARATSDEVLQSDLSAHYIPKETDGTEGTVEIETVKLARSVFSKLHEICCSWVKDFPLRRRPQLYYETSIHAIKNMRRKMEDKHVCIPDFNMLFNLEDQEEQAYFAVFDGHGGVDAAIYASIHLHVNLVRQEMFPHDPAEALCRAFRVTDERFVQKAARESLRCGTTGVVTFIRGNMLHVAWVGDSQVMLVRKGQAVELMKPHKPDREDEKQRIEALGGCVVWFGAWRVNGSLSVSRAIGDAEHKPYICGDADSASTVLDGTEDYLILACDGFYDTVNPDEAVKVVSDHLKENNGDSSMVAHKLVASARDAGSSDNITVIVVFLRDMNKAVNVSEESDWTENSFQGGQEDGGDDKENHGECKRPWPQHQCSAPADLGYDGRVDSFTDRTSLSPGSQINVLEDPGYLDLTQIEASKPHSAQFLLPVEMFGPGAPKKANLINELMMEKKSVQSSLPEWSGAGEFPTAFNLGSTGEQIYRMQSLSPVCSGLENEQFKSPGNRVSRLSHLRHHYSKKWHRFRFNPKFYSFLSAQEPSHKIGTSLSSLTGSGKRNRIRSSLPWRQNSWKGYSENMRKLRKTHDIPCPDLPWSYKIE

SEQ ID NO: 42043 - protein, 518 aa, Homo sapiens
MKSFRVIFLHIISQRKRMAQKGLWDQEEQAYFAVFDGHGGVDAAIYASIHLHVNLVRQEMFPHDPAEALCRAFRVTDERFVQKAARESLRCGTTGVVTFIRGNMLHVAWVGDSQVMLVRKGQAVELMKPHKPDREDEKQRIEALGGCVVWFGAWRVNGSLSVSRAIGDAEHKPYICGDADSASTVLDGTEDYLILACDGFYDTVNPDEAVKVVSDHLKENNGDSSMVAHKLVASARDAGSSDNITVIVVFLRDMNKAVNVSEESDWTENSFQGGQEDGGDDKENHGECKRPWPQHQCSAPADLGYDGRVDSFTDRTSLSPGSQINVLEDPGYLDLTQIEASKPHSAQFLLPVEMFGPGAPKKANLINELMMEKKSVQSSLPEWSGAGEFPTAFNLGSTGEQIYRMQSLSPVCSGLENEQFKSPGNRVSRLSHLRHHYSKKWHRFRFNPKFYSFLSAQEPSHKIGTSLSSLTGSGKRNRIRSSLPWRQNSWKGYSENMRKLRKTHDIPCPDLPWSYKIE

SEQ ID NO: 42044 - protein, 546 aa, Homo sapiens
MGAYLSQPNTVKCSGDGVGAPRLPLPYGFSAMQGWRVSMEDAHNCIPELDSETAMFSVYDGHGGEEVALYCAKYLPDIIKDQKAYKEGKLQKALEDAFLAIDAKLTTEEVIKELAQIAGRPTEDEDEKEKVADEDDVDNEEAALLHEEATMTIEELLTRYGQNCHKGPPHSKSGGGTGEEPGSQGLNGEAGPEDSTRETPSQENGPTAKAYTGFSSNSERGTEAGQVGEPGIPTGEAGPSCSSASDKLPRVAKSKFFEDSEDESDEAEEEEEDSEECSEEEDGYSSEEAENEEDEDDTEEAEEDDEEEEEEMMVPGMEGKEEPGSDSGTTAVVALIRGKQLIVANAGDSRCVVSEAGKALDMSYDHKPEDEVELARIKNAGGKVTMDGRVNGGLNLSRAIGDHFYKRNKNLPPEEQMISALPDIKVLTLTDDHEFMVIACDGIWNVMSSQEVVDFIQSKISQRDENGELRLLSSIVEELLDQCLAPDTSGDGTGCDNMTCIIICFKPRNTAELQPESGKRKLEEVLSTEGAEENGNSDKKKKAKRD

SEQ ID NO: 42045 - protein, 459 aa, Homo sapiens
MSAGWFRRRFLPGEPLPAPRPPGPHASPVPYRRPRFLRGSSSSPGAADASRRPDSRPVRSPARGRTLPWNAGYAEIINAEKSEFNEDQAACGKLCIRRCEFGAEEEWLTLCPEEFLTGHYWALFDGHGGPAAAILAANTLHSCLRRQLEAVVEGLVATQPPMHLNGRCICPSDPQFVEEKGIRAEDLVIGALESAFQECDEVIGRELEASGQMGGCTALVAVSLQGKLYMANAGDSRAILVRRDEIRPLSFEFTPETERQRIQQLAFVYPELLAGEFTRLEFPRRLKGDDLGQKVLFRDHHMSGWSYKRVEKSDLKYPLIHGQGRQARLLGTLAVSRGLGDHQLRVLDTNIQLKPFLLSVPQVTVLDVDQLELQEDDVVVMATDGLWDVLSNEQVAWLVRSFLPGNQEDPHRFSKLAQMLIHSTQGKEDSLTEEGQVSYDDVSVFVIPLHSQGQESSDH

SEQ ID NO: 42046 - protein, 270 aa, Homo sapiens
MHLNGRCICPSDPQFVEEKGIRAEDLVIGALESAFQECDEVIGRELEASGQMGGCTALVAVSLQGKLYMANAGDSRAILVRRDEIRPLSFEFTPETERQRIQQLAFVYPELLAGEFTRLEFPRRLKGDDLGQKVLFRDHHMSGWSYKRVEKSDLKYPLIHGQGRQARLLGTLAVSRGLGDHQLRVLDTNIQLKPFLLSVPQVTVLDVDQLELQEDDVVVMATDGLWDVLSNEQVAWLVRSFLPGNQEDPHRYCSCWGPAWAWVGASSKPK

SEQ ID NO: 42047 - protein, 284 aa, Homo sapiens
MSAGWFRRRFLPGEPLPAPRPPGPHASPVPYRRPRFLRGSSSSPGAADASRRPDSRPVRSPARGRTLPWNAGYAEIINAEKSEFNEDQAACGKLCIRRCEFGAEEEWLTLCPEEFLTGHYWALFDGHGGPAAAILAANTLHSCLRRQLEAVVEGLVATQPPMHLNGRCICPSDPQFVEEKGIRAEDLVIGALESAFQECDEVIGRELEASGQMGGCTALVAVSLQGKLYMANAGDSRAILVRRDEIRPLSFEFTPETERQRIQQLVGALGSMEAVKLQLLGPGP

SEQ ID NO: 42048 - protein, 169 aa, Homo sapiens
MGHRAWVDAGSAPGRSYKRVEKSDLKYPLIHGQGRQARLLGTLAVSRGLGDHQLRVLDTNIQLKPFLLSVPQVTVLDVDQLELQEDDVVVMATDGLWDVLSNEQVAWLVRSFLPGNQEDPHRFSKLAQMLIHSTQGKEDSLTEEGQVSYDDVSVFVIPLHSQGQESSDH

SEQ ID NO: 42049 - protein, 247 aa, Homo sapiens
MGGCTALVAVSLQGKLYMANAGDSRAILVRRDEIRPLSFEFTPETERQRIQQLAFVYPELLAGEFTRLEFPRRLKGDDLGQKVLFRDHHMSGWSYKRVEKSDLKYPLIHGQGRQARLLGTLAVSRGLGDHQLRVLDTNIQLKPFLLSVPQVTVLDVDQLELQEDDVVVMATDGLWDVLSNEQVAWLVRSFLPGNQEDPHRFSKLAQMLIHSTQGKEDSLTEEGQVSYDDVSVFVIPLHSQGQESSDH

SEQ ID NO: 42050 - protein, 245 aa, Homo sapiens
MTSSYGHVLERQPALGGRLDSPGNLDTLQAKKNFSVSHLLDLEEAGDMVAAQADENVGEAGRSLLESPGLTSGSDTPQQDNDQLNSEEKKKRKQRRNRTTFNSSQLQALERVFERTHYPDAFVREDLARRVNLTEARVQVWFQNRRAKFRRNERAMLANKNASLLKSYSGDVTAVEQPIVPRPAPRPTDYLSWGTASPYSAMATYSATCANNSPAQGINMANSIANLRLKAKEYSLQRNQVPTVN

SEQ ID NO: 42051 - protein, 217 aa, Homo sapiens
MTSSYGHVLERQPALGGRLDSPGNLDTLQAKKNFSVSHLLDLEEAGDMVAAQADENVGEAGRSLLESPGLTSGSDTPQQDNDQLNSEEKKKRKQRRNRTTFNSSQLQALERVFERTHYPDAFVREDLARRVNLTEARVQVWFQNRRAKFRRNERAMLANKNASLLKSYSGDVTAVEQPIVPRPAPRPTDYLSWGTASPYRSSSLPRCCLHEGLHNGF

SEQ ID NO: 42052 - protein, 899 aa, Homo sapiens
MARHGCLGLGLFCCVLFAATVGPQPTPSIPGAPATTLTPVPQSEASMLSLNLGLNFKFHLRGPAAVWGSPVTETQPLSLGPGQEPGEEVASGLRTDPLWELLVGSSGNSLTEWGSTEGGSKPRASSLLPESTSRRSGPSDGPTAPYQPRRSTVTWDTALMVTALPSSAPRPHQSELELKFDMALRAGAAPTLGHRTLPLLPSLRASLAEIAGRLGPFGFFGTTLSPLRNFSGLSPPGETTSTSSASGVSGSLGFLGTTLSLPPYSLERKLSSPSPLDPAASLSFASIATTSLDPTVPISGPDDLSPPASLGNPSGQPECGPGSCSVGELPEREGQPPEAPRPLFFLTLEADWAEARARWGLAWEAHVYGVGALFGLVALLALLALALLPWRCPPGAPCLALLDLLLLSAGTTRAFPLFYDAYGHRDRLPALAWLLLQDLPLPCLAAGLGLACLLLARPRPPRCPTGLAALLLLGLGLAAAAALGSAAHRPLRPLRLASRGLHAFLAAFLSGLLLALSCWGGRRRRAGAPLGGSGFKGATPLPQGRSPFAPRESWRRAARTAPVAGTFGLLSGALQGYEVLHALGYGGQSGLEGPWPWWAFQLGLRLGEVGVALPLALLGLYPALCSPRVPPRCWAKLFRLSPGHAAPLLPGGWVTGPPDKEPLGSAIARGDAELLQLCALAGPGPDLLLQGGGCRGFEGAAANPAPSPASSPCSDYTVDFRPPSPINLRRSIEEALCSEALLAPGLFQGPAFEDALPGLGLYRTASLGTGGRASERSGEASGPAAPPELPSPGAWPAGSSVSSGSFCGLSRDSSSMLLCSSPDRPPRCPLVCVLSPPRPSGSSPSLPASGSYQALSPPSRDSPEPASELQAEEALLQEQFLDACRQIDELSVGSDTIDL

SEQ ID NO: 42053 - protein, 429 aa, Homo sapiens
MARHGCLGLGLFCCVLFAATVGPQPTPSIPGAPATTLTPVPQSEASMLSLNLGLNFKFHLRGPAAVWGSPVTETQPLSLGPGQEPGEEVASGLRTDPLWELLVGSSGNSLTEWGSTEGGSKPRASSLLPESTSRRSGPSDGPTAPYQPRRSTVTWDTALMVTALPSSAPRPHQSELELKFDMALRAGAAPTLGHRTLPLLPSLRASLAEIAGRLGPFGFFGTTLSPLRNFSGLSPPGETTSTSSASGVSGSLGFLGTTLSLPPYSLERKLSSPSPLDPAASLSFASIATTSLDPTVPISGPDDLSPPASLGNPSGQPECGPGSCSVGELPEREGQPPEAPRPLFFLTLEADWAEARARWGLAWEAHVYGRLHRGLPPALPNQPATQHRGGPLQRGPACAWPLPGPCLRGRSAWARTLPHRLAGDRGQGQ

SEQ ID NO: 42054 - protein, 693 aa, Homo sapiens
MARHGCLGLGLFCCVLFAATVGPQPTPSIPGAPATTLTPVPQSEASMLSLNLGLNFKFHLRGPAAVWGSPVTETQPLSLGPGQEPGEEVASGLRTDPLWELLVGSSGNSLTEWGSTEGGSKPRASSLLPESTSRRSGPSDGPTAPYQPRRSTVTWDTALMVTALPSSAPRPHQSELELKFDMALRAGAAPTLGHRTLPLLPSLRASLAEIAGRLGPFGFFGTTLSPLRNFSGLSPPGETTSTSSASGVSGSLGFLGTTLSLPPYSLERKLSSPSPLDPAASLSFASIATTSLDPTVPISGPDDLSPPASLGNPSGQPECGPGSCSVGELPEREGQPPEAPRPLFFLTLEADWAEARARWGLAWEAHVYGGYEVLHALGYGGQSGLEGPWPWWAFQLGLRLGEVGVALPLALLGLYPALCSPRVPPRCWAKLFRLSPGHAAPLLPGGWVTGPPDKEPLGSAIARGDAELLQLCALAGPGPDLLLQGGGCRGFEGAAANPAPSPASSPCSDYTVDFRPPSPINLRRSIEEALCSEALLAPGLFQGPAFEDALPGLGLYRTASLGTGGRASERSGEASGPAAPPELPSPGAWPAGSSVSSGSFCGLSRDSSSMLLCSSPDRPPRCPLVCVLSPPRPSGSSPSLPASGSYQALSPPSRDSPEPASELQAEEALLQEQFLDACRQIDELSVGSDTIDL

SEQ ID NO: 42055 - protein, 372 aa, Homo sapiens
MSTAALITLVRSGGNQVRRRVLLSSRLLQDDRRVTPTCHSSTSEPRCSRFDPDGSGSPATWDNFGIWDNRIDEPILLPPSIKYGKPIPKISLENVGCASQIGKRKENEDRFDFAQLTDEVLYFAVYDGHGGPAAADFCHTHMEKCIMDLLPKEKNLETLLTLAFLEIDKAFSSHARLSADATLLTSGTTATVALLRDGIELVVASVGDSRAILCRKGKPMKLTIDHTPERKDEKERIKKCGGFVAWNSLGQPHVNGRLAMTRSIGDLDLKTSGVIAEPETKRIKLHHADDSFLVLTTDGINFMVNSQEICDFVNQCHDPNEAAHAVTEQAIQYGTEDNSTAVVVPFGAWGKYKNSEINFSFSRSFASSGRWA

SEQ ID NO: 42056 - protein, 233 aa, Homo sapiens
MSTAALITLVRSGGNQVRRRVLLSSRLLQDDRRVTPTCHSSTSEPRCSRFDPDGSGSPATWDNFGIWDNRIDEPILLPPSIKYGKPIPKISLENVGCASQIGKRKENEDRFDFAQLTDEVLYFAVYDGHGGPAAADFCHTHMEKCIMDLLPKEKNLETLLTLAFLEIDKAFSSHARLSADENCAWSAALDLEPVDTICGASVEREICLILSQVKESSGSYPGLREGSHISLSH

SEQ ID NO: 42057 - protein, 150 aa, Homo sapiens
MSTAALITLVRSGGNQVRRRVLLSSRLLQDDRRVTPTCHSSTSEPRCSRFDPDGSGSPATWDNFGIWDNRIDEPILLPPSIKYGKPIPKISLENVGCASQIGKRKENEDRFDFAQLTDEVLYFAVYDGHGGPAAADFCHTHMEKCIMYVQ

SEQ ID NO: 42058 - protein, 290 aa, Homo sapiens
MRRPAAVPLLLLLCFGSQRAKAATACGRPRMLNRMVGGQDTQEGEWPWQVSIQRNGSHFCGGSLIAEQWVLTAAHCFRNTSETSLYQVLLGARQLVQPGPHAMYARVRQVESNPLYQGTASSADVALVELEAPVPFTNYILPVCLPDPSVIFETGMNCWVTGWGSPSEEDLLPEPRILQKLAVPIIDTPKCNLLYSKDTEFGYQPKTIKNDMLCAGFEEGKKDACKGDSGGPLVCLVGQSWLQAGVISWGEGCARQNRPGVYIRVTAHHNWIHRIIPKLQFQPARLGGQK

SEQ ID NO: 42059 - protein, 504 aa, Homo sapiens
MSLICSISNEVPEHPCVSPVSNHVYERRLIEKYIAENGTDPINNQPLSEEQLIDIKVAHPIRPKPPSATSIPAILKALQDEWDAVMLHSFTLRQQLQTTRQELSHALYQHDAACRVIARLTKEVTAAREALATLKPQAGLIVPQAVPSSQPSVVGAGEPMDLGELVGMTPEIIQKLQDKATVLTTERKKRGKTVPEELVKPEELSKYRQVASHVGLHSASIPGILALDLCPSDTNKILTGGADKNVVVFDKSSEQILATLKGHTKKVTSVVFHPSQDLVFSASPDATIRIWSVPNASCVQVVRAHESAVTGLSLHATGDYLLSSSDDQYWAFSDIQTGRVLTKVTDETSGCSLTCAQFHPDGLIFGTGTMDSQIKIWDLKERTNVANFPGHSGPITSIAFSENGYYLATAADDSSVKLWDLRKLKNFKTLQLDNNFEVKSLIFDQSGTYLALGGTDVQIYICKQWTEILHFTEHSGLTTGVAFGHHAKFIASTGMDRSLKFYSL

SEQ ID NO: 42060 - protein, 220 aa, Homo sapiens
MFQLLIPLLLALKGHAQDNPENVQCGHRPAFPNSSWLPFHERLQVQNGECPWQVSIQMSRKHLCGGSILHWWWVLTAAHCFRRTLLDMAVVNVTVVMGTRTFSNIHSERKQVQKEEERTWDWCWMAQWVTTNGYDQYDDLNMHLEKLRVVQISRKECAKRINQLSRNMICAWNEPGTNGIFKVLTPAQPPPPSRETVGHLWFVLFMEPRDSSKWVSSVGA

SEQ ID NO: 42061 - protein, 753 aa, Homo sapiens
MGSGTSTQHHFAFQNAERAFKAAALIQRWYRRYVARLEMRRRCTWSIFQSIEYAGQQDQVKLHDFFSYLMDHFIPSSHNDRDFLTRIFTEDRFAQDSEMKKCSDYESIEVPDSYTGPRLSFPLLPDHATALVEAFRLKQQLHARYVLNLLYETKKHLVQLPNINRVSTCYSEEITVCGDLHGQLDDLIFIFYKNGLPSPERSYVFNGDFVDRGKDSVEILMILFAFMLVYPKEFHLNRGNHEDHMVNLRYGFTKEVMNKYKVHGKEILRTLQDVFCWLPLATLIDEKVLILHGGVSDITDLELLDKIERSKIVSTMRCKTRQKSEKQMEEKRRANQKSSAQGPIPWFLPESRSLPSSPLRLGSYKAQKTSRSSSIPCSGSLDGRELSRQVRSSVELELERCRQQAGLLVTGEKEEPSRSASEADSEAGELRKPTQEEWRQVVDILWSDPMAQEGCKANTIRGGGCYFGPDVTQQLLQKYNMQFLIRSHECKPEGYEFCHNRKVLTIFSASNYYEVGSNRGAYVKLGPALTPHIVQYQANKVTHTLTMRQRISRVEESALRALREKLFAHSSDLLSEFKKHDADKVGLITLSDWAAAVESVLHLGLPWRMLRPQLVNSSADNMLEYKSWLKNLAKEQLSRENIQSSLLETLYRNRSNLETIFRIIDSDHSGFISLDEFRQTWKLFSSHMNIDITDDCICDLARSIDFNKDGHIDINEFLEAFRLVEKSCPEGDASECPQATNAKDSGCSSPGAH

SEQ ID NO: 42062 - protein, 598 aa, Homo sapiens
MGSGTSTQHHFAFQNAERAFKAAALIQRWYRRYVARLEMRRRCTWSIFQSIEYAGQQDQVKLHDFFSYLMDHFIPSSHNDRDFLTRIFTEDRFAQDSEMKKCSDYESIEVPDSYTGPRLSFPLLPDHATALVEAFRLKQQLHARYVLNLLYETKKHLVQLPNINRVSTCYSEEITVCGDLHGQLDDLIFIFYKNGLPSPERSYVFNGDFVDRGKDSVEILMILFAFMLVYPKEFHLNRGNHEDHMVNLRYGFTKEVMNKYKVHGKEILRTLQDVFCWLPLATLIDEKVLILHGGVSDITDLELLDKIERSKIVSTMRCKTRQKSEKQMEEKRRANQKSSAQGPIPWFLPESRSLPSSPLRLGSYKAQKTSRSSSIPCSGSLDGRELSRQVRSSVELELERCRQQAGLLVTGEKEEPSRSASEADSEAGELRKPTQEEWRQVVDILWSDPMAQEGCKANTIRGGGCYFGPDVTQQLLQKYNMQFLIRSHECKPEGYEFCHNRKVLTIFSASNYYEVGSNRGAYVKLGPALTPHIVQYQANKVTHTLTMRQRISRVEESALRALREKLFAHSSDLLSEFKKHDADKVGLASSQLCYYQQK

SEQ ID NO: 42063 - protein, 653 aa, Homo sapiens
MGCSSSSTKTRRSDTSLRAALIIQNWYRGYKARLKARQHYALTIFQSIEYADEQGQMQLSTFFSFMLENYTHIHKEELELRNQSLESEQDMRDRWDYVDSIDVPDSYNGPRLQFPLTCTDIDLLLEAFKEQQILHAHYVLEVLFETKKVLKQMPNFTHIQTSPSKEVTICGDLHGKLDDLFLIFYKNGLPSERNPYVFNGDFVDRGKNSIEILMILCVSFLVYPNDLHLNRGNHEDFMMNLRYGFTKEILHKYKLHGKRILQILEEFYAWLPIGTIVDNEILVIHGGISETTDLNLLHRVERNKMKSVLIPPTETNRDHDTDSKHNKVGVTFNAHGRIKTNGSPTEHLTEHEWEQIIDILWSDPRGKNGCFPNTCRGGGCYFGPDVTSKILNKYQLKMLIRSHECKPEGYEICHDGKVVTIFSASNYYEEGSNRGAYIKLCSGTTPRFFQYQVTKATCFQPLRQRVDTMENSAIKILRERVISRKSDLTRAFQLQDHRKSGKLSVSQWAFCMENILGLNLPWRSLSSNLVNIDQNGNVEYMSSFQNIRIEKPVQEAHSTLVETLYRYRSDLEIIFNAIDTDHSGLISVEEFRAMWKLFSSHYNVHIDDSQVNKLANIMDLNKDGSIDFNEFLKAFYVVHRYEDLMKPDVTNLG

SEQ ID NO: 42064 - protein, 599 aa, Homo sapiens
MGCSSSSTKTRRSDTSLRAALIIQNWYRGYKARLKARQHYALTIFQSIEYADEQGQMQLSTFFSFMLENYTHIHKEELILHAHYVLEVLFETKKVLKQMPNFTHIQTSPSKEVTICGDLHGKLDDLFLIFYKNGLPSERNPYVFNGDFVDRGKNSIEILMILCVSFLVYPNDLHLNRGNHEDFMMNLRYGFTKEILHKYKLHGKRILQILEEFYAWLPIGTIVDNEILVIHGGISETTDLNLLHRVERNKMKSVLIPPTETNRDHDTDSKHNKVGVTFNAHGRIKTNGSPTEHLTEHEWEQIIDILWSDPRGKNGCFPNTCRGGGCYFGPDVTSKILNKYQLKMLIRSHECKPEGYEICHDGKVVTIFSASNYYEEGSNRGAYIKLCSGTTPRFFQYQVTKATCFQPLRQRVDTMENSAIKILRERVISRKSDLTRAFQLQDHRKSGKLSVSQWAFCMENILGLNLPWRSLSSNLVNIDQNGNVEYMSSFQNIRIEKPVQEAHSTLVETLYRYRSDLEIIFNAIDTDHSGLISVEEFRAMWKLFSSHYNVHIDDSQVNKLANIMDLNKDGSIDFNEFLKAFYVVHRYEDLMKPDVTNLG

SEQ ID NO: 42065 - protein, 625 aa, Homo sapiens
MGCSSSSTKTRRSDTSLRAALIIQNWYRGYKARLKARQHYALTIFQSIEYADEQGQMQLSTFFSFMLENYTHIHKEELELRNQSLESEQDMRDRWDYVDSIDVPDSYNGPRLQFPLTCTDIDLLLEAFKEQQILHAHYVLEVLFETKKVLKQMPNFTHIQTSPSKEVTICGDLHGKLDDLFLIFYKNGLPSERNPYVFNGDFVDRGKNSIEILMILCVSFLVYPNDLHLNRGNHEDFMMNLRYGFTKEILHKYKLHGKRILQILEEFYAWLPIGTIVDNEILVIHGGISETTDLNLLHRVERNKMKSVLIPPTETNRDHDTDSKHNKIIDILWSDPRGKNGCFPNTCRGGGCYFGPDVTSKILNKYQLKMLIRSHECKPEGYEICHDGKVVTIFSASNYYEEGSNRGAYIKLCSGTTPRFFQYQVTKATCFQPLRQRVDTMENSAIKILRERVISRKSDLTRAFQLQDHRKSGKLSVSQWAFCMENILGLNLPWRSLSSNLVNIDQNGNVEYMSSFQNIRIEKPVQEAHSTLVETLYRYRSDLEIIFNAIDTDHSGLISVEEFRAMWKLFSSHYNVHIDDSQVNKLANIMDLNKDGSIDFNEFLKAFYVVHRYEDLMKPDVTNLG

SEQ ID NO: 42066 - protein, 376 aa, Homo sapiens
MGCSSSSTKTRRSDTSLRAALIIQNWYRGYKARLKARQHYALTIFQSIEYADEQGQMQLSTFFSFMLENYTHIHKEELELRNQSLESEQDMRDRWDYVDSIDVPDSYNGPRLQFPLTCTDIDLLLEAFKEQQILHAHYVLEVLFETKKVLKQMPNFTHIQTSPSKEVTICGDLHGKLDDLFLIFYKNGLPSERNPYVFNGDFVDRGKNSIEILMILCVSFLVYPNDLHLNRGNHEDFMMNLRYGFTKEILHKYKLHGKRILQILEEFYAWLPIGTIVDNEILVIHGGISETTDLNLLHRVERNKMKSVLIPPTETNRDHDTDSKHNKVGVTFNAHGRIKTNGSPTEHLTEHEWEQSGYYGKQRHQDIKRESDFTKK

SEQ ID NO: 42067 - protein, 591 aa, Homo sapiens
MGCSSSSTKTRRSDTSLRAALIIQNWYRGYKARLKARQHYALTIFQSIEYADEQGQMQLSTFFSFMLENYTHIHKEELELRNQSLESEQDMRDRWDYVDSIDVPDSYNGPRLQFPLTCTDIDLLLEAFKEQQILHAHYVLEVLFETKKVLKQMPNFTHIQTSPSKEVTICGDLHGKLDDLFLIFYKNGLPSERNPYVFNGDFVDRGKNSIEILMILCVSFLVYPNDLHLNRGNHEDFMMNLRYGFTKEILHKYKLHGKRILQILEEFYAWLPIGTIVDNEILVIHGGISETTDLNLLHRVERNKMKSVLIPPTETNRDHDTDSKHNKVGVTFNAHGRIKTNGSPTEHLTEHEWEQVVTIFSASNYYEEGSNRGAYIKLCSGTTPRFFQYQVTKATCFQPLRQRVDTMENSAIKILRERVISRKSDLTRAFQLQDHRKSGKLSVSQWAFCMENILGLNLPWRSLSSNLVNIDQNGNVEYMSSFQNIRIEKPVQEAHSTLVETLYRYRSDLEIIFNAIDTDHSGLISVEEFRAMWKLFSSHYNVHIDDSQVNKLANIMDLNKDGSIDFNEFLKAFYVVHRYEDLMKPDVTNLG

SEQ ID NO: 42068 - protein, 279 aa, Homo sapiens
MSRERPPGTDIPRNLSFIAALTERAYYRSQRPSLEEEPEEEPGEGGTRFGARSRAHAPSRGRRARSAPAGGGGARAPRSRSPDTRKRVRFADALGLELAVVRRFRPGELPRVPRHVQIQLQRDALRHFAPCQPRARGLQEARAALEPASEPGFAARLLTQRICLERAEAGPLGVAGSARVVDLAYEKRVSVRWSADGWRSQREAPAAYAGPAPPPPRADRFAFRLPAPPIGGALLFALRYRVTGHEFWDNNGGRDYALRGPEHPGSGGAPEPQGWIHFI

SEQ ID NO: 42069 - protein, 110 aa, Homo sapiens
MSMTDLLNAEDIKKAVGAFSATDSFDHKKFFQMVGLKKKSADDVKKVFHMLDKDKSGFIEEDELGFILKGFSPDARDLSAKETKMLMAAGDKDGDGKIGVDEFSTLVAES

SEQ ID NO: 42070 - protein, 334 aa, Homo sapiens
MTRSLFKGNFWSADILSTIGYDNIIQHLNNGRKNCKEFEDFLKERAAIEERYGKDLLNLSRKKPCGQSEINTLKRALEVFKQQVDNVAQCHIQLAQSLREEARKMEEFREKQKLQRKKTELIMDAIHKQKSLQFKKTMDAKKNYEQKCRDKDEAEQAVSRSANLVNPKQQEKLFVKLATSKTAVEDSDKAYMLHIGTLDKVREEWQSEHIKACEAFEAQECERINFFRNALWLHVNQLSQQCVTSDEMYEQVRKSLEMCSIQRDIEYFVNQRKTGQIPPAPIMYENFYSSQKNAVPAGKATGPNLARRGPLPIPKSSPDDPNYSLVDDYSLLYQ

SEQ ID NO: 42071 - protein, 312 aa, Homo sapiens
MTRSLFKGNFWSADILSTIGYDNIIQHLNNGRKNCKEFEDFLKERAAIEERYGKDLLNLSRKKPCGQSEINTLKRALEVFKQQVDNVAQCHIQLAQSLREEARKMEEFREKQKLQRKKTELIMDAIHKQKSLQFKKTMDAKKNYEQKCRDKDEAEQAVSRSANLVNPKQQEKLFVKLATSKTAVEDSDKAYMLHIGTLDKVREEWQSEHIKACEAFEAQECERINFFRNALWLHVNQLSQQCVTSDEHPSCMRISTPPRRMQSQQERLQGLTWQGEDPSQFLKAHQMIPITLWLMTTVCSISKINETRAFSG

SEQ ID NO: 42072 - protein, 417 aa, Homo sapiens
MDVERLQEALKDFEKRGKKEVCPVLDQFLCHVAKTGETMIQWSQFKGYFIFKLEKVMDDFRTSAPEPRGPPNPNVEYIPFDEMKERILKIVTGFNGIPFTIQRLCELLTDPRRNYTGTDKFLRGVEKNVMVVSCVYPSSEKNNSNSLNRMNGVMFPGNSPSYTERSNINGPGTPRPLNRPKVSLSAPMTTNGLPESTDSKEANLQQNEEKNHSDSSTSESEVSSVSPLKNKHPDEDAVEAEGHEVKRLRFDKEGEVRETASQTTSSEISSVMVGETEASSSSQDKDKDSRCTRQHCTEEDEEEDEEEEEESFMTSREMIPERKNQEKESDDALTVNEETSEENNQMEESDVSQAEKDLLHSEGSENEGPVSSSSSDCRETEELVGSNSSKTGEILSESSMENDDEATEVTDEPMEQD

SEQ ID NO: 42073 - protein, 360 aa, Homo sapiens
MDVERLQEALKDFEKRGKKEVCPVLDQFLCHVAKTGETIIPFTIQRLCELLTDPRRNYTGTDKFLRGVEKNVMVVSCVYPSSEKNNSNSLNRMNGVMFPGNSPSYTERSNINGPGTPRPLNRPKVSLSAPMTTNGLPESTDSKEANLQQNEEKNHSDSSTSESEVSSVSPLKNKHPDEDAVEAEGHEVKRLRFDKEGEVRETASQTTSSEISSVMVGETEASSSSQDKDKDSRCTRQHCTEEDEEEDEEEEEESFMTSREMIPERKNQEKESDDALTVNEETSEENNQMEESDVSQAEKDLLHSEGSENEGPVSSSSSDCRETEELVGSNSSKTGEILSESSMENDDEATEVTDEPMEQD

SEQ ID NO: 42074 - protein, 361 aa, Homo sapiens
MDDFRTSAPEPRGPPNPNVEYIPFDEMKERILKIVTGFNGIPFTIQRLCELLTDPRRNYTGTDKFLRGVEKNVMVVSCVYPSSEKNNSNSLNRMNGVMFPGNSPSYTERSNINGPGTPRPLNRPKVSLSAPMTTNGLPESTDSKEANLQQNEEKNHSDSSTSESEVSSVSPLKNKHPDEDAVEAEGHEVKRLRFDKEGEVRETASQTTSSEISSVMVGETEASSSSQDKDKDSRCTRQHCTEEDEEEDEEEEEESFMTSREMIPERKNQEKESDDALTVNEETSEENNQMEESDVSQAEKDLLHSEGSENEGPVSSSSSDCRETEELVGSNSSKTGEILSESSMENDDEATEVTDEPMEQD

SEQ ID NO: 42075 - protein, 1010 aa, Homo sapiens
MAARVLIIGSGGREHTLAWKLAQSHHVKQVLVAPGNAGTACSEKISNTAISISDHTALAQFCKEKKIEFVVVGPEAPLAAGIVGNLRSAGVQCFGPTAEAAQLESSKRFAKEFMDRHGIPTAQWKAFTKPEEACSFILSADFPALVVKASGLAAGKGVIVAKSKEEACKAVQEIMQEKAFGAAGETIVIEELLDGEEVSCLCFTDGKTVAPMPPAQDHKRLLEGDGGPNTGGMGAYCPAPQVSNDLLLKIKDTVLQRTVDGMQQEGTPYTGILYAGIMLTKNGPKVLEFNCRFGDPECQVILPLLKSDLYEVIQSTLDGLLCTSLPVWLENHTALTVVMASKGYPGDYTKGVEITGFPEAQALGLEVFHAGTALKNGKVVTHGGRVLAVTAIRENLISALEEAKKGLAAIKFEGAIYRKDVGFRAIAFLQQPRSLTYKESGVDIAAGNMLVKKIQPLAKATSRSGCKVDLGGFAGLFDLKAAGFKDPLLASGTDGVGTKLKIAQLCNKHDTIGQDLVAMCVNDILAQGAEPLFFLDYFSCGKLDLSVTEAVVAGIAKACGKAGCALLGGETAEMPDMYPPGEYDLAGFAVGAMERDQKLPHLERITEGDVVVGIASSGLHSNGFSLVRKIVAKSSLQYSSPAPDGCGDQTLGDLLLTPTRIYSHSLLPVLRSGHVKAFAHITGGGLLENIPRVLPEKLGVDLDAQTWRIPRVFSWLQQEGHLSEEEMARTFNCGVGAVLVVSKEQTEQILRDIQQHKEEAWVIGSVVARAEGSPRVKVKNLIESMQINGSVLKNGSLTNHFSFEKKKARVAVLISGTGSNLQALIDSTREPNSSAQIDIVISNKAAVAGLDKAERAGIPTRVINHKLYKNRVEFDSAIDLVLEEFSIDIVCLAGFMRILSGPFVQKWNGKMLNIHPSLLPSFKGSNAHEQALETGVTVTGCTVHFVAEDVDAGQIILQEAVPVKRGDTVATLSERVKLAEHKIFPAALQLVASGTVQLGENGKICWVKEE

SEQ ID NO: 42076 - protein, 433 aa, Homo sapiens
MAARVLIIGSGGREHTLAWKLAQSHHVKQVLVAPGNAGTACSEKISNTAISISDHTALAQFCKEKKIEFVVVGPEAPLAAGIVGNLRSAGVQCFGPTAEAAQLESSKRFAKEFMDRHGIPTAQWKAFTKPEEACSFILSADFPALVVKASGLAAGKGVIVAKSKEEACKAVQEIMQEKAFGAAGETIVIEELLDGEEVSCLCFTDGKTVAPMPPAQDHKRLLEGDGGPNTGGMGAYCPAPQVSNDLLLKIKDTVLQRTVDGMQQEGTPYTGILYAGIMLTKNGPKVLEFNCRFGDPECQVILPLLKSDLYEVIQSTLDGLLCTSLPVWLENHTALTVVMASKGYPGDYTKGVEITGFPEAQALGLEVFHAGTALKNGKVVTHGGRVLAVTAIRENLISALEEAKKGLAAIKFEGAIYRKDVGFRAIAFLQQPR

SEQ ID NO: 42077 - protein, 979 aa, Homo sapiens
MRRPRRPGGLGGSGGLRLLLCLLLLSSRPGGCSAVSAHGCLFDRRLCSHLEVCIQDGLFGQCQVGVGQARPLLQVTSPVLQRLQGVLRQLMSQGLSWHDDLTQYVISQEMERIPRLRPPEPRPRDRSGLAPKRPGPAGELLLQDIPTGSAPAAQHRLPQPPVGKGGAGASSSLSPLQAELLPPLLEHLLLPPQPPHPSLSYEPALLQPYLFHQFGSRDGSRVSEGSPGMVSVGPLPKAEAPALFSRTASKGIFGDHPGHSYGDLPGPSPAQLFQDSGLLYLAQELPAPSRARVPRLPEQGSSSRAEDSPEGYEKEGLGDRGEKPASPAVQPDAALQRLAAVLAGYGVELRQLTPEQLSTLLTLLQLLPKGAGRNPGGVVNVGADIKKTMEGPVEGRDTAELPARTSPMPGHPTASPTSSEVQQVPSPVSSEPPKAARPPVTPVLLEKKSPLGQSQPTVAGQPSARPAAEEYGYIVTDQKPLSLAAGVKLLEILAEHVHMSSGSFINISVVGPALTFRIRHNEQNLSLADVTQQAGLVKSELEAQTGLQILQTGVGQREEAAAVLPQTAHSTSPMRSVLLTLVALAGVAGLLVALAVALCVRQHARQQDKERLAALGPEGAHGDTTFEYQDLCRQHMATKSLFNRAEGPPEPSRVSSVSSQFSDAAQASPSSHSSTPSWCEEPAQANMDISTGHMILAYMEDHLRNRDRLAKEWQALCAYQAEPNTCATAQGEGNIKKNRHPDFLPYDHARIKLKVESSPSRSDYINASPIIEHDPRMPAYIATQGPLSHTIADFWQMVWESGCTVIVMLTPLVEDGVKQCDRYWPDEGASLYHVYEVNLVSEHIWCEDFLVRSFYLKNVQTQETRTLTQFHFLSWPAEGTPASTRPLLDFRRKVNKCYRGRSCPIIVHCSDGAGRTGTYILIDMVLNRMAKGVKEIDIAATLEHVRDQRPGLVRSKDQFEFALTAVAEEVNAILKALPQ

SEQ ID NO: 42078 - protein, 950 aa, Homo sapiens
MRRPRRPGGLGGSGGLRLLLCLLLLSSRPGGCSAVSAHGCLFDRRLCSHLEVCIQDGLFGQCQVGVGQARPLLQVTSPVLQRLQGVLRQLMSQGLSWHDDLTQYVISQEMERIPRLRPPEPRPRDRSGLAPKRPGPAGELLLQDIPTGSAPAAQHRLPQPPVGKGGAGASSSLSPLQAELLPPLLEHLLLPPQPPHPSLSYEPALLQPYLFHQFGSRDGSRVSEGSPGMVSVGPLPKAEAPALFSRTASKGIFGDHPGHSYGDLPGPSPAQLFQDSGLLYLAQELPAPSRARVPRLPEQGSSSRAEDSPEGYEKEGLGDRGEKPASPAVQPDAALQRLAAVLAGYGVELRQLTPEQLSTLLTLLQLLPKGAGRNPGGVVNVGADIKKTMEGPVEGRDTAELPARTSPMPGHPTASPTSSEVQQVPSPVSSEPPKAARPPVTPVLLEKKSPLGQSQPTVAGQPSARPAAEEYGYIVTDQNVVGPALTFRIRHNEQNLSLADVTQQAGLVKSELEAQTGLQILQTGVGQREEAAAVLPQTAHSTSPMRSVLLTLVALAGVAGLLVALAVALCVRQHARQQDKERLAALGPEGAHGDTTFEYQDLCRQHMATKSLFNRAEGPPEPSRVSSVSSQFSDAAQASPSSHSSTPSWCEEPAQANMDISTGHMILAYMEDHLRNRDRLAKEWQALCAYQAEPNTCATAQGEGNIKKNRHPDFLPYDHARIKLKVESSPSRSDYINASPIIEHDPRMPAYIATQGPLSHTIADFWQMVWESGCTVIVMLTPLVEDGVKQCDRYWPDEGASLYHVYEVNLVSEHIWCEDFLVRSFYLKNVQTQETRTLTQFHFLSWPAEGTPASTRPLLDFRRKVNKCYRGRSCPIIVHCSDGAGRTGTYILIDMVLNRMAKGVKEIDIAATLEHVRDQRPGLVRSKDQFEFALTAVAEEVNAILKALPQ

SEQ ID NO: 42079 - protein, 889 aa, Homo sapiens
MSQGLSWHDDLTQYVISQEMERIPRLRPPEPRPRDRSGLAPKRPGPAGELLLQDIPTGSAPAAQHRLPQPPVGKGGAGASSSLSPLQAELLPPLLEHLLLPPQPPHPSLSYEPALLQPYLFHQFGSRDGSRVSEGSPGMVSVGPLPKAEAPALFSRTASKGIFGDHPGHSYGDLPGPSPAQLFQDSGLLYLAQELPAPSRARVPRLPEQGSSSRAEDSPEGYEKEGLGDRGEKPASPAVQPDAALQRLAAVLAGYGVELRQLTPEQLSTLLTLLQLLPKGAGRNPGGVVNVGADIKKTMEGPVEGRDTAELPARTSPMPGHPTASPTSSEVQQVPSPVSSEPPKAARPPVTPVLLEKKSPLGQSQPTVAGQPSARPAAEEYGYIVTDQKPLSLAAGVKLLEILAEHVHMSSGSFINISVVGPALTFRIRHNEQNLSLADVTQQAGLVKSELEAQTGLQILQTGVGQREEAAAVLPQTAHSTSPMRSVLLTLVALAGVAGLLVALAVALCVRQHARQQDKERLAALGPEGAHGDTTFEYQDLCRQHMATKSLFNRAEGPPEPSRVSSVSSQFSDAAQASPSSHSSTPSWCEEPAQANMDISTGHMILAYMEDHLRNRDRLAKEWQALCAYQAEPNTCATAQGEGNIKKNRHPDFLPYDHARIKLKVESSPSRSDYINASPIIEHDPRMPAYIATQGPLSHTIADFWQMVWESGCTVIVMLTPLVEDGVKQCDRYWPDEGASLYHVYEVNLVSEHIWCEDFLVRSFYLKNVQTQETRTLTQFHFLSWPAEGTPASTRPLLDFRRKVNKCYRGRSCPIIVHCSDGAGRTGTYILIDMVLNRMAKGVKEIDIAATLEHVRDQRPGLVRSKDQFEFALTAVAEEVNAILKALPQ

SEQ ID NO: 42080 - protein, 331 aa, Homo sapiens
MARGGRGRRLGLALGLLLALVLAPRVLRAKPTVRKERVVRPDSELGERPPEDNQSFQYDHEAFLGKEDSKTFDQLTPDESKERLGKIVDRIDNDGDGFVTTEELKTWIKRVQKRYIFDNVAKVWKDYDRDKDDKISWEEYKQATYGYYLGNPAEFHDSSDHHTFKKMLPRDERRFKAADLNGDLTATREEFTAFLHPEEFEHMKEIVVLETLEDIDKNGDGFVDQDEYIADMFSHEENGPEPDWVLSEREQFNEFRDLNKDGKLDKDEIRHWILPQDYDHAQAEARHLVYESDKNKDEKLTKEEILENWNMFVGSQATNYGEDLTKNHDEL

SEQ ID NO: 42081 - protein, 280 aa, Homo sapiens
MTGGEGPLPTAKQATCSPPSSRERNPRRRGSRPRKIVDRIDNDGDGFVTTEELKTWIKRVQKRYIFDNVAKVWKDYDRDKDDKISWEEYKQATYGYYLGNPAEFHDSSDHHTFKKMLPRDERRFKAADLNGDLTATREEFTAFLHPEEFEHMKEIVVLETLEDIDKNGDGFVDQDEYIADMFSHEENGPEPDWVLSEREQFNEFRDLNKDGKLDKDEIRHWILPQDYDHAQAEARHLVYESDKNKDEKLTKEEILENWNMFVGSQATNYGEDLTKNHDEL

SEQ ID NO: 42082 - protein, 206 aa, Homo sapiens
MAANKPKGQNSLALHKVIMVGSGGVGKSALTLQFMYDEFVEDYEPTKADSYRKKVVLDGEEVQIDILDTAGQEDYAAIRDNYFRSGEGFLCVFSITEMESFAATADFREQILRVKEDENVPFLLVGNKSDLEDKRQVSVEEAKNRAEQWNVNYVETSAKTRANVDKVFFDLMREIRARKMEDSKEKNGKKKRKSLAKRIRERCCIL

SEQ ID NO: 42083 - protein, 194 aa, Homo sapiens [sequence omitted]

SEQ ID NO: 42084 - protein, 812 aa, Homo sapiens [sequence omitted]

SEQ ID NO: 42085 - protein, 291 aa, Homo sapiens
MQAKNKDALQPIKEDRTGKAQDDAFWLQSLITDAFHDKGFQKIKEYFQQKESHFPQKYNRLLLYRLDRSINKELDKNEFQSVSLLLKCIQRFLVDGLKEDEPLLIRQGLIPKLVSWFERTTGILTSEGLASDTSLICVIEDFFDTALIISRSSSEGKIQMLDSFLLSLGFLVTEKTVNHLLQQEGLKTFNCILHAVPREERKKFPLSEGMCHLMKDLARTLLTVGDYDQQVAISEALCRLTIKKSRDELVHKWFDDEVIAEAFKEIKDREFETDSRRFLNHLNNRLGDQRR

SEQ ID NO: 42086 - protein, 59 aa, Homo sapiens [sequence omitted]

SEQ ID NO: 42087 - protein, 263 aa, Homo sapiens
MARGPKKHLKRVAAPKHWMLDKLTGVFAPRPSTGPHKLRECLPLIVFLRNRLKYALTGDEVKKICMQHFLKIDGKVRVDITYPAGFIDVISIEKTGEHFRLVYNTKGCFAVHRITVEEAKYKLCKVRKITVGTKGIPHLVTHDARTIRYPDPLIKVNDTVQIDLGTGKITSFIKFDTGNVCMVIAGANLGRVGVITNRERHPGSCDVVHVKDANGNSFATRISNIFVIGNGNKPWISLPRGKGIRLTIAEERDKRLAAKQSSG

SEQ ID NO: 42088 - protein, 263 aa, Homo sapiens
MRLGLCVVALVLSWTHLTISSRGIKGKRQRRISAEGSQACAKGCELCSEVNGCLKCSPKLFILLERNDIRQVGVCLPSCPPGYFDARNPDMNKCIKCKIEHCEACFSHNFCTKCKEGLYLHKGRCYPACPEGSSAANGTMECSSPAQCEMSEWSPWGPCSKKQQLCGFRRGSEERTRRVLHAPVGDHAACSDTKETRRCTVRRVPCPEGQKRRKGGQGRRENANRNLARKESKEAGAGSRRRKGQQQQQQQGTVGPLTSAGPA

SEQ ID NO: 42089 - protein, 236 aa, Homo sapiens
MIFRVSAEGSQACAKGCELCSEVNGCLKCSPKLFILLERNDIRQVGVCLPSCPPGYFDARNPDMNKCIKCKIEHCEACFSHNFCTKCKEGLYLHKGRCYPACPEGSSAANGTMECSSPAQCEMSEWSPWGPCSKKQQLCGFRRGSEERTRRVLHAPVGDHAACSDTKETRRCTVRRVPCPEGQKRRKGGQGRRENANRNLARKESKEAGAGSRRRKGQQQQQQQGTVGPLTSAGPA

SEQ ID NO: 42090 - protein, 200 aa, Homo sapiens
MRLGLCVVALVLSWTHLTISSRGIKGKRQRRISAEGSQACAKGCELCSEVNGCLKCSPKLFILLERNDIRQVGVCLPSCPPGYFDARNPDMNKCIKCKIEHCEACFSHNFCTKCKEGLYLHKGRCYPACPEGSSAANGTMECSSPGQKRRKGGQGRRENANRNLARKESKEAGAGSRRRKGQQQQQQQGTVGPLTSAGPA

SEQ ID NO: 42091 - protein, 234 aa, Homo sapiens
MRAPLCLLLLVAHAVDMLALNRRKKQVGTGLGGNCTGCIICSEENGCSTCQQRLFLFIRREGIRQYGKCLHDCPPGYFGIRGQEVNRCKKCGATCESCFSQDFCIRCKRQFYLYKGKCLPTCPPGTLAHQNTRECQGECELGPWGGWSPCTHNGKTCGSAWGLESRVREAGRAGHEEAATCQVLSESRKCPIQRPCPGERSPGQKKGRKDRRPRKDRKLDRRLDVRPRQPGLQP

SEQ ID NO: 42092 - protein, 172 aa, Homo sapiens
MRAPLCLLLLVAHAVDMLALNRRKKQVGTGLGGNCTGCIICSEENGCSTCQQRLFLFIRREGIRQYGKCLHDCPPGYFGIRGQEVNRCKKCGATCESCFSQDFCIRCKRQFYLYKGKCLPTCPPGTLAHQNTRECQERSPGQKKGRKDRRPRKDRKLDRRLDVRPRQPGLQP

SEQ ID NO: 42093 - protein, 434 aa, Homo sapiens
MAASDTERDGLAPEKTSPDRDKKKEQSEVSVSPRASKHHYSRSRSRSRERKRKSDNEGRKHRSRSRSKEGRRHESKDKSSKKHKSEEHNDKEHSSDKGRERLNSSENGEDRHKRKERKSSRGRSHSRSRSRERRHRSRSRERKKSRSRSRERKKSRSRSRERKKSRSRSRERKRRIRSRSRSRSRHRHRTRSRSRTRSRSRDRKKRIEKPRRFSRSLSRTPSPPPFRGRNTAMDAQEALARRLERAKKLQEQREKEMVEKQKQQEIAAAAATGGSVLNVAALLASGTQVTPQIAMAAQMAALQAKALAETGIAVPSYYNPAAVNPMKFAEQEKKRKMLWQGKKEGDKSQSAEIWEKLNFGNKDQNVKFRKLMGIKSEDEAGCSSVDEESYKTLKQQEEVFRNLDAQYEMARSQTHTQRGMGLGFTSSMRGMDAV

SEQ ID NO: 42094 - protein, 386 aa, Homo sapiens
MKEENTGAGAEAKRTNFFLKQGRRHESKDKSSKKHKSEEHNDKEHSSDKGRERLNSSENGEDRHKRKERKSSRGRSHSRSRSRERRHRSRSRERKKSRSRSRERKKSRSRSRERKKSRSRSRERKRRIRSRSRSRSRHRHRTRSRSRTRSRSRDRKKRIEKPRRFSRSLSRTPSPPPFRGRNTAMDAQEALARRLERAKKLQEQREKEMVEKQKQQEIAAAAATGGSVLNVAALLASGTQVTPQIAMAAQMAALQAKALAETGIAVPSYYNPAAVNPMKFAEQEKKRKMLWQGKKEGDKSQSAEIWEKLNFGNKDQNVKFRKLMGIKSEDEAGCSSVDEESYKTLKQQEEVFRNLDAQYEMARSQTHTQRGMGLGFTSSMRGMDAV

SEQ ID NO: 42095 - protein, 351 aa, Homo sapiens
MRAVLAREMDGRRVLGRFWSGWRRGLGVRPVPEDAGFGTEARHQRQPRGSCQRSGPLGDQPFAGLLPKNLSREELVDALRAAVVDRKGPLVTLNKPQGLPVTGKPGELTLFSVLPELSQSLGLREQELQVVRASGKESSGLVLLSSCPQTASRLQKYFTHARRAQRPTATYCAVTDGIPAASEGKIQAALKLEHIDGVNLTVPVKAPSRKDILEGVKKTLSHFRVVATGSGCALVQLQPLTVFSSQLQVHMVLQLCPVLGDHMYSARVGTVLGQRFLLPAENNKPQRQVLDEALLRRLHLTPSQAAQLPLHLHLHRLLLPGTRARDTPVELLAPLPPYFSRTLQCLGLRLQ

SEQ ID NO: 42096 - protein, 336 aa, Homo sapiens
MRAVLAREMDGRRVLGRFWSGWRRGLGVRPVPEDAGFGTEARHQRQPRGSCQRSGPLGDQPFAGLLPKNLSREELVDALRAAVVDRKGKPGELTLFSVLPELSQSLGLREQELQVVRASGKESSGLVLLSSCPQTASRLQKYFTHARRAQRPTATYCAVTDGIPAASEGKIQAALKLEHIDGVNLTVPVKAPSRKDILEGVKKTLSHFRVVATGSGCALVQLQPLTVFSSQLQVHMVLQLCPVLGDHMYSARVGTVLGQRFLLPAENNKPQRQVLDEALLRRLHLTPSQAAQLPLHLHLHRLLLPGTRARDTPVELLAPLPPYFSRTLQCLGLRLQ

SEQ ID NO: 42097 - protein, 136 aa, Homo sapiens
MRAVLAREMDGRRVLGRFWSGWRRGLGVRPVPEDAGFGTEARHQRQPRGSCQRSGPLGDQPFAGLLPKNLSREELVDALRAAVVDRKGPLVTLNKPQGLPVTGKPGELTLFSVLPELSQSLGLREQELQVVRASGK

SEQ ID NO: 42098 - protein, 505 aa, Homo sapiens
MSRSYNDELQFLEKINKNCWRIKKGFVPNMQVEGVFYVNDALEKLMFEELRNACRGGGVGGFLPAMKQIGNVAALPGIVHRSIGLPDVHSGYGFAIGNMAAFDMNDPEAVVSPGGVGFDINCGVRLLRTNLDESDVQPVKEQLAQAMFDHIPVGVGSKGVIPMNAKDLEEALEMGVDWSLREGYAWAEDKEHCEEYGRMLQADPNKVSARAKKRGLPQLGTLGAGNHYAEIQVVDEIFNEYAAKKMGIDHKGQVCVMIHSGSRGLGHQVATDALVAMEKAMKRDKIIVNDRQLACARIASPEGQDYLKGMAAAGNYAWVNRSSMTFLTRQAFAKVFNTTPDDLDLHVIYDVSHNIAKVEQHVVDGKERTLLVHRKGSTRAFPPHHPLIAVDYQLTGQPVLIGGTMGTCSYVLTGTEQGMTETFGTTCHGAGRALSRAKSRRNLDFQDVLDKLADMGIAIRVASPKLVMEEAPESYKNVTDVVNTCHDAGISKKAIKLRPIAVIKG

SEQ ID NO: 42099 - protein, 377 aa, Homo sapiens
MAAPRWSASGPWIRGNGQGCGSLFTLVSKPFCAAAAASTAINAQRLAEKLRAQKREQDTKKEPVSTNAVQRRVQEIVRFTRQLQRVHPNVLAKALTRGILHQDKNLVVINKPYGLPVHGGPGVQLCITDVLPILAKMLHGHKAEPLHLCHRLDKETTGVMVLAWDKDMAHQVQELFRTRQVVKKYWAITVHVPMPSAGVVDIPIVEKEAQGQQQHHKMTLSPSYRMDDGKMVKVRRSRNAQVAVTQYQVLSSTLSSALVELQPITGIKHQLRVHLSFGLDCPILGDHKYSDWNRLAPQKLSVGTLKKLGLEQSKARYIPLHLHARQLILPALGSGKEELNLVCKLPRFFVHSLHRLRLEMPNEDQNENNEAKCLGAQ

SEQ ID NO: 42100 - protein, 346 aa, Homo sapiens
MAAPRWSASGPWIRGNGQGCGSLFTLVSKPFCAAAAASTAINAQRLAEKLRAQKREQDTKKEPVSTNAVQRRVQEIVRFTRQLQRVHPNVLAKALTRGILHQDKNLVVINKPYGLPVHGGPGVQLCITDVLPILAKMLHGHKAEPLHLCHRLDKETTGVMVLAWDKDMAHQVQELFRTRQVVKKYWAITVHVPMPSAGVVDIPIVEKEAQVAVTQYQVLSSTLSSALVELQPITGIKHQLRVHLSFGLDCPILGDHKYSDWNRLAPQKLSVGTLKKLGLEQSKARYIPLHLHARQLILPALGSGKEELNLVCKLPRFFVHSLHRLRLEMPNEDQNENNEAKCLGAQ

SEQ ID NO: 42101 - protein, 203 aa, Homo sapiens
MVSTYRVAVLGARGVGKSAIVRQFLYNEFSEVCVPTTARRLYLPAVVMNGHVHDLQILDFPPISAFPVNTLQEWADTCCRGLRSVHAYILVYDICCFDSFEYVKTIRQQILETRVIGTSETPIIIVGNKRDLQRGRVIPRWNVSHLVRKTWKCGYVECSAKYNWHILLLFSELLKSVGCARCKHVHAALRFQGALRRNRCAIM

SEQ ID NO: 42102 - protein, 710 aa, Homo sapiens
MRGRLCVGRAAAAAAAVAVPLAGGQEGSPGGGRRGSRGTTMVKKRKGRVVIDSDTEDSGSDENLDQELLSLAKRKRSDSEEKEPPVSQPAASSDSETSDSDDEWTFGSNKNKKKGKARKIEKKGTMKKQANKTASSGSSDKDSSAESSAPEEGEVSDSDSNSSSSSSDSDSSSEDEEFHDGYGEDLMGDEEDRARLEQMTEKEREQELFNRIEKREVLKRRFEIKKKLKTAKKKEKKEKKKKQEEEQEKKKLTQIQESQVTSHNKERRSKRDEKLDKKSQAMEELKAEREKRKNRTAELLAKKQPLKTSEVYSDDEEEEEDDKSSEKSDRSSRTSSSDEEEEKEEIPPKSQPVSLPEELNRVRLSRHKLERWCHMPFFAKTVTGCFVRIGIGNHNSKPVYRVAEITGVVETAKVYQLGGTRTNKGLQLRHGNDQRVFRLEFVSNQEFTESEFMKWKEAMFSAGMQLPTLDEINKKELSIKEALNYKFNDQDIEEIVKEKERFRKAPPNYAMKKTQLLKEKAMAEDLGDQDKAKQIQDQLNELEERAEALDRQRTKNISAISYINQRNREWNIVESEKALVAESHNMKNQQMDPFTRRQCKPTIVSNSRDPAVQAAILAQLNAKYGSGVLPDAPKEMSKGQGKDKDLNSKSASDLSEDLFKVHDFDVKIDLQVPSSESKALAITSKAPPAKDGAPRRSLNLEDYKKRRGLI

SEQ ID NO: 42103 - protein, 1358 aa, Homo sapiens
MIEPSEDSFETMMEHKNPSSKQMESSEGSSNTTEATSGSGVRGEAGPASGPAQEKKEPPSGPLQEMEELPTDLLQDMEEPSSGPRKEIEDPPNDLLQDLEESCNGSHQARGDPLSGASDRMKEASVNPSGAREEQEAHTDLKESGREETPQEQNQTEHSTAELMAMVRSIISLYFRMQDLKEQQRVAEEILIKGINAGQLPAPKHFSGDRREFHEFIVLCQLTLQSYPRMFYNDRLRVGYVINHLSGLALEWAKALLQENSPLIGDFPAFLEAMSEVFEYRQALRVAEEAMFTIRQGGRSATEYIDEFQSLVPILGWPDEVLQAHLCQGLNEEIRHYLFRVPQPDSLDSLIVLILQIEEKLAERRAMLRLPPEARPRNLTWIDSPAPERWMVSSWLPSEVHPDINRAHLFLLLMVRVNPYHSVAVQALVDSGADGNFMDEKFAQEHYVELYEKPYPQPVQSVDGSLIGNEPVWLYTEPLVCIHQNHQESIEFDIVPSPNFSVVLGIRWLRVHAPEVDWIKGRCTFHSPYCLKNCFRPPPPCIALERHGMSLLPGLPHPYSDLADVFNPKEADDETSDQPSSDGSDDLSESEPSELQQAGDSDHSETFYECPSTAPWEPVGARMQERARLQEEYWDLQDMLTNRQDYIQMIPELFDQLHGAEWFTKLELRGTIVEESVNGHRTEDVWKAAFGLELEEMKSYQPFALSPDPIIPQNVIHFILKDMLGFFVLSYGQEVLIYSMSQEEHLHHVRQVLVRFRHHNVYCSLDKSQFHRQTVEFLGFVVTPKGVKLNKNVMTIITGYPTPGSKLSLRNFIEFVFPYRHFVERFSIIAEPLVRQLLSSYQFYWGVEEQEAFECLKRAFRKAPLLHHPKPQNPFYLETGVTGTALHASLIQIDDQTGKRACCAFYSRNISPIEVEYSQAEMKILPIRAAFMVWCRYLENTEEPIMILLNTEDLASLNNDRLTVLLPGHWVFFFSHFNFDVMELPEQDGGRALPPVRNLRWRRAFQRNTAARQTLLLASRGFPRDPSTESGEEENEEQDELNEQILRQELLAMIPIDQILNSFLAHFSMAQIRAVILHFFRGLLYWKNTLALAAILVLLRVRQCLSLRPAPAMRVARPQPQRSLRLILDSSLIAGSSITTAITQLLTQMPALVGANTIPAQELAELFLGPGRWQRNALHSQAHRGLQFTPGFWLTLCEFFGVRVTPQEGHLPALRQNRYLELHVVGDEDVVLREALQDDLQRYRQCGLHDGLQDTSQDKQDNDVQEAPPSHTAATHPPRPRHLMDPQVLEFLGSRLLHIHSADGQLHLLSREQAARALSQFLTLIYRRALPIPAWESQPREQARLEELPDEDEDANLD

SEQ ID NO: 42104 - protein, 1192 aa, Homo sapiens
MEDLDQSPLVSSSDSPPRPQPAFKYQFVREPEDEEEEEEEEEEDEDEDLEELEVLERKPAAGLSAAPVPTAPAAGAPLMDFGNDFVPPAPRGPLPAAPPVAPERQPSWDPSPVSSTVPAPSPLSAAAVSPSKLPEDDEPPARPPPPPPASVSPQAEPVWTPPAPAPAAPPSTPAAPKRRGSSGSVDETLFALPAASEPVIRSSAENMDLKEQPGNTISAGQEDFPSVLLETAASLPSLSPLSAASFKEHEYLGNLSTVLPTEGTLQENVSEASKEVSEKAKTLLIDRDLTEFSELEYSEMGSSFSVSPKAESAVIVANPREEIIVKNKDEEEKLVSNNILHNQQELPTALTKLVKEDEVVSSEKAKDSFNEKRVAVEAPMREEYADFKPFERVWEVKDSKEDSDMLAAGGKIESNLESKVDKKCFADSLEQTNHEKDSESSNDDTSFPSTPEGIKDRSGAYITCAPFNPAATESIATNIFPLLGDPTSENKTDEKKIEEKKAQIVTEKNTSTKTSNPFLVAAQDSETDYVTTDNLTKVTEEVVANMPEGLTPDLVQEACESELNEVTGTKIAYETKMDLVQTSEVMQESLYPAAQLCPSFEESEATPSPVLPDIVMEAPLNSAVPSAGASVIQPSSSPLEASSVNYESIKHEPENPPPYEEAMSVSLKKVSGIKEEIKEPENINAALQETEAPYISIACDLIKETKLSAEPAPDFSDYSEMAKVEQPVPDHSELVEDSSPDSEPVDLFSDDSIPDVPQKQDETVMLVKESLTETSFESMIEYENKEKLSALPPEGGKPYLESFKLSLDNTKDTLLPDEVSTLSKKEKIPLQMEELSTAVYSNDDLFISKEAQIRETETFSDSSPIEIIDEFPTLISSKTDSFSKLAREYTDLEVSHKSEIANAPDGAGSLPCTELPHDLSLKNIQPKVEEKISFSDDFSKNGSATSKVLLLPPDVSALATQAEIESIVKPKVLVKEAEKKLPSDTEKEDRSPSAIFSAELSKTSVVDLLYWRDIKKTGVVFGASLFLLLSLTVFSIVSVTAYIALALLSVTISFRIYKGVIQAIQKSDEGHPFRAYLESEVAISEELVQKYSNSALGHVNCTIKELRRLFLVDDLVDSLKFAVLMWVFTYVGALFNGLTLLILALISLFSVPVIYERHQAQIDHYLGLANKNVKDAMAKIQAKIPGLKRKAE

SEQ ID NO: 42105 - protein, 373 aa, Homo sapiens
MEDLDQSPLVSSSDSPPRPQPAFKYQFVREPEDEEEEEEEEEEDEDEDLEELEVLERKPAAGLSAAPVPTAPAAGAPLMDFGNDFVPPAPRGPLPAAPPVAPERQPSWDPSPVSSTVPAPSPLSAAAVSPSKLPEDDEPPARPPPPPPASVSPQAEPVWTPPAPAPAAPPSTPAAPKRRGSSGSVVVDLLYWRDIKKTGVVFGASLFLLLSLTVFSIVSVTAYIALALLSVTISFRIYKGVIQAIQKSDEGHPFRAYLESEVAISEELVQKYSNSALGHVNCTIKELRRLFLVDDLVDSLKFAVLMWVFTYVGALFNGLTLLILALISLFSVPVIYERHQAQIDHYLGLANKNVKDAMAKIQAKIPGLKRKAE

SEQ ID NO: 42106 - protein, 199 aa, Homo sapiens
MDGQKKNWKDKVVDLLYWRDIKKTGVVFGASLFLLLSLTVFSIVSVTAYIALALLSVTISFRIYKGVIQAIQKSDEGHPFRAYLESEVAISEELVQKYSNSALGHVNCTIKELRRLFLVDDLVDSLKFAVLMWVFTYVGALFNGLTLLILALISLFSVPVIYERHQAQIDHYLGLANKNVKDAMAKIQAKIPGLKRKAE

SEQ ID NO: 42107 - protein, 960 aa, Homo sapiens
MEDLDQSPLVSSSDSPPRPQPAFKYQFVREPEDEEEEEEEEEEDEDEDLEELEVLERTEFSELEYSEMGSSFSVSPKAESAVIVANPREEIIVKNKDEEEKLVSNNILHNQQELPTALTKLVKEDEVVSSEKAKDSFNEKRVAVEAPMREEYADFKPFERVWEVKDSKEDSDMLAAGGKIESNLESKVDKKCFADSLEQTNHEKDSESSNDDTSFPSTPEGIKDRSGAYITCAPFNPAATESIATNIFPLLGDPTSENKTDEKKIEEKKAQIVTEKNTSTKTSNPFLVAAQDSETDYVTTDNLTKVTEEVVANMPEGLTPDLVQEACESELNEVTGTKIAYETKMDLVQTSEVMQESLYPAAQLCPSFEESEATPSPVLPDIVMEAPLNSAVPSAGASVIQPSSSPLEASSVNYESIKHEPENPPPYEEAMSVSLKKVSGIKEEIKEPENINAALQETEAPYISIACDLIKETKLSAEPAPDFSDYSEMAKVEQPVPDHSELVEDSSPDSEPVDLFSDDSIPDVPQKQDETVMLVKESLTETSFESMIEYENKEKLSALPPEGGKPYLESFKLSLDNTKDTLLPDEVSTLSKKEKIPLQMEELSTAVYSNDDLFISKEAQIRETETFSDSSPIEIIDEFPTLISSKTDSFSKLAREYTDLEVSHKSEIANAPDGAGSLPCTELPHDLSLKNIQPKVEEKISFSDDFSKNGSATSKVLLLPPDVSALATQAEIESIVKPKVLVKEAEKKLPSDTEKEDRSPSAIFSAELSKTSVVDLLYWRDIKKTGVVFGASLFLLLSLTVFSIVSVTAYIALALLSVTISFRIYKGVIQAIQKSDEGHPFRAYLESEVAISEELVQKYSNSALGHVNCTIKELRRLFLVDDLVDSLKFAVLMWVFTYVGALFNGLTLLILALISLFSVPVIYERHQAQIDHYLGLANKNVKDAMAKIQAKIPGLKRKAE

SEQ ID NO: 42108 - protein, 392 aa, Homo sapiens
MEDLDQSPLVSSSDSPPRPQPAFKYQFVREPEDEEEEEEEEEEDEDEDLEELEVLERKPAAGLSAAPVPTAPAAGAPLMDFGNDFVPPAPRGPLPAAPPVAPERQPSWDPSPVSSTVPAPSPLSAAAVSPSKLPEDDEPPARPPPPPPASVSPQAEPVWTPPAPAPAAPPSTPAAPKRRGSSGSVDETLFALPAASEPVIRSSAVVDLLYWRDIKKTGVVFGASLFLLLSLTVFSIVSVTAYIALALLSVTISFRIYKGVIQAIQKSDEGHPFRAYLESEVAISEELVQKYSNSALGHVNCTIKELRRLFLVDDLVDSLKFAVLMWVFTYVGALFNGLTLLILALISLFSVPVIYERHQAQIDHYLGLANKNVKDAMAKIQAKIPGLKRKAE

SEQ ID NO: 42109 - protein, 986 aa, Homo sapiens
MDLKEQPGNTISAGQEDFPSVLLETAASLPSLSPLSAASFKEHEYLGNLSTVLPTEGTLQENVSEASKEVSEKAKTLLIDRDLTEFSELEYSEMGSSFSVSPKAESAVIVANPREEIIVKNKDEEEKLVSNNILHNQQELPTALTKLVKEDEVVSSEKAKDSFNEKRVAVEAPMREEYADFKPFERVWEVKDSKEDSDMLAAGGKIESNLESKVDKKCFADSLEQTNHEKDSESSNDDTSFPSTPEGIKDRSGAYITCAPFNPAATESIATNIFPLLGDPTSENKTDEKKIEEKKAQIVTEKNTSTKTSNPFLVAAQDSETDYVTTDNLTKVTEEVVANMPEGLTPDLVQEACESELNEVTGTKIAYETKMDLVQTSEVMQESLYPAAQLCPSFEESEATPSPVLPDIVMEAPLNSAVPSAGASVIQPSSSPLEASSVNYESIKHEPENPPPYEEAMSVSLKKVSGIKEEIKEPENINAALQETEAPYISIACDLIKETKLSAEPAPDFSDYSEMAKVEQPVPDHSELVEDSSPDSEPVDLFSDDSIPDVPQKQDETVMLVKESLTETSFESMIEYENKEKLSALPPEGGKPYLESFKLSLDNTKDTLLPDEVSTLSKKEKIPLQMEELSTAVYSNDDLFISKEAQIRETETFSDSSPIEIIDEFPTLISSKTDSFSKLAREYTDLEVSHKSEIANAPDGAGSLPCTELPHDLSLKNIQPKVEEKISFSDDFSKNGSATSKVLLLPPDVSALATQAEIESIVKPKVLVKEAEKKLPSDTEKEDRSPSAIFSAELSKTSVVDLLYWRDIKKTGVVFGASLFLLLSLTVFSIVSVTAYIALALLSVTISFRIYKGVIQAIQKSDEGHPFRAYLESEVAISEELVQKYSNSALGHVNCTIKELRRLFLVDDLVDSLKFAVLMWVFTYVGALFNGLTLLILALISLFSVPVIYERHQAQIDHYLGLANKNVKDAMAKIQAKIPGLKRKAE

SEQ ID NO: 42110 - protein, 715 aa, Homo sapiens
MVQKYQSPVRVYKYPFELIMAAYERRFPTCPLIPMFVGSDTVNEFKSEDGAIHVIERRCKLDVDAPRLLKKIAGVDYVYFVQKNSLNSRERTLHIEAYNETFSNRVIINEHCCYTVHPENEDWTCFEQSASLDIKSFFGFESTVEKIAMKQYTSNIKKGKEIIEYYLRQLEEEGITFVPRWSPPSITTSSETSSSSSKKQAASMAVVIPEAALKEGLSGDALSSPSAPEPVVGTPDDKLDADYIKRYLGDLTPLQESCLIRLRQWLQETHKGKIPKDEHILRFLRARDFNIDKAREIMCQSLTWRKQHQVDYILETWTPPQVLQDYYAGGWHHHDKDGRPLYVLRLGQMDTKGLVRALGEEALLRYVLSINEEGLRRCEENTKVFGRPISSWTCLVDLEGLNMRHLWRPGVKALLRIIEVVEANYPETLGRLLILRAPRVFPVLWTLVSPFIDDNTRRKFLIYAGNDYQGPGGLLDYIDKEIIPDFLSGECMCEVPEGGLVPKSLYRTAEELENEDLKLWTETIYQSASVFKGAPHEILIQIVDASSVITWDFDVCKGDIVFNIYHSKRSPQPPKKDSLGAHSITSPGGNNVQLIDKVWQLGRDYSMVESPLICKEGESVQGSHVTRWPGFYILQWKFHSMPACAASSLPRVDDVLASLQVSSHKCKVMYYTEVIGSEDFRGSMTSLESSHSGFSQLSAATTSSSQSHSSSMISR

SEQ ID NO: 42111 - protein, 719 aa, Homo sapiens
MVQKYQSPVRVYKYPFELIMAAYERRFPTCPLIPMFVGSDTVNEFKSEDGAIHVIERRCKLDVDAPRLLKKIAGVDYVYFVQKNSLNSRERTLHIEAYNETFSNRVIINEHCCYTVHPENEDWTCFEQSASLDIKSFFGFESTVEKIAMKQYTSNIKKGKEIIEYYLRQLEEEGITFVPRWSPPSITTSSETSSSSSKKQAASMAVVIPEAALKEGLSGDALSSPSAPEPVVGTPDDKLDADYIKRYLGDLTPLQESCLIRLRQWLQETHKGKIPKDEHILRFLRARDFNIDKAREIMCQSLTWRKQHQVDYILETWTPPQVLQDYYAGGWHHHDKDGRPLYVLRLGQMDTKGLVRALGEEALLRYVLSINEEGLRRCEENTKVFGRPISSWTCLVDLEGLNMRHLWRPGVKALLRIIEVVEANYPETLGRLLILRAPRVFPVLWTLVSPFIDDNTRRKFLIYAGNDYQGPGGLLDYIDKEIIPDFLSGECMCEVPEGGLVPKSLYRTAEELENEDLKLWTETIYQSASVFKGAPHEILIQIVDASSVITWDFDVCKGDIVFNIYHSKRSPQPPKKDSLGAHSITSPGGNNVQLIDKVWQLGRDYSMVESPLICKEGESVQGSHVTRWPGFYILQWKFHSMPACAASSLPRVDDVLASLQVSSHKCKVMYYTEVIGSEDFRGSMTSLESSHSGFSQLSAATTSSSQSHSSSMISRWRFC

SEQ ID NO: 42112 - protein, 681 aa, Homo sapiens
MFVGSDTVNEFKSEDGAIHVIERRCKLDVDAPRLLKKIAGVDYVYFVQKNSLNSRERTLHIEAYNETFSNRVIINEHCCYTVHPENEDWTCFEQSASLDIKSFFGFESTVEKIAMKQYTSNIKKGKEIIEYYLRQLEEEGITFVPRWSPPSITTSSETSSSSSKKQAASMAVVIPEAALKEGLSGDALSSPSAPEPVVGTPDDKLDADYIKRYLGDLTPLQESCLIRLRQWLQETHKGKIPKDEHILRFLRARDFNIDKAREIMCQSLTWRKQHQVDYILETWTPPQVLQDYYAGGWHHHDKDGRPLYVLRLGQMDTKGLVRALGEEALLRYVLSINEEGLRRCEENTKVFGRPISSWTCLVDLEGLNMRHLWRPGVKALLRIIEVVEANYPETLGRLLILRAPRVFPVLWTLVSPFIDDNTRRKFLIYAGNDYQGPGGLLDYIDKEIIPDFLSGECMCEVPEGGLVPKSLYRTAEELENEDLKLWTETIYQSASVFKGAPHEILIQIVDASSVITWDFDVCKGDIVFNIYHSKRSPQPPKKDSLGAHSITSPGGNNVQLIDKVWQLGRDYSMVESPLICKEGESVQGSHVTRWPGFYILQWKFHSMPACAASSLPRVDDVLASLQVSSHKCKVMYYTEVIGSEDFRGSMTSLESSHSGFSQLSAATTSSSQSHSSSMISR

SEQ ID NO: 42113 - protein, 729 aa, Homo sapiens
MNPFQKNESKETLFSPVSIEEVPPRPPSPPKKPSPTICGSNYPLSIAFIVVNEFCERFSYYGMKAVLILYFLYFLHWNEDTSTSIYHAFSSLCYFTPILGAAIADSWLGKFKTIIYLSLVYVLGHVIKSLGALPILGGQVVHTVLSLIGLSLIALGTGGIKPCVAAFGGDQFEEKHAEERTRYFSVFYLSINAGSLISTFITPMLRGDVQCFGEDCYALAFGVPGLLMVIALVVFAMGSKIYNKPPPEGNIVAQVFKCIWFAISNRFKNRSGDIPKRQHWLDWAAEKYPKQLIMDVKALTRVLFLYIPLPMFWALLDQQGSRWTLQAIRMNRNLGFFVLQPDQMQVLNPLLVLIFIPLFDFVIYRLVSKCGINFSSLRKMAVGMILACLAFAVAAAVEIKINEMAPAQPGPQEVFLQVLNLADDEVKVTVVGNENNSLLIESIKSFQKTPHYSKLHLKTKSQDFHFHLKYHNLSLYTEHSVQEKNWYSLVIREDGNSISSMMVKDTESRTTNGMTTVRFVNTLHKDVNISLSTDTSLNVGEDYGVSAYRTVQRGEYPAVHCRTEDKNFSLNLGLLDFGAAYLFVITNNTNQGLQAWKIEDIPANKMSIAWQLPQYALVTAGEVMFSVTGLEFSYSQAPSSMKSVLQAAWLLTIAVGNIIVLVVAQFSGLVQWAEFILFSCLLLVICLIFSIMGYYYVPVKTEDMRGPADKHIPHIQGNMIKLETKKTKL

SEQ ID NO: 42114 - protein, 698 aa, Homo sapiens
MNPFQKNESKETLFSPVSIEEVPPRPPSPPKKPSPTICGSNYPLSIAFIVVNEFCERFSYYGMKAVLILYFLYFLHWNEDTSTSIYHAFSSLCYFTPILGAAIADSWLGKFKVLSLIGLSLIALGTGGIKPCVAAFGGDQFEEKHAEERTRYFSVFYLSINAGSLISTFITPMLRGDVQCFGEDCYALAFGVPGLLMVIALVVFAMGSKIYNKPPPEGNIVAQVFKCIWFAISNRFKNRSGDIPKRQHWLDWAAEKYPKQLIMDVKALTRVLFLYIPLPMFWALLDQQGSRWTLQAIRMNRNLGFFVLQPDQMQVLNPLLVLIFIPLFDFVIYRLVSKCGINFSSLRKMAVGMILACLAFAVAAAVEIKINEMAPAQPGPQEVFLQVLNLADDEVKVTVVGNENNSLLIESIKSFQKTPHYSKLHLKTKSQDFHFHLKYHNLSLYTEHSVQEKNWYSLVIREDGNSISSMMVKDTESRTTNGMTTVRFVNTLHKDVNISLSTDTSLNVGEDYGVSAYRTVQRGEYPAVHCRTEDKNFSLNLGLLDFGAAYLFVITNNTNQGLQAWKIEDIPANKMSIAWQLPQYALVTAGEVMFSVTGLEFSYSQAPSSMKSVLQAAWLLTIAVGNIIVLVVAQFSGLVQWAEFILFSCLLLVICLIFSIMGYYYVPVKTEDMRGPADKHIPHIQGNMIKLETKKTKL

SEQ ID NO: 42115 - protein, 406 aa, Homo sapiens
MSSRVGDLSPQQQEALARFRENLQDLLPILPNADDYFLLRWLRARNFDLQKSEDMLRRHMEFRKQQDLDNIVTWQPPEVIQLYDSGGLCGYDYEGCPVYFNIIGSLDPKGLLLSASKQDMIRKRIKVCELLLHECELQTQKLGRKIEMALMVFDMEGLSLKHLWKPAVEVYQQFFSILEANYPETLKNLIVIRAPKLFPVAFNLVKSFMSEETRRKIVILGDNWKQELTKFISPDQLPVEFGGTMTDPDGNPKCLTKINYGGEVPKSYYLCEQVRLQYEHTRSVGRGSSLQVENEILFPGCVLRWQFASDGGDIGFGVFLKTKMGEQQSAREMTEVLPSQRYNAHMVPEDGSLTCLQAGVYVLRFDNTYSRMHAKKLSYTVEVLLPDKASEETLQSLKAMRPSPTQ

SEQ ID NO: 42116 - protein, 360 aa, Homo sapiens
MSSRVGDLSPQQQEALARFRENLQDLLPILPNADDYFLLRWLRARNFDLQKSEDMLRRHMEFRKQQDLDNIVTWQPPEVIQLYDSGGLCGYDYEGCPVYFNIIGSLDPKGLLLSASKQDMIRKRIKVCELLLHECELQTQKLGRKIEMALMVFDMEGLSLKHLWKPAVEVYQQFFSILEANYPETLKNLIVIRAPKLFPVAFNLVKSFMSEETRRKIVILGDNWKQELTKFISPDQLPVEFGGTMTDPDGNPKCLTKINYGGEVPKSYYLCEQVRLQYEHTRSVGRGSSLQVENEILFPGCVLRWQFASDGGDIGFGVFLKTKMGEQQSAREMTEVLPSQRYNAHMVPEDGSLTCLQAGV

SEQ ID NO: 42117 - protein, 244 aa, Homo sapiens
MFRRKLTALDYHNPAGFNCKDETEFRNFIVWLEDQKIRHYKIEDRGNLRNIHSSDWPKFFEKYLRDVNCPFKIQDRQEAIDWLLGLAVRLEYGDNAEKYKDLVPDNSKTADNATKNAEPLINLDVNNPDFKAGVMALANLLQIQRHDDYLVMLKAIRILVQERLTQDAVAKANQTKEGLPVALDKHILGFDTGDAVLNEAAQILRLLHIEELRELQTKINEAIVAVQAIIADPKTDHRLGKVGR

SEQ ID NO: 42118 - protein, 613 aa, Homo sapiens
MAAVEAAAEPVTVVAAVGPKAKDEEEEEEEPLPPCEAVRWAPVGAVAEARPGATAFLEEATAEEPGAAPGSPPDSPGRTLRRLRAERRRLDSALLALSSHFAQVQFRLRQVVRGAPAEQQRLLRELEDFAFRGCPHVLGYEGPGDPASDEGDGLPGDRPWLRGEDQSEQEKQERLETQREKQKELILQLKTQLDDLETFAYQEGSYDSLPQSVVLERQRVIIDELIKKLDMNLNEDISSLSTEELRQRVDAAVAQIVNPARVKEQLVEQLKTQIRDLEMFINFIQDEVGSPLQTGGGHCECKAGGKTGNGCSRTGSSRTPPGNSKTKAEDVKKVRETGLHLMRRALAVLQIFAVSQFGCATGQIPPTLWQRVQADRDYSPLLKRLEVSVDRVKQLALRQQPHDHVITSANLQDLSLGGKDELTMAVRKELTVAVRDLLAHGLYASSPGMSLVMAPIACLLPAFSSAPEAMHPWELFVKYYHAKNGRAYVESPARKLSQSFALPVTGGTVVTPKQSLLTAIHMVLTEHDPFKRSADSELKALVCMALNEQRLVSWVNLICKSGSLIEPHYQPWSYMAHTGFESALNLLSRLSSLKFSLPVDLAVRQLKNIKDAF

SEQ ID NO: 42119 - protein, 612 aa, Homo sapiens
MAAVEAAAEPVTVVAAVGPKAKDEEEEEEEPLPPCEAVRWAPVGAVAEARPGATAFLEEATAEEPGAAPGSPPDSPGRTLRRLRAERRRLDSALLALSSHFAQVQFRLRQVVRGAPAEQQRLLRELEDFAFRGCPHVLGYEGPGDPASDEGDGLPGDRPWLRGEDQSEQEKQERLETQREKQKELILQLKTQLDDLETFAYQEGSYDSLPQSVVLERQRVIIDELIKKLDMNLNEDISSLSTEELRQRVDAAVAQIVNPARVKEQLVEQLKTQIRDLEMFINFIQEVGSPLQTGGGHCECKAGGKTGNGCSRTGSSRTPPGNSKTKAEDVKKVRETGLHLMRRALAVLQIFAVSQFGCATGQIPPTLWQRVQADRDYSPLLKRLEVSVDRVKQLALRQQPHDHVITSANLQDLSLGGKDELTMAVRKELTVAVRDLLAHGLYASSPGMSLVMAPIACLLPAFSSAPEAMHPWELFVKYYHAKNGRAYVESPARKLSQSFALPVTGGTVVTPKQSLLTAIHMVLTEHDPFKRSADSELKALVCMALNEQRLVSWVNLICKSGSLIEPHYQPWSYMAHTGFESALNLLSRLSSLKFSLPVDLAVRQLKNIKDAF

SEQ ID NO: 42120 - protein, 201 aa, Homo sapiens
MAARTAFGAVCRRLWQGLGNFSVNTSKGNTAKNGGLLLSTNMKWVQFSNLHVDVPKDLTKPVVTISDEPDILYKRLSVLVKGHDKAVLDSYEYFAVLAAKELGISIKVHEPPRKIERFTLLQSVHIYKKHRVQYEMRTLYRCLELEHLTGSTADVYLEYIQRNLPEGVAMEVTKTQLEQLPEHIKEPIWETLSEEKEESKS

SEQ ID NO: 42121 - protein, 523 aa, Homo sapiens
MSFHKEDGVNSLCQKALHIVTELCFAGQVEWEKCSGIFPRDRGSQGGSSTDISVSLLAVVVSFCGLALLVVSLFVFWKLCWPCWKSKPVTSNITTLPQSISSAPTEVFETEEKKEIKENEKPAVKAIEPAIKISHTSPDIPAEVQTALKEHLIKHARVQRQITEPTSSTRHSSFRRHLPRQMQVSSVDFSMGTEPVLQRGETTTSIGRIKPELYKQKSVDSEGNQNEDVKICGKLNFTLQYDYENELLVVKIIKALDLPAKDFTGTSDPYVKMYLLPDRKKKFQTRVHRKTLNPLFDETFQFPVAYDQLSNRKLHFSVYDFDRFSRHDMIGEVILDNLFEVSDLSREATVWKDIHCATTESIDLGEIMFSLCYLPTAGRMTLTVIKCRNLKAMDITGSSDPYVKVSLMCEGRRLKKRKTTTKKNTLNPVYNEAIIFDIPPENVDQVSLSIAVMDYDRVGHNEVIGVCRTGLDAEGLGRDHWNEMLAYHRKPITHWHPLLELPGRATSFDSQGSCPSPKPPSTP

SEQ ID NO: 42122 - protein, 622 aa, Homo sapiens
MSEREERRFVEIPRESVRLMAESTGLELSDEVAALLAEDVCYRLREATQNSSQFMKHTKRRKLTVEDFNRALRWSSVEAVCGYGSQEALPMRPAREGELYFPEDREVNLVELALATNIPKGCAETAVRVHVSYLDGKGNLAPQGSVPSAVSSLTDDLLKYYHQVTRAVLGDDPQLMKVALQDLQTNSKIGALLPYFVYVVSGVKSVSHDLEQLHRLLQVARSLFRNPHLCLGPYVRCLVGSVLYCVLEPLAASINPLNDHWTLRDGAALLLSHIFWTHGDLVSGLYQHILLSLQKILADPVRPLCCHYGAVVGLHALGWKAVERVLYPHLSTYWTNLQAVLDDYSVSNAQVKADGHKVYGAILVAVERLLKMKAQAAEPNRGGPGGRGCRRLDDLPWDSLLFQESSSGGGAEPSFGSGLPLPPGGAGPEDPSLSVTLADIYRELYAFFGDSLATRFGTGQPAPTAPRPPGDKKEPAAAPDSVRKMPQLTASAIVSPHGDESPRGSGGGGPASASGPAASESRPLPRVHRARGAPRQQGPGTGTRDVFQKSRFAPRGAPHFRFIIAGRQAGRRCRGRLFQTAFPAPYGPSPASRYVQKLPMIGRTSRPARRWALSDYSLYLPL

SEQ ID NO: 42123 - protein, 431 aa, Homo sapiens
MAEITNIRPSFDVSPVVAGLIGASVLVVCVSVTVFVWSCCHQQAEKKQKNPPYKFIHMLKGISIYPETLSNKKKIIKVRRDKDGPGREGGRRNLLVDAAEAGLLSRDKDPRGPSSGSCIDQLPIKMDYGEELRSPITSLTPGESKTTSPSSPEEDVMLGSLTFSVDYNFPKKALVVTIQEAHGLPVMDDQTQGSDPYIKMTILPDKRHRVKTRVLRKTLDPVFDETFTFYGIPYSQLQDLVLHFLVLSFDRFSRDDVIGEVMVPLAGVDPSTGKVQLTRDIIKRNIQKCISRGELQVSLSYQPVAQRMTVVVLKARHLPKMDITGLSGNPYVKVNVYYGRKRIAKKKTHVKKCTLNPIFNESFIYDIPTDLLPDISIEFLVIDFDRTTKNEVVGRLILGAHSVTASGAEHWREVCESPRKPVAKWHSLSEY

SEQ ID NO: 42124 - protein, 238 aa, Homo sapiens
MESLSELQNPLLPRSPAHLHGPYPYPETPPSWSCQEKLYSYLLGGAGPAGAHQLLDPGSLQLAVEAWYRPSCLLGRDKVKEPRAGSCETSFTEDREPQEGPPEQPTGPGQAAENVTIQTVSYGVQEELRDQEDDQEEEESDATSTESESEDNFLTLPPRDHLGLTLFSMLCCFWPLGIAAFYFSQGTSKAISKGDFRLASTTSRRALFLATLAIAVGAGLYVAVVVALAAYMSQNGHG

SEQ ID NO: 42125 - protein, 426 aa, Homo sapiens
MVLSVPVIALGATLGTATSILALCGVTCLCRHMHPKKGLLPRDQDPDLEKAKPSLLGSAQQFNVKKSTEPVQPRALLKFPDIYGPRPAVTAPEVINYADYSLRSTEEPTAPASPQPPNDSRLKRQVTEELFILPQNGVVEDVCVMETWNPEKAASWNQAPKLHYCLDYDCQKAELFVTRLEAVTSNHDGGCDCYVQGSVANRTGSVEAQTALKKRQLHTTWEEGLVLPLAEEELPTATLTLTLRTCDRFSRHSVAGELRLGLDGTSVPLGAAQWGELKTSAKEPSAGAGEVLLSISYLPAANRLLVVLIKAKNLHSNQSKELLGKDVSVKVTLKHQARKLKKKQTKRAKHKINPVWNEMIMFELPDDLLQASSVELEVLGQDDSGQSCALGHCSLGLHTSGSERSHWEEMLKNPRRQIAMWHQLHL

SEQ ID NO: 42126 - protein, 560 aa, Homo sapiens
MTVKPAKAASLARNLAKRRRTYLGGAAGRSQEPEVPCAAVLPGKPGDRNCPEFPPPDRTLGCWATDAAPAAGLCGAGSEPSIAPTSCAGNLPSRPPPLLSPLLASRNPCPWHYLHLSGSHNTLAPTCFKAKLHRKRGSQPPDMASALTDRTSRAPSTYTYTSRPRALPCQRSRYRDSLTQPDEEPMHYGNIMYDRRVIRGNTYALQTGPLLGRPDSLELQRQREARKRALARKQAQEQLRPQTPEPVEGRKHVDVQTELYLEEIADRIIEVDMECQTDAFLDRPPTPLFIPAKTGKDVATQILEGELFDFDLEVKPVLEVLVGKTIEQSLLEVMEEEELANLRASQREYEELRNSERAEVQRLEEQERRHREEKERRKKQQWEIMHKHNETSQKIAARAFAQRYLADLLPSVFGSLRDSGYFYDPIERDIEIGFLPWLMNEVEKTMEYSMVGRTVLDMLIREVVEKRLCMYEHGEDTHQSPEPEDEPGGPGAMTESLEASEFLEQSMSQTRELLLDGGYLQRTTYDRRSSQERKFMEERELLGQDEETAMRKSLGEEELS

SEQ ID NO: 42127 - protein, 464 aa, Homo sapiens
MTVKPAKAASLARNLAKRRRTYLGGAAGRSQEPEVPCAAVLPGKPGDRNCPEFPPPDRTLGCWATDAAPAAGLCGAGSEPSIAPTSCAGNLPSRPPPLLSPLLASRNPCPWHYLHLSGSHNTLAPTCFKAKLHRKRGSQPPDMASALTDRTSRAPSTYTYTSRPRALPCQRSRYRDSLTQPDEEPMHYGNIMYDRRVIRGNTYALQTGPLLFDFDLEVKPVLEVLVGKTIEQSLLEVMEEEELANLRASQREYEELRNSERAEVQRLEEQERRHREEKERRKKQQWEIMHKHNETSQKIAARAFAQRYLADLLPSVFGSLRDSGYFYDPIERDIEIGFLPWLMNEVEKTMEYSMVGRTVLDMLIREVVEKRLCMYEHGEDTHQSPEPEDEPGGPGAMTESLEASEFLEQSMSQTRELLLDGGYLQRTTYDRRSSQERKFMEERELLGQDEETAMRKSLGEEELS

SEQ ID NO: 42128 - protein, 555 aa, Homo sapiens
MAIEGGERTCGVHELICIRKVSPEAVGFLSAVGVFIILMLLLFLYINKKFCFENVGGFPDLGSEYSTRKNSQDKIYNSYMDKDEHGSSSESEDEALGKYHEALSRTHNSRLPLADSRQRNYAWETRQKYSPLSAEYDGYSSEASIDEGNCIQRMRRTPPLDELQPPPYQDDSGSPHLSCTPSEIGDSKCEFSHCSNSPRCSYNKCPSEGSTGHEIESFHNKGYEEDVPSDSTAVLSPEDMSAQGSSSQLPKPFDPEPEAKYGTLDVTFDYDSQEQKLLVTVTAVTDIPTYNRTGGNSWQVHLVLLPIKKQRAKTSIQRGPCPVFTETFKFNHVESEMIGNYAVRFRLYGVHRMKKEKIVGEKIFYLTKLNLQGKMSLPVILEPSYNHSGCDSQMSVSEMSCSESTSSCQSLEHGSVPEILIGLLYNATTGRLSAEVIKGSHFKNLAANRPPNTYVKLTLLNSMGQEMSKCKTSIRRGQPNPVYKETFVFQVALFQLSDVTLILSVYNKRSMKRKEMIGWISLGLNSSGEEELNHWTEMKESKGQQVCRWHALLES

SEQ ID NO: 42129 - protein, 457 aa, Homo sapiens
MAIEGGERTCGVHELICIRKVSPEAVGFLSAVGVFIILMLLLFLYINKKFCFENVGGFPDLGSEYSTRKNSQDKIYNSYMDKDEHGSSSESEDEALGKYHEALSRTHNSRLPLADSRQRNYAWETRQKYSPLSAEYDGYSSEASIDEGNCIQRMRRTPPLDELQPPPYQDDSGSPHLSCTPSEIGDSKCEFSHCSNSPRCSYNKCPSEGSTGHEIESFHNKGYEEDVPSDSTAVLSPEDMSAQGSSSQLPKPFDPEPEAKYGTLDVTFDYDSQEQKLLVTVTAVTDIPTYNRTGGNSWQVHLVLLPIKKQRAKTSIQRGPCPVFTETFKFNHVESEMIGNYAVRFRLYGVHRMKKEKIVGEKIFYLTKLNLQGKMSLPVILEPSYNHSGCDSQMSVSEMSCSESTSSCQSLEHGSVPEILIGLLYNATTGRLSAEVIKGSHFKNLAANRHPMDCSVV

SEQ ID NO: 42130 - protein, 517 aa, Homo sapiens
MLLLFLYINKKFCFENVGGFPDLGSEYSTRKNSQDKIYNSYMDKDEHGSSSESEDEALGKYHEALSRTHNSRLPLADSRQRNYAWETRQKYSPLSAEYDGYSSEASIDEGNCIQRMRRTPPLDELQPPPYQDDSGSPHLSCTPSEIGDSKCEFSHCSNSPRCSYNKCPSEGSTGHEIESFHNKGYEEDVPSDSTAVLSPEDMSAQGSSSQLPKPFDPEPEAKYGTLDVTFDYDSQEQKLLVTVTAVTDIPTYNRTGGNSWQVHLVLLPIKKQRAKTSIQRGPCPVFTETFKFNHVESEMIGNYAVRFRLYGVHRMKKEKIVGEKIFYLTKLNLQGKMSLPVILEPSYNHSGCDSQMSVSEMSCSESTSSCQSLEHGSVPEILIGLLYNATTGRLSAEVIKGSHFKNLAANRPPNTYVKLTLLNSMGQEMSKCKTSIRRGQPNPVYKETFVFQVALFQLSDVTLILSVYNKRSMKRKEMIGWISLGLNSSGEEELNHWTEMKESKGQQVCRWHALLES

SEQ ID NO: 42131 - protein, 265 aa, Homo sapiens
MLLLFLYINKKFCFENVGGFPDLGSEYSTRKNSQDKIYNSYMDKDEHGSSSESEDEALGKYHEALSRTHNSRLPLADSRQRNYAWETRQKYSPLSAEYDGYSSEASIDEGNCIQRMRRTPPLDELQPPPYQDDSGSPHLSCTPSEIGDSKCEFSHCSNSPRCSYNKCPSEGSTGHEIESFHNKGYEEDVPSDSTAVLSPEDMSAQGSSSQLPKPFDPEPEAKYGTLDVTFDYDSQEQKLLVTVTAVTDIPTYNRTGGNSWAVTPK

SEQ ID NO: 42132 - protein, 581 aa, Homo sapiens
MAIEGGERTCGVHELICIRKVSPEAVGFLSAVGVFIILMLLLFLYINKKFCFENVGGFPDLGSEYSTRKNSQDKIYNSYMDKDEHGSSSESEDEALGKYHEALSRTHNSRLPLADSRQRNYAWETRQKYSPLSAEYDGYSSEASIDEGNCIQRMRRTPPLDELQPPPYQDDSGSPHLSCTPSEIGDSKCEFSHCSNSPRCSYNKCPSEGSTGHEIESFHNKGYEEDVPSDSTAVLSPEDMSAQGSSSQLPKPFDPEPEAKYGTLDVTFDYDSQEQKLLVTVTAVTDIPTYNRTGGNSWQVHLVLLPIKKQRAKTSIQRGPCPVFTETFKFNHVESEMIGNYAVRFRLYGVHRMKKEKIVGEKIFYLTKLNLQGKMSLPVILEPSYNHSGCDSQMSVSEMSCSESTSSCQSLEHGSVPEILIGLLYNATTGRLSAEVIKGSHFKNLAANRPPTFHPLLSDGLFCCLKHLIGGQVYIIRDTYVKLTLLNSMGQEMSKCKTSIRRGQPNPVYKETFVFQVALFQLSDVTLILSVYNKRSMKRKEMIGWISLGLNSSGEEELNHWTEMKESKGQQVCRWHALLES

SEQ ID NO: 42133 - protein, 574 aa, Homo sapiens
MAIEGGERTCGVHELICIRKVSPEAVGFLSAVGVFIILMLLLFLYINKKFCFENVGGFPDLGSEYSTRKNSQDKIYNSYMDKDEHGSSSESEDEALGKYHEALSRTHNSRLPLADSRQRNYAWETRQKYSPLSAEYDGYSSEASIDEGNCIQRMRRTPPLDELQPPPYQDDSGSPHLSCTPSEIGDSKCEFSHCSNSPRCSYNKCPSEGSTGHEIESFHNKGYEEDVPSDSTAVLSPEDMSAQGSSSQLPKPFDPEPEAKYGTLDVTFDYDSQEQKLLVTVTAVTDIPTYNRTGGNSWQVHLVLLPIKKQRAKTSIQRGPCPVFTETFKFNHVESEMIGNYAVRFRLYGVHRMKKEKIVGEKIFYLTKLNLQGKMSLPVILEPSYNHSGCDSQMSVSEMSCSESTSSCQSLEHGSVPEILIGLLYNATTGRLSAEVIKGSHFKNLAANRPPNGLFCCLKHLIGGQVYIIRDTYVKLTLLNSMGQEMSKCKTSIRRGQPNPVYKETFVFQVALFQLSDVTLILSVYNKRSMKRKEMIGWISLGLNSSGEEELNHWTEMKESKGQQVCRWHALLES

SEQ ID NO: 42134 - protein, 619 aa, Homo sapiens
MASASWRLKVEREPVEYMNLSVLEKIGYFSVARLEYSGTILAHCNFRLLGSNDSSASASQVTGTTVSPEAVGFLSAVGVFIILMLLLFLYINKKFCFENVGGFPDLGSEYSTRKNSQDKIYNSYMDKDEHGSSSESEDEALGKYHEALSRTHNSRLPLADSRQRNYAWETRQKYSPLSAEYDGYSSEASIDEGNCIQRMRRTPPLDELQPPPYQDDSGSPHLSCTPSEIGDSKCEFSHCSNSPRCSYNKCPSEGSTGHEIESFHNKGYEEDVPSDSTAVLSPEDMSAQGSSSQLPKPFDPEPEAKYGTLDVTFDYDSQEQKLLVTVTAVTDIPTYNRTGGNSWQVHLVLLPIKKQRAKTSIQRGPCPVFTETFKFNHVESEMIGNYAVRFRLYGVHRMKKEKIVGEKIFYLTKLNLQGKMSLPVILEPSYNHSGCDSQMSVSEMSCSESTSSCQSLEHGSVPEILIGLLYNATTGRLSAEVIKGSHFKNLAANRPPNGLFCCLKHLIGGQVYIIRDTYVKLTLLNSMGQEMSKCKTSIRRGQPNPVYKETFVFQVALFQLSDVTLILSVYNKRSMKRKEMIGWISLGLNSSGEEELNHWTEMKESKGQQVCRWHALLES

SEQ ID NO: 42135 - protein, 421 aa, Homo sapiens
MAEQLALVIGGTIGGLLLLLLIGASCCLWRRFCATLTYEELPGTPAMATTAASSGQRDRPCQPHARTQLSRPPAVPFVVPPTLQGRDWVPLHSGEWADAPWDPCPASELLPHTSSGGLGDACMVGAINPELYKFPEDKSETDFPDGCLGRLWFSVEYEQEAERLLVGLIKAQHLQAPSETCSPLVKLYLLPDERRFLQSKTKRKTSNPQFDEHFIFQVSSKTITQRVLKFSVYHVDRQRKHQLLGQVLFPLKNETLVGDCRRVIWRDLEAESLEPPSEFGDLQFCLSYNDYLSRLTVVVLRAKGLRLQEDRGIVSVFVKVSLMNHNKFVKCKKTSAVLGSINPVYNETFSFKADATELDTASLSLTVVQNMEGDKSQQLGRVVVGPYMYTRGRELEHWDEMLSKPKELVKRWHALCRTTEP

SEQ ID NO: 42136 - protein, 390 aa, Homo sapiens
MAEQLALVIGGTIGGLLLLLLIGASCCLWRRFCATLTYEELPGTPAMATTAASSGQRDRPCQPHARTQLSRPPAVPFVVPPTLQGRDWVPLHSGEWADAPWDPCPASELLPHTSSGGLGDACMVGAINPELYKFPEDKSETDFPDGCLGRLWFSVEYEQEAERLLVGLIKAQHLQAPSETCSPLVKLYLLPDERRFLQSKTKRKTSNPQFDEHFIFQVSSKTITQRVLKFSVYHVDRQRKHQLLGQVLFPLKNETLVGDCRRVIWRDLEAESLEPPSEFGDLQFCLSYNDYLSRLTVVVLRAKGLRLQEDRGIVSVFVKVSLMNHNKFVKCKKTSAVLGSINPVYNETFSFKADATELDTASLSLTVVQNMEGDKQATTVELFLFHLTSG

SEQ ID NO: 42137 - protein, 474 aa, Homo sapiens
MGVVLLPHPAPSRREPLAPLAPGTRPGWSPAVSGSSRSALRPSTAGPGPGPGTGWGGTAASGRWVPAPAVHCAAPRAAAGHQQHHGPPLCSPDGAPRRFKRRPGSPAPAAQTGETSLREQPHGGPPAVPFVVPPTLQGRDWVPLHSGEWADAPWDPCPASELLPHTSSGGLGDACMVGAINPELYKFPEDKSETDFPDGCLGRLWFSVEYEQEAERLLVGLIKAQHLQAPSETCSPLVKLYLLPDERRFLQSKTKRKTSNPQFDEHFIFQVSSKTITQRVLKFSVYHVDRQRKHQLLGQVLFPLKNETLVGDCRRVIWRDLEAESLEPPSEFGDLQFCLSYNDYLSRLTVVVLRAKGLRLQEDRGIVSVFVKVSLMNHNKFVKCKKTSAVLGSINPVYNETFSFKADATELDTASLSLTVVQNMEGDKSQQLGRVVVGPYMYTRGRELEHWDEMLSKPKELVKRWHALCRTTEP

SEQ ID NO: 42138 - protein, 348 aa, Homo sapiens
MAEQLALVIGGTIGGLLLLLLIGASCCLWRRFCATLTYEELPGTPAMATTAASSGQRDRPCQPHARTQLSRPPAVPFVVPPTLQGRDWVPLHSGEWADAPWDPCPASELLPHTSSGGLGDACMVGAINPELYKFPEDKSETDFPDGCLGRLWFSVEYEQEAERLLVGLIKAQHLQAPSETCSPLVKLYLLPDERRFLQSKTKRKTSNPQFDEHFIFQVSSKTITQRVLKFSVYHVDRQRKHQLLGQVLFPLKNETLVGDCRRVIWRDLEAESLEPPSEFGDLQFCLSYNDYLSRLTVVVLRAKGLRLQEDRGIVSVFVKVSLMNHNKFVKCKPGPGLGEESRGSLNLK

SEQ ID NO: 42139 - protein, 580 aa, Homo sapiens
MNFLRRRLSDSSFMANLPNGYMTDLQRPDSSTSSPASPAMERRHPQPLAASFSSPGSSLFSSLSSAMKQAPQATSGLMEPPGPSTPIVQRPRILLVIDDAHTDWSKYFHGKKVNGEIEIRVEQAEFSELNLAAYVTGGCMVDMQVVRNGTKVVSRSFKPDFILVRQHAYSMALGEDYRSLVIGLQYGGLPAVNSLYSVYNFCSKPWVFSQLIKIFHSLGPEKFPLVEQTFFPNHKPMVTAPHFPVVVKLGHAHAGMGKIKVENQLDFQDITSVVAMAKTYATTEAFIDSKYDIRIQKIGSNYKAYMRTSISGNWKANTGSAMLEQVAMTERYRLWVDSCSEMFGGLDICAVKAVHSKDGRDYIIEVMDSSMPLIGEHVEEDRQLMADLVVSKMSQLPMPGGTAPSPLRPWAPQIKSAKSPGQAQLGPQLGQPQPRPPPQGGPRQAQSPQPQRSGSPSQQRLSPQGQQPLSPQSGSPQQQRSPGSPQLSRASSGSSPNQASKPGATLASQPRPPVQGRSTSQQGEESKKPAPPHPHLNKSQSLTNSLSTSDTSQRGTPSEDEAKAETIRNLRKSFASLFSD

SEQ ID NO: 42140 - protein, 354 aa, Homo sapiens
MESALAVPRLPPHDPGTPVLSVVDMHTGGEPLRIVLAGCPEVSGPTLLAKRRYMRQHLDHVRRRLMFEPRGHRDMYGAVLVPSELPDAHLGVLFLHNEGYSSMCGHAVLALGRFALDFGLVPAPPAGTREARVNIHCPCGLVTAFVACEDGRSHGPVRFHSVPAFVLATDLMVDVPGHGKVMVDIAYGGAFYAFVTAEKLGLDICSAKTRDLVDAASAVTEAVKAQFKINHPDSEDLAFLYGTILTDGKDAYTKEPTTNICVFADEQVDRSPTGSGVTARIALQYHKGLLELNQMRAFKSSATGSVFTGKAVREAKCGDFKAVIVEVSGQAHYTGTASFIIEDDDPLRDGFLLK

SEQ ID NO: 42141 - protein, 310 aa, Homo sapiens
MADAAATAGAGGSGTRSGSKQSTNPADNYHLARRRTLQVVVSSLLTEAGFESAEKASVETLTEMLQSYISEIGRSAKSYCEHTARTQPTLSDIVVTLVEMGFNVDTLPAYAKRSQRMVITAPPVTNQPVTPKALTAGQNRPHPPHIPSHFPEFPDPHTYIKTPTYREPVSDYQVLREKAASQRRDVERALTRFMAKTGETQSLFKDDVSTFPLIAARPFTIPYLTALLPSELEMQQMEETDSSEQDEQTDTENLALHISMEDSGAEKENTSVLQQNPSLSGSRNGEENIIDNPYLRPVKKPKIRRKKSLS

SEQ ID NO: 42142 - protein, 311 aa, Homo sapiens
MADAAATAGAGGSGTRSGSKQSTNPADNYHLARRRTLQVVVSSLLTEAGFESAEKASVETLTEMLQSYISEIGRSAKSYCEHTARTQPTLSDIVVTLVEMGFNVDTLPAYAKRSQRMVITAPPVTNQPVTPKALTAGQNRPHPPHIPSHFPEFPDPHTYIKTPTYREPVSDYQVLREKAASQRRDVERALTRFMAKTGETQSLFKDDVSTFPLIAARPFTIPYLTALLPSELEMQQMEETDSSEQDEQTDTENLALHISMEDSGAEKENTSVLQQNPSLSGSRNGEENIIDNPYLRPVKKPKIRRKKPDTF

SEQ ID NO: 42143 - protein, 338 aa, Homo sapiens
MADAAATAGAGGSGTRSGSKQSTNPADNYHLARRRTLQVVVSSLLTEAGFESAEKASVETLTEMLQSYISEIGRSAKSYCEHTARTQPTLSDIVVTLVEMGFNVDTLPAYAKRSQRMVITAPPVTNQPVTPKALTAGQNRPHPPHIPSHFPEFPDPHTYIKTPTYREPVSDYQVLREKAASQRRDVERALTRFMAKTGETQSLFKDDVSTFPLIAARPFTIPYLTALLPSELEMQQMEETDSSEQDEQTDTENLALHISMIESRSVTQAGVQWQDLGSLQPPPPGFKRFSSLSLLSSWNYRRILEPRRRTPLSCSRTPPCRVAGMGRRTSSITLICGR

SEQ ID NO: 42144 - protein, 548 aa, Homo sapiens
MVLAELYVSDREGSDATGDGTKEKPFKTGLKALMTVGKEPFPTIYVDSQKENERWNVISKSQLKNIKKMWHREQMKSESREKKEAEDSLRREKNLEEAKKITIKNDPSLPEPKCVKIGALEGYRGQRVKVFGWVHRLRRQGKNLMFLVLRDGTGYLQCVLADELCQCYNGVLLSTESSVAVYGMLNLTPKGKQAPGGHELSCDFWELIGLAPAGGADNLINEESDVDVQLNNRHMMIRGENMSKILKARSMVTRCFRDHFFDRGYYEVTPPTLVQTQVEGGATLFKLDYFGEEAFLTQSSQLYLETCLPALGDVFCIAQSYRAEQSRTRRHLAEYTHVEAECPFLTFDDLLNRLEDLVCDVVDRILKSPAGSIVHELNPNFQPPKRPFKRMNYSDAIVWLKEHDVKKEDGTFYEFGEDIPEAPERLMTDTINEPILLCRFPVEIKSFYMQRCPEDSRLTESVDVLMPNVGEIVGGSMRIFDSEEILAGYKREGIDPTPYYWYTDQRKYGTCPHGGYGLGLERFLTWILNRYHIRDVCLYPRFVQRCTP

SEQ ID NO: 42145 - protein, 174 aa, Homo sapiens
MVLAELYVSDREGSDATGDGTKEKPFKTGLKALMTVGKEPFPTIYVDSQKENERWNVISKSQLKNIKKMWHREQMKSESREKKEAEDSLRREKNLEEAKKITIKNDPSLPEPKCVKIGALEGYRGQRVKVFGWVHRLRRQVSVLQWSSLVHGEQCCSVWNAKSYPKGQAGSRWP

SEQ ID NO: 42146 - protein, 422 aa, Homo sapiens
MVSESHHEALAAPPVTTVATVLPSNATEPASPGEGKEDAFSKLKEKFMNELHKIPLPPWALIAIAIVAVLLVLTCCFCICKKCLFKKKNKKKGKEKGGKNAINMKDVKDLGKTMKDQALKDDDAETGLTDGEEKEEPKEEEKLGKLQYSLDYDFQNNQLLVGIIQAAELPALDMGGTSDPYVKVFLLPDKKKKFETKVHRKTLNPVFNEQFTFKVPYSELGGKTLVMAVYDFDRFSKHDIIGEFKVPMNTVDFGHVTEEWRDLQSAEKEEQEKLGDICFSLRYVPTAGKLTVVILEAKNLKKMDVGGLSDPYVKIHLMQNGKRLKKKKTTIKKNTLNPYYNESFSFEVPFEQIQKVQVVVTVLDYDKIGKNDAIGKVFVGYNSTGAELRHWSDMLANPRRPIAQWHTLQVEEEVDAMLAVKK

SEQ ID NO: 42147 - protein, 251 aa, Homo sapiens
MESGKMAPPKNAPRDALVMAQILKDMGITEYEPRVINQMLEFAFRYVTTILDDAKIYSSHAKKPNVDADDVRLAIQCRADQSFTSPPPRDFLLDIARQKNQTPLPLIKPYAGPRLPPDRYCLTAPNYRLKSLIKKGPNQGRLVPRLSVGAVSSKPTTPTIATPQTVSVPNKVATPMSVTSQRFTVQIPPSQSTPVKPVPATTAVQNVLINPSMIGPKNILITTNMVSSQNTANEANPLKRKHEDDDDNDIM

SEQ ID NO: 42148 - protein, 8797 aa, Homo sapiens
MATSRGASRCPRDIANVMQRLQDEQEIVQKRTFTKWINSHLAKRKPPMVVDDLFEDMKDGVKLLALLEVLSGQKLPCEQGRRMKRIHAVANIGTALKFLEGRKIKLVNINSTDIADGRPSIVLGLMWTIILYFQIEELTSNLPQLQSLSSSASSVDSIVSSETPSPPSKRKVTTKIQGNAKKALLKWVQYTAGKQTGIEVKDFGKSWRSGVAFHSVIHAIRPELVDLETVKGRSNRENLEDAFTIAETELGIPRLLDPEDVDVDKPDEKSIMTYVAQFLKHYPDIHNASTDGQEDDEILPGFPSFANSVQNFKREDRVIFKEMKVWIEQFERDLTRAQMVESNLQDKYQSFKHFRVQYEMKRKQIEHLIQPLHRDGKLSLDQALVKQSWDRVTSRLFDWHIQLDKSLPAPLGTIGAWLYRAEVALREEITVQQVHEETANTIQRKLEQHKDLLQNTDAHKRAFHEIYRTRSVNGIPVPPDQLEDMAERFHFVSSTSELHLMKMEFLELKYRLLSLLVLAESKLKSWIIKYGRRESVEQLLQNYVSFIENSKFFEQYEVTYQILKQTAEMYVKADGSVEEAENVMKFMNETTAQWRNLSVEVRSVRSMLEEVISNWDRYGNTVASLQAWLEDAEKMLNQSENAKKDFFRNLPHWIQQHTAMNDAGNFLIETCDEMVSRDLKQQLLLLNGRWRELFMEVKQYAQADEMDRMKKEYTDCVVTLSAFATEAHKKLSEPLEVSFMNVKLLIQDLEDIEQRVPVMDAQYKIITKTAHLITKESPQEEGKEMFATMSKLKEQLTKVKECYSPLLYESQQLLIPLEELEKQMTSFYDSLGKINEIITVLEREAQSSALFKQKHQELLACQENCKKTLTLIEKGSQSVQKFVTLSNVLKHFDQTRLQRQIADIHVAFQSMVKKTGDWKKHVETNSRLMKKFEESRAELEKVLRIAQEGLEEKGDPEELLRRHTEFFSQLDQRVLNAFLKACDELTDILPEQEQQGLQEAVRKLHKQWKDLQGEAPYHLLHLKIDVEKNRFLASVEECRTELDRETKLMPQEGSEKIIKEHRVFFSDKGPHHLCEKRLQLIEELCVKLPVRDPVRDTPGTCHVTLKELRAAIDSTYRKLMEDPDKWKDYTSRFSEFSSWISTNETQLKGIKGEAIDTANHGEVKRAVEEIRNGVTKRGETLSWLKSRLKVLTEVSSENEAQKQGDELAKLSSSFKALVTLLSEVEKMLSNFGDCVQYKEIVKNSLEELISGSKEVQEQAEKILDTENLFEAQQLLLHHQQKTKRISAKKRDVQQQIAQAQQGEGGLPDRGHEELRKLESTLDGLERSRERQERRIQVTLRKWERFETNKETVVRYLFQTGSSHERFLSFSSLESLSSELEQTKEFSKRTESIAVQAENLVKEASEIPLGPQNKQLLQQQAKSIKEQVKKLEDTLEEDIKTMEMVKTKWDHFGSNFETLSVWITEKEKELNALETSSSAMDMQISQIKVTIQEIESKLSSIVGLEEEAQSFAQFVTTGESARIKAKLTQIRRYGEELREHAQCLEGTILGHLSQQQKFEENLRKIQQSVSEFEDKLAVPIKICSSATETYKVLQEHMDLCQALESLSSAITAFSASARKVVNRDSCVQEAAALQQQYEDILRRAKERQTALENLLAHWQRLEKELSSFLTWLERGEAKASSPEMDISADRVKVEGELQLIQALQNEVVSQASFYSKLLQLKESLFSVASKDDVKMMKLHLEQLDERWRDLPQIINKRINFLQSVVAEHQQFDELLLSFSVWIKLFLSELQTTSEISIMDHQVALTRHKDHAAEVESKKGELQSLQGHLAKLGSLGRAEDLHLLQGKAEDCFQLFEEASQVVERRQLALSHLAEFLQSHASLSGILRQLRQTVEATNSMNKNESDLIEKDLNDALQNAKALESAAVSLDGILSKAQYHLKIGSSEQRTSCRATADQLCGEVERIQNLLGTKQSEADALAVLKKAFQDQKEELLKSIEDIEERTDKERLKEPTRQALQQRLRVFNQLEDELNSHEHELCWLKDKAKQIAQKDVAFAPEVDREINRLEVTWDDTKRLIHENQGQCCGLIDLMREYQNLKSAVSKVLENASSVIVTRTTIKDQEDLKWAFSKHETAKNKMNYKQKDLDNFTSKGKHLLSELKKIHSSDFSLVKTDMESTVDKWLDVSEKLEENMDRLRVSLSIWDDVLSTRDEIEGWSNNCVPQMAENISNLDNHLRAEELLKEFESEVKNKALRLEELHSKVNDLKELTKNLETPPDLQFIEADLMQKLEHAKEITEVAKGTLKDFTAQSTQVEKFINDITTWFTKVEESLMNCAQNETCEALKKVKDIQKELQSQQSNISSTQENLNSLCRKYHSAELESLGRAMTGLIKKHEAVSQLCSKTQASLQESLEKHFSESMQEFQEWFLGAKAAAKESSDRTGDSKVLEAKLHDLQNILDSVSDGQSKLDAVTQEGQTLYAHLSKQIVSSIQEQITKANEEFQAFLKQCLKDKQALQDCASELGSFEDQHRKLNLWIHEMEERFNTENLGESKQHIPEKKNEVHKVEMFLGELLAARESLDKLSQRGQLLSEEGHGAGQEGRLCSQLLTSHQNLLRMTKEKLRSCQVALQEHEALEEALQSMWFWVKAIQDRLACAESTLGSKDTLEKRLSQIQDILLMKGEGEVKLNMAIGKGEQALRSSNKEGQRVIQTQLETLKEVWADIMSSSVHAQSTLESVISQWNDYVERKNQLEQWMESVDQKIEHPLQPQPGLKEKFVLLDHLQSILSEAEDHTRALHRLIAKSRELYEKTEDESFKDTAQEELKTQFNDIMTVAKEKMRKVEEIVKDHLMYLDAVHEFTDWLHSAKEELHRWSDMSGDSSATQKKLSKIKELIDSREIGASRLSRVESLAPEVKQNTTASGCELMHTEMQALRADWKQWEDSVFQTQSCLENLVSQMALSEQEFSGQVAQLEQALEQFSALLKTWAQQLTLLEGKNTDEEIVECWHKGQEILDALQKAEPRTEDLKSQLNELCRFSRDLSTYSGKVSGLIKEYNCLCLQASKGCQNKEQILQQRFRKAFRDFQQWLVNAKITTAKCFDIPQNISEVSTSLQKIQEFLSESENGQHKLNMMLSKGELLSTLLTKEKAKGIQAKVTAAKEDWKNFHSNLHQKESALENLKIQMKDFEVSAEPIQDWLSKTEKMVHESSNRLYDLPAKRREQQKLQSVLEEIHCYEPQLNRLKEKAQQLWEGQAASKSFRHRVSQLSSQYLALSNLTKEKVSRLDRIVAEHNQFSLGIKELQDWMTDAIHMLDSYCHPTSDKSVLDSRTLKLEALLSVKQEKEIQMKMIVTRGESVLQNTSPEGIPTIQQQLQSVKDMWASLLSAGIRCKSQLEGALSKWTSYQDGVRQFSGWMDSMEANLNESERQHAELRDKTTMLGKAKLLNEEVLSYSSLLETIEVKGAGMTEHYVTQLELQDLQERYRAIQERAKEAVTKSEKLVRLHQEYQRDLKAFEVWLGQEQEKLDQYSVLEGDAHTHETTLRDLQELQVHCAEGQALLNSVLHTREDVIPSGIPQAEDRALESLRQDWQAYQHRLSETRTQFNNVVNKLRLMEQKFQQVDEWLKTAEEKVSPRTRRQSNRATKEIQLHQMKKWHEEVTAYRDEVEEVGARAQEILDESHVNSRMGCQATQLTSRYQALLLQVLEQIKFLEEEIQSLEESESSLSSYSDWYGSTHKNFKNVATKIDKVDTVMMGKKLKTLEVLLKDMEKGHSLLKSAREKGERAVKYLEEGEAERLRKEIHDHMEQLKELTSTVRKEHMTLEKGLHLAKEFSDKCKALTQWIAEYQEILHVPEEPKMELYEKKAQLSKYKSLQQTVLSHEPSVKSVREKGEALLELVQDVTLKDKIDQLQSDYQDLCSIGKEHVFSLEAKVKDHEDYNSELQEVEKWLLQMSGRLVAPDLLETSSLETITQQLAHHKAMMEEIAGFEDRLNNLQMKGDTLIGQCADHLQAKLKQNVHAHLQGTKDSYSAICSTAQRMYQSLEHELQKHVSRQDTLQQCQAWLSAVQPDLEPSPQPPLSRAEAIKQVKHFRALQEQARTYLDLLCSMCDLSNASVKTTAKDIQQTEQTIEQKLVQAQNLTQGWEEIKHLKSELWIYLQDADQQLQNMKRRHSELELNIAQNMVSQVKDFVKKLQSKQASVNTIIEKVNKLTKKEESPEHKEINHLNDQWLDLCRQSNNLCLQREEDLQRTRDYHDCMNVVEVFLEKFTTEWDNLARSDAESTAVHLEALKKLALALQERKYAIEDLKDQKQKMIEHLNLDDKELVKEQTSHLEQRWFQLEDLIKRKIQVSVTNLEELNVVQSRFQELMEWAEEQQPNIAEALKQSPPPDMAQNLLMDHLAICSELEAKQMLLKSLIKDADRVMADLGLNERQVIQKALSDAQSHVNCLSDLVGQRRKYLNKALSEKTQFLMAVFQATSQIQQHERKIMFREHICLLPDDVSKQVKTCKSAQASLKTYQNEVTGLWAQGRELMKEVTEQEKSEVLGKLQELQSVYDSVLQKCSHRLQELEKNLVSRKHFKEDFDKACHWLKQADIVTFPEINLMNESSELHTQLAKYQNILEQSPEYENLLLTLQRTGQTILPSLNEVDHSYLSEKLNALPRQFNVIVALAKDKFYKVQEAILARKEYASLIELTTQSLSELEAQFLRMSKVPTDLAVEEALSLQDGCRAILDEVAGLGEAVDELNQKKEGFRSTGQPWQPDKMLHLVTLYHRLKRQTEQRVSLLEDTTSAYQEHEKMCQQLERQLKSVKEEQSKVNEETLPAEEKLKMYHSLAGSLQDSGIVLKRVTIHLEDLAPHLDPLAYEKARHQIQSWQGELKLLTSAIGETVTECESRMVQSIDFQTEMSRSLDWLRRVKAELSGPVYLDLNLQDIQEEIRKIQIHQEEVQSSLRIMNALSHKEKEKFTKAKELISADLEHSLAELSELDGDIQEALRTRQATLTEIYSQCQRYYQVFQAANDWLEDAQELLQLAGNGLDVESAEENLKSHMEFFSTEDQFHSNLEELHSLVATLDPLIKPTGKEDLEQKVASLELRSQRMSRDSGAQVDLLQRCTAQWHDYQKAREEVIELMNDTEKKLSEFSLLKTSSSHEAEEKLSEHKALVSVVNSFHEKIVALEEKASQLEKTGNDASKATLSRSMTTVWQRWTRLRAVAQDQEKILEDAVDEWTGFNNKVKKATEMIDQLQDKLPGSSAEKASKAELLTLLEYHDTFVLELEQQQSALGMLRQQTLSMLQDGAAPTPGEEPPLMQEITAMQDRCLNMQEKVKTNGKLVKQELKDREMVETQINSVKCWVQETKEYLGNPTIEIDAQLEELQILLTEATNHRQNIEKMAEEQKEKYLGLYTILPSELSLQLAEVALDLKIRDQIQDKIKEVEQSKATSQELSRQIQKLAKDLTTILTKLKAKTDNVVQAKTDQKVLGEELDGCNSKLMELDAAVQKFLEQNGQLGKPLAKKIGKLTELHQQTIRQAENRLSKLNQAASHLEEYNEMLELILKWIEKAKVLAHGTIAWNSASQLREQYILHQTLLEESKEIDSELEAMTEKLQYLTSVYCTEKMSQQVAELGRETEELRQMIKIRLQNLQDAAKDMKKFEAELKKLQAALEQAQATLTSPEVGRLSLKEQLSHRQHLLSEMESLKPKVQAVQLCQSALRIPEDVVASLPLCHAALRLQEEASRLQHTAIQQCNIMQEAVVQYEQYEQEMKHLQQLIEGAHREIEDKPVATSNIQELQAQISRHEELAQKIKGYQEQIASLNSKCKMLTMKAKHATMLLTVTEVEGLAEGTEDLDGELLPTPSAHPSVVMMTAGRCHTLLSPVTEESGEEGTNSEISSPPACRSPSPVANTDASVNQDIAYYQALSAERLQTDAAKIHPSTSASQEFYEPGLEPSATAKLGDLQRSWETLKNVISEKQRTLYEALERQQKYQDSLQSISTKMEAIELKLSESPEPGRSPESQMAEHQALMDEILMLQDEINELQSSLAEELVSESCEADPAEQLALQSTLTVLAERMSTIRMKASGKRQLLEEKLNDQLEEQRQEQALQRYRCEADELDSWLLSTKATLDTALSPPKEPMDMEAQLMDCQNMLVEIEQKVVALSELSVHNENLLLEGKAHTKDEAEQLAGKLRRLKGSLLELQRALHDKQLNMQGTAQEKEESDVDLTATQSPGVQEWLAQARTTWTQQRQSSLQQQKELEQELAEQKSLLRSVASRGEEILIQHSAAETSGDAGEKPDVLSQELGMEGEKSSAEDQMRMKWESLHQEFSTKQKLLQNVLEQEQEQVLYSRPNRLLSGVPLYKGDVPTQDKSAVTSLLDGLNQAFEEVSSQSGGAKRQSIHLEQKLYDGVSATSTWLDDVEERLFVATALLPEETETCLFNQEILAKDIKEMSEEMDKNKNLFSQAFPENGDNRDVIEDTLGCLLGRLSLLDSVVNQRCHQMKERLQQILNFQNDLKVLFTSLADNKYIILQKLANVFEQPVAEQIEAIQQAEDGLKEFDAGIIELKRRGDKLQVEQPSMQELSKLQDMYDELMMIIGSRRSGLNQNLTLKSQYERALQDLADLLETGQEKMAGDQKIIVSSKEEIQQLLDKHKEYFQGLESHMILTETLFRKIISFAVQKETQFHTELMAQASAVLKRAHKRGVELEYILETWSHLDEDQQELSRQLEVVESSIPSVGLVEENEDRLIDRITLYQHLKSSLNEYQPKLYQVLDDGKRLLISISCSDLESQLNQLGECWLSNTNKMSKELHRLETILKHWTRYQSESADLIHWLQSAKDRLEFWTQQSVTVPQELEMVRDHLNAFLEFSKEVDAQSSLKSSVLSTGNQLLRLKKVDTATLRSELSRIDSQWTDLLTNIPAVQEKLHQLQMDKLPSRHAISEVMSWISLMENVIQKDEDNIKNSIGYKAIHEYLQKYKGFKIDINCKQLTVDFVNQSVLQISSQDVESKRSDKTDFAEQLGAMNKSWQILQGLVTEKIQLLEGLLESWSEYENNVQCLKTWFETQEKRLKQQHRIGDQASVQNALKDCQDLEDLIKAKEKEVEKIEQNGLALIQNKKEDVSSIVMSTLRELGQTWANLDHMVGQLKILLKSVLDQWSSHKVAFDKINSYLMEARYSLSRFRLLTGSLEAVQVQVDNLQNLQDDLEKQERSLQKFGSITNQLLKECHPPVTETLTNTLKEVNMRWNNLLEEIAEQLQSSKALLQLWQRYKDYSKQCASTVQQQEDRTNELLKAATNKDIADDEVATWIQDCNDLLKGLGTVKDSLFFLHELGEQLKQQVDASAASAIQSDQLSLSQHLCALEQALCKQQTSLQAGVLDYETFAKSLEALEAWIVEAEEILQGQDPSHSSDLSTIQERMEELKGQMLKFSSMAPDLDRLNELGYRLPLNDKEIKRMQNLNRHWSLISSQTTERFSKLQSFLLQHQTFLEKCETWMEFLVQTEQKLAVEISGNYQHLLEQQRAHELFQAEMFSRQQILHSIIIDGQRLLEQGQVDDRDEFNLKLTLLSNQWQGVIRRAQQRRGIIDSQIRQWQRYREMAEKLRKWLVEVSYLPMSGLGSVPIPLQQARTLFDEVQFKEKVFLRQQGSYILTVEAGKQLLLSADSGAEAALQAELAEIQEKWKSASMRLEEQKKKLAFLLKDWEKCEKGIADSLEKLRTFKKKLSQSLPDHHEELHAEQMRCKELENAVGSWTDDLTQLSLLKDTLSAYISADDISILNERVELLQRQWEELCHQLSLRRQQIGERLNEWAVFSEKNKELCEWLTQMESKVSQNGDILIEEMIEKLKKDYQEEIAIAQENKIQLQQMGERLAKASHESKASEIEYKLGKVNDRWQHLLDLIAARVKKLKETLVAVQQLDKNMSSLRTWLAHIESELAKPIVYDSCNSEEIQRKLNEQQELQRDIEKHSTGVASVLNLCEVLLHDCDACATDAECDSIQQATRNLDRRWRNICAMSMERRLKIEETWRLWQKFLDDYSRFEDWLKSSERTAAFPSSSGVIYTVAKEELKKFEAFQRQVHECLTQLELINKQYRRLARENRTDSACSLKQMVHEGNQRWDNLQKRVTSILRRLKHFIGQREEFETARDSILVWLTEMDLQLTNIEHFSECDVQAKIKQLKAFQQEISLNHNKIEQIIAQGEQLIEKSEPLDAAIIEEELDELRRYCQEVFGRVERYHKKLIRLPLPDDEHDLSDRELELEDSAALSDLHWHDRSADSLLSPQPSSNLSLSLAQPLRSERSGRDTPASVDSIPLEWDHDYDLSRDLESAMSRALPSEDEEGQDDKDFYLRGAVGLSGDHSALESQIRQLGKALDDSRFQIQQTENIIRSKTPTGPELDTSYKGYMKLLGECSSSIDSVKRLEHKLKEEEESLPGFVNLHSTETQTAGVIDRWELLQAQALSKELRMKQNLQKWQQFNSDLNSIWAWLGDTEEELEQLQRLELSTDIQTIELQIKKLKELQKAVDHRKAIILSINLCSPEFTQADSKESRDLQDRLSQMNGRWDRVCSLLEEWRGLLQDALMQCQGFHEMSHGLLLMLENIDRRKNEIVPIDSNLDAEILQDHHKQLMQIKHELLESQLRVASLQDMSCQLLVNAEGTDCLEAKEKVHVIGNRLKLLLKEVSRHIKELEKLLDVSSSQQDLSSWSSADELDTSGSVSPTSGRSTPNRQKTPRGKCSLSQPGPSVSSPHSRSTKGGSDSSLSEPGPGRSGRGFLFRVLRAALPLQLLLLLLIGLACLVPMSEEDYSCALSNNFARSFHPMLRYTNGPPPL

SEQ ID NO: 42149 - protein, 3321 aa, Homo sapiens
MELDAAVQKFLEQNGQLGKPLAKKIGKLTELHQQTIRQAENRLSKLNQAASHLEEYNEMLELILKWIEKAKVLAHGTIAWNSASQLREQYILHQTLLEESKEIDSELEAMTEKLQYLTSVYCTEKMSQQVAELGRETEELRQMIKIRLQNLQDAAKDMKKFEAELKKLQAALEQAQATLTSPEVGRLSLKEQLSHRQHLLSEMESLKPKVQAVQLCQSALRIPEDVVASLPLCHAALRLQEEASRLQHTAIQQCNIMQEAVVQYEQYEQEMKHLQQLIEGAHREIEDKPVATSNIQELQAQISRHEELAQKIKGYQEQIASLNSKCKMLTMKAKHATMLLTVTEVEGLAEGTEDLDGELLPTPSAHPSVVMMTAGRCHTLLSPVTEESGEEGTNSEISSPPACRSPSPVANTDASVNQDIAYYQALSAERLQTDAAKIHPSTSASQEFYEPGLEPSATAKLGDLQRSWETLKNVISEKQRTLYEALERQQKYQDSLQSISTKMEAIELKLSESPEPGRSPESQMAEHQALMDEILMLQDEINELQSSLAEELVSESCEADPAEQLALQSTLTVLAERMSTIRMKASGKRQLLEEKLNDQLEEQRQEQALQRYRCEADELDSWLLSTKATLDTALSPPKEPMDMEAQLMDCQNMLVEIEQKVVALSELSVHNENLLLEGKAHTKDEAEQLAGKLRRLKGSLLELQRALHDKQLNMQGTAQEKEESDVDLTATQSPGVQEWLAQARTTWTQQRQSSLQQQKELEQELAEQKSLLRSVASRGEEILIQHSAAETSGDAGEKPDVLSQELGMEGEKSSAEDQMRMKWESLHQEFSTKQKLLQNVLEQEQEQVLYSRPNRLLSGVPLYKGDVPTQDKSAVTSLLDGLNQAFEEVSSQSGGAKRQSIHLEQKLYDGVSATSTWLDDVEERLFVATALLPEETETCLFNQEILAKDIKEMSEEMDKNKNLFSQAFPENGDNRDVIEDTLGCLLGRLSLLDSVVNQRCHQMKERLQQILNFQNDLKVLFTSLADNKYIILQKLANVFEQPVAEQIEAIQQAEDGLKEFDAGIIELKRRGDKLQVEQPSMQELSKLQDMYDELMMIIGSRRSGLNQNLTLKSQYERALQDLADLLETGQEKMAGDQKIIVSSKEEIQQLLDKHKEYFQGLESHMILTETLFRKIISFAVQKETQFHTELMAQASAVLKRAHKRGVELEYILETWSHLDEDQQELSRQLEVVESSIPSVGLVEENEDRLIDRITLYQHLKSSLNEYQPKLYQVLDDGKRLLISISCSDLESQLNQLGECWLSNTNKMSKELHRLETILKHWTRYQSESADLIHWLQSAKDRLEFWTQQSVTVPQELEMVRDHLNAFLEFSKEVDAQSSLKSSVLSTGNQLLRLKKVDTATLRSELSRIDSQWTDLLTNIPAVQEKLHQLQMDKLPSRHAISEVMSWISLMENVIQKDEDNIKNSIGYKAIHEYLQKYKGFKIDINCKQLTVDFVNQSVLQISSQDVESKRSDKTDFAEQLGAMNKSWQILQGLVTEKIQLLEGLLESWSEYENNVQCLKTWFETQEKRLKQQHRIGDQASVQNALKDCQDLEDLIKAKEKEVEKIEQNGLALIQNKKEDVSSIVMSTLRELGQTWANLDHMVGQLKILLKSVLDQWSSHKVAFDKINSYLMEARYSLSRFRLLTGSLEAVQVQVDNLQNLQDDLEKQERSLQKFGSITNQLLKECHPPVTETLTNTLKEVNMRWNNLLEEIAEQLQSSKALLQLWQRYKDYSKQCASTVQQQEDRTNELLKAATNKDIADDEVATWIQDCNDLLKGLGTVKDSLFFLHELGEQLKQQVDASAASAIQSDQLSLSQHLCALEQALCKQQTSLQAGVLDYETFAKSLEALEAWIVEAEEILQGQDPSHSSDLSTIQERMEELKGQMLKFSSMAPDLDRLNELGYRLPLNDKEIKRMQNLNRHWSLISSQTTERFSKLQSFLLQHQTFLEKCETWMEFLVQTEQKLAVEISGNYQHLLEQQRAHELFQAEMFSRQQILHSIIIDGQRLLEQGQVDDRDEFNLKLTLLSNQWQGVIRRAQQRRGIIDSQIRQWQRYREMAEKLRKWLVEVSYLPMSGLGSVPIPLQQARTLFDEVQFKEKVFLRQQGSYILTVEAGKQLLLSADSGAEAALQAELAEIQEKWKSASMRLEEQKKKLAFLLKDWEKCEKGIADSLEKLRTFKKKLSQSLPDHHEELHAEQMRCKELENAVGSWTDDLTQLSLLKDTLSAYISADDISILNERVELLQRQWEELCHQLSLRRQQIGERLNEWAVFSEKNKELCEWLTQMESKVSQNGDILIEEMIEKLKKDYQEEIAIAQENKIQLQQMGERLAKASHESKASEIEYKLGKVNDRWQHLLDLIAARVKKLKETLVAVQQLDKNMSSLRTWLAHIESELAKPIVYDSCNSEEIQRKLNEQQELQRDIEKHSTGVASVLNLCEVLLHDCDACATDAECDSIQQATRNLDRRWRNICAMSMERRLKIEETWRLWQKFLDDYSRFEDWLKSSERTAAFPSSSGVIYTVAKEELKKFEAFQRQVHECLTQLELINKQYRRLARENRTDSACSLKQMVHEGNQRWDNLQKRVTSILRRLKHFIGQREEFETARDSILVWLTEMDLQLTNIEHFSECDVQAKIKQLKAFQQEISLNHNKIEQIIAQGEQLIEKSEPLDAAIIEEELDELRRYCQEVFGRVERYHKKLIRLPLPDDEHDLSDRELELEDSAALSDLHWHDRSADSLLSPQPSSNLSLSLAQPLRSERSGRDTPASVDSIPLEWDHDYDLSRDLESAMSRALPSEDEEGQDDKDFYLRGAVGLSGDHSALESQIRQLGKALDDSRFQIQQTENIIRSKTPTGPELDTSYKGYMKLLGECSSSIDSVKRLEHKLKEEEESLPGFVNLHSTETQTAGVIDRWELLQAQALSKELRMKQNLQKWQQFNSDLNSIWAWLGDTEEELEQLQRLELSTDIQTIELQIKKLKELQKAVDHRKAIILSINLCSPEFTQADSKESRDLQDRLSQMNGRWDRVCSLLEEWRGLLQDALMQCQGFHEMSHGLLLMLENIDRRKNEIVPIDSNLDAEILQDHHKQLMQIKHELLESQLRVASLQDMSCQLLVNAEGTDCLEAKEKVHVIGNRLKLLLKEVSRHIKELEKLLDVSSSQQDLSSWSSADELDTSGSVSPTSGRSTPNRQKTPRGKCSLSQPGPSVSSPHSRSTKGGSDSSLSEPGPGRSGRGFLFRVLRAALPLQLLLLLLIGLACLVPMSEEDYSCALSNNFARSFHPMLRYTNGPPPL

SEQ ID NO: 42150 - protein, 982 aa, Homo sapiens
MGERLAKASHESKASEIEYKLGKVNDRWQHLLDLIAARVKKLKETLVAVQQLDKNMSSLRTWLAHIESELAKPIVYDSCNSEEIQRKLNEQQELQRDIEKHSTGVASVLNLCEVLLHDCDACATDAECDSIQQATRNLDRRWRNICAMSMERRLKIEETWRLWQKFLDDYSRFEDWLKSSERTAAFPSSSGVIYTVAKEELKKFEAFQRQVHECLTQLELINKQYRRLARENRTDSACSLKQMVHEGNQRWDNLQKRVTSILRRLKHFIGQREEFETARDSILVWLTEMDLQLTNIEHFSECDVQAKIKQLKAFQQEISLNHNKIEQIIAQGEQLIEKSEPLDAAIIEEELDELRRYCQEVFGRVERYHKKLIRLPLPDDEHDLSDRELELEDSAALSDLHWHDRSADSLLSPQPSSNLSLSLAQPLRSERSGRDTPASVDSIPLEWDHDYDLSRDLESAMSRALPSEDEEGQDDKDFYLRGAVGLSDVMIPESPEAYVKLTENAIKNTSGDHSALESQIRQLGKALDDSRFQIQQTENIIRSKTPTGPELDTSYKGYMKLLGECSSSIDSVKRLEHKLKEEEESLPGFVNLHSTETQTAGVIDRWELLQAQALSKELRMKQNLQKWQQFNSDLNSIWAWLGDTEEELEQLQRLELSTDIQTIELQIKKLKELQKAVDHRKAIILSINLCSPEFTQADSKESRDLQDRLSQMNGRWDRVCSLLEEWRGLLQDALMQCQGFHEMSHGLLLMLENIDRRKNEIVPIDSNLDAEILQDHHKQLMQIKHELLESQLRVASLQDMSCQLLVNAEGTDCLEAKEKVHVIGNRLKLLLKEVSRHIKELEKLLDVSSSQQDLSSWSSADELDTSGSVSPTSGRSTPNRQKTPRGKCSLSQPGPSVSSPHSRSTKGGSDSSLSEPGPGRSGRGFLFRVLRAALPLQLLLLLLIGLACLVPMSEEDYSCALSNNFARSFHPMLRYTNGPPPL

SEQ ID NO: 42151 - protein, 8749 aa, Homo sapiens
MATSRGASRCPRDIANVMQRLQDEQEIVQKRTFTKWINSHLAKRKPPMVVDDLFEDMKDGVKLLALLEVLSGQKLPCEQGRRMKRIHAVANIGTALKFLEGRKSMHRGSPIKLVNINSTDIADGRPSIVLGLMWTIILYFQIEELTSNLPQLQSLSSSASSVDSIVSSETPSPPSKRKVTTKIQGNAKKALLKWVQYTAGKQTGIEVKDFGKSWRSGVAFHSVIHAIRPELVDLETVKGRSNRENLEDAFTIAETELGIPRLLDPEDVDVDKPDEKSIMTYVAQFLKHYPDIHNASTDGQEDDEILPGFPSFANSVQNFKREDRVIFKEMKVWIEQFERDLTRAQMVESNLQDKYQSFKHFRVQYEMKRKQIEHLIQPLHRDGKLSLDQALVKQSWDRVTSRLFDWHIQLDKSLPAPLGTIGAWLYRAEVALREEITVQQVHEETANTIQRKLEQHKDLLQNTDAHKRAFHEIYRTRSVNGIPVPPDQLEDMAERFHFVSSTSELHLMKMEFLELKYRLLSLLVLAESKLKSWIIKYGRRESVEQLLQNYVSFIENSKFFEQYEVTYQILKQTAEMYVKADGSVEEAENVMKFMNETTAQWRNLSVEVRSVRSMLEEVISNWDRYGNTVASLQAWLEDAEKMLNQSENAKKDFFRNLPHWIQQHTAMNDAGNFLIETCDEMVSRDLKQQLLLLNGRWRELFMEVKQYAQADEMDRMKKEYTDCVVTLSAFATEAHKKLSEPLEVSFMNVKLLIQDLEDIEQRVPVMDAQYKIITKTAHLITKESPQEEGKEMFATMSKLKEQLTKVKECYSPLLYESQQLLIPLEELEKQMTSFYDSLGKINEIITVLEREAQSSALFKQKHQELLACQENCKKTLTLIEKGSQSVQKFVTLSNVLKHFDQTRLQRQIADIHVAFQSMVKKTGDWKKHVETNSRLMKKFEESRAELEKVLRIAQEGLEEKGDPEELLRRHTEFFSQLDQRVLNAFLKACDELTDILPEQEQQGLQEAVRKLHKQWKDLQGEAPYHLLHLKIDVEKNRFLASVEECRTELDRETKLMPQEGSEKIIKEHRVFFSDKGPHHLCEKRLQLIEELCVKLPVRDPVRDTPGTCHVTLKELRAAIDSTYRKLMEDPDKWKDYTSRFSEFSSWISTNETQLKGIKGEAIDTANHGEVKRAVEEIRNGVTKRGETLSWLKSRLKVLTEVSSENEAQKQGDELAKLSSSFKALVTLLSEVEKMLSNFGDCVQYKEIVKNSLEELISGSKEVQEQAEKILDTENLFEAQQLLLHHQQKTKRISAKKRDVQQQIAQAQQGEGGLPDRGHEELRKLESTLDGLERSRERQERRIQVTLRKWERFETNKETVVRYLFQTGSSHERFLSFSSLESLSSELEQTKEFSKRTESIAVQAENLVKEASEIPLGPQNKQLLQQQAKSIKEQVKKLEDTLEEDIKTMEMVKTKWDHFGSNFETLSVWITEKEKELNALETSSSAMDMQISQIKVTIQEIESKLSSIVGLEEEAQSFAQFVTTGESARIKAKLTQIRRYGEELREHAQCLEGTILGHLSQQQKFEENLRKIQQSVSEFEDKLAVPIKICSSATETYKVLQEHMDLCQALESLSSAITAFSASARKVVNRDSCVQEAAALQQQYEDILRRAKERQTALENLLAHWQRLEKELSSFLTWLERGEAKASSPEMDISADRVKVEGELQLIQALQNEVVSQASFYSKLLQLKESLFSVASKDDVKMMKLHLEQLDERWRDLPQIINKRINFLQSVVAEHQQFDELLLSFSVWIKLFLSELQTTSEISIMDHQVALTRHKDHAAEVESKKGELQSLQGHLAKLGSLGRAEDLHLLQGKAEDCFQLFEEASQVVERRQLALSHLAEFLQSHASLSGILRQLRQTVEATNSMNKNESDLIEKDLNDALQNAKALESAAVSLDGILSKAQYHLKIGSSEQRTSCRATADQLCGEVERIQNLLGTKQSEADALAVLKKAFQDQKEELLKSIEDIEERTDKERLKEPTRQALQQRLRVFNQLEDELNSHEHELCWLKDKAKQIAQKDVAFAPEVDREINRLEVTWDDTKRLIHENQGQCCGLIDLMREYQNLKSAVSKVLENASSVIVTRTTIKDQEDLKWAFSKHETAKNKMNYKQKDLDNFTSKGKHLLSELKKIHSSDFSLVKTDMESTVDKWLDVSEKLEENMDRLRVSLSIWDDVLSTRDEIEGWSNNCVPQMAENISNLDNHLRAEELLKEFESEVKNKALRLEELHSKVNDLKELTKNLETPPDLQFIEADLMQKLEHAKEITEVAKGTLKDFTAQSTQVEKFINDITTWFTKVEESLMNCAQNETCEALKKVKDIQKELQSQQSNISSTQENLNSLCRKYHSAELESLGRAMTGLIKKHEAVSQLCSKTQASLQESLEKHFSESMQEFQEWFLGAKAAAKESSDRTGDSKVLEAKLHDLQNILDSVSDGQSKLDAVTQEGQTLYAHLSKQIVSSIQEQITKANEEFQAFLKQCLKDKQALQDCASELGSFEDQHRKLNLWIHEMEERFNTENLGESKQHIPEKKNEVHKVEMFLGELLAARESLDKLSQRGQLLSEEGHGAGQEGRLCSQLLTSHQNLLRMTKEKLRSCQVALQEHEALEEALQSMWFWVKAIQDRLACAESTLGSKDTLEKRLSQIQDILLMKGEGEVKLNMAIGKGEQALRSSNKEGQRVIQTQLETLKEVWADIMSSSVHAQSTLESVISQWNDYVERKNQLEQWMESVDQKIEHPLQPQPGLKEKFVLLDHLQSILSEAEDHTRALHRLIAKSRELYEKTEDESFKDTAQEELKTQFNDIMTVAKEKMRKVEEIVKDHLMYLDAVHEFTDWLHSAKEELHRWSDMSGDSSATQKKLSKIKELIDSREIGASRLSRVESLAPEVKQNTTASGCELMHTEMQALRADWKQWEDSVFQTQSCLENLVSQMALSEQEFSGQVAQLEQALEQFSALLKTWAQQLTLLEGKNTDEEIVECWHKGQEILDALQKAEPRTEDLKSQLNELCRFSRDLSTYSGKVSGLIKEYNCLCLQASKGCQNKEQILQQRFRKAFRDFQQWLVNAKITTAKCFDIPQNISEVSTSLQKIQEFLSESENGQHKLNMMLSKGELLSTLLTKEKAKGIQAKVTAAKEDWKNFHSNLHQKESALENLKIQMKDFEVSAEPIQDWLSKTEKMVHESSNRLYDLPAKRREQQKLQSVLEEIHCYEPQLNRLKEKAQQLWEGQAASKSFRHRVSQLSSQYLALSNLTKEKVSRLDRIVAEHNQFSLGIKELQDWMTDAIHMLDSYCHPTSDKSVLDSRTLKLEALLSVKQEKEIQMKMIVTRGESVLQNTSPEGIPTIQQQLQSVKDMWASLLSAGIRCKSQLEGALSKWTSYQDGVRQFSGWMDSMEANLNESERQHAELRDKTTMLGKAKLLNEEVLSYSSLLETIEVKGAGMTEHYVTQLELQDLQERYRAIQERAKEAVTKSEKLVRLHQEYQRDLKAFEVWLGQEQEKLDQYSVLEGDAHTHETTLRDLQELQVHCAEGQALLNSVLHTREDVIPSGIPQAEDRALESLRQDWQAYQHRLSETRTQFNNVVNKLRLMEQKFQQVDEWLKTAEEKKWHEEVTAYRDEVEEVGARAQEILDESHVNSRMGCQATQLTSRYQALLLQVLEQIKFLEEEIQSLEESESSLSSYSDWYGSTHKNFKNVATKIDKVDTVMMGKKLKTLEVLLKDMEKGHSLLKSAREKGERAVKYLEEGEAERLRKEIHDHMEQLKELTSTVRKEHMTLEKGLHLAKEFSDKCKALTQWIAEYQEILHVPEEPKMELYEKKAQLSKYKSLQQTVLSHEPSVKSVREKGEALLELVQDVTLKDKIDQLQSDYQDLCSIGKAMMEEIAGFEDRLNNLQMKGDTLIGQCADHLQAKLKQNVHAHLQGTKDSYSAICSTAQRMYQSLEHELQKHVSRQDTLQQCQAWLSAVQPDLEPSPQPPLSRAEAIKQVKHFRALQEQARTYLDLLCSMCDLSNASVKTTAKDIQQTEQTIEQKLVQAQNLTQGWEEIKHLKSELWIYLQDADQQLQNMKRRHSELELNIAQNMVSQVKDFVKKLQSKQASVNTIIEKVNKLTKKEESPEHKEINHLNDQWLDLCRQSNNLCLQREEDLQRTRDYHDCMNVVEVFLEKFTTEWDNLARSDAESTAVHLEALKKLALALQERKYAIEDLKDQKQKMIEHLNLDDKELVKEQTSHLEQRWFQLEDLIKRKIQVSVTNLEELNVVQSRFQELMEWAEEQQPNIAEALKQSPPPDMAQNLLMDHLAICSELEAKQMLLKSLIKDADRVMADLGLNERQVIQKALSDAQSHVNCLSDLVGQRRKYLNKALSEKTQFLMAVFQATSQIQQHERKIMFREHICLLPDDVSKQVKTCKSAQASLKTYQNEVTGLWAQGRELMKEVTEQEKSEVLGKLQELQSVYDSVLQKCSHRLQELEKNLVSRKHFKEDFDKACHWLKQADIVTFPEINLMNESSELHTQLAKYQNILEQSPEYENLLLTLQRTGQTILPSLNEVDHSYLSEKLNALPRQFNVIVALAKDKFYKVQEAILARKEYASLIELTTQSLSELEAQFLRMSKVPTDLAVEEALSLQDGCRAILDEVAGLGEAVDELNQKKEGFRSTGQPWQPDKMLHLVTLYHRLKRQTEQRVSLLEDTTSAYQEHEKMCQQLERQLKSVKEEQSKVNEETLPAEEKLKMYHSLAGSLQDSGIVLKRVTIHLEDLAPHLDPLAYEKARHQIQSWQGELKLLTSAIGETVTECESRMVQSIDFQTEMSRSLDWLRRVKAELSGPVYLDLNLQDIQEEIRKIQIHQEEVQSSLRIMNALSHKEKEKFTKAKELISADLEHSLAELSELDGDIQEALRTRQATLTEIYSQCQRYYQVFQAANDWLEDAQELLQLAGNGLDVESAEENLKSHMEFFSTEDQFHSNLEELHSLVATLDPLIKPTGKEDLEQKVASLELRSQRMSRDSGAQVDLLQRCTAQWHDYQKAREEVIELMNDTEKKLSEFSLLKTSSSHEAEEKLSEHKALVSVVNSFHEKIVALEEKASQLEKTGNDASKATLSRSMTTVWQRWTRLRAVAQDQEKILEDAVDEWTGFNNKVKKATEMIDQLQDKLPGSSAEKASKAELLTLLEYHDTFVLELEQQQSALGMLRQQTLSMLQDGAAPTPGEEPPLMQEITAMQDRCLNMQEKVKTNGKLVKQELKDREMVETQINSVKCWVQETKEYLGNPTIEIDAQLEELQILLTEATNHRQNIEKMAEEQKEKYLGLYTILPSELSLQLAEVALDLKIRDQIQDKIKEVEQSKATSQELSRQIQKLAKDLTTILTKLKAKTDNVVQAKTDQKVLGEELDGCNSKLMELDAAVQKFLEQNGQLGKPLAKKIGKLTELHQQTIRQAENRLSKLNQAASHLEEYNEMLELILKWIEKAKVLAHGTIAWNSASQLREQYILHQTLLEESKEIDSELEAMTEKLQYLTSVYCTEKMSQQVAELGRETEELRQMIKIRLQNLQDAAKDMKKFEAELKKLQAALEQAQATLTSPEVGRLSLKEQLSHRQHLLSEMESLKPKVQAVQLCQSALRIPEDVVASLPLCHAALRLQEEASRLQHTAIQQCNIMQEAVVQYEQYEQEMKHLQQLIEGAHREIEDKPVATSNIQELQAQISRHEELAQKIKGYQEQIASLNSKCKMLTMKAKHATMLLTVTEVEGLAEGTEDLDGELLPTPSAHPSVVMMTAGRCHTLLSPVTEESGEEGTNSEISSPPACRSPSPVANTDASVNQDIAYYQALSAERLQTDAAKIHPSTSASQEFYEPGLEPSATAKLGDLQRSWETLKNVISEKQRTLYEALERQQKYQDSLQSISTKMEAIELKLSESPEPGRSPESQMAEHQALMDEILMLQDEINELQSSLAEELVSESCEADPAEQLALQSTLTVLAERMSTIRMKASGKRQLLEEKLNDQLEEQRQEQALQRYRCEADELDSWLLSTKATLDTALSPPKEPMDMEAQLMDCQNMLVEIEQKVVALSELSVHNENLLLEGKAHTKDEAEQLAGKLRRLKGSLLELQRALHDKQLNMQGTAQEKEESDVDLTATQSPGVQEWLAQARTTWTQQRQSSLQQQKELEQELAEQKSLLRSVASRGEEILIQHSAAETSGDAGEKPDVLSQELGMEGEKSSAEDQMRMKWESLHQEFSTKQKLLQNVLEQEQEQVLYSRPNRLLSGVPLYKGDVPTQDKSAVTSLLDGLNQAFEEVSSQSGGAKRQSIHLEQKLYDGVSATSTWLDDVEERLFVATALLPEETETCLFNQEILAKDIKEMSEEMDKNKNLFSQAFPENGDNRDVIEDTLGCLLGRLSLLDSVVNQRCHQMKERLQQILNFQNDLKVLFTSLADNKYIILQKLANVFEQPVAEQIEAIQQAEDGLKEFDAGIIELKRRGDKLQVEQPSMQELSKLQDMYDELMMIIGSRRSGLNQNLTLKSQYERALQDLADLLETGQEKMAGDQKIIVSSKEEIQQLLDKHKEYFQGLESHMILTETLFRKIISFAVQKETQFHTELMAQASAVLKRAHKRGVELEYILETWSHLDEDQQELSRQLEVVESSIPSVGLVEENEDRLIDRITLYQHLKSSLNEYQPKLYQVLDDGKRLLISISCSDLESQLNQLGECWLSNTNKMSKELHRLETILKHWTRYQSESADLIHWLQSAKDRLEFWTQQSVTVPQELEMVRDHLNAFLEFSKEVDAQSSLKSSVLSTGNQLLRLKKVDTATLRSELSRIDSQWTDLLTNIPAVQEKLHQLQMDKLPSRHAISEVMSWISLMENVIQKDEDNIKNSIGYKAIHEYLQKYKGFKIDINCKQLTVDFVNQSVLQISSQDVESKRSDKTDFAEQLGAMNKSWQILQGLVTEKIQLLEGLLESWSEYENNVQCLKTWFETQEKRLKQQHRIGDQASVQNALKDCQDLEDLIKAKEKEVEKIEQNGLALIQNKKEDVSSIVMSTLRELGQTWANLDHMVGQLKILLKSVLDQWSSHKVAFDKINSYLMEARYSLSRFRLLTGSLEAVQVQVDNLQNLQDDLEKQERSLQKFGSITNQLLKECHPPVTETLTNTLKEVNMRWNNLLEEIAEQLQSSKALLQLWQRYKDYSKQCASTVQQQEDRTNELLKAATNKDIADDEVATWIQDCNDLLKGLGTVKDSLFFLHELGEQLKQQVDASAASAIQSDQLSLSQHLCALEQALCKQQTSLQAGVLDYETFAKSLEALEAWIVEAEEILQGQDPSHSSDLSTIQERMEELKGQMLKFSSMAPDLDRLNELGYRLPLNDKEIKRMQNLNRHWSLISSQTTERFSKLQSFLLQHQTFLEKCETWMEFLVQTEQKLAVEISGNYQHLLEQQRAHELFQAEMFSRQQILHSIIIDGQRLLEQGQVDDRDEFNLKLTLLSNQWQGVIRRAQQRRGIIDSQIRQWQRYREMAEKLRKWLVEVSYLPMSGLGSVPIPLQQARTLFDEVQFKEKVFLRQQGSYILTVEAGKQLLLSADSGAEAALQAELAEIQEKWKSASMRLEEQKKKLAFLLKDWEKCEKGIADSLEKLRTFKKKLSQSLPDHHEELHAEQMRCKELENAVGSWTDDLTQLSLLKDTLSAYISADDISILNERVELLQRQWEELCHQLSLRRQQIGERLNEWAVFSEKNKELCEWLTQMESKVSQNGDILIEEMIEKLKKDYQEEIAIAQENKIQLQQMGERLAKASHESKASEIEYKLGKVNDRWQHLLDLIAARVKKLKETLVAVQQLDKNMSSLRTWLAHIESELAKPIVYDSCNSEEIQRKLNEQQELQRDIEKHSTGVASVLNLCEVLLHDCDACATDAECDSIQQATRNLDRRWRNICAMSMERRLKIEETWRLWQKFLDDYSRFEDWLKSSERTAAFPSSSGVIYTVAKEELKKFEAFQRQVHECLTQLELINKQYRRLARENRTDSACSLKQMVHEGNQRWDNLQKRVTSILRRLKHFIGQREEFETARDSILVWLTEMDLQLTNIEHFSECDVQAKIKQLKAFQQEISLNHNKIEQIIAQGEQLIEKSEPLDAAIIEEELDELRRYCQEVFGRVERYHKKLIRLPLPDDEHDLSDRELELEDSAALSDLHWHDRSADSLLSPQPSSNLSLSLAQPLRSERSGRDTPASVDSIPLEWDHDYDLSRDLESAMSRALPSEDEEGQDDKDFYLRGAVGLSDVMIPESPEAYVKLTENAIKNTSGDHSALESQIRQLGKALDDSRFQIQQTENIIRSKTPTGPELDTSYKGYMKLLGECSSSIDSVKRLEHKLKEEEESLPGFVNLHSTETQTAGVIDRWELLQAQALSKELRMKQNLQKWQQFNSDLNSIWAWLGDTEEELEQLQRLELSTDIQTIELQIKKLKELQKAVDHRKAIILSINLCSPEFTQADSKESRDLQDRLSQMNGRWDRVCSLLEEWRGLLQDALMQCQGFHEMSHGLLLMLENIDRRKNEIVPIDSNLDAEILQDHHKQLMQIKHELLESQLRVASLQDMSCQLLVNAEGTDCLEAKEKVHVIGNRLKLLLKEVSRHIKELEKLLDVSSSQQDLSSWSSADELDTSGSVSPTSGRSTPNRQKTPRGKCSLSQPGPSVSSPHSRSTKGGSDSSLSEPGPGRSGRGFLFRVLRAALPLQLLLLLLIGLACLVPMSEEDYSCALSNNFARSFHPMLRYTNGPPPL

SEQ ID NO: 42152 - protein, 1443 aa, Homo sapiens
MATSRGASRCPRDIANVMQRLQDEQEIVQKRTFTKWINSHLAKRKPPMVVDDLFEDMKDGVKLLALLEVLSGQKLPCEQGRRMKRIHAVANIGTALKFLEGRKIKLVNINSTDIADGRPSIVLGLMWTIILYFQIEELTSNLPQLQSLSSSASSVDSIVSSETPSPPSKRKVTTKIQGNAKKALLKWVQYTAGKQTGIEVKDFGKSWRSGVAFHSVIHAIRPELVDLETVKGRSNRENLEDAFTIAETELGIPRLLDPEDVDVDKPDEKSIMTYVAQFLKHYPDIHNASTDGQEDDEILPGFPSFANSVQNFKREDRVIFKEMKVWIEQFERDLTRAQMVESNLQDKYQSFKHFRVQYEMKRKQIEHLIQPLHRDGKLSLDQALVKQSWDRVTSRLFDWHIQLDKSLPAPLGTIGAWLYRAEVALREEITVQQVHEETANTIQRKLEQHKDLLQNTDAHKRAFHEIYRTRSVNGIPVPPDQLEDMAERFHFVSSTSELHLMKMEFLELKYRLLSLLVLAESKLKSWIIKYGRRESVEQLLQNYVSFIENSKFFEQYEVTYQILKQTAEMYVKADGSVEEAENVMKFMNETTAQWRNLSVEVRSVRSMLEEVISNWDRYGNTVASLQAWLEDAEKMLNQSENAKKDFFRNLPHWIQQHTAMNDAGNFLIETCDEMVSRDLKQQLLLLNGRWRELFMEVKQYAQADEMDRMKKEYTDCVVTLSAFATEAHKKLSEPLEVSFMNVKLLIQDLEDIEQRVPVMDAQYKIITKTAHLITKESPQEEGKEMFATMSKLKEQLTKVKECYSPLLYESQQLLIPLEELEKQMTSFYDSLGKINEIITVLEREAQSSALFKQKHQELLACQENCKKTLTLIEKGSQSVQKFVTLSNVLKHFDQTRLQRQIADIHVAFQSMVKKTGDWKKHVETNSRLMKKFEESRAELEKVLRIAQEGLEEKGDPEELLRRHTEFFSQLDQRVLNAFLKACDELTDILPEQEQQGLQEAVRKLHKQWKDLQGEAPYHLLHLKIDVEKNRFLASVEECRTELDRETKLMPQEGSEKIIKEHRVFFSDKGPHHLCEKRLQLIEELCVKLPVRDPVRDTPGTCHVTLKELRAAIDSTYRKLMEDPDKWKDYTSRFSEFSSWISTNETQLKGIKGEAIDTANHGEVKRAVEEIRNGVTKRGETLSWLKSRLKVLTEVSSENEAQKQGDELAKLSSSFKALVTLLSEVEKMLSNFGDCVQYKEIVKNSLEELISGSKEVQEQAEKILDTENLFEAQQLLLHHQQKTKRISAKKRDVQQQIAQAQQGEGGLPDRGHEELRKLESTLDGLERSRERQERRIQVTLRKWERFETNKETVVRYLFQTGSSHERFLSFSSLESLSSELEQTKEFSKRTESIAVQAENLVKEASEIPLGPQNKQLLQQQAKSIKEQVKKLEDTLEEEYVIDKS

SEQ ID NO: 42153 - protein, 1725 aa, Homo sapiens
MATSRGASRCPRDIANVMQRLQDEQEIVQKRTFTKWINSHLAKRKPPMVVDDLFEDMKDGVKLLALLEVLSGQKLPCEQGRRMKRIHAVANIGTALKFLEGRKIKLVNINSTDIADGRPSIVLGLMWTIILYFQIEELTSNLPQLQSLSSSASSVDSIVSSETPSPPSKRKVTTKIQGNAKKALLKWVQYTAGKQTGIEVKDFGKSWRSGVAFHSVIHAIRPELVDLETVKGRSNRENLEDAFTIAETELGIPRLLDPEDVDVDKPDEKSIMTYVAQFLKHYPDIHNASTDGQEDDEILPGFPSFANSVQNFKREDRVIFKEMKVWIEQFERDLTRAQMVESNLQDKYQSFKHFRVQYEMKRKQIEHLIQPLHRDGKLSLDQALVKQSWDRVTSRLFDWHIQLDKSLPAPLGTIGAWLYRAEVALREEITVQQVHEETANTIQRKLEQHKDLLQNTDAHKRAFHEIYRTRSVNGIPVPPDQLEDMAERFHFVSSTSELHLMKMEFLELKYRLLSLLVLAESKLKSWIIKYGRRESVEQLLQNYVSFIENSKFFEQYEVTYQILKQTAEMYVKADGSVEEAENVMKFMNETTAQWRNLSVEVRSVRSMLEEVISNWDRYGNTVASLQAWLEDAEKMLNQSENAKKDFFRNLPHWIQQHTAMNDAGNFLIETCDEMVSRDLKQQLLLLNGRWRELFMEVKQYAQADEMDRMKKEYTDCVVTLSAFATEAHKKLSEPLEVSFMNVKLLIQDLEDIEQRVPVMDAQYKIITKTAHLITKESPQEEGKEMFATMSKLKEQLTKVKECYSPLLYESQQLLIPLEELEKQMTSFYDSLGKINEIITVLEREAQSSALFKQKHQELLACQENCKKTLTLIEKGSQSVQKFVTLSNVLKHFDQTRLQRQIADIHVAFQSMVKKTGDWKKHVETNSRLMKKFEESRAELEKVLRIAQEGLEEKGDPEELLRRHTEFFSQLDQRVLNAFLKACDELTDILPEQEQQGLQEAVRKLHKQWKDLQGEAPYHLLHLKIDVEKNRFLASVEECRTELDRETKLMPQEGSEKIIKEHRVFFSDKGPHHLCEKRLQLIEELCVKLPVRDPVRDTPGTCHVTLKELRAAIDSTYRKLMEDPDKWKDYTSRFSEFSSWISTNETQLKGIKGEAIDTANHGEVKRAVEEIRNGVTKRGETLSWLKSRLKVLTEVSSENEAQKQGDELAKLSSSFKALVTLLSEVEKMLSNFGDCVQYKEIVKNSLEELISGSKEVQEQAEKILDTENLFEAQQLLLHHQQKTKRISAKKRDVQQQIAQAQQGEGGLPDRGHEELRKLESTLDGLERSRERQERRIQVTLRKWERFETNKETVVRYLFQTGSSHERFLSFSSLESLSSELEQTKEFSKRTESIAVQAENLVKEASEIPLGPQNKQLLQQQAKSIKEQVKKLEDTLEEDIKTMEMVKTKWDHFGSNFETLSVWITEKEKELNALETSSSAMDMQISQIKVTIQEIESKLSSIVGLEEEAQSFAQFVTTGESARIKAKLTQIRRYGEELREHAQCLEGTILGHLSQQQKFEENLRKIQQSVSEFEDKLAVPIKICSSATETYKVLQEHMDLCQALESLSSAITAFSASARKVVNRDSCVQEAAALQQQYEDILRRAKERQTALENLLAHWQRLEKELSSFLTWLERGEAKASSPEMDISADRVKVEGELQLIQASSRKCEEGKNKMLFVTVTLFKIIK

SEQ ID NO: 42154 - protein, 5580 aa, Homo sapiens
MATSRGASRCPRDIANVMQRLQDEQEIVQKRTFTKWINSHLAKRKPPMVVDDLFEDMKDGVKLLALLEVLSGQKLPCEQGRRMKRIHAVANIGTALKFLEGRKIKLVNINSTDIADGRPSIVLGLMWTIILYFQIEELTSNLPQLQSLSSSASSVDSIVSSETPSPPSKRKVTTKIQGNAKKALLKWVQYTAGKQTGIEVKDFGKSWRSGVAFHSVIHAIRPELVDLETVKGRSNRENLEDAFTIAETELGIPRLLDPEDVDVDKPDEKSIMTYVAQFLKHYPDIHNASTDGQEDDEILPGFPSFANSVQNFKREDRVIFKEMKVWIEQFERDLTRAQMVESNLQDKYQSFKHFRVQYEMKRKQIEHLIQPLHRDGKLSLDQALVKQSWDRVTSRLFDWHIQLDKSLPAPLGTIGAWLYRAEVALREEITVQQVHEETANTIQRKLEQHKDLLQNTDAHKRAFHEIYRTRSVNGIPVPPDQLEDMAERFHFVSSTSELHLMKMEFLELKYRLLSLLVLAESKLKSWIIKYGRRESVEQLLQNYVSFIENSKFFEQYEVTYQILKQTAEMYVKADGSVEEAENVMKFMNETTAQWRNLSVEVRSVRSMLEEVISNWDRYGNTVASLQAWLEDAEKMLNQSENAKKDFFRNLPHWIQQHTAMNDAGNFLIETCDEMVSRDLKQQLLLLNGRWRELFMEVKQYAQADEMDRMKKEYTDCVVTLSAFATEAHKKLSEPLEVSFMNVKLLIQDLEDIEQRVPVMDAQYKIITKTAHLITKESPQEEGKEMFATMSKLKEQLTKVKECYSPLLYESQQLLIPLEELEKQMTSFYDSLGKINEIITVLEREAQSSALFKQKHQELLACQENCKKTLTLIEKGSQSVQKFVTLSNVLKHFDQTRLQRQIADIHVAFQSMVKKTGDWKKHVETNSRLMKKFEESRAELEKVLRIAQEGLEEKGDPEELLRRHTEFFSQLDQRVLNAFLKACDELTDILPEQEQQGLQEAVRKLHKQWKDLQGEAPYHLLHLKIDVEKNRFLASVEECRTELDRETKLMPQEGSEKIIKEHRVFFSDKGPHHLCEKRLQLIEELCVKLPVRDPVRDTPGTCHVTLKELRAAIDSTYRKLMEDPDKWKDYTSRFSEFSSWISTNETQLKGIKGEAIDTANHGEVKRAVEEIRNGVTKRGETLSWLKSRLKVLTEVSSENEAQKQGDELAKLSSSFKALVTLLSEVEKMLSNFGDCVQYKEIVKNSLEELISGSKEVQEQAEKILDTENLFEAQQLLLHHQQKTKRISAKKRDVQQQIAQAQQGEGGLPDRGHEELRKLESTLDGLERSRERQERRIQVTLRKWERFETNKETVVRYLFQTGSSHERFLSFSSLESLSSELEQTKEFSKRTESIAVQAENLVKEASEIPLGPQNKQLLQQQAKSIKEQVKKLEDTLEEDIKTMEMVKTKWDHFGSNFETLSVWITEKEKELNALETSSSAMDMQISQIKVTIQEIESKLSSIVGLEEEAQSFAQFVTTGESARIKAKLTQIRRYGEELREHAQCLEGTILGHLSQQQKFEENLRKIQQSVSEFEDKLAVPIKICSSATETYKVLQEHMDLCQALESLSSAITAFSASARKVVNRDSCVQEAAALQQQYEDILRRAKERQTALENLLAHWQRLEKELSSFLTWLERGEAKASSPEMDISADRVKVEGELQLIQALQNEVVSQASFYSKLLQLKESLFSVASKDDVKMMKLHLEQLDERWRDLPQIINKRINFLQSVVAEHQQFDELLLSFSVWIKLFLSELQTTSEISIMDHQVALTRHKDHAAEVESKKGELQSLQGHLAKLGSLGRAEDLHLLQGKAEDCFQLFEEASQVVERRQLALSHLAEFLQSHASLSGILRQLRQTVEATNSMNKNESDLIEKDLNDALQNAKALESAAVSLDGILSKAQYHLKIGSSEQRTSCRATADQLCGEVERIQNLLGTKQSEADALAVLKKAFQDQKEELLKSIEDIEERTDKERLKEPTRQALQQRLRVFNQLEDELNSHEHELCWLKDKAKQIAQKDVAFAPEVDREINRLEVTWDDTKRLIHENQGQCCGLIDLMREYQNLKSAVSKVLENASSVIVTRTTIKDQEDLKWAFSKHETAKNKMNYKQKDLDNFTSKGKHLLSELKKIHSSDFSLVKTDMESTVDKWLDVSEKLEENMDRLRVSLSIWDDVLSTRDEIEGWSNNCVPQMAENISNLDNHLRAEELLKEFESEVKNKALRLEELHSKVNDLKELTKNLETPPDLQFIEADLMQKLEHAKEITEVAKGTLKDFTAQSTQVEKFINDITTWFTKVEESLMNCAQNETCEALKKVKDIQKELQSQQSNISSTQENLNSLCRKYHSAELESLGRAMTGLIKKHEAVSQLCSKTQASLQESLEKHFSESMQEFQEWFLGAKAAAKESSDRTGDSKVLEAKLHDLQNILDSVSDGQSKLDAVTQEGQTLYAHLSKQIVSSIQEQITKANEEFQAFLKQCLKDKQALQDCASELGSFEDQHRKLNLWIHEMEERFNTENLGESKQHIPEKKNEVHKVEMFLGELLAARESLDKLSQRGQLLSEEGHGAGQEGRLCSQLLTSHQNLLRMTKEKLRSCQVALQEHEALEEALQSMWFWVKAIQDRLACAESTLGSKDTLEKRLSQIQDILLMKGEGEVKLNMAIGKGEQALRSSNKEGQRVIQTQLETLKEVWADIMSSSVHAQSTLESVISQWNDYVERKNQLEQWMESVDQKIEHPLQPQPGLKEKFVLLDHLQSILSEAEDHTRALHRLIAKSRELYEKTEDESFKDTAQEELKTQFNDIMTVAKEKMRKVEEIVKDHLMYLDAVHEFTDWLHSAKEELHRWSDMSGDSSATQKKLSKIKELIDSREIGASRLSRVESLAPEVKQNTTASGCELMHTEMQALRADWKQWEDSVFQTQSCLENLVSQMALSEQEFSGQVAQLEQALEQFSALLKTWAQQLTLLEGKNTDEEIVECWHKGQEILDALQKAEPRTEDLKSQLNELCRFSRDLSTYSGKVSGLIKEYNCLCLQASKGCQNKEQILQQRFRKAFRDFQQWLVNAKITTAKCFDIPQNISEVSTSLQKIQEFLSESENGQHKLNMMLSKGELLSTLLTKEKAKGIQAKVTAAKEDWKNFHSNLHQKESALENLKIQMKDFEVSAEPIQDWLSKTEKMVHESSNRLYDLPAKRREQQKLQSVLEEIHCYEPQLNRLKEKAQQLWEGQAASKSFRHRVSQLSSQYLALSNLTKEKVSRLDRIVAEHNQFSLGIKELQDWMTDAIHMLDSYCHPTSDKSVLDSRTLKLEALLSVKQEKEIQMKMIVTRGESVLQNTSPEGIPTIQQQLQSVKDMWASLLSAGIRCKSQLEGALSKWTSYQDGVRQFSGWMDSMEANLNESERQHAELRDKTTMLGKAKLLNEEVLSYSSLLETIEVKGAGMTEHYVTQLELQDLQERYRAIQERAKEAVTKSEKLVRLHQEYQRDLKAFEVWLGQEQEKLDQYSVLEGDAHTHETTLRDLQELQVHCAEGQALLNSVLHTREDVIPSGIPQAEDRALESLRQDWQAYQHRLSETRTQFNNVVNKLRLMEQKFQQVDEWLKTAEEKVSPRTRRQSNRATKEIQLHQMKKWHEEVTAYRDEVEEVGARAQEILDESHVNSRMGCQATQLTSRYQALLLQVLEQIKFLEEEIQSLEESESSLSSYSDWYGSTHKNFKNVATKIDKVDTVMMGKKLKTLEVLLKDMEKGHSLLKSAREKGERAVKYLEEGEAERLRKEIHDHMEQLKELTSTVRKEHMTLEKGLHLAKEFSDKCKALTQWIAEYQEILHVPEEPKMELYEKKAQLSKYKSLQQTVLSHEPSVKSVREKGEALLELVQDVTLKDKIDQLQSDYQDLCSIGKEHVFSLEAKVKDHEDYNSELQEVEKWLLQMSGRLVAPDLLETSSLETITQQLAHHKAMMEEIAGFEDRLNNLQMKGDTLIGQCADHLQAKLKQNVHAHLQGTKDSYSAICSTAQRMYQSLEHELQKHVSRQDTLQQCQAWLSAVQPDLEPSPQPPLSRAEAIKQVKHFRALQEQARTYLDLLCSMCDLSNASVKTTAKDIQQTEQTIEQKLVQAQNLTQGWEEIKHLKSELWIYLQDADQQLQNMKRRHSELELNIAQNMVSQVKDFVKKLQSKQASVNTIIEKVNKLTKKEESPEHKEINHLNDQWLDLCRQSNNLCLQREEDLQRTRDYHDCMNVVEVFLEKFTTEWDNLARSDAESTAVHLEALKKLALALQERKYAIEDLKDQKQKMIEHLNLDDKELVKEQTSHLEQRWFQLEDLIKRKIQVSVTNLEELNVVQSRFQELMEWAEEQQPNIAEALKQSPPPDMAQNLLMDHLAICSELEAKQMLLKSLIKDADRVMADLGLNERQVIQKALSDAQSHVNCLSDLVGQRRKYLNKALSEKTQFLMAVFQATSQIQQHERKIMFREHICLLPDDVSKQVKTCKSAQASLKTYQNEVTGLWAQGRELMKEVTEQEKSEVLGKLQELQSVYDSVLQKCSHRLQELEKNLVSRKHFKEDFDKACHWLKQADIVTFPEINLMNESSELHTQLAKYQNILEQSPEYENLLLTLQRTGQTILPSLNEVDHSYLSEKLNALPRQFNVIVALAKDKFYKVQEAILARKEYASLIELTTQSLSELEAQFLRMSKVPTDLAVEEALSLQDGCRAILDEVAGLGEAVDELNQKKEGFRSTGQPWQPDKMLHLVTLYHRLKRQTEQRVSLLEDTTSAYQEHEKMCQQLERQLKSVKEEQSKVNEETLPAEEKLKMYHSLAGSLQDSGIVLKRVTIHLEDLAPHLDPLAYEKARHQIQSWQGELKLLTSAIGETVTECESRMVQSIDFQTEMSRSLDWLRRVKAELSGPVYLDLNLQDIQEEIRKIQIHQEEVQSSLRIMNALSHKEKEKFTKAKELISADLEHSLAELSELDGDIQEALRTRQATLTEIYSQCQRYYQVFQAANDWLEDAQELLQLAGNGLDVESAEENLKSHMEFFSTEDQFHSNLEELHSLVATLDPLIKPTGKEDLEQKVASLELRSQRMSRDSGAQVDLLQRCTAQWHDYQKAREEVIELMNDTEKKLSEFSLLKTSSSHEAEEKLSEHKALVSVVNSFHEKIVALEEKASQLEKTGNDASKATLSRSMTTVWQRWTRLRAVAQDQEKILEDAVDEWTGFNNKVKKATEMIDQLQDKLPGSSAEKASKAELLTLLEYHDTFVLELEQQQSALGMLRQQTLSMLQDGAAPTPGEEPPLMQEITAMQDRCLNMQEKVKTNGKLVKQELKDREMVETQINSVKCWVQETKEYLGNPTIEIDAQLEELQILLTEATNHRQNIEKMAEEQKEKYLGLYTILPSELSLQLAEVALDLKIRDQIQDKIKEVEQSKATSQELSRQIQKLAKDLTTILTKLKAKTDNVVQAKTDQKVLGEELDGCNSKLMELDAAVQKFLEQNGQLGKPLAKKIGKLTELHQQTIRQAENRLSKLNQAASHLEEYNEMLELILKWIEKAKVLAHGTIAWNSASQLREQYILHQVTLGKIIFKK

SEQ ID NO: 42155 - protein, 3212 aa, Homo sapiens
MTEKLQYLTSVYCTEKMSQQVAELGRETEELRQMIKIRLQNLQDAAKDMKKFEAELKKLQAALEQAQATLTSPEVGRLSLKEQLSHRQHLLSEMESLKPKVQAVQLCQSALRIPEDVVASLPLCHAALRLQEEASRLQHTAIQQCNIMQEAVVQYEQYEQEMKHLQQLIEGAHREIEDKPVATSNIQELQAQISRHEELAQKIKGYQEQIASLNSKCKMLTMKAKHATMLLTVTEVEGLAEGTEDLDGELLPTPSAHPSVVMMTAGRCHTLLSPVTEESGEEGTNSEISSPPACRSPSPVANTDASVNQDIAYYQALSAERLQTDAAKIHPSTSASQEFYEPGLEPSATAKLGDLQRSWETLKNVISEKQRTLYEALERQQKYQDSLQSISTKMEAIELKLSESPEPGRSPESQMAEHQALMDEILMLQDEINELQSSLAEELVSESCEADPAEQLALQSTLTVLAERMSTIRMKASGKRQLLEEKLNDQLEEQRQEQALQRYRCEADELDSWLLSTKATLDTALSPPKEPMDMEAQLMDCQNMLVEIEQKVVALSELSVHNENLLLEGKAHTKDEAEQLAGKLRRLKGSLLELQRALHDKQLNMQGTAQEKEESDVDLTATQSPGVQEWLAQARTTWTQQRQSSLQQQKELEQELAEQKSLLRSVASRGEEILIQHSAAETSGDAGEKPDVLSQELGMEGEKSSAEDQMRMKWESLHQEFSTKQKLLQNVLEQEQEQVLYSRPNRLLSGVPLYKGDVPTQDKSAVTSLLDGLNQAFEEVSSQSGGAKRQSIHLEQKLYDGVSATSTWLDDVEERLFVATALLPEETETCLFNQEILAKDIKEMSEEMDKNKNLFSQAFPENGDNRDVIEDTLGCLLGRLSLLDSVVNQRCHQMKERLQQILNFQNDLKVLFTSLADNKYIILQKLANVFEQPVAEQIEAIQQAEDGLKEFDAGIIELKRRGDKLQVEQPSMQELSKLQDMYDELMMIIGSRRSGLNQNLTLKSQYERALQDLADLLETGQEKMAGDQKIIVSSKEEIQQLLDKHKEYFQGLESHMILTETLFRKIISFAVQKETQFHTELMAQASAVLKRAHKRGVELEYILETWSHLDEDQQELSRQLEVVESSIPSVGLVEENEDRLIDRITLYQHLKSSLNEYQPKLYQVLDDGKRLLISISCSDLESQLNQLGECWLSNTNKMSKELHRLETILKHWTRYQSESADLIHWLQSAKDRLEFWTQQSVTVPQELEMVRDHLNAFLEFSKEVDAQSSLKSSVLSTGNQLLRLKKVDTATLRSELSRIDSQWTDLLTNIPAVQEKLHQLQMDKLPSRHAISEVMSWISLMENVIQKDEDNIKNSIGYKAIHEYLQKYKGFKIDINCKQLTVDFVNQSVLQISSQDVESKRSDKTDFAEQLGAMNKSWQILQGLVTEKIQLLEGLLESWSEYENNVQCLKTWFETQEKRLKQQHRIGDQASVQNALKDCQDLEDLIKAKEKEVEKIEQNGLALIQNKKEDVSSIVMSTLRELGQTWANLDHMVGQLKILLKSVLDQWSSHKVAFDKINSYLMEARYSLSRFRLLTGSLEAVQVQVDNLQNLQDDLEKQERSLQKFGSITNQLLKECHPPVTETLTNTLKEVNMRWNNLLEEIAEQLQSSKALLQLWQRYKDYSKQCASTVQQQEDRTNELLKAATNKDIADDEVATWIQDCNDLLKGLGTVKDSLFFLHELGEQLKQQVDASAASAIQSDQLSLSQHLCALEQALCKQQTSLQAGVLDYETFAKSLEALEAWIVEAEEILQGQDPSHSSDLSTIQERMEELKGQMLKFSSMAPDLDRLNELGYRLPLNDKEIKRMQNLNRHWSLISSQTTERFSKLQSFLLQHQTFLEKCETWMEFLVQTEQKLAVEISGNYQHLLEQQRAHELFQAEMFSRQQILHSIIIDGQRLLEQGQVDDRDEFNLKLTLLSNQWQGVIRRAQQRRGIIDSQIRQWQRYREMAEKLRKWLVEVSYLPMSGLGSVPIPLQQARTLFDEVQFKEKVFLRQQGSYILTVEAGKQLLLSADSGAEAALQAELAEIQEKWKSASMRLEEQKKKLAFLLKDWEKCEKGIADSLEKLRTFKKKLSQSLPDHHEELHAEQMRCKELENAVGSWTDDLTQLSLLKDTLSAYISADDISILNERVELLQRQWEELCHQLSLRRQQIGERLNEWAVFSEKNKELCEWLTQMESKVSQNGDILIEEMIEKLKKDYQEEIAIAQENKIQLQQMGERLAKASHESKASEIEYKLGKVNDRWQHLLDLIAARVKKLKETLVAVQQLDKNMSSLRTWLAHIESELAKPIVYDSCNSEEIQRKLNEQQELQRDIEKHSTGVASVLNLCEVLLHDCDACATDAECDSIQQATRNLDRRWRNICAMSMERRLKIEETWRLWQKFLDDYSRFEDWLKSSERTAAFPSSSGVIYTVAKEELKKFEAFQRQVHECLTQLELINKQYRRLARENRTDSACSLKQMVHEGNQRWDNLQKRVTSILRRLKHFIGQREEFETARDSILVWLTEMDLQLTNIEHFSECDVQAKIKQLKAFQQEISLNHNKIEQIIAQGEQLIEKSEPLDAAIIEEELDELRRYCQEVFGRVERYHKKLIRLPLPDDEHDLSDRELELEDSAALSDLHWHDRSADSLLSPQPSSNLSLSLAQPLRSERSGRDTPASVDSIPLEWDHDYDLSRDLESAMSRALPSEDEEGQDDKDFYLRGAVGLSGDHSALESQIRQLGKALDDSRFQIQQTENIIRSKTPTGPELDTSYKGYMKLLGECSSSIDSVKRLEHKLKEEEESLPGFVNLHSTETQTAGVIDRWELLQAQALSKELRMKQNLQKWQQFNSDLNSIWAWLGDTEEELEQLQRLELSTDIQTIELQIKKLKELQKAVDHRKAIILSINLCSPEFTQADSKESRDLQDRLSQMNGRWDRVCSLLEEWRGLLQDALMQCQGFHEMSHGLLLMLENIDRRKNEIVPIDSNLDAEILQDHHKQLMQIKHELLESQLRVASLQDMSCQLLVNAEGTDCLEAKEKVHVIGNRLKLLLKEVSRHIKELEKLLDVSSSQQDLSSWSSADELDTSGSVSPTSGRSTPNRQKTPRGKCSLSQPGPSVSSPHSRSTKGGSDSSLSEPGPGRSGRGFLFRVLRAALPLQLLLLLLIGLACLVPMSEEDYSCALSNNFARSFHPMLRYTNGPPPL

SEQ ID NO: 42156 - protein, 977 aa, Homo sapiens
MVVAEDLSALRMAEDGCVDADLPDCNCDVTRARVKKLKETLVAVQQLDKNMSSLRTWLAHIESELAKPIVYDSCNSEEIQRKLNEQQELQRDIEKHSTGVASVLNLCEVLLHDCDACATDAECDSIQQATRNLDRRWRNICAMSMERRLKIEETWRLWQKFLDDYSRFEDWLKSSERTAAFPSSSGVIYTVAKEELKKFEAFQRQVHECLTQLELINKQYRRLARENRTDSACSLKQMVHEGNQRWDNLQKRVTSILRRLKHFIGQREEFETARDSILVWLTEMDLQLTNIEHFSECDVQAKIKQLKAFQQEISLNHNKIEQIIAQGEQLIEKSEPLDAAIIEEELDELRRYCQEVFGRVERYHKKLIRLPLPDDEHDLSDRELELEDSAALSDLHWHDRSADSLLSPQPSSNLSLSLAQPLRSERSGRDTPASVDSIPLEWDHDYDLSRDLESAMSRALPSEDEEGQDDKDFYLRGAVGLSDVMIPESPEAYVKLTENAIKNTSGDHSALESQIRQLGKALDDSRFQIQQTENIIRSKTPTGPELDTSYKGYMKLLGECSSSIDSVKRLEHKLKEEEESLPGFVNLHSTETQTAGVIDRWELLQAQALSKELRMKQNLQKWQQFNSDLNSIWAWLGDTEEELEQLQRLELSTDIQTIELQIKKLKELQKAVDHRKAIILSINLCSPEFTQADSKESRDLQDRLSQMNGRWDRVCSLLEEWRGLLQDALMQCQGFHEMSHGLLLMLENIDRRKNEIVPIDSNLDAEILQDHHKQLMQIKHELLESQLRVASLQDMSCQLLVNAEGTDCLEAKEKVHVIGNRLKLLLKEVSRHIKELEKLLDVSSSQQDLSSWSSADELDTSGSVSPTSGRSTPNRQKTPRGKCSLSQPGPSVSSPHSRSTKGGSDSSLSEPGPGRSGRGFLFRVLRAALPLQLLLLLLIGLACLVPMSEEDYSCALSNNFARSFHPMLRYTNGPPPL

SEQ ID NO: 42157 - protein, 3032 aa, Homo sapiens
MATSRGASRCPRDIANVMQRLQDEQEIVQKRTFTKWINSHLAKRKPPMVVDDLFEDMKDGVKLLALLEVLSGQKLPCEQGRRMKRIHAVANIGTALKFLEGRKIKLVNINSTDIADGRPSIVLGLMWTIILYFQIEELTSNLPQLQSLSSSASSVDSIVSSETPSPPSKRKVTTKIQGNAKKALLKWVQYTAGKQTGIEVKDFGKSWRSGVAFHSVIHAIRPELVDLETVKGRSNRENLEDAFTIAETELGIPRLLDPEDVDVDKPDEKSIMTYVAQFLKHYPDIHNASTDGQEDDREDRVIFKEMKVWIEQFERDLTRAQMVESNLQDKYQSFKHFRVQYEMKRKQIEHLIQPLHRDGKLSLDQALVKQSWDRVTSRLFDWHIQLDKSLPAPLGTIGAWLYRAEVALREEITVQQVHEETANTIQRKLEQHKDLLQNTDAHKRAFHEIYRTRSVNGIPVPPDQLEDMAERFHFVSSTSELHLMKMEFLELKYRLLSLLVLAESKLKSWIIKYGRRESVEQLLQNYVSFIENSKFFEQYEVTYQILKQTAEMYVKADGSVEEAENVMKFMNETTAQWRNLSVEVRSVRSMLEEVISNWDRYGNTVASLQAWLEDAEKMLNQSENAKKDFFRNLPHWIQQHTAMNDAGNFLIETCDEMVSRDLKQQLLLLNGRWRELFMEVKQYAQADEMDRMKKEYTDCVVTLSAFATEAHKKLSEPLEVSFMNVKLLIQDLEDIEQRVPVMDAQYKIITKTAHLITKESPQEEGKEMFATMSKLKEQLTKVKECYSPLLYESQQLLIPLEELEKQMTSFYDSLGKINEIITVLEREAQSSALFKQKHQELLACQENCKKTLTLIEKGSQSVQKFVTLSNVLKHFDQTRLQRQIADIHVAFQSMVKKTGDWKKHVETNSRLMKKFEESRAELEKVLRIAQEGLEEKGDPEELLRRHTEFFSQLDQRVLNAFLKACDELTDILPEQEQQGLQEAVRKLHKQWKDLQGEAPYHLLHLKIDVEKNRFLASVEECRTELDRETKLMPQEGSEKIIKEHRVFFSDKGPHHLCEKRLQLIEELCVKLPVRDPVRDTPGTCHVTLKELRAAIDSTYRKLMEDPDKWKDYTSRFSEFSSWISTNETQLKGIKGEAIDTANHGEVKRAVEEIRNGVTKRGETLSWLKSRLKVLTEVSSENEAQKQGDELAKLSSSFKALVTLLSEVEKMLSNFGDCVQYKEIVKNSLEELISGSKEVQEQAEKILDTENLFEAQQLLLHHQQKTKRISAKKRDVQQQIAQAQQGEGGLPDRGHEELRKLESTLDGLERSRERQERRIQVTLRKWERFETNKETVVRYLFQTGSSHERFLSFSSLESLSSELEQTKEFSKRTESIAVQAENLVKEASEIPLGPQNKQLLQQQAKSIKEQVKKLEDTLEEDIKTMEMVKTKWDHFGSNFETLSVWITEKEKELNALETSSSAMDMQISQIKVTIQEIESKLSSIVGLEEEAQSFAQFVTTGESARIKAKLTQIRRYGEELREHAQCLEGTILGHLSQQQKFEENLRKIQQSVSEFEDKLAVPIKICSSATETYKVLQEHMDLCQALESLSSAITAFSASARKVVNRDSCVQEAAALQQQYEDILRRAKERQTALENLLAHWQRLEKELSSFLTWLERGEAKASSPEMDISADRVKVEGELQLIQALQNEVVSQASFYSKLLQLKESLFSVASKDDVKMMKLHLEQLDERWRDLPQIINKRINFLQSVVAEHQQFDELLLSFSVWIKLFLSELQTTSEISIMDHQVALTRHKDHAAEVESKKGELQSLQGHLAKLGSLGRAEDLHLLQGKAEDCFQLFEEASQVVERRQLALSHLAEFLQSHASLSGILRQLRQTVEATNSMNKNESDLIEKDLNDALQNAKALESAAVSLDGILSKAQYHLKIGSSEQRTSCRATADQLCGEVERIQNLLGTKQSEADALAVLKKAFQDQKEELLKSIEDIEERTDKERLKEPTRQALQQRLRVFNQLEDELNSHEHELCWLKDKAKQIAQKDVAFAPEVDREINRLEVTWDDTKRLIHENQGQCCGLIDLMREYQNLKSAVSKVLENASSVIVTRTTIKDQEDLKWAFSKHETAKNKMNYKQKDLDNFTSKGKHLLSELKKIHSSDFSLVKTDMESTVDKWLDVSEKLEENMDRLRVSLSIWDDVLSTRDEIEGWSNNCVPQMAENISNLDNHLRAEELLKEFESEVKNKALRLEELHSKVNDLKELTKNLETPPDLQFIEADLMQKLEHAKEITEVAKGTLKDFTAQSTQVEKFINDITTWFTKVEESLMNCAQNETCEALKKVKDIQKELQSQQSNISSTQENLNSLCRKYHSAELESLGRAMTGLIKKHEAVSQLCSKTQASLQESLEKHFSESMQEFQEWFLGAKAAAKESSDRTGDSKVLEAKLHDLQNILDSVSDGQSKLDAVTQEGQTLYAHLSKQIVSSIQEQITKANEEFQAFLKQCLKDKQALQDCASELGSFEDQHRKLNLWIHEMEERFNTENLGESKQHIPEKKNEVHKVEMFLGELLAARESLDKLSQRGQLLSEEGHGAGQEGRLCSQLLTSHQNLLRMTKEKLRSCQVALQEHEALEEALQSMWFWVKAIQDRLACAESTLGSKDTLEKRLSQIQDILLMKGEGEVKLNMAIGKGEQALRSSNKEGQRVIQTQLETLKEVWADIMSSSVHAQSTLESVISQWNDYVERKNQLEQWMESVDQKIEHPLQPQPGLKEKFVLLDHLQSILSEAEDHTRALHRLIAKSRELYEKTEDESFKDTAQEELKTQFNDIMTVAKEKMRKVEEIVKDHLMYLDAVHEFTDWLHSAKEELHRWSDMSGDSSATQKKLSKIKELIDSREIGASRLSRVESLAPEVKQNTTASGCELMHTEMQALRADWKQWEDSVFQTQSCLENLVSQMALSEQEFSGQVAQLEQALEQFSALLKTWAQQLTLLEGKNTDEEIVECWHKGQEILDALQKAEPRTEDLKSQLNELCRFSRDLSTYSGKVSGLIKEYNW

SEQ ID NO: 42158 - protein, 1139 aa, Homo sapiens
MRLEEQKKKLAFLLKDWEKCEKGIADSLEKLRTFKKKLSQSLPDHHEELHAEQMRCKELENAVGSWTDDLTQLSLLKDTLSAYISADDISILNERVELLQRQWEELCHQLSLRRQQIGERLNEWAVFSEKNKELCEWLTQMESKVSQNGDILIEEMIEKLKKDYQEEIAIAQENKIQLQQMGERLAKASHESKASEIEYKLGKVNDRWQHLLDLIAARVKKLKETLVAVQQLDKNMSSLRTWLAHIESELAKPIVYDSCNSEEIQRKLNEQQELQRDIEKHSTGVASVLNLCEVLLHDCDACATDAECDSIQQATRNLDRRWRNICAMSMERRLKIEETWRLWQKFLDDYSRFEDWLKSSERTAAFPSSSGVIYTVAKEELKKFEAFQRQVHECLTQLELINKQYRRLARENRTDSACSLKQMVHEGNQRWDNLQKRVTSILRRLKHFIGQREEFETARDSILVWLTEMDLQLTNIEHFSECDVQAKIKQLKAFQQEISLNHNKIEQIIAQGEQLIEKSEPLDAAIIEEELDELRRYCQEVFGRVERYHKKLIRLPLPDDEHDLSDRELELEDSAALSDLHWHDRSADSLLSPQPSSNLSLSLAQPLRSERSGRDTPASVDSIPLEWDHDYDLSRDLESAMSRALPSEDEEGQDDKDFYLRGAVGLSGDHSALESQIRQLGKALDDSRFQIQQTENIIRSKTPTGPELDTSYKGYMKLLGECSSSIDSVKRLEHKLKEEEESLPGFVNLHSTETQTAGVIDRWELLQAQALSKELRMKQNLQKWQQFNSDLNSIWAWLGDTEEELEQLQRLELSTDIQTIELQIKKLKELQKAVDHRKAIILSINLCSPEFTQADSKESRDLQDRLSQMNGRWDRVCSLLEEWRGLLQDALMQCQGFHEMSHGLLLMLENIDRRKNEIVPIDSNLDAEILQDHHKQLMQIKHELLESQLRVASLQDMSCQLLVNAEGTDCLEAKEKVHVIGNRLKLLLKEVSRHIKELEKLLDVSSSQQDLSSWSSADELDTSGSVSPTSGRSTPNRQKTPRGKCSLSQPGPSVSSPHSRSTKGGSDSSLSEPGPGRSGRGFLFRVLRAALPLQLLLLLLIGLACLVPMSEEDYSCALSNNFARSFHPMLRYTNGPPPL

SEQ ID NO: 42159 - protein, 476 aa, Homo sapiens
MHTEMQALRADWKQWEDSVFQTQSCLENLVSQMALSEQEFSGQVAQLEQALEQFSALLKTWAQQLTLLEGKNTDEEIVECWHKGQEILDALQKAEPRTEDLKSQLNELCRFSRDLSTYSGKVSGLIKEYNCLCLQASKGCQNKEQILQQRFRKAFRDFQQWLVNAKITTAKCFDIPQNISEVSTSLQKIQEFLSESENGQHKLNMMLSKGELLSTLLTKEKAKGIQAKVTAAKEDWKNFHSNLHQKESALENLKIQMKDFEVSAEPIQDWLSKTEKMVHESSNRLYDLPAKRREQQKLQSVLEEIHCYEPQLNRLKEKAQQLWEGQAASKSFRHRVSQLSSQYLALSNLTKEKVSRLDRIVAEHNQFSLGIKELQDWMTDAIHMLDSYCHPTSDKSVLDSRTLKLEVCIFTQKYLQPTEFVFLKISRLHPPGVMMSHSLHDKSQMLCECNAVCLGCTCQRIPESSDPGCFPKNKIK

SEQ ID NO: 42160 - protein, 264 aa, Homo sapiens
MESGKTASPKSMPKDAQMMAQILKDMGITEYEPRVINQMLEFAFRYVTTILDDAKIYSSHAKKATVDADDVRLAIQCRADQSFTSPPPRDFLLDIARQRNQTPLPLIKPYSGPRLPPDRYCLTAPNYRLKSLQKKASTSAGRITVPRLSVGSVTSRPSTPTLGTPTPQTMSVSTKVGTPMSLTGQRFTVQMPTSQSPAVKASIPATSAVQNVLINPSLIGSKNILITTNMMSSQNTANESSNALKRKREDDDDDDDDDDDYDNL

SEQ ID NO: 42161 - protein, 6885 aa, Homo sapiens
MASSPELPTEDEQGSWGIDDLHISLQAEQEDTQKKAFTCWINSQLARHTSPSVISDLFTDIKKGHVLLDLLEVLSGQQLPRDKGSNTFQCRINIEHALTFLRNRSIKLINIHVTDIIDGNPSIILGLIWTIILHFHIEKLAQTLSCNYNQPSLDDVSVVDSSPASSPPAKKCSKVQARWQMSARKALLLWAQEQCATYESVNVTDFKSSWRNGMAFLAIIHALRPDLIDMKSVKHRSNKDNLREAFRIAEQELKIPRLLEPEDVDVVDPDEKSIMTYVAQFLQYSKDAPGTGEEAQGKVKDAMGWLTLQKEKLQKLLKDSENDTYFKKYNSLLSFMESFNEEKKSFLDVLSIKRDLDELDKDHLQLREAWDGLDHQINAWKIKLNYALPPPLHQTEAWLQEVEELMDEDLSASQDHSQAVTLIQEKMTLFKSLMDRFEHHSNILLTFENKDENHLPLVPPNKLEEMKRRINNILEKKFILLLEFHYYKCLVLGLVDEVKSKLDIWNIKYGSRESVELLLEDWHKFIEEKEFLARLDTSFQKCGEIYKNLAGECQNINKQYMMVKSDVCMYRKNIYNVKSTLQKVLACWATYVENLRLLRACFEETKKEEIKEVPFETLAQWNLEHATLNEAGNFLVEVSNDVVGSSISKELRRLNKRWRKLVSKTQLEMNLPLMIKKQDQPTFDNSGNILSKEEKATVEFSTDMSVELPENYNQNIKAGEKHEKENEEFTGQLKVAKDVEKLIGQVEIWEAEAKSVLDQDDVDTSMEESLKHLIAKGSMFDELMARSEDMLQMDIQNISSQESFQHVLTTGLQAKIQEAKEKVQINVVKLIAALKNLTDVSPDLDIRLKMEESQKELESYMMRAQQLLGQRESPGELISKHKEALIISNTKSLAKYLKAVEELKNNVTEDIKMSLEEKSRDVCAKWESLHHELSLYVQQLKIDIEKGKLSDNILKLEKQINKEKKLIRRGRTKGLIKEHEACFSEEGCLYQLNHHMEVLRELCEELPSQKSQQEVKRLLKDYEQKIERLLKCASEIHMTLQPTAGGTSKNEGTITTSENRGGDPHSEAPFAKSDNQPSTEKAMEPTMKFSLASVLRPLQEESIMEKDYSASINSLLERYDTYRDILEHHLQNNKFRITSDFSSEEDRSSSCLQAKLTDLQVIKNETDARWKEFEIISLKLENHVNDIKKPFVIKERDTLKERERELQMTLNTRMESLETALRLVLPVEKASLLLCGSDLPLHKMAIQGFHLIDADRIYQHLRNIQDSIAKQIEICNRLEEPGNFVLKELHPFDLHAMQNIILKYKTQFEGMNHRVQRSEDTLKALEDFLASLRTAKLSAEPVTDLSASDTQVAQENTLTVKNKEGEIHLMKDKAKHLDKCLKMLDMSFKDAERGDDTSCENLLDAFSIKLSETHGYGVQEEFTEENKLLEACIFKNNELLKNIQDVQSQISKIGLKDPTVPAVKHRKKSLIRLDKVLDEYEEEKRHLQEMANSLPHFKDGREKTVNQQCQNTVVLWENTKALVTECLEQCGRVLELLKQYQNFKSILTTLIQKEESVISLQASYMGKENLKKRIAEIEIVKEEFNEHLEVVDKINQVCKNLQFYLNKMKTFEEPPFEKEANIIVDRWLDINEKTEDYYENLGRALALWDKLFNLKNVIDEWTEKALQKMELHQLTEEDRERLKEELQVHEQKTSEFSRRVAEIQFLLQSSEIPLELQVMESSILNKMEHVQKCLTGESNCHALSGSTAELREDLDQAKTQIGMTESLLKALSPSDSLEIFTKLEEIQQQILQQKHSMILLENQIGCLTPELSELKKQYESVSDLFNTKKSVLQDHFSKLLNDQCKNFNDWFSNIKVNLKECFESSETKKSVEQKLQKLSDFLTLEGRNSKIKQVDSVLKHVKKHLPKAHVKELISWLVGQEFELEKMESICQARAKELEDSLQQLLRLQDDHRNLRKWLTNQEEKWKGMEEPGEKTELFCQALARKREQFESVAQLNNSLKEYGFTEEEEIIMEATCLMDRYQTLLRQLSEIEEEDKLLPTEDQSFNDLAHDVIHWIKEIKESLMVLNSSEGKMPLEERIQKIKEIILLKPEGDARIETIMKQAESSEAPLVQKTLTDISNQWDNTLHLASTYLSHQEKLLLEGEKYLQSKEDLRLMLIELKKKQEAGFALQHGLQEKKAQLKIYKKFLKKAQDLTSLLKELKSQGNYLLECTKNPSFSEEPWLEIKHLHESLLQQLQDSVQNLDGHVREHDSYQVCVTDLNTTLDNFSKEFVSFSDKPVDQIAVEEKLQKLQELENRLSLQDGTLKKILALAKSVKQNTSSVGQKIIKDDIKSLQCKQKDLENRLASAKQEMECCLNSILKSKRSTEKKGKFTLPGREKQATSDVQESTQESAAVEKLEEDWEINKDSAVEMAMSKQLSLNAQESMKNTEDERKVNELQNQPLELDTMLRNEQLEEIEKLYTQLEAKKAAIKPLEQTECLNKTETGALVLHNIGYSAQHLDNLLQALITLKKNKESQYCVLRDFQEYLAAVESSMKALLTDKESLKVGPLDSVTYLDKIKKFIASIEKEKDSLGNLKIKWENLSNHVTDMDKKLLESQIKQLEHGWEQVEQQIQKKYSQQVVEYDEFTTLMNKVQDTEISLQQQQQHLQLRLKSPEERAGNQSMIALTTDLQATKHGFSVLKGQAELQMKRIWGEKEKKNLEDGINNLKKQWETLEPLHLEAENQIKKCDIRNKMKETILWAKNLLGELNPSIPLLPDDILSQIRKCKVTHDGILARQQSVESLAEEVKDKVPSLTTYEGSDLNNTLEDLRNQYQMLVLKSTQRSQQLEFKLEERSNFFAIIRKFQLMVQESETLIIPRVETAATEAELKHHHVTLEASQKELQEIDSGISTHLQELTNIYEELNVFERLFLEDQLKNLKIRTNRIQRFIQNTCNEVEHKIKFCRQFHEKTSALQEEADSIQRNELLLNQEVNKGVKEEIYNLKDRLTAIKCCILQVLKLKKVFDYIGLNWDFSQLDQLQTQVFEKEKELEEKIKQLDTFEEEHGKYQALLSKMRAIDLQIKKMTEVVLKAPDSSPESRRLNAQILSQRIEKAKCLCDEIIKKLNENKTFDDSFKEKEILQIKLNAEENDKLYKVLQNMVLELSPKELDEKNCQDKLETSLHVLNQIKSQLQQPLLINLEIKHIQNEKDNCEAFQEQVWAEMCSIKAVTAIEKQREENSSEASDVETKLREFEDLQMQLNTSIDLRTNVLNDAYENLTRYKEAVTRAVESITSLEAIIIPYRVDVGNPEESLEMPLRKQEELESTVAHIQDLTEKLGMISSPEAKLQLQYTLQELVSKNSAMKEAFKAQETEAERYLENYKCYRKMEEDIYTNLSKMETVLGQSMSSLPLSYREALERLEQSKALVSNLISTKEELMKLRQILRLLRLRCTENDGICLLKIVSALWEKWLSLLEAAKEWEMWCEELKQEWKFVSEEIEREAIILDNLQEELPEISKTKEAATTEELSELLDCLCQYGENVEKQQLLLTLLLQRIRSIQNVPESSGAVETVPAFQEITSMKERCNKLLQKVQKNKELVQTEIQERHSFTKEIIALKNFFQQTTTSFQNMAFQDHPEKSEQFEELQSILKKGKLTFENIMEKLRIKYSEMYTIVPAEIESQVEECRKALEDIDEKISNEVLKSSPSYAMRRKIEEINNGLHNVEKMLQQKSKNIEKAQEIQKKMWDELDLWHSKLNELDSEVQDIVEQDPGQAQEWMDNLMIPFQQYQQVSQRAECRTSQLNKATVKMEEYSDLLKSTEAWIENTSHLLANPADYDSLRTLSHHASTVQMALEDSEQKHNLLHSIFMDLEDLSIIFETDELTQSIQELSNQVTALQQKIMESLPQIQRMADDVVAIESEVKSMEKRVSKIKTILLSKEIFDFSPEEHLKHGEVILENIRPMKKTIAEIVSYQVELRLPQTGMKPLPVFQRTNQLLQDIKLLENVTQEQNELLKVVIKQTNEWDEEIENLKQILNNYSAQFSLEHMSPDQADKLPQLQGEIERMEKQILSLNQRKEDLLVDLKATVLNLHQHLKQEQEGVERDRLPAVTSEEGGVAERDASERKLNRRGSMSYLAAVEEEVEESSVKSDNGDEKAEPSPQSWSSLWKHDKDMEEDRASSSSGTIVQEAYGKISTSDNSMAQILTPDSLNTEQGPECSLRPNQTEEGTTPPIEADTLDSSDAQGGLEPRVEKTRPEPTEVLHACKTQVAELELWLQQANVAVEPETLNADMQQVLEQQLVGCQAMLTEIEHKVAFLLETCKDQGLGDNGATQHEAEALSLKLKTVKCNLEKVQMMLQEKHSEDQHPTILKKSSEPEHQEALQPVNLSELESIVTERPQFSRQKDFQQQQVLELKPMEQKDFIKFIEFNAKKMWPQYCQHDNDTTQESSASNQASSPENDVPDSILSPQGQNGDKWQYLHHELSSKIKLPLPQLVEPQVSTNMGILPSVTMYNFRYPTTEELKTYTTQLEDLRQEASNLQTQENMTEEAYINLDKKLFELFLTLSQCLSSVEEMLEMPRLYREDGSGQQVHYETLALELKKLYLALSDKKGDLLKAMTWPGENTNLLLECFDNLQVCLEHTQAAAVCRSKSLKAGLDYNRSYQNEIKRLYHQLIKSKTSLQQSLNEISGQSVAEQLQKADAYTVELENAESRVAKLRDEGERLHLPYALLQEVYKLEDVLDSMWGMLRARYTELSSPFVTESQQDALLQGMVELVKIGKEKLAHGHLKQTKSKVALQAQIENHKVFFQKLVADMLLIQAYSAKILPSLLQNRETFWAEQVTEVKILEEKSRQCGMKLQSLLQKWEEFDENYASLEKDLEILISTLPSVSLVEETEERLVERISFYQQIKRNIGGKHARLYQTLNEGKQLVASVSCPELEGQIAKLEEQWLSLNKKIDHELHRLQALLKHLLSYNRDSDQLTKWLESSQHTLNYWKEQSLNVSQDLDTIRSNINNFFEFSKEVDEKSSLKTAVISIGNQLLHLKETDTATLRASLAQFEQKWTMLITQLPDIQEKLHQLQMEKLPSRKAITEMISWMNNVEHQTSDEDSVHSPSSASQVKHLLQKHKEFRMEMDYKQWIVDFVNQSLLQLSTCDVESKRYERTEFAEHLGEMNRQWHRVHGMLNRKIQHLEQLLESITESENKIQILNNWLEAQEERLKTLQKPESVISVQKLLLDCQDIENQLAIKSKALDELKQSYLTLESGAVPLLEDTASRIDELFQKRSSVLTQVNQLKTSMQSVLQEWKIYDQLYDEVNMMTIRFWYCMEHSKPVVLSLETLRCQVENLQSLQDEAESSEGSWEKLQEVIGKLKGLCPSVAEIIEEKCQNTHKRWTQVNQAIADQLQKAQSLLQLWKAYSNAHGEAAARLKQQEAKFQQLANISMSGNNLAEILPPALQDIKELQHDVQKTKEAFLQNSSVLDRLPQPAESSTHMLLPGPLHSLQRAAYLEKMLLVKANEFEFVLSQFKDFGVRLESLKGLIMHEEENLDRLHQQEKENPDSFLNHVLALTAQSPDIEHLNEVSLKLPLSDVAVKTLQNMNRQWIRATATALERCSELQGIGLNEKFLYCCEKWIQLLEKIEEALKVDVANSLPELLEQQKTYKMLEAEVSINQTIADSYVTQSLQLLDTTEIENRPEFITEFSKLTDRWQNAVQGVRQRKGDVDGLVRQWQDFTTSVENLFRFLTDTSHLLSAVKGQERFSLYQTRSLIHELKNKEIHFQRRRTTCALTLEAGEKLLLTTDLKTKESVGRRISQLQDSWKDMEPQLAEMIKQFQSTVETWDQCEKKIKELKSRLQVLKAQSEDPLPELHEDLHNEKELIKELEQSLASWTQNLKELQTMKADLTRHVLVEDVMVLKEQIEHLHRQWEDLCLRVAIRKQEIEDRLNTWVVFNEKNKELCAWLVQMENKVLQTADISIEEMIEKLQKDCMEEINLFSENKLQLKQMGDQLIKASNKSRAAEIDDKLNKINDRWQHLFDVIGSRVKKLKETFAFIQQLDKNMSNLRTWLARIESELSKPVVYDVCDDQEIQKRLAEQQDLQRDIEQHSAGVESVFNICDVLLHDSDACANETECDSIQQTTRSLDRRWRNICAMSMERRMKIEETWRLWQKFLDDYSRFEDWLKSAERTAACPNSSEVLYTSAKEELKRFEAFQRQIHERLTQLELINKQYRRLARENRTDTASRLKQMVHEGNQRWDNLQRRVTAVLRRLRHFTNQREEFEGTRESILVWLTEMDLQLTNVEHFSESDADDKMRQLNGFQQEITLNTNKIDQLIVFGEQLIQKSEPLDAVLIEDELEELHRYCQEVFGRVSRFHRRLTSCTPGLEDEKEASENETDMEDPREIQTDSWRKRGESEEPSSPQSLCHLVAPGHERSGCETPVSVDSIPLEWDHTGDVGGSSSHEEDEEGPYYSALSGKSISDGHSWHVPDSPSCPEHHYKQMEGDRNVPPVPPASSTPYKPPYGKLLLPPGTDGGKEGPRVLNGNPQQEDGGLAGITEQQSGAFDRWEMIQAQELHNKLKIKQNLQQLNSDISAITTWLKKTEAELEMLKMAKPPSDIQEIELRVKRLQEILKAFDTYKALVVSVNVSSKEFLQTESPESTELQSRLRQLSLLWEAAQGAVDSWRGGLRQSLMQCQDFHQLSQNLLLWLASAKNRRQKAHVTDPKADPRALLECRRELMQLEKELVERQPQVDMLQEISNSLLIKGHGEDCIEAEEKVHVIEKKLKQLREQVSQDLMALQGTQNPASPLPSFDEVDSGDQPPATSVPAPRAKQFRAVRTTEGEEETESRVPGSTRPQRSFLSRVVRAALPLQLLLLLLLLLACLLPSSEEDYSCTQANNFARSFYPMLRYTNGPPPT

SEQ ID NO: 42162 - protein, 6907 aa, Homo sapiens
MASSPELPTEDEQGSWGIDDLHISLQAEQEDTQKKAFTCWINSQLARHTSPSVISDLFTDIKKGHVLLDLLEVLSGQQLPRDKGSNTFQCRINIEHALTFLRNRSIKLINIHVTDIIDGNPSIILGLIWTIILHFHIEKLAQTLSCNYNQPSLDDVSVVDSSPASSPPAKKCSKVQARWQMSARKALLLWAQEQCATYESVNVTDFKSSWRNGMAFLAIIHALRPDLIDMKSVKHRSNKDNLREAFRIAEQELKIPRLLEPEDVDVVDPDEKSIMTYVAQFLQYSKDAPGTGEEAQGKVKDAMGWLTLQKEKLQKLLKDSENDTYFKKYNSLLSFMESFNEEKKSFLDVLSIKRDLDELDKDHLQLREAWDGLDHQINAWKIKLNYALPPPLHQTEAWLQEVEELMDEDLSASQDHSQAVTLIQEKMTLFKSLMDRFEHHSNILLTFENKDENHLPLVPPNKLEEMKRRINNILEKKFILLLEFHYYKCLVLGLVDEVKSKLDIWNIKYGSRESVELLLEDWHKFIEEKEFLARLDTSFQKCGEIYKNLAGECQNINKQYMMVKSDVCMYRKNIYNVKSTLQKVLACWATYVENLRLLRACFEETKKEEIKEVPFETLAQWNLEHATLNEAGNFLVEVSNDVVGSSISKELRRLNKRWRKLVSKTQLEMNLPLMIKKQDQPTFDNSGNILSKEEKATVEFSTDMSVELPENYNQNIKAGEKHEKENEEFTGQLKVAKDVEKLIGQVEIWEAEAKSVLDQDDVDTSMEESLKHLIAKGSMFDELMARSEDMLQMDIQNISSQESFQHVLTTGLQAKIQEAKEKVQINVVKLIAALKNLTDVSPDLDIRLKMEESQKELESYMMRAQQLLGQRESPGELISKHKEALIISNTKSLAKYLKAVEELKNNVTEDIKMSLEEKSRDVCAKWESLHHELSLYVQQLKIDIEKGKLSDNILKLEKQINKEKKLIRRGRTKGLIKEHEACFSEEGCLYQLNHHMEVLRELCEELPSQKSQQEVKRLLKDYEQKIERLLKCASEIHMTLQPTAGGTSKNEGTITTSENRGGDPHSEAPFAKSDNQPSTEKAMEPTMKFSLASVLRPLQEESIMEKDYSASINSLLERYDTYRDILEHHLQNNKFRITSDFSSEEDRSSSCLQAKLTDLQVIKNETDARWKEFEIISLKLENHVNDIKKPFVIKERDTLKERERELQMTLNTRMESLETALRLVLPVEKASLLLCGSDLPLHKMAIQGFHLIDADRIYQHLRNIQDSIAKQIEICNRLEEPGNFVLKELHPFDLHAMQNIILKYKTQFEGMNHRVQRSEDTLKALEDFLASLRTAKLSAEPVTDLSASDTQVAQENTLTVKNKEGEIHLMKDKAKHLDKCLKMLDMSFKDAERGDDTSCENLLDAFSIKLSETHGYGVQEEFTEENKLLEACIFKNNELLKNIQDVQSQISKIGLKDPTVPAVKHRKKSLIRLDKVLDEYEEEKRHLQEMANSLPHFKDGREKTVNQQCQNTVVLWENTKALVTECLEQCGRVLELLKQYQNFKSILTTLIQKEESVISLQASYMGKENLKKRIAEIEIVKEEFNEHLEVVDKINQVCKNLQFYLNKMKTFEEPPFEKEANIIVDRWLDINEKTEDYYENLGRALALWDKLFNLKNVIDEWTEKALQKMELHQLTEEDRERLKEELQVHEQKTSEFSRRVAEIQFLLQSSEIPLELQVMESSILNKMEHVQKCLTGESNCHALSGSTAELREDLDQAKTQIGMTESLLKALSPSDSLEIFTKLEEIQQQILQQKHSMILLENQIGCLTPELSELKKQYESVSDLFNTKKSVLQDHFSKLLNDQCKNFNDWFSNIKVNLKECFESSETKKSVEQKLQKLSDFLTLEGRNSKIKQVDSVLKHVKKHLPKAHVKELISWLVGQEFELEKMESICQARAKELEDSLQQLLRLQDDHRNLRKWLTNQEEKWKGMEEPGEKTELFCQALARKREQFESVAQLNNSLKEYGFTEEEEIIMEATCLMDRYQTLLRQLSEIEEEDKLLPTEDQSFNDLAHDVIHWIKEIKESLMVLNSSEGKMPLEERIQKIKEIILLKPEGDARIETIMKQAESSEAPLVQKTLTDISNQWDNTLHLASTYLSHQEKLLLEGEKYLQSKEDLRLMLIELKKKQEAGFALQHGLQEKKAQLKIYKKFLKKAQDLTSLLKELKSQGNYLLECTKNPSFSEEPWLEIKHLHESLLQQLQDSVQNLDGHVREHDSYQVCVTDLNTTLDNFSKEFVSFSDKPVDQIAVEEKLQKLQELENRLSLQDGTLKKILALAKSVKQNTSSVGQKIIKDDIKSLQCKQKDLENRLASAKQEMECCLNSILKSKRSTEKKGKFTLPGREKQATSDVQESTQESAAVEKLEEDWEINKDSAVEMAMSKQLSLNAQESMKNTEDERKVNELQNQPLELDTMLRNEQLEEIEKLYTQLEAKKAAIKPLEQTECLNKTETGALVLHNIGYSAQHLDNLLQALITLKKNKESQYCVLRDFQEYLAAVESSMKALLTDKESLKVGPLDSVTYLDKIKKFIASIEKEKDSLGNLKIKWENLSNHVTDMDKKLLESQIKQLEHGWEQVEQQIQKKYSQQVVEYDEFTTLMNKVQDTEISLQQQQQHLQLRLKSPEERAGNQSMIALTTDLQATKHGFSVLKGQAELQMKRIWGEKEKKNLEDGINNLKKQWETLEPLHLEAENQIKKCDIRNKMKETILWAKNLLGELNPSIPLLPDDILSQIRKCKVTHDGILARQQSVESLAEEVKDKVPSLTTYEGSDLNNTLEDLRNQYQMLVLKSTQRSQQLEFKLEERSNFFAIIRKFQLMVQESETLIIPRVETAATEAELKHHHVTLEASQKELQEIDSGISTHLQELTNIYEELNVFERLFLEDQLKNLKIRTNRIQRFIQNTCNEVEHKIKFCRQFHEKTSALQEEADSIQRNELLLNQEVNKGVKEEIYNLKDRLTAIKCCILQVLKLKKVFDYIGLNWDFSQLDQLQTQVFEKEKELEEKIKQLDTFEEEHGKYQALLSKMRAIDLQIKKMTEVVLKAPDSSPESRRLNAQILSQRIEKAKCLCDEIIKKLNENKTFDDSFKEKEILQIKLNAEENDKLYKVLQNMVLELSPKELDEKNCQDKLETSLHVLNQIKSQLQQPLLINLEIKHIQNEKDNCEAFQEQVWAEMCSIKAVTAIEKQREENSSEASDVETKLREFEDLQMQLNTSIDLRTNVLNDAYENLTRYKEAVTRAVESITSLEAIIIPYRVDVGNPEESLEMPLRKQEELESTVAHIQDLTEKLGMISSPEAKLQLQYTLQELVSKNSAMKEAFKAQETEAERYLENYKCYRKMEEDIYTNLSKMETVLGQSMSSLPLSYREALERLEQSKALVSNLISTKEELMKLRQILRLLRLRCTENDGICLLKIVSALWEKWLSLLEAAKEWEMWCEELKQEWKFVSEEIEREAIILDNLQEELPEISKTKEAATTEELSELLDCLCQYGENVEKQQLLLTLLLQRIRSIQNVPESSGAVETVPAFQEITSMKERCNKLLQKVQKNKELVQTEIQERHSFTKEIIALKNFFQQTTTSFQNMAFQDHPEKSEQFEELQSILKKGKLTFENIMEKLRIKYSEMYTIVPAEIESQVEECRKALEDIDEKISNEVLKSSPSYAMRRKIEEINNGLHNVEKMLQQKSKNIEKAQEIQKKMWDELDLWHSKLNELDSEVQDIVEQDPGQAQEWMDNLMIPFQQYQQVSQRAECRTSQLNKATVKMEEYSDLLKSTEAWIENTSHLLANPADYDSLRTLSHHASTVQMALEDSEQKHNLLHSIFMDLEDLSIIFETDELTQSIQELSNQVTALQQKIMESLPQIQRMADDVVAIESEVKSMEKRVSKIKTILLSKEIFDFSPEEHLKHGEVILENIRPMKKTIAEIVSYQVELRLPQTGMKPLPVFQRTNQLLQDIKLLENVTQEQNELLKVVIKQTNEWDEEIENLKQILNNYSAQFSLEHMSPDQADKLPQLQGEIERMEKQILSLNQRKEDLLVDLKATVLNLHQHLKQEQEGVERDRLPAVTSEEGGVAERDASERKLNRRGSMSYLAAVEEEVEESSVKSDNGDEKAEPSPQSWSSLWKHDKDMEEDRASSSSGTIVQEAYGKISTSDNSMAQILTPDSLNTEQGPECSLRPNQTEEGTTPPIEADTLDSSDAQGGLEPRVEKTRPEPTEVLHACKTQVAELELWLQQANVAVEPETLNADMQQVLEQQLVGCQAMLTEIEHKVAFLLETCKDQGLGDNGATQHEAEALSLKLKTVKCNLEKVQMMLQEKHSEDQHPTILKKSSEPEHQEALQPVNLSELESIVTERPQFSRQKDFQQQQVLELKPMEQKDFIKFIEFNAKKMWPQYCQHDNDTTQESSASNQASSPENDVPDSILSPQGQNGDKWQYLHHELSSKIKLPLPQLVEPQVSTNMGILPSVTMYNFRYPTTEELKTYTTQLEDLRQEASNLQTQENMTEEAYINLDKKLFELFLTLSQCLSSVEEMLEMPRLYREDGSGQQVHYETLALELKKLYLALSDKKGDLLKAMTWPGENTNLLLECFDNLQVCLEHTQAAAVCRSKSLKAGLDYNRSYQNEIKRLYHQLIKSKTSLQQSLNEISGQSVAEQLQKADAYTVELENAESRVAKLRDEGERLHLPYALLQEVYKLEDVLDSMWGMLRARYTELSSPFVTESQQDALLQGMVELVKIGKEKLAHGHLKQTKSKVALQAQIENHKVFFQKLVADMLLIQAYSAKILPSLLQNRETFWAEQVTEVKILEEKSRQCGMKLQSLLQKWEEFDENYASLEKDLEILISTLPSVSLVEETEERLVERISFYQQIKRNIGGKHARLYQTLNEGKQLVASVSCPELEGQIAKLEEQWLSLNKKIDHELHRLQALLKHLLSYNRDSDQLTKWLESSQHTLNYWKEQSLNVSQDLDTIRSNINNFFEFSKEVDEKSSLKTAVISIGNQLLHLKETDTATLRASLAQFEQKWTMLITQLPDIQEKLHQLQMEKLPSRKAITEMISWMNNVEHQTSDEDSVHSPSSASQVKHLLQKHKEFRMEMDYKQWIVDFVNQSLLQLSTCDVESKRYERTEFAEHLGEMNRQWHRVHGMLNRKIQHLEQLLESITESENKIQILNNWLEAQEERLKTLQKPESVISVQKLLLDCQDIENQLAIKSKALDELKQSYLTLESGAVPLLEDTASRIDELFQKRSSVLTQVNQLKTSMQSVLQEWKIYDQLYDEVNMMTIRFWYCMEHSKPVVLSLETLRCQVENLQSLQDEAESSEGSWEKLQEVIGKLKGLCPSVAEIIEEKCQNTHKRWTQVNQAIADQLQKAQSLLQLWKAYSNAHGEAAARLKQQEAKFQQLANISMSGNNLAEILPPALQDIKELQHDVQKTKEAFLQNSSVLDRLPQPAESSTHMLLPGPLHSLQRAAYLEKMLLVKANEFEFVLSQFKDFGVRLESLKGLIMHEEENLDRLHQQEKENPDSFLNHVLALTAQSPDIEHLNEVSLKLPLSDVAVKTLQNMNRQWIRATATALERCSELQGIGLNEKFLYCCEKWIQLLEKIEEALKVDVANSLPELLEQQKTYKMLEAEVSINQTIADSYVTQSLQLLDTTEIENRPEFITEFSKLTDRWQNAVQGVRQRKGDVDGLVRQWQDFTTSVENLFRFLTDTSHLLSAVKGQERFSLYQTRSLIHELKNKEIHFQRRRTTCALTLEAGEKLLLTTDLKTKESVGRRISQLQDSWKDMEPQLAEMIKQFQSTVETWDQCEKKIKELKSRLQVLKAQSEDPLPELHEDLHNEKELIKELEQSLASWTQNLKELQTMKADLTRHVLVEDVMVLKEQIEHLHRQWEDLCLRVAIRKQEIEDRLNTWVVFNEKNKELCAWLVQMENKVLQTADISIEEMIEKLQKDCMEEINLFSENKLQLKQMGDQLIKASNKSRAAEIDDKLNKINDRWQHLFDVIGSRVKKLKETFAFIQQLDKNMSNLRTWLARIESELSKPVVYDVCDDQEIQKRLAEQQDLQRDIEQHSAGVESVFNICDVLLHDSDACANETECDSIQQTTRSLDRRWRNICAMSMERRMKIEETWRLWQKFLDDYSRFEDWLKSAERTAACPNSSEVLYTSAKEELKRFEAFQRQIHERLTQLELINKQYRRLARENRTDTASRLKQMVHEGNQRWDNLQRRVTAVLRRLRHFTNQREEFEGTRESILVWLTEMDLQLTNVEHFSESDADDKMRQLNGFQQEITLNTNKIDQLIVFGEQLIQKSEPLDAVLIEDELEELHRYCQEVFGRVSRFHRRLTSCTPGLEDEKEASENETDMEDPREIQTDSWRKRGESEEPSSPQSLCHLVAPGHERSGCETPVSVDSIPLEWDHTGDVGGSSSHEEDEEGPYYSALSDVEIPENPEAYLKMTTKTLKASSGKSISDGHSWHVPDSPSCPEHHYKQMEGDRNVPPVPPASSTPYKPPYGKLLLPPGTDGGKEGPRVLNGNPQQEDGGLAGITEQQSGAFDRWEMIQAQELHNKLKIKQNLQQLNSDISAITTWLKKTEAELEMLKMAKPPSDIQEIELRVKRLQEILKAFDTYKALVVSVNVSSKEFLQTESPESTELQSRLRQLSLLWEAAQGAVDSWRGGLRQSLMQCQDFHQLSQNLLLWLASAKNRRQKAHVTDPKADPRALLECRRELMQLEKELVERQPQVDMLQEISNSLLIKGHGEDCIEAEEKVHVIEKKLKQLREQVSQDLMALQGTQNPASPLPSFDEVDSGDQPPATSVPAPRAKFRAVRTTEGEEETESRVPGSTRPQRSFLSRVVRAALPLQLLLLLLLLLACLLPSSEEDYSCTQANNFARSFYPMLRYTNGPPPT

SEQ ID NO: 42163 - protein, 855 aa, Homo sapiens
MSNLRTWLARIESELSKPVVYDVCDDQEIQKRLAEQQDLQRDIEQHSAGVESVFNICDVLLHDSDACANETECDSIQQTTRSLDRRWRNICAMSMERRMKIEETWRLWQKFLDDYSRFEDWLKSAERTAACPNSSEVLYTSAKEELKRFEAFQRQIHERLTQLELINKQYRRLARENRTDTASRLKQMVHEGNQRWDNLQRRVTAVLRRLRHFTNQREEFEGTRESILVWLTEMDLQLTNVEHFSESDADDKMRQLNGFQQEITLNTNKIDQLIVFGEQLIQKSEPLDAVLIEDELEELHRYCQEVFGRVSRFHRRLTSCTPGLEDEKEASENETDMEDPREIQTDSWRKRGESEEPSSPQSLCHLVAPGHERSGCETPVSVDSIPLEWDHTGDVGGSSSHEEDEEGPYYSALSGKSISDGHSWHVPDSPSCPEHHYKQMEGDRNVPPVPPASSTPYKPPYGKLLLPPGTDGGKEGPRVLNGNPQQEDGGLAGITEQQSGAFDRWEMIQAQELHNKLKIKQNLQQLNSDISAITTWLKKTEAELEMLKMAKPPSDIQEIELRVKRLQEILKAFDTYKALVVSVNVSSKEFLQTESPESTELQSRLRQLSLLWEAAQGAVDSWRGGLRQSLMQCQDFHQLSQNLLLWLASAKNRRQKAHVTDPKADPRALLECRRELMQLEKELVERQPQVDMLQEISNSLLIKGHGEDCIEAEEKVHVIEKKLKQLREQVSQDLMALQGTQNPASPLPSFDEVDSGDQPPATSVPAPRAKQFRAVRTTEGEEETESRVPGSTRPQRSFLSRVVRAALPLQLLLLLLLLLACLLPSSEEDYSCTQANNFARSFYPMLRYTNGPPPT

SEQ ID NO: 42164 - protein, 763 aa, Homo sapiens
MSMERRMKIEETWRLWQKFLDDYSRFEDWLKSAERTAACPNSSEVLYTSAKEELKRFEAFQRQIHERLTQLELINKQYRRLARENRTDTASRLKQMVHEGNQRWDNLQRRVTAVLRRLRHFTNQREEFEGTRESILVWLTEMDLQLTNVEHFSESDADDKMRQLNGFQQEITLNTNKIDQLIVFGEQLIQKSEPLDAVLIEDELEELHRYCQEVFGRVSRFHRRLTSCTPGLEDEKEASENETDMEDPREIQTDSWRKRGESEEPSSPQSLCHLVAPGHERSGCETPVSVDSIPLEWDHTGDVGGSSSHEEDEEGPYYSALSGKSISDGHSWHVPDSPSCPEHHYKQMEGDRNVPPVPPASSTPYKPPYGKLLLPPGTDGGKEGPRVLNGNPQQEDGGLAGITEQQSGAFDRWEMIQAQELHNKLKIKQNLQQLNSDISAITTWLKKTEAELEMLKMAKPPSDIQEIELRVKRLQEILKAFDTYKALVVSVNVSSKEFLQTESPESTELQSRLRQLSLLWEAAQGAVDSWRGGLRQSLMQCQDFHQLSQNLLLWLASAKNRRQKAHVTDPKADPRALLECRRELMQLEKELVERQPQVDMLQEISNSLLIKGHGEDCIEAEEKVHVIEKKLKQLREQVSQDLMALQGTQNPASPLPSFDEVDSGDQPPATSVPAPRAKQFRAVRTTEGEEETESRVPGSTRPQRSFLSRVVRAALPLQLLLLLLLLLACLLPSSEEDYSCTQANNFARSFYPMLRYTNGPPPT

SEQ ID NO: 42165 - protein, 556 aa, Homo sapiens
MEDPREIQTDSWRKRGESEEPSSPQSLCHLVAPGHERSGCETPVSVDSIPLEWDHTGDVGGSSSHEEDEEGPYYSALSDVEIPENPEAYLKMTTKTLKASSGKSISDGHSWHVPDSPSCPEHHYKQMEGDRNVPPVPPASSTPYKPPYGKLLLPPGTDGGKEGPRVLNGNPQQEDGGLAGITEQQSGAFDRWEMIQAQELHNKLKIKQNLQQLNSDISAITTWLKKTEAELEMLKMAKPPSDIQEIELRVKRLQEILKAFDTYKALVVSVNVSSKEFLQTESPESTELQSRLRQLSLLWEAAQGAVDSWRGGLRQSLMQCQGSKTRPRSDVLFFKDFHQLSQNLLLWLASAKNRRQKAHVTDPKADPRALLECRRELMQLEKELVERQPQVDMLQEISNSLLIKGHGEDCIEAEEKVHVIEKKLKQLREQVSQDLMALQGTQNPASPLPSFDEVDSGDQPPATSVPAPRAKQFRAVRTTEGEEETESRVPGSTRPQRSFLSRVVRAALPLQLLLLLLLLLACLLPSSEEDYSCTQANNFARSFYPMLRYTNGPPPT

SEQ ID NO: 42166 - protein, 429 aa, Homo sapiens
MEGDRNVPPVPPASSTPYKPPYGKLLLPPGTDGGKEGPRVLNGNPQQEDGGLAGITEQQSGAFDRWEMIQAQELHNKLKIKQNLQQLNSDISAITTWLKKTEAELEMLKMAKPPSDIQEIELRVKRLQEILKAFDTYKALVVSVNVSSKEFLQTESPESTELQSRLRQLSLLWEAAQGAVDSWRGGLRQSLMQCQGSKTRPRSDVLFFKDFHQLSQNLLLWLASAKNRRQKAHVTDPKADPRALLECRRELMQLEKELVERQPQVDMLQEISNSLLIKGHGEDCIEAEEKVHVIEKKLKQLREQVSQDLMALQGTQNPASPLPSFDEVDSGDQPPATSVPAPRAKFRAVRTTEGEEETESRVPGSTRPQRSFLSRVVRAALPLQLLLLLLLLLACLLPSSEEDYSCTQANNFARSFYPMLRYTNGPPPT

SEQ ID NO: 42167 - protein, 3270 aa, Homo sapiens
MEKLRIKYSEMYTIVPAEIESQVEECRKALEDIDEKISNEVLKSSPSYAMRRKIEEINNGLHNVEKMLQQKSKNIEKAQEIQKKMWDELDLWHSKLNELDSEVQDIVEQDPGQAQEWMDNLMIPFQQYQQVSQRAECRTSQLNKATVKMEEYSDLLKSTEAWIENTSHLLANPADYDSLRTLSHHASTVQDSKCFRSGPRPNIYVSYYVTVIQMALEDSEQKHNLLHSIFMDLEDLSIIFETDELTQSIQELSNQVTALQQKIMESLPQIQRMADDVVAIESEVKSMEKRVSKIKTILLSKEIFDFSPEEHLKHGEVILENIRPMKKTIAEIVSYQVELRLPQTGMKPLPVFQRTNQLLQDIKLLENVTQEQNELLKVVIKQTNEWDEEIENLKQILNNYSAQFSLEHMSPDQADKLPQLQGEIERMEKQILSLNQRKEDLLVDLKATVLNLHQHLKQEQEGVERDRLPAVTSEEGGVAERDASERKLNRRGSMSYLAAVEEEVEESSVKSDNGDEKAEPSPQSWSSLWKHDKDMEEDRASSSSGTIVQEAYGKISTSDNSMAQILTPDSLNTEQGPECSLRPNQTEEGTTPPIEADTLDSSDAQGGLEPRVEKTRPEPTEVLHACKTQVAELELWLQQANVAVEPETLNADMQQVLEQQLVGCQAMLTEIEHKVAFLLETCKDQGLGDNGATQHEAEALSLKLKTVKCNLEKVQMMLQEKHSEDQHPTILKKSSEPEHQEALQPVNLSELESIVTERPQFSRQKDFQQQQVLELKPMEQKDFIKFIEFNAKKMWPQYCQHDNDTTQESSASNQASSPENDVPDSILSPQGQNGDKWQYLHHELSSKIKLPLPQLVEPQVSTNMGILPSVTMYNFRYPTTEELKTYTTQLEDLRQEASNLQTQENMTEEAYINLDKKLFELFLTLSQCLSSVEEMLEMPRLYREDGSGQQVHYETLALELKKLYLALSDKKGDLLKAMTWPGENTNLLLECFDNLQVCLEHTQAAAVCRSKSLKAGLDYNRSYQNEIKRLYHQLIKSKTSLQQSLNEISGQSVAEQLQKADAYTVELENAESRVAKLRDEGERLHLPYALLQEVYKLEDVLDSMWGMLRARYTELSSPFVTESQQDALLQGMVELVKIGKEKLAHGHLKQTKSKVALQAQIENHKVFFQKLVADMLLIQAYSAKILPSLLQNRETFWAEQVTEVKILEEKSRQCGMKLQSLLQKWEEFDENYASLEKDLEILISTLPSVSLVEETEERLVERISFYQQIKRNIGGKHARLYQTLNEGKQLVASVSCPELEGQIAKLEEQWLSLNKKIDHELHRLQALLKHLLSYNRDSDQLTKWLESSQHTLNYWKEQSLNVSQDLDTIRSNINNFFEFSKEVDEKSSLKTAVISIGNQLLHLKETDTATLRASLAQFEQKWTMLITQLPDIQEKLHQLQMEKLPSRKAITEMISWMNNVEHQTSDEDSVHSPSSASQVKHLLQKHKEFRMEMDYKQWIVDFVNQSLLQLSTCDVESKRYERTEFAEHLGEMNRQWHRVHGMLNRKIQHLEQLLESITESENKIQILNNWLEAQEERLKTLQKPESVISVQKLLLDCQDIENQLAIKSKALDELKQSYLTLESGAVPLLEDTASRIDELFQKRSSVLTQVNQLKTSMQSVLQEWKIYDQLYDEVNMMTIRFWYCMEHSKPVVLSLETLRCQVENLQSLQDEAESSEGSWEKLQEVIGKLKGLCPSVAEIIEEKCQNTHKRWTQVNQAIADQLQKAQSLLQLWKAYSNAHGEAAARLKQQEAKFQQLANISMSGNNLAEILPPALQDIKELQHDVQKTKEAFLQNSSVLDRLPQPAESSTHMLLPGPLHSLQRAAYLEKMLLVKANEFEFVLSQFKDFGVRLESLKGLIMHEEENLDRLHQQEKENPDSFLNHVLALTAQSPDIEHLNEVSLKLPLSDVAVKTLQNMNRQWIRATATALERCSELQGIGLNEKFLYCCEKWIQLLEKIEEALKVDVANSLPELLEQQKTYKMLEAEVSINQTIADSYVTQSLQLLDTTEIENRPEFITEFSKLTDRWQNAVQGVRQRKGDVDGLVRQWQDFTTSVENLFRFLTDTSHLLSAVKGQERFSLYQTRSLIHELKNKEIHFQRRRTTCALTLEAGEKLLLTTDLKTKESVGRRISQLQDSWKDMEPQLAEMIKQFQSTVETWDQCEKKIKELKSRLQVLKAQSEDPLPELHEDLHNEKELIKELEQSLASWTQNLKELQTMKADLTRHVLVEDVMVLKEQIEHLHRQWEDLCLRVAIRKQEIEDRLNTWVVFNEKNKELCAWLVQMENKVLQTADISIEEMIEKLQKDCMEEINLFSENKLQLKQMGDQLIKASNKSRAAEIDDKLNKINDRWQHLFDVIGSRVKKLKETFAFIQQLDKNMSNLRTWLARIESELSKPVVYDVCDDQEIQKRLAEQQDLQRDIEQHSAGVESVFNICDVLLHDSDACANETECDSIQQTTRSLDRRWRNICAMSMERRMKIEETWRLWQKFLDDYSRFEDWLKSAERTAACPNSSEVLYTSAKEELKRFEAFQRQIHERLTQLELINKQYRRLARENRTDTASRLKQMVHEGNQRWDNLQRRVTAVLRRLRHFTNQREEFEGTRESILVWLTEMDLQLTNVEHFSESDADDKMRQLNGFQQEITLNTNKIDQLIVFGEQLIQKSEPLDAVLIEDELEELHRYCQEVFGRVSRFHRRLTSCTPGLEDEKEASENETDMEDPREIQTDSWRKRGESEEPSSPQSLCHLVAPGHERSGCETPVSVDSIPLEWDHTGDVGGSSSHEEDEEGPYYSALSGKSISDGHSWHVPDSPSCPEHHYKQMEGDRNVPPVPPASSTPYKPPYGKLLLPPGTDGGKEGPRVLNGNPQQEDGGLAGITEQQSGAFDRWEMIQAQELHNKLKIKQNLQQLNSDISAITTWLKKTEAELEMLKMAKPPSDIQEIELRVKRLQEILKAFDTYKALVVSVNVSSKEFLQTESPESTELQSRLRQLSLLWEAAQGAVDSWRGGLRQSLMQCQDFHQLSQNLLLWLASAKNRRQKAHVTDPKADPRALLECRRELMQLEKELVERQPQVDMLQEISNSLLIKGHGEDCIEAEEKVHVIEKKLKQLREQVSQDLMALQGTQNPASPLPSFDEVDSGDQPPATSVPAPRAKQFRAVRTTEGEEETESRVPGSTRPQRSFLSRVVRAALPLQLLLLLLLLLACLLPSSEEDYSCTQANNFARSFYPMLRYTNGPPPT

SEQ ID NO: 42168 - protein, 285 aa, Homo sapiens
MASSPELPTEDEQGSWGIDDLHISLQAEQEDTQKKAFTCWINSQLARHTSPSVISDLFTDIKKGHVLLDLLEVLSGQQLPRDKGSNTFQCRINIEHALTFLRNRSIKLINIHVTDIIDGNPSIILGLIWTIILHFHIEKLAQTLSCNYNQPSLDDVSVVDSSPASSPPAKKCSKVQARWQMSARKALLLWAQEQCATYESVNVTDFKSSWRNGMAFLAIIHALRPDLIDMKSVKHRSNKDNLREAFRIAEQELKIPRLLEPEDAWRSSALYRIYMPGTVSCASYL

SEQ ID NO: 42169 - protein, 267 aa, Homo sapiens
MASSPELPTEDEQGSWGIDDLHISLQAEQEDTQKKAFTCWINSQLARHTSPSVISDLFTDIKKGHVLLDLLEVLSGQQLPRDKGSNTFQCRINIEHALTFLRNRSIKLINIHVTDIIDGNPSIILGLIWTIILHFHIEKLAQTLSCNYNQPSLDDVSVVDSSPASSPPAKKCSKVQARWQMSARKALLLWAQEQCATYESVNVTDFKSSWRNGMAFLAIIHALRPDLIDMKSVKHRSNKDNLREAFRIAEQELKIPRLLEPEAYKNF

SEQ ID NO: 42170 - protein, 667 aa, Homo sapiens
MVHEGNQRWDNLQRRVTAVLRRLRHFTNQREEFEGTRESILVWLTEMDLQLTNVEHFSESDADDKMRQLNGFQQEITLNTNKIDQLIVFGEQLIQKSEPLDAVLIEDELEELHRYCQEVFGRVSRFHRRLTSCTPGLEDEKEASENETDMEDPREIQTDSWRKRGESEEPSSPQSLCHLVAPGHERSGCETPVSVDSIPLEWDHTGDVGGSSSHEEDEEGPYYSALSGKSISDGHSWHVPDSPSCPEHHYKQMEGDRNVPPVPPASSTPYKPPYGKLLLPPGTDGGKEGPRVLNGNPQQEDGGLAGITEQQSGAFDRWEMIQAQELHNKLKIKQNLQQLNSDISAITTWLKKTEAELEMLKMAKPPSDIQEIELRVKRLQEILKAFDTYKALVVSVNVSSKEFLQTESPESTELQSRLRQLSLLWEAAQGAVDSWRGGLRQSLMQCQDFHQLSQNLLLWLASAKNRRQKAHVTDPKADPRALLECRRELMQLEKELVERQPQVDMLQEISNSLLIKGHGEDCIEAEEKVHVIEKKLKQLREQVSQDLMALQGTQNPASPLPSFDEVDSGDQPPATSVPAPRAKFRAVRTTEGEEETESRVPGSTRPQRSFLSRVVRAALPLQLLLLLLLLLACLLPSSEEDYSCTQANNFARSFYPMLRYTNGPPPT

SEQ ID NO: 42171 - protein, 451 aa, Homo sapiens
MTTKTLKASSGKSISDGHSWHVPDSPSCPEHHYKQMEGDRNVPPVPPASSTPYKPPYGKLLLPPGTDGGKEGPRVLNGNPQQEDGGLAGITEQQSGAFDRWEMIQAQELHNKLKIKQNLQQLNSDISAITTWLKKTEAELEMLKMAKPPSDIQEIELRVKRLQEILKAFDTYKALVVSVNVSSKEFLQTESPESTELQSRLRQLSLLWEAAQGAVDSWRGGLRQSLMQCQDFHQLSQNLLLWLASAKNRRQKAHVTDPKADPRALLECRRELMQLEKELVERQPQVDMLQEISNSLLIKGHGEDCIEAEEKVHVIEKKLKQLREQVSQDLMALQGTQNPASPLPSFDEVDSGDQPPATSVPAPRAKQFRAVRTTEGEEETESRVPGSTRPQRSFLSRVVRAALPLQLLLLLLLLLACLLPSSEEDYSCTQANNFARSFYPMLRYTNGPPPT

SEQ ID NO: 42172 - protein, 542 aa, Homo sapiens
MEDPREIQTDSWRKRGESEEPSSPQSLCHLVAPGHERSGCETPVSVDSIPLEWDHTGDVGGSSSHEEDEEGPYYSALSDVEIPENPEAYLKMTTKTLKASSGKSISDGHSWHVPDSPSCPEHHYKQMEGDRNVPPVPPASSTPYKPPYGKLLLPPGTDGGKEGPRVLNGNPQQEDGGLAGITEQQSGAFDRWEMIQAQELHNKLKIKQNLQQLNSDISAITTWLKKTEAELEMLKMAKPPSDIQEIELRVKRLQEILKAFDTYKALVVSVNVSSKEFLQTESPESTELQSRLRQLSLLWEAAQGAVDSWRGGLRQSLMQCQDFHQLSQNLLLWLASAKNRRQKAHVTDPKADPRALLECRRELMQLEKELVERQPQVDMLQEISNSLLIKGHGEDCIEAEEKVHVIEKKLKQLREQVSQDLMALQGTQNPASPLPSFDEVDSGDQPPATSVPAPRAKQFRAVRTTEGEEETESRVPGSTRPQRSFLSRVVRAALPLQLLLLLLLLLACLLPSSEEDYSCTQANNFARSFYPMLRYTNGPPPT

SEQ ID NO: 42173 - protein, 1035 aa, Homo sapiens
MQELEQSLASWTQNLKELQTMKADLTRHVLVEDVMVLKEQIEHLHRQWEDLCLRVAIRKQEIEDRLNTWVVFNEKNKELCAWLVQMENKVLQTADISIEEMIEKLQKDCMEEINLFSENKLQLKQMGDQLIKASNKSRAAEIDDKLNKINDRWQHLFDVIGSRVKKLKETFAFIQQLDKNMSNLRTWLARIESELSKPVVYDVCDDQEIQKRLAEQQDLQRDIEQHSAGVESVFNICDVLLHDSDACANETECDSIQQTTRSLDRRWRNICAMSMERRMKIEETWRLWQKFLDDYSRFEDWLKSAERTAACPNSSEVLYTSAKEELKRFEAFQRQIHERLTQLELINKQYRRLARENRTDTASRLKQMVHEGNQRWDNLQRRVTAVLRRLRHFTNQREEFEGTRESILVWLTEMDLQLTNVEHFSESDADDKMRQLNGFQQEITLNTNKIDQLIVFGEQLIQKSEPLDAVLIEDELEELHRYCQEVFGRVSRFHRRLTSCTPGLEDEKEASENETDMEDPREIQTDSWRKRGESEEPSSPQSLCHLVAPGHERSGCETPVSVDSIPLEWDHTGDVGGSSSHEEDEEGPYYSALSGKSISDGHSWHVPDSPSCPEHHYKQMEGDRNVPPVPPASSTPYKPPYGKLLLPPGTDGGKEGPRVLNGNPQQEDGGLAGITEQQSGAFDRWEMIQAQELHNKLKIKQNLQQLNSDISAITTWLKKTEAELEMLKMAKPPSDIQEIELRVKRLQEILKAFDTYKALVVSVNVSSKEFLQTESPESTELQSRLRQLSLLWEAAQGAVDSWRGGLRQSLMQCQDFHQLSQNLLLWLASAKNRRQKAHVTDPKADPRALLECRRELMQLEKELVERQPQVDMLQEISNSLLIKGHGEDCIEAEEKVHVIEKKLKQLREQVSQDLMALQGTQNPASPLPSFDEVDSGDQPPATSVPAPRAKQFRAVRTTEGEEETESRVPGSTRPQRSFLSRVVRAALPLQLLLLLLLLLACLLPSSEEDYSCTQANNFARSFYPMLRYTNGPPPT

SEQ ID NO: 42174 - protein, 133 aa, Homo sapiens [sequence omitted]

SEQ ID NO: 42175 - protein, 419 aa, Homo sapiens
MRNIFKRNQEPIVAPATTTATMPIGPVDNSTESGGAGESQEDMFAKLKEKLFNEINKIPLPPWALIAIAVVAGLLLLTCCFCICKKCCCKKKKNKKEKGKGMKNAMNMKDMKGGQDDDDAETGLTEGEGEGEEEKEPENLGKLQFSLDYDFQANQLTVGVLQAAELPALDMGGTSDPYVKVFLLPDKKKKYETKVHRKTLNPAFNETFTFKVPYQELGGKTLVMAIYDFDRFSKHDIIGEVKVPMNTVDLGQPIEEWRDLQGGEKEEPEKLGDICTSLRYVPTAGKLTVCILEAKNLKKMDVGGLSDPYVKIHLMQNGKRLKKKKTTVKKKTLNPYFNESFSFEIPFEQIQKVQVVVTVLDYDKLGKNEAIGKIFVGSNATGTELRHWSDMLANPRRPIAQWHSLKPEEEVDALLGKNK

SEQ ID NO: 42176 - protein, 201 aa, Homo sapiens
MGSRKCGGCLSCLLIPLALWSIIVNILLYFPNGQTSYASSNKLTNYVWYFEGICFSGIMMLIVTTVLLVLENNNNYKCCQSENCSKKYVTLLSIIFSSLGIAFSGYCLVISALGLVQGPYCRTLDGWEYAFEGTAGRFLTDSSIWIQCLEPAHVVEWNIILFSILITLSGLQVIICLIRVVMQLSKILCGSYSVIFQPGII

SEQ ID NO: 42177 - protein, 131 aa, Homo sapiens
MSKRYLQKATKGKLLIIIFIVTLWGKVVSSANHHKAHHVKTGTCEVVALHRCCNKNKIEERSQTVKCSCFPGQVAGTTRAAPSCVDASIVEQKWWCHMQPCLEGEECKVLPDRKGWSCSSGNKVKTTRVTH

SEQ ID NO: 42178 - protein, 34 aa, Homo sapiens
MQPCLEGEECKVLPDRKGWSCSSGNKVKTTRVTH

SEQ ID NO: 42179 - protein, 975 aa, Homo sapiens
MTQQPQDDFDRSVEDAQAWMKAVQDQLQVNDNTQGPRAALEARLWETEKICQLEPEGRVRVDLVLRMAEALLACCPGDQKPGILARLKDIKAQWEETVTYMTHCHSRIEWVWLHWSEYLLARDEFYRWFQKMMVTLEPHIELQLGLKEKQWQLSHAQVLLHNVDNQAVLLDRLLEEAASLFNRIGDPSVDEDAQKRMKAEYDAVKAKAQKRVDLLEQVAREHEEYQAGVDEFQLWLKAVVEKVNGCLGRNCKLPITQRLSTLQDIAKDFPRGEESLETLEEQSAGVIRNTSPLGAEKITGELEEMRKVLEKLRALWEEEEERLRGLLRSRGAWEQQIKQLEAELSEFRMVLQRLAQEGLQPAAKAGTEDELVAHWRRYSATRAALASEEPRVDRLQAQLKELIVFPHNLKPLSDSVIATIQEYQSLKVKSARLRNAAAVELWQHFQRPLQDLQLWKALAQRLLEVTASLPDLPSLHTFLPQIEAALMESSRLKELLTMLQLKKDLLIGIFGQERATALLEQVAGSMRDRDLLHNSLLQRKSKLQSLLAQHKDFGAAFEPLQRKLLDLQVRVQAEKGLQRDLPGKQAQLSRLQGLQEEGLDLGAQMEAARPLVQENPNHQHKMDQLSSDFQALQRSLEDLVDRCRQSVQEHCTFSHQLLELRQWIVVTTQKLEAHRGEAGPGDAESQEAEFERLVAEFPEKEAQLSLVEAQGWLVMEKSSPEGAAVVQEELRELAESWRALRLLEESLLSLIRNWHLQRMEVDSGKKMVFTNNIPKSGFLINPMDPIPRHRRRANLLQEEEGSHEDFSQLLRNFGQWLQVENSKLVRIIAMRTSTAEDLRTRKSKLQELEARVPEGQHLFENLLRLGPARGTSDELEDLRYQWMLYKSKLKDSGHLLTQSSPGEPTGFQKTRRWRGLGSLFRRACCVALPLQLLLLLFLLLLFLLPIREEDRSCTLANNFARSFTLMLRYNGPPPT

SEQ ID NO: 42180 - protein, 970 aa, Homo sapiens
MTQQPQDDFDRSVEDAQAWMKAVQDQLQVNDNTQGPRAALEARLWETEKICQLEPEGRVRVDLVLRMAEALLACCPGDQKPGILARLKDIKAQWEETVTYMTHCHSRIEWVWLHWSEYLLARDEFYRWFQKMMVTLEPHIELQLGLKEKQWQLSHAQVLLHNVDNQAVLLDRLLEEAASLFNRIGDPSVDEDAQKRMKAEYDAVKAKAQKRVDLLEQVAREHEEYQAGVDEFQLWLKAVVEKVNGCLGRNCKLPITQRLSTLQDIAKDFPRGEESLETLEEQSAGVIRNTSPLGAEKITGELEEMRKVLEKLRALWEEEEERLRGLLRSRGAWEQQIKQLEAELSEFRMVLQRLAQEGLQPAAKAGTEDELVAHWRRYSATRAALASEEPRVDRLQAQLKELIVFPHNLKPLSDSVIATIQEYQSLKVKSARLRNAAAVELWQHFQRPLQDLQLWKALAQRLLEVTASLPDLPSLHTFLPQIEAALMESSRLKELLTMLQLKKDLLIGIFGQERATALLEQVAGSMRDRDLLHNSLLQRKSKLQSLLAQHKDFGAAFEPLQRKLLDLQVRVQAEKGLQRDLPGKQAQLSRLQGLQEEGLDLGAQMEAARPLVQENPNHQHKMDQLSSDFQALQRSLEDLVDRCRQSVQEHCTFSHQLLELRQWIVVTTQKLEAHRGEAGPGDAESQEAEFERLVAEFPEKEAQLSLVEAQGWLVMEKSSPEGAAVVQEELRELAESWRALRLLEESLLSLIRNWHLQRMEVDSGKKMVFTNNIPKSGFLINPMDPIPRHRRREEEGSHEDFSQLLRNFGQWLQVENSKLVRIIAMRTSTAEDLRTRKSKLQELEARVPEGQHLFENLLRLGPARGTSDELEDLRYQWMLYKSKLKDSGHLLTQSSPGEPTGFQKTRRWRGLGSLFRRACCVALPLQLLLLLFLLLLFLLPIREEDRSCTLANNFARSFTLMLRYNGPPPT

SEQ ID NO: 42181 - protein, 596 aa, Homo sapiens
MTQQPQDDFDRSVEDAQAWMKAVQDQLQVNDNTQGPRAALEARLWETEKICQLEPEGRVRVDLVLRMAEALLACCPGDQKPGILARLKDIKAQWEETVTYMTHCHSRIEWVWLHWSEYLLARDEFYRWFQKMMVTLEPHIELQLGLKEKQWQLSHAQVLLHNVDNQAVLLDRLLEEAASLFNRIGDPSVDEDAQKRMKAEYDAVKAKAQKRVDLLEQVAREHEEYQAGVDEFQLWLKAVVEKVNGCLGRNCKLPITQRLSTLQDIAKDFPRGEESLETLEEQSAGVIRNTSPLGAEKITGELEEMRKVLEKLRALWEEEEERLRGLLRSRGAWEQQIKQLEAELSEFRMVLQRLAQEGLQPAAKAGTEDELVAHWRRYSATRAALASEEPRVDRLQAQLKELIVFPHNLKPLSDSVIATIQEYQSLKVKSARLRNAAAVELWQHFQRPLQDLQLWKALAQRLLEVTASLPDLPSLHTFLPQIEAALMESSRLKELLTMLQLKKDLLIGIFGQERATALLEQVAGSMRDRDLLHNSLLQRKSKLQSLLAQHKDFGAAFEPLQRKLLDLQVRVQAEKGLQRDLPGKQAQLSRLQVRGL

SEQ ID NO: 42182 - protein, 209 aa, Homo sapiens
MVSSPCTQASSRTCSRILGLSLGTAALFAAGANVALLLPNWDVTYLLRGLLGRHAMLGTGLWGGGLMVLTAAILISLMGWRYGCFSKSGLCRSVLTALLSGGLALLGALICFVTSGVALKDGPFCMFDVSSFNQTQAWKYGYPFKDLHSRNYLYDRSLWNSVCLEPSAAVVWHVSLFSALLCISLLQLLLVVVHVINSLLGLFCSLCEK

SEQ ID NO: 42183 - protein, 183 aa, Homo sapiens
MVSSPCTQASSRTCSRILGLSLGTAALFAAGANVALLLPNWDVTYLLRGLLGRHAMLGTGLWGGGLMVLTALLSGGLALLGALICFVTSGVALKDGPFCMFDVSSFNQTQAWKYGYPFKDLHSRNYLYDRSLWNSVCLEPSAAVVWHVSLFSALLCISLLQLLLVVVHVINSLLGLFCSLCEK

SEQ ID NO: 42184 - protein, 202 aa, Homo sapiens
MCYGKCARCIGHSLVGLALLCIAANILLYFPNGETKYASENHLSRFVWFFSGIVGGGLLMLLPAFVFIGLEQDDCCGCCGHENCGKRCAMLSSVLAALIGIAGSGYCVIVAALGLAEGPLCLDSLGQWNYTFASTEGQYLLDTSTWSECTEPKHIVEWNVSLFSILLALGGIEFILCLIQVINGVLGGICGFCCSHQQQYDC

SEQ ID NO: 42185 - protein, 133 aa, Homo sapiens
MSERVERNWSTGGWLLALCLAWLWTHLTLAALQPPTATVLVQQGTCEVIAAHRCCNRNRIEERSQTVKCSCFSGQVAGTTRAKPSCVDASIVLQRWWCQMEPCLPGEECKVLPDLSGWSCSSGHKVKTTKVTR

SEQ ID NO: 42186 - protein, 169 aa, Homo sapiens
MSERVERNWSTGGWLLALCLAWLWTHLTLAALQPPTATVLVQQGTCEVIAAHRCCNRNRIEERSQTVKCSCFSGQVAGTTRAKPSCVDDLLLAAHCARRDPRAALRLLLPQPPSSCRDGGVRWSPACRGRSVRCSRTCRDGAAAVDTKSKPPRSHDSSWGSRPGQERLD

SEQ ID NO: 42187 - protein, 404 aa, Homo sapiens
MALSLPLGPRLGSEPLNHPPGAPREADIVGCTVCPASGEESTSPEQAQTLGQDSLGPPEHFQGGPRGNEPAAHPPRWSTPSSYEDPAGGKHCEHPISGLEVLEAEQNSLHLCLLGLGRRLQDLEQGLGHWALAQSGMVQLQALQVDLRGAAERVEALLAFGEGLAQRSEPRAWAALEQILRALGAYRDSIFRRLWQLQAQLVSYSLVFEEANTLDQDLEVEGDSDWPGPGGVWGPWAPSSLPTSTELEWDPAGDIGGLGPLGQKTARTLGVPCELCGQRGPQGRGQGLEEADTSHSRQDMLESGLGHQKRLARHQRHSLLRKPQDKKRQASPHLQDVRLEGNPGAPDPASRQPLTFLLILFLLFLLLVGAMFLLPASGGPCCSHARIPRTPYLVLSYVNGLPPV

SEQ ID NO: 42188 - protein, 291 aa, Homo sapiens
MALSLPLGPRLGSEPLNHPPGAPREADIVGCTVCPASGEESTSPEQAQTLGQDSLGPPEHFQGGPRGNEPAAHPPRWSTPSSYEDPAGGKHCEVFEEANTLDQDLEVEGDSDWPGPGGVWGPWAPSSLPTSTELEWDPAGDIGGLGPLGQKTARTLGVPCELCGQRGPQGRGQGLEEADTSHSRQDMLESGLGHQKRLARHQRHSLLRKPQDKKRQASPHLQDVRLEGNPGAPDPASRQPLTFLLILFLLFLLLVGAMFLLPASGGPCCSHARIPRTPYLVLSYVNGLPPV

SEQ ID NO: 42189 - protein, 140 aa, Homo sapiens
MRSPRMRVCAKSVLLSHWLFLAYVLMVCCKLMSASSQHLRGHAGHHQIKQGTCEVVAVHRCCNKNRIEERSQTVKCSCFPGQVAGTTRAQPSCVEASIVIQKWWCHMNPCLEGEDCKVLPDYSGWSCSSGNKVKTTKVTR

SEQ ID NO: 42190 - protein, 590 aa, Homo sapiens
MSGDYEDDLCRRALILVSDLCARVRDADTNDRCQEFNDRIRGYPRGPDADISVSLLSVIVTFCGIVLLGVSLFVSWKLCWVPWRDKGGSAVGGGPLRKDLGPGVGLAGLVGGGGHHLAAGLGGHPLLGGPHHHAHAAHHPPFAELLEPGSLGGSDTPEPSYLDMDSYPEAAAAAVAAGVKPSQTSPELPSEGGAGSGLLLLPPSGGGLPSAQSHQQVTSLAPTTRYPALPRPLTQQTLTSQPDPSSEERPPALPLPLPGGEEKAKLIGQIKPELYQGTGPGGRRSGGGPGSGEAGTGAPCGRISFALRYLYGSDQLVVRILQALDLPAKDSNGFSDPYVKIYLLPDRKKKFQTKVHRKTLNPVFNETFQFSVPLAELAQRKLHFSVYDFDRFSRHDLIGQVVLDNLLELAEQPPDRPLWRDIVEGGSEKADLGELNFSLCYLPTAGRLTVTIIKASNLKAMDLTGFSDPYVKASLISEGRRLKKRKTSIKKNTLNPTYNEALVFDVAPESVENVGLSIAVVDYDCIGHNEVIGVCRVGPDAADPHGREHWAEMLANPRKPVEHWHQLVEEKTVTSFTKGSKGLSEKENSE

SEQ ID NO: 42191 - protein, 229 aa, Homo sapiens
MTCCEGWTSCNGFSLLVLLLLGVVLNAIPLIVSLVEEDQFSQNPISCFEWWFPGIIGAGLMAIPATTMSLTARKRACCNNRTGMFLSSLFSVITVIGALYCMLISIQALLKGPLMCNSPSNSNANCEFSLKNISDIHPESFNLQWFFNDSCAPPTGFNKPTSNDTMASGWRASSFHFDSEENKHRLIHFSVFLGLLLVGILEVLFGLSQIVIGFLGCLCGVSKRRSQIV

SEQ ID NO: 42192 - protein, 1565 aa, Homo sapiens [sequence omitted]

SEQ ID NO: 42193 - protein, 1253 aa, Homo sapiens [sequence omitted]

SEQ ID NO: 42194 - protein, 339 aa, Homo sapiens [sequence omitted]

SEQ ID NO: 42195 - protein, 202 aa, Homo sapiens
MCTGGCARCLGGTLIPLAFFGFLANILLFFPGGKVIDDNDHLSQEIWFFGGILGSGVLMIFPALVFLGLKNNDCCGCCGNEGCGKRFAMFTSTIFAVVGFLGAGYSFIISAISINKGPKCLMANSTWGYPFHDGDYLNDEALWNKCREPLNVVPWNLTLFSILLVVGGIQMVLCAIQVVNGLLGTLCGDCQCCGCCGGDGPV

SEQ ID NO: 42196 - protein, 132 aa, Homo sapiens
MAPSPRTGSRQDATALPSMSSTFWAFMILASLLIAYCSQLAAGTCEIVTLDRDSSQPRRTIARQTARCACRKGQIAGTTRARPACVDARIIKTKQWCDMLPCLEGEGCDLLINRSGWTCTQPGGRIKTTTVS

SEQ ID NO: 42197 - protein, 125 aa, Homo sapiens
MQLLKALWALAGAALCCFLVLVIHAQFLKEGQLAAGTCEIVTLDRDSSQPRRTIARQTARCACRKGQIAGTTRARPACVDARIIKTKQWCDMLPCLEGEGCDLLINRSGWTCTQPGGRIKTTTVS

SEQ ID NO: 42198 - protein, 53 aa, Homo sapiens
MYHHREWPARIIKTKQWCDMLPCLEGEGCDLLINRSGWTCTQPGGRIKTTTVS

SEQ ID NO: 42199 - protein, 197 aa, Homo sapiens
MCTGKCARCVGLSLITLCLVCIVANALLLVPNGETSWTNTNHLSLQVWLMGGFIGGGLMVLCPGIAAVRAGGKGCCGAGCCGNRCRMLRSVFSSAFGVLGAIYCLSVSGAGLRNGPRCLMNGEWGYHFEDTAGAYLLNRTLWDRCEAPPRVVPWNVTLFSLLVAASCLEIVLCGIQLVNATIGVFCGDCRKKQDTPH

SEQ ID NO: 42200 - protein, 258 aa, Homo sapiens
MDGIIEQKSMLVHSKISDAGKRNGLINTRNLMAESRDGLVSVYPAPQYQSHRVGASTVPASLDSSRSEPMQQLLDPNTLQQSVESRYRPNIILYSEGVLRSWGDGVAADCCETTFIEDRSPTKDSLEYPDGKFIDLSADDIKIHTLSYDVEEEEEFQELESDYSSDTESEDNFLMMPPRDHLGLSVFSMLCCFWPLGIAAFYLSHETNKAVAKGDLHQASTSSRRALFLAVLSITIGTGVYVGVAVALIAYLSKNNHL

SEQ ID NO: 42201 - protein, 425 aa, Homo sapiens
MAPITTSREEFDEIPTVVGIFSAFGLVFTVSLFAWICCQRKSSKSNKTPPYKFVHVLKGVDIYPENLNSKKKFGADDKNEVKNKPAVPKNSLHLDLEKRDLNGNFPKTNLKPGSPSDLENATPKLFLEGEKESVSPESLKSSTSLTSEEKQEKLGTLFFSLEYNFERKAFVVNIKEARGLPAMDEQSMTSDPYIKMTILPEKKHKVKTRVLRKTLDPAFDETFTFYGIPYTQIQELALHFTILSFDRFSRDDIIGEVLIPLSGIELSEGKMLMNREIIKRNVRKSSGRGELLISLCYQSTTNTLTVVVLKARHLPKSDVSGLSDPYVKVNLYHAKKRISKKKTHVKKCTPNAVFNELFVFDIPCEGLEDISVEFLVLDSERGSRNEVIGQLVLGAAAEGTGGEHWKEICDYPRRQIAKWHVLCDG

SEQ ID NO: 42202 - protein, 407 aa, Homo sapiens
MAPITTSREEFVSLFAWICCQRKSSKSNKTPPYKFVHVLKGVDIYPENLNSKKKFGADDKNEVKNKPAVPKNSLHLDLEKRDLNGNFPKTNLKPGSPSDLENATPKLFLEGEKESVSPESLKSSTSLTSEEKQEKLGTLFFSLEYNFERKAFVVNIKEARGLPAMDEQSMTSDPYIKMTILPEKKHKVKTRVLRKTLDPAFDETFTFYGIPYTQIQELALHFTILSFDRFSRDDIIGEVLIPLSGIELSEGKMLMNREIIKRNVRKSSGRGELLISLCYQSTTNTLTVVVLKARHLPKSDVSGLSDPYVKVNLYHAKKRISKKKTHVKKCTPNAVFNELFVFDIPCEGLEDISVEFLVLDSERGSRNEVIGQLVLGAAAEGTGGEHWKEICDYPRRQIAKWHVLCDG

SEQ ID NO: 42203 - protein, 124 aa, Homo sapiens
MRASPCISQPAASWHPRPSALRPTAGSGPDTRTPGTVEDGSAPCPAFRSPAVSPCGEEPCCFQISPAEETLELGRLVSPGNCDTLSPRAAGFYACHVRSLIPCRSTKGRWPLTASAAGLSSFSG

SEQ ID NO: 42204 - protein, 132 aa, Homo sapiens
MRASPCISQPAASWHPRPSALRPTAGSGPDTRTPGTVEDGSAPCPAFRSPAVSPCGEEPCCFQISPAEETLELGRLVSPGNCDTLSPRAAGFYACHVRSLIPCRSTKGRWPLTASAAGLSRHAQCGPSLGLG

SEQ ID NO: 42205 - protein, 102 aa, Homo sapiens
MRASPCISQPAASWHPRPSALRPTAGSGPDTRTPGTVEDGSAPCPAFRSPAVSPCGEEPCCFQISPAEETLELGRLVSPGCHKSSAPQERRLDPRARCVVHI

SEQ ID NO: 42206 - protein, 290 aa, Homo sapiens [sequence omitted]

SEQ ID NO: 42207 - protein, 240 aa, Homo sapiens
MFQRLNKMFVGEVSSSSNQEPEFNEKEDDEWILVDFIDTCTGFSAEEEEEEEDISEESPTEHPSVFSCLPASLECLADTSDSCFLQFESCPMEESWFITPPPCFTAGGLTTIKVETSPMENLLIEHPSMSVYAVHNSCPGLSEATRGTDELHSPSSPRVEAQNEMGQHIHCYVAALAAHTTFLEQPKSFRPSQWIKEHSERQPLNRNSLRRQNLTRDCHPRQVKHNGWVVHQPCPRQYNY

SEQ ID NO: 42208 - protein, 164 aa, Homo sapiens
MFQRLNKMFVGEVSSSSNQEPEFNEKEDDEWILVDFIDTCTGFSAEEEEEEEDISEESPTEHPSVFSCLPASLECLADTSDSCFLQFESCPMEESWFITPPPCFTAGGLTTIKVETSPMENLLIEHPSMSVYAVHNSCPGLSEATRGTDELHSPSSPRARKSCL

SEQ ID NO: 42209 - protein, 1573 aa, Homo sapiens
MAFSKGFRIYHKLDPPPFSLIVETRHKEECLMFESGAVAVLSSAEKEAIKGTYSKVLDAYGLLGVLRLNLGDTMLHYLVLVTGCMSVGKIQESEVFRVTSTEFISLRIDSSDEDRISEVRKVLNSGNFYFAWSASGISLDLSLNAHRSMQEQTTDNRFFWNQSLHLHLKHYGVNCDDWLLRLMCGGVEIRTIYAAHKQAKACLISRLSCERAGTRFNVRGTNDDGHVANFVETEQVVYLDDSVSSFIQIRGSVPLFWEQPGLQVGSHRVRMSRGFEANAPAFDRHFRTLKNLYGKQIIVNLLGSKEGEHMLSKAFQSHLKASEHAADIQMVNFDYHQMVKGGKAEKLHSVLKPQVQKFLDYGFFYFNGSEVQRCQSGTVRTNCLDCLDRTNSVQAFLGLEMLAKQLEALGLAEKPQLVTRFQEVFRSMWSVNGDSISKIYAGTGALEGKAKLKDGARSVTRTIQNNFFDSSKQEAIDVLLLGNTLNSDLADKARALLTTGSLRVSEQTLQSASSKVLKSMCENFYKYSKPKKIRVCVGTWNVNGGKQFRSIAFKNQTLTDWLLDAPKLAGIQEFQDKRSKPTDIFAIGFEEMVELNAGNIVSASTTNQKLWAVELQKTISRDNKYVLLASEQLVGVCLFVFIRPQHAPFIRDVAVDTVKTGMGGATGNKGAVAIRMLFHTTSLCFVCSHFAAGQSQVKERNEDFIEIARKLSFPMGRMLFSHDYVFWCGDFNYRIDLPNEEVKELIRQQNWDSLIAGDQLINQKNAGQVFRGFLEGKVTFAPTYKYDLFSDDYDTSEKCRTPAWTDRVLWRRRKWPFDRSAEDLDLLNASFQDESKILYTWTPGTLLHYGRAELKTSDHRPVVALIDIDIFEVEAEERQNIYKEVIAVQGPPDGTVLVSIKSSLPENNFFDDALIDELLQQFASFGEVILIRFVEDKMWVTFLEGSSALNVLSLNGKELLNRTITIALKSPDWIKNLEEEMSLEKISIALPSSTSSTLLGEDAEVAADFDMEGDVDDYSAEVEELLPQHLQPSSSSGLGTSPSSSPRTSPCQSPTISEGPVPSLPIRPSRAPSRTPGPPSAQSSPIDAQPATPLPQKDPAQPLEPKRPPPPRPVAPPTRPAPPQRPPPPSGARSPAPTRKEFGGIGAPPSPGVARREMEAPKSPGTTRKDNIGRSQPSPQAGLAGPGPAGYSTARPTIPPRAGVISAPQSHARASAGRLTPESQSKTSETSKGSTFLPEPLKPQAAFPPQSSLPPPAQRLQEPLVPVAAPMPQSGPQPNLETPPQPPPRSRSSHSLPSEASSQPQVKTNGISDGKRESPLKIDPFEDLSFNLLAVSKAQLSVQTSPVPTPDPKRLIQLPSATQSNVLSSVSCMPTMPPIPARSQSQENMRSSPNPFITGLTRTNPFSDRTAAPGNPFRAKSEESEATSWFSKEEPVTISPFPSLQPLGHNKSRASSSLDGFKDSFDLQGQSTLKISNPKGWVTFEEEEDFGVKGKSKSACSDLLGNQPSSFSGSNLTLNDDWNKGTNVSFCVLPSRRPPPPPVPLLPPGTSPPVDPFTTLASKASPTLDFTER

SEQ ID NO: 42210 - protein, 1311 aa, Homo sapiens
MAFSKGFRIYHKLDPPPFSLIVETRHKEECLMFESGAVAVLSSAEKEAIKGTYSKVLDAYGLLGVLRLNLGDTMLHYLVLVTGCMSVGKIQESEVFRVTSTEFISLRIDSSDEDRISEVRKVLNSGNFYFAWSASGISLDLSLNAHRSMQEQTTDNRFFWNQSLHLHLKHYGVNCDDWLLRLMCGGVEIRTIYAAHKQAKACLISRLSCERAGTRFNVRGTNDDGHVANFVETEQVVYLDDSVSSFIQIRGSVPLFWEQPGLQVGSHRVRMSRGFEANAPAFDRHFRTLKNLYGKQIIVNLLGSKEGEHMLSKAFQSHLKASEHAADIQMVNFDYHQMVKGGKAEKLHSVLKPQVQKFLDYGFFYFNGSEVQRCQSGTVRTNCLDCLDRTNSVQAFLGLEMLAKQLEALGLAEKPQLVTRFQEVFRSMWSVNGDSISKIYAGTGALEGKAKLKDGARSVTRTIQNNFFDSSKQEAIDVLLLGNTLNSDLADKARALLTTGSLRVSEQTLQSASSKVLKSMCENFYKYSKPKKIRVCVGTWNVNGGKQFRSIAFKNQTLTDWLLDAPKLAGIQEFQDKRSKPTDIFAIGFEEMVELNAGNIVSASTTNQKLWAVELQKTISRDNKYVLLASEQLVGVCLFVFIRPQHAPFIRDVAVDTVKTGMGGATGNKGAVAIRMLFHTTSLCFVCSHFAAGQSQVKERNEDFIEIARKLSFPMGRMLFSHDYVFWCGDFNYRIDLPNEEVKELIRQQNWDSLIAGDQLINQKNAGQVFRGFLEGKVTFAPTYKYDLFSDDYDTSEKCRTPAWTDRVLWRRRKWPFDRSAEDLDLLNASFQDESKILYTWTPGTLLHYGRAELKTSDHRPVVALIDIDIFEVEAEERQNIYKEVIAVQGPPDGTVLVSIKSSLPENNFFDDALIDELLQQFASFGEVILIRFVEDKMWVTFLEGSSALNVLSLNGKELLNRTITIALKSPDWIKNLEEEMSLEKISIALPSSTSSTLLGEDAEVAADFDMEGDVDDYSAEVEELLPQHLQPSSSSGLGTSPSSSPRTSPCQSPTISEGPVPSLPIRPSRAPSRTPGPPSAQSSPIDAQPATPLPQKDPAQPLEPKRPPPPRPVAPPTRPAPPQRPPPPSGARSPAPTRKEFGGIGAPPSPGVARREMEAPKSPGTTRKDNIGRSQPSPQAGLAGPGPAGYSTARPTIPPRAGVISAPQSHARASAGRLTPESQSKTSETSKGSTFLPEPLKPQAAFPPQSSLPPPAQRLQEPLVPVAAPMPQSGPQPNLETPPQPPPRSRSSHSLPSEASSQPQQEQPSG

SEQ ID NO: 42211 - protein, 1295 aa, Homo sapiens
MAFSKGFRIYHKLDPPPFSLIVETRHKEECLMFESGAVAVLSSAEKEAIKGTYSKVLDAYGLLGVLRLNLGDTMLHYLVLVTGCMSVGKIQESEVFRVTSTEFISLRIDSSDEDRISEVRKVLNSGNFYFAWSASGISLDLSLNAHRSMQEQTTDNRFFWNQSLHLHLKHYGVNCDDWLLRLMCGGVEIRTIYAAHKQAKACLISRLSCERAGTRFNVRGTNDDGHVANFVETEQVVYLDDSVSSFIQIRGSVPLFWEQPGLQVGSHRVRMSRGFEANAPAFDRHFRTLKNLYGKQIIVNLLGSKEGEHMLSKAFQSHLKASEHAADIQMVNFDYHQMVKGGKAEKLHSVLKPQVQKFLDYGFFYFNGSEVQRCQSGTVRTNCLDCLDRTNSVQAFLGLEMLAKQLEALGLAEKPQLVTRFQEVFRSMWSVNGDSISKIYAGTGALEGKAKLKDGARSVTRTIQNNFFDSSKQEAIDVLLLGNTLNSDLADKARALLTTGSLRVSEQTLQSASSKVLKSMCENFYKYSKPKKIRVCVGTWNVNGGKQFRSIAFKNQTLTDWLLDAPKLAGIQEFQDKRSKPTDIFAIGFEEMVELNAGNIVSASTTNQKLWAVELQKTISRDNKYVLLASEQLVGVCLFVFIRPQHAPFIRDVAVDTVKTGMGGATGNKGAVAIRMLFHTTSLCFVCSHFAAGQSQVKERNEDFIEIARKLSFPMGRMLFSHDYVFWCGDFNYRIDLPNEEVKELIRQQNWDSLIAGDQLINQKNAGQVFRGFLEGKVTFAPTYKYDLFSDDYDTSEKCRTPAWTDRVLWRRRKWPFDRSAEDLDLLNASFQDESKILYTWTPGTLLHYGRAELKTSDHRPVVALIDIDIFEVEAEERQNIYKEVIAVQGPPDGTVLVSIKSSLPENNFFDDALIDELLQQFASFGEVILIRFVEDKMWVTFLEGSSALNVLSLNGKELLNRTITIALKSPDWIKNLEEEMSLEKISIALPSSTSSTLLGEDAEVAADFDMEGDVDDYSAEVEELLPQHLQPSSSSGLGTSPSSSPRTSPCQSPTISEGPVPSLPIRPSRAPSRTPGPPSAQSSPIDAQPATPLPQKDPAQPLEPKRPPPPRPVAPPTRPAPPQRPPPPSGARSPAPTRKEFGAPKSPGTTRKDNIGRSQPSPQAGLAGPGPAGYSTARPTIPPRAGVISAPQSHARASAGRLTPESQSKTSETSKGSTFLPEPLKPQAAFPPQSSLPPPAQRLQEPLVPVAAPMPQSGPQPNLETPPQPPPRSRSSHSLPSEASSQPQQEQPSG

SEQ ID NO: 42212 - protein, 519 aa, Homo sapiens
MAFSKGFRIYHKLDPPPFSLIVETRHKEECLMFESGAVAVLSSAEKEAIKGTYSKVLDAYGLLGVLRLNLGDTMLHYLVLVTGCMSVGKIQESEVFRVTSTEFISLRIDSSDEDRISEVRKVLNSGNFYFAWSASGISLDLSLNAHRSMQEQTTDNRFFWNQSLHLHLKHYGVNCDDWLLRLMCGGVEIRTIYAAHKQAKACLISRLSCERAGTRFNVRGTNDDGHVANFVETEQVVYLDDSVSSFIQIRGSVPLFWEQPGLQVGSHRVRMSRGFEANAPAFDRHFRTLKNLYGKQIIVNLLGSKEGEHMLSKAFQSHLKASEHAADIQMVNFDYHQMVKGGKAEKLHSVLKPQVQKFLDYGFFYFNGSEVQRCQSGTVRTNCLDCLDRTNSVQAFLGLEMLAKQLEALGLAEKPQLVTRFQEVFRSMWSVNGDSISKIYAGTGALEGKAKAGKLKDGARSVTRTIQNNFFDSSKQEAIDVLLLGNTLNSDLADKARALLTTGSLRASSKVLKSMCENF

SEQ ID NO: 42213 - protein, 386 aa, Homo sapiens
MFPEPPTPGPPSPDTPPDSSRISHGPVPPWALATIVLVSGLLIFSCCFCLYRKSCRRRTGKKSQAQAQVHLQEVKGLGQSYIDKVQPEVEELEPAPSGPGQQVADKHELGRLQYSLDYDFQSGQLLVGILQAMGLAALDLGGSSDPYVRVYLLPDKRRRYETKVHRQTLNPHFGETFAFKVPYVELGGRVLVMAVYDFDRFSRNDAIGEVRVPMSSVDLGRPVQAWRELQAAPREEQEKLGDICFSLRYVPTAGKLTVIVLEAKNLKKMDVGGLSDPYVKVHLLQGGKKVRKKKTTIKKNTLNPYYNEAFSFEVPCDQVQKVQVELTVLDYDKLGKNEAIGRVAVGAAAGGAGLRHWADMLANPRRPIAQWHSLRPPDRVRLLPAP

SEQ ID NO: 42214 - protein, 382 aa, Homo sapiens
MTRGGCPVSARLFAQRPHGSWSSLLCVGLKGRLGWEWGTRVLECLCRKDSRTPPPCSRSPQPRGLHRPTRLPTPVASATAQVQPEVEELEPAPSGPGQQVADKHELGRLQYSLDYDFQSGQLLVGILQAMGLAALDLGGSSDPYVRVYLLPDKRRRYETKVHRQTLNPHFGETFAFKVPYVELGGRVLVMAVYDFDRFSRNDAIGEVRVPMSSVDLGRPVQAWRELQAAPREEEKLGDICFSLRYVPTAGKLTVIVLEAKNLKKMDVGGLSDPYVKVHLLQGGKKVRKKKTTIKKNTLNPYYNEAFSFEVPCDQVQKVQVELTVLDYDKLGKNEAIGRVAVGAAAGGAGLRHWADMLANPRRPIAQWHSLRPPDRVRLLPAP

SEQ ID NO: 42215 - protein, 220 aa, Homo sapiens
MFQRLSSLFFSTPSPPEDPDCPRAFVSEEDEVDGWLIIDLPDSYAAPPSPGAAPAPAGRPPPAPSLMDESWFVTPPACFTAEGPGLGPARLQSSPLEDLLIEHPSMSVYVTGSTIVLEPGSPSPLPDAALPDGDLSEGELTPARREPRAARHAAPLPARAALLEKAGQVRRLQRARQRAERHALSAKAVQRQNRARESRPRRSKNQSSFIYQPCQRQFNY

SEQ ID NO: 42216 - protein, 1496 aa, Homo sapiens
MALSKGLRLLGRLGAEGDCSVLLEARGRDDCLLFEAGTVATLAPEEKEVIKGQYGKLTDAYGCLGELRLKSGGTSLSFLVLVTGCTSVGRIPDAEIYKITATDFYPLQEEAKEEERLIALKKILSSGVFYFSWPNDGSRFDLTVRTQKQGDDSSEWGNSFFWNQLLHVPLRQHQVSCCDWLLKIICGVVTIRTVYASHKQAKACLVSRVSCERTGTRFHTRGVNDDGHVSNFVETEQMIYMDDGVSSFVQIRGSVPLFWEQPGLQVGSHHLRLHRGLEANAPAFDRHMVLLKEQYGQQVVVNLLGSRGGEEVLNRAFKKLLWASCHAGDTPMINFDFHQFAKGGKLEKLETLLRPQLKLHWEDFDVFTKGENVSPRFQKGTLRMNCLDCLDRTNTVQSFIALEVLHLQLKTLGLSSKPIVDRFVESFKAMWSLNGHSLSKVFTGSRALEGKAKVGKLKDGARSMSRTIQSNFFDGVKQEAIKLLLVGDVYGEEVADKGGMLLDSTALLVTPRILKAMTERQSEFTNFKRIRIAMGTWNVNGGKQFRSNVLRTAELTDWLLDSPQLSGATDSQDDSSPADIFAVGFEEMVELSAGNIVNASTTNKKMWGEQLQKAISRSHRYILLTSAQLVGVCLYIFVRPYHVPFIRDVAIDTVKTGMGGKAGNKGAVGIRFQFHSTSFCFICSHLTAGQSQVKERNEDYKEITQKLCFPMGRNVFSHDYVFWCGDFNYRIDLTYEEVFYFVKRQDWKKLLEFDQLQLQKSSGKIFKDFHEGAINFGPTYKYDVGSAAYDTSDKCRTPAWTDRVLWWRKKHPFDKTAGELNLLDSDLDVDTKVRHTWSPGALQYYGRAELQASDHRPVLAIVEVEVQEVDVGARERVFQEVSSFQGPLDATVVVNLQSPTLEEKNEFPEDLRTELMQTLGSYGTIVLVRINQGQMLVTFADSHSALSVLDVDGMKVKGRAVKIRPKTKDWLKGLREEIIRKRDSMAPVSPTANSCLLEENFDFTSLDYESEGDILEDDEDYLVDEFNQPGVSDSELGGDDLSDVPGPTALAPPSKSPALTKKKQHPTYKDDADLVELKRELEAVGEFRHRSPSRSLSVPNRPRPPQPPQRPPPPTGLMVKKSASDASISSGTHGQYSILQTARLLPGAPQQPPKARTGISKPYNVKQIKTTNAQEAEAAIRCLLEARGGASEEALSAVAPRDLEASSEPEPTPGAAKPETPQAPPLLPRRPPPRVPAIKKPTLRRTGKPLSPEEQFEQQTVHFTIGPPETSVEAPPVVTAPRVPPVPKPRTFQPGKAAERPSHRKPASDEAPPGAGASVPPPLEAPPLVPKVPPRRKKSAPAAFHLQVLQSNSQLLQGLTYNSSDSPSGHPPAAGTVFPQGDFLSTSSATSPDSDGTKAMKPEAAPLLGDYQDPFWNLLHHPKLLNNTWLSKSSDPLDSGTRSPKRDPIDPVSAGASAAKAELPPDHEHKTLGHWVTISDQEKRTALQVFDPLAKT

SEQ ID NO: 42217 - protein, 1451 aa, Homo sapiens
MALSKGLRLLGRLGAEGDCSVLLEARGRDDCLLFEAGTVATLAPEEKEVIKGQYGKLTDAYGCLGELRLKSGGTSLSFLVLVTGCTSVGRIPDAEIYKITATDFYPLQEEAKEEERLIALKKILSSGVFYFSWPNDGSRFDLTVRTQKQGDDSSEWGNSFFWNQLLHVPLRQHQVSCCDWLLKIICGVVTIRTVYASHKQAKACLVSRVSCERTGTRFHTRGVNDDGHVSNFVETEQMIYMDDGVSSFVQIRGSVPLFWEQPGLQVGSHHLRLHRGLEANAPAFDRHMVLLKEQYGQQVVVNLLGSRGGEEVLNRAFKKLLWASCHAGDTPMINFDFHQFAKGGKLEKLETLLRPQLKLHWEDFDVFTKGENVSPRFQKGTLRMNCLDCLDRTNTVQSFIALEVLHLQLKTLGLSSKPIVDRFVESFKAMWSLNGHSLSKVFTGSRALEGKAKVGKLKDGARSMSRTIQSNFFDGVKQEAIKLLLVGDVYGEEVADKGGMLLDSTALLVTPRILKAMTERQSEFTNFKRIRIAMGTWNVNGGKQFRSNVLRTAELTDWLLDSPQLSGATDSQDDSSPADIFAVGFEEMVELSAGNIVNASTTNKKMWGEQLQKAISRSHRYILLTSAQLVGVCLYIFVRPYHVPFIRDVAIDTVKTGMGGKAGNKGAVGIRFQFHSTSFCFICSHLTAGQSQVKERNEDYKEITQKLCFPMGRNVFSHDYVFWCGDFNYRIDLTYEEVFYFVKRQDWKKLLEFDQLQLQKSSGKIFKDFHEGAINFGPTYKYDVGSAAYDTSDKCRTPAWTDRVLWWRKKHPFDKTAGELNLLDSDLDVDTKVRHTWSPGALQYYGRAELQASDHRPVLAIVEVEVQEVDVGARERVFQEVSSFQGPLDATVVVNLQSPTLEEKNEFPEDLRTELMQTLGSYGTIVLVRINQGQMLVTFADSHSALSVLDVDGMKVKGRAVKIRPKTKDWLKGLREEIIRKRDSMAPVSPTANSCLLEENFDFTSLDYESEGDILEDDEDYLVDEFNQPGVSDSELGGDDLSDVPGPTALAPPSKSPALTKKKQHPTYKTGLMVKKSASDASISSGTHGQYSILQTARLLPGAPQQPPKARTGISKPYNVKQIKTTNAQEAEAAIRCLLEARGGASEEALSAVAPRDLEASSEPEPTPGAAKPETPQAPPLLPRRPPPRVPAIKKPTLRRTGKPLSPEEQFEQQTVHFTIGPPETSVEAPPVVTAPRVPPVPKPRTFQPGKAAERPSHRKPASDEAPPGAGASVPPPLEAPPLVPKVPPRRKKSAPAAFHLQVLQSNSQLLQGLTYNSSDSPSGHPPAAGTVFPQGDFLSTSSATSPDSDGTKAMKPEAAPLLGDYQDPFWNLLHHPKLLNNTWLSKSSDPLDSGTRSPKRDPIDPVSAGASAAKAELPPDHEHKTLGHWVTISDQEKRTALQVFDPLAKT

SEQ ID NO: 42218 - protein, 1288 aa, Homo sapiens
MALSKGLRLLGRLGAEGDCSVLLEARGRDDCLLFEAGTVATLAPEEKEVIKGQYGKLTDAYGCLGELRLKSGGTSLSFLVLVTGCTSVGRIPDAEIYKITATDFYPLQEEAKEEERLIALKKILSSGVFYFSWPNDGSRFDLTVRTQKQGDDSSEWGNSFFWNQLLHVPLRQHQVSCCDWLLKIICGVVTIRTVYASHKQAKACLVSRVSCERTGTRFHTRGVNDDGHVSNFVETEQMIYMDDGVSSFVQIRGSVPLFWEQPGLQVGSHHLRLHRGLEANAPAFDRHMVLLKEQYGQQVVVNLLGSRGGEEVLNRAFKKLLWASCHAGDTPMINFDFHQFAKGGKLEKLETLLRPQLKLHWEDFDVFTKGENVSPRFQKGTLRMNCLDCLDRTNTVQSFIALEVLHLQLKTLGLSSKPIVDRFVESFKAMWSLNGHSLSKVFTGSRALEGKAKVGKLKDGARSMSRTIQSNFFDGVKQEAIKLLLVGDVYGEEVADKGGMLLDSTALLVTPRILKAMTERQSEFTNFKRIRIAMGTWNVNGGKQFRSNVLRTAELTDWLLDSPQLSGATDSQDDSSPADIFAVGFEEMVELSAGNIVNASTTNKKMWGEQLQKAISRSHRYILLTSAQLVGVCLYIFVRPYHVPFIRDVAIDTVKTGMGGKAGNKGAVGIRFQFHSTSFCFICSHLTAGQSQVKERNEDYKEITQKLCFPMGRNVFSHDYVFWCGDFNYRIDLTYEEVFYFVKRQDWKKLLEFDQLQLQKSSGKIFKDFHEGAINFGPTYKYDVGSAAYDTSDKCRTPAWTDRVLWWRKKHPFDKTAGELNLLDSDLDVDTKVRHTWSPGALQYYGRAELQASDHRPVLAIVEVEVQEVDVGARERVFQEVSSFQGPLDATVVVNLQSPTLEEKNEFPEDLRTELMQTLGSYGTIVLVRINQGQMLVTFADSHSALSVLDVDGMKVKGRAVKIRPKTKDWLKGLREEIIRKRDSMAPVSPTANSCLLEENFDFTSLDYESEGDILEDDEDYLVDEFNQPGVSDSELGGDDLSDVPGPTALAPPSKSPALTKKKQHPTYKDDADLVELKRELEAVGEFRHRSPSRSLSVPNRPRPPQPPQRPPPPTGLMVKKSASDASISSGTHGQYSILQTARLLPGAPQQPPKARTGISKPYNVKQIKTTNAQEAEAAIRCLLEARGGASEEALSAVAPRDLEASSEPEPTPGAAKPETPQAPPLLPRRPPPRVPAIKKPTLRRTGKIVFCSRSQASQPCLLLQRHEFVRTVAAQRLASVDTSGSSV

SEQ ID NO: 42219 - protein, 510 aa, Homo sapiens
MSGVWGAGGPRCQEALAVLASLCRARPPPLGLDVETCRSFELQPPERSPSAAGAGTSVSLLAVVVIVCGVALVAVFLFLFWKLCWMPWRNKEASSPSSANPPLEALQSPSFRGNMADKLKDPSTLGFLEAAVKISHTSPDIPAEVQMSVKEHIMRHTRLQRQTTEPASSTRHTSFKRHLPRQMHVSSVDYGNELPPAAEQPTSIGRIKPELYKQKSVDGEDAKSEATKSCGKINFSLRYDYETETLIVRILKAFDLPAKDFCGSSDPYVKIYLLPDRKCKLQTRVHRKTLNPTFDENFHFPVPYEELADRKLHLSVFDFDRFSRHDMIGEVILDNLFEASDLSRETSIWKDIQYATSESVDLGEIMFSLCYLPTAGRLTLTVIKCRNLKAMDITGYSDPYVKVSLLCDGRRLKKKKTTIKKNTLNPVYNEAIIFDIPPENMDQVSLLISVMDYDRVGHNEIIGVCRVGITAEGLGRDHWNEMLAYPRKPIAHWHSLVEVKKSFKEGNPRL

SEQ ID NO: 42220 - protein, 425 aa, Homo sapiens
MPWRNKEASSPSSANPPLEALQSPSFRGNMADKLKDPSTLGFLEAAVKISHTSPDIPAEVQMSVKEHIMRHTRLQRQTTEPASSTRHTSFKRHLPRQMHVSSVDYGNELPPAAEQPTSIGRIKPELYKQKSVDGEDAKSEATKSCGKINFSLRYDYETETLIVRILKAFDLPAKDFCGSSDPYVKIYLLPDRKCKLQTRVHRKTLNPTFDENFHFPVPYEELADRKLHLSVFDFDRFSRHDMIGEVILDNLFEASDLSRETSIWKDIQYATSESVDLGEIMFSLCYLPTAGRLTLTVIKCRNLKAMDITGYSDPYVKVSLLCDGRRLKKKKTTIKKNTLNPVYNEAIIFDIPPENMDQVSLLISVMDYDRVGHNEIIGVCRVGITAEGLGRDHWNEMLAYPRKPIAHWHSLVEVKKSFKEGNPRL

SEQ ID NO: 42221 - protein, 731 aa, Homo sapiens
MKLRSSHNASKTLNANNMETLIECQSEGDIKEHPLLASCESEDSICQLIEVKKRKKVLSWPFLMRRLSPASDFSGALETDLKASLFDQPLSIICGDSDTLPRPIQDILTILCLKGPSTEGIFRRAANEKARKELKEELNSGDAVDLERLPVHLLAVVFKDFLRSIPRKLLSSDLFEEWMGALEMQDEEDRIEALKQVADKLPRPNLLLLKHLVYVLHLISKNSEVNRMDSSNLAICIGPNMLTLENDQSLSFEAQKDLNNKVKTLVEFLIDNCFEIFGENIPVHSSITSDDSLEHTDSSDVSTLQNDSAYDSNDPDVESNSSSGISSPSRQPQVPMATAAGLDSAGPQDAREVSPEPIVSTVARLKSSLAQPDRRYSEPSMPSSQECLESRVTNQTLTKSEGDFPVPRVGSRLESEEAEDPFPEEVFPAVQGKTKRPVDLKIKNLAPGSVLPRALVLKAFSSSSLDASSDSSPVASPSSPKRNFFSRHQSFTTKTEKGKPSREIKKHSMSFTFAPHKKVLTKNLSAGSGKSQDFTRDHVPRGVRKESQLAGRIVQENGCETHNQTARGFCLRPHALSVDDVFQGADWERPGSPPSYEEAMQGPAARLVASESQTVGSMTVGSMRARMLEAHCLLPPLPPAHHVEDSRHRGSKEPLPGHGLSPLPERWKQSRTVHASGDSLGHVSGPGRPELLPLRTVSESVQRNKRDCLVRRCSQPVFEADQFQYAKESYI

SEQ ID NO: 42222 - protein, 553 aa, Homo sapiens
MGALEMQDEEDRIEALKQVADKLPRPNLLLLKHLVYVLHLISKNSEVNRMDSSNLAICIGPNMLTLENDQSLSFEAQKDLNNKVKTLVEFLIDNCFEIFGENIPVHSSITSDDSLEHTDSSDVSTLQNDSAYDSNDPDVESNSSSGISSPSRQPQVPMATAAGLDSAGPQDAREVSPEPIVSTVARLKSSLAQPDRRYSEPSMPSSQECLESRVTNQTLTKSEGDFPVPRVGSRLESEEAEDPFPEEVFPAVQGKTKRPVDLKIKNLAPGSVLPRALVLKAFSSSSLDASSDSSPVASPSSPKRNFFSRHQSFTTKTEKGKPSREIKKHSMSFTFAPHKKVLTKNLSAGSGKSQDFTRDHVPRGVRKESQLAGRIVQENGCETHNQTARGFCLRPHALSVDDVFQGADWERPGSPPSYEEAMQGPAARLVASESQTVGSMTVGSMRARMLEAHCLLPPLPPAHHVEDSRHRGSKEPLPGHGLSPLPERWKQSRTVHASGDSLGHVSGPGRPELLPLRTVSESVQRNKRDCLVRRCSQPVFEADQFQYAKESYI

SEQ ID NO: 42223 - protein, 522 aa, Homo sapiens
MAATAAAVVAEEDTELRDLLVQTLENSGVLNRIKAELRAAVFLALEEQEKVEVKTLVEFLIDNCFEIFGENIPVHSSITSDDSLEHTDSSDVSTLQNDSAYDSNDPDVESNSSSGISSPSRQPQVPMATAAGLDSAGPQDAREVSPEPIVSTVARLKSSLAQPDRRYSEPSMPSSQECLESRVTNQTLTKSEGDFPVPRVGSRLESEEAEDPFPEEVFPAVQGKTKRPVDLKIKNLAPGSVLPRALVLKAFSSSSLDASSDSSPVASPSSPKRNFFSRHQSFTTKTEKGKPSREIKKHSMSFTFAPHKKVLTKNLSAGSGKSQDFTRDHVPRGVRKESQLAGRIVQENGCETHNQTARGFCLRPHALSVDDVFQGADWERPGSPPSYEEAMQGPAARLVASESQTVGSMTVGSMRARMLEAHCLLPPLPPAHHVEDSRHRGSKEPLPGHGLSPLPERWKQSRTVHASGDSLGHVSGPGRPELLPLRTVSESVQRNKRDCLVRRCSQPVFEADQFQYAKESYI

SEQ ID NO: 42224 - protein, 266 aa, Homo sapiens
MKLRSSHNASKTLNANNMETLIECQSEGDIKEHPLLASCESEDSICQLIEVKKRKKVLSWPFLMRRLSPASDFSGALETDLKASLFDQPLSIICGDSDTLPRPIQDILTILCLKGPSTEGIFRRAANEKARKELKEELNSGDAVDLERLPVHLLAVVFKDFLRSIPRKLLSSDLFEEWMGALEMQDEEDRIEALKQVADKLPRPNLLLLKHLVYVLHLISKNSEVNRMDSSNLAICIGPNMLTLENDQSLSFEAQKDLNNKVCSAY

SEQ ID NO: 42225 - protein, 403 aa, Homo sapiens
MYRDPEAASPGAPSRDVLLVSAIITVSLSVTVVLCGLCHWCQRKLGKRYKNSLETVGTPDSGRGRSEKKAIKLPAGGKAVNTAPVPGQTPHDESDRRTEPRSSVSDLVNSLTSEMLMLSPGSEEDEAHEGCSRENLGRIQFSVGYNFQESTLTVKIMKAQELPAKDFSGTSDPFVKIYLLPDKKHKLETKVKRKNLNPHWNETFLFEGFPYEKVVQRILYLQVLDYDRFSRNDPIGEVSIPLNKVDLTQMQTFWKDLKPCSDGSGSRGELLLSLCYNPSANSIIVNIIKARNLKAMDIGGTSDPYVKVWLMYKDKRVEKKKTVTMKRNLNPIFNESFAFDIPTEKLRETTIIITVMDKDKLSRNDVIGKIYLSWKSGPGEVKHWKDMIARPRQPVAQWHQLKA

SEQ ID NO: 42226 - protein, 478 aa, Homo sapiens
MYRDPEAASPGAPSRDVLLVSAIITVSLSVTVVLCGLCHWCQRKLGKRYKNSLETVGTPDSGRGRSEKKAINGTLLSGAKVAAAAGLAVEREGRLGEKPAPVPPPGEDALRSGGAAPSEPGSGGKAGRGRWRTVQSHLAAGKLNLSKLPAGGKAVNTAPVPGQTPHDESDRRTEPRSSVSDLVNSLTSEMLMLSPGSEEDEAHEGCSRENLGRIQFSVGYNFQESTLTVKIMKAQELPAKDFSGTSDPFVKIYLLPDKKHKLETKVKRKNLNPHWNETFLFEGFPYEKVVQRILYLQVLDYDRFSRNDPIGEVSIPLNKVDLTQMQTFWKDLKPCSDGSGSRGELLLSLCYNPSANSIIVNIIKARNLKAMDIGGTSDPYVKVWLMYKDKRVEKKKTVTMKRNLNPIFNESFAFDIPTEKLRETTIIITVMDKDKLSRNDVIGKIYLSWKSGPGEVKHWKDMIARPRQPVAQWHQLKA

SEQ ID NO: 42227 - protein, 686 aa, Homo sapiens
MYRDPEAASPGAPSRDVLLVSAIITVSLSVTVVLCGLCHWCQRKLGKRYKNSLETVGTPDSGRGRSEKKAINDLDRDFWNNNESTVQQKWSSYPPKEFILNISPYAPYGDPRLSLNGTLLSGAKVAAAAGLAVEREGRLGEKPAPVPPPGEDALRSGGAAPSEPGSGGKAGRGRWRTVQSHLAAGKLNLSNFEDSTLSTATTLESIPSSTGEPKCQRPRTLMRQQSLQQPLSQHQRGRQPSQPTTSQSLGQLQAHMASAPGPNPRAYGRGQARQGTSAGSKYRAAGGRSRSNPGSWDHVVGQIRNRGLDMKSFLEGRMVVLSLVLGLSEQDDFANIPDLQNPGTQQNQNAQGDKRLPAGGKAVNTAPVPGQTPHDESDRRTEPRSSVSDLVNSLTSEMLMLSPGSEEDEAHEGCSRENLGRIQFSVGYNFQESTLTVKIMKAQELPAKDFSGTSDPFVKIYLLPDKKHKLETKVKRKNLNPHWNETFLFEGFPYEKVVQRILYLQVLDYDRFSRNDPIGEVSIPLNKVDLTQMQTFWKDLKPCSDGSGSRGELLLSLCYNPSANSIIVNIIKARNLKAMDIGGTSDPYVKVWLMYKDKRVEKKKTVTMKRNLNPIFNESFAFDIPTEKLRETTIIITVMDKDKLSRNDVIGKIYLSWKSGPGEVKHWKDMIARPRQPVAQWHQLKA

SEQ ID NO: 42228 - protein, 611 aa, Homo sapiens
MYRDPEAASPGAPSRDVLLVSAIITVSLSVTVVLCGLCHWCQRKLGKRYKNSLETVGTPDSGRGRSEKKAINDLDRDFWNNNESTVQQKWSSYPPKEFILNISPYAPYGDPRLSLNFEDSTLSTATTLESIPSSTGEPKCQRPRTLMRQQSLQQPLSQHQRGRQPSQPTTSQSLGQLQAHMASAPGPNPRAYGRGQARQGTSAGSKYRAAGGRSRSNPGSWDHVVGQIRNRGLDMKSFLEGRMVVLSLVLGLSEQDDFANIPDLQNPGTQQNQNAQGDKRLPAGGKAVNTAPVPGQTPHDESDRRTEPRSSVSDLVNSLTSEMLMLSPGSEEDEAHEGCSRENLGRIQFSVGYNFQESTLTVKIMKAQELPAKDFSGTSDPFVKIYLLPDKKHKLETKVKRKNLNPHWNETFLFEGFPYEKVVQRILYLQVLDYDRFSRNDPIGEVSIPLNKVDLTQMQTFWKDLKPCSDGSGSRGELLLSLCYNPSANSIIVNIIKARNLKAMDIGGTSDPYVKVWLMYKDKRVEKKKTVTMKRNLNPIFNESFAFDIPTEKLRETTIIITVMDKDKLSRNDVIGKIYLSWKSGPGEVKHWKDMIARPRQPVAQWHQLKA

SEQ ID NO: 42229 - protein, 522 aa, Homo sapiens
MYRDPEAASPGAPSRDVLLVSAIITVSLSVTVVLCGLCHWCQRKLGKRYKNSLETVGTPDSGRGRSEKKAINDLDRDFWNNNESTVQQKWSSYPPKEFILNISPYAPYGDPRLSLNGTLLSGAKVAAAAGLAVEREGRLGEKPAPVPPPGEDALRSGGAAPSEPGSGGKAGRGRWRTVQSHLAAGKLNLSKLPAGGKAVNTAPVPGQTPHDESDRRTEPRSSVSDLVNSLTSEMLMLSPGSEEDEAHEGCSRENLGRIQFSVGYNFQESTLTVKIMKAQELPAKDFSGTSDPFVKIYLLPDKKHKLETKVKRKNLNPHWNETFLFEGFPYEKVVQRILYLQVLDYDRFSRNDPIGEVSIPLNKVDLTQMQTFWKDLKPCSDGSGSRGELLLSLCYNPSANSIIVNIIKARNLKAMDIGGTSDPYVKVWLMYKDKRVEKKKTVTMKRNLNPIFNESFAFDIPTEKLRETTIIITVMDKDKLSRNDVIGKIYLSWKSGPGEVKHWKDMIARPRQPVAQWHQLKA

SEQ ID NO: 42230 - protein, 447 aa, Homo sapiens
MYRDPEAASPGAPSRDVLLVSAIITVSLSVTVVLCGLCHWCQRKLGKRYKNSLETVGTPDSGRGRSEKKAINDLDRDFWNNNESTVQQKWSSYPPKEFILNISPYAPYGDPRLSLKLPAGGKAVNTAPVPGQTPHDESDRRTEPRSSVSDLVNSLTSEMLMLSPGSEEDEAHEGCSRENLGRIQFSVGYNFQESTLTVKIMKAQELPAKDFSGTSDPFVKIYLLPDKKHKLETKVKRKNLNPHWNETFLFEGFPYEKVVQRILYLQVLDYDRFSRNDPIGEVSIPLNKVDLTQMQTFWKDLKPCSDGSGSRGELLLSLCYNPSANSIIVNIIKARNLKAMDIGGTSDPYVKVWLMYKDKRVEKKKTVTMKRNLNPIFNESFAFDIPTEKLRETTIIITVMDKDKLSRNDVIGKIYLSWKSGPGEVKHWKDMIARPRQPVAQWHQLKA

SEQ ID NO: 42231 - protein, 477 aa, Homo sapiens
MLGVRCLLRSVRFCSSAPFPKHKPSAKLSVRDALGAQNASGERIKIQGWIRSVRSQKEVLFLHVNDGSSLESLQVVADSGLDSRELNFGSSVEVQGQLIKSPSKRQNVELKAEKIKVIGNCDAKDFPIKYKERHPLEYLRQYPHFRCRTNVLGSILRIRSEATAAIHSFFKDSGFVHIHTPIITSNDSEGAGELFQLEPSGKLKVPEENFFNVPAFLTVSGQLHLEVMSGAFTQVFTFGPTFRAENSQSRRHLAEFYMIEAEISFVDSLQDLMQVIEELFKATTMMVLSKCPEDVELCHKFIAPGQKDRLEHMLKNNFLIISYTEAVEILKQASQNFTFTPEWGADLRTEHEKYLVKHCGNIPVFVINYPLTLKPFYMRDNEDGPQHTVAAVDLLVPGVGELFGGGLREERYHFLEERLARSGLTEVYQWYLDLRRFGSVPHGGFGMGFERYLQCILGVDNIKDVIPFPRFPHSCLL

SEQ ID NO: 42232 - protein, 250 aa, Homo sapiens
MSGAFTQVFTFGPTFRAENSQSRRHLAEFYMIEAEISFVDSLQDLMQVIEELFKATTMMVLSKCPEDVELCHKFIAPGQKDRLEHMLKNNFLIISYTEAVEILKQASQNFTFTPEWGADLRTEHEKYLVKHCGNIPVFVINYPLTLKPFYMRDNEDGPQHTVAAVDLLVPGVGELFGGGLREERYHFLEERLARSGLTEVYQWYLDLRRFGSVPHGGFGMGFERYLQCILGVDNIKDVIPFPRFPHSCLL

SEQ ID NO: 42233 - protein, 1720 aa, Homo sapiens
MAAAPSALLLLPPFPVLSTYRLQSRSRPSAPETDDSRVGGIMRGEKNYYFRGAAGDHGSCPTTTSPLASALLMPSEAVSSSWSESGGGLSGGDEEDTRLLQLLRTARDPSEAFQALQAALPRRGGRLGFPRRKEALYRALGRVLVEGGSDEKRLCLQLLSDVLRGQGEAGQLEEAFSLALLPQLVVSLREENPALRKDALQILHICLKRSPGEVLRTLIQQGLESTDARLRASTALLLPILLTTEDLLLGLDLTEVIISLARKLGDQETEEESETAFSALQQIGERLGQDRFQSYISRLPSALRRHYNRRLESQFGSQVPYYLELEASGFPEDPLPCAVTLSNSNLKFGIIPQELHSRLLDQEDYKNRTQAVEELKQVLGKFNPSSTPHSSLVGFISLLYNLLDDSNFKVVHGTLEVLHLLVIRLGEQVQQFLGPVIAASVKVLADNKLVIKQEYMKIFLKLMKEVGPQQVLCLLLEHLKHKHSRVREEVVNICICSLLTYPSEDFDLPKLSFDLAPALVDSKRRVRQAALEAFAVLASSMGSGKTSILFKAVDTVELQDNGDGVMNAVQARLARKTLPRLTEQGFVEYAVLMPSSAGGRSNHLAHGADTDWLLAGNRTQSAHCHCGDHVRDSMHIYGSYSPTICTRRVLSAGKGKNKLPWENEQPGIMGENQTSTSKDIEQFSTYDFIPSAKLKLSQGMPVNDDLCFSRKRVSRNLFQNSRDFNPDCLPLCAAGTTGTHQTNLSGKCAQLGFSQICGKTGSVGSDLQFLGTTSSHQEKVYASLNFGSKTQQTFGSQTECTSSNGQNPSPGAYILPSYPVSSPRTSPKHTSPLIISPKKSQDNSVNFSNSWPLKSFEGLSKPSPQKKLVSQKSSDPTGRNHGENSQEKPPVQLTPALVRSPSSRRGLNGTKPVPPIPRGISLLPDKADLSTVGHKKKEPDDIWKCEKDSLPIDLSELNFKDKDLDQEEMHSSLRSLRNSAAKKRAKLSGSTSDLESPDSAMKLDLTMDSPSLSSSPNINSYSESGVYSQESLTSSLSTTPQGKRIMSDIFPTFGSKPCPTRLSSAKKKISHIAEQSPSAGSSSNPQQISSFDFTTTKALSEDSVVVVGKGVFGSLSSAPATCSQSVISSVENGDTFSIKQSIEPPSGIYGRSVQQNISSYLDVENEKDAKVSISKSTYNKMRQKRKEEKELFHNKDCEKKEKNSWERMRHTGTEKMASESETPTGAISQYKERMPSVTHSPEIMDLSELRPFSKPEIALTEALRLLADEDWEKKIEGLNFIRCLAAFHSEILNTKLHETNFAVVQEVKNLRSGVSRAAVVCLSDLFTYLKKSMDQELDTTVKVLLHKAGESNTFIREDVDKALRAMVNNVTPARAVVSLINGGQRYYGRKMLFFMMCHPNFEKMLEKYVPSKDLPYIKDSVRNLQQKGLGEIPLDTPSAKGRRSHTGSVGNTRSSSVSRDAFNSAERAVTEVREVTRKSVPRNSLESAEYLKLITGLLNAKDFRDRINGIKQLLSDTENNQDLVVGNIVKIFDAFKSRLHDSNSKVNLVALETMHKMIPLLRDHLSPIINMLIPAIVDNNLNSKNPGIYAAATNVVQALSQHVDNYLLLQPFCTKAQFLNGKAKQDMTEKLADIVTELYQRKPHATEQKVLVVLWHLLGNMTNSGSLPGAGGNIRTATAKLSKALFAQMGQNLLNQAASQPPHIKKSLEELLDMTILNEL

SEQ ID NO: 42234 - protein, 974 aa, Homo sapiens
MAAAPSALLLLPPFPVLSTYRLQSRSRPSAPETDDSRVGGIMRGEKNYYFRGAAGDHGSCPTTTSPLASALLMPSEAVSSSWSESGGGLSGGDEEDTRLLQLLRTARDPSEAFQALQAALPRRGGRLGFPRRKEALYRALGRVLVEGGSDEKRLCLQLLSDVLRGQGEAGQLEEAFSLALLPQLVVSLREENPALRKDALQILHICLKRSPGEVLRTLIQQGLESTDARLRASTALLLPILLTTEDLLLGLDLTEVIISLARKLGDQETEEESETAFSALQQIGERLGQDRFQSYISRLPSALRRHYNRRLESQFGSQVPYYLELEASGFPEDPLPCAVTLSNSNLKFGIIPQELHSRLLDQEDYKNRTQAVEELKQVLGKFNPSSTPHSSLVGFISLLYNLLDDSNFKVVHGTLEVLHLLVIRLGEQVQQFLGPVIAASVKVLADNKLVIKQEYMKIFLKLMKEVGPQQVLCLLLEHLKHKHSRVREEVVNICICSLLTYPSEDFDLPKLSFDLAPALVDSKRRVRQAALEAFAVLASSMGSGKTSILFKAVDTVELQDNGDGVMNAVQARLARKTLPRLTEQGFVEYAVLMPSSAGGRSNHLAHGADTDWLLAGNRTQSAHCHCGDHVRDSMHIYGSYSPTICTRRVLSAGKGKNKLPWENEQPGIMGENQTSTSKDIEQFSTYDFIPSAKLKLSQGMPVNDDLCFSRKRVSRNLFQNSRDFNPDCLPLCAAGTTGTHQTNLSGKCAQLGFSQICGKTGSVGSDLQFLGTTSSHQEKVYASLNFGSKTQQTFGSQTECTSSNGQNPSPGAYILPSYPVSSPRTSPKHTSPLIISPKKSQDNSVNFSNSWPLKSFEGLSKPSPQKKLVSQKSSDPTGRNHGENSQEKPPVQLTPALVRSPSSRRGLNGTKPVPPIPRGISLLPDKADLSTVGHKKKEPDDIWKCEKDSLPIDLSELNFKDKDLDQEEVRTKYF

SEQ ID NO: 42235 - protein, 995 aa, Homo sapiens
MAAAPSALLLLPPFPVLSTYRLQSRSRPSAPETDDSRVGGIMRGEKNYYFRGAAGDHGSCPTTTSPLASALLMPSEAVSSSWSESGGGLSGGDEEDTRLLQLLRTARDPSEAFQALQAALPRRGGRLGFPRRKEALYRALGRVLVEGGSDEKRLCLQLLSDVLRGQGEAGQLEEAFSLALLPQLVVSLREENPALRKDALQILHICLKRSPGEVLRTLIQQGLESTDARLRASTALLLPILLTTEDLLLGLDLTEVIISLARKLGDQETEEESETAFSALQQIGERLGQDRFQSYISRLPSALRRHYNRRLESQFGSQVPYYLELEASGFPEDPLPCAVTLSNSNLKFGIIPQELHSRLLDQEDYKNRTQAVEELKQVLGKFNPSSTPHSSLVGFISLLYNLLDDSNFKVVHGTLEVLHLLVIRLGEQVQQFLGPVIAASVKVLADNKLVIKQEYMKIFLKLMKEVGPQQVLCLLLEHLKHKHSRVREEVVNICICSLLTYPSEDFDLPKLSFDLAPALVDSKRRVRQAALEAFAVLASSMGSGKTSILFKAVDTVELQDNGDGVMNAVQARLARKTLPRLTEQGFVEYAVLMPSSAGGRSNHLAHGADTDWLLAGNRTQSAHCHCGDHVRDSMHIYGSYSPTICTRRVLSAGKGKNKLPWENEQPGIMGENQTSTSKDIEQFSTYDFIPSAKLKLSQGMPVNDDLCFSRKRVSRNLFQNSRDFNPDCLPLCAAGTTGTHQTNLSGKCAQLGFSQICGKTGSVGSDLQFLGTTSSHQEKVYASLNFGSKTQQTFGSQTECTSSNGQNPSPGAYILPSYPVSSPRTSPKHTSPLIISPKKSQDNSVNFSNSWPLKSFEGLSKPSPQKKLVSQKSSDPTGRNHGENSQEKPPVQLTPALVRSPSSRRGLNGTKPVPPIPRGISLLPDKADLSTVGHKKKEPDDIWKCEKDSLPIDLSELNFKDKDLDQEEVRHISNIWVKTLSNKTFFCKEKNFSYC

SEQ ID NO: 42236 - protein, 622 aa, Homo sapiens
MAHVRGLQLPGCLALAALCSLVHSQHVFLAPQQARSLLQRVRRANTFLEEVRKGNLERECVEETCSYEEAFEALESSTATDVFWAKYTACETARTPRDKLAACLEGNCAEGLGTNYRGHVNITRSGIECQLWRSRYPHKPEINSTTHPGADLQENFCRNPDSSTTGPWCYTTDPTVRRQECSIPVCGQDQVTVAMTPRSEGSSVNLSPPLEQCVPDRGQQYQGRLAVTTHGLPCLAWASAQAKALSKHQDFNSAVQLVENFCRNPDGDEEGVWCYVAGKPGDFGYCDLNYCEEAVEEETGDGLDEDSDRAIEGRTATSEYQTFFNPRTFGSGEADCGLRPLFEKKSLEDKTERELLESYIDGRIVEGSDAEIGMSPWQVMLFRKSPQELLCGASLISDRWVLTAAHCLLYPPWDKNFTENDLLVRIGKHSRTRYERNIEKISMLEKIYIHPRYNWRENLDRDIALMKLKKPVAFSDYIHPVCLPDRETAASLLQAGYKGRVTGWGNLKETWTANVGKGQPSVLQVVNLPIVERPVCKDSTRIRITDNMFCAGYKPDEGKRGDACEGDSGGPFVMKSPFNNRWYQMGIVSWGEGCDRDGKYGFYTHVFRLKKWIQKVIDQFGE

SEQ ID NO: 42237 - protein, 1019 aa, Homo sapiens
MGTRDDVPEAKVLVPVAVYCGSIPRTSAGPRVLPPGSINSSLPHGEGSLQPEPRALLNNEEPSQLLRGLGQLGGLKLDTPSKGWQARNGHPRNLRALSLGDQPLVLLPSPESEANSVARDTIQIKDKLKKRRLSEGLAASSRASLDPGGGPQGVPLHSTIPRATSQRLLRVPRPMPLIQSIPTTPEASGVKEKGLDLPGSIPGPHELRPGAQEAQISWQYLHCNDEKMQKSLGAIVIPPIPKARTVAATPSRVPGSLPSPLPPGQGVLTGLRAPRTRLARGSGPREKTPASLEPKPLASPIRDRPAAAKKPALPFSQSAPTLTAFSFDCAREACPPLKEEDQKEIGTKIQVTISKSAREKMQLKQMKEMELLRRLEEPRTGQELTSQCLGSQRAFMKEGLLPLRGSGTLSVPTRLSGPCRNDVSIILRKWASRASLPSIPISRQEPRFARHASANSLPAVLTLGSPEWEEEEEMDLRACKELRPFSNPELGLRDALQCLNSSDWQMKEKGLVSIQRLAACHSEVLTGKLHDVCLVVTGEVTNLRSKVSHLAISTLGDLFQALKKNMDQEAEEIARCLLQKMADTNEFIQRAAGQSLRAMVENVTLARSLVVLTSAGVYHRNPLIRKYAAEHLSAVLEQIGAEKLLSGTRDSTDMLVHNLVRLAQDSNQDTRFYGRKMVNILMANTKFDAFLKQSLPSYDLQKVMAAIKQQGIEDNDELPSAKGRKVLRSLVVCENGLPIKEGLSCNGPRLVGLRSTLQGRGEMVEQLRELTRLLEAKDFRSRMEGVGQLLELCKAKTELVTAHLVQVFDAFTPRLQDSNKKVNQWALESFAKMIPLLRESLHPMLLSIIITVADNLNSKNSGIYAAAVAVLDAMVESLDNLCLLPALAGRVRFLSGRAVLDVTDRLAVLVASVYPRKPQAVERHVLPILWHFLNTATRNGTLPGPSGNIRGVVCRLSRSLQEHMGSRLLDFAASQPKHVLKTLQELLDSESLGGSRKATDRGVAPDSKTTGSSYPFQLD

SEQ ID NO: 42238 - protein, 546 aa, Homo sapiens
MDLRACKELRPFSNPELGLRDALQCLNSSDWQMKEKGLVSIQRLAACHSEVLTGKLHDVCLVVTGEVTNLRSKVSHLAISTLGDLFQALKKNMDQEAEEIARCLLQKMADTNEFIQRAAGQSLRAMVENVTLARSLVVLTSAGVYHRNPLIRKYAAEHLSAVLEQIGAEKLLSGTRDSTDMLVHNLVRLAQDSNQDTRFYGRKMVNILMANTKFDAFLKQSLPSYDLQKVMAAIKQQGIEDNDELPSAKGRKVLRSLVVCENGLPIKEGLSCNGPRLVGLRSTLQGRGEMVEQLRELTRLLEAKDFRSRMEGVGQLLELCKAKTELVTAHLVQVFDAFTPRLQDSNKKVNQWALESFAKMIPLLRESLHPMLLSIIITVADNLNSKNSGIYAAAVAVLDAMVESLDNLCLLPALAGRVRFLSGRAVLDVTDRLAVLVASVYPRKPQAVERHVLPILWHFLNTATRNGTLPGPSGNIRGVVCRLSRSLQEHMGSRLLDFAASQPKHVLKTLQELLDSESLGGSRKATDRGVAPDSKTTGSSYPFQLD

SEQ ID NO: 42239 - protein, 247 aa, Homo sapiens
MLCVYFFKGIEDNDELPSAKGRKVLRSLVVCENGLPIKEGLSCNGPRLVGLRSTLQGRGEMVEQLRELTRLLEAKDFRSRMEGVGQLLELCKAKTELVTAHLVQVFDAFTPRLQDSNKKVNQWALESFAKMIPLLRESLHPMLLSIIITVADNLNSKNSGIYAAAVAVLDAMVESLDNLCLLPALAGRVRFLSGRAVLDVTDRLAGEHPQPHPTPSPGRFLFSPGLWLNHSPSYLRPEIIPPNHLKF

SEQ ID NO: 42240 - protein, 626 aa, Homo sapiens
MAGERPPLRGPGPGPGEVPGEGPPGPGGTGGGPGRGRPSSYRALRSAVSSLARVDDFHCAEKIGAGFFSEVYKVRHRQSGQVMVLKMNKLPSNRGNTLREVQLMNRLRHPNILRFMGVCVHQGQLHALTEYMNGGTLEQLLSSPEPLSWPVRLHLALDIARGLRYLHSKGVFHRDLTSKNCLVRREDRGFTAVVGDFGLAEKIPVYREGARKEPLAVVGSPYWMAPEVLRGELYDEKADVFAFGIVLCELIARVPADPDYLPRTEDFGLDVPAFRTLVGDDCPLPFLLLAIHCCNLEPSTRAPFTEITQHLEWILEQLPEPAPLTRTALTHNQGSVARGGPSATLPRPDPRLSRSRSDLFLPPSPESPPNWGDNLTRVNPFSLREDLRGGKIKLLDTPSKPVLPLVPPSPFPSTQLPLVTTPETLVQPGTPARRCRSLPSSPELPRRMETALPGPGPPAVGPSAEEKMECEGSSPEPEPPGPAPQLPLAVATDNFISTCSSASQPWSPRSGPVLNNNPPAVVVNSPQGWAGEPWNRAQHSLPRAAALERTEPSPPPSAPREPDEGLPCPGCCLGPFSFGFLSMCPRPTPAVARYRNLNCEAGSLLCHRGHHAKPPTPSLQLPGARS

SEQ ID NO: 42241 - protein, 386 aa, Homo sapiens
MEDEMPKTLYVGNLSRDVTEALILQLFSQIGPCKNCKMIMDTAGNDPYCFVEFHEHRHAAAALAAMNGRKIMGKEVKVNWATTPSSQKKDTSSSTVVSTQRSQDHFHVFVGDLSPEITTEDIKAAFAPFGRISDARVVKDMATGKSKGYGFVSFFNKWDAENAIQQMGGQWLGGRQIRTNWATRKPPAPKSTYESNTKQLSYDEVVNQSSPSNCTVYCGGVTSGLTEQLMRQTFSPFGQIMEIRVFPDKGYSFVRFNSHESAAHAIVSVNGTTIEGHVVKCYWGKETLDMINPVQQQNQIGYPQPYGQWGQWYGNAQQIGQYMPNGWQVPAYGMYGQAWNQQGFNQTQSSAPWMGPNYGVQPPQGQNGSMLPNQPSGYRVAGYETQ

SEQ ID NO: 42242 - protein, 375 aa, Homo sapiens
MEDEMPKTLYVGNLSRDVTEALILQLFSQIGPCKNCKMIMDTAGNDPYCFVEFHEHRHAAAALAAMNGRKIMGKEVKVNWATTPSSQKKDTSNHFHVFVGDLSPEITTEDIKAAFAPFGRISDARVVKDMATGKSKGYGFVSFFNKWDAENAIQQMGGQWLGGRQIRTNWATRKPPAPKSTYESNTKQLSYDEVVNQSSPSNCTVYCGGVTSGLTEQLMRQTFSPFGQIMEIRVFPDKGYSFVRFNSHESAAHAIVSVNGTTIEGHVVKCYWGKETLDMINPVQQQNQIGYPQPYGQWGQWYGNAQQIGQYMPNGWQVPAYGMYGQAWNQQGFNQTQSSAPWMGPNYGVQPPQGQNGSMLPNQPSGYRVAGYETQ

SEQ ID NO: 42243 - protein, 214 aa, Homo sapiens
MEDEMPKTLYVGNLSRDVTEALILQLFSQIGPCKNCKMIMDTAGNDPYCFVEFHEHRHAAAALAAMNGRKIMGKEVKVNWATTPSSQKKDTSSSTVVSTQRSQDHFHVFVGDLSPEITTEDIKAAFAPFGRISDARVVKDMATGKSKGYGFVSFFNKWDAENAIQQMGGQWLGGRQIRTNWATRKPPAPKSTYECRCIGEEKEMWNFGEKYARF

SEQ ID NO: 42244 - protein, 115 aa, Homo sapiens
MSSPSSPFREQSFLCAAGDAGEESRVQVLKNEVRRGSPVLLGWVEQAYADKCVCGPSAPPAPTPPSLSQRVMCNDLFKVNPFQLQQFRADPSTASLLLCPGGLDHKLNLRGKAWG

SEQ ID NO: 42245 - protein, 571 aa, Homo sapiens
MDRSKRNSIAGFPPRVERLEEFEGGGGGEGNVSQVGRVWPSSYRALISAFSRLTRLDDFTCEKIGSGFFSEVFKVRHRASGQVMALKMNTLSSNRANMLKEVQLMNRLSHPNILRFMGVCVHQGQLHALTEYINSGNLEQLLDSNLHLPWTVRVKLAYDIAVGLSYLHFKGIFHRDLTSKNCLIKRDENGYSAVVADFGLAEKIPDVSMGSEKLAVVGSPFWMAPEVLRDEPYNEKADVFSYGIILCEIIARIQADPDYLPRTENFGLDYDAFQHMVGDCPPDFLQLTFNCCNMDPKLRPSFVEIGKTLEEILSRLQEEEQERDRKLQPTARGLLEKAPGVKRLSSLDDKIPHKSPCPRRTIWLSRSQSDIFSRKPPRTVSVLDPYYRPRDGAARTPKVNPFSARQDLMGGKIKFFDLPSKSVISLVFDLDAPGPGTMPLADWQEPLAPPIRRWRSLPGSPEFLHQEACPFVGREESLSDGPPPRLSSLKYRVKEIPPFRASALPAAQAHEAMDCSILQEENGFGSRPQGTSPCPAGASEEMEVEERPAGSTPATFSTSGIGLQTQGKQDG

SEQ ID NO: 42246 - protein, 555 aa, Homo sapiens
MDRSKRNSIAGFPPRVERLEEFEGGGGGEGNVSQVGRVWPSSYRALISAFSRLTRLDDFTCEKIGSGFFSEVFKVRHRASGQVMALKMNTLSSNRANMLKEVQLMNRLSHPNILRYINSGNLEQLLDSNLHLPWTVRVKLAYDIAVGLSYLHFKGIFHRDLTSKNCLIKRDENGYSAVVADFGLAEKIPDVSMGSEKLAVVGSPFWMAPEVLRDEPYNEKADVFSYGIILCEIIARIQADPDYLPRTENFGLDYDAFQHMVGDCPPDFLQLTFNCCNMDPKLRPSFVEIGKTLEEILSRLQEEEQERDRKLQPTARGLLEKAPGVKRLSSLDDKIPHKSPCPRRTIWLSRSQSDIFSRKPPRTVSVLDPYYRPRDGAARTPKVNPFSARQDLMGGKIKFFDLPSKSVISLVFDLDAPGPGTMPLADWQEPLAPPIRRWRSLPGSPEFLHQEACPFVGREESLSDGPPPRLSSLKYRVKEIPPFRASALPAAQAHEAMDCSILQEENGFGSRPQGTSPCPAGASEEMEVEERPAGSTPATFSTSGIGLQTQGKQDG

SEQ ID NO: 42247 - protein, 542 aa, Homo sapiens
MDRSKRNSIAGFPPRVERLEEFEGGGGGEGNVSQVGRVWPSSYRALISAFSRLTRLDDFTCEKIGSGFFSEVFKVRHRASGQVMALKMNTLSSNRANMLKEVQLMNRLSHPNILRFMGVCVHQGQLHALTEYINSGNLEQLLDSNLHLPWTVRVKLAYDIAVGLSYLHFKGIFHRDLTSKNCLIKRDENGYSAVVADFGLAEKIPDVSMGSEKLAVVGSPFWMAPEVLRDEPYNEKADVFSYGIILCEIIARIQADPDYLPRTEMDPKLRPSFVEIGKTLEEILSRLQEEEQERDRKLQPTARGLLEKAPGVKRLSSLDDKIPHKSPCPRRTIWLSRSQSDIFSRKPPRTVSVLDPYYRPRDGAARTPKVNPFSARQDLMGGKIKFFDLPSKSVISLVFDLDAPGPGTMPLADWQEPLAPPIRRWRSLPGSPEFLHQEACPFVGREESLSDGPPPRLSSLKYRVKEIPPFRASALPAAQAHEAMDCSILQEENGFGSRPQGTSPCPAGASEEMEVEERPAGSTPATFSTSGIGLQTQGKQDG

SEQ ID NO: 42248 - protein, 401 aa, Homo sapiens
MLHLHGWQTMQGRKMGHPPVSPSAPAPAGTTAIPGLIPDLVAGTPWPRWALIAGALAAGVLLVSCLLCAACCCCRRHRKKPRDKESVGLGSARGTTTTHLVQPDVDGLESSPGDAQQWGCLQLSLEFDFGSQEIRVGLRQAADLRPGGTVDPYARVSVSTQAGHRHETKVHRGTLCPVFDETCCFHIPQAELPGATLQVQLFNFKRFSGHEPLGELRLPLGTVDLQHVLEHWYLLGPPAATQPEQVGELCFSLRYVPSSGRLTVVVLEARGLRPGLAEPYVKVQLMLNQRKWKKRKTATKKGTAAPYFNEAFTFLVPFSQVQNVDLVLAVWDRSLPLRTEPVGKVHLGARASGQPLQHWADMLAHARRPIAQRHPLRPAREVDRMLALQPRLRLRLPLPHS

SEQ ID NO: 42249 - protein, 172 aa, Homo sapiens
MLHLHGWQTMQGRKMGHPPVSPSAPAPAGTTAIPGLIPDLVAGTPWPRWALIAGALAAGVLLVSCLLCAACCCCRRHRKKPRDKESVGLGSARGTTTTHLVQPDVDGLESSPGDAQQWGCLQLSLEFDFGSQEVKGPAAQDQRFCEFPERVTGEGQTPCPGWWGADRAGALG

SEQ ID NO: 42250 - protein, 491 aa, Homo sapiens
MPGARDALCHQALQLLAELCARGALEHDSCQDFIYHLRDRARPRLRDPDISVSLLTLVVTACGLALFGVSLFVSWKLCWVPWRERGLPSGSKDNNQEPLNYMDTETNEQENSEDFLDPPTPCPDSSMKISHTSPDIPLSTQTGIQENCAHGVRVQRQVTEPTSSARHNSIRRQLNLSNPDFNIQQLQKQEQLTGIGRIKPELYKQRSLDNDDGRRSNSKACGKLNFILKYDCDLEQLIVKIHKAVNLPAKDFSGTSDPYVKIYLLPDRKTKHQTKVHRKTLNPVFDEVFLFPVPYNDLEARKLHFSVYDFDRFSRHDLIGQVVVDHFLDLADFPRECILWKDIEYVTNDNVDLGELMFSLCYLPTAGRLTITIIKARNLKAMDITGASDPYVKVSLMCDGRRLKKRKTSTKRNTLNPVYNEAIVFDVPPENIDQIHLSIAVMDYDRVGHNEIIGVCQVGNEAERLGRDHWSEMLSYPRKPIAHWHSLVEKR

SEQ ID NO: 42251 - protein, 555 aa, Homo sapiens
MAFTDLLDALGSMGRFQLNHTALLLLPCGLLACHNFLQNFTAAVPPHHCRGPANHTEASTNDSGAWLRATIPLDQLGAPEPCRRFTKPQWALLSPNSSIPGAATEGCKDGWVYNRSVFPSTIVMEWDLVCEARTLRDLAQSVYMAGVLVGAAVFGSLADRLGCKGPLVWSYLQLAASGAATAYFSSFSAYCVFRFLMGMTFSGIILNSVSLVVEWMPTRGRTVAGILLGYSFTLGQLILAGVAYLIRPWRCLQFAISAPFLIFFLYSWWLPESSRWLLLHGKSQLAVQNLQKVAAMNGRKEEGERLTKEVMSSYIQSEFASVCTSNSILDLFRTPAIRKVTCCLMVIWFSNSVAYYGLAMDLQKFGLSLYLVQALFGIINTPAMLVATATMIYVGRRATVASFLILAGLMVIANMFVPEGTQILCTAQAALGKGCLASSFICVYLFTGELYPTEIRQMGMGFASVHARLGGLTAPLVTTLGEYSTILPPVSFGATAILAGLAVCVLTETRNMPLVETIAAMERRVKEGSSKKHVEEKSEEISLQQLRASPLKETI

SEQ ID NO: 42252 - protein, 347 aa, Homo sapiens
MAFTDLLDALGSMGRFQLNHTALLLLPCGLLACHNFLQNFTAAVPPHHCRGPANHTEASTNDSGAWLRATIPLDQLGAPEPCRRFTKPQWALLSPNSSIPGAATEGCKDGWVYNRSVFPSTIVMEWDLVCEARTLRDLAQSVYMAGVLVGAAVFGSLADRLGCKGPLVWSYLQLAASGAATAYFSSFSAYCVFRFLMGMTFSGIILNSVSLVASRVIPLAPPAWQVPVSCTESAEGGCNEREEGGRGKADQGGDELLHPKRVCKCLHLQLNLGPLPNPGHPQGHMLSHGDLRGRQRSSGSGEQGGSCEPESRNGRLPAVAPAGLGLPFVHLPLSAREKQILSSKFQS

SEQ ID NO: 42253 - protein, 681 aa, Homo sapiens
MSKGILQVHPPICDCPGCRISSPVNRGRLADKRTVALPAARNLKKERTPSFSASDGDSDGSGPTCGRRPGLKQEDGPHIRIMKRRVHTHWDVNISFREASCSQDGNLPTLISSVHRSRHLVMPEHQSRCEFQRGSLEIGLRPAGDLLGKRLGRSPRISSDCFSEKRARSESPQEALLLPRELGPSMAPEDHYRRLVSALSEASTFEDPQRLYHLGLPSHGEDPPWHDPPHHLPSHDLLRVRQEVAAAALRGPSGLEAHLPSSTAGQRRKQGLAQHREGAAPAAAPSFSERELPQPPPLLSPQNAPHVALGPHLRPPFLGVPSALCQTPGYGFLPPAQAEMFAWQQELLRKQNLARLELPADLLRQKELESARPQLLAPETALRPNDGAEELQRRGALLVLNHGAAPLLALPPQGPPGSGPPTPSRDSARRAPRKGGPGPASARPSESKEMTGARLWAQDGSEDEPPKDSDGEDPETAAVGCRGPTPGQAPAGGAGAEGKGLFPGSTLPLGFPYAVSPYFHTGAVGGLSMDGEEAPAPEDVTKWTVDDVCSFVGGLSGCGEYTRVFREQGIDGETLPLLTEEHLLTNMGLKLGPALKIRAQVARRLGRVFYVASFPVALPLQPPTLRAPERELGTGEQPLSPTTATSPYGGGHALAGQTSPKQENGTLALLPGAPDPSQPLC

SEQ ID NO: 42254 - protein, 480 aa, Homo sapiens
MAPEDHYRRLVSALSEASTFEDPQRLYHLGLPSHDLLRVRQEVAAAALRGPSGLEAHLPSSTAGQRRKQGLAQHREGAAPAAAPSFSERELPQPPPLLSPQNAPHVALGPHLRPPFLGVPSALCQTPGYGFLPPAQAEMFAWQQELLRKQNLARLELPADLLRQKELESARPQLLAPETALRPNDGAEELQRRGALLVLNHGAAPLLALPPQGPPGSGPPTPSRDSARRAPRKGGPGPASARPSESKEMTGARLWAQDGSEDEPPKDSDGEDPETAAVGCRGPTPGQAPAGGAGAEGKGLFPGSTLPLGFPYAVSPYFHTGAVGGLSMDGEEAPAPEDVTKWTVDDVCSFVGGLSGCGEYTRVFREQGIDGETLPLLTEEHLLTNMGLKLGPALKIRAQVARRLGRVFYVASFPVALPLQPPTLRAPERELGTGEQPLSPTTATSPYGGGHALAGQTSPKQENGTLALLPGAPDPSQPLC

SEQ ID NO: 42255 - protein, 529 aa, Homo sapiens
MAPEDHYRRLVSALSEASTFEDPQRLYHLGLPSHGEDPPWHDPPHHLPSHDLLRVRQEVAAAALRGPSGLEAHLPSSTAGQRRKQGLAQHREGAAPAAAPSFSERELPQPPPLLSPQNAPHVALGPHLRPPFLGVPSALCQTPGYGFLPPAQAEMFAWQQELLRKQNLARLELPADLLRQKELESARPQLLAPETALRPNDGAEELQRRGALLVLNHGAAPLLALPPQGPPGSGPPTPSRDSARRAPRKGGPGPASARPSESKEMTGARLWAQDGSEDEPPKDSDGEDPETAAVGCRGPTPGQAPAGGAGAEGKGLFPGSTLPLGFPYAVSPYFHTGAVGGLSMDGEEAPAPEDVTKWTVDDVCSFVGGLSGCGEYTRVFREQGIDGETLPLLTEEHLLTNMGLKLGPALKIRAQVRRWGVRSGSPDHSWAESSGWVCDSPHQAISLQVARRLGRVFYVASFPVALPLQPPTLRAPERELGTGEQPLSPTTATSPYGGGHALAGQTSPKQENGTLALLPGAPDPSQPLC

SEQ ID NO: 42256 - protein, 666 aa, Homo sapiens
MSKGILQVHPPICDCPGCRISSPVNRGRLADKRTVALPAARNLKKERTPSFSASDGDSDGSGPTCGRRPGLKQEDGPHIRIMKRRVHTHWDVNISFREASCSQDGNLPTLISSVHRSRHLVMPEHQSRCEFQRGSLEIGLRPAGDLLGKRLGRSPRISSDCFSEKRARSESPQAEALLLPRELGPSMAPEDHYRRLVSALSEASTFEDPQRLYHLGLPSHDLLRVRQEVAAAALRGPSGLEAHLPSSTAGQRRKQGLAQHREGAAPAAAPSFSERELPQPPPLLSPQNAPHVALGPHLRPPFLGVPSALCQTPGYGFLPPAQAEMFAWQQELLRKQNLARLELPADLLRQKELESARPQLLAPETALRPNDGAEELQRRGALLVLNHGAAPLLALPPQGPPGSGPPTPSRDSARRAPRKGGPGPASARPSESKEMTGARLWAQDGSEDEPPKDSDGEDPETAAVGCRGPTPGQAPAGGAGAEGKGLFPGSTLPLGFPYAVSPYFHTGAVGGLSMDGEEAPAPEDVTKWTVDDVCSFVGGLSGCGEYTRVFREQGIDGETLPLLTEEHLLTNMGLKLGPALKIRAQVARRLGRVFYVASFPVALPLQPPTLRAPERELGTGEQPLSPTTATSPYGGGHALAGQTSPKQENGTLALLPGAPDPSQPLC

SEQ ID NO: 42257 - protein, 699 aa, Homo sapiens
MSKGILQVHPPICDCPGCRISSPVNRGRLADKRTVALPAARNLKKERTPSFSASDGDSDGSGPTCGRRPGLKQEDGPHIRIMKRRVHTHWDVNISFREASCSQDGNLPTLISSVHRSRHLVMPEHQSRCEFQRGSLEIGLRPAGDLLGKRLGRSPRISSDCFSEKRARSESPQAEALLLPRELGPSMAPEDHYRRLVSALSEASTFEDPQRLYHLGLPSHDLLRVRQEVAAAALRGPSGLEAHLPSSTAGQRRKQGLAQHREGAAPAAAPSFSERELPQPPPLLSPQNAPHVALGPHLRPPFLGVPSALCQTPGYGFLPPAQAEMFAWQQELLRKQNLARLELPADLLRQKELESARPQLLAPETALRPNDGAEELQRRGALLVLNHGAAPLLALPPQGPPGSGPPTPSRDSARRAPRKGGPGPASARPSESKEMTGARLWAQDGSEDEPPKDSDGEDPETAAVGCRGPTPGQAPAGGAGAEGKGLFPGSTLPLGFPYAVSPYFHTGAVGGLSMDGEEAPAPEDVTKWTVDDVCSFVGGLSGCGEYTRVFREQGIDGETLPLLTEEHLLTNMGLKLGPALKIRAQVRRWGVRSGSPDHSWAESSGWVCDSPHQAISLQVARRLGRVFYVASFPVALPLQPPTLRAPERELGTGEQPLSPTTATSPYGGGHALAGQTSPKQENGTLALLPGAPDPSQPLC

SEQ ID NO: 42258 - protein, 665 aa, Homo sapiens
MSKGILQVHPPICDCPGCRISSPVNRGRLADKRTVALPAARNLKKERTPSFSASDGDSDGSGPTCGRRPGLKQEDGPHIRIMKRRVHTHWDVNISFREASCSQDGNLPTLISSVHRSRHLVMPEHQSRCEFQRGSLEIGLRPAGDLLGKRLGRSPRISSDCFSEKRARSESPQEALLLPRELGPSMAPEDHYRRLVSALSEASTFEDPQRLYHLGLPSHDLLRVRQEVAAAALRGPSGLEAHLPSSTAGQRRKQGLAQHREGAAPAAAPSFSERELPQPPPLLSPQNAPHVALGPHLRPPFLGVPSALCQTPGYGFLPPAQAEMFAWQQELLRKQNLARLELPADLLRQKELESARPQLLAPETALRPNDGAEELQRRGALLVLNHGAAPLLALPPQGPPGSGPPTPSRDSARRAPRKGGPGPASARPSESKEMTGARLWAQDGSEDEPPKDSDGEDPETAAVGCRGPTPGQAPAGGAGAEGKGLFPGSTLPLGFPYAVSPYFHTGAVGGLSMDGEEAPAPEDVTKWTVDDVCSFVGGLSGCGEYTRVFREQGIDGETLPLLTEEHLLTNMGLKLGPALKIRAQVARRLGRVFYVASFPVALPLQPPTLRAPERELGTGEQPLSPTTATSPYGGGHALAGQTSPKQENGTLALLPGAPDPSQPLC

SEQ ID NO: 42259 - protein, 1151 aa, Homo sapiens
MPCGFSPSPVAHHLVPGPPDTPAQQLRCGWTVGGWLLSLVRGLLPCLPPGARTAEGPIMVLAGPLAVSLLLPSLTLLVSHLSSSQDVSSEPSSEQQLCALSKHPTVAFEDLQPWVSNFTYPGARDFSQLALDPSGNQLIVGARNYLFRLSLANVSLLQATEWASSEDTRRSCQSKGKTEEECQNYVRVLIVAGRKVFMCGTNAFSPMCTSRQVGNLSRTIEKINGVARCPYDPRHNSTAVISSQGELYAATVIDFSGRDPAIYRSLGSGPPLRTAQYNSKWLNEPNFVAAYDIGLFAYFFLRENAVEHDCGRTVYSRVARVCKNDVGGRFLLEDTWTTFMKARLNCSRPGEVPFYYNELQSAFHLPEQDLIYGVFTTNVNSIAASAVCAFNLSAISQAFNGPFRYQENPRAAWLPIANPIPNFQCGTLPETGPNENLTERSLQDAQRLFLMSEAVQPVTPEPCVTQDSVRFSHLVVDLVQAKDTLYHVLYIGTESGTILKALSTASRSLHGCYLEELHVLPPGRREPLRSLRILHSARALFVGLRDGVLRVPLERCAAYRSQGACLGARDPYCGWDGKQQRCSTLEDSSNMSLWTQNITACPVRNVTRDGGFGPWSPWQPCEHLDGDNSGSCLCRARSCDSPRPRCGGLDCLGPAIHIANCSRNGAWTPWSSWALCSTSCGIGFQVRQRSCSNPAPRHGGRICVGKSREERFCNENTPCPVPIFWASWGSWSKCSSNCGGGMQSRRRACENGNSCLGCGVEFKTCNPEGCPEVRRNTPWTPWLPVNVTQGGARQEQRFRFTCRAPLADPHGLQFGRRRTETRTCPADGSGSCDTDALVEVLLRSGSTSPHTVSGGWAAWGPWSSCSRDCELGFRVRKRTCTNPEPRNGGLPCVGDAAEYQDCNPQACPVRGAWSCWTSWSPCSASCGGGHYQRTRSCTSPAPSPGEDICLGLHTEEALCATQACPEGWSPWSEWSKCTDDGAQSRSRHCEELLPGSSACAGNSSQSRPCPYSEIPVILPASSMEEATDCAGFNLIHLVATGISCFLGSGLLTLAVYLSCQHCQRQSQESTLVHPATPNHLHYKGGGTPKNEKYTPMEFKTLNKNNLIPDDRANFYPLQQTNVYTTTYYPSPLNKHSFRPEASPGQRCFPNS

SEQ ID NO: 42260 - protein, 1092 aa, Homo sapiens
MPCGFSPSPVAHHLVPGPPDTPAQQLRCGWTVGGWLLSLVRGLLPCLPPGARTAEGPIMVLAGPLAVSLLLPSLTLLVSHLSSSQDVSSEPSSEQQLCALSKHPTVAFEDLQPWVSNFTYPGARDFSQLALDPSGNQLIVGARNYLFRLSLANVSLLQATEWASSEDTRRSCQSKGKTEEECQNYVRVLIVAGRKVFMCGTNAFSPMCTSRQVGNLSRTIEKINGVARCPYDPRHNSTAVISSQGELYAATVIDFSGRDPAIYRSLGSGPPLRTAQYNSKWLNEPNFVAAYDIGLFAYFFLRENAVEHDCGRTVYSRVARVCKNDVGGRFLLEDTWTTFMKARLNCSRPGEVPFYYNELQSAFHLPEQDLIYGVFTTNVNSIAASAVCAFNLSAISQAFNGPFRYQENPRAAWLPIANPIPNFQCGTLPETGPNENLTERSLQDAQRLFLMSEAVQPVTPEPCVTQDSVRFSHLVVDLVQAKDTLYHVLYIGTESGTILKALSTASRSLHGCYLEELHVLPPGRREPLRSLRILHSARALFVGLRDGVLRVPLERCAAYRSQGACLGARDPYCGWDGKQQRCSTLEDSSNMSLWTQNITACPVRNVTRDGGFGPWSPWQPCEHLDGDNSGSCLCRARSCDSPRPRCGGLDCLGPAIHIANCSRNGAWTPWSSWALCSTSCGIGFQVRQRSCSNPAPRHGGRICVGKSREERFCNENTPCPVPIFWASWGSWSKCSSNCGGGMQSRRRACENGNSCLGCGEFKTCNPEGCPEVRRNTPWTPWLPVNVTQGGARQEQRFRFTCRAPLADPHGLQFGRRRTETRTCPADGSGSCDTDALVEVLLRSGSTSPHTVSGGWAAWGPWSSCSRDCELGFRVRKRTCTNPEPRNGGLPCVGDAAEYQDCNPQACPVRGAWSCWTSWSPCSASCGGGHYQRTRSCTSPAPSPGEDICLGLHTEEALCATQACPGWSPWSEWSKCTDDGAQSRSRHCEELLPGSSACAGNSSQSRPCPYSEIPVILPASSMEEATDCAGKRNRTYLMLRSSQPSSTPLQSLDSFHILLQTAKLCWGPHCFEMGSISSTWWPRASPASWALGS

SEQ ID NO: 42261 - protein, 1130 aa, Homo sapiens
MPCGFSPSPVAHHLVPGPPDTPAQQLRCGWTVGGWLLSLVRGLLPCLPPGARTAEGPIMVLAGPLAVSLLLPSLTLLVSHLSSSQDVSSEPSSEQQLCALSKHPTVAFEDLQPWVSNFTYPGARDFSQLALDPSGNQLIVGARNYLFRLSLANVSLLQATEWASSEDTRRSCQSKGKTEEECQNYVRVLIVAGRKVFMCGTNAFSPMCTSRQVGNLSRTIEKINGVARCPYDPRHNSTAVISSQGELYAATVIDFSGRDPAIYRSLGSGPPLRTAQYNSKWLNEPNFVAAYDIGLFAYFFLRENAVEHDCGRTVYSRVARVCKNDVGGRFLLEDTWTTFMKARLNCSRPGEVPFYYNELQSAFHLPEQDLIYGVFTTNVNSIAASAVCAFNLSAISQAFNGPFRYQENPRAAWLPIANPIPNFQCGTLPETGPNENLTERSLQDAQRLFLMSEAVQPVTPEPCVTQDSVRFSHLVVDLVQAKDTLYHVLYIGTESGTILKALSTASRSLHGCYLEELHVLPPGRREPLRSLRILHSARALFVGLRDGVLRVPLERCAAYRSQGACLGARDPYCGWDGKQQRCSTLEDSSNMSLWTQNITACPVRNVTRDGGFGPWSPWQPCEHLDGDNSGSCLCRARSCDSPRPRCGGLDCLGPAIHIANCSRNGAWTPWSSWALCSTSCGIGFQVRQRSCSNPAPRHGGRICVGKSREERFCNENTPCPVPIFWASWGSWSKCSSNCGGGMQSRRRACENGNSCLGCGVEFKTCNPEGCPEVRRNTPWTPWLPVNVTQGGARQEQRFRFTCRAPLADPHGLQFGRRRTETRTCPADGSGSCDTDALVEVLLRSGSTSPHTVSGGWAAWGPWSSCSRDCELGFRVRKRTCTNPEPRNGGLPCVGDAAEYQDCNPQACPVRGAWSCWTSWSPCSASCGGGHYQRTRSCTSPAPSPEGWSPWSEWSKCTDDGAQSRSRHCEELLPGSSACAGNSSQSRPCPYSEIPVILPASSMEEATDCAGFNLIHLVATGISCFLGSGLLTLAVYLSCQHCQRQSQESTLVHPATPNHLHYKGGGTPKNEKYTPMEFKTLNKNNLIPDDRANFYPLQQTNVYTTTYYPSPLNKHSFRPEASPGQRCFPNS

SEQ ID NO: 42262 - protein, 1205 aa, Homo sapiens
MLHLSAEEAIGCVRVRRSFIDELAFGRGHSTGTGKQKRRDRVSGSSWCLACVSWMPCGFSPSPVAHHLVPGPPDTPAQQLRCGWTVGGWLLSLVRGLLPCLPPGARTAEGPIMVLAGPLAVSLLLPSLTLLVSHLSSSQDVSSEPSSEQQLCALSKHPTVAFEDLQPWVSNFTYPGARDFSQLALDPSGNQLIVGARNYLFRLSLANVSLLQATEWASSEDTRRSCQSKGKTEEECQNYVRVLIVAGRKVFMCGTNAFSPMCTSRQVGNLSRTIEKINGVARCPYDPRHNSTAVISSQGELYAATVIDFSGRDPAIYRSLGSGPPLRTAQYNSKWLNEPNFVAAYDIGLFAYFFLRENAVEHDCGRTVYSRVARVCKNDVGGRFLLEDTWTTFMKARLNCSRPGEVPFYYNELQSAFHLPEQDLIYGVFTTNVNSIAASAVCAFNLSAISQAFNGPFRYQENPRAAWLPIANPIPNFQCGTLPETGPNENLTERSLQDAQRLFLMSEAVQPVTPEPCVTQDSVRFSHLVVDLVQAKDTLYHVLYIGTESGTILKALSTASRSLHGCYLEELHVLPPGRREPLRSLRILHSARALFVGLRDGVLRVPLERCAAYRSQGACLGARDPYCGWDGKQQRCSTLEDSSNMSLWTQNITACPVRNVTRDGGFGPWSPWQPCEHLDGDNSGSCLCRARSCDSPRPRCGGLDCLGPAIHIANCSRNGAWTPWSSWALCSTSCGIGFQVRQRSCSNPAPRHGGRICVGKSREERFCNENTPCPVPIFWASWGSWSKCSSNCGGGMQSRRRACENGNSCLGCGVEFKTCNPEGCPEVRRNTPWTPWLPVNVTQGGARQEQRFRFTCRAPLADPHGLQFGRRRTETRTCPADGSGSCDTDALVEVLLRSGSTSPHTVSGGWAAWGPWSSCSRDCELGFRVRKRTCTNPEPRNGGLPCVGDAAEYQDCNPQACPVRGAWSCWTSWSPCSASCGGGHYQRTRSCTSPAPSPGEDICLGLHTEEALCATQACPEGWSPWSEWSKCTDDGAQSRSRHCEELLPGSSACAGNSSQSRPCPYSEIPVILPASSMEEATDCAGFNLIHLVATGISCFLGSGLLTLAVYLSCQHCQRQSQESTLVHPATPNHLHYKGGGTPKNEKYTPMEFKTLNKNNLIPDDRANFYPLQQTNVYTTTYYPSPLNKHSFRPEASPGQRCFPNS

SEQ ID NO: 42263 - protein, 532 aa, Homo sapiens
MEKSNETNGYLDSAQAGPAAGPGAPGTAAGRARRCAGFLRRQALVLLTVSGVLAGAGLGAALRGLSLSRTQVTYLAFPGEMLLRMLRMIILPLVVCSLVSGAASLDASCLGRLGGIAVAYFGLTTLSASALAVALAFIIKPGSGAQTLQSSDLGLEDSGPPPVPKETVDSFLDLARNLFPSNLVVAAFRTYATDYKVVTQNSSSGNVTHEKIPIGTEIEGMNILGLVLFALVLGVALKKLGSEGEDLIRFFNSLNEATMVLVSWIMWYVPVGIMFLVGSKIVEMKDIIVLVTSLGKYIFASILGHVIHGGIVLPLIYFVFTRKNPFRFLLGLLAPFATAFATCSSSATLPSMMKCIEENNGVDKRISRFILPIGATVNMDGAAIFQCVAAVFIAQLNNVELNAGQIFTILVTATASSVGAAGVPAGGVLTIAIILEAIGLPTHDLPLILAVDWIVDRTTTVVNVEGDALGAGILHHLNQKATKKGEQELAEVKVEAIPNCKSEEETSPLVTHQNPAGPVASAPELESKESVL

SEQ ID NO: 42264 - protein, 234 aa, Homo sapiens
MNILGLVLFALVLGVALKKLGSEGEDLIRFFNSLNEATMVLVSWIMCSATLPSMMKCIEENNGVDKRISRFILPIGATVNMDGAAIFQCVAAVFIAQLNNVELNAGQIFTILVTATASSVGAAGVPAGGVLTIAIILEAIGLPTHDLPLILAVDWIVDRTTTVVNVEGDALGAGILHHLNQKATKKGEQELAEVKVEAIPNCKSEEETSPLVTHQNPAGPVASAPELESKESVL

SEQ ID NO: 42265 - protein, 1591 aa, Homo sapiens
MGNAESQHVEHEFYGEKHASLGRKHTSRSLRLSHKTRRTRHASSGKVIHRNSEVSTRSSSTPSIPQSLAENGLEPFSQDGTLEDFGSPIWVDRVDMGLRPVSYTDSSVTPSVDSSIVLTAASVQSMPDTEESRLYGDDATYLAEGGRRQHSYTSNGPTFMETASFKKKRSKSADIWREDSLEFSLSDLSQEHLTSNEEILGSAEEKDCEEARGMETRASPRQLSTCQRANSLGDLYAQKNSGVTANGGPGSKFAGYCRNLVSDIPNLANHKMPPAAAEETPPYSNYNTLPCRKSHCLSEGATNPQISHSNSMQGRRAKTTQDVNAGEGSEFADSGIEGATTDTDLLSRRSNATNSSYSPTTGRAFVGSDSGSSSTGDAARQGVYENFRRELEMSTTNSESLEEAGSAHSDEQSSGTLSSPGQSDILLTAAQGTVRKAGALAVKNFLVHKKNKKVESATRRKWKHYWVSLKGCTLFFYESDGRSGIDHNSIPKHAVWVENSIVQAVPEHPKKDFVFCLSNSLGDAFLFQTTSQTELENWITAIHSACATAVARHHHKEDTLRLLKSEIKKLEQKIDMDEKMKKMGEMQLSSVTDSKKKKTILDQIFVWEQNLEQFQMDLFRFRCYLASLQGGELPNPKRLLAFASRPTKVAMGRLGIFSVSSFHALVAARTGETGVRRRTQAMSRSASKRRSRFSSLWGLDTTSKKKQGRPSINQVFGEGTEAVKKSLEGIFDDIVPDGKREKEVVLPNVHQHNPDCDIWVHEYFTPSWFCLPNNQPALTVVRPGDTARDTLELICKTHQLDHSAHYLRLKFLIENKMQLYVPQPEEDIYELLYKEIEICPKVTQSIHIEKSDTAADTYGFSLSSVEEDGIRRLYVNSVKETGLASKKGLKAGDEILEINNRAADALNSSMLKDFLSQPSLGLLVRTYPELEEGVELLESPPHRVDGPADLGESPLAFLTSNPGHSLCSEQGSSAETAPEETEGPDLESSDETDHSSKSTEQVAAFCRSLHEMNPSDQSPSPQDSTGPQLATMRQLSDADKLRKVICELLETERTYVKDLNCLMERYLKPLQKETFLTQDELDVLFGNLTEMVEFQVEFLKTLEDGVRLVPDLEKLEKVDQFKKVLFSLGGSFLYYADRFKLYSAFCASHTKVPKVLVKAKTDTAFKAFLDAQNPKQQHSSTLESYLIKPIQRILKYPLLLRELFALTDAESEEHYHLDVAIKTMNKVASHINEMQKIHEEFGAVFDQLIAEQTGEKKEVADLSMGDLLLHTTVIWLNPPASLGKWKKEPELAAFVFKTAVVLVYKDGSKQKKKLVGSHRLSIYEDWDPFRFRHMIPTEALQVRALASADAEANAVCEIVHVKSESEGRPERVFHLCCSSPESRKDFLKAVHSILRDKHRRQLLKTESLPSSQQYVPFGGKRLCALKGARPAMSRAVSAPSKSLGRRRRRLARNRFTIDSDAVSASSPEKESQQPPGGGDTDRWVEEQFDLAQYEEQDDIKETDILSDDDEFCESVKGASVDRDLQERLQATSISQRERGRKTLDSHASRMAQLKKQAALSGINGGLESASEEVIWVRREDFAPSRKLNTEI

SEQ ID NO: 42266 - protein, 1531 aa, Homo sapiens
MGNAESQHVEHEFYGEKHASLGRKHTSRSLRLSHKTRRTRHASSGKVIHRNSEVSTRSSSTPSIPQSLAENGLEPFSQDGTLEDFGSPIWVDRVDMGLRPVSYTDSSVTPSVDSSIVLTAASVQSMPDTEESRLYGDDATYLAEGGRRQHSYTSNGPTFMETASFKKKRSKSADIWREDSLEFSLSDLSQEHLTSNEEILGSAEEKDCEEARGMETRASPRQLSTCQRANSLGDLYAQKNSGVTANGGPGSKFAGYCRNLVSDIPNLANHKMPPAAAEETPPYSNYNTLPCRKSHCLSEGATNPQISHSNSMQGRRAKTTQDVNAGEGSEFADSGIEGATTDTDLLSRRSNATNSSYSPTTGRAFVGSDSGSSSTGDAARQGVYENFRRELEMSTTNSESLEEAGSAHSDEQSSGTLSSPGQSDILLTAAQGTVRKAGALAVKNFLVHKKNKKVESATRRKWKHYWVSLKGCTLFFYESDGRSGIDHNSIPKHAVWVENSIVQAVPEHPKKDFVFCLSNSLGDAFLFQTTSQTELENWITAIHSACATAVARHHHKEDTLRLLKSEIKKLEQKIDMDEKMKKMGEMQLSSVTDSKKKKTILDQIFVWEQNLEQFQMDLFRFRCYLASLQGGELPNPKRLLAFASRPTKVAMGRLGIFSVSSFHALVAARTGETGVRRRTQAMSRSASKRRSRFSSLWGLDTTSKKKQGRPSINQREKEVVLPNVHQHNPDCDIWVHEYFTPSWFCLPNNQPALTVVRPGDTARDTLELICKLYKEIEICPKVTQSIHIEKSDTAADTYGFSLSSVEEDGIRRLYVNSVKETGLASKKGLKAGDEILEINNRAADALNSSMLKDFLSQPSLGLLVRTYPELEEGVELLESPPHRVDGPADLGESPLAFLTSNPGHSLCSEQGSSAETAPEETEGPDLESSDETDHSSKSTEQVAAFCRSLHEMNPSDQSPSPQDSTGPQLATMRQLSDADKLRKVICELLETERTYVKDLNCLMERYLKPLQKETFLTQDELDVLFGNLTEMVEFQVEFLKTLEDGVRLVPDLEKLEKVDQFKKVLFSLGGSFLYYADRFKLYSAFCASHTKVPKVLVKAKTDTAFKAFLDAQNPKQQHSSTLESYLIKPIQRILKYPLLLRELFALTDAESEEHYHLDVAIKTMNKVASHINEMQKIHEEFGAVFDQLIAEQTGEKKEVADLSMGDLLLHTTVIWLNPPASLGKWKKEPELAAFVFKTAVVLVYKDGSKQKKKLVGSHRLSIYEDWDPFRFRHMIPTEALQVRALASADAEANAVCEIVHVKSESEGRPERVFHLCCSSPESRKDFLKAVHSILRDKHRRQLLKTESLPSSQQYVPFGGKRLCALKGARPAMSRAVSAPSKSLGRRRRRLARNRFTIDSDAVSASSPEKESQQPPGGGDTDRWVEEQFDLAQYEEQDDIKETDILSDDDEFCESVKGASVDRDLQERLQATSISQRERGRKTLDSHASRMAQLKKQAALSGINGGLESASEEVIWVRREDFAPSRKLNTEI

SEQ ID NO: 42267 - protein, 930 aa, Homo sapiens
MPRAPHFMPLLLLLLLLSLPHTQAAFPQDPLPLLISDLQGTSPLSWFRGLEDDAVAAELGLDFQRFLTLNRTLLVAARDHVFSFDLQAEEEGEGLVPNKYLTWRSQDVENCAVRGKLTDECYNYIRVLVPWDSQTLLACGTNSFSPVCRSYGITSLQQEGEELSGQARCPFDATQSNVAIFAEGSLYSATAADFQASDAVVYRSLGPQPPLRSAKYDSKWLREPHFVQALEHGDHVYFFFREVSVEDARLGRVQFSRVARVCKRDMGGSPRALDRHWTSFLKLRLNCSVPGDSTFYFDVLQALTGPVNLHGRSALFGVFTTQTNSIPGSAVCAFYLDEIERGFEGKFKEQRSLDGAWTPVSEDRVPSPRPGSCAGVGGAALFSSSRDLPDDVLTFIKAHPLLDPAVPPVTHQPLLTLTSRALLTQVAVDGMAGPHSNITVMFLGSNDGTVLKVLTPGGRSGGPEPILLEEIDAYSPARCSGKRTAQTARRIIGLELDTEGHRLFVAFSGCIVYLPLSRCARHGACQRSCLASQDPYCGWHSSRGCVDIRGSGGTDVDQAGNQESMEHGDCQDGATGSQSGPGDSAYGVRRDLPPASASRSVPIPLLLASVAAAFALGASVSGLLVSCACRRAHRRRGKDIETPGLPRPLSLRSLARLHGGGPEPPPPSKDGDAVQTPQLYTTFLPPPEGVPPPELACLPTPESTPELPVKHLRAAGDPWEWNQNRNNAKEGPGRSRGGHAAGGPAPRVLVRPPPPGCPGQAVEVTTLEELLRYLHGPQPPRKGAEPPAPLTSRALPPEPAPALLGGPSPRPHECASPLRLDVPPEGRCASAPARPALSAPAPRLGVGGGRRLPFSGHRAPPALLTRVPSGGPSRYSGGPGKHLLYLGRPEGYRGRALKRVDVEKPQLSLKPPLVGPSSRQAVPNGGRFNF

SEQ ID NO: 42268 - protein, 922 aa, Homo sapiens
MPRAPHFMPLLLLLLLLSLPHTQAAFPQDPLPLLISDLQGTSPLSWFRGLEDDAVAAELGLDFQRFLTLNRTLLVAARDHVFSFDLQAEEEGEGLVPNKYLTWRSQDVENCAVRGKLTDECYNYIRVLVPWDSQTLLACGTNSFSPVCRSYGITSLQQEGEELSGQARCPFDATQSNVAIFAEPHFVQALEHGDHVYFFFREVSVEDARLGRVQFSRVARVCKRDMGGSPRALDRHWTSFLKLRLNCSVPGDSTFYFDVLQALTGPVNLHGRSALFGVFTTQTNSIPGSAVCAFYLDEIERGFEGKFKEQRSLDGAWTPVSEDRVPSPRPGSCAGVGGAALFSSSRDLPDDVLTFIKAHPLLDPAVPPVTHQPLLTLTSRALLTQVAVDGMAGPHSNITVMFLGSNDGTVLKVLTPGGRSGGPEPILLEEIDAYSPARCSGKRTAQTARRIIGLELDTEGHRLFVAFSGCIVYLPLSRCARHGACQRSCLASQDPYCGWHSSRGCVDIRGSGGTDVDQAGNQESMEHGDCQDGATGSQSGPGDSAYVLPGPGPSPGTPSPPSDAHPRPQSSTLGVHTRGVRRDLPPASASRSVPIPLLLASVAAAFALGASVSGLLVSCACRRAHRRRGKDIETPGLPRPLSLRSLARLHGGGPEPPPPSKDGDAVQTPQLYTTFLPPPEGVPPPELACLPTPESTPELPVKHLRAAGDPWEWNQNRNNAKEGPGRSRGGHAAGGPAPRVLVRPPPPGCPGQAVEVTTLEELLRYLHGPQPPRKGAEPPAPLTSRALPPEPAPALLGGPSPRPHECASPLRLDVPPEGRCASAPARPALSAPAPRLGVGGGRRLPFSGHRAPPALLTRVPSGGPSRYSGGPGKHLLYLGRPEGYRGRALKRVDVEKPQLSLKPPLVGPSSRQAVPNGGRFNF

SEQ ID NO: 42269 - protein, 962 aa, Homo sapiens
MPRAPHFMPLLLLLLLLSLPHTQAAFPQDPLPLLISDLQGTSPLSWFRGLEDDAVAAELGLDFQRFLTLNRTLLVAARDHVFSFDLQAEEEGEGLVPNKYLTWRSQDVENCAVRGKLTDECYNYIRVLVPWDSQTLLACGTNSFSPVCRSYGITSLQQEGEELSGQARCPFDATQSNVAIFAEGSLYSATAADFQASDAVVYRSLGPQPPLRSAKYDSKWLREPHFVQALEHGDHVYFFFREVSVEDARLGRVQFSRVARVCKRDMGGSPRALDRHWTSFLKLRLNCSVPGDSTFYFDVLQALTGPVNLHGRSALFGVFTTQTNSIPGSAVCAFYLDEIERGFEGKFKEQRSLDGAWTPVSEDRVPSPRPGSCAGVGGAALFSSSRDLPDDVLTFIKAHPLLDPAVPPVTHQPLLTLTSRALLTQVAVDGMAGPHSNITVMFLGSNDGTVLKVLTPGGRSGGPEPILLEEIDAYSPARCSGKRTAQTARRIIGLELDTEGHRLFVAFSGCIVYLPLSRCARHGACQRSCLASQDPYCGWHSSRGCVDIRGSGGTDVDQAGNQESMEHGDCQDGATGSQSGPGDSAYVLPGPGPSPGTPSPPSDAHPRPQSSTLGVHTRGVRRDLPPASASRSVPIPLLLASVAAAFALGASVSGLLVSCACRRAHRRRGKDIETPGLPRPLSLRSLARLHGGGPEPPPPSKDGDAVQTPQLYTTFLPPPEGVPPPELACLPTPESTPELPVKHLRAAGDPWEWNQNRNNAKEGPGRSRGGHAAGGPAPRVLVRPPPPGCPGQAVEVTTLEELLRYLHGPQPPRKGAEPPAPLTSRALPPEPAPALLGGPSPRPHECASPLRLDVPPEGRCASAPARPALSAPAPRLGVGGGRRLPFSGHRAPPALLTRVPSGGPSRYSGGPGKHLLYLGRPEGYRGRALKRVDVEKPQLSLKPPLVGPSSRQAVPNGGRFNF

SEQ ID NO: 42270 - protein, 192 aa, Homo sapiens
MVRAGAVGAHLPASGLDIFGDLKKMNKRQLYYQVLNFAMIVSSALMIWKGLIVLTGSESPIVVVLSGSMEPAFHRGDLLFLTNFREDPIRAGEIVVFKVEGRDIPIVHRVIKVHEKDNGDIKFLTKGDNNEVDDRGLYKEGQNWLEKKDVVGRARGFLPYVGMVTIIMNDYPKFKYALLAVMGAYVLLKRES

SEQ ID NO: 42271 - protein, 166 aa, Homo sapiens
MNKWRLYYQVLNFGMIVSSALMIWKGLMVITGSESPIVLLSGSMEPAFHRGYLLFLTNRVEDPIRVGEIAVLRIEGRKIPIVHRVLKIHEKQNGHIKFLTKGDNNAVDDRGLYKQDQHWLEKKDVVGRARGFVPYIGIGTSLMNDYPKHKYEVLFLLGLFVLVHRE

SEQ ID NO: 42272 - protein, 538 aa, Homo sapiens
MAGPPALPPPETAAAATTAAAASSSAASPHYQEWILDTIDSLRSRKARPDLERICRMVRRRHGPEPERTRAELEKLIQQRAVLRVSYKGSISYRNAARVQPPRRGATPPAPPRAPRGAPAAAAAAAPPPTPAPPPPPAPVAAAAPARAPRAAAAAATAPPSPGPAQPGPRAQRAAPLAAPPPAPAAPPAVAPPAGPRRAPPPAVAAREPPLPPPPQPPAPPQQQQPPPPQPQPPPEGGAVRAGGAARPVSLREVVRYLGGSGGAGGRLTRGRVQGLLEEEAAARGRLERTRLGALALPRGDRPGRAPPAASARPSRSKRGGEERVLEKEEEEDDDEDEDEEDDVSEGSEVPESDRPAGAQHHQLNGERGPQSAKERVKEWTPCGPHQGQDEGRGPAPGSGTRQVFSMAAMNKEGGTASVATGPDSPSPVPLPPGKPALPGADGTPFGCPPGRKEKPSDPVEWTVMDVVEYFTEAGFPEQATAFQEQEIDGKSLLLMQRTDVLTGLSIRLGPALKIYEHHIKVLQQGHFEDDDPDGFLG

SEQ ID NO: 42273 - protein, 582 aa, Homo sapiens
MKSIILFVLSLLLILEKQAAVMGQKGGSKGQLPSGSSQFPHGQKGQHYFGQKDQQHTKSKGSFSIQHTYHVDINDHDWTRKSQQYDLNALHKATKSKQHLGGSQQLLNYKQEGRDHDKSKGHFHMIVIHHKGGQAHHGTQNPSQDQGNSPSGKGLSSQCSNTEKRLWVHGLSKEQASASGAQKGRTQGGSQSSYVLQTEELVVNKQQRETKNSHQNKGHYQNVVDVREEHSSKLQTSLHPAHQDRLQHGPKDIFTTQDELLVYNKNQHQTKNLSQDQEHGRKAHKISYPSSRTEERQLHHGEKSVQKDVSKGSISIQTEEKIHGKSQNQVTIHSQDQEHGHKENKISYQSSSTEERHLNCGEKGIQKGVSKGSISIQTEEQIHGKSQNQVRIPSQAQEYGHKENKISYQSSSTEERRLNSGEKDVQKGVSKGSISIQTEEKIHGKSQNQVTIPSQDQEHGHKENKMSYQSSSTEERRLNYGGKSTQKDVSQSSISFQIEKLVEGKSQIQTPNPNQDQWSGQNAKGKSGQSADSKQDLLSHEQKGRYKQESSESHNIVITEHEVAQDDHLTQQYNEDRNPIST

SEQ ID NO: 42274 - protein, 146 aa, Homo sapiens
MQVLTKRYPKNCLLTVMDRYAAEVHNMEQVVMIPSLLRDVQLSGPGGQAQAEAPDLYTYFTMLKAICVDVDHGLLPREEWQAKVAGSEENGTAETEEVEDESASGELDLEAQFHLHFSSLHHILMHLTEKAQEVTRKYQEMTGQVW

SEQ ID NO: 42275 - protein, 128 aa, Homo sapiens
MYCQDSNICAVFAVQGGKVGRKHGIKRGRRPSIRSPAQRARGPWIHESKHPAFAKQQINLEMPNSRATTELAWVCSSTSRKKKWARSLTLSTAPLSPPPSLVHCEDCSCLPGCHSGDLYNLAPAERTC

SEQ ID NO: 42276 - protein, 767 aa, Homo sapiens
MATYLEFIQQNEERDGVRFSWNVWPSSRLEATRMVVPLACLLTPLKERPDLPPVQYEPVLCSRPTCKAVLNPLCQVDYRAKLWACNFCFQRNQFPPAYGGISEVNQPAELMPQFSTIEYVIQRGAQSPLIFLYVVDTCLEEDDLQALKESLQMSLSLLPPDALVGLITFGRMVQVHELSCEGISKSYVFRGTKDLTAKQIQDMLGLTKPAMPMQQARPAQPQEHPFASSRFLQPVHKIDMNLTDLLGELQRDPWPVTQGKRPLRSTGVALSIAVGLLEGTFPNTGARIMLFTGGPPTQGPGMVVGDELKIPIRSWHDIEKDNARFMKKATKHYEMLANRTAANGHCIDIYACALDQTGLLEMKCCANLTGGYMVMGDSFNTSLFKQTFQRIFTKDFNGDFRMAFGATLDVKTSRELKIAGAIGPCVSLNVKGPCVSENELGVGGTSQWKICGLDPTSTLGIYFEVVNQHNTPIPQGGRGAIQFVTHYQHSSTQRRIRVTTIARNWADVQSQLRHIEAAFDQEAAAVLMARLGVFRAESEEGPDVLRWLDRQLIRLCQKFGQYNKEDPTSFRLSDSFSLYPQFMFHLRRSPFLQVFNNSPDESSYYRHHFARQDLTQSLIMIQPILYSYSFHGPPEPVLLDSSSILADRILLMDTFFQIVIYLGETIAQWRKAGYQDMPEYENFKHLLQAPLDDAQEILQARFPMPRYINTEHGGSQARFLLSKVNPSQTHNNLYAWGQETGAPILTDDVSLQVFMDHLKKLAVSSAC

SEQ ID NO: 42277 - protein, 521 aa, Homo sapiens
MDELLLDLFHKLTSGRQLAAGNGLCGISHKEQEVWKPGHNILVKMRKEDKSLVWLIHSTLARYTQVTNFLGTSRSSVTRCKPGANCPSSHSGISRQLSPLSVTEDSSAPILELQNQGSSGVCGHRVERQNRSADDGTQTHSENSSQENRIKARCLSCTSMVLKGIWGLLIILSVSSSWVGTTQIVKITYKNFYCPFFMTWFSTNWNIMFFPVYYSGHLATAQEKQSPMKKFRECSRIFGEDGLTLKLFLKRTAPFSILWTLTNYLYLLALKKLTATDVSALFCCNKAFVFLLSWIVLKDRFMGVRIVAAIMAITGIVMMAYADNFHADSIIGVAFAVGSASTSALYKVLFKMFLGSANFGEAAHFVSTLGFFNLIFISFTPVILYFTKVEHWSSFAALPWGCLCGMAGLWLAFNILVNVGVVLTYPILISIGTVLSVPGNAAVDLLKQEVIFNVVRLAATIIICIGFLLMLLPEEWDEITLRFINSLKEKKSEEHVDDVTDPSIHLRGRGRANGTVSIPLA

SEQ ID NO: 42278 - protein, 362 aa, Homo sapiens
MVLKGIWGLLIILSVSSSWVGTTQIVKITYKNFYCPFFMTWFSTNWNIMFFPVYYSGHLATAQEKQSPMKKFRECSRIFGEDGLTLKLFLKRTAPFSILWTLTNYLYLLALKKLTATDVSALFCCNKAFVFLLSWIVLKDRFMGVRIVAAIMAITGIVMMAYADNFHADSIIGVAFAVGSASTSALYKVLFKMFLGSANFGEAAHFVSTLGFFNLIFISFTPVILYFTKVEHWSSFAALPWGCLCGMAGLWLAFNILVNVGVVLTYPILISIGTVLSVPGNAAVDLLKQEVIFNVVRLAATIIICIGFLLMLLPEEWDEITLRFINSLKEKKSEEHVDDVTDPSIHLRGRGRANGTVSIPLA

SEQ ID NO: 42279 - protein, 418 aa, Homo sapiens
MHPRRPDGFDGLGYRGGARDEQGFGGAFPARSFSTGSDLGHWVTTPPDIPGSRNLHWGEKSPPYGVPTTSTPYEGPTEEPFSSGGGGSVQGQSSEQLNRFAGFGIGLASLFTENVLAHPCIVLRRQCQVNYHAQHYHLTPFTVINIMYSFNKTQGPRALWKGMGSTFIVQGVTLGAEGIISEFTPLPREVLHKWSPKQIGEHLLLKSLTYVVAMPFYSASLIETVQSEIIRDNTGILECVKEGIGRVIGMGVPHSKRLLPLLSLIFPTVLHGVLHYIISSVIQKFVLLILKRKTYNSHLAESTSPVQSMLDAYFPELIANFAASLCSDVILYPLETVLHRLHIQGTRTIIDNTDLGYEVLPINTQYEGMRDCINTIRQEEGVFGFYKGFGAVIIQYTLHAAVLQITKIIYSTLLQNNI

SEQ ID NO: 42280 - protein, 272 aa, Homo sapiens
MYSFNKTQGPRALWKGMGSTFIVQGVTLGAEGIISEFTPLPREVLHKWSPKQIGEHLLLKSLTYVVAMPFYSASLIETVQSEIIRDNTGILECVKEGIGRVIGMGVPHSKRLLPLLSLIFPTVLHGVLHYIISSVIQKFVLLILKRKTYNSHLAESTSPVQSMLDAYFPELIANFAASLCSDVILYPLETVLHRLHIQGTRTIIDNTDLGYEVLPINTQYEGMRDCINTIRQEEGVFGFYKGFGAVIIQYTLHAAVLQITKIIYSTLLQNNI

SEQ ID NO: 42281 - protein, 337 aa, Homo sapiens
MHPRRPDGFDGLGYRGGARDEQGFGGAFPARSFSTGSDLGHWVTTPPDIPGSRNLHWGEKSPPYGVPTTSTPYEGPTEEPFSSGGGGSVQGQSSEQLNRFAGFGIGLASLFTENVLAHPCIVLRRQCQVNYHAQHYHLTPFTVINIMYSFNKTQGPRALWKGMGSTFIVQGVTLGAEGIISEFTPLPREVLHKWSPKQIGEHLLLKSLTYVVAMPFYSASLIETVQSMLDAYFPELIANFAASLCSDVILYPLETVLHRLHIQGTRTIIDNTDLGYEVLPINTQYEGMRDCINTIRQEEGVFGFYKGFGAVIIQYTLHAAVLQITKIIYSTLLQNNI

SEQ ID NO: 42282 - protein, 370 aa, Homo sapiens
MGAQPGEPQNTCSRIQTLFRRVKTLLIKAPPPPQPPPPPPSWNPGCTHVYGYAFGHMHDNNLEHLPSQQVLDTGEQLMVPVEVLEVDNKEALWKFLLSGAMAGAVSRTGTAPLDRAKVYMQVYSSKTNFTNLLGGLQSMVQEGGFRSLWRGNGINVLKIAPEYAIKFSVFEQCKNYFCGIQGSPPFQERLLAGSLAVAISQTLINPMEVLKTRLTLRRTGQYKGLLDCARQILQREGTRALYRGYLPNMLGIIPYACTDLAVYEMLQCFWVKSGRDMGDPSGLVSLSSVTLSTTCGQMASYPLTLVRTRMQAQDTVEGSNPTMRGVLQRILAQQGWLGLYRGMTPTLLKVLPAGGISYVVYEAMKKTLGI

SEQ ID NO: 42283 - protein, 242 aa, Homo sapiens
MGAQPGEPQNTCSRIQTLFRRVKTLLIKAPPPPQPPPPPPSWNPGCTHVYGYAFGHMHDNNLEHLPSQQVLDTGEQLMVPVEVLEVDNKEALWKFLLSGAMAGAVSRTGTAPLDRAKVYMQLLGRLRQENRLNLGGGGCSEPRSPDRTPAWATESTPPRRTSPTCWGGYRAWSRRAASAPCGGATASTCSRLLLSMPSSSPYSSSARITSVEYKGPRPSRSVSLLAPWLWPSPRPSSTPWRC

SEQ ID NO: 42284 - protein, 94 aa, Homo sapiens
  MOD_RES (92)..(92): Selenocysteine
MVYISNGQVLDSRSQSPWRLSLITDFFWGIAEFVVLFFKTLLQQDVKKRRSYGNSSDSRYDDGRGPPGNPPRRMGRINHLRGPSPPPMAGGXGR

SEQ ID NO: 42285 - protein, 309 aa, Homo sapiens
MEQLLGIKLGCLFALLALTLGCGLTPICFKWFQIDAARGHHRLVLRLLGCISAGVFLGAGFMHMTAEALEEIESQIQKFMVQNRSASERNSSGDADSAHMEYPYGELIISLGFFFVFFLESLALQCCPGAAGGSTVQDEEWGGAHIFELHSHGHLPSPSKGPLRALVLLLSLSFHSVFEGLAVGLQPTVAATVQLCLAVLAHKGLVVFGVGMRLVHLGTSSRWAVFSILLLALMSPLGLAVGLAVTGGDSEGGRGLAQAVLEGVAAGTFLYVTFLEILPRELASPEAPLAKWSCVAAGFAFMAFIALWA

SEQ ID NO: 42286 - protein, 85 aa, Homo sapiens
MEQLLGIKLGCLFALLALTLGCGLTPICFKWFQIDAARGHHRLVLRLLGCISAGVFLGAGFMHMTAEALEEIESQIQKFMVQISK

SEQ ID NO: 42287 - protein, 395 aa, Homo sapiens
MPRYCAAICCKNRRGRNNKDRKLSFYPFPLHDKERLEKWLKNMKRDSWVPSKYQFLCSDHFTPDSLDIRWGIRYLKQTAVPTIFSLPEDNQGKDPSKKKSQKKNLEDEKEVCPKAKSEESFVLNETKKNIVNTDVPHQHPELLHSSSLVKPPAPKTGSIQNNMLTLNLVKQHTGKPESTLETSVNQDTGRGGFHTCFENLNSTTITLTTSNSESIHQSLETQEVLEVTTSHLANPNFTSNSMEIKSAQENPFLFSTINQTVEELNTNKESVIAIFVPAENSKPSVNSFISAQKETTEMEDTDIEDSLYKDVDYGTEVLQIEHSYCRQDINKEHLWQKVSKLHSKITLLELKEQQTLGRLKSLEALIRQLKQENWLSEENVKIIENHFTTYEVTMI

SEQ ID NO: 42288 - protein, 353 aa, Homo sapiens
MKRDSWVPSKYQFLCSDHFTPDSLDIRWGIRYLKQTAVPTIFSLPEDNQGKDPSKKKSQKKNLEDEKEVCPKAKSEESFVLNETKKNIVNTDVPHQHPELLHSSSLVKPPAPKTGSIQNNMLTLNLVKQHTGKPESTLETSVNQDTGRGGFHTCFENLNSTTITLTTSNSESIHQSLETQEVLEVTTSHLANPNFTSNSMEIKSAQENPFLFSTINQTVEELNTNKESVIAIFVPAENSKPSVNSFISAQKETTEMEDTDIEDSLYKDVDYGTEVLQIEHSYCRQDINKEHLWQKVSKLHSKITLLELKEQQTLGRLKSLEALIRQLKQENWLSEENVKIIENHFTTYEVTMI

SEQ ID NO: 42289 - protein, 791 aa, Homo sapiens
MSQPRPRYVVDRAAYSLTLFDDEFEKKDRTYPVGEKLRNAFRCSSAKIKAVVFGLLPVLSWLPKYKIKDYIIPDLLGGLSGGSIQVPQGMAFALLANLPAVNGLYSSFFPLLTYFFLGGVHQMVPGTFAVISILVGNICLQLAPESKFQVFNNATNESYVDTAAMEAERLHVSATLACLTAIIQMGLGFMQFGFVAIYLSESFIRGFMTAAGLQILISVLKYIFGLTIPSYTGPGSIVFTFIDICKNLPHTNIASLIFALISGAFLVLVKELNARYMHKIRFPIPTEMIVVVVATAISGGCKMPKKYHMQIVGEIQRGFPTPVSPVVSQWKDMIGTAFSLAIVSYVINLAMGRTLANKHGYDVDSNQEMIALGCSNFFGSFFKIHVICCALSVTLAVDGAGGKSQVASLCVSLVVMITMLVLGIYLYPLPKSVLGALIAVNLKNSLKQLTDPYYLWRKSKLDCCIWVVSFLSSFFLSLPYGVAVGVAFSVLVVVFQTQFRNGYALAQVMDTDIYVNPKTYNRAQDIQGIKIITYCSPLYFANSEIFRQKVIAKTGMDPQKVLLAKQKYLKKQEKRRMRPTQQRRSLFMKTKTVSLQELQQDFENAPPTDPNNNQTPANGTSVSYITFSPDSSSPAQSEPPASAEAPGEPSDMLASVPPFVTFHTLILDMSGVSFVDLMGIKALAKLSSTYGKIGVKVFLVNIHAQVYNDISHGGVFEDGSLECKHVFPSIHDAVLFAQANARDVTPGHNFQGAPGDAELSLYDSEEDIRSYWDLEQEMFGSMFHAETLTAL

SEQ ID NO: 42290 - protein, 887 aa, Homo sapiens
MSQPRPRYVVDRAAYSLTLFDDEFEKKDRTYPVGEKLRNAFRCSSAKIKAVVFGLLPVLSWLPKYKIKDYIIPDLLGGLSGGSIQVPQGMAFALLANLPAVNGLYSSFFPLLTYFFLGGVHQMVPGTFAVISILVGNICLQLAPESKFQVFNNATNESYVDTAAMEAERLHVSATLACLTAIIQMGLGFMQFGFVAIYLSESFIRGFMTAAGLQILISVLKYIFGLTIPSYTGPGSIVFTFIDICKNLPHTNIASLIFALISGAFLVLVKELNARYMHKIRFPIPTEMIVVVVATAISGGCKMPKKYHMQIVGEIQRGFPTPVSPVVSQWKDMIGTAFSLAIVSYVINLAMGRTLANKHGYDVDSNQEMIALGCSNFFGSFFKIHVICCALSVTLAVDGAGGKSQVASLCVSLVVMITMLVLGIYLYPLPKSVLGALIAVNLKNSLKQLTDPYYLWRKSKLDCCIWVVSFLSSFFLSLPYGVAVGVAFSVLVVVFQTQFRNGYALAQVMDTDIYVNPKTYNRAQDIQGIKIITYCSPLYFANSEIFRQKVIAKTGMDPQKVLLAKQKYLKKQEKRRMRPTQQRRSLFMKTKTVSLQELQQDFENAPPTDPNNNQTPANGTSVSYITFSPDSSSPAQSEPPASAEAPGEPSDMLASVPPFVTFHTLILDMSGVSFVDLMGIKALAKLSSTYGKIGVKVFLVNIHAQVYNDISHGGVFEDGSLECKHVFPSIHDAVLFAQANARDVTPGHNFQGAPGDAELSLYDSEEDIRSYWDLEQEMFGSMFHAETLTALESLSAAGGCYPYRSESLVSPLFTRQALAAMDKPPAHSTPPTSALSLAAEGHLDFQLLRVSQKQKDKYNCAGLLYKLQKVSQSPHGSVSDGVRLSRT

SEQ ID NO: 42291 - protein, 431 aa, Homo sapiens
MLQQILHDMYIDPELLAELSDVQKHILFYKMREEQLRRWKERETWEALAQDEGLRPPKTKRASDKHIQWLLGADGEVWVWIMGEGPGDKPYEEISEELIAERARLQAQREAEELWRQKEAEITKKFRDALANEKARILAEKWKVEMEDRKAAKVLEERIHEEFKRKEEEERKRGEEQIRLQEEQRAKELYWTLKQAQLHCQASEKEEREWEEQLRRSKAADEERSRRAQRARDEYRHHSLRAIQKGTVAGLSSMFRELGQSHEQEARLYHHLPDPGLPQPLALPVRTWERPLRPVSRDVIVRWFKEEQLPRRAGFERNTKFIAPWFHGIISREDAEALLENMTEGAFLVRVSEKIWGYTLSYRLQKGFKHFLVDASGDFYSFLGVDPNRHATLTDLVDFHKEEIITVSGGELLQEPCGQRDSPPDYHLLFE

SEQ ID NO: 42292 - protein, 357 aa, Homo sapiens
MLQQILHDMYIDPELLAELSDVQKHILFYKMREEQLRRWKERETWEALAQDEGLRPPKTKRAASDKHIQWLLGADGEVWVWIMGEGPGDKPYEEISEELIAERARLQAQREAEELWRQKEAEITKKFRDALANEKARILAEKWKVEMEDRKAAKVLEERIHEEFKRKEEEERKRGEEQIRLQEEQRAKELYWTLKQAQLHCQASEKEEREWEEQLRRSKAADEERSRRAQRARDEYRHHSLRAIQKGTVAGLSSMFRELGQSHEQEARLYHHLPDPGLPQPLALPVRTWERPLRPVSRDVIVRWFKEEQLPRRAGFERNTKFIAPWFHGGNYHCFRRRVTSGTLRTEGQPTRLPSVV

SEQ ID NO: 42293 - protein, 309 aa, Homo sapiens
MLPEDSGGSPDAAASDKHIQWLLGADGEVWVWIMGEGPGDKPYEEISEELIAERARLQAQREAEELWRQKEAEITKKFRDALANEKARILAEKWKVEMEDRKAAKVLEERIHEEFKRKEEEERKRGEEQIRLQEEQRAKELYWTLKQAQLHCQASEKEEREWEEQLRRSKAADEERSRRAQRARDEYRHHSLRAIQKGTVAGLSSMFRELGQSHEQEARLYHHLPDPGLPQPLALPVSRTWERPLRPVSRDVIVRWFKEEQLPRRAGFERNTKFIAPWFHGGNYHCFRRRVTSGTLRTEGQPTRLPSVV

SEQ ID NO: 42294 - protein, 314 aa, Homo sapiens
MKMSFALTFRSAKGRWIANPSQPCSKASIGLFVPASPPLDPEKVKELQRFITLSKRLLVMTGAGISTESGIPDYRSEKVGLYARTDRRPIQHGDFVRSAPIRQRYWARNFVGWPQFSSHQPNPAHWALSTWEKLGKLYWLVTQNVDALHTKAGSRRLTELHGCMDRVLCLDCGEQTPRGVLQERFQVLNPTWSAEAHGLAPDGDVFLSEEQVRSFQVPTCVQCGGHLKPDVVFFGDTVNPDKVDFVHKRVKEADSLLVVGSSLQVYSGYRFILTAWEKKLPIAILNIGPTRSDDLACLKLNSRCGELLPLIDPC

SEQ ID NO: 42295 - protein, 691 aa, Homo sapiens
MDQNQHLNKTAEAQPSENKKTRYCNGLKMFLAALSLSFIAKTLGAIIMKSSIIHIERRFEISSSLVGFIDGSFEIGNLLVIVFVSYFGSKLHRPKLIGIGCFIMGIGGVLTALPHFFMGYYRYSKETNINSSENSTSTLSTCLINQILSLNRASPEIVGKGCLKESGSYMWIYVFMGNMLRGIGETPIVPLGLSYIDDFAKEGHSSLYLGILNAIAMIGPIIGFTLGSLFSKMYVDIGYVDLSTIRITPTDSRWVGAWWLNFLVSGLFSIISSIPFFFLPQTPNKPQKERKASLSLHVLETNDEKDQTANLTNQGKNITKNVTGFFQSFKSILTNPLYVMFVLLTLLQVSSYIGAFTYVFKYVEQQYGQPSSKANILLGVITIPIFASGMFLGGYIIKKFKLNTVGIAKFSCFTAVMSLSFYLLYFFILCENKSVAGLTMTYDGNNPVTSHRDVPLSYCNSDCNCDESQWEPVCGNNGITYISPCLAGCKSSSGNKKPIVFYNCSCLEVTGLQNRNYSAHLGECPRDDACTRKFYFFVAIQVLNLFFSALGGTSHVMLIVKIVQPELKSLALGFHSMVIRALGGILAPIYFGALIDTTCIKWSTNNCGTRGSCRTYNSTSFSRVYLGLSSMLRVSSLVLYIILIYAMKKKYQEKDINASENGSVMDEANLESLNKNKHFVPSAGADSETHC

SEQ ID NO: 42296 - protein, 305 aa, Homo sapiens
MGGTLAWTLLLPLLLRESDSLEPSCTVSSADVDWNAEFSATCLNFSGLSLSLPHNQSLRASNVILLDLSGNGLRELPVTFFAHLQKLEVLNVLRNPLSRVDGALAARCDLDLQADCNCALESWHDIRRDNCSGQKPLLCWDTTSSQHNLSAFLEVSCAPGLASATIGAVVVSGCLLLGLAIAGPVLAWRLWRCRVARSRELNKPWAAQDGPKPGLGLQPRYGSRSAPKPQVAVPSCPSTPDYENMFVGQPAAEHQWDEQGAHPSEDNDFYINYKDIDLASQPVYCNLQSLGQAPMDEEEYVIPGH

SEQ ID NO: 42297 - protein, 880 aa, Homo sapiens
MKNLYFRVITIVIGLYFTGIMTNASRKSNILFNSECQWNEYILTNCSFTGKCDIPVDISQTAATVDVSFNFFRVLLQSHTKKEEWKIKHLDLSNNLISKITLSPFAYLHALEVLNLSNNAIHSLSLDLLSPKSSWVKRHRSSFRNRFPLLKVLILQRNKLSDTPKGLWKLKSLQSLDLSFNGILQIGWSDFHNCLQLENLCLKSNKIFKIPPQAFKDLKKLQVIDLSNNALITILPMMIIALEFPHLVVDLADNNWQCDDSVAVFQNFISESWRKKWNVICNRSIGSEEANGGTPQSRISRETRLPPIHLHRMKSLIRSKAERPQGGRHTGISTLGKKAKAGSGLRKKQRRLPRSVRSTRDVQAAGKKEDAPQDLALAVCLSVFITFLVAFSLGAFTRPYVDRLWQKKCQSKSPGLDNAYSNEGFYDDMEAAGHTPHPETHLRQVFPHLSLYENQTPFWVTQPHPHATVIPDRTLGRSRKDPGSSQSPGQCGDNTGAGSGNDGAVYSILQRHPHAGNRELMSAAQDHIHRNDILGEWTYETVAQEEPLSAHSVGVSSVAGTSHAVSGSSRYDSNELDPSLSGEITASLCKMLTHAEAQRTGDSKERGGTEQSLWDSQMEFSKERQVSSSIDLLSIQQPRLSGARAEEALSAHYSEVPYGDPRDTGPSVFPPRWDSGLDVTPANKEPVQKSTPSDTCCELESDCDSDEGSLFTLSSISSESARSKTEEAVPDEESLQDESSGASKDNVTAVDSLEENVTFQTIPGKCKNQEDPFEKPLISAPDSGMYKTHLENASDTDRSEGLSPWPRSPGNSPLGDEFPGMFTYDYDTALQSKAAEWHCSLRDLEFSNVDVLQQTPPCSAEVPSDPDKAAFHERDSDILK

SEQ ID NO: 42298 - protein, 117 aa, Homo sapiens; identical to SEQ ID NO: 24369

SEQ ID NO: 42299 - protein, 662 aa, Homo sapiens
MGLYRIRVSTGASLYAGSNNQVQLWLVGQHGEAALGKRLWPARGKETELKVEVPEYLGPLLFVKLRKRHLLKDDAWFCNWISVQGPGAGDEVRFPCYRWVEGNGVLSLPEGTGRTVGEDPQGLFQKHREEELEERRKLYRWGNWKDGLILNMAGAKLYDLPVDERFLEDKRVDFEVSLAKGLADLAIKDSLNVLTCWKDLDDFNRIFWCGQSKLAERVRDSWKEDALFGYQFLNGANPVVLRRSAHLPARLVFPPGMEELQAQLEKELEGGTLFEADFSLLDGIKANVILCSQQHLAAPLVMLKLQPDGKLLPMVIQLQLPRTGSPPPPLFLPTDPPMAWLLAKCWVRSSDFQLHELQSHLLRGHLMAEVIVVATMRCLPSIHPIFKLIIPHLRYTLEINVRARTGLVSDMGIFDQIMSTGGGGHVQLLKQAGAFLTYSSFCPPDDLADRGLLGVKSSFYAQDALRLWEIIYRYVEGIVSLHYKTDVAVKDDPELQTWCREITEIGLQGAQDRGFPVSLQARDQVCHFVTMCIFTCTGQHASVHLGQLDWYSWVPNAPCTMRLPPPTTKDATLETVMATLPNFHQASLQMSITWQLGRRQPVMVAVGQHEEEYFSGPEPKAVLKKFREELAALDKEIEIRNAKLDMPYEYLRPSVVENSVAI

SEQ ID NO: 42300 - protein, 623 aa, Homo sapiens
MGLYRIRVSTGASLYAGSNNQVQLWLVGQHGEAALGKRLWPARGKGPGAGDEVRFPCYRWVEGNGVLSLPEGTGRTVGEDPQGLFQKHREEELEERRKLYRWGNWKDGLILNMAGAKLYDLPVDERFLEDKRVDFEVSLAKGLADLAIKDSLNVLTCWKDLDDFNRIFWCGQSKLAERVRDSWKEDALFGYQFLNGANPVVLRRSAHLPARLVFPPGMEELQAQLEKELEGGTLFEADFSLLDGIKANVILCSQQHLAAPLVMLKLQPDGKLLPMVIQLQLPRTGSPPPPLFLPTDPPMAWLLAKCWVRSSDFQLHELQSHLLRGHLMAEVIVVATMRCLPSIHPIFKLIIPHLRYTLEINVRARTGLVSDMGIFDQIMSTGGGGHVQLLKQAGAFLTYSSFCPPDDLADRGLLGVKSSFYAQDALRLWEIIYRYVEGIVSLHYKTDVAVKDDPELQTWCREITEIGLQGAQDRGFPVSLQARDQVCHFVTMCIFTCTGQHASVHLGQLDWYSWVPNAPCTMRLPPPTTKDATLETVMATLPNFHQASLQMSITWQLGRRQPVMVAVGQHEEEYFSGPEPKAVLKKFREELAALDKEIEIRNAKLDMPYEYLRPSVVENSVAI

SEQ ID NO: 42301 - protein, 325 aa, Homo sapiens
MANALASATCERCKGGFAPAEKIVNSNGELYHEQCFVCAQCFQQFPEGLFYEFEGRKYCEHDFQMLFAPCCHQCGEFIIGRVIKAMNNSWHPECFRCDLCQEVLADIGFVKNAGRHLCRPCHNREKARGLGKYICQKCHAIIDEQPLIFKNDPYHPDHFNCANCGKELTADARELKGELYCLPCHDKMGVPICGACRRPIEGRVVNAMGKQWHVEHFVCAKCEKPFLGHRHYERKGLAYCETHYNQLFGDVCFHCNRVIEGDVVSALNKAWCVNCFACSTCNTKLTLKNKFVEFDMKPVCKKCYEKFPLELKKRLKKLAETLGRK

SEQ ID NO: 42302 - protein, 337 aa, Homo sapiens
MLGVAAGMTHSNMANALASATCERCKGGFAPAEKIVNSNGELYHEQCFVCAQCFQQFPEGLFYEFEGRKYCEHDFQMLFAPCCHQCGEFIIGRVIKAMNNSWHPECFRCDLCQEVLADIGFVKNAGRHLCRPCHNREKARGLGKYICQKCHAIIDEQPLIFKNDPYHPDHFNCANCGKELTADARELKGELYCLPCHDKMGVPICGACRRPIEGRVVNAMGKQWHVEHFVCAKCEKPFLGHRHYERKGLAYCETHYNQLFGDVCFHCNRVIEGDVVSALNKAWCVNCFACSTCNTKLTLKNKFVEFDMKPVCKKCYEKFPLELKKRLKKLAETLGRK

SEQ ID NO: 42303 - protein, 387 aa, Homo sapiens
MAFSGRARPCIIPENEEIPRAALNTVHEANGTEDERAVSKLQRRHSDVKVYKEFCDFYAKFNMANALASATCERCKGGFAPAEKIVNSNGELYHEQCFVCAQCFQQFPEGLFYEFEGRKYCEHDFQMLFAPCCHQCGEFIIGRVIKAMNNSWHPECFRCDLCQEVLADIGFVKNAGRHLCRPCHNREKARGLGKYICQKCHAIIDEQPLIFKNDPYHPDHFNCANCGKELTADARELKGELYCLPCHDKMGVPICGACRRPIEGRVVNAMGKQWHVEHFVCAKCEKPFLGHRHYERKGLAYCETHYNQLFGDVCFHCNRVIEGDVVSALNKAWCVNCFACSTCNTKLTLKNKFVEFDMKPVCKKCYEKFPLELKKRLKKLAETLGRK

SEQ ID NO: 42304 - protein, 329 aa, Homo sapiens
MTCNMANALASATCERCKGGFAPAEKIVNSNGELYHEQCFVCAQCFQQFPEGLFYEFEGRKYCEHDFQMLFAPCCHQCGEFIIGRVIKAMNNSWHPECFRCDLCQEVLADIGFVKNAGRHLCRPCHNREKARGLGKYICQKCHAIIDEQPLIFKNDPYHPDHFNCANCGKELTADARELKGELYCLPCHDKMGVPICGACRRPIEGRVVNAMGKQWHVEHFVCAKCEKPFLGHRHYERKGLAYCETHYNQLFGDVCFHCNRVIEGDVVSALNKAWCVNCFACSTCNTKLTLKNKFVEFDMKPVCKKCYEKFPLELKKRLKKLAETLGRK

SEQ ID NO: 42305 - protein, 362 aa, Homo sapiens
MTALQLKELSHSGLYRRRRDRPDSLRVNGLPEEELSNMANALASATCERCKGGFAPAEKIVNSNGELYHEQCFVCAQCFQQFPEGLFYEFEGRKYCEHDFQMLFAPCCHQCGEFIIGRVIKAMNNSWHPECFRCDLCQEVLADIGFVKNAGRHLCRPCHNREKARGLGKYICQKCHAIIDEQPLIFKNDPYHPDHFNCANCGKELTADARELKGELYCLPCHDKMGVPICGACRRPIEGRVVNAMGKQWHVEHFVCAKCEKPFLGHRHYERKGLAYCETHYNQLFGDVCFHCNRVIEGDVVSALNKAWCVNCFACSTCNTKLTLKNKFVEFDMKPVCKKCYEKFPLELKKRLKKLAETLGRK

SEQ ID NO: 42306 - protein, 803 aa, Homo sapiens
MITLTELKCLADAQSSYHILKPWWDVFWYYITLIMLLVAVLAGALQLTQSRVLCCLPCKVEFDNHCAVPWDILKASMNTSSNPGTPLPLPLRIQNDLHRQQYSYIDAVCYEKQLHWFAKFFPYLVLLHTLIFAACSNFWLHYPSTSSRLEHFVAILHKCFDSPWTTRALSETVAEQSVRPLKLSKSKILLSSSGCSADIDSGKQSLPYPQPGLESAGIESPTSSVLDKKEGEQAKAIFEKVKRFRMHVEQKDIIYRVYLKQIIVKVILFVLIITYVPYFLTHITLEIDCSVDVQAFTGYKRYQCVYSLAEIFKVLASFYVILVILYGLTSSYSLWWMLRSSLKQYSFEALREKSNYSDIPDVKNDFAFILHLADQYDPLYSKRFSIFLSEVSENKLKQINLNNEWTVEKLKSKLVKNAQDKIELHLFMLNGLPDNVFELTEMEVLSLELIPEVKLPSAVSQLVNLKELRVYHSSLVVDHPALAFLEENLKILRLKFTEMGKIPRWVFHLKNLKELYLSGCVLPEQLSTMQLEGFQDLKNLRTLYLKSSLSRIPQVVTDLLPSLQKLSLDNEGSKLVVLNNLKKMVNLKSLELISCDLERIPHSIFSLNNLHELDLRENNLKTVEEIISFQHLQNLSCLKLWHNNIAYIPAQIGALSNLEQLSLDHNNIENLPLQLFLCTKLHYLDLSYNHLTFIPEEIQYLSNLQYFAVTNNNIEMLPDGLFQCKKLQCLLLGKNSLMNLSPHVGELSNLTHLELIGNYLETLPPELEGCQSLKRNCLIVEENLLNTLPLPVTERLQTCLDKC

SEQ ID NO: 42307 - protein, 711 aa, Homo sapiens
MAVYRLCVTTGPYLRAGTLDNISVTLVGTCGESPKQRLDRMGRDFAPGSVQKYKVRCTAELGELLLLRVHKERYAFFRKDSWYCSRICVTEPDGSVSHFPCYQWIEGYCTVELRPGTARTICQDSLPLLLDHRTRELRARQECYRWKIYAPGFPCMVDVNSFQEMESDKKFALTKTTTCVDQGDSSGNRYLPGFPMKIDIPSLMYMEPNVRYSATKTISLLFNAIPASLGMKLRGLLDRKGSWKKLDDMQNIFWCHKTFTTKYVTEHWCEDHFFGYQYLNGVNPVMLHCISSLPSKLPVTNDMVAPLLGQDTCLQTELERGNIFLADYWILAEAPTHCLNGRQQYVAAPLCLLWLSPQGALVPLAIQLSQTPGPDSPIFLPTDSEWDWLLAKTWVRNSEFLVHENNTHFLCTHLLCEAFAMATLRQLPLCHPIYKLLLPHTRYTLQVNTIARATLLNPEGLVDQVTSIGRQGLIYLMSTGLAHFTYTNFCLPDSLRARGVLAIPNYHYRDDGLKIWAAIESFVSEIVGYYYPSDASVQQDSELQAWTGEIFAQAFLGRESSGFPSRLCTPGEMVKFLTAIIFNCSAQHAAVNSGQHDFGAWMPNAPSSMRQPPPQTKGTTTLKTYLDTLPEVNISCNNLLLFWLVSQEPKDQRPLGTYPDEHFTEEAPRRSIAAFQSRLAQISRDIQERNQGLALPYTYLDPPLIENSVSI

SEQ ID NO: 42308 - protein, 843 aa, Homo sapiens
MPRGAFRPCLPALYFAFLTCPTPEQRMSGTQAPDIHLGEPARGTGCVRGKQTSIRVQDCGRREEARAASRELRREKAQEHPRESWAHPQPYPAPQPLALRPETQPCPACRSSPPGRLLLRPALPGHPFLLPIMAVYRLCVTTGPYLRAGTLDNISVTLVGTCGESPKQRLDRMGRDFAPGSVQKYKVRCTAELGELLLLRVHKERYAFFRKDSWYCSRICVTEPDGSVSHFPCYQWIEGYCTVELRPGTARTICQDSLPLLLDHRTRELRARQECYRWKIYAPGFPCMVDVNSFQEMESDKKFALTKTTTCVDQGDSSGNRYLPGFPMKIDIPSLMYMEPNVRYSATKTISLLFNAIPASLGMKLRGLLDRKGSWKKLDDMQNIFWCHKTFTTKYVTEHWCEDHFFGYQYLNGVNPVMLHCISSLPSKLPVTNDMVAPLLGQDTCLQTELERGNIFLADYWILAEAPTHCLNGRQQYVAAPLCLLWLSPQGALVPLAIQLSQTPGPDSPIFLPTDSEWDWLLAKTWVRNSEFLVHENNTHFLCTHLLCEAFAMATLRQLPLCHPIYKLLLPHTRYTLQVNTIARATLLNPEGLVDQVTSIGRQGLIYLMSTGLAHFTYTNFCLPDSLRARGVLAIPNYHYRDDGLKIWAAIESFVSEIVGYYYPSDASVQQDSELQAWTGEIFAQAFLGRESSGFPSRLCTPGEMVKFLTAIIFNCSAQHAAVNSGQHDFGAWMPNAPSSMRQPPPQTKGTTTLKTYLDTLPEVNISCNNLLLFWLVSQEPKDQRPLGTYPDEHFTEEAPRRSIAAFQSRLAQISRDIQERNQGLALPYTYLDPPLIENSVSI

SEQ ID NO: 42309 - protein, 345 aa, Homo sapiens
MWLLGPLCLLLSSAAESQLLPGNNFTNECNIPGNFMCSNGRCIPGAWQCDGLPDCFDKSDEKECPKAKSKCGPTFFPCASGIHCIIGRFRCNGFEDCPDGSDEENCTANPLLCSTARYHCKNGLCIDKSFICDGQNNCQDNSDEESCESSQEPGSGQVFVTSENQLVYYPSITYAIIGSSVIFVLVVALLALVLHHQRKRNNLMTLPVHRLQHPVLLSRLVVLDHPHHCNVTYNVNNGIQYVASQAEQNASEVGSPPSYSEALLDQRPAWYDLPPPPYSSDTESLNQADLPPYRSRSGSANSASSQAASSLLSVEDTSHSPGQPGPQEGTAEPRDSEPSQGTEEV

SEQ ID NO: 42310 - protein, 296 aa, Homo sapiens
MWLLGPLCLLLSSAAAKAKSKCGPTFFPCASGIHCIIGRFRCNGFEDCPDGSDEENCTANPLLCSTARYHCKNGLCIDKSFICDGQNNCQDNSDEESCESSQEPGSGQVFVTSENQLVYYPSITYAIIGSSVIFVLVVALLALVLHHQRKRNNLMTLPVHRLQHPVLLSRLVVLDHPHHCNVTYNVNNGIQYVASQAEQNASEVGSPPSYSEALLDQRPAWYDLPPPPYSSDTESLNQADLPPYRSRSGSANSASSQAASSLLSVEDTSHSPGQPGPQEGTAEPRDSEPSQGTEEV

SEQ ID NO: 42311 - protein, 97 aa, Homo sapiens
MLSRNDDICIYGGLGLGGLLLLAVVLLSACLCWLHRRVKRLERSWAQGSSEQELHYASLQRLPVPSSEGPDLRGRDKRGTKEDPRADYACIAENKPT

SEQ ID NO: 42312 - protein, 91 aa, Homo sapiens
MIYVSTGAWGWAGSCFWQWSFCPPACVGCIEEHLLSWSQAQGSSEQELHYASLQRLPVPSSEGPDLRGRDKRGTKEDPRADYACIAENKPT

SEQ ID NO: 42313 - protein, 85 aa, Homo sapiens
MIYVSTGAWGWAGSCFWQWSFCPPACVGCIEEEAQGSSEQELHYASLQRLPVPSSEGPDLRGRDKRGTKEDPRADYACIAENKPT

SEQ ID NO: 42314 - protein, 53 aa, Homo sapiens
MTQGSSEQELHYASLQRLPVPSSEGPDLRGRDKRGTKEDPRADYACIAENKPT

SEQ ID NO: 42315 - protein, 59 aa, Homo sapiens
MLSRNDDICIYGGLGLGGLLLLAVVLLSACLCWLHRRGPGLLRAGTPLCISAEAASAQQ

SEQ ID NO: 42316 - protein, 51 aa, Homo sapiens
MLSRNDVKRLERSWRLPVPSSEGPDLRGRDKRGTKEDPRADYACIAENKPT

SEQ ID NO: 42317 - protein, 43 aa, Homo sapiens
MLSRNDVKRLERSWHLSVLVPGPGLLRAGTPLCISAEAASAQQ

SEQ ID NO: 42318 - protein, 35 aa, Homo sapiens
MLSRNDAPSVLVPGPGLLRAGTPLCISAEAASAQQ

SEQ ID NO: 42319 - protein, 13 aa, Homo sapiens
MLSRNDEAASAQQ

SEQ ID NO: 42320 - protein, 66 aa, Homo sapiens
MLSRNDVKRLERSWAQGSSEQELHYASLQRLPVPSSEGPDLRGRDKRGTKEDPRADYACIAENKPT

SEQ ID NO: 42321 - protein, 104 aa, Homo sapiens
MLSRNDDICIYGGLGLGGLLLLAVVLLSACLCWLHRRVKRLERSWHLLSWSQAQGSSEQELHYASLQRLPVPSSEGPDLRGRDKRGTKEDPRADYACIAENKPT

SEQ ID NO: 42322 - protein, 66 aa, Homo sapiens
MLSRNDDICIYGGLGLGGLLLLAVVLLSACLCWLHRRAPSVLVPGPGLLRAGTPLCISAEAASAQQ

SEQ ID NO: 42323 - protein, 73 aa, Homo sapiens
MLSRNDVKRLERSWHLLSWSQAQGSSEQELHYASLQRLPVPSSEGPDLRGRDKRGTKEDPRADYACIAENKPT

SEQ ID NO: 42324 - protein, 370 aa, Homo sapiens
MGDRRFIDFQFQDSNSSLRPRLGNATANNTCIVDDSFKYNLNGAVYSVVFILGLITNSVSLFVFCFRMKMRSETAIFITNLAVSDLLFVCTLPFKIFYNFNRHWPFGDTLCKISGTAFLTNIYGSMLFLTCISVDRFLAIVYPFRSRTIRTRRNSAIVCAGVWILVLSGGISASLFSTTNVNNATTTCFEGFSKRVWKTYLSKITIFIEVVGFIIPLILNVSCSSVVLRTLRKPATLSQIGTNKKKVLKMITVHMAVFVVCFVPYNSVLFLYALVRSQAITNCFLERFAKIMYPITLCLATLNCCFDPFIYYFTLESFQKSFYINAHIRMESLFKTETPLTTKPSLPAIQEEVSDQTTNNGGELMLESTF

SEQ ID NO: 42325 - protein, 851 aa, Homo sapiens
MNYVGQLAETVFGTVKELYRGLNPATLSGGIDVLVVKQVDGSFRCSPFHVRFGKLGVLRSREKVVDIELNGEPVDLHMKLGDSGEAFFVQELESDDEHVPPGLCTSPIPWGGLSGFPSDSQLGTASEPEGLVMAGTASTGRRKRRRRRKPKQKEDAVATDSSPEELEAGAESELSLPEKLRPEPPGVQLEEKSSLQPKDIYPYSDGEWPPQASLSAGELTSPKSDSELEVRTPEPSPLRAESHMQWAWGRLPKVARAERPESSVVLEGRAGATSPPRGGPSTPSTSVAGGVDPLGLPIQQTEAGADLQPDTEDPTLVGPPLHTPETEESKTQSSGDMGLPPASKSWSWATLEVPVPTGQPERVSRGKGSPKRSQHLGPSDIYLDDLPSLDSENAALYFPQSDSGLGARRWSEPSSQKSLRDPNPEHEPEPTLDTVDTIALSLCGGLADSRDISLEKFNQHSVSYQDLTKNPGLLDDPNLVVKINGKHYNWAVAAPMILSLQAFQKNLPKSTMDKLEREKMPRKGGRWWFSWRRRDFLAEERSAQKEKTAAKEQQGEKTEVLSSDDDAPDSPVILEIPSLPPSTPPSTPTYKKSLRLSSDQIRRLNLQEGANDVVFSVTTQYQGTCRCKATIYLWKWDDKVVISDIDGTITKSDALGHILPQLGKDWTHQGITSLYHKIQLNGYKFLYCSARAIGMADLTKGYLQWVSEGGCSLPKGPILLSPSSLFSALHREVIEKKPEVFKVACLSDIQQLFLPHGQPFYAAFGNRPNDVFAYRQVGLPESRIFTVNPRGELIQELIKNHKSTYERLGEVVELLFPPVARGPSTDLANPEYSNFCYWREPLPAVDLDTLD

SEQ ID NO: 42326 - protein, 852 aa, Homo sapiens
MNYVGQLAETVFGTVKELYRGLNPATLSGGIDVLVVKQVDGSFRCSPFHVRFGKLGVLRSREKVVDIELNGEPVDLHMKLGDSGEAFFVQELESDDEHVPPGLCTSPIPWGGLSGFPSDSQLGTASEPEGLVMAGTASTGRRKRRRRRKPKQKEDAVATDSSPEELEAGAESELSLPEKLRPEPPGSVQLEEKSSLQPKDIYPYSDGEWPPQASLSAGELTSPKSDSELEVRTPEPSPLRAESHMQWAWGRLPKVARAERPESSVVLEGRAGATSPPRGGPSTPSTSVAGGVDPLGLPIQQTEAGADLQPDTEDPTLVGPPLHTPETEESKTQSSGDMGLPPASKSWSWATLEVPVPTGQPERVSRGKGSPKRSQHLGPSDIYLDDLPSLDSENAALYFPQSDSGLGARRWSEPSSQKSLRDPNPEHEPEPTLDTVDTIALSLCGGLADSRDISLEKFNQHSVSYQDLTKNPGLLDDPNLVVKINGKHYNWAVAAPMILSLQAFQKNLPKSTMDKLEREKMPRKGGRWWFSWRRRDFLAEERSAQKEKTAAKEQQGEKTEVLSSDDDAPDSPVILEIPSLPPSTPPSTPTYKKSLRLSSDQIRRLNLQEGANDVVFSVTTQYQGTCRCKATIYLWKWDDKVVISDIDGTITKSDALGHILPQLGKDWTHQGITSLYHKIQLNGYKFLYCSARAIGMADLTKGYLQWVSEGGCSLPKGPILLSPSSLFSALHREVIEKKPEVFKVACLSDIQQLFLPHGQPFYAAFGNRPNDVFAYRQVGLPESRIFTVNPRGELIQELIKNHKSTYERLGEVVELLFPPVARGPSTDLANPEYSNFCYWREPLPAVDLDTLD

SEQ ID NO: 42327 - protein, 358 aa, Homo sapiens
MSVCYRPPGNETLLSWKTSRATGTAFLLLAALLGLPGNGFVVWSLAGWRPARGRPLAATLVLHLALADGAVLLLTPLFVAFLTRQAWPLGQAGCKAVYYVCALSMYASVLLTGLLSLQRCLAVTRPFLAPRLRSPALARRLLLAVWLAALLLAVPAAVYRHLWRDRVCQLCHPSPVHAAAHLSLETLTAFVLPFGLMLGCYSVTLARLRGARWGSGRHGARVGRLVSAIVLAFGLLWAPYHAVNLLQAVAALAPPEGALAKLGGAGQAARAGTTALAFFSSSVNPVLYVFTAGDLLPRAGPRFLTRLFEGSGEARGGGRSREGTMELRTTPQLKVVGQGRGNGDPGGGMEKDGPEWDL

SEQ ID NO: 42328 - protein, 344 aa, Homo sapiens
MVSVNSSHCFYNDSFKYTLYGCMFSMVFVLGLISNCVAIYIFICVLKVRNETTTYMINLAMSDLLFVFTLPFRIFYFTTRNWPFGDLLCKISVMLFYTNMYGSILFLTCISVDRFLAIVYPFKSKTLRTKRNAKIVCTGVWLTVIGGSAPAVFVQSTHSQGNNASEACFENFPEATWKTYLSRIVIFIEIVGFFIPLILNVTCSSMVLKTLTKPVTLSRSKINKTKVLKMIFVHLIIFCFCFVPYNINLILYSLVRTQTFVNCSVVAAVRTMYPITLCIAVSNCCFDPIVYYFTSDTIQNSIKMKNWSVRRSDFRFSEVHGAENFIQHNLQTLKSKIFDNESAA

SEQ ID NO: 42329 - protein, 421 aa, Homo sapiens
MCLRFFSPVPGSTSSATNVTMVVSAGPWSSEKAEMNILEINEKLRPQLAENKQQFRNMKQKFLVTQMAGFLANQQNKYKYEECKDLIKSMLREELQFKEEKLAEQLKQAEELRQYKVLVHSQERELIQLREKLREGRDASHSLNQHLQALLTPDKHDNSQGQDFREQLAEGCRLARHLVHKLSPENDTDEDENDKTKELDKVQESPAPREEQKAEEKEVPEDSLEECAITYSNSHGPSDSNPPHKNIKITSEEDKVNSILVVDSESSQDEWQDALNILLENQNDDEEEEGKAPVPPQVTLWICGLKLQESEEKEVLQDSPEERVTTSCSDHDVSQSYQPCEGTFLALVEQKVCSAQDVASEHSNSKGEETPLGFPDTKYCWKDEKDERMSQKVAFLLDEKNYNSKPSSIPNTTLQGSFTED

SEQ ID NO: 42330 - protein, 343 aa, Homo sapiens
MSDEDDLEDSEPDQDDSEKEEDEKETEEGEDYRKEGEEFPEEWLPTPLTEDMMKEGLSLLCKTGNGLAHAYVKLEVKERDLTDIYLLRSYIHLRYVDISENHLTDLSPLNYLTHLLWLKADGNRLRSAQMNELPYLQIASFAYNQITDTEGISHPRLETLNLKGNSIHMVTGLDPEKLISLHTVELRGNQLESTLGINLPKLKNLYLAQNMLKKVEGLEDLSNLTTLHLRDNQIDTLSGFSREMKSLQYLNLRGNMVANLGELAKLRDLPKLRALVLLDNPCTDETSYRQEALVQMPYLERLDKEFYEEEERAEADVIRQRLKEEKEQEPEPQRDLEPEQSLI

SEQ ID NO: 42331 - protein, 312 aa, Homo sapiens
MSDEDDLEDSEPDQDDSEKEEDEKETEEGEDYRKEGEEFPEEWLPTPLTEDMMKEGLSLLCKTGNGLAHAYVKLEVKERDLTDIYLLRSYIHLRYVDISENHLTDLSPLNYLTHLLWLKADGNRLRSAQMNELPYLQIASFAYNQITDTEGISHPRLETLNLKGNSIHMVTGLDPEKLISLHTVELRGNQLESTLGINLPKLKNLYLAQNMLKKVEGLEDLSNLTTLHLRDNQIDTLSGFSREMKSLQYLNLRRSKTLAFRPDQTPRGSHHMYDREQRMPVFAPKLEIHHNLRPRICSVPVLWAVWGAEWGA

SEQ ID NO: 42332 - protein, 183 aa, Homo sapiens
MLYKSSDRPAHKVSMLLLCHALAIAVVQIVIFSESWAFAKNINFYNVRPPLDPTPFPNSFKCFTCENAGDNYNCNRWAEDKWCPQNTQYCLTVHHFTSHGRSTSITKKCASRSECHFVGCHHSRDSEHTECRSCCEGMICNVELPTNHTNAVFAVMHAQRTSGSSAPTLYLPVLAWVFVLPLL

SEQ ID NO: 42333 - protein, 207 aa, Homo sapiens
MLLITLSANLFTVPERSLTTTFSFSRYKSSDRPAHKVSMLLLCHALAIAVVQIVIFSESWAFAKNINFYNVRPPLDPTPFPNSFKCFTCENAGDNYNCNRWAEDKWCPQNTQYCLTVHHFTSHGRSTSITKKCASRSECHFVGCHHSRDSEHTECRSCCEGMICNVELPTNHTNAVFAVMHAQRTSGSSAPTLYLPVLAWVFVLPLL

SEQ ID NO: 42334 - protein, 1721 aa, Homo sapiens
MAGAWLRWGLLLWAGLLASSAHGRLRRITYVVHPGPGLAAGALPLSGPPRSRTFNVALNARYSRSSAAAGAPSRASPGVPSERTRRTSKPGGAALQGLRPPPPPPPEPARPAVPGGQLHPNPGGHPAAAPFTKQGRQVVRSKVPQETQSGGGSRLQVHQKQQLQGVNVCGGRCCHGWSKAPGSQRCTKPSCVPPCQNGGMCLRPQLCVCKPGTKGKACETIAAQDTSSPVFGGQSPGAASSWGPPEQAAKHTSSKKADTLPRVSPVAQMTLTLKPKPSVGLPQQIHSQVTPLSSQSVVIHHGQTQEYVLKPKYFPAQKGISGEQSTEGSFPLRYVQDQVAAPFQLSNHTGRIKVVFTPSICKVTCTKGSCQNSCEKGNTTTLISENGHAADTLTATNFRVVICHLPCMNGGQCSSRDKCQCPPNFTGKLCQIPVHGASVPKLYQHSQQPGKALGTHVIHSTHTLPLTVTSQQGVKVKFPPNIVNIHVKHPPEASVQIHQVSRIDGPTGQKTKEAQPGQSQVSYQGLPVQKTQTIHSTYSHQQVIPHVYPVAAKTQLGRCFQETIGSQCGKALPGLSKQEDCCGTVGTSWGFNKCQKCPKKPSYHGYNQMMECLPGYKRVNNTFCQDINECQLQGVCPNGECLNTMGSYRCTCKIGFGPDPTFSSCVPDPPVISEEKGPCYRLVSSGRQCMHPLSVHLTKQLCCCSVGKAWGPHCEKCPLPGTAAFKEICPGGMGYTVSGVHRRRPIHHHVGKGPVFVKPKNTQPVAKSTHPPPLPAKEEPVEALTFSREHGPGVAEPEVATAPPEKEIPSLDQEKTKLEPGQPQLSPGISTIHLHPQFPVVIEKTSPPVPVEVAPEASTSSASQVIAPTQVTEINECTVNPDICGAGHCINLPVRYTCICYEGYRFSEQQRKCVDIDECTQVQHLCSQGRCENTEGSFLCICPAGFMASEEGTNCIDVDECLRPDVCGEGHCVNTVGAFRCEYCDSGYRMTQRGRCEDIDECLNPSTCPDEQCVNSPGSYQCVPCTEGFRGWNGQCLDVDECLEPNVCANGDCSNLEGSYMCSCHKGYTRTPDHKHCRDIDECQQGNLCVNGQCKNTEGSFRCTCGQGYQLSAAKDQCEDIDECQHRHLCAHGQCRNTEGSFQCVCDQGYRASGLGDHCEDINECLEDKSVCQRGDCINTAGSYDCTCPDGFQLDDNKTCQDINECEHPGLCGPQGECLNTEGSFHCVCQQGFSISADGRTCEDIDECVNNTVCDSHGFCDNTAGSFRCLCYQGFQAPQDGQGCVDVNECELLSGVCGEAFCENVEGSFLCVCADENQEYSPMTGQCRSRTSTDLDVDVDQPKEEKKECYYNLNDASLCDNVLAPNVTKQECCCTSGVGWGDNCEIFPCPVLGTAEFTEMCPKGKGFVPAGESSSEAGGENYKDADECLLFGQEICKNGFCLNTRPGYECYCKQGTYYDPVKLQCFDMDECQDPSSCIDGQCVNTEGSYNCFCTHPMVLDASEKRCIRPAESNEQIEETDVYQDLCWEHLSDEYVCSRPLVGKQTTYTECCCLYGEAWGMQCALCPLKDSDDYAQLCNIPVTGRRQPYGRDALVDFSEQYTPEADPYFIQDRFLNSFEELQAEECGILNGCENGRCVRVQEGYTCDCFDGYHLDTAKMTCVDVNECDELNNRMSLCKNAKCINTDGSYKCLCLPGYVPSDKPNYCTPLNTALNLEKDSDLE

SEQ ID NO: 42335 - protein, 1395 aa, Homo sapiens
MDTKLMCLLFFFSLPPLLVSNHTGRIKVVFTPSICKVTCTKGSCQNSCEKGNTTTLISENGHAADTLTATNFRVVICHLPCMNGGQCSSRDKCQCPPNFTGKLCQIPVHGASVPKLYQHSQQPGKALGTHVIHSTHTLPLTVTSQQGVKVKFPPNIVNIHVKHPPEASVQIHQVSRIDGPTGQKTKEAQPGQSQVSYQGLPVQKTQTIHSTYSHQQVIPHVYPVAAKTQLGRCFQETIGSQCGKALPGLSKQEDCCGTVGTSWGFNKCQKCPKKPSYHGYNQMMECLPGYKRVNNTFCQDINECQLQGVCPNGECLNTMGSYRCTCKIGFGPDPTFSSCVPDPPVISEEKGPCYRLVSSGRQCMHPLSVHLTKQLCCCSVGKAWGPHCEKCPLPGTAAFKEICPGGMGYTVSGVHRRRPIHHHVGKGPVFVKPKNTQPVAKSTHPPPLPAKEEPVEALTFSREHGPGVAEPEVATAPPEKEIPSLDQEKTKLEPGQPQLSPGISTIHLHPQFPVVIEKTSPPVPVEVAPEASTSSASQVIAPTQVTEINECTVNPDICGAGHCINLPVRYTCICYEGYRFSEQQRKCVDIDECTQVQHLCSQGRCENTEGSFLCICPAGFMASEEGTNCIDVDECLRPDVCGEGHCVNTVGAFRCEYCDSGYRMTQRGRCEDIDECLNPSTCPDEQCVNSPGSYQCVPCTEGFRGWNGQCLDVDECLEPNVCANGDCSNLEGSYMCSCHKGYTRTPDHKHCRDIDECQQGNLCVNGQCKNTEGSFRCTCGQGYQLSAAKDQCEDIDECQHRHLCAHGQCRNTEGSFQCVCDQGYRASGLGDHCEDINECLEDKSVCQRGDCINTAGSYDCTCPDGFQLDDNKTCQDINECEHPGLCGPQGECLNTEGSFHCVCQQGFSISADGRTCEDIDECVNNTVCDSHGFCDNTAGSFRCLCYQGFQAPQDGQGCVDVNECELLSGVCGEAFCENVEGSFLCVCADENQEYSPMTGQCRSRTSTDLDVDVDQPKEEKKECYYNLNDASLCDNVLAPNVTKQECCCTSGVGWGDNCEIFPCPVLGTAEFTEMCPKGKGFVPAGESSSEAGGENYKDADECLLFGQEICKNGFCLNTRPGYECYCKQGTYYDPVKLQCFDMDECQDPSSCIDGQCVNTEGSYNCFCTHPMVLDASEKRCIRPAESNEQIEETDVYQDLCWEHLSDEYVCSRPLVGKQTTYTECCCLYGEAWGMQCALCPLKDSDDYAQLCNIPVTGRRQPYGRDALVDFSEQYTPEADPYFIQDRFLNSFEELQAEECGILNGCENGRCVRVQEGYTCDCFDGYHLDTAKMTCVDVNECDELNNRMSLCKNAKCINTDGSYKCLCLPGYVPSDKPNYCTPLNTALNLEKDSDLE

SEQ ID NO: 42336 - protein, 1342 aa, Homo sapiens
MDTKLMCLLFFFSLPPLLVSNHTGRIKVVFTPSICKVTCTKGSCQNSCEKGNTTTLISENGHAADTLTATNFRVVICHLPCMNGGQCSSRDKCQCPPNFTGKLCQIPVHGASVPKLYQHSQQPGKALGTHVIHSTHTLPLTVTSQQGVKVKFPPNIVNIHVKHPPEASVQIHQVSRIDGPTGQKTKEAQPGQSQVSYQGLPVQKTQTIHSTYSHQQVIPHVYPVAAKTQLGRCFQETIGSQCGKALPGLSKQEDCCGTVGTSWGFNKCQKCPKKPSYHGYNQMMECLPGYKRVNNTFCQDINECQLQGVCPNGECLNTMGSYRCTCKIGFGPDPTFSSCVPDPPVISEEKGPCYRLVSSGRQCMHPLSVHLTKQLCCCSVGKAWGPHCEKCPLPGTAKEEPVEALTFSREHGPGVAEPEVATAPPEKEIPSLDQEKTKLEPGQPQLSPGISTIHLHPQFPVVIEKTSPPVPVEVAPEASTSSASQVIAPTQVTEINECTVNPDICGAGHCINLPVRYTCICYEGYRFSEQQRKCVDIDECTQVQHLCSQGRCENTEGSFLCICPAGFMASEEGTNCIDVDECLRPDVCGEGHCVNTVGAFRCEYCDSGYRMTQRGRCEDIDECLNPSTCPDEQCVNSPGSYQCVPCTEGFRGWNGQCLDVDECLEPNVCANGDCSNLEGSYMCSCHKGYTRTPDHKHCRDIDECQQGNLCVNGQCKNTEGSFRCTCGQGYQLSAAKDQCEDIDECQHRHLCAHGQCRNTEGSFQCVCDQGYRASGLGDHCEDINECLEDKSVCQRGDCINTAGSYDCTCPDGFQLDDNKTCQDINECEHPGLCGPQGECLNTEGSFHCVCQQGFSISADGRTCEDIDECVNNTVCDSHGFCDNTAGSFRCLCYQGFQAPQDGQGCVDVNECELLSGVCGEAFCENVEGSFLCVCADENQEYSPMTGQCRSRTSTDLDVDVDQPKEEKKECYYNLNDASLCDNVLAPNVTKQECCCTSGVGWGDNCEIFPCPVLGTAEFTEMCPKGKGFVPAGESSSEAGGENYKDADECLLFGQEICKNGFCLNTRPGYECYCKQGTYYDPVKLQCFDMDECQDPSSCIDGQCVNTEGSYNCFCTHPMVLDASEKRCIRPAESNEQIEETDVYQDLCWEHLSDEYVCSRPLVGKQTTYTECCCLYGEAWGMQCALCPLKDSDDYAQLCNIPVTGRRQPYGRDALVDFSEQYTPEADPYFIQDRFLNSFEELQAEECGILNGCENGRCVRVQEGYTCDCFDGYHLDTAKMTCVDVNECDELNNRMSLCKNAKCINTDGSYKCLCLPGYVPSDKPNYCTPLNTALNLEKDSDLE

SEQ ID NO: 42337 - protein, 1722 aa, Homo sapiens
MAGAWLRWGLLLWAGLLASSAHGRLRRITYVVHPGPGLAAGALPLSGPPRSRTFNVALNARYSRSSAAAGAPSRASPGVPSERTRRTSKPGGAALQGLRPPPPPPPEPARPAVPGGQLHPNPGGHPAAAPFTKQGRQVVRSKVPQETQSGGGSRLQVHQKQQLQGVNVCGGRCCHGWSKAPGSQRCTKPSCVPPCQNGGMCLRPQLCVCKPGTKGKACETIAAQDTSSPVFGGQSPGAASSWGPPEQAAKHTSSKKADTLPRVSPVAQMTLTLKPKPSVGLPQQIHSQVTPLSSQSVVIHHGQTQEYVLKPKYFPAQKGISGEQSTEGSFPLRYVQDQVAAPFQLSNHTGRIKVVFTPSICKVTCTKGSCQNSCEKGNTTTLISENGHAADTLTATNFRVVICHLPCMNGGQCSSRDKCQCPPNFTGKLCQIPVHGASVPKLYQHSQQPGKALGTHVIHSTHTLPLTVTSQQGVKVKFPPNIVNIHVKHPPEASVQIHQVSRIDGPTGQKTKEAQPGQSQVSYQGLPVQKTQTIHSTYSHQQVIPHVYPVAAKTQLGRCFQETIGSQCGKALPGLSKQEDCCGTVGTSWGFNKCQKCPKKPSYHGYNQMMECLPGYKRVNNTFCQDINECQLQGVCPNGECLNTMGSYRCTCKIGFGPDPTFSSCVPDPPVISEEKGPCYRLVSSGRQCMHPLSVHLTKQLCCCSVGKAWGPHCEKCPLPGTAAFKEICPGGMGYTVSGVHRRRPIHHHVGKGPVFVKPKNTQPVAKSTHPPPLPAKEEPVEALTFSREHGPGVAEPEVATAPPEKEIPSLDQEKTKLEPGQPQLSPGISTIHLHPQFPGIVIEKTSPPVPVEVAPEASTSSASQVIAPTQVTEINECTVNPDICGAGHCINLPVRYTCICYEGYRFSEQQRKCVDIDECTQVQHLCSQGRCENTEGSFLCICPAGFMASEEGTNCIDVDECLRPDVCGEGHCVNTVGAFRCEYCDSGYRMTQRGRCEDIDECLNPSTCPDEQCVNSPGSYQCVPCTEGFRGWNGQCLDVDECLEPNVCANGDCSNLEGSYMCSCHKGYTRTPDHKHCRDIDECQQGNLCVNGQCKNTEGSFRCTCGQGYQLSAAKDQCEDIDECQHRHLCAHGQCRNTEGSFQCVCDQGYRASGLGDHCEDINECLEDKSVCQRGDCINTAGSYDCTCPDGFQLDDNKTCQDINECEHPGLCGPQGECLNTEGSFHCVCQQGFSISADGRTCEDIDECVNNTVCDSHGFCDNTAGSFRCLCYQGFQAPQDGQGCVDVNECELLSGVCGEAFCENVEGSFLCVCADENQEYSPMTGQCRSRTSTDLDVDVDQPKEEKKECYYNLNDASLCDNVLAPNVTKQECCCTSGVGWGDNCEIFPCPVLGTAEFTEMCPKGKGFVPAGESSSEAGGENYKDADECLLFGQEICKNGFCLNTRPGYECYCKQGTYYDPVKLQCFDMDECQDPSSCIDGQCVNTEGSYNCFCTHPMVLDASEKRCIRPAESNEQIEETDVYQDLCWEHLSDEYVCSRPLVGKQTTYTECCCLYGEAWGMQCALCPLKDSDDYAQLCNIPVTGRRQPYGRDALVDFSEQYTPEADPYFIQDRFLNSFEELQAEECGILNGCENGRCVRVQEGYTCDCFDGYHLDTAKMTCVDVNECDELNNRMSLCKNAKCINTDGSYKCLCLPGYVPSDKPNYCTPLNTALNLEKDSDLE

SEQ ID NO: 42338 - protein, 1396 aa, Homo sapiens
MDTKLMCLLFFFSLPPLLVSNHTGRIKVVFTPSICKVTCTKGSCQNSCEKGNTTTLISENGHAADTLTATNFRVVICHLPCMNGGQCSSRDKCQCPPNFTGKLCQIPVHGASVPKLYQHSQQPGKALGTHVIHSTHTLPLTVTSQQGVKVKFPPNIVNIHVKHPPEASVQIHQVSRIDGPTGQKTKEAQPGQSQVSYQGLPVQKTQTIHSTYSHQQVIPHVYPVAAKTQLGRCFQETIGSQCGKALPGLSKQEDCCGTVGTSWGFNKCQKCPKKPSYHGYNQMMECLPGYKRVNNTFCQDINECQLQGVCPNGECLNTMGSYRCTCKIGFGPDPTFSSCVPDPPVISEEKGPCYRLVSSGRQCMHPLSVHLTKQLCCCSVGKAWGPHCEKCPLPGTAAFKEICPGGMGYTVSGVHRRRPIHHHVGKGPVFVKPKNTQPVAKSTHPPPLPAKEEPVEALTFSREHGPGVAEPEVATAPPEKEIPSLDQEKTKLEPGQPQLSPGISTIHLHPQFPGIVIEKTSPPVPVEVAPEASTSSASQVIAPTQVTEINECTVNPDICGAGHCINLPVRYTCICYEGYRFSEQQRKCVDIDECTQVQHLCSQGRCENTEGSFLCICPAGFMASEEGTNCIDVDECLRPDVCGEGHCVNTVGAFRCEYCDSGYRMTQRGRCEDIDECLNPSTCPDEQCVNSPGSYQCVPCTEGFRGWNGQCLDVDECLEPNVCANGDCSNLEGSYMCSCHKGYTRTPDHKHCRDIDECQQGNLCVNGQCKNTEGSFRCTCGQGYQLSAAKDQCEDIDECQHRHLCAHGQCRNTEGSFQCVCDQGYRASGLGDHCEDINECLEDKSVCQRGDCINTAGSYDCTCPDGFQLDDNKTCQDINECEHPGLCGPQGECLNTEGSFHCVCQQGFSISADGRTCEDIDECVNNTVCDSHGFCDNTAGSFRCLCYQGFQAPQDGQGCVDVNECELLSGVCGEAFCENVEGSFLCVCADENQEYSPMTGQCRSRTSTDLDVDVDQPKEEKKECYYNLNDASLCDNVLAPNVTKQECCCTSGVGWGDNCEIFPCPVLGTAEFTEMCPKGKGFVPAGESSSEAGGENYKDADECLLFGQEICKNGFCLNTRPGYECYCKQGTYYDPVKLQCFDMDECQDPSSCIDGQCVNTEGSYNCFCTHPMVLDASEKRCIRPAESNEQIEETDVYQDLCWEHLSDEYVCSRPLVGKQTTYTECCCLYGEAWGMQCALCPLKDSDDYAQLCNIPVTGRRQPYGRDALVDFSEQYTPEADPYFIQDRFLNSFEELQAEECGILNGCENGRCVRVQEGYTCDCFDGYHLDTAKMTCVDVNECDELNNRMSLCKNAKCINTDGSYKCLCLPGYVPSDKPNYCTPLNTALNLEKDSDLE

SEQ ID NO: 42339 - protein, 366 aa, Homo sapiens
MNISQIISYWGYPDEEYDIVTEDGYILGLYRIPYWRTDNNKNLAQRVVVYLQHGLLTSASSWISNLPNNSLGFILADAGYDVWMGNSRGNTWSRKHLYLETSSKEFWAFSFDEMAKYDLPASIDFTVKQTRQEEIFYVGHSQGTTIGFITFSTISKIAERIKIFFALAPVFSTKYLKSPLIRMTYKWKSIVMAFSGNKDFLPKTSFKKFIGSKLCPLQIFDKICLNILFMMFGYDPKNLNMSRLDVYFSHNPAGTSVQNMLHWSQLLNSTHLKAYDWGSPDLNLVHYNQTTSPLYNMTNMNVATAIWNGKSDLLADPEDVNILHSEITNHIYYKTISYYNHIDSLFGLDVYDQVYHEIIDIIQDNL

SEQ ID NO: 42340 - protein, 1821 aa, Homo sapiens
MRPRTKARSPGRALRNPWRGFLPLTLALFVGAGHAQRDPVGRYEPAGGDANRLRRPGGSYPAAAAAKVYSLFREQDAPVAGLQPVERAQPGWGSPRRPTEAEARRPSRAQQSRRVQPPAQTRRSTPLGQQQPAPRTRAAPALPRLGTPQRSGAAPPTPPRGRLTGRNVCGGQCCPGWTTANSTNHCIKPVCEPPCQNRGSCSRPQLCVCRSGFRGARCEEVIPDEEFDPQNSRLAPRRWAERSPNLRRSSAAGEGTLARAQPPAPQSPPAPQSPPAGTLSGLSQTHPSQQHVGLSRTVRLHPTATASSQLSSNALPPGPGLEQRDGTQQAVPLEHPSSPWGLNLTEKIKKIKIVFTPTICKQTCARGHCANSCERGDTTTLYSQGGHGHDPKSGFRIYFCQIPCLNGGRCIGRDECWCPANSTGKFCHLPIPQPDREPPGRGSRPRALLEAPLKQSTFTLPLSNQLASVNPSLVKVHIHHPPEASVQIHQVAQVRGGVEEALVENSVETRPPPWLPASPGHSLWDSNNIPARSGEPPRPLPPAAPRPRGLLGRCYLNTVNGQCANPLLELTTQEDCCGSVGAFWGVTLCAPCPPRPASPVIENGQLECPQGYKRLNLTHCQDINECLTLGLCKDAECVNTRGSYLCTCRPGLMLDPSRSRCVSDKAISMLQGLCYRSLGPGTCTLPLAQRITKQICCCSRVGKAWGSECEKCPLPGTEAFREICPAGHGYTYASSDIRLSMRKAEEEELARPPREQGQRSSGALPGPAERQPLRVVTDTWLEAGTIPDKGDSQAGQVTTSVTHAPAWVTGNATTPPMPEQGIAEIQEEQVTPSTDVLVTLSTPGIDRCAAGATNVCGPGTCVNLPDGYRCVCSPGYQLHPSQAYCTDDNECLRDPCKGKGRCINRVGSYSCFCYPGYTLATSGATQECQDINECEQPGVCSGGQCTNTEGSYHCECDQGYIMVRKGHCQDINECRHPGTCPDGRCVNSPGSYTCLACEEGYRGQSGSCVDVNECLTPGVCAHGKCTNLEGSFRCSCEQGYEVTSDEKGCQDVDECASRASCPTGLCLNTEGSFACSACENGYWVNEDGTACEDLDECAFPGVCPSGVCTNTAGSFSCKDCDGGYRPSPLGDSCEDVDECEDPQSSCLGGECKNTVGSYQCLCPQGFQLANGTVCEDVNECMGEEHCAPHGECLNSHGSFFCLCAPGFVSAEGGTSCQDVDECATTDPCVGGHCVNTEGSFNCLCETGFQPSPESGECVDIDECEDYGDPVCGTWKCENSPGSYRCVLGCQPGFHMAPNGDCIDIDECANDTMCGSHGFCDNTDGSFRCLCDQGFEISPSGWDCVDVNECELMLAVCGAALCENVEGSFLCLCASDLEEYDAQEGHCRPRGAGGQSMSEAPTGDHAPAPTRMDCYSGQKGHAPCSSVLGRNTTQAECCCTQGASWGDACDLCPSEDSAEFSEICPSGKGYIPVEGAWTFGQTMYTDADECVIFGPGLCPNGRCLNTVPGYVCLCNPGFHYDASHKKCEDHDECQDLACENGECVNTEGSFHCFCSPPLTLDLSQQRCMNSTSSTEDLPDHDIHMDICWKKVTNDVCSEPLRGHRTTYTECCCQDGEAWSQQCALCPPRSSEVYAQLCNVARIEAEREAGVHFRPGYEYGPGPDDLHYSIYGPDGAPFYNYLGPEDTVPEPAFPNTAGHSADRTPILESPLQPSELQPHYVASHPEPPAGFEGLQAEECGILNGCENGRCVRVREGYTCDCFEGFQLDAAHMACVDVNECDDLNGPAVLCVHGYCENTEGSYRCHCSPGYVAEAGPPHCTAKE

SEQ ID NO: 42341 - protein, 1018 aa, Homo sapiens
MEDEEGPEYGKPDFVLLDQVTMEDFMRNLQLRFEKGRIYTYIGEVLVSVNPYQELPLYGPEAIARYQGRELYERPPHLYAVANAAYKAMKHRSRDTCIVISGESGAGKTEASKHIMQYIAAVTNPSQRAEVERVKDVLLKSTCVLEAFGNARTNRNHNSSRFGKYMDINFDFKGDPIGGHIHSYLLEKSRVLKQHVGERNFHAFYQLLRGSEDKQLHELHLERNPAVYNFTHQGAGLNMTVHSALDSDEQSHQAVTEAMRVIGFSPEEVESVHRILAAILHLGNIEFVETEEGGLQKEGLAVAEEALVDHVAELTATPRDLVLRSLLARTVASGGRELIEKGHTAAEASYARDACAKAVYQRLFEWVVNRINSVMEPRGRDPRRDGKDTVIGVLDIYGFEVFPVNSFEQFCINYCNEKLQQLFIQLILKQEQEEYEREGITWQSVEYFNNATIVDLVERPHRGILAVLDEACSSAGTITDRIFLQTLDMHHRHHLHYTSRQLCPTDKTMEFGRDFRIKHYAGDVTYSVEGFIDKNRDFLFQDFKRLLYNSTDPTLRAMWPDGQQDITEVTKRPLTAGTLFKNSMVALVENLASKEPFYVRCIKPNEDKVAGKLDENHCRHQVAYLGLLENVRVRRAGFASRQPYSRFLLRYKMTCEYTWPNHLLGSDKAAVSALLEQHGLQGDVAFGHSKLFIRSPRTLVTLEQSRARLIPIIVLLLQKAWRGTLARWRCRRLRAIYTIMRWFRRHKVRAHLAELQRRFQAARQPPLYGRDLVWPLPPAVLQPFQDTCHALFCRWRARQLVKNIPPSDMPQIKAKVAAMGALQGLRQDWGCRRAWARDYLSSATDNPTASSLFAQRLKTLQDKDGFGAVLFSSHVRKVNRFHKIRNRALLLTDQHLYKLDPDRQYRVMRAVPLEAVTGLSVTSGGDQLVVLHARGQDDLVVCLHRSRPPLDNRVGELVGVLAAHCQGEGRTLEVRVSDCIPLSHRGVRRLISVEPRPEQPEPDFRCARGSFTLLWPSR

SEQ ID NO: 42342 - protein, 230 aa, Homo sapiens
MEDEEGPEYGKPDFVLLDQVTMEDFMRNLQLRFEKGRIYTYIGEVLVSVNPYQELPLYGPEAIARYQGRELYERPPHLYAVANAAYKAMKHRSRDTCIVISGESGAGKTEASKHIMQYIAAVTNPSQRAEVERVKDVLLKSTCVLEAFGNARTNRNHNSSRFGKYMDINFDFKGDPIGGHIHSYLLEKSRVLKQHVGERNFHAFYQVSPEGKGRWKNGVGKGRAASWTSL

SEQ ID NO: 42343 - protein, 525 aa, Homo sapiens
MEDEEGPEYGKPDFVLLDQVTMEDFMRNLQLRFEKGRIYTYIGEVLVSVNPYQELPLYGPEAIARYQGRELYERPPHLYAVANAAYKAMKHRSRDTCIVISGESGAGKTEASKHIMQYIAAVTNPSQRAEVERVKDVLLKSTCVLEAFGNARTNRNHNSSRFGKYMDINFDFKGDPIGGHIHSYLLEKSRVLKQHVGERNFHAFYQLLRGSEDKQLHELHLERNPAVYNFTHQGAGLNMTVHSALDSDEQSHQAVTEAMRVIGFSPEEVESVHRILAAILHLGNIEFVETEEGGLQKEGLAVAEEALVDHVAELTATPRDLVLRSLLARTVASGGRELIEKGHTAAEASYARDACAKAVYQRLFEWVVNRINSVMEPRGRDPRRDGKDTVIGVLDIYGFEVFPVNSFEQFCINYCNEKLQQLFIQLILKQEQEEYEREGITWQSVEYFNNATIVDLVERPHRGILAVLDEACSSAGTITDRIFLQTLDMHHRHHLHYTSRQLCPTDKTMEFGRDFRIKHYAGDVT

SEQ ID NO: 42344 - protein, 722 aa, Homo sapiens
MEDEEGPEYGKPDFVLLDQVTMEDFMRNLQLRFEKGRIYTYIGEVLVSVNPYQELPLYGPEAIARYQGRELYERPPHLYAVANAAYKAMKHRSRDTCIVISGESGAGKTEASKHIMQYIAAVTNPSQRAEVERVKDVLLKSTCVLEAFGNARTNRNHNSSRFGKYMDINFDFKGDPIGGHIHSYLLEKSRVLKQHVGERNFHAFYQLLRGSEDKQLHELHLERNPAVYNFTHQGAGLNMTVHSALDSDEQSHQAVTEAMRVIGFSPEEVESVHRILAAILHLGNIEFVETEEGGLQKEGLAVAEEALVDHVAELTATPRDLVLRSLLARTVASGGRELIEKGHTAAEASYARDACAKAVYQRLFEWVVNRINSVMEPRGRDPRRDGKDTVIGVLDIYGFEVFPVNSFEQFCINYCNEKLQQLFIQLILKQEQEEYEREGITWQSVEYFNNATIVDLVERPHRGILAVLDEACSSAGTITDRIFLQTLDMHHRHHLHYTSRQLCPTDKTMEFGRDFRIKHYAGDVTYSVEGFIDKNRDFLFQDFKRLLYNSTDPTLRAMWPDGQQDITEVTKRPLTAGTLFKNSMVALVENLASKEPFYVRCIKPNEDKVAGKLDENHCRHQVAYLGLLENVRVRRAGFASRQPYSRFLLRYWHLTPITPWAIVPVWSPRGRSRGSPNSTSQTSIQAGTSTLLASRHQNIWEDMCVSTCMWGHTGGNMGMRAV

SEQ ID NO: 42345 - protein, 1624 aa, Homo sapiens
MPRPGTSGRRPLLLVLLLPLFAAATSAASPSPSPSQVVEVPGVPSRPASVAVCRCCPGQTSRRSRCIRAFCRVRSCQPKKCAGPQRCLNPVPAVPSPSPSVRKRQVSLNWQPLTLQEARALLKRRRPRGPGGRGLLRRRPPQRAPAGKAPVLCPLICHNGGVCVKPDRCLCPPDFAGKFCQLHSSGARPPAPAVPGLTRSVYTMPLANHRDDEHGVASMVSVHVEHPQEASVVVHQVERVSGPWEEADAEAVARAEAAARAEAAAPYTVLAQSAPREDGYSDASGFGYCFRELRGGECASPLPGLRTQEVCCRGAGLAWGVHDCQLCSERLGNSERVSAPDGPCPTGFERVNGSCEDVDECATGGRCQHGECANTRGGYTCVCPDGFLLDSSRSSCISQHVISEAKGPCFRVLRDGGCSLPILRNITKQICCCSRVGKAWGRGCQLCPPFGSEGFREICPAGPGYHYSASDLRYNTRPLGQEPPRVSLSQPRTLPATSRPSAGFLPTHRLEPRPEPRPDPRPGPELPLPSIPAWTGPEIPESGPSSGMCQRNPQVCGPGRCISRPSGYTCACDSGFRLSPQGTRCIDVDECRRVPPPCAPGRCENSPGSFRCVCGPGFRAGPRAAECLDVDECHRVPPPCDLGRCENTPGSFLCVCPAGYQAAPHGASCQDVDECTQSPGLCGRGACKNLPGSFRCVCPAGFRGSACEEDVDECAQEPPPCGPGRCDNTAGSFHCACPAGFRSRGPGAPCQDVDECARSPPPCTYGRCENTEGSFQCVCPMGFQPNTAGSECEDVDECENHLACPGQECVNSPGSFQCRTCPSGHHLHRGRCTDVDECSSGAPPCGPHGHCTNTEGSFRCSCAPGYRAPSGRPGPCADVNECLEGDFCFPHGECLNTDGSFACTCAPGYRPGPRGASCLDVDECSEEDLCQSGICTNTDGSFECICPPGHRAGPDLASCLDVDECRERGPALCGSQRCENSPGSYRCVRDCDPGYHAGPEGTCDDVDECQEYGPEICGAQRCENTPGSYRCTPACDPGYQPTPGGGCQDVDECRNRSFCGAHAVCQNLPGSFQCLCDQGYEGARDGRHCVDVNECETLQGVCGAALCENVEGSFLCVCPNSPEEFDPMTGRCVPPRTSAGTFPGSQPQAPASPVLPARPPPPPLPRRPSTPRQGPVGSGRRECYFDTAAPDACDNILARNVTWQECCCTVGEGWGSGCRIQQCPGTETAEYQSLCPHGRGYLAPSGDLSLRRDVDECQLFRDQVCKSGVCVNTAPGYSCYCSNGYYYHTQRLECIDNDECADEEPACEGGRCVNTVGSYHCTCEPPLVLDGSQRRCVSNESQSLDDNLGVCWQEVGADLVCSHPRLDRQATYTECCCLYGEAWGMDCALCPAQDSDDFEALCNVLRPPAYSPPRPGGFGLPYEYGPDLGPPYQGLPYGPELYPPPALPYDPYPPPPGPFARREAPYGAPRFDMPDFEDDGGPYGESEAPAPPGPGTRWPYRSRDTRRSFPEPEEPPEGGSYAGSLAEPYEELEAEECGILDGCTNGRCVRVPEGFTCRCFDGYRLDMTRMACVDINECDEAEAASPLCVNARCLNTDGSFRCICRPGFAPTHQPHHCAPARPRA

SEQ ID NO: 42346 - protein, 1557 aa, Homo sapiens
MAGGVRLLWVSLLVLLAQLGPQPGLGRLGERLRVRFTPVVCGLRCVHGPTGSRCTPTCAPRNATSVDSGAPGGAAPGGPGFRAFLCPLICHNGGVCVKPDRCLCPPDFAGKFCQLHSSGARPPAPAVPGLTRSVYTMPLANHRDDEHGVASMVSVHVEHPQEASVVVHQVERVSGPWEEADAEAVARAEAAARAEAAAPYTVLAQSAPREDGYSDASGFGYCFRELRGGECASPLPGLRTQEVCCRGAGLAWGVHDCQLCSERLGNSERVSAPDGPCPTGFERVNGSCEDVDECATGGRCQHGECANTRGGYTCVCPDGFLLDSSRSSCISQHVISEAKGPCFRVLRDGGCSLPILRNITKQICCCSRVGKAWGRGCQLCPPFGSEGFREICPAGPGYHYSASDLRYNTRPLGQEPPRVSLSQPRTLPATSRPSAGFLPTHRLEPRPEPRPDPRPGPELPLPSIPAWTGPEIPESGPSSGMCQRNPQVCGPGRCISRPSGYTCACDSGFRLSPQGTRCIDVDECRRVPPPCAPGRCENSPGSFRCVCGPGFRAGPRAAECLDVDECHRVPPPCDLGRCENTPGSFLCVCPAGYQAAPHGASCQDVDECTQSPGLCGRGACKNLPGSFRCVCPAGFRGSACEEDVDECAQEPPPCGPGRCDNTAGSFHCACPAGFRSRGPGAPCQDVDECARSPPPCTYGRCENTEGSFQCVCPMGFQPNTAGSECEDVDECENHLACPGQECVNSPGSFQCRTCPSGHHLHRGRCTDVDECSSGAPPCGPHGHCTNTEGSFRCSCAPGYRAPSGRPGPCADVNECLEGDFCFPHGECLNTDGSFACTCAPGYRPGPRGASCLDVDECSEEDLCQSGICTNTDGSFECICPPGHRAGPDLASCLDVDECRERGPALCGSQRCENSPGSYRCVRDCDPGYHAGPEGTCDDVDECQEYGPEICGAQRCENTPGSYRCTPACDPGYQPTPGGGCQDVDECRNRSFCGAHAVCQNLPGSFQCLCDQGYEGARDGRHCVDVNECETLQGVCGAALCENVEGSFLCVCPNSPEEFDPMTGRCVPPRTSAGTFPGSQPQAPASPVLPARPPPPPLPRRPSTPRQGPVGSGRRECYFDTAAPDACDNILARNVTWQECCCTVGEGWGSGCRIQQCPGTETAEYQSLCPHGRGYLAPSGDLSLRRDVDECQLFRDQVCKSGVCVNTAPGYSCYCSNGYYYHTQRLECIDNDECADEEPACEGGRCVNTVGSYHCTCEPPLVLDGSQRRCVSNESQSLDDNLGVCWQEVGADLVCSHPRLDRQATYTECCCLYGEAWGMDCALCPAQDSDDFEALCNVLRPPAYSPPRPGGFGLPYEYGPDLGPPYQGLPYGPELYPPPALPYDPYPPPPGPFARREAPYGAPRFDMPDFEDDGGPYGESEAPAPPGPGTRWPYRSRDTRRSFPEPEEPPEGGSYAGSLAEPYEELEAEECGILDGCTNGRCVRVPEGFTCRCFDGYRLDMTRMACVDINECDEAEAASPLCVNARCLNTDGSFRCICRPGFAPTHQPHHCAPARPRA

SEQ ID NO: 42347 - protein, 1587 aa, Homo sapiens
MGDVKALLFVVAARARRLGGAAASESLAVSEAFCRVRSCQPKKCAGPQRCLNPVPAVPSPSPSVRKRQVSLNWQPLTLQEARALLKRRRPRGPGGRGLLRRRPPQRAPAGKAPVLCPLICHNGGVCVKPDRCLCPPDFAGKFCQLHSSGARPPAPAVPGLTRSVYTMPLANHRDDEHGVASMVSVHVEHPQEASVVVHQVERVSGPWEEADAEAVARAEAAARAEAAAPYTVLAQSAPREDGYSDASGFGYCFRELRGGECASPLPGLRTQEVCCRGAGLAWGVHDCQLCSERLGNSERVSAPDGPCPTGFERVNGSCEDVDECATGGRCQHGECANTRGGYTCVCPDGFLLDSSRSSCISQHVISEAKGPCFRVLRDGGCSLPILRNITKQICCCSRVGKAWGRGCQLCPPFGSEGFREICPAGPGYHYSASDLRYNTRPLGQEPPRVSLSQPRTLPATSRPSAGFLPTHRLEPRPEPRPDPRPGPELPLPSIPAWTGPEIPESGPSSGMCQRNPQVCGPGRCISRPSGYTCACDSGFRLSPQGTRCIDVDECRRVPPPCAPGRCENSPGSFRCVCGPGFRAGPRAAECLDVDECHRVPPPCDLGRCENTPGSFLCVCPAGYQAAPHGASCQDVDECTQSPGLCGRGACKNLPGSFRCVCPAGFRGSACEEDVDECAQEPPPCGPGRCDNTAGSFHCACPAGFRSRGPGAPCQDVDECARSPPPCTYGRCENTEGSFQCVCPMGFQPNTAGSECEDVDECENHLACPGQECVNSPGSFQCRTCPSGHHLHRGRCTDVDECSSGAPPCGPHGHCTNTEGSFRCSCAPGYRAPSGRPGPCADVNECLEGDFCFPHGECLNTDGSFACTCAPGYRPGPRGASCLDVDECSEEDLCQSGICTNTDGSFECICPPGHRAGPDLASCLDVDECRERGPALCGSQRCENSPGSYRCVRDCDPGYHAGPEGTCDDVDECQEYGPEICGAQRCENTPGSYRCTPACDPGYQPTPGGGCQDVDECRNRSFCGAHAVCQNLPGSFQCLCDQGYEGARDGRHCVDVNECETLQGVCGAALCENVEGSFLCVCPNSPEEFDPMTGRCVPPRTSAGTFPGSQPQAPASPVLPARPPPPPLPRRPSTPRQGPVGSGRRECYFDTAAPDACDNILARNVTWQECCCTVGEGWGSGCRIQQCPGTETAEYQSLCPHGRGYLAPSGDLSLRRDVDECQLFRDQVCKSGVCVNTAPGYSCYCSNGYYYHTQRLECIDNDECADEEPACEGGRCVNTVGSYHCTCEPPLVLDGSQRRCVSNESQSLDDNLGVCWQEVGADLVCSHPRLDRQATYTECCCLYGEAWGMDCALCPAQDSDDFEALCNVLRPPAYSPPRPGGFGLPYEYGPDLGPPYQGLPYGPELYPPPALPYDPYPPPPGPFARREAPYGAPRFDMPDFEDDGGPYGESEAPAPPGPGTRWPYRSRDTRRSFPEPEEPPEGGSYAGSLAEPYEELEAEECGILDGCTNGRCVRVPEGFTCRCFDGYRLDMTRMACVDINECDEAEAASPLCVNARCLNTDGSFRCICRPGFAPTHQPHHCAPARPRA

SEQ ID NO: 42348 - protein, 636 aa, Homo sapiens
MLGGAGGGPGLRTPCPADVDECSEEDLCQSGICTNTDGSFECICPPGHRAGPDLASCLDVDECRERGPALCGSQRCENSPGSYRCVRDCDPGYHAGPEGTCDDVNECETLQGVCGAALCENVEGSFLCVCPNSPEEFDPMTGRCVPPRTSAGTFPGSQPQAPASPVLPARPPPPPLPRRPSTPRQGPVGSGRRECYFDTAAPDACDNILARNVTWQECCCTVGEGWGSGCRIQQCPGTETAEYQSLCPHGRGYLAPSGDLSLRRDVDECQLFRDQVCKSGVCVNTAPGYSCYCSNGYYYHTQRLECIDNDECADEEPACEGGRCVNTVGSYHCTCEPPLVLDGSQRRCVSNESQSLDDNLGVCWQEVGADLVCSHPRLDRQATYTECCCLYGEAWGMDCALCPAQDSDDFEALCNVLRPPAYSPPRPGGFGLPYEYGPDLGPPYQGLPYGPELYPPPALPYDPYPPPPGPFARREAPYGAPRFDMPDFEDDGGPYGESEAPAPPGPGTRWPYRSRDTRRSFPEPEEPPEGGSYAGSLAEPYEELEAEECGILDGCTNGRCVRVPEGFTCRCFDGYRLDMTRMACVDINECDEAEAASPLCVNARCLNTDGSFRCICRPGFAPTHQPHHCAPARPRA

SEQ ID NO: 42349 - protein, 337 aa, Homo sapiens
METMRAQRLQPGVGTSGRGTLRALRPGVTGAAAATATPPAGPPPAPPPPAPPPPPLLLSGAPGLPLPPGAAGSPAVLREAVEAVVRSFAKHTQGYGRVNVVEALQEFWQMKQSRGADLKNGALVVYEMVPSNSPPYVCYVTLPGGSCFGSFQFCPTKAEARRSAAKIALMNSVFNEHPSRRITDEFIEKSVSEALASFNGNREEADNPNTGIGAFRFMLESNKGKSMLEFQELMTVFQLLHWNGSLKAMRERQCSRQEVLAHYSHRALDDDIRHQMALDWVSREQSVPGALSRELASTERELDEARLAGKELRFHKEKKDILVLAAGQLGNMHSSNC

SEQ ID NO: 42350 - protein, 42 aa, Homo sapiens
PSRLLLQPSPQRADPRCWPRGFWSEPQSLCYVFGTGTKVTVL

SEQ ID NO: 42351 - protein, 465 aa, Homo sapiens
MLPLWTLSLLLGAVAGKEVCYERLGCFSDDSPWSGITERPLHILPWSPKDVNTRFLLYTNENPNNFQEVAADSSSISGSNFKTNRKTRFIIHGFIDKGEENWLANVCKNLFKVESVNCICVDWKGGSRTGYTQASQNIRIVGAEVAYFVEFLQSAFGYSPSNVHVIGHSLGAHAAGEAGRRTNGTIGRITGLDPAEPCFQGTPELVRLDPSDAKFVDVIHTDGAPIVPNLGFGMSQVVGHLDFFPNGGVEMPGCKKNILSQIVDIDGIWEGTRDFAACNHLRSYKYYTDSIVNPDGFAGFPCASYNVFTANKCFPCPSGGCPQMGHYADRYPGKTNDVGQKFYLDTGDASNFARWRYKVSVTLSGKKVTGHILVSLFGNKGNSKQYEIFKGTLKPDSTHSNEFDSDVDVGDLQMVKFIWYNNVINPTLPRVGASKIIVETNVGKQFNFCSPETVREEVLLTLTPC

SEQ ID NO: 42352 - protein, 228 aa, Homo sapiens
MCHVIVTCRSMLWTLLSIVVAFAELIAFMSADWLIGKARSRGGVEPAGPGGGSPEPYHPTLGIYARCIRNPGVQHFQRDTLCGPYAESFGEIASGFWQATAIFLAVGIFILCMVALVSVFTMCVQSIMKKSIFNVCGLLQGIAGLFLILGLILYPAGWGCQKAIDYCGHYASAYKPGDCSLGWAFYTAIGGTVLTFICAVFSAQAEIATSSDKVQEEIEEGKNLICLL

SEQ ID NO: 42353 - protein, 207 aa, Homo sapiens
MGKCSGRCTLVAFCCLQLVAALERQIFDFLGYQWAPILANFLHIMAVILGIFGTVQYRSRYLILYAAWLVLWVGWNAFIICFYLEVGQLSQDRDFIMTFNTSLHRSWWMENGPGCLVTPVLNSRLALEDHHVISVTGCLLDYPYIEALSSALQIFLALFGFVFACYVSKVFLEEEDSFDFIGGFDSYGYQAPQKTSHLQLQPLYTSG

SEQ ID NO: 42354 - protein, 136 aa, Homo sapiens
MAVILGIFGTVQYRSRYLILDRDFIMTFNTSLHRSWWMENGPGCLVTPVLNSRLALEDHHVISVTGCLLDYPYIEALSSALQIFLALFGFVFACYVSKVFLEEEDSFDFIGGFDSYGYQAPQKTSHLQLQPLYTSG

SEQ ID NO: 42355 - protein, 234 aa, Homo sapiens
MGPGGRVARLLAPLMWRRAVSSVAGSAVGAEPGLRLLAVQRLPVGAAFCRACQTPNFVRGLHSEPGLEERAEGTVNEGRPESDAADHTGPKFDIDMMVSLLRQENARDICVIQVPPEMRYTDYFVIVSGTSTRHLHAMAFYVVKMYKHLKCKRDPHVKIEGKDTDDWLCVDFGSMVIHLMLPETREIYELEKLWTLRSYDDQLAQIAPETVPEDFILGIEDDTSSVTPVELKCE

SEQ ID NO: 42356 - protein, 200 aa, Homo sapiens
MAQQRALPQSKETLLQSYNKRLKDDIKSIMDNFTEIIKTAKIEDETQVSRATQGEQDNYEMHVRAANIVRAGESLMKLVSDLKQFLILNDFPSVNEAIDQRNQQLRTLQEECDRKLITLRDEISIDLYELEEEYYSSSSSLCEANDLPLCEAYGRLDLDTDSADGLSAPLLASPEPSAGPLQVAAPAHSHAGGPGPTEHA

SEQ ID NO: 42357 - protein, 140 aa, Homo sapiens
MAQQRALPQSKETLLQSYNKRLKDDIKSIMDNFTEIIKTAKIEDETQVSRATQGEQDNYEMHVRAANIVRAGESLMKLVSDLKQFLILNDFPSVNEAIDQRNQQLRTLQEECDRKLITLRDEISIDLYELEEEYYSSRYK

SEQ ID NO: 42358 - protein, 270 aa, Homo sapiens
MAASSSGEKEKERLGGGLGVAGGNSTRERLLSALEDLEVLSRELIEMLAISRNQKLLQAGEENQVLELLIHRDGEFQELMKLALNQGKIHHEMQVLEKEVEKRDSDIQQLQKQLKEAEQILATAVYQAKEKLKSIEKARKGAISSEEIIKYAHRISASNAVCAPLTWVPGDPRRPYPTDLEMRSGLLGQMNNPSTNGVNGHLPGDALAAGRLPDVLAPQYPWQSNDMSMNMLPPNHSSDFLLEPPGHNKENEDDVEIMSTDSSSSSSESD

SEQ ID NO: 42359 - protein, 224 aa, Homo sapiens
MLAISRNQKLLQAGEENQVLELLIHRDGEFQELMKLALNQGKIHHEMQVLEKEVEKRDSDIQQLQKQLKEAEQILATAVYQAKEKLKSIEKARKGAISSEEIIKYAHRISASNAVCAPLTWVPGDPRRPYPTDLEMRSGLLGQMNNPSTNGVNGHLPGDALAAGRLPDVLAPQYPWQSNDMSMNMLPPNHSSDFLLEPPGHNKENEDDVEIMSTDSSSSSSESD

SEQ ID NO: 42360 - protein, 460 aa, Homo sapiens
MDMEVLGQEQSSEQLDLEEISRKISFLDKWREIFSYHRLGTNNSTPQNHEGNHTSADENEDGTGLSQPKGQGHLPSSGLCSIPNPSIISSKLGGFPISLAMATKLRQILFGNTVHVFSYNWKKAYFRFHDPSSELAFTLEVGKGGARSIQMAVQGSIIKYLLFTRKGKDCNLGNLCEISKKEQEQALAAALAGILWAAGAAQKATICLVTEDIYVASTPDYSVDNFTERLQLFEFLEKEAAEKFIYDHLLCFRGEGSHGVILFLYSLIFSRTFERLQMDLDVTTTQLLQPNAGGFLCRQAVLNMILTGRASPNVFNGCEEGKSQETLHGVLTRSDVGYLQWGKDASEDDRLSQVGSMLKTPKLPIWLCNINGNYSILFCTNRQLLSDWKMERLFDLYFYSGQPSQKKLVRLTIDTHSHHWERDQQEEKHGPRRRFSPVEMAIRTKWSEATINWNGTVPFF

SEQ ID NO: 42361 - protein, 456 aa, Homo sapiens
MGNSRSRVGRSFCSQFLPEEQAEIDQLFDALSSDKNSPNVSSKSFSLKALQNHVGEALPPEMVTRLYDGMRRVDLTGKAKGPSENVSQEQFTASMSHLLKGNSEEKSLMIMKMISATEGPVKAREVQKFTEDLVGSVVHVLSHRQELRGWTGKEAPGPNPRVQVLAAQLLSDMKLQDGKRLLGPQWLDYDCDRAVIEDWVFRVPHVAIFLSVVICKGFLILCSSLDLTTLVPERQVDQGRGFESILDVLSVMYINAQLPREQRHRWCLLFSSELHGHSFSQLCGHITHRGPCVAVLEDHDKHVFGGFASCSWEVKPQFQGDNRCFLFSICPSMAVYTHTGYNDHYMYLNHGQQTIPNGLGMGGQHNYFGLWVDVDFGKGHSRAKPTCTTYNSPQLSAQENFQFDKMEVWAVGDPSEEQLAKGNKSILDADPEAQALLEISGHSRHSEGLREVPDDE

SEQ ID NO: 42362 - protein, 448 aa, Homo sapiens
MLWLALGPFPAMENQVLVIRIKIPNSGAVDWTVHSGPQLLFRDVLDVIGQVLPEATTTAFEYEDEDGDRITVRSDEEMKAMLSYYYSTVMEQQVNGQLIEPLQIFPRACKPPGERNIHGLKVNTRAGPSQHSSPAVSDSLPSNSLKKSSAELKKILANGQMNEQDIRYRDTLGHGNGGTVYKAYHVPSGKILAVKVILLDITLELQKQIMSELEILYKCDSSYIIGFYGAFFVENRISICTEFMDGGSLDVYRKMPEHVLGRIAVAVVKGLTYLWSLKILHRDVKPSNMLVNTRGQVKLCDFGVSTQLVNSIAKTYVGTNAYMAPERISGEQYGIHSDVWSLGISFMELALGRFPYPQIQKNQGSLMPLQLLQCIVDEDSPVLPVGEFSEPFVHFITQCMRKQPKERPAPEELMGHPFIVQFNDGNAAVVSMWVCRALEERRSQQGPP

SEQ ID NO: 42363 - protein, 438 aa, Homo sapiens
MLWLALGPFPAMENQVLVIRIKIPNSGAVDWTVHSGPQLLFRDVLDVIGQVLPEATTTAFEYEDEDGDRITVRSDEEMKAMLSYYYSTVMEQQVNGQLIEPLQIFPRACKPPGERNIHGLKVNTRAGPSQHSSPAVSDSLPSNSLKKSSAELKKILANGQMNEQDIRYRDTLGHGNGGTVYKAYHVPSGKILAVKVILLDITLELQKQIMSELEILYKCDSSYIIGFYGAFFVENRISICTEFMDGGSLDVYRKMPEHVLGRIAVAVVKGLTYLWSLKILHRDVKPSNMLVNTRGQVKLCDFGVSTQLVNSIAKTYVGTNAYMAPERISGEQYGIHSDVWSLGISFMEIQKNQGSLMPLQLLQCIVDEDSPVLPVGEFSEPFVHFITQCMRKQPKERPAPEELMGHPFIVQFNDGNAAVVSMWVCRALEERRSQQGPP

SEQ ID NO: 42364 - protein, 444 aa, Homo sapiens
MLWLALGPFPAMENQVLVIRIKIPNSGAVDWTVHSGPQLLFRDVLDVIGQVLPEATTTAFEYEDEDGDRITVRSDEEMKAMLSYYYSTVMEQQVNGQLIEPLQIFPRACKPPGERNIHGLKVNTRAGPSQHSSPAVSDSLPSNSLKKSSAELKKILANGQMNEQDIRYRDTLGHGNGGTVYKAYHVPSGKILAVKVILLDITLELQKQIMSELEILYKCDSSYIIGFYGAFFVENRISICTEFMDGGSLDVYRKMPEHVLGRIAVAVVKGLTYLWSLKILHRDVKPSNMLVNTRGQVKLCDFGVSTQLVNSIAKTYVGTNAYMAPERISGEQYGIHSDVWSLGISFMEIQKNQGSLMPLQLLQCIVDEDSPVLPVGEFSEPFVHFITQCMRKQPKERPAPEELMGHPFIVQFNDGNAAVVSMWVCRALEERRSLASLPSPSPSV

SEQ ID NO: 42365 - protein, 412 aa, Homo sapiens
MMEGHFPQSDVIGQVLPEATTTAFEYEDEDGDRITVRSDEEMKAMLSYYYSTVMEQQVNGQLIEPLQIFPRACKPPGERNIHGLKVNTRAGPSQHSSPAVSDSLPSNSLKKSSAELKKILANGQMNEQDIRYRDTLGHGNGGTVYKAYHVPSGKILAVKVILLDITLELQKQIMSELEILYKCDSSYIIGFYGAFFVENRISICTEFMDGGSLDVYRKMPEHVLGRIAVAVVKGLTYLWSLKILHRDVKPSNMLVNTRGQVKLCDFGVSTQLVNSIAKTYVGTNAYMAPERISGEQYGIHSDVWSLGISFMELALGRFPYPQIQKNQGSLMPLQLLQCIVDEDSPVLPVGEFSEPFVHFITQCMRKQPKERPAPEELMGHPFIVQFNDGNAAVVSMWVCRALEERRSQQGPP

SEQ ID NO: 42366 - protein, 399 aa, Homo sapiens
MAAPSPSGGGGSGGGSGSGTPGPVGSPAPGHPAVSSMQGKRKALKLNFANPPFKSTARFTLNPNPTGVQNPHIERLRTHSIESSGKLKISPEQHWDFTAEDLKDLGEIGRGAYGSVNKMVHKPSGQIMAVKRIRSTVDEKEQKQLLMDLDVVMRSSDCPYIVQFYGALFREGDCWICMELMSTSFDKFYKYVYSVLDDVIPEEILGKITLATVKALNHLKENLKIIHRDIKPSNILLDRSGNIKLCDFGISGQLVDSIAKTRDAGCRPYMAPERIDPSASRQGYDVRSDVWSLGITLYELATGRFPYPKWNSVFDQLTQVVKGDPPQLSNSEEREFSPSFINFVNLCLTKDESKRPKYKELLKHPFILMYEERAVEVACYVCKILDQMPATPSSPMYVD

SEQ ID NO: 42367 - protein, 410 aa, Homo sapiens
MAAPSPSGGGGSGGGSGSGTPGPVGSPAPGHPAVSSMQGFQINFCEKAQSKRKALKLNFANPPFKSTARFTLNPNPTGVQNPHIERLRTHSIESSGKLKISPEQHWDFTAEDLKDLGEIGRGAYGSVNKMVHKPSGQIMAVKRIRSTVDEKEQKQLLMDLDVVMRSSDCPYIVQFYGALFREGDCWICMELMSTSFDKFYKYVYSVLDDVIPEEILGKITLATVKALNHLKENLKIIHRDIKPSNILLDRSGNIKLCDFGISGQLVDSIAKTRDAGCRPYMAPERIDPSASRQGYDVRSDVWSLGITLYELATGRFPYPKWNSVFDQLTQVVKGDPPQLSNSEEREFSPSFINFVNLCLTKDESKRPKYKELLKHPFILMYEERAVEVACYVCKILDQMPATPSSPMYVD

SEQ ID NO: 42368 - protein, 1732 aa, Homo sapiens
MSGEVRLRQLEQFILDGPAQTNGQCFSVETLLDILICLYDECNNSPLRREKNILEYLEWAKPFTSKVKQMRLHREDFEILKVIGRGAFGEVAVVKLKNADKVFAMKILNKWEMLKRAETACFREERDVLVNGDNKWITTLHYAFQDDNNLYLVMDYYVGGDLLTLLSKFEDRLPEDMARFYLAEMVIAIDSVHQLHYVHRDIKPDNILMDMNGHIRLADFGSCLKLMEDGTVQSSVAVGTPDYISPEILQAMEDGKGRYGPECDWWSLGVCMYEMLYGETPFYAESLVETYGKIMNHKERFQFPAQVTDVSENAKDLIRRLICSREHRLGQNGIEDFKKHPFFSGIDWDNIRNCEAPYIPEVSSPTDTSNFDVDDDCLKNSETMPPPTHTAFSGHHLPFVGFTYTSSCVLSDRSCLRVTAGPTSLDLDVNVQRTLDNNLATEAYERRIKRLEQEKLELSRKLQESTQTVQALQYSTVDGPLTASKDLEIKNLKEEIEKLRKQVTESSHLEQQLEEANAVRQELDDAFRQIKAYEKQIKTLQQEREDLNKELVQASERLKNQSKELKDAHCQRKLAMQEFMEINERLTELHTQKQKLARHVRDKEEEVDLVMQKVESLRQELRRTERAKKELEVHTEALAAEASKDRKLREQSEHYSKQLENELEGLKQKQISYSPGVCSIEHQQEITKLKTDLEKKSIFYEEELSKREGIHANEIKNLKKELHDSEGQQLALNKEIMILKDKLEKTRRESQSEREEFESEFKQQYEREKVLLTEENKKLTSELDKLTTLYENLSIHNQQLEEEVKDLADKKESVAHWEAQITEIIQWVSDEKDARGYLQALASKMTEELEALRNSSLGTRATDMPWKMRRFAKLDMSARLELQSALDAEIRAKQAIQEELNKVKASNIITECKLKDSEKKNLELLSEIEQLIKDTEELRSEKGIEHQDSQHSFLAFLNTPTDALDQFERSPSCTPASKGRRTVDSTPLSVHTPTLRKKGCPGSTGFPPKRKTHQFFVKSFTTPTKCHQCTSLMVGLIRQGCSCEVCGFSCHITCVNKAPTTCPVPPEQTKGPLGIDPQKGIGTAYEGHVRIPKPAGVKKGWQRALAIVCDFKLFLYDIAEGKASQPSVVISQVIDMRDEEFSVSSVLASDVIHASRKDIPCIFRVTASQLSASNNKCSILMLADTENEKNKWVGVLSELHKILKKNKFRDRSVYVPKEAYDSTLPLIKTTQAAAIIDHERIALGNEEGLFVVHVTKDEIIRVGDNKKIHQIELIPNDQLVAVISGRNRHVRLFPMSALDGRETDFYKLSETKGCQTVTSGKVRHGALTCLCVAMKRQVLCYELFQSKTRHRKFKEIQVPYNVQWMAIFSEQLCVGFQSGFLRYPLNGEGNPYSMLHSNDHTLSFIAHQPMDAICAVEISSKEYLLCFNSIGIYTDCQGRRSRQQELMWPANPSSCCYNAPYLSVYSENAVDIFDVNSMEWIQTLPLKKVRPLNNEGSLNLLGLETIRLIYFKNKMAEGDELVVPETSDNSRKQMVRNINNKRRYSFRVPEEERMQQRREMLRDPEMRNKLISNPTNFNHIAHMGPGDGIQILKDLPMNPRPQESRTVFSGSVSIPSITKSRPEPGRSMSASSGLSARSSAQNGSALKREFSGGSYSAKRQPMPSPSEGSLSSGGMDQGSDAPARDFDGEDSDSPRHSTASNSSNLSSPPSPASPRKTKSLSLESTDRGSWDP

SEQ ID NO: 42369 - protein, 1754 aa, Homo sapiens
MSGEVRLRQLEQFILDGPAQTNGQCFSVETLLDILICLYDECNNSPLRREKNILEYLEWAKPFTSKVKQMRLHREDFEILKVIGRGAFGEVAVVKLKNADKVFAMKILNKWEMLKRAETACFREERDVLVNGDNKWITTLHYAFQDDNNLYLVMDYYVGGDLLTLLSKFEDRLPEDMARFYLAEMVIAIDSVHQLHYVHRDIKPDNILMDMNGHIRLADFGSCLKLMEDGTVQSSVAVGTPDYISPEILQAMEDGKGRYGPECDWWSLGVCMYEMLYGETPFYAESLVETYGKIMNHKERFQFPAQVTDVSENAKDLIRRLICSREHRLGQNGIEDFKKHPFFSGIDWDNIRNCEAPYIPEVSSPTDTSNFDVDDDCLKNSETMPPPTHTAFSGHHLPFVGFTYTSSCVLSDRSCLRVTAGPTSLDLDVNVQRTLDNNLATEAYERRIKRLEQEKLELSRKLQESTQTVQALQYSTVDGPLTASKDLEIKNLKEEIEKLRKQVTESSHLEQQLEEANAVRQELDDAFRQIKAYEKQIKTLQQEREDLNKELVQASERLKNQSKELKDAHCQRKLAMQEFMEINERLTELHTQKQKLARHVRDKEEEVDLVMQKVESLRQELRRTERAKKELEVHTEALAAEASKDRKLREQSEHYSKQLENELEGLKQKQISYSPGVCSIEHQQEITKLKTDLEKKSIFYEEELSKREGIHANEIKNLKKELHDSEGQQLALNKEIMILKDKLEKTRRESQSEREEFESEFKQQYEREKVLLTEENKKLTSELDKLTTLYENLSIHNQQLEEEVKDLADKKESVAHWEAQITEIIQWVSDEKDARGYLQALASKMTEELEALRNSSLGTRATDMPWKMRRFAKLDMSARLELQSALDAEIRAKQAIQEELNKVKASNIITECKLKDSEKKNLELLSEIEQLIKDTEELRSEKGIEHQDSQHSFLAFLNTPTDALDQFETDPVENTYVWNPSVKFHIQSRSTSPSTSSEAEPVKTVDSTPLSVHTPTLRKKGCPGSTGFPPKRKTHQFFVKSFTTPTKCHQCTSLMVGLIRQGCSCEVCGFSCHITCVNKAPTTCPVPPEQTKGPLGIDPQKGIGTAYEGHVRIPKPAGVKKGWQRALAIVCDFKLFLYDIAEGKASQPSVVISQVIDMRDEEFSVSSVLASDVIHASRKDIPCIFRVTASQLSASNNKCSILMLADTENEKNKWVGVLSELHKILKKNKFRDRSVYVPKEAYDSTLPLIKTTQAAAIIDHERIALGNEEGLFVVHVTKDEIIRVGDNKKIHQIELIPNDQLVAVISGRNRHVRLFPMSALDGRETDFYKLSETKGCQTVTSGKVRHGALTCLCVAMKRQVLCYELFQSKTRHRKFKEIQVPYNVQWMAIFSEQLCVGFQSGFLRYPLNGEGNPYSMLHSNDHTLSFIAHQPMDAICAVEISSKEYLLCFNSIGIYTDCQGRRSRQQELMWPANPSSCCYNAPYLSVYSENAVDIFDVNSMEWIQTLPLKKVRPLNNEGSLNLLGLETIRLIYFKNKMAEGDELVVPETSDNSRKQMVRNINNKRRYSFRVPEEERMQQRREMLRDPEMRNKLISNPTNFNHIAHMGPGDGIQILKDLPMNPRPQESRTVFSGSVSIPSITKSRPEPGRSMSASSGLSARSSAQNGSALKREFSGGSYSAKRQPMPSPSEGSLSSGGMDQGSDAPARDFDGEDSDSPRHSTASNSSNLSSPPSPASPRKTKSLSLESTDRGSWDP

SEQ ID NO: 42370 - protein, 1638 aa, Homo sapiens
MSGEVRLRQLEQFILDGPAQTNGQCFSVETLLDILICLYDECNNSPLRREKNILEYLEWAKPFTSKVKQMRLHREDFEILKVIGRGAFGEVAVVKLKNADKVFAMKILNKWEMLKRAETACFREERDVLVNGDNKWITTLHYAFQDDNNLYLVMDYYVGGDLLTLLSKFEDRLPEDMARFYLAEMVIAIDSVHQLHYVHRDIKPDNILMDMNGHIRLADFGSCLKLMEDGTVQSSVAVGTPDYISPEILQAMEDGKGRYGPECDWWSLGVCMYEMLYGETPFYAESLVETYGKIMNHKERFQFPAQVTDVSENAKDLIRRLICSREHRLGQNGIEDFKKHPFFSGIDWDNIRNCEAPYIPEVSSPTDTSNFDVDDDCLKNSETMPPPTHTAFSGHHLPFVGFTYTSSCVLSDRSCLRVTAGPTSLDLDVNVQRTLDNNLATEAYERRIKRLEQEKLELSRKLQESTQTVQALQYSTVDGPLTASKDLEIKNLKEEIEKLRKQVTESSHLEQQLEEANAVRQELDDAFRQIKAYEKQIKTLQQEREDLNKLEVHTEALAAEASKDRKLREQSEHYSKQLENELEGLKQKQISYSPGVCSIEHQQEITKLKTDLEKKSIFYEEELSKREGIHANEIKNLKKELHDSEGQQLALNKEIMILKDKLEKTRRESQSEREEFESEFKQQYEREKVLLTEENKKLTSELDKLTTLYENLSIHNQQLEEEVKDLADKKESVAHWEAQITEIIQWVSDEKDARGYLQALASKMTEELEALRNSSLGTRATDMPWKMRRFAKLDMSARLELQSALDAEIRAKQAIQEELNKVKASNIITECKLKDSEKKNLELLSEIEQLIKDTEELRSEKGIEHQDSQHSFLAFLNTPTDALDQFETVDSTPLSVHTPTLRKKGCPGSTGFPPKRKTHQFFVKSFTTPTKCHQCTSLMVGLIRQGCSCEVCGFSCHITCVNKAPTTCPVPPEQTKGPLGIDPQKGIGTAYEGHVRIPKPAGVKKGWQRALAIVCDFKLFLYDIAEGKASQPSVVISQVIDMRDEEFSVSSVLASDVIHASRKDIPCIFRVTASQLSASNNKCSILMLADTENEKNKWVGVLSELHKILKKNKFRDRSVYVPKEAYDSTLPLIKTTQAAAIIDHERIALGNEEGLFVVHVTKDEIIRVGDNKKIHQIELIPNDQLVAVISGRNRHVRLFPMSALDGRETDFYKLSETKGCQTVTSGKVRHGALTCLCVAMKRQVLCYELFQSKTRHRKFKEIQVPYNVQWMAIFSEQLCVGFQSGFLRYPLNGEGNPYSMLHSNDHTLSFIAHQPMDAICAVEISSKEYLLCFNSIGIYTDCQGRRSRQQELMWPANPSSCCYNAPYLSVYSENAVDIFDVNSMEWIQTLPLKKVRPLNNEGSLNLLGLETIRLIYFKNKMAEGDELVVPETSDNSRKQMVRNINNKRRYSFRVPEEERMQQRREMLRDPEMRNKLISNPTNFNHIAHMGPGDGIQILKDLPMNPRPQESRTVFSGSVSIPSITKSRPEPGRSMSASSGLSARSSAQNGSALKREFSGGSYSAKRQPMPSPSEGSLSSGGMDQGSDAPARDFDGEDSDSPRHSTASNSSNLSSPPSPASPRKTKSLSLESTDRGSWDP

SEQ ID NO: 42371 - protein, 1691 aa, Homo sapiens
MSGEVRLRQLEQFILDGPAQTNGQCFSVETLLDILICLYDECNNSPLRREKNILEYLEWAKPFTSKVKQMRLHREDFEILKVIGRGAFGEVAVVKLKNADKVFAMKILNKWEMLKRAETACFREERDVLVNGDNKWITTLHYAFQDDNNLYLVMDYYVGGDLLTLLSKFEDRLPEDMARFYLAEMVIAIDSVHQLHYVHRDIKPDNILMDMNGHIRLADFGSCLKLMEDGTVQSSVAVGTPDYISPEILQAMEDGKGRYGPECDWWSLGVCMYEMLYGETPFYAESLVETYGKIMNHKERFQFPAQVTDVSENAKDLIRRLICSREHRLGQNGIEDFKKHPFFSGIDWDNIRNCEAPYIPEVSSPTDTSNFDVDDDCLKNSETMPPPTHTAFSGHHLPFVGFTYTSSCVLSDRSCLRVTAGPTSLDLDVNVQRTLDNNLATEAYERRIKRLEQEKLELSRKLQESTQTVQALQYSTVDGPLTASKDLEIKNLKEEIEKLRKQVTESSHLEQQLEEANAVRQELDDAFRQIKAYEKQIKTLQQEREDLNKELVQASERLKNQSKELKDAHCQRKLAMQEFMEINERLTELHTQKQKLARHVRDKEEEVDLVMQKVESLRQELRRTERAKKELEVHTEALAAEASKDRKLREQSEHYSKQLENELEGLKQKQISYSPGVCSIEHQQEITKLKTDLEKKSIFYEEELSKREGIHANEIKNLKKELHDSEGQQLALNKEIMILKDKLEKTRRESQSEREEFESEFKQQYEREKVLLTEENKKLTSELDKLTTLYENLSIHNQQLEEEVKDLADKKESVAHWEAQITEIIQWVSDEKDARGYLQALASKMTEELEALRNSSLGTRATDMPWKMRRFAKLDMSARLELQSALDAEIRAKQAIQEELNKVKASNIITECKLKDSEKKNLELLSEIEQLIKDTEELRSEKGIEHQDSQHSFLAFLNTPTDALDQFERKTHQFFVKSFTTPTKCHQCTSLMVGLIRQGCSCEVCGFSCHITCVNKAPTTCPVPPEQTKGPLGIDPQKGIGTAYEGHVRIPKPAGVKKGWQRALAIVCDFKLFLYDIAEGKASQPSVVISQVIDMRDEEFSVSSVLASDVIHASRKDIPCIFRVTASQLSASNNKCSILMLADTENEKNKWVGVLSELHKILKKNKFRDRSVYVPKEAYDSTLPLIKTTQAAAIIDHERIALGNEEGLFVVHVTKDEIIRVGDNKKIHQIELIPNDQLVAVISGRNRHVRLFPMSALDGRETDFYKLSETKGCQTVTSGKVRHGALTCLCVAMKRQVLCYELFQSKTRHRKFKEIQVPYNVQWMAIFSEQLCVGFQSGFLRYPLNGEGNPYSMLHSNDHTLSFIAHQPMDAICAVEISSKEYLLCFNSIGIYTDCQGRRSRQQELMWPANPSSCCYNAPYLSVYSENAVDIFDVNSMEWIQTLPLKKVRPLNNEGSLNLLGLETIRLIYFKNKMAEGDELVVPETSDNSRKQMVRNINNKRRYSFRVPEEERMQQRREMLRDPEMRNKLISNPTNFNHIAHMGPGDGIQILKDLPMNPRPQESRTVFSGSVSIPSITKSRPEPGRSMSASSGLSARSSAQNGSALKREFSGGSYSAKRQPMPSPSEGSLSSGGMDQGSDAPARDFDGEDSDSPRHSTASNSSNLSSPPSPASPRKTKSLSLESTDRGSWDP

SEQ ID NO: 42372 - protein, 1719 aa, Homo sapiens
MSGEVRLRQLEQFILDGPAQTNGQCFSVETLLDILICLYDECNNSPLRREKNILEYLEWAKPFTSKVKQMRLHREDFEILKVIGRGAFGEVAVVKLKNADKVFAMKILNKWEMLKRAETACFREERDVLVNGDNKWITTLHYAFQDDNNLYLVMDYYVGGDLLTLLSKFEDRLPEDMARFYLAEMVIAIDSVHQLHYVHRDIKPDNILMDMNGHIRLADFGSCLKLMEDGTVQSSVAVGTPDYISPEILQAMEDGKGRYGPECDWWSLGVCMYEMLYGETPFYAESLVETYGKIMNHKERFQFPAQVTDVSENAKDLIRRLICSREHRLGQNGIEDFKKHPFFSGIDWDNIRNCEAPYIPEVSSPTDTSNFDVDDDCLKNSETMPPPTHTAFSGHHLPFVGFTYTSSCVLSDRSCLRVTAGPTSLDLDVNVQRTLDNNLATEAYERRIKRLEQEKLELSRKLQESTQTVQALQYSTVDGPLTASKDLEIKNLKEEIEKLRKQVTESSHLEQQLEEANAVRQELDDAFRQIKAYEKQIKTLQQEREDLNKELVQASERLKNQSKELKDAHCQRKLAMQEFMEINERLTELHTQKQKLARHVRDKEEEVDLVMQKVESLRQELRRTERAKKELEVHTEALAAEASKDRKLREQSEHYSKQLENELEGLKQKQISYSPGVCSIEHQQEITKLKTDLEKKSIFYEEELSKREGIHANEIKNLKKELHDSEGQQLALNKEIMILKDKLEKTRRESQSEREEFESEFKQQYEREKVLLTEENKKLTSELDKLTTLYENLSIHNQQLEEEVKDLADKKESVAHWEAQITEIIQWVSDEKDARGYLQALASKMTEELEALRNSSLGTRATDMPWKMRRFAKLDMSARLELQSALDAEIRAKQAIQEELNKVKASNIITECKLKDSEKKNLELLSEIEQLIKDTEELRSEKGIEHQDSQHSFLAFLNTPTDALDQFETVDSTPLSVHTPTLRKKGCPGSTGFPPKRKTHQFFVKSFTTPTKCHQCTSLMVGLIRQGCSCEVCGFSCHITCVNKAPTTCPVPPEQTKGPLGIDPQKGIGTAYEGHVRIPKPAGVKKGWQRALAIVCDFKLFLYDIAEGKASQPSVVISQVIDMRDEEFSVSSVLASDVIHASRKDIPCIFRVTASQLSASNNKCSILMLADTENEKNKWVGVLSELHKILKKNKFRDRSVYVPKEAYDSTLPLIKTTQAAAIIDHERIALGNEEGLFVVHVTKDEIIRVGDNKKIHQIELIPNDQLVAVISGRNRHVRLFPMSALDGRETDFYKLSETKGCQTVTSGKVRHGALTCLCVAMKRQVLCYELFQSKTRHRKFKEIQVPYNVQWMAIFSEQLCVGFQSGFLRYPLNGEGNPYSMLHSNDHTLSFIAHQPMDAICAVEISSKEYLLCFNSIGIYTDCQGRRSRQQELMWPANPSSCCYNAPYLSVYSENAVDIFDVNSMEWIQTLPLKKVRPLNNEGSLNLLGLETIRLIYFKNKMAEGDELVVPETSDNSRKQMVRNINNKRRYSFRVPEEERMQQRREMLRDPEMRNKLISNPTNFNHIAHMGPGDGIQILKDLPMNPRPQESRTVFSGSVSIPSITKSRPEPGRSMSASSGLSARSSAQNGSALKREFSGGSYSAKRQPMPSPSEGSLSSGGMDQGSDAPARDFDGEDSDSPRHSTASNSSNLSSPPSPASPRKTKSLSLESTDRGSWDP

SEQ ID NO: 42373 - protein, 1781 aa, Homo sapiens
MSGEVRLRQLEQFILDGPAQTNGQCFSVETLLDILICLYDECNNSPLRREKNILEYLEWAKPFTSKVKQMRLHREDFEILKVIGRGAFGEVAVVKLKNADKVFAMKILNKWEMLKRAETACFREERDVLVNGDNKWITTLHYAFQDDNNLYLVMDYYVGGDLLTLLSKFEDRLPEDMARFYLAEMVIAIDSVHQLHYVHRDIKPDNILMDMNGHIRLADFGSCLKLMEDGTVQSSVAVGTPDYISPEILQAMEDGKGRYGPECDWWSLGVCMYEMLYGETPFYAESLVETYGKIMNHKERFQFPAQVTDVSENAKDLIRRLICSREHRLGQNGIEDFKKHPFFSGIDWDNIRNCEAPYIPEVSSPTDTSNFDVDDDCLKNSETMPPPTHTAFSGHHLPFVGFTYTSSCVLSDRSCLRVTAGPTSLDLDVNVQRTLDNNLATEAYERRIKRLEQEKLELSRKLQESTQTVQALQYSTVDGPLTASKDLEIKNLKEEIEKLRKQVTESSHLEQQLEEANAVRQELDDAFRQIKAYEKQIKTLQQEREDLNKELVQASERLKNQSKELKDAHCQRKLAMQEFMEINERLTELHTQKQKLARHVRDKEEEVDLVMQKVESLRQELRRTERAKKELEVHTEALAAEASKDRKLREQSEHYSKQLENELEGLKQKQISYSPGVCSIEHQQEITKLKTDLEKKSIFYEEELSKREGIHANEIKNLKKELHDSEGQQLALNKEIMILKDKLEKTRRESQSEREEFESEFKQQYEREKVLLTEENKKLTSELDKLTTLYENLSIHNQQLEEEVKDLADKKESVAHWEAQITEIIQWVSDEKDARGYLQALASKMTEELEALRNSSLGTRATDMPWKMRRFAKLDMSARLELQSALDAEIRAKQAIQEELNKVKASNIITECKLKDSEKKNLELLSEIEQLIKDTEELRSEKGIEHQDSQHSFLAFLNTPTDALDQFETVDSTPLSVHTPTLRKKGCPGSTGFPPKRKTHQFFVKSFTTPTKCHQCTSLMVGLIRQGCSCEVCGFSCHITCVNKAPTTCPVPPEQTKGPLGIDPQKGIGTAYEGHVRIPKPAGVKKGWQRALAIVCDFKLFLYDIAEGKASQPSVVISQVIDMRDEEFSVSSVLASDVIHASRKDIPCIFRVTASQLSASNNKCSILMLADTENEKNKWVGVLSELHKILKKNKFRDRSVYVPKEAYDSTLPLIKTTQAAAIIDHERIALGNEEGLFVVHVTKDEIIRVGDNKKIHQIELIPNDQLVAVISGRNRHVRLFPMSALDGRETDFYKLSETKGCQTVTSGKVRHGALTCLCVAMKRQVLCYELFQSKTRHRKFKEIQVPYNVQWMAIFSEQLCVGFQSGFLRYPLNGEGNPYSMLHSNDHTLSFIAHQPMDAICAVEISSKEYLLCFNSIGIYTDCQGRRSRQQELMWPANPSSCCYNAPYLSVYSENAVDIFDVNSMEWIQTLPLKKVRPLNNEGSLNLLGLETIRLIYFKNKMAEGDELVVPETSDNSRKQMVRNINNKRRYSFRVPEEERMQQRREMLRDPEMRNKLISNPTNFNHIAHMGPGDGIQILKDLPMPGFPYPSPHHHSGLISSPINFEHIYHMTVNSAEKFLSPDSINPEYSPSLRSVPGTPSFMTLRNPRPQESRTVFSGSVSIPSITKSRPEPGRSMSASSGLSARSSAQNGSALKREFSGGSYSAKRQPMPSPSEGSLSSGGMDQGSDAPARDFDGEDSDSPRHSTASNSSNLSSPPSPASPRKTKSLSLESTDRGSWDP

SEQ ID NO: 42374 - protein, 937 aa, Homo sapiens
MLLYRGAPAGPGAPGCGLARPGGGPQAFGIRLSTMSPRYLQSNSSSHTRPFSAIAELLDNAVDPDVSARTVFIDVEEVKNKSCLTFTDDGCGMTPHKLHRMLSFGFTDKVIKKSQCPIGVFGNGFKSGSMRLGKDALVFTKNGGTLTVGLLSQTYLECVQAQAVIVPIVPFNQQNKKMIITEDSLPSLEAILNYSIFNRENDLLAQFDAIPGKKGTRVLIWNIRRNKNGKSELDFDTDQYDILVSDFDTEEKMTGGVTSELPETEYSLRAFCGILYMKPRMKIFLRQKKVTTQMIAKSLANVEYDTYKPTFTNKQVRITFGFSCKNSNQFGIMMYHNNRLIKSFEKVGCQVKPTRGEGVGVIGVIECNFLKPAYNKQDFEYTKEYRLTINALAQKLNAYWKEKTSQDNFETSTVARPIPKVPDQTWVQCDECLKWRKLPGKIDPSMLPARWFCYYNSHPKYRRCSVPEEQELTDEDLCLSKAKKQEQTVEEKKKMPMENENHQVFSNPPKILTVQEMAGLNNKTIGYEGIHSPSVLPSGGEESRSPSLQLKPLDSSVLQFSSKYKWILGEEPVEKRRRLQNEMTTPSLDYSMPAPYRRVEAPVAYPEGENSHDKSSSERSTPPYLFPEYPEASKNTGQNREVSILYPGAKDQRQGSLLPEELEDQMPRLVAEESNRGSTTINKEEVNKGPFVAVVGVAKGVRDSGAPIQLIPFNREELAERRKAVESWNPVPYSVASAAIPAAAIGEKARGYEESEGHNTPKLKNQRELEELKRTTEKLERVLAERNLFQQKVEELEQERNHWQSEFKKVQHELVIYSTQEAEGLYWSKKHMGYRQAEFQILKAELERTKEEKQELKEKLKETETHLEMLQKAQVSYRTPEGDDLERALAKLTRLRIHVSYLLTSVLPHLELREIGYDSEQVDGILYTVLEANHILD

SEQ ID NO: 42375 - protein, 648 aa, Homo sapiens
MTGGVTSELPETEYSLRAFCGILYMKPRMKIFLRQKKVTTQMIAKSLANVEYDTYKPTFTNKQVRITFGFSCKNSNQFGIMMYHNNRLIKSFEKVGCQVKPTRGEGVGVIGVIECNFLKPAYNKQDFEYTKEYRLTINALAQKLNAYWKEKTSQDNFETSTVARPIPKVPDQTWVQCDECLKWRKLPGKIDPSMLPARWFCYYNSHPKYRRCSVPEEQELTDEDLCLSKAKKQEQTVEEKKKMPMENENHQVFSNPPKILTVQEMAGLNNKTIGYEGIHSPSVLPSGGEESRSPSLQLKPLDSSVLQFSSKYKWILGEEPVEKRRRLQNEMTTPSLDYSMPAPYRRVEAPVAYPEGENSHDKSSSERSTPPYLFPEYPEASKNTGQNREVSILYPGAKDQRQGSLLPEELEDQMPRLVAEESNRGSTTINKEEVNKGPFVAVVGVAKGVRDSGAPIQLIPFNREELAERRKAVESWNPVPYSVASAAIPAAAIGEKARGYEESEGHNTPKLKNQRELEELKRTTEKLERVLAERNLFQQKVEELEQERNHWQSEFKKVQHELVIYSTQEAEGLYWSKKHMGYRQAEFQILKAELERTKEEKQELKEKLKETETHLEMLQKAQGFGKAYAATYPRQLSPYFCPPSLGAS

SEQ ID NO: 42376 - protein, 900 aa, Homo sapiens
MLLYRGAPAGPGAPGCGLARPGGGPQAFGIRLSTMSPRYLQSNSSSHTRPFSAIAELLDNAVDPDVSARTVFIDVEEVKNKSCLTFTDDGCGMTPHKLHRMLSFGFTDKVIKKSQCPIGVFGNGFKSGSMRLGKDALVFTKNGGTLTVGLLSQTYLECVQAQAVIVPIVPFNQQNKKMIITEDSLPSLEAILNYSIFNRENDLLAQFDAIPGKKGTRVLIWNIRRNKNGKSELDFDTDQYDILVSDFDTEEKMTGGVTSELPETEYSLRAFCGILYMKPRMKIFLRQKKVTTQMIAKSLANVEYDTYKPTFTNKQVRITFGFSCKNSNQFGIMMYHNNRLIKSFEKVGCQVKPTRGEGVGVIGVIECNFLKPAYNKQDFEYTKEYRLTINALAQKLNAYWKEKTSQDNFETSTVARPIPKVPDQTWVQCDECLKWRKLPGKIDPSMLPARWFCYYNSHPKYRRCSVPEEQELTDEDLCLSKAKKQEQTVEEKKKMPMENENHQVFSNPPKILTVQEMAGLNNKTIGYEGIHSPSVLPSGGEESRSPSLQLKPLDSSVLQFSSKYKWILGEEPVEKRRRLQNEMTTPSLDYSMPAPYRRVEAPVAYPEGENSHDKSSSERSTPPYLFPEYPEASKNTGQNREVSILYPGAKDQRQGSLLPEELEDQMPRLVAEESNRGSTTINKEEVNKGPFVAVVGVAKGVRDSGAPIQLIPFNREELAERRKAVESWNPVPYSVASAAIPAAAIGEKARGYEESEGHNTPKLKNQRELEELKRTTEKLERVLAERNLFQQKVEELEQERNHWQSEFKKVQHELVIYSTQEAEGLYWSKKHMGYRQAEFQILKAELERTKEEKQELKEKLKETETHLEMLQKAQGFGKAYAATYPRQLSPYFCPPSLGAS

SEQ ID NO: 42377 - protein, 477 aa, Homo sapiens
MAQRYDELPHYGGMDGVGVPASMYGDPHAPRPIPPVHHLNHGPPLHATQHYGAHAPHPNVMPASMGSAVNDALKRDKDAIYGHPLFPLLALVFEKCELATCTPREPGVAGGDVCSSDSFNEDIAVFAKQVRAEKPLFSSNPELDNLMIQAIQVLRFHLLELEKVHELCDNFCHRYISCLKGKMPIDLVIDERDGSSKSDHEELSGSSTNLADHNPSSWRDHDDATSTHSAGTPGPSSGGHASQSGDNSSEQGDGLDNSVASPGTGDDDDPDKDKKRQKKRGIFPKVATNIMRAWLFQHLTHPYPSEEQKKQLAQDTGLTILQVNNWFINARRRIVQPMIDQSNRAGFLLDPSVSQGAAYSPEGQPMGSFVLDGQQHMGIRPAGLQSMPGDYVSQGGPMGMSMAQPSYTPPQMTPHPTQLRHGPPMHSYLPSHPHHPAMMMHGGPPTHPGMTMSAQSPTMLNSVDPNVGGQVMDIHAQ

SEQ ID NO: 42378 - protein, 401 aa, Homo sapiens
MAQRYDELPHYGGMDGVGVPASMYGDPHAPRPIPPVHHLNHGPPLHATQHYGAHAPHPNVMPASMGSAVNDALKRDKDAIYGHPLFPLLALVFEKCELATCTPREPGVAGGDVCSSDSFNEDIAVFAKQVRAEKPLFSSNPELDNLMIQAIQVLRFHLLELEKVHELCDNFCHRYISCLKGKMPIDLVIDERDGSSKSDHEELSGSSTNLADHNPSSWRDHDDATSTHSAGTPGPSSGGHASQSGDNSSEQGDGLDNSVASPGTGDDDDPDKDKKRQKKRGIFPKVATNIMRAWLFQHLTHPYPSEEQKKQLAQDTGLTILQVNNWFINARRRIVQPMIDQSNRAGFLLDPSVSQGAAYSPEGQPMGSFVLDGQQHMGIRPAGPMSGMGMNMGMDGQWHYM

SEQ ID NO: 42379 - protein, 394 aa, Homo sapiens
MAQRYDELPHYGGMDGVGVPASMYGDPHAPRPIPPVHHLNHGPPLHATQHYGAHAPHPNVMPASMGSAVNDALKRDKDAIYGHPLFPLLALVFEKCELATCTPREPGVAGGDVCSSDSFNEDIAVFAKQVRAEKPLFSSNPELDNLMIQAIQVLRFHLLELEKVHELCDNFCHRYISCLKGKMPIDLVIDERDGSSKSDHEELSGSSTNLADHNPSSWRDHDDATSTHSAGTPGPSSGGHASQSGDNSSEQGDGLDNSVASPGTGDDDDPDKDKKRQKKRGIFPKVATNIMRAWLFQHLTHPYPSEEQKKQLAQDTGLTILQVNNWFINARRRIVQPMIDQSNRAVSQGAAYSPEGQPMGSFVLDGQQHMGIRPAGPMSGMGMNMGMDGQWHYM

SEQ ID NO: 42380 - protein, 470 aa, Homo sapiens
MAQRYDELPHYGGMDGVGVPASMYGDPHAPRPIPPVHHLNHGPPLHATQHYGAHAPHPNVMPASMGSAVNDALKRDKDAIYGHPLFPLLALVFEKCELATCTPREPGVAGGDVCSSDSFNEDIAVFAKQVRAEKPLFSSNPELDNLMIQAIQVLRFHLLELEKVHELCDNFCHRYISCLKGKMPIDLVIDERDGSSKSDHEELSGSSTNLADHNPSSWRDHDDATSTHSAGTPGPSSGGHASQSGDNSSEQGDGLDNSVASPGTGDDDDPDKDKKRQKKRGIFPKVATNIMRAWLFQHLTHPYPSEEQKKQLAQDTGLTILQVNNWFINARRRIVQPMIDQSNRAVSQGAAYSPEGQPMGSFVLDGQQHMGIRPAGLQSMPGDYVSQGGPMGMSMAQPSYTPPQMTPHPTQLRHGPPMHSYLPSHPHHPAMMMHGGPPTHPGMTMSAQSPTMLNSVDPNVGGQVMDIHAQ

SEQ ID NO: 42381 - protein, 302 aa, Homo sapiens
MAQRYDELPHYGGMDGVGVPASMYGDPHAPRPIPPVHHLNHGPPLHATQHYGAHAPHPNVMPASMGSAVNDALKRDKDAIYGHPLFPLLALVFEKCELATCTPREPGVAGGDVCSSDSFNEDIAVFAKQVRAEKPLFSSNPELDNLMIQAIQVLRFHLLELEKVHELCDNFCHRYISCLKGKMPIDLVIDERDGSSKSDHEELSGSSTNLADHNPSSWRDHDDATSTHSAGTPGPSSGGHASQSGDNSSEQGDGLDNSVASPGTGDDDDPDKDKKRQKKRGIFPKVATNIMRAWLFQHLTVY

SEQ ID NO: 42382 - protein, 306 aa, Homo sapiens
MALVFEKCELATCTPREPGVAGGDVCSSDSFNEDIAVFAKQVRAEKPLFSSNPELDNLMIQAIQVLRFHLLELEKVHELCDNFCHRYISCLKGKMPIDLVIDERDGSSKSDHEELSGSSTNLADHNPSSWRDHDDATSTHSAGTPGPSSGGHASQSGDNSSEQGDGLDNSVASPGTGDDDDPDKDKKRQKKRGIFPKVATNIMRAWLFQHLTHPYPSEEQKKQLAQDTGLTILQVNNWFINARRRIVQPMIDQSNRAVSQGAAYSPEGQPMGSFVLDGQQHMGIRPAGPMSGMGMNMGMDGQWHYM

SEQ ID NO: 42383 - protein, 381 aa, Homo sapiens
MDGVGVPASMYGDPHAPRPIPPVHHLNHGPPLHATQHYGAHAPHPNVMPASMGSAVNDALKRDKDAIYGHPLFPLLALVFEKCELATCTPREPGVAGGDVCSSDSFNEDIAVFAKQVRAEKPLFSSNPELDNLMIQAIQVLRFHLLELEKVHELCDNFCHRYISCLKGKMPIDLVIDERDGSSKSDHEELSGSSTNLADHNPSSWRDHDDATSTHSAGTPGPSSGGHASQSGDNSSEQGDGLDNSVASPGTGDDDDPDKDKKRQKKRGIFPKVATNIMRAWLFQHLTHPYPSEEQKKQLAQDTGLTILQVNNWFINARRRIVQPMIDQSNRAVSQGAAYSPEGQPMGSFVLDGQQHMGIRPAGPMSGMGMNMGMDGQWHYM

SEQ ID NO: 42384 - protein, 388 aa, Homo sapiens
MDGVGVPASMYGDPHAPRPIPPVHHLNHGPPLHATQHYGAHAPHPNVMPASMGSAVNDALKRDKDAIYGHPLFPLLALVFEKCELATCTPREPGVAGGDVCSSDSFNEDIAVFAKQVRAEKPLFSSNPELDNLMIQAIQVLRFHLLELEKVHELCDNFCHRYISCLKGKMPIDLVIDERDGSSKSDHEELSGSSTNLADHNPSSWRDHDDATSTHSAGTPGPSSGGHASQSGDNSSEQGDGLDNSVASPGTGDDDDPDKDKKRQKKRGIFPKVATNIMRAWLFQHLTHPYPSEEQKKQLAQDTGLTILQVNNWFINARRRIVQPMIDQSNRAGFLLDPSVSQGAAYSPEGQPMGSFVLDGQQHMGIRPAGPMSGMGMNMGMDGQWHYM

SEQ ID NO: 42385 - protein, 188 aa, Homo sapiens
MSSLEISSSCFSLETKLPLSPPLVEDSAFEPSRKDMDEVEEKSKDVINFTAEKLSVDEVSQLVISPLCGAISLFVGTTRNNFEGKKVISLEYEAYLPMAENEVRKICSDIRQKWPVKHIAVFHRLGLVPVSEASIIIAVSSAHRAASLEAVSYAIDTLKAKVPIWKKEIYEESSTWKGNKECFWASNS

SEQ ID NO: 42386 - protein, 147 aa, Homo sapiens
MPPPQKIPSVRPFKQRKSLAIRQEEVAGIRAKFPNKIPVVVERYPRETFLPPLDKTKFLVPQELTMTQFLSIIRSRMVLRATEAFYLLVNNKSLVSMSATMAEIYRDYKDEDGFVYMTYASQETFGCLESAAPRDGSSLEDRPCNPL

SEQ ID NO: 42387 - protein, 215 aa, Homo sapiens
MYGKSSTRAVLLLLGIQLTALWPIAAVEIYTSRVLEAVNGTDARLKCTFSSFAPVGDALTVTWNFRPLDGGPEQFVFYYHIDPFQPMSGRFKDRVSWDGNPERYDASILLWKLQFDDNGTYTCQVKNPPDVDGVIGEIRLSVVHTVRFSEIHFLALAIGSACALMIIIVIVVVLFQHYRKKRWAERAHKVVEIKSKEEERLNQEKKVSVYLEDTD

SEQ ID NO: 42388 - protein, 465 aa, Homo sapiens
MGGAVVDEGPTGVKAPDGGWGWAVLFGCFVITGFSYAFPKAVSVFFKELIQEFGIGYSDTAWISSILLAMLYGTGPLCSVCVNRFGCRPVMLVGGLFASLGMVAASFCRSIIQVYLTTGVITGLGLALNFQPSLIMLNRYFSKRRPMANGLAAAGSPVFLCALSPLGQLLQDRYGWRGGFLILGGLLLNCCVCAALMRPLVVTAQPGSGPPRPSRRLLDLSVFRDRGFVLYAVAASVMVLGLFVPPVFVVSYAKDLGVPDTKAAFLLTILGFIDIFARPAAGFVAGLGKVRPYSVYLFSFSMFFNGLADLAGSTAGDYGGLVVFCIFFGISYGMVGALQFEVLMAIVGTHKFSSAIGLVLLMEAVAVLVGPPSGGKLLDATHVYMYVFILAGAEVLTSSLILLLGNFFCIRKKPKEPQPEVAAAEEEKLHKPPADSGVDLREVEHFLKAEPEKNGEVVHTPETSV

SEQ ID NO: 42389 - protein, 309 aa, Homo sapiens
MTLRNSSSVTEFILVGLSEQPELQLPLFLLFLGIYVFTVVGNLGLITLIGINPSLHTPMYFFLFNLSFIDLCYSCVFTPKMLNDFVSESIISYVGCMTQLFFFCFFVNSECYVLVSMAYDRYVAICNPLLYMVTMSPRVCFLLMFGSYVVGFAGAMAHTGSMLRLTFCDSNVIDHYLCDVLPLLQLSCTSTHVSELVFFIVVGVITMLSSISIVISYALILSNILCIPSAEGRSKAFSTWGSHIIAVALFFGSGTFTYLTTSFPGSMNHGRFASVFYTNVVPMLNPSIYSLRNKDDKLALGKTLKRVLF

SEQ ID NO: 42390 - protein, 362 aa, Homo sapiens
MFSSVAHLARANPFNTPHLQLVHDGLGDLRSSSPGPTGQPRRPRNLAAAAVEEQYSCDYGSGRFFILCGLGGIISCGTTHTALVPLDLVKCRMQVDPQKYKGIFNGFSVTLKEDGVRGLAKGWAPTFLGYSMQGLCKFGFYEVFKVLYSNMLGEENTYLWRTSLYLAASASAEFFADIALAPMEAAKVRIQTQPGYANTLRDAAPKMYKEEGLKAFYKGVAPLWMRQIPYTMMKFACFERTVEALYKFVVPKPRSECSKPEQLVVTFVAGYIAGVFCAIVSHPADSVVSVLNKEKGSSASLVLKRLGFKGVWKGLFARIIMIGTLTALQWFIYDSVKVYFRLPRPPPPEMPESLKKKLGLTQ

SEQ ID NO: 42391 - protein, 361 aa, Homo sapiens
MFSSVAHLARANPFNTPHLQLVHDGLGDLRSSSPGPTGQPRRPRNLAAAAVEEYSCEFGSAKYYALCGFGGVLSCGLTHTAVVPLDLVKCRMQVDPQKYKGIFNGFSVTLKEDGVRGLAKGWAPTFLGYSMQGLCKFGFYEVFKVLYSNMLGEENTYLWRTSLYLAASASAEFFADIALAPMEAAKVRIQTQPGYANTLRDAAPKMYKEEGLKAFYKGVAPLWMRQIPYTMMKFACFERTVEALYKFVVPKPRSECSKPEQLVVTFVAGYIAGVFCAIVSHPADSVVSVLNKEKGSSASLVLKRLGFKGVWKGLFARIIMIGTLTALQWFIYDSVKVYFRLPRPPPPEMPESLKKKLGLTQ

SEQ ID NO: 42392 - protein, 341 aa, Homo sapiens
MGVATTLQPPTTSKTLQKQHLEAVGAYQYVLTFLFMGPFFSLLVFVLLFTSLWPFSVFYLVWLYVDWDTPNQGGRRSEWIRNRAIWRQLRDYYPVKLVKTAELPPDRNYVLGAHPHGIMCTGFLCNFSTESNGFSQLFPGLRPWLAVLAGLFYLPVYRDYIMSFGLCPVSRQSLDFILSQPQLGQAVVIMVGGAHEALYSVPGEHCLTLQKRKGFVRLALRHGASLVPVYSFGENDIFRLKAFATGSWQHWCQLTFKKLMGFSPCIFWGRGLFSATSWGLLPFAVPITTVVGRPIPVPQRLHPTEEEVNHYHALYMTALEQLFEEHKESCGVPASTCLTFI

SEQ ID NO: 42393 - protein, 281 aa, Homo sapiens
MGVATTLQPPTTSKTLQKQHLEAVGAYQYVLTFLFMGPFFSLLVFVLLFTSLWPFSVFYLVWLYVDWDTPNQGGRRSEWIRNRAIWRQLRDYYPVKLVKTAELPPDRNYVLGAHPHGIMCTGFLCNFSTESNGFSQLFPGLRPWLAVLAGLFYLPVYRDYIMSFGLCPVSRQSLDFILSQPQLGQAVVIMVGGAHEALYSVPGEHCLTLQKRKGFVRLALRHGGPPHPRPPAPPPHRGGSQSLSRPLHDGPGAALRGAQGKLWGPRFHLPHLHLGLAAAFR

SEQ ID NO: 42394 - protein, 344 aa, Homo sapiens
MGVATTLQPPTTSKTLQKQHLEAVGAYQYVLTFLFMGPFFSLLVFVLLFTSLWPFSVFYLVWLYVDWDTPNQGGRRSEWIRNRAIWRQLRDYYPVKLVKTAELPPDRNYVLGAHPHGIMCTGFLCNFSTESNGFSQLFPGLRPWLAVLAGLFYLPVYRDYIMSFGLCPVSRQSLDFILSQPQLGQAVVIMVGGAHEALYSVPGEHCLTLQKRKGFVRLALRHGASLVPVYSFGENDIFRLKAFATGSWQHWCQLTFKKLMGFSPCIFWGRGLFSATSWGLLPFAVPITTVGECPPPGGRPPAAAWASGIPRPPVSLSLQWAAPSPSPSASTPPRRKSITITPST

SEQ ID NO: 42395 - protein, 637 aa, Homo sapiens
MIQSDKGADPPDKKDMKLSTATNPQNGLSQILRLVLQELSLFYGRDVNGVCLLYDLLHSPWLQALLKIYDCLQEFKEKKLVPATPHAQVLSYEVVELLRETPTSPEIQELRQMLQAPHFKALLSAHDTIAQKDFEPLLPPLPDNIPESEEAMRIVCLVKNQQPLGATIKRHEMTGDILVARIIHGGLAERSGLLYAGDKLVEVNGVSVEGLDPEQVIHILAMSRGTIMFKVVPVSDPPVNSQQMVYVRAMTEYWPQEDPDIPCMDAGLPFQKGDILQIVDQNDALWWQARKISDPATCAGLVPSNHLLKRKQREFWWSQPYQPHTCLKSTLSISMEEEDDMKIDEKCVEADEETFESEELSEDKEEFVGYGQKFFIAGFRRSMRLCRRKSHLSPLHASVCCTGSCYSAVGAPYEEVVRYQRRPSDKYRLIVLMGPSGVGVNELRRQLIEFNPSHFQSAVPHTTRTKKSYEMNGREYHYVSKETFENLIYSHRMLEYGEYKGHLYGTSVDAVQTVLVEGKICVMDLEPQDIQGVRTHELKPYVIFIKPSNMRCMKQSRKNAKVITDYYVDMKFKDEDLQEMENLAQRMETQFGQFFDHVIVNDSLHDACAQLLSAIQKAQEEPQWVPATWISSDTESQ

SEQ ID NO: 42396 - protein, 593 aa, Homo sapiens
MIQSDKGADPPDKKDMKLSTATNPQNGLSQILRLVLQELSLFYGRDVNGVCLLYDLLHSPWLQALLKIYDCLQEFKEKKLVPATPHAQVLSYEVVELLRETPTSPEIQELRQMLQAPHFKALLSAHDTIAQKDFEPLLPPLPDNIPESEEAMRIVCLVKNQQPLGATIKRHEMTGDILVARIIHGGLAERSGLLYAGDKLVEVNGVSVEGLDPEQVIHILAMSRGTIMFKVVPVSDPPVNSQQMDPDIPCMDAGLPFQKGDILQIVDQNDALWWQARKISDPATCAGLVPSNHLLKRKQREFWWSQPYQPHTCLKSTLYKEEFVGYGQKFFIAGFRRSMRLCRRKSHLSPLHASVCCTGSCYSAVGAPYEEVVRYQRRPSDKYRLIVLMGPSGVGVNELRRQLIEFNPSHFQSAVPHTTRTKKSYEMNGREYHYVSKETFENLIYSHRMLEYGEYKGHLYGTSVDAVQTVLVEGKICVMDLEPQDIQGVRTHELKPYVIFIKPSNMRCMKQSRKNAKVITDYYVDMKFKDEDLQEMENLAQRMETQFGQFFDHVIVNDSLHDACAQLLSAIQKAQEEPQWVPATWISSDTESQ

SEQ ID NO: 42397 - protein, 266 aa, Homo sapiens
MIQSDKGADPPDKKDMKLSTATNPQNGLSQILRLVLQELSLFYGRDVNGVCLLYDLLHSPWLQALLKIYDCLQEFKEKKLVPATPHAQVLSYEVVELLRETPTSPEIQELRQMLQAPHFKGATIKRHEMTGDILVARIIHGGLAERSGLLYAGDKLVEVNGVSVEGLDPEQVIHILAMSRGTIMFKVVPVSDPPVNSQQMVYVRAMTEYWPQEDPDIPCMDAGLPFQKGDILQIVDQNDALWWQARKISDPATCAGLVPSNHLLKR

SEQ ID NO: 42398 - protein, 602 aa, Homo sapiens
MIQSDKGADPPDKKDMKLSTATNPQNGLSQILRLVLQELSLFYGRDVNGVCLLYDLLHSPWLQALLKIYDCLQEFKEKKLVPATPHAQVLSYEVVELLRETPTSPEIQELRQMLQAPHFKGATIKRHEMTGDILVARIIHGGLAERSGLLYAGDKLVEVNGVSVEGLDPEQVIHILAMSRGTIMFKVVPVSDPPVNSQQMVYVRAMTEYWPQEDPDIPCMDAGLPFQKGDILQIVDQNDALWWQARKISDPATCAGLVPSNHLLKRWSFALVAQAGVQWHYLDSLQPLPPGFKRFSCLSLPRSWDYIEDDMKIDEKCVEADEETFESDKEEFVGYGQKFFIAGFRRSMRLCRRKSHLSPLHASVCCTGSCYSAVGAPYEEVVRYQRRPSDKYRLIVLMGPSGVGVNELRRQLIEFNPSHFQSAVPHTTRTKKSYEMNGREYHYVSKETFENLIYSHRMLEYGEYKGHLYGTSVDAVQTVLVEGKICVMDLEPQDIQGVRTHELKPYVIFIKPSNMRCMKQSRKNAKVITDYYVDMKFKDEDLQEMENLAQRMETQFGQFFDHVIVNDSLHDACAQLLSAIQKAQEEPQWVPATWISSDTESQ

SEQ ID NO: 42399 - protein, 565 aa, Homo sapiens
MIQSDKGADPPDKKDMKLSTATNPQNGLSQILRLVLQELSLFYGRDVNGVCLLYDLLHSPWLQALLKIYDCLQEFKEKKLVPATPHAQVLSYGATIKRHEMTGDILVARIIHGGLAERSGLLYAGDKLVEVNGVSVEGLDPEQVIHILAMSRGTIMFKVVPVSDPPVNSQQMVYVRAMTEYWPQEDPDIPCMDAGLPFQKGDILQIVDQNDALWWQARKISDPATCAGLVPSNHLLKRKQREFWWSQPYQPHTCLKSTLSISMEEEDDMKIDEKCVEADEETFESEELSEDKEEFVGYGQKFFIAGFRRSMRLCRRKSHLSPLHASVCCTGSCYSAVGAPYEEVVRYQRRPSDKYRLIVLMGPSGVGVNELRRQLIEFNPSHFQSAVPHTTRTKKSYEMNGREYHYVSKETFENLIYSHRMLEYGEYKGHLYGTSVDAVQTVLVEGKICVMDLEPQDIQGVRTHELKPYVIFIKPSNMRCMKQSRKNAKVITDYYVDMKFKDEDLQEMENLAQRMETQFGQFFDHVIVNDSLHDACAQLLSAIQKAQEEPQWVPATWISSDTESQ

SEQ ID NO: 42400 - protein, 320 aa, Homo sapiens
MMEIANVSSPEVFVLLGFSTRPSLETVLFIVVLSFYMVSILGNGIIILVSHTDVHLHTPMYFFLANLPFLDMSFTTSIVPQLLANLWGPQKTISYGGCVVQFYISHWLGATECVLLATMSYDRYAAICRPLHYTVIMHPQLCLGLALASWLGGLTTSMVGSTLTMLLPLCGNNCIDHFFCEMPLIMQLACVDTSLNEMEMYLASFVFVVLPLGLILVSYGHIARAVLKIRSAEGRRKAFNTCSSHVAVVSLFYGSIIFMYLQPAKSTSHEQGKFIALFYTVVTPALNPLIYTLRNTEVKSALRHMVLENCCGSAGKLAQI

SEQ ID NO: 42401 - protein, 121 aa, Homo sapiens
MPSDRPFKQRRSFADRCKEVQQIRDQHPSKIPVIIERYKGEKQLPVLDKTKFLVPDHVNMSELVKIIRRRLQLNPTQAFFLLVNQHSMVSVSTPIADIYEQEKDEDGFLYMVYASQETFGF

SEQ ID NO: 42402 - protein, 125 aa, Homo sapiens
MKMRFFSSPCGKAAVDPADRCKEVQQIRDQHPSKIPVIIERYKGEKQLPVLDKTKFLVPDHVNMSELVKIIRRRLQLNPTQAFFLLVNQHSMVSVSTPIADIYEQEKDEDGFLYMVYASQETFGF

SEQ ID NO: 42403 - protein, 305 aa, Homo sapiens
MGIQTSPVLLASLGVGLVTLLGLAVGSYLVRRSRRPQVTLLDPNEKYLLRLLDKTTVSHNTKRFRFALPTAHHTLGLPVGKHIYLSTRIDGSLVIRPYTPVTSDEDQGYVDLVIKVYLKGVHPKFPEGGKMSQYLDSLKVGDVVEFRGPSGLLTYTGKGHFNIQPNKKSPPEPRVAKKLGMIAGGTGITPMLQLIRAILKVPEDPTQCFLLFANQTEKDIILREDLEELQARYPNRFKLWFTLDHPPKDWAYSKGFVTADMIREHLPAPGDDVLVLLCGPPPMVQLACHPNLDKLGYSQKMRFTY

SEQ ID NO: 42404 - protein, 301 aa, Homo sapiens
MKSNPAIQAAIDLTAGAAGGTACVLTGQPFDTMKVKMQTFPDLYRGLTDCCLKTYSQVGFRGFYKGTSPALIANIAENSVLFMCYGFCQQVVRKVAGLDKQAKLSDLQNAAAGSFASAFAALVLCPTELVKCRLQTMYEMETSGKIAKSQNTVWSVIKSILRKDGPLGFYHGLSSTLLREVPGYFFFFGGYELSRSFFASGRSKDELGPVPLMLSGGVGGICLWLAVYPVDCIKSRIQVLSMSGKQAGFIRTFINVVKNEGITALYSGLKPTMIRAFPANGALFLAYEYSRKLMMNQLEAY

SEQ ID NO: 42405 - protein, 317 aa, Homo sapiens
MRNLSGGHVEEFVLVGFPTTPPLQLLLFVLFFAIYLLTLLENALIVFTIWLAPSLHRPMYFFLGHLSFLELWYINVTIPRLLAAFLTQDGRVSYVGCMTQLYFFIALACTECVLLAVMAYDRYLAICGPLLYPSLMPSSLATRLAAASWGSGFFSSMMKLLFISQLSYCGPNIINHFFCDISPLLNLTCSDKEQAELVDFLLALVMILLPLLAVVSSYTAIIAAILRIPTSRGRHKAFSTCAAHLAVVVIYYSSTLFTYARPRAMYTFNHNKIISVLYTIIVPFFNPAIYCLRNKEVKEAFRKTVMGRCHYPRDVQD

SEQ ID NO: 42406 - protein, 653 aa, Homo sapiens
MISSKMMSSNPEEDPLDTFLQYIEDMGMKAYDGLVIQNASDIARENDRLRNETNLAYLKEKNEKRRRQEEAIKRIGGEVGRGHEGSYVGKHFRMGFMTMPAPQDRLPHPCSSGFSVRSQSLHSVGGTDDDSSCGSRRQPPPKPKRDPSTKLSTSSETVSSTAASKSGKTPERTEASAKPRPHSDEYSKKIPPPKPKRNPNTQLSTSFDETYIKKHGPRRTSLPRDSSLSQMGSPAGDPEEEEPVYIEMVGNILRDFRKEDDDQSEAVYEEMKYPIFDDLGQDAKCDFDHHSCSSQCATPTVPDLDFAKASVPCPPKGLLCDIPPPFPNLLSHRPPLLVFPPAPVHCSPNSDESPLTPLEVTKLPVLENVSYMKQPAGASPSTLPSHVPGHAKLEKEQAAALGPASATPALSSSPPPPSTLYRTQSPHGYPKSHSTSPSPVSMGRSLTPLSLKRPPPYDAVHSGSLSRSSPSVPHSTPRPVSQDGAKMVNAAVNTYGAAPGGSRSRTPTSPLEELTSLFSSGRSLLRKSSSGRRSKEPAEKSTEELKVRSHSTEPLPKLDNKERGHHGASSSREPVKAQEWDGTPGTPVVTSRLGRCSVSPTLLAGNHSSEPKVSCKLGRSASTSGVPPPSVTPLRQSSDLQQSQVPSSLANRD

SEQ ID NO: 42407 - protein, 145 aa, Homo sapiens
MISSKMMSSNPEEDPLDTFLQYIEDMGMKAYDGLVIQNASDIARENDRLRNETNLAYLKEKNEKRRRQEEAIKRINRGTESPKPQHGAITKVGQQGKRPPWGVFLQRACQSSGMGWNTRATCGHQSTRKMLCEPHLVSGKPQFRA

SEQ ID NO: 42408 - protein, 159 aa, Homo sapiens
MVNAAVNTYGAAPGGSRSRTPTSPLEELTSLFSSGRSLLRKSSSGRRSKEPAEKSTEELKVRSHSTEPLPKLDNKERGHHGASSSREPVKAQEWDGTPGTPVVTSRLGRCSVSPTLLAGNHSSEPKVSCKLGRSASTSGVPPPSVTPLRQSSDLQQSQI

SEQ ID NO: 42409 - protein, 298 aa, Homo sapiens
MRNHTMVTEFILLGIPETEGLETALLFLFSSFYLCTLLGNVLILTAIISSTRLHTPMYFFLGNLSIFDLGFSSTTVPKMLFYLSGNSHAISYAGCVSQLFFYHFLGCTECFLYTVMACDRFVAICFPLRYTVIMNHRVCFMLATGTWMIGCVHAMILTPLTFQLPYCGPNKVGYYFCDIPAVLPLACKDTSLAQRVGFTNVGLLSLICFFLILVSYTCIGISISKIRSAEGRQRAFSTCSAHLTAILCAYGPVIVIYLQPNPSALLGSIIQILNNLVTPMLNPLIYSLRNKDVKSDQP

SEQ ID NO: 42410 - protein, 480 aa, Homo sapiens
MNGEEEFFDAVTGFDSDNSSGEFSEANQKVTGMIDLDTSKNNRIGKTGERPSQENGIQKHRTSLPAPMFSRSDFSVWTILKKCVGLELSKITMPIAFNEPLSFLQRITEYMEHVYLIHRASCQPQPLERMQSVAAFAVSAVASQWERTGKPFNPLLGETYELIREDLGFRFISEQVSHHPPISAFHSEGLNHDFLFHGSIYPKLKFWGKSVEAEPRGTITLELLKHNEAYTWTNPTCCVHNVIIGKLWIEQYGTVEILNHRTGHKCVLHFKPCGLFGKELHKVEGHIQDKNKKKLFMIYGKWTECLWGIDPVSYESFKKQERRGDHLRKAKLDEDSGKADSDVADDVPVAQETVQVIPGSKLLWRINTRPPNSAQMYNFTSFTVSLNELETGMEKTLPPTDCRLRPDIRGMENGNMDLASQEKERLEEKQREARRERAKEEAEWQTRWFYPGNNPYTGTPDWLYAGDYFERNFSDCPDIY

SEQ ID NO: 42411 - protein, 468 aa, Homo sapiens
MNGEEEFFDAVTEANQKVTGMIDLDTSKNNRIGKTGERPSQENGIQKHRTSLPAPMFSRSDFSVWTILKKCVGLELSKITMPIAFNEPLSFLQRITEYMEHVYLIHRASCQPQPLERMQSVAAFAVSAVASQWERTGKPFNPLLGETYELIREDLGFRFISEQVSHHPPISAFHSEGLNHDFLFHGSIYPKLKFWGKSVEAEPRGTITLELLKHNEAYTWTNPTCCVHNVIIGKLWIEQYGTVEILNHRTGHKCVLHFKPCGLFGKELHKVEGHIQDKNKKKLFMIYGKWTECLWGIDPVSYESFKKQERRGDHLRKAKLDEDSGKADSDVADDVPVAQETVQVIPGSKLLWRINTRPPNSAQMYNFTSFTVSLNELETGMEKTLPPTDCRLRPDIRGMENGNMDLASQEKERLEEKQREARRERAKEEAEWQTRWFYPGNNPYTGTPDWLYAGDYFERNFSDCPDIY

SEQ ID NO: 42412 - protein, 315 aa, Homo sapiens
MQGLNHTSVSEFILVGFSAFPHLQLMLFLLFLLMYLFTLLGNLLIMATVWSERSLHMPMYLFLCALSITEILYTVAIIPRMLADLLSTQRSIAFLACASQMFFSFSFGFTHSFLLTVMGYDRYVAICHPLRYNVLMSLRGCTCRVGCSWAGGLVMGMVVTSAIFHLAFCGHKEIHHFFCHVPPLLKLACGDDVLVVAKGVGLVCITALLGCFLLILLSYAFIVAAILKIPSAEGRNKAFSTCASHLTVVVVHYGFASVIYLKPKGPQSPEGDTLMGITYTVLTPFLSPIIFSLRNKELKVAMKKTCFTKLFPQNC

SEQ ID NO: 42413 - protein, 435 aa, Homo sapiens
MPHLENVVLCRESQVSILQSLFGERHHFSFPSIFIYGHTASGKTYVTQTLLKTLELPHVFVNCVECFTLRLLLEQILNKLNHLSSSEDGCSTEITCETFNDFVRLFKQVTTAENLKDQTVYIVLDKAEYLRDMEANLLPGFLRLQELADRNVTVLFLSEIVWEKFRPNTGCFEPFVLYFPDYSIGNLQKILSHDHPPEYSADFYAAYINILLGVFYTVCRDLKELRHLAVLNFPKYCEPVVKGEASERDTRKLWRNIEPHLKKAMQTVYLREISSSQWEKLQKDDTDPGQLKGLSAHTHVELPYYSKFILIAAYLASYNPARTDKRFFLKHHGKIKKTNFLKKHEKTSNHLLGPKPFPLDRLLAILYSIVDSRVAPTANIFSQITSLVTLQLLTLVGHDDQLDGPKYKCTVSLDFIRAIARTVNFDIIKYLYDFL

SEQ ID NO: 42414 - protein, 324 aa, Homo sapiens
MPHLENVVLCRESQVSILQSLFGERHHFSFPSIFIYGHTASGKTYVTQTLLKTLELPHVFVNCVECFTLRLLLEQILNKLNHLSSSEDGCSTEITCETFNDFVRLFKQVTTAENLKDQTVYIVLDKAEYLRDMEANLLPGFLRLQELADRNVTVLFLSEIVWEKFRPNTGCFEPFVLYFPDYSIGNLQKILSHDHPPEYSADFYAAYINILLGVFYTVCRDLKELRHLAVLNFPKYCEPVVKGEASERDTRKLWRNIEPHLKKAMQTVYLREISSSQWEKLQKDDTDPGQLKGIRGSIETVTGDTSSANYQDTKVNTKEHSVRK

SEQ ID NO: 42415 - protein, 235 aa, Homo sapiens
MPCKRCRPSVYSLSYIKRGKTRNYLYPIWSPYAYYLYCYKYRITLREKMLPRCYKSITYKEEEDLTLQPRSCLQCSESLVGLQEGKSTEQGNHDQLKELYSAGNLTVLATDPLLHQDPVQLDFHFRLTSQTSAHWHGLLCDRRLFLDIPYQALDQGNRESLTATLEYVEEKTNVDSVFVNFQNDRNDRGALLRAFSYMGFEVVRPDHPALPPLDNVIFMVYPLERDVGHLPSEPP

SEQ ID NO: 42416 - protein, 190 aa, Homo sapiens
MTVPWRPGKRRITYKEEEDLTLQPRPASSAPESLVGLQEGKSTEQGNHDQLKELYSAGNLTVLATDPLLHQDPVQLDFHFRLTSQTSAHWHGLLCDRRLFLDIPYQALDQGNRESLTATLEYVEEKTNVDSVFVNFQNDRNDRGALLRAFSYMGFEVVRPDHPALPPLDNVIFMVYPLERDVGHLPSEPP

SEQ ID NO: 42417 - protein, 364 aa, Homo sapiens; identical to SEQ ID NO: 2869

SEQ ID NO: 42418 - protein, 316 aa, Homo sapiens
MICENHTRVTEFILLGFTNNPEMQVSLFIFFLAIYTVTLLGNFLIVTVTSVDLALQTPMYFFLQNLSLLEVCFTLVMVPKMLVDLVSPRKIISFVGCGTQMYFFFFFGSSECFLLSMMAYDRFVAICNPLHYSVIMNRSLCLWMAIGSWMSGVPVSMLQTAWMMALPFCGPNAVDHFFCDGPPVLKLVTVDTTMYEMQALASTLLFIMFPFCLILVSYTRIIITILRMSSATGRQKAFSTCSSHLIVVSLFYGTASLTYLRPKSNQSPESKKLVSLSYTVITPMLNPIIYGLRNNEVKGAVKRTITQKVLQKLDVF

SEQ ID NO: 42419 - protein, 313 aa, Homo sapiens
MDSLNQTRVTEFVFLGLTDNRVLEMLFFMAFSAIYMLTLSGNILIIIATVFTPSLHTPMYFFLSNLSFIDICHSSVTVPKMLEGLLLERKTISFDNCITQLFFLHLFACAEIFLLIIVAYDRYVAICTPLHYPNVMNMRVCIQLVFALWLGGTVHSLGQTFLTIRLPYCGPNIIDSYFCDVPLVIKLACTDTYLTGILIVTNSGTISLSCFLAVVTSYMVILVSLRKHSAEGRQKALSTCSAHFMVVALFFGPCIFIYTRPDTSFSIDKVVSVFYTVVTPLLNPFIYTLRNEEVKSAMKQLRQRQVFFTKSYT

SEQ ID NO: 42420 - protein, 309 aa, Homo sapiens
MEGINKTAKMQFFFRPFSPDPEVQMLIFVVFLMMYLTSLGGNATIAVIVQINHSLHTPMYFFLANLAVLEIFYTSSITPLALANLLSMGKTPVSITGCGTQMFFFVFLGGADCVLLVVMAYDQFIAICHPLRYRLIMSWSLCVELLVGSLVLGFLLSLPLTILIFHLPFCHNDEIYHFYCDMPAVMRLACADTRVHKTALYIISFIVLSIPLSLISISYVFIVVAILRIRSAEGRQQAYSTCSSHILVVLLQYGCTSFIYLSPSSSYSPEMGRVVSVAYTFITPILNPLIYSLRNKELKDALRKALRKF

SEQ ID NO: 42421 - protein, 324 aa, Homo sapiens
MAEVNIIYVTVFILKGITNRPELQAPCFGVFLVIYLVTVLGNLGLITLIKIDTRLHTPMYYFLSHLAFVDLCYSSAITPKMMVNFVVERNTIPFHACATQLGCFLTFMITECFLLASMAYDCYVAICSPLHYSTLMSRRVCIQLVAVPYIYSFLVALFHTVITFRLTYCGPNLINHFYCDDLPFLALSCSDTHMKEILIFAFAGFDMISSSSIVLTSYIFIIAAILRIRSTQGQHKAISTCGSHMVTVTIFYGTLIFMYLQPKSNHSLDTDKMASVFYTVVIPMLNPLIYSLRNKEVKDASKKALDKGCENLQILTFLKIRKLY

SEQ ID NO: 42422 - protein, 308 aa, Homo sapiens
MNTTLFHPYSFLLLGIPGLESMHLWVGFPFFAVFLTAVLGNITILFVIQTDSSLHHPMFYFLAILSSIDPGLSTSTIPKMLGTFWFTLREISFEGCLTQMFFIHLCTGMESAVLVAMAYDCYVAICDPLCYTLVLTNKVVSVMALAIFLRPLVFVIPFVLFILRLPFCGHQIIPHTYGEHMGIARLSCASIRVNIIYGLCAISILVFDIIAIVISYVQILCAVFLLSSHDARLKAFSTCGSHVCVMLTFYMPAFFSFMTHRFGRNIPHFIHILLANFYVVIPPALNSVIYGVRTKQIRAQVLKMFFNK

SEQ ID NO: 42423 - protein, 314 aa, Homo sapiens
MENNTEVSEFILLGLTNAPELQVPLFIMFTLIYLITLTGNLGMIILILLDSHLHTPMYFFLSNLSLAGIGYSSAVTPKVLTGLLIEDKAISYSACAAQMFFCAVFATVENYLLSSMAYDRYAAVCNPLHYTTTMTTRVCACLAIGCYVIGFLNASIQIGDTFRLSFCMSNVIHHFFCDKPAVITLTCSEKHISELILVLISSFNVFFALLVTLISYLFILITILKRHTGKGYQKPLSTCGSHLIAIFLFYITVIIMYIRPSSSHSMDTDKIASVFYTMIIPMLSPIVYTLRNKDVKNAFMKVVEKAKYSLDSVF

SEQ ID NO: 42424 - protein, 344 aa, Homo sapiens
MELLTNNLKFITDPFVCRLRHLSPTPSEEHMKNKNNVTEFILLGLTQNPEGQKVLFVTFLLIYMVTIMGNLLIIVTIMASQSLGSPMYFFLASLSFIDTVYSTAFAPKMIVDLLSEKKTISFQGCMAQLFMDHLFAGAEVILLVVMAYDRYMAICKPLHELITMNRRVCVLMLLAAWIGGFLHSLVQFLFIYQLPFCGPNVIDNFLCDLYPLLKLACTNTYVTGLSMIANGGAICAVTFFTILLSYGVILHSLKTQSLEGKRKAFYTCASHVTVVILFFVPCIFLYARPNSTFPIDKSMTVVLTFITPMLNPLIYTLKNAEMKSAMRKLWSKKVSLAGKWLYHS

SEQ ID NO: 42425 - protein, 313 aa, Homo sapiens
MKKEQDSNVTEFVLLGLSSSWELQLFLFLLFLFFYIAIVLGNLLIVVTVQAHAHLLQSPMYYFLGHLSFIDLCLSCVTVPKMLGDFLQQGKSISFSGCLAQIYFLHFLGASEMFLLTVMAYDRYVAICNPLRYLTVMNPQLCLWLVLACWCGGFIHSIMQVILVIQLPFCGPNELDNFYCDVPQVIKLACMDTYVVEVLVIANSGLLSLVCFLVLLFSYAIILITLRTHFCQGQNKVFSTCASHLTVVSLIFVPCVFIYLRPFCSFSVDKIFSLFYTVITPMLNPLIYTLRNTDMKTAMKKLRIKPCGIPLPC

SEQ ID NO: 42426 - protein, 314 aa, Homo sapiens
MANVTLVTGFLLMGFSNIQKLRILYGVLFLLIYLAALMSNLLIITLITLDVKLQTPMYFFLKNLSFLDVFLVSVPIPKFIVNNLTHNNSISILGCAFQLLLMTSFSAGEIFILTAMSYDRYVAICCPLNYEVIMNTGVCVLMASVSWAIGGLFGTAYTAGTFSMPFCGSSVIPQFFCDVPSLLRISCSETLMVIYAGIGVGACLSISCFICIVISYIYIFSTVLKIPTTKGQSKAFSTCFPHLTVFTVFIITAYFVYLKPPSNSPSVIDRLLSVIYTVMPPVFNPVTYSLRNNDMKCALIRLLQKTYGQEAYFI

SEQ ID NO: 42427 - protein, 319 aa, Homo sapiens
MFPANWTSVKVFFFLGFFHYPKVQVIIFAVCLLMYLITLLGNIFLISITILDSHLHTPMYLFLSNLSFLDIWYSSSALSPMLANFVSGRNTISFSGCATQMYLSLAMGSTECVLLPMMAYDRYVAICNPLRYPVIMNRRTCVQIAAGSWMTGCLTAMVEMMSVLPLSLCGNSIINHFTCEILAILKLVCVDTSLVQLIMLVISVLLLPMPMLLICISYAFILASILRISSVEGRSKAFSTCTAHLMVVVLFYGTALSMHLKPSAVDSQEIDKFMALVYAGQTPMLNPIIYSLRNKEVKVALKKLLIRNHFNTAFISILK

SEQ ID NO: 42428 - protein, 326 aa, Homo sapiens
MSGLPSDMDLYKLQLNNFTEVTMFILISFTEEFDVQVFLFLLFLAIYLFTLIGNLGLVVPIIGDFWLHSPMYYFLGVLSFLDVCYSTVVTPKMLVNFLAKNKSISFLGCATQMFLACTFGTTECFLLAAMAYDRYVAIYNPLLYSVSMSPRVYVPLITASYVASILHATIHTVATFSLSFCGSNEIRHVFCNMPPLLAISCSDTHVIQLLFFYFVGSIEIVTILIVLISYGFILLAILKMQSAEGRRKVFSTCGAHLTGVTIYHGTILFMYVRPSSSYTSDNDMIVSIFYTIVIPMLNPIIYSLRNKDVKEAIKRLLVRNWFINKL

SEQ ID NO: 42429 - protein, 307 aa, Homo sapiens
MNHSVVTEFIILGLTKKPELQGIIFLFFLIVYLVAFLGNMLIIIAKIYNNTLHTPMYVFLLTLAVVDIICTTSIIPKMLGTMLTSENTISYAGCMSQLFLFTWSLGAEMVLFTTMAYDRYVAICFPLHYSTIMNHHMCVALLSMVMAIAVTNSWVHTALIMRLTFCGPNTIDHFFCEIPPLLALSCSPVRINEVMVYVADITLAIGDFILTCISYGFIIVAILRIRTVEGKRKAFSTCSSHLTVVTLYYSPVIYTYIRPASSYTFERDKVVAALYTLVTPTLNPMVYSFQNREMQAGIRKVFAFLKH

SEQ ID NO: 42430 - protein, 298 aa, Homo sapiens
MGRGNSTEVTEFHLLGFGVQHEFQHVLFIVLLLIYVTSLIGNIGMILLIKTDSRLQTPMYFFPQHLAFVDICYTSAITPKMLQSFTEENNLITFRGCVIQFLVYATFATSDCYLLAIMAMDCYVAICKPLRYPMIMSQTVYIQLVAGSYIIGSINASVHTGFTFSLSFCKSNKINHFFCDGLPILALSCSNIDINIILDVVFVGFDLMFTELVIIFSYIYIMVTILKMSSTAGRKKSFSTCASHLTAVTIFYGTLSYMYLQPQSNNSQENMKVASIFYGTVIPMLNPLIYSLRNKEGK

SEQ ID NO: 42431 - protein, 317 aa, Homo sapiens
MGMVRHTNESNLAGFILLGFSDYPQLQKVLFVLILILYLLTILGNTTIILVSRLEPKLHMPMYFFLSHLSFLYRCFTSSVIPQLLVNLWEPMKTIAYGGCLVHLYNSHALGSTECVLPAVMSCDRYVAVCRPLHYTVLMHIHLCMALASMAWLSGIATTLVQSTLTLQLPFCGHRQVDHFICEVPVLIKLACVGTTFNEAELFVASILFLIVPVSFILVSSGYIAHAVLRIKSATRRQKAFGTCFSHLTVVTIFYGTIIFMYLQPAKSRSRDQGKFVSLFYTVVTRMLNPLIYTLRIKEVKGALKKVLAKALGVNIL

SEQ ID NO: 42432 - protein, 293 aa, Homo sapiens
MEAVLTEELDEEEQLLRRHRKEKKELQAKIQGMKNAVPKNDKKRRKQLTEDVAKLEKEMEQKHREELEQLKLTTKENKIDSVAVNISNLVLENQPPRISKAQKRREKKAALEKEREERIAEAEIENLTGARHMESEKLAQILAARQLEIKQIPSDGHCMYKAIEDQLKEKDCALTVVALRSQTAEYMQSHVEDFLPFLTNPNTGDMYTPEEFQKYCEDIVNTAAWGGQLELRALSHILQTPIEIIQADSPPIIVGEEYSKKPLILVYMRHAYGLGEHYNSVTRLVNIVTENCS

SEQ ID NO: 42433 - protein, 192 aa, Homo sapiens
MISKEKKAALEKEREERIAEAEIENLTGARHMESEKLAQILAARQLEIKQIPSDGHCMYKAIEDQLKEKDCALTVVALRSQTAEYMQSHVEDFLPFLTNPNTGDMYTPEEFQKYCEDIVNTAAWGGQLELRALSHILQTPIEIIQADSPPIIVGEEYSKKPLILVYMRHAYGLGEHYNSVTRLVNIVTENCS

SEQ ID NO: 42434 - protein, 612 aa, Homo sapiens
MLEGLGSPASPRAAASASVAGSSGPAACSPPSSSAPRSPESPAPRRGGVRASVPQKLAEMLSSQYGLIVFVAGLLLLLAWAVHAAGVSKSDLLCFLTALMLLQLLWMLWYVGRSSAHRRLFRLKDTHAGAGWLRGSITLFAVITVILGCLKIGYFIGFSECLSATEGVFPVTHSVHTLLQVYFLWGHAKDIIQSFKTLERFGVIHSVFTNLLLWANGVLNESKHQLNEHKERLITLGFGNITTVLDDHTPQCNCTPPTLCTAISHGIYYLYPFNIEYQILASTMLYVLWKNIGRKVDSHQHQKMQFKSDGVMVGAVLGLTVLAATIAVVVVYLIHIGRSKTKSESALIMFYLYAITLLMLMGAAGLAGIRIYRIDEKSLDESKNPARKLDSDLLVGTASGSWLISWGSILAILCAEGHPRYTWYNLPYSILAIVEKYIQNLFIFESIHREPEKLSEDIQTLRVVTVCNGNTMPLASSCPKSGGVARDVAPQGKDMPPAANGNVCMRESHDKEEEKQEESSWGGSPSPVRLPRFLQGNAKRKVLRNIAAFLFLCNISLWIPPAFGCRPEYDNGLEEIVFGFEPWIIVVNLAMPFSIFYRMHAAASLFEVYCKI

SEQ ID NO: 42435 - protein, 307 aa, Homo sapiens
MLNFTDVTEFILLGLTSRREWQVLFFIIFLVVYIITMVGNIGMMVLIKVSPQLNNPMYFFLSHLSFVDVWFSSNVTPKMLENLLSDKKTITYAGCLVQCFFFIALVHVEIFILAAMAFDRYMAIGNPLLYGSKMSRVVCIRLITFPYIYGFLTSLAATLWTYGLYFCGKIEINHFYCADPPLIKMACAGTFVKEYTMIILAGINFTYSLTVIIISYLFILIAILRMRSAEGRQKAFSTCGSHLTAVIIFYGTLIFMYLRRPTEESVEQGKMVAVFYTTVIPMLNPMIYSLRNKDVKKAMMKVISRSC

SEQ ID NO: 42436 - protein, 314 aa, Homo sapiens
MDGTNGSTQTHFILLGFSDRPHLERILFVVILIAYLLTLVGNTTIILVSRLDPHLHTPMYFFLAHLSFLDLSFTTSSIPQLLYNLNGCDKTISYMGCAIQLFLFLGLGGVECLLLAVMAYDRCVAICKPLHYMVIMNPRLCRGLVSVTWGCGVANSLAMSPVTLRLPRCGHHEVDHFLREMPALIRMACVSTVAIEGTVFVLAVGVVLSPLVFILLSYSYIVRAVLQIRSASGRQKAFGTCGSHLTVVSLFYGNIIYMYMQPGASSSQDQGMFLMLFYNIVTPLLNPLIYTLRNREVKGALGRLLLGKRELGKE

SEQ ID NO: 42437 - protein, 947 aa, Homo sapiens
MEFSWGSGQESRRLLLLLLLLAAWEAGNGQLHYSVSEEAKHGTFVGRIAQDLGLELAELVPRLFRVASKGRGGLLEVNLQNGILFVNSRIDREELCRRSAECSIHLEVIVDRPLQVFHVDVEVRDINDNPPVFPATQKNLSIAESRPLDSRFPLEGASDADIGENALLTYRLSPNEYFSLEKPPDDELVKGLGLILRKSLDREEAPEIFLVLTATDGGKPELTGTVQLLITVLDANDNAPAFDRTIYKVRLLENVPNGTLVIKLNASDLDEGLNGDIVYSFSNDISPNVKSKFHIDPITGQIIVKGYIDFEESKSYEIIVEGIDKGQLPLSGHCRVIVEVEDNNDNVPDLEFKSLSLPIREDAPLGTVIALISVSDKDMGVNGLVTCSLTSHVPFKLVSTFKNYYSLVLDSALDRESVSAYELVVTARDGGSPSLWATASVSVEVADVNDNAPAFAQPEYTVFVKENNPPGCHIFTVSAWDADAQENALVSYSLVERRVGERALSSYVSVHAESGKVYALQPLDHEELELLQFQVTARDAGVPPLGSNVTLQVFVLDENDNAPALLAPRAGGTGGAVSELVPWSVGVGHVVAKVRAVDADSGYNAWLSYELQPGTGGARIPFRVGLYTGEISTTRALDETDAPRHRLLVLVKDHGEPALTATATVLVSLVESGQAPKASSRALVGAVGPDAALVDVNVYLIIAICAVSSLLVLTLLLYTALRCSALPTEGACAPGKPTLVCSSAVGSWSYSQQRRPRVCSGEGPPKTDLMAFSPSLPDSRDREDQLQTTEESFAKPRQPNPDWRYSASLRAGMHSSVHLEEAGILRAGPGGPDQQWPTVSSATPEPEAGEVSPPVGAGVNSNSWTFKYGPGNPKQSGPGELPDKFIIPGSPAIISIRQEPTNSQIDKSDFITFGKKEETKKKKKKKKGNKTQEKKEKGNSTTDNSDQ

SEQ ID NO: 42438 - protein, 798 aa, Homo sapiens
MEFSWGSGQESRRLLLLLLLLAAWEAGNGQLHYSVSEEAKHGTFVGRIAQDLGLELAELVPRLFRVASKGRGGLLEVNLQNGILFVNSRIDREELCRRSAECSIHLEVIVDRPLQVFHVDVEVRDINDNPPVFPATQKNLSIAESRPLDSRFPLEGASDADIGENALLTYRLSPNEYFSLEKPPDDELVKGLGLILRKSLDREEAPEIFLVLTATDGGKPELTGTVQLLITVLDANDNAPAFDRTIYKVRLLENVPNGTLVIKLNASDLDEGLNGDIVYSFSNDISPNVKSKFHIDPITGQIIVKGYIDFEESKSYEIIVEGIDKGQLPLSGHCRVIVEVEDNNDNVPDLEFKSLSLPIREDAPLGTVIALISVSDKDMGVNGLVTCSLTSHVPFKLVSTFKNYYSLVLDSALDRESVSAYELVVTARDGGSPSLWATASVSVEVADVNDNAPAFAQPEYTVFVKENNPPGCHIFTVSAWDADAQENALVSYSLVERRVGERALSSYVSVHAESGKVYALQPLDHEELELLQFQVTARDAGVPPLGSNVTLQVFVLDENDNAPALLAPRAGGTGGAVSELVPWSVGVGHVVAKVRAVDADSGYNAWLSYELQPGTGGARIPFRVGLYTGEISTTRALDETDAPRHRLLVLVKDHGEPALTATATVLVSLVESGQAPKASSRALVGAVGPDAALVDVNVYLIIAICAVSSLLVLTLLLYTALRCSALPTEGACAPGKPTLVCSSAVGSWSYSQQRRPRVCSGEGPPKTDLMAFSPSLPDSRDREDQLQTTEESFAKVSV

SEQ ID NO: 42439 - protein, 340 aa, Homo sapiens
MATGGYRTSSGLGGSTTDFLEEWKAKREKMRAKQNPPGPAPPGGGSSDAAGKPPAGALGTPAAAAANELNNNLPGGAPAAPAVPGPGGVNCAVGSAMLTRAAPGPRRSEDEPPAASASAAPPPQRDEEEPDGVPEKGKSSGPSARKGKGQIEKRKLREKRRSTGVVNIPAAECLDEYEDDEAGQKERKREDAITQQNTIQNEAVNLLDPGSSYLLQEPPRTVSGRYKSTTSVSEEDVSSRYSRTDRSGFPRYNRDANVSGTLVSSSTLEKKIEDLEKEVVRERQENLRLVRLMQDKEEMIGKLKEEIDLLNRDLDDIEDENEQLKQENKTLLKVVGQLTR

SEQ ID NO: 42440 - protein, 234 aa, Homo sapiens
MSETSFNLISEKCDILSILRDHPENRIYRRKIEELSKRFTAIRKTKGDGNCFYRALGYSYLESLLGKSREIFKFKERVLQTPNDLLAAGFEEHKFRNFFNAFYSVVELVEKDGSVSSLLKVFNDQSASDHIVQFLRLLTSAFIRNRADFFRHFIDEEMDIKDFCTHEVEPMATECDHIQITALSQALSIALQVEYVDEMDTALNHHVFPEAATPSVYLLYKTSHYNILYAADKH

SEQ ID NO: 42441 - protein, 73 aa, Homo sapiens
MSETSFNLISEKCDILSILRDHPENRIYRRKIEELSKRFTAIRKTKGDGNCFYRALGYSYLESLLGKSREIFK

SEQ ID NO: 42442 - protein, 843 aa, Homo sapiens
MTLDMDAVLSDFVRSTGAEPGLARDLLEGKNWDVNAALSDFEQLRQVHAGNLPPSFSEGSGGSRTPEKGFSDREPTRPPRPILQRQDDIVQEKRLSRGISHASSSIVSLARSHVSSNGGGGGSNEHPLEMPICAFQLPDLTVYNEDFRSFIERDLIEQSMLVALEQAGRLNWWVSVDPTSQRLLPLATTGDGNCLLHAASLGMWGFHDRDLMLRKALYALMEKGVEKEALKRRWRWQQTQQNKESGLVYTEDEWQKEWNELIKLASSEPRMHLGTNGANCGGVESSEEPVYESLEEFHVFVLAHVLRRPIVVVADTMLRDSGGEAFAPIPFGGIYLPLEVPASQCHRSPLVLAYDQAHFSALVSMEQKENTKEQAVIPLTDSEYKLLPLHFAVDPGKGWEWGKDDSDNVRLASVILSLEVKLHLLHSYMNVKWIPLSSDAQAPLAQPESPTASAGDEPRSTPESGDSDKESVGSSSTSNEGGRRKEKSKRDREKDKKRADSVANKLGSFGKTLGSKLKKNMGGLMHSKGSKPGGVGTGLGGSSGTETLEKKKKNSLKSWKGGKEEAAGDGPVSEKPPAESVGNGGSKYSQEVMQSLSILRTAMQGEGKFIFVGTLKMGHRHQYQEEMIQRYLSDAEERFLAEQKQKEAERKIMNGGIGGGPPPAKKPEPDAREEQPTGPPAESRAMAFSTGYPGDFTIPRPSGGGVHCQEPRRQLAGGPCVGGLPPYATFPRQCPPGRPYPHQDSIPSLEPGSHSKDGLHRGALLPPPYRVADSYSNGYREPPEPDGWAGGLRGLPPTQTKCKQPNCSFYGHPETNNFCSCCYREELRRREREPDGELLVHRF

SEQ ID NO: 42443 - protein, 814 aa, Homo sapiens
MTLDMDAVLSDFVRSTGAEPGLARDLLEGKNWDVNAALSDFEQLRQVHAGNLPPSFSEGSGGSRTPEKGFSDREPTRPPRPILQRQDDIVQEKRLSRGISHASSSIVSLARSHVSSNGGGGGSNEHPLEMPICAFQLPDLTVYNEDFRSFIERDLIEQSMLVALEQAGRLNWWVSVDPTSQRLLPLATTGDGNCLLHAASLGMWGFHDRDLMLRKALYALMEKGVEKEALKRRWRWQQTQQNKESGLVYTEDEWQKEWNELIKLASSEPRMHLGTNGANCGGVESSEEPVYESLEEFHVFVLAHVLRRPIVVVADTMLRDSGGEAFAPIPFGGIYLPLEVPASQCHRSPLVLAYDQAHFSALVSMEQKENTKEQAVIPLTDSEYKLLPLHFAVDPGKGWEWGKDDSDNVRLASVILSLEVKLHLLHSYMNVKWIPLSSDAQAPLAQPESPTASAGDEPRSTPESGDSDKESVGSSSTSNEGGRRKEKSKRDREKDKKRADSVANKLGSFGKTLGSKLKKNMGGLMHSKGSKPGGVGTGLGGSSGTETLEKKKKNSLKSWKGGKEEAAGDGPVSEKPPAESVGNGGSKYSQEVMQSLSILRTAMQGEGKFIFVGTLKMGHRHQYQEEMIQRYLSDAEERFLAEQKQKEAERKIMNGGIGGGPPPAKKPEPDAREEQPTGPPAESRAMAFSTGYPGDFTIPRPSGGGVHCQEPRRQLAGGPCVGGLPPYATFPRQCPPGRPYPHQDSIPSLEPGSHSKDGLHRGALLPPPYRVADSYSNGYREPPEPDGWAGGLRGLPPTQTKCKQPDGELLVHRF

SEQ ID NO: 42444 - protein, 324 aa, Homo sapiens
MNHMSASLKISNSSKFQVSEFILLGFPGIHSWQHWLSLPLALLYLSALAANTLILIIIWQNPSLQQPMYIFLGILCMVDMGLATTIIPKILAIFWFDAKVISLPECFAQIYAIHFFVGMESGILLCMAFDRYVAICHPLRYPSIVTSSLILKATLFMVLRNGLFVTPVPVLAAQRDYCSKNEIEHCLCSNLGVTSLACDDRRPNSICQLVLAWLGMGSDLSLIILSYILILYSVLRLNSAEAAAKALSTCSSHLTLILFFYTIVVVISVTHLTEMKATLIPVLLNVLHNIIPPSLNPTVYALQTKELRAAFQKVLFALTKEIRS

SEQ ID NO: 42445 - protein, 62 aa, Homo sapiens
MSERQGAGATNGKDKTSGENDGQKKVQEEFDIDMDAPETERAAVAIQSQFRKFQKKKAGSQS

SEQ ID NO: 42446 - protein, 541 aa, Homo sapiens
MGSSEVSIIPGLQKEEKAAVERRRLHVLKALKKLRIEADEAPVVAVLGSGGGLRAHIACLGVLSEMKEQGLLDAVTYLAGVSGSTWAISSLYTNDGDMEALEADLKHRFTRQEWDLAKSLQKTIQAARSENYSLTDFWAYMVISKQTRELPESHLSNMKKPVEEGTLPYPIFAAIDNDLQPSWQEARAPETWFEFTPHHAGFSALGAFVSITHFGSKFKKGRLVRTHPERDLTFLRGLWGSALGNTEVIREYIFDQLRNLTLKGLWRRAVANAKSIGHLIFARLLRLQESSQGEHPPPEDEGGEPEHTWLTEMLENWTRTSLEKQEQPHEDPERKGSLSNLMDFVKKTGICASKWEWGTTHNFLYKHGGIRDKIMSSRKHLHLVDAGLAINTPFPLVLPPTREVHLILSFDFSAGDPFETIRATTDYCRRHKIPFPQVEEAELDLWSKAPASCYILKGETGPVVMHFPLFNIDACGGDIEAWSDTYDTFKLADTYTLDVVVLLLALAKKNVRENKKKILRELMNVAGLYYPKDSARSCCLA

SEQ ID NO: 42447 - protein, 527 aa, Homo sapiens
MGSSEVSIIPGLQKEEKAAVERRRLHVLKALKKLRIEADEAPVVAVLGSGGGLRAHIACLGVLSEMKEQGLLDAVTYLAGVSGSTWAISSLYTNDGDMEALEADLKHRFTRQEWDLAKSLQKTIQAARSENYSLTDFWAYMVISKQTRELPESHLSNMKKPVEEGTLPYPIFAAIDNDLQPSWQEARAPETWFEFTPHHAGFSALGAFVSITHFGSKFKKGRLVRTHPERDLTFLRGLWGSALGNTEVIREYIFDQLRNLTLKGLWRRAVANAKSIGHLIFARLLRLQESSQGEHPPPEDEGGEPEHTWLTEMLENWTRTSLEKQEQPHEDPERKGSLSNLMDFVKKTGICASKWEWGTTHNFLYKHGGIRDKIMSSRKHLHLVDAGLAINTPFPLVLPPTREVHLILSFDFSAGDPFETIRATTDYCRRHKIPFPQVEEAELDLWSKAPASCYILKGETGPVVMHFPLFNIDACGGDIEAWSDTYDTFKLADTYTLDVVVLLLALAKKNVRENKKKILRELMNVAG

SEQ ID NO: 42448 - protein, 551 aa, Homo sapiens
MRTRPRPRLRRTENFLTAVHHGKKEEKAAVERRRLHVLKALKKLRIEADEAPVVAVLGSGGGLRAHIACLGVLSEMKEQGLLDAVTYLAGVSGSTWAISSLYTNDGDMEALEADLKHRFTRQEWDLAKSLQKTIQAARSENYSLTDFWAYMVISKQTRELPESHLSNMKKPVEEGTLPYPIFAAIDNDLQPSWQEARAPETWFEFTPHHAGFSALGAFVSITHFGSKFKKGRLVRTHPERDLTFLRGLWGSALGNTEVIREYIFDQLRNLTLKGLWRRAVANAKSIGHLIFARLLRLQESSQGEHPPPEDEGGEPEHTWLTEMLENWTRTSLEKQEQPHEDPERKGSLSNLMDFVKKTGICASKWEWGTTHNFLYKHGGIRDKIMSSRKHLHLVDAGLAINTPFPLVLPPTREVHLILSFDFSAGDPFETIRATTDYCRRHKIPFPQVEEAELDLWSKAPASCYILKGETGPVVMHFPLFNIDACGGDIEAWSDTYDTFKLADTYTLDVVVLLLALAKKNVRENKKKILRELMNVAGLYYPKDSARSCCLA

SEQ ID NO: 42449 - protein, 267 aa, Homo sapiens
MARFLTLCTWLLLLGPGLLATVRAECSQDCATCSYRLVRPADINFLACVMECEGKLPSLKIWETCKELLQLSKPELPQDGTSTLRENSKPEESHLLAKRYGGFMKRYGGFMKKMDELYPMEPEEEANGSEILAKRYGGFMKKDAEEDDSLANSSDLLKELLETGDNRERSHHQDGSDNEEEVSKRYGGFMRGLKRSPQLEDEAKELQKRYGGFMRRVGRPEWWMDYQKRYGGFLKRFAEALPSDEEGESYSKEVPEMEKRYGGFMRF

SEQ ID NO: 42450 - protein, 331 aa, Homo sapiens
MAQASPPRPERVLGASSPEARPAQEALLLPTGVFQVAEKMEKRTCALCPKDVEYNVLYFAQSENIAAHENCLLYSSGLVECEDQDPLNPDRSFDVESVKKEIQRGRKLKCKFCHKRGATVGCDLKNCNKNYHFFCAKKDDAVPQSDGVRGIYKLLCQQHAQFPIIAQSAKFSGVKRKRGRKKPLSGNHVQPPETMKCNTFIRQVKEEHGRHTDATVKVPFLKKCKEAGLLNYLLEEILDKVHSIPEKLMDETTSESDYEEIGSALFDCRLFEDTFVNFQAAIEKKIHASQQRWQQLKEEIELLQDLKQTLCSFQENRDLMSSSTSISSLSY

SEQ ID NO: 42451 - protein, 292 aa, Homo sapiens
MEKRTCALCPKDVEYNVLYFAQSENIAAHENCLLYSSGLVECEDQDPLNPDRSFDVESVKKEIQRGRKLKCKFCHKRGATVGCDLKNCNKNYHFFCAKKDDAVPQSDGVRGIYKLLCQQHAQFPIIAQSAKFSGVKRKRGRKKPLSGNHVQPPETMKCNTFIRQVKEEHGRHTDATVKVPFLKKCKEAGLLNYLLEEILDKVHSIPEKLMDETTSESDYEEIGSALFDCRLFEDTFVNFQAAIEKKIHASQQRWQQLKEEIELLQDLKQTLCSFQENRDLMSSSTSISSLSY

SEQ ID NO: 42452 - protein, 432 aa, Homo sapiens
MGPAGSLLGSGQMQITLWGSLAAVAIFFVITFLIFLCSSCDREKKPRQHSGDHENLMNVPSDKEMFSRSVTSLATDAPASSEQNGALTNGDILSEDSTLTCMQHYEEVQTSASDLLDSQDSTGKPKCHQSRELPRIPPESAVDTMLTARSVDGDQGLGMEGPYEVLKDSSSQENMVEDCLYETVKEIKEVAAAAHLEKGHSGKAKSTSASKELPGPQTEGKAEFAEYASVDRNKKCRQSVNVESILGNSCDPEEEAPPPVPVKLLDENENLQEKEGGEAEESATDTTSETNKRFSSLSYKSREEDPTLTEEEISAMYSSVNKPGQLVNKSGQSLTVPESTYTSIQGDPQRSPSSCNDLYATVKDFEKTPNSTLPPAGRPSEEPEPDYEAIQTLNREEEKATLGTNGHHGLVPKENDYESISDLQQGRDITRL

SEQ ID NO: 42453 - protein, 216 aa, Homo sapiens
MAAQGEPQVQFKLVLVGDGGTGKTTFVKRHLTGEFEKKYVATLGVEVHPLVFHTNRGPIKFNVWDTAGQEKFGGLRDGYYIQAQCAIIMFDVTSRVTYKNVPNWHRDLVRVCENIPIVLCGNKVDIKDRKVKAKSIVFHRKKNLQYYDISAKSNYNFEKPFLWLARKLIGDPNLEFVAMPALAPPEVVMDPALAAQYEHDLEVAQTTALPDEDDDL

SEQ ID NO: 42454 - protein, 403 aa, Homo sapiens
MLEAMAEPSPEDPPPTLKPETQPPEKRRRTIEDFNKFCSFVLAYAGYIPPSKEESDWPASGSSSPLRGESAADSDGWDSAPSDLRTIQTFVKKAKSSKRRAAQAGPTQPGPPRSTFSRLQAPDSATLLEKMKLKDSLFDLDGPKVASPLSPTSLTHTSRPPAALTPVPLSQGDLSHPPRKKDRKNRKLGPGAGAGFGVLRRPRPTPGDGEKRSRIKKSKKRKLKKAERGDRLPPPGPPQAPPSDTDSEEEEEEEEEEEEEEMATVVGGEAPVPVLPTPPEAPRPPATVHPEGVPPADSESKEVGSTETSQDGDASSSEGEMRVMDEDIMVESGDDSWDLITCYCRKPFAGRPMIECSLCGTWIHLSCAKIKKTNVPDFFYCQKCKELRPEARRLGGPPKSGEP

SEQ ID NO: 42455 - protein, 158 aa, Homo sapiens
MLEAMAEPSPEDPPPTLKPETQPPEKRRRTIEDFNKFCSFVLAYAGYIPPSKEESDWPASGSSSPLRGESAADSDGWDSAPSDLRTIQTFVKKAKSSKRRAAQAGPTQPGPPRSTFSRLQAPDSATLLEKMKLKDSLFDLDGPKVASPLSRPCAANTP

SEQ ID NO: 42456 - protein, 336 aa, Homo sapiens
MLEAMAEPSPEDPPPTLKPETQPPEKRRRTIEDFNKFCSFVLAYAGYIPPSKEAPDSATLLEKMKLKDSLFDLDGPKVASPLSPTSLTHTSRPPAALTPVPLSQGDLSHPPRKKDRKNRKLGPGAGAGFGVLRRPRPTPGDGEKRSRIKKSKKRKLKKAERGDRLPPPGPPQAPPSDTDSEEEEEEEEEEEEEEMATVVGGEAPVPVLPTPPEAPRPPATVHPEGVPPADSESKEVGSTETSQDGDASSSEGEMRVMDEDIMVESGDDSWDLITCYCRKPFAGRPMIECSLCGTWIHLSCAKIKKTNVPDFFYCQKCKELRPEARRLGGPPKSGEP

SEQ ID NO: 42457 - protein, 399 aa, Homo sapiens
MPGDCRRDPPPTLKPETQPPEKRRRTIEDFNKFCSFVLAYAGYIPPSKEESDWPASGSSSPLRGESAADSDGWDSAPSDLRTIQTFVKKAKSSKRRAAQAGPTQPGPPRSTFSRLQAPDSATLLEKMKLKDSLFDLDGPKVASPLSPTSLTHTSRPPAALTPVPLSQGDLSHPPRKKDRKNRKLGPGAGAGFGVLRRPRPTPGDGEKRSRIKKSKKRKLKKAERGDRLPPPGPPQAPPSDTDSEEEEEEEEEEEEEEMATVVGGEAPVPVLPTPPEAPRPPATVHPEGVPPADSESKEVGSTETSQDGDASSSEGEMRVMDEDIMVESGDDSWDLITCYCRKPFAGRPMIECSLCGTWIHLSCAKIKKTNVPDFFYCQKCKELRPEARRLGGPPKSGEP

SEQ ID NO: 42458 - protein, 303 aa, Homo sapiens
MGSAGRLHYLAMTAENPTPGDLAPAPLITCKLCLCEQSLDKMTTLQECQCIFCTACLKQYMQLAIREGCGSPITCPDMVCLNHGTLQEAEIACLVPVDQFQLYQRLKFEREVHLDPYRTWCPVADCQTVCPVASSDPGQPVLVECPSCHLKFCSCCKDAWHAEVSCRDSQPIVLPTEHRALFGTDAEAPIKQCPVCRVYIERNEGCAQMMCKNCKHTFCWYCLQNLDNDIFLRHYDKGPCRNKLGHSRASVMWNRTQVVGILVGLGIIALVTSPLLLLASPCIICCVCKSCRGKKKKHDPSTT

SEQ ID NO: 42459 - protein, 214 aa, Homo sapiens
MLWITMPHPAHLGLFIAVTLSEVHLDPYRTWCPVADCQTVCPVASSDPGQPVLVECPSCHLKFCSCCKDAWHAEVSCRDSQPIVLPTEHRALFGTDAEAPIKQCPVCRVYIERNEGCAQMMCKNCKHTFCWYCLQNLDNDIFLRHYDKGPCRNKLGHSRASVMWNRTQVVGILVGLGIIALVTSPLLLLASPCIICCVCKSCRGKKKKHDPSTT

SEQ ID NO: 42460 - protein, 653 aa, Homo sapiens
MADTLPSEFDVIVIGTGLPESIIAAACSRSGRRVLHVDSRSYYGGNWASFSFSGLLSWLKEYQENSDIVSDSPVWQDQILENEEAIALSRKDKTIQHVEVFCYASQDLHEDVEEAGALQKNHALVTSANSTEAADSAFLPTEDESLSTMSCEMLTEQTPSSDPENALEVNGAEVTGEKENHCDDKTCVPSTSAEDMSENVPIAEDTTEQPKKNRITYSQIIKEGRRFNIDLVSKLLYSRGLLIDLLIKSNVSRYAEFKNITRILAFREGRVEQVPCSRADVFNSKQLTMVEKRMLMKFLTFCMEYEKYPDEYKGYEEITFYEYLKTQKLTPNLQYIVMHSIAMTSETASSTIDGLKATKNFLHCLGRYGNTPFLFPLYGQGELPQCFCRMCAVFGGIYCLRHSVQCLVVDKESRKCKAIIDQFGQRIISEHFLVEDSYFPENMCSRVQYRQISRAVLITDRSVLKTDSDQQISILTVPAEEPGTFAVRVIELCSSTMTCMKGTYLVHLTCTSSKTAREDLESVVQKLFVPYTEMEIENEQVEKPRILWALYFNMRDSSDISRSCYNDLPSNVYVCSGPDCGLGNDNAVKQAETLFQEICPNEDFCPPPPNPEDIILDGDSLQPEASESSAIPEANSETFKESTNLGNLEESSE

SEQ ID NO: 42461 - protein, 110 aa, Homo sapiens
MADTLPSEFDVIVIGTGLPESIIAAACSRSGRRVLHVDSRSYYGGNWASFSFSGLLSWLKEYQENSDIVSDSPVWQDQILENEEAIALSRKDKTIQHVEVFCYARSTLLL

SEQ ID NO: 42462 - protein, 400 aa, Homo sapiens
MGVLMSKRQTVEQVQKVSLAVSAFKDGLRDRPSIRRTGELPGSRRGTVEGSVQEVQEEKEAEAGTSVVQEESSAGRAAWERLRDGRGVEPEEFDRTSRFTPPAFIRPTRKLDDDKPPEICLEPREPVVNDEMCDVCEVWTAESLFPCRVCTRVFHDGCLRRMGYIQGDSAAEVTEMAHTETGWSCHYCDNINLLLTEEEMYSLTETFQRCKVIPDCSLTLEDFLRYRHQAAKRGDRDRALSEEQEEQAARQFAALDPEHRGHIEWPDFLSHESLLLLQQLRPQNSLLRLLTVKERERARAAFLARGSGSTVSEAECRRAQHSWFCKRFPEAPSCSVSISHVGPIADSSPASSSSKSQDKTLLPTEQESRFVDWPTFLQENVLYILAARPNSAAIHLKPPG

SEQ ID NO: 42463 - protein, 780 aa, Homo sapiens
MAAVDLEKLRASGAGKAIGVLTSGGDAQGMNAAVRAVTRMGIYVGAKVFLIYEGYEGLVEGGENIKQANWLSVSNIIQLGGTIIGSARCKAFTTREGRRAAAYNLVQHGITNLCVIGGDGSLTGANIFRSEWGSLLEELVAEGKISETTARTYSHLNIAGLVGSIDNDFCGTDMTIGTDSALHRIMEVIDAITTTAQSHQRTFVLEVMGRHCGYLALVSALASGADWLFIPEAPPEDGWENFMCERLGETRSRGSRLNIIIIAEGAIDRNGKPISSSYVKDLVVQRLGFDTRVTVLGHVQRGGTPSAFDRILSSKMGMEAVMALLEATPDTPACVVTLSGNQSVRLPLMECVQMTKEVQKAMDDKRFDEATQLRGGSFENNWNIYKLLAHQKPPKEKSNFSLAILNVGAPAAGMNAAVRSAVRTGISHGHTVYVVHDGFEGLAKGQVQEVGWHDVAGWLGRGGSMLGTKRTLPKGQLESIVENIRIYGIHALLVVGGFEAYEGVLQLVEARGRYEELCIVMCVIPATISNNVPGTDFSLGSDTAVNAAMESCDRIKQSASGTKRRVFIVETMGGYCGYLATVTGIAVGADAAYVFEDPFNIHDLKVNVEHMTEKMKTDIQRGLVLRNEKCHDYYTTEFLYNLYSSEGKGVFDCRTNVLGHLQQGGAPTPFDRNYGTKLGVKAMLWLSEKLREVYRKGRVFANAPDSACVIGLKKKAVAFSPVTELKKDTDFEHRMPREQWWLSLRLMLKMLAQYRISMAAYVSGELEHVTRRTLSMDKGF

SEQ ID NO: 42464 - protein, 827 aa, Homo sapiens
MCNQGRGRESSRGGLHVQGSCRGLSRSPQQETGFAKAPAGTDCFFHCSPGSRGQGDRKEEVTSEPGGTSIMSRLGGMNAAVRAVTRMGIYVGAKVFLIYEGYEGLVEGGENIKQANWLSVSNIIQLGGTIIGSARCKAFTTREGRRAAAYNLVQHGITNLCVIGGDGSLTGANIFRSEWGSLLEELVAEGKISETTARTYSHLNIAGLVGSIDNDFCGTDMTIGTDSALHRIMEVIDAITTTAQSHQRTFVLEVMGRHCGYLALVSALASGADWLFIPEAPPEDGWENFMCERLGETRSRGSRLNIIIIAEGAIDRNGKPISSSYVKDLVVQRLGFDTRVTVLGHVQRGGTPSAFDRILSSKMGMEAVMALLEATPDTPACVVTLSGNQSVRLPLMECVQMTKEVQKAMDDKRFDEATQLRGGSFENNWNIYKLLAHQKPPKEKSNFSLAILNVGAPAAGMNAAVRSAVRTGISHGHTVYVVHDGFEGLAKGQVQEVGWHDVAGWLGRGGSMLGTKRTLPKGQLESIVENIRIYGIHALLVVGGFEAYEGVLQLVEARGRYEELCIVMCVIPATISNNVPGTDFSLGSDTAVNAAMESCDRIKQSASGTKRRVFIVETMGGYCGYLATVTGIAVGADAAYVFEDPFNIHDLKVNVEHMTEKMKTDIQRGLVLRNEKCHDYYTTEFLYNLYSSEGKGVFDCRTNVLGHLQQGGAPTPFDRNYGTKLGVKAMLWLSEKLREVYRKGRVFANAPDSACVIGLKKKAVAFSPVTELKKDTDFEHRMPREQWWLSLRLMLKMLAQYRISMAAYVSGELEHVTRRTLSMDKGF

SEQ ID NO: 42465 - protein, 780 aa, Homo sapiens
MTHEEHHAAKTLGIGKAIAVLTSGGDAQGMNAAVRAVVRVGIFTGARVFFVHEGYQGLVDGGDHIKEATWESVSMMLQLGGTVIGSARCKDFREREGRLRAAYNLVKRGITNLCVIGGDGSLTGADTFRSEWSDLLSDLQKAGKITDEEATKSSYLNIVGLVGSIDNDFCGTDMTIGTDSALHRIMEIVDAITTTAQSHQRTFVLEVMGRHCGYLALVTSLSCGADWVFIPECPPDDDWEEHLCRRLSETRTRGSRLNIIIVAEGAIDKNGKPITSEDIKNLVVKRLGYDTRVTVLGHVQRGGTPSAFDRILGSRMGVEAVMALLEGTPDTPACVVSLSGNQAVRLPLMECVQVTKDVTKAMDEKKFDEALKLRGRSFMNNWEVYKLLAHVRPPVSKSGSHTVAVMNVGAPAAGMNAAVRSTVRIGLIQGNRVLVVHDGFEGLAKGQIEEAGWSYVGGWTGQGGSKLGTKRTLPKKSFEQISANITKFNIQGLVIIGGFEAYTGGLELMEGRKQFDELCIPFVVIPATVSNNVPGSDFSVGADTALNTICTTCDRIKQSAAGTKRRVFIIETMGGYCGYLATMAGLAAGADAAYIFEEPFTIRDLQANVEHLVQKMKTTVKRGLVLRNEKCNENYTTDFIFNLYSEEGKGIFDSRKNVLGHMQQGGSPTPFDRNFATKMGAKAMNWMSGKIKESYRNGRIFANTPDSGCVLGMRKRALVFQPVAELKDQTDFEHRIPKEQWWLKLRPILKILAKYEIDLDTSDHAHLEHITRKRSGEAAV

SEQ ID NO: 42466 - protein, 749 aa, Homo sapiens
MTHEEHHAAKTLGIGKAIAVLTSGGDAQGMNAAVRAVVRVGIFTGARVFFVHEGYQGLVDGGDHIKEATWESVSMMLQLGGTVIGSARCKDFREREGRLRAAYNLVKRGITNLCVIGGDGSLTGADTFRSEWSDLLSDLQKAGKITDEEATKSSYLNIVGLVGSIDNDFCGTDMTIGTDSALHRIMEIVDAITTTAQSHQRTFVLEVMGRHCGYLALVTSLSCGADWVFIPECPPDDDWEEHLCRRLSETRTRGSRLNIIIVAEGAIDKNGKPITSEDIKNGSRMGVEAVMALLEGTPDTPACVVSLSGNQAVRLPLMECVQVTKDVTKAMDEKKFDEALKLRGRSFMNNWEVYKLLAHVRPPVSKSGSHTVAVMNVGAPAAGMNAAVRSTVRIGLIQGNRVLVVHDGFEGLAKGQIEEAGWSYVGGWTGQGGSKLGTKRTLPKKSFEQISANITKFNIQGLVIIGGFEAYTGGLELMEGRKQFDELCIPFVVIPATVSNNVPGSDFSVGADTALNTICTTCDRIKQSAAGTKRRVFIIETMGGYCGYLATMAGLAAGADAAYIFEEPFTIRDLQANVEHLVQKMKTTVKRGLVLRNEKCNENYTTDFIFNLYSEEGKGIFDSRKNVLGHMQQGGSPTPFDRNFATKMGAKAMNWMSGKIKESYRNGRIFANTPDSGCVLGMRKRALVFQPVAELKDQTDFEHRIPKEQWWLKLRPILKILAKYEIDLDTSDHAHLEHITRKRSGEAAV

SEQ ID NO: 42467 - protein, 851 aa, Homo sapiens
MHKDEFHLKFFMCVIQSRQLVRTPQRTAGEASTSSMLIPKPPPKTDILKSLDTMDDPDTVGSIPVFKTEWIMTHEEHHAAKTLGIGKAIAVLTSGGDAQGMNAAVRAVVRVGIFTGARVFFVHEGYQGLVDGGDHIKEATWESVSMMLQLGGTVIGSARCKDFREREGRLRAAYNLVKRGITNLCVIGGDGSLTGADTFRSEWSDLLSDLQKAGKITDEEATKSSYLNIVGLVGSIDNDFCGTDMTIGTDSALHRIMEIVDAITTTAQSHQRTFVLEVMGRHCGYLALVTSLSCGADWVFIPECPPDDDWEEHLCRRLSETRTRGSRLNIIIVAEGAIDKNGKPITSEDIKNLVVKRLGYDTRVTVLGHVQRGGTPSAFDRILGSRMGVEAVMALLEGTPDTPACVVSLSGNQAVRLPLMECVQVTKDVTKAMDEKKFDEALKLRGRSFMNNWEVYKLLAHVRPPVSKSGSHTVAVMNVGAPAAGMNAAVRSTVRIGLIQGNRVLVVHDGFEGLAKGQIEEAGWSYVGGWTGQGGSKLGTKRTLPKKSFEQISANITKFNIQGLVIIGGFEAYTGGLELMEGRKQFDELCIPFVVIPATVSNNVPGSDFSVGADTALNTICTTCDRIKQSAAGTKRRVFIIETMGGYCGYLATMAGLAAGADAAYIFEEPFTIRDLQANVEHLVQKMKTTVKRGLVLRNEKCNENYTTDFIFNLYSEEGKGIFDSRKNVLGHMQQGGSPTPFDRNFATKMGAKAMNWMSGKIKESYRNGRIFANTPDSGCVLGMRKRALVFQPVAELKDQTDFEHRIPKEQWWLKLRPILKILAKYEIDLDTSDHAHLEHITRKRSGEAAV

SEQ ID NO: 42468 - protein, 769 aa, Homo sapiens
MGCNMCVVQKPEEQYKVMLQVNGKELSKLSQEQTLQALRSSKEPLVIQVLRRSPRLRGDSSCHDLQLVDSGTQTDITFEHIMALGKLRPPTPPMVILEPPPISHEYYDPAEFMEGGPQEADRLDELEYEEVELYKSSHRDKLGLMVCYRTDDEEDLGIYVGEVNPNSIAAKDGRIREGDRIIQINGVDVQNREEAVAILSQEENTNISLLVARPESQLAKRWKDSDRDDFLDDFGSENEGELRARKLKSPPAQQPGNEEEKGAPDAGPGLSNSQELDSGVGRTDESTRNEESSEHDLLGDEPPSSTNTPGSLRKFGLQGDALQSRDFHFSMDSLLAEGAGLGGGDVPGLTDEEYERYRELLEIKCHLENGNQLGLLFPRASGGNSALDVNRNESLGHEMAMLEEELRHLEFKCRNILRAQKMQQLRERCMKAWLLEEESLYDLAASEPKKHELSDISELPEKSDKDSTSAYNTGESCRSTPLLVEPLPESPLRRAMAGNSNLNRTPPGPAVATPAKAAPPPGSPAKFRSLSRDPEAGRRQHAEERGRRNPKTGLTLERVGPESSPYLSRRHRGQGQEGEHYHSCVQLAPTRGLEELGHGPLSLAGGPRVGGVAAAATEAPRMEWKVKVRSDGTRYVAKRPVRDRLLKARALKIREERSGMTTDDDAVSEMKMGRYWSKEERKQHLIRAREQRKRREFMMQSRLECLREQQNGDSKPELNIIALSHRKTMKKRNKKILDNWITIQEMLAHGARSADGKRVYNPLLSVTTV

SEQ ID NO: 42469 - protein, 660 aa, Homo sapiens
MGCNMCVVQKPEEQYKVMLQEVELYKSSHRDKLGLMVCYRTDDEEDLGIYVGEVNPNSIAAKDGRIREGDRIIQINGVDVQNREEAVAILSQEENTNISLLVARPESQLAKRWKDSDRDDFLDDFGSENEGELRARKLKSPPAQQPGNEEEKGAPDAGPGLSNSQELDSGVGRTDESTRNEESSEHDLLGDEPPSSTNTPGSLRKFGLQGDALQSRDFHFSMDSLLAEGAGLGGGDVPGLTDEEYERYRELLEIKCHLENGNQLGLLFPRASGGNSALDVNRNESLGHEMAMLEEELRHLEFKCRNILRAQKMQQLRERCMKAWLLEEESLYDLAASEPKKHELSDISELPEKSDKDSTSAYNTGESCRSTPLLVEPLPESPLRRAMAGNSNLNRTPPGPAVATPAKAAPPPGSPAKFRSLSRDPEAGRRQHAEERGRRNPKTGLTLERVGPESSPYLSRRHRGQGQEGEHYHSCVQLAPTRGLEELGHGPLSLAGGPRVGGVAAAATEAPRMEWKVKVRSDGTRYVAKRPVRDRLLKARALKIREERSGMTTDDDAVSEMKMGRYWSKEERKQHLIRAREQRKRREFMMQSRLECLREQQNGDSKPELNIIALSHRKTMKKRNKKILDNWITIQEMLAHGARSADGKRVYNPLLSVTTV

SEQ ID NO: 42470 - protein, 531 aa, Homo sapiens
MELQSRPEALAVELARHQNGDLKKQLHERQPRIAALSDKQALGTITAVPVTGPQVSSLQRLAGQGAAVLPQVRPKTLIPDSLPVAPGRDRPPKQPPTFQKATVVSVKNPSPALPTANNTVSHVPAPGSQPQALAEPAALASPLSSAGVAYAIISTSPSNAAAMAPSTAVSVVSDSIKVQPLLISADNKPPPRLLSSPHPATHHCPLHPSSLPLTPPSPSLSPSPLHGIFQVIIIQPQVQTQPESTAESRPPTEEPSQGAQATKKKKEDRPPTQENPEKIAFMVALGLVTTEHLEEIQSKRQERKRRSTANPAYSGLLETERKRLASNYLNNPLFLTARANEDPCWKNEITHDEHCAACKRGANLQPCGTCPGAYHLSCLEPPLKTAPKGVWVCPRCQQKALKKDEGVPWTGMLAIVHSYVTHKTVKEEEKQKLLQRGSELQNEHQQLEERDRRLASAVQKCLELKTSLLARQRGTQSSLDRLRALLRLIQGEQLLQVTMTTTSPAPLLAGPWTKPSVAATHPTVQHPQGHN

SEQ ID NO: 42471 - protein, 489 aa, Homo sapiens
MELQSRPEALAVELARHQNGDLKKQLHERQPRIAALSDKQALGTITAVPVTGPQVSSLQRLAGQGAAVLPQVRPKTLIPDSLPVAPGRDRPPKQPPTFQKATVVSVKNPSPALPTANNTVSHVPAPGSQPQALAEPAALASPLSSAGVAYAIISTSPSNAAAMAPSTAVSVVSDSIKVQPLLISADNKVIIIQPQVQTQPESTAESRPPTEEPSQGAQATKKKKEDRPPTQENPEKIAFMVALGLVTTEHLEEIQSKRQERKRRSTANPAYSGLLETERKRLASNYLNNPLFLTARANEDPCWKNEITHDEHCAACKRGANLQPCGTCPGAYHLSCLEPPLKTAPKGVWVCPRCQQKALKKDEGVPWTGMLAIVHSYVTHKTVKEEEKQKLLQRGSELQNEHQQLEERDRRLASAVQKCLELKTSLLARQRGTQSSLDRLRALLRLIQGEQLLQVTMTTTSPAPLLAGPWTKPSVAATHPTVQHPQGHN

SEQ ID NO: 42472 - protein, 477 aa, Homo sapiens
MRRQPQNGDLKKQLHERQPRIAALSDKQALGTITAVPVTGPQVSSLQRLAGQGAAVLPQVRPKTLIPDSLPVAPGRDRPPKQPPTFQKATVVSVKNPSPALPTANNTVSHVPAPGSQPQALAEPAALASPLSSAGVAYAIISTSPSNAAAMAPSTAVSVVSDSIKVQPLLISADNKVIIIQPQVQTQPESTAESRPPTEEPSQGAQATKKKKEDRPPTQENPEKIAFMVALGLVTTEHLEEIQSKRQERKRRSTANPAYSGLLETERKRLASNYLNNPLFLTARANEDPCWKNEITHDEHCAACKRGANLQPCGTCPGAYHLSCLEPPLKTAPKGVWVCPRCQQKALKKDEGVPWTGMLAIVHSYVTHKTVKEEEKQKLLQRGSELQNEHQQLEERDRRLASAVQKCLELKTSLLARQRGTQSSLDRLRALLRLIQGEQLLQVTMTTTSPAPLLAGPWTKPSVAATHPTVQHPQGHN

SEQ ID NO: 42473 - protein, 1458 aa, Homo sapiens
MGLRPGIFLLELLLLLGQGTPQIHTSPRKSTLEGQLWPETLKNSPFPCNPNKLGVNMPSKSVHSLKPSDIKFVAAIGNLEIPPDPGTGDLEKQDWTERPQQVCMGVMTVLSDIIRYFSPSVPMPVCHTGKRVIPHDGAEDLWIQAQELVRNMKENLQLDFQFDWKLINVFFSNASQCYLCPSAQQNGLAAGGVDELMGVLDYLQQEVPRAFVNLVDLSEVAEVSRQYHGTWLSPAPEPCNCSEETTRLAKVVMQWSYQEAWNSLLASSRYSEQESFTVVFQPFFYETTPSLHSEDPRLQDSTTLAWHLWNRMMEPAGEKDEPLSVKHGRPMKCPSQESPYLFSYRNSNYLTRLQKPQDKLEVREGAEIRCPDKDPSDTVPTSVHRLKPADINVIGALGDSLTAGNGAGSTPGNVLDVLTQYRGLSWSVGGDENIGTVTTLANILREFNPSLKGFSVGTGKETSPNAFLNQAVAGGRAEDLPVQARRLVDLMKNDTRIHFQEDWKIITLFIGGNDLCDFCNDLVHYSPQNFTDNIGKALDILHAEVPRAFVNLVTVLEIVNLRELYQEKKVYCPRMILRSLCPCVLKFDDNSTELATLIEFNKKFQEKTHQLIESGRYDTREDFTVVVQPFFENVDMPKTSEGLPDNSFFAPDCFHFSSKSHSRAASALWNNMLEPVGQKTTRHKFENKINITCPNQVQPFLRTYKNSMQGHGTWLPCRDRAPSALHPTSVHALRPADIQVVAALGDSLTAGNGIGSKPDDLPDVTTQYRGLSYSAGGDGSLENVTTLPNILREFNRNLTGYAVGTGDANDTNAFLNQAVPGAKAEDLMSQVQTLMQKMKDDHRVNFHEDWKVITVLIGGSDLCDYCTDSNLYSAANFVHHLRNALDVLHREVPRVLVNLVDFLNPTIMRQVFLGNPDKCPVQQASVLCNCVLTLRENSQELARLEAFSRAYRSSMRELVGSGRYDTQEDFSVVLQPFFQNIQLPVLADGLPDTSFFAPDCIHPNQKFHSQLARALWTNMLEPLGSKTETLDLRAEMPITCPTQNEPFLRTPRNSNYTYPIKPAIENWGSDFLCTEWKASNSVPTSVHQLRPADIKVVAALGDSLTTAVGARPNNSSDLPTSWRGLSWSIGGDGNLETHTTLPNILKKFNPYLLGFSTSTWEGTAGLNVAAEGARARDMPAQAWDLVERMKNSPDINLEKDWKLVTLFIGVNDLCHYCENPEAHLATEYVQHIQQALDILSEELPRAFVNVVEVMELASLYQGQGGKCAMLAAQNNCTCLRHSQSSLEKQELKKVNWNLQHGISSFSYWHQYTQREDFAVVVQPFFQNTLTPLNERGDTDLTFFSEDCFHFSDRGHAEMAIALWNNMLEPVGRKTTSNNFTHSRAKLKCPSPESPYLYTLRNSRLLPDQAEEAPEVLYWAVPVAAGVGLVVGIIGTVVWRCRRGGRREDPPMSLRTVAL

SEQ ID NO: 42474 - protein, 488 aa, Homo sapiens
MEPAGEKDEPLSVKHGRPMKCPSQESPYLFSYRNSNYLTRLQKPQDKLEVREGAEIRCPDKDPSDTVPTSVHRLKPADINVIGALGDSLTAGNGAGSTPGNVLDVLTQYRGLSWSVGGDENIGTVTTLANILREFNPSLKGFSVGTGKETSPNAFLNQAVAGGRAEDLPVQARRLVDLMKNDTRIHFQEDWKIITLFIGGNDLCDFCNDLVHYSPQNFTDNIGKALDILHAEVPRAFVNLVTVLEIVNLRELYQEKKVYCPRMILRSLCPCVLKFDDNSTELATLIEFNKKFQEKTHQLIESGRYDTREDFTVVVQPFFENVDMPKTSEGLPDNSFFAPDCFHFSSKSHSRAASALWNNMLEPVGQKTTRHKFENKINITCPNQVQPFLRTYKNSMQGHGTWLPCRDRAPSALHPTSVHALRPADIQVVAALGDSLTAGNGIGSKPDDLPDVTTQYRGLSYRESKPGFLSDSWVSKSNRKCTRKAPNP

SEQ ID NO: 42475 - protein, 1447 aa, Homo sapiens
MGLRPGIFLLELLLLLGQGTPQIHTSPRKSTLEGQLWPETLKNSPFPCNPNKLGVNMPSKSVHSLKPSDIKFVAAIGNLEIPPDPGTGDLEKQDWTERPQQVCMGVMTVLSDIIRYFSPSVPMPVCHTGKRVIPHDGAEDLWIQAQELVRNMKENLQLDFQFDWKLINVFFSNASQCYLCPSAQQAPSLSTVLLSQNGLAAGGVDELMGVLDYLQQEVPRAFVNLVDLSEVAEVSRQYHGTWLSPAPEPCNCSEETTRLAKVVMQWSYQEAWNSLLASSRYSEQESFTVVFQPFFYETTPSLHSEDPRLQDSTTLAWHLWNRMMEPAGEKDEPLSVKHGRPMKCPSQESPYLFSYRNSNYLTRLQKPQDKLEVREGAEIRCPDKDPSDTVPTSVHRLKPADINVIGALGDSLTAGNGAGSTPGNVLDVLTQYRGLSWSVGGDENIGTVTTLANILREFNPSLKGFSVGTGKETSPNAFLNQAVAGGRAEDLPVQARRLVDLMKNDTRIHFQEDWKIITLFIGGNDLCDFCNDLVPRAFVNLVTVLEIVNLRELYQEKKVYCPRMILRSLCPCVLKFDDNSTELATLIEFNKKFQEKTHQLIESGRYDTREDFTVVVQPFFENVDMPKTSEGLPDNSFFAPDCFHFSSKSHSRAASALWNNMLEPVGQKTTRHKFENKINITCPNQVQPFLRTYKNSMQGHGTWLPCRDRAPSALHPTSVHALRPADIQVVAALGDSLTAGNGIGSKPDDLPDVTTQYRGLSYSAGGDGSLENVTTLPNILREFNRNLTGYAVGTGDANDTNAFLNQAVPGAKAEDLMSQVQTLMQKMKDDHRVNFHEDWKVITVLIGGSDLCDYCTDSNLYSAANFVHHLRNALDVLHREVPRVLVNLVDFLNPTIMRQVFLGNPDKCPVQQASVLCNCVLTLRENSQELARLEAFSRAYRSSMRELVGSGRYDTQEDFSVVLQPFFQNIQLPVLADGLPDTSFFAPDCIHPNQKFHSQLARALWTNMLEPLGSKTETLDLRAEMPITCPTQNEPFLRTPRNSNYTYPIKPAIENWGSDFLCTEWKASNSVPTSVHQLRPADIKVVAALGDSLTTAVGARPNNSSDLPTSWRGLSWSIGGDGNLETHTTLPNILKKFNPYLLGFSTSTWEGTAGLNVAAEGARARDMPAQAWDLVERMKNSPDINLEKDWKLVTLFIGVNDLCHYCENPEAHLATEYVQHIQQALDILSEELPRAFVNVVEVMELASLYQGQGGKCAMLAAQNNCTCLRHSQSSLEKQELKKVNWNLQHGISSFSYWHQYTQREDFAVVVQPFFQNTLTPLNERGDTDLTFFSEDCFHFSDRGHAEMAIALWNNMLEPVGRKTTSNNFTHSRAKLKCPSPESPYLYTLRNSRLLPDQAEEAPEVLYWAVPVAAGVGLVVGIIGTVVWRCRRGGRREDPPMSLRTVAL

SEQ ID NO: 42476 - protein, 760 aa, Homo sapiens
MGLRPGIFLLELLLLLGQGTPQIHTSPRKSTLEGQLWPETLKNSPFPCNPNKLGVNMPSKSVHSLKPSDIKFVAAIGNLEIPPDPGTGDLEKQDWTERPQQVCMGVMTVLSDIIRYFSPSVPMPVCHTGKRVIPHDGAEDLWIQAQELVRNMKENLQLDFQFDWKLINVFFSNASQCYLCPSAQQNGLAAGGVDELMGVLDYLQQEVPRAFVNLVDLSEVAEVSRQYHGTWLSPAPEPCNCSEETTRLAKVVMQWSYQEAWNSLLASSRYSEQESFTVVFQPFFYETTPSLHSEDPRLQDSTTLAWHLWNRMMEPAGEKDEPLSVKHGRPMKCPSQESPYLFSYRNSNYLTRLQKPQDKLEVREGAEIRCPDKDPSDTVPTSVHRLKPADINVIGALGDSLTAGNGAGSTPGNVLDVLTQYRGLSWSVGGDENIGTVTTLANILREFNPSLKGFSVGTGKETSPNAFLNQAVAGGRAEDLPVQARRLVDLMKNDTRIHFQEDWKIITLFIGGNDLCDFCNDLVHYSPQNFTDNIGKALDILHAEVPRAFVNLVTVLEIVNLRELYQEKKVYCPRMILRSLCPCVLKFDDNSTELATLIEFNKKFQEKTHQLIESGRYDTREDFTVVVQPFFENVDMPKTSEGLPDNSFFAPDCFHFSSKSHSRAASALWNNMLEPVGQKTTRHKFENKINITCPNQVQPFLRTYKNSMQGHGTWLPCRDRAPSALHPTSVHALRPADIQVVAALGDSLTVRTLGPQVVWG

SEQ ID NO: 42477 - protein, 423 aa, Homo sapiens
MPITCPTQNEPFLRTPRNSNYTYPIKPAIENWGSDFLCTEWKASNSVPTSVHQLRPADIKVVAALGDSLTTAVGARPNNSSDLPTSWRGLSWSIGGDGNLETHTTLPNILKKFNPYLLGFSTSTWEGTAGLNVAAEGARARDMPAQAWDLVERMKNSPDINLEKDWKLVTLFIGVNDLCHYCENPEAHLATEYVQHIQQALDILSEELPRAFVNVVEVMELASLYQGQGGKCAMLAAQNNCTCLRHSQSSLEKQELKKVNWNLQHGISSFSYWHQYTQREDFAVVVQPFFQNTLTPLNERGDTDLTFFSEDCFHFSDRGHAEMAIALWNNMLEPVGRKTTSNNFTHSRAKLKCPSPESPYLYTLRNSRLLPDQAEEAPEVLYWAVPVAAGVGLVVGIIGTVVWRCRRGGRREDPPMSLRTVAL

SEQ ID NO: 42478 - protein, 204 aa, Homo sapiens
MRLSRRPETFLLAFVLLCTLLGLGCPLHCEICTAAGSRCHGQMKTCSSDKDTCVLLVGKATSKGKELVHTYKGCIRSQDCYSGVISTTMGPKDHMVTSSFCCQSDGCNSAFLSVPLTNLTENGLMCPACTASFRDKCMGPMTHCTGKENHCVSLSGHVQAGIFKPRFAMRGCATESMCFTKPGAEVPTGTNVLFLHHIECTHSP

SEQ ID NO: 42479 - protein, 228 aa, Homo sapiens
MWVQTHPSSASYKSWGPGTADTHTMRLSRRPETFLLAFVLLCTLLGLGCPLHCEICTAAGSRCHGQMKTCSSDKDTCVLLVGKATSKGKELVHTYKGCIRSQDCYSGVISTTMGPKDHMVTSSFCCQSDGCNSAFLSVPLTNLTENGLMCPACTASFRDKCMGPMTHCTGKENHCVSLSGHVQAGIFKPRFAMRGCATESMCFTKPGAEVPTGTNVLFLHHIECTHSP

SEQ ID NO: 42480 - protein, 143 aa, Homo sapiens
MWVQTHPSSASYKSWGPGTADTHTMRLSRRPETFLLAFVLLCTLLGLGCPLHCEICTAAGSRCHGQMKTCSSDKDTCVLLVGKATSSKRMWPGTWWGGGVYLQGGRDYHAEGGSSRFSRRERGKKSVESRKEGKTIMRWREQK

SEQ ID NO: 42481 - protein, 116 aa, Homo sapiens
MGPKDHMVTSSFCCQSDGCNSAFLSVPLTNLTENGLMCPACTASFRDKCMGPMTHCTGKENHCVSLSGHVQAGIFKPRFAMRGCATESMCFTKPGAEVPTGTNVLFLHHIECTHSP

SEQ ID NO: 42482 - protein, 789 aa, Homo sapiens
MLCGRWRRCRRPPEEPPVAAQVAAQVAAPVALPSPPTPSDGGTKRPGLRALKKMGLTEDEDVRAMLRGSRLRKIRSRTWHKERLYRLQEDGLSVWFQRRIPRAPSQHIFFVQHIEAVREGHQSEGLRRFGGAFAPARCLTIAFKGRRKNLDLAAPTAEEAQRWVRGLTKLRARLDAMSQRERLDHWIHSYLHRADSNQDSKMSFKEIKSLLRMVNVDMNDMYAYLLFKECDHSNNDRLEGAEIEEFLRRLLKRPELEEIFHQYSGEDRVLSAPELLEFLEDQGEEGATLARAQQLIQTYELNETAKQHELMTLDGFMMYLLSPEGAALDNTHTCVFQDMNQPLAHYFISSSHNTYLTDSQIGGPSSTEAYVRAFAQGCRCVELDCWEGPGGEPVIYHGHTLTSKILFRDVVQAVRDHAFTLSPYPVILSLENHCGLEQQAAMARHLCTILGDMLVTQALDSPNPEELPSPEQLKGRVLVKGKKLPAARSEDGRALSDREEEEEDDEEEEEEVEAAAQRRLAKQISPELSALAVYCHATRLRTLHPAPNAPQPCQVSSLSERKAKKLIREAGNSFVRHNARQLTRVYPLGLRMNSANYSPQEMWNSGCQLVALNFQTPGYEMDLNAGRFLVNGQCGYVLKPACLRQPDSTFDPEYPGPPRTTLSIQVLTAQQLPKLNAEKPHSIVDPLVRIEIHGVPADCARQETDYVLNNGFNPRWGQTLQFQLRAPELALVRFVVEDYDATSPNDFVGQFTLPLSSLKQGYRHIHLLSKDGASLSPATLFIQIRIQRS

SEQ ID NO: 42483 - protein, 581 aa, Homo sapiens
MVAEVCSMPAASAVKKPFDLRSKMGKWCHHRFPCCRGSGKSNMGTSGDHDDSFMKTLRSKMGKCCHHCFPCCRGSGTSNVGTSGDHDNSFMKTLRSKMGKWCCHCFPCCRGSGKSNVGTWGDYDDSAFMEPRYHVRREDLDKLHRAAWWGKVPRKDLIVMLRDTDMNKRDKQKRTALHLASANGNSEVVQLLLDRRCQLNVLDNKKRTALIKAVQCQEDECVLMLLEHGADGNIQDEYGNTALHYAIYNEDKLMAKALLLYGADIESKNKCGLTPLLLGVHEQKQQVVKFLIKKKANLNALDRYGRTALILAVCCGSASIVNLLLEQNVDVSSQDLSGQTAREYAVSSHHHVICELLSDYKEKQMLKISSENSNPEQDLKLTSEEESQRLKVSENSQPEKMSQEPEINKDCDREVEEEIKKHGSNPVGLPENLTNGASAGNGDDGLIPQRKSRKPENQQFPDTENEEYHSDEQNDTQKQLSEEQNTGISQDEILTNKQKQIEVAEKEMNSKLSLSHKKEEDLLRENSMLREEIAMLRLELDETKHQNQLRENKILEEIESVKEKLLKAIQLNEEALTKTSI

SEQ ID NO: 42484 - protein, 381 aa, Homo sapiens
MVAEVCSMPAASAVKKPFDLRSKMGKWCHHRFPCCRGSGKSNMGTSGDHDDSFMKTLRSKMGKCCHHCFPCCRGSGTSNVGTSGDHDNSFMKTLRSKMGKWCCHCFPCCRGSGKSNVGTWGDYDDSAFMEPRYHVRREDLDKLHRAAWWGKVPRKDLIVMLRDTDMNKRDKQKRTALHLASANGNSEVVQLLLDRRCQLNVLDNKKRTALIKAVQCQEDECVLMLLEHGADGNIQDEYGNTALHYAIYNEDKLMAKALLLYGADIESKNKCGLTPLLLGVHEQKQQVVKFLIKKKANLNALDRYGRTALILAVCCGSASIVNLLLEQNVDVSSQDLSGQTAREYAVSSHHHVICELLSDYKEKQMLKISSENSNPGKEAEE

SEQ ID NO: 42485 - protein, 544 aa, Homo sapiens
MVAEVCSMPAASAVKKPFDLRSKMGKWCHHRFPCCRGSGKSNVGTSGDHDNSFMKTLRSKMGKWCCHCFPCCRGSGKSNVGTWGDYDDSAFMEPRYHVRREDLDKLHRAAWWGKVPRKDLIVMLRDTDMNKRDKQKRTALHLASANGNSEVVQLLLDRRCQLNVLDNKKRTALIKAVQCQEDECVLMLLEHGADGNIQDEYGNTALHYAIYNEDKLMAKALLLYGADIESKNKCGLTPLLLGVHEQKQQVVKFLIKKKANLNALDRYGRTALILAVCCGSASIVNLLLEQNVDVSSQDLSGQTAREYAVSSHHHVICELLSDYKEKQMLKISSENSNPEQDLKLTSEEESQRLKVSENSQPEKMSQEPEINKDCDREVEEEIKKHGSNPVGLPENLTNGASAGNGDDGLIPQRKSRKPENQQFPDTENEEYHSDEQNDTQKQLSEEQNTGISQDEILTNKQKQIEVAEKEMNSKLSLSHKKEEDLLRENSMLREEIAMLRLELDETKHQNQLRENKILEEIESVKEKLLKAIQLNEEALTKTSI

SEQ ID NO: 42486 - protein, 355 aa, Homo sapiens [sequence omitted]

SEQ ID NO: 42487 - protein, 271 aa, Homo sapiens
MRELAIEIGVRALLFGVFVFTEFLDPFQRVIQPEEIWLYKNPLVQSDNIPTRLMFAISFLTPLAVICVVKIIRRTDKTEIKEAFLAVSLALALNGVCTNTIKLIVGRPRPDFFYRCFPDGVMNSEMHCTGDPDLVSEGRKSFPSIHSSFAFSGLGFTTFYLAGKLHCFTESGRGKSWRLCAAILPLYCAMMIALSRMCDYKHHWQDSFVGGVIGLIFAYICYRQHYPPLANTACHKPYVSLRVPASLKKEERPTADSAPSLPLEGITEGPV

SEQ ID NO: 42488 - protein, 208 aa, Homo sapiens
MRELAIEIGVRALLFGVFVFTEFLDPFQRVIQPEEIWLYKNPLVQSDNIPTRLMFAISFLTPLAVICVVKIIRRTDKTEIKEAFLVAFSGLGFTTFYLAGKLHCFTESGRGKSWRLCAAILPLYCAMMIALSRMCDYKHHWQDSFVGGVIGLIFAYICYRQHYPPLANTACHKPYVSLRVPASLKKEERPTADSAPSLPLEGITEGPV

SEQ ID NO: 42489 - protein, 82 aa, Homo sapiens
MMIALSRMCDYKHHWQDSFVGGVIGLIFAYICYRQHYPPLANTACHKPYVSLRVPASLKKEERPTADSAPSLPLEGITEGPV

SEQ ID NO: 42490 - protein, 96 aa, Homo sapiens
MRELAIEIGVRALLFGVFVFTEFLDPFQRVIQPEEIWLYKNPLVQSDNIPTRLMFIPLWVESSASFLHTFATDSTILLWPTQLAINPTLVCESQPH

SEQ ID NO: 42491 - protein, 1095 aa, Homo sapiens
MAEGAAGREDPAPPDAAGGEDDPRVGPDAAGDCVTAASGGRMRDRRSGVALPGAAGTPADSEAGLLEAARATPRRSSIIKDPSNQKCGGRKKTVSFSSMPSEKKISSANDCISFMQAGCELKKVRPNSRIYNRFFTLDTDLQALRWEPSKKDLEKAKLDISAIKEIRLGKNTETFRNNGLADQICEDCAFSILHGENYESLDLVANSADVANIWVSGLRYLVSRSKQPLDFMEGNQNTPRFMWLKTVFEAADVDGNGIMLEDTSVELIKQLNPTLKEAKIRLKFKEIQKSKEKLTTRVTEEEFCEAFCELCTRPEVYFLLVQISKNKEYLDANDLMLFLEAEQGVTHITEDICLDIIRRYELSEEGRQKGFLAIDGFTQYLLSSECDIFDPEQKKVAQDMTQPLSHYYINASHNTYLIEDQFRGPADINGYIRALKMGCRSVELDVSDGSDNEPILCNRNNMTTHVSFRSVIEVINKFAFVASEYPLILCLGNHCSLPQQKVMAQQMKKVFGNKLYTEAPLPSESYLPSPEKLKRMIIVKGKKLPSDPDVLEGEVTDEDEEAEMSRRMSVDYNGEQKQIRLCRELSDLVSICKSVQYRDFELSMKSQNYWEMCSFSETEASRIANEYPEDFVNYNKKFLSRIYPSAMRIDSSNLNPQDFWNCGCQIVAMNFQTPGPMMDLHTGWFLQNGGCGYVLRPSIMRDEVSYFSANTKGILPGVSPLALHIKIISGQNFPKPKGACAKGDVIDPYVCIEIHGIPADCSEQRTKTVQQNSDNPIFDETFEFQVNLPELAMIRFVVLDDDYIGDEFIGQYTIPFECLQPGYRHVPLRSFVGDIMEHVTLFVHIAITNRSGGGKAQKRSLSVRMGKKVREYTMLRNIGLKTIDDIFKIAVHPLREAIDMRENMQNAIVSIKELCGLPPIASLKQCLLTLSSRLITSDNTPSVSLVMKDSFPYLEPLGAIPDVQKKMLTAYDLMIQESRFLIEMADTVQEKIVQCQKAGMEFHEELHNLGAKEGLKGRKLNKATESFAWNITVLKGQGDLLKNAKNEAIENMKQIQLACLSCGLSKAPSSSAEAKSKRSLEAIEEKESSEENGKL

SEQ ID NO: 42492 - protein, 997 aa, Homo sapiens
MPSEKKISSANDCISFMQAGCELKKVRPNSRIYNRFFTLDTDLQALRWEPSKKDLEKAKLDISAIKEIRLGKNTETFRNNGLADQICEDCAFSILHGENYESLDLVANSADVANIWVSGLRYLVSRSKQPLDFMEGNQNTPRFMWLKTVFEAADVDGNGIMLEDTSVELIKQLNPTLKEAKIRLKFKEIQKSKEKLTTRVTEEEFCEAFCELCTRPEVYFLLVQISKNKEYLDANDLMLFLEAEQGVTHITEDICLDIIRRYELSEEGRQKGFLAIDGFTQYLLSSECDIFDPEQKKVAQDMTQPLSHYYINASHNTYLIEDQFRGPADINGYIRALKMGCRSVELDVSDGSDNEPILCNRNNMTTHVSFRSVIEVINKFAFVASEYPLILCLGNHCSLPQQKVMAQQMKKVFGNKLYTEAPLPSESYLPSPEKLKRMIIVKGKKLPSDPDVLEGEVTDEDEEAEMSRRMSVDYNGEQKQIRLCRELSDLVSICKSVQYRDFELSMKSQNYWEMCSFSETEASRIANEYPEDFVNYNKKFLSRIYPSAMRIDSSNLNPQDFWNCGCQIVAMNFQTPGPMMDLHTGWFLQNGGCGYVLRPSIMRDEVSYFSANTKGILPGVSPLALHIKIISGQNFPKPKGACAKGDVIDPYVCIEIHGIPADCSEQRTKTVQQNSDNPIFDETFEFQVNLPELAMIRFVVLDDDYIGDEFIGQYTIPFECLQPGYRHVPLRSFVGDIMEHVTLFVHIAITNRSGGGKAQKRSLSVRMGKKVREYTMLRNIGLKTIDDIFKIAVHPLREAIDMRENMQNAIVSIKELCGLPPIASLKQCLLTLSSRLITSDNTPSVSLVMKDSFPYLEPLGAIPDVQKKMLTAYDLMIQESRFLIEMADTVQEKIVQCQKAGMEFHEELHNLGAKEGLKGRKLNKATESFAWNITVLKGQGDLLKNAKNEAIENMKQIQLACLSCGLSKAPSSSAEAKSKRSLEAIEEKESSEENGKL

SEQ ID NO: 42493 - protein, 150 aa, Homo sapiens
MALKPPSATQPAPNAPATPDAPPTTGDPGASAAPGSPTTTGGPGAPAEVPQEPQEPTQTPEELAFYAPNYLCLTIFAILLFPPFGLAALYFSYEGSWTQKPTSMLPPLQTMKANQNSEWEEAYINSGRTGWFGAFVVMIGLGIIYGLVLY

SEQ ID NO: 42494 - protein, 353 aa, Homo sapiens
MAMTLLEDWCRGMDVNSQRALLVWGIPVNCDEAEIEETLQAAMPQVSYRMLGRMFWREENAKAALLELTGAVDYAAIPREMPGKGGVWKVLFKPPTSDAEFLERLHLFLAREGWTVQDVARVLGFQNPTPTPGPEMPAEMLNYILDNVIQPLVESIWYKRLTLFSGRDIPGPGEETFDPWLEHTNEVLEEWQVSDVEKRRRLMESLRGPAADVIRILKSNNPAITTAECLKALEQVFGSVESSRDAQIKFLNTYQNPGEKLSAYVIRLEPLLQKVVEKGAIDKDNVNQARLEQVIAGANHSGAIRRQLWLTGAGEGPAPNLFQLLVQIREEEAKEEEEEAEATLLQLGLEGHF

SEQ ID NO: 42495 - protein, 126 aa, Homo sapiens
MAEAGAGLSETVTETTVTVTTEPENRSLTIKLRKRKPEKKVEWTSDTVDNEHMGRRSSKCCCIYEKPRAFGESSTESDEEEEEGCGHTHCVRGHRKGRRRATLGPTPTTPPQPPDPSQPPPGPMQH

SEQ ID NO: 42496 - protein, 321 aa, Homo sapiens
MPLLPAALTSSMLYFQMVIMAGTVMLAYYFEYTDTFTVNVQGFFCHDSAYRKPYPGPEDSSAVPPVLLYSLAAGVPVLVIIVGETAVFCLQLATRDFENQEKTILTGDCCYINPLVRRTVRFLGIYTFGLFATDIFVNAGQVVTGNLAPHFLALCKPNYTALGCQQYTQFISGEEACTGNPDLIMRARKTFPSKEAALSVYAAMYLTMYITNTIKAKGTRLAKPVLCLGLMCLAFLTGLNRVAEYRNHWSDVIAGFLVGISIAVFLVVCVVNNFKGRQAENEHIHMDNLAQMPMISIPRVESPLEKVTSVQNHITAFAEVT

SEQ ID NO: 42497 - protein, 316 aa, Homo sapiens
MPLLPAALTSSMLYFQMVIMAGTVMLAYYFEYTDTFTVNVQGFFCHDSAYRKPYPGPEDSSAVPPVLLYSLAAGVPVLVIIVGETAVFCLQLATRDFENQEKTILTGDCCYINPLVRRTVRFLGIYTFGLFATDIFVNAGQVVTGNLAPHFLALCKPNYTALGCQQYTQFISGEEACTGNPDLIMRARKTFPSKEAALSVYAAMYLTMYITNTIKAKGTRLAKPVLCLGLMCLAFLTGLNRVAEYRNHWSDVIAGFLVGISIAVFLVVCVVNNFKGRQAENEHIHMDNLAQMPMISIPRVESPLEKNHITAFAEVT

SEQ ID NO: 42498 - protein, 147 aa, Homo sapiens
MGFIFSKSMNESMKNQKEFMLMNARLQLERQLIMQSEMRERQMAMQIAWSREFLKYFGTFFGLAAISLTAGAIKKKKPAFLVPIVPLSFILTYQYDLGYGTLLERMKGEAEDILETEKSKLQLPRGMITFESIEKARKEQSRFFIDK

SEQ ID NO: 42499 - protein, 689 aa, Homo sapiens
MEDTGIQRGIWDGDAKAVQQCLTDIFTSVYTTCDIPENAIFGPCVLSHTSLYDSIAFIALKSTDKRTVPYIFRVDTSAANGSSEGLMWLRLVQSARDKEEQNLEAYIKNGQLFYRSLRRIAKDEELLVWYGKELTELLLLCPSRSHNKMNGSSPYTCLECSQRFQFEFPYVAHLRFRCPKRLHSADISPQDEQGGGVGTKDHGGGGGGGKDQQQQQQEAPLGPGPKFCKAGPLHHYPSPSPESSNPSAAAGGSSAKPSTDFHNLARELENSRGGSSCSPAQSLSSGSGSGGGGGHQEAELSPDGIATGGGKGKRKFPEEAAEGGGGAGLVGGRGRFVERPLPASKEDLVCTPQQYRASGSYFGLEENGRLFAPPSPETGEAKRSAFVEVKKAARAASLQEEGTADGAGVASEDQDAGGGGGSSTPAAASPVGAEKLLAPRPGGPLPSRLEGGSPARGSAFTSVPQLGSAGSTSGGGGTGAGAAGGAGGGQGAASDERKSAFSQPARSFSQLSPLVLGQKLGALEPCHPADGVGPTRLYPAAADPLAVKLQGAADLNGGCGSLPSGGGGLPKQSPFLYATAFWPKSSAAAAAAAAAAAAGPLQLQLPSALTLLPPSFTSLCLPAQNWCAKCNASFRMTSDLVYHMRSHHKKEYAMEPLVKRRREEKLKCPICNESFRERHHLSRHMTSHN

SEQ ID NO: 42500 - protein, 334 aa, Homo sapiens
MEDTGIQRGIWDGDAKAVQQCLTDIFTSVYTTCDIPENAIFGPCVLSHTSLYDSIAFIALKSTDKRTVPYIFRVDTSAANGSSEGLMWLRLVQSARDKEEQNLEAYIKNGQLFYRSLRRIAKDEELLVWYGKELTELLLLCPSRSHNKMNGSSPYTCLECSQRFQFEFPYVAHLRFRCPKRLHSADISPQDEQGGGVGTKDHGGGGGGGKDQQQQQQEAPLGPGPKFCKAGPLHHYPSPSPESSNPSAAAGGSSAKPSTDFHNLARELENSRGGSSCSPAQSLSSGSGSGGGGGHQEAELSPDGIATGGGKGKRKFPEEAAEGGGGAGLVGAAL

SEQ ID NO: 42501 - protein, 225 aa, Homo sapiens
MAGSSEEAPDYGRGVVIMDDWPGYDLNLFTYPQHYYGDLEYVLIPHGIIVDRIERLAKDIMKDIGYSDIMVLCVLKGGYKFCADLVEHLKNISRNSDRFVSMKVDFIRLKSYRNDQSMGEMQIIGGDDLSTLAGKNVLIVEDVVGTGRTMKALLSNIEKYKPNMIKVASLLVKRTSRSDGFRPDYAGFEIPNLFVVGYALDYNEYFRDLNHICVINEHGKEKYRV

SEQ ID NO: 42502 - protein, 190 aa, Homo sapiens
MAGSSEEAPDYGRGVVIMDDWPGYDLNLFTYPQHYYGDLEYVLIPHGIIVDRIERLAKDIMKDIGYSDIMVLCVLKGGYKFCADLVEHLKNISRNSDRFVSMKVDFIRLKSYRNDQSMGEMQIIGGDDLSTLAGKNVLIVEDVVGTGRTMKALLSNIEKYKPNMIKVASLLVKRTSRSDGFRPDSHMRHQ

SEQ ID NO: 42503 - protein, 173 aa, Homo sapiens
MAGSSEEAPDYGRGVVIMDDWPGYDLNLFTYPQHYYGDLEYVLIPHGIIVDRIERLAKDIMKDIGYSDIMVLCVLKGGYKFCADLVEHLKNISRNSDRFVSMKVDFIRLKSYRLRARLKRTTICDRGGLAFSQGYMSSCAPLQESPNTLWRGYLQVLIPCFHIRFQLPRSEQN

SEQ ID NO: 42504 - protein, 2036 aa, Homo sapiens
MDRNYPSAGFGDPLGAGAGWSYERSAKASLVYGSSRTSHPETDILHRQAYAAPHPLQSYATNHHPAGLSGLFDTGLHHAGSAGPDASVMNLISALESRGPQPGPSASSLLSQFRSPSWQTAMHTPGPTELFISGALPGSSTFPSSSALSAYQHPASFGSRPFPVPSSLSLQDPPFSPPANGLLSPHDVLHLKPSQAPTVPSSLGFERLAGGGVLGPAGLGPAQTPPYRPGPPDPPPPPRHLPTQFNLLASSSAAAAAAEQSSPQLYNFSGAAPGPPPPERALPRQDTVIKHYQRPASAQPPPPPPPAHALQHYLSCGGSYPSMGHRANLACSPLGGGEPSPGAGEPSKAGPSGATAGASGRATGPEAAGGGGAGGGGGGYRPIIQSPGYKTGKGGYGAAAGGATRPPPPRSTATPKCQSLGGPAAAYATGKASGAGGAGGQAYSPGQPQGLLGPQAYGQGFGGGQAQDLSKAPSYSGGPPQPPSGPPPPGLATCQSYSPDQLQGQLYGVQGEPYPGPAAHSQGLPTASPSLSYSTGHSPALSGHGGGWGPSSLGGGGEASPSHIIRPLQSPPATGRPPGVGSPGAPGKYLSSVLASAPFLAPPGAGSYAAGAGGYKGKGDGSELLAGPGGPPAERTEDEEFLIQHLLQAPSPPRTSGADGLVGEDGAADASKGLGGSGGAGGPPGTPYELAKEDPQRYHLQSVIRTSASLDEGATAALELGLGRLKEKKKGPERGGETPEGLATSVVHYGAGAKELGAFLQKSPPPPPPTAQSTQPTPHGLLLEAGGPDLPLVLPPPPPQLLPSVLSHAPSPSPSASKVGVHLLEPATRDGAPQPPPPPPPPPPPMPLQLEAHLRSHGLEPAAPSPRLRPEESLDPPGAMQELLGALEPLPPAPGDTGVGPPNSEGKDPAGAYRSPSPQGTKAPRFVPLTSICFPDSLLQDEERSFFPTMEEMFGGGAADDYGKAGPPEDEGDPKAGAGPPPGPPAYDPYGPYCPGRASGAGPETPGLGLDPNKPPELPSTVNAEPLGLIQSGPHQAAPPPPPPPPPPPAPASEPKGGLTSPIFCSTKPKKLLKTSSFHLLRRRDPPFQTPKKLYAQEYEFEADEDKADVPADIRLNPRRLPDLVSSCRSRPALSPLGDIDFCPPNPGPDGPRRRGRKPTKAKRDGPPRPRGRPRIRPLEVPTTAGPASASTPTDGAKKPRGRGRGRGRKAEEAGGTRLEPLKPLKIKLSVPKAGEGLGTSSGDAISGTDHNSLDSSLTREKIEAKIKEVEEKQPEMKSGFMASFLDFLKSGKRHPPLYQAGLTPPLSPPKSVPPSVPARGLQPQPPATPAVPHPPPSGAFGLGGALEAAESEGLGLGCPSPCKRLDEELKRNLETLPSFSSDEEDSVAKNRDLQESISSAISALDDPPLAGPKDTSTPDGPPLAPAAAVPGPPPLPGLPSANSNGTPEPPLLEEKPPPTPPPAPTPQPQPPPPPPPPQPALPSPPPLVAPTPSSPPPPPLPPPPPPAMPSPPPPPPPAAAPLAAPPEEPAAPSPEDPELPDTRPLHLAKKQETAAVCGETDEEAGESGGEGIFRERDEFVIRAEDIPSLKLALQTGREPPPIWRVQKALLQKFTPEIKDGQRQFCATSNYLGYFGDAKNRYQRLYVKFLENVNKKDYVRVCARKPWHRPPVPVRRSGQAKNPVSAGGSSAPPPKAPAPPPKPETPEKTTSEKPPEQTPETAMPEPPAPEKPSLLRPVEKEKEKEKVTRGERPLRGERATSGRQTRPERSLATGQPATSRLPKARPTKVKAEPPPKKRKKWLKEAGGNATAGGGPPGSSSDSESSPGAPSEDERAVPGRLLKTRAMREMYRSYVEMLVSTALDPDMIQALEDTHDELYLPPMRKIDGLLNEHKKKVLKRLSLSPALQDALHTFPQLQVEQSGEGSPEEGAVRLRPAGEPYNRKTLSKLKRSVVRAQEFKVELEKSGYYTLYHSLHHYKYHTFLRCRDQTLAIEGGAEDLGQEEVVQQCMRNQPWLEQLFDSFSDLLAQAQAHSRCG

SEQ ID NO: 42505 - protein, 1964 aa, Homo sapiens
MDRNYPSAGFGDPLGAGAGWSYERSAKASLVYGSSRTSHPETDILHRQAYAAPHPLQSYATNHHPAGLSGLFDTGLHHAGSAGPDASVMNLISALESRGPQPGPSASSLLSQFRSPSWQTAMHTPGPTELFISGALPGSSTFPSSSALSAYQHPASFGSRPFPVPSSLSLQDPPFSPPANGLLSPHDVLHLKPSQAPTVPSSLGFERLAGGGVLGPAGLGPAQTPPYRPGPPDPPPPPRHLPTQFNLLASSSAAAAAAEQSSPQLYNFSGAAPGPPPPERALPRQDTVIKHYQRPASAQPPPPPPPAHALQHYLSCGGSYPSMGHRANLACSPLGGGEPSPGAGEPSKAGPSGATAGASGRATGPEAAGGGGAGGGGGGYRPIIQSPGYKTGKGGYGAAAGGATRPPPPRSTATPKCQSLGGPAAAYATGKASGAGGAGGQAYSPGQPQGLLGPQAYGQGFGGGQAQDLSKAPSYSGGPPQPPSGPPPPGLATCQSYSPDQLQGQLYGVQGEPYPGPAAHSQGLPTASPSLSYSTGHSPALSGHGGGWGPSSLGGGGEASPSHIIRPLQSPPATGRPPGVGSPGAPGKYLSSVLASAPFLAPPGAGSYAAGAGGYKGKGDGSELLAGPGGPPAERTEDEEFLIQHLLQAPSPPRTSGADGLVGEDGAADASKGLGGSGGAGGPPGTPYELAKEDPQRYHLQSVIRTSASLDEGATAALELGLGRLKEKKKGPERGGETPEGLATSVVHYGAGAKELGAFLQKSPPPPPPTAQSTQPTPHGLLLEAGGPDLPLVLPPPPPQLLPSVLSHAPSPSPSASKVGVHLLEPATRDGAPQPPPPPPPPPPPMPLQLEAHLRSHGLEPAAPSPRLRPEESLDPPGAMQELLGALEPLPPAPGDTGVGPPNSEGKDPAGAYRSPSPQGTKAPRFVPLTSICFPDSLLQDEERSFFPTMEEMFGGGAADDYGKAGPPEDEGDPKAGAGPPPGPPAYDPYGPYCPGRASGAGPETPGLGLDPNKPPELPSTVNAEPLGLIQSGPHQAAPPPPPPPPPPPAPASEPKGGLTSPIFCSTKPKKLLKTSSFHLLRRRDPPFQTPKKLYAQEYEFEADEDKADVPADIRLNPRRLPDLVSSCRSRPALSPLGDIDFCPPNPGPDGPRRRGRKPTKAKRDGPPRPRGRPRIRPLEVPTTAGPASASTPTDGAKKPRGRGRGRGRKAEEAGGTRLEPLKPLKIKLSVPKAGEGLGTSSGDAISGTDHNSLDSSLTREKIEAKIKEVEEKQPEMKSGFMASFLDFLKSGKRHPPLYQAGLTPPLSPPKSVPPSVPARGLQPQPPATPAVPHPPPSGAFGLGGALEAAESEGLGLGCPSPCKRLDEELKRNLETLPSFSSDEEDSVAKNRDLQESISSAISALDDPPLAGPKDTSTPDGPPLAPAAAVPGPPPLPGLPSANSNGTPEPPLLEEKPPPTPPPAPTPQPQPPPPPPPPQPALPSPPPLVAPTPSSPPPPPLPPPPPPAMPSPPPPPPPAAAPLAAPPEEPAAPSPEDPELPDTRPLHLAKKQETAAVCGETDEEAGESGGEGIFRERDEFVIRAEDIPSLKLALQTGREPPPIWRVQKALLQKFTPEIKDGQRQFCATSNYLGYFGDAKNRYQRLYVKFLENVNKKDYVRVCARKPWHRPPVPVRRSGQAKNPVSAGGSSAPPPKAPAPPPKPETPEKTTSEKPPEQTPETAMPEPPAPEKPSLLRPVEKEKEKEKVTRGERPLRGERATSGRQTRPERSLATGQPATSRLPKARPTKVKAEPPPKKRKKWLKEAGGNATAGGGPPGSSSDSESSPGAPSEDERAVPGRLLKTRAMREMYRSYVEMLVSTALDPDMIQALEDTHKLKRSVVRAQEFKVELEKSGYYTLYHSLHHYKYHTFLRCRDQTLAIEGGAEDLGQEEVVQQCMRNQPWLEQLFDSFSDLLAQAQAHSRCG

SEQ ID NO: 42506 - protein, 140 aa, Homo sapiens
MAGWNAYIDNLMADGTCQDAAIVGYKDSPSVWAAVPGKTFVNITPAEVGVLVGKDRSSFYVNGLTLGGQKCSVIRDSLLQDGEFSMDLRTKSTGGAPTFNVTVTKTDKTLVLLMGKEGVHGGLINKKCYEMASHLRRSQY

SEQ ID NO: 42507 - protein, 153 aa, Homo sapiens
MLLRDLVLRRGCCWSSLLLHCALHPLWGFVQVTHGEPQKSCSKVTDSCRHVCQCRPPPPLPPPPPPPPPPRLLSAPAPNSTSCPTEESWWSGLVIIIAVCCASLVFLTVLVIICYKAIKRKPLRKDENGTSVAEYPMSASQSNKGVDVNNAVV

SEQ ID NO: 42508 - protein, 124 aa, Homo sapiens
MLLRDLVLRRGCCWSSLLLHCALHPLWGFVQVTHGEPQKSCSKVTDSCRHVCQCRPPPPLPPPPPPPPPPRLLSAPAPNSTSCPTEESWWSGLVIIIAVCCASLVFLTVLVIICYKAIKRNHAI

SEQ ID NO: 42509 - protein, 445 aa, Homo sapiens
MMEESGIETTPPGTPPPNPAGLAATAMSSTPVPLAATSSFSSPNVSSMESFPPLAYSTPQPPLPPVRPSAPLPFVPPPAVPSVPPLVTSMPPPVSPSTAAAFGNPPVSHFPPSTSAPNTLLPAPPSGPPISGFSVGSTYDITRGHAGRAPQTPLMPSFSAPSGTGLLPTPITQQASLTSLAQGTGTTSAITFPEEQEDPRITRGQDEASAGGIWGFIKGVAGNPMVKSVLDKTKHSVESMITTLDPGMAPYIKSGGELDIVVTSNKEVKVAAVRDAFQEVFGLAVVVGEAGQSNIAPQPVGYAAGLKGAQERIDSLRRTGVIHEKQTAVSVENFIAELLPDKWFDIGCLVVEDPVHGIHLETFTQATPVPLEFVQQAQSLTPQDYNLRWSGLLVTVGEVLEKSLLNVSRTDWHMAFTGMSRRQMIYSAARAIAGMYKQRLPPRTV

SEQ ID NO: 42510 - protein, 464 aa, Homo sapiens
MMEESGIETTPPGTPPPNPAGLAATAMSSTPVPLAATSSFSSPNVSSMESFPPLAYSTPQPPLPPVRPSAPLPFVPPPAVPSVPPLVTSMPPPVSPSTAAAFGNPPVSHFPPSTSAPNTLLPAPPSGPPISGFSVGSTYDITRGHAGRAPQTPLMPSFSAPSGTGLLPTPITQQASLTSLAQGTGTTSAITFPEEQEDPRITRGQDEASAGGIWGFIKGVAGNPMVKSVLDKTKHSVESMITTLDPGMAPYIKSGGELDIVVTSNKEVKVAAVRDAFQEVFGLAVVVGEAGQSNIAPQPVGYAAGLKGAQERIDSLRRTGVIHEKQTAVSVENFIAELLPDKWFDIGCLVVEDPVHGIHLETFTQATPVPLEFVQQAQSLTPQDYNLRWSGLLVTVGEVLEKSLLNVSRTDWHMAFTGMSRRQMIYSAARAIENPQRAVAVHGLVEARNFPAPGDLVSLLLGTV

SEQ ID NO: 42511 - protein, 462 aa, Homo sapiens
MMEESGIETTPPGTPPPNPAGLAATAMSSTPVPLAATSSFSSPNVSSMESFPPLAYSTPQPPLPPVRPSAPLPFVPPPAVPSVPPLVTSMPPPVSPSTAAAFGNPPVSHFPPSTSAPNTLLPAPPSGPPISGFSVGSTYDITRGHAGRAPQTPLMPSFSAPSGTGLLPTPITQQASLTSLAQGTGTTSAITFPEEQEDPRITRGQDEASAGGIWGFIKGVAGNPMVKSVLDKTKHSVESMITTLDPGMAPYIKSGGELDIVVTSNKEVKVAAVRDAFQEVFGLAVVVGEAGQSNIAPQPVGYAAGLKGAQERIDSLRRTGVIHEKQTAVSVENFIAELLPDKWFDIGCLVVEDPVHGIHLETFTQATPVPLEFVQQAQSLTPQDYNLRWSGLLVTVGEVLEKSLLNVSRTDWHMAFTGMSRRQMIYSAARAIADDYFPRIPKEQWQSMAWLKLEIFLPLVTW

SEQ ID NO: 42512 - protein, 311 aa, Homo sapiens
MMEESGIETTPPGTPPPNPAGLAATAMSSTPVPLAATSSFSSPNVSSMESFPPLAYSTPQPPLPPVRPSAPLPFVPPPAVPSVPPLVTSMPPPVSPSTAAAFGNPPVSHFPPSTSAPNTLLPAPPSGPPISGFSVGSTYDITRGHAGRAPQTPLMPSFSAPSGTGLLPTPITQQASLTSLAQGTGTTSAITFPEEQEDPRITRGQDEASAGGIWGFIKGVAGNPMVKSVLDKTKHSVESMITTLDPGMAPYIKSGGELDIVVTSNKEVKVAAVRDAFQEVFGLAVVVGEAGQSNIAPQPVGYAAGLKGAQA

SEQ ID NO: 42513 - protein, 418 aa, Homo sapiens
MMEESGIETTPPGTPPPNPAGLAATAMSSTPVPLAATSSFSSPNVSSMESFPPLAYSTPQPPLPPVRPSAPLPFVPPPAVPSVPPLVTSMPPPVSPSTAAAFGNPPVSHFPPSTSAPNTLLPAPPSGPPISGFSVGSTYDITRGHAGRAPQTPLMPSFSAPSGTGLLPTPITQQASLTSLAQGTGTTSAITFPEEQEDPRITRGQDEASAGGIWGFIKGVAGNPMVKSVLDKTKHSVESMITTLDPGMAPYIKSGGELDIVVTSNKEVKVAAVRDAFQEVFGLAVVVGEAGQSNIAPQPVGYAAGLKGAQERIDSLRRTGVIHEKQTAVSVENFIAELLPDKWFDIGCLVVEDPVHGIHLETFTQATPVPLEFVQQVGFLLCFFIMLQRNLHYCFQNKNLFGFFVRNMFLILFQSFFF

SEQ ID NO: 42514 - protein, 360 aa, Homo sapiens
MIEDTMTLLSLLGRIMRYFLLRPETLFLLCISLALWSYFFHTDEVKTIVKSSRDAVKMVKGKVAEIMQNDRLGGLDVLEAEFSKTWEFKNHNVAVYSIQGRRDHMEDRFEVLTDLANKTHPSIFGIFDGHGGETAAEYVKSRLPEALKQHLQDYEKDKENSVLSYQTILEQQILSIDREMLEKLTVSYDEAGTTCLIALLSDKDLTVANVGDSRGVLCDKDGNAIPLSHDHKPYQLKERKRIKRAGGFISFNGSWRVQGILAMSRSLGDYPLKNLNVVIPDPDILTFDLDKLQPEFMILASDGLWDAFSNEEAVRFIKERLDEPHFGAKSIVLQSFYRGCPDNITVMVVKFRNSSKTEEQ

SEQ ID NO: 42515 - protein, 181 aa, Homo sapiens
MLEKLTVSYDEAGTTCLIALLSDKDLTVANVGDSRGVLCDKDGNAIPLSHDHKPYQLKERKRIKRAGGFISFNGSWRVQGILAMSRSLGDYPLKNLNVVIPDPDILTFDLDKLQPEFMILASDGLWDAFSNEEAVRFIKERLDEPHFGAKSIVLQSFYRGCPDNITVMVVKFRNSSKTEEQ

SEQ ID NO: 42516 - protein, 233 aa, Homo sapiens
MPAFSTTAAEYVKSRLPEALKQHLQDYEKDKENSVLSYQTILEQQILSIDREMLEKLTVSYDEAGTTCLIALLSDKDLTVANVGDSRGVLCDKDGNAIPLSHDHKPYQLKERKRIKRAGGFISFNGSWRVQGILAMSRSLGDYPLKNLNVVIPDPDILTFDLDKLQPEFMILASDGLWDAFSNEEAVRFIKERLDEPHFGAKSIVLQSFYRGCPDNITVMVVKFRNSSKTEEQ

SEQ ID NO: 42517 - protein, 194 aa, Homo sapiens
MIEDTMTLLSLLGRIMRYFLLRPETLFLLCISLALWSYFFHTDEVKTIVKSSRDAVKMVKGKVAEIMQNDRLGGLDVLEAEFSKTWEFKNHNVAVYSIQGRRDHMEDRFEVLTDLANKTHPSIFGIFDGHGGETAAEYVKSRLPEALKQHLQDYEKDKENSVLSYQTILEQQILSIDREMLEKLTVSYDEAVTF

SEQ ID NO: 42518 - protein, 430 aa, Homo sapiens
MAVLARQLQRLLWTACKKKEREKEGREEEEEEEAGRRAPEGPRSLLTAPRRAQRPHGGAEASGGLRFGASAAQGWRARMEDAHCTWLSLPGLPPGWALFAVLDGHGGARAARFGARHLPGHVLQELGPEPSEPEGVREALRRAFLSADERLRSLWPRVETGGCTAVVLLVSPRFLYLAHCGDSRAVLSRAGAVAFSTEDHRPLRPRERERIHAAGGTIRRRRVEGSLAVSRALGDFTYKEAPGRPPELQLVSAEPEVAALARQAEDEFMLLASDGVWDTVSGAALAGLVASRLRLGLAPELLCAQLLDTCLCKGSLDNMTCILVCFPGAPRPSEEAIRRELALDAALGCRIAELCASAQKPPSLNTVFRTLASEDIPDLPPGGGLDCKATVIAEVYSQICQVSEECGEKGQDGAGKSNPTHLGSALDMEA

SEQ ID NO: 42519 - protein, 340 aa, Homo sapiens
MEDAHCTWLSLPGLPPGWALFAVLDGHGGARAARFGARHLPGHVLQELGPEPSEPEGVREALRRAFLSADERLRSLWPRVETGGCTAVVLLVSPRFLYLAHCGDSRAVLSRAGAVAFSTEDHRPLRPRERERIHAAGGTIRRRRVEGSLAVSRALGDFTYKEAPGRPPELQLVSAEPEVAALARQAEDEFMLLASDGVWDTVSGAALAGLVASRLRLGLAPELLCAQLLDTCLCKVLGAWRGTFGAWCSRGREPRGFGEEGFDREARVKLAKEGIGLKRRAWPEVGRAKIQGRSLRDALRHGRVSGRDLRERAWSFGKGRFWVVGAGPEVLISAGRWKSR

SEQ ID NO: 42520 - protein, 112 aa, Homo sapiens
MTCILVCFPGAPRPSEEAIRRELALDAALGCRIAELCASAQKPPSLNTVFRTLASEDIPDLPPGGGLDCKATVIAEVYSQICQVSEECGEKGQDGAGKSNPTHLGSALDMEA

SEQ ID NO: 42521 - protein, 389 aa, Homo sapiens
MADPRDKALQDYRKKLLEHKEIDGRLKELREQLKELTKQYEKSENDLKALQSVGQIVGEVLKQLTEEKFIVKATNGPRYVVGCRRQLDKSKLKPGTRVALDMTTLTIMRYLPREVDPLVYNMSHEDPGNVSYSEIGGLSEQIRELREVIELPLTNPELFQRVGIIPPKGCLLYGPPGTGKTLLARAVASQLDCNFLKVVSSSIVDKYIGESARLIREMFNYARDHQPCIIFMDEIDAIGGRRFSEGTSADREIQRTLMELLNQMDGFDTLHRVKMIMATNRPDTLDPALLRPGRLDRKIHIDLPNEQARLDILKIHAGPITKHGEIDYEAIVKLSDGFNGADLRNVCTEAGMFAIRADHDFVVQEDFMKAVRKVADSKKLESKLDYKPV

SEQ ID NO: 42522 - protein, 383 aa, Homo sapiens
MAGIPGLLFLLFFLLCAVGQVSPYSAPWKPTWPAYRLPVVLPQSTLNLAKPDFGAEAKLEVSSSCGPQCHKGTPLPTYEEAKQYLSYETLYANGSRTETQVGIYILSSSGDGAQHRDSGSSGKSRRKRQIYGYDSRFSIFGKDFLLNYPFSTSVKLSTGCTGTLVAEKHVLTAAHCIHDGKTYVKGTQKLRVGFLKPKFKDGGRGANDSTSAMPEQMKFQWIRVKRTHVPKGWIKGNANDIGMDYDYALLELKKPHKRKFMKIGVSPPAKQLPGGRIHFSGYDNDRPGNLVYRFCDVKDETYDLLYQQCDAQPGASGSGVYVRMWKRQQQKWERKIIGIFSGHQWVDMNGSPQDFNVAVRITPLKYAQICYWIKGNYLDCREG

SEQ ID NO: 42523 - protein, 351 aa, Homo sapiens
MAGIPGLLFLLFFLLCAVGQVSPYSAPWKPTWPAYRLPVVLPQSTLNLAKQYLSYETLYANGSRTETQVGIYILSSSGDGAQHRDSGSSGKSRRKRQIYGYDSRFSIFGKDFLLNYPFSTSVKLSTGCTGTLVAEKHVLTAAHCIHDGKTYVKGTQKLRVGFLKPKFKDGGRGANDSTSAMPEQMKFQWIRVKRTHVPKGWIKGNANDIGMDYDYALLELKKPHKRKFMKIGVSPPAKQLPGGRIHFSGYDNDRPGNLVYRFCDVKDETYDLLYQQCDAQPGASGSGVYVRMWKRQQQKWERKIIGIFSGHQWVDMNGSPQDFNVAVRITPLKYAQICYWIKGNYLDCREG

SEQ ID NO: 42524 - protein, 283 aa, Homo sapiens
MGLGLRGWGRPLLTVATALMLPVKPPAGSWGAQIIGGHEVTPHSRPYMASVRFGGQHHCGGFLLRARWVVSAAHCFSHRDLRTGLVVLGAHVLSTAEPTQQVFGIDALTTHPDYHPMTHANDICLLRLNGSAVLGPAVGLLRPPGRRARPPTAGTRCRVAGWGFVSDFEELPPGLMEAKVRVLDPDVCNSSWKGHLTLTMLCTRSGDSHRRGFCSADSGGPLVCRNRAHGLVSFSGLWCGDPKTPDVYTQVSAFVAWIWDVVRRSSPQPGPLPGTTRPPGEAA

SEQ ID NO: 42525 - protein, 313 aa, Homo sapiens
MSQSRHRAEAPPLEREDSGTFSLGKMITAKPGKTPIQVLHEYGMKTKNIPVYECERSDVQIHVPTFTFRVTVGDITCTGEGTSKKLAKHRAAEAAINILKANASICFAVPDPLMPDPSKQPKNQLNPIGSLQELAIHHGWRLPEYTLSQEGGPAHKREYTTICRLESFMETGKGASKKQAKRNAAEKFLAKFSNISPENHISLTNVVGHSLGCTWHSLRNSPGEKINLLKRSLLSIPNTDYIQLLSEIAKEQGFNITYLDIDELSANGQYQCLAELSTSPITVCHGSGISCGNAQSDAAHNALQYLKIIAERK

SEQ ID NO: 42526 - protein, 302 aa, Homo sapiens
MQSTPFCGFCSLGKMITAKPGKTPIQVLHEYGMKTKNIPVYECERSDVQIHVPTFTFRVTVGDITCTGEGTSKKLAKHRAAEAAINILKANASICFAVPDPLMPDPSKQPKNQLNPIGSLQELAIHHGWRLPEYTLSQEGGPAHKREYTTICRLESFMETGKGASKKQAKRNAAEKFLAKFSNISPENHISLTNVVGHSLGCTWHSLRNSPGEKINLLKRSLLSIPNTDYIQLLSEIAKEQGFNITYLDIDELSANGQYQCLAELSTSPITVCHGSGISCGNAQSDAAHNALQYLKIIAERK

SEQ ID NO: 42527 - protein, 288 aa, Homo sapiens
MITAKPGKTPIQVLHEYGMKTKNIPVYECERSDVQIHVPTFTFRVTVGDITCTGEGTSKKLAKHRAAEAAINILKANASICFAVPDPLMPDPSKQPKNQLNPIGSLQELAIHHGWRLPEYTLSQEGGPAHKREYTTICRLESFMETGKGASKKQAKRNAAEKFLAKFSNISPENHISLTNVVGHSLGCTWHSLRNSPGEKINLLKRSLLSIPNTDYIQLLSEIAKEQGFNITYLDIDELSANGQYQCLAELSTSPITVCHGSGISCGNAQSDAAHNALQYLKIIAERK

SEQ ID NO: 42528 - protein, 264 aa, Homo sapiens
MEAFLGSRSGLWAGGPAPGQFYRIPSTPDSFMDPASALYRGPITRTQNPMVTGTSVLGVKFEGGVVIAADMLGSYGSLARFRNISRIMRVNNSTMLGASGDYADFQYLKQVLGQMVIDEELLGDGHSYSPRAIHSWLTRAMYSRRSKMNPLWNTMVIGGYADGESFLGYVDMLGVAYEAPSLATGYGAYLAQPLLREVLEKQPVLSQTEARDLVERCMRVLYYRDARSYNRFQIATVTEKGVEIEGPLSTETNWDIAHMISGFE

SEQ ID NO: 42529 - protein, 535 aa, Homo sapiens
MLGPCMLLLLLLLGLRLQLSLGIIPVEEENPDFWNREAAEALGAAKKLQPAQTAAKNLIIFLGDGMGVSTVTAARILKGQKKDKLGPEIPLAMDRFPYVALSKTYNVDKHVPDSGATATAYLCGVKGNFQTIGLSAAARFNQCNTTRGNEVISVMNRAKKAGKSVGVVTTTRVQHASPAGTYAHTVNRNWYSDADVPASARQEGCQDIATQLISNMDIDVILGGGRKYMFRMGTPDPEYPDDYSQGGTRLDGKNLVQEWLAKRQGARYVWNRTELMQASLDPSVTHLMGLFEPGDMKYEIHRDSTLDPSLMEMTEAALRLLSRNPRGFFLFVEGGRIDHGHHESRAYRALTETIMFDDAIERAGQLTSEEDTLSLVTADHSHVFSFGGYPLRGSSIFGLAPGKARDRKAYTVLLYGNGPGYVLKDGARPDVTESESGSPEYRQQSAVPLDEETHAGEDVAVFARGPQAHLVHGVQEQTFIAHVMAFAACLEPYTACDLAPPAGTTDAAHPGRSVVPALLPLLAGTLLLLETATAP

SEQ ID NO: 42530 - protein, 165 aa, Homo sapiens
MVNPTVFFDIAVDGEPLGRVSFELFADKVPKTAENFRALSTGEKGFGYKGSCFHRIIPGFMCQGGDFTRHNGTGGKSIYGEKFEDENFILKHTGPGILSMANAGPNTNGSQFFICTAKTEWLDGKHVVFGKVKEGMNIVEAMERFGSRNGKTSKKITIADCGQLE

SEQ ID NO: 42531 - protein, 105 aa, Homo sapiens
MCQGGDFTRHNGTGGKSIYGEKFEDENFILKHTGPGILSMANAGPNTNGSQFFICTAKTEWLDGKHVVFGKVKEGMNIVEAMERFGSRNGKTSKKITIADCGQLE

SEQ ID NO: 42532 - protein, 593 aa, Homo sapiens
MGTARIAPGLALLLCCPVLSSAYALVDADDVMTKEEQIFLLHRAQAQCEKRLKEVLQRPASIMESDKGWTSASTSGKPRKDKASGKLYPESEEDKEAPTGSRYRGRPCLPEWDHILCWPLGAPGEVVAVPCPDYIYDFNHKGHAYRRCDRNGSWELVPGHNRTWANYSECVKFLTNETREREVFDRLGMIYTVGYSVSLASLTVAVLILAYFRRLHCTRNYIHMHLFLSFMLRAVSIFVKDAVLYSGATLDEAERLTEEELRAIAQAPPPPATAAAGYAGCRVAVTFFLYFLATNYYWILVEGLYLHSLIFMAFFSEKKYLWGFTVFGWGLPAVFVAVWVSVRATLANTGCWDLSSGNKKWIIQVPILASIVLNFILFINIVRVLATKLRETNAGRCDTRQQYRKLLKSTLVLMPLFGVHYIVFMATPYTEVSGTLWQVQMHYEMLFNSFQGFFVAIIYCFCNGEVQAEIKKSWSRWTLALDFKRKARSGSSSYSYGPMVSHTSVTNVGPRVGLGLPLSPRLLPTATTNGHPQLPGHAKPGTPALETLETTPPAMAAPKDDGFLNGSCSGLDEEASGPERPPALLQEEWETVM

SEQ ID NO: 42533 - protein, 110 aa, Homo sapiens [sequence omitted]

SEQ ID NO: 42534 - protein, 128 aa, Homo sapiens
MQIFVKTLTGKTITLEVEPSDTIENVKAKIQDKEGIPPDQQRLIFAGKQLEDGRTLSDYNIQKESTLHLVLRLRGGIIEPSLRQLAQKYNCDKMICRKCYARLHPRAVNCRKKKCGHTNNLRPKKKVK

SEQ ID NO: 42535 - protein, 294 aa, Homo sapiens
MKDRLQELKQRTKEIELSRDSHVSTTETEEQGVFLQQAVIYEREPVAERHLHEIQKLQESINNLADNVQKFGQQQKSLVASMRRFSLLKRESTITKEIKIQAEYINRSLNDLVKEVKKSEVENGPSSVVTRILKSQHAAMFRHFQQIMFIYNDTIAAKQEKCKTFILRQLEVAGKEMSEEDVNDMLHQGKWEVFNESLLTEINITKAQLSEIEQRHKELVNLENQIKDLRDLFIQISLLVEEQGESINNIEMTVNSTKEYVNNTKEKFGLAVKYKKRNPCRVLCCWCCPCCSSK

SEQ ID NO: 42536 - protein, 718 aa, Homo sapiens
MRAVLDTADIAIVALYFILVMCIGFFAMWKSNRSTVSGYFLAGRSMTWVTIGASLFVSNIGSEHFIGLAGSGAASGFAVGAWEFNALLLLQLLGWVFIPIYIRSGVYTMPEYLSKRFGGHRIQVYFAALSLILYIFTKLSVDLYSGALFIQESLGWNLYVSVILLIGMTALLTVTGGLVAVIYTDTLQALLMIIGALTLMIISIMEIGGFEEVKRRYMLASPDVTSILLTYNLSNTNSCNVSPKKEALKMLRNPTDEDVPWPGFILGQTPASVWYWCADQVIVQRVLAAKNIAHAKGSTLMAGFLKLLPMFIIVVPGMISRILFTDDIACINPEHCMLVCGSRAGCSNIAYPRLVMKLVPVGLRGLMMAVMIAALMSDLDSIFNSASTIFTLDVYKLIRKSASSRELMIVGRIFVAFMVVISIAWVPIIVEMQGGQMYLYIQEVADYLTPPVAALFLLAIFWKRCNEQGAFYGGMAGFVLGAVRLILAFAYRAPECDQPDNRPGFIKDIHYMYVATGLFWVTGLITVIVSLLTPPPTKEQIRTTTFWSKKNLVVKENCSPKEEPYQMQEKSILRCSENNETINHIIPNGKSEDSIKGLQPEDVNLLVTCREEGNPVASLGHSEAETPVDAYSNGQAALMGEKERKKETDDGGRYWKFIDWFCGFKSKSLSKRSLRDLMEEEAVCLQMLEETRQVKVILNIGLFAVCSLGIFMFVYFSL

SEQ ID NO: 42537 - protein, 303 aa, Homo sapiens
MSVIFFACVVRVRDGLPLSASTDFYHTQDFLEWRRRLKSLALRLAQYPGRGSAEGCDFSIHFSSFGDVACMAICSCQCPAAMAFCFLETLWWEFTASYDTTCIGLASRPYAFLEFDSIIQKVKWHFNYVSSSQMECSLEKIQEELKLQPPAVLTLEDTDVANGVMNGHTPMHLEPAPNFRMEPVTALGILSLILNIMCAALNLIRGVHLAEHSLQVAHEEIGNILAFLVPFVACIFQCYLYLFYSPARTMKVVLMLLFICLGNMYLHGLRNLWQILFHIGVAFLSSYQILTRQLQEKQSDCGV

SEQ ID NO: 42538 - protein, 250 aa, Homo sapiens
MSVIFFACVVRVRDGLPLSASTDFYHTQDFLEWRRRLKSLALRLAQYPGRGSAEGCDFSIHFSSFGDVACMAICSCQCPAAMAFCFLETLWWEFTASYDTTCIGLASRPYAFLEFDSIIQKVKWHFNYVSSSQMECSLEKIQEELKLQPPAVLTLEDTDVANGVMNGHTPMHLEPAPNFRMEPVTALGILSLILNIMCAALNLIRGVHLAEHSLQVAHEEIGNILAFLVPFVACIFQDPRSWFCWLDQTS

SEQ ID NO: 42539 - protein, 228 aa, Homo sapiens
MSVIFFACVVRVRDGLPLSASTDFYHTQDFLEWRRRLKSLALRLAQYPGRGSAEGCDFSIHFSSFGDVACMAICSCQCPAAMAFCFLETLWWEFTASYDTTCIGLASRPYAFLEFDSIIQKVKWHFNYVSSSQMECSLEKIQEELKLQPPAVLTLEDTDVANGVMNGHTPMHLEPAPNFRMEPVTALGILSLILNIMCAALNLIRGVHLAEHSLQDPRSWFCWLDQTS

SEQ ID NO: 42540 - protein, 453 aa, Homo sapiens
MGSVLGLCSMASWIPCLCGSAPCLLCRCCPSGNNSTVTRLIYALFLLVGVCVACVMLIPGMEEQLNKIPGFCENEKGVVPCNILVGYKAVYRLCFGLAMFYLLLSLLMIKVKSSSDPRAAVHNGFWFFKFAAAIAIIIGAFFIPEGTFTTVWFYVGMAGAFCFILIQLVLLIDFAHSWNESWVEKMEEGNSRCWYAALLSATALNYLLSLVAIVLFFVYYTHPASCSENKAFISVNMLLCVGASVMSILPKIQESQPRSGLLQSSVITVYTMYLTWSAMTNEPETNCNPSLLSIIGYNTTSTVPKEGQSVQWWHAQGIIGLILFLLCVFYSSIRTSNNSQVNKLTLTSDESTLIEDGGARSDGSLEDGDDVHRAVDNERDGVTYSYSFFHFMLFLASLYIMMTLTNWYRYEPSREMKSQWTAVWVKISSSWIGIVLYVWTLVAPLVLTNRDFD

SEQ ID NO: 42541 - protein, 313 aa, Homo sapiens
MALLVDRVRGHWRIAAGLLFNLLVSICIVFLNKWIYVYHGFPNMSLTLVHFVVTWLGLYICQKLDIFAPKSLPPSRLLLLALSFCGFVVFTNLSLQNNTIGTYQLAKAMTTPVIIAIQTFCYQKTFSTRIQLTLIPITLGVILNSYYDVKFNFLGMVFAALGVLVTSLYQVWVGAKQHELQVNSMQLLYYQAPMSSAMLLVAVPFFEPVFGEGGIFGPWSVSALLMVLLSGVIAFMVNLSIYWIIGNTSPVTYNMFGHFKFCITLFGGYVLFKDPLSINQALGILCTLFGILAYTHFKLSEQEGSRSKLAQRP

SEQ ID NO: 42542 - protein, 338 aa, Homo sapiens
MAGSHPYFNQPDSTHPSPPSAPPSLRWYQRCQPSDATSGLLVALLGGGLPAGFVGPLSRMAYQASNLPSLELLIWRCLFHLPIALLLKLRGDPLLGTPDIRSRAFFCALLNILSIGCAYSAVQVVPAGNAATVRKGSSTVCSAVLTLCLESQGLSGYDWCGLLGCILGLIIIVGPGLWTLQEGTTGVYTALGYVEAFLGGLALSLRLLVYRSLHFPPCLPTVAFLSGLVGLLGSVPGLFVLQAPVLPSDLLSWSCVGAVGILALVSFTCVGYAVTKAHPALVCAVLHSEVVVALILQYYMLHETVAPSDIVAAGVVLGSIAIITAQNLSCERTGRVEE

SEQ ID NO: 42543 - protein, 228 aa, Homo sapiens
MAAPQDVHVRICNQEIVKFDLEVKALIQDIRDCSGPLSALTELNTKVKEKFQQLRHRIQDLEQLAKEQDKESEKQLLLQEVENHKKQMLSNQASWRKANLTCKIAIDNLEKAELLQGGDLLRQRKTTKESLAQTSSTITESLMGISRMMAQQVQQSEEAMQSLVTSSRTILDANEEFKSMSGTIQLGRKLITKYNRRELTDKLLIFLALALFLATVLYIVKKRLFPFL

SEQ ID NO: 42544 - protein, 194 aa, Homo sapiens
MAAPQDVHVRICNQEIVKFDLEVKALIQDIRDCSGPLSALTELNTKVKEKFQQLRHRIQDLEQLAKEQDKESEKQLLLQEVENHKKQMLRKTTKESLAQTSSTITESLMGISRMMAQQVQQSEEAMQSLVTSSRTILDANEEFKSMSGTIQLGRKLITKYNRRELTDKLLIFLALALFLATVLYIVKKRLFPFL

SEQ ID NO: 42545 - protein, 271 aa, Homo sapiens
MAAPQDVHVRICNQEIVKFDLEVKALIQDIRDCSGPLSALTELNTKVKEKFQQLRHRIQPVLYQRAFIWTASTFFFKLTYSLTDFSSTQHDFNSPTTPVTFSDLEQLAKEQDKESEKQLLLQEVENHKKQMLSNQASWRKANLTCKIAIDNLEKAELLQGGDLLRQRKTTKESLAQTSSTITESLMGISRMMAQQVQQSEEAMQSLVTSSRTILDANEEFKSMSGTIQLGRKLITKYNRRELTDKLLIFLALALFLATVLYIVKKRLFPFL

SEQ ID NO: 42546 - protein, 237 aa, Homo sapiens
MAAPQDVHVRICNQEIVKFDLEVKALIQDIRDCSGPLSALTELNTKVKEKFQQLRHRIQPVLYQRAFIWTASTFFFKLTYSLTDFSSTQHDFNSPTTPVTFSDLEQLAKEQDKESEKQLLLQEVENHKKQMLRKTTKESLAQTSSTITESLMGISRMMAQQVQQSEEAMQSLVTSSRTILDANEEFKSMSGTIQLGRKLITKYNRRELTDKLLIFLALALFLATVLYIVKKRLFPFL

SEQ ID NO: 42547 - protein, 240 aa, Homo sapiens
MSKPSDHIKRPMNAFMVWSRGQRRKMAQENPKMHNSEISKRLGAEWKLLSEAEKRPYIDEAKRLRAQHMKEHPDYKYRPRRKPKNLLKKDRYVFPLPYLGDTDPLKAAGLPVGASDGLLSAPEKARAFLPPASAPYSLLDPAQFSSSAIQKMGEVPHTLATGALPYASTLGYQNGAFGSLSCPSQHTHTHPSPTNPGYVVPCNCTAWSASTLQPPVAYILFPGMTKTGIDPYSSAHATAM

SEQ ID NO: 42548 - protein, 239 aa, Homo sapiens
MPLLLLGETEPLKLERDCRSPVDPWAAASPDLALACLCHCQDLSSGAFPDRGVLGGVLFPTVEMVIKVFVATSSGSIAIRKKQQEVVGFLEANKIDFKELDIAGDEDNRRWMRENVPGEKKPQNGIPLPPQIFNEEQYCGDFDSFFSAKEENIIYSFLGLAPPPDSKGSEKAEEGGETEAQKEGSEDVGNLPEAQEKNEEEGETATEETEEIAMEGAEGEAEEEEETAEGEEPGEDEDS

SEQ ID NO: 42549 - protein, 128 aa, Homo sapiens
MRENVPGEKKPQNGIPLPPQIFNEEQYCGDFDSFFSAKEENIIYSFLGLAPPPDSKGSEKAEEGGETEAQKEGSEDVGNLPEAQEKNEEEGETATEETEEIAMEGAEGEAEEEEETAEGEEPGEDEDS

SEQ ID NO: 42550 - protein, 339 aa, Homo sapiens
MEGEPPPVEERRRLQEELNEFVESGCRTLEEVTASLGWDLDSLDPGEEEAAEDEVVICPYDSNHHMPKSSLAKHMASCRLRKMGYTKEEEDEMYNPEFFYENVKIPSITLNKDSQFQIIKQARTAVGKDSDCYNQRIYSSLPVEVPLNHKRFVCDLTQADRLALYDFVVEETKKKRSDSQIIENDSDLFVDLAAKINQDNSRKSPKSYLEILAEVRDYKRRRQSYRAKNVHITKKSYTEVIRDVINVHMEELSNHWQEEQEKAEDDAEKNEERRSASVDSRQSGGSYLDAECSRHRRDRSRSPHKRKRNKDKDKNCESRRRKERDGERHHSHKRRKQKI

SEQ ID NO: 42551 - protein, 147 aa, Homo sapiens
MEGEPPPVEERRRLQEELNEFVESGCRTLEEVTASLGWDLDSLDPGEEEAAEDEVVICPYDSNHHMPKSSLAKHMASCRLRKMGYTKEEEDEMYNPEFFYENVKIPSITLNKDSQFQIIKQARTAVGKDSDCYNQIIGVSIKRNQKI

SEQ ID NO: 42552 - protein, 451 aa, Homo sapiens
MREIVHIQIGQCGNQIGAKFWEMIGEEHGIDLAGSDRGASALQLERISVYYNEAYGRKYVPRAVLVDLEPGTMDSIRSSKLGALFQPDSFVHGNSGAGNNWAKGHYTEGAELIENVLEVVRHESESCDCLQGFQIVHSLGGGTGSGMGTLLMNKIREEYPDRIMNSFSVMPSPKVSDTVVEPYNAVLSIHQLIENADACFCIDNEALYDICFRTLKLTTPTYGDLNHLVSLTMSGITTSLRFPGQLNADLRKLAVNMVPFPRLHFFMPGFAPLTAQGSQQYRALSVAELTQQMFDARNTMAACDLRRGRYLTVACIFRGKMSTKEVDQQLLSVQTRNSSCFVEWIPNNVKVAVCDIPPRGLSMAATFIGNNTAIQEIFNRVSEHFSAMFKRKAFVHWYTSEGMDINEFGEAENNIHDLVSEYQQFQDAKAVLEEDEEVTEEAEMEPEDKGH

SEQ ID NO: 42553 - protein, 968 aa, Homo sapiens
MLTEASLSIWGWGSLGIVLFLITFGPFVIFYLTFYILCFVGGGLVVTLLFGKTNSEKYLEQCEHSFLPPTSPGVPKCLEEMKREARTIKIDRRLTGANIIDEPLQQVIQFSLRDYVQYWYYTLSDDESFLLEIRQTLQNALIQFATRSKEIDWQPYFTTRIVDDFGTHLRVFRKAQQKITEKDDQVKGTAEDLVDTFFEVEVEMEKEVCRDLVCTSPKDEEGFLRDLCEVLLYLLLPPGDFQNKIMRYFVREILARGILLPLINQLSDPDYINQYVIWMIRDSNCNYEAFMNIIKLSDNIGELEAVRDKAAEELQYLRSLDTAGDDINTIKNQINSLLFVKKVCDSRIQRLQSGKEINTVKLAANFGKLCTVPLDSILVDNVALQFFMDYMQQTGGQAHLFFWMTVEGYRVTAQQQLEVLLSRQRDGKHQTNQTKGLLRAAAVGIYEQYLSEKASPRVTVDDYLVAKLADTLNHEDPTPEIFDDIQRKVYELMLRDERFYPSFRQNALYVRMLAELDMLKDPSFRGSDDGDGESFNGSPTGSINLSLDDLSNVSSDDSVQLHAYISDTVYADYDPYAVAGVCNDHGKTYALYAITVHRRNLNSEEMWKTYRRYSDFHDFHMRITEQFESLSSILKLPGKKTFNNMDRDFLEKRKKDLNAYLQLLLAPEMMKASPALAHYVYDFLENKAYSKGKGDFARKMDTFVNPLRNSMRNVSNAVKSLPDSLAEGMTKMSDNMGKMSERLGQDIKQSFFKVPPLIPKTDSDPEHRRVSAQLDDNVDDNIPLRVMLLLMDEVFDLKERNQWLRRNIKNLLQQLIRATYGDTINRKIVDHVDWMTSPEQVADSVKRFRDAFWPNGILAEAVPCRDKSIRMRTRVAGKTKLLAIMPDELKHIIGAETTRKGILRVFEMFQHNQLNRRMVYVFLEGFLETLFPQYKFRELFNKLHSRSKQMQKYKQKLQTTQAPSLQKR

SEQ ID NO: 42554 - protein, 957 aa, Homo sapiens
MLTEASLSIWGWGSLGIVLFLITFGPFVIFYLTFYILCFVGGGLVVTLLFGKTNSEKYLEQCEHSFLPPTSPGVPKCLEEMKREARTIKIDRRLTGANIIDEPLQQVIQFSLRDYVQYWYYTLSDDESFLLEIRQTLQNALIQFATRSKEIDWQPYFTTRIVDDFGTHLRVFRKAQQKITEKDDQVKGTAEDLVDTFFEVEVEMEKEVCRDLVCTSPKDEEGFLRDLCEVLLYLLLPPGDFQNKIMRYFVREILARGILLPLINQLSDPDYINQYVIWMIRDSNCNYEAFMNIIKLSDNIGELEAVRDKAAEELQYLRSLDTAGDDINTIKNQINSLLFVKKVCDSRIQRLQSGKEINTVKLAANFGKLCTVPLDSILVDNVALQFFMDYMQQTGGQAHLFFWMTVEGYRVTAQQQLEVLLSRQRDGKHQTNQTKGLLRAAAVGIYEQYLSEKASPRVTVDDYLVAKLADTLNHEDPTPEIFDDIQRKVYELMLRDERFYPSFRQNALYVRMLAELDMLKDPSFRGSDDGDGESFNGSPTGSINLSLDDLSNVSSDDSVQLHAYISDTGVCNDHGKTYALYAITVHRRNLNSEEMWKTYRRYSDFHDFHMRITEQFESLSSILKLPGKKTFNNMDRDFLEKRKKDLNAYLQLLLAPEMMKASPALAHYVYDFLENKAYSKGKGDFARKMDTFVNPLRNSMRNVSNAVKSLPDSLAEGMTKMSDNMGKMSERLGQDIKQSFFKVPPLIPKTDSDPEHRRVSAQLDDNVDDNIPLRVMLLLMDEVFDLKERNQWLRRNIKNLLQQLIRATYGDTINRKIVDHVDWMTSPEQVADSVKRFRDAFWPNGILAEAVPCRDKSIRMRTRVAGKTKLLAIMPDELKHIIGAETTRKGILRVFEMFQHNQLNRRMVYVFLEGFLETLFPQYKFRELFNKLHSRSKQMQKYKQKLQTTQAPSLQKR

SEQ ID NO: 42555 - protein, 519 aa, Homo sapiens
MAAEREPPPLGDGKPTDFEDLEDGEDLFTSTVSTLESSPSSPEPASLPAEDISANSNGPKPTEVVLDDDREDLFAEATEEVSLDSPEREPILSSEPSPAVTPVTPTTLIAPRIESKSMSAPVIFDRSREEIEEEANGDIFDIEIGVSDPEKVGDGMNAYMAYRVTTKTSLSMFSKSEFSVKRRFSDFLGLHSKLASKYLHVGYIVPPAPEKSIVGMTKVKVGKEDSSSTEFVEKRRAALERYLQRTVKHPTLLQDPDLRQFLESSELPRAVNTQALSGAGILRMVNKAADAVNKMTIKMNESDAWFEEKQQQFENLDQQLRKLHVSVEALVCHRKELSANTAAFAKSAAMLGNSEDHTALSRALSQLAEVEEKIDQLHQEQAFADFYMFSELLSDYIRLIAAVKGVFDHRMKCWQKWEDAQITLLKKREAEAKMMVANKPDKIQQAKNEIREWEAKVQQGERDFEQISKTIRKEVGRFEKERVKDFKTVIIKYLESLVQTQQQLIKYWEAFLPEAKAIA

SEQ ID NO: 42556 - protein, 402 aa, Homo sapiens
MSAPVIFDRSREEIEEEANGDIFDIEIGVSDPEKVGDGMNAYMAYRVTTKTSLSMFSKSEFSVKRRFSDFLGLHSKLASKYLHVGYIVPPAPEKSIVGMTKVKVGKEDSSSTEFVEKRRAALERYLQRTVKHPTLLQDPDLRQFLESSELPRAVNTQALSGAGILRMVNKAADAVNKMTIKMNESDAWFEEKQQQFENLDQQLRKLHVSVEALVCHRKELSANTAAFAKSAAMLGNSEDHTALSRALSQLAEVEEKIDQLHQEQAFADFYMFSELLSDYIRLIAAVKGVFDHRMKCWQKWEDAQITLLKKREAEAKMMVANKPDKIQQAKNEIREWEAKVQQGERDFEQISKTIRKEVGRFEKERVKDFKTVIIKYLESLVQTQQQLIKYWEAFLPEAKAIA

SEQ ID NO: 42557 - protein, 954 aa, Homo sapiens
MSLPLTEEQRKKIEENRQKALARRAEKLLAEQHQRTSSGTSIAGNPFQAKQGPSQNFPRESCKPVSHGVIFKQQNLSSSSNADQRPHDSHSFQAKGIWKKPEEMPTACPGHSPRSQMALTGISPPLAQSPPEVPKQQLLSYELGQGHAQASPEIRFTPFANPTHKPLAKPKSSQETPAHSSGQPPRDAKLEAKTAKASPSGQNISYIHSSSESVTPRTEGRLQQKSGSSVQKGVNSQKGKCVRNGDRFQVLIGYNAELIAVFKTLPSKNYDPDTKTWNFSMNDYSALMKAAQSLPTVNLQPLEWAYGSSESPSTSSEGQAGLPSAPSLSFVKGRCMLISRAYFEADISYSQDLIALFKQMDSRRYDVKTRKWSFLLEEHSKLIAKVRCLPQVQLDPLPTTLTLAFASQLKKTSLSLTPDVPEADLSEVDPKLVSNLMPFQRAGVNFAIAKGGRLLLADDMGLGKTIQAICIAAFYRKEWPLLVVVPSSVRFTWEQAFLRWLPSLSPDCINVVVTGKDRLTAGLINIVSFDLLSKLEKQLKTPFKVVIIDESHFLKNSRTARCRAAMPVLKVAKRVILLSGTPAMSRPAELYTQIIAVKPTFFPQFHAFGLRYCDAKRMPWGWDYSGSSNLGELKLLLEEAVMLRRLKSDVLSQLPAKQRKIVVIAPGRINARTRAALDAAAKEMTTKDKTKQQQKDALILFFNRTAEAKIPSVIEYILDLLESGREKFLVFAHHKVVLDAITQELERKHVQHIRIDGSTSSAEREDLCQQFQLSERHAVAVLSITAANMGLTFSSADLVVFAELFWNPGVLIQAEDRVHRIGQTSSVGIHYLVAKGTADDYLWPLIQEKIKVLAEAGLSETNFSEMTESTDYLYKDPKQQKIYDLFQKSFEKEGSDMELLEAAESFDPGSASGTSGSSSQNMGDTLDESSLTASPQKKRRFEFFDNWDSFTSPL

SEQ ID NO: 42558 - protein, 195 aa, Homo sapiens
MAVSQGDGTLCFVLLLCCWQETELRPRTVIPGSPTEIPFSSKQEDMSELLDEILVQEILDLNKTTPSEMPSTASTLSTPLHAGIDENYQAGGSENYHELLENLQFSPGIEVKISNDEANANANLHGDPSENYRGPQVSPGSEKSVSSKEKNSKNTQYENLSILDQILQNIGRSSGNIFHKEQQRTSAQRRSQGSQ

SEQ ID NO: 42559 - protein, 396 aa, Homo sapiens
MKAVKSERERGSRRRHRDGDVVLPAGVVVKQERLSPEVAPPAHRRPDHSGGSPSPPTSEPARSGHRGNRARGVSRSPPKKKNKASGRRSKSPRSKRNRSPHHSTVKVKQEREDHPRRGREDRQHREPSEQEHRRARNSDRDRHRGHSHQRRTSNERPGSGQGQGRDRDTQNLQAQEEEREFYNARRREHRQRNDVGGGGSESQELVPRPGGNNKEKEVPAKEKPSFELSGALLEDTNTFRGVVIKYSEPPEARIPKKRWRLYPFKNDEVLPVMYIHRQSAYLLGRHRRIADIPIDHPSCSKQHAVFQYRLVEYTRADGTVGRRVKPYIIDLGSGNGTFLNNKRIEPQRYYELKEKDVLKFGFSSREYVLLHESSDTSEIDRKDDEDEEEEEEVSDS

SEQ ID NO: 42560 - protein, 1054 aa, Homo sapiens
MEQDTAAVAATVAAADATATIVVIEDEQPGPSTSQEEGAAAAATEATAATEKGEKKKEKNVSSFQLKLAAKAPKSEKEMDPEYEEKMKADRAKRFEFLLKQTELFAHFIQPSAQKSPTSPLNMKLGRPRIKKDEKQSLISAGDYRHRRTEQEEDEELLSESRKTSNVCIRFEVSPSYVKGGPLRDYQIRGLNWLISLYENGVNGILADEMGLGKTLQTIALLGYLKHYRNIPGPHMVLVPKSTLHNWMNEFKRWVPSLRVICFVGDKDARAAFIRDEMMPGEWDVCVTSYEMVIKEKSVFKKFHWRYLVIDEAHRIKNEKSKLSEIVREFKSTNRLLLTGTPLQNNLHELWALLNFLLPDVFNSADDFDSWFDTKNCLGDQKLVERLHAVLKPFLLRRIKTDVEKSLPPKKEIKIYLGLSKMQREWYTKILMKDIDVLNSSGKMDKMRLLNILMQLRKCCNHPYLFDGAEPGPPYTTDEHIVSNSGKMVVLDKLLAKLKEQGSRVLIFSQMTRLLDILEDYCMWRGYEYCRLDGQTPHEEREDKFLEVEFLGQREAIEAFNAPNSSKFIFMLSTRAGGLGINLASADVVILYDSDWNPQVDLQAMDRAHRIGQKKPVRVFRLITDNTVEERIVERAEIKLRLDSIVIQQGRLIDQQSNKLAKEEMLQMIRHGATHVFASKESELTDEDITTILERGEKKTAEMNERLQKMGESSLRNFRMDIEQSLYKFEGEDYREKQKLGMVEWIEPPKRERKANYAVDAYFREALRVSEPKIPKAPRPPKQPNVQDFQFFPPRLFELLEKEILYYRKTIGYKVPRNPDIPNPALAQREEQKKIDGAEPLTPEETEEKEKLLTQGFTNWTKRDFNQFIKANEKYGRDDIDNIAREVEGKSPEEVMEYSAVFWERCNELQDIEKIMAQIERGEARIQRRISIKKALDAKIARYKAPFHQLRIQYGTSKGKNYTEEEDRFLICMLHKMGFDRENVYEELRQCVRNAPQFRFDWFIKSRTAMEFQRRCNTLISLIEKENMEIEERERAEKKKRATKTPMVKFSAFS

SEQ ID NO: 42561 - protein, 1042 aa, Homo sapiens
MEQDTAAVAATVAAADATATIVVIEDEQPGPSTSQEEGAAAAATEATAATEKGEKKKEKNVSSFQLKLAAKAPKSEKEMDPEYEEKMKADRAKRFEFLLKQTELFAHFIQPSAQKSPTSPLNMKLGRPRIKKDEKQSLISAGDYRHRRTEQEEDEELLSESRKTSNVCIRFEVSPSYVKGGPLRDYQIRGLNWLISLYENGVNGILADEMGLGKTLQTIALLGYLKHYRNIPGPHMVLVPKSTLHNWMNEFKRWVPSLRVICFVGDKDARAAFIRDEMMPGEWDVCVTSYEMVIKEKSVFKKFHWRYLVIDEAHRIKNEKSKLSEIVREFKSTNRLLLTGTPLQNNLHELWALLNFLLPDVFNSADDFDSWFDTKNCLGDQKLVERLHAVLKPFLLRRIKTDVEKSLPPKKEIKIYLGLSKMQREWYTKILMKDIDVLNSSGKMDKMRLLNILMQLRKCCNHPYLFDGAEPGPPYTTDEHIVSNSGKMVVLDKLLAKLKEQGSRVLIFSQMTRLLDILEDYCMWRGYEYCRLDGQTPHEEREEAIEAFNAPNSSKFIFMLSTRAGGLGINLASADVVILYDSDWNPQVDLQAMDRAHRIGQKKPVRVFRLITDNTVEERIVERAEIKLRLDSIVIQQGRLIDQQSNKLAKEEMLQMIRHGATHVFASKESELTDEDITTILERGEKKTAEMNERLQKMGESSLRNFRMDIEQSLYKFEGEDYREKQKLGMVEWIEPPKRERKANYAVDAYFREALRVSEPKIPKAPRPPKQPNVQDFQFFPPRLFELLEKEILYYRKTIGYKVPRNPDIPNPALAQREEQKKIDGAEPLTPEETEEKEKLLTQGFTNWTKRDFNQFIKANEKYGRDDIDNIAREVEGKSPEEVMEYSAVFWERCNELQDIEKIMAQIERGEARIQRRISIKKALDAKIARYKAPFHQLRIQYGTSKGKNYTEEEDRFLICMLHKMGFDRENVYEELRQCVRNAPQFRFDWFIKSRTAMEFQRRCNTLISLIEKENMEIEERERAEKKKRATKTPMVKFSAFS

SEQ ID NO: 42562 - protein, 62 aa, Homo sapiens
MQGTWLPPSFLAVCDTEEVSLFLELCFKIHVTCKAVLICDYGPMELGQSLWEAEGKDPGHFR

SEQ ID NO: 42563 - protein, 299 aa, Homo sapiens
MTREQYILATQQNNLPRTENAQLYPVGIYGWRKRCLYFFVLLLLVTMIVNLAMTIWILKVMNFTVDGMGNLRVTKKGIRLEGISEFLLPLYVKEIHSRKDSPLVLQSDRNVTVNARNHMGQLTGQLTIGADAVEAQCKRFEVRASEDGRVLFSADEDEITIGAEKLKVTGTEGAVFGHSVETPHIRAEPSQDLRLESPTRSLIMEAPRGVQVSAAAGDFKATCRKELHLQSTEGEIFLNAETIKLGNLPTGSFSSSSPSSSSSRQTVYELCVCPNGKLYLSPAGVGSTCQSSSNICLWS

SEQ ID NO: 42564 - protein, 312 aa, Homo sapiens
MDRSTNLDIEELKMTREQYILATQQNNLPRTENAQLYPVGIYGWRKRCLYFFVLLLLVTMIVNLAMTIWILKVMNFTVDGMGNLRVTKKGIRLEGISEFLLPLYVKEIHSRKDSPLVLQSDRNVTVNARNHMGQLTGQLTIGADAVEAQCKRFEVRASEDGRVLFSADEDEITIGAEKLKVTGTEGAVFGHSVETPHIRAEPSQDLRLESPTRSLIMEAPRGVQVSAAAGDFKATCRKELHLQSTEGEIFLNAETIKLGNLPTGSFSSSSPSSSSSRQTVYELCVCPNGKLYLSPAGVGSTCQSSSNICLWS

SEQ ID NO: 42565 - protein, 225 aa, Homo sapiens
MAQSDFLYPENPKRREEVNRLHQQLLDCLSDSFDVTNKLTEVLNMHLGCRLASIEMKRDGTIKENCDLIIQAIMKIQKELQKVDEALKDKLEPTLYRKLQDIKEKETDKIAIVQKVISVILGEATSAASAVAVKLVGSNVTTGIINKLVTVLAQIGASLLGSIGVAVLGLGIDMIVRAILGAVEKTQLQAAIKSYEKHLVEFKSASEKYNHAITEVINTVKHQMK

SEQ ID NO: 42566 - protein, 431 aa, Homo sapiens
MTVKTEAAKGTLTYSRMRGMVAILIAFMKQRRMGLNDFIQKIANNSYACKHPEVQSILKISQPQEPELMNANPSPPPSPSQQINLGPSSNPHAKPSDFHFLKVIGKGSFGKVLLARHKAEEVFYAVKVLQKKAILKKKEEKHIMSERNVLLKNVKHPFLVGLHFSFQTADKLYFVLDYINGGELFYHLQRERCFLEPRARFYAAEIASALGYLHSLNIVYRDLKPENILLDSQGHIVLTDFGLCKENIEHNSTTSTFCGTPEYLAPEVLHKQPYDRTVDWWCLGAVLYEMLYGLPPFYSRNTAEMYDNILNKPLQLKPNITNSARHLLEGLLQKDRTKRLGAKDDFMEIKSHVFFSLINWDDLINKKITPPFNPNVSGPNDLRHFDPEFTEEPVPNSIGKSPDSVLVTASVKEAAEAFLGFSYAPPTDSFL

SEQ ID NO: 42567 - protein, 526 aa, Homo sapiens
MVNKDMNGFPVKKCSAFQFFKKRVRRWIKSPMVSVDKHQSPSLKYTGSSMVHIPPGEPDFESSLCQTCLGEHAFQRGVLPQENESCSWETQSGCEVREPCNHANILTKPDPRTFWTNDDPAFMKQRRMGLNDFIQKIANNSYACKHPEVQSILKISQPQEPELMNANPSPPPSPSQQINLGPSSNPHAKPSDFHFLKVIGKGSFGKVLLARHKAEEVFYAVKVLQKKAILKKKEEKHIMSERNVLLKNVKHPFLVGLHFSFQTADKLYFVLDYINGGELFYHLQRERCFLEPRARFYAAEIASALGYLHSLNIVYRDLKPENILLDSQGHIVLTDFGLCKENIEHNSTTSTFCGTPEYLAPEVLHKQPYDRTVDWWCLGAVLYEMLYGLPPFYSRNTAEMYDNILNKPLQLKPNITNSARHLLEGLLQKDRTKRLGAKDDFMEIKSHVFFSLINWDDLINKKITPPFNPNVSGPNDLRHFDPEFTEEPVPNSIGKSPDSVLVTASVKEAAEAFLGFSYAPPTDSFL

SEQ ID NO: 42568 - protein, 445 aa, Homo sapiens
MGEMQGALARARLESLLRPRHKKRAEAQKRSESFLLSGLAFMKQRRMGLNDFIQKIANNSYACKHPEVQSILKISQPQEPELMNANPSPPPSPSQQINLGPSSNPHAKPSDFHFLKVIGKGSFGKVLLARHKAEEVFYAVKVLQKKAILKKKEEKHIMSERNVLLKNVKHPFLVGLHFSFQTADKLYFVLDYINGGELFYHLQRERCFLEPRARFYAAEIASALGYLHSLNIVYRDLKPENILLDSQGHIVLTDFGLCKENIEHNSTTSTFCGTPEYLAPEVLHKQPYDRTVDWWCLGAVLYEMLYGLPPFYSRNTAEMYDNILNKPLQLKPNITNSARHLLEGLLQKDRTKRLGAKDDFMEIKSHVFFSLINWDDLINKKITPPFNPNVSGPNDLRHFDPEFTEEPVPNSIGKSPDSVLVTASVKEAAEAFLGFSYAPPTDSFL

SEQ ID NO: 42569 - protein, 421 aa, Homo sapiens
MKPSKRFFISPPSSTAFMKQRRMGLNDFIQKIANNSYACKHPEVQSILKISQPQEPELMNANPSPPPSPSQQINLGPSSNPHAKPSDFHFLKVIGKGSFGKVLLARHKAEEVFYAVKVLQKKAILKKKEEKHIMSERNVLLKNVKHPFLVGLHFSFQTADKLYFVLDYINGGELFYHLQRERCFLEPRARFYAAEIASALGYLHSLNIVYRDLKPENILLDSQGHIVLTDFGLCKENIEHNSTTSTFCGTPEYLAPEVLHKQPYDRTVDWWCLGAVLYEMLYGLPPFYSRNTAEMYDNILNKPLQLKPNITNSARHLLEGLLQKDRTKRLGAKDDFMEIKSHVFFSLINWDDLINKKITPPFNPNVSGPNDLRHFDPEFTEEPVPNSIGKSPDSVLVTASVKEAAEAFLGFSYAPPTDSFL

SEQ ID NO: 42570 - protein, 459 aa, Homo sapiens
MSSQSSSLSEACSREAYSSHNWALPPASRSNPQPAYPWATRRMKEEAIKPPLKAFMKQRRMGLNDFIQKIANNSYACKHPEVQSILKISQPQEPELMNANPSPPPSPSQQINLGPSSNPHAKPSDFHFLKVIGKGSFGKVLLARHKAEEVFYAVKVLQKKAILKKKEEKHIMSERNVLLKNVKHPFLVGLHFSFQTADKLYFVLDYINGGELFYHLQRERCFLEPRARFYAAEIASALGYLHSLNIVYRDLKPENILLDSQGHIVLTDFGLCKENIEHNSTTSTFCGTPEYLAPEVLHKQPYDRTVDWWCLGAVLYEMLYGLPPFYSRNTAEMYDNILNKPLQLKPNITNSARHLLEGLLQKDRTKRLGAKDDFMEIKSHVFFSLINWDDLINKKITPPFNPNVSGPNDLRHFDPEFTEEPVPNSIGKSPDSVLVTASVKEAAEAFLGFSYAPPTDSFL

SEQ ID NO: 42571 - protein, 402 aa, Homo sapiens
MDRTETRFRKRGQITEKITTSRQPQPQNEQSPQRSTSGYPLQEVVDDEVLGPSAPGVDPSPPCRSLGWKRKREWSDESAEEPEKELAPEPEETWVVEMLCGLKMKLKQQRVSPILPEHHKGFNSQLAPGVDPSPPHRSFCWKRKMEWWDESEESLEEEPRKVLAPEPEEIWVAEMLCGLKMKLKRRRVSLVLPEHHEAFNRLLEDPVIKRFLAWDKDLRVSDKYLLAMVIAYFSRAGFPSWQYQRIHFFLALYLANDMEEDDEDSKQNIFHFLYGKNRSRIPLLRKRWFQLGRSMNPRARKKRSRIPLLRKRRFQLGRSMNPRARKNRSRIPLLRKRRFQLGRSMNLRARKNRSQIVLFQKRRFQFFCSMSGRAWVSPEELEEIQAYDPEHWVWARDRAHLS

SEQ ID NO: 42572 - protein, 176 aa, Homo sapiens
MGAPATRRCVEWLLGLYFLSHIPITLFMDLQAVLPRELYPVEFRNLLKWYAKEFKDPLLQEPPAWFKSFLFCELVFQLPFFPIATYAFLKGSCKWIRTPAIIYSVHTMTTLIPILSTFLFEDFSKASGFKGQRPETLHERLTLVSVYAPYLLIPFILLIFMLRSPYYKYEEKRKKK

SEQ ID NO: 42573 - protein, 402 aa, Homo sapiens
MDRTETRFRKRGQITGKITTSRQPHPQNEQSPQRSTSGYPLQEVVDDEMLGPSAPGVDPSPPCRSLGWKRKREWSDESEEEPEKELAPEPEETWVVEMLCGLKMKLKQQRVSPILPEHHKDFNSQLAPGVDPSPPHRSFCWKRKMEWWDESEESLEEEPRKVLAPEPEEIWVAEMLCGLKMKLKRRRVSLVLPEHHEAFNRLLEDPVIKRFLAWDKDLRVSDKYLLAMVIAYFSRAGFPSWQYQRIHFFLALYLANDMEEDDEDSKQNIFHFLYRKNRSRIPLLRKPWFQLGHSMNPRARKNRSRIPLLRKRRFQLYRSTNPRARKNRSRIPLLRKRRFQLYRSMNSRARKNRSQIVLFQKRRFHFFCSMSCRAWVSPEELEEIQAYDPEHWVWARDRAHLS

SEQ ID NO: 42574 - protein, 258 aa, Homo sapiens; identical to SEQ ID NO: 4954

SEQ ID NO: 42575 - protein, 173 aa, Homo sapiens
MARMNRPAPVEVSYKHMRFLITHNPTNATLSTFIEDLKKYGATTVVRVCEVTYDKTPLEKDGITVVDWPFDDGAPPPGKVVEDWLSLVKAKFCEAPGSCVAVHCVAGLGRAPVLVALALIESGMKYEDAIQFIRQKRRGAINSKQLTYLEKYRPKQRLRFKDPHTHKTRCCVM

SEQ ID NO: 42576 - protein, 148 aa, Homo sapiens
MARMNRPAPVEVSYKHMRFLITHNPTNATLSTFIEDLKKYGATTVVRVCEVTYDKTPLEKDGITVVDWPFDDGAPPPGKVVEDWLSLVKAKFCEAPGSCVAVHCVAGLGRKRRGAINSKQLTYLEKYRPKQRLRFKDPHTHKTRCCVM

SEQ ID NO: 42577 - protein, 87 aa, Homo sapiens
MARMNRPAPVEVSYKHMRFLITHNPTNATLSTFIEDLKKYEDAIQFIRQKRRGAINSKQLTYLEKYRPKQRLRFKDPHTHKTRCCVM

SEQ ID NO: 42578 - protein, 335 aa, Homo sapiens
MGSASPGLSSVSPSHLLLPPDTVSRTGLEKAAAGAVGLERRDWSPSPPATPEQGLSAFYLSYFDMLYPEDSSWAAKAPGASSREEPPEEPEQCPVIDSQAPAGSLDLVPGGLTLEEHSLEQVQSMVVGEVLKDIETACKLLNITADPMDWSPSNVQKWLLWTEHQYRLPPMGKAFQELAGKELCAMSEEQFRQRSPLGGDVLHAHLDIWKSAAWMKERTSPGAIHYCASTSEESWTDSEVDSSCSGQPIHLWQFLKELLLKPHSYGRFIRWLNKEKGIFKIEDSAQVARLWGIRKNRPAMNYDKLSRSIRQYYKKGIIRKPDISQRLVYQFVHPI

SEQ ID NO: 42579 - protein, 319 aa, Homo sapiens
MGSASPGLSSVSPSHLLLPPDTVSRTGLEKAAAGAVGLERRDWSPSPPATPEQGLSAFYLSYFDMLYPEDSSWAAKAPGASSREEPPEEPEQCPVIDSQAPAGSLDLVPGGLTLEEHSLEQVQSMVVGEVLKDIETACKLLNITADPMDWSPSNVQKWLLWTEHQYRLPPMGKAFQELAGKELCAMSEEQFRQRSPLGGDVLHAHLDIWKSASTSEESWTDSEVDSSCSGQPIHLWQFLKELLLKPHSYGRFIRWLNKEKGIFKIEDSAQVARLWGIRKNRPAMNYDKLSRSIRQYYKKGIIRKPDISQRLVYQFVHPI

SEQ ID NO: 42580 - protein, 911 aa, Homo sapiens
MPPRRSIVEVKVLDVQKRRVPNKHYVYIIRVTWSSGSTEAIYRRYSKFFDLQMQMLDKFPMEGGQKDPKQRIIPFLPGKILFRRSHIRDVAVKRLIPIDEYCKALIQLPPYISQCDEVLQFFETRPEDLNPPKEEHIGKKKSGGDQTSVDPMVLEQYVVVANYQKQESSEISLSVGQVVDIIEKNESGWWFVSTAEEQGWVPATCLEGQDGVQDEFSLQPEEEEKYTVIYPYTARDQDEMNLERGAVVEVIQKNLEGWWKIRYQGKEGWAPASYLKKNSGEPLPPKPGPGSPSHPGALDLDGVSRQQNAVGREKELLSSQRDGRFEGRPVPDGDAKQRSPKMRQRPPPRRDMTIPRGLNLPKPPIPPQVEEEYYTIAEFQTTIPDGISFQAGLKVEVIEKNLSGWWYIQIEDKEGWAPATFIDKYKKTSNASRPNFLAPLPHEVTQLRLGEAAALENNTGSEATGPSRPLPDAPHGVMDSGLPWSKDWKGSKDVLRKASSDMSASAGYEEISDPDMEEKPSLPPRKESIIKSEGELLERERERQRTEQLRGPTPKPPGVILPMMPAKHIPPARDSRRPEPKPDKSRLFQLKNDMGLECGHKVLAKEVKKPNLRPISKSKTDLPEEKPDATPQNPFLKSRPQVRPKPAPSPKTEPPQGEDQVDICNLRSKLRPAKSQDKSLLDGEGPQAVGGQDVAFSRSFLPGEGPGRAQDRTGKQDGLSPKEISCRAPPRPAKTTDPVSKSVPVPLQEAPQQRPVVPPRRPPPPKKTSSSSRPLPEVRGPQCEGHESRAAPTPGRALLVPPKAKPFLSNSLGGQDDTRGKGSLGPWGTGKIGENREKAAAASVPNADGLKDSLYVAVADFEGDKDTSSFQEGTVFEVREKNSSGWWFCQVLSGAPSWEGWIPSNYLRKKP

SEQ ID NO: 42581 - protein, 276 aa, Homo sapiens
MSYGPLDMYRNPGPSGPQLRDFSSIIQTCSGNIQRISQATAQIKNLMSQLGTKQDSSKLQENLQQLQHSTNQLAKETNELLKELGSLPLPLSTSEQRQQRLQKERLMNDFSAALNNFQAVQRRVSEKEKESIARARAGSRLSAEERQREEQLVSFDSHEEWNQMQSQEDEVAITEQDLELIKERETAIRQLEADILDVNQIFKDLAMMIHDQGDLIDSIEANVESSEVHVERATEQLQRAAYYQKKSRKKMCILVLVLSVIILILGLIIWLVYKTK

SEQ ID NO: 42582 - protein, 1772 aa, Homo sapiens
MALSLWPLLLLLLLLLLLSFAVTLAPTGPHSLDPGLSFLKSLLSTLDQAPQGSLSRSRFFTFLANISSSFEPGRMGEGPVGEPPPLQPPALRLHDFLVTLRGSPDWEPMLGLLGDMLALLGQEQTPRDFLVHQAGVLGGLVEVLLGALVPGGPPTPTQPPCTRDGPSDCVLAADWLPSLLLLLEGTRWQALVQVQPSVDPTNATGLDGREAAPHFLQGLLGLLTPTGELGSKEALWGGLLRTVGAPLYAAFQEGLLRVTHSLQDEVFSILGQPEPDTNGQCQGGNLQQLLLWGVRHNLSWDVQALGFLSGSPPPPPALLHCLSTGVPLPRASQPSAHISPRQRRAITVEALCENHLGPAPPYSISNFSIHLLCQHTKPATPQPHPSTTAICQTAVWYAVSWAPGAQGWLQACHDQFPDEFLDAICSNLSFSALSGSNRRLVKRLCAGLLPPPTSCPEGLPPVPLTPDIFWGCFLENETLWAERLCGEASLQAVPPSNQAWVQHVCQGPTPDVTASPPCHIGPCGERCPDGGSFLVMVCANDTMYEVLVPFWPWLAGQCRISRGGNDTCFLEGLLGPLLPSLPPLGPSPLCLTPGPFLLGMLSQLPRCQSSVPALAHPTRLHYLLRLLTFLLGPGAGGAEAQGMLGRALLLSSLPDNCSFWDAFRPEGRRSVLRTIGEYLEQDEEQPTPSGFEPTVNPSSGISKMELLACFSPVLWDLLQREKSVWALQILVQAYLHMPPENLQQLVLSAEREAAQGFLTLMLQGKLQGKLQVPPSEEQALGRLTALLLQRYPRLTSQLFIDLSPLIPFLAVSDLMRFPPSLLANDSVLAAIRDYSPGMRPEQKEALAKRLLAPELFGEVPAWPQELLWAVLPLLPHLPLENFLQLSPHQIQALEDSWPAAGLGPGHARHVLRSLVNQSVQDGEEQVRRLGPLACFLSPEELQSLVPLSDPTGPVERGLLECAANGTLSPEGRVAYELLGVLRSSGGAVLSPRELRVWAPLFSQLGLRFLQELSEPQLRAMLPVLQGTSVTPAQAVLLLGRLLPRHDLSLEELCSLHLLLPGLSPQTLQAIPRRVLVGACSCLAPELSRLSACQTAALLQTFRVKDGVKNMGTTGAGPAVCIPGQQPIPTTWPDCLLPLLPLKLLQLDSLALLANRRRYWELPWSEQQAQFLWKKMQVPTNLTLRNLQALGTLAGGMSCEFLQQINSMVDFLEVVHMIYQLPTRVRGSLRACIWAELQRRMAMPEPEWTTVGPELNGLDSKLLLDLPIQLMDRLSNESIMLVVELVQRAPEQLLALTPLHQAALAERALQNLAPKETPVSGEVLETLGPLVGFLGTESTRQIPLQILLSHLSFCLGETFATELGWLLLQESVLGKPELWSQDEVEQAGRLVFTLSTEAISLIPREALGPETLERLLEKQQSWEQSRVGQLCRGPQLAAKKAALVAGVVRPAAEDLPEPVPNCADVRGTFPAACSATQIAEMELSDFKDCLTLFAGDPGLGPEEPRAAMGKAKWLWGPPRGFGPEQILQLGRLLIGLGDQELQELILVDWGVLSTLGQIDGWSSTQLRIVVSSFLRQSGRHVSHLDFVHLTALGYTLCGLRPEELQHISSWEFSQAALFLGTLHLQCSEEQLEFLAHLFVLPGGFGPISNWGPEIFTEIGTIAAGIPDLALSALLRGQIQGVTPLAISVIPPPKFAVVFSPIQLSSLASAQAVAVTPEQMAFLSPEQRRAVAWAQHEGKESPEQQGRSTAWGLQDWSRPSWSLVLTISFLGHLL

SEQ ID NO: 42583 - protein, 285 aa, Homo sapiens
MSDDFLWFEGIAFPTMGFRSETLRKVRDEFVIRDEDVIILTYPKSGTNWLAEILCLMHSKGDAKWIQSVPIWERSPWVESEIGYTALSETESPRLFSSHLPIQLFPKSFFSSKAKVIYLMRNPRDVLVSGYFFWKNMKFIKKPKSWEEYFEWFCQGTVLYGSWFDHIHGWMPMREEKNFLLLSYEELKQDTGRTIEKICQFLGKTLEPEELNLILKNSSFQSMKENKMSNYSLLSVDYVVDKAQLLRKGVSGDWKNHFTVAQAEDFDKLFQEKMADLPRELFPWE

SEQ ID NO: 42584 - protein, 295 aa, Homo sapiens; identical to SEQ ID NO: 8778

SEQ ID NO: 42585 - protein, 282 aa, Homo sapiens
MSCGRPPPDVDGMITLKVDNLTYRTSPDSLRRVFEKYGRVGDVYIPREPHTKAPRGFAFVRFHDRRDAQDAEAAMDGAELDGRELRVQVARYGRRDLPRSRQGEPRGRSRGGGYGRRSRSYGRRSRSPRRRHRSRSRGPSCSRSRSRSRYRGSRYSRSPYSRSPYSRSRYSRSPYSRSRYRESRYGGSHYSSSGYSNSRYSRYHSSRSHSKSGSSTSSRSASTSKSSSARRSKSSSVSRSRSRSRSSSMTRSPPRVSKRKSKSRSRSKRPPKSPEEEGQMSS

SEQ ID NO: 42586 - protein, 275 aa, Homo sapiens
MSCGRPPPDVDGMITLKVDNLTYRTSPDSLRRVFEKYGRVGDVYIPREPHTKAPRGFAFVRFHDRRDAQDAEAAMDGAELDGRELRVQVARYGRRDLPRSRQGEPRGRSRGGGYGRRSRSPRRRHRSRSRGPSCSRSRSRSRYRGSRYSRSPYSRSPYSRSRYSRSPYSRSRYRESRYGGSHYSSSGYSNSRYSRYHSSRSHSKSGSSTSSRSASTSKSSSARRSKSSSVSRSRSRSRSSSMTRSPPRVSKRKSKSRSRSKRPPKSPEEEGQMSS

SEQ ID NO: 42587 - protein, 236 aa, Homo sapiens [sequence omitted]

SEQ ID NO: 42588 - protein, 196 aa, Homo sapiens
MVGGLKRKHSDLEEEEERWEWSPAGLQSYQQALLRISLDKVQRSLGPRAPSLRRHVLIHNTLQQLQAALRLAPAPALPPEPLFLGEEDFSLSATIGSILRELDTSMDGTEPPQNPVTPLGLQNEVPPQPDPVFLEALSSRYLGDSGLDDFFLDIDTSAVEKEPARAPPEPPHNLFCAPGSWEWNELDHIMEIILGS

SEQ ID NO: 42589 - protein, 288 aa, Homo sapiens [sequence omitted]

SEQ ID NO: 42590 - protein, 123 aa, Homo sapiens
MAEKRHTRDSEAQRLPDSFKDSPSKGLGPCGWILVAFSFLFTVITFPISIWMCIKVIAAEGEMNASRALKEASMVITESPAALQLRYLQTLTTIAAEKNSTIVFPLPIDMLQGIIGAKHSHLG

SEQ ID NO: 42591 - protein, 291 aa, Homo sapiens
MEKLAASTEPQGPRPVLGRESVQVPDDQDFRSFRSECEAEVGWNLTYSRAGVSVWVQAVEMDRTLHKIKCRMECCDVPAETLYDVLHDIEYRKKWDSNVIETFDIARLTVNADVGYYSWRCPKPLKNRDVITLRSWLPMGADYIIMNYSVKHPKYPPRKDLVRAVSIQTGYLIQSTGPKSCVITYLAQVDPKGSLPKWVVNKSSQFLAPKAMKKMYKACLKYPEWKQKHLPHFKPWLHPEQSPLPSLALSELSVQHADSLENIDESAVAESREERMGGAGGEGSDDDTSLT

SEQ ID NO: 42592 - protein, 364 aa, Homo sapiens
MTEKEVLESPKPSFPAETRQSGLQRLKQLLRKGSTGTKEMELPPEPQANGEAVGAGGGPIYYIYEEEEEEEEEEEEPPPEPPKLVNDKPHKFKDHFFKKPKFCDVCARMIVLNNKFGLRCKNCKTNIHEHCQSYVEMQRCFGKIPPGFHRAYSSPLYSNQQYACVKDLSAANRNDPVFETLRTGVIMANKERKKGQADKKNPVAAMMEEEPESARPEEGKPQDGNPEGDKKAEKKTPDDKHKQPGFQQSHYFVALYRFKALEKDDLDFPPGEKITVIDDSNEEWWRGKIGEKVGFFPPNFIIRVRAGERVHRVTRSFVGNREIGQITLKKDQIVVQKGDEAGGYVKVYTGRKVGLFPTDFLEEI

SEQ ID NO: 42593 - protein, 325 aa, Homo sapiens
MELPPEPQANGEAVGAGGGPIYYIYEEEEEEEEEEEEPPPEPPKLVNDKPHKFKDHFFKKPKFCDVCARMIVLNNKFGLRCKNCKTNIHEHCQSYVEMQRCFGKIPPGFHRAYSSPLYSNQQYACVKDLSAANRNDPVFETLRTGVIMANKERKKGQADKKNPVAAMMEEEPESARPEEGKPQDGNPEGDKKAEKKTPDDKHKQPGFQQSHYFVALYRFKALEKDDLDFPPGEKITVIDDSNEEWWRGKIGEKVGFFPPNFIIRVRAGERVHRVTRSFVGNREIGQITLKKDQIVVQKGDEAGGYVKVYTGRKVGLFPTDFLEEI

SEQ ID NO: 42594 - protein, 178 aa, Homo sapiens
MANKERKKGQADKKNPVAAMMEEEPESARPEEGKPQDGNPEGDKKAEKKTPDDKHKQPGFQQSHYFVALYRFKALEKDDLDFPPGEKITVIDDSNEEWWRGKIGEKVGFFPPNFIIRVRAGERVHRVTRSFVGNREIGQITLKKDQIVVQKGDEAGGYVKVYTGRKVGLFPTDFLEEI

SEQ ID NO: 42595 - protein, 386 aa, Homo sapiens
MMNSDQKAVKFLANFYINGGKHWTHGHLRQTQPEPTQPKASVLLLGPEPGMAWDETQPPKMKEIPVGLRLQTGTPQESLPTYTQTLRELLLEQRPLITADLEVPSPTRYQVPSPSVRESSPHPHYSIGCKHQGREGGGRRAWQTLWFQSESPFTQKADFDQEQKWPSPAHYQLLSRPAFPAFSFRGCHSASKTPEGHTHLGLPGARGLGLRVQPQSLLQASLQAPGKRCPGPNTYNILPGSRLQSPRSPAFSMSRSPAFTSWLSTSFSFGSPNPWPSRLPRGGLQLTLPFGAWRGHPGCTQTQAPRHRPLLHALEPAGHNLLGPATEWNHGLPRGFPRPPLGLGAPAWPSDPLGTPMHPSGWPTLLWAVDKAGPAWIPHLPISPLH

SEQ ID NO: 42596 - protein, 389 aa, Homo sapiens
MMNSDQKAVKFLANFYINGGKHWTHGHLRQTQPEPTQPKASVLLLGPEPGMAWDETQPPKMKEIPVGLRLQTGTPQESLPTYTQTLRELLLEQRPLITADLEVPSPTRYQVPSPSVRESSPHPHYSIGCKHQGREGGGRRAWQTLWFQSESPFTQKADFDQEQKWPSPAHYQLLSRPAFPAFSFRGCHSASKTPEGHTHLGLPGARGLGLRVQPQSLLQASLQAPGKRCPGPNTYNILPGSRLQSPRSPAFSMSRSPAFTSWLSTWLPAFSFGSPNPWPSRLPRGGLQLTLPFGAWRGHPGCTQTQAPRHRPLLHALEPAGHNLLGPATEWNHGLPRGFPRPPLGLGAPAWPSDPLGTPMHPSGWPTLLWAVDKAGPAWIPHLPISPLH

SEQ ID NO: 42597 - protein, 331 aa, Homo sapiens
MMNSDQKAVKFLANFYINGGKHWTHGHLRQTQPEPTQPKASVLLLGPEPGMAWDETQPPKMKEIPVGLRLQTGTPQESLPTYTQTLRELLLEQRPLITADLEVPSPTRYQVPSPSVRESSPHPHYSIGCKHQGREGGGRRAWQTLWFQSESPFTQKADFDQEQKASLQAPGKRCPGPNTYNILPGSRLQSPRSPAFSMSRSPAFTSWLSTSFSFGSPNPWPSRLPRGGLQLTLPFGAWRGHPGCTQTQAPRHRPLLHALEPAGHNLLGPATEWNHGLPRGFPRPPLGLGAPAWPSDPLGTPMHPSGWPTLLWAVDKAGPAWIPHLPISPLH

SEQ ID NO: 42598 - protein, 308 aa, Homo sapiens
MMNSDQKAVKFLANFYINGGKHWTHGHLRQTQPEPTQPKASVLLLGPEPGMAWDETQPPKMKEIPVGLRLQTGTPQESLPTYTQTLRELLLEQRPLITADLEVPSPTRYQVPSPSVRESSPHPHYSIGCKHQGREGGGRRAWQTLWFQSESPFTQKADFDQEQKWPSPAHYQLLSRPAFPAFSFRGCHSASKTPEGHTHLGLPGARGLGLRVQPQSLLQASLQAPGKRCPGPNTYNILPGSRLQSPRSPAFSMSRSPAFTSWLSTSRTPGPAAYHVEDCNSRFPSAPGVVIQGVRRPKRHDTGPFCTL

SEQ ID NO: 42599 - protein, 874 aa, Homo sapiens
MAAVDSDVESLPRGGFRCCLCHVTTANRPSLDAHLGGRKHRHLVELRAARKAQGLRSVFVSGFPRDVDSAQLSEYFLAFGPVASVVMDKDKGVFAIVEMGDVGAREAVLSQSQHSLGGHRLRVRPREQKEFQSPASKSPKGAAPDSHQLAKALAEAADVGAQMIKLVGLRELSEAERQLRSLVVALMQEVFTEFFPGCVVHPFGSSINSFDVHGCDLDLFLDLGDLEEPQPVPKAPESPSLDSALASPLDPQALACTPASPPDSQPPASPQDSEALDFETPSSSLAPQTPDSALASETLASPQSLPPASPLLEDREEGDLGKASELAETPKEEKAEGAAMLELVGSILRGCVPGVYRVQTVPSARRPVVKFCHRPSGLHGDVSLSNRLALHNSRFLSLCSELDGRVRPLVYTLRCWAQGRGLSGSGPLLSNYALTLLVIYFLQTRDPPVLPTVSQLTQKAGEGEQVEVDGWDCSFPRDASRLEPSINVEPLSSLLAQFFSCVSCWDLRGSLLSLREGQALPVAGGLPSNLWEGLRLGPLNLQDPFDLSHNVAANVTSRVAGRLQNCCRAAANYCRSLQYQRRSSRGRDWGLLPLLQPSSPSSLLSATPIPLPLAPFTQLTAALVQVFREALGCHIEQATKRTRSEGGGTGESSQGGTSKRLKVDGQKNCCEEGKEEQQGCAGDGGEDRVEEMVIEVGEMVQDWAMQSPGQPGDLPLTTGKHGAPGEEGQPSHAALAERGPKGHEAAQEWSQGEAGKGASLPSSASWRCALWHRVWQGRRRARRRLQQQTKEGAGGGAGTRAGWLATEAQVTQELKGLSGGEERPETEPLLSFVASVSPADRMLTVTPLQDPQGLFPDLHHFLQVFLPQAIRHLK

SEQ ID NO: 42600 - protein, 355 aa, Homo sapiens
MARRPRNSRAWHFVLSAARRDADARAVALAGSTNWGYDSDGQHSDSDSDPEYSTLPPSIPSAVPVTGESFCDCAGQSEASFCSSLHSAHRGRDCRCGEEDEYFDWVWDDLNKSSATLLSCDNRKVSFHMEYSCGTAAIRGTKELGEGQHFWEIKMTSPVYGTDMMVGIGTSDVDLDKYRHTFCSLLGRDEDSWGLSYTGLLHHKGDKTSFSSRFGQGSIIGVHLDTWHGTLTFFKNRKCIGVAATKLQNKRFYPMVCSTAARSSMKVTRSCASATSLQYLCCHRLRQLRPDSGDTLEGLPLPPGLKQVLHNKLGWVLSMSCSRRKAPVSDPQAATSAHPSSREPRPCQRKRCRRT

SEQ ID NO: 42601 - protein, 350 aa, Homo sapiens
MAMRQTPLTCSGHTRPVVDLAFSGITPYGYFLISACKDGKPMLRQGDTGDWIGTFLGHKGAVWGATLNKDATKAATAAADFTAKVWDAVSGDELMTLAHKHIVKTVDFTQDSNYLLTGGQDKLLRIYDLNKPEAEPKEISGHTSGIKKALWCSEDKQILSADDKTVRLWDHATMTEVKSLNFNMSVSSMEYIPEGEILVITYGRSIAFHSAVSLDPIKSFEAPATINSASLHPEKEFLVAGGEDFKLYKYDYNSGEELESYKGHFGPIHCVRFSPDGELYASGSEDGTLRLWQTVVGKTYGLWKCVLPEEDSGELAKPKIGFPETTEEELEEIASENSDCIFPSAPDVKA

SEQ ID NO: 42602 - protein, 363 aa, Homo sapiens
MAMRQTPLTCSGHTRPVVDLAFSGITPYGYFLISACKGAGQHLPRLSGQHDGKPMLRQGDTGDWIGTFLGHKGAVWGATLNKDATKAATAAADFTAKVWDAVSGDELMTLAHKHIVKTVDFTQDSNYLLTGGQDKLLRIYDLNKPEAEPKEISGHTSGIKKALWCSEDKQILSADDKTVRLWDHATMTEVKSLNFNMSVSSMEYIPEGEILVITYGRSIAFHSAVSLDPIKSFEAPATINSASLHPEKEFLVAGGEDFKLYKYDYNSGEELESYKGHFGPIHCVRFSPDGELYASGSEDGTLRLWQTVVGKTYGLWKCVLPEEDSGELAKPKIGFPETTEEELEEIASENSDCIFPSAPDVKA

SEQ ID NO: 42603 - protein, 780 aa, Homo sapiens
MDEQAGPGVFFSNNHPGAGGAKGLGPLAEAAAAGDGAAAAGAARAQYSLPGILHFLQHEWARFEVERAQWEVERAELQAQIAFLQGERKGQENLKKDLVRRIKMLEYALKQERAKYHKLKYGTELNQGDMKPPSYDSDEGNETEVQPQQNSQLMWKQGRQLLRQYLQEVGYTDTILDVKSKRVRALLGFSSDVTDREDDKNQDSVVNGTEAEVKETAMIAKSELTDSASVLDNFKFLESAAADFSDEDEDDDVDGREKSVIDTSTIVRKKALPDSGEDRDTKEALKEFDFLVTSEEGDNESRSAGDGTDWEKEDQCLMPEAWNVDQGVITKLKEQYKKERKGKKGVKRPNRSKLQDMLANLRDVDELPSLQPSVGSPSRPSSSRLPEHEINRADEVEALTFPPSSGKSFIMGADEALESELGLGELAGLTVANEADSLTYDIANNKDALRKTWNPKFTLRSHFDGIRALAFHPIEPVLITASEDHTLKMWNLQKTAPAKKSTSLDVEPIYTFRAHKGPVLCVVMSSNGEQCYSGGTDGLIQGWNTTNPNIDPYDSYDPSVLRGPLLGHTDAVWGLAYSAAHQRLLSCSADGTLRLWNTTEVAPALSVFNDTKELGIPASVDLVSSDPSHMVASFSKGYTSIFNMETQQRILTLESNVDTTANSSCQINRVISHPTLPISITAHEDRHIKFYDNNTGKLIHSMVAHLEAVTSLAVDPNGLYLMSGSHDCSIRLWNLESKTCIQEFTAHRKKFEESIHDVAFHPSKCYIASAGADALAKVFV

SEQ ID NO: 42604 - protein, 731 aa, Homo sapiens
MDEQAGPGVFFSNNHPGAGGAKGLGPLAGAARAQYSLPGILHFLQHEWARFEVERAQWEVERAELQAQIAFLQGERKGQENLKKDLVRRIKMLEYALKQERAKYHKLKYGTELNQGDMKPPSYDSDEGNETEVQPQQNSQLMWKQGRQLLRQYLQEVGYTDTILDVKSKRVRALLGFSSDVTDREDDKNQDSVVNGTEAEVKETAMIAKSELTDSASVLDNFKFLESAAADFSDEDEDDDVDGREKSVIDTSTIVRKKALPDSGEDRDTKEALKEFDFLVTSEEGDNESRSAGDGTDWGPNRSKLQDMLANLRDVDELPSLQPSVGSPSRPSSSRLPEHEINRADEVEALTFPPSSGKSFIMGADEALESELGLGELAGLTVANEADSLTYDIANNKDALRKTWNPKFTLRSHFDGIRALAFHPIEPVLITASEDHTLKMWNLQKTAPAKKSTSLDVEPIYTFRAHKGPVLCVVMSSNGEQCYSGGTDGLIQGWNTTNPNIDPYDSYDPSVLRGPLLGHTDAVWGLAYSAAHQRLLSCSADGTLRLWNTTEVAPALSVFNDTKELGIPASVDLVSSDPSHMVASFSKGYTSIFNMETQQRILTLESNVDTTANSSCQINRVISHPTLPISITAHEDRHIKFYDNNTGKLIHSMVAHLEAVTSLAVDPNGLYLMSGSHDCSIRLWNLESKTCIQEFTAHRKKFEESIHDVAFHPSKCYIASAGADALAKVFV

SEQ ID NO: 42605 - protein, 256 aa, Homo sapiens
MSELPGDVRAFLREHPSLRLQTDARKVRCILTGHELPCRLPELQVYTRGKKYQRLVRASPAFDYAEFEPHIVPSTKNPHQLFCKLTLRHINKCPEHVLRHTQGRRYQRALCKYEECQKQGVEYVPACLVHRRRRREDQMDGDGPRPREAFWEPTSSDEGGAASDDSMTDLYPPELFTRKDLGSTEDGDGTDDFLTDKEDEKAKPPREKATDESRRETTVYRGLVQKRGKKQLGSLKKKFKSHHRKPKSFSSCKQPG

SEQ ID NO: 42606 - protein, 1258 aa, Homo sapiens
MITSELPVLQDSTNETTAHSDAGSELEETEVKGKRKRGRPGRPPSTNKKPRKSPGEKSRIEAGIRGAGRGRANGHPQQNGEGEPVTLFEVVKLGKSAMQSVVDDWIESYKQDRDIALLDLINFFIQCSGCRGTVRIEMFRNMQNAEIIRKMTEEFDEDSGDYPLTMPGPQWKKFRSNFCEFIGVLIRQCQYSIIYDEYMMDTVISLLTGLSDSQVRAFRHTSTLAAMKLMTALVNVALNLSIHQDNTQRQYEAERNKMIGKRANERLELLLQKRKELQENQDEIENMMNSIFKGIFVHRYRDAIAEIRAICIEEIGVWMKMYSDAFLNDSYLKYVGWTLHDRQGEVRLKCLKALQSLYTNRELFPKLELFTNRFKDRIVSMTLDKEYDVAVEAIRLVTLILHGSEEALSNEDCENVYHLVYSAHRPVAVAAGEFLHKKLFSRHDPQAEEALAKRRGRNSPNGNLIRMLVLFFLESELHEHAAYLVDSLWESSQELLKDWECMTELLLEEPVQGEEAMSDRQESALIELMVCTIRQAAEAHPPVGRGTGKRVLTAKERKTQIDDRNKLTEHFIITLPMLLSKYSADAEKVANLLQIPQYFDLEIYSTGRMEKHLDALLKQIKFVVEKHVESDVLEACSKTYSILCSEEYTIQNRVDIARSQLIDEFVDRFNHSVEDLLQEGEEADDDDIYNVLSTLKRLTSFHNAHDLTKWDLFGNCYRLLKTGIEHGAMPEQIVVQALQCSHYSILWQLVKITDGSPSKEDLLVLRKTVKSFLAVCQQCLSNVNTPVKEQAFMLLCDLLMIFSHQLMTGGREGLQPLVFNPDTGLQSELLSFVMDHVFIDQDEENQSMEGDEEDEANKIEALHKRRNLLAAFSKLIIYDIVDMHAAADIFKHYMKYYNDYGDIIKETLSKTRQIDKIQCAKTLILSLQQLFNELVQEQGPNLDRTSAHVSGIKELARRFALTFGLDQIKTREAVATLHKDGIEFAFKYQNQKGQEYPPPNLAFLEVLSEFSSKLLRQDKKTVHSYLEKFLTEQMMERREDVWLPLISYRNSLVTGGEDDRMSVNSGSSSSKTSSVRNKKGRPPLHKKRVEDESLDNTWLNRTDTMIQTPGPLPAPQLTSTVLRENSRPMGDQIQEPESEHGSEPDFLHNPQMQISWLGQPKLEDLNRKDRTGMNYMKVRTGVRHAVRGLMEEDAEPIFEDVMMSSRSQLEDMNEEFEDTMVIDLPPSRNRRERAELRPDFFDSAAIIEDDSGFGMPMF

SEQ ID NO: 42607 - protein, 1221 aa, Homo sapiens
MITSELPVLQDSTNETTAHSDAGSELEETEVKGKRKRGRPGRPPSTNKKPRKSPGEKSRIEAGIRGAGRGRANGHPQQNGEGEPVTLFEVVKLGKSAMQSVVDDWIESYKQDRDIALLDLINFFIQCSGCRGTVRIEMFRNMQNAEIIRKMTEEFDEDSGDYPLTMPGPQWKKFRSNFCEFIGVLIRQCQYSIIYDEYMMDTVISLLTGLSDSQVRAFRHTSTLAAMKLMTALVNVALNLSIHQDNTQRQYEAERNKMIGKRANERLELLLQKRKELQENQDEIENMMNSIFKGIFVHRYRDAIAEIRAICIEEIGVWMKMYSDAFLNDSYLKYVGWTLHDRQGEVRLKCLKALQSLYTNRELFPKLELFTNRFKDRIVSMTLDKEYDVAVEAIRLVTLILHGSEEALSNEDCENVYHLVYSAHRPVAVAAGEFLHKKLFSRHDPQAEEALAKRRGRNSPNGNLIRMLVLFFLESELHEHAAYLVDSLWESSQELLKDWECMTELLLEEPVQGEEAMSDRQESALIELMVCTIRQAAEAHPPVGRGTGKRVLTAKERKTQIDDRNKLTEHFIITLPMLLSKYSADAEKVANLLQIPQYFDLEIYSTGRMEKHLDALLKQIKFVVEKHVESDVLEACSKTYSILCSEEYTIQNRVDIARSQLIDEFVDRFNHSVEDLLQEGEEADDDDIYNVLSTLKRLTSFHNAHDLTKWDLFGNCYRLLKTGIEHGAMPEQIVVQALQCSHYSILWQLVKITDGSPSKEDLLVLRKTVKSFLAVCQQCLSNVNTPVKEQAFMLLCDLLMIFSHQLMTGGREGLQPLVFNPDTGLQSELLSFVMDHVFIDQDEENQSMEGDEEDEANKIEALHKRRNLLAAFSKLIIYDIVDMHAAADIFKHYMKYYNDYGDIIKETLSKTRQIDKIQCAKTLILSLQQLFNELVQEQGPNLDRTSAHVSGIKELARRFALTFGLDQIKTREAVATLHKDGIEFAFKYQNQKGQEYPPPNLAFLEVLSEFSSKLLRQDKKTVHSYLEKFLTEQMMERREDVWLPLISYRNSLVTGGEDDRMSVNSGSSSSKTSSVRNKKGRPPLHKKRVEDESLDNTWLNRTDTMIQTPGPLPAPQLTSTVLRENSRPMGDQIQEPESEHGSEPDFLHNRGLMEEDAEPIFEDVMMSSRSQLEDMNEEFEDTMVIDLPPSRNRRERAELRPDFFDSAAIIEDDSGFGMPMF

SEQ ID NO: 42608 - protein, 303 aa, Homo sapiens
MCHGRIAPKSTSVFAVASVGHGVFLPLVILCTLLGDGLASVCPLPPEPENGGYICHPRPCRDPLTAGSVIEYLCAEGYMLKGDYKYLTCKNGEWKPAMEISCRLNEDKDTHTSLGVPTLSIVASTASSVALILLLVVLFVLLQPKLKSFHHSRRDQGVSGDQVSIMVDGVQVALPSYEEAVYGSSGHCVPPADPRVQIVLSEGSGPSGRSVPREQQLPDQGACSSAGGEDEAPGQSGLCEAWGSRASETVMVHQATTSSWVAGSGNRQLAHKETADSENSDIQSLLSLTSEEYTDDIPLLKEA

SEQ ID NO: 42609 - protein, 738 aa, Homo sapiens
MRGPSGALWLLLALRTVLGGMEVRWCATSDPEQHKCGNMSEAFREAGIQPSLLCVRGTSADHCVQLIAAQEADAITLDGGAIYEAGKEHGLKPVVGEVYDQEVGTSYYAVAVVRRSSHVTIDTLKGVKSCHTGINRTVGWNVPVGYLVESGRLSVMGCDVLKAVSDYFGGSCVPGAGETSYSESLCRLCRGDSSGEGVCDKSPLERYYDYSGAFRCLAEGAGDVAFVKHSTVLENTDGKTLPSWGQALLSQDFELLCRDGSRADVTEWRQCHLARVPAHAVVVRADTDGGLIFRLLNEGQRLFSHEGSSFQMFSSEAYGQKDLLFKDSTSELVPIATQTYEAWLGHEYLHAMKGLLCDPNRLPPYLRWCVLSTPEIQKCGDMAVAFRRQRLKPEIQCVSAKSPQHCMERIQAEQVDAVTLSGEDIYTAGKTYGLVPAAGEHYAPEDSSNSYYVVAVVRRDSSHAFTLDELRGKRSCHAGFGSPAGWDVPVGALIQRGFIRPKDCDVLTAVSEFFNASCVPVNNPKNYPSSLCALCVGDEQGRNKCVGNSQERYYGYRGAFRCLVENAGDVAFVRHTTVFDNTNGHNSEPWAAELRSEDYELLCPNGARAEVSQFAACNLAQIPPHAVMVRPDTNIFTVYGLLDKAQDLFGDDHNKNGFKMFDSSNYHGQDLLFKDATVRAVPVGEKTTYRGWLGLDYVAALEGMSSQQCSGAAAPAPGAPLLPLLLPALAARLLPPAL

SEQ ID NO: 42610 - protein, 302 aa, Homo sapiens
MRGPSGALWLLLALRTVLGGMEVRWCATSDPEQHKCGNMSEAFREAGIQPSLLCVRGTSADHCVQLIAAQEADAITLDGGAIYEAGKEHGLKPVVGEVYDQEVGTSYYAVAVVRRSSHVTIDTLKGVKSCHTGINRTVGWNVPVGYLVESGRLSVMGCDVLKAVSDYFGGSCVPGAGETSYSESLCRLCRGDSSGEGVCDKSPLERYYDYSGAFRCLAEGAGDVAFVKHSTVLENTDESPSRRQTWTRSEEEEGECPAHEEARRTMRSSAGQAWKWAPVHRPQDESDKGEFGKRAKSRDMLG

SEQ ID NO: 42611 - protein, 847 aa, Homo sapiens
MSLWGLVSKMPPEKVQRLYVDFPQHLRHLLGDWLESQPWEFLVGSDAFCCNLASALLSDTVQHLQASVGEQGEGSTILQHISTLESIYQRDPLKLVATFRQILQGEKKAVMEQFRHLPMPFHWKQEELKFKTGLRRLQHRVGEIHLLREALQKGAEAGQVSLHSLIETPANGTGPSEALAMLLQETTGELEAAKALVLKRIQIWKRQQQLAGNGAPFEESLAPLQERCESLVDIYSQLQQEVGAAGGELEPKTRASLTGRLDEVLRTLVTSCFLVEKQPPQVLKTQTKFQAGVRFLLGLRFLGAPAKPPLVRADMVTEKQARELSVPQGPGAGAESTGEIINNTVPLENSIPGNCCSALFKNLLLKKIKRCERKGTESVTEEKCAVLFSASFTLGPGKLPIQLQALSLPLVVIVHGNQDNNAKATILWDNAFSEMDRVPFVVAERVPWEKMCETLNLKFMAEVGTNRGLLPEHFLFLAQKIFNDNSLSMEAFQHRSVSWSQFNKEILLGRGFTFWQWFDGVLDLTKRCLRSYWSDRLIIGFISKQYVTSLLLNEPDGTFLLRFSDSEIGGITIAHVIRGQDGSPQIENIQPFSAKDLSIRSLGDRIRDLAQLKNLYPKKPKDEAFRSHYKPEQMGKDGRGYVPATIKMTVERDQPLPTPELQMPTMVPSYDLGMAPDSSMSMQLGPDMVPQVYPPHSHSIPPYQGLSPEESVNVLSAFQEPHLQMPPSLGQMSLPFDQPHPQGLLPCQPQEHAVSSPDPLLCSDVTMVEDSCLSQPVTAFPQGTWIGEDIFPPLLPPTEQDLTKLLLEGQGESGGGSLGAQPLLQPSHYGQSGISMSHMDLRANPSW

SEQ ID NO: 42612 - protein, 673 aa, Homo sapiens
MEQALAMLLQETTGELEAAKALVLKRIQIWKRQQQLAGNGAPFEESLAPLQERCESLVDIYSQLQQEVGAAGGELEPKTRASLTGRLDEVLRTLVTSCFLVEKQPPQVLKTQTKFQAGVRFLLGLRFLGAPAKPPLVRADMVTEKQARELSVPQGPGAGAESTGEIINNTVPLENSIPGNCCSALFKNLLLKKIKRCERKGTESVTEEKCAVLFSASFTLGPGKLPIQLQALSLPLVVIVHGNQDNNAKATILWDNAFSEMDRVPFVVAERVPWEKMCETLNLKFMAEVGTNRGLLPEHFLFLAQKIFNDNSLSMEAFQHRSVSWSQFNKEILLGRGFTFWQWFDGVLDLTKRCLRSYWSDRLIIGFISKQYVTSLLLNEPDGTFLLRFSDSEIGGITIAHVIRGQDGSPQIENIQPFSAKDLSIRSLGDRIRDLAQLKNLYPKKPKDEAFRSHYKPEQMGKDGRGYVPATIKMTVERDQPLPTPELQMPTMVPSYDLGMAPDSSMSMQLGPDMVPQVYPPHSHSIPPYQGLSPEESVNVLSAFQEPHLQMPPSLGQMSLPFDQPHPQGLLPCQPQEHAVSSPDPLLCSDVTMVEDSCLSQPVTAFPQGTWIGEDIFPPLLPPTEQDLTKLLLEGQGESGGGSLGAQPLLQPSHYGQSGISMSHMDLRANPSW

SEQ ID NO: 42613 - protein, 737 aa, Homo sapiens
MEQFRHLPMPFHWKQEELKFKTGLRRLQHRVGEIHLLREALQKGAEAGQVSLHSLIETPANGTGPSEALAMLLQETTGELEAAKALVLKRIQIWKRQQQLAGNGAPFEESLAPLQERCESLVDIYSQLQQEVGAAGGELEPKTRASLTGRLDEVLRTLVTSCFLVEKQPPQVLKTQTKFQAGVRFLLGLRFLGAPAKPPLVRADMVTEKQARELSVPQGPGAGAESTGEIINNTVPLENSIPGNCCSALFKNLLLKKIKRCERKGTESVTEEKCAVLFSASFTLGPGKLPIQLQALSLPLVVIVHGNQDNNAKATILWDNAFSEMDRVPFVVAERVPWEKMCETLNLKFMAEVGTNRGLLPEHFLFLAQKIFNDNSLSMEAFQHRSVSWSQFNKEILLGRGFTFWQWFDGVLDLTKRCLRSYWSDRLIIGFISKQYVTSLLLNEPDGTFLLRFSDSEIGGITIAHVIRGQDGSPQIENIQPFSAKDLSIRSLGDRIRDLAQLKNLYPKKPKDEAFRSHYKPEQMGKDGRGYVPATIKMTVERDQPLPTPELQMPTMVPSYDLGMAPDSSMSMQLGPDMVPQVYPPHSHSIPPYQGLSPEESVNVLSAFQEPHLQMPPSLGQMSLPFDQPHPQGLLPCQPQEHAVSSPDPLLCSDVTMVEDSCLSQPVTAFPQGTWIGEDIFPPLLPPTEQDLTKLLLEGQGESGGGSLGAQPLLQPSHYGQSGISMSHMDLRANPSW

SEQ ID NO: 42614 - protein, 504 aa, Homo sapiens
MVLADLGRKITSALRSLSNATIINEEVLNAMLKEVCTALLEADVNIKLVKQLRENVKSAIDLEEMASGLNKRKMIQHAVFKELVKLVDPGVKAWTPTKGKQNVIMFVGLQGSGKTTTCSKLAYYYQRKGWKTCLICADTFRAGAFDQLKQNATKARIPFYGSYTEMDPVIIASEGVEKFKNENFEIIIVDTSGRHKQEDSLFEEMLQVANAIQPDNIVYVMDASIGQACEAQAKAFKDKVDVASVIVTKLDGHAKGGGALSAVAATKSPIIFIGTGEHIDDFEPFKTQPFISKLLGMGDIEGLIDKVNELKLDDNEALIEKLKHGQFTLRDMYEQFQNIMKMGPFSQILGMIPGFGTDFMSKGNEQESMARLKKLMTIMDSMNDQELDSTDGAKVFSKQPGRIQRVARGSGVSTRDVQELLTQYTKFAQMVKKMGGIKGLFKGGDMSKNVSQSQMAKLNQQMAKMMDPRVLHHMGGMAGLQSMMRQFQQGAAGNMKGMMGFNNM

SEQ ID NO: 42615 - protein, 455 aa, Homo sapiens
MPPLSMKRSAIDLEEMASGLNKRKMIQHAVFKELVKLVDPGVKAWTPTKGKQNVIMFVGLQGSGKTTTCSKLAYYYQRKGWKTCLICADTFRAGAFDQLKQNATKARIPFYGSYTEMDPVIIASEGVEKFKNENFEIIIVDTSGRHKQEDSLFEEMLQVANAIQPDNIVYVMDASIGQACEAQAKAFKDKVDVASVIVTKLDGHAKGGGALSAVAATKSPIIFIGTGEHIDDFEPFKTQPFISKLLGMGDIEGLIDKVNELKLDDNEALIEKLKHGQFTLRDMYEQFQNIMKMGPFSQILGMIPGFGTDFMSKGNEQESMARLKKLMTIMDSMNDQELDSTDGAKVFSKQPGRIQRVARGSGVSTRDVQELLTQYTKFAQMVKKMGGIKGLFKGGDMSKNVSQSQMAKLNQQMAKMMDPRVLHHMGGMAGLQSMMRQFQQGAAGNMKGMMGFNNM

SEQ ID NO: 42616 - protein, 440 aa, Homo sapiens
MASLTVKAYLLGKEDAAREIRRFSFCCSPEPEAEAEAAAGPGPCERLLSRVAALFPALRPGGFQAHYRDEDGDLVAFSSDEELTMAMSYVKDDIFRIYIKEKKECRRDHRPPCAQEAPRNMVHPNVICDGCNGPVVGTRYKCSVCPDYDLCSVCEGKGLHRGHTKLAFPSPFGHLSEGFSHSRWLRKVKHGHFGWPGWEMGPPGNWSPRPPRAGEARPGPTAESASGPSEDPSVNFLKNVGESVAAALSPLGIEVDIDVEHGGKRSRLTPVSPESSSTEEKSSSQPSSCCSDPSKPGGNVEGATQSLAEQMRKIALESEGRPEEQMESDNCSGGDDDWTHLSSKEVDPSTGELQSLQMPESEGPSSLDPSQEGPTGLKEAALYPHLPPEADPRLIESLSQMLSMGFSDEGGWLTRLLQTKNYDIGAALDTIQYSKHPPPL

SEQ ID NO: 42617 - protein, 356 aa, Homo sapiens
MAMSYVKDDIFRIYIKEKKECRRDHRPPCAQEAPRNMVHPNVICDGCNGPVVGTRYKCSVCPDYDLCSVCEGKGLHRGHTKLAFPSPFGHLSEGFSHSRWLRKVKHGHFGWPGWEMGPPGNWSPRPPRAGEARPGPTAESASGPSEDPSVNFLKNVGESVAAALSPLGIEVDIDVEHGGKRSRLTPVSPESSSTEEKSSSQPSSCCSDPSKPGGNVEGATQSLAEQMRKIALESEGRPEEQMESDNCSGGDDDWTHLSSKEVDPSTGELQSLQMPESEGPSSLDPSQEGPTGLKEAALYPHLPPEADPRLIESLSQMLSMGFSDEGGWLTRLLQTKNYDIGAALDTIQYSKHPPPL

SEQ ID NO: 42618 - protein, 627 aa, Homo sapiens
MAAEKQVPGGGGGGGSGGGGGSGGGGSGGGRGAGGEENKENERPSAGSKANKEFGDSLSLEILQIIKESQQQHGLRHGDFQRYRGYCSRRQRRLRKTLNFKMGNRHKFTGKKVTEELLTDNRYLLLVLMDAERAWSYAMQLKQEANTEPRKRFHLLSRLRKAVKHAEELERLCESNRVDAKTKLEAQAYTAYLSGMLRFEHQEWKAAIEAFNKCKTIYEKLASAFTEEQAVLYNQRVEEISPNIRYCAYNIGDQSAINELMQMRLRSGGTEGLLAEKLEALITQTRAKQAATMSEVEWRGRTVPVKIDKVRIFLLGLADNEAAIVQAESEETKERLFESMLSECRDAIQVVREELKPDQKQRDYILEGEPGKVSNLQYLHSYLTYIKLSTAIKRNENMAKGLQRALLQQQPEDDSKRSPRPQDLIRLYDIILQNLVELLQLPGLEEDKAFQKEIGLKTLVFKAYRCFFIAQSYVLVKKWSEALVLYDRVLKYANEVNSDAGAFKNSLKDLPDVQELITQVRSEKCSLQAAAILDANDAHQTETSSSQVKDNKPLVERFETFCLDPSLVTKQANLVHFPPGFQPIPCKPLFFDLALNHVAFPPLEDKLEQKTKSGLTGYIKGIFGFRS

SEQ ID NO: 42619 - protein, 596 aa, Homo sapiens
MAAEKQVPGGGGGGGSGGGGGSGGGGSGGGRGAGGEENKENERPSAGSKANKEFGDSLSLEILQIIKESQQQHGLRHGDFQRYRGYCSRRQRRLRKTLNFKMGNRHKFTGKKVTEELLTDNRYLLLVLMDAERAWSYAMQLKQEANTEPRKRFHLLSRLRKAVKHAEELERLCESNRVDAKTKLEAQAYTAYLSGMLRFEHQEWKAAIEAFNKCKTIYEKLASAFTEEQAVLYNQRVEEISPNIRYCAYNIGDQSAKQAATMSEVEWRGRTVPVKIDKVRIFLLGLADNEAAIVQAESEETKERLFESMLSECRDAIQVVREELKPDQKQRDYILEGEPGKVSNLQYLHSYLTYIKLSTAIKRNENMAKGLQRALLQQQPEDDSKRSPRPQDLIRLYDIILQNLVELLQLPGLEEDKAFQKEIGLKTLVFKAYRCFFIAQSYVLVKKWSEALVLYDRVLKYANEVNSDAGAFKNSLKDLPDVQELITQVRSEKCSLQAAAILDANDAHQTETSSSQVKDNKPLVERFETFCLDPSLVTKQANLVHFPPGFQPIPCKPLFFDLALNHVAFPPLEDKLEQKTKSGLTGYIKGIFGFRS

SEQ ID NO: 42620 - protein, 288 aa, Homo sapiens
MLSECRDAIQVVREELKPDQKQRDYILEGEPGKVSNLQYLHSYLTYIKLSTAIKRNENMAKGLQRALLQQQPEDDSKRSPRPQDLIRLYDIILQNLVELLQLPGLEEDKAFQKEIGLKTLVFKAYRCFFIAQSYVLVKKWSEALVLYDRVLKYANEVNSDAGAFKNSLKDLPDVQELITQVRSEKCSLQAAAILDANDAHQTETSSSQVKDNKPLVERFETFCLDPSLVTKQANLVHFPPGFQPIPCKPLFFDLALNHVAFPPLEDKLEQKTKSGLTGYIKGIFGFRS

SEQ ID NO: 42621 - protein, 589 aa, Homo sapiens
MAAEKQVPGGGGGGGSGGGGGSGGGGSGGGRGAGGEENKENERPSAGSKANKEFGDSLSLEILQIIKESQQQHGLRHGDFQRYRYLLLVLMDAERAWSYAMQLKQEANTEPRKRFHLLSRLRKAVKHAEELERLCESNRVDAKTKLEAQAYTAYLSGMLRFEHQEWKAAIEAFNKCKTIYEKLASAFTEEQAVLYNQRVEEISPNIRYCAYNIGDQSAINELMQMRLRSGGTEGLLAEKLEALITQTRAKQAATMSEVEWRGRTVPVKIDKVRIFLLGLADNEAAIVQAESEETKERLFESMLSECRDAIQVVREELKPDQKQRDYILEGEPGKVSNLQYLHSYLTYIKLSTAIKRNENMAKGLQRALLQQQPEDDSKRSPRPQDLIRLYDIILQNLVELLQLPGLEEDKAFQKEIGLKTLVFKAYRCFFIAQSYVLVKKWSEALVLYDRVLKYANEVNSDAGAFKNSLKDLPDVQELITQVRSEKCSLQAAAILDANDAHQTETSSSQVKDNKPLVERFETFCLDPSLVTKQANLVHFPPGFQPIPCKPLFFDLALNHVAFPPLEDKLEQKTKSGLTGYIKGIFGFRS

SEQ ID NO: 42622 - protein, 401 aa, Homo sapiens
MSLYDDLGVETSDSKTEGWSKNFKLLQSQLQVKKAALTQAKSQRTKQSTVLAPVIDLKRGGSSDDRQIVDTPPHVAAGLKDPVPSGFSAGEVLIPLADEYDPMFPNDYEKVVKRQREERQRQRELERQKEIEEREKRRKDRHEASGFARRPDPDSDEDEDYERERRKRSMGGAAIAPPTSLVEKDKELPRDFPYEEDSRPRSQSSKAAIPPPVYEEQDRPRSPTGPSNSFLANMGGTVAHKIMQKYGFREGQGLGKHEQGLSTALSVEKTSKRGGKIIVGDATEKDASKKSDSNPLTEILKCPTKVVLLRNMVGAGEVDEDLEVETKEECEKYGKVGKCVIFEIPGAPDDEAVRIFLEFERVESAIKAVVDLNGRYFGGRVVKACFYNLDKFRVLDLAEQV

SEQ ID NO: 42623 - protein, 188 aa, Homo sapiens
  MOD_RES (1)..(1): Any amino acid
XRRPEVDGVRKALQDLGLRIVEIGDENATLDGTDVLFTGREFFVGLSKWTNHRGAEIVADTFRDFAVSTVPVSGPSHLRGLCGMGGPRTVVAGSSDAAQKAVRMTQLLTVSFFVLGCLVCPLSSCTVEVGICPTARRHCRSSLMSPWYLCPAQNWRRLAPGSAPSAWCSAHAPTAEGLALGYCWPGVG

SEQ ID NO: 42624 - protein, 117 aa, Homo sapiens
  MOD_RES (1)..(1): Any amino acid
XRDTAEPKWDEEFEIELEGSQSLRILCYEKCYDKTKVNKDNNEIVDKIMGKGQIQLDPQTVETKNWHTDVIEMNGIKVEFSMKFTSRDMSLKRTPSKKQTGVFGVKISVVTKWPVWI

SEQ ID NO: 42625 - protein, 308 aa, Homo sapiens
MRKFNIRKVLDGLTAGSSSASQQQQQQHPPGNREPEIQETLQSEHFQLCKTVRHGFPYQPSALAFDPVQKILAVGTQTGALRLFGRPGVECYCQHDSGAAVIQLQFLINEGALVSALADDTLHLWNLRQKRPAILHSLKFCRERVTFCHLPFQSKWLYVGTERGNIHIVNVESFTLSGYVIMWNKAIELSSKSHPGPVVHISDNPMDEGKLLIGFESGTVVLWDLKSKKADYRYTYDEAIHSVAWHHEGKQFICSHSDGTLTIWNVRSPAKPVQTITPHGKQLKDGKKPEPCKPILKVEFKTTRSGVC

SEQ ID NO: 42626 - protein, 66 aa, Homo sapiens
MSRRKQTNPNKVHWDQVFAGLEEQARQAMMKTDFPGDLGSQRQAIQQLRDQDSSSSEFCTFWSQGI

SEQ ID NO: 42627 - protein, 219 aa, Homo sapiens
MIQSKCSVPFTPIEFHYENTRAQFFVEDASTASALKAVNYKILDRENRRISIIINSSAPPHTILNELKPEQVEQLKLIMSKRYDGSQQALDLKGLRSDPDLVAQNIDVVLNRRSCMAATLRIIEENIPELLSLNLSNNRLYRLDDMSSIVQKAPNLKILNLSGNELKSERELDKIKGLKLEELWLDGNSLCDTFRDQSTYIRSVVACVSPPGDLHPLGG

SEQ ID NO: 42628 - protein, 118 aa, Homo sapiens
MFPPSGSTGLIPPSHFQARPLSTLPRMAPTWLSDIPLVQPPGHQDVSERRLDTQRPQVTMWERDVSSDRQEPGRRGRSWGLEGSQALSQQAEVIVRQLQELRWLEEEVWLLRETSLQQ

SEQ ID NO: 42629 - protein, 131 aa, Homo sapiens
MAMTAGTTTTFPMSNHTRERVTVAKLTLENFYSNLILQHEERETRQKKLEVAMEEEGLADEEKKLRRSQHARKETEFLRLKRTRLGLDDFESLKVIGRGAFGEVRLVQKKDTGHIYAMKILRKSDMLEKEQ

SEQ ID NO: 42630 - protein, 31 aa, Homo sapiens
MAVVLPAVVEELLSEMAAAVQESARSTGPSS

SEQ ID NO: 42631 - protein, 110 aa, Homo sapiens
MFLSFPTTKTYFPHFDLSHGSAQVKGHGKKVADALTNAVAHVDDMPNALSALSDLHAHKLRVDPVNFKLLSHCLLVTLAAHLPAEFTPAVHASLDKFLASVSTVLTSKYR

SEQ ID NO: 42632 - protein, 119 aa, Homo sapiens
MPDSNFAERSEEQVSGAKVIAQALKTQDVEYIFGIVGIPVTEIAIAAQQLGIKYIGMRNEQAACYAASAIGYLTSRPGVCLVVSGPGLIHALGGMANANMNCWLKLVDYIPSSLPAQAA

SEQ ID NO: 42633 - protein, 339 aa, Homo sapiens
MNHSERFVFIAEWYDPNASLLRRYELLFYPGDGSVEMHDVKNHRTFLKRTKYDNLHLEDLFIGNKVNVFSRQLVLIDYGDQYTARQLGSRKEKTLALIKPDAISKAGEIIEIINKAGFTITKLKMMMLSRKEALDFHVDHQSRPFFNELIQFITTGPIIAMEILRDDAICEWKRLLGPANSGVARTDASESIRALFGTDGIRNAAHGPDSFASAAREMELFFPSSGGCGPANTAKFTNCTCCIVKPHAVSEGLLGKILMAIRDAGFEISAMQMFNMDRVNVEEFYEVYKGVVTEYHDMVTEMYSGPCVAMEIQQNNATKTFREFCGPADPTPKSPISHK

SEQ ID NO: 42634 - protein, 540 aa, Homo sapiens
MAHELVMFRDVAIDVSQEEWECLNPAQRNLYKEVMLENYSNLVSLGLSVSKPAVISSLEQGKEPWMVVREETGRWCPDLASRDEPQKLSPKRDIYETELSQWVNMEEFKSHSPERSIFSAIWEGNCHFEQHQGQEEGYFRQLMINHENMPIFSQHTLLTQEFYDREKISECKKCRKIFSYHLFFSHHKRTHSKELSECKECTEIVNTPCLFKQQTIQNGDKCNECKECWKAFVHCSQLKHLRIHNGEKRYECNECGKAFNYGSELTLHQRIHTGEKPYECKECGKAFRQRSQLTQHQRLHTGEKPYECKQCGKAFIRGFQLTEHLRLHTGEKPYECKECGKTFRHRSHLTIHQRIHTGEKPYECRECGKAFSYHSSFSHHQKIHSGKKPYECHECGKAFCDGLQLTLHQRIHTGEKPYECKECGKTFRQCSHLKRHQRIHTGEKPHECMICGKAFRLHSHLIQHQRIHTGEKPYECKECGKAFSYHSSFSHHQRIHSGKKPYQCGKAFNHRLQLNLHQTLHTGEKPVRFPLLPPHPSLAS

SEQ ID NO: 42635 - protein, 242 aa, Homo sapiens
MSSYFVNSLFSKYKTGESLRPNYYDCGFAQDLGGRPTVVYGPSSGGSFQHPSQIQEFYHGPSSLSTAPYQQNPCAVACHGDPGNFYGYDPLQRQSLFGAQDPDLVQYADCKLAAASGLGEEAEGSEQSPSPTQLFPWMRPQAAGRRRGRQTYSRYQTLELEKEFLFNPYLTRKRRIEVSHALGLTERQVKIWFQNRRMKWKKENNKDKFPSSKCEQEELEKQKLERAPEAADEGDAQKGDKK

SEQ ID NO: 42636 - protein, 94 aa, Homo sapiens
MTPQSLLQTTLFLLSLLFLVQGAHGRGHREDFRFCSQRNQTHRSSLHYKPTPDLRISIENSEEALTVHAPFPAAHPASRSFPDPRGLYHFCLYW

SEQ ID NO: 42637 - protein, 45 aa, Homo sapiens
MAALRYAGLDDTDSEDELPPGWEERTTKDGWVYYAKFAIRMGTRN

SEQ ID NO: 42638 - protein, 55 aa, Homo sapiens
MALDVKSRAKRYEKLDFLGEGQFATVYKARDKNTNQIVAIKKIKLGHRSEAKDAP

SEQ ID NO: 42639 - protein, 215 aa, Homo sapiens
VPFLKRSLPALRQLTPDSAAFIQQSQQQPPPPTSQATTALTAVVLSSSVQRTAGKTAATVTSALQPPVLSLTQPTQVIQQPPKPGALIRPPQVTLTQTPMVALRQPHNRIMLTTPQQIQLNPLQPVPVVKPAVLPGTKALSAVSAQAAAAQKNKLKEPGGGSFRDDDDINDVASMAGVNLSEESARILATNSELVGTLTRSCKDETFLLQAPLQR

SEQ ID NO: 42640 - protein, 122 aa, Homo sapiens
MAVVSEDDFQHSSNSTYRTTSSSLRADQEALLEKLLDRPPPGLQRPEDRFCGTYIIFFSLGIGSLLPWNFFITAKEYWMFKLRNSSSPATGEDPEGSDILEEPWAGRSAPWPHWWTWLHPVM

SEQ ID NO: 42641 - protein, 75 aa, Homo sapiens
MATVLKTIVLIPCIGVLEQNNFSLNRRMQKARHCGHCPEEWITYSNSCYYIGKERRTWEERVCWPVLRRTLICFL

SEQ ID NO: 42642 - protein, 920 aa, Homo sapiens
MATVAANPAAAAAAVAAAAAVTEDREPQHEELPGLDSQWRQIENGESGRERPLRAGESWFLVEKHWYKQWEAYVQGGDQDSSTFPGCINNATLFQDEINWRLKEGLVEGEDYVLLPAAAWHYLVSWYGLEHGQPPIERKVIELPNIQKVEVYPVELLLVRHNDLGKSHTVQFSHTDSIGLVLRTARERFLVEPQEDTRLWAKNSEGSLDRLYDTHITVLDAALETGQLIIMETRKKDGTWPSAQLHVMNNNMSEEDEDFKGQPGICGLTNLGNTCFMNSALQCLSNVPQLTEYFLNNCYLEELNFRNPLGMKGEIAEAYADLVKQAWSGHHRSIVPHVFKNKVGHFASQFLGYQQHDSQELLSFLLDGLHEDLNRVKKKEYVELCDAAGRPDQEVAQEAWQNHKRRNDSVIVDTFHGLFKSTLVCPDCGNVSVTFDPFCYLSVPLPISHKRVLEVFFIPMDPRRKPEQHRLVVPKKGKISDLCVALSKHTGISPERMMVADVFSHRFYKLYQLEEPLSSILDRDDIFVYEVSGRIEAIEGSREDIVVPVYLRERTPARDYNNSYYGLMLFGHPLLVSVPRDRFTWEGLYNVLMYRLSRYVTKPNSDDEDDGDEKEDDEEDKDDVPGPSTGGSLRDPEPEQAGPSSGVTNRCPFLLDNCLGTSQWPPRRRRKQLFTLQTVNSNGTSDRTTSPEEVHAQPYIAIDWEPEMKKRYYDEVEAEGYVKHDCVGYVMKKAPVRLQECIELFTTVETLEKENPWYCPSCKQHQLATKKLDLWMLPEILIIHLKRFSYTKFSREKLDTLVEFPIRDLDFSEFVIQPQNESNPELYKYDLIAVSNHYGGMRDGHYTTFACNKDSGQWHYFDDNSVSPVNENQIESKAAYVLFYQRQDVARRLLSPAGSSGAPASPACSSPPSSEFMDVN

SEQ ID NO: 42643 - protein, 151 aa, Homo sapiens
MKSCGVSLATAAAAAAAFGDEEKKMAAGKASGESEEASPSLTAEEREALGGLDSRLFGFVRFHEDGARTKALLGKAVRCYESLILKAEGKVESDFFCQLGHFNLLLEDYPKALSAYQRYYSLQSDYWKNAAFLYGLGLVYFHYNAFQCIFS

SEQ ID NO: 42644 - protein, 147 aa, Homo sapiens
MLQNVTPHNKLPGEGNAGLLGLGPEAAAPGKRIRKPSLLYEGFESPTMASVPALQLTPANPPPPEVSNPKKPGRVTNQLQYLHKVVMKALWKHQFAWPFRQPVDAVKLGLPIPTSGWERTTVAKILSFFLSLMQPMDSQPQRIITKL

SEQ ID NO: 42645 - protein, 70 aa, Homo sapiens
MAAEPNKTEIQTLFKRLRAVPTNKACFDCGAKNPSWASITYGVFLCIDCSGVHRSLGVHLSFISWVPRKA

SEQ ID NO: 42646 - protein, 52 aa, Homo sapiens
  MOD_RES (1)..(1): Any amino acid
XCWFGKRPGVYTDYIYQGPMILVLLEGCESHSGAAAPPGHHLHAVLRQSRGG

SEQ ID NO: 42647 - protein, 120 aa, Homo sapiens
MKAVLLADTEIDLFSTDIPPTNAVDFTGRCYFTKICKCKLKDIACLKCGNIVGYHVIVPCSSCLPSCNNGHFWMFHSQAVYDINRLDSTGVNILLWGNLPEIEESTDEDVLNISAEECIR

SEQ ID NO: 42648 - protein, 101 aa, Homo sapiens
MDQPSGRSFMQVLCEKYSPENFPYRRGPGMGVHVPATPQGSPMKDRLNLPSVLVLNSCGITCAGDEKEIAAFCAHVSELDLSDNKLEDWHEVCSPGKTLIN

SEQ ID NO: 42649 - protein, 606 aa, Homo sapiens
TDVTTEEMKQEENLSVPFEMTTSEHIQDEPGVCIIPHVHSKDKSHIPSSLDNVNHKIVHECQELSSPVITTSPASFEENKIVLEEQSSREEISLMEKVKENATPTRNTISKVTSNLRIRSRLAKPKPNLEKTLGTNRLDDYQEVSSLCVTKGAEMETQRETEKNASKATELENKNLGPVTTAENKDQSKLACVHGIKGTSISSEVNLTERNENQEESSQEVHMLSVAPVASSETGPCTLGLDRGLGENSVEEPQIKDSKGDSVLTLPVPEYTPTSIPEVQQENIINPQDLTVNLVANVPQDGEDEQAFILTLVEIPANAVEEFTDATAQFMPNPLLPAPILVKSVNTEERGDMSICLPATSVGQDAMGLSISGRDNSKKPPDNLDLVSRKRFQCRLDKNDHIPPAKKRSLTLRDDCQEYTTEVHSKELTNVFEETGESHKGQDIFLTSGSTLTTPEPQRQQVEAAFQSRGSRSPDACMDKNVPQLPQDEMIVSDKEERTDAAPKSQQMDSRTSSSKASLSRPGRRPLGFLSLICSKNSLESDEPMQVHSKKRLKPLIPGLRKKLKRSNPFNESQEKNRESSDLLPSPSVITTQSENISSSATQRPF

SEQ ID NO: 42650 - protein, 145 aa, Homo sapiens
MGGHPQLRLVKALLLLGLNPVSASLQDQHCESLSLASNISGLQCNASVDLIGTCWPRSPAGQLVVRPCPAFFYGVRYNTTNNGYRECLANGSWAARVNYSECQEILNEEKKSKVHYHVAVIINYLGHCISLVALLVAFVLFLRLS

SEQ ID NO: 42651 - protein, 504 aa, Homo sapiens
MFCFVFQELLTFRDVTIEFSLEEWEFLNPAQQSLYRKVMLENYRNLVSLGLTVSKPELISRLEQRQEPWNVKRHETIAKPPAMSSHYTEDLLPEQCMQDSFQKVILRRYGSCGLEDLHLRKDGENVGECKDQKEIYNGLNQCLSTLPSKIFPYNKCVKVFSKSSNLNRENIRHTTEKLFKCMQCGKVFKSHSGLSYHKIIHTEEKLCICEECGKTFKWFSYLTKHKRIHTGEKPYKCEECGKAFNWCSSLTKHKRIHTGEKPYKCEECGKAFHWCSPFVRHKKIHTGEKPYTCEDCGRAFNRHSHLTKHKTIHTGKKPYKCKECGKAFNHCSLLTIHERTHTGEKPYKCEECGKAFNSSSILTEHKVIHSGEKPYKCEKCDKVFKRFSYLTKHKRIHTGEKPYKCEECGKAFNWSSILTEHKRIHTGEKPYNCEECGKAFNRCSHLTRHKKIHTAVKRYKCEECGKAFKRCSHLNEHKRVQRGEKSCKYKKCGEAFNHCSNLTT

SEQ ID NO: 42652 - protein, 165 aa, Homo sapiens
SDSLSGDNNQRLLFPKEIQEECSISNISFNPVAPTIMMKFLNRIVTIEANKNGGKITVPDKTSLELLCQGCSGDIRSAINSLQFSSSKGENNLRPRKKGMSLKSDAVLSKSKRRKKPDRVFENQEVQAIGGKDVSLFLFRALGKILYCKMNGIRILSCREQHLPT

SEQ ID NO: 42653 - protein, 130 aa, Homo sapiens
MNSLSVGLLPQRDTKFREDCPPDREELGRHSWAVLHTLAAYYPDLPTPEQQQDMAQFIHLFSKFYPCEECAEDLRKRLCRNHPDTRTRACFTQWLCHLHNEVNRKLGKPDFDCSKVDERWRDGWKDGSCD

SEQ ID NO: 42654 - protein, 116 aa, Homo sapiens
MKERRASQKLSSKSIMDPNQNVKCKIVVVGDSQCGKTALLHVFAKDCFPENYVPTVFENYTASFEIDTQRIELSLWDTSGSPYYDNVRPLSYPDSDAVLICFDISRPETLDSVLKK

SEQ ID NO: 42655 - protein, 73 aa, Homo sapiens
MAAYSYRPGPGAGPGPAAGAALPDQSFLWNVFQRVDKDRSGVISDTELQQALSNGTWTPFNPVTVRSIICRGR

SEQ ID NO: 42656 - protein, 154 aa, Homo sapiens
MWGLSGQSFGRTLTPTLKMRSTWGCCSRTLFSASADTAKRSGDAGRAPQVLVNEGGGFDRASGSFVAPVRGVYSFRFHVVKVYNRQTVQVSLMLNTWPVISAFANDPDVTREAATSSVLLPLDPGDRVSLRLRRGNLLGGWKYSSFSGFLIFPL

SEQ ID NO: 42657 - protein, 390 aa, Homo sapiens
MFGEVHLEFTMSKARQLEGKSCSLVGMKVLQKVTRGRTAGIFSLIDTLWPPAIPLKTPGRDQPCEEIKTHLPPPALCYILTAHPNLGQIDIIDEDPIYKLYQPPVTRCLRDILQMNDLGTRCSFYATVIYQKPQLKSLLLLEQREIWLLVTDVTLQTKEERDPRLPKTLLVYVAPLCVLGSEVLEALAGAAPHSLFFKDALRDQGRIVCAERTVLLLQKPLLSVVSGASSCELPGPVMLDSLDSATPVNSICSVQGTVVGVDESTAFSWPVCDMCGNGRLEQRPEDRGAFSCGDCSRVVTSPVLKRHLQVFLDCRSRPQCRVKVKLLQRSISSLLRFAAGEDGSYEVKSVLGKEVGLLNCFVQSVTAHPTSCIGLEEIELLSAGGASAEH

SEQ ID NO: 42658 - protein, 115 aa, Homo sapiens
GDYHRYLAEFATGNDRKEAAENSLVAYKAASDIAMTELPPTHPIRLGLALNFSVFYYEILNSPDRACRLAKAAFDDAIAELDTLSEESYKDSTLIMQLLRDNLTLWTSDMQGDDS

SEQ ID NO: 42659 - protein, 41 aa, Homo sapiens
MFYHISLEHEILLHPRYFGPNLLNTVKQKLFTEVEGTCTGK

SEQ ID NO: 42660 - protein, 284 aa, Homo sapiens
MVLAVLWCSMAQTLLLPSFIWSCERYRADVRTVWEQCVAIMSEEDGDDDGGCDDYAEGRVCKVRFDANGATGPGSRDPAQVKLLPGRHMLFPPLERVHYLQVPLSRRLSHDETNIFSTPREPGSFLHKWSSSDDIRVLPAQSRALGGPPEYLGQRHRLEDEEDEEEAEGGGLASLRQFLESGVLGSGGGPPRGPGFFREEITTFIDETPLPSPTASPGHSPRRPRPLGLSPRRLSLGSPESRAVGLPLGLSAGRRCSLTGGEESARAWGGSWGPGNPIFPQLTL

SEQ ID NO: 42661 - protein, 720 aa, Homo sapiens
MEGAHASLSLEDEVSGAGSRQRPLEGKGGETPAAEEPGSLKNYAVFATRDVSAAPEKEEEEAEGPLRAQDLRESYIQLVQGVQEWQDGCMYQGEFGLNMKLGYGKFSWPTGESYHGQFYRDHCHGLGTYMWPDGSSFTGTFYLSHREGYGTMYMKTRLFQTHCHNDIVNLLLDCGADVNKCSDEGLTALSMCFLLHYPAQSFKPNVAERTIPEPQEPPKFPVVPILSSSFMDTNLESLYYEVNVPSQGSYELRPPPAPLLLPRVSGSHEGGHFQDTGQCGGSIDHRSSSLKGDSPLVKGSLGHVESGLEDVLGNTDRGSLCSAETKFESNVCVCDFSIELSQAMLERSAQSHSLLKMASPSPCTSSFDKGTMRRMALSMIERRKRWRTIKLLLRRGADPNLCCVPMQVLFLAVKAGDVDGVRLLLEHGARTDICFPPQLSTLTPLHIAAALPGEEGVQIVELLLHAITDVDAKASDEDDTYKPGKLDLLPSSLKLSNEPGPPQAYYSTDTALPEEGGRTALHMACEREDDNKIDRLISHGADILKPVMLRQGEKEAVGTAVDYGYFRFFQDRRIARCPFHTLMPAERETFLARKRLLEYMGLQLRQAVFAKESQWDPTWLYLCKRAELIPSHRMKKKGPSLPRGLDVKEQGQIPFFKFCYQCGRSIGVRLLPCPRCYGILTCSKYCKTKAWTEFHKKDCGDLVAIVTQLEQVSRRREEFQ

SEQ ID NO: 42662 - protein, 591 aa, Homo sapiens
MEGKWLLCMLLVLGTAIVEAHDGHDDDVIDIEDDLDDVIEEVEDSKPDTTAPPSSPKVTYKAPVPTGEVYFADSFDRGTLSGWILSKAKKDDTDDEIAKYDGKWEVEEMKESKLPGDKGLVLMSRAKHHAISAKLNKPFLFDTKPLIVQYEVNFQNGIECGGAYVKLLSKTPELNLDQFHDKTPYTIMFGPDKCGEDYKLHFIFRHKNPKTGIYEEKHAKRPDADLKTYFTDKKTHLYTLILNPDNSFEILVDQSVVNSGNLLNDMTPPVNPSREIEDPEDRKPEDWDERPKIPDPEAVKPDDWDEDAPAKIPDEEATKPEGWLDDEPEYVPDPDAEKPEDWDEDMDGEWEAPQIANPRCESAPGCGVWQRPVIDNPNYKGKWKPPMIDNPSYQGIWKPRKIPNPDFFEDLEPFRMTPFSAIGLELWSMTSDIFFDNFIICADRRIVDDWANDGWGLKKAADGAAEPGVVGQMIEAAEERPWLWVVYILTVALPVFLVILFCCSGKKQTSGMEYKKTDAPQPDVKEEEEEKEEEKDKGDEEEEGEEKLEKQKSDAEEDGGTVSQEEEDRKPKAEEDEILNRSPRNRKPRRE

SEQ ID NO: 42663 - protein, 100 aa, Homo sapiens
MRRHMVTYAWQLLKKELGLYQLAMDIIIMIRVCKMFRQGLRGFREYQIIETAHWKHPIFSFWDVSSWAQQDYEGSKKPNKLHPTSWPKLRTEKEDKRKSR

SEQ ID NO: 42664 - protein, 205 aa, Homo sapiens
MIQAILVFNNHGKPRLVRFYQRFPEEIQQQIVRETFHLVLKRDDNICNFLEGGSLIGGSDYKLIYRHYATLYFVFCVDSSESELGILDLIQVHLEVVFFIAPKVFVETLDKCFENVCELDLIFHMDKVHYILQEVVMGGMVLETNMNEIVAQIEAQNRLEKSEGGLSAAPARAVSAVKNINLPEIPRNINIGDLNIKVPNLSQFV

SEQ ID NO: 42665 - protein, 387 aa, Homo sapiens
MMDEPWWEGRVASDVHCTLREKELKLPTFRAHSPLLKSRRFFVDILTLLSSHCQLCPAARHLAVYLLDHFMDRYNVTTSKQLYTVAVSCLLLASKFEDREDHVPKLEQINSTRILSSQNFTLTKKELLSTELLLLEAFSWNLCLPTPAHFLDYYLLASVSQKDHHCHTWPTTCPRKTKECLKEYAHYFLEVTLQDHIFYKFQPSVVAAACVGASRICLQLSPYWTRDLQRISSYSLEHLSTCIEILLVVYDNVLKDAVAVKSQALAMVPGTPPTPTQVLFQPPAYPALGQPATTLAQFQTPVQDLCLAYRDSLQAHRSGSLLSGSTGSSLHTPYQPLQPLDMCPVPVPASLSMHMAIAAEPRHCLATTYGSSYFSGSHMFPTGCFDR

SEQ ID NO: 42666 - protein, 88 aa, Homo sapiens
MDFSRLHMYSPPQCVPENTGYTYALSSSYSSDALDFETEHKLDPVFDSPRMSRRSLRLATTACTLGDGEAVGADSGTSSAVSLKNRAA

SEQ ID NO: 42667 - protein, 11 aa, Homo sapiens
MGTWCRAPSGA

SEQ ID NO: 42668 - protein, 121 aa, Homo sapiens
MDSKASVSKKKRMCVKLLPLGATDTAVFDVRLSGKTKTVPGYLRIGDMGGFAIWCKKAKAPRPVPKPRGLSRDMQGLSLDAASQPSKGGLLERTASRLGSRASTLRRNDSIYEASSLYGIS

SEQ ID NO: 42669 - protein, 124 aa, Homo sapiens
MQVDPPLHGPPNDFLIFQIIPLHSLSIMPRFLWILCFSMEETQGELTSSCGSKTMANVSLAFRDVSIDLSQEEWECLDAVQRDLYKDVMLENYSNLVSLGYTIPKPDVITLLEQEKEPWIVMRE

SEQ ID NO: 42670 - protein, 312 aa, Homo sapiens
MHQENQTTITEFILLGLSNQAEHQNLLFVLFLSMYVVTVVGNGLIIVAISLDIYLHTPMYLFLAYLSFADISSISNSVPKMLVNIQTNSQSISYESCITQMYFSIVFVVTDNLLLGTMAFDHFVAICHPLNYTTFMRARFGTLLTVISWFLSNIIALTHTLLLIQLLFCDHNTLPHFFCDLAPLLKLSCSDTMINELVLFIVGLSVIIFPFVLIFFSYVCIIRAVLGVSSTQGKWKAFSTCGSHLTIALLFYGTTVGVYFFPSSTHPEDTDKIGAVLFTVVTPMMNPFIYSLRNKDMKGALRKLINRKISSL

SEQ ID NO: 42671 - protein, 170 aa, Homo sapiens
  MOD_RES (1)..(1): Any amino acid
XAHEFGHVLGLQHTTAAKALMSAFYTFRYPLSLSPDDCRGVQHLYGQPWPTVTSRTPALGPQAGIDTNEIAPLEPDAPPDACEASFDAVSTIRGELFFFKAGFVWRLRGGQLQPGYPALASRHWQGLPSPVDAAFEDAQGHIWFFQELGFPSSTGRDESLEHCRCQGLHK

SEQ ID NO: 42672 - protein, 58 aa, Homo sapiens
MALDVKSRAKRYEKLDFLGEGQFATVYKARDKNTNQIVAIKKIKLGHRSEAKDGYNKG

SEQ ID NO: 42673 - protein, 81 aa, Homo sapiens
MAGFLDNFRWPECECIDWSERRNAVASVVAGILFFTGWWIMIDAAVVYPKPEQLNHAFHTCGVFSTLAFFMINAVSNAQVR

SEQ ID NO: 42674 - protein, 245 aa, Homo sapiens
MRPRGLPPLLVVLLGCWASVSAQTDATPAVTTEGLNSTEAALATFGTFPSTRPPGTPRAPGPSSGPRPTPVTDVAVLCVCDLSPAQCDINCCCDPDCSSVDFSVFSACSVPVVTGDSQFCSQKAVIYSLNFTANPPQRVFELVDQINPSIFCIHITNYKPALSFINPEVPDENNFDTLMKTSDGFTLNAESYVSFTTKLDIPTAAKYEVSLNLIDSFHPITNIFPCKLIFKVTRKTGFLETELIL

SEQ ID NO: 42675 - protein, 252 aa, Homo sapiens
MASLSRPSLPSCLCSFLLLLLLQVSSSYAGQFRVIGPRHPIRALVGDEVELPCRISPGKNATGMEVGWYRPPFSRVVHLYRNGKDQDGDQAPEYRGRTELLKDAIGEGKVTLRIRNVRFSDEGGFTCFFRDHSYQEEAAMELKVEDPFYWVSPGVLVLLAVLPVLLLQITVGLVFLCLQYRLRGKLRAEIENLHRTFDPHFLRVPCWKITLFVIVPVLGPLVALIICYNWLHRRLAGQFLEELLFHLEALSG

SEQ ID NO: 42676 - protein, 305 aa, Homo sapiens
MAADGDWQDFYEFQEPARSLLDQENCNASPEPGAEAGAEAGGGADGFPAPACSLEEKLSLCFRPSDPGAEPPRTAVRPITERSLLQGDEIWNALTDNYGNVMPVDWKSSHTRTLHLLTLNLSEKGVSDSLLFDTSDDEELREQLDMHSIIVSCVNDEPLFTADQVIEEIEEMMQESPDPEDDETPTQSDRLSMLSQEIQTLKRSSTGSYEERVKRLSVSELNEILEEIETAIKEYSEELVQQLALRDELEFEKEVKNSFISVLIEVQNKQKEHKETAKKKKKLKNGSSQNGKNERSHMPGTFFVP

SEQ ID NO: 42677 - protein, 124 aa, Homo sapiens
MRPNDFASYLLAIGICNLLLYFAFYIIMKLRSGERIKLIPLLCIVCTSVVWGFALFFFFQGLSTWQKTPAESREHNRDCILLDFFDDHDIWHFLSSIAMFGSFLVLLTLDDDLDTVQRDKIYVF

SEQ ID NO: 42678 - protein, 44 aa, Homo sapiens
MNYMPGTASLIEDIDKKHLVLLRDGRTLIGFLRSIDQFGLGKGE

SEQ ID NO: 42679 - protein, 45 aa, Homo sapiens
MPLLVEGRRVRLPQSAGDLVRAHPPLEAPSPFWVLMMPLLVTLWS

SEQ ID NO: 42680 - protein, 1144 aa, Homo sapiens
MPTAESEAKVKTKVRFEELLKTHSDLMREKKKLKKKLVRSEENISPDTIRSNLHYMKETTSDDPDTIRSNLPHIKETTSDDVSAANTNNLKKSTRVTKNKLRNTQLATENPNGDASVEEDKQGKPNKKVIKTVPQLTTQDLKPETPENKVDSTHQKTHTKPQPGVDHQKSEKANEGREETDLEEDEELMQAYQCHVTEEMAKEIKRKIRKKLKEQLTYFPSDTLFHDDKLSSEKRKKKKEVPVFSKAETSTLTISGDTVEGEQKKESSVRSVSSDSHQDDEISSMEQSTEDSMQDDTKPKPKKTKKKTKAVADNNEDVDGDGVHEITSRDSPVYPKCLLDDDLVLGVYIHRTDRLKSDFMISHPMVKIHVVDEHTGQYVKKDDSGRPVSSYYEKENVDYILPIMTQPYDFKQLKSRLPEWEEQIVFNENFPYLLRGSDESPKVILFFEILDFLSVDEIKNNSEVQNQECGFRKIAWAFLKLLGANGNANINSKLRLQLYYPPTKPRSPLSVVEAFEWWSKCPRNHYPSTLYVTVRGLKVPDCIKPSYRSMMALQEEKGKPVHCERHHESSSVDTEPGLEESKEVIKWKRLPGQACRIPNKHLFSLNAGERGCFCLDFSHNGRILAAACASRDGYPIILYEIPSGRFMRELCGHLNIIYDLSWSKDDHYILTSSSDGTARIWKNEINNTNTFRVLPHPSFVYTAKFHPAVRELVVTGCYDSMIRIWKVEMREDSAILVRQFDVHKSFINSLCFDTEGHHMYSGDCTGVIVVWNTYVKINDLEHSVHHWTINKEIKETEFKGIPISYLEIHPNGKRLLIHTKDSTLRIMDLRILVARKFVGAANYREKIHSTLTPCGTFLFAGSEDGIVYVWNPETGEQVAMYSDLPFKSPIRDISYHPFENMVAFCAFGQNEPILLYIYDFHVAQQEAEMFKRYNGTFPLPGIHQSQDALCTCPKLPHQGSFQIDEFVHTESSSTKMQLVKQRLETVTEVIRSCAAKVNKNLSFTSPPAVSSQQSKLKQSNMLTAQEILHQFGFTQTGIISIERKPCNHQVDTAPTVVALYDYTANRSDELTIHRGDIIRVFFKDNEDWWYGSIGKGQEGYFPANHVASETLYQELPPEIKERSPPLSPEEKTKIEKSPAPQKVK

SEQ ID NO: 42681 - protein, 438 aa, Homo sapiens
MDHPSREKDERQRTTKPMAQRSAHCSRPSGSSSSSGVLMVGPNFRVGKKIGCGNFGELRLGKNLYTNEYVAIKLEPIKSRAPQLHLEYRFYKQLGSAGEGLPQVYYFGPCGKYNAMVLELLGPSLEDLFDLCDRTFTLKTVLMIAIQLLSRMEYVHSKNLIYRDVKPENFLIGRQGNKKEHVIHIIDFGLAKEYIDPETKKHIPYREHKSLTGTARYMSINTHLGKEQSRRDDLEALGHMFMYFLRGSLPWQGLKADTLKERYQKIGDTKRNTPIEALCENFPEEMATYLRYVRRLDFFEKPDYEYLRTLFTDLFEKKGYTFDYAYDWVGRPIPTPVGSVHVDSGASAITRESHTHRDRPSQQQPLRNQVVSSTNGELNVDDPTGAHSNAPITAHAEVEVVEEAKCIMFHKPWHWSQSSAVKMKFVVFLNMNVNFKCI

SEQ ID NO: 42682 - protein, 106 aa, Homo sapiens
MVHGSVTFRDVAIDFSQEEWECLQPDQRTLYRDVMLENYSHLISLGSSISKPDVITLLEQEKEPWMVVRKETSRRYPDLELKYGPEKVSPENDTSEVNLPKQVIKQ

SEQ ID NO: 42683 - protein, 1022 aa, Homo sapiens
MRVQLLQDLQDFFRKKAEIETEYSRNLEKLAERFMAKTRSTKDHQQYKKDQNLLSPVNCWYLLLNQVRRESKDHATLSDIYLNNVIMRFMQISEDSTRMFKKSKEIAFQLHEDLMKVLNELYTVMKTYHMYHAESISAESKLKEAEKQEEKQIGRSGDPVFHIRLEERHQRRSSVKKIEKMKEKRQAKYSENKLKSIKARNEYLLTLEATNASVFKYYIHDLSDLIDCCDLGYHASLNRALRTYLSAEYNLETSRHEGLDIIENAVDNLEPRSDKQRFMEMYPAAFCPPMKFEFQSHMGDEVCQVSAQQPVQAELMLRYQQLQSRLATLKIENEEVKKTTEATLQTIQDMVTIEDYDVSECFQHSRSTESVKSTVSETYLSKPSIAKRRANQQETEQFYFMKLREYLEGSNLITKLQAKHDLLQRTLGEGHRAEYMTTSRGRRNSHTRHQDSGQVIPLIVESCIRFINLYGLQHQGIFRVSGSQVEVNDIKNSFERGENPLADDQSNHDINSVAGVLKLYFRGLENPLFPKERFNDLISCIRIDNLYERALHIRKLLLTLPRSVLIVMRYLFAFLNHLSQYSDENMMDPYNLAICFGPTLMPVPEIQDQVSCQAHVNEIIKTIIIHHETIFPDAKELDGPVYEKCMAGDDYCDSPYSEHGTLEEVDQDAGTEPHTSEDECEPIEAIAKFDYVGRSARELSFKKGASLLLYHRASEDWWEGRHNGIDGLVPHQYIVVQDMDDTFSDTLSQKADSEASSGPVTEDKSSSKDMNSPTDRHPDGYLARQRKRGEPPPPVRRPGRTSDGHCPLHPPHALSNSSVDLGSPSLASHPRGLLQNRGLNNDSPERRRRPGHGSLTNISRHDSLKKIDSPPIRRSTSSGQYTGFNDHKPLDPETIAQDIEETMNTALNELRELERQSTAKHAPDVVLDTLEQVKNSPTPATSTESLSPLHNVALRSSEPQIRRSTSSSSDTMSTFKPMVAPRMGVQLKPPALRPKPAVLPKTNPTIGPAPPPQGPTDKSCTM

SEQ ID NO: 42684 - protein, 79 aa, Homo sapiens
MGSSEPLPIADGDRRRKKKRRGRATDSLPGKFEDMYKLTSELLGEGAYAKVQGAVSLQNGKEYAVKVSVSAECQALLCK

SEQ ID NO: 42685 - protein, 846 aa, Homo sapiens
MLHDARDRQKFFSDVQYLRDMQHKVDSEYQACLRRQEYRRDPNEKKRDQFWGQETSFERSRFSSRSSSKQSSSEEDALTEPRSSIKISAFKCDSKLPAIDQTSVKQKHKSTMTVRKAEKVDPSEPSPAESEPTWWNKPETDLGGPSGWCSLGKKGPMSRSIPPCEADQAPMVLLRKRKPNLRRFTVSPESHSPRASGDRSRQKQQWPAKVPVPRGADQVVQQEGLMCNTKLKRPNQERRNLVPSSQPMTENAPDRAKKGDPSAPSQSELHPALSQAFQGKNSPQVLSEFSGPPLTPTTVGGPRKASFRFRDEDFYSILSLNSRRESDDTEEETQSEECLWVGVRSPCSPSHHKRSRFGGTSTPQAKNKNFEENAENCRGHSSRRSEPSHGSLRISNAMEPATERPSAGQRLSQDPGLPDRESATEKDRGGSENAKKSPLSWDTKSEPRQEVGVNAENVWSDCISVEHRPGTHDSEGYWKDYLNSSQNSLDYFISGRPISPRSSVNSSYNPPASFMHSALRDDIPVDLSMSSTSVHSSDSEGNSGFHVCQPLSPIRNRTPFASAENHNYFPVNSAHEFAVREAEDTTLTSQPQGAPLYTDLLLNPQGNLSLVDSSSSSPSRMNSEGHLHVSGSLQENTPFTFFAVSHFPNQNDNGSRMAASGFTDEKETSKIKADPEKLKKLQESLLEEDSEEEGDLCRICQIAGGSPSNPLLEPCGCVGSLQFVHQECLKKWLKVKITSGADLGAVKTCEMCKQGLLVDLGDFNMIEFYQKHQQSQAQNELMNSGLYLVLLLHLYEQRFAELMRLNHNQVERERLSRNYPQPRTEENENSELGDGNEGSISQSQVV

SEQ ID NO: 42686 - protein, 198 aa, Homo sapiens
MSRPLLITFTPATDPSDLWKDGQQQPQPEKPESTLDGAAARAFYEALIGDESSAPDSQRSQTEPARERKRKKRRIMKAPAAEAVAEGASGRHGQGRSLEAEDKMTHRILRAAQEGDLPELRRLLEPHEAGGAGGNINARDAFWWTPLMCAARAGQGAAVSYLLGRGAAWVGVCELSGRDAAQLAEEAGFPEVARMVRE

SEQ ID NO: 42687 - protein, 520 aa, Homo sapiens
MSQLSLSWLGLWPVAASPWLLLLLVGASWLLAHVLAWTYAFYDNCRRLRCFPQPPRRNWFWGHQGMIHSSEEGLLYTQSLACTFGDMGCWWVGPWQAVIHIFLPTCIKPVLFAPAAIAPKDKFFYSFLEPWLGDGLLLSAGDKWSRHRRMLTPAFHFNILKPYMKIFNESVNIMHAKWQLLASEGSACLDMFEHISLMTLDSLQKCVFSFDSHCQEKPSEYIAAILELSALVSKRHHEILLHIDFLYYLTPDGQRFRRACRLVHDFTDAVIQERRRTLPSQGVDDFLQAKAKSKTLDFIDVLLLSKDEDGKKLSDEDIRAEADTFMFEGHDTTASGLSWVLYHLAKHPEYQERCRQEVQELLKDREPKEIEWDDLAHLPFLTMCMKESLRLHPPVPVISRHVTQDIVLPDGRVIPKGIICLISVFGTHHNPAVWPDPEVYDPFRFDPENIKERSPLAFIPFSAGPRNCIGQTFAMAEMKVVLALTLLRFRVLPDHTEPRRKPELVLRAEGGLWLRVEPLS

SEQ ID NO: 42688 - protein, 324 aa, Homo sapiens
MFIGGLSWQTSPDSLRDYFSKFGEIRECMVMRDPTTKRSRGFGFVTFADPASVDKVLGQPHHELDSKTIDPKVAFPRRAQPKMVTRTKKIFVGGLSANTVVEDVKQYFEQFGKVEDAMLMFDKTTNRHRGFGFVTFENEDVVEKVCEIHFHEINNKMVECKKAQPKEVMFPPGTRGRARGLPYTMDAFMLGMGMLGYPNFVATYGRGYPGFAPSYGYQFPGFPAAAYGPVAAAAVAAARGSVLNSYSAQPNFGAPASPAGSNPARPGGFPGANSPGPVADLYGPASQDSGVGNYISAASPQPGSGFGHGIAGPLIATAFTNGYH

SEQ ID NO: 42689 - protein, 226 aa, Homo sapiens
MGTPGEGLGRCSHALIRGVPESLASGEGAGAGLPALDLAKAQREHGVLGGKLRQRLGLQLLELPPEESLPLGPLLGDTAVIQGDTALITRPWSPARRPEVDGVRKALQDLGLRIVEIGDENATLDGTDVLFTGREFFVGLSKWTNHRGAEIVADTFRDFAVSTVPVSGPSHLRGLCGMGGPRTVVAGSSDAAQKAVRAMAVLTDHPYASLTLPDDAAADCLFLRPG

SEQ ID NO: 42690 - protein, 381 aa, Homo sapiens
MVMEKPSPLLVGREFVRQYYTLLNKAPEYLHRFYGRNSSYVHGGVDASGKPQEAVYGQNDIHHKVLSLNFSECHTKIRHVDAHATLSDGVVVQVMGLLSNSGQPERKFMQTFVLAPEGSVPNKFYVHNDMFRYEDEVFGDSEPELDEESEDEVEEEQEERQPSPEPVQENANSGYYEAHPVTNGIEEPLEESSHEPEPEPESETKTEELKPQVEEKNLEELEEKSTTPPPAEPVSLPQEPPKAFSWASVTSKNLPPSGTVSSSGIPPHVKAPVSQPRVEAKPEVQSQPPRVREQRPRERPGFPPRGPRPGRGDMEQNDSDNRRIIRYPDSHQLFVGNLPHDIDENELKEFFMTDYVSRGSTFKCGREKNKSCKRARNQRWW

SEQ ID NO: 42691 - protein, 59 aa, Homo sapiens
MYRTKVGLKDRQQLYKLIISQLLYDGYISIANGLINEIKPQSVCAPSEQLLHLIKLGRL

SEQ ID NO: 42692 - protein, 186 aa, Homo sapiens
MGLLLLVPLLLLPGSYGLPFYNGFYYSNSANDQNLGNGHGKDLLNGVKLVVETPEETLFTYQGASVILPCRYRYEPALVSPRRVRVKWWKLSENGAPEKDVLVAIGLRHRSFGDYQGRVHLRQDKEHDVSLEIQDLRLEDYGRYRCEVIDGLEDESGLVELELRGWGCVSSHLSHMLGRQFGDRGR

SEQ ID NO: 42693 - protein, 44 aa, Homo sapiens
MASMGTLAFDEYGRPFLIIKDQDRKSRLMGLEALKGQQLSPTDG

SEQ ID NO: 42694 - protein, 214 aa, Homo sapiens
MGVPRTPSRTVLFERERTGLTYRVPSLLPVPPGPTLLAFVEQRLSPDDSHAHRLVLRRGTLAGGSVRTGPHSLWVPATVCSCPQAACWYPPTPTAWTAESVLARSAGPALTPSPSTAMTTAAPGAVEASCPTCAQASASWQRWTVGRPAASSTAMPGAHWAAVCRRSALTRAPPSCPQSAWLPCPRLPGAARAASWASQPPPPTGHGMTVGQWA

SEQ ID NO: 42695 - protein, 594 aa, Homo sapiens
MAAARDPPEVSLREATQRKLRRFSELRGKLVARGEFWDIVAITAADEKQELAYNQQLSEKLKRKELPLGVQYHVFVDPAGAKIGNGGSTLCALQCLEKLYGDKWNSFTILLIHSGGYSQRLPNASALGKIFTALPLGNPIYQMLELKLAMYIDFPLNMNPGILVTCADDIELYSIGEFEFIRFDKPGFTALAHPSSLTIGTTHGVFVLDPFDDLKHRDLEYRSCHRFLHKPSIEKMYQFNAVCRPGNFCQQDFAGGDIADLKLDSDYVYTDSLFYMDHKSAKMLLAFYEKIGTLSCEIDAYGDFLQALGPGATVEYTRNTSNVIKEESELVEMRQRIFHLLKGTSLNVVVLNNSKFYHIGTTEEYLFYFTSDNSLKSELGLQSITFSIFPDIPECSGKTSCIIQSILDSRCSVAPGSVVEYSRLGPDVSVGENCIISGSYILTKAALPAHSFVCSLSLKMNRCLKYATMAFGVQDNLKKSVKTLSDIKLLQFFGVCFLSCLDVWNLKVTEELFSGNKTCLSLWTARIFPVCSSLSDSVITSLKMLNAVKNKSAFSLNSYKLLSIEEMLIYKDVEDMITYREQIFLEISLKSSLM

SEQ ID NO: 42696 - protein, 123 aa, Homo sapiens
MAPWPPKGLVPAMLWGLSLFLNLPGPIWLQPSPPPQSSPPPQPHPCHTCRGLVDSFNKGLERTIRDNFGGGNTAWEEENLSKYKDSETRLVEVLEGVCSKSDFECHRLLELSEELVESWWFHK

SEQ ID NO: 42697 - protein, 206 aa, Homo sapiens
MTMPWGQLGKDGWLGGTHCVACLAPPAGSVLYHLFMCHQGGSAVYARLLALDMCGVCLVNTLGALPIIHCTLACRPWLRPAALVGYTVLSGVAGWRALTAPSTSARLRAFGWQAAARLLVFGARGVGLGSGAPGSLPCYLRMDALALLGGLVNVARLPERWGPGRFDYWGNSHQIMHLLSVGSILQLHAGVVPDLLWAAHHACPRD

SEQ ID NO: 42698 - protein, 108 aa, Homo sapiens
MFVSVTAFFFSLLFLGMFLSGMVAQIDANWNFLDFAYHFTVFVFYFGAFLLEAAATSLHDLHCNTTITGQPLLSDNQYNINVAASIFAFMTTACYGCSLGLALRRWRP

SEQ ID NO: 42699 - protein, 129 aa, Homo sapiens
MAAGSAPMQLHLRATIRMKDGLCVPRKWIYHLTEGSTDLRTEGRPDMKTELFSSSCPGGIMLNETGQGYQRFLLYNRSPHPPEKCVEEFKSLTSCLDSKAFLLTPRNQGKGLKSHKTGLGLTKSSGVTG

SEQ ID NO: 42700 - protein, 719 aa, Homo sapiens
MMKLIINSLYKNKEIFLRELISNASDALDKIRLISLTDENALSGNEELTVKIKCDKEKNLLHVTDTGVGMTREELVKNLGTIAKSGTSEFLNKMTEAQEDGQSTSELIGQFGVGFYSAFLVADKVIVTSKHNNDTQHIWESDSNEFSVIADPRGNTLGRGTTITLVLKEEASDYLELDTIKNLVKKYSQFINFPIYVWSSKTETVEEPMEEEEAAKEEKEESDDEAAVEEEEEEKKPKTKKVEKTVWDWELMNDIKPIWQRPSKEVEEDEYKAFYKSFSKESDDPMAYIHFTAEGEVTFKSILFVPTSAPRGLFDEYGSKKSDYIKLYVRRVFITDDFHDMMPKYLNFVKGVVDSDDLPLNVSRETLQQHKLLKVIRKKLVRKTLDMIKKIADDKYNDTFWKEFGTNIKLGVIEDHSNRTRLAKLLRFQSSHHPTDITSLDQYVERMKEKQDKIYFMAGSSRKEAESSPFVERLLKKGYEVIYLTEPVDEYCIQALPEFDGKRFQNVAKEGVKFDESEKTKESREAVEKEFEPLLNWMKDKALKDKIEKAVVSQRLTESPCALVASQYGWSGNMERIMKAQAYQTGKDISTNYYASQKKTFEINPRHPLIRDMLRRIKEDEDDKTVLDLAVVLFETATLRSGYLLPDTKAYGDRIERMLRLSLNIDPDAKVEEEPEEEPEETAEDTTEDTEQDEDEEMDVGTDEEEETAKESTAEKDEL

SEQ ID NO: 42701 - protein, 107 aa, Homo sapiens
  MOD_RES (1)..(1): Any amino acid
XQKLLEEERKRRQFEEQKQKLRLLSSVKPKTGEKSRDDALEAIKGNLDGFSRDAKMHPTPASHPKKPGSFKRHYIFLFWEGDLCSPCFFTSPLYVCVKSQCRTLPSS

SEQ ID NO: 42702 - protein, 9 aa, Homo sapiens
MAAMAPALT

SEQ ID NO: 42703 - protein, 68 aa, Homo sapiens
MGFGDLKSPAGLQVLNDYLADKSYIEGYVPSQADVAVFEAVSSPPPADLCHALRWYNHIKSYEKEKAR

SEQ ID NO: 42704 - protein, 222 aa, Homo sapiens
MKGLGTDEDSLIEIICSRTNQELQEINRVYKEMYKTDLEKDIISDTSGDFRKLMVALAKGRRAEDGSVIDYELIDQDARDLYDAGVKRKGTDVPKWISIMTERSVPHLQKVFDRYKSYSPYDMLESIRKEVKGDLENAFLNLVQCIQNKPLYFADRLYDSMKGKGTRDKVLIRIMVSRSEVDMLKIRSEFKRKYGKSLYYYIQQDTKGDYQKALLYLCGGDD

SEQ ID NO: 42705 - protein, 498 aa, Homo sapiens
MFNYERPKHFIQSQNPCGSRLQPPGPETSSFSSQTKQSSIIIQPRQCTEQRFSASSTLSSHITMSSSAFPASPQQHAGSNPGQRVTTTYNQSPASFLSSILPSQPDYNSSKIPSAMDSNYQQSSAGQPINAKPSQTANAKPIPRTPDHEIQGSKEALIQDLERKLKCKDTLLHNGNQRLTYEEKMARRLLGPQNAAAVFQAQDDSGAQDSQQHNSEHARLQVPTSQVRSRSTSRGDVNDQDAIQEKFYPPRFIQVPENMSIDEGRFCRMDFKVSGLPAPDVSWYLNGRTVQSDDLHKMIVSEKGLHSLIFEVVRASDAGAYACVAKNRAGEATFTVQLDVLAKEHKRAPMFIYKPQSKKVLEGDSVKLECQISAIPPPKLFWKRNNEMVQFNTDRISLYQDNTGRVTLLIKDVNKKDAGWYTVSAVNEAGVTTCNTRLDVTARPNQTLPAPKQLRVRPTFSKYLALNGKGLNVKQAFNPEGEFQRLAAQSGLYESEEL

SEQ ID NO: 42706 - protein, 126 aa, Homo sapiens
MAAAARARVAYLLRQLQRAACQCPTHSHTYSQAPGLSPSGKTTDYAFEMAVSNIRYGAAVTKEVGMDLKNMGAKNVCLMTDKNLSKLPPVQVAMDSLVKNGIPFTVYDNVRVEPTDSSANYLRNRE

SEQ ID NO: 42707 - protein, 1611 aa, Homo sapiens
MTSAQCPALACVMSPLRFWGPWPLLMWQLLWLLVKEAQPLEWVKDPLQLTSNPLGPPEPWSSHSSHFPRESPHAPTLPADPWDFDHLGPSASSEMPAPPQESTENLVPFLDTWDSAGELPLEPEQFLASQQDLKDKLSPQERLPVSPKKLKKDPAQRWSLAEIIGIIRQLSTPQSQKQTLQNEYSSTDTPYPGSLPPELRVKSDEPPGPSEQVGPSQFHLEPETQNPETLEDIQSSSLQQEAPAQLPQLLEEEPSSMQQEAPALPPESSMESLTLPNHEVSVQPPGEDQAYYHLPNITVKPADVEVTITSEATNETESSQAQQETPIQFPEEVEPSATQQEAPIEPPVPPMEHELSISEQQQPVQPSETSREVESSPTQQETPGQPPEHHEVTVSPPGDHQTHHLDSPSVSVKPPDVQLTIAAEPSAEVGTSLVQQEATTRLSGSGNDIEPPAIQHGGPPLLSESSEEAGPLAVQQETSFQSPEPINNENPSPTQQEAAAEHPQTAEEGESSLTHQEAPAQTPEFPNVVVAQPPEHSHLTQATVQPLDLGFTITPESMTEVELSPTMKETPTQPPKKVVPQLRVYQGVTNPTPGQDQAQHPVSPSVTVQLLDLGLTITPEPTTEVGHSTPPKRTIVSPKHPEVTLPHPDQVQTQHSHLTRATVQPLDLGFTITPKSMTEVEPSTALMTTAPPPGHPEVTLPPSDKGQAQHSHLTQATVQPLDLELTITTKPTTEVKPSPTTEETSTQPPDLGLAIIPEPTTETGHSTALEKTTAPRPDRVQTLHRSLTEVTGPPTELEPAQDSLVQSESYTQNKALTAPEEHKASTSTNICELCTCGDEMLSCIDLNPEQRLRQVPVPEPNTHNGTFTILILRENNLTELHKDSFEGLLSLQYLDLSCNKIQSIERHTFEPLPFLKFINLSCNVITELSFGTFQAWHGMQFLHKLILNHNPLTTVEDPYLFKLPALKYLDMGTTLVPLTTLKNILMMTVELEKLILPSHMACCLCQFKNSIEAVCKTVKLHCNSACLTNTTHCPEEASVGNPEGAFMKVLQARKNYTSTELIVEPEEPSDSSGINLSGFGSEQLDTNDESDFISTLSYILPYFSAVNLDVKSLLLPLIKLPTTGNSLAKIQTVGQNRQRVKRVLMGPRSIQKRHFKEVGRQSIRREQGAQASVENAAEEKRLGSPAPREVEQPHTQQGPEKLAGNAVYTKPSFTQEHKAAVSVLKPFSKGAPSTSSPAKALPQVRDRWKDLTHAISILESAKARVTNTKTSKPIVHARKKYRFHKTRSHVTHRTPKVKKSPKVRKKSYLSRLMLANRLPFSAAKSLINSPSQGAFSSLGDLSPQENPFLEVSAPSEHFIEKNNTKHTTARNAFEENDFMENTNMPEGTISENTNYNHPPEADSAGTAFNLGPTVKQTETKWEYNNVGTDLSPEPKSFNYPLLSSPGDQFEIQLTQQLQSLIPNNNVRRLIAHVIRTLKMDCSGAHVQVTCAKLISRTGHLMKLLSGQQEVKASEIEWDTDQWKIENYINESTEAQSEQKEKSLELKKEVPGYGYTDKLILALIVTGILTILIILFCLIVICCHRRSLQEDEEGFSRDSEAPTEEEESEALP

SEQ ID NO: 42708 - protein, 122 aa, Homo sapiens
MATGSRTSLLLAFGLLCLPWLQEGSAFPTIPLSRLFDNAMLRAHRLHQLAFDTYQEFRLEDGSPRTGQIFKQTYSKFDTNSHNDDALLKNYGLLYCFRKDMDKVETFLRIVQCRSVEGSCGF

SEQ ID NO: 42709 - protein, 65 aa, Homo sapiens
MLPSKKTVRMPSVTQRLRDPDINPCLSILFYLLNDASLISVRNLMLPPDVWMKITMTGKGVPLTS

SEQ ID NO: 42710 - protein, 172 aa, Homo sapiens
MNHLPEDMENALTGSQSSHASLRNIHSINPTQLMARIESYEGREKKGISDVRRTFCLFVTFDLLFVTLLWIIELNVNGGIENTLEKEVMQYDYYSSYFDIFLLAVFRFKVLILAYAVCRLRHWWAIALTTAVTSAFLLAKVILSKLFSQGAFGYVLPIISFILAWIETWFLD

SEQ ID NO: 42711 - protein, 334 aa, Homo sapiens
MFWFRISEREKEISGLWNELDSLKDAVEHQRKKNNDLREKNWEAMEALASTEKMLQDKVNKTSKERQQQVEAVELEAKEVLKKLFPKVSVPSNLSYGEWLHGFEKKAKECMAGTSGSEEVKVLEHKLKEADEMHTLLQLECEKYKSVLAETEGILQKLQRSVEQEENKWKVKVDESHKTIKQMQSSFTSSEQELERLRSENKDIENLRREREHLEMELEKAEMERSTYVTEVRELKAQLNETLTKLRTEQNERQKVAGDLHKAQQSLELIQSKIVKAAGDTTVIENSDVSPETESSEKETMSVSLNQTVTQLQQLLQAVNQQLTKEKEHYQVLE

SEQ ID NO: 42712 - protein, 385 aa, Homo sapiens
MITHQRIWYGTGLTFVSGLKADDVIYITLPFYHSAALLIGIHGCIVAGATLALRTKFSASQFWDDCRKYNVTVIQYIGELLRYLCNSPQKPNDRDHKVRLALGNGLRGDVWRQFVKRFGDICIYEFYAATEGNIGFMNYARKVGAVGRVNYLQKKIITYDLIKYDVEKDEPVRDENGYCVRVPKGEVGLLVCKITQLTPFNGYAGAKAQTEKKKLRDVFKKGDLYFNSGDLLMVDHENFIYFHDRVGDTFRWKGENVATTEVADTVGLVDFVQEVNVYGVHVPDHEGRIGMASIKMKENHEFDGKKLFQHIADYLPSYARPRFLRIQDTIEITGTFKHRKMTLVEEGFNPAVIKDALYFLDDTAKMYVPMTEDIYNAISAKTLKL

SEQ ID NO: 42713 - protein, 51 aa, Homo sapiens
MRELGSGLFGVVRLGKWRAQYKVAIKAIREGAMCEEDFIEEAKVMMLPEIV

SEQ ID NO: 42714 - protein, 375 aa, Homo sapiens
MDCLCIVTTKKYRYQDEDTPPQEHISPQITNEVIGPELVHVSEKNLSEIENVHGFVSHSHISPIKPTEAVLPSPPTVPVIPVLPVPAENTVILPTIPQANPPPVLVNTDSLETPTYVNGTDADYEYEEITLERGNSGLGFSIAGGTDNPHIGDDSSIFITKIITGGAAAQDGRLRVNDCILRVNEVDVRDVTHSKAVEALKEAGSIVRLYVKRRKPVSEKIMEIKLIKGPKGLGFSIAGGVGNQHIPGDNSIYVTKIIEGGAAHKDGKLQIGDKLLAVNNVCLEEVTHEEAVTALKNTSDFVYLKVAKPTSMYMNDGYAPPDITNYGVSLLLPRLECSGVISDHHNLCLPDSSHSLASVAGITGMRHHALLILYF

SEQ ID NO: 42715 - protein, 336 aa, Homo sapiens
DLDVGNWRETEDPEAEELEESSPEREPSELLVGDGGSEESQEAARKASHQNLLHFLSEVAYLMEPLCISSNESSEGCCPPSGTRQEGREIKASEGERELCRETEELSAKGDPLVAEKPLGENGKPEVASAPSVICTVQGLLTESEEGEAQQESKGEDQGEVYVSEMEDQPPSGECDDAFNIKETPLVDTLFSHATSSKLTDLSQDDPVQDHLLFKKTLLPVWKMIASHRFSSPFLKPVSERQAPGYKDVVKRPMDLTSLKRNLSKGRIRTMAQFLRDLMLMFQNAVMYNDSDHHVYHMAVEMRQEVLEQIQVLYADTCSLWNLDFRTPMRIKVISR

SEQ ID NO: 42716 - protein, 166 aa, Homo sapiens
MSFLVSKPERIRTNDASSESIASFSKQEVMSSFLPEGGCYELLTVIGKGFEDLMTVNLARYKPTGEYVTGELHVSKLFNHPNIVPYRATFIADNELWVVTSFMAYGSAKDLICTHFMDGMNELAIAYILQGVLKALDYIHHMGYVHRSVKASHILISVDGKVYLSG

SEQ ID NO: 42717 - protein, 187 aa, Homo sapiens
MEATGTWALLLALALLLLLTLALSGTRARGHLPPGPTPLPLLGNLLQLRPGALYSGLMRLSKKYGPVFTIYLGPWRPVVVLVGQEAVREALGGQAEEFSGRGTVAMLEGTFDGHGVFFSNGERWRQLRKFTMLALRDLGMGKREGEELIQAEARCLVETFQGTEGGTKPRHRIHQQEHADDSHLFAV

SEQ ID NO: 42718 - protein, 330 aa, Homo sapiens
MAPEENAGTELLLQGFERRFLAVRTLRSFPWQSLEAKLRDSSDSELLRDILQKTVRHPVCVKHPPSVKYAWCFLSELIKKHEAVHTEPLDKLYEVLTETLMAKESTQGHRSYLLSSGGSVTLSKSTAIISHGTTGLVTWDAALYLAEWAIENPAAFINRTVLELGSGAGLTGLAICKMCRPRAYIFSDPHSRVLEQLRGNVLLNGLSLEADITGNLDSPRVTVAQLDWDVAMVHQLSAFQPDVVIAADVLYCPEAIVSLVGVLQRLAACREHKRAPEVYVAFTVRNPETCQLFTTELGRDGIRWEAEAHHDQKLFPYGEHLEMAMLNLTL

SEQ ID NO: 42719 - protein, 59 aa, Homo sapiens
MCPKNASYYGNRAATLMMLGRFREALGDAQQSVRDIYERASATSLWGMPWQHVAASREP

SEQ ID NO: 42720 - protein, 309 aa, Homo sapiens
  MOD_RES (1)..(1): Any amino acid
XLQPLSERLTLLAIFISTFLFSLTWQFNQFMMLMQALVLFTLDSLDMLPAVKATWLYGIQITSLLLVCILQFFNSMILGSLLISFNLSVFIARKLQKNLKTGSFLNRLGKLLLHLFMVLCLTLFLNNIIKKILNLKSDEHIFKFLKAKFGLGATRDFDANLYLCEEAFGLLPFNTFGRLSDTLLFYAYIFVLSITVIVAFVVAFHNLSDSTNQQSVGKMEKGTVDLKPETAYNLIHTILFGFLALSTMRMKYLWTSHMCVFASFGLCSPEIWELLLKSVHLYNPKRICIMRYSVPILILLYLCYKNQKS

SEQ ID NO: 42721 - protein, 101 aa, Homo sapiens
MPGGPIPPGFFQPFMSPRYAGGPRPPIRMGNQPPGGVPGTQPLLPNSMDPTRQQGHPNMGGSMQRMNPPRGMGPMGPGPQNYGSGMRPPPNSLGPAMPGIN

SEQ ID NO: 42722 - protein, 56 aa, Homo sapiens
QRSSEALATVTGIVDGSGSIGAAVGQTSCTIVFISPLIVREIFSLVLRRQAHILRE

SEQ ID NO: 42723 - protein, 151 aa, Homo sapiens
MRTLEDSSGTVLHRLIQEQLRYGNLTETRTLLAIQQQALRGGAGTGGTGSPQASLEILAPEDSQVLQQATRQEPQGQEHQGGENHLAENTLYRLCPQPSKGEELPTYEEAKAHSQYYAAQQAGTRPHAGDRDPRGAPGGSRRQDEALRELR

SEQ ID NO: 42724 - protein, 311 aa, Homo sapiens
  MOD_RES (1)..(1): Any amino acid
XGGRAEAALLLAPRSVPAAARGLQGQSRVPAGRAALPGPGRPPALPRGLAAFALPLGESPGCRARADPPWDEGCRDCGGARRDPRGEPGLGACAERGCPRDLFLFLQAADGETILKGLQSIFQEQGMAESVHTWQDHGYLATYTNKNGSFANLRIYPHGLVLLDLQSYDGDAQGKEEIDSILNKVEERMKELSQDSTGRVKRLPPIVRGGAIDRYWPTADGRLVEYDIDEVVYDEDSPYQNIKILHSKQFGNILILSGDVNLAESDLAYTRAIMGSGKEDYTGKDVLILGGGDGGILCEIVKLKPKMVTMV

SEQ ID NO: 42725 - protein, 127 aa, Homo sapiens
MAVNVYSTSITQETMSRHDIIAWVNDIVSLNYTKVEQLCSGAAYCQFMDMLFPGCISLKKVKFQAKLEHEYIHNFKLLQASFKRMNVDKVIPVEKLVKGRFQDNLDFIQWFKKFYDANYDGKEYDPV

SEQ ID NO: 42726 - protein, 358 aa, Homo sapiens
PHTNKFAVALLDDSVRVYNASSTIVPSLKHRLQRNVASLAWKPLSASVLAVACQSCILIWTLDPTSLSTRPSSGCAQVLSHPGHTPVTSLAWAPSGGRLLSASPVDAAIRVWDVSTETCVPLPWFRGGGVTNLLWSPDGSKILATTPSAVFRVWEAQMWTCERWPTLSGRCQTGCWSPDGSRLLFTVLGEPLIYSLSFPERCGEGKGCVGGAKSATIVADLSETTIQTPDGEERLGGEAHSMVWDPSGERLAVLMKGKPRVQDGKPVILLFRTRNSPVFELLPWAGPQAELPTSRCTLSMPSFHVLAQCLGGPRNPLLGVEALFMTCPSLLRHPQPLPLGTLSQGHHLFCPTPHIPTS

SEQ ID NO: 42727 - protein, 195 aa, Homo sapiens
  MOD_RES (1)..(1): Any amino acid
XYCRSQPPARLISGEEHFSSKKCLAWFYEYAGPDEVVGPEGMEKFCEDIGVEPENIIMLVLAWKLEAESMGFFTKEEWLKGMTSLQCDCTEKLQNKFDFLRSQLNDISSFKNIYRYAFDFARDKDQRSLDIDTAKSMLALLLGRTWPLFSVFYQYLEGLFFLMNLLSGKKSVRHHSKNYVKKMQTFQFPRVYKLM

SEQ ID NO: 42728 - protein, 216 aa, Homo sapiens
MAMNYNAKDEVDGGPPCAPGGTAKTRRPDNTAFKQQRLPAWQPILTAGTVLPIFFIIGLIFIPIGIGIFVTSNNIREIEIDYTGTEPSSPCNKCLSPDVTPCFCTINFTLEKSFEGNVFMYYGLSNFYQNHRRYVKSRDDSQLNGDSSALLNPSKECEPYRRNEDKPIAPCGAIANSMFNDGASFCRPGWSAVARRRLTATSAPWVQAFLLPQLPL

SEQ ID NO: 42729 - protein, 60 aa, Homo sapiens
MDNSGKEAEAMALLAEAERKVKNSQSFFSGLFGPHPDPTERIPKCVAVGLWFDEMSTSCG

SEQ ID NO: 42730 - protein, 125 aa, Homo sapiens
MLAGGVRSMPSPLLACWQPILLLVLGSVLSGSATGCPPRCECSAQDRAVLCHRKRFVAVPEGIPTETRLLDLGKNRIKTLNQDEFASFPHLEELELNENIVSAVEPGAFNNLFNLRTLGLRSNRL

SEQ ID NO: 42731 - protein, 128 aa, Homo sapiens
MVATGSLSSKNPASISELLDCGYHPESLLSDFDYWDYVVPEPNLNEVIFEESTCQNLVKMLENCLSKSKQTKLGCSKVLVPEKLTQRIAQDVLRLSSTEPCGLRGCVMHVNLEIENVCKKLDRIVCDS

SEQ ID NO: 42732 - protein, 181 aa, Homo sapiens
MGQQISDQTQLVINKLPEKVAKHVTLVRESGSLTYEEFLGRVAELNDVTAKVASGQEKHLLFEVQPGSDSSAFWKVVVRVVCTKINKSSGIVEASRIMNLYQFIQLYKDITSQAAGVLAQSSTSEEPDENSSSVTSCQASLWMGRVKQLTDEEECCICMDGRADLILPCAHSFCQKCIDKW

SEQ ID NO: 42733 - protein, 200 aa, Homo sapiens
MEAARDYAGALIRRVPRVPLIAVRFQSPCVRWPHIPLCASSTVPRSLQPPAPRILLRSATPRTHPSAPLVPKPSSRARGQSPIPSRASSPSCSWAQVPGVALARCAGVCKPGDSWRVAACISGRCCSRGRRRGSGPRNPEQSFRDARGPGFWGSWKSQRELGAGGAQAWPLLEARALVSEGRPQPSGGALQAPDIYGITD

SEQ ID NO: 42734 - protein, 189 aa, Homo sapiens
  MOD_RES (1)..(1): Any amino acid
XIHVLKGIRGTEGHQGPLTCVAANQDGSLILTGSVDCQAKLVSATTGKVVGVFRPETVASQPSLGEGEESESNSVESLGFCSVMPLAAVGYLDGTLAIYDLATQTLRHQCQHQSGIVQLLWEAGTAVVYTCSLDGIVRLWDARTGRLLTDYRGHTAEILDFALSKDASLVVTTSGDHKAKVFCVQRPDR

SEQ ID NO: 42735 - protein, 36 aa, Homo sapiens
MARLSFWSQGVELARSTRCFSPEDISGKAPVLGTGM

SEQ ID NO: 42736 - protein, 260 aa, Homo sapiens
MELAGGTEPAEAAMAPASKNAKEGSRSHGRRRWRKDKAKASRLIHNMDLRTMTQSLVTLAEDNIAFFSSQGPGETAQRLSGVFAGVREQALGLEPALGRLLGVAHLFDLDPETPANGYRSLVHTARCCLAHLLHKSRYVASNRRSIFFRTSHNLAELEAYLAALTQLRALVYYAQRLLVTNRPGVLFFEGDEGLTADFLREYVTLHKGCFYGRCLGFQFTPAIRPFLQTISIGLVSFGEHYKRNETGLSVAASSLFTSGR

SEQ ID NO: 42737 - protein, 29 aa, Homo sapiens
  MOD_RES (1)..(1): Any amino acid
XLAILLTFFHPFLVYRECRTWKESPSAIA

SEQ ID NO: 42738 - protein, 139 aa, Homo sapiens
  MOD_RES (1)..(1): Any amino acid
XPYDPSFNEATAVRSITKTDMRKGTSIAWNSPKPEYFLGSVDKIPDKDHLSEEKNFKESCLFDRDLREQLTTIDKETLQGAAKPDAHFRTMPCGQLLHFLQRNTIIAAVSGVAILMAIVLLLLGLASYIRKKQPSDMYS

SEQ ID NO: 42739 - protein, 40 aa, Homo sapiens
MKRMLSLRDQRLKEKDRLKPKKKEKKDPSALKEREVIYFQ

SEQ ID NO: 42740 - protein, 198 aa, Homo sapiens
MEALILEPSLYTVKAILILDNDGDRLFAKYYDDTYPSVKEQKAFEKNIFNKTHRTDSEIALLEGLTVVYKSSIDLYFYVIGSSYENELMLMAVLNCLFDSLSQMLRTGSTQAGGLHESSSRQAWATQKNVEKRALLENMEGLFLAVDEIVDGGVILESDPQQVVHRVALRGEDVPLTEQTVSQVLQSAKEQIKWSLLR

SEQ ID NO: 42741 - protein, 38 aa, Homo sapiens
MTILKLKNADLRKNEDKLNHHQRIGLKYFGDFEKRIPR

SEQ ID NO: 42742 - protein, 63 aa, Homo sapiens
MLTPAFDLSQDPDFLTIAIRVPYARVSEFDVYFEGSDFKFYAKPYFLRNFYHSPAQRNPWPAF

SEQ ID NO: 42743 - protein, 95 aa, Homo sapiens
MSKEQVEEHVSRIREELDREREERNYFQLERDKIHTFWEITRRQLEEKKAELRNKDREMEEAEERHQVEIKVYKQKVKHLLYEHQNNLTEMKAEG

SEQ ID NO: 42744 - protein, 197 aa, Homo sapiens
MADVLSVLRQYNIQKKEIVVKGDEVIFGEFSWPKNVKTNYVVWGTGKEGQPREYYTLDSILFLLNNVHLSHPVYVRRAATENIPVVRRPDRKDLLGYLNGEASTSASIDRSAPLEIGLQRSTQVKRAADEVLAEAKKPRIEDEECVRLDKERLAARLEGHKEGIVQTEQIRFCVNIFQDFHLVTKVIFLSTVIKVFV

SEQ ID NO: 42745 - protein, 173 aa, Homo sapiens
MGKEKTHINIVVIGHVDSGKSTTTGHLIYKCGGIDKRTIEKFEKEAAEMGKGSFKYAWVLDKLKAERERGITIDISLWKFETTKYYITIIDAPGHRDFIKNMITGTSQADCAVLIVAAGVGEFEAGISKNGQTREHALLAYTLGVKQLIVGVNKMDSTEPAYSEKRYDEIVKE

SEQ ID NO: 42746 - protein, 136 aa, Homo sapiens
MPTAAAPIISSVQKLVLYETRARYFLVGSNNAETKYRVLKIDRTEPKDLVIIDDRHVYTQQEVRELLGRLDLGNRTKMGQKGSSGLFRAVSAFGVVGIYEYFKMWTYLAIFTLVTAMICPTHFNIISLSCECPWRC

SEQ ID NO: 42747 - protein, 45 aa, Homo sapiens
  MOD_RES (1)..(1): Any amino acid
XMKIKMTAPVTSYVEPGSGPFREGKRGNVQVKIESGKGASTGVLV

SEQ ID NO: 42748 - protein, 237 aa, Homo sapiens
MADIDNKEQSELDQDLDDVEEVEEEETGEETKLKARQLTVQMMQNPQILAALQERLDGLVETPTGYIESLPRVVKRRVNALKNLQVKCAQIEAKFYEEVHDLERKYAVLYQPLFDKEELKEKAKIEDEKKDEEKEDPKGIPEFWLTVFKNVDLLSDMVQEHDEPILKHLKDIKVKFSDAGQPMSFVLEFHFEPNEYFTNEVLTKTYRMRSEPDDSDPFSFDGPEIMGCTGCQIDWKK

SEQ ID NO: 42749 - protein, 227 aa, Homo sapiens
  MOD_RES (1)..(1): Any amino acid
XDVAYDLWREENGCECTKAVNFAMHELQLIRVEKQYLHHNLDHLVEELFLGDIHTDATQRMFYRPSSYQPPLQNAKCAAESSGSFQILPQDSSEKEQNGLSHWCLSRPGHQKDWALCAHAGPATAGCPSCLWPPAETGRKAGRTSSKTVHACPGEAGTSSFELFYFPNCWSIETKLKISLNAKLSFKPRASAPLETGHRVKIETLSQLVFLSFIQLCCEVQSPLANK

SEQ ID NO: 42750 - protein, 267 aa, Homo sapiens
MAEISDLDRQIEQLRRCELIKESEVKALCAKAREILVEESNVQRVDSPVTVCGDIHGQFYDLKELFRVRYPDRITLIRGNHESRQITQVYGFYDECLRKYGSVTVWRYCTEIFDYLSLSAIIDGKIFCVHGGLSPSIQTLDQIRTIDRKQEVPHDGPMCDLLWSDPEDTTGWGVSPRGAGYLFGSDVVAQFNAANDIDMICRAHQLVMEGYKWHFNETVLTVWSAPNYCYRCGNVAAILELDEHLQKDFIIFEAAPQETRGIPSKKP

SEQ ID NO: 42751 - protein, 364 aa, Homo sapiens
MWVRTTLTIERWTKEKTEPKARSWDESRCRDVNRLPSWERGHLLAGVASSTDVSTFSEGDCKEPDKCCWRHKQCTGHIIYPFASDCVRHSLHLHSVNHCNCNSRLKDSSEDSSSSRGAGPTCSHVIESPCFELTPEEEHVERFRYGWCKSYRPVSVAVIHHPLYHECGADDLNEEEEEEEEESKPPIPTQVGPATASPDLGTSMATGTPDSTAPITIWRSESPTGKGQGSKVIKKVKKKKEKEKDKEEMDEKAKLKKKAKKGQLTKKKSPVKLEPSPPDVSRSLSARQLARMSESSPESREELESEDSYNGRGQGELSSEDIVESSSPRKRENTVQAKKTGAKPSQARKVNKRKSPPGSNPNLS

SEQ ID NO: 42752 - protein, 71 aa, Homo sapiens
  MOD_RES (1)..(1): Any amino acid
XNSDDAYVQLDNLPGMSLVAGKALSSARMSDAVLSQSSLMGSQQFQDGENEDILLSYKHPEVSFSMEQAGV

SEQ ID NO: 42753 - protein, 259 aa, Homo sapiens
MPVTVTRTTITTTTTSSSGLGSPMIVGSPRALTQPLGLLRLLQLVSTCVAFSLVASVGAWTGSMGNWSMFTWCFCFSVTLIILIVELCGLQARFPLSWRNFPITFACYAALFCLSASIIYPTTYVQFLSHGRSRDHAIAATFFSCIACVAYATEVAWTRARPGEITGYMATVPGLLKVLETFVACIIFAFISDPNLYQHQPALEWCVAVYAICFILAAIAILLNLGECTNVLPIPFPSFLSGLALLSVLLYATALVLWP

SEQ ID NO: 42754 - protein, 66 aa, Homo sapiens
MEMDGDPYNLPAQGQGNIIITKYEQGHRAGAAVDLGHEQVDVRKYTNNLGIVHEMELPHVSALEVK

SEQ ID NO: 42755 - protein, 190 aa, Homo sapiens
SSSTEGEEDLFVSASENHQNNPAVPSGSIDEDVVVIEASSTPQVTANEEINVTSTDSEVEIVTVGESYRSRSTLGHSRSHWSQGSSSHASRPQEPRNRSRISTVIQPLRQNAAEVVDLTVDEDEPTVVPTTSARMESQATSASINNSNPSTSEQASDTASAVTSSQPSTVSETSATLTSNSTTGTSIGGM

SEQ ID NO: 42756 - protein, 468 aa, Homo sapiens
  MOD_RES (1)..(1): Any amino acid
XSGSDHVMLKSLDWNAEYEVYVVAENQQGKSKAAHFVFRTSAQPTAIPANGSPTSGLSTGAIVGILIVIFVLLLVVVDITCYFLNKCGLFMCIAVNLCGKAGPGAKGKDMEEGKAAFSKDESKEPIVEVRTEEERTPNHDGGKHTEPNETTPLTEPELPADTTATVEDMLPSVTTVTTNSDTITETFATAQNSPTSETTTLTSSIAPPATATPDSNSVPAGQATPSKGPSASAPSPAPASAPKVAPLVDLSDTPTSTPAASNLSSSVLANQGAVLSPSAPAGVGEASKAPPASKPTPAPVPTPTGAASPLAAAAAPATEAPQAKQEAPSTKGPDPEPTQPGAAKSPAEAATALASPKSEAASVSTTNPSQGEDFKMDEGNFKTPDIDLAKDVFAALGSPAPAAGASGQAPELAPSTADSSVSPAPAKTEKGPVEAKPECQETETKPAPAEVKTVPNDATQTKENESKA

SEQ ID NO: 42757 - protein, 170 aa, Homo sapiens
MKTPWKVLLGLLGAAALVTIITVPVVLLNKGNDATADSRKTYTLTDYLKNTYRLKLYSLRWISDHEYLYKQENNILVFNAEYGNSSVFLENSTFDEFGHSINDYSISPDGQFILLEYNYVKQWRHSYTASYDIYDLNKRQLITEERIPNNTQWVTWSPVGHKLVSICLEQ

SEQ ID NO: 42758 - protein, 1963 aa, Homo sapiens
MPPLPLARDTRQPPGASLLVRGFMVPCNACLILLATATLGFAVLLFLNNYKPGTHFTPVPPTPPDACRGMLCGFGAVCEPNAEGPGRASCVCKKSPCPSVVAPVCGSDASTYSNECELQRAQCSQQRRIRLLSRGPCGSRDPCSNVTCSFGSTCARSADGLTASCLCPATCRGAPEGTVCGSDGADYPGECQLLRRACARQENVFKKFDGPCDPCQGALPDPSRSCRVNPRTRRPEMLLRPESCPARQAPVCGDDGVTYENDCVMGRSGAARGLLLQKVRSGQCQGRDQCPEPCRFNAVCLSRRGRPRCSCDRVTCDGAYRPVCAQDGRTYDSDCWRQQAECRQQRAIPSKHQGPCDQAPSPCLGVQCAFGATCAVKNGQAACECLQACSSLYDPVCGSDGVTYGSACELEATACTLGREIQVARKGPCDRCGQCRFGALCEAETGRCVCPSECVALAQPVCGSDGHTYPSECMLHVHACTHQISLHVASAGPCETCGDAVCAFGAVCSAGQCVCPRCEHPPPGPVCGSDGVTYGSACELREAACLQQTQIEEARAGPCEQAECGSGGSGSGEDGDCEQELCRQRGGIWDEDSEDGPCVCDFSCQSVPGSPVCGSDGVTYSTECELKKARCESQRGLYVAAQGACRGPTFAPLPPVAPLHCAQTPYGCCQDNITAARGVGLAGCPSACQCNPHGSYGGTCDPATGQCSCRPGVGGLRCDRCEPGFWNFRGIVTDGRSGCTPCSCDPQGAVRDDCEQMTGLCSCKPGVAGPKCGQCPDGRALGPAGCEADASAPATCAEMRCEFGARCVEESGSAHCVCPMLTCPEANATKVCGSDGVTYGNECQLKTIACRQGLQISIQSLGPCQEAVAPSTHPTSASVTVTTPGLLLSQALPAPPGALPLAPSSTAHSQTTPPPSSRPRTTASVPRTTVWPVLTVPPTAPSPAPSLVASAFGESGSTDGSSDEELSGDQEASGGGSGGLEPLEGSSVATPGPPVERASCYNSALGCCSDGKTPSLDAEGSNCPATKVFQGVLELEGVEGQELFYTPEMADPKSELFGETARSIESTLDDLFRNSDVKKDFRSVRLRDLGPGKSVRAIVDVHFDPTTAFRAPDVARALLRQIQVSRRRSLGVRRPLQEHVRFMDFDWFPAFITGATSGAIAAGATARATTASRLPSSAVTPRAPHPSHTSQPVAKTTAAPTTRRPPTTAPSRVPGRRPPAPQQPPKPCDSQPCFHGGTCQDWALGGGFTCSCPAGRGGAVCEKVLGAPVPAFEGRSFLAFPTLRAYHTLRLALEFRALEPQGLLLYNGNARGKDFLALALLDGRVQLRFDTGSGPAVLTSAVPVEPGQWHRLELSRHWRRGTLSVDGETPVLGESPSGTDGLNLDTDLFVGGVPEDQAAVALERTFVGAGLRGCIRLLDVNNQRLELGIGPGAATRGSGVGECGDHPCLPNPCHGGAPCQNLEAGRFHCQCPPGRVGPTCADEKSPCQPNPCHGAAPCRVLPEGGAQCECPLGREGTFCQTASGQDGSGPFLADFNGFSHLELRGLHTFARDLGEKMALEVVFLARGPSGLLLYNGQKTDGKGDFVSLALRDRRLEFRYDLGKGAAVIRSREPVTLGAWTRVSLERNGRKGALRVGDGPRVLGESPKSRKVPHTVLNLKEPLYVGGAPDFSKLARAAAVSSGFDGAIQLVSLGGRQLLTPEHVLRQVDVTSFAGHPCTRASGHPCLNGASCVPREAAYVCLCPGGFSGPHCEKGLVEKSAGDVDTLAFDGRTFVEYLNAVTESELANEIPVPETLDSGALHSEKALQSNHFELSLRTEATQGLVLWSGKATERADYVALAIVDGHLQLSYNLGSQPVVLRSTVPVNTNRWLRVVAHREQREGSLQVGNEAPVTGSSPLGATQLDTDGALWLGGLPELPVGPALPKAYGTGFVGCLRDVVVGRHPLHLLEDAVTKPELRPCPTP

SEQ ID NO: 42759 - protein, 20 aa, Homo sapiens
MEGSKTSNNSTMQVSFVCQR

SEQ ID NO: 42760 - protein, 175 aa, Homo sapiens
MLRAALSLLALPLAGAAEEPTQKPESPGEPPPGLELFRWQWHEVEAPYLVALWILVASLAKIVFHLSRKVTSLVPESCLLILLGLVLGGIVLAVAKKAEYQLEPGTFFLFLLPPIVLDSGYFMPSRLFFDNLGAILTYAVVGTLWNAFTTGWLTGLPAVWEPHLGGGPRGRASCL

SEQ ID NO: 42761 - protein, 177 aa, Homo sapiens
ADITPEELFNVFFGGHFPTGNIHMFSNVTDDTYYYRRRHRHERTQTQKEEEEEKPQTTYSAFIQLLPVLVIVIISVITQLLATNPPYSLFYKSTLGYTISRETQNLQVPYFVDKNFDKAYRGASLHDLEKTIEKDYIDYIQTSCWKEKQQRFWHSPCFRTSAQQMSFEERILRSRKQ

SEQ ID NO: 42762 - protein, 40 aa, Homo sapiens
MPGLKTGTINCGTKSSFRRGGHTWVSGKPILCPIMHCNKE

SEQ ID NO: 42763 - protein, 519 aa, Homo sapiens
MATANFGKIQIGIYVEIKRSDGRIHQAMVTSLNEDNESVTVEWIENGDTKGKEIDLESIFSLNPDLVPDEEIEPSPETPPPPASSAKVNKIVKNRRTVASIKNDPPSRDNRVVGSARARPSQFPEQSSSAQQNGSVSDISPVQAAKKEFGPPSRRKSNCVKEVEKLQEKREKRRLQQQELREKRAQDVDATNPNYEIMCMIRDFRGSLDYRPLTTADPIDEHRICVCVRKRPLNKKETQMKDLDVITIPSKDVVMVHEPKQKVDLTRYLENQTFRFDYAFDDSAPNEMVYRFTARPLVETIFERGMATCFAYGQTGSGKTHTMGGDFSGKNQDCSKGIYALAARDVFLMLKKPNYKKLELQVYATFFEIYSGKVFDLLNRKTKLRVLEDGKQQVQVVGLQEREVKCVEDVLKLIDIGNSCRTSGQTSANAHSSRSHAVFQIILRRKGKLHGKFSLIDLAGNERGADTSSADRQTRLEGAEINKSLLALKVNKMYFIMKGLLLLTLIFFTQLQNSSTCFT

SEQ ID NO: 42764 - protein, 79 aa, Homo sapiens
MGPVSLLPKYQKLNTWNGDLAKMTHLQAGLSPETIEKARLELNENPDVLHQDIQQVRDMIITRPDIGFLRTDDAFILRF

SEQ ID NO: 42765 - protein, 130 aa, Homo sapiens
MYHDASRWGLTLQTYVQLTMLDRHTRPQVSSVRLMERSIHSARYIFVENLYRSGKMPEVDYVVLSEWFDWILRNMDVSVDLIVYLRTNPETCYQRLKKRCREEEKVIPLEYLEAIHHLHEEWLIKGSLFP

SEQ ID NO: 42766 - protein, 68 aa, Homo sapiens
INTRRKVDWLTEKMHARDFTVSAMHGDMDQKERDVIMREFRSGSSRVLITTDLLSVLRAHAEELSFLT

SEQ ID NO: 42767 - protein, 224 aa, Homo sapiens
MRVTAPRTLLLLLWGAVALTETWAGSHSMRYFHTSVSRPGRGEPRFISVGYVDGTQFVRFDSDAASPRTEPRAPWIEQEGPEYWDRNTQISKTNTQTYRESLRNLRGYYNQSEAGSHTLQRMYGCDVGPDGRLLRGHDQSAYDGKDYIALNEDLSSWTAADTAAQITQRKWEAARVAEQLRAYLEGTCVEWLRRHLENGKETLQRADQEQKSLFPAQRLELSNE

SEQ ID NO: 42768 - protein, 97 aa, Homo sapiens
MKKKLVVLGLLAVVLVLVIVGLCLWLPSASKEPDNHVYTRAAVAADAKQCSKIGRDALRDGGSAVDAAIAALLCVGLMNAHSMGIGGGLFLTIYNST

SEQ ID NO: 42769 - protein, 284 aa, Homo sapiens
MAGGRHRRVVGTLHLLLLVAALPWASRGVSPSASAWPEEKHIMQRIQRLQADWVLEIDTFLSQTPYGYRSFSNIISTLNPTAKRHLVLACHYDSKYFSHWNNRVFVGATDSAVPCAMMLELARALDKKLLSLKTVSDSKPDLSLQLIFFDGEEAFLHWSPQDSLYGSRHLAAKMASTPHPPGARGTSQLHGMDLLVLLDLIGAPNPTFPNFFPNSARWFERLQAIEHELHELGLLKDHSLEGRYFQNYSYGGVIQDDHIPFLRRGVPVLHLIPSPFPEVWHTMD

SEQ ID NO: 42770 - protein, 152 aa, Homo sapiens
MMSLSVRPQRRLLSARVNRSQSFAGVLGSHERGPRSFPVFSPPGPPRKPPALSRVSRMFSVAHPAAKVPQPERLDLVYTALKRGLTAYLEVHQQEQEKLQGQIRESKRNSRLGFLYDLDKQVKSIERFLRRLEFHASKIDELYEAYCVQRRL

SEQ ID NO: 42771 - protein, 212 aa, Homo sapiens
MLAGRPGTRSAVGELGTESSDNLDRAPLGPRESGGHHRPGSYLDMKIHLEKNLEEERQILLQQQKICRNRARKYFVESNRRKKAFEEKRKEQEEKEHQIREQILQQRKQKFEEVTEKFQRAHVPLSQRRKAVSRKPVPPLEEALKQIQESNLKSEVNLPFSRRPTINWSSTGCFPNPFGTSPCFEAFLFIQSPPLSTSPHSFLCHSVACTSC

SEQ ID NO: 42772 - protein, 205 aa, Homo sapiens
MYASSEDEVDVLLHGTPDQKRKLIRECLTGESESSSEDEFEKEMEAELNSTMKTMEDKLSSLGTGSSSGNGKVATAPTRYYDDIYFDSDSEDEDRAVQVTKKKKKKQHKIPTNDELLYDPEKDNRDQAWVDAQRRGYHGLGPQRSRQQQPVPNSDAVLNCPACMTTLCLDCQRHESYKTQYRAMFVMNCSINKEEVLRYKASENR

SEQ ID NO: 42773 - protein, 531 aa, Homo sapiens
MLQITEWRFLARDEGESAVAEDPTWGEDEEPSACTTDSWAQGSVPVLHASTSEGLENFQGEVHSSGASPDSSAIAPALPFPTSHCPSAFPQDPGGVDRIPLGRSWMGRGSQEQMESWEPSPQLRVTSAPPPTSELFQEAGPGGPVEEADGQSRGLSSAGSLSASFQLSVEEAPADDADPSLDPYLVASPQASTGRGHPLGFHLSLEDLYCCMPQLDAAGDRLELRSEGVPCIASGVLVSYPSVGGATRPSASCQQQRAGHSDVRLSAHHHRMRRKAAVKRLDPARLPCHWVRPLAEVLVPDSQTRPLEAYRGRQRGEKTKARAEPQALGPGTRVSPAAFFPLRPGIPFRDLDSGPALLFPTLNLGLSSPSLESKLPLPNSRIRFLTTHPVLPDVARSRSPKLWPSVRWPSGWEGKAELLGELWAGRTRVPPQGLELADREGQDPGRWPRTTPPVLEATSQVMWKPVLLPEALKLAPGVSMWNRSTQVLLSSGVPEQEDKEGFRRHLPQGAWISPLSLTMLGPFCSQIYSKE

SEQ ID NO: 42774 - protein, 916 aa, Homo sapiens
MDSERQVKDTDDIESPKRSIRDSGYIDCWDSERSDSLSPPRHGRDDSFDSLDSFGSRSRQTPSPDVVLRGSSDGRGSDSESDLPHRKLPDVKKDDMSARRTSHGEPKSAVPFNQYLPNKSNQTAYVPAPLRKKKAEREEYRKSWSTATSPLGGERPFRSTSMFDMRCEEEAAVQPHSRARQEQLQLINNQLREEDDKWQDDLARWKSRRRSVSQDLIKKEEERKKMEKLLAGEDGTSERRKSIKTYREIVQEKERRERELHEAYKNARSQEEAEGILQQYIERFTISEAVLERLEMPKILERSHSTEPNLSSFLNDPNPMKYLRQQSLPPPKFTATVETTIARASVLDTSMSAGSGSPSKTVTPKAVPMLTPKPYSQPKNSQDVLKTFKVDGKVSVNGETVHREEEKERECPTVAPAHSLTKSQMFEGVARVHGSPLELKQDNGSIEINIKKPNSVPQELAATTEKTEPNSQEDKNDGGKSRKGNIELASSEPQHFTTTVTRCSPTVAFVEFPSSPQLKNDVSEEKDQKKPENEMSGKVELVLSQKVVKPKSPEPEATLTFPFLDKMPEANQLHLPNLNSQVDSPSSEKSPVMTPFKFWAWDPEEERRRQEKWQQEQERLLQERYQKEQDKLKEEWEKAQKEVEEEERRYYEEERKIIEDTVVPFTVSSSSADQLSTSSSMTEGSGTMNKIDLGNCQDEKQDRRWKKSFQGDDSDLLLKTRESDRLEEKGSLTEGALAHSGNPVSKGVHEDHQLDTEAGAPHCGTNPQLAQDPSQNQQTSNPTHSSEDVKPKTLPLDKSINHQIESPSERRKKSPREHFQAGPFSPCSPTPPGQSPNRSISGKKLCSSCGLPLGKGAAMIIETLNLYFHIQCFRCGICKGQLGDAVSGTDVRIRNGLLNCNDCYMRSRSAGQPTTL

SEQ ID NO: 42775 - protein, 256 aa, Homo sapiens
  MOD_RES (1)..(1): Any amino acid
XEVVPEKKVPLVVPKKPEAPPAKVPEVPKEVVPEKKVAVPKKPEVPPAKVPEVPKKPVLEEKPAVPVPERAESPPPEVYEEPEEIAPEEEIAPEEEKPVPVAEEEEPEVPPPAVPEEPKKIIPEKKVPVIKKPEAPPPKEPEPEKVIEKPKLKPRPPPPPPAPPKEDVKEKIFQLKAIPKKKVPEKPQVPEKVELTPLKVPEPPPPKPVEEVEVPTVTKRERKIPEPTKVPEIKPAIPLPAPEPKPKPEAEVKTIK

SEQ ID NO: 42776 - protein, 244 aa, Homo sapiens
  MOD_RES (1)..(1): Any amino acid
XARTLRPSPLCPGGGKAQLSSASLLGAGLLLQPPTPPPLLLLLFPLLLFSRLCGALAGPIIVEPHVTAVWGKNVSLKCLIEVNETITQISWEKIHGKSSQTVAVHHPQYGFSVQGEYQGRVLFKNYSLNDATITLHNIGFSDSGKYICKAVTFPLGNAQSSTTVTVLDAPEVSVTGYDGNWFVGRKGVNLKCNADANPPPFKSVWSRLDGQWPDGLLASDNTLHFVHPLTFNYSGVYICKVTNS

SEQ ID NO: 42777 - protein, 156 aa, Homo sapiens
MDSELKEEIPVHEEFILCGGAETQVLKCGPWTDLFHDQSVKRPKLLIFIIPGNPGFSAFYVPFAKALYSLTNRRFPVWTISHAGHALAPKDKKILTTSEGGILAVLSWWTQEASPLGTLAGSTLMTPSDPNYFPKTPLHLLIAFGHRVSPMDLGAI

SEQ ID NO: 42778 - protein, 22 aa, Homo sapiens
MLLLPPRPPHPRSSSPEAMDPP

SEQ ID NO: 42779 - protein, 190 aa, Homo sapiens
  MOD_RES (1)..(1): Any amino acid
XGSKFSKTQTFQGCGILQPDPPANITVTAVARNPRWLSVTWQDPHSWNSSFYRLRFELRYRAERSKTFTTWMVKDLQHHCVIHDAWSGLRHVVQLRAQEEFGQGEWSEWSPEAMGTPWTESRSPPAENEVSTPMQALTTNKDDDNILFRDSANATSLPVQDSSSVPLPTFLVAGGSLAFGTLLCIAIVLR

SEQ ID NO: 42780 - protein, 138 aa, Homo sapiens
MADEIDWLDLPGRWAYGVDGGGRIFFINDEEKSTSWVHPGTKSPIQSGHTSCPGLPKGWEVDSTQEGAVYFINHNERRNTFLHPVTGQVPEENKKFDLKISTLDMSNKTGGKRPATTNSDIPNHNMVSEVPPERPSVR

SEQ ID NO: 42781 - protein, 1057 aa, Homo sapiens
MDAAGRGCHLLPLPAARGPARAPAAAAAAAASPPGPCSGAACAPSAAAGAGAMNPSSSAGEEKGATGGSSSSGSGAGSCCLGAEGGADPRGAGSAAAAGAAALDEPAAAGQKEKDEALEEKLRNLTFRKQVSYRKAISRAGLQHLAPAHPLSLPVANGPAKEPRATLDWSENAVNGEHLWLETNVSGDLCYLGEENCQVRFAKSALRRKCAVCKIVVHTACIEQLEKINFRCKPTFREGGSRSPRENFVRHHWVHRRRQEGKCKQCGKGFQQKFSFHSKEIVAISCSWCKQAFHNKVTCFMLHHIEEPCSLGAHAAVIVPPTWIIKVKKPQNSLKASNRKKKRTSFKRKASKRGMEQENKGRPFVIKPISSPLMKPLLVFVNPKSGGNQGTKVLQMFMWYLNPRQVFDLSQEGPKDALELYRKVPNLRILACGGDGTVGWILSILDELQLSPQPPVGVLPLGTGNDLARTLNWGGGYTDEPVSKILCQVEDGTVVQLDRWNLHVERNPDLPPEELEDGVCKLPLNVFNNYFSLGFDAHVTLEFHESREANPEKFNSRFRNKMFYAGAAFSDFLQRSSRDLSKHVKVVCDGTDLTPKIQELKFQCIVFLNIPRYCAGTMPWGNPGDHHDFEPQRHDDGYIEVIGFTMASLAALQVGGHGERLHQCREVMLLTYKSIPMQVDGEPCRLAPAMIRISLRNQANMVQKSKRRTSMPLLNDPQSVPDRLRIRVNKISLQDYEGFHYDKEKLREASIPLGILVVRGDCDLETCRMYIDRLQEDLQSVSSGSQRVHYQDHETSFPRALSAQRLSPRWCFLDATSADRFYRIDRSQEHLHFVMEISQDEIFILDPDMVVSQPAGTPPGMPDLVVEQASGISDWWNPALRKRMLSDSGLGMIAPYYEDSDLKDLSHSRVLQSPVSSEDHAILQAVIAGDLMKLIESYKNGGSLLIQGPDHCSLLHYAAKTGNGEIVKYILDHGPSELLDMADSETGETALHKAACQRNRAVCQLLVDAGASLRKTDSKGKTPQERAQQAGDPDLAAYLESRQNYKVIGHEDLETAV

SEQ ID NO: 42782 - protein, 101 aa, Homo sapiens
MEESGYESVLCVKPDVHVYRIPPRATNRGYRAAEWQLDQPSWSGRLRITAKGQMAYIKLEDRTSGELFAQAPVDQFPGTAVESVTDSSRYFVIRIEDGNGG

SEQ ID NO: 42783 - protein, 1513 aa, Homo sapiens
MEPRSMEYFCAQVQQKDVGGRLQVGQELLLYLGAPGAISDLEEDLGRLGKTVDALTGWVGSSNYRVSLMGLEILSAFVDRLSTRFKSYVAMVIVALIDRMGDAKDKVRDEAQTLILKLMDQVAPPMYIWEQLASGFKHKNFRSREGVCLCLIETLNIFGAQPLVISKLIPHLCILFGDSNSQVRDAAILAIVEIYRHVGEKVRMDLYKRGIPPARLEMIFAKFDEVQSSGGMILSVCKDKSFDDEESVDGNRPSSAASAFKVPAPKTSGNPANSARKPGSAGGPKVGGASKEGGAGAVDEDDFIKAFTDVPSIQIYSSRELEETLNKIREILSDDKHDWDQRANALKKIRSLLVAGAAQYDCFFQHLRLLDGALKLSAKDLRSQVVREACITVAHLSTVLGNKFDHGAEAIVPTLFNLVPNSAKVMATSGCAAIRFIIRHTHVPRLIPLITSNCTSKSVPVRRRSFEFLDLLLQEWQTHSLERHAAVLVETIKKGIHDADAEARVEARKTYMGLRNHFPGEAETLYNSLEPSYQKSLQTYLKSSGSVASLPQSDRSSSSSQESLNRPFSSKWSTANPSTVAGRVSAGSSKASSLPGSLQRSRSDIDVNAAAGAKAHHAAGQSVRSGRLGAGALNAGSYASLEDTSDKLDGTASEDGRVRAKLSAPLAGMGNAKADSRGRSRTKMVSQSQPGSRSGSPGRVLTTTALSTVSSGVQRVLVNSASAQKRSKIPRSQGCSREASPSRLSVARSSRIPRPSVSQGCSREASRESSRDTSPVRSFQPLGPGYGISQSSRLSSSVSAMRVLNTGSDVEEAVADALLLGDIRTKKKPARRRYESYGMHSDDDANSDASSACSERSYSSRNGSIPTYMRQTEDVAEVLNRCASSNWSERKEGLLGLQNLLKNQRTLSRVELKRLCEIFTRMFADPHGKVFSMFLETLVDFIQVHKDDLQDWLFVLLTQLLKKMGADLLGSVQAKVQKALDVTRESFPNDLQFNILMRFTVDQTQTPSLKVKVAILKYIETLAKQMDPGDFINSSETRLAVSRVITWTTEPKSSDVRKAAQSVLISLFELNTPEFTMLLGALPKTFQDGATKLLHNHLRNTGNGTQSSMGSPLTRPTPRSPANWSSPLTSPTNTSQNTLSPSAFDYDTENMNSEDIYSSLRGVTEAIQNFSFRSQEDMNEPLKRDSKKDDGDSMCGGPGMSDPRAGGDATDSSQTALDNKASLLHSMPTHSSPRSRDYNPYNYSDSISPFNKSALKEAMFDDDADQFPDDLSLDHSDLVAELLKELSNHNERVEERKIALYELMKLTQEESFSVWDEHFKTILLLLLETLGDKEPTIRALALKVLREILRHQPARFKNYAELTVMKTLEAHKDPHKEVVRSAEEAASVLATSISPEQCIKVLCPIIQTADYPINLAAIKMQTKVIERVSKETLNLLLPEIMPGLIQGYDNSESSVRKACVFCLVAVHAVIGDELKPHLSQLTGSKMKLLNLYIKRAQTGSGGADPTTDVSGQS

SEQ ID NO: 42784 - protein, 143 aa, Homo sapiens
MADPVAGIAGSAAKSVRPFRSSEAYVEAMKEDLAEWLNALYGLGLPGGGDGFLTGLATGTTLCQHANAVTEAARALAAARPARGVAFQAHSVVPGSFMARDNVATFIGWCRVELGVPEVLMFETEDLVLRKNEKSVVLCLLEV

SEQ ID NO: 42785 - protein, 352 aa, Homo sapiens
MAAGVEAAAEVAATEIKMEEESGAPGVPSGNGAPGPKGEGERPAQNEKRKEKNIKRGGNRFEPYANPTKRYRAFITNIPFDVKWQSLKDLVKEKVGEVTYVELLMDAEGKSRGCAVVEFKMEESMKKAAEVLNKHSLSGRPLKVKEDPDGEHARRAMQKAGRLGSTVFVANLDYKVGWKKLKEVFSMAGVVVRADILEDKDGKSRGIGTVTFEQSIEAVQAISMFNGQLLFDRPMHVKMDERALPKGDFFPPERPQQLPHGLGGIGMGLGPGGQPIDANHLNKGIGMGNIGPAGMEGPFGGGMENMGRFGSGMNMGRINEILSNALKRGEIIAKQGGGGGGGSVPGIERMGP

SEQ ID NO: 42786 - protein, 184 aa, Homo sapiens
YFIDATTIIECLHSFCKTCIVRYLETSKYCPICDVQVHKTRPLLNIRLDRKVNKDKEKSKEEVNDKRYLRCPAAMTVMHLRKFLRSKMDIPNTFQIDVMYEEEPLKDYYTLMDIAYIYTWRRNGPLPLKYRVRPTCKRMKISHQRDGLTNAGELESDSGSDKANSPAGGIPSTSSCLPSPSTPV

SEQ ID NO: 42787 - protein, 122 aa, Homo sapiens
VDESPPDFEIHITMCDDDPPTPEEDSETQPDEEEEEEEEKVSQPEVSISSQSWLILSSTFGRFSCIWAGYAFSTSGSHSHHPECSAVARSQLSAASISQAQAILPPQPPEKLELQECATASG

SEQ ID NO: 42788 - protein, 576 aa, Homo sapiens
  MOD_RES (1)..(1): Any amino acid
XGTVRAVVLQTGFNTAKGDLVRSILYPKPVNFQLYRDAIRFLLCLVGTATIGMIYTLCVYVLSGEPPEEVVRKALDVITIAVPPALPAALTTGIIYAQRRLKKRGIFCISPQRINVCGQLNLVCFDKTGTLTRDGLDLWGVVSCDRNGFQEVHSFASGQALPWGPLCAAMASCHSLILLDGTIQGDPLDLKMFEATTWEMAFSGDDFHIKGVPAHAMVVKPCRTASQVPVEGIAILHQFPFSSALQRMTVIVQEMGGDRLAFMKGAPERVASFCQPETVPTSFVSELQIYTTQGFRVIALAYKKLENDHHATTLTRETVESDLIFLGLLILENRLKEETKPVLEELISARIRTVMITGDNLQTAITVARKSGMVSESQKVILIEANETTGSSSASISWTLVEEKKHIMYGNQDNYINIRDEVSDKGREGSYHFALTGKSFHVISQHFSSLLPKILINGTIFARMSPGQKSSLVEEFQKLDYFVGMCGDGANDCGALKMAHVGISLSEQEASVASPFTSKTPNIECVPHLIKEGRAALVTSFCMFKYMALYSMIQRQTAFQITSFCSRIWPLQLLLV

SEQ ID NO: 42789 - protein, 49 aa, Homo sapiens
  MOD_RES (1)..(1): Any amino acid
XKCEKCGKTLTSGGHAEHEGKPYCNHPCYAAMFGPKGFGRGGAESHTFK

SEQ ID NO: 42790 - protein, 143 aa, Homo sapiens
MPHTLSLPYPQLLGLSVATMVTLTYFGAHFAVIRRASLEKNPYQAVHQWAFSAGLSLVGLLTLGAVLSAAATVREAQGLMAGGFLCFSLAFCAQVQVVFWRLHSPTQVEDAMLDTYDLVYEQAMKVSVLWEEVSFQPSGEHRG

SEQ ID NO: 42791 - protein, 54 aa, Homo sapiens
MHDSNNVEKDITPSELPANPGTSVSCCHVKKNTFASSSTIIVVCIQKSILLKLP

SEQ ID NO: 42792 - protein, 1655 aa, Homo sapiens
MPARTAPARVPTLAVPAISLPDDVRRRLKDLERDSLTEKECVKEKLNLLHEFLQTEIKNQLCDLETKLRKEELSEEGYLAKVKSLLNKDLSLENGAHAYNREVNGRLENGNQARSEARRVGMADANSPPKPLSKPRTPRRSKSDGEAKPEPSPSPRITRKSTRQTTITSHFAKGPAKRKPQEESERAKSDESIKEEDKDQDEKRRRVTSRERVARPLPAEEPERAKSGTRTEKEEERDEKEEKRLRSQTKEPTPKQKLKEEPDREARAGVQADEDEDGDEKDEKKHRSQPKDLAAKRRPEEKEPEKVNPQISDEKDEDEKEEKRRKTTPKEPTEKKMARAKTVMNSKTHPPKCIQCGQYLDDPDLKYGQHPPDAVDEPQMLTNEKLSIFDANESGFESYEALPQHKLTCFSVYCKHGHLCPIDTGLIEKNIELFFSGSAKPIYDDDPSLEGGVNGKNLGPINEWWITGFDGGEKALIGFSTSFAEYILMDPSPEYAPIFGLMQEKIYISKIVVEFLQSNSDSTYEDLINKIETTVPPSGLNLNRFTEDSLLRHAQFVVEQVESYDEAGDSDEQPIFLTPCMRDLIKLAGVTLGQRRAQARRQTIRHSTREKDRGPTKATTTKLVYQIFDTFFAEQIEKDDREDKENAFKRRRCGVCEVCQQPECGKCKACKDMVKFGGSGRSKQACQERRCPNMAMKEADDDEEVDDNIPEMPSPKKMHQGKKKKQNKNRISWVGEAVKTDGKKSYYKKVCIDAETLEVGDCVSVIPDDSSKPLYLARVTALWEDSSNGQMFHAHWFCAGTDTVLGATSDPLELFLVDECEDMQLSYIHSKVKVIYKAPSENWAMEGGMDPESLLEGDDGKTYFYQLWYDQDYARFESPPKTQPTEDNKFKFCVSCARLAEMRQKEIPRVLEQLEDLDSRVLYYSATKNGILYRVGDGVYLPPEAFTFNIKLSSPVKRPRKEPVDEDLYPEHYRKYSDYIKGSNLDAPEPYRIGRIKEIFCPKKSNGRPNETDIKIRVNKFYRPENTHKSTPASYHADINLLYWSDEEAVVDFKAVQGRCTVEYGEDLPECVQVYSMGGPNRFYFLEAYNAKSKSFEDPPNHARSPGNKGKGKGKGKGKPKSQACEPSEPEIEIKLPKLRTLDVFSGCGGLSEGFHQAGISDTLWAIEMWDPAAQAFRLNNPGSTVFTEDCNILLKLVMAGETTNSRGQRLPQKGDVEMLCGGPPCQGFSGMNRFNSRTYSKFKNSLVVSFLSYCDYYRPRFFLLENVRNFVSFKRSMVLKLTLRCLVRMGYQCTFGVLQAGQYGVAQTRRRAIILAAAPGEKLPLFPEPLHVFAPRACQLSVVVDDKKFVSNITRLSSGPFRTITVRDTMSDLPEVRNGASALEISYNGEPQSWFQRQLRGAQYQPILRDHICKDMSALVAARMRHIPLAPGSDWRDLPNIEVRLSDGTMARKLRYTHHDRKNGRSSSGALRGVCSCVEAGKACDPAARQFNTLIPWCLPHTGNRHNHWAGLYGRLEWDGFFSTTVTNPEPMGKQGRVLHPEQHRVVSVRECARSQGFPDTYRLFGNILDKHRQVGNAVPPPLAKAIGLEIKLCMLAKARESASGMVGWARLPLGPDCPLGVHVGAVAGHRFGLWDSGGSPTHVRGPIFLKGLL

SEQ ID NO: 42793 - protein, 77 aa, Homo sapiens
  MOD_RES (1)..(1): Any amino acid
XASILWLIGEYCEHVPRIAPDVLRKMAKSFTAEEDIVKLQVINLAAKLYLTNSKQAGLNSSSYFGKEESGKVAGLPT

SEQ ID NO: 42794 - protein, 253 aa, Homo sapiens
MALTVHFEEAATAKERSKVAKIGAFCCGLSLCNQHTIILYVLCIIPWILFQLLKKKELSLGSLLKLSLYFSAGLLPYVHLPISSYLNHARWTWGDQTTLQGFLTHFLREEYGTFSLAKSEIGSSMSEILLSQVTNMRTELSFNIQALAVCANICLATKDRQNPSLVWLFTGMFCIYSLFFAWRANLDISKPLFMGVVERFWMQSNAVVAVLAGIGLAAVVSETNRVLNSNGLQCLEWLSATLFVVYQIYSNYR

SEQ ID NO: 42795 - protein, 18 aa, Homo sapiens
EHPGSGGAPEPQGWIHFI

SEQ ID NO: 42796 - protein, 92 aa, Homo sapiens
MAGSEELGLREDTLRVLAAFLRRGEAAGSPVPTPPRSPAQEEPTDFLSRLRRCLPCSLGVEHVHSFTPWIQAHGGWEGILAVSPVDLNLPLD

SEQ ID NO: 42797 - protein, 45 aa, Homo sapiens
MVSRVQLPPEIQLAQRLAGNEQVTRDRAVRKLRKYIVARTQRAAD

SEQ ID NO: 42798 - protein, 154 aa, Homo sapiens
MADHSFSDGVPSDSVEAAKNASNTEKLTDQVMQNPRVLAALQERLDNVPHTPSSYIETLPKAVKRRINALKQLQDIKVKFSDPGQPMSFVLEFHFEPNDYFTNSVLTKTYKMKSEPDKADPFSFEGPEIVDCDGCTIDWKKGKNVTVKTIKKKQ

SEQ ID NO: 42799 - protein, 117 aa, Homo sapiens
MAEDEPDAKSPKTGGRAPPGGAEAGEPTTLLQRLRGTISKAVQNKVEGILQDVQKFSDNDKLYLYLQLPSGPTTGDKSSEPSTLSNEEYMYAYRWIRNHLEEHTDTCLPKQSVYDAY

SEQ ID NO: 42800 - protein, 997 aa, Homo sapiens
  MOD_RES (1)..(1): Any amino acid
XPGLLYLSSHGLWLITIAKCGILCIRDVYTLETFAWCRSHSHQGHGIQSMRISMDGQNILVNGRDDGTLVYLKWKRFGGHLASEILDYYQKLLISLSSAMDKENHYLSTTPKVSVDLGSDSEHTKQKASTDLSQDELVLTDVKKEIPWIQQKSQEAIKKEVNLFSKKRKEIKQGIKSLSKTILNMMEENDKLENIAKLDQQEFGLDLEELERLHDESQEEVAKMIKDVEMHNLAKSYLAELIKEECWNSMAVKGRALKCFHIPCVVENFPMKARTVEELKELERVLQQKKIEAECLKLRKEIVEAQSGVKLIKQRHEEDDEEEEEEDKTVKYSNLPNYLLGSLSTDFGVDTSLLSSQLELHSREEKINQIILLKDIIYKVKTVFNNEFDAAYKQKEFEIARVKERNVRIREIILDLELEEAVWQPEFEDCEKPERTLVVQDEEITAHKHIKPWHKAKELIVNHEKEHWLLIQDASTRLRALMDMMGGVLEVKKEDILRMVIPQPAFMAKPDAVWTEEERKQFKDYEKKVKELNEERDKYRKSLEAELKKLQNSIQESTQAFDEHLKRLFERRVKAEMVTNQEELKISNLAFSLLLDEELSSREKFLNNYLTRKQHEKVMDRSFKKEFSEIPGHQVDILYKLFKRRPRISKQKTHSETTSVVPFGELPGSGKLNKDAFAQLMKAMDELDNISNMPEGLDPLVWNHFCMTRRAKVENEQKVKQKAADLLEMATFLQKRVEEEEKVQQEIERVFHELILLQEEKVRFQLNLTIQILLKQGQVELENFQLVLEYSDAILINKNIIEDLNSVIRTQGQKKVASMMESKDVHKRILQIEWEHKKMEMEREDLNQKAWDIQMLFFSRDRQKYLNEPNYEALISIQIGIMEQTIAVLDKMHKKNVENCKKLLKKLGKFSNQKDIANYALSCNLREELVAVSERKDICNAMGSKLTCEKIVKERYENMMQQQKLTNISKQQAEQISILQTEVERLRMKTFPALVQM

SEQ ID NO: 42801 - protein, 118 aa, Homo sapiens
MCIAEIDLIPRDRPFVCAPSSKTGSVTTTYCCNQDHCNKIELPTTVKSSPGLGPVELAAVIAGPVCFVCISLMLMVYICHNRTVIHHRVPNEEDPSLDRPFISEGTTLKDLIYDMTTS

SEQ ID NO: 42802 - protein, 29 aa, Homo sapiens
  MOD_RES (1)..(1): Any amino acid
XALIVHGEKDPLVPRFHADFIHKHVKGSR

SEQ ID NO: 42803 - protein, 761 aa, Homo sapiens
  MOD_RES (1)..(1): Any amino acid
XSILRKVAWDYGRLALVTDADSVASAMHGDSHDRYERLTSVSSSVDFDQRDNGFCSWLTAIFRIKDDEIRDKCGGDAVHYLSFQRHIIGLLVVVGVLSVGIVLPVNFSGDLLENNAYSFGRTTIANLKSGNNLLWLHTSFAFLYLLLTVYSMRRHTSKMRYKEDDLVKRTLFINGISKYAESEKIKKHFEEAYPNCTVLEARPCYNVARLMFLDAERKKAERGKLYFTNLQSKENVPTMINPKPCGHLCCCVVRGCEQVEAIEYYTKLEQKLKEDYKREKEKVNEKPLGMAFVTFHNETITAIILKDFNVCKCQGCTCRGEPRPSSCSESLHISNWTVSYAPDPQNIYWEHLSIRGFIWWLRCLVINVVLFILLFFLTTPAIIITTMDKFNVTKPVEYLNNPIITQFFPTLLLWCFSALLPTIVYYSAFFEAHWTRSGENRTTMHKCYTFLIFMVLLLPSLGLSSLDLFFRWLFDKKFLAEAAIRFECVFLPDNGAFFVNYVIASAFIGNAMDLLRIPGLLMYMIRLCLARSAAERRNVKRHQAYEFQFGAAYAWMMCVFTVVMTYSITCPIIVPFGLMYMLLKHLVDRYNLYYAYLPAKLDKKIHSGAVNQVVAAPILCLFWLLFFSTMRTGFLAPTSMFTFVVLVITIVICLCHVCFGHFKYLSAHNYKIEHTETDTVDPRSNGRPPTAAAVPKSAKYIAQVLQDSEVDGDGDGAPGSSGDEPPSSSSQDEELLMPPDALTDTDFQSCEDSLIENEIHQ

SEQ ID NO: 42804 - protein, 10 aa, Homo sapiens
MTATTEVADD

SEQ ID NO: 42805 - protein, 35 aa, Homo sapiens
MNSAAGFSHLDRRERVLKLGESFEKQPRCAFHTVR

SEQ ID NO: 42806 - protein, 61 aa, Homo sapiens
MFTARMMLRPSGNPETGDDLRQEKNDPVEKMELVADPETRTVAVKQLGVNPSTTGTQELKP

SEQ ID NO: 42807 - protein, 74 aa, Homo sapiens
MAIPGRQYGLILPKKTQQLHPVLQKPSVFGNDSDDDDEMGFHSCCPGWSAMVQSRLTATSTSWVQAIFLPQPPK

SEQ ID NO: 42808 - protein, 288 aa, Homo sapiens
MSMILSASVIRVRDGLPLSASTDYEQSTGMQECRKYFKMLSRKLAQLPDRCTLKTGHYNINFISSLGVSYMMLCTENYPNVLAFSFLDELQKEFITTYNMMKTNTAVRPYCFIEFDNFIQRTKQRYNNPRSLSTKINLSDMQTEIKLRPPYQISMCELGSANGVTSAFSVDCKGAGKISSAHQRLEPATLSGIVGFILSLLCGALNLIRGFHAIESLLQSDGDDFNYIIAFFLGTAACLYQCYLLVYYTGWRNVKSFLTFGLICLCNMYLYELRNLWQLFFHVTVGAF

SEQ ID NO: 42809 - protein, 64 aa, Homo sapiens
MAAAPLKVCIVGSGNWLPCQILARLCRMQTCWCLSFPTSSFTESVMRSLGECPRKRWESPSSRA

SEQ ID NO: 42810 - protein, 440 aa, Homo sapiens
MDLSSEMNRHGKNPVSHKLEDQKKIYTDWANHYLAKSGHKRLIKDLQQDIADGVLLAEIIQIIANEKVEDINGCPRSQSQMIENVDVCLSFLAARGVNVQGLSAEEIRNGNLKAILGLFFSLSRYKQQQHHQQQYYQSLVELQQRVTHASPPSEASQAKTQQDMQSSLAARYATQSNHSGIATSQKKPTRLPGPSRVPAAGSSSKVQGASNLNRRSQSFNSIDKNKPPNYANGNEKDSSKGPQSSSGVNGNVQPPSTAGQPPASAIPSPSASKPWRSKSMNVKHSATSTMLTVKQSSTATSPTPSSDRLKPPVSEGVKTAPSGQKSMLEKFKLVNARTALRPPQPPSSGPSDGGKDDDAFSESGEMEGFNSGLNSGGSTNSSPKVSPKLAPPKAGSKNLSNKKSLLQPKEKEEKNRDKNKVCTEKPVKEEKDQVTEMAPK

SEQ ID NO: 42811 - protein, 665 aa, Homo sapiens
MEEQDEKPPEPPKVCAQDSFLPQEIIIKVEGEDTGSLTIPSQEGVNFKIVTVDFTREEQGTCNPAQRTLDRDVILENHRDLVSWDLATAVGKKDSTSKQRIFDEEPANGVKIERFTRDDPWLSSCEEVDDCKDQLEKQQEKQEILLQEVAFTQRKAVIHERVCKSDETGEKSGLNSSLFSSPVIPIRNHFHKHVSHAKKWHLNAAVNSHQKINENETLYENNECGKPPQSIHLIQFTRTQTKDKSYGFSDRIQSFCHGTPLHIHEKIHGGGKTFDFKECGQVLNPKISHNEQQRIPFEESQYKCSETSHSSSLTQNMRNNSEEKPFECNQCGKSFSWSSHLVAHQRTHTGEKPYECSECGKSFSRSSHLVSHQRTHTGEKPYRCNQCGKSFSQSYVLVVHQRTHTGEKPYECNQCGKSFRQSYKLIAHQRTHTGEKPYECNQCGKSFIQSYKLIAHQRIHTGEKPYECNQCGKSFSQSYKLVAHQRTHTGEKPFECNQCGKSFSWSSQLVAHQRTHTGEKPYECSECGKSFNRSSHLVMHQRIHTGEKPYECNQCGKSFSQSYVLVVHQRTHTGEKPYECSQCGKSFRQSSCLTQHQRTHTGEKPFECNQCGKTFSLSARLIVHQRTHTGEKPFTCIQCGKAFINSYKLIRHQATHTEEKLYECN

SEQ ID NO: 42812 - protein, 128 aa, Homo sapiens
MPAPTQLFFPLIRNCELSRIYGTACYCHHKHLCCSSSYIPQSRLRYTPHPAYATFCRPKENWWQYTQGRRYASTPQKFYLTPPQVNSILKANEYSFKVPEFDGKNVSSILGFDSNQLPANAPIEDRRS

SEQ ID NO: 42813 - protein, 827 aa, Homo sapiens
MFWKFDLHSSSHIDTLLEREDVTLKELMDEEDVLQECKAQNRKLIEFLLKAECLEDLVSFIIEEPPQDMDEKIRYKYPNISCELLTSDVSQMNDRLGEDESLLMKLYSFLLNDSPLNPLLASFFSKVLSILISRKPEQIVDFLKKKHDFVDLIIKHIGTSAIMDLLLRLLTCIEPPQPRQDVLNWLNEEKIIQRLVEIVHPSQEEDRHSNASQSLCEIVRLSRDQMLQIQNSTEPDPLLATLEKQEIIEQLLSNIFHKEKNESAIVSAIQILLTLLETRRPTFEGHIEICPPGMSHSACSVNKSVLEAIRGRLGSFHELLLEPPKKSVMKTTWGVLDPPVGNTRLNVIRLISSLLQTNTSSINGDLMELNSIGVILNMFFKYTWNNFLHTQVEICIALILASPFENTENATITDQDSTGDNLLLKHLFQKCQLIERILEAWEMNEKKQAEGGRRHGYMGHLTRIANCIVHSTDKGPNSALVQQLIKDLPDEVRERWETFCTSSLGETNKRNTVDLFGFNDEKFADQDDIGNVSFDRVSDINFTLNTNESGNIALFEACCKERIQQFDDGGSDEEDIWEEKHIAFTPESQRRSSSGSTDSEESTDSEEEDGAKQDLFEPSSANTEDKMEVDLSEPPNWSANFDVPMETTHGAPLDSVGSDVWSTEEPMPTKETGWASFSEFTSSLSTKDSLRSNSPVEMETSTEPMDPLTPSAAALAVQPEAAGSVAMEASSDGEEDAESTDKVTETVMNGGMKETLSLTVDAKTETAVFKSEEGKLSTSQDAACKDAEECPETAEAKCAAPRPPSSSPEQRTGQPSAPGDTSVNGPV

SEQ ID NO: 42814 - protein, 192 aa, Homo sapiens
  MOD_RES (1)..(1): Any amino acid
XESMLNATTRRMLSHSSGAVRYLMHVPGNAGADVLLVGSEAFVLLDGQELTPRWTPKAAHVLRKPIFGRYKPDTLAVAVENGTGTDRQETGEARHSLYMFHPTLPRVLLELANVSTHIVAFDAVLFEPSRHAAYILLTGPADSEAPGLVSVIKHKVRDLVPSSRVVRLGEGGPDSDQAIRDRFSRLRYQSEA

SEQ ID NO: 42815 - protein, 933 aa, Homo sapiens
MAASTAQCRVTKAESKAAAGPRAGGARERAPAGAPPPSPPSPGPAAPPAPPPPPPPPPPPPPPPPPPPPPRDGPKAEPEPGPGPASAPAPGLGSEENAMVAMDLGSPSLPKKSLPVPGALEQVASRLSSKVAAEVPHGSKQELQDLKAQSLTTCEVCGACFETRKGLSSHARSHLRQLGVAESESSGAPIDLLYELVKQKGLPDAHLGLPPGLAKKSSSLKEVVAGAPRPGLLSLAKPLDAPAVNKAIKSPPGFSAKGLGHPPSSPLLKKTPLALAGSPTPKNPEDKSPQLSLSPRPASPKAQWPQSEDEGPLNLTSGPEPARDIRCEFCGEFFENRKGLSSHARSHLRQMGVTEWYVNGSPIDTLREILKRRTQSRPGGPPNPPGPSPKALAKMMGGAGPGSSLEARSPSDLHISPLAKKLPPPPGSPLGHSPTASPPPTARKMFPGLAAPSLPKKLKPEQIRVEIKREMLPGALHGELHPSEGPWGAPREDMTPLNLSSRAEPVRDIRCEFCGEFFENRKGLSSHARSHLRQMGVTEWSVNGSPIDTLREILKKKSKPCLIKKEPPAGDLAPALAEDGPPTVAPGPVQSPLPLSPLAGRPGKPGAGPAQVPRELSLTPITGAKPSATGYLGSVAAKRPLQEDRLLPAEVKAKTYIQTELPFKAKTLHEKTSHSSTEACCELCGLYFENRKALASHARAHLRQFGVTEWCVNGSPIETLSEWIKHRPQKVGAYRSYIQGGRPFTKKFRSAGHGRDSDKRPSLGLAPGGLAVVGRSAGGEPGPEAGRAADGGERPLAASPPGTVKAEEHQRQNINKFERRQARPPDASAARGGEDTNDLQQKLEEVRQPPPRVRPVPSLVPRPPQTSLVKFVGNIYTLKCRFCEVEFQGPLSIQEEWVRHLQRHILEMNFSKADPPPEESQAPQAQTAAAEAP

SEQ ID NO: 42816 - protein, 44 aa, Homo sapiens
MARAMAAAWPLLLVALLVLSWPPPGTGAQHGGDACVTADLGAAW

SEQ ID NO: 42817 - protein, 246 aa, Homo sapiens
MASVGRSEGTAGGGAGPGEPRREEGRAGLSPSSPPGSHSMRYFYTAMSRPGRGEPRFIAVGYVDDTQFVRFDSDAASPRMAPRAPWIEQEGPEYWDRETQISKTNTQTYRESLRNLRGYYNQSEAGSHTLQRMYGCDVGPDGRLLRGHDQSAYDGKDYIALNEDLSSWTAADTAAQITQRKWEAAREAEQWRAYLEGLCVEWLRRYLENGKETLQRADPPKTHVTHHPISDHEATLRCWALGFYPA

SEQ ID NO: 42818 - protein, 122 aa, Homo sapiens
MCPSLYPRYLLQYQEPIPCEQLVTALCDIKQAYTQFGGKRPFGVSLLYIGWDKHYGFQLYQSDPSGNYGGWKATCIGNNSAAAVSMLKQDYKEGEMTLKSALALAIKVLNKTMDVSKLSAEK

SEQ ID NO: 42819 - protein, 244 aa, Homo sapiens
MEAMWLLCVALAVLAWGFLWVWDSSERMKSREQGGRLGAESRTLLVIAHPDDEAMFFAPTVLGLARLRHWVYLLCFSAGNYYNQGETRKKELLQSCDVLGIPLSSVMIIDNRDFPDDPGMQWDTEHVARVLLQHIEVNGINLVVTFDAGGVSGHSNHIALYAAVRVLCAHASVCECAAQVHLPSGSALVSASYAGCPLRAQQQRSGTGQESHVLPPQPAPLVPPPLHYLLPVHENQLTELPLKP

SEQ ID NO: 42820 - protein, 392 aa, Homo sapiens
  MOD_RES (1)..(1): Any amino acid
XSSESEGTKSSSSASDGESEGKRGRQKPKAAPEGAGALAQGSSLEPGRPAAPSLPGEAEPGAHAPDKEPELGGQEEGERDGLCGLGNGCADRKEAETESQNSELSGVTAGESLDQSMEEEEEEDTDEDDHLIYLEEILVRVHTDYYAKYDRYLNKEIEEAPDIRKIVPELKSKVLADVAIIFSGLHPTNFPIEKTREHYHATALGAKILTRLVLSPDAPDRATHLIAARAGTEKVLQAQECGHLHVVNPDWLWSCLERWDKVEEQLFPLRDDHTKAQRENSPAAFPDREGVPPTALFHPMPVLPKAQPGPEVRIYDSNTGKLIRTGARGPPAPSSSLPIRQEPSSFRGHKRKLNEEDAASESSRESSNEDEGSSSEADEMAKALEAELNDLM

SEQ ID NO: 42821 - protein, 454 aa, Homo sapiens
MQLPRWWELGDPCAWTGQGRGTRRMSPATTGTFLLTVYSIFSKVHSDRNVYPSAGVLFVHVLEREYFKGEFPPYPKPGEISNDPITFNTNLMGYPDRPGWLRYIQRTPYSDGVLYGSPTAENVGKPTIIEITAYNRRTFETARHNLIINIMSAEDFPLPYQAEFFIKNMNVEEMLASEVLGDFLGAVKNVWQPERLNAINITSALDRGGRVPLPINDLKEGVYVMVGADVPFSSCLREVENPQNQLRCSQEMEPVITCDKKFRTQFYIDWCKISLVDKTKQVSTYQEVIRGEGILPDGGEYKPPSDSLKSRDYYTDFLITLAVPSAVALVLFLILAYIMCCRREGVEKRNMQTPDIQLVHHSAIQKSTKELRDMSKNREIAWPLSTLPVFHPVTGEIIPPLHTDNYDSTNMPLMQTQQWSFAPVAQAGVQWSDLGSLQPPPPRDGVSPCWPGWS

SEQ ID NO: 42822 - protein, 737 aa, Homo sapiens
MGRGSGTFERLLDKATSQLLLETDWESILQICDLIRQGDTQAKYAVNSIKKKVNDKNPHVALYALEVMESVVKNCGQTVHDEVANKQTMEELKDLLKRQVEVNVRNKILYLIQAWAHAFRNEPKYKVVQDTYQIMKVEGHVFPEFKESDAMFAAERAPDWVDAEECHRCRVQFGVMTRKHHCRACGQIFCGKCSSKYSTIPKFGIEKEVRVCEPCYEQLNRKAEGKATSTTELPPEYLTSPLSQQSQLPPKRDETALQEEEELQLALALSQSEAEEKERLRQKSTYTSYPKAEPMPSASSAPPASSLYSSPVNSSAPLAEDIDPELARYLNRNYWEKKQEEARKSPTPSAPVPLTEPAAQPGEGHAAPTNVVENPLPETDSQPIPPSGGPFSEPQFHNGESEESHEQFLKALQNAVTTFVNRMKSNHMRGRSITNDSAVLSLFQSINGMHPQLLELLNQLDERRLYYEGLQDKLAQIRDARGALSALREEHREKLRRAAEEAERQRQIQLAQKLEIMRQKKQEYLEVQRQLAIQRLQEQEKERQMRLEQQKQTVQMRAQMPAFPLPYAQLQAMPAAGGVLYQPSGPASFPSTFSPAGSVEGSPMHGVYMSQPAPAAGPYPSMPSTAADPSMVSAYMYPAGATGAQAAPQAQAGPTASPAYSSYQPTPTAGYQNLMTTLPSQDASLPPQQPYIAGQQPMYQQGETHTRGPFSADRTRTQVSGQIRASASVDRKNREFT

SEQ ID NO: 42823 - protein, 46 aa, Homo sapiens
  MOD_RES (1)..(1): Any amino acid
XENIVWMTQEDSVKVLILKKQVQMKLRFPKEILTRLLLWPSMFCFL

SEQ ID NO: 42824 - protein, 170 aa, Homo sapiens
MEVLREKVEEEEEAEREEAAEWAEWARMEKMMRPVEVRKEEITLKQETLRDLEKKLSEIQITVSAELPAFTKDTIDISKLPISYKTNTPKEEHLLQVADNFSRQYSHLCPDRVPLFLHPLNECEVPVRLKFVSTTLRPTLMPYPELYNWDSCAQFVSDFLTMVPLPDPLK

SEQ ID NO: 42825 - protein, 357 aa, Homo sapiens
MADGNEDLRADDLPGPAFESYESMELACPAERSGHVAVSDGRHMFVWGGYKSNQVRGLYDFYLPREELWIYNMETGRWKKINTEGDVPPSMSGSCAVCVDRVLYLFGGHHSRGNTNKFYMLDSRSTDRVLQWERIDCQGIPPSSKDKLGVWVYKNKLIFFGGYGYLPEDKVLGTFEFDETSFWNSSHPRGWNDHVHILDTETFTWSQPITTGKAPSPRAAHACATVGNRGFVFGGRYRDARMNDLHYLNLDTWEWNELIPQGICPVGRSWHSLTPVSSDHLFLFGGFTTDKQPLSDAWTYCISKNEWIQFNHPYTEKPRLWHTACASDEGEVIVFGGCANNLLVHHRAAKLRSSHLL

SEQ ID NO: 42826 - protein, 906 aa, Homo sapiens
MAARPLPVSPARALLLALAGALLAPCEARGVSLWNQGRADEVVSASVGSGDLWIPVKSFDSKNHPEVLNIRLQRESKELIINLERNEGLIASSFTETHYLQDGTDVSLARNYTGHCYYHGHVRGYSDSAVSLSTCSGLRGLIVFENESYVLEPMKSATNRYKLFPAKKLKSVRGSCGSHHNTPNLAAKNVFPPPSQTWARRHKRETLKATKYVELVIVADNREFQRQGKDLEKVKQRLIEIANHVDKFYRPLNIRIVLVGVEVWNDMDKCSVSQDPFTSLHEFLDWRKMKLLPRKSHDNAQLVSGVYFQGTTIGMAPIMSMCTADQSGGIVMDHSDNPLGAAVTLAHELGHNFGMNHDTLDRGCSCQMAVEKGGCIMNASTGYPFPMVFSSCSRKDLETSLEKGMGVCLFNLPEVRESFGGQKCGNRFVEEGEECDCGEPEECMNRCCNATTCTLKPDAVCAHGLCCEDCQLKPAGTACRDSSNSCDLPEFCTGASPHCPANVYLHDGHSCQDVDGYCYNGICQTHEQQCVTLWGPGAKPAPGICFERVNSAGDPYGNCGKVSKSSFAKCEMRDAKCGKIQCQGGASRPVIGTNAVSIETNIPLQQGGRILCRGTHVYLGDDMPDPGLVLAGTKCADGKICLNRQCQNISVFGVHECAMQCHGRGVCNNRKNCHCEAHWAPPFCDKFGFGGSTDSGPIRQADNQGLTIGILVTILCLLAAGFVVYLKRKTLIRLLFTNKKTTIEKLRCVRPSRPPRGFQPCQAHLGHLGKGLMRKPPDSYPPKDNPRRLLQCQNVDISRPLNGLNVPQPQSTQRVLPPLHRAPRAPSVPARPLPAKPALRQAQGTCKPNPPQKPLPADPLARTTRLTHALARTPGQWETGLRLAPLRPAPQYPHQVPRSTHTAYIK

SEQ ID NO: 42827 - protein, 52 aa, Homo sapiens
  MOD_RES (1)..(1): Any amino acid
XLYRKVMLENYRNLVSLGLTVSKPELISRLEQRQEPWNVKRHETIAKPPVSV

SEQ ID NO: 42828 - protein, 20 aa, Homo sapiens
MTKKTRDLRRQLRKAVMDHV

SEQ ID NO: 42829 - protein, 130 aa, Homo sapiens
  MOD_RES (1)..(1): Any amino acid
XVSQYKVRDTFCSYSVMELCTKGLGSQTESLKARGLDLSRVRTCVVVAEERPRIALTQSFSKLFKDLGLHPRAVSTSFGCRVNLAICLQCWDYRHEPPRPAPKCFKMVYKEGVRSVGEDKIREKRTKTWR

SEQ ID NO: 42830 - protein, 1051 aa, Homo sapiens
MSVKEGAQRKWAALKEKLGPQDSDPTEANLESADPELCIRLLQMPSVVNYSGLRKRLEGSDGGWMVQFLEQSGLDLLLEALARLSGRGVARISDALLQLTCVSCVRAVMNSRQGIEYILSNQGYVRQLSQALDTSNVMVKKQVFELLAALCIYSPEGHVLTLDALDHYKTVCSQQYRFSIVMNELSGSDNVPYVVTLLSVINAVILGPEDLRARTQLRNEFIGLQLLDVLARLRDLEDADLLIQLEAFEEAKAEDEEELLRVSGGVDMSSHQEVFASLFHKVSCSPVSAQLLSVLQGLLHLEPTLRSSQLLWEALESLVNRAVLLASDAQECTLEEVVERLLSVKGRPRPSPLVKAHKSVQANLDQSQRGSSPQNTTTPKPSVEGQQPAAAAACEPVDHAQSESILKVSQPRALEQQASTPPPPPPPPLLPGSSAEPPPPPPPPPLPSVGAKALPTAPPPPPLPGLGAMAPPAPPLPPPLPGSCEFLPPPPPPLPGLGCPPPPPPLLPGMGWGPPPPPPPLLPCTCSPPVAGGMEEVIVAQVDHGLGSAWVPSHRRVNPPTLRMKKLNWQKLPSNVAREHNSMWASLSSPDAEAVEPDFSSIERLFSFPAAKPKEPTMVAPRARKEPKEITFLDAKKSLNLNIFLKQFKCSNEEVAAMIRAGDTTKFDVEVLKQLLKLLPEKHEIENLRAFTEERAKLASADHFYLLLLAIPCYQLRIECMLLCEGAAAVLDMVRPKAQLVLAACESLLTSRQLPIFCQLILRIGNFLNYGSHTGDADGFKISTLLKLTETKSQQNRVTLLHHVLEEAEKSHPDLLQLPRDLEQPSQAAGINLEIIRSEASSNLKKLLETERKVSASVAEVQEQYTERLQASISAFRALDELFEAIEQKQRELADYLCEDAQQLSLEDTFSTMKAFRDLFLRALKCRRTRTGRSRRRRQRGGSSSWRRRRRGGLGERTGSLSGRGPGSRRRCVSSMPCWLTSGRASSCGRQPGAAGTPTGAARQPPWIPQEPQSLWPPVTLQEIPWAARAVPPLSPALMLQQPASPGAGTL

SEQ ID NO: 42831 - protein, 89 aa, Homo sapiens
MILLEVNNRIIEETLALKFENAAAGNKPEAVEVTFADFDGVLYHISNPNGDKTKVMVSISLKFYKELQAHGADELLKRVYGSFLVNPES

SEQ ID NO: 42832 - protein, 99 aa, Homo sapiens
MRPMRIFVNDDRHVMAKHSSVYPTQEELEAVQNMVSHTERALKAVSDWIDEQEKGSSEQAESDNMDVPPEDDSKEGAGEQKTEHMTRTLRGVMRVGLVA

SEQ ID NO: 42833 - protein, 168 aa, Homo sapiens
  MOD_RES (1)..(1): Any amino acid
XHCLLSACLAPARPCSARGALSPPGIPFTASLSIGGVSKDPFPLGMAQPGVSVKSLVSSYETRVVGMAPGLPRKRGCASSPCSPRGASPIRGTSGPPPHRGLGGPGQRPSTRRGMDKTLLSLILYCHSGSGSLVGIDNKIEQAMPSRHWAGDEAPTPLTLCLSRGPQD

SEQ ID NO: 42834 - protein, 47 aa, Homo sapiens
MRQLKGKPKKETSKDKKERKQAMQEARQQITTVVLPTLAVVVLLIVV

SEQ ID NO: 42835 - protein, 193 aa, Homo sapiens
MFRRKLTALDYHNPAGFNCKDETEFRNFIVWLEDQKIRHYKIEDRGNLRNIHSSDWPKFFEKYLRDVNCPFKIQDRQEAIDWLLGLAVRLEYGDNAEKYKDLVPDNSKTADNATKNAEPLINLDVNNPDFKAGVMALANLLQIQRHDDYLVMLKAIRILVQERLTQDAVAKANQTKEEMQFLMKLLKFCDCCT

SEQ ID NO: 42836 - protein, 76 aa, Homo sapiens
MSVQYPRRRATAGEKPGNEPEEVKLQNASKQIVQNAILQAVQQVSQESQRREERISDNRDHIQLGVGELTKKHEKK

SEQ ID NO: 42837 - protein, 116 aa, Homo sapiens
MDSPIQIFRGEPGPTCAPSACLPPNSSAWFPGWAEPDSNGSAGSEDAQLEPAHISPAIPVIITAVYSVVFVVGLVGNSLVMFVIIRLEFQWKTTKPCDELRDPKGTGVKPGREALD

SEQ ID NO: 42838 - protein, 108 aa, Homo sapiens
ALVSAAKLEKEAVKDAVLKVVEEERKNLEKAHAEERELWKTEHAKDQEKVSQEIQKAIQEQRKISQETVKAAIIEEQKRSEKAVEEAVKRTRDELIEYIKEQKRVSIS

SEQ ID NO: 42839 - protein, 122 aa, Homo sapiens
MAAAAARVVLSSAARRRLWGFSESLLIRGAAGRVSFPPGRSCPRDLARPGAAHLRVGATDPNSGSGRASSTRTRRAPGGLGLLNWPGVTGLWPPARRPASDVWDDPGFRLLPPATEECMFDH

SEQ ID NO: 42840 - protein, 195 aa, Homo sapiens
MSALLRLLRTGAPAAACLRLGTSAGTGSRRAMALYHTEERGQPCSQNYRLFFKNVTGHYISPFHDIPLKENGIPMKKARNDEYENLFNMIVEIPRWTNAKMEIATKEPMNPIKQYVKDGKLRYVANIFPYKGYIWNYGTLPQTWEDPHEKDKSTNCFGDNDPIDVCEIGSKILSCGEVIHVKILGILALIDEGET

SEQ ID NO: 42841 - protein, 161 aa, Homo sapiens
MELVQVLKRGLQQITGHGGLRGYLRVFFRTNDAKVGTLVGEDKYGNKYYEDNKQFFGRHRWVVYTTEMNGKNTFWDVDGSMVPPEWCPALSCSMEWPMWQELKIIFNASQQKTEVLSPTSHKEMNSANNRVNETAVLVRNAIAAFRRDSGIEDPTNGCLDS

SEQ ID NO: 42842 - protein, 2368 aa, Homo sapiens [sequence omitted]

SEQ ID NO: 42843 - protein, 822 aa, Homo sapiens
MPKSTGMLHGGRENAGVKFSSCVGTKGTQYETNSMDFKPQKGKKVVALDPSPPPKDTLLPWPQHQNANGLRRRKRDWVIPPINVPENSRGPFPQQLVRIRSDKDNDIPIRYSITGVGADQPPMEVFSIDSMSGRMYVTRPMDREEHASYHLRAHAVDMNGNKVENPIDLYIYVIDMNDNRPEFINQVYNGSVDEGSKPGTYVMTVTANDADDSTTANGMVRYRIVTQTPQSPSQNMFTINSETGDIVTVAAGLDREKVQQYTVIVQATDMEGNLNYGLSNTATAIITVTDVNDNPPEFTASTFAGEVPENRVETVVANLTVMDRDQPHSPNWNAVYRIISGDPSGHFSVRTDPVTNEGMVTVVKAVDYELNRAFMLTVMVSNQAPLASGIQMSFQSTAGVTISIMDINEAPYFPSNHKLIRLEEGVPPGTVLTTFSAVDPDRFMQQAVRYSKLSDPASWLHINATNGQITTAAVLDRESLYTKNNVYEATFLAADNGIPPASGTGTLQIYLIDINDNAPELLPKEAQICEKPNLNAINITAADADVDPNIGPYVFELPFVPAAVRKNWTITRLNGDYAQLSLRILYLEAGMYDVPIIVTDSGNPPLSNTSIIKVKVCPCDDNGDCTTIGAVAAAGLGTGAIVAILICILILLTMVLLFVMWMKRREKERHTKQLLIDPEDDVRDNILKYDEEGGGEEDQDYDLSQLQQPEAMGHVPSKAPGVRRVDERPVGAEPQYPIRPMVPHPGDIGDFINEGLRAADNDPTAPPYDSLLVFDYEGSGSTAGSVSSLNSSSSGDQDYDYLNDWGPRFKKLADMYGGGEED

SEQ ID NO: 42844 - protein, 199 aa, Homo sapiens
MFCQLAKTCPVQLWVDSTPPPGTRVRAMAIYKQSQHMTEVVRRCPHHERCSDSDGLAPPQHLIRVEGNLRVEYLDDRNTFRHSVVVPYEPPEVGSDCTTIHYNYMCNSSCMGGMNRRPILTIITLEDSSGNLLGRNSFEVRVCACPGRDRRTEEENLRKKGEPHHELPPGSTKRALPNNTSSSPQPKKKPLDGEYFTLQ

SEQ ID NO: 42845 - protein, 247 aa, Homo sapiens
MGCCTGRCSLICLCALQLVSALERQIFDFLGFQWAPILGNFLHIIVVILGLFGTIQYRPRYIMVYTVWTALWVTWNVFIICFYLEVGGLSKDTDLMTFNISVHRSWWREHGPGCVRRVLPPSAHGMMDDYTYVSVTGCIVDFQYLEVIHSAVQILLSLVGFVYACYVISISMEEEDTFDFIGGLDTHSYYQDHVELKPVKPGVQATWCRHLLSFWKGLRKLLLMMEGKAGGGTSHSKSGSKRDVMLF

SEQ ID NO: 42846 - protein, 169 aa, Homo sapiens
  MOD_RES (1)..(1): Any amino acid
XVAGCSVQPWESLSSNSHTSTTSSTASSCDTEFTKEDEQRLKDYIQQLKNDRAAVKLTMLELESIHIDPLSYDVKPRGDSQRLDLENAVLMQELMAMKEEMAELKAQLYLLEKEKKALELKLSTREAQEQAYLVHIEHLKSEVEEQKEQRMRSLSSTSSGSKDKPGKVI

SEQ ID NO: 42847 - protein, 370 aa, Homo sapiens
TAASTMSVCSSDLSYSSRVCLPGSCDSCSDSWQVDDCPESCCEPPCCAPSCCAPAPCLSLVCTPVSRVSSPCCPVTCEPSPCQSGCTSSCTPSCCQQSSCQLACCASSPCQQACCVPVCCKTVCCKPVCCVPVCCGDSSCCQQSSCQSACCTSSPCQQACCVPICCKPVCSGISSSCCQQSSCVSCVSSPCCQAVCEPSPCQSGCISSCTPSCCQQSSCQPACCTSSSCQQACCVPVCCLPVCCAPTCSEDSYSCCQQSSCQPACCTSSPCQQACCVPVCSGASTSCCQQSSCQPACCTASCCRPSSSVSLLCHPVCKSTCCVPVPSCGASASSCQPSCCRTASCVSLLCRPVCSRPACYSLCSGQKSSC

SEQ ID NO: 42848 - protein, 600 aa, Homo sapiens
MEGKWLLCMLLVLGTAIVEAHDGHDDDVIDIEDDLDDVIEEVEDSKPDTTAPPSSPKVTYKAPVPTGEVYFADSFDRGTLSGWILSKAKKDDTDDEIAKYDGKWEVEEMKESKLPGDKGLVLMSRAKHHAISAKLNKPFLFDTKPLIVQYEVNFQNGIECGGAYVKLLSKTPELNLDQFHDKTPYTIMFGPDKCGEDYKLHFIFRHKNPKTGIYEEKHAKRPDADLKTYFTDKKTHLYTLILNPDNSFEILVDQSVVNSGNLLNDMTPPVNPSREIEDPEDRKPEDWDERPKIPDPEAVKPDDWDEDAPAKIPDEEATKPEGWLDDEPEYVPDPDAEKPEDWDEDMDGEWEAPQIANPRCESAPGCGVWQRPVIDNPNYKGKWKPPMIDNPSYQGIWKPRKIPNPDFFEDLEPFRMTPFSAIGLELWSMTSDIFFDNFIICADRRIVDDWANDGWGLKKAADGAAEPGVVGQMIEAAEERPWLWVVYILTVALPVFLVILFCCSGKKQTSGMEYKKTDAPQPDVKEEEEEKEEEKDKGDEEEEGEEKLEEKQKSDAEEDGGTVSQEEEDRKPKAEVKERGHTFCFTKLKVHLCKGNILIG

SEQ ID NO: 42849 - protein, 162 aa, Homo sapiens
MLKEGVRLDRVRGGRQKYKRRPEVDPLPFPGPFPAGPLAVAGGPRKTAAPVNALVSHLLVVEPEKLYAMPDPAGPDGHLPAVATLCDLFDREIVVTISWAKSIPGFSSLSLSDQMSVLQSVWMEVLVLGVAQRSLPLQDELAFAEDLVLDEEGARAAGLGEL

SEQ ID NO: 42850 - protein, 38 aa, Homo sapiens
MNFDLKQGTWGGDWPEALAISQRWQQQDKAANKELTFL

SEQ ID NO: 42851 - protein, 77 aa, Homo sapiens
MEKRLGVKPNPASWILSGYYWQTSAKWLRSLYLFYTCFCFSVLWLSTGPQGDYNFQSPNHRPDCRAVWWAKECISAT

SEQ ID NO: 42852 - protein, 309 aa, Homo sapiens
MPGKHQHFQEPEVGCCGKYFLFGFNIVFWVLGALFLAIGLWAWGEKGVLSNISALTDLGGLDPVWLFVVVGGVMSVLGFAGCIGALRENTFLLKFDWIRDQLNLFINNNVKAYRDDIDLQNLIDFAQEYWSCCGARGPNDWNLNIYFNCTDLNPSRERCGVPFSCCVRDPAEDVLNTQCGYDVRLKLVRGELEQQGFIHTKGCVGQFEKWLQDNLIVVAGVFMGIALLQIFGICLAQNLVSDIKAVKANWSKWNDDFENHWLTPTISEVLSTAGPQQNSLTGAPGPAPPSRHVFFGLGGLYPEPTFKNW

SEQ ID NO: 42853 - protein, 269 aa, Homo sapiens
MSSGASRKSWDPGNPWPPDWPITGRKMKVLWAALLVTFLAGCQAKVEQAVETEPEPELRQQTEWQSGQRWELALGRFWDYLRWVQTLSEQVQEELLSSQVTQELRALMDETMKELKAYKSELEEQLTPVAEETRARLSKELQAAQARLGADMEDVCGRLVQYRGEVQAMLGQSTEELRVRLASHLRKLRKRLLRDADDLQKRLAVYQAGAREGAERGLSAIRERLGPLVEQGRVRAATVGSLAGQPLQERAQAWGERLRARMEEMGSRT

SEQ ID NO: 42854 - protein, 76 aa, Homo sapiens
MRLSLPLLLLLLGAWAIPGGLGDRAPLTATAPQLDDEEMYSAHMPAHLRCDACRAVAYQLRSSRSGPSETSHRPRT

SEQ ID NO: 42855 - protein, 253 aa, Homo sapiens
  MOD_RES (1)..(1): Any amino acid
XSVNKLFGEKSASFREEYIRLCQKYYSSEPQAVDFLECAEEARKKINSWVKTQTKGKIPNLLPEGSVDGDTRMVLVNAVYFKGKWKTPFEKKLNGLYPFRVNSAQRTPVQMMYLREKLNIGYIEDLKAQILELPYAGDVSMFLLLPDEIADVSTGLELLESEITYDKLNKWTSKDKMAEDEVEVSSMDSLATSINQFALELSKKLAESAQGKNIFFSSWSISTSLTIVYLGAKGTTAAQMAQVLQFNRDQGVK

SEQ ID NO: 42856 - protein, 177 aa, Homo sapiens
LYSILAFIDNFQAAKQALAEATVQAAGMAATGVKELAQRSSRMALDINIKAPVVVIPQSPVSENVFVADFGLITMTNTFHMITESQSSPPPVIDLITIKLSEMRLYRSRFINDAYQEVLDLLLPLNLEVVVERNLCWEWYQEVPCFNVNAQLKPMEVESIQNVLVMLPTICKCPAAF

SEQ ID NO: 42857 - protein, 459 aa, Homo sapiens
MWQIVFFTLSCDLVLAAAYNNFRKSMDSIGKKQYQVQHGSCSYTFLLPEMDNCRSSSSPYVSNAVQRDAPLEYDDSVQRLQVLENIMENNTQWLMKLENYIQDNMKKEMVEIQQNAVQNQTAVMIEIGTNLLNQTAEQTRKLTDVEAQVLNQTTRLELQLLEHSLSTNKLEKQILDQTSEINKLQDKNSFLEKKVLAMEDKHIIQLQSIKEEKDQLQVLVSKQNSIIEELEKKIVTATVNNSVLQKQQHDLMETVNNLLTMMSTSNSKDPTVAKEEQISFRDCAEVFKSGHTTNGIYTLTFPNSTEEIKAYCDMEAGGGGWTIIQRREDGSVDFQRTWKEYKVGFGNPSGEYWLGNEFVSQLTNQQRYVLKIHLKDWEGNEAYSLYEHFYLSSEELNYRIHLKGLTGTAGKISSISQPGNDFSTKDGDNDKCICKCSQMLTGGRDDFLSSYLYWQGMIS

SEQ ID NO: 42858 - protein, 186 aa, Homo sapiens
MEPAGPCGFCPAGEVQPARYTCPRCNAPYCSLRCYRTHGTCAENFYRDQLPNVLFAYAHTLALYHGGDDALLSDFCATLLGVSGALGAQQVFASAEEALQAAAHVLEAGEHPPGPLGTRGAMHEVARILLGEGPTNQKGYTLAALGDLAQTLGRARKQAVAREERDHLYRARKKCQFLLAWTNENE

SEQ ID NO: 42859 - protein, 45 aa, Homo sapiens
MASDSPARSLDEIDLSALRDPAGIFELVELVGNGTYGQVYKQMNQ

SEQ ID NO: 42860 - protein, 307 aa, Homo sapiens
MYDNLYLHGIEDSEAGSADSYTSRPSDSDVSLEEDREAIRQEREQQAAIQLERAKSKPVAFAVKTNVSYCGALDEDVPVPSTAISFDAKDFLHIKEKYNNDWWIGRLVKEGCEIGFIPSPLRLENIRIQQEQKRGRFHGGKSSGNSSSSLGEMVSGTFRATPTSTAKQKQKVTEHIPPYDVVPSMRPVVLVGPSLKGYEVQISSVTLQFLIEHPGDSHVDACSSRVCFHVGPDGSQCSAWEGRGYRVGLMRPSALSFLSCTLLIFYVLHCLEIPPSKYSQWEDLVKDLLYIKCKEKDFICLDHSHYY

SEQ ID NO: 42861 - protein, 149 aa, Homo sapiens
LQTLNACCAVYGQKELKDFLPSLWASIRREVFQTASERVEAEGLAALHSLTACLSRSVLRADAEDLLDSFLSNILQDCRHHLCEPDMKLVWPSAKLLQAAAGASARACDSVTSNVLPLLLEQFHKHSQYPLKRYRAASGGQSLKCSWVS

SEQ ID NO: 42862 - protein, 1882 aa, Homo sapiens
MPENPATDKLQVLQVLDRLKMKLQEKGDTSQNEKLSMFYETLKSPLFNQILTLQQSIKQLKGQLNHIPSDCSANFDFSRKGLLVFTDGSITNGNVHRPSNNSTVSGLFPWTPKLGNEDFNSVIQQMAQGRQIEYIDIERPSTGGLGFSVVALRSQNLGKVDIFVKDVQPGSVADRDQRLKENDQILAINHTPLDQNISHQQAIALLQQTTGSLRLIVAREPVHTKSSTSSSLNDTTLPETVCWGHVEEVELINDGSGLGFGIVGGKTSGVVVRTIVPGGLADRDGRLQTGDHILKIGGTNVQGMTSEQVAQVLRNCGNSVRMLVARDPAGDISVTPPAPAALPVALPTVASKGPGSDSSLFETYNVELVRKDGQSLGIRIVGYVGTSHTGEASGIYVKSIIPGSAAYHNGHIQVNDKIVAVDGVNIQGFANHDVVEVLRNAGQVVHLTLVRRKTSSSTSPLEPPSDRGTVVEPLKPPALFLTGAVETETNVDGEDEEIKERIDTLKNDNIQALEKLEKVPDSPENELKSRWENLLGPDYEVMVATLDTQIADDAELQKYSKLLPIHTLRLGVEVDSFDGHHYISSIVSGGPVDTLGLLQPEDELLEVNGMQLYGKSRREAVSFLKEVPPPFTLVCCRRLFDDEASVDEPRRTETSLPETEVDHNMDVNTEEDDDGELALWSPEVKIVELVKDCKGLGFSILDYQDPLDPTRSVIVIRSLVADGVAERSGGLLPGDRLVSVNEYCLDNTSLAEAVEILKAVPPGLVHLGICKPLVEDNEEESCYILHSSSNEDKTEFSGTIHDINSSLILEAPKGFRDEPYFKEELVDEPFLDLGKSFHSQQKEIEQSKEAWEMHEFLTPRLQEMDEEREILVDEEYELYQDPSPSMELYPLSHIQEATPVPSVNELHFGTQWLHDNEPSESQEARTGRTVYSQEAQPYGYCPENVMKENFVMESLPSVPSTEGNSQQGRFDDLENLNSLAKTSLDLGMIPNDVQGPSLLIDLPVVAQRREQEDLPLYQHQATRVISKASAYTGMLSSRYATDTCELPEREEGEGEETPNFSHWGPPRIVEIFREPNVSLGISIVGGQTVIKRLKNGEELKGIFIKQVLEDSPAGKTNALKTGDKILEVSGVDLQNASHSEAVEAIKNAGNPVVFIVQSLSSTPRVIPNVHNKANKITGNQNQDTQEKKEKRQGTAPPPMKLPPPYKALTDDSDENEEEDAFTDQKIRQRYADLPGELHIIELEKDKNGLGLSLAGNKDRSRMSIFVVGINPEGPAAADGRMRIGDELLEINNQILYGRSHQNASAIIKTAPSKVKLVFIRNEDAVNQMAVTPFPVPSSSPSSIEDQSGTEPISSEEDGSVEVGIKQLPESESFKLAVSQMKQQKYPTKVSFSSQEIPLAPASSYHSTDADFTGYGGFQAPLSVDPATCPIVPGQEMIIEISKGRSGLGLSIVGGKDTPLNAIVIHEVYEEGAAARDGRLWAGDQILEVNGVDLRNSSHEEAITALRQTPQKVRLVVYRDEAHYRDEENLEIFPVDLQKKAGRGLGLSIVGKRNGSGVFISDIVKGGAADLDGRLIQGDQILSVNGEDMRNASQETVATILKCAQGLVQLEIGRLRAGSWTSARTTSQNSQGSQQSAHSSCHPSFAPVITGLQNLVGTKRVSDPSQKNSGTDMEPRTVEINRELSDALGISIAGGRGSPLGDIPVFIAMIQASGVAARTQKLKVGDRIVSINGQPLDGLSHADVVNLLKNAYGRIILQVVADTNISAIAAQLENMSTGYHLGSPTAEHHPEDTETPPPKIITLEKGSEGLGFSIVGGYGSPHGDLPIYVKTVFAKGAAADDGRLKRGDQILAVNGETLEGVTHEQAVAILKHQRGTVTLTVLS

SEQ ID NO: 42863 - protein, 271 aa, Homo sapiens
  MOD_RES (1)..(1): Any amino acid
XHKAPKKKGIKSSIGRLFGKKEKGRPGQTGKEALGQAGVSETDNSSQDALGLSKLGGQAEKNRKLQKKHELLEEARRQGLPFAQWDGPTVVVWLELWVGMPAWYVAACRANVKSGAIMSALSDTEIQREIGISNPLHRLKLRLAIQEIMSLTSPSAPPTSRTTTGNVWLTHEEMETLAATPQTEDEEGSWAQTLAYGDMNHEWIGNEWLPSLGLPQYRSYFMECLVDARMLDHLTKKDLRGQLKMVDSFHRNSFQCGIMCLRRLNYDRKEL

SEQ ID NO: 42864 - protein, 45 aa, Homo sapiens
WKQAGLNLKMMETLEHLNTYLCHDNLSSNDTKIEIFLPTKVLQLE

SEQ ID NO: 42865 - protein, 147 aa, Homo sapiens
MKDIDIGKEYIIPSPGYRSVRERTSTSGTHRDREDSKFRRTRPLECQDALETAARAEGLSLDASMHSQLRILDEEHPKGKYHHGLSALKPIRTTSKHQHPVDNAGLFSCMTFSWLSSLARVAHKKGELSMEDVWSLSKHESSDVNCR

SEQ ID NO: 42866 - protein, 116 aa, Homo sapiens
MLVFLQEMDKPCGCPPGVCDHGTGDRRDPWYSTVGLLPPVRAMSQRNLNAKTEQGPTGVTMTSNPITWGQIKKTTQEAEKLLERQGQAKTPDSMFLAMLAVVSCASIGSGEPPTGN

SEQ ID NO: 42867 - protein, 129 aa, Homo sapiens
MYHSLSETRHPLQPEEQEVGIDPLSSYSNKSGGDSNKNGRRTSSTLDSEGTFNSYRKEWEELFVNNNYLATIRQKGINGQLRSSRFRSICWKLFLCVLPQDKSQWISRIEELRAWYSNIKEIHITNPRK

SEQ ID NO: 42868 - protein, 177 aa, Homo sapiens
  MOD_RES (1)..(1): Any amino acid
XHGVKGQKGERGLPGLQGVIGFPGMQGPEGPQGPPGQKGDTGEPGLPGTKGTRGPPGASGYPGNPGLPGIPGQDGPPGPPGIPGCNGTKGERGPLGPPGLPGFAGNPGPPGLPGMKGDPGEILGHVPGMLLKGERGFPGIPGTPGPPGLPGLQGPVGPPGFTGPPVSFGGCLSEAII

SEQ ID NO: 42869 - protein, 477 aa, Homo sapiens
MSSEEDKSVEQPQPPPPPPEEPGAPAPSPAAADKRPRGRPRKDGASPFQRARKKPRSRGKTAVEDEDSMDGLETTETETIVETEIKEQSAEEDAEAEVDNSKQLIPTLQRSVSEESANSLVSVGVEAKISEQLCAFCYCGEKSSLGQGDLKQFRITPGFILPWRNQPSNKKDIDDNSNGTYEKMQNSAPRKQRGQRKERSPQQNIVSCVSVSTQTASDDQAGKLWDELSLVGLPDAIDIQALFDSTGTCWAHHRCVEWSLGVCQMEEPLLVNVDKAVVSGSTERCAFCKHLGATIKCCEEKCTQMYHYPCAAGAGTFQDFSHIFLLCPEHIDQAPERSKEDANCAVCDSPGDLLDQFFCTTCGQHYHGMCLDIAVTPLKRAGWQCPECKVCQNCKQSGEDSKMLVCDTCDKGYHTFCLQPVMKSVPTNGWKCKVSCLFIYFFKSSLCFIWRPDKSDTYSNLYIITISFLKTALLTYN

SEQ ID NO: 42870 - protein, 97 aa, Homo sapiens
MYASQWFLTLFTAKFPLCMVFHIIDLLLCEGLNIIFHVALALLKTSKEDLLQADFEGALKFFRVQLPKRYRAEENARRLMEQACNIKVGVYTGTELQ

SEQ ID NO: 42871 - protein, 316 aa, Homo sapiens
MAALTRDPQFQKLQQWYREHRSELNLRRLFDANKDRFNHFSLTLNTNHGHILVDYSKNLVTEDVMRMLVDLAKSRGVEAARERMFNGEKINYTEGRAVLHVALRNRSNTPILVDGKDVMPEVNKVLDKMKSFCQRVRSGDWKGYTGKTITDVINIGIGGSDLGPLMVTEALKPYSSGGPRVWYVSNIDGTHIAKTLAQLNPESSLFIIASKTFTTQETITNAETAKEWFLQAAKDPSAVAKHFVALSTNTTKVKEFGIDPQNMFEFWDVSTSTSALGELSVLCQVMAVERPMRSVGGRTLLAVVGHRTLHCPARGF

SEQ ID NO: 42872 - protein, 257 aa, Homo sapiens
MDPLFQQTHKQVHEIQSCMGRLETADKQSVHIVENEIQASIDQIFSRLERLEILSSKEPPNKRQNARLRVDQLKYDVQHLQTALRNFQHRRHAREQQERQREELLSRTFTTNDSDTTIPMDESLQFNSSLQKVHNGMDDLILDGHNILDGLRTQRLTLKGTQKKILDIANMLGLSNTVMRLIEKRAFQDKYFMIETRSHHVAQNGPELLSSRDPPASASRSAGIIGMSHHPDLQIPFELRLGFELWFYQLLAVISDQ

SEQ ID NO: 42873 - protein, 228 aa, Homo sapiens
NGIQTNKPALRAVRQRSEFTLMAKRIGKDLSNTFAKLEKLTILAKRKSLFDDKAVEIEELTYIIKQDINSLNKQIAQLQDFVRAKGSQSGRHLQTHSNTIVVSLQSKLASMSNDFKSVLEVRTENLKQQRSRREQFSRAPVSALPLAPNHLGGGAVVLGAESHASKDVAIDMMDSRTSQQLQLIDEQDSYIQSRADTMQNIESTIVELGSIFQQLAHMVKEQEETIQR

SEQ ID NO: 42874 - protein, 91 aa, Homo sapiens
MELGGPGAPRLLPPLLLLLGTGLLRASSHVETRAHAEERLLKKLFSGYNKWSRPVANISDVVLVRFGLSIAQLIDVDEKNQMMTTNVWVKQ

SEQ ID NO: 42875 - protein, 152 aa, Homo sapiens
MWRAGSMSAELGVGCALRAVNERVQQAVARRPRDLPAIQPRLVAVSKTKPADMVIEAYGHGQRTFGENYVQELLEKASNPKILSLCPEIKWHFIGHLQKQNVNKLMAVPNLFMLETVDSVKLADKVNSSWQRKGSPERLKVMVQINTSGEES

SEQ ID NO: 42876 - protein, 177 aa, Homo sapiens
MAAMSLLRRVSVTAVAALSGRPLGTRLGFGGFLTRGFPKAAAPGNHHSAVFMILTTLFLIFYIALTGIPVAIFITLVNVFIGQAELAEIPEGYVPEHWEYYKHPISRWIARNFYDSPEKIYERTMAVLQIEAEKAELRVKELEVRKLMHVRGDGPWYYYETIDKELIDHSPKATPDN

SEQ ID NO: 42877 - protein, 58 aa, Homo sapiens
MQEESLRQEYAATTSRRSSGSSCNSTRRGFHHHHAIHLDRHLSSHPEIHLVHDLLLGE

SEQ ID NO: 42878 - protein, 331 aa, Homo sapiens
MALSSAWRSVLPLWLLWSAACSRAASGDDNAFPFDIEGSSAVGRQDPPETSEPRVALGRLPPAAEKCNAGFFHTLSGECVPCDCNGNSNECLDGSGYCVHCQRNTTGEHCEKCLDGYIGDSIRGAPQFCQPCPCPLPHLANFAESCYRKNGAVRCICNENYAGPNCERCAPGYYGNPLLIGSTCKKCDCSGNSDPNLIFEDCDEVTGQCRNCLRNTTGFKCERCAPGYYGDARIAKNCAVCNCGGGPCDSVTGECLEEGFEPPTGMDCPTISCDKCVWDLTDDLRLAALSIEEGKSGVLSVSSGAAAHRHVNEINATIYLLKTKLSERENQ

SEQ ID NO: 42879 - protein, 40 aa, Homo sapiens
MDYLTTFTEKSGRLLRGTANRLLGFGGGGEARQTLAKRRP

SEQ ID NO: 42880 - protein, 134 aa, Homo sapiens
MASPSKGNDLFSPDEEGPAVVAGPGPGPGGAEGAAEERRVKVSSLPFSVEALMSDKKPPKEASPLPAESASAGATLRPLLLSGHGAREAHSPGPLVKPFETASVKSENSEDGAAWMQEPGRYSPPPSECAPGQE

SEQ ID NO: 42881 - protein, 234 aa, Homo sapiens
MSDRYLEQRISIKFCVKLNKSASETHHLLKEAYGDEVMSRARVFDWHKRFKEGREDVRDDARSGRPVTHRTDDNIQKVKDLVCSNRQLTVRMMAEELNLDKETVRLILKENLNMRKISAKVISGVLKGEPKPRKLDFRSDLSKETRKNSSCLRKKVCTVDAFSTSSDSVPHLSLLYGTSGNESITSCFPISSLAATLAPIKDMSMQLIKTNLEALWCCSSDVLPAPHTVVPQLR

SEQ ID NO: 42882 - protein, 248 aa, Homo sapiens
MTPKGPAMCSMPLTSADCFSNDIHKLDTSTMTWTLICTKGSPARWRDFHSATMLGSHMYVFGGRADRFGPFHSNNEIYCNRIRVFDTRTEAWLDCPPTPVLPEGRRSHSAFGYNGELYIFGGYNARLNRHFHDLWKFNPVSFTWKKIEPKGKGPCPRRRQCCCIVGDKIVLFGGTSPSPEEGLGDEFDLIDHSDLHILDFSPSLKTLCKLAVIQYNLDQSCLPHDIRWELNAMTTNSNISRPIVSSHG

SEQ ID NO: 42883 - protein, 948 aa, Homo sapiens
MATQVMGQSSGGGGLFTSSGNIGMALPNDMYDLHDLSKAELAAPQLIMLANVALTGEVNGSCCDYLVGEERQMAELMPVGDNNFSDSEEGEGLEESADIKGEPHGLENMELRSLELSVVEPQPVFEASGAPDIYSSNKDLPPETPGAEDKGERPYKCELCPYSSSQKTHLTRHMRTHSGEKPFKCDQCSYVASNQHEVTRHARQVHNGPKPLNCPHCDYKTADRSNFKKHVELHVNPRQFNCPVCDYAASKKCNLQYHFKSKHPTCPNKTMDVSKVKLKKTKKREADLPDNITNEKTEIEQTKIKGDVAGKKNEKSVKAEKRDVSKEKKPSNNVSVIQVTTRTRKSVTEVKEMDVHTGSNSEKFSKTKKSKRKLEVDSHSLHGPVNDEESSTKKKKKVESKSKNNSQEVPKGDSKVEENKKQNTCMKKSTKKKTLKNKSSKKSSKPPQKEPVEKGSAQMDPPQMGPAPTEAVQKGPVQVEPPPPMEHAQMEGAQIRPAPDEPVQMEVVQEGPAQKELLPPVEPAQMVGAQIVLAHMELPPPMETAQTEVAQMGPAPMEPAQMEVAQVESAPMQVVQKEPVQMELSPPMEVVQKEPVQIELSPPMEVVQKEPVKIELSPPIEVVQKEPVQMELSPPMGVVQKEPAQREPPPPREPPLHMEPISKKPPLRKDKKEKSNMQSERARKEQVLIEVGLVPVKDSWLLKESVSTEDLSPPSPPLPKENLREEASGDQKLLNTGEGNKEAPLQKVGAEEADESLPGLAANINESTHISSSGQNLNTPEGETLNGKHQTDSIVCEMKMDTDQNTRENLTGINSTVEEPVSPMLPPSAVEEREAVSKTALASPPATMAANESQEIDEDEGIHSHEGSDLSDNMSEGSDDSGLHGARPVPQESSRKNAKEALAVKAAKGDFVCIFCDRSFRKGKDYSKHLNRHLVNVYYLEEAAQGQE

SEQ ID NO: 42884 - protein, 227 aa, Homo sapiens
MADKEAGGSDGPRETAPTSAYSSPARSLGDTGITPLSPSHIVNDTDSNVSEQQSFLVVVAVDFGTTSSGYAYSFTKEPECIHVMRRWEGGDPGVSNQKTPTTILLTPERKFHSFGYAARDFYHDLDPNEAKQWLYLEKFKMKLHTTGDLTMDTDLTAANGKKVKALEIFAYALQYFKEQALKELSDQAGSEFENSDVRWVITVPAIWKQPAKQFMRQAAYQADPMDL

SEQ ID NO: 42885 - protein, 85 aa, Homo sapiens
MTLTERLREKISRAFYNHGLLCASYPIPIILFTGFCILACCYPLLKLPLPGTGPVEFTTPVKDYSPPPVDSDRKQGEPTEQPEWA

SEQ ID NO: 42886 - protein, 80 aa, Homo sapiens
MSELSDEASEPELLNRSLSMWHGLGTQVSGEELDVPLDLHTAASIGQYEVVKECVQRESRWTRETTVEPQPGCWPSSTDT

SEQ ID NO: 42887 - protein, 34 aa, Homo sapiens
MATLVVNKLGAGVDSGRQGSRGTAVVKVIQVSGD

SEQ ID NO: 42888 - protein, 108 aa, Homo sapiens
MAEQDVENDLLDYDEEEEPQAPQESTPAPPKKDIKGSYVSIHSSGFRDFLLKPELLRAIVDCGFEHPSEVQHECIPQAILGMDVLCQAKSGMGKTAVFVLATLQQIEP

SEQ ID NO: 42889 - protein, 134 aa, Homo sapiens
MSWKKALRIPGDLRVATVTLMLAMLSSLLAEGRDSPVEPTVTISPSRTEALNHHNLLVCSVTDFYPGQIKVRWFRNDQEETAGVVSTPLIRNGDWTFQILVMLEMTPQRGDVYTCHVEHPSLQSPITVEWRLLH

SEQ ID NO: 42890 - protein, 32 aa, Homo sapiens
MEGAPAVSVPPPGAQHRPGTPEVPLAVGPASD

SEQ ID NO: 42891 - protein, 244 aa, Homo sapiens
MYGCDLGPDGRLLRGYDQSAYDGKDYIALNEDLRSWTAADTAAQITQRKWEAARAAEQQRAYLEGTCVEWLRRYLENGKETLQRAEHPKTHVTHHLVSDHEATLRCWALGFYPAEITLTWQRDGEDQTQDTELVETRPAGDGTFQKWAAVVVPSGEEQRYTCHVQHEGLPEPLTLRWEPSSQPTIPIVGIVAGLAVLAVLAVLGAVVAVVMCRRKSSGGKGGSCSQAASSNSAQGSDESLIACK

SEQ ID NO: 42892 - protein, 534 aa, Homo sapiens
MLFLSFHAGSWESWCCCCLIPADRPWDRGQHWQLEMADTRSVHETRFEAAVKVIQSLPKNGSFQPTNEMMLKFYSFYKQATEGPCKLSRPGFWDPIGRYKWDAWSSLGDMTKEEAMIAYVEEMKKIIETMPMTEKVEELLRVIGPFYEIVEDKKSGRSSDITSDLGNVLTSTPNAKTVNGKAESSDSGAESEEEEAQEEVKGAEQSDNDKKMMKKSADHKNLEVIVTNGYDKDGFVQDIQNDIHASSSLNGRSTEEVKPIDENLGQTGKSAVCIHQDINDDHVEDVTGIQHLTSDSDSEVYCDSMEQFGQEESLDSFTSNNGPFQYYLGGHSSQPMENSGFREDIQVPPGNGNIGNMQVVAVEGKGEVKHGGEDGRNNSGAPHREKRGGETDEFSNVRRGRGHRMQHLSEGTKGRQVGSGGDGERWGSDRGSRGSLNEQIALVLMRLQEDMQNVLQRLQKLETLTALQAKSSTSTLQTAPQPTSQRPSWWPFEMSPGVLTFAIIWPFIAQWLVYLYYQRRRRFLLKCPSSQRSS

SEQ ID NO: 42893 - protein, 221 aa, Homo sapiens
MRPEGSLTYRVPERLRQGSCGVGRAAQALVELEPVNAQARKAFSRQREKMERRRKPHLDRRGAVIQSVPGFWANVIANHPQMSALITDEDEDMLSYMVSLEVEEEKHRVHLCKIMLFFRSNPYFQNKVITKEYLVNITEYRASHSTPIEWYPDYEVEAYRRRHHNSSLNFFNWFSDHNFAGSNKIAEILCKDLWRNPLQYYKRMKPPEEGTETSGDSQLLS

SEQ ID NO: 42894 - protein, 389 aa, Homo sapiens [sequence omitted]

SEQ ID NO: 42895 - protein, 194 aa, Homo sapiens
MFCVTPPELETKMNITKGGLVLFSANSNSSCMELSKKIAERLGVEMGKVQVYQEPNRETRVQIQESVRGKDVFIIQTVSKDVNTTIMELLIMVYACKTSCAKSIIGVIPYFPYSKQCKMRKRGSIVSKLLASMMCKAGLTHLITMDLHQKEIQGFFNIPVDNLRASPFLLQYIQEEIPDYRNAVIVAKSPASAK

SEQ ID NO: 42896 - protein, 7418 aa, Homo sapiens
MKGARWRRVPWVSLSCLCLCLLPHVVPGTTEDTLITGSKTPAPVTSTGSTTATLEGQSTAASSRTSNQDISASSQNHQTKSTETTSKAQTDTLTQMMTSTLFSSPSVHNVMETVTQETAPPDEMTTSFPSSVTNTLMMTSKTITMTTSTDSTLGNTEETSTAGTESSTPVTSAVSITAGQEGQSRTTSWRTSIQDTSASSQNHWTRSTQTTRESQTSTLTHRTTSTPSFSPSVHNVTGTVSQKTSPSGETATSSLCSVTNTSMMTSEKITVTTSTGSTLGNPGETSSVPVTGSLMPVTSAALVTVDPEGQSPVTFSRTSTQDTTAFSKNHQTQSVETTRVSQINTLNTLTPVTTSTVLSSPSGFNPSGTVSQETFPSGETTISSPSSVSNTFLVTSKVFRMPISRDSTLGNTEETSLSVSGTISAITSKVSTIWWSDTLSTALSPSSLPPKISTAFHTQQSEGAETTGRPHERSSFSPGVSQEIFTLHETTTWPSSFSSKGHTTWSQTELPSTSTGAATRLVTGNPSTGAAGTIPRVPSKVSAIGEPGEPTTYSSHSTTLPKTTGAGAQTQWTQETGTTGEALLSSPSYSVTQMIKTATSPSSSPMLDRHTSQQITTAPSTNHSTIHSTSTSPQESPAVSQRGHTQAPQTTQESQTTRSVSPMTDTKTVTTPGSSFTASGHSPSEIVPQDAPTISAATTFAPAPTGDGHTTQAPTTALQAAPSSHDATLGPSGGTSLSKTGALTLANSVVSTPGGPEGQWTSASASTSPDTAAAMTHTHQAESTEASGQTQTSEPASSGSRTTSAGTATPSSSGASGTTPSGSEGISTSGETTRFSSNPSRDSHTTQSTTELLSASASHGAIPVSTGMASSIVPGTFHPTLSEASTAGRPTGQSSPTSPSASPQETAAISRMAQTQRTRTSRGSDTISLASQATDTFSTVPPTPPSITSSGLTSPQTQTHTLSPSGSGKTFTTALISNATPLPVTYASSASTGHTTPLHVTDASSVSTGHATPLPVTDTSSESTGHATPLPVTSPSSVSTGHTTPLPVTDTSSESTGHVTPLPVTSLSSASTGDSTPLPVTDTSSASTGHVTPLPVTSLSSASTGDTTPLPVTDTSSASTGHATSLPVTDTSSVSTGHTTPLPVTDTSSASTGHATSLPVTDTSSVSTAHATPLPVTGLSSASTDDTTRLPVTDVSSASTGQAIPLPVTSPSSASTGDTTPLPVTDASSASTGDTTSLPVTIPSSASSGHTTSLPVTDASSVSTGHATSLLVTDASSVSTGDTTPLPVTDTNSASTGDTTPLHVTDASSVSTGHATSLPVTSLSSASTGDTTPLPVTSPSSASSGHTTPLPVTDASSVPTGHATSLPVTDASSVSTGHATPLPVTDASSVSTGHATPLPVTDTSSVSTGQATPLPVTSLSSASTGDTTPLPVTDTSSASTGQDTPLPVTSLSSVSTGDTTPLPVTSPSSASTGHATPLLVTDASSVSTGHATSLLVTDASSVSTGHATALHVTDASSLSTGDTTPLPVTSPSSASTGDTTPLPVTDTSSASTGHATSLPVTDTSSASTGHATPLPVTDTSSASTGQATPLPVTGPSSASTGHAIPLLVTDTSSASTGQATPLPVTSLSSASTGDTTPLPVTDASSVSTGHATSLPVTSLSSVSTGDTTPLPVTSPSSASSGHTTPLPVTDASSVSTGDTTPLPVTSPSSASSGHTTPLPVTSPSSASSGHTTPLPVTDASSASTGDTTPLPVTDTSSASTGHATHLPVTGLSSASTGDTTRLPVTNVSSASTGHATPLPVTSTSSASTGDTTPLPGTDTSSVSTGHTTPLLVTDASSVSTGDTTRLPVTSPSSASTGHTTPLPVTDTPSASTGDTTPLPVTNASSLSTRHTTSLHVTSPSSASTGHATSLPVTDTSSVSTGHATPLHVTSPSSASTGDTTPLPVTDTYSASTGQATPLPVTDTSSASTGDTTPLPVTDTSSASTGHATPLPVTNTSSVSTGHATPLHVTSPSSASTGHTTPLPVTDASSVSTGHATSLPVTDASSVFTGHATSLPVTIPSSASSGHTTPLPVTDASSVSTGHATSLPVTDASSVSTGHATPLPVTDASSVSTGHATPLPVTDTSSVSTGHATPLPLTSLSSVSTGDTTPLPVTDTSSASTGQATPLPVTSLSSVSTGDTTPLPVTDTSSASTGHATSLPVTDTSSASTGHATPLPDTDTSSASTGHATPLPVTDTSSASTGHATLLPVTDTSSASIGHATPLPVTDTSSISTGHATPLHVTSPSSASTGHATPLPVTDTSSASTGHANPLHVTSPSSASTGHATPLPVTDTSSASTGHATPLPVTSLSSVSTGDTTPLPVTSPSSASTGHTTPLPVTDTSSASTGQATALPVTSTSSASTGDTTPLPVTDTSSASTGQATPLPVTSLSSVSTGDTTPLPVTSPSSASTGHATPLLVTDASSASTGQATPLPVTDTSSAYTGDTTSLPVTDTSSSSTGDTTPLLVTETSSASTGHATPLHVTSPSSASTGDTTPVPVTDTSSVSTGHATPLPVTGLSSASTGDTTRLPVTDISSASTGQATPLPVTNTSSASTGHATPLPVTGLSSASTGDTTRLPVTDISSASTGQATPLPVTNTSSVSTGDTMPLPVTSPSSASTGHATPLPVTSTSSASTGHATPVPVTSTSSASTGHTTPLPVTDTSSASTGDTTPLPVTSPSSASTGHTTPLHVTIPSSASTGDTSTLPVTGASSASTGHATPLPVTDTSSVSTGHATPLPVTSFSSVSTGDTTPLPVTDTSSVSTGHATPLPVTSFSSVSTGDTTPLPVTDASSASTGHATPLPVTDTSSVSTGHATPLPLTSLSSVSTGDTTTLPVTDTSSVSTGHATPLPVTSFSSVSTGDTTPLPVTDASSASTGHATPLPVTDTSSVSTGHATPLPVTSLSSVSTGDTTPLPVTDASSASTGQATPLPVTSLSSVSTGDTTPLPVTIPSSASSGHTTSLPVTDTSSASTGQATPLPVTSLSSVSTGDTTPLLVTDASSVSTGHATPLPVTDTSSASTGDTTRLPVTDTSSASTGQATPLPVTSLSSVSTGDTTPLLVTNTSSVSRGHATSLPVTIPSSSSSGHTTPLPVTSTSSVSTGHVTPLPVTSTSSASTGHATSLPVTDTSSVSTGHATSLPVTDTSSVSTGHATPLPVTDASSVSTGHATPLPVTDASSASTGDTTPLPVTNTSSASTGQATPLPVTSLSSVSTGDTMPLPVTSPSSASTGHATPLPVTGLSSASTGDTTPLPVTDTSSASTGHVTPLPVTSLSSASTGDSTPLPVTDTSSASTGHVTPLPVTSLSSASTGDTTPLPVTDTSSASTGHATPLHVTDASSASTGQATLLPVTSLSSVSTGDTTPLPVTSPSSASTGHATPLLVTDTSSASTGHATPLPVTDASSVSTGHATSLPVTIRSSGSTGHTTPLPVTDTSSASTGQATSLLVTDTSSVSTGDTTPLPVTSTSSASTGHVTPLHVTSPSSASTGHATPLPVTSLSSASTGDTMPLPVTSPSSASTGDTTPLPVTDASSVSTGHTTPLPVTSPSSASTGHTTPLPVTDTTSASKGDTTPLPVTSPSSASTGHTTPLPVTDTSSASTGDTTPLPVTSPSSASTGHATPLPVTNASSLSTGHATPLHVTSPSSASTGHATPLPVTSTSSASTGHATSLPVTSTSSASTGHATPLPVTDNSSVSTGHATPLPVTGLSSATTDDTTRLPVTDVSSASTGQATPLPVTSLSSVSTGDTTPLPVTSPSSASTGHASPLLVTDASSASTGQATPLPVTDTSSVSTAHATPLPVTGLSSASTDDTTRLPVTDVSSASTGQAIPLPVTSPSSASTGDTTPLPVTDASSASTGDTTSLPVTIPSSASSGHTTSLPVTDASSVSTGHATSLLVTDASSVSTGDTTPLPVTDTNSASTGDTTPLHVTDASSVSTGHATSLPVTSLSSASTGDTTPLPVTSPSSASSGDTTPLPVTDTSSASTGHATHLPVTGLSSASTGDTTRLPVTNVSSASTGHATPLPVTSTSSASTGDTTPLPGTDTSSVSTGHTTPLLVTDASSVSTGDTTRLPVTSPSSASTGHTTPLHVTDASSVSTGHTTPLPVTDTSSASTGQATSLLVTDTSSVSTGDTTPLPVTSTSSASTGHVTPLHVTSPSSASTGHATPLPVTSLSSASTGDTTPLPVTDTSSVSTGHTTPLPVTSPSSASTGHTTPLPVTDTSSASKGDTTPLPVTSPSSASTGHTTPLPVTDTSSASTGDTTPLPVTNASSLSTGHATPLHVTSPSSASTGHATPLPVTSTSSASTGHATPLPVTSTSSASTGHATPLPVTDNSSVSTGHATPLPVTGLSSATTDDTTRLPVTDVSSASTGQATPLPVTSLSSVSTGDTTPLPVTSPSSASTGHASPLLVTDASSASTGQATPLPVTDTSSVSTAHATPLPVTGLSSASTDDTTRLPVTDVSSASTGQAIPLPVTSPSSASTGDTTPLPVTDASSASTGDTTSLPVTIPSSASSGHTTSLPVTDASSVSTGHATSLLVTDASSVSTGDTTPLPVTDTNSASTGDTTPLHVTDASSVSTGHATSLPVTSLSSASTGDTTPLPVTSPSSASSGHTTSLPVTDASSVSTGHATSLPVTIPSSASSGHTTPLPVTDASSVPTGHATSLPVTDASSVSTGHATPLPVTDASSVSTGHATPLPVTDTSSVSTGQATPLPVTSLSSASSTGDTTPLPVTDTSSASTGQDTPLPVTSLFSVSTGDTTPLPVTSPSSASTGHATHLLVTDASSVSTGHATSLLVTDASSVSTGHATALHVTDASSLSTGDTTPLPVTSPSSASTGDTTPLPVTDTSSVSTGHATSLPVTDTSSASTGHATSLPVTDTSSASTGQATPLPVTSPSSASTGHAIPLLVTDTSSASTGQATPLPVTSLSSASTGDTTPLPVTDASSVSTGHATSLPVTSLSSVSTGDTTPLPVTSPSSASTGHATPLHVTSPSSASTGHATPLPVTSLSSASTGDTTPLPVTSPSSASTGHATPLHVTDASSVSTGDTTPLPVTSPSSASSGHTTPLPVTDASSASTGDTTPLPVTDTSSASTGHATHLPVTGLSSASTGDTTRLPVTDVSSASTGHATPLPVTSTSSASTGDTTPLPGTDTSSVSTGHTTPLLVTDASSVSTGDTTRLPVTSPSSASTGHTTPLPVTDTPSASTGDTTPLPVTNASSLSTRHATSLHVTSPSSASTGHATPLPVTDTSAASTGHATPLPVTSTSSASTGDTTPLPVTDTSSASTGHATPLPVTNTSSVSTGHATPLHVTSPSSASTGHTTPLPVTDASSVSTGHATSLPVTDASSVSTGHATPLPVTDASSVSTGHATPLPLTSLSSVSTGDTTPLPVTDTSSASTGQATPLPVTSLSSVSTGDTTPLPVTDTSSASTGHATSLPVTDTSSASTGHATPLPVTDTSSISTGHATPLHVTSPSSASTGHATPLPVTDTSSASTGHATPLPVTSLSSVSTGDTTPLPVTSPSSASTGHATPLLVTDASSASTGQATPLPVTSLSSVSTGDTTPLPVTSPSSASTGHATSLPVTDTSSASTGDTTSLPVTDTSSAYTGDTTSLPVTDTSSSSTGDTTPLLVTETSSASTGDTTPVPVTDTSSVSTGHATPLPVTGLSSASTGDTTRLPVTDISSASTGQATPLPVTNTSSVSTGDTMPLPVTSPSSASTGHATPLPVTSTSSASTGHATPVPVTSTSLASTGHTTPLPVTSPSSASTGHTTPLPVTDTSSASTGDTTPLPVTNASSLSTGHTTPLHVTIPSSASTGDTSTLPVTGASSASTGHATPLPVTDTSSVSTGHATPLPVTSFSSVSTGDTTPLPVTDASSASTGHATPLPVTDTSSASTGDTTPLPVTDASSASTGQATPLPVTSLSSVSTGDTTPLPVTIPSSASSGHTTSLPVSDTSSASTGQATPLPVTSLSSVSTGDTTPLLVTDASSVSTGHATPLPVTDTSSASTGDTTRLPVTDTSSASTGQATPLPVTSLSSVSTGDTTPLLVTNTSSVSTGHATSLPVTIPSSSSSGHTTPLPVTSTSSVSTGHVTPLHVTSPSSSSTGQATPLPVTSTSSVSTGHVTPLHVTSPSSASTGHATPLPVTSTSSASTGHATPLPVTDASSVSTGHATPLPVTDTSSASTGDTTPLPVTDTSSASTGQATPLPVTSLSSVSTGHATPLAVSSATSASTVSSDSPLKMETSGMTTPSLKTDGGRRTATSPPPTTSQTIISTIPSTAMHTRSTAAPIPILPERGVSLFPYGADAGDLEFVRRTVDFTSPLFKPATGFPLGSSLRDSLYFTDNGQIIFPESDYQIFSYPNPLPTGFTGRDPVALVAPFWDDADFSTGRGTTFYQEYETFYGEHSLLVQQAESWIRKMTNNGGYKARWALKVTWVNAHAYPAQWTLGSNTYQAILSTDGSRSYALFLYQSGGMQWDVAQRSGNPVLMGFSSGDGYFENSPLMSQPVWERYRPDRFLNSNSGLQGLQFYRLHREERPNYRLECLQWLKSQPRWPSWGWNQVSCPCSWQQGRRDLRFQPVSIGRWGLGSRQLCSFTSWRGGVCCSYGPWGEFREGWHVQRPWQLAQELEPQSWCCRWNDKPYLCALYQQRRPHVGCATYRPPQPAWMFGDPHITTLDGVSYTFNGLGDFLLVGAQDGNSSFLLQGRTAQTGSAQATNFIAFAAQYRSSSLGPVTVQWLLEPHDAIRVLLDNQTVTFQPDHEDGGGQETFNATGVLLSRNGSEVSASFDGWATVSVIALSNILHASASLPPEYQNRTEGLLGVWNNNPEDDFRMPNGSTIPPGSPEEMLFHFGMTWQINGTGLLGKRNDQLPSNFTPVFYSQLQKNSSWAEHLISNCDGDSSCIYDTLALRNASIGLHTREVSKNYEQANATLNQYPPSINGGRVIEAYKGQTTLIQYTSNAEDANFTLRDSCTDLELFENGTLLWTPKSLEPFTLEILARSAKIGLASALQPRTVVCHCNAESQCLYNQTSRVGNSSLEVAGCKCDGGTFGRYCEGSEDACEEPCFPSVHCVPGKGCEACPPNLTGDGRHCAALGSSFLCQNQSCPVNYCYNQGHCYISQTLGCQPMCTCPPAFTDSRCFLAGNNFSPTVNLELPLRVIQLLLSEEENASMAEVNASVAYRLGTLDMRAFLRNSQVERIDSAAPASGSPIQHWMVISEFQYRPRGPVIDFLNNQLLAAVVEAFLYHVPRRSEEPRNDVVFQPISGEDVRDVTALNVSTLKAYFRCDGYKGYDLVYSPQSGFTCVSPCSRGYCDHGGQCQHLPSGPRCSCVSFSIYTAWGEHCEHLSMKLDAFFGIFFGALGGLLLLGVGTFVVLRFWGCSGARFSYFLNSAEALP

SEQ ID NO: 42897 - protein, 44 aa, Homo sapiens
MNIFDRKINFDALLKFSHITPSTQQHLKKVYASFALCMFVAAAG

SEQ ID NO: 42898 - protein, 83 aa, Homo sapiens
LSLFPHPHIHEYLLDPYVNLAPGCRSLFSVIVRVVGDLMLRIQRIQDFTPKLLLVRKRLLGLEPEGPISDLEPVEALTVSSIC

SEQ ID NO: 42899 - protein, 87 aa, Homo sapiens
MGIGVSLLLQFSLTPGGYRSVGRSRRCSRGSIPRNIPKRSWKKPHPQLCSLQGLVIFDVSQLLHLLNRELSVCLSSFSELLCSSDVA

SEQ ID NO: 42900 - protein, 236 aa, Homo sapiens
MSAFDTNPFADPVDVNPFQDPSVTQLTNAPQGGLAEFNPFSETNAATTVPVTQLPGSSQPAVLQPSVEPTQPTPQAVVSAAQAGLLRQQEELDRKAAELERKERELQNTVANLHVRQNNWPPLPSWCPVKPCFYQDFSTEIPADYQRICKMLYYLWMLHSVTLFLNLLACLAWFSGNSSKGVDFGLSILWFLIFTPCAFLCWYRPIYKAFRDLHHPVGWHPWPGGQRLDCSPVYTG

SEQ ID NO: 42901 - protein, 218 aa, Homo sapiens
MRPAALRGALLGCLCLALLCLGGADKRLRDNHEWKKLIMVQHWPETVCEDLLPEMRAYWPDVIHSFPNRSRFWKHEWEKHGTCAAQVDALNSQKKYFGRSLELYRELDLNSVLLKLGIKPSINYYQVADFKDALARVYGVIPKIQCLPPSQDEEVQTIGQIELCLTKQDQQLQNCTEPGEQPSPKQEVWLANGAAESRGLRVCEDGPVFYPPPKKTKH

SEQ ID NO: 42902 - protein, 204 aa, Homo sapiens
  MOD_RES (1)..(1): Any amino acid
XLAGSTSLMHNHAALPSQPGTLPDLSRPPDSYSGLGRAGATAAASEIKREEKEDEENTSAADHSEEEKKELKAPRARTSPDEDEDDLLPPEQKAEREKERRVANNARERLRVRDINEAFKELGRMCQLHLNSEKPQTKLLILHQAVSVILNLEQQVRERNLNPKAACLKRREEEKVSGVVGDPQMVLSAPHPGLSEAHNPAGHM

SEQ ID NO: 42903 - protein, 432 aa, Homo sapiens
MPLFFRKRKPSEEARKRLEYQMCLAKEAGADDILDISKCELSEIPFGAFATCKVLQKKVLIVHTNHLTSLLPKSCSLLSLATIKVLDLHDNQLTALPDDLGQLTALQVLNVERNQLMQLPRSIGNLTQLQTLNVKDNKLKELPDTVGELRSLRTLNISGNEIQRLPQMLAHVRTLEMLSLDASAMVYPPREVCGAGTAAILQFLCKESGLEYYPPSQYLLPILEQDGIENSRDSPDGPTDRFSREELEWQNRFSDYEKRKEQKMLEKLEFERRLELGQREHTQLLQQSSSQKDEILQTVKEEQSRLEQGLSEHQRHLNAERQRLQEQLKQTEQNISSRIQKLLQDNQRQKKSSEILKSLENERIRMEQLMSITQEETESLRRRDVASAMQQMLTESCKNRLIQMAYESQRQNLVQQACSRARCRRLRSRHSR

SEQ ID NO: 42904 - protein, 104 aa, Homo sapiens
MEVMNLMEQPIKVTEWQQTYTYDSGIHSGANTCVPSVSSKGIMEEDEACGRQYTLKKTTTYTQGVPPSQGDLEYQMSTTARAKRVREAMCPGVSGEDSSLLLAT

SEQ ID NO: 42905 - protein, 290 aa, Homo sapiens
  MOD_RES (1)..(1): Any amino acid
XSKLDPKTMKVNDLRKELESRALSSKGLKSQLIARLTKQLKVEEQKEEQKELEKSEKEEDEDDDRKSEDDKEEEERKRQEEIERQRRERRYILPDEPAIIVHPNWAAKSGKFDCSIMSLSVLLDYRLEDNKEHSFEKEDKRKDDSKDDDETEEDNNQDEYDPMEAEEAEDEEDDRDEEEMTKRDDKRDINRYCKERPSKDKEKEKTQMITINRDLLMAFVYFDQSHCGYLLEKDLEEILYTLGLHLSRAQVKKLLNKVVLRESCFYRKLTDTSKDEENHEESESLQEDML

SEQ ID NO: 42906 - protein, 101 aa, Homo sapiens
MSMILSASVIRVRDGLPLSASTDYEQSTGMQECRKYFKMLSRKLAQLPDRCTLKTGHYNINFISSLGVSYMMLCTENYPNVLAFSFLDELQKEFITTYNMM

SEQ ID NO: 42907 - protein, 35 aa, Homo sapiens
MSLHFLYYCSEPTLDVKIAFCQGFDKQVDVSYIAK

SEQ ID NO: 42908 - protein, 119 aa, Homo sapiens
  MOD_RES (1)..(1): Any amino acid
XCFLEDATIGNSNKMSISPGVAGPGGVAGSGEGEPGEDAVAAFTEVLNPSKSFMKFGINFFQTPVNVDSLTSSHESQMFLTACRLVIFSRRFSTYFAQIHLRNHSVLHLCPHKIYLLKN

SEQ ID NO: 42909 - protein, 41 aa, Homo sapiens
MGPEALSSLLLLLLVASGDADMKGHFDPAKCRYALGMQDRT

SEQ ID NO: 42910 - protein, 225 aa, Homo sapiens
GAGTEDSACIPWAYYSTVDQVKDLYSGLIGPLIVCRRPYLKVFNPRRKLEFALLFLVFDENESWYLDDNIKTYSDHPEKVNKDDEEFIESNKMHAINGRMFGNLQGLTMHVGDEVNWYLMGMGNEIDLHTVHFHGHSFQYKHRGVYSSDVFDIFPGTYQTLEMFPRTPGIWLLHCHVTDHIHAGMETTYTVLQNEASSETHRRIWNVIYPITVSVIILFQISTKE

SEQ ID NO: 42911 - protein, 181 aa, Homo sapiens
MEPLLLGRGLIVYLMFLLLKFSKAIEIPSSVQQVPTIIKQSKVQVAFPFDEYFQIECEAKGNPEPTFSWTKDGNPFYFTDHRIIPSNNSGTFRIPNEGHISHFQGKYRCFASNKLGIAMSEEIEFIVPSVPKFPKEKIDPLEVEEGDPIVLPCNPPKGLPPLHIYWMNIELEHIEQDERVY

SEQ ID NO: 42912 - protein, 163 aa, Homo sapiens
NLWNFLAHTFIESAAERACWVLPGVQLRGQPHVRMLGLRARDRLDPTAVNILQQIIELGAETHDATALASVVAMAPGTVTVVKQVTEEEPSSNHTVMIQETVQQASVELAEQHHLVVSSDDVEGIETVTVYTQGGEASEFIVYVQEAMQPVEEQAVEQPAQEL

SEQ ID NO: 42913 - protein, 209 aa, Homo sapiens
MFLVGLTGGIASGKSSVIQVFQQLGCAVIDVDVMARHVVQPGYPAHRRIVEVFGTEVLLENGDINRKVLGDLIFNQPDRRQLLNAITHPEIRKEMMKETFKYFLRGYRYVILDIPLLFETKKLLKYMKHTVVVYCDRDTQLARLMRRNSLNRKDAEARINAQLPLTDKARMARHVLDNSGEWSVTKRQVILLHTELERSLEYLPLRFGV

SEQ ID NO: 42914 - protein, 116 aa, Homo sapiens
MGCGLRKLEDPDDSSPGKIFSTLKRPQVETKTEFAYEYVLLDFTLQASSNPEVIKINSILDIVTKVENYYLKGYIVGAIHPVIQPVGQRKHLPASYLYRVVLLRLKLSPKNSAAPS

SEQ ID NO: 42915 - protein, 291 aa, Homo sapiens
MFLSSVGFSVVMMSIWPYLQKIDPTADTSFLGWVIASYSLGQMVASPIFGLWSNYRPRKEPLIVSILISVAANCLYAYLHIPASHNKYYMLVARGLLGIGAGNVAVVRSYTAGATSLQERTSSMANISMCQALGFILGPVFQTCFTFLGEKGVTWDVIKLQINMYTTPVLLSAFLGILNIILILAILREHRVDDSGRQCKSINFEEASTDEAQVPQGNIDQVAVVAINVLFFVTLFIFALFETIITPLTMDMYAWTQEQAVLYNGIILAALGVEAVVIFLGVKLLSKKFAQ

SEQ ID NO: 42916 - protein, 92 aa, Homo sapiens
  MOD_RES (1)..(1): Any amino acid
XLTFPASGLRRVMAGPAEEAGAHCPESLWPLPPQVSPRVTYTRVSPGQAEDVTFLYHPCAHPWLKLQLALLAYACMANPSLTPDFSLTQDRL

SEQ ID NO: 42917 - protein, 161 aa, Homo sapiens
MAETREEETVSAEASGFSDLSDSEFLEFLDLEDAQESKALVNMPGPSSESLGKDDKPISLQNWKRGLDILSPMERFHLKYLYVTDLATQNWCELQTAYGKELPGFLAPEKAAVLDTGASIHLARELELHDLVTVPVTTKEDAWAIKFLNILLLIPTLQSEG

SEQ ID NO: 42918 - protein, 69 aa, Homo sapiens
MDAALKRSRSEEPAEILPPARDEEEEEEEGMEQGLEEEEEVDPRIQGELEKLNQSTDDINRRETELEVQ

SEQ ID NO: 42919 - protein, 11 aa, Homo sapiens
MKLKEVDRTAM

SEQ ID NO: 42920 - protein, 160 aa, Homo sapiens
MGSKAKKRVLLPTRPAPPTVEQILEDVRGAPAEDPVFTILAPEDPPVPFRMMEDAEAPGEQLYQQSRAYVAANQRLQQAGNPRLPPQADLSGPAGLGSAQGGLHPGFPWGSVGPRLAFTGSQPTWVLTQAPLLMLGLRFIRRLIHAELVGPTQLAPSCVT

SEQ ID NO: 42921 - protein, 69 aa, Homo sapiens
MKITRQKHAKKHLGFFRNNFGVREPYQILLDGTFCQAALRGRIQLREQLPRYLMGETQLCTTSGSLLAY

SEQ ID NO: 42922 - protein, 68 aa, Homo sapiens
DPKTRSLNYCGHIYTPISCKIRMTLKMITVNYPPQRSISEISTTALMSFSVIKQSLMILDLWLRYQIE

SEQ ID NO: 42923 - protein, 611 aa, Homo sapiens
MASGEHSPGSGAARRPLHSAQAVDVASASNFRAFELLHLHLDLRAEFGPPGPGAGSRGLSGTAVLDLRCLEPEGAAELRLDSHPCLEVTAAALRRERPGSEEPPAEPVSFYTQPFSHYGQALCVSFPQPCRAAERLQVLLTYRVGEGPGVCWLAPEQTAGKKKPFVYTQGQAVLNRAFFPCFDTPAVKYKYSALIEVPDGFTAVMSASTWEKRGPNKFFFQMCQPIPSYLIALAIGDLVSAEVGPRYDLLFMPPSFPFGGMENPCLTFVTPCLLAGDRSLADVIIHEISHSWFGNLVTNANWGEFWLNEGFTMYAQRRISTILFGAAYTCLEAATGRALLRQHMDITGEENPLNKLRVKIEPGVDPDDTYNETPYEKGFCFVSYLAHLVGDQDQFDSFLKAYVHEFKFRSILADDFLDFYLEYFPELKKKRVDIIPGFEFDRWLNTPGWPPYLPDLSPGDSLMKPAEELAQLWAAEELDMKAIEAVAISPWKTYQLVYFLDKILQKSPLPPGNVKKLGDTYPSISNARNAELRLRWGQIVLKNDHQEDFWKVKEFLHNQGKQKYTLPLYHAMMGGSEVAQTLAKETFASTASQLHSNVVNYVQQIVAPKGS

SEQ ID NO: 42924 - protein, 144 aa, Homo sapiens
MEKEETTRELLLPNWQGSGSHGLTIAQRDDGVFVQEVTQNSPAARTGVVKEGDQIVGATIYFDNLQSGEVTQLLNTMGHHTVGLKLHRKGDRSPEPGQTWTREVFSSCSSEVVLSGDDEEYQRIYTTKIKPRLKSEDGVEGDLG

SEQ ID NO: 42925 - protein, 86 aa, Homo sapiens
MSGKDRIEIFPSRMAQTIMKARLKGAQTGRNLLKKKSDALTLRFRQILKKIIETKMLMGEVMREAAFSLAEAKFTAGDFRCYFASI

SEQ ID NO: 42926 - protein, 55 aa, Homo sapiens
MGLCLAGRRRSVQWCAVSQPEATKCFQWQRNMRKVRGPPVSCIKRDSPIQCIQAI

SEQ ID NO: 42927 - protein, 282 aa, Homo sapiens
MEVTGVSAPTVTVFISSSLNTFRSEKRYSRSLTIAEFKCKLELLVGSPASCMELELYGVDDKFYSKLDQEDALLGSYPVDDGCRIHVIDHSGARLGEYEDVSRVEKYTISQEAYDQRQDTVRSFLKRSKLGRYNEEERAQQEAEAAQRLAEEKAQASSIPVGSRCEVRAAGQSPRRGTVMYVVSLRHPGWSAVVLSAHCILCLPGSSNSHASASRVAGIIGLTDFKPGYWIGVRYDEPLGKNDGSVNGKRYFECQAKYGAFVKPAVVTVGDFPEEDYGLDEI

SEQ ID NO: 42928 - protein, 570 aa, Homo sapiens
MPSPRPVLLRGARAALLLLLPPRLLARPSLLLRRSLSAASCPPISLPAAASRSSMDGAGAEEVLAPLRLAVRQQGDLVRKLKEDKAPQVDVDKAVAELKARKRVLEAKELALQPKDDIVDRAKMEDTLKRRFFYDQAFAIYGGVSGLYDFGPVGCALKNNIIQTWRQHFIQEEQILEIDCTMLTPEPVLKTSGHVDKFADFMVKDVKNGECFRADHLLKAHLQKLMSDKKCSVEKKSEMESVLAQLDNYGQQELADLFVNYNVKSPITGNDLSPPVSFNLMFKTFIGPGGNMPGYLRPETAQGIFLNFKRLLEFNQGKLPFAAAQIGNSFRNEISPRSGLIRVREFTMAEIEHFVDPSEKDHPKFQNVADLHLYLYSAKAQVSGQSARKMRLGDAVEQGVINNTVLGYFIGRIYLYLTKVGISPDKLRFRQHMENEMAHYACDCWDAESKTSYGWIEIVGCADRSCYDLSCHARATKVPLVAEKPLKEPKTVNVVQFEPSKGAIGKAYKKDAKLVMEYLAICDECYITEMEMLLNEKGEFTIETEGKTFQLTKDMINVKRFQKTLYEQIL

SEQ ID NO: 42929 - protein, 47 aa, Homo sapiens
MPPFLITLFLFHSCCLRANGHLREGMTLLKTEFALHLYQSVAACRNE

SEQ ID NO: 42930 - protein, 226 aa, Homo sapiens
MAEMKTEDGKVEKHYLFYDGESVSGKVNLAFKQPGKRLEHQGIRIEFVGQIELFNDKSNTHEFVNLVKELALPGELTQSRSYDFEFMQVEKPYESYIGANVRLRYFLKVTIVRRLTDLVKEYDLIVHQLATYPDVNNSIKMEVGIEDCLHIEFEYNKSKYHLKDVIVGKIYFLLVRIKIQHMELQLIKKEITGIGPSTTTETETIAKYEIMDGAPVKGDNFMEKSS

SEQ ID NO: 42931 - protein, 139 aa, Homo sapiens
MACIHYLRENREKFEAFIEGSFEEYLKRLENPQEWVGQVEISALSLMYRKDFIIYREPNVSPSQVTENNFPEKVLLCFSNGNHYDIVYPIKYKESSAMCQSLLYELLYEKVFKTDVSKIVMELDTLEVADEDNSEISDS

SEQ ID NO: 42932 - protein, 195 aa, Homo sapiens
ANIPIMDTGENPEVPFPRDMIDLEANFEKIENELKEINTNQEALKRNFLELTELKFILRKTQQFFDEMADPDLLEESSSLLEPSEMGRGTPLRLGFVAGVINRERIPTFERMLWRVCRGNVFLRQAEIENPLEDPVTVESHSVVQARVQWRDLGSPQPPLPGFKRFSCLSLPSSWGLQGDYVHKSVFIIFFQGDQ

SEQ ID NO: 42933 - protein, 57 aa, Homo sapiens
MILTKAQYDEIAQCLVSVPPTRQSLRKLKQRFPRNTLKEHMPNIILRKQLKVITRGT

SEQ ID NO: 42934 - protein, 460 aa, Homo sapiens
MLELQYHNEDLEKDKTSQNCLGRGMEQVAKKLGVAHEEIQRLTDELQVKEKEQCKLDSALKKAQLEIDKLKENLVKLKENDAADLQKAKEQNQRLDEEILALRNRVRSLDSEKKVLGEMVERLKGEVCESQENKQLGNHSPGKTVGGEQREQHPSSGEKLKYNQQGEVQQLHQNLHRLQILCNSAENELRYERGQNLDLKQHNSLLQEENIKIKIELKHAQQKLLDSTKMCSSLTAEYKHCQQKIKELELEVLKHTQSIKSQNNLQEKLVQEKSKVADAEEKILDLQRKLEHAHKVCLTDTCISEKQQLEEKIKEATQNEAKVKQQYQEEQQKRKLLYQNVDELHRQVRTLQDKENLLEMTCSQQQSRIQQQEALLKQLENEKRKYDEHVKSNQELSEKLSKLQQEKEALREEYLRLLKLLNVHVRWSLALLPRLECNGMNSAHCNLCLPGSSNYPTSTS

SEQ ID NO: 42935 - protein, 1116 aa, Homo sapiens
MAPKHKSSDAGNLDRPKRSRKVLPLSEKVKVLDLIRKDKKSYAEVAKIYGKNESSIREIVKKEKEIRASFAVSPPTAKVTATVRDKCLVKMEQALHLWVEEMNRKRVPIDSNMLRQKALSLYQDFCKGCSETDTKPFTASKGWLHRFRHRFSHHYKKKKKGIMAQVAVSTLPVEEESSSETRMVVTFLVSALESMCKELAKSKAEVACIAVYETDVFVVGTERGCAFVNARTDFQKDFAKYCVAEGLCEVKPPCPVNGMQVHSGETEILRKAVEDYFCFCYGKALGTTVMVPVPYEKMLRDQSAVVVQGLPEGVAFQHPENYDLATLKWILENKAGISFIINRPFLGPESQLGGPGMVTDAERSIVSPSESCGPINVKTEPMEDSGISLKAEAVSVKKESEDPNYYQYNMQGSHPSSTSNEVIEMELPMEDSTPLVPSEEPNEDPEAEVKIEGNTNSSSVTNSAAGVEDLNIVQVTVPDNEKERLSSIEKIKQLREQVNDLFSRKFGEAIGVDFPVKVPYRKITFNPGCVVIDGMPPGVVFKAPGYLEISSMRRILEAAEFIKFTVIRPLPGLELSNGEYSTVGKRKIDQEGRVFQEKWERAYFFVEVQNIPTCLICKQSMSVSKEYNLRRHYQTNHSKHYDQYTERMRDEKLHELKKGLRKYLLGSSDTECPEQKQVFANPSPTQKSPVQPVEDLAGNLWEKLREKIRSFVAYSIAIDEITDINNTTQLAIFIRGVDENFDVSEELLDTVPMTGTKSGNEIFLRVEKSLKKFCINWSRLVSVASTGTPAMVDANNGLVTKLKSRVATFCKGAELKSICCIIHPESLCAQKLKMDHVMDVVVKSVNWICSRGLNHSEFTTLLYELDSQYGSLLYYTEIKWLSRGLVLKRFFESLEEIDSFMSSRGKPLPQLSSIDWIRDLAFLVDMTMHLNALNISLQGHSQIVTQMYDLIRAFLAKLCLWETHLTRNNLAHFPTLKLVSRNESDGLNYIPKIAELKTEFQKRLSDFKLYESELTLFSSPFSTKIDSVHEELQMEVIDLQCNTVLKTKYDKVGIPEFYKYLWGSYPKYKHHCAKILSMFGSTYICEQLFSIMKLSKTKYCSQLKDSQWDSVLHIAT

SEQ ID NO: 42936 - protein, 168 aa, Homo sapiens
  MOD_RES (1)..(1): Any amino acid
XASIPCPRSELRLDLVLPSGQSFRWREQSPAHWSGVLADQVWTLTQTEEQLHCTVYRGDKSQASRPTPDELEAVRKYFQLDVTLAQLYHHWGSVDSHFQEVAQKFQGVRLLRQDPIECLFSFICSSNNNIARITGMVERLCQAFGPRLIQLDDVTYHGFPSLQALAGG

SEQ ID NO: 42937 - protein, 84 aa, Homo sapiens
MPPMPSAPPVHPPPDGGWGWIVVGAAFISIGFSYAFPKAVTVFFKEIQQIFHTTYSEIAWISSIMLAVMYAGAGPKLPSHLQEE

SEQ ID NO: 42938 - protein, 228 aa, Homo sapiens
ASSTHHSTVPPLTSSNHSTSPQLSTGVSFFFLSFHISNLQFNSSLEDPSTDYYQELQRDISEMFLQIYKQGGFLGLSNIKFRPGSVVVQLTLAFREGTINVHDVETQFNQYKTEAASRYNLTISDVSVSDVPFPFSAQSGAGVPGWGIALLVLVCVLVALAIVYLIALAVCQCRRKNYGQLDIFPARDTYHPMSEYPTYHTHGRYVPPSSTDRSPYEKEWRVDRERLA

SEQ ID NO: 42939 - protein, 138 aa, Homo sapiens
MDHPSREKDERQRTTKPMAQRSAHCSRPSGSSSSSGVLMVGPNFRVGKKIGCGNFGELRLGKNLYTNEYVAIKLEPIKSRAPQLHLEYRFYKQLGSAGEGLPQVYYFGPCGKYNAMVLELLGPSLEDLFDLCDRTFTL

SEQ ID NO: 42940 - protein, 145 aa, Homo sapiens
MVQFSTSEFRLTPHIDNLEVANSFAVTNAFCSQFSRGVYAIFGFYDKKSVNTITSFCGTLHVSFITPSFPTDGTHPFVIQMRPDLKGALLSLIEYYQWDKFAYLYDSDRGLSTLQAVLDSAAEKKWQVTAINVGNINNDKKDEMY

SEQ ID NO: 42941 - protein, 1060 aa, Homo sapiens
MNGNTALAIAKRLGYISVVDTLKVVTEEVTTTTTTITEKHKLNVPETMTEVLDVSDEEGDDTMTGDGGEYLRPEDLKELGDDSLPSSQFLDGMNYLRYSLEGGRSDSLRSFSSDRSHTLSHASYLRDSAVMDDSVVIPSHQVSTLAKEAERNSYRLSWGTENLDNVALSSSPIHSGRASPCLERDNSSFLVSFMVDARGGAMRGCRHNGLRIIIPPRKCTAPTRVTCRLVKRHRLATMPPMVEGEGLASRLIEVGPSGAQFLGPVIVEIPHFAALRGKERELVVLRSENGDSWKEHFCDYTEDELNEILNGMDEVLDSPEDLEKKRICRIITRDFPQYFAVVSRIKQDSNLIGPEGGVLSSTVVPQVQAVFPEGALTKRIRVGLQAQPMHSELVKKILGNKATFSPIVTLEPRRRKFHKPITMTIPVPKASSDVMLNGFGGDAPTLRLLCSITGGTTPAQWEDITGTTPLTFVNECVSFTTNVSARFWLIDCRQIQESVTFASQVYREIICVPYMAKFVVFAKSHDPIEARLRCFCMTDDKVDKTLEQQENFAEVARSRDVEVLEGKPIYVDCFGNLVPLTKSGQHHIFSFFAFKENRLPLFVKVRDTTQEPCGRLSFMKEPKSTRGLVHQAICNLNITLPIYTKESESDQEQEEEIDMTSEKNPQDEQERIEERLAYIADHLGFSWTELARELDFTEEQIHQIRIENPNSLQDQSHALLKYWLERDGKHATDTNLVECLTKINRMDIVHLMETNTEPLQERISHSYAEIEQTITLDHSEGFSVLQEELCTAQHKQKEEQAVSKESETCDHPPIVSEEDISVGYSTFQDGVPKTEGDSSATALFPQTHKEQVQQDFSGKMQDLPEESSLEYQQEYFVTTPGTETSETQKAMIVPSSPSKTPEEVSTPAEEEKLYLQTPTSSERGGSPIIQEPEEPSEHREESSPRKTSLVIVESADNQPETCERLDEDAAFEKGDDMPEIPPETVTEEEYIDEHGHTVVKKVTRKIIRRYVSSEGTEKEEIMVQGMPQEPVNIEEGDGYSKVIKRVVLKSDTEQSEDNNE

SEQ ID NO: 42942 - protein, 98 aa, Homo sapiens
MFLRGRPVPMMIPDELAPTYSLDTRSELPSCRLKLEWVYGYRGRDCRANLYLLPTGEIVYFVASVAVLYSVEEQRQRHYLGHNDDIKCLAIHPDMVTI

SEQ ID NO: 42943 - protein, 70 aa, Homo sapiens
MLDDNNHLIQCIMDSQNKGKTSECSQYQQMLHTNLVYLATIADSNQNMQSLLPAPPTQNMPMGPGGMNQS

SEQ ID NO: 42944 - protein, 224 aa, Homo sapiens
MAAIGRGRSLKNLRVREPSDNLREILQNVARLQGVSNMRKLGHLNNFTKLLCDIGHSEEKLGFHYEDIIICLRLALLNEAKEVRAAGLRALRYLIQDSSILQKVLKLKVDYLIARCIDIQQSNEVERTQALRLVRKMITVNASLFPSSVTNSLIAVGNDGLQERDRMVRACIAIICELALQNPEVVALRGGLNTILKNVIDCQLSRINEALITTILHLLNHPKT

SEQ ID NO: 42945 - protein, 53 aa, Homo sapiens
MSRRFTVTSLPPAGPARSPDPESRRHSVADPRHLPGEDVKANPTDPHVLAIHL

SEQ ID NO: 42946 - protein, 145 aa, Homo sapiens
MRRSGEMLKPLVEKRRRDRINRSLEELRLLLLERTRDQNLRNPKLEKAEILEFAVGYLRERSRVEPPAAAAPGVPRSPVQDAEALASCYLSGFRECLLRLAAFAHDASPAARAQLFSALHGYLRPKPPRPKPVDPRPPAPRPSLD

SEQ ID NO: 42947 - protein, 2977 aa, Homo sapiens
KESCGDPGTPLYGIREGDGFSNRDVLRFECQFGFELIGEKSIVCQENNQWSANIPICIFPCLSNFTAPMGTVLSPDYPEGYGNNLNCIWTIISDPGSRIHLSFNDFDLESQFDFLAVKDGDSPESPILGTFTGAEVPSHLTSNSHILRLEFQADHSMSGRGFNITYNTFGHNECPDPGIPINARRFGDNFQLGSSISVICEEGFIKTQGTETITCILMDGKVMWSGLIPKCGAPCGGHFSAPSGVILSPGWPGYYKDSLNCEWVIEAEPGHSIKITFERFQTELNYDVLEVHDGPNLLSPLLGSYNGTQVPQFLFSSSNFIYLLFTTDNSRSNNGFKIHYESVTVNTYSCLDPGIPVHGRRYGHDFSIGSTVSFSCDSGYRLSHEEPLLCEKNHWWSHPLPTCDALCGGDVRGPSGTILSPGYPEFYPNSLNCTWTVDVTHGKGVQFNFHTFHLEDHHDYLLITENGSFTQPLARLTGSDLPPTINAGLYGNFRAQLRFISDFSISYEGFNITFSEYNLEPCEDPGIPQYGSRIGFNFGIGDTLTFSCSSGYRLEGTSEIICLGGGRRVWSAPLPRCVAECGASATNNEGILLSPNYPLNYENNHECIYSIQVQAGKGINISARTFHLAQGDVLKIYDGKDKTTHLLGAFTGASMRGLTLSSTSNQLWLEFNSDTEGTDEGFQLVYTSFELSHCEDPGIPQFGYKISDQGHFAGSTIIYGCNPGYTLHGSSLLKCMTGERRAWDYPLPSCIAECGGRFKGESSGRILSPGYPFPYDNNLRCMWMIEVDPGNIVSLQFLAFDTEASHDILRVWDGPPENDMLLKEISGSLIPEGIHSTLNIVTIQFDTDFYISKSGFAIQFSSSVATACRDPGVPMNGTRNGDGREPGDTVVFQCDPGYELQGEERITCIQVENRYFWQPSPPVCIAPCGGNLTGSSGFILSPNFPHPYPHSRDCDWTITVNADYVISLAFISFSIEPNYDFLYIYDGPDSNSPLIGSFQDSKLPERIESSSNTMHLAFRSDGSVSYTGFHLEYKAKLRESCFDPGNIMNGTRLGMDYKLGSTVTYYCDAGYVLQGYSTLTCIMGDDGRPGWNRALPSCHAPCGSRSTGSEGTVLSPNYPKNYSVGHNCVYSIAVPKEFAVPRTSSTQCSSVPEPRFGRRIGNEFAVGSSVLFDCNPGYILHGSIAIRCETVPNSLAQWNDSLPTCIVPCGGILTKRKGTILSPGYPEPYDNNLNCVWKITVPEGAGIQVQVVSFATEHNWDSLDFYDGGDNNAPRLGSYSGTTIPHLLNSTSNNLYLNFQSDISVSAAGFHLEYTAIGLDSCPEPQTPSSGIKIGDRYMVGDVVSFQCDQGYSLQGHSHITCMPGPVRRWNYPIPICLAQCGGAMSDFSGVILSPGFPGNYPSSLDCTWTINLPIGFGVHLQFVNFSTETIHDYLEVRSGSSETSTVIGRLSGPQIPSSLFSTTHETSLYFHSDYSQNKQGFHIVYQAYQLQSCPDPRPFRNGFVIGNDFTVGQTISFECFPGYTLIGNSALTCLHGVSRNWNHPLPRCEALCGGNITAMNGTIYSPGYPDEYPNFQDCFWLVRVPPGNGIYINFTVLQTEPIYDFITVWDGPDQNSPQIGQFSGNTALESVYSTSNQILIKFHSDFTTSGFFVLSYHAYQLRVCQPPPPVPNAEILTEDDEFEIGDIIRYQCLPGFTLVGNAILTCRLGERLQMDGAPPVCQVLCPANELRLDSTGVILSPGYPDSYPNLQMCAWSISVEKGYNITMFVEFFQTEKEFDVLQVYDGPNIQSPVLISLSGDYSSAFNITSNGHEVFLQWSADHGNNKKGFRIRYIAFYCSTPESPPHGYIISQTGGQLNSVVRWACDRGFRLVGKSSAVCRKSSYGYHAWDAPVPACQAISCGIPKAPTNGGILTTDYLVGTRVTYFCNDGYRLSSKELTTAVCQSDGTWSNHNKTPRCVVVTCPSINSFILEHGRWRIVNGSHYEYKTKVVFSCDPGYHGLGPASIECLPNGTWSWRNERPYCQIISCGELPTPPNGNKIGTQTSYGSTAIFTCDLGFMLVGSAVRECLSSGLWSESETRCLAGHCGIPELIVNGQVIGENYGYRDTVVYQCNPGFRLIGSSVRICQQDHNWSGQLPSCVPVSCGHPGSPIYGRTSGNGFNFNDVVTFSCNIGYLMQGPTKAQCQANRQWSHPPPMCKVVNCSDPGIPANSKRESKIEHGNFTYGTVVFYDCNPGYFLFGSSVLICQPNGQWDKPLPECIMIDCGHPGVPPNAVLSGEKYTFGSTVHYSCTGKRSLLGQSSRTCQLNGHWSGSQPHCSGDATGTCGDPGTPGHGSRQESNFRTKSTVRYACDTGYILHGSEERTCLANGSWTGRQPECKAVQCGNPGTTANGKVFRIDGTTFSSSVIYSCMEGYILSGPSVRQCTANGTWSGTLPNCTIISCGDPGIPANGLRYGDDYVVGQNVSYMCQPGYTMELNGSRIRTCTINGTWSGVMPTCRAVTCPTPPQISNGRLEGTNFDWGFSISYICSPGYELSFPAVLTCVGNGTWSGEVPQCLPKFCGDPGIPAQGKREGKSFIYQSEVSFSCNFPFILVGSSTRICQADGTWSGSSPHCIEPTQTSCENPGVPRHGSQNNTFGFQVGSVVQFHCKKGHLLQGSTTRTCLPDLTWSGIQPECIPHSCKQPETPAHANVVGMDLPSHGYTLIYTCQPGFFLAGGTEHRVCRSDNTWTGKVPICEAGSKILVKDPRPALGTPSPKLSVPDDVFAQNYIWKGSYNFKGRKQPMTLTVTSFNASTGRVNATLSNSNMELLLSGVYKSQEARLMLRIYLIKVPAHASVKKMKEENWAMDGFVSAEPDGATYVFQGFIQGKDYGQFGLQRLGLNMSEGSNSSNQPHGTNSSSVAIAILVPFFALIFAGFGFYLYKQRTAPKTQYTGCSVHENNNGQAAFENPMYDTNAKSVEGKAVRFDPNLNTVCTMV

SEQ ID NO: 42948 - protein, 162 aa, Homo sapiens
MKDLHSDDNEEESDEVEDNDNDSEMERPVNRGGSRSRRVSLSDGSDSESSSASSPLHHEPPPPLLKTNNNQILEVKSPIKQSKSDKQIKNGECDKAYLDELVELHRRLMTLRERHILQQIVNLIEETGHFHITNTTFDFDLCSLDKTTVRKLQSYLETSGTS

SEQ ID NO: 42949 - protein, 568 aa, Homo sapiens
MEKKWKYCAVYYIIQIHFVKGVWEKTVNTEENVYATLGSDVNLTCQTQTVGFFVQMQWSKVTNKIDLIAVYHPQYGFYCAYGRPCESLVTFTETPENGSKWTLHLRNMSCSVSGRYECMLVLYPEGIQTKIYNLLIQTHVTADEWNSNHTIEIEINQTLEIPCFQNSSSKISSEFTYAWSVEDNGTQETLISQNHLISNSTLLKDRVKLGTDYRLHLSPVQIFDDGRKFSCHIRVGPNKILRSSTTVKVFAKPEIPVIVENNSTDVLVERRFTCLLKNVFPKANITWFIDGSFLHDEKEGIYITNEERKGKDGFLELKSVLTRVHSNKPAQSDNLTIWCMALSPVPGNKVWNISSEKITFLLGSEISSTDPPLSVTESTLDTQPSPASSVSPARYPATSSVTLVDVSALRPNTTPQPSNSSMTTRGFNYPWTSSGTDTKKFSRIPSETYSSSPSGAGSTLHDNVFTSTARAFSEVPTTANGSTKTNHVHITGIVVNKPKDGMSWPVIVAALLFCCMILFGLGVRKWCQYQKEIMERPPPFKPPPPPIKYTCIQEPNESDLPYHEMETL

SEQ ID NO: 42950 - protein, 73 aa, Homo sapiens
  MOD_RES (1)..(1): Any amino acid
XSPFCMYHYFVDIITWNKNVRRGDITIKLRDKAGNTTESKINQISNRPKVQAQDSPNEVKVPCPSGEASAVSV

SEQ ID NO: 42951 - protein, 1248 aa, Homo sapiens
MGVDFDVKTFCHNLRATKPPYECPVETCRKVYKSYSGIEYHLYHYDHDNPPPPQQTPLRKHKKKGRQSRPANKQSPSPSEVSQSPGREVMSYAQAQRMVEVDLHGRVHRISIFDNLDVVSEDEEAPEEAPENGSNKENTETPAATPKSGKHKNKEKRKDSNHHHHHNVSASTTPKLPEVVYRELEQDTPDAPPRPTSYYRYIEKSAEELDEEVEYDMDEEDYIWLDIMNERRKTEGVSPIPQEIFEYLMDRLEKESYFESHNKGDPNALVDEDAVCCICNDGECQNSNVILFCDMCNLAVHQECYGVPYIPEGQWLCRRCLQSPSRAVDCALCPNKGGAFKQTDDGRWAHVVCALWIPEVCFANTVFLEPIDSIEHIPPARWKLTCYICKQRGSGACIQCHKANCYTAFHVTCAQQAGLYMKMEPVRETGANGTSFSVRKTAYCDIHTPPGSARRLPALSHSEGEEDEDEEEDEGKGWSSEKVKKAKAKSRIKMKKARKILAEKRAAAPVVSVPCIPPHRLSKITNRLTIQRKSQFMQRLHSYWTLKRQSRNGVPLLRRLQTHLQSQRNCDQVGRDSEDKNWALKEQLKSWQRLRHDLERARLLVELIRKREKLKRETIKVQQIAMEMQLTPFLILLRKTLEQLQEKDTGNIFSEPVPLSEVPDYLDHIKKPMDFFTMKQNLEAYRYLNFDDFEEDFNLIVSNCLKYNAKDTIFYRAAVRLREQGGAVLRQARRQAEKMGIDFETGMHIPHSLAGDEATHHTEDAAEEERLVLLENQKHLPVEEQLKLLLERLDEVNASKQSVGRSRRAKMIKKEMTALRRKLAHQRETGRDGPERHGPSSRGSLTPHPAACDKDGQTDSAAEESSSQETSKGLGPNMSSTPAHEVGRRTSVLFSKKNPKTAGPPKRPGRPPKNRESQMTPSHGGSPVGPPQLPIMSSLRQRKRGRSPRPSSSSDSDSDKSTEDPPMDLPANGFSGGNQPVKKSFLVYRNDCSLPRSSSDSESSSSSSSSAASDRTSTTPSKQGRGKPSFSRGTFPEDSSEDTSGTENEAYSVGTGRGVGHSSKFPCPRPGMLGTQCQGLASPPAADPPPLPHSCEVVRKSLGRGAGWLSEDEDSPLDALDLVWAKCRGYPSYPALIIDPKMPREGMFHHGVPIPVPPLEVLKLGEQMTQEAREHLYLVLFFDNKRTWQWLPRTKLVPLGVNQDLDKEKMLEGRKSNIRKSVQIAYHRALQHRSKVQGEQSSETSDSD

SEQ ID NO: 42952 - protein, 83 aa, Homo sapiens
MTKFQEMVTFKDVAVVFTREELGLLDLAQRKLYQDVMLENFRNLLSVGYQPFKLDVILQLGKEDKLRMMETEIQGDGCSGLTL

SEQ ID NO: 42953 - protein, 632 aa, Homo sapiens
MNGDSRAAVVTSPPPTTAPHKERYFDRVDENNPEYLRERNMAPDLRQDFNMMEQKKRVSMILQSPAFCEELESMIQEQFKKGKNPTGLLALQQIADFMTTNVPNVYPAAPQGGMAALNMSLGMVTPVNDLRGSDSIAYDKGEKLLRCKLAAFYRLADLFGWSQLIYNHITTRVNSEQEHFLIVPFGLLYSEVTASSLVKINLQGDIVDRGSTNLGVNQAGFTLHSAIYAARPDVKCVVHIHTPAGAAVSAMKCGLLPISPEALSLGEVAYHDYHGILVDEEEKVLIQKNLGPKSKVLILRNHGLVSVGESVEEAFYYIHNLVVACEIQVRTLASAGGPDNLVLLNPEKYKAKSRSPGSPVGEGTGSPPKWQIGEQEFEALMRMLDNLGYRTGYPYRYPALREKSKKYSDVEVPASVTGYSFASDGDSGTCSPLRHSFQKQQREKTRWLNSGRGDEASEEGQNGSSPKSKTKWTKEDGHRTSTSAVPNLFVPLNTNPKEVQEMRNKIREQNLQDIKTAGPQSQVLCGVVMDRSLVQGELVTASKAIIEKEYQPHVIVSTTGPNPFTTLTDRELEEYRREVERKQKGSEENLDEAREQKEKSPPDQPAVPHPPPSTPIKLEEAGDGCAREYLLP

SEQ ID NO: 42954 - protein, 80 aa, Homo sapiens
MDLRAGEEPQPRDEEEAELELLRQFDLAWQYGPCTGITRLQRWCRAKQMGLEPPPEVWQVLKTHPGDPRFQCSLWHLYPL

SEQ ID NO: 42955 - protein, 25 aa, Homo sapiens
MGREQDLILAVKNGDVTGVQKLVAK

SEQ ID NO: 42956 - protein, 147 aa, Homo sapiens
MLERPPALAMPMPTEGTPPPLSGTPIPVPAYFRHAEPGFSLKRPRGLSRSLPPPPPAKGSIPISRLFPPRTPGWHQLQPRRVSFRGEASETLQSPGYDPSRPESFFQQSFQRLSRLGHGSYGEVFKVRSKEDGRLYAVKRSMSPFRG

SEQ ID NO: 42957 - protein, 68 aa, Homo sapiens
MERSAPRVGVRASGCVCSSGRWRVGCDPETAAAWHVMYVCPCLMCRCPRWTGFQSQLCHSPACVPWGR

SEQ ID NO: 42958 - protein, 70 aa, Homo sapiens
MGQKIAPYSVEIKNTCTSVYTKDRAAKCKIPALDLLIKLLQTFRSSRLMDEFKIGELFSKFYGELALKKK

SEQ ID NO: 42959 - protein, 51 aa, Homo sapiens
MASEKPLAAVTCTAPVNIAVIKYWSPGACPLAITELSKSSIIDSHESGQAR

SEQ ID NO: 42960 - protein, 715 aa, Homo sapiens
MAGVGPGGYAAEFVPPPECPVFEPSWEEFTDPLSFIGRIRPLAEKTGICKIRPPKEYALSGWNLNNMPVLEQSVLAHINVDISGMKVPWLYVGMCFSSFCWHIEDHWSYSINYLHWGEPKTWYGVPSHAAEQLEEVMRELAPELFESQPDLLHQLVTIMNPNVLMEHGVPVYRTNQCAGEFVVTFPRAYHSGFNQGYNFAEAVNFCTADWLPIGRQCVNHYRRLRRHCVFSHEELIFKMAADPECLDVGLAAMVCKELTLMTEEETRLRESVVQMGVLMSEEEVFELVPDDERQCSACRTTCFLSALTCSCNPERLVCLYHPTDLCPCPMQKKCLRYRYPLEDLPSLLYGVKVRAQSYDTWVSRVTEALSANFNHKKDLIELRVMLEDAEDRKYPENDLFRKLRDAVKEAETCASVAQLLLSKKQKHRQSPDSGRTRTKLTVEELKAFVQQLFSLPCVISQARQVKNLLDDVEEFHERAQEAMMDETPDSSKLQMLIDMGSSLYVELPELPRLKQELQQARWLDEVRLTLSDPQQVTLDVMKKLIDSGVGLAPHHAVEKAMAELQELLTVSERWEEKAKVCLQARPRHSVASLESIVNEAKNIPAFLPNVLSLKEALQKAREWTAKVEAIQSGSNYAYLEQLESLSAKGRPIPVRLEALPQVESQVAAARAWRERTGRTFLKKNSSHTLLQVLSPRTDIGVYGSGKNRRKKVKEL

SEQ ID NO: 42961 - protein, 53 aa, Homo sapiens
  MOD_RES (1)..(1): Any amino acid
XASLDRVKVLVLGDSGVGKSSLVHLLCQNQVLGNPSWTVGCSVDVRVLFSYTT

SEQ ID NO: 42962 - protein, 171 aa, Homo sapiens
FPRDLSLISPLAQAVRSSSRTPSDKPVAHVVANPQAEGQLQWLNRRANALLANGVELRDNQLVVPSEGLYLIYSQVLFKGQGCPSTHVLLTHTISRIAVSYQTKVNLLSAIKSPCQRETPEGAEAKPWYEPIYLGGVFQLEKGDRLSAEINRPDYLDFAESGQVYFGIIAL

SEQ ID NO: 42963 - protein, 107 aa, Homo sapiens
MSSKVAINSDIGQALWAVEQLQMEAGIDQVKVRVGASAGGGKRWEHMGQGTGACLGLVWLNQLVCRCPKMAADLLKFCTEQAKNDPFLVGIPAATNSFKEKKPYAIL

SEQ ID NO: 42964 - protein, 52 aa, Homo sapiens
MAAEADGPLKRLLVPILLPEKCYDQLFVQWDLLHGEFYSASDPSPTRVTVGP

SEQ ID NO: 42965 - protein, 15 aa, Homo sapiens
MKLYVFLVNTGTTLT

SEQ ID NO: 42966 - protein, 104 aa, Homo sapiens
  MOD_RES (1)..(1): Any amino acid
XRKLALQPLKKQRKKQIDLSSVQKASFEELFPNVSNYVNSNEIVPVSSLQENSSNEFPANASEICCIIRTSPGTRQVKNKGVIVKKKKYSLPKDTPQDIIIKMA

SEQ ID NO: 42967 - protein, 65 aa, Homo sapiens
  MOD_RES (1)..(1): Any amino acid
XLPTIHKRASLGVASQILVTIAASDHAHGVFEFSPESLFVSGTEPEDGYSTVTLNFQILHVLGLR

SEQ ID NO: 42968 - protein, 76 aa, Homo sapiens
MSQKRQTKFQNGKSKTSENSSAKREKGMVVNSKEISDAVGQSKFVLENLRHYTVHPNLAQYYKPLKATALQKFLAQ

SEQ ID NO: 42969 - protein, 124 aa, Homo sapiens
MIHTELKAVRQFQKRKIQVERELDDLKENLRNTERIHQETLRRLESRFFEEKHRLEQEAEKKIIMLAERAHHEAIVQLNDAGRNVFKENDYLQKALAYHLKETDALQKNSQKLQESHTLLLHQK

SEQ ID NO: 42970 - protein, 516 aa, Homo sapiens
MAETVWSTDTGEAVYRSRDPVRNLRLRVHLQRITSSNFLHYQPAAELGKDLIDLATFRPQPTASGHRPEEDEEEEIVIGWQEKLFSQFEVDLYQNETACQSPLDYQYRQEILKLENSGGKKNRRIFTYTDSDRYTNLEEHCQRMTTAASEVPSFLVERMANVRRRRQDRRGMLGYKKYEHVLCTLKVDSNGVITVKPDFTGLKGPYRIETEGEKQELWKYTIDNVSPHAQPEEEERERRVFKDLYGRHKEYLSSLVGTDFEMTVPGALRLFVNGEVVSAQGYEYDNLYVHFFVELPTAHWSSPAFQQLSGVTQTCTTKSLAMDKVAHFSYPFTFEAFFLHEDESSDALPEWPVLYCEVLSLDFWQRYRVEGYGAVVLPATPGSHTLTVSTWRPVELGTVAELRRFFIGGSLELEDLSYVRIPGSFKGERLSRFGLRTETTGTVTFRLHCLQQSRAFMESSSLQKRMRSVLDRLEGFSQQSSIHNVLEAFRRARRRMQEARESLPQDLVSPSGTLVS

SEQ ID NO: 42971 - protein, 166 aa, Homo sapiens
METPAAAAPAGSLFPSFLLLACGTLVAALLGAAHRLGLFYQLLHKVDKASVRHGGENVAAVLRAHGVRFIFTLVGGHISPLLVACEKLGIRVVDTRHEVTAVFAADAMARLSGTVGVAAVTAGPGLTNTVTAVKNAQMAQSPILLLGGAASTLLQNRGALQAVDQL

SEQ ID NO: 42972 - protein, 127 aa, Homo sapiens
VIAPGNRELLQDYYMTHKMLYEEDLQNLCDKTQMSSQQTEFDLINVKDWPVWETACHVEEPNPTLCCHMPFPCPAAGHLGELPESSQTAQSLPLPSACPPPSKQQARWGSHQFFLPQCRTFPLPSNG

SEQ ID NO: 42973 - protein, 356 aa, Homo sapiens
RPFPASHHREPLPVGIEEYSQVLHPGIIFNNGPTWKDIRRFSLTTLRNYGMGKQGNESRIQREAHFLLEALRKTQGQPFDPTFLIGCAPCNVIADILFRKHFDYNDEKFLRLMYLFNENFHLLSTPWLQLYNNFPSFLHYLPGSHRKVIKNVAEVKEYVSERVKEHHQSLDPNCPRDLTDCLLVEMEKEKHSAERLYTMDGITVTVADLFFAGTETTSTTLRYGLLILMKYPEIEEKLHEEIDRVIGPSRIPAIKDRQEMPYMDAVVHEIQRFITLVPSNLPHEATRDTIFRGYLIPKGTVVVPTLDSVLYDNQEFPDPEKFKPEHFLNENGKFKYSDYFKPFSTGKRVCAGEGLA

SEQ ID NO: 42974 - protein, 741 aa, Homo sapiens [sequence omitted]

SEQ ID NO: 42975 - protein, 356 aa, Homo sapiens
MTSVRENILFGMGNPLLDISAVVDKDFLDKYSLKPNDQILAEDKHKELFDELVKKFKVEYHAGGSTQNSIKVAQWMIQQPHKAATFFGCIGIDKFGEILKRKAAEAHVDAHYYEQNEQPTGTCAACITGDNRSLIANLAAANCYKKEKHLDLEKNWMLVEKARVCYIAGFFLTVSPESVLKVAHHASENNRIFTLNLSAPFISQFYKESLMKVMPYVDILFGNETEAATFAREQGFETKDIKEIAKKTQALPKMNSKRQRIVIFTQGRDDTIMATESEVTAFAVLDQDQKEIIDTNGAGDAFVGDGVLLCHQAGVQWHDLGSLQPLPLGFKRLPCLSLPSSWRLQVFCLNWSLTSL

SEQ ID NO: 42976 - protein, 129 aa, Homo sapiens
MEKLYSENEGMASNQGKMENEEQPQDERKPEVTCTLEDKKLENEGKTENKGKTGDEEMLKDKGKPESEGEAKEGKSEREGESEMEGGSEREGKPEIEGKPESEGEPGSETRAAGKRPAEDDVPRKAKRK

SEQ ID NO: 42977 - protein, 139 aa, Homo sapiens
GRVIFCLDYIIFTLRLIHIFTVSRNLGPKIIMLQRMLIDVFFFLFLFAVWMVAFGVARQGILRQNEQRWRWIFRSVIYEPYLAMFGQVPSDVDGKPDLAQMETAWRRHLLPEPTPRAAPETALQKHARETESNITEYHV

SEQ ID NO: 42978 - protein, 131 aa, Homo sapiens
MTSFSTSAQCSTSDSACRISPGQINQVRPKLPLLKILHAAGAQGEMFTVKEVMHYLGQYIMVKQLYDQQEQHMVYCGGDLLGELLGRQSFSVKDPSPLYDMLRKNLVTLATATTEMGHLFCRISHALELAD

SEQ ID NO: 42979 - protein, 258 aa, Homo sapiens
  MOD_RES (1)..(1): Any amino acid
XKNKTTSWLDPRLDPRFAMNQRISQSAPVKQPPPLAPQSPQGGVMGGSNSNQQQQMRLQQLQMEKERLRLKQQELLRQVRPQAMRNINPSTANSPKCQELALRSQLPTLEQDGGTQNPVSSPGMSQELRTMTTNSSDPFLNSGTYHSRDESTDSGLSMSSYSVPRTPDDFLNSVDEMDTGDTINQSTLPSQQNRFPDYLEAIPGTNVDLGTLEGDGMNIEGEELMPSLQEALSSDILNDMESVLAATKLDKESFLTWL

SEQ ID NO: 42980 - protein, 190 aa, Homo sapiens
MFRTRGLAPNRPSIKNSKTSEREGALVYRFTKYQGDPTTQPARNARGLGHNGSGTAAGIRVRSAASQARAVWDPSARTPAPAKEPGMAQLERSAISGFSSKSRRNSFAYDVKREVYNEETFQQEHKRKASSSGNMNINITTFRHHVQCRCSWHRFLRCVLTIFPFLEWMCMYRLKDWLLGDLLAGISVGL

SEQ ID NO: 42981 - protein, 633 aa, Homo sapiens
AALGSSSGSASPAVAELCQNTPETFLEASKLLLTYADNILRNPNDEKYRSIRIGNTAFSTRLLPVRGAVECLFEMGFEEGETHLIFPKKASVEQLQKIRDLIAIERSSRLDGSNKSHKVKSSQQPAASTQLPTTPSSNPSGLNQHTRNRQGQSSDPPSASTVAADSAILEVLQSNIQHVLVYENPALQEKALACIPVQELKRKSQEKLSRARKLDKGINISDEDFLLLELLHWFKEEFFHWVNNVLCSKCGGQTRSRDRSLLPSDDELKWGAKEVEDHYCDACQFSNRFPRYNNPEKLLETRCGRCGEWANCFTLCCRAVGFEARYVWDYTELQRTLSLKLTTLKEIGKTFLRISKRQKLIQVVDVTWRYSCKHEEVIARRTKVKEALLRDTINGLNKQRQLFLSENRRKELLQRIIVELVEFISPKTPKPGELGGRISGSVAWRVARGEMGLQRKETLFIPCENEKISKQLHLCYNIVKDRYVRVSNNNQTISGWENGVWKMESIFRKVETDWHMVYLARKEGSSFAYISWKFECGSVGLKVDSISIRTSSQTFQTGTVEWKLRSDTAQVELTGDNSLHSYADFSGATEVILEAELSRGDGDVAWQHTQLFRQSLNDHEENCLEIIIKFSDL

SEQ ID NO: 42982 - protein, 202 aa, Homo sapiens
MRLNQNTLLLGKKVVLVPYTSEHVPSRYHEWMKSEELQRLTASEPLTLEQEYAMQCSWQEDADKCTFIVLDAEKWQAQPGATEESCMVGDVNLFLTDLEDLTLGEIEVMIAEPSCRGKGLGTEAVLAMLSYGLTKFEAKIGQGNEPSIRMFQKLHFEQVATSSVFQEVTLRLTVSESEHQWLLEQTSHVEEKPYRDGSAEPC

SEQ ID NO: 42983 - protein, 78 aa, Homo sapiens
MTPKQILQVIEAEGLKEMRSGTSPLACLNAMLHSNSRGGEGLFYKLPGRISLFTLKKDALQWSRHPATVEGEEPEDTA

SEQ ID NO: 42984 - protein, 67 aa, Homo sapiens
RIRAILSTYRKRTPVMEGYVEVKEGKTWKQICDKHWTAKNSRVVCGMFGFPGERTYNTKVYNNPWCD

SEQ ID NO: 42985 - protein, 41 aa, Homo sapiens
MEPPGRSSREEEEEEETEEEEEEDAHQFCCPASECSSPSSR

SEQ ID NO: 42986 - protein, 498 aa, Homo sapiens
MALNSGSPPAIGPYYENHGYQPENPYPAQPTVVPTVYEVHPAQYYPSPVPQYAPRVLTQASNPVVCTQPKSPSGTVCTSKTKKALCITLTLGTFLVGAALAAGLLWKFMGSKCSNSGIECDSSGTCINPSNWCDGVSHCPGGEDENRCVRLYGPNFILQVYSSQRKSWHPVCQDDWNENYGRAACRDMGYKNNFYSSQGIVDDSGSTSFMKLNTSAGNVDIYKKLYHSDACSSKAVVSLRCIACGVNLNSSRQSRIVGGESALPGAWPWQVSLHVQNVHVCGGSIITPEWIVTAAHCVEKPLNNPWHWTAFAGILRQSFMFYGAGYQVEKVISHPNYDSKTKNNDIALMKLQKPLTFNDLVKPVCLPNPGMMLQPEQLCWISGWGATEEKGKTSEVLNAAKVLLIETQRCNSRYVYDNLITPAMICAGFLQGNVDSCQGDSGGPLVTSKNNIWWLIGDTSWGSGCAKAYRPGVYGNVMVFTDWIYRQMRTANPHGLRP

SEQ ID NO: 42987 - protein, 387 aa, Homo sapiens
  MOD_RES (1)..(1): Any amino acid
XELPLSSRRMRLTHCGLQEKHLEQLCKALGGSCHLGHLHLDFSGNALGDEGAARLAQLLPGLGALQSLNLSENGLSLDAVLGLVRCFSTLQWLFRLDISFESQHILLRGDKTSRDMWATGSLPDFPAAAKFLGFRQRCIPRSLCLSECPLEPPSLTRLCATLKDCPGPLELQLSCEFLSDQSLETLLDCLPQLPQLSLLQLSQTGLSPKSPFLLANTLSLCPRVKKVDLRSLHHATLHFRSNEEEEGVCCGLSANLLGDSGLRCLLECLPQVPISGLLDLSHNSISQESALYLLETLPSCPRVREASVNLGSEQSFRIHFSREDQAGKTLRLSECSFRPEHVSRLATGLSKSLQLTELTLTQCCLGQKQLAILLSLVGRPAGLFSLS

SEQ ID NO: 42988 - protein, 214 aa, Homo sapiens
MFREVFADEDPATYVWDGNYHQPWEPAAAGAVGAGAYREVEAEDPGRLAVEALVRTRRCVCVAQRWGGKREVMYTAFKALGDSVDYVQVCDSDTRLDPMALLELVRVLDEDPRVGAVGGDVRILNPLDSWVSFLSSLRYWVAFNVERACQSYFHCVSCISGPLESCPGPREHAMMPSFLAPVQVHLQVPLLLRDALVLPAVAEPADTLVQVVLP

SEQ ID NO: 42989 - protein, 95 aa, Homo sapiens
MRTTKVYKLVIHKKGFGGSDDELVVNPKVFPHIKLGDIVEIAHPNDEYSPLLLQVKSLKEDLQKETISVDQTVTQVFRLRPYQDVYVNVVDPKWN

SEQ ID NO: 42990 - protein, 165 aa, Homo sapiens
MGSALGRARRTLSGRPFQRAPCKTRRALSLSAALRNVTKAQGGCPKSLVLWGCRPKRPRKRRTSLKLAWRGTFCSSSLKISEDTHEDHDTSTENTDESNHDPQFEPIVSLPEQEIKTLEEDEEELFKMRAKLFRFASENDLPEWKERGTGDVKLLKHKEKGAIRL

SEQ ID NO: 42991 - protein, 183 aa, Homo sapiens
MSFICGLQSAARNHVFFRFNSLSNWRKCNTLASTSRGCHQVQVNHIVNKYQGLGVNQCDRWSFLPGNFHFYSTFNNKRTGGLSSTKSKEIWRITSKCTVWNDAFSRQLLIKEVTAVPSLSVLHPLSPASIRAIRNFHTSPRFQAAPVPLLLMILKPVQKLFAIIVGRGIRKWWQALPPNKKEV

SEQ ID NO: 42992 - protein, 126 aa, Homo sapiens
ALLVRVLRNQTSISQWVPVCSRLIPVSPTQGQGDRALSRTSQWPQMSQSRACGGSEQIPGIDIQLNRKYHTTRKLSTTKDSPQPVEEKRSWDMMRGSFQMIMGWPLPSGEPSSTGNVKTLDILNCW

SEQ ID NO: 42993 - protein, 34 aa, Homo sapiens
  MOD_RES (1)..(1): Any amino acid
XQFGWVSELANQAPETEIIFNSIQVRRSNASYIQ

SEQ ID NO: 42994 - protein, 1237 aa, Homo sapiens
MLQQVPENINFPAEEEKILEFWTEFNCFQECLKQSKHKPKFTFYDGPPFATGLPHYGHILAGTIKDIVTRYAHQSGFHVDRRFGWDCHGLPVEYEIDKTLGIRGPEDVAKMGITEYNNQCRAIVMRYSAEWKSTVSRLGRWIDFDNDYKTLYPQFMESVWWVFKQLYDKGLVYRGVKVMPFSTACNTPLSNFESHQNYKDVQDPSVFVTFPLEEDETVSLVAWTTTPWTLPSNLAVCVNPEMQYVKIKDVARGRLLILMEARLSALYKLESDYEILERFPGAYLKGKKYRPLFDYFLKCKENGAFTVLVDNYVKEEEGTGVVHQAPYFGAEDYRVCMDFNIIRKDSLPVCPVDASGCFTTEVTDFAGQYVKDADKSIIRTLKEQGRLLVATTFTHSYPFCWRSDTPLIYKAVPSWFVRVENMVDQLLRNNDLCYWVPELVREKRFGNWLKDARDWTISRNRYWGTPIPLWVSDDFEEVVCIGSVAELEELSGAKISDLHRESVDHLTIPSRCGKGSLHRISEVFDCWFESGSMPYAQVHYPFENKREFEDAFPADFIAEGIDQTRGWFYTLLVLATALFGQPPFKNVIVNGLVLASDGQKMSKRKKNYPDPVSIIQKYGADALRLYLINSPVVRAENLRFKEEGVRDVLKDVLLPWYNAYRFLIQNVLRLQKEEEIEFLYNENTVRESPNITDRWILSFMQSLIGFFETEMAAYRLYTVVPRLVKFVDILTNWYVRMNRRRLKGENGMEDCVMALETLFSVLLSLCRLMDKDTLSIHYLMLPRVREELIDKKTESAVSQMQSVIELGRVIRDRKTIPIKYPLKEIVVIHQDPEALKDIKSLEKYIIEELNVRKVTLSTDKNKYGIRLRAEPDHMVLGKRLKGAFKAVMTSIKQLSSEELEQFQKTGTIVVEGHELHDEDIRLMYTFDQATGGTAQFEAHSDAQALVLLDVTPDQSMVDEGMAREVINRIQKLRKKCNLVPTDEITVYYKAKSEGTYLNSVIESHTEFIFTTIKAPLKPYPVSPSDKVLIQEKTQLKGSELEITLTRGSSLPGPACAYVNLNICANGSEQGGVLLLENPKGDNRLDLLKLKSVVTSIFGVKNTELAVFHDETEIQNQTDLLSLSGKTLCVTAGSAPSLINSSSTLLCQYINLQLLNAKPQECLMGTVGTLLLENPLGQNGLTHQGLLYEAAKVFGLRSRKLKLFLNETQTQEITEDIPVKTLNMKTVYVSVLPTTADF

SEQ ID NO: 42995 - protein, 415 aa, Homo sapiens
  MOD_RES (1)..(1): Any amino acid
XGLGQFGQLGLGTFLFETSEPKVIENIRDQTISYISCGENHTALITDIGLMYTFGDGRHGKLGLGLENFTNHFIPTLCSNFLRFIVKLVACGGCHMVVFAAPHRGVAKEIEFDEINDTCLSVATFLPYSSLTSGNVLQRTLSARMRRRERERSPDSFSMRRTLPPIEGTLGLSACFLPNSVFPRCSERNLQESVLSEQDLMQPEEPDYLLDEMTKEAEIDNSSTVESLGETTDILNMTHIMSLNSNEKSLKLSPVQKQKKQQTIGELTQDTALTENDDSDEYEEMSEMKEGKACKQHVSQGIFMTQPATTIEAFSDEEDHEFSKTEELKLEDVDEEINAENVESKKKTVGDDESVPTGYHSKTEGAERTNDDSSAETIEKKEKANLEERAICEYNENPKGYMLDDADSSSLEILE

SEQ ID NO: 42996 - protein, 141 aa, Homo sapiens
MRVHPRPHSRLAAKLAGLEPETPYPGFEFSELVTGATGTGDLTRKEPTELGASEMADEALAGLDEGALRKLLEVTADLAERRRIRSAIRELQRQELEREEEALASKRFRAERQDNKENWLHSQQREAEQRAALARLAGQLE

SEQ ID NO: 42997 - protein, 157 aa, Homo sapiens
MKKEHVLHCQFSAWYPFFRGVTIKSVILPLPQNVKDYLLDDGTLVVSGRDDPPTHSQPDSDDEAEEIQWSDDENTATLTAPEFPEFATKVQEAINSLGGSVFPKLNWSAPRDAYWIAMNSSLKCKTLSDIFLLFKSSDFITRDFTQPFIHCTDDSPD

SEQ ID NO: 42998 - protein, 237 aa, Homo sapiens
VSFGRDVIHYRVLHRDGHLTIDEAVFFCNLMDMVERPPGNGTGCWGSPPWGWAHGCPTILQHYSKDKGAICTKLVRPKRKHGTKSAEEELARGPQLRHSSVTIIHHLSQKPGPEPPPTPSSSIPSLARFPRPAGWLLNLQHLTLGAQIGEGEFGAVLQGEYLGQKVAVKNIKCDVTAQAFLDETAVMTKMQHENLVRLLGVILHQGLYIVMEHVSKGNLVNFLRTRGRALVNTAQLL

SEQ ID NO: 42999 - protein, 67 aa, Homo sapiens
  MOD_RES (1)..(1): Any amino acid
XTVAAGNLLNESEKDCGQDRRAPGVQPCRLVTMTSVVKTVYSLQPPSALSGGQPAEHLNGNPGTSGD

SEQ ID NO: 43000 - protein, 126 aa, Homo sapiens
MDVFKKGFSIAKEGVVGAVEKTKQGVTEAAEKTKEGVMYVGAKTKENVVQSVTSGLPWGWGWGGGQPVSSHSGREDQGAGQRRERGCGEQRQHCGHQDRGGGGEHRGHLRGGAQGGLEAICPPTGG

SEQ ID NO: 43001 - protein, 46 aa, Homo sapiens
MGCKGDASGACAAGALPVTGTQGWREEASWTKRGFGAQGDPVPLSH

SEQ ID NO: 43002 - protein, 269 aa, Homo sapiens
  MOD_RES (1)..(1): Any amino acid
XAHKTKHDLMMKGEGSRKGSFFKQAKKSYPMFPAPEERIKWDEYGEIIKARVTYIDYEGRSDGDSIKKIINQMKPRQLIIVHGPPEASQDLAECCRAFGGKDIKVYMPKLHETVDATSETHIYQVRLKDSLVSSLQFCKAKDAELAWIDGVLDMRVSKVDTGVILEEGELKDDGEDSEMQVEAPSDSSVIAQQKAMKSLFGDDEKETGEESEIIPTLEPLPPHEVPGHQSVFMNEPRLSDFKQVLLREGIQAEFVGGVLVCNNQVAVRR

SEQ ID NO: 43003 - protein, 100 aa, Homo sapiens
MGHRYVEVFKSNNVEMDWVLKHTGPNSPDTANDGFVRLRGLPFGCSKEEIVQFFSGLEIVPNGITLPVDFQGRSTGEAFVQFASQEIAEKALKKHKERIG

SEQ ID NO: 43004 - protein, 133 aa, Homo sapiens
MAALTIATGTGNWFSALALGVTLLKCLLIPTYHSTDFEVHRNWLAITHSLPISQWYYEATSEWTLDYPPFFAWFEYILSHVAKYFDQEMLNVHNLNYSSSRTLLFQRFSVIFMDVLFVYAVRDCFCFFPNVSM

SEQ ID NO: 43005 - protein, 103 aa, Homo sapiens
  MOD_RES (1)..(1): Any amino acid
XSDSFSHNNPVRFRPIKGRQEELKEVIERFKKDEHLEKAFKCLTSGEWARHYFLNKNKMQEKLFKEHRQNLALSPRLECSGLIMAHCSFHLLGSSDSSSQPPT

SEQ ID NO: 43006 - protein, 127 aa, Homo sapiens
MADEALAGLDEGALRKLLEVTADLAERRRIRSAIRELQRQELEREEEALASKRFRAERQDNKENWLHSQQREAEQRAALARLAGQLESMNDVEELTALLRSAGEYEERKLIRAAIRRVRAQEIEAAT

SEQ ID NO: 43007 - protein, 176 aa, Homo sapiens
MHKDEFHLKFFMCVIQSRQLVRTPQRTAGEASTSSMLIPKPPPKTDILKSLDTMDDPDTVGSIPVFKTECAEVEIQVSKRKRAVVKARGDPTVETMKQREEWIMTHEEHHAAKTLGIGKAIAVLTSGGDAQEMGRDRPGAVAHTCNPRTLGGRGGQITRGWEFETSLTNMEKPRLY

SEQ ID NO: 43008 - protein, 1000 aa, Homo sapiens
MPPRPSSGELWGIHLMPPRILVECLLPNGMIVTLECLREATLITIKHELFKEARKYPLHQLLQDESSYIFVSVTQEAEREEFFDETRRLCDLRLFQPFLKVIEPVGNREEKILNREIGFAIGMPVCEFDMVKDPEVQDFRRNILNVCKEAVDLRDLNSPHSRAMYVYPPNVESSPELPKHIYNKLDKGQIIVVIWVIVSPNNDKQKYTLKINHDCVPEQVIAEAIRKKTRSMLLSSEQLKLCVLEYQGKYILKVCGCDEYFLEKYPLSQYKYIRSCIMLGRMPNLMLMAKESLYSQLPMDCFTMPSYSRRISTATPYMNGETSTKSLWVINSALRIKILCATYVNVNIRDIDKIYVRTGIYHGGEPLCDNVNTQRVPCSNPRWNEWLNYDIYIPDLPRAARLCLSICSVKGRKGAKEEHCPLAWGNINLFDYTDTLVSGKMALNLWPVPHGLEDLLNPIGVTGSNPNKETPCLELEFDWFSSVVKFPDMSVIEEHANWSVSREAGFSYSHAGLSNRLARDNELRENDKEQLKAISTRDPLSEITEQEKDFLWSHRHYCVTIPEILPKLLLSVKWNSRDEVAQMYCLVKDWPPIKPEQAMELLDCNYPDPMVRGFAVRCLEKYLTDDKLSQYLIQLVQVLKYEQYLDNLLVRFLLKKALTNQRIGHFFFWHLKSEMHNKTVSQRFGLLLESYCRACGMYLKHLNRQVEAMEKLINLTDILKQEKKDETQKVQMKFLVEQMRRPDFMDALQGFLSPLNPAHQLGNLRLEECRIMSSAKRPLWLNWENPDIMSELLFQNNEIIFKNGDDLRQDMLTLQIIRIMENIWQNQGLDLRMLPYGCLSIGDCVGLIEVVRNSHTIMQIQCKGGLKGALQFNSHTLHQWLKDKNKGEIYDAAIDLFTRSCAGYCVATFILGIGDRHNSNIMVKDDGQLFHIDFGHFLDHKKKKFGYKRERVPFVLTQDFLIVISKGAQECTKTREFESSQGECFQLFPIQYDIGRGFVT

SEQ ID NO: 43009 - protein, 351 aa, Homo sapiens
MKKKDYGFRAGGNGTKKNLQFVGVNGGYETTSSEETSGEDSTPEDLSDSEAEKKCDGPDHKHVKDAHLTCEAGQGIPEGTCHAAQESGPGEEVPHSKAERYKPSEEFLNACRALSQHLPETGTTTDQLLRQSLNTISQEWFRVSSRKSSSPAVVASYLHEVQPHSPHFLKLLVNLADHNGNTALHYSVSHSNFSIVKLLLETGVCNVDHQNKAGYTAVMITPLASAETNEDMAVVWKLLREGNVNIQATQGGQTALMLGVSHDREDMVQALLSCQADVNLQDHDGSSALMVACHHGNVDLVRLLLAHPACDSSLTDKAGRTALSIALKSPTHMEIAGLLRAHAEQGRSLGL

SEQ ID NO: 43010 - protein, 1208 aa, Homo sapiens
MPAPEQASLVEEGQPQTRQEAASTGPGMEPETTATTILASVKEQELQFQRLTRELEVERQIVASQLERCRLGAESPSIASTSSTEKSFPWRSTDVPNTGVSKPRVSDAVQPNNYLIRTEPEQGTLYSPEQTSLHESEGSLGNSRSSTQMNSYSDSGYQEAGSFHNSQNVSKADNRQQHSFIGSTNNHVVRNSRAEGQTLVQPSVANRAMRRVSSVPSRAQSPSYVISTGVSPSRGSLRTSLGSGFGSPSVTDPRPLNPSAYSSTTLPAARAASPYSQRPASPTAIRRIGSVTSRQTSNPNGPTPQYQTTARVGSPLTLTDAQTRVASPSQGQVGSSSPKRSGMTAVPQHLGPSLQRTVHDMEQFGQQQYDIYERMVPPRPDSLTGLRSSYASQHSQLGQDLRSAVSPDLHITPIYEGRTYYSPVYRSPNHGTVELQGSQTALYRTGSGIGNLQRTSSQRSTLTYQRNNYALNTTATYAEPYRPIQYRVQECNYNRLQHAVPADDGTTRSPSIDSIQKDPREFAWRDPELPEVIHMLQHQFPSVQANAAAYLQHLCFGDNKVKMEVCRLGGIKHLVDLLDHRVLEVQKNACGALRNLVFGKSTDENKIAMKNVGGIPALLRLLRKSIDAEVRELVTGVLWNLSSCDAVKMTIIRDALSTLTNTVIVPHSGWNNSSFDDDHKIKFQTSLVLRNTTGCLRNLSSAGEEARKQMRSCEGLVDSLLYVIHTCVNTSDYDSKTVENCVCTLRNLSYRLELEVPQARLLGLNELDDLLGKESPSKDSEPSCWGKKKKKKKRTPQEDQWDGVGPIPGLSKSPKGVEMLWHPSVVKPYLTLLAESSNPATLEGSAGSLQNLSAGNWKFAAYIRGRPKRKGLPILVELLRMDNDRVVSSVATALRNMALDVRNKELIGKYAMRDLVNRLPGGNGPSVLSDETMAAICCALHEVTSKNMENAKALADSGGIEKLVNITKGRGDRSSLKVVKAAAQVLNTLWQYRDLRSIYKKDGWNQNHFITPVSTLERDRFKSHPSLSTTNQQMSPIIQSVGSTSSSPALLGIRDPRSEYDRTQPPMQYYNSQGDATHKGLYPGSSKPSPIYISSYSSPAREQNRRLQHQQLYYSQDDSNRKNFDAYRLYLQSPHSYEDPYFDDRVHFPASTDYSTQYGLKSTTNYVDFYSTKRPSYRAEQYPGSPDSWVHQDAQQRNSFFLTLFRLR

SEQ ID NO: 43011 - protein, 64 aa, Homo sapiens
MYDADEDMQYDEDDDEITPDLWQEACWIVISSYFDEKGLVRQQLDSFDEFIQMSVQRIVEDAPP

SEQ ID NO: 43012 - protein, 81 aa, Homo sapiens
MKASAALLCLLLTAAAFSPQGLAQPERPRTHPQWTFLLVVSLQLGLILQLPAATDLSIRKSLSRGWRATEGPPVATVPGKL

SEQ ID NO: 43013 - protein, 91 aa, Homo sapiens
MGMCSRQERIQKDIDVVIQKSRAEKDCLFADFRYSDSTFTFTYVGGPRSVSYSVHVSEDYPAIVNTATMHMVVEILLQDPGSVSCGSQKDC

SEQ ID NO: 43014 - protein, 71 aa, Homo sapiens
MDFADLPALFGATLSQEGLQGFLVEAHPDNACSPIAPPPPAPVNGSVFIALLRRFDCNFDLKVLNAQKAGY

SEQ ID NO: 43015 - protein, 61 aa, Homo sapiens
MLCDEKAQKRRKRKAKESGMALPQGAAMHWEAMQKTNQLKNNLEYPFTYICLNWSYFQMKG

SEQ ID NO: 43016 - protein, 78 aa, Homo sapiens
TGSASRRCAGPAGAVARPGGAPGPLGAGDCRACGWGPLAGSPSLRGPALFTVYFIRPAWRKARGRLQREKAYSESVYF

SEQ ID NO: 43017 - protein, 943 aa, Homo sapiens
MSEILCQWLNKELKVSRTVSPKSFAKAFSSGYLLGEVLHKFELQDDFSEFLDSRVSSAKLNNFSRLEPTLNLLGVQFDQNVAHGIITEKPGVATKLLYQLYIALQKKKKSGLTGVEMQTMQRLTNLRLQNMKSDTFQERLRHMIPRQTDFNLMRITYRFQEKYKHVKEDLAHLHFEKLERFQKLKEEQRCFDIEKQYLNRRRQNEIMAKIQAAIIQIPKPASNRTLKALEAQKMMKKKKEAEDVADEIKKFEALIKKDLQAKESASKTSLDTAGQTTTDLLNTYSDDEYIKKIQKRLEEDAFAREQREKRRRKLLMDQLIAHEAQEEAYREEQLINRLMRQSQQERRIAVQLMHVRHEKEVLWQNRIFREKQHEERRLKDFQDALDREAALAKQAKIDFEEQFLKEKRFHDQIAVERAQARYEKHYSVCAEILDQIVDLSTKVADYRMLTNNLIPYKLMHDWKELFFNAKPIYEQASVKTLPANPSREQLTELEKRDLLDTNDYEEYKNMVGEWALPEEMVDNLPPSNNCILGHILHRLAEKSLPPRAESTTPELPSFAVKGCLLGKTLSGKTTILRSLQKDFPIQILSIDTLVQEAIQAFHDNEKVSEVLPIQKNDEEDALPVLQEEIKESQDPQHVFSAGPVSDEVLPETEGANADKTPKAEEVKSSDSFLKLTTRAQLGAKSEQLLKKGKSIPDVLLVDIIVNAINEIPVNQDCILDGFPMTLNQAQLLEEALTGCNRNLTEVERKKAQKSTLAIDPATSKEIPLPSPAFDFVILLDVSDTSSMSRMNDIIAEELSYKTAHEDISQRVAAENQDKDGDQNLRDQIQHRIIGFLDNWPLLEQWFSEPENILIKINAEIDKESLCEKVKEILTTEIAKKKNKVEKKLEEKEAEKKAAASLAELPLPTPPPAPPPEPEKEKEIHQSHVASKTPTAKGKPQSGD

SEQ ID NO: 43018 - protein, 71 aa, Homo sapiens
MATPLVAGPAALRFAAAASWQVVRGRCVEHFPRVLEFLRSLRAVAPGLVRYRHHERLCMGLKAKSALLLTQ

SEQ ID NO: 43019 - protein, 158 aa, Homo sapiens
MPKEKYDPPDPRRIYTIMSAEEVANGKKSHWAELEISGRVRSLSTSLWSLTHLTALHLNDNYLSRIPPDIAKLHNLVYLDLSSNKLRSLPAELGNMVSLRELLLNNNLLRVLPYELGRLFQLQTLGLKGNPLSQDILNLYQDPDGTRKLLNFMLDNLA

SEQ ID NO: 43020 - protein, 44 aa, Homo sapiens
MAICQFFLQGRCRFGDRCWNEHPGARGAGGGRQQPQQQPSGKEL

SEQ ID NO: 43021 - protein, 86 aa, Homo sapiens
  MOD_RES (1)..(1): Any amino acid
XDNGMFSPSGESCEDIDECGTGRHSCANDTICFNLDGGYDCRCPHGKNCTGDCIHDGKVKHNGQIWVLENDRCSVCSCQVGINEKL

SEQ ID NO: 43022 - protein, 68 aa, Homo sapiens
MENMHLRRVRTMPRHSQSLTMAPYSSVSLVEQLEDRILCHEKTTAALVEHAFRIKDDIVNSLQKMQNK

SEQ ID NO: 43023 - protein, 1262 aa, Homo sapiens
  MOD_RES (1)..(1): Any amino acid
XKQSYWNHRELMRGEEGRPGKKLKKVKLRKLERPPETPTVDPTVKYERQPEYLDATGGTLHPYQMEGLNWLRFSWAQGTDTILADEMGLGKTVQTAVFLYSLYKEGHSKGPFLVSAPLSTIINWEREFEMWAPDMYVVTYVGDKDSRAIIRENEFSFEDNAIRGGKKASRMKKEASVKFHVLLTSYELITIDMAILGSIDWACLIVDEAHRLKNNQSKFFRVLNGYSLQHKLLLTGTPLQNNLEELFHLLNFLTPERFHNLEGFLEEFADIAKEDQIKKLHDMLGPHMLRRLKADVFKNMPSKTELIVRVELSPMQKKYYKYILTRNFEALNARGGGNQVSLLNVVMDLKKCCNHPYLFPVAAMEAPKMPNGMYDGSALIRASGKLLLLQKMLKNLKEGGHRVLIFSQMTKMLDLLEDFLEHEGYKYERIDGGITGNMRQEAIDRFNAPGAQQFCFLLSTRAGGLGINLATADTVIIYDSDWNPHNDIQAFSRAHRIGQNKKVMIYRFVTRASVEERITQVAKKKMMLTHLVVRPGLGSKTGSMSKQELDDILKFGTEELFKDEATDGGEVVRNLRFGVGLGLSKGGDNKEGEDSSVIHYDDKAIERLLDRNQDETEDTELQGMNEYLSSFKVAQYVVREEEMGEEEVEREIIKQEESVDPDYWEKLLRHHYEQQQEDLARNLGKGKRIRKQVNYNDGSQEDRDWQDDQSDNQSDYSVASEEGDEDFDERSEAPRRPSRKGLRNDKDKPLPPLLARVGGNIEVLGFNARQRKAFLNAIMRYGMPPQDAFTTQWLVRDLRGKSEKEFKAYVSLFMRHLCEPGADGAETFADGVPREGLSRQHVLTRIGVMSLIRKKVQEFEHVNGRWSMPELAEVEENKKMSQPGSPSPKTPTPSTPGDTQPNTPAPVPPAEDGIKIEENSLKEEESIEGEKEVKSTAPETAIECTQAPAPASEDEKVVVEPPEGEEKVEKAEVKERTEEPMETEPKGAADVEKVEEKSAIDLTPIVVEDKEEKKEEEEKKEVMLQNGETPKDLNDEKQKKNIKQRFMFNIADGGFTELHSLWQNEERAATVTKKTYEIWHRRHDYWLLAGIINHGYARWQDIQNDPRYAILNEPFKGEMNRGNFLEIKNKFLARRFKLLEQALVIEEQLRRAAYLNMSEDPSHPSMALNTRFAEVECLAESHQHLSKESMAGNKPANAVLHKVLKQLEELLSDMKADVTRLPATIARIPPVAVRLQMSERNILSRLANRAPEPTPQQVAQQQ

SEQ ID NO: 43024 - protein, 44 aa, Homo sapiens
MLLLDCNPEVDGLKHLLETGASVNAPPDPCKQSPVHLAAGSGLA

SEQ ID NO: 43025 - protein, 47 aa, Homo sapiens
MYNDTLNGSTEKRSAELPDAVGPIVQLQEKLYVPVKEYPDFNFVGRI

SEQ ID NO: 43026 - protein, 135 aa, Homo sapiens
MVWKVAVFLSVALGIGAVPIDDPEDGGKHWVVIVAGSNGWYNYRHQADACHAYQIIHRNGIPDEQIVVMINPTPGIVINRPNGTDVYQGVPKDYTGEDVTPQNFLAVLRGDAEAVKGIGSGKVLKSGPQDHVFIY

SEQ ID NO: 43027 - protein, 88 aa, Homo sapiens
MPDRDSYANGTGSSGGGPGGGGSEEASGAGVGSGGASSDAICRDFLRNVCKRGKRCRYRHPDMSEVSNLGVSKNEFIFCHDFQNKECS

SEQ ID NO: 43028 - protein, 41 aa, Homo sapiens
MAAASVSAASGSHLSPYFLLLRIFKIRFDAWNLRGFRQKKV

SEQ ID NO: 43029 - protein, 511 aa, Homo sapiens
MKIIFPILSNPVFRRTVKLLLCLLWIGYSQGTTHVLRFGGIFEYVESGPMGAEELAFRFAVNTINRNRTLLPNTTLTYDTQKINLYDSFEASKKACDQLSLGVAAIFGPSHSSSANAVQSICNALGVPHIQTRWKHQVSDNKDSFYVSLYPDFSSLSRAILDLVQFFKWKTVTVVYDDSTGLIRLQELIKAPSRYNLRLKIRQLPADTKDAKPLLKEMKRGKEFHVIFDCSHEMAAGILKQALAMGMMTEYYHYIFTTLDLFALDVEPYRYSGVNMTGFRILNTENTQVSSIIEKWSMERLQAPPKPDSGLLDGFMTTDAALMYDAVHVVSVAVQQFPQMTVSSLQCNRHKPWRFGTRFMSLIKEAHWEGLTGRITFNKTNGLRTDFDLDVISLKEEGLEKIGTWDPASGLNMTESQKGKPANITDSLSNRSLIVTTILEEPYVLFKKSDKPLYGNDRFEGYCIDLLRELSTILGFTYEIRLVEDGKYGAQDDANGQWNGMVRELIDHDSG

SEQ ID NO: 43030 - protein, 38 aa, Homo sapiens
MAAGETQLYAKVSNKLKSRSSPSLLEPLLAMGFPVHTA

SEQ ID NO: 43031 - protein, 140 aa, Homo sapiens
MGLVHGPNHPLVLLAKWYEKFFGRLSHLNLCVTNAMREDLADNWHIRAVTVYDKPASFFKETPLDLQHRLFMKLGSMHSPFRARSEPEDPVTERSAFTERDAGSGLVTRLRERPALLVSSTSWTEDEDFSILLAALESRV

SEQ ID NO: 43032 - protein, 1138 aa, Homo sapiens
MPLAFCGSENHSAAYRVDQGVLNNGCFVDALNVVPHVFLLFITFPILFIGWGSQSSKVHIHHSTWLHFPGHNLRWILTFMLLFVLVCEIAEGILSDGVTESHHLHLYMPAGMAFMAAVTSVVYYHNIETSNFPKLLIALLVYWTLAFITKTIKFVKFLDHAIGFSQLRFCLTGLLVILYGMLLLVEVNVIRVRRYIFFKTPREVKPPEDLQDLGVRFLQPFVNLLSKGTYWWMNAFIKTAHKKPIDLRAIGKLPIAMRALTNYQRLCEAFDAQRKDIQGTQGARAIWQALSHAFGRRLVLSSTFRILADLLGFAGPLCIFGIVDHLGKENDVFQPKTQFLGVYFVSSQEFLANAYVLAVLLFLALLLQRTFLQASYYVAIETGINLRGAIQTKIYNKIMHLSTSNLSMGEMTAGQICNLVAIDTNQLMWFFFLCPNLWAMPVQIIVGVILLYYILGVSALIGAAVIILLAPVQYFVATKLSQAQRSTLEYSNERLKQTNEMLRGIKLLKLYAWENIFRTRVETTRRKEMTSLRAFAIYTSISIFMNTAIPIAAVLITFVGHVSFFKEADFSPSVAFASLSLFHILVTPLFLLSSVVRSTVKALVSVQKLSEFLSSAEIREEQCAPHEPTPQGPASKYQAVPLRVVNRKRPAREDCRGLTGPLQSLVPSADGDADNCCVQIMGGYFTWTPDGIPTLSNITIRIPRGQLTMIVGQVGCGKSSLLLAALGEMQKVSGAVFWSSLPDSEIGEDPSPERETATDLDIRKRGPVAYASQKPWLLNATVEENIIFESPFNKQRYKMVIEACSLQPDIDILPHGDQTQIGERGINLSGGQRQRISVARALYQHANVVFLDDPFSALDIHLSDHLMQAGILELLRDDKRTVVLVTHKLQYLPHADWIIAMKDGTIQREGTLKDFQRSECQLFEHWKTLMNRQDQELEKETVTERKATEPPQGLSRAMSSRDGLLQDEEEEEEEAAESEEDDNLSSMLHQRAEIPWRACAKYLSSAGILLLSLLVFSQLLKHMVLVAIDYWLAKWTDSALTLTPAARNCSLSQECTLDQTVYAMVFTVLCSLGIVLCLVTSVTVEWTGLKVAKRLHRSLLNRIILAPMRFFETTPLGSILNRFSSDCNTIDQGPAAAG

SEQ ID NO: 43033 - protein, 176 aa, Homo sapiens
MKLLTRAGSFSFTKLPNGLVIASLENYSPVSRIGLFIKAGSRYEDFSNLGTTHLLRLTSSLTTKGASSFKITRGIEAVGGKLSVTATRENMAYTVECLRGDVDILMEFLLNVTTAPEFRRWEVADLQPQLKIDKAVAFQNPQTHVIENLHAAAYRNALANPLYCPDYRIGKVTSEE

SEQ ID NO: 43034 - protein, 68 aa, Homo sapiens
MAWQGLVLAACLLMFPSTTADCLSRCSLCAVKTQDGPKPINPLICSLQCQAALLPSEEWERCQSFLSF

SEQ ID NO: 43035 - protein, 342 aa, Homo sapiens
MWAVLRLALRPCARASPAGPRAYHGDSVASLGTQPDLGSALYQENYKQMKALVNQLHERVEHIKLGGGEKARALHISRGKLLPRERIDNLIDPGSPFLELSQFAGYQLYDNEEVPGGGIITGIGRVSGVECMIIANDATVKGGAYYPVTVKKQLRAQEIAMQNRLPCIYLVDSGGAYLPRQADVFPDRDHFGRTFYNQAIMSSKNIAQIAVVMGSCTAGGAYVPAMADENIIVRKQGTIFLAGPPLVKAATGEEVSAEDLGGADLHCRKSGVSDHWALDDHHALHLTRKVVRNLNYQKKLDVTIEPSEEPLFPADELYGIVGANLKRSFDVREDLLEYLGTQ

SEQ ID NO: 43036 - protein, 57 aa, Homo sapiens
VHAESLQQVVQSQREVTEVLQEATCKIAAQQSETARLTTDAARQICEEKSICFTLSE

SEQ ID NO: 43037 - protein, 1071 aa, Homo sapiens
  MOD_RES (1)..(1): Any amino acid
XSVESIPSLRGSITQGTPIKFDNNSGQSAIKHNVKSLITGPSKLSRGMPPLEIVPENIKVVERGKYEDVKAGETVRSRHTSVVSSGPSVLRSTLHEAPKAQLSPGIYDDTSARRTPVSYQNTMSRGSPMMNRTSDVTISSNKSTNHERKSTLTPTQRESIPAKSPVPGVDPVVSHSPFDPHHRGSTAGEVYRSHLPTHLDPAMPFHRALDPAAAAYLFQRQLSPTPGYPSQYQLYAMENTRQTILNDYITSQQMQVNLRPDVARGLSPREQPLGLPYPATRGIIDLTNMPPTILVPHPGGTSTPPMDRITYIPGTQITFPPRPYNSASMSPGHPTHLAAAASAEREREREREKERERERIAAASSDLYLRPGSEQPGRPGSHGYVRSPSPSVRTQETMLQQRPSVFQGTNGTSVITPLDPTAQLRIMPLPAGGPSISQGLPASRYNTAADALAALVDAAASAPQMDVSKTKESKHEAARLEENLRSRSAAVSEQQQLEQKTLEVEKRSVQCLYTSSAFPSGKPQPHSSVVYSEAGKDKGPPPKSRYEEELRTRGKTTITAANFIDVIITRQIASDKDARERGSQSSDSSSSLSSHRYETPSDAIEVISPASSPAPPQEKLQTYQPEVVKANQAENDPTRQYEGPLHHYRPQQESPSPQQQLPPSSQAEGMGQVPRTHRLITLADHICQIITQDFARNQVSSQTPQQPPTSTFQNSPSALVSTPVRTKTSNRYSPESQAQSVHHQRPGSRVSPENLVDKSRGSRPGKSPERSHVSSEPYEPISPPQVPVVHEKQDSLLLLSQRGAEPAEQRNDARSPGSISYLPSFFTKLENTSPMVKSKKQEIFRKLNSSGGGDSDMAAAQPGTEIFNLPAVTTSGSVSSRGHSFADPASNLGLEDIIRKALMGSFDDKVEDHGVVMSQPMGVVPGTANTSVVTSGETRREEGDPSPHSGGVCKPKLISKSNSRKSKSPIPGQGYLGTERPSSVSSVHSEGDYHRQTPGWAWEDRPSSTGSTQFPYNPLTMRMLSSTPPTPIACAPSAVNQAAPHQQNRIWEREPAPLLSAQYETLSDSDD

SEQ ID NO: 43038 - protein, 127 aa, Homo sapiens
MWATCCNWFCLDGQPEEVPPPQGARMQAYSNPGYSSFPSPTGLEPSCKSCGAHFANTARKANGHVSQDQEEPVYLESVARVPAEDETQSIDSEDSFVPGRRASLSDLTDLEDIEGLTVRQLKEILAR

SEQ ID NO: 43039 - protein, 256 aa, Homo sapiens
MACAEFSFHVPSLEELAGVMQKGLKDNFADVQVSVVDCPDLTKEPFTFPVKGICGKTRIAEVGGVPYLLPLVNQKKVYDLNKIAKEIKLPGAFILGAGAGPFQTLGFNSEVIEVKAKRRTGPLNFVTCMRETLEKHYGNKPIGMGGTFIIQKGKVKSHIMPAEFSSCPLNSDEEVNKWLHFYEMKAPLVCLPVFVSRDPGFDLRLEHTHFFSRHGEGGHYHYDTTPDIVEYLGYFLPAEFLYRIDQPKETHSIGRD

SEQ ID NO: 43040 - protein, 685 aa, Homo sapiens
  MOD_RES (1)..(1): Any amino acid
XLETRRVGTEGLVDSFSQGLERSYAVSSSVLHGIEPRLKDFHQLLLNPPKKKAILTTIGVLEEPLGNARLHGARLMAALLHTNTPSINQELCRLNTMDLLLDLFFKYTWNNFLHFQVELCIAAILSHAAREERTEASGSESRVEPPHENGNRSLETPQPAASLPDNTMVTHLFQKCCLVQRILEAWEANDHTQAAGGMRRGNMGHLTRIANAVVQNLERGPVQTHISEVIRGLPADCRGRWESFVEETLTETNRRNTVDLVSTHHLHSSSEDEDIEGAFPNELSLQQAFSDYQIQQMTANFVDQFGFNDEEFADQDDNINAPFDRIAEINFNIDADEDSPSAALFEACCSDRIQPFDDDEDEDIWEDSDTRCAARVMARPRFGAPHASESCSKNGPERGGQDGKASLEAHRDAPGAGAPPAPGKKEAPPVEGDSEGAMWTAVFDEPANSTPTAPGVVRDVGSSVWAAGTSAPEEKGWAKFTDFQPFCCSESGPRCSSPVDTECSHAEGSRSQGPEKAFSPASPCAWNVCVTRKAPLLASDSSSSGGSHSEDGDQKAASAMDAVSRGPGREAPPLPTVARTEEAVGRVGCADSRLLSPACPAPKEVTAAPAVAVPPEATVAITTALSKAGPAIPTPAVSSALAVAVPLGPIMAVTAAPAMVATLGTVTKDGKTDAPPEGAALNGPV

SEQ ID NO: 43041 - protein, 76 aa, Homo sapiens
MAGSYPEGAPAILADKRQQFGSRFLSDPARVFHHNAWDNVEWSEEQAAAAERKVQENSIQRVCQEKQVKDTWTTGH

SEQ ID NO: 43042 - protein, 125 aa, Homo sapiens
MAWFYCNCKKMDASGPSDSDMPSRTRPKSPRKHNYRNESARESLCDSPHQNLSRPLLENKLKAFSIGKMSTAKRTLSKKEQEELKKKEDEKAAAEIYEEFLAAFEGSDGNKVKTFVRGGVVNAAK

SEQ ID NO: 43043 - protein, 110 aa, Homo sapiens
MRLFVSDGVPGCLPVLAAAGRARGRAEVLISTVGPEDCVVPFLTRPKVPVLQLDSGNYLFSTSAICRYFFLLSGWEQDDLTNQWLEWEATELQWSKARRGKMFLVQCGEP

SEQ ID NO: 43044 - protein, 146 aa, Homo sapiens
RERRIEIEENKKQGKYFLLTPLSPTASQGSPSFCVGSLEEDSPFPSFAQMLRVGKAKADVWPKTAPKKDENSLVPPAPVDSDGESDNSDRVPVPSFQNSFSQAIEAAFMKLDTPATSDPLSEEKGGKKRKKQKQKLLFSTSVVHTK

SEQ ID NO: 43045 - protein, 142 aa, Homo sapiens
MRMDAGEVTLVNHNSVFKTHLLPQTGFPEDQLSLSDQQILSSRQGHLDRSFTCSTRSAAYNPSYYSDNPSSDSFLGSGDLRTFGQSANGQWRNSTPSSSSSLQKSRNSRSLYLETRKTSSGLSNSFAGKSNHHCHVSAYEKS

SEQ ID NO: 43046 - protein, 115 aa, Homo sapiens
MMLGTEGGEGFVVKVRGLPWSCSADEVQRFFSDCKIQNGAQGIRFIYTREGRPSGEAFVELESEDEVKLALKKDRETMGHRYVEVFKSNNVEMDWVLKHTGPNSPDTANDGFVRL

SEQ ID NO: 43047 - protein, 494 aa, Homo sapiens
MKNEMNDVPFFDIQLPYELAINIFQYLDRKELGRCAQVSKTWKVIAEDEVLWYRLCQQEGHLPDSSISDYSCWKLIFQECRAKEHMLRTNWKNRKGAVSELEHVPDTVLCDVHSHDGVVIAGYTSGDVRVWDTRTWDYVAPFLESEDEEDEPGMQPNVSFVRINSSLAVAAYEDGFLNIWDLRTGKYPVHRFEHDARIQALALSQDDATVATASAFDVVMLSPNEEGYWQIAAEFEVPKLVQYLEIVPETRRYPVAVAAAGDLMYLLKAEDSARTLLYAHGPPVTCLDVSANQVAFGVQGLGWVYEGSKILVYSLEAGRRLLKLGNVLRDFTCVNLSDSPPNLMVSGNMDGRVRIHDLRSGNIALSLSAHQLRVSAVQMDDWKIVSGGEEGLVSVWDYRMNQKLWEVYSGHPVQHISFSSHSLITANVPYQTVMRNADLDSFTTHRRHRGLIRAYEFAVDQLAFQSPLPVCRSSCDAMATHYYDLALAFPYNHV

SEQ ID NO: 43048 - protein, 139 aa, Homo sapiens
MPSEYTYVKLRSDCSRPSLQWYTRAQSKMRRPSLLLKDILKCTLLVFGVWILYILKLNYTTEECDMKKMHYVDPDHVKRAQKYAQQVLQKECRPKFAKTSMALLFEHRYSVDLLPFVQKAPKDSEAESKYDPPFGFRKF

SEQ ID NO: 43049 - protein, 910 aa, Homo sapiens
  MOD_RES (1)..(1): Any amino acid
XNGDCKPEMSEIKLNSDSEYIKLMHRTSACLPSSQNVDCQININGELERPHSQMNKNHGILRRSISLGGAYPNISCLSSLKHNCSKGGPSQLLIKFASGNEGKVDNLSRDSNRDCTNELSNSCKTENPRLERPYTFKDFVLHPRSHKSRVKGYLRLKMTYLPKTSGSEDDNAEQAEELEPGWVVLDQPDAACHLQQQQEPSPLPPGWEERQDILGRTYYVNHESRRTQWKRPTPQDNLTDAENGNIQLQAQRAFTTRRQISEETESVDNRESSENWEIIREDEATMYSNQAFPSPPPSSNLDVPTHLAEELNARLTIFGNSAVSQPASSSNHSSRRGSLQAYTFEEQPTLPVLLPTSSGLPPGWEEKQDERGRSYYVDHNSRTTTWTKPTVQATVETSQLTSSQSSAGPQSQASTSDSGQQVTQPSEIEQGFLPKGWEVRHAPNGRPFFIDHNTKTTTWEDPRLKIPAHLRGKTSLDTSNDLGPLPPGWEERTHTDGRIFYINHNIKRTQWEDPRLENVAITGPAVPYSRDYKRKYEFFRRKLKKQNDIPNKFEMKLRRATVLEDSYRRIMGVKRADFLKARLWIEFDGEKGLDYGGVAREWFFLISKEMFNPYYGLFEYSATDNYTLQINPNSGLCNEDHLSYFKFIGRVAGMAVYHGKLLDGFFIRPFYKMMLHKPITLHDMESVDSEYYNSLRWILENDPTELDLRFIIDEELFGQTHQHELKNGGSEIVVTNKNKKEYIYLVIQWRFVNRIQKQMAAFKEGFFELIPQDLIKIFDENELELLMCGLGDVDVNDWREHTKYKNGYSANHQVIQWFWKAVLMMDSEKRIRLLQFVTGTSRVPMNGFAELYGSNGPQSFTVEQWGTPEKLPRAHTCFNRLDLPPYESFEELWDKLQMAIENTQGFDGVD

SEQ ID NO: 43050 - protein, 178 aa, Homo sapiens
LIPRLQKIWKNYLSMNKYKVSYKGPGPGIKFSAEALRCHLRDHVNVSMVEVTDFPFNTSEWEGYLPKESIRTKAGPWGRCAVVSSAGSLKSSQLGREIDDHDAVLRFNGAPTANFQQDVGTKTTIRLMNSQISVHHCARAARKVAHFPGYTTHPQESLSCCFLVGYHREALPQRQFVQ

SEQ ID NO: 43051 - protein, 105 aa, Homo sapiens
MLSLGTKADTHDEILEGLNFNLTEIPEAQIHEGFQELLRTLNQPDSQLQLTTGNGLFLSEGLKLVDKFLEDVKKLYHSEAFTVNFGDTEEAKKQINDYVEKGTQG

SEQ ID NO: 43052 - protein, 124 aa, Homo sapiens
EQASWVCQCDDNMVQRLETDFKMTLQQQSTLEQWAAWLDNVMMQALKPYEGRPSFPKAARQFLLKWSFYSSMVIRDLTLRSAASFGSFHLIRLLYDEYMFYLVEHRVAQATGETPIAVMGEVPM

SEQ ID NO: 43053 - protein, 255 aa, Homo sapiens
  MOD_RES (1)..(1): Any amino acid
XLLLAAALGALLSFALLAAAVASDYWYILEVADAGNGSAWPGRAELLSSHSGLWRICEGQNGCIPLVDPFASESLDVSTSVQHLICSSQLGWILRALQTPGSPFRTRFFQMACCLPGWHLPPVLHRAVIVVLPLSLVLLVCGWICGLLSSLAQSVSLLLFTGCYFLLGSVLTLAGVSIYISYSHLAFAETVQQYGPQHMQGVRVSFGWSMALAWGSCALEAFSGTLLLSAAWTLSLSPPICGHLSPQQVGGRGGD

SEQ ID NO: 43054 - protein, 150 aa, Homo sapiens
MVVKACNEGVRKMSRTEQMISIQKKMEFKIKSVPIISHSRWLLKQGELQQMSGPKTSRTLRTKKLFHEIYLFLFNDLLVICRQIPGDKYQVFDSAPRGLLRVEELEDQGQTLANVFILRLLENADDREATYMLKASSQSEMKRWMTSLAP

SEQ ID NO: 43055 - protein, 155 aa, Homo sapiens
MEREKEQFRKLFIGGLSFETTEESLRNYYEQWGKLTDCVVMRDPASKRSRGFGFVTFSSMAEVDAAMAARPHSIDGRVVEPKRAVAREESGKPGAHVTVKKLFVGGIKEDTEEHHLRDYFEEYGKIDTIEIITDRQLWLWGFTWWRWKFRTRTRK

SEQ ID NO: 43056 - protein, 887 aa, Homo sapiens
MKSCAVSLTTAAVAFGDEAKKMAEGKASRESEEESVSLTVEEREALGGMDSRLFGFVRLHEDGARTKTLLGKAVRCYESLILKAEGKVESDFFCQLGHFNLLLEDYSKALSAYQRYYSLQADYWKNAAFLYGLGLVYFYYNAFHWAIKAFQDVLYVDPSFCRAKEIHLRLGLMFKVNTDYKSSLKHFQLALIDCNPCTLSNAEIQFHIAHLYETQRKYHSAKEAYEQLLQTENLPAQVKATVLQQLGWMHHNMDLVGDKATKESYAIQYLQKSLEADPNSGQSWYFLGRCYSSIGKVQDAFISYRQSIDKSEASADTWCSIGVLYQQQNQPMDALQAYICAVQLDHGHAAAWMDLGTLYESCNQPQDAIKCYLNAARSKRCSNTSTLAARIKFLQNGSDNWNGGQSLSHHPVQQVYSLCLTPQKLQHLEQLRANRDNLNPAQKHQLEQLESQFVLMQQMRHKEVAQVRTTGIHNGAITDSSLPTNSVSNRQPHGALTRVSSVSQPGVRPACVEKLLSSGAFSAGCIPCGTSKILGSTDTILLGSNCIAGSESNGNVPYLQQNTHTLPHNHTDLNSSTEEPWRKQLSNSAQGLHKSQSSCLSGPNEEQPLFSTGSAQYHQATSTGIKKANEHLTLPSNSVPQGDADSHLSCHTATSGGQQGIMFTKESKPSKNRSLVPETSRHTGDTSNGCADVKGLSNHVHQLIADAVSSPNHGDSPNLLIADNPQLSALLIGKANGNVGTGTCDKVNNIHPAVHTKTDHSVASSPSSAISTATPSPKSTEQRSINSVTSLNSPHSGLHTVNGEGLGKSQSSTKVDLPLASHRSTSQILPSMSVSICPSSTEVLKACRLPVRSDDSFFCCVLGSSLITTRGYLKFNGDKEMRRDKSS

SEQ ID NO: 43057 - protein, 382 aa, Homo sapiens
MSDPEGETLRSTFPSYMAEGERLYLCGEFSKAAQSFSNALYLQDGDKNCLVARSKCFLKMGDLERSLKDAEASLQSDPAFCKGILQKAETLYTMGDFEFALVFYHRGYKLRPDREFRVGIQKAQEAINNSVGSPSSIKLENKGDLSFLSKQAENIKAQQKPQPMKHLLHPTKGEPKWKASLKSEKTVRQLLGELYVDKEYLEKLLLDEDLIKGTMKGGLTVEDLIMTGINYLDTHSNFWRQQKPIYARERDRKLMQEKWLRDHKRRPSQTAHYILKSLEDIDMLLTSGSAEGSLQKAEKVLKKVLEWNKEEVPNKDELVGNLYSCIGNAQIELGQMEAALQSHRKDLEIAKEYDLPDAKSRALDNIGRVFARVGKFQQAIDT

SEQ ID NO: 43058 - protein, 73 aa, Homo sapiens
MEASWGSFNAERGWYVSVQQPEEAEAEELSPLLSNVSGLCSLPRADALRLPSSACQIRPRKGGPHRDRGDAGA

SEQ ID NO: 43059 - protein, 180 aa, Homo sapiens
  MOD_RES (1)..(1): Any amino acid
XDVSHVFPEFPAPDLGSFLLQDGVTLHDVKALQLVYRRHCEATVDVVMNLQFHYIEKLWLSFWNSKASSSDGPTSLPASDEDPEGAVLPKDKLISLCQCDPILRWMRSCDHILYQALVEILIPDVLRPVPSGRRQCLRPDAAALHVPQPPGAGGPGGAAEHVPDQPDAQRPQPRGLCQRA

SEQ ID NO: 43060 - protein, 192 aa, Homo sapiens
MMSPSQASLLFLNVCIFICGEAVQGNCVHHSTDSSVVNIVEDGSNAKDESKSNDTVCKEDCEESCDVKTKITREEKHFMCRNLQNSIVSYTRSTKKLLRNMMDEQQASLDYLSNQVMCDMDYRGGGRTVIQKRIDGIIDFQRLWCDYLDGFGDLLGEFWLGLKKIFYIVNQKNTSFMLYVALESEDDTLAYA

SEQ ID NO: 43061 - protein, 120 aa, Homo sapiens
MKAVLLADTEIDLFSTDIPPTNAVDFTGRCYFTKICKCKLKDIACLKCGNIVGYHVIVPCSSCLLSCNNGHFWMFHSQAVYDINRLDSTGVNVLLWGNLPEIEESTDEDVLNISAEECIR

SEQ ID NO: 43062 - protein, 228 aa, Homo sapiens
  MOD_RES (1)..(1): Any amino acid
XNSEEVSEKDAKQIIETAKQDVDDEYSMQYSARGSQSYYTVAHAISERVEKQSALLINGTLKHYQLQGLEWMVSLYNNNLNGILADEMGLGKTIQTIALITYLMEHKRLNGPYLIIVPLSTLSNWTYEFDKWAPSVVKISYKGTPAMRRSLVPQLRSGKFNVLLTTYEYIIKDKHILAKVDLNEEETILIIRRLHKVLRPFLLRRLKKEVESQLPEKVEYVIKCDMSA

SEQ ID NO: 43063 - protein, 66 aa, Homo sapiens
MAAPSGTVSDSESSNSSSDAEELERCREAAMPAWGLEQRPHVAGKPRAVEMGFHHVDQDGLDLLTS

SEQ ID NO: 43064 - protein, 854 aa, Homo sapiens
MGELCRRDSALTALDEETLWEMMESHRHRIVRCICPSRLTPYLRQAKVLCQLDEEEVLHSPRLTNSAMRAGHLLDLLKTRGKNGAIAFLESLKFHNPDVYTLVTGLQPDVDFSNFSGLMETSKLTECLAGAIGSLQEELNQEKGQKEVLLRRCQQLQEHLGLAETRAEGLHQLEADHSRMKREVSAHFHEVLRLKDEMLSLSLHYSNALQEKELAASRCRSLQEELYLLKQELQRANMVSSCELELQEQSLRTASDQESGDEELNRLKEENEKLRSLTFSLAEKDILEQSLDEARGSRQELVERIHSLRERAVAAERQREQYWEEKEQTLLQFQKSKMACQLYREKVNALQAQVCELQKERDQAYSARDSAQREISQSLVEKDSLRRQVFELTDQVCELRTQLRQLQAEPPGVLKQEARTREPCPREKQRLVRMHAICPRDDSDCSLVSSTESQLLSDLSATSSRELVDSFRSSSPAPPSQQSLYKRVAEDFGEEPWSFSSCLEIPEGDPGALPGAKAGDPHLDYELLDTADLPQLESSLQPVSPGRLDVSESGVLMRRRPARRILSQVTMLAFQGDALLEQISVIGGNLTGIFIHRVTPGSAADQMALRPGTQIVMVDYEASEPLFKAVLEDTTLEEAVGLLRRVDGFCCLSVKVNTDGYKRLLQDLEAKVATSGDSFYIRVNLAMEGRAKGELQVHCNEVLHVTDTMFQGCGCWHAHRVNSYTMKDTAAHGTIPNYSRAQQQLIALIQDMTQQCTVTRKPSSGGPQKLVRIVSMDKAKASPLRLSFDRGQLDPSRMEGEAWLQHVLLGRELPHPGALYPGAAPSTRPAPACAPRAQGGWEDPERETVPPPRV

SEQ ID NO: 43065 - protein, 392 aa, Homo sapiens
MRAKAFPETRDYSQPTAAATVQDIKKPVQQPAKQAPHQTLAARFMDGHITFQTAATVKIPTTTPATTKNTATTSPITYTLVTTQATPNNSHTAPPVTEVTVGPSLAPYSLPPTITPPAHTTGTSSSTVSHTTGNTTQPSNQTTLPATLSIALHKSTTGQKPVQPTHAPGTTAAAHNTTRTAAPASTVPGPTLAPQPSSVKTGIYQVLNGSRLCIKAEMGIQLIVQDKESVFSPRRYFNIDPNATQASGNCGTRKSNLLLNFQGGFVNLTFTKDEESYYISEVGAYLTVSDPETIYQGIKHAVVMFQTAVGHSFKCVSEQSLQLSAHLQVKTTDVQLQAFDFEDDHFGNVDECSSDYTIVLPVIGAIVVGLCLMGMGVYKIRLRCQSSGYQRI

SEQ ID NO: 43066 - protein, 706 aa, Homo sapiens
MAAAVLMDRVQSCVTFEDVFVYFSREEWELLEEAQRFLYRDVMLENFALVATLAFIFPVPCSCAVGGGRKPWVPDRADITAATVKETYRGHGPAEWELEEGFWCEAEHEAPSEQSVSVEGVSQVRTAESGLFQKAHPCEMCDPLLKDILHLAEHQGSHLTQKLCTRGLCRRRFSFSANFYQHQKQHNGENCFRGDDGGASFVKSCTVHMLGRSFTCREEGMDLPDSSGLFQHQTTYNRVSPCRRTECMESFPHSSSLRQHQGDYDGQMLFSCGDEGKAFLDTFTLLDSQMTHAEVRPFRCLPCGNVFKEKSALINHRKIHSGEISHVCKECGKAFIHLHHLKMHQKFHTGKRHYTCSECGKAFSRKDTLVQHQRVHTGERSYDCSECGKAYSRSSHLVQHQRIHTGERPYKCNKCGKAFSRKDTLVQHQRFHTGERPYECSECGKFFSQSSHLIEHWRIHTGARPYECIECGKFFSHNSSLIKHRRVHTGARSYVCSKCGKAFGCKDTLVQHQIIHTGARPYECSECGKAFSRKDTLVQHQKIHTGERPYECGECGKFFSHSSNLIVHQRIHTGAKPYECNECGKCFSHNSSLILHQRVHTGARPYVCSECGKAYISSSHLVQHKKVHTGARPYECSECGKFFSRNSGLILHQRVHTGEKPYVCSECGKAYSRSSHLVRHQKAHTGERAHECNSFGGPLAASLKLV

SEQ ID NO: 43067 - protein, 236 aa, Homo sapiens
MIRTNFFLKQGRRHESKDKSSKKHKSEEHNDKEHSSDKGRERLNSSENGEDRHKRKERKSSRGRSHSRSRSRERRHRSRSRERKKSRSRSRERKKSRSRSRERKKSRSRSRERKRRIRSRSRSRSRHRHRTRSRSRTRSRSRDRKKRIEKPRRFSRSLSRTPSPPPFRGRNTAMDAQEALARRLERAKKLQEQREKEMVEKQKQQEIAAAAATGGSVLNVAALLASGTQVTPQIAM

SEQ ID NO: 43068 - protein, 218 aa, Homo sapiens
  MOD_RES (1)..(1): Any amino acid
XPNESNFLEFVSLLESINTSKMTASSQLNGSAEQNEESGLLRDNCSQEKKEEILENEKPSGHSSKQGKPDLQSQDHTSTGPACTQPAKTTAFFQGNRQRQIIYRVTSQQDSSVLQVISGPETSVQEEISVDAMHVFIDEHGEIRSCYLKSGNQKEGPLQPLPSNNDCLSQAREMQVSSSSTTTSESQDPSSGDPAVSALQQQLLLMVARRTQSETPRN

SEQ ID NO: 43069 - protein, 126 aa, Homo sapiens
  MOD_RES (1)..(1): Any amino acid
XASANITIVESNEIITGMPASTEGAYVSSESPIRISVSTEGANTSSSTSTSTTGTSHLVKCAEKEKTFCVNGGECFMVKDLSNPSRYLCKCQPGFTGARCTENVPMKVQNQESAQMSLLVIAAKTT

SEQ ID NO: 43070 - protein, 514 aa, Homo sapiens
  MOD_RES (1)..(1): Any amino acid
XWTEEERKQFKDYEKKVKELNEERDKYRKSLEAELKKLQNSIQESTQAFDEHLKRLFERRVKAEMVTNQEELKISNLAFSLLLDEELSSREKFLNNYLTRKQHEKSQTSEAVRKSREDLDVCKEHYDNLLAEDKVMDRSFKKEFSEIPGHQVDILYKLFKRRPRISKQKTHSETTSVVPFGELPGSGKLNKDAFAQLMKAMDELDNISNMPEGLDPLVWNHFCMTRRAKVENEQKVKQKAADLLEMATFLQKRVEEEEKVQQEIERVFHELILLQEEKVRFQLNLTIQILLKQGQVELENFQLVLEYSDAILINKNIIEDLNSVIRTQGQKKVASMMESKDVHKRILQIEWEHKKMEMEREDLNQKAWDIQMLFFSRDRQKYLNEPNYEALISIQIGIMEQTIAVLDKMHKKNVENCKKLLKKLGKFSNQKDIANYALSCNLREELVAVSERKDICNAMGSKLTCEKIVKERYENMMQQQKLTNISKQQAEQISILQTEVERLRMKTFPALVQM

SEQ ID NO: 43071 - protein, 124 aa, Homo sapiens
MAEPDYIEDDNPELIRPQKLINPVKTSRNHQDLHRELLMNQKRGLAPQNKPELQKVMEKRKRDQVIKQKEEEAQKKKSDLEIELLKRQQKLEQLELEKQKLQEEQENAPEFVKVKGNLRRTGQE

SEQ ID NO: 43072 - protein, 147 aa, Homo sapiens
HEIDTASSHGPQMQDAFLSPLSNKGDECSIGSATDLTESSSMVDGDWTMVDENFSTLSLTQSELEHISMELASKGPHKSQVQLRYLLHIFMEAGCLDWCIVIGLILRESSIINQILVITQSSEVDGEMLQNIKTGLHAVDRWASTDW

SEQ ID NO: 43073 - protein, 38 aa, Homo sapiens
MASPRELTQNPLKKIWMPYSNGRPALHACQRGELSKVG

SEQ ID NO: 43074 - protein, 140 aa, Homo sapiens
AAARGGHTEAVTMLLQRGVDVNTRDTDGFSPLLLAVRGRHPGVIGLLREAGASLSTQELEEAGTELCRLAYRADLEGLQVWWQAGADLGQPGYDGHSALHVAEAAGNLAVVAFLQSLEGAVGAQAPCPEPSCFQEVLPGV

SEQ ID NO: 43075 - protein, 241 aa, Homo sapiens [sequence omitted]

SEQ ID NO: 43076 - protein, 145 aa, Homo sapiens
MNNLLCCALVFLDISIKWTTQETFPPKYLHYDEETSHQLLCDKCPPGTYLKQHCTAKWKTVCAPCPDHYYTDSWHTSDECLYCSPVCKELQYVKQECNRTHNRVCECKEGRYLEIEFCLKHRSCPPGFGVVQAGCRRRPKPQICI

SEQ ID NO: 43077 - protein, 117 aa, Homo sapiens
MGAGPSLLLAALLLLLSGDGAVRCDTPANCTYLDLLGTWVFQVGSSGSQRDVNCSVMGPQEKKVVVYLQKLDTAYDDLGNSGHFTIIYNQGFEIVLNDYKWFAFFKLLNRASVEGLF

SEQ ID NO: 43078 - protein, 179 aa, Homo sapiens
  MOD_RES (1)..(1): Any amino acid
XVFGYLGDRYNRKYLMCGGIAFWSLVTLGSSFIPGEIFIFIGETLLSMNWAIVADILLYVVIPTRRSTAEAFQIVLSHLLGDAGSPYLIGLISDRLRRNWPPSFLSEFRALQFSLMLCAFVGALGGAAFLGTAIFIEADRRRAQLHVQGLLHEAGSTDDRIVVPQRGRSTRVPVASVLI

SEQ ID NO: 43079 - protein, 208 aa, Homo sapiens
MDQNNSLPPYAQGLASPQGAMTPGIPIFSPMMPYGTGLTPQPIQNTNSLSILEEQQRQQQQQQQQQQQQQQQQQQQQQQQQQQQQQQQQQQQQQQAVAAAAVQQSTSQQATQGTSGQAPQLFHSQTLTTAPLPGTTPLYPSPMTPMTPITPATPASESSGIVPQLQNIVSTVNLGCKLDLKTIALRARNAEYNPKRFAAVIMRIREPR

SEQ ID NO: 43080 - protein, 346 aa, Homo sapiens
MEALLALLPELSVLAQQNYTEWLQDLKEKGPTLLKHPPAPAEPSSDLASKLREAEETQSTLQAECDQYRSILAETEGMLRDLQKSVEEEEQVWRAKVGAAEEELQKSRVTVKHLEEIVEKLKGELESSDQVREHTSHLEAELEKHMAAASAECQNYAKEVAGLRQLLLESQSQLDAAKSEAQKQSDELALVRQQLSEMKSHVEDGDIAGAPASSPEAPPAEQDPVQLKTQLEWTEAILEDEQTQRQKLTAEFEEAQTSACRLQEELEKLRTAGPLESSETEEASQLKERLEKEKKLTSDLGRAATRLQELLKTTQEQLAREKDTVKKLQEQLEKEDGSSSKEGTSV

SEQ ID NO: 43081 - protein, 328 aa, Homo sapiens
MADIDNLPRVVKRRVNALKNLQVKCAQIEAKFYEEVHDLERKYAVLYQPLFDKRFEIINAIYEPTEEECEWKPDEEDEISEELKEKAKIEDEKKDEEKEDPKGIPEFWLTVFKNVDLLSDMVQEHDEPILKHLKDIKVKFSDAGQPMSFVLEFHFEPNEYFTNEVLTKTYRMRSEPDDSDPFSFDGPEIMGCTGCQIDWKKGKNVTLKTIKKKQKHKGRGTVRTVTKTVSNDSFFNFFAPPEVPESGDLDDDAEAILAADFEIGHFLRERIIPRSVLYFTGEAIEDDDDDYDEEGEEADEEGEEEGDEENDPDYDPKKDQNPAECKQQ

SEQ ID NO: 43082 - protein, 192 aa, Homo sapiens
ITHRIHWESASLLRSEETKENEGFTVTAEGKGQGTLSVVTMYHAKAKDQLTCNKFDLKVTIKPAPETGIPSPIFLSSVFLEKRPQDAKNTMILEICTRYRGDQDATMSILDISMMTGFAPDTDDLKQLANGVDRYISKYELDKAFSDRNTLIIYLDKVSHSEDDCLAFKVHQYFNVELIQPGAVKVYAYYNL

SEQ ID NO: 43083 - protein, 1055 aa, Homo sapiens
MALDYLLLLLLASAVAAMEETLMDTRTATAELGWTANPASGWEEVSGYDENLNTIRTYQVCNVFEPNQNNWLLTTFINRRGAHRIYTEMRFTVRDCSSLPNVPGSCKETFNLYYYETDSVIATKKSAFWSEAPYLKVDTIAADESFSQVDFGGRLMKVNTEVRSFGPLTRNGFYLAFQDYGACMSLLSVRVFFKKCPSIVQNFAVFPETMTGAESTSLVIARGTCIPNAEEVDVPIKLYCNGDGEWMVPIGRCTCKPGYEPENSVACKACPAGTFKASQEAEGCSHCPSNSRSPAEASPICTCRTGYYRADFDPPEVACTSVPSGPRNVISIVNETSIILEWHPPRETGGRDDVTYNIICKKCRADRRSCSRCDDNVEFVPRQLGLTECRVSISSLWAHTPYTFDIQAINGVSSKSPFPPQHVSVNITTNQAAPSTVPIMHQVSATMRSITLSWPQPEQPNGIILDYEIRYYEKEHNEFNSSMARSQTNTARIDGLRPGMVYVVQVRARTVAGYGKFSGKMCFQTLTDDDYKSELREQLPLIAGSAAAGVVFVVSLVAISIVCSRKRAYSKEAVYSDKLQHYSTGRGSPGMKIYIDPFTYEDPNEAVREFAKEIDVSFVKIEEVIGAGEFGEVYKGRLKLPGKREIYVAIKTLKAGYSEKQRRDFLSEASIMGQFDHPNIIRLEGVVTKSRPVMIITEFMENGALDSFLRQNDGQFTVIQLVGMLRGIAAGMKYLAEMNYVHRDLAARNILVNSNLVCKVSDFGLSRYLQDDTSDPTYTSSLGGKIPVRWTAPEAIAYRKFTSASDVWSYGIVMWEVMSFGERPYWDMSNQDVINAIEQDYRLPPPMDCPAALHQLMLDCWQKDRNSRPRFAEIVNTLDKMIRNPASLKTVATITAVPSQPLLDRSIPDFTAFTTVDDWLSAIKMVQYRDSFLTAGFTSLQLVTQMTSEHHLGRPSEEDPEQHSFYEGPDKSVTNGNGMRTLVSWGRRGGKRTRVKGDQRLTTVECTGETGFSAEECISISEESTGPVASRQSPFLSDRSMFEMPWETKYIIIKI

SEQ ID NO: 43084 - protein, 37 aa, Homo sapiens
MPFTLHLRSRLPSAIRSLILQKKPNIRNTSSMAGGFH

SEQ ID NO: 43085 - protein, 212 aa, Homo sapiens
LSLLNGSESAKLFAPPRDTPPKCIRCAVVGNGGILNGSRQGPNIDAHDYVFRLNGAVIKGFERDVGTKTSFYGFTVNTMKNSLVSYWNLGFTSVPQGQDLQYIFIPSDIRDYVMLRSAILGVPVPEGLDKGDRFLKSKLINTHFGDLYMPSTGALMLLTALHTCDQVSAYGFITSNYWKFSDHYFERKMKPLIFYANHDLSLEAALWRDLHK

SEQ ID NO: 43086 - protein, 227 aa, Homo sapiens
MCDQCCVCQDLVDRTRSWLYAACSISYLGAMVSSNSALQFVNYPTQVLGKSCKPIPVMLLGVTLLKKKYPLAKYLCVLLIVAGVALFMYKPKKVVGIEEHTVGYGELLLLLSLTLDGLTGVSQDHMRAHYQTGSNHMMLNINLWSTLLLGMGILFTGELWEFLSFAERYPAIIYNILLFGLTSALGQSFIFMTVVYFGPLTCSIITTTRKFFTILASVILFANPISP

SEQ ID NO: 43087 - protein, 26 aa, Homo sapiens
QLAPRSSTFNSQEPHNILPLASSQIR

SEQ ID NO: 43088 - protein, 56 aa, Homo sapiens
MKTGLFFLCLLGTAAAIPTNARLLSDHSKPTAETVAPDNTAIPSLRAEAEENEKET

SEQ ID NO: 43089 - protein, 93 aa, Homo sapiens
MPPTQPTHGQFALTNGDPLNCHSYLSGYISLLLRAEPYPTSRFGSQCMQPNNIMGIENICELAARMLFSAVEWARNIPFFPDLQITDQVALLR

SEQ ID NO: 43090 - protein, 20 aa, Homo sapiens
  MOD_RES (1)..(1): Any amino acid
XSSDWIKTFAKGTRLIVTSP

SEQ ID NO: 43091 - protein, 197 aa, Homo sapiens
MGFNRPSKIQEMALPMMLAHPPQNLIAQSQSGTGKTAAFVLAMLSRVNALELFPQCLCLAPTYELALQTGRVVEQMGKFCVDVQVMYAIRGNRIPRGTDITKQIIIGTPGTVLDWCFKLKLIDLTKIRVFVLDEADVMIDTQGFSDHSIRIQRIIWLLVAKETTDNFQLPSLTLELYRDIMETPHSFLLLSQGTWRI

SEQ ID NO: 43092 - protein, 90 aa, Homo sapiens
LRVDKWWGNRKELATVRTICSHVQNMIKGVACSVSQAQKDELILEGNDIELVSNSAALIQQATTVKNKDIRKFLDGIYVSEKGTVQQADE

SEQ ID NO: 43093 - protein, 99 aa, Homo sapiens
MDSDGEREDSAAERARQQLEALLNKTMRIRMTDGRTLVGCFLCTDRDCNVILGSAQEFLKPSDSFSAGEPRVLGLAMVPGHHIVSIEVQRESLTGPPYL

SEQ ID NO: 43094 - protein, 274 aa, Homo sapiens
MAAERQEALREFVAVTGAEEDRARFFLESAGWDLQIALASFYEDGGDEDIVTISQATPSSVSRGTAPSDNRVTSFRDLIHDQDEDEEEEEGQRFYAGGSERSGQQIVGPPRKKSPNELVDDLFKGAKEHGAVAVERVTKSPGETSKPRPFAGGGYRLGAAPEEESAYVAGEKRQHSSQDVHVVLKLWKSGFSLDNGELRSYQDPSNAQFLESIRRGEVPAELRRLAHGGQVNLDMEDHRDEDFVKPKGAFKAFTGEGQKLGRLSCFPPFKPLFS

SEQ ID NO: 43095 - protein, 878 aa, Homo sapiens
MATEHPEPPKAELQLPPPPPPGHYGAWAAQELQAKLAEIGAPIQGNREELVERLQSYTRQTGIVLNRPVLRGEDGDKAAPPPMSAQLPGIPMPPPPLGLPPLQPPPPPPPPPPGLGLGFPMAHPPNLGPPPPLRVGEPVALSEEERLKLAQQQAALLMQQEERAKQAAVLLEQERQQEIAKMGTPVPRPPQDMGQIGVRTPLGPRVAAPVGPVGPTPTVLPMGAPVPRPRGPPPPPGDENREMDDPSVGPKIPQALEKILQLKESRQEEMNSQQEEEEMETDARSSLGQSASETEEDTVSVSKKEKNRKRRNRKKKKKPQRVRGVSSESSGDREKDSTRSRGSDSPAADVEIEYVTEEPEIYEPNFIFFKRIFEAFKLTDDVKKEKEKEPEKLDKLENSAAPKKKGFEEEHKDSDDDSSDDEQEKKPEAPKLSKKKLRRMNRFTVAELKQLVARPDVVEMHDVTAQDPKLLVHLKATRNSVPVPRHWCFKRKYLQGKRGIEKPPFELPDFIKRTGIQEMREALQEKEEQKTMKSKMREKVRPKMGKIDIDYQKLHDAFFKWQTKPKLTIHGDLYYEGKEFETRLKEKKPGDLSDELRISLGMPVGPNAHKVPPPWLIAMQRYGPPPSYPNLKIPGLNSPIPESCSFGYHAGGWGKPPVDETGKPLYGDVFGTNAAEFQTKTEEEEIDRTPWGELEPSDEESSEEEEEEESDEDKPDETGFITPADSGLITPGGFSSVPAGMETPELIELRKKKIEEAMDGSETPQLFTVLPEKRTATVGGAMMGSTHIYDMSTVMSRKGPAPELQGVEVALAPEELELDPMAMTQKYEEHVREQQAQVEKEDFSDMVAEHAAKQKQKKRKAQPQDSRGGSKKYKEFKF

SEQ ID NO: 43096 - protein, 367 aa, Homo sapiens
MNTNVCVEPGPSPEAPGLPKESHLPEGALNSLVDYNSEMERYRSFATSFYKTNGGAFPQAAKIARITTPIFPSSAAAAAAAARIGMSPWNCDNAATAAAATAMLWGSGGGGGGGGGGGGGGGGGGGGGGGGGGGRKSSSAAASSSASSSSAILPAGGGGGGGGGGSRTSMHHRNDSQRLGKAGCPPEPSLQMANTNFLSTLSPEHCRPLAGECMNKLKCGAAEAEIMNLPERVGTFSAIPALGGISLPPGVIVMTALHSPAAASAAVTDSAFQIANLADCPQNHSSSSSSSSGGAGGANPAKKKRKRCGVCVPCKRLINCGVCSSCRNRKTGHQICKFRKCEELKKKPGTSLERTPVPSAEAFRWFF

SEQ ID NO: 43097 - protein, 4179 aa, Homo sapiens
MSEPGGGGGEDGSAGLEVSAVQNVADVSVLQKHLRKLVPLLLEDGGEAPAALEAALEEKSALEQMRKFLSDPQVHTVLVERSTLKEDVGDEGEEEKEFISYNINIDIHYGVKSNSLAFIKRTPVIDADKPVSSQLRVLTLSEDSPYETLHSFISNAVAPFFKSYIRESGKADRDGDKMAPSVEKKIAELEMGLLHLQQNIEIPEISLPIHPMITNVAKQCYERGEKPKVTDFGDKVEDPTFLNQLQSGVNRWIREIQKVTKLDRDPASGTALQEISFWLNLERALYRIQEKRESPEVLLTLDILKHGKRFHATVSFDTDTGLKQALETVNDYNPLMKDFPLNDLLSATELDKIRQALVAIFTHLRKIRNTKYPIQRALRLVEAISRDLSSQLLKVLGTRKLMHVAYEEFEKVMVACFEVFQTWDDEYEKLQVLLRDIVKRKREENLKMVWRINPAHRKLQARLDQMRKFRRQHEQLRAVIVRVLRPQVTAVAQQNQGEVPEPQDMKVAEVLFDAADANAIEEVNLAYENVKEVDGLDVSKEGTEAWEAAMKRYDERIDRVETRITARLRDQLGTAKNANEMFRIFSRFNALFVRPHIRGAIREYQTQLIQRVKDDIESLHDKFKVQYPQSQACKMSHVRDLPPVSGSIIWAKQIDRQLTAYMKRVEDVLGKGWENHVEGQKLKQDGDSFRMKLNTQEIFDDWARKVQQRNLGVSGRIFTIESTRVRGRTGNVLKLKVNFLPEIITLSKEVRNLKWLGFRVPLAIVNKAHQANQLYPFAISLIESVRTYERTCEKVEERNTISLLVAGLKKEVQALIAEGIALVWESYKLDPYVQRLAETVFNFQEKVDDLLIIEEKIDLEVRSLETCMYDHKTFSEILNRVQKAVDDLNLHSYSNLPIWVNKLDMEIERILGVRLQAGLRAWTQVLLGQAEDKAEVDMDTDAPQVSHKPGGEPKIKNVVHELRITNQVIYLNPPIEECRYKLYQEMFAWKMVVLSLPRIQSQRYQVGVHYELTEEEKFYRNALTRMPDGPVALEESYSAVMGIVSEVEQYVKVWLQYQCLWDMQAENIYNRLGEDLNKWQALLVQIRKARGTFDNAETKKEFGPVVIDYGKVQSKVNLKYDSWHKEVLSKFGQMLGSNMTEFHSQISKSRQELEQHSVDTASTSDAVTFITYVQSLKRKIKQFEKQVELYRNGQRLLEKQRFQFPPSWLYIDNIEGEWGAFNDIMRRKDSAIQQQVANLQMKIVQEDRAVESRTTDLLTDWEKTKPVTGNLRPEEALQALTIYEGKFGRLKDDREKCAKAKEALELTDTGLLSGSEERVQVALEELQDLKGVWSELSKVWEQIDQMKEQPWVSVQPRKLRQNLDALLNQLKSFPARLRQYASYEFVQRLLKGYMKINMLVIELKSEALKDRHWKQLMKRLHVNWVVSELTLGQIWDVDLQKNEAIVKDVLLVAQGEMALEEFLKQIREVWNTYELDLVNYQNKCRLIRGWDDLFNKVKEHINSVSAMKLSPYYKVFEEDALSWEDKLNRIMALFDVWIDVQRRWVYLEGIFTGSADIKHLLPVETQRFQSISTEFLALMKKVSKSPLVMDVLNIQGVQRSLERLADLLGKIQKALGEYLERERSSFPRFYFVGDEDLLEIIGNSKNVAKLQKHFKKMFAGVSSIILNEDNSVVLGISSREGEEVMFKTPVSITEHPKINEWLTLVEKEMRVTLAKLLAESVTEVEIFGKATSIDPNTYITWIDKYQAQLVVLSAQIAWSENVETALSSMGGGGDAAPLHSVLSNVEVTLNVLADSVLMEQPPLRRRKLEHLITELVHQRDVTRSLIKSKIDNAKSFEWLSQMRFYFDPKQTDVLQQLSIQMANAKFNYGFEYLGVQDKLVQTPLTDRCYLTMTQALEARLGGSPFGPAGTGKTESVKALGHQLGRFVLVFNCDETFDFQAMGRIFVGLCQVGAWGCFDEFNRLEERMLSAVSQQVQCIQEALREHSNPNYDKTSAPITCELLNKQVKVSPDMAIFITMNPGYAGRSNLPDNLKKLFRSLAMTKPDRQLIAQVMLYSQGFRTAEVLANKIVPFFKLCDEQLSSQSHYDFGLRALKSVLVSAGNVKRERIQKIKREKEERGEAVDEGEIAENLPEQEILIQSVCETMVPKLVAEDIPLLFSLLSDVFPGVQYHRGEMTALREELKKVCQEMYLTYGDGEEVGGMWVEKVLQLYQITQINHGLMMVGPSGSGKSMAWRVLLKALERLEGVEGVAHIIDPKAISKDHLYGTLDPNTREWTDGLFTHVLRKIIDSVRGELQKRQWIVFDGDVDPEWVENLNSVLDDNKLLTLPNGERLSLPPNVRIMFEVQDLKYATLATVSRCGMVWFSEDVLSTDMIFNNFLARLRSIPLDEGEDEAQRRRKGKEDEGEEAASPMLQIQRDAATIMQPYFTSNGLVTKALEHAFQLEHIMDLTRLRCLGSLFSMLHQACRNVAQYNANHPDFPMQIEQLERYIQRYLVYAILWSLSGDSRLKMRAELGEYIRRITTVPLPTAPNIPIIDYEVSISGEWSPWQAKVPQIEVETHKVAAPDVVVPTLDTVRHEALLYTWLAEHKPLVLCGPPGSGKTMTLFSALRALPDMEVVGLNFSSATTPELLLKTFDHYCEYRRTPNGVVLAPVQLGKWLVLFCDEINLPDMDKYGTQRVISFIRQMVEHGGFYRTSDQTWVKLERIQFVGACNPPTDPGRKPLSHRFLRHVPVVYVDYPGPASLTQIYGTFNRAMLRLIPSLRTYAEPLTAAMVEFYTMSQERFTQDTQPHYIYSPREMTRWVRGIFEALRPLETLPVEGLIRIWAHEALRLFQDRLVEDEERRWTDENIDTVALKHFPNIDREKAMSRPILYSNWLSKDYIPVDQEELRDYVKARLKVFYEEELDVPLVLFNEVLDHVLRIDRIFRQPQGHLLLIGVSGAGKTTLSRFVAWMNGLSVYQIKVHRKYTGEDFDEDLRTVLRRSGCKNEKIAFIMDESNVLDSGFLERMNTLLANGEVPGLFEGDEYATLMTQCKEGAQKEGLMLDSHEELYKWFTSQVIRNLHVVFTMNPSSEGLKDRAATSPALFNRCVLNWFGDWSTEALYQVGKEFTSKMDLEKPNYIVPDYMPVVYDKLPQPPSHREAIVNSCVFVHQTLHQANARLAKRGGRTMAITPRHYLDFINHYANLFHEKRSELEEQQMHLNVGLRKIKETVDQVEELRRDLRIKSQELEVKNAAANDKLKKMVKDQQEAEKKKVMSQEIQEQLHKQQEVIADKQMSVKEDLDKVEPAVIEAQNAVKSIKKQHLVEVRSMANPPAAVKLALESICLLLGESTTDWKQIRSIIMRENFIPTIVNFSAEEISDAIREKMKKNYMSNPSYNYEIVNRASLACGPMVKWAIAQLNYADMLKRVEPLRNELQKLEDDAKDNQQKANEVEQMIRDLEASIARYKEEYAVLISEAQAIKADLAAVEAKVNRSTALLKSLSAERERWEKTSETFKNQMSTIAGDCLLSAAFIAYAGYFDQQMRQNLFTTWSHHLQQANIQFRTDIARTEYLSNADERLRWQASSLPADDLCTENAIMLKRFNRYPLIIDPSGQATEFIMNEYKDRKITRTSFLDDAFRKNLESALRFGNPLLVQDVESYDPVLNPVLNREVRRTGGRVLITLGDQDIDLSPSFVIFLSTRDPTVEFPPDLCSRVTFVNFTVTRSSLQSQCLNEVLKAERPDVDEKRSDLLKLQGEFQLRLRQLEKSLLQALNEVKGRILDDDTIITTLENLKREAAEVTRKVEETDIVMQEVETVSQQYLPLSTACSSIYFTMESLKQIHFLYQYSLQFFLDIYHNVLYENPNLKGVTDHTQRLSIITKDLFQVAFNRVARGMLHQDHITFAMLLARIKLKGTVGEPTYDAEFQHFLRGNEIVLSAGSTPRIQGLTVEQAEAVVRLSCLPAFKDLIAKVQADEQFGIWLDSSSPEQTVPYLWSEETPATPIGQAIHRLLLIQAFRPDRLLAMAHMFVSTNLGESFMSIMEQPLDLTHIVGTEVKPNTPVLMCSVPGYDASGHVEDLAAEQNTQITSIAIGSAEGFNQADKAINTAVKSGRWVMLKNVHLAPGWLMQLEKKLHSLQPHACFRLFLTMEINPKVPVNLLRAGRIFVFEPPPGVKANMLRTFSSIPVSRICKISYWLNKF

SEQ ID NO: 43098 - protein, 114 aa, Homo sapiens
MGPGLLCWVLLCLLVAGPVDAGVTQSPTHLIKTRGQQVTLRCSPISGHKSVSWYQQVLGQGPQFIFQYYEKEERGRGNFPDRFSARQFPNYSSELNVNALLLGDSALYLCASSL

SEQ ID NO: 43099 - protein, 25 aa, Homo sapiens
MLIYKGGDEYDNHCGKEQRRAVVMI

SEQ ID NO: 43100 - protein, 130 aa, Homo sapiens
MEDDTSWRSEATFQFTVERFSRLSESVLSPPCFVRNLPWKIMVMPRFYPDRPHQKSVGFFLQCNAESDSTSWSCHAQAVLKIINYRDDEKSFSRRISHLFFHKENDWGFSNFMAWSEVTDPEKGFIDDDK

SEQ ID NO: 43101 - protein, 425 aa, Homo sapiens
MASPDRSKRKILKAKKTMPLSCRKQVEMLNKSRNVEALKTAIGSNVPSGNQSFSPSVITRTTEITKCSPSENGASSLDSNKNSISEKSKVFSQNCIKPVEEIVHSETKLEQVVCSYQKPSRTTESPSRVFTEEAKDSLNTSENDSEHQTNVTRSLFEHEGACSLKSSCCPPSVLSGVVQMPESTVTSTVGDKKTDQMVFHLETNSNSESHDKRQSDNILCSEDSGFVPVEKTPNLVNSVTSNNCADDILKTDECSRTSISNCESADSTWQSSLDTNNNSHYQKKRMFSENEENVKRMKTSEQINENICVSLERQTAFLEQVRHLIQQEIYSINYELFDKKLKELNQRIGKTECRNKHEGIADKLLAKIAKLQRRIKTVLLFQRNCLKPNMLSSNGASKIPEKLHQEILAILPMLKLWLYRRNLIL

SEQ ID NO: 43102 - protein, 84 aa, Homo sapiens
MPTRRWAPGTQCITKCEHTRPKPGELAFRKGDVVTILEACENKSWYRVKHHTSGQEGLLAAGALREREALSADPKLSLMPWFHG

SEQ ID NO: 43103 - protein, 589 aa, Homo sapiens
MTSSASGIYGNFGQANYSAAKLGLLGLANSLAIEGRKSNIHCNTIAPNAGSRMTQTVMPEDLVEALKPEYVAPLVLWLCHESCEENGGLFEVGAGWIGKLRWERTLGAIVRQKNHPMTPEAVKANWKKICDFENASKPQSIQESTGSIIEVLSKIDSEGGVSANHTSRATSTATSGFAGAIGQKLPPFSYAYTELEAIMYALGVGASIKDPKDLKFIYEGSSDFSCLPTFGVIIGQKSMMGGGLAEIPGLSINFAKVLHGEQYLELYKPLPRAGKLKCEAVVADVLDKGSGVVIIMDVYSYSEKELICHNQFSLFLVGSGGFGGKRTSDKVKVAVAIPNRPPDAVLTDTTSLNQAALYRLSGDWNPLHIDPNFASLAGFDKPILHGLCTFGFSARRVLQQFADNDVSRFKAIKARFAKPVYPGQTLQTEMWKEGNRIHFQTKVQETGDIVISNAYVDLAPTSGTSAKTPSEGGKLQSTFVFEEIGRRLKDIGPEVVKKVNAVFEWHITKGGNIGAKWTIDLKSGSGKVYQGPAKGAADTTIILSDEDFMEVVLGKLDPQKAFFSGRLKARGNIMLSQKLQMILKDYAKL

SEQ ID NO: 43104 - protein, 207 aa, Homo sapiens
  MOD_RES (1)..(1): Any amino acid
XEVRGHLKKKRPEECDCHKISYHTQHKGRLKHRGSSLHPFRKGLQEKDKVWLLREQKRKKKLRKLLKRLQNNDTCSMPGLTCFTHDNQHWQTAPFWTLGPFCACTSANNNTYWCMRTINETHNFLFCEFATGFLEYFDLNTDPYQLMNAVNTLDRDVLNQLHVQLMELRSCKGYKQCNPRTRNMDLGLKDGGSYEQYRGQLWEGWEG

SEQ ID NO: 43105 - protein, 1093 aa, Homo sapiens
  MOD_RES (1)..(1): Any amino acid
XLNTSSLESATDEAGSPLAAAAAAAAAERCSWLVPLVRTLLDRAYEPLGLQWGLPSLPPTNGSPTFFEDFQAFCATPEWRHFIDKQVQPTMSQFEMDTYAKSHDLMSGFWNACYDMLMSSGQRRQWERAQSRRAFQELVLEPAQRRARLEGLRYTAVLKQQATQHSMALLHWGALWRQLASPCGAWALRDTPIPRWKLSSAETYSRMRLKLVPNHHFDPHLEASALRDNLGEVPLTPTEEASLPLAVTKEAKVSTPPELLQEDQLGEDELAELETPMEAAELDEQREKLVLSAECQLVTVVAVVPGLLEVTTQNVYFYDGSTERVETEEGIGYDFRRPLAQLREVHLRRFNLRRSALELFFIDQANYFLNFPCKVGTTPVSSPSQTPRPQPGPIPPHTQVRNQVYSWLLRLRPPSQGYLSSRSPQEMLRASGLTQKWVQREISNFEYLMQLNTIAGRTYNDLSQYPVFPWVLQDYVSPTLDLSNPAVFRDLSKPIGVVNPKHAQLVREKYESFEDPAGTIDKFHYGTHYSNAAGVMHYLIRVEPFTSLHVQLQSGRFDCSDRQFHSVAAAWQARLESPADVKELIPEFFYFPDFLENQNGFDLGCLQLTNEKVGDVVLPPWASSPEDFIQQHRQALESEYVSAHLHEWIDLIFGYKQRGPAAEEALNVFYYCTYEGAVDLDHVTDERERKALEGIISNFGQTPCQLLKEPHPTRLSAEEAAHRLARLDTNSPSIFQHLDELKAFFAEVTVSASGLLGTHSWLPYDRNISNYFSFSKDPTMGSHKTQRLLSGPWVPGSGVSGQALAVAPDGKLLFSGGHWDGSLRVTALPRGKLLSQLSCHLDVVTCLALDTCGIYLISGSRDTTCMVWRLLHQGGLSVGLAPKPVQVLYGHGAAVSCVAISTELDMAVSGSEDGTVIIHTVRRGQFVAALRPLGATFPGPIFHLALGSEGQIVVQSSAWERPGAQVTYSLHLYSVNGKLRASLPLAEQPTALTVTEDFVLLGTAQCALHILQLNTLLPAAPPLPMKVAIRSVAVTKERSHVLVGLEDGKLIVVVAGQPSEVRSSQFARKLWRSSRRISQVSSGETEYNPTEAR

SEQ ID NO: 43106 - protein, 201 aa, Homo sapiens
MKKTFYKRLLLYFIALAIGTLYSNALFQLIPEAFGFNPLEDYYVSKSAVVFGGFYLFFFTEKILKILLKQKNEHHHGHSHYASESLPSKKDQEEGVMEKLQNGDLDHMIPQHCSSELDGKAPMVDEKVIVGSLSVQDLQASQSACYWLKGVRYSDIGTLAWMITLSDGLHNFIDGLAIGASFTVSVFQGISTSVAILCEEF

SEQ ID NO: 43107 - protein, 124 aa, Homo sapiens
MWGACKVKVHDSLATISITLRRYLRLGATMAKSKFEYVRDFEADDTCLAHCWVVVRLDGRNFHRFAEKHNFAKPNDSRALQLMTKCAQTVMEELEDIVIAYGQSDEYSFVFKRKTNWFKRRARL

SEQ ID NO: 43108 - protein, 115 aa, Homo sapiens
RILFLLDVGGAQVLATGKTPGAEIDFKYALIGTAVGVAISAGFLALKICMIRRHLFDDDSSDLKSTPGGLSGETTISPKASGQICANSPTTESEKFPKICLLTSRNDFSFCHQSG

SEQ ID NO: 43109 - protein, 71 aa, Homo sapiens
MANNTKELEDCEQANKLGAINSTLSNQSKEAFIDWARYDDSRDHFCELDDERSPAAQYVDLLLNPERYTGY

SEQ ID NO: 43110 - protein, 89 aa, Homo sapiens
MLKEWAIKQGILLKVAETIKSWIFFSQCNKKDDLLHKLDIGFRLDSLHTILQQEVLLQEDVELIELLDPSILSAGQSQQQENGHLPTLC

SEQ ID NO: 43111 - protein, 73 aa, Homo sapiens
MGSRNSSSAGSGSGDPSEGLPRRGAGLRRSEEEEEEDEDVDLAQVLAYLLRRGQVRLVQGGGAANLQFIQALL

SEQ ID NO: 43112 - protein, 101 aa, Homo sapiens
MLKPSVTSAPTADMATLTVVQPLTLDRDVARAIELLEKLQESGEVPVHKLQSLKKVLQSEFCTAIREVYQYMHETITVNGCPEFRARATAKVFSCVHCKRI

SEQ ID NO: 43113 - protein, 524 aa, Homo sapiens
  MOD_RES (1)..(1): Any amino acid
XNSTFEACDPQRTGTVAVAQVLAYLEAVTGQGPQDARLQTLANSLDPNGEGPKATVDLDTFLVVMRDWIAACQLHGGLELEEETAFQGALTSRQLPSGCPEAEEPANLESFGGEDPRPELQATADLLSSLEDLELSNRRLVGENAKLQRSMETAEEGSARLGEEILALRKQLHSTQQALQFAKAMDEELEDLKTLARSLEEQNRSLLAQARQAEKEQQHLVAEMETLQEENGKLLAERDGVKKRSQELAMEKDTLKRQLFECEHLICQRDTILSERTRDVESLAQTLEEYRVTTQELRLEISRLEEQLSQTYEGPDELPEGAQLRRVGWTELLPPSLGLEIEAIRQEVATADLSNPLCGVWQWEEVIHETSEETEFPSEAPAGGQRNFQGEPAHPEEGRKEPSMWLTRREEEEDAESQVTADLPVPLGAPRPGDIPENPPERPARRELQQALVPVMKKLVPVRRRAWGQLCLPPQRLRVTRHPLIPAPVLGLLLLLLLSVLLLGPSPPPTWPHLQLCYLQPPPV

SEQ ID NO: 43114 - protein, 248 aa, Homo sapiens
MTEPGASPEDPWVKASPVGAHAGEGRAGRARARRGAGRRGASLLSPKSPTLSVPRGCREDSSHPACAKVEYAYSDNSLDPDDEDSDYHQEAYKESYKDRRRRAHTQAEQKRRDAIKRGYDDLQTIVPTCQQQDFSIGSQKLSKAIVLQKTIDYIQFLHKEKKKQEEEVSTLRKDVTALKIMKVNYEQIVKAHQDNPHEGEDQVSDQVKFNVFQGIMDSLFQSFNASISVASFQELSACVFSWIEEHCK

SEQ ID NO: 43115 - protein, 136 aa, Homo sapiens
MIQAILVFNNHGKPRLVRFYQRFPEEIQQQIVRETFHLVLKRDDNICNFLEGGSLIGGSDYKLIYRHYATLYFVFCVDSSESELGILDLIQVHLEVVFFIAPKLKKRERKKSQCNTLQTGTLALWEQGPDIRTRRL

SEQ ID NO: 43116 - protein, 88 aa, Homo sapiens
MARKLVMFRDVAIDFSQEEWECLDSAQRDLYRDVMLENYSNLVSLDLPSRCASKDLSPEKNTYETELSQWEMSDRLENCDLEESNSRD

SEQ ID NO: 43117 - protein, 1211 aa, Homo sapiens
MQLKIMPKKKRLSAGRVPLILFLCQMISALEVPLDPKLLEDLVQPPTITQQSPKDYIIDPRENIVIQCEAKGKPPPSFSWTRNGTHFDIDKDPLVTMKPGTGTLIINIMSEGKAETYEGVYQCTARNERGAAVSNNIVVRPSRSPLWTKEKLEPITLQSGQSLVLPCRPPIGLPPPIIFWMDNSFQRLPQSERVSQGLNGDLYFSNVLPEDTREDYICYARFNHTQTIQQKQPISVKVISVDELNDTIAANLSDTEFYGAKSSRERPPTFLTPEGNASNKEELRGNVLSLECIAEGLPTPIIYWAKEDGMLPKNRTVYKNFEKTLQIIHVSEADSGNYQCIAKNALGAIHHTISVRVKAAPYWITAPQNLVLSPGEDGTLICRANGNPKPRISWLTNGVPIEIAPDDPSRKIDGDTIIFSNVQERSSAVYQCNASNEYGYLLANAFVNVLAEPPRILTPANTLYQVIANRPALLDCAFFGSPLPTIEWFKGAKGSALHEDIYVLHENGTLEIPVAQKDSTGTYTCVARNKLGMAKNEVHLEIKDPTWIVKQPEYAVVQRGSMVSFECKVKHDHTLSLTVLWLKDNRELPSDERFTVDKDHLVVADVSDDDSGTYTCVANTTLDSVSASAVLSVVAPTPTPAPVYDVPNPPFDLELTDQLDKSVQLSWTPGDDNNSPITKFIIEYEDAMHKPGLWHHQTEVSGTQTTAQLKLSPYVNYSFRVMAVNSIGKSLPSEASEQYLTKASEPDKNPTAVEGLGSEPDNLVITWKPLNGFESNGPGLQYKVSWRQKDGDDEWTSVVVANVSKYIVSGTPTFVPYLIKVQALNDMGFAPEPAVVMGHSGEDLPMVAPGNVRVNVVNSTLAEVHWDPVPLKSIRGHLQGYRIYYWKTQSSSKRNRRHIEKKILTFQGSKTHGMLPGLEPFSHYTLNVRVVNGKGEGPASPDRVFNTPEGVPSAPSSLKIVNPTLDSLTLEWDPPSHPNGILTEYTLKYQPINSTHELGPLVDLKIPANKTRWTLKNLNFSTRYKFYFYAQTSAGSGSQITEEAVTTVDEAGILPPDVGAGKAMASRQVDIATQGWFIGLMCAVALLILILLIVCFIRRNKGGKYPVKEKEDAHADPEIQPMKEDDGTFGEYSDAEDHKPLKKGSRTPSDRTVKKEDSDDSLVDYGEGVNGQFNEDGSFIGQYSGKKEKEPAEGNESSEAPSPVNAMNSFV

SEQ ID NO: 43118 - protein, 80 aa, Homo sapiens
MKQPNRKRKLNMDSKERLDQDGRLEQAEEEKKPKDSTTPLSHVPSAAAQGAWSWEWYLKEQKAVAAPVELFSKDQSFPEH

SEQ ID NO: 43119 - protein, 649 aa, Homo sapiens
MTPALTALLCLGLSLGPRTRVQAGPFPKPTLWAEPGSVISWGSPVTIWCQGSLEAQEYRLDKEGSPEPLDRNNPLEPKNKARFSIPSMTEHHAGRYRCHYYSSAGWSEPSDPLELVMTGFYNKPTLSALPSPVVASGGNMTLRCGSQKGYHHFVLMKEGEHQLPRTLDSQQLHSGGFQALFPVGPVNPSHRWRFTCYYYYMNTPQVWSHPSDPLEILPSGVSRKPSLLTLQGPVLAPGQSLTLQCGSDVGYDRFVLYKEGERDFLQRPGQQPQAGLSQANFTLGPVSPSHGGQYRCYGAHNLSSEWSAPSDPLNILMAGQIYDTVSLSAQPGPTVASGENVTLLCQSWWQFDTFLLTKEGAAHPPLRLRSMYGAHKYQAEFPMSPVTSAHAGTYRCYGSYSSNPHLLSFPSEPLELMVSGHSGGSSLPPTGPPSTPGGPEDQPLNPPGSGPQNGLGRYLEVLIGVSVAFVLLLFLLLFLLLRRQRHSKHRTSDQRKTDFQRPAGAAETEPKDRGLLRRSSPAADVQEENLYAAVKDTQSEDRVELDSQQSPHDEDPQAVTYAPVKHSSPRREMASPPSSLSGEFLDTKDRQVEEDRQMDTEAAASEASQDVTYAQLHSLTLRRKATEPPPSQEGEPPAEPSIYATLAIH

SEQ ID NO: 43120 - protein, 158 aa, Homo sapiens
MYDNLYLHGIEDSEAGSADSYTSRPSDSDVSLEEDREAIRQEREQQAAIQLERAKSKPVAFAVKTNVSYCGALDEDVPVPSTAISFDAKDFLHIKEKYNNDWWIGRLVKEGCEIGFIPSPLRLENIRIQQEQKRGRFHGGKCLMLYWMKISLRMHVNI

SEQ ID NO: 43121 - protein, 36 aa, Homo sapiens
MTMYLWLKLLAFGFAFLDTEVFVTGQSPTPSPTGKN

SEQ ID NO: 43122 - protein, 140 aa, Homo sapiens
MGSTESSEGRRVSFGVDEEERVRVLQGVRLSENVVNRMKEPSSPPPAPTSSTFGLQDGNLRAPHKESTLPRSGSSGGQQPSGMKEGVKRYEQEHAAIQDKLFQVAKREREAATKHSKASLPTGEGSISHEEQKSVRLIIH

SEQ ID NO: 43123 - protein, 84 aa, Homo sapiens
  MOD_RES (1)..(1): Any amino acid
XCKPQPCVVSVEGLSSSTTDAQLKSLLMSVGPIQSLQMLPQQRKAIAKFKEPAHALAFQQKFHRELPAGAEPPGAQVSPGRCPA

SEQ ID NO: 43124 - protein, 143 aa, Homo sapiens
MRYVNLTSLLIFRSVSTAVYKRFPTMDHVVEAGFMTTDERKLFNHLKSPHLKYWVPFIWFGNLATKARNEGRIRDSVDLQSLMTEMNRYRSWCSLLFGYDWVGIPLVYTQVAEQLINPFGEDDDDFETNWCIDRNLQLWTKCT

SEQ ID NO: 43125 - protein, 483 aa, Homo sapiens
MAQISSNSGFKECPSSHPEPTRAKDVDKEEALQMEAEALAKLQKDRQVTDNQRGFELSSSTRKKAQVYNKQDYDLMVFPESDSQKRALDIDVEKLTQAELEKLLLDDSFETKKTPVLPVTPILSPSFSAQLYFRPTIQRGQWPPGLPGPSTYALPSIYPSTYSKQAAFQNGFNPRMPTFPSTEPIYLSLPGQSPYFSYPLTPATPFHPQGSLPIYRPVVSTDMAKLFDKIASTSEFLKNGKARTDLEITDSKVSNLQVSPKSEDISKFDWLDLDPLSKPKVDNVEVLDHEEEKNVSSLLAKDPWDAVLLEERSTANCHLERKVNGKSLSVATVTRSQSLNIRTTQLAKAQGHISQKDPNGTSSLPTGSSLLQEVEVQNEEMAAFCRSITKLKTKFPYTNHRTNPGYLLSPVTAQRNICGENASVKVSIDIEGFQLPVTFTCDVSSTVEIIIMQALCWVHDDLNQVDVGSYVLKVCGQEEVLQK

SEQ ID NO: 43126 - protein, 133 aa, Homo sapiens
MLSRLRVVSTTCTLACRHLHIKEKGKPLMLNPRTNKGMAFTLQERQMLGLQGLLPPKIETQDIQALRFHRNLKKMTSPLEKYIYIMGIQERNEKLFYRILQDDIESLMPIVYTPTVGLACSQYGHIFRRPKHS

SEQ ID NO: 43127 - protein, 702 aa, Homo sapiens
QKCQLQVHDAEALIALLQEGPHLEEVDLSGNQLEDEGCRLMAEAASQLHIARKLDLSNNGLSVAGVHCVLRAVSACWTLAELHISLQHKTVIFMFAQEPEEQKGPQERAAFLDSLMLQMPSELPLSSRRMRLTHCGLQEKHLEQLCKALGGSCHLGHLHLDFSGNALGDEGAARLAQLLPGLGALQSLNLSENGLSLDAVLGLVRCFSTLQWLFRLDISFESQHILLRGDKTSRDMWATGSLPDFPAAAKFLGFRQRCIPRSLCLSECPLEPPSLTRLCATLKDCPGPLELQLSCEFLSDQSLETLLDCLPQLPQLSLLQLSQTGLSPKSPFLLANTLSLCPRVKKVDLRSLHHATLHFRSNEEEEGVCCGRFTGCSLSQEHVESLCWLLSKCKDLSQVDLSANLLGDSGLRCLLECLPQVPISGLLDLSHNSISQESALYLLETLPSCPRVREASVNLGSEQSFRIHFSREDQAGKTLRLSECSFRPEHVSRLATGLSKSLQLTELTLTQCCLGQKQLAILLSLVGRPAGLFSLRVQEPWADRARVLSLLEVCAQASGSVTEISISETQQQLCVQLEFPRQEENPEAVALRLAHCDLGAHHSLLVGQLMETCARLQQLSLSQVNLCEDDDASSLLLQSLLLSLSELKTFRIQSSQDPGRLLPDLLPFDPHQADLQLCEHRGPRPPGIWSGPLPPLGGAGLV

SEQ ID NO: 43128 - protein, 934 aa, Homo sapiens
MEHGTLLAQPGLWTRDTSWALLYFLCYILPQTAPQVLRIGGIFETVENEPVNVEELAFKFAVTSINRNRTLMPNTTLTYDIQRINLFDSFEASRRACDQLALGVAALFGPSHSSSVSAVQSICNALEVPHIQTRWKHPSVDNKDLFYINLYPDYAAISRAILDLVLYYNWKTVTVVYEDSTGLIRLQELIKAPSRYNIKIKIRQLPSGNKDAKPLLKEMKKGKEFYVIFDCSHETAAEILKQILFMGMMTEYYHYFFTTLDLFALDLELYRYSGVNMTGFRLLNIDNPHVSSIIEKWSMERLQAPPRPETGLLDGMMTTEAALMYDAVYMVAIASHRASQLTVSSLQCHRHKPWRLGPRFMNLIKEARWDGLTGHITFNKTNGLRKDFDLDIISLKEEGTEKIGIWNSNSGLNMTDSNKDKSSNITDSLANRTLIVTTILEEPYVMYRKSDKPLYGNDRFEGYCLDLLKELSNILGFIYDVKLVPDGKYGAQNDKGEWNGMVKELIDHRADLAVAPLTITYVREKVIDFSKPFMTLGISILYRKPNGTNPGVFSFLNPLSPDIWMYVLLACLGVSCVLFVIARFTPYEWYNPHPCNPDSDVVENNFTLLNSFWFGVGALMQQGSELMPKALSTRIVGGIWWFFTLIIISSYTANLAAFLTVERMESPIDSADDLAKQTKIEYGAVRDGSTMTFFKKSKISTYEKMWAFMSSRQQTALVRNSDEGIQRVLTTDYALLMESTSIEYVTQRNCNLTQIGGLIDSKGYGVGTPIGSPYRDKITIAILQLQEEGKLHMMKEKWWRGNGCPEEDNKEASALGVENIGGIFIVLAAGLVLSVFVAIGEFIYKSRKNNDIEQKGKSSRIRFYFRNKVRFHGRKKQSLGVEKCLSFNAIMEELGISLKNQKKIKKKSRTKGKSSFTSILTCHQRRTQRKETVA

SEQ ID NO: 43129 - protein, 115 aa, Homo sapiens
MWRPVQLCHFHSALLHSRQKPWPSPAVFFRRNVRGLPPRFSSPTPLWRKVLSTAVVGAPLLLGARYVMAEAREKRRMRLVVDGMGRFGRPCLPRPWRPTLLVSSSLPSGPQAAGL

SEQ ID NO: 43130 - protein, 314 aa, Homo sapiens
MEDDAPVIYGLEFQARALTPQTAETDAIRFLVGTQSLKYDNQIHIIDFDDENNIINKNVLLHQAGEIWHISASPADRGVLTTCYNRTSDSKVLTCAAVWRMPKELESGSHESPDDSSSTAQTLELLCHLDNTAHGNMACVVWEPMGDGKKIISLADNHILLWDLQESSSQAVREESEHSEGACTDPVCAIIPRLEALWGRGTLESGNRDGPRHLHLPRASLTEGGPATSLTQGRRTRHGPHSQKDPPRASRMEEGPAECFLGELGLSYDCKKSAICQAYQNAMAKFIQQTLSELTLERVIRTFPNKWSFLTIFK

SEQ ID NO: 43131 - protein, 224 aa, Homo sapiens
MSWKKALRIPGGLRAATVTLMLAMLSTPVAEGRDSPEDFVYQFKAMCYFTNGTERVRYVTRYIYNREEYARFDSDVEVYRAVTPLGPPDAEYWNSQKEVLERTRAELDTVCRHNYQLELRTTLQRRVEPTVTISPSRTEALNHHNLLVCSVTDFYPAQIKVRWFRNDQEETTGVVSTPLIRNGDWTFQILVMLEMTPQHGDVYTCHVEHPSLQNPITVEWRLLH

SEQ ID NO: 43132 - protein, 196 aa, Homo sapiens
  MOD_RES (1)..(1): Any amino acid
XLGPRGNSLKRLQEETLTKMSILGKGSMRDKAKEEELRKSGEAKYFHLNDDLHVLIEVFAPPAEAYARMGHALEEIKKFLIPDYNDEIRQAQLQELTYLNGGSENADVPVVRGKPTLRTRGVPAPAITRGRGGVTARPVGVVVPRGTPTPRGVLSTRGPVSRGRGLLTPRARGVPPTGYRPPPPPPTQETYGEYWC

SEQ ID NO: 43133 - protein, 75 aa, Homo sapiens
  MOD_RES (1)..(1): Any amino acid
XQEQWAGGKLSIPVKKRMALLVQELSSHRWDAADDIHRSLMVDHVTEELSFNGKPTAYLRYPSRERARQLYLTQH

SEQ ID NO: 43134 - protein, 375 aa, Homo sapiens
MGAGAVGALQLTYISKVSIATPKQKPKTPFCFVINALSQRYFLQANDQKDMKDWVEALNQASKITVPKGGGLPMTTEVLKSLAAPPALEKKPQVAYKTEIIGGVVVHTPISQNGGDGQEGSEPGSHTILRRSQSYIPTSGCRASTGPPLIKSGYCVKQGNVRKSWKRRFFALDDFTICYFKCEQDREPLRTIFLKDVLKTHECLVKSGDLLMRDNLFEIITSSRTFYVQADSPEDMHSWIKEIGAAVQALKCHPRETSFSRSISLTRPGSSSLSSGPNSILCRGRPPLEEKKALCKAPSVASSWQPWTPVPQAGEKLLPPGDTSEDSLFTPRPGEGSAPGVLPSSRIRHRSEPQHPKEKPFMFNLDDENIRTSDV

SEQ ID NO: 43135 - protein, 230 aa, Homo sapiens
MSTVHEILCKLSLEGDHSTPPSAYGSVKAYTNFDAERDALNIETAIKTKGVDEVTIVNILTNRSNAQRQDIAFAYQRRTKKELASALKSALSGHLETVILGLLKTPAQYDASELKASMKGLGTDEDSLIEIICSRTNQELQEINRVYKEMYKTDLEKDIISDTSGDFRKLMVALAKGRRAEDGSVIDYELIDQDARDLYDAGVKRKGTDVPKWISIMTERSVPHLQKGGI

SEQ ID NO: 43136 - protein, 777 aa, Homo sapiens [sequence omitted]

SEQ ID NO: 43137 - protein, 87 aa, Homo sapiens
TKAGLYWGYTVRLASCLSAVFAEAPFQDGYDLTIGTSERGSDVASAQLPNFRKPSSSPWPPCSLASSRRVPGTPESSKGPRTSVKQQ

SEQ ID NO: 43138 - protein, 299 aa, Homo sapiens
MAVMAPRTLLLLLLGALALTQTWAGSHSMRYFTTSVSRPGRGEPRFIAVGYVDDTQFVRFDSDAASQRMEPRAPWIEQEGPEYWDLQTRNVKAQSQTDRANLGTLRGYYNQSEAGSHTIQMMYGCDVGSDGRFLRGYRQDAYDGKDYIALNEDLRSWTAADMAAQITQRKWEAARVAEQLRAYLEGTCVEWLRRYLENGKETLQRTDAPKTHMTHHAVSDHEATLRCWALSFYPAEITLTWQRDGEDQTQDTELVETRPAGDGTFQKWASVVVPSGQEQRYTCHVQHEGLPKPLTLRWV

SEQ ID NO: 43139 - protein, 465 aa, Homo sapiens
MATEHVNGNGTEEPMDTTSAVIHSENFQTLLDAGLPQKVAEKLDEIYVAGLVAHSDLDERAIEALKEFNEDGALAVLQQFKDSDLSHVQNKSAFLCGVMKTYRQREKQGTKVADSSKGPDEAKIKYNNHEIRSGKHIGVCISVANNRLFVGSIPKSKTKEQILEEFSKVTEGLTDVILYHQPDDKKKNRGFCFLEYEDHKTAAQARRRLMSGKVKVWGNVGTVEWADPIEDPDPEVMAKVKVLFVRNLANTVTEEILEKAFSQFGKLERVKKLKDYAFIHFDERDGAVKAMEEMNGKDLEGENIEIVFAKPPDQKRKERKAQRQAAKNQMYDDYYYYGPPHMPPPTRGRGRGGRGGYGYPPDYYGYEDYYDYYGYDYHNYRGGYEDPYYGYEDFQVGARGRGGRGARGAAPSRGRGAAPPRGRAGYSQRGGPGSARGVRGARGGAQQQRGRGQGKGVEAGPDLLQ

SEQ ID NO: 43140 - protein, 48 aa, Homo sapiens
MTNQYGILFKQEQAHDDAIWSVAWGTNKKENSETVVTGSLDDLVKVWK

SEQ ID NO: 43141 - protein, 164 aa, Homo sapiens
MLRYPYFCRMYKECLSCWLESGIPNLGVWPNRIHTTAEKYREYEAREQTDQTQAQELHRSQDRDFETMAKLHIPVMVDEVVHCLSPQKGQILFMCIVLFAYPNFLVMWTRMVYLFPFTHEETEAQRNFSRYDIWFGRAHKSHSAEGVRYCSLCLGQRPNSLCIS

SEQ ID NO: 43142 - protein, 381 aa, Homo sapiens
MAQQANVGELLAMLDSPMLGVRDDVTAVFKENLNSDRGPMLVNTLVDYYLETSSQPALHILTTLQEPHDKHLLDRINEYVGKAATRLSILSLLGHVIRLQPSWKHKLSQAPLLPSLLKCLKMDTDVVVLTTGVLVLITMLPMIPQSGKQHLLDFFDIFGRLSSWCLKKPGHVAEVYLVHLHASVYALFHRLYGMYPCNFVSFLRSHYSMKENLETFEEVVKPMMEHVRIHPELVTGSKDHELDPRRWKRLETHDVVIECAKISLDPTEASYEDGYSVSHQISARFPHRSADVTTSPYADTQNSYGCATSTPYSTSRLMLLNMPGQLPQTLSSPSTRLITEPPQVWCQLVCLLSPLLSGYSLEPIYGLWYDHSSNFSWKCPT

SEQ ID NO: 43143 - protein, 135 aa, Homo sapiens
MIQSQEKPDRVLVRVRDLTIQKADEVVWVRARVHTSRAKGKQCFLVLRQQQFNVQALVAVGDHASKQMVKFAANINKESIVDVEGVVRKVNQKIGSCTQQDVELHVQKIYVISLAEPRLPLQLDDAVRPEAEGEE

SEQ ID NO: 43144 - protein, 247 aa, Homo sapiens
MAPKSGQEVEETEEEALLSPTEQESVSGHLGPPAGAPAAPETPTCLPDTTPHPAPVVCSADPQLALESLDPRTLRLLWRQRELEIQALRWAIQNGEDARLCHILEEVAGLPPKRSSHSQEKLLQNQVQKLIQELKEQKERAQWEKEHLEERLLQTTRTLQEMEAELQNLQKSCLLQLARSSWVGRMLRSQTGSVEVVTAETLMDPSDLSENIQAPTGEGFRLEDVDWNSVARRYPNLFTNMEPSSKQ

SEQ ID NO: 43145 - protein, 44 aa, Homo sapiens
MLEGQLEAREPKEGTHPEDPCPGAGAAMEKTPAAAEVPREDSNA

SEQ ID NO: 43146 - protein, 78 aa, Homo sapiens
MNGTLDHPDQPDLDAIKMFVGQVPRTWSEKDLRELFEQYGAVYEINVLRDRSQNPPQSKGCCFVTFYTRKAALEAQNA

SEQ ID NO: 43147 - protein, 779 aa, Homo sapiens
MKKWSSTDLGAAADPLQKDTCPDPLDGDPNSRPPPAKPQLSTAKSRTRLFGKGDSEEAFPVDCPHEEGELDSCPTITVSPVITIQRPGDGPTGARLLSQDSVAASTEKTLRLYDRRSIFEAVAQNNCQDLESLLLFLQKSKKHLTDNEFKDPETGKTCLLKAMLNLHDGQNTTIPLLLEIARQTDSLKELVNASYTDSYYKGQTALHIAIERRNMALVTLLVENGADVQAAAHGDFFKKTKGRPGFYFGELPLSLAACTNQLGIVKFLLQNSWQTADISARDSVGNTVLHALVEVADNTADNTKFVTSMYNEILMLGAKLHPTLKLEELTNKKGMTPLALAAGTGKIGNRHDMLLVEPLNRLLQDKWDRFVKRIFYFNFLVYCLYMIIFTMAAYYRPVDGLPPFKMEKTGDYFRVTGEILSVLGGVYFFFRGIQYFLQRRPSMKTLFVDSYSEMLFFLQSLFMLATVVLYFSHLKEYVASMVFSLALGWTNMLYYTRGFQQMGIYAVMIEKMILRDLCRFMFVYIVFLFGFSTAVVTLIEDGKNDSLPSESTSHRWRGPACRPPDSSYNSLYSTCLELFKFTIGMGDLEFTENYDFKAVFIILLLAYVILTYILLLNMLIALMGETVNKIAQESKNIWKLQRAITILDTEKSFLKCMRKAFRSGKLLQVGYTPDGKDDYRWCFRVDEVNWTTWNTNVGIINEDPGNCEGVKRTLSFSLRSSRVSGRHWKNFALVPLLREASARDRQSAQPEEVYLRQFSGSLKPEDAEVFKSPAASGEK

SEQ ID NO: 43148 - protein, 91 aa, Homo sapiens
MAPEIHMTGPMCLIENTNGELVANPEALKILSAITQPVVVVAIVGLYRTGKSYLMNKLAGKNKGWSTVARSQLTTVLTSWAQAILSPQPPE

SEQ ID NO: 43149 - protein, 439 aa, Homo sapiens
MVRGWEPPPGLDCAISEGHKSEGTMPPNKEASGLSSSPAGLICLPPISEELQLVWTQAAQTSELDSNEHLLKTFSYFPYPSLADIALLCLRYGLQMEKVKTWFMAQRLRCGISWSSEEIEETRARVVYRRDQLHFKSLLSFTHHAGRPPEEVPPPPVPAPEQVGIGIGPPTLSKPTQTKGLKVLANGATAASKPLQPLGCVPQSVSPSEQALPPHLEPAWPQGLRHNSVPGRVGPTEYLSPDMQRQRKTKRKTKEQLAILKSFFLQCQWARREDYQKLEQITGLPRPEIIQWFGDTRYALKHGQLKWFRDNAVPGAPSFQDPAIPTPPPSTRSLNERAETPPLPIPPPPPDIQPLERYWAAHQQLRETDIPQLSQASRLSTQQVLDWFDSRLPQPAEVVVCLDEEEEEEEEELPEDDEEEEEEEEEDDDDDDDDVIIQD

SEQ ID NO: 43150 - protein, 111 aa, Homo sapiens
MKYILVTGGVISGIGKGIIASSVGTILKSCGLHVTSIKIDPYINIDAGTFSPYEHGEVFVLDDGGEVDLDLGNYERFLDIRLTKDNNLTTGKIYQYVINKERKGDYLGKTV

SEQ ID NO: 43151 - protein, 180 aa, Homo sapiens
MLGLCGQRLPAAWVLLLLPFLPLLLLAAPAPHRASYKPVIVVHGLFDSSYSFRHLLEYINETHPGTVVTVLDLFDGRESLRPLWEQVQGFREAVVPIMAKAPQGVHLICYSQGGLVCRALLSVMDDHNVDSFISLSSPQMGQYGDTDYLKWLFPTSMRSNLYRICYSPWGQEFSICNYWH

SEQ ID NO: 43152 - protein, 301 aa, Homo sapiens
MENNIKLSEVVGSGKDGRILKEDILNYLEKQTGAILPPSPKVEIMPPPPKPKDMTVPILVSKPPVFTGKDKTEPIKGFQKAMVKTMSAALKIPHFGYCDEIDLTELVKLREELKPIAFARGIKLSFMPFFLKAASLGLLQFPILNASVDENCQNITYKASHNIGIAMDTEQGLIVPNVKNVQICSIFDIATELNRLQKLGSVSQLSTTDLTGGTFTLSNIGSIGGTFAKPVIMPPEVAIGALGSIKAIPRFNQKGEVYKAQIMNVSWSADHRVIDGATMSRFSNLWKSYLENPAFMLLDLK

SEQ ID NO: 43153 - protein, 166 aa, Homo sapiens
MRDSSAPSSASSSVTDLYCTPHSSRSDLVLPGTAGDFSLSASLSACTLLYEGAVEPMQIDVDPQEDPQNAPDVNYVVENPSLDLEQYAASYSGLMRIERLQFIADHCPTLRVEALKMALSFVQRTFNVDMYEEIHRKLSEATRSSLRELQNAPDAIPESGVEPPAL

SEQ ID NO: 43154 - protein, 77 aa, Homo sapiens
MVMYARKQQRLSDGCHDRRGDSQPYQVPAEAGVEGLEGAGGGREGLLLERRPQKSIQALRCNTSETSTADPLKIPGT

SEQ ID NO: 43155 - protein, 160 aa, Homo sapiens
  MOD_RES (1)..(1): Any amino acid
XRPRWSGPPCLLPEPNLPRLELPGRPKARSQCPGRPPLPLPLPAPGSPVSSKVVINNKLEQRIIGVINEHKKQNNDKGMISGRLTAKKLQDLYMALQAFSFKTKDIEDAMTNTLLYGGDLHSALDWLCLNLSDDALPEGFSQEFEEQQPKSRPKFQSPQI

SEQ ID NO: 43156 - protein, 163 aa, Homo sapiens
MGDDRPFVCNAPGCGQRFTNEDHLAVHKHKHEMTLKFGPARTDSVIIADQTPTPTRFLKNCEEVGLFNELASSFEHEFKKAADEDEKKARSRTVAKKLVAAAGPLDMSLPSTPDIKIKEEEPVEVDSSPPDSPASSPCSPPLKEKEVTPKPVLISTPTPTIVR

SEQ ID NO: 43157 - protein, 1366 aa, Homo sapiens
MAALLRSARWLLRAGAAPRLPLSLRLLPGGPGRLHAASYLPAARAGPVAGGLLSPARLYAIAAKEKDIQEESTFSSRKISNQFDWALMRLDLSVRRTGRIPKKLLQKVFNDTCRSGGSHALLLLRSCGSLLPELKLEERTEFAHRIWDTLQKLGAVYDVSHYNALLKVYLQNEYKFSPTDFLAKMEEANIQPNRVTYQRLIASYCNVGDIEGASKILGFMKTKDLPVTEAVFSALVTGHARAGDMENAENILTVMRDAGIEPGPDTYLALLNAYAEKGDIDHVKQTLEKVEKSELHLMDRDLLQIIFSFSKAGYPQYVSEILEKVTCERRYIPDAMNLILLLVTEKLEDVALQILLACPVSKEDGPSVFGSFFLQHCVTMNTPVEKLTDYCKKLKEVQMHSFPLQFTLHCALLANKTDLAKALMKAVKEEGFPIRPHYFWPLLVGRRKEKNVQGIIEILKGMQELGVHPDQETYTDYVIPCFDSVNSARAILQENGCLSDSDMFSQAGLRSEAANGNLDFVLSFLKSNTLPISLQSIRSSLLLGFRRSMNINLWSEITELLYKDGRYCQEPRGPTEAVGYFLYNLIDSMSDSEVQAKEEHLRQYFHQLEKMNVKIPENIYRGIRNLLESYHVPELIKDAHLLVESKNLDFQKTVQLTSSELESTLETLKAENQPIRDVLKQLILVLCSEENMQKALELKAKYESDMVTGGYAALINLCCRHDKVEDALNLKEEFDRLDSSAVLDTGKYVGLVRVLAKHGKLQDAINILKEMKEKDVLIKDTTALSFFHMLNGAALRGEIETVKQLHEAIVTLGLAEPSTNISFPLVTVHLEKGDLSTALEVAIDCYEKYKVLPRIHDVLCKLVEKGETDLIQKAMDFVSQEQGEMVMLYDLFFAFLQTGNYKEAKKIIETPGIRARSARLQWFCDRCVANNQVETLEKLVELTQKLFECDRDQMYYNLLKLYKINGDWQRADAVWNKIQEENVIPREKTLRLLAEILREGNQEVPFDVPELWYEDEKHSLNSSSASTTEPDFQKDILIACRLNQKKGAYDIFLNAKEQNIVFNAETYSNLIKLLMSEDYFTQAMEVKAFAETHIKGFTLNDAANSRLIITQVRRDYLKEAVTTLKTVLDQQQTPSRLAVTRVIQALAMKGDVENIEVVQKMLNGLEDSIGLSKMVFINNIALAQIKNNNIDAAIENIENMLTSENKVIEPQYFGLAYLFRKVIEEQLEPAVEKISIMAERLANQFAIYKPVTDFFLQLVDAGKVDDARALLQASTVKSVLELIPELNEKEEAYNSLMKSYVSEKDVTSAKALYEHLTAKNTKLDDLFLKRYASLLKYAGEPVPFIEPPESFEFYAQQLRKLRENSS

SEQ ID NO: 43158 - protein, 64 aa, Homo sapiens
MNISGSSCGSPNSADTSSDFKDLWTKLKECHDREVQGLQVKVTKLKQERILDAQRLEEFFTKNQ

SEQ ID NO: 43159 - protein, 682 aa, Homo sapiens
MSKGILQVHPPICDCPGCRISSPVNRGRLADKRTVALPAARNLKKERTPSFSASDGDSDGSGPTCGRRPGLKQEDGPHIRIMKRRVHTHWDVNISFREASCSQDGNLPTLISSVHRSRHLVMPEHQSRCEFQRGSLEIGLRPAGDLLGKRLGRSPRISSDCFSEKRARSESPQAEALLLPRELGPSMAPEDHYRRLVSALSEASTFEDPQRLYHLGLPSHGEDPPWHDPPHHLPSHDLLRVRQEVAAAALRGPSGLEAHLPSSTAGQRRKQGLAQHREGAAPAAAPSFSERELPQPPPLLSPQNAPHVALGPHLRPPFLGVPSALCQTPGYGFLPPAQAEMFAWQQELLRKQNLARLELPADLLRQKELESARPQLLAPETALRPNDGAEELQRRGALLVLNHGAAPLLALPPQGPPGSGPPTPSRDSARRAPRKGGPGPASARPSESKEMTGARLWAQDGSEDEPPKDSDGEDPETAAVGCRGPTPGQAPAGGAGAEGKGLFPGSTLPLGFPYAVSPYFHTGAVGGLSMDGEEAPAPEDVTKWTVDDVCSFVGGLSGCGEYTRVFREQGIDGETLPLLTEEHLLTNMGLKLGPALKIRAQVARRLGRVFYVASFPVALPLQPPTLRAPERELGTGEQPLSPTTATSPYGGGHALAGQTSPKQENGTLALLPGAPDPSQPLC

SEQ ID NO: 43160 - protein, 131 aa, Homo sapiens
MAAVATCGSVAASTGSAVATASKSNVTSFQRRGPRASVTNDSGPRLVSIAGTRPSVRNGQLLVSTGLPALDQLLGGGLAVGTVLLIEEDKYNIYSPLLFKYFLAEGIVNGHTLLVASAKEDPANILQCYTC

SEQ ID NO: 43161 - protein, 110 aa, Homo sapiens
MHTGGETSACKPSSVRLAPSFSFHAAGLQMAGQMPHSHQYSDRRQPNISDQQVSALSYSDQIQQPLTNQRRMPQTFRDPATAPLRKLSVDLIKTYKHINEVYYAKKKRRH

SEQ ID NO: 43162 - protein, 330 aa, Homo sapiens
MSRQLSRARPATVLGAMEMGRRMDAPTSAAVTRAFLERGHTEIDTAFLYSDGQSETILGGLGLRMGSSDCRVKIATKANPWIGNSLKPDSVRSQLETSLKRLQCPVDLFYLHAPDHSAPVEETLRACHQLHQEGKFVELGLSNYAAWEVAEICTLCKSNGWILPTVYQGMYSATTRQVETELFPCLRHFGLRFYAYNPLAGGLLTGKYKYEDKDGKQPVGRFFGTQWAEIYRNHFWKEHHFEGIALVEKALQAAYGASAPSMTSAALRWMYHHSQLQGAHGDAVILGMSSLEQLEQNLAAAEEGPLEPAVVDAFNQAWHLFAHECPNYFI

SEQ ID NO: 43163 - protein, 85 aa, Homo sapiens
MGKQNSKLRPEVMQDLLESTDFTEHEIQEWYKGFLRDCPSGHLSMEEFKKIYGNFFPYGDASKFAEHVFRTFDANGDGTIDFREF

SEQ ID NO: 43164 - protein, 141 aa, Homo sapiens
MVTIILLLSCDFWAVKNVTGRLMVGLRWWNHIDEDGKSHWVFESRKESSQENKTVSEAESRIFWLGLIACSVLWVIFAFSALFSFTVKWLAVVIMGVVLQGANLYGYIRCKVRSRKHLTSMATSYFGKQFLRQNTGDDQTS

SEQ ID NO: 43165 - protein, 141 aa, Homo sapiens
  MOD_RES (1)..(1): Any amino acid
XVAVVQAILEGKGSFSPEGPRNAQQPEPGDPREIPDRGPLGLESGDRSPESLLPPMLLQPPQESVEPAGPLDVLGPSLQGREWTLMDLDMELSLMQPLVPERGEPELAVKGLNSPSPALLRAGLPPTWARKPVPPPKTPRL

SEQ ID NO: 43166 - protein, 985 aa, Homo sapiens
MHRRRLALGLGFCLLAGTSLSVLWVYLENWLPVSYVPYYLPCPEILPMMMALSCLCHQQHEAALQEGEATPARGMVTVPSAQAAGAQAHTAADTHTLVGAHRLRGNLQPRASAAHLPATEPDHWGHGVCRGESSTQEIGEELINGVIYSISLRKVQLHHGGNKGQRWLGYENESALNLYETCKVRTVKAGTLEKLVEHLVPAFQGSDLSYVTIFLCTYRAFTTTQQVLDLLFKRYGRCDALTASSRYGCILPYSDEDGGPQDQLKNAISSILGTWLDQYSEDFCQPPDFPCLKQLVAYVQLNMPGSDLERRAHLLLAQLEHSEPIEAEPEALSPVPALKPTPELELALTPARAPSPVPAPAPEPEPAPTPAPGSELEVAPAPAPELQQAPEPAVGLESAPAPALELEPAPEQDPAPSQTLELEPAPAPVPSLQPSWPSPVVAENGLSEEKPHLLVFPPDLVAEQFTLMDAELFKKVVPYHCLGSIWSQRDKKGKEHLAPTIRATVTQFNSVANCVITTCLGNRSTKAPDRARVVEHWIEVARECRILKNFSSLYAILSALQSNSIHRLKKTWEDVSRDSFRIFQKLSEIFSDENNYSLSRELLIKEGTSKFATLEMNPKRAQKRPKETGIIQGTVPYLGTFLTDLVMLDTAMKDYLYGRLINFEKRRKEFEVIAQIKLLQSACNNYSIAPDEQFGAWFRAVERLSETESYNLSCELEPPSESASNTLRTKKNTAIVKRWSDRQAPSTELSTSGSSHSKSCDQLRCGPYLSSGDIADALSVHSAGSSSSDVEEINISFVPESPDGQEKKFWESASQSSPETSGISSASSSTSSSSASTTPVAATRTHKRSVSGLCNSSSALPLYNQQVGDCCIIRVSLDVDNGNMYKSILVTSQDKAPAVIRKAMDKHNLEEEEPEDYELLQILSDDRKLKIPENANVFYAMNSTANYDFVLKKRTFTKGVKVKHGASSTLPRMKQKGLKIAKGIF

SEQ ID NO: 43167 - protein, 209 aa, Homo sapiens
MRPEDRMFHIRAVILRALSLAFLLSLRGAGAIKADHVSTYAAFVQTHRPTGEFMFEFDEDEMFYVDLDKKETVWHLEEFGQAFSFEAQGGLANIAILNNNLNTLIQRSNHTQATNDPPEVTVFPKEPVELGQPNTLICHIDKFFPPVLNVTWLCNGELVTEGVAESLFLPRTDYSFHKFHYLTFVPSAEDFYDCRVEHWGLDQPLLKHW

SEQ ID NO: 43168 - protein, 50 aa, Homo sapiens
MDVLSPLSFIKVSHVRMQGILLLVFAKYQHLPYIQILSTKSTPTGLFGYW

SEQ ID NO: 43169 - protein, 106 aa, Homo sapiens
VAKTTPFNTREPVMLACYVWGFYPAEVTITWRKNGKLVMPHSSAHKTAQPNGDWTYQTLSHLALTPSYGDTYTCVVEHTGAPEPILRDWSYTPLPGSNYSEGWHIS

SEQ ID NO: 43170 - protein, 115 aa, Homo sapiens
MPTAAAPIISSVQKLVLYETRARYFLVGSNNAETKYRVLKIDRTEPKDLVIIDDRHVYTQQEVRELLGRLDLGNRTKMGQKGSSGLFRAVSAFGVVGGRWRILEVMQSIRSKIQI

SEQ ID NO: 43171 - protein, 161 aa, Homo sapiens
  MOD_RES (1)..(1): Any amino acid
XERRDRGAEKEHKRYHSLGNISRGGSGGSGSGGEKPSGPVPRSRLDPAKVLGTALCPRIHEVPLLEPLVCKKIAQERLTVLLFLEDCIITACQEGLICTWARPGKAVSGPTPACRGPGRTFRGKRQALAERGLCCCHSLWLRGVRGSQGNLSVSVQDLSDP

SEQ ID NO: 43172 - protein, 156 aa, Homo sapiens
MAAEPNKTEIQTLFKRLRAVPTNKACFDCGAKNPSWASITYGVFLCIDCSGVHRSLGVHLSFIRYKDNPFSLGESFGSRWDTDAAWGMDRVEEKEPEVTISSIRPISERATNRREVESRSSGLESSEARQKFAGAKAISSDMFFGREVDAEYEARS

SEQ ID NO: 43173 - protein, 31 aa, Homo sapiens
MSVYIQGVASEHMKRFFVNFVVGQDPGSDVA

SEQ ID NO: 43174 - protein, 127 aa, Homo sapiens [sequence omitted]

SEQ ID NO: 43175 - protein, 16 aa, Homo sapiens
MNSLLIGELSPEQPSF

SEQ ID NO: 43176 - protein, 2424 aa, Homo sapiens
MSSVKRPRGRPPSSKKSDGSGTYTKLQNTQVRVMSEKKQRKKVESESKQEKANRIISEAIAKAKERGERNIPRVMSPENFPTASVEGKEEKKGRRMKSKPKDKDSKKTKTCSKLKEKTKIGKLIITLGKKQKRKNESSDEISDAEQMPQHTLKDQDSQKRRSNRQIKRKKYAEDIEGKQSEEEVKGSMKIKKNSAPLPGEQPLQLFVENPSEEDAAIVDKILSSRTVKKEISPGVMIDTEEFFVKYKNYSYLHCEWATEEQLLKDKRIQQKIKRFKLRQAQRAHFFADMEEEPFNPDYVEVDRVLEVSFCEDKDTGEPVIYYLVKWCSLPYEDSTWELKEDVDLAKIEEFEQLQASRPDTRRLDRPPSNIWKKIDQSRDYKNGNQLREYQLEGLNWLLFNWYNRRNCILADEMGLGKTIQSITFLYEILLTGIRGPFLIIAPLSTIANWEREFRTWTDINVVVYHGSLISRQMIQQYEMYFRDSQGRIIRGAYRFQAIITTFEMILGGCGELNAIEWRCVIIDEAHRLKNKNCKLLEGLKLMNLEHKVLLTGTPLQNTVEELFSLLHFLEPLRFPSESTFMQEFGDLKTEEQVQKLQAILKPMMLRRLKEDVEKKLAPKEETIIEVELTNIQKKYYRAILEKNFSFLSKGAGQTNVPNLVNTMMELRKCCNHPYLIKGAEEKILGEFRDTYNPAASDFHLQAMIQSAGKLVLIDKLLPKMKAGGHKVLIFSQMVRCLDILEDYLIHKRYLYERIDGRVRGNLRQAAIDRFSKPDSDRFVFLLCTRAGGLGINLTAADTCIIFDSDWNPQNDLQAQARCHRIGQNKAVKVYRLVTRNSYEREMFDRASLKLGLDKAVLQSMSGRESNVGGIQQLSKKEIEDLLRRGAYGAIMEEEDEGSKFCEEDIDQILLRRTKTITIESEGRGSTFAKASFVASGNRTDISLDDPNFWQKWAKKAEIDIEAISGRNSLVIDTPRIRKQTRPFSATKDELAELSEAESEGDEKPKLRRPCDRSNGYGRTECFRVEKNLLVYGWGRWREILSHGRFKRQLNEHDVEIICRALLAYCLVHYRGDEKIKGFIWDLITPTEDGQTRELQNHLGLSAPVPRGRKGKKVKTQTSSFDIQKAEWLRKYNPEQLLQDEGYKKHIKHHCNKVLLRVRMLYYLKQEVIGNECQKVFDGVDASDIDVWVPEPDHSEVPAEWWDFDADKSLLIGVFKHGYEKYNTIRADPALCFLERVGKPDEKAVAAEQRANDYMDGDVEDPEYKPAPAIFKDDIEDDVSSPGDLVIADGDGQLMEGDKVYWPTQSALTTRLRRLITAYQRTNKNRQIQQIQPTFSVPTSVMQPIYEEATLNPKMAAKIERQQRWTRREEADFYRVVSTFGVVFDPDRGQFDWTKFRAMARLHKKTDDSLEKYLYAFMSMCRRVCRLPSKEELVDPNIFIQPITEERASRTLYRIELLRKVREQALRHPQLFERLKLCHPNPDLPVWWECGPHDRDLLIGAAKHGVSRTDYHILRDPELSFMAAQRNYSQSKMAHSRTSTPLLQQYQVALSASPLTSLPRLLDAKGIILEEMKVKSENLKEEPQSSEEESMSSVETRTLIKSEPVSPKNGVLPQATGDQKSGGKCETDRRMVAARTEPLTPNPASKKPRVHKRGSESSSDSDSDSERSSCSSRSSSSSSSSSCSHSRSGSSSSSSSSCSSASSSSSSSTSSSSSSSSSSSEESDSDEEEAQKRAESTTHMKAYDEESVASLSTTQDETQDSFQMNNGTPESAYILQGGYMLAASYWPKDRVMINRLDSICQTVLKGKWPSARRSYDANTVASFYTTKLLDSPGAATEYSDPSVPTPPGAGVKEEHDQSTQMSKVKKHVREKEFTVKIKDEGGLKLTFQKQGLAQKRPFDGEDGALGQQQYLTRLRELQSASETSLVNFPKSIPVSGTSIQPTLGANGVILDNQPIVKKRRGRRKNVEGVDIFFFNRNKPPNHVSLGLTSSQISTGINPALSYTQPQGIPDTESPVPVINLKDGTRLAGDDAPKRKDLEKWLKEHPGYVEDLGAFIPRMQLHEGRPKQKRHRCRNPNKLDVNSLTGEERVQLINRRNARKVGGAFAPPLKDLCRFLKENSEYGVAPEWGDVVKQSGFLPESMYERILTGPVVREEVSRRGRRPKSGIAKATAAAAAASATSVSGNPLLANGLLPGVDLTTLQALQQNLQNLQSLQVTAGLMGMPTGLPSGGEAKNMAAMFPMLLSGMAGLPNLLGMGGLLTKPTESGTEDKKGSDSKESEGKTERTESQSSENGGENSVSSSPSTSSTAALNTAAAANPLALNPLLLSNILYPGMLLTPGLNLHIPTLSQSNTFDVQNKNSDLGSSKSVEVKEEDSRIKDQEDKGGTEPSPLNENSTDEGSEKADASSGSDSTSSSSEDSDSSNED

SEQ ID NO: 43177 - protein, 406 aa, Homo sapiens
NQITRSRKEGRERIYHVDDTPSGSMDGVLDYSKTIQGTRDPICAITASDKILIVGRESGTIQRYSLPNVGLIQKYSLNCRAYQLSLNCNSSRLAIIDISGVLTFFDLDARVTDSTGQQVVGELLKLERRDVWDMKWAKDNPDLFAMMEKTRMYVFRNLDPEEPIQTSGYICNFEDLEIKSVLLDEILKDPEHPNKDYLINFEIRSLRDSRALIEKVGIKDASQFIEDNPHPRLWRLLAEAALQKLDLYTAEQAFVRCKDYQGIKFVKRLGKLLSESMKQAEVVGYFGRFEEAERTYLEMDRRDLAIGLRLKLGDWFRVLQLLKTGSGDADDSLLEQANNAIGDYFADRQKWLNAVQYYVQGRNQERLAECYYMLEDYEGLENLAISLPENHKLLPVGIANFSFWNC

SEQ ID NO: 43178 - protein, 123 aa, Homo sapiens
  MOD_RES (1)..(1): Any amino acid
XPRQIPSHIVRLKPSCSTDSSFTRTPVPTVSLASRELPVSSWQVTEPSSKNLWEQICKEYEAEQPPFPEGYKVKQEPVITVAPVEEMLFHGFSAEHYFPVSHFTMISRTPCPQDKSETINPKT

SEQ ID NO: 43179 - protein, 233 aa, Homo sapiens
MNPTLILAAFCLGIASATLTFDHSLEAQWTKWKAMHNRLYGMNEEGWRRAVWEKNMKMIELHNQEYREGKHSFTMAMNAFGDMTSEEFRQVMNGFQNRKPRKGKVFQEPLFYEAPRSVDWREKGYVTPVKNQGQCGSCWAFSATGALEGQMFRKTGRLISLSEQNLVDCSGPQGNEGCNGGLMDYAFQYVQDNGGLDSEESYPYEATNPVSTIPSILLLMTPALWTSLSRRRP

SEQ ID NO: 43180 - protein, 141 aa, Homo sapiens
MVMAALSLVAACWGRAAADESVQLPAAPGSSVRARETMVSVTMATSEWIQFFKEAGIPPGPAVNYAVMFVDNRIQKSMLLDLNKEIMNELGVTVVGDIIAILKHAKVVHRQGLTPSPRLECSSTISAHCNLCLPGHVQSCH

SEQ ID NO: 43181 - protein, 85 aa, Homo sapiens
MAQSINITELNLPQLEMLKNQLDQEVEFLSTSIAQLKVVQTKYVEAKDCLNVLNKSNEGVCLHCFHRERITRPTDEFYVCPWEAA

SEQ ID NO: 43182 - protein, 86 aa, Homo sapiens
IDDNYLKELNEDLKLRKQELLEMLKPLEDKNNLLFQKLMSNLEEKQRSLQIMRQIMAGKGCEESSVMELLKEAEEMKQNLHFLELF

SEQ ID NO: 43183 - protein, 313 aa, Homo sapiens
  MOD_RES (1)..(1): Any amino acid
XLSPDPWKRDAKEKLEKQQQMHIVDMLSKEIQELQSKPDRSAEESDRLRKLMLEWQFQKRLQESKQKDEDDEEEEDDDVDTMLIMQRLEAERRARDEERRRQQQLEEMRKREAEDRARQEEERRRQEEERTKRDAEEKRRQEEGYYSRLEAERRRQHDEAARRLLEPEAPGLCRPPLPRDYEPPSPSPAPGAPPPPPQRNASYLKTQVLSPDSLFTAKFVAYNEEEEEEDCSLAGPNSYPGSTGAAVGAHDACRDAKEKRSKSQDADSPGSSGAPENLTFKERQRLFSQGQDVSNKVKASRKLTELENELNTK

SEQ ID NO: 43184 - protein, 703 aa, Homo sapiens
CHPTHSVLLSFLDRCLQNYIPAQSLTLSCPVCRQTSILPEQGVSALQNNFFISSLMEAMQQAPDGAHDPEDPHPLSVVAGRPLSCPNHEGKTMEFYCEACETAMCGECRAGEHREHHKAALQRQLEAVRGRLPQLSAAIALVGGISQQLQERKAEALAQISAAFEDLEQALQQRKQALVSDLETICGAKQKVLQSQLDTLRQGQEHIGSSCSFAEQALRLGSAPEVLLVRKHMRERLAALAAQAFPERPHENAQLELVLEVDGLRRSVLNLGALLTTSATAHETVATGEGLRQALVGQPASLTVTTKDKDGRLVRTGSAELRAEITGPDGTRLPVPVVDHKNGTYELVYTARTEGELLLSVLLYGQPVRGSPFRVRALRPGDLPPSPDDVKRRVKSPGGPGSHVRQKAVRRPSSMYSTGGKRKDNPIEDELVFRVGSRGREKGEFTNLQGVSAASSGRIVVADSNNQCIQVFSNEGQFKFRFGVRGRSPGQLQRPTGVAVDTNGDIIVADYDNRWVSIFSPEGKFKTKIGAGRLMGPKGVAVDRNGHIIVVDNKSCCVFTFQPNGKLVGRFGGRGATDRHFAGPHFVAVNNKNEIVVTDFHNHSVKVYSADGEFLFKFGSHGEGNGQFNAPTGVAVDSNGNIIVADWGNSRIQVFDSSGSFLSYINTSAEPLYGPQGLALTSDGHVVVADAGNHCFKAYRYLQ

SEQ ID NO: 43185 - protein, 110 aa, Homo sapiens
MVSSVLPNPTSAECWAALLHDPMTLDMDAVLSDFVRSTGAEPGLARDLLEGKNWDLTAALSDYEQLRQVHTANLPHVFNEGRGPKQPEREPQPGHKVERPCLQRQDDIAQ

SEQ ID NO: 43186 - protein, 2055 aa, Homo sapiens
MFKGLSKGSQGKGSPKGSPAKGSPKGSPSRHSRAATQELALLISRMQANADQVERDILETQKRLQQDRLNSEQSQALQHQQETGRSLKEAEVLLKDLFLDVDKARRLKHPQAEEIEKDIKQLHERVTQECAEYRALYEKMVLPPDVGPRVDWARVLEQKQKQVCAGQYGPGMAELEQQIAEHNILQKEIDAYGQQLRSLVGPDAATIRSQYRDLLKAASWRGQSLGSLYTHLQGCTRQLSALAEQQRRILQQDWSDLMADPAGVRREYEHFKQHELLSQEQSVNQLEDDGERMVELRHPAVGPIQAHQEALKMEWQNFLNLCICQETQLQHVEDYRRFQEEADSVSQTLAKLNSNLDAKYSPAPGGPPGAPTELLQQLEAEEKRLAVTERATGDLQRRSRDVAPLPQRRNPPQQPLHVDSICDWDSGEVQLLQGERYKLVDNTDPHAWVVQGPGGETKRAPAACFCIPAPDPDAVARASRLASELQALKQKLATVQSRLKASAVESLRPSQQGTQGGPGRGGCGARRSRFRLPTAPSGSDLANPQAQKLLTQMTRLDGDLGQIERQVLAWARAPLSRPTPLEDLEGRIHSHEGTAQRLQSLGTEKETAQKECEAFLSTRPVGPAALQLPVALNSVKNKFSDVQVLCSLYGEKAKAALDLERQIQDADRVIRGFEATLVQEAPIPAEPGALQERVSELQRQRRELLEQQTCVLRLHRALKASEHACAALQNNFQEFCQDLPRQQRQVRALTDRYHAVGDQLDLREKVVQDAALTYQQFKNCKDNLSSWLEHLPRSQVRPSDGPSQIAYKLQAQKRLTQEIQSRERDRATASHLSQALQAALQDYELQADTYRCSLEPTLAVSAPKRPRVAPLQESIQAQEKNLAKAYTEVAAAQQQLLQQLEFARKMLEKKELSEDIRRTHDAKQGSESPAQAGRESEALKAQLEEERKRVARVQHELEAQRSQLLQLRTQRPLERLEEKEVVEFYRDPQLEGSLSRVKAQVEEEGKRRAGLQADLEVAAQKVVQLESKRKTMQPHLLTKEVTQVERDPGLDSQAAQLRIQIQQLRGEDAVISARLEGLKKELLALEKREVDVKEKVVVKEVVKVEKNLEMVKAAQALRLQMEEDAARRKQAEEAVAKLQARIEDLERAISSVEPKVIVKEVKKVEQDPGLLQESSRLRSLLEEERTKNATLARELSDLHSKYSVVEKQRPKVQLQERVHEIFQVDPETEQEITRLKAKLQEMAGKRSGVEKEVEKLLPDLEVLRAQKPTVEYKEVTQEVVRHERSPEVLREIDRLKAQLNELVNSHGRSQEQLIRLQGERDEWRRERAKVETKTVSKEVVRHEKDPVLEKEAERLRQEVREAAQKRRAAEDAVYELQSKRLLLERRKPEEKVVVQEVVVTQKDPKLREEHSRLSGSLDEEVGRRRQLELEVQQLRAGVEEQEGLLSFQEDRSKKLAVERELRQLTLRIQELEKRPPTVQEKIIMEEVVKLEKDPDLEKSTEALRWDLDQEKTQVTELNRECKNLQVQIDVLQKAKSQEKTIYKEVIRVQKDRVLEDERARVWEMLNRERTARQAREEEARRLRERIDRAETLGRTWSREESELQRARDQADQECGRLQQELRALERQKQQQTLQLQEESKLLSQKTESERQKAAQRGQELSRLEAAILREKDQIYEKERTLRDLHAKVSREELSQETQTRETNLSTKISILEPETGKDMSPYEAYKRGIIDRGQYLQLQELECDWEEVTTSGPCGEESVLLDRKSGKQYSIEAALRCRRISKEEYHLYKDGHLPISEFALLVAGETKPSSSLSIGSIISKSPLASPAPQSTSFFSPSFSLGLGDDSFPIAGIYDTTTDNKCSIKTAVAKNMLDPITGQKLLEAQAATGGIVDLLSRERYSVHKAMERGLIENTSTQRLLNAQKAFTGIEDPVTKKRLSVGEAVQKGWMPRESVLPHLQVQHLTGGLIDPKRTGRIPIQQALLSGMISEELAQLLQDESSYEKDLTDPISKERLSYKEAMGRCRKDPLSGLLLLPAALEGYRCYRSASPTVPRSLR

SEQ ID NO: 43187 - protein, 74 aa, Homo sapiens
MESPQLHCILNSNSVACSFAVGAGFLAFLSCLAFLVLDTQETRIAGTRFKTAFQLLDFILADIPGLPGIPGPPK

SEQ ID NO: 43188 - protein, 84 aa, Homo sapiens
  MOD_RES (1)..(1): Any amino acid
XPLLLHTGMGRLCTLDESVSLATMIDRIKRHLKLSHIRLALGVGRTLESQVKVVALCAGSGSSVLQGVEADLYLTGGIIAETSG

SEQ ID NO: 43189 - protein, 450 aa, Homo sapiens
MKTERPRPNTFVIRCLQWTTVIERTFHVDSPDEREEWMRAIQMVANSLKQRAPGEDPMDYKCGSPSDSSTTEEMEVAVSKARAKVTMNDFDYLKLLGKGTFGKVILVREKATGRYYAMKILRKEVIIAKDEVAHTVTESRVLQNTRHPFLTALKYAFQTHDRLCFVMEYANGGELFFHLSRERVFTEERARFYGAEIVSALEYLHSRDVVYRDIKLENLMLDKDGHIKITDFGLCKEGISDGATMKTFCGTPEYLAPEVLEDNDYGRAVDWWGLGVVMYEMMCGRLPFYNQDHERLFELILMEEIRFPRTLSPEAKSLLAGLLKKDPKQRLGGGPSDAKEVMEHRFFLSINWQDVVQKKLLPPFKPQVTSEVDTRYFDDEFTAQSITITPPDRCECLGPPRWCACPRGGGMGSALNSLLKEGPRRPPLHVWEISPSLLSGPFAVGPLWTW

SEQ ID NO: 43190 - protein, 685 aa, Homo sapiens
  MOD_RES (1)..(1): Any amino acid
XVPTFSLPPAPGRLERLGRVMVELEALLPPPGAVPGGAGVWVPGGRPPVLRGLVRVLNRSFEKAVHVRASHDGWASFCDHPARYVPRSPPWAGAGGTGAGDPILDPGLGLGPGQASASSPDDGGRTDRFAFQLPFAEGAGDGARLDFVVRYETPEGTFWANNHGRNYTVLLRIAPAPTPTDAEGLPQQQQLPQLEPQPECQGPVEAEARQLKSCMKPVRRRPAEEELKTKNMDDNTFAMAEHPDVQESVGPLVAPTPLRPWPQMTLQVSDVPMTGNPAEEGDVPRSSPPVAFTEVLQAPAIRIPPSSPLCGLGGSPRDQASGPDASEGATGPFLEPSQQQAEATWGVSSENGGGLEAVSGSEELLGEDTIDQELEQLYLSHLSRLRAAVAAGGAGGGGEGSTDGGMSPSHPLGILTDRDLILKWPGPERALNSALAEEITLHYARLGRGVELIKDTEDPDDEGEGEEGLSVTPSSPEGDSPKESPPEILSGARSVVATMGDVWLPWAEGSGCDGPVVLGTEGQFIGDPEKGMGKDTSSLHMNRVIAGVTESLGEAGTEAQIEVTSEWAGSLDPISGKEPASPVLLQGQNPTLLSPLGAEVCLSSVARPHVSSQDEKDAGPSLEPPKKSPTLAVPAECVCALPPQLRGPLTQTLGVLAGLVVVPVALNSGVSLLVLALCLSLAWFS

SEQ ID NO: 43191 - protein, 96 aa, Homo sapiens
MAAAMPLALLVLLLLGPGGWCLAEPPRDSLREELVITPLPSGDVAATFQFRTRWDSELQREGGRPLCAAEGRSLVPHQLPLPGSAYPPCLQKCTLY

SEQ ID NO: 43192 - protein, 287 aa, Homo sapiens
MGTPKPRILPWLVSQLDLGQLEGVAWVNKSRTRFRIPWKHGLRQDAQQEDFGIFQAWAEATGAYVPGRDKPDLPTWKRNFRSALNRKEGLRLAEDRSKDPHDPHKIYEFVNSGVGDFSQPDTSPDTNGGGSTSDTQEDILDELLGNMVLAPLPDPGPPSLAVAPEPCPQPLRSPSLDNPTPFPNLGPSENPLKRLLVPGEEWEFEVTAFYRGRQVFQQTISCPEGLRLVGSEVGDRTLPGWPVTLPDPGMSLTDRGVMSYVRHVLSCLGGGLALWRAGQWLWAQRLG

SEQ ID NO: 43193 - protein, 126 aa, Homo sapiens
  MOD_RES (1)..(1): Any amino acid
XGPNGVASYELQAGPEAQELFGLQVAEDQEEKQPQLIVMGNLDRERWDSYDLTIKVQDGGSPPRASSALLRVTVLDTNDNAPKFERPSYEAELSENSPIGHSVIQSLVDWDLEKRLRKKRETDSRG

SEQ ID NO: 43194 - protein, 347 aa, Homo sapiens
MAVTEASLLRQCPLLLPQNRSKTVYEGFISAQGRDFHLRIVLPEDLQLKNARLLCSWQLRTILSGYHRIVQQRMQHSPDLMSFMMELKMLLEVALKNRQELYALPPPPQFYSSLIEEIGTLGWDKLVYADTCFSTIKLKAEDASGREHLITLKLKAKYPAESPDYFVDFPVPFCASWTPQSSLISIYSQFLAAIESLKAFWDVMDEIDEKTWVLEPEKPPRSATARRIALVVKPLGIKLSRNIHLWDPENSVLQNLKDVLEIDFPARAILEKSDFTMDCGICYAYQLDGTIPDQVCDNSQCGQPFHQICLYEWLRGLLTSRQSFNIIFGECPYCSKPITLKMSGRKH

SEQ ID NO: 43195 - protein, 216 aa, Homo sapiens
MAKREILSAAEHFSMIRASRNKNGPALGGLSCSPNLPGQTTVQVRVPYRVVGLVVGPKGATIKRIQQQTHTYIVTPSRDKEPVFEVTGMPENVDRAREEIEMHIAMRTGNYIELNEENDFHYNGTDVSFEGGTLGSAWLSSNPVPPSRARMISNYRNDSSSSLGSGSTDSYFGSNRLADFSPTSPFSTGNFWFGDTLPSVGSEDLAVDSPAFDSLP

SEQ ID NO: 43196 - protein, 117 aa, Homo sapiens
MASMLLAQRLACSFQHSYRLLVPGSRHISQAAAKVDVEFDYDGPLMKTEVPGPRSQELMKQLNIIQNAEAVHFFCNYEESRGNYLVDVDGNRMLDLYSQISSVPIESHCHPGWSAVA

SEQ ID NO: 43197 - protein, 50 aa, Homo sapiens
MCAASASPDNLVFHMKNEMRNIKYKPVDYQQLRALTEAKKLASASAKLKM

SEQ ID NO: 43198 - protein, 220 aa, Homo sapiens
  MOD_RES (1)..(1): Any amino acid
XLRTFCESKRLTTDKANIKDLSQILKKMPQYQKELNKYSTHLHLADDCMKHFKGSVEKLCSVEQDLAMGSDAEGEKIKDSMKLIVPVLLDAAVPAYDKIRVLLLYILLRNGVSEENLAKLIQHANVQAHSSLIRNLEQLGGTVTNPGGSGTSSRLEPRERMEPTYQLSRWTPVIKDVMEDAVEDRLDRNLWPFVSDPAPTASSQAAVRLLTHPHPDPLPG

SEQ ID NO: 43199 - protein, 461 aa, Homo sapiens
MKYILVTGGVISGIGKGIIASSVGTILKSCGLHVTSIKIDPYINIDAGTFSPYEHGEVFVLDDGGEVDLDLGNYERFLDIRLTKDNNLTTGKIYQYVINKERKGDYLGKTVQVVPHITDAIQEWVMRQALIPVDEDGLEPQVCVIELGGTVGDIESMPFIEAFRQFQFKVKRENFCNIHVSLVPQPSSTGEQKTKPTQNSVRELRGLGLSPDLVVCRCSNPLDTSVKEKISMFCHVEPEQVICVHDVSSIYRVPLLLEEQGVVDYFLRRLDLPIERQPRKMLMKWKEMADRYDRLLETCSIALVGKYTKFSDSYASVIKALEHSALAINHKLEIKYIDSADLEPITSQEEPVRYHEAWQKLCSAHGVLVPGGFGVRGTEGKIQAIAWARNQKKPFLGVCLGMQLAVVEFSRNVLGWQGWAAGLQNDRPVMQALIRPADVPLAKTSHVAKPRAGRGGEHTWV

SEQ ID NO: 43200 - protein, 596 aa, Homo sapiens
MDYPKMDYFLDVESAHRLLDVESAQRFFYSQGAQARRATLLLPPTLMAASSEDDIDRRPIRRVRSKSDTPYLAEARISFNLGAAEEVERLAAMRSDSLVPGTHTPPIRRRSKFANLGRIFKPWKWRKKKSEKFKHTSAALERKISMRQSREELIKRGVLKEIYDKDGELSISNEEDSLENGQSLSSSQLSLPALSEMEPVPMPRDPCSYEVLQPSDIMDGPDPGAPVKLPCLPVKLSPPLPPKKVMICMPVGGPDLSLVSYTAQKSGQQGVAQHHHTVLPSQIQHQLQYGSHGQHLPSTTGSLPMHPSGCRMIDELNKTLAMTMQRLESSEQRVPCSTSYHSSGLHSGDGVTKAGPMGLPEIRQVPTVVIECDDNKENVPHESDYEDSSCLYTREEEEEEEDEDDDSSLYTSSLAMKVCRKDSLAIKLSNRPSKRELEEKNILPRQTDEERLELRQQIGTKLTRRLSQRPTAEELEQRNILKPRNEQEEQEEKREIKRRLTRKLSQRPTVEELRERKILIRFSDYVEVADAQDYDRRADKPWTRLTAADKAAIRKELNEFKSTEMEVHELSRHLTRLVLRVFFFLFFPQVAIFISK

SEQ ID NO: 43201 - protein, 88 aa, Homo sapiens
MFQALIGEGCRRSGGGGLRDWRLLGGRCQALGGGGGGGGQGGRCRNERWVPAAAGGVFPAPKDPQTSMAATAAVSPSDYLQPAASTTQ

SEQ ID NO: 43202 - protein, 155 aa, Homo sapiens
MFSAGAESLLHQAREIQDEELKKFCSRICKLLQAEDLGPDTLDSLQRLFLIISATKYSRRVTETRRSEPWARACYERWRAGSLRDPASDTSSPSWPRSWSSARAPSRRTRPPCSASGWSTGCATPASSKGSHTPAASSPRPGPGSRAPSPRWTGR

SEQ ID NO: 43203 - protein, 256 aa, Homo sapiens
MTSATDGERLEENYEIAEGVCIPRSALYMHYLDFCEKNDTQPVNAASFGKIIRQQFPQLTTRRLGTRGQSKYHYYGIAVKESSQYYDVMYSKKGAAWVSETGKKEVSKQTVAYSPRSKLGTLLPEFPNVKDLNLPASLPEEKVSTFIMMYRTHCQRILDTVIRANFDEVQSFLLHFWQGMPPHMLPVLGSSTVVNIVGVCDSILYKAISGVLMPTVLQALPDSLTQVIRKFAKQLDEWLKVALHDLPENLRNIKFE

SEQ ID NO: 43204 - protein, 23 aa, Homo sapiens
QARLHLGEQNMGAKFALFQQQHG

SEQ ID NO: 43205 - protein, 438 aa, Homo sapiens
MADISLDELIRKRGAAAKGRLNARPGVGGVRSRVGIQQGLLSQSTRTATFQQRFDARQKIGLSDARLKLGVKDAREKLLQKDARFRIKGKVQDAREMLNSRKQQTTVPQKPRQVADAREKISLKRSSPAAFINPPIGTVTPALKLTKTIQRMHVDPVGWILTTECFQVPQQKAMAPLHPHPAGMRINVVNNHQAKQNLYDLDEDDDGIASVPTKQMKFAASGGFLHHMAGLSSSKLSMSKALPLTKVVQNDAYTAPALPSSIRTKALTNMSRTLVNKEEPPKELPAAEPVLSPLEGTKMTVNNLHPRVTEEDIVELFCVCGALKRARLVHPGVAEVVFVKKDDAITAYKKYNNRCLDGQPMKCNLHMNGNVITSDQPILLRLSDSPSMKKESELPRRVNSASSSNPPAEVDPDTILKALFKSSGASVTTQPTEFKIKL

SEQ ID NO: 43206 - protein, 861 aa, Homo sapiens
MAGPRGALLAWCRRQCEGYRGVEIRDLSSSFRDGLAFCAILHRHRPDLLDFDSLSKDNVFENNRLAFEVAEKELGIPALLDPNDMVSMSVPDCLSIMTYVSQYYNHFCSPGQAGVSPPRKGLAPCSPPSVAPTPVEPEDVAQGEELSSGSLSEQGTGQTPSSTCAACQQHVHLVQRYLADGRLYHRHCFRCRRCSSTLLPGAYENGPEEGTFVCAEHCARLGPGTRSGTRPGPFSQPKQQHQQQLAEDAKDVPGGGPSSSAPAGAEADGPKASPEARPQIPTKPRVPGKLQELASPPAGRPTPAPRKASESTTPAPPTPRPRSSLQQENLVEQAGSSSLVNGRLHELPVPKPRGTPKPSEGTPAPRKDPPWITLVQAEPKKKPAPLPPSSSPGPPSQDSRQVENGGTEEVAQPSPTASLESKPYNPFEEEEEDKEEEAPAAPSLATSPALGHPESTPKSLHPWYGITPTSSPKTKKRPAPRAPSASPLALHASRLSHSEPPSATPSPALSVESLSSESASQTAGAELLEPPAVPKSSSEPAVHAPGTPGNPVSLSTNSSLASSGELVEPRVEQMPQASPGLAPRTRGSSGPQPAKPCSGATPTPLLLVGDRSPVPSPGSSSPQLQSSCKENPFNRKPSPAASPATKKATKGSKPVRPPAPGHGFPLIKRKVQADQYIPEEDIHGEMDTIERRLDALEHRGVLLEEKLRGGLNEGREDDMLVDWFKLIHEKHLLVRRESELIYVFKQQNLEQRQADVEYELRCLLNKPEKDWTEEDRAREKVLMQELVTLIEQRNAIINCLDEDRQREEEEDKMLEAMIKKKEFQREAEPEGKKKGKFKTMKMLKLLGNKRDAKSKSPRDKS

SEQ ID NO: 43207 - protein, 107 aa, Homo sapiens
  MOD_RES (1)..(1): Any amino acid
XLWRSGDEAPGLFFVDAERVPCRHDDVFFPPSASFRVGLGPGASPTFTRDEDLAVFLASRAGRLRFHGPGALSVGPEDCADPSGCVCGNAEAQPWICAALLQPLGGR

SEQ ID NO: 43208 - protein, 84 aa, Homo sapiens
MNWTGLYTLLSGVNRHSTAIGRVWLSVIFIFRIMVLVVAAESVWGDEKSSFICNTLQPGCNSVCYDQFFPISHVRLWSLQLILV

SEQ ID NO: 43209 - protein, 108 aa, Homo sapiens
MTVMSLSRDLKDDFHSDTVLSILNEQRIRGILCDVTIIVEDTKFKAHSNVLAASSLYFKNIFWSHTICISSHVLELDDLKAEVFTEILNYIYSSTVVVKRQETVTDLA

SEQ ID NO: 43210 - protein, 150 aa, Homo sapiens
MGAGALAICQSKAAVRLKEDMKKIVAVPLNEQKDFTYQKLFGVSLQELERQGLTENGIPAVVWNIVEYLTQHGLTQEGLFRVNGNVKVVEQLRLKFESGVPVELGKDGDVCSAASLLKLFLRELPDSLITSALQPRFIQLFQVCHLGLKA

SEQ ID NO: 43211 - protein, 140 aa, Homo sapiens
MRKSEPLQSVVDHMATHLGVSPSRILLLFGETELSPTATPRTLKLGVADIIDCVVLTSSPEATETSQQLQLRVQGKEKHQTLEVSLSRDSPLKTLMSHYEEAMGLSGRKLSFFFDGTKLSGRELPADLGMESGDLIEVWG

SEQ ID NO: 43212 - protein, 375 aa, Homo sapiens
MNSGILQVFQGELICPLCMNYFIDPVTIDCGHSFCRPCFYLNWQDIPFLVQCSECTKSTEQINLKTNIHLKKMASLARKVSLWLFLSSEEQMCGTHRETKKIFCEVDRSLLCLLCSSSQEHRYHRHRPIEWAAEEHREKLLQKMQSLWEKACENHRNLNVETTRTRCWKAFGDILHRSESVLLHMPQPLNPELSAGPITGLRDRLNQFRVHITLHHEEANNDIFLYEILRSMCIGCDHQDVPYFTATPRSFLAWGVQTFTSGKYYWEVHVGDSWNWAFGVCNMYRKEKNQNEKIDGKAGLFLLGCVKNDIQCSLFTTSPLMLQYIPKPTSRVGLFLDCEAKTVSFVDVNQSSLIYTIPNCSFSPPLRPIFCCIHF

SEQ ID NO: 43213 - protein, 107 aa, Homo sapiens
MEAYEQVQKGPLKLKGVAELGVTKRKKKKKDKDKAKLLEAMGTSKKNEEEKRRGLDKRTPAQAAFEKMQEKRQGHQTSCTATGFQGHKANAARSYAWTQNWYCVPSS

SEQ ID NO: 43214 - protein, 516 aa, Homo sapiens
MSNDGRSRNRDRRYDEVPSDLPYQDTTIRTHPILHDSERAVSADPLPPPPLPLQPPFGPDFYSSDTEEPAIAPDLKPVRRFVPDSWKNFFRGKKKDPEWDKPVSDIRYISDGVECSPPASPARPNHRSPLNSCKDPYGGSEGTFSSRKEADAVFPRDPYGSLDRHTQTVRTYSEKVEEYNLRYSYMKSWAGLLRILGVVELLLGAGVFACVTAYIHKDSEWYNLFGYSQPYGMGGVGGLGSMYGGYYYTGPKTPFVLVVAGLAWITTIIILVLGMSMYYRTILLDSNWWPLTEFGINVALFILYMAAAIVYVNDTNRGGLCYYPLFNTPVNAVFCRVEGGQIAAMIFLFVTMIVYLISALVCLKLWRHEAARRHREYMEQQEINEPSLSSKRKMCEMATSGDRQRDSEVNFKELRTAKMKPELLSGHIPPGHIPKPIVMPDYVAKYPVIQTDDERERYKAVFQDQFSEYKELSAEVQAVLRKFDELDAVMSRLPHHSESRQEHERISRIHEEFKKK

SEQ ID NO: 43215 - protein, 88 aa, Homo sapiens
MVAMAEAEAGVAVEVRGLPPAVPDELLTLYFENRRRSGGGPVLSWQRLGCGGVLTFREPADAERVLAQADHELHGAQLSLRPAPPRAP

SEQ ID NO: 43216 - protein, 1179 aa, Homo sapiens
ATEEPFPFHGLLPKKETGAASFLCRYPEYDGRGVLIAVLDTGVDPGAPGMQVTTDGKPKIVDIIDTTGSGDVNTATEVEPKDGEIVGLSGRVLKIPASWTNPSGKYHIGIKNGYDFYPKALKERIQKERKEKIWDPVHRVALAEACRKQEEFDVANNGSSQANKLIKEELQSQVELLNSFEKKYSDPGPVYDCLVWHDGEVWRACIDSNEDGDLSKSTVLRNYKEAQEYGSFGTAEMLNYSVNIYDDGNLLSIVTSGGAHGTHVASIAAGHFPEEPERNGVAPGAQILSIKIGDTRLSTMETGTGLIRAMIEVINHKCDLVNYSYGEATHWPNSGRICEVINEAVWKHNIIYVSSAGNNGPCLSTVGCPGGTTSSVIGVGAYVSPDMMVAEYSLREKLPANQYTWSSRGPSADGALGVSISAPGGAIASVPNWTLRGTQLMNGTSMSSPNACGGIALILSGLKANNIDYTVHSVRRALENTAVKADNIEVFAQGHGIIQVDKAYDYLVQNTSFANKLGFTVTVGNNRGIYLRDPVQVAAPSDHGVGIEPVFPENTENSEKISLQLHLALTSNSSWVQCPSHLELMNQCRHINIRVDPRGLREGLHYTEVCGYDIASPNAGPLFRVPITAVIAAKVNESSHYDLAFTDVHFKPGQIRRHFIEVPEGATWAEVTVCSCSSEVSAKFVLHAVQLVKQRAYRSHEFYKFCSLPEKGTLTEAFPVLGGKAIEFCIARWWASLSDVNIDYTISFHGIVCTAPQLNIPKSGEVTPSCPLLCELLYESEFDSQLWIIFDQNKRQMGSGDAYPHQYSLKLEKGDYTIRLQIRHEQISDLERLKDLPFIVSHRLSNTLSLDIHENHSFALLGKKKSSNLTLPPKYNQPFFVTSLPDDKIPKGAGPGCYLAGSLTLSKTELGKKADVIPVHYYLIPPPTKTKNGSKDKEKDSEKEKDLKEEFTEALRDLKIQWMTKLDSSDIYNELKETYPNYLPLYVARLHQLDAEKERMKRLNEIVDAANAVISHIDQTALAVYIAMKTDPRPDAATIKNDMDKQKSTLVDALCRKGCALADHLLHTQAQDGAISTDAEGKEEEGESPLDSLAETFWETTKWTDLFDNKVLTFAYKHALVNKMYGRGLKFATKLVEEKPTKENWKNCIQLMKLLGWTHCASFTENWLPIMYPPDYCVF

SEQ ID NO: 43217 - protein, 119 aa, Homo sapiens
MAASCVLLHTGQKMPLIGLGTWKSEPGQVKAAVKYALSVGYRHIDCAAIYGNEPEIGEALKEDVGPGKAVPREELFVTSKLWNTKHHPEDVEPALRKTLADLQLEYLDLYLMHWPYAFE

SEQ ID NO: 43218 - protein, 96 aa, Homo sapiens
  MOD_RES (1)..(1): Any amino acid
XTPSSPGMSQQGGPGMGPPMPTVNRKAQEAAAAVMQAAANSAQSRPPYIRSPAYPSQSGAGGRPMFSSQHPNYGNSQAPMVHQPDQYGNSHVQGIN

SEQ ID NO: 43219 - protein, 57 aa, Homo sapiens
MSFLLPKLTSKKEVDQAIKSTAEKVLVLRFGRDEDPVCLQLDDICAASSMCLMQRET

SEQ ID NO: 43220 - protein, 84 aa, Homo sapiens
  MOD_RES (1)..(1): Any amino acid
XDEPVTPKDSLIDRRRTPGSSARSQKREARLDKVLSDMKRHKKLEEQILRTGRDLFSLDSEDPSPASPPLRSSGSSLFPRQRKY

SEQ ID NO: 43221 - protein, 129 aa, Homo sapiens
  MOD_RES (1)..(1): Any amino acid
XALMDEINNKIEEEKLVKANITLWEANMIKAYNASFSENSTGPPFFVHPADVPRGPCWETMVGQEFVRLTVSDVLTTYVTILIGDFLRACFVRFCNYCWCWDLEYGYPSYTEFDISGNVLALIFNQGMI

SEQ ID NO: 43222 - protein, 157 aa, Homo sapiens
MPEELPRWSTMEGDCLSCMKYLMFVFNFFIFLGGACLLAIGIWVMVDPTGFREIVAANPLLLTGAYILLAMGGLLFLLGFLGCCGAVRENKCLLLFFFLFILIIFLAELSAAILAFIFRENLTREFFTKELTKHYQGNNDTDVFSATWNSVMITVSD

SEQ ID NO: 43223 - protein, 59 aa, Homo sapiens
MEGSKTSNNSTMQVSFVCQRCSQPLKLDTSFKILDRVTIQELTAPLLTTAQAKPGETQE

SEQ ID NO: 43224 - protein, 7 aa, Homo sapiens
MYCLQWL

SEQ ID NO: 43225 - protein, 236 aa, Homo sapiens
  MOD_RES (1)..(1): Any amino acid
XQEKLTGMWWKQLVAGAVAGAVSRTGTAPLDRLKVFMQVHASKTNRLNILGGLRSMVLEGGIRSLWRGNGINVLKIAPESAIKFMAYEQIKRAILGQQETLHVQERFVAGSLAGATAQTIIYPMETLKNWWLQQYSHDSADPGILVLLACGTISSTCGQIASYPLALVRTRMQAQASIEGGPQLSMLGLLRHILSQEGMRGLYRGIAPNFMKVIPAVSISYVVYENMKQALGVTSR

SEQ ID NO: 43226 - protein, 216 aa, Homo sapiens
MPECLWTQGVLQEVLNSYFCGSIILSTLPWEVPGGHASRICLLLLATGENKQVECYQLSPGLSSLPDFQDSEETVTSRMLFPTSAQESSRGLPDANDLCLGLQSLSLTGWDRPWSTQDSDSSAQSSTHSVKPSHFSTSALPVSVRGWSQRPFKDGGRVSDGPRASCSCCSHSLPNQCFKEMARSFCVAILGPPRSSQRPLQHRERGQAAPTSCSCE

SEQ ID NO: 43227 - protein, 414 aa, Homo sapiens
MLLSGAPPAGSRPGPRTQGSAGGGPGGSRRGAGGAGAGPGGGGSGGVAKWLREHLGFRGGGGGGGGSKPAPPEPDYRPPAPSPAAPPAPPPDILAAYRLQRERDFEDPYSGGSSGSAALATPVAPGPTPPPRHGSPPHRLIRVETPGPPAPPADERISGPPASSDRLAILEDYADPFDVQETGEGSAGASGAPEKVPENDGYMEPYEAQKMMAEIRGSKETATQPLPLYDTPYEPEEDGATAEGEGAPWPRESRLPEDDERPPEEYDQPWEWKKERISKAFAVDIKVIKDLPWPPPVGQLDSSPSLPDGDRDISGPASPLPEPSLEDSSAQFEGPEKSCLSPGREEKGRLPPRLSAGNPKSAKPLSMEPSSPLGEWTDPALPLENQLVSRGHQPNRRREPAPAVQRGQLPGAQQ

SEQ ID NO: 43228 - protein, 185 aa, Homo sapiens
METFDPTELPELLKLYYRRLFPYSQYYRWLNYGGVIKNYFQHREFSFTLKDDIYIRYQSFNNQSDLEKEMQKMNPYKIDIGAVYSHRPNQHNTVKLGAFQAQEKELVFDIDMTDYDDVRRCCSSADICPKCWTLMTMAIRIIDRALKGKTLDLSIVSGYILEGEVFIVGSVMNQLENCLLQYVLG

SEQ ID NO: 43229 - protein, 387 aa, Homo sapiens
GPALKKADVGFAMGIAGTDVAKEASDIILTDDNFSSIVKAVMWGRNVYDSISKFLQFQLTVNVVAVIVAFTGACITQDSPLKAVQMLWVNLIMDTFASLALATEPPTETLLLRKPYGRNKPLISRTMMKNILGHAVYQLALIFTLLFVGEKMFQIDSGRNAPLHSPPSEHYTIIFNTFVMMQLFNEINARKIHGERNVFDGIFRNPIFCTIVLGTFAIQIVIVQFGGKPFSCSPLQLDQWMWCIFIGLGELVWGQSRIGCLQGPVTSGGIRDRGISNPRRTEGQPRARLMQDELDPPPCPVLTMPRAAPTLQLGKPKLGHRHHPDQQTQVPQGGRQAHTEGGDPGGGAQRGRGGDRPRGAGAAAGPDPVVPRPESDPDTDPRREGVP

SEQ ID NO: 43230 - protein, 98 aa, Homo sapiens
MKNISRYLTDIKPLPPNIKDRLIKIMSMQGQITDSNISEGHAPLPRLEYSGAISAHCNLRCLDLETGFHHVAQAGLELRSSSDPSASASQNAGITDFT

SEQ ID NO: 43231 - protein, 351 aa, Homo sapiens
MPKNKKRNTPHRGSSAGGGGSGAAAATAATAGGQHRNVQPFSDEDASIETMSHCSGYSDPSSFAEDGPEVLDEEGTQEDLEYKLKGLIDLTLDKSAKTRQAALEGIKNALASKMLYEFILERRMTLTDSIERCLKKGKSDEQRAAAALASVLCIQLGPGIESEEILKTLGPILKKIICDGSASMQARQTCATCFGVCCFIATDDITELYSTLECLENIFTKSYLKEKDTTVICSTPNTVLHISSLLAWTLLLTICPINEVKKKLEMHFHKLPSLLSCDDVNMRIAAGESLALLFELARGIESDFFYEDMESLTQMLRALATDGNKHRAKVDKRKQRSVFRDVLRAVESMVG

SEQ ID NO: 43232 - protein, 156 aa, Homo sapiens
MESNLSGLVPAAGLVPALPPAVTLGLTAAYTTLYALLFFSVYAQLWLVLLYGHKRLSYQTVFLALCLLWAALRTTLFSFYFRDTPRANRLGPLPFWLLYCCPVCLQFFTLTLMNLYFAQVVFKAKVKRRPEMSRGLRAPSTSIYLEAKGTSVCQAA

SEQ ID NO: 43233 - protein, 175 aa, Homo sapiens
  MOD_RES (1)..(1): Any amino acid
XLKLVLNCLNFDFIGSSADESADDLCTVQIPTTWRTIFLEPETLDLFFNLYHSLPPLLSQLALSCLVQFASTRRSLFNSPERAKYLGNLIKGVKRILENPQHWEFAPNSVHYLLTLWQRMVASVPFVKSTEPHLLDTYAPEITKAFITSRLDSVAIVVRDHLDDPLDDTATVFQQ

SEQ ID NO: 43234 - protein, 330 aa, Homo sapiens
MIEDSGKRGNTMAERRQLFAEMRAQDLDRIRLSTYRTACKLRFVQKKCNLHLVDIWNVIEALRENALNNLDPNTELNVSRLEAVLSTIFYQLNKRMPTTHQIHVEQSISLLLNFLLAAFDPEGHGKISVFAVKMALATLCGGKIMDKLRYIFSMISDSSGVMVYGRYDQFLREVLKLPTAVFEGPSFGYTEQSARSCFSQQKKVTLNGFLDTLMSDPPPQCLVWLPLLHRLANVENVFHPVECSYCHSESMMGFRYRCQQCHNYQLCQDCFWRGHAGGSHSNQHQMKEYTSWKSPAKKLTNALSKSLSCASSREPLHPMFPDQPEKPLNL

SEQ ID NO: 43235 - protein, 610 aa, Homo sapiens
  MOD_RES (1)..(1): Any amino acid
XDYEVDDGIGVVPPVGYRSSARESKSTTLTVPEQQRTTHHRSRSVSPHRGNDQGKPRSRLPNVPLQRSLDEIHPTRRSRSPTRHHDASRSPVDHRTRDVDSQYLSEQDSELLMLPRAKRGRSAECLHTTRHSRKSERSSIQKQTRKGTASDAERMHRQRSPTQSPPADTSFSSRRGRQLPQVPVRSGSIEQEQEKYNSSTKASLVVEERTRQMKMKVHRFKQTTGSGSSQELDREQYSKYNIHKDQYRSCDNVSAKSSDSDVSDVSAISRTSSASRLSSTSFMSEQSERPRGRISSFTPKMQGRRMGTSGRSIMKSTSVSGEMYTLEHNDGSQSDTAVGTVGAGGKKRRSSLSAKVVAIVSRRSRSTSQLSQTESGHKKLKSTIQRSTETGMAAEMRKMVRQPSRESTDGSINSYSSEGNLIFPGVRLGADSQFSDFLDGLGPAQLVGRQTLATPAMGDIQIGMEDKKGQLEVEVIRARSLTQKPGSKSTPAPYVKVYLLENGACIAKKKTRIARKTLDPLYQQSLVFDESPQGKVLQVIVWGDYGRMDHKCFMGVAQILLEELDLSSMVIGWYKLFPPSSLVDPTLTPLTRRASQSSLESSTGPPCIRS

SEQ ID NO: 43236 - protein, 93 aa, Homo sapiens
MSGGASATGPRRGPPGLEDTTSKKKQKDRANQESKDGDPRKETGSRYVAQAGLEPLASGDPSASASHAAGITGSRHRTRLFFPSSSGSASTPQ

SEQ ID NO: 43237 - protein, 212 aa, Homo sapiens
MKPASISEEELLNLINKLNNDDNVDGLLVQLPLPEHIDERRICNAVSPDKDVDGFHVINVGRMCLDQYSMLPATPWGVWEIIKRTGDATVTISHRYTPKEQLKKHTILADIVISAAGIPNLITADMIKEGAAVIDVGINRVHDPVTAKPKLVGDVDFEGVRQKAGYITPVPGGVGPMTVAMLMKNTIIAAKKVLRLEEREVLKSKELGVATN

SEQ ID NO: 43238 - protein, 61 aa, Homo sapiens
MSVAFAAPRQRGKGEITPAAIQKMLDDNNHLIQCIMDSQNKGKTSECSHHPHRICLWVLEG

SEQ ID NO: 43239 - protein, 407 aa, Homo sapiens
MAAVGRVGSFGSSPPGLSSTYTGGPLGNEIASGNGGAAAGDDEDGQNLWSCILSEVSTRSRSKLPAGKNVLLLVIRDFQEYVEPGEDFPASPQRRNTASQEDKDDSVVLPLGADTLTHNLGIPVLVVCTKCDAISVLEKEHDYRDEHFDFIQSHIRKFCLQYGAALIYTSVKENKNIDLVYKYIVQKLYGFPYKIPAVVVEKDAVFIPAGWDNDKKIGILHENFQTLKAEDNFEDIITKPPVRKFVHEKEIMAEDDQVFLMKLQSLLAKQPPTAAGRPVDASPRVPGGSPRTPNRSVSSNVASVSPIPAGSKKIDPNMKAGATSEGVLANFFNSLLSKKTGSPGGPGVSGGSPAGGAGGGSSGLPPSTKKSGQKPVLDVHAELDRITRKPVTVSPTTPTSPTEGEAS

SEQ ID NO: 43240 - protein, 1806 aa, Homo sapiens
MMNEDAAQKSDSGEKFNGSSQRRKRPKKSDSNASFLRAARAGNLDKVVEYLKGGIDINTCNQNGLNALHLAAKEGHVGLVQELLGRGSSVDSATKKGNTALHIASLAGQAEVVKVLVKEGANINAQSQNGFTPLYMAAQENHIDVVKYLLENGANQSTATEDGFTPLAVALQQGHNQAVAILLENDTKGKVRLPALHIAARKDDTKSAALLLQNDHNADVQSKMMVNRTTESGFTPLHIAAHYGNVNVATLLLNRGAAVDFTARNGITPLHVASKRGNTNMVKLLLDRGGQIDAKTRDGLTPLHCAARSGHDQVVELLLERGAPLLARTKNGLSPLHMAAQGDHVECVKHLLQHKAPVDDVTLDYLTALHVAAHCGHYRVTKLLLDKRANPNARALNGFTPLHIACKKNRIKVMELLVKYGASIQAITESGLTPIHVAAFMGHLNIVLLLLQNGASPDVTNIRGETALHMAARAGQVEVVRCLLRNGALVDARAREEQTPLHIASRLGKTEIVQLLLQHMAHPDAATTNGYTPLHISAREGQVDVASVLLEAGAAHSLATKKGFTPLHVAAKYGSLDVAKLLLQRRAAADSAGKNGYTPLHIAAKKNQMQIASTLLNYGAETNIVTKQGVTPLHLASQEGHTDMVTLLLDKGANIHMSTKSGLTSLHLAAQEDKVNVADILTKHGADQDAHTKLGYTPLIVACHYGNVKMVNFLLKQGANVNAKTKNGYTPLHQAAQQGHTHIINVLLQHGAKPNATTANGNTALAIAKRLGYISVVDTLKVVTEEVTTTTTTITEKHKLNVPETMTEVLDVSDEEGDDTMTGDGGEYLRPEDLKELGDDSLPSSQFLDGMNYLRYSLEGGRSDSLRSFSSDRSHTLSHASYLRDSAVMDDSVVIPSHQVSTLAKEAERNSYRLSWGTENLDNVALSSSPIHSGFLVSFMVDARGGAMRGCRHNGLRIIIPPRKCTAPTRVTCRLVKRHRLATMPPMVEGEGLASRLIEVGPSGAQFLGPVIVEIPHFAALRGKERELVVLRSENGDSWKEHFCDYTEDELNEILNGMDEVLDSPEDLEKKRICRIITRDFPQYFAVVSRIKQDSNLIGPEGGVLSSTVVPQVQAVFPEGALTKRIRVGLQAQPMHSELVKKILGNKATFSPIVTLEPRRRKFHKPITMTIPVPKASSDVMLNGFGGDAPTLRLLCSITGGTTPAQWEDITGTTPLTFVNECVSFTTNVSARFWLIDCRQIQESVTFASQVYREIICVPYMAKFVVFAKSHDPIEARLRCFCMTDDKVDKTLEQQENFAEVARSRDVEVLEGKPIYVDCFGNLVPLTKSGQHHIFSFFAFKENRLPLFVKVRDTTQEPCGRLSFMKEPKSTRGLVHQAICNLNITLPIYTKESESDQEQEEEIDMTSEKNPQDEQERIEERLAYIADHLGFSWTELARELDFTEEQIHQIRIENPNSLQDQSHALLKYWLERDGKHATDTNLVECLTKINRMDIVHLMETNTEPLQERISHSYAEIEQTITLDHSEGFSVLQEELCTAQHKQKEEQAVSKESETCDHPPIVSEEDISVGYSTFQDGVPKTEGDSSATALFPQTHKEQVQQDFSGKMQDLPEESSLEYQQEYFVTTPGTETSETQKAMIVPSSPSKTPEEVSTPAEEEKLYLQTPTSSERGGSPIIQEPEEPSEHREESSPRKTSLVIVESADNQPETCERLDEDAAFEKGDDMPEIPPETVTEEEYIDEHGHTVVKKVTRKIIRRYVSSEGTEKEEIMVQGMPQEPVNIEEGDGYSKVIKRVVLKSDTEQSEDNNE

SEQ ID NO: 43241 - protein, 153 aa, Homo sapiens
MAAVFDLDLETEEGSEGEGEPELSPADACPLAELRAAGLEPVGHYEEVELTETSVNVGPERIGPHCFELLRVLGKGGYGKVFQVRKVQGTNLGKIYAMKVLRKAKIVRNAKDTAHTRAERNILESVKHPFIVELAYAFQTGGKLYLILECLSD

SEQ ID NO: 43242 - protein, 27 aa, Homo sapiens
  MOD_RES (1)..(1): Any amino acid
XELGLREENEGVYNGSWGGRGEDLAMH

SEQ ID NO: 43243 - protein, 170 aa, Homo sapiens
MEDSSTDTEKEEEEEKDEKDQEPIYAIVPTINIQDERFVDLSETPAFIFLHELHAMGKLPGTRMAALKAKYTLLHDAVMSTQESEVQLLQNAKRFTEQIQQQQFHLQQADNFPEAFSTEVSKMREQLLKYQNEYNAVKEREFHNQYRLNSLKEEKIIIVKEFEKITKPGV

SEQ ID NO: 43244 - protein, 73 aa, Homo sapiens
MAAAKVALTKRADPAELRTIFLKYASIEKNGEFFMSPNDFVTRYLNIFGESQPNPKTVELLSGVVDQTKDGGC

SEQ ID NO: 43245 - protein, 107 aa, Homo sapiens
  MOD_RES (1)..(1): Any amino acid
XILTNNDFDIKEVRIMRWFGLVSRTVMHCFWMFFVINYAHITYKNRSQGNIISYKRRISTAEILHSRNKRLSISSGFSGSHLESQYFERQRETSTWLVAGGALVKQV

SEQ ID NO: 43246 - protein, 500 aa, Homo sapiens
MSIDHEQPWQQPVPAGERPAAGPGGLAAAAAGKPAAESTAHAPAPADHDPRARAALPAPKRLHSADGQRRGHWGQPGLCPAPISAHLPPDQVLLFSWRASDEDAADAGVTSHCLQPGHRNMFPPNLVEACFKQFKTQYSTRVVTRTMVRTENGSEPGASMPPPFSVENGTSFLENVTRALGTLQEMLSFEETVPVPGSANGINALGLVVFSVAFGLVIGGMKHKGRVLRDFFDSLNEAIMRLVGIIIWYAPVGILFLIAGKILEMEDMAVLGGQLGMYTLTVIVGLFLHAGIVLPLIYFLVTHRNPFPFIGGMLQALITAMGTSSSSATLPITFRCLEEGLGVDRRITRFVLPVGATVNMDGTALYEALAAIFIAQVNNYELNLGQITTISITATAASVGAAGIPQAGLVTMVIVLTSVGLPTEDITLIIAVDWFLDRLRTMTNVLGDSIGAAVIEHLSQRELELQEAELTLPSLGKPYKSLMAQEKGASRGRGGNESAM

SEQ ID NO: 43247 - protein, 242 aa, Homo sapiens
MEKTQETVQRILLEPYKYLLQLPGKQVRTKLSQAFNHWLKVPEDKLQIIIEVTEMLHNASLLIDDIEDNSKLRRGFPVAHSIYGIPSVINSANYVYFLGLEKVLTLDHPDAVKLFTRQLLELHQGQGLDIYWRDNYTCPTEEEYKAMVLQKTGGLFGLAVGLMQLFSDYKEDLKPLLNTLGLFFQIRDDYANLHSKEYSENKSFCEDLTEGKFSFPTIHAIWSRPESTQVQNILRQRTENID

SEQ ID NO: 43248 - protein, 456 aa, Homo sapiens
MDNMSITNTPTSNDACLSIVHSLMCHRQGGESETFAKRAIESLVKKLKEKKDELDSLITAITTNGAHPSKCVTIQRTLDGRLQVAGRKGFPHVIYARLWRWPDLHKNELKHVKYCQYAFDLKCDSVCVNPYHYERVVSPGIDLSGLTLQSNAPSSMMVKDEYVHDFEGQPSLSTEGHSIQTIQHPPSNRASTETYSTPALLAPSESNATSTANFPNIPVASTTPEYWCSIAYFEMDVQVGETFKVPSSCPIVTVDGYVDPSGGDRFCLGQLSNVHRTEAIERARLHIGKGVQLECKGEGDVWVRCLSDHAVFVQSYYLDREAGRAPGDAVHKIYPSAYIKVFDLRQCHRQMQQQAATAQAAAAAQAAAVAGNIPGPGSVGGIAPAISLSAAAGIGVDDLRRLCILRMSFVKGWGPDYPRQSIKETPCWIEIHLHRALQLLDEVLHTMPIADPQPLD

SEQ ID NO: 43249 - protein, 202 aa, Homo sapiens
MPRWWYNVTDGSCQLFVYGGCDGNSNNYLTKEECLKKCATVTENATGDLATSRNAADSSVPSAPRRQDSEDHSSDMFNYEEYCTANAVTGPCRASFPRWYFDVERNSCNNFIYGGCRGNKNSYRSEEACMLRCFRQQENPPLPLGSKVVVLAGLFVMVLILFLGASMVYLIRVARRNQERALRTVWSSGDDKEQLVKNTYVL

SEQ ID NO: 43250 - protein, 43 aa, Homo sapiens
MLATRVFSLVGKRAISTSVCVRAHESVVKSEDFSLPAYMDRRD

SEQ ID NO: 43251 - protein, 90 aa, Homo sapiens
MKLLLLHPAFQSCLLLTLLGLWRTTPEAHASSLGAPAISAASFLQDLIHRYGEGDSLTLQQLKALLNHLDVGVGRGNVTQHVQGHRNLST

SEQ ID NO: 43252 - protein, 63 aa, Homo sapiens
MVFSNNDEGLINKKLPKELLLRMLFSLLLNFTWSNPECTKYVHSIGLDSFCNVEQGQDNNNKQ

SEQ ID NO: 43253 - protein, 527 aa, Homo sapiens
  MOD_RES (1)..(1): Any amino acid
XHFKISRDRLSASSLTMESFAFLWAGGRASYGVSKGKVCFEMKVTEKIPVRHLYTKDIDIHEVRIGWSLTTSGMLLGEEEFSYGYSLKGIKTCNCETEDYGEKFDENDVITCFANFESDEVELSYAKNGQDLGVAFKISKEVLAGRPLFPHVLCHNCAVEFNFGQKEKPYFPIPEEYTFIQNVPLEDRVRGPKGPEEKKDCEVVMMIGLPGAGKTTWVTKHAAENPGKYNILGTNTIMDKMMVAGFKKQMADTGKLNTLLQRAPQCLGKFIEIAARKKRNFILDQTNVSAAAQRRKMCLFAGFQRKAVVVCPKDEDYKQRTQKKAEVEGKDLPEHAVLKMKGNFTLPEVAECFDEITYVELQKEEAQKLLEQYKEESKKALPPEKKQNTGSKKSNKNKSGKNQFNRGGGHRGRGGFNMRGGNFRGGAPGNRGGYNRRGNMPQRGGGGGGSGGIGYPYPRAPVFPGRGSYSNRGNYNRGGMPNRGNYNQNFRGRGNNRGYKNQSQGYNQWQQGSVHVNVLCGRVKGPN

SEQ ID NO: 43254 - protein, 54 aa, Homo sapiens
MLAQARVPLGDEMTVCQCEALASPGPPAPHMEAEGPVDVRHVQWLMGKLRFRWR

SEQ ID NO: 43255 - protein, 562 aa, Homo sapiens
MSEEDRTFSFGPGTRKLGFMSQLSPACSVTLGKSLPLSGLGVFSSKMDAVPVILASPCQPLCFEEDTCLIYLLPLLIHREPAPAATMASRIGLRMQLMREQAQQEEQRERMQQQAVMHYMQQQQQQQQQQLGGPPTPAINTPVHFQSPPPVPGEVLKVQSYLENPTSYHLQQSQHQKVREYLSETYGNKFAAHISPAQGSPKPPPAASPGVRAGHVLSSSAGNSAPNSPMAMLHIGSNPERELDDVIDNIMRLDDVLGYINPEMQMPNTLPLSSSHLNVYSSDPQVTASLVGVTSSSCPADLTQKRELTDAESRALAKERQKKDNHNLIERRRRFNINDRIKELGMLIPKANDLDVRWNKGTILKASVDYIRRMQKDLQKSRELENHSRRLEMTNKQLWLRIQELEMQARVHGLPTTSPSGMNMAELAQQVVKQELPSEEGPGEALMLGAEVPDPEPLPALPPQAPLPLPTQPPSPFHHLDFSHSLSFGGREDEGPPGYPEPLAPGHGSPFPSLSKKDLDLMLLDDSLLPLASDPLLSTMSPEASKASSRRSSFSMEEGDVL

SEQ ID NO: 43256 - protein, 85 aa, Homo sapiens
TEAASRYNLTISDVSVWGWGARLGHRAAGAGLCSGCAGHCLSHCLGCLSVPPKELRAAGHLSSPGYLPSYERVPHLPHPWALCAP

SEQ ID NO: 43257 - protein, 429 aa, Homo sapiens
  MOD_RES (1)..(1): Any amino acid
XHVLNELIQTERVYVRELYTVLLGYRAEMDNPEMFDLMPPLLRNKKDILFGNMAEIYEFHNDIFLSSLENCAHAPERVGPCFLERKDDFQMYAKYCQNKPRSETIWRKYSECAFFQECQRKLKHRLRLDSYLLKPVQRITKYQLLLKELLKYSKDCEGSALLKKALDAMLDLLKSVNDSMHQIAINGYIGNLNELGKMIMQGGFSVWIGHKKGATKMKDLARFKPMQRHLFLYEKAIVFCKRRVESGEGSDRYPSYSFKHCWKMDEVGITEYVKGDNRKFEIWYGEKEEVYIVQASNVDVKMTWLKEIRNILLKQQELLTVKKRKQQDQLTERDKFQISLQQNDEKQQGAFISTEETELEHTSTVVEVCEAIASVQAEANTVWTEASQSAEISEEPAEWSSNYFYPTYDENEEENRPLMRPVSEMALLY

SEQ ID NO: 43258 - protein, 517 aa, Homo sapiens
  MOD_RES (1)..(1): Any amino acid
XELVQREAEASRRCMELEKYVEELAAVRQTLQTDLETSIRRIADLQAALEEVASSDSDTERDNVSILSSQPEGSLQSWLSCTLSLATDTMRTPSRQSATSSRILSPRINEEAGDTERTQSALALSRARSTNVHSKTSGDKPVSPHFVRRQKYCHFGDGEVLAVQRKSTERLEPASSPLASRSTNTSPLSREKLPSPSAALSEFVEGLRRKRAQRGQGSTLGLEDWPTLPIYQTTGASTLRRGRAGSDEGNLSLRVGAKSPLEIEGAAGGLLRSTSLKCISSDGVGGTTLLPEKSKTQFSSCESLLESRPSMGRKLSSPTTPRDMLLSPTLRPRRRCLESSVDDAGCPDLGKEPLVFQNRQFAHLMEEPLGSDPFSWKLPSLDYERKTKVDFDDFLPAIRKPQTPTSLAGSAKGGQDGSQRSSIHFETEEANRSFLSGIKTILKKSPEPKEDPAHLSDSSSSSGSIVSFKSADSIKSRPGIPRLAGDGGERTSPERREPGTGRKDDDVASIMKKYLQK

SEQ ID NO: 43259 - protein, 658 aa, Homo sapiens
MEVKGPSGRSFCCESEGQFKSCLKRHTPSLLLPSSWKGNSGSCLMAEALHRTSPTPNSCPLPLPLCRMSGVLCSRNLFTFKFSLFQLDSGASGEPGHSLGLTLGFSYCGNCQTAVVSAQPEGMASNGAYPVLGPGVTANPGTSLSVFTALPFTTPAPGPAHGPLLVTAGAPPGGPLVLSTFPSTPLVTEQDGCSPSGAGASNVFVQMRTEVGPVKAAQAQTLVLTQAPLVWQAPGALCGGVVCPPPLLLAAAPVVPVMAAQVVGGTQACEGGWSQGLPLPPPPPPAAQLPPIVSQGNAGPWPQGAHGESSLASSQAKAPPDDSCNPRSVYENFRLWQHYKPLARRHLPQSPDTEALSCFLIPVLRSLARRKPTMTLEEGLWRAMREWQHTSNFDRMIFYEMAEKFLEFEAEEEMQIQKSQWMKGPQCLPPPATPRLEPRGPPAPEVVKQPVYLPSKAGPKAQTACLPPPRPQRPVTKARRPPPQPHRRAETKARLPPPRPQRPAETKVPEEIPPEVVQEYVDIMEELLGPSLGATGEPEKQREEGKVKQPQEEDWTPPDPGLLSYIDKLCSQKDFVTKVEAVIHPQFLEELLSPDPQMDFLALSQDLEQEEGLTLAQVPQGQEGPGTQGPPDCLIPPAGDARLLGEPLWSGKMQVQRE

SEQ ID NO: 43260 - protein, 11 aa, Homo sapiens
MDVLAEANGTF

SEQ ID NO: 43261 - protein, 269 aa, Homo sapiens
ISLVSFLVERLLHIIIDDNKRTQIVTEIISEIRAPIVTVGVNNDPADVRKKELKMAEIKVKLIEAKEALENCITLQDFNRASELKEEIKALEDARINLLKETEQLEIKEVHIEKVQNDAETLQKCLILCYELLKQMSISTGLSATMNGIIESLILPGIISIHPVVRNLAVLCLGCCGLQNQDFARKHFVLLLQVLQIDDVTIKISALKAIFDQLMTFGIEPFKTKKIKTLHCEGTEINSDDEQESKEVEETATAKNVLKLLSDFLDSEV

SEQ ID NO: 43262 - protein, 170 aa, Homo sapiens
MFPSRRKAAQLPWEDGRSGLLSGGLPRKCSVFHLFVACLSLGFFSLLWLQLSCSGDVARAVRGQGQETSGPPRACPPEPPPEHWEEDASWGPHRLAVLVPFRERFEELLVFVPHMRRFLSRKKIRHHIYVLNQVDHFSLAHPAQVQPGSAHQRGLPGEQQQHGLHCHARR

SEQ ID NO: 43263 - protein, 135 aa, Homo sapiens
MASGVQVADEVCRIFYDMKVRKCSTPEEIKKRKKAVIFCLSADKKCIIVEEGKEILVGDVGVTITDPFKHFVGMLPEKDCRYALYDASFETKESRKEELMFFLWAPELAPLKSKMIYASSKDAIKKKFQGKCTHS

SEQ ID NO: 43264 - protein, 80 aa, Homo sapiens
MSSASGLRRGHPAGGEENMTETDAFYKREMFDPAEKYKMDHRRRGIALIFNHERFFWHLTLPERRGTCADRDNLTRSVNC

SEQ ID NO: 43265 - protein, 331 aa, Homo sapiens
MLLLINVILTLWVSCANGQEVKPCDFPEIQHGGLYYKSLRRLYFPAAAGQSYSYYCDQNFVTPSGSYWDYIHCTQDGWLPTVPCLRTCSKSDIEIENGFISESSSIYILNKEIQYKCKPGYATADGNSSGSITCLQNGWSAQPICIKFCDMPVFENSRAKSNGMRFKLHDTLDYECYDGYEISYGNTTGSIVCGEDGWSHFPTCYNSSEKCGPPPPISNGDTTSFLLKVYVPQSRVEYQCQSYYELQGSNYVTCSNGEWSEPPRCIHPCIITEENMNKNNIQLKGKSDIKYYAKTGDTIEFMCKLGYNANTSVLSFQAVCREGIVEYPRCE

SEQ ID NO: 43266 - protein, 69 aa, Homo sapiens
  MOD_RES (1)..(1): Any amino acid
XSEIPDKEFQNVMTYLTSIPSLQDAGIGFILVIDRRRDKWTSVKASVLRIALRARCTESEPLHPGGSGI

SEQ ID NO: 43267 - protein, 66 aa, Homo sapiens
MDITKPVQIKDAYSKVAAMLQDRGLWAVINNAGVLGFPTDGELLLMTDYKQCMAVNFFGTVEVTKT

SEQ ID NO: 43268 - protein, 80 aa, Homo sapiens
MSFPKYKPSSLRTLPETLDPAEYNISPETRRAQAERLAIRAQLKREYLLQYNDPNRRGLIDRKEKLIQEGKLDRTFHLSY

SEQ ID NO: 43269 - protein, 117 aa, Homo sapiens
MKLNERSLAFYATCDAPVDNAGFLYKKGGRHAAYHRRWFVLRGNMLFYFEDAASREPVGVIILEGCTVELVEAAEEFAFAVRFAGTRARTYVLAAESQDAMEGWVKALSRASFDYLR

SEQ ID NO: 43270 - protein, 124 aa, Homo sapiens
MDVGSKEVLMESPPVLEMSIGAPEAQQRLALSEHLVTTATFSIGSTGLVVYDYQQLLIAYKPAPGTCCYIMKIAPESIPSLEALTRKVHNFQAKPAVPTSKLGQAEGRDAGSAPSGGDPAFLGM

SEQ ID NO: 43271 - protein, 190 aa, Homo sapiens
MAGTARHDREMAIQAKKKLTTATDPIERLRLQCLARGSAGIKGLGRVFRIMDDDNNRTLDFKEFMKGLNDYAVVMEKEEVEELFRRFDKDGNGTIDFNEFLLTLRPPMSRARKEVIMQAFRKLDKTGDGVITIEDLREVYNAKHHPKYQNGEWSEEQVFRKFLDNFDSPYDKDGLVTPEEFMNYYAGVSA

SEQ ID NO: 43272 - protein, 222 aa, Homo sapiens
LGASGVSGLTALILLLVEATSVLLPTDIKFGIVFDAGSSHTSLFLYQWLANKENGTGVVSQALACQVEGPGISSYTSNAAQAGESLQGCLEEALVLIPEAQHRKTPTFLGATAGMRLLSSHPGPGPVSRGLLGCRAPGRAGRRCLWLDHCQLRLGDAGQVLLHWRMDPASGGDAGGCPGHGRGLHPDHVRAWGPHLGQEHPGRFSPLRLRLQRLHSQLPVLW

SEQ ID NO: 43273 - protein, 106 aa, Homo sapiens
MDTDLYDEFGNYIGPELDSDEDDDELGRETKDLDEMDDDDDDDDVGDHDDDHPGMEVVLHEDKKYYPTAEEVYGPEVETIVQEEDTQPLTEPIIKPVKTKKFTLME

SEQ ID NO: 43274 - protein, 250 aa, Homo sapiens
MTTKNLETKVTVTSSPIRGAGDGMETEEPPKSVEVTSGVQSRKHHSLQSPWKKAVPSESPGVLQLGKMLTEKAMEVKAVRILVPKAAITHDIPNKNTKVKSLGHHKGEFLGQSEGVIEPNKELSEVKNVLEKLKNSERRLLQDKEGLSNQLRVQTEVNRELKKLLVASVGDDLQYHFERLAREKNQLILENEALGRNTAQLSEQLERMSIQCDVWRSKFLASRVMADELTNSRAALQRQNRDAHGAIQDL

SEQ ID NO: 43275 - protein, 189 aa, Homo sapiens
  MOD_RES (1)..(1): Any amino acid
XDEEEEPQAPQESTPAPPKKDIKGSYVSIHSSGFRDFLLKPELLRAIVDCGFEHPSEVQHECIPQAILGMDVLCQAKSGMGKTAVFVLATLQQIEPVNGQVTVLVMCHTRELAFQISKEYERFSKYMPSVKDEEVLKKNCPHVVVGTPGRILALVRNRSFSLKNVKHFVLDECDKMLEQLDMRRDVQEI

SEQ ID NO: 43276 - protein, 150 aa, Homo sapiens
DAEQPRGPSGAERGGLELGDAGAAGQLVLTNPWNIMIKHRQVQRRGRRSQMTTSFTDPAISMDLLRAVLQPSINEEIQTVFNKYMKFFQKAALNVRDNVGEEVDAEQLIQEACRSCLEQVRGGSSYHGPIWYHGDEHPAASLPLWCGQEA

SEQ ID NO: 43277 - protein, 729 aa, Homo sapiens
MAAFSEMGVMPEIAQAVEEMDWLLPTDIQAESIPLILGGGDVLMAAETGSGKTGAFSIPVIQIVYETLKDQQEGKKGKTTIKTGASVLNKWQMNPYDRGSAFAIGSDGLCCQSREVKEWHGCRATKGLMKGKHYYEVSCHDQGLCRVGWSTMQASLDLGTDKFGFGFGGTGKKSHNKQFDNYGEEFTMHDTIGCYLDIDKGHVKFSKNGKDLGLAFEIPPHMKNQALFPACVLKNAELKFNFGEEEFKFPPKDGFVALSKAPDGYIVKSQHSGNAQVTQTKFLPNAPKALIVEPSRELAEQTLNNIKQFKKYIDNPKLRELLIIGGVAARDQLSVLENGVDIVVGTPGRLDDLVSTGKLNLSQVRFLVLDEADGLLSQGYSDFINRMHNQIPQVTSDGKRLQVIVCSATLHSFDVKKLSEKIMHFPTWVDLKGEDSVPDTVHHVVVPVNPKTDRLWERLGKSHIRTDDVHAKDNTRPGANSPGEYAVRAIKEHKMDQAIIFCRTKIDCDNLEQYFIQQGGGPDKKGHQFSCVCLHGDRKPHERKQNLERFKKGDVRFLICTDVAARGIDIHGVPYVINVTLPDEKQNYVHRIGRVGRAERMGLAISLVATEKEKVWYHVCSSRGKGCYNTRLKEDGGCTIWYNEMQLLSEIEEHLNCTISQVEPDIKVPVDEFDGKVTYGQKRAAGGGSYKGHVDILAPTVQELAALEKEAQTSFLHLGYLPNQLFRTF

SEQ ID NO: 43278 - protein, 186 aa, Homo sapiens
MRWTPAAADICFTKELHSHFFSLGKCVPVCRGAEFFQAENEGKGVLDTGRHMPGAGKRREKGDGVYQKGMDFILEKLNHGDWVHIFPEGIGRLIAECHLNPIILPLWHVGMNDVLPNSPPYFPRFGQKITVLIGKPFSALPVLERLRAENKSAVEMRKALTDFIQEEFQHLKTQAEQLHNHLQPGR

SEQ ID NO: 43279 - protein, 113 aa, Homo sapiens
MSSFSESALEKKLSELSNSQQSVQTLSLWLIHHRKHAGPIVSVWHRELRKAKSNRKLTFLYLANDVIQNSKRKGPEFTREFESVLVDAFSHVASNRREEISETNFSANSGGGG

SEQ ID NO: 43280 - protein, 1137 aa, Homo sapiens
MPPLRPIRKSRREPSFKRSQRRKSQPLPKALRCLPQEDPSTSHQSLWLLAEFSCSDHSTKQAGDTDDPPRITQNPVINGNVALSDGHNTAEEDMEDDTSWRSEATFQFTVERFSRLSESVLSPPCFVRNLPWKIMVMPRFYPDRPHQKSVGFFLQCNAESDSTSWSCHAQAVLKIINYRDDEKSFSRRISHLFFHKENDWGFSNFMAWSEVTDPEKGFIDDDKVTFEVFVQADAPHGVAWDSKKHTGYVGLKNQGATCYMNSLLQTLFFTNQLRKAVYMMPTEGDDSSKSVPLALQRVFYELQHSDKPVGTKKLTKSFGWETLDSFMQHDVQELCRVLLDNVENKMKGTCVEGTIPKLFRGKMVSYIQCKEVDYRSDRREDYYDIQLSIKGKKNIFESFVDYVAVEQLDGDNKYDAGEHGLQEAEKGVKFLTLPPVLHLQLMRFMYDPQTDQNIKINDRFEFPEQLPLDEFLQKTDPKDPANYILHAVLVHSGDNHGGHYVVYLNPKGDGKWCKFDDDVVSRCTKEEAIEHNYGGHDDDLSVRHCTNAYMLVYIRESKLSEVLQAVTDHDIPQQLVERLQEEKRIEAQKRKERQEAHLYMQVQIVAEDQFCGHQGNDMYDEEKVKYTVFKVLKNSSLAEFVQSLSQTMGFPQDQIRLWPMQARSNGTKRPAMLDNEADGNKTMIELSDNENPWTIFLETVDPELAASGATLPKFDKDHDVMLFLKMYDPKTRSLNYCGHIYTPISCKIRDLLPVMCDRAGFIQDTSLILYEEVKPNLTERIQDYDVSLDKALDELMDGDIIVFQKDDPENDNSELPTAKEYFRDLYHRVDVIFCDKTIPNDPGFVVTLSNRMNYFQVAKTVAQRLNTDPMLLQFFKSQGYRDGPGNPLRHNYEGTLRDLLQFFKPRQPKKLYYQQLKMKITDFENRRSFKCIWLNSQFREEEITLYPDKHGCVRDLLEECKKAVELGEKASGKLRLLEIVSYKIIGVHQEDELLECLSPATSRTFRIEEIPLDQVDIDKENEMLVTVAHFHKEVFGTFGIPFLLRIHQGEHFREVMKRIQSLLDIQEKEFEKFKFAIVMMGRHQYINEDEYEVNLKDFEPQPGNMSHPRPWLGLDHFNKAPKRSRYTYLEKAIKIHN

SEQ ID NO: 43281 - protein, 1242 aa, Homo sapiens
MGAASGRRGPGLLLPLPLLLLLPPQPALALDPGLQPGNFSADEAGAQLFAQSYNSSAEQVLFQSVAASWAHDTNITAENARRQEEAALLSQEFAEAWGQKAKELYEPIWQNFTDPQLRRIIGAVRTLGSANLPLAKRQQYNALLSNMSRIYSTAKVCLPNKTATCWSLDPDLTNILASSRSYAMLLFAWEGWHNAAGIPLKPLYEDFTALSNEAYKQDGFTDTGAYWRSWYNSPTFEDDLEHLYQQLEPLYLNLHAFVRRALHRRYGDRYINLRGPIPAHLLGDMWAQSWENIYDMVVPFPDKPNLDVTSTMLQQGWNATHMFRVAEEFFTSLELSPMPPEFWEGSMLEKPADGREVVCHASAWDFYNRKDFRIKQCTRVTMDQLSTVHHEMGHIQYYLQYKDLPVSLRRGANPGFHEAIGDVLALSVSTPEHLHKIGLLDRVTNDTESDINYLLKMALEKIAFLPFGYLVDQWRWGVFSGRTPPSRYNFDWWYLRTKYQGICPPVTRNETHFDAGAKFHVPNVTPYIRYFVSFVLQFQFHEALCKEAGYEGPLHQCDIYRSTKAGAKLRKVLQAGSSRPWQEVLKDMVGLDALDAQPLLKYFQPVTQWLQEQNQQNGEVLGWPEYQWHPPLPDNYPEGIDLVTDEAEASKFVEEYDRTSQVVWNEYAEANWNYNTNITTETSKILLQKNMQIANHTLKYGTQARKFDVNQLQNTTIKRIIKKVQDLERAALPAQELEEYNKILLDMETTYSVATVCHPNGSCLQLEPDLTNVMATSRKYEDLLWAWEGWRDKAGRAILQFYPKYVELINQAARLNGYVDAGDSWRSMYETPSLEQDLERLFQELQPLYLNLHAYVRRALHRHYGAQHINLEGPIPAHLLGNMWAQTWSNIYDLVVPFPSAPSMDTTEAMLKQGWTPRRMFKEADDFFTSLGLLPVPPEFWNKSMLEKPTDGREVVCHASAWDFYNGKDFRIKQCTTVNLEDLVVAHHEMGHIQYFMQYKDLPVALREGANPGFHEAIGDVLALSVSTPKHLHSLNLLSSEGGSDEHDINFLMKMALDKIAFIPFSYLVDQWRWRVFDGSITKENYNQEWWSLRLKYQGLCPPVPRTQGDFDPGAKFHIPSSVPYIRYFVSFIIQFQFHEALCQAAGHTGPLHKCDIYQSKEAGQRLATAMKLGFSRPWPEAMQLITGQPNMSASAMLSYFKPLLDWLRTENELHGEKLGWPQYNWTPNSGTATHPTSSLGS

SEQ ID NO: 43282 - protein, 62 aa, Homo sapiens
MAEPGHSHHLSARVRGRTERRIPRLWRLLLWAGTAFQVTQGTGPELHACKEPSPATPGSFWI

SEQ ID NO: 43283 - protein, 588 aa, Homo sapiens
  MOD_RES (1)..(1): Any amino acid
XGGGAEGRSAWAVGPVGGAGEEGFRGWEVEHGGNGWAIEKNLTPVPGAPSQTCFVTSFEWCSKRQLVDLVMEGVWQELLDSAQIEICVADWWGARENCGCVYQLRVRLLDVYEKEVVKFSASPDPVLQWTERGCRQVSHVFTNFGKGIRYVSFEQYGRDISTWQELRQLQEQIRSLEEEKAAVTEAVRALLANQDSGEVQQDPKYQGLRARGREIRKELVHLYPREAQLEEQFYLQALKLPNQTHPDVPVGDESQARVLHMVGDKPVFSFQPRGHLEIGEKLDIIRQKRLSHVSGHRSYYLRGAGALLQHGLVNFTFNKLLRRGFTPMTVPDLLRGAVFEGCGMTPNANPSQIYNIDPARFKDLNLAGTAEVGLAGYFMDHTVAFRDLPVRMVCSSTCYRAETNTGQEPRGLYRVHHFTKVEMFGVTGPGLEQSSQLLEEFLSLQMEILTELGLHFRVLDMPTQELGLPAYRKFDIEAWMPGRGRFGEVTSASNCTDFQSRRLHIMFQTEAGELQFAHTVNATACAVPRLLIALLESNQQKDGSVLVPPALQSYLGTDRITAPTHVPLQYIGPNQPRKPGLPGQPAVS

SEQ ID NO: 43284 - protein, 80 aa, Homo sapiens
MDFNGLADPYVKLHLLPGACKANKLKTKTQRNTLNPVWNEDLTYSGITDDDITHKVLRIAVCDEDKLSHNEFIGEIRVPL

SEQ ID NO: 43285 - protein, 83 aa, Homo sapiens
MSSCNFTHATFVLIGIPGLEKAHFWVGFPLLSMYVVAMFGNCIVVFIVRTERSLHAPMYLFLCMLAAIDLALSTSTMPKILAL

SEQ ID NO: 43286 - protein, 82 aa, Homo sapiens
MPAIMTMLADHAARQLLDFSQKLDINLLDNVVNCLYHGEGAQQRMAQEVLTHLKEHPDAWTRVDTILEFSQNMNTKVSKWWF

SEQ ID NO: 43287 - protein, 167 aa, Homo sapiens
MEADLSGFNIDAPRWDQRTFLGRVKHFLNITDPRTVFVSERELDWAKVMVEKSRMGVVPPGTQVEQLLYAKKLYDSAFHPDTGEKMNVIGRMSFQLPGGMIITGFMLQFYRTMPAVIFWQWVNQSFNALVNYTNRNAASPTSVRQMALSYFTATTTAVATAVGMNML

SEQ ID NO: 43288 - protein, 97 aa, Homo sapiens
  MOD_RES (1)..(1): Any amino acid
XDKDGSKVTTVVATPGQGPDRPQEVSYTDTKVIGNGSFGVVYQAKLCDSGELVAIKKVLQDKRFKVLGTPTREQIREMNPNYTEFKFPQIKAHPWTK

SEQ ID NO: 43289 - protein, 181 aa, Homo sapiens
MAKATSGAAGLRLLLLLLLPLLGKDVAEEAGCPLSCAVSKRRLECEECGGLGSPTGRCEWRQGDGKGITRNFSTCSPSTKTCPDGHCDVVETQDINICPQDCLRGSIVGGHEPGEPRGIKAGYGTCNCFPEEEKCFCEPEDIQDPLCDELCRTVIAAAVLFSFIVSVLLSAFCIHCYHKFA

SEQ ID NO: 43290 - protein, 19 aa, Homo sapiens
QANVPSALPSLPAGSGCVI

SEQ ID NO: 43291 - protein, 145 aa, Homo sapiens
  MOD_RES (1)..(1): Any amino acid
XIFQKELNESENSVFQAVYGLQRALQGDYKDVVNMKESSRQRLEALREAAIKEETEYMELLAAEKHQVEALKNMQHQNQSLSMLDEILEDVRKAADRLEEEIEEHAFDDNKSVSVPEQLLLHLLSHSLIRRHVVEIVHVYVFNVD

SEQ ID NO: 43292 - protein, 175 aa, Homo sapiens
  MOD_RES (1)..(1): Any amino acid
XDSGNWIEIAYGTSSGGVRVIVQHPETVGSGPQLFQTFTVHRSPVTKIMLSEKHLISAGGLTEQELMEQLEHCELAPPAPSAPSWGCLPSPSPRISLTSLHSASSNTSLSGHRGSPSPPQAEARRRGGGSFVERCQELVRSGPDLRRPPTPAPWPSSGLGTPLTPPKMKLNETSF

SEQ ID NO: 43293 - protein, 79 aa, Homo sapiens
MDKGRERMAAAAAAAAAAAAAAQCRSPRCAAERRGFRRELDSWRHRLMHCVGFESILEGLYGPRLRRDLSLFEGLYTIS

SEQ ID NO: 43294 - protein, 695 aa, Homo sapiens
MAFSKGFRIYHKLDPPPFSLIVETRHKEECLMFESGAVAVLSSAEKEAIKGTYSKVLDAYGLLGVLRLNLGDTMLHYLVLVTGCMSVGKIQESEVFRVTSTEFISLRIDSSDEDRISEVRKVLNSGNFYFAWSASGISLDLSLNAHRSMQEQTTDNRFFWNQSLHLHLKHYGVNCDDWLLRLMCGGVEIRTIYAAHKQAKACLISRLSCERAGTRFNVRGTNDDGHVANFVETEQVVYLDDSVSSFIQIRGSVPLFWEQPGLQVGSHRVRMSRGFEANAPAFDRHFRTLKNLYGKQIIVNLLGSKEGEHMLSKAFQSHLKASEHAADIQMVNFDYHQMVKGGKAEKLHSVLKPQVQKFLDYGFFYFNGSEVQRCQSGTVRTNCLDCLDRTNSVQAFLGLEMLAKQLEALGLAEKPQLVTRFQEVFRSMWSVNGDSISKIYAGTGALEGKAKAGKLKDGARSVTRTIQNNFFDSSKQEAIDVLLLGNTLNSDLADKARALLTTGSLRASSKVLKSMCENFYKYSKPKKIRVCVGTWNVNGGKQFRSIAFKNQTLTDWLLDAPKLAGIQEFQDKRSKPTDIFAIGFEEMVELNAGNIVSASTTNQKLWAVELQKTISRDNKYVLLASEQLVGVCLFVFIRPQHAPFIRDVAVDTVKTGMGGATGNKGAVAIRMLFHTTSLCFVCSHFAAGQSQVKER

SEQ ID NO: 43295 - protein, 132 aa, Homo sapiens
MASFGWKRKIGEKVSKVTSQQFEAEAADEKDVVDNDEGNWLHAIKRRKEILLEGCAEKSKQLKDEGASLAENKRVSLCLCHPGWNSWTPAIASQVAWKLGLTSMCYHTWLILYIYTFFFNGDRVSLCFPSLS

SEQ ID NO: 43296 - protein, 96 aa, Homo sapiens
FKGHKCSPCDTNWRYYGDSCYGFFRHNLTWEESKQYCTDMNATLLKIDNRNIVEYIKARTHLIRWVGLSRQKSNEVWKWEDGSVISENMKTQIMIF

SEQ ID NO: 43297 - protein, 1207 aa, Homo sapiens
  MOD_RES (1)..(1): Any amino acid
XPLDDEYDKAMAPQQGLLDKIKDEPDNAQEYSHGQQQKTQEGELKISAVFSVSGSPLAPQLTTGFQPSLASSGMNKMLPSVPATAVRVSCSGCKKILQKGQTAYQRKGSTQLFCSTLCLTGYTVPPARPPPPLTKKTCSSCSKDILNPKDVISAQFENTTTSKDFCSQSCLSTYELKKKPIVTINTNSISTKCSMCQKNAVIRHEVNYQNVVHKLCSDACFSKFRSANNLTMNCCENCGGYCYSGSGQCHMLQIEGQSKKFCSSSCITAYKQNLFNKPTGMNSSVVPLSQGQVIVSIPTGSTVSAGGGSTSAVSPTSISSSAAAGLQRLAAQSQHVGFARSVVKLKCQHCNRLFATKPELLDYKGKMFQFCGKNCSDEYKKINNVMAMCEYCKIEKIVKETVRFSGADKSFCSEGCKLLYKHDLAKRWGNHCKMCSYCLQTSPKLVQNNLGGKVEEFCCEECMSKYTVLFYQMAKCDACKRQGKLSESLKWRGEMKHFCNLLCILMFCNQQSVCDPPSQNNAANISMVQAASAGPPSLRKDSTPVIANVVSLASAPAAQPTVNSNSVLQGAVPTVTAKIIGDASTQTDALKLPPSQPPRLLKNKALLCKPITQTKATSCKPHTQNKECQTDTPSQPQIIVVPVPVPVFVPIPLHLYTQYAPVPFGIPVPMPVPMLIPSSMDSEDKVTESIEDIKEKLPTHPFEADLLEMAEMIAEDEEKKTLSQGESQTSEHELFLDTKIFEKDQGSTYSGDLESEAVSTPHSWEEELNHYALKSNAVQEADSELKQFSKGETEQDLEADFPSDSFDPLNKGQGIQARSRTRRRHRDGFPQPRRRGRKKSIVAVEPRSLIQGAFQGCSVSGMTLKYMYGVNAWKNWVQWKNAKEEQGDLKCGGVEQASSSPRSDPLGSTQDHALSQESSEPGCRVRSIKLKEDILSCTFAELSLGLCQFIQEVRRPNGEKYDPDSILYLCLGIQQYLFENGRIDNIFTEPYSRFMIELTKLLKIWEPTILPNGYMFSRIEEEHLWECKQLGAYSPIVLLNTLLFFNTKYFQLKNVTEHLKLSFAHVMRRTRTLKYSTKMTYLRFFPPLQKQESEPDKLTVGKRKRNEDDEVPVGVEMAENTDNPLRCPVRLYEFYLSKCSESVKQRNDVFYLQPERSCVPNSPMWYSTFPIDPGTLDTMLTRILMVREVHEELAKAKSEDSDVELSD

SEQ ID NO: 43298 - protein, 173 aa, Homo sapiens
MDSFKVVLEGPAPWGFRLQGGKDFNVPLSISRLTPGGKAAQAGVAVGDWVLSIDGENAGSLTHIEAQNKIRACGERLSLGLSRAQPVQSKPQKASAPAADPPRYTFAPSVSLNKTARPFGAPPPADSAPQQNGQPLRPLVPDASKQRLMENTEDWRPRPGTGQSRSFRILAHL

SEQ ID NO: 43299 - protein, 88 aa, Homo sapiens
MKKAEMGRFSISPDEDSSSYSSNSDFNYSYPTKQAALKSHYADVDPENQNFLLESNLGKKKYETEFNSLDICVNIFPVFCSSPFEDCQ

SEQ ID NO: 43300 - protein, 868 aa, Homo sapiens
MPVRKQDTQRALHLLEEYRSKLSQTEDRQLRSSIERVINIFQSNLFQALIDIQEFYEVTLLDNPKCIDRSKPSEPIQPVNTWEISSLPSSTVTSETLPSSLSPSVEKYRYQDEDTPPQEHISPQITNEVIGPELVHVSEKNLSEIENVHGFVSHSHISPIKANPPPVLVNTDSLETPTYVNGTDADYEYEEITLERGNSGLGFSIAGGTDNPHIGDDSSIFITKIITGGAAAQDGRLRVNDCILRVNEVDVRDVTHSKAVEALKEAGSIVRLYVKRRKPVSEKIMEIKLIKGPKGLGFSIAGGVGNQHIPGDNSIYVTKIIEGGAAHKDGKLQIGDKLLAVNNVCLEEVTHEEAVTALKNTSDFVYLKVAKPTSMYMNDGYAPPDITNSSSQPVDNHVSPSSFLGQTPASPARYSPVSKAVLGDDEITREPRKVVLHRGSTGLGFNIVGGEDGEGIFISFILAGGPADLSGELRKGDRIISVNSVDLRAASHEQAAAALKNAGQAVTIVAQYRPEEYSRFEAKIHDLREQMMNSSISSGSGSLRTSQKRSLYVRALFDYDKTKDSGLPSQGLNFKFGDILHVINASDDEWWQARQVTPDGESDEVGVIPSKRSSHSMTSVKRTSFPENSPSTRTRTRVSRKQVMLTEIPDDMGSKGLSGQEEYVLSYEPVNQQEVNYTRPVIILGPMKDRINDDLISEFPDKFGSCVPHTTRPKRDYEVDGRDYHFVTSREQMEKDIQEHKFIEAGQYNNHLYGTSVQSVREVAEKGKHCILDVSGNAIKRLQIAQLYPISIFIKPKSMENIMEMNKRLTEEQARKTFERAMKLEQEFTEHFTAIVQGDTLEDIYNQVKQIIEEQSGSYIWVPAKEKL

SEQ ID NO: 43301 - protein, 155 aa, Homo sapiens
  MOD_RES (1)..(1): Any amino acid
XESRNTEMLAAACAVGVGCCFAAPIGGVLFSIEVTSTFFAVRNYWRGFFAATFSAFIFRVLAVWNRDEETITALFKTRFRLDFPFDLQELPAFAVIGIASGFGGALFVYLNRKIVQTPALPGSGDPAHLHADLPPWLWTVHGWTALTERDAGHPV

SEQ ID NO: 43302 - protein, 925 aa, Homo sapiens
MAAHGKLRRERGLQAEYETQVKEMRWQLSEQLRCLELQGELRRELLQELAEFMRRRAEVELEYSRGLEKLAERFSSRGGRLGSSREHQSFRKEPSLLSPLHCWAVLLQHTRQQSRESAALSEVLAGPLAQRLSHIAEDVGRLVKKAKKTYQAYHMESVNAEAKLREAERQEEKRAGRSVPTTTAGATEAGPLRKSSLKKGGRLVEKRQAKFMEHKLKCTKARNEYLLSLASVNAAVSNYYLHDVLDLMDCCDTGFHLALGQVLRSYTAAESRTQASQVQGLGSLEEAVEALDPPGDKAKVLEVHATVFCPPLRFDYHPHDGDEVAEICVEMELRDEILPRAQNIQSRLDRQTIETEEVNKTLKATLQALLEVVASDDGDVLDSFQTSPSTESLKSTSSDPGSRQAGRRRGQQQETETFYLTKLQEYLSGRSILAKLQAKHEKLQEALQRGDKEEQEVSWTQYTQRKFQKSRQPRPSSQYNQRLFGGDMEKFIQSSGQPVPLVVESCIRFINLNGLQHEGIFRVSGAQLRVSEIRDAFERGEDPLVEGCTAHDLDSVAGVLKLYFRSLEPPLFPPDLFGELLASSELEATAERVEHVSRLLWRLPAPVLVVLRYLFTFLNHLAQYSDENMMDPYNLAVCFGPTLLPVPAGQDPVALQGRVNQLVQTLIVQPDRVFPPLTSLPGPVYEKCMAPPSASCLGDAQLESLGADNEPELEAEMPAQEDDLEGVVEAVACFAYTGRTAQELSFRRGDVLRLHERASSDWWRGEHNGMRGLIPHKYITLPAGTEKQVVGAGLQTAGESGSSPEGLLASELVHRPEPCTSPEAMGPSGHRRRCLVPASPEQHVEVDKAVAQNMDSVFKELLGKTSVRQGLGPASTTSPSPGPRSPKAPPSSRLGRNKGFSRGPGAPASPSASHPQGLDTTPKPH

SEQ ID NO: 43303 - protein, 160 aa, Homo sapiens
MPASAARPRPGPGQPTASPFPLLLLAVLSGPVSGRVPRSVPRTSLPISEADSCLTRFAVPHTYNYSVLLVDPASHTLYVGARDTIFALSLPFSGERPRRIDWMVPEAHRQNCRKKGKKEDECHNFVQILAIANASHLLTCGTFAFDPKCGVIGGSSMLPL

SEQ ID NO: 43304 - protein, 154 aa, Homo sapiens
  MOD_RES (1)..(1): Any amino acid
XQNRAVARTAQNERSSRSHSVFQLQISGEHSSRGLQCGAPLSLVDLAGSERLDPGLALGPGERERLRETQAINSSLSTLGLVIMALSNKESHVPYRNSKLTYLLQNSLGGSAKMLMFVNISPLEENVSESLNSLRFASKVRLPPVSLVRTRGWL

SEQ ID NO: 43305 - protein, 247 aa, Homo sapiens
MAQNLKDLAGRLPAGPRGMGTALKLLLGAGAVAYGVRESVFTVEGGHRAIFFNRIGGVQQDTILAEGLHFRVVPGCTPLHRAYREEHEGENAWERVFGLDQPLLTSISDLQMVNISLRVLSRPNAQELPSMYQRLGLDYEERVLPSIVNEVLKSVVAKFNASQLITQRAQVSLLIRRELTERAKDFSLILDDVAITELSFSREYTAAVEAKQVAQQEAQRAQFLVEKAKQEQRQKIVQAEGEAEAAK

SEQ ID NO: 43306 - protein, 155 aa, Homo sapiens
MTELPAPLSYFQNAQMSEDNHLSNTVRSQNDNRERQEHNDRRSLGHPEPLSNGRPQGNSRQVVEQDEEEDEELTLKYGAKHVIMLFVPVTLCMVVVVATIKSVSFYTRKDGQLIYTPFTEDTETVGQRALHSILNAAIMISVIVVMTILLVVLYK

SEQ ID NO: 43307 - protein, 479 aa, Homo sapiens
MRRTRRPRVLLCQPGWNVVAQSELTAALTCQTQAIFSLLSSWDYRFVLMNKMDDLNLHYRFLNWRRRIREIREVRAFRYQERFKHILVDGDTLSYHGNSGEVGCYVASRPLTKDSNYFEVSIVDSGVRGTIAVGLVPQYYSLDHQPGWLPDSVAYHADDGKLYNGRAKGRQFGSKCNSGDRIGCGIEPVSFDVQTAQIFFTKNGKRVGSTIMPMSPDGLFPAVGMHSLGEEVRLHLNAELGREDDSVMMVDSYEDEWGRLHDVRVCGTLLEYLGKGKSIVDVGLAQARHPLSTRSHYFEVEIVDPGEKCYIALGLARKDYPKNRHPGWSRGSVAYHADDGKIFHGSGVGDPFGPRCYKGDIMGCGIMFPRDYILDSEGDSDDSCDTVILSPTARAVRNVRNVMYLHQEGEEEEEEEEEEEDGEEIEPEHEGRKVVVFFTRNGKIIGKKDAVVPSGGFFPTIGMLSCGEKVKVDLHPLSG

SEQ ID NO: 43308 - protein, 517 aa, Homo sapiens
MLLYPAGFSFASLKSDLSKAMSQDGASQFQEVIRQELELSVKKELEKILTTASSHEFEHTKKDLDGFRKLFHRFLQEKGPSVDWGKIQRPPEDSIQPYEKIKARGLPDNISSVLNKLVVVKLNGGLGTSMGCKGPKSLIGVRNENTFLDLTVQQIEHLNKTYNTDVPLVLMNSFNTDEDTKKILQKYNHCRVKIYTFNQSRYPRINKESLLPVAKDVSYSGENTEAWYPPGHGDIYASFYNSGLLDTFIGEGKEYIFVSNIDNLGATVDLYILNHLMNPPNGKRCEFVMEVTNKTRADVKGGTLTQYEGKLRLVEIAQVPKAHVDEFKSVSKFKIFNTNNLWISLAAVKRLQEQNAIDMEIIVNAKTLDGGLNVIQLETAVGAAIKSFENSLGINVPRSRFLPVKTTSDLLLVMSNLYSLNAGSLTMSEKREFPTVPLVKLGSSFTKVQDYLRRFESIPDMLELDHLTVSGDVTFGKNVSLKGTVIIIANHGDRIDIPPGAVLENKIVSGNLRILDH

SEQ ID NO: 43309 - protein, 193 aa, Homo sapiens
MVKEPVEDTDPSTLSFNMSDKYPIQDTELPKAEECDTITLNCPRNSDMKNQGEENGFPDSTGDPLPEISKDNSCKENCTCSSCLLRAPTISDLLNDQDLLDVIRIKLDPCHPTVKNWRNFASKWGMSYDELCFLEQRPQSPTLEFLLRNSQRTVGQLMELCRLYHRADVEKVLRRWVDEEWPKRERGDPSRHF

SEQ ID NO: 43310 - protein, 165 aa, Homo sapiens
MWQLWASLCCLLVLANARSRPSFHPLSDELVNYVNKRNTTWQAGHNFYNVDMSYLKRLCGTFLGGPKPPQRVMFTEDLKLPASFDAREQWPQCPTIKEIRDQGSCGSCWAFGAVEAISDRICIHTNAHVSVEVSAEDLLTCCGSMCGDGCNGGYPAEAWNFWTRK

SEQ ID NO: 43311 - protein, 251 aa, Homo sapiens
MAEAAAAAGGTGLGAGASYGSAADRDRDPDPDRAGRRLRVLSGHLLGRPREALSTNECKARRAASAATAAPTATPAAQESGTIPKKRQEVMKWNGWGYNDSKFIFNKKGQIELTGKRYPLSGMGLPTFKEWIQNTLGVNVEHKTTSKASLNPSDTPPSVVNEDFLHDLKETNISYSQEADDRVFRAHGHCLHEIFLLREGMFERIPDIVLWPTCHDDVVKIVNLACKYNLCIIPIGGRRNKCFIWPDVSCR

SEQ ID NO: 43312 - protein, 426 aa, Homo sapiens
MPAGRRGPAAQSARRPPPLLPLLLLLCVLGAPRAGSGAHTAVISPQDPTLLIGSSLLATCSVHGDPPGATAEGLYWTLNGRRLPPELSRVLNASTLALALANLNGSRQRSGDNLVCHARDGSILAGSCLYVGLPPEKPVNISCWSKNMKDLTCRWTPGAHGETFLHTNYSLKYKLRWYGQDNTCEEYHTVGPHSCHIPKDLALFTPYEIWVEATNRLGSARSDVLTLDILDVVTTDPPPDVHVSRVGGLEDQLSVRWVSPPALKDFLFQAKYQIRYRVEDSVDWKVVDDVSNQTSCRLAGLKPGTVYFVQVRCNPFGIYGSKKAGIWSEWSHPTAASTPRSERPGPGGGACEPRGGEPSSGPVRRELKQFLGWLKKHAYCSNLSFRLYDQWRAWMQKSHKTRNQHRTRGSCPRADGARREVLPDKL

SEQ ID NO: 43313 - protein, 105 aa, Homo sapiens
MEMKKKINLELRNRSPEEQITYLDGFDQEDNEAPDSEEEDDEDGDEDDEEEEENEAGPPEGYEEEEEEEEEEDEDEDEDEDEAGSELGEGEEEVGLSYLMKEEIQ

SEQ ID NO: 43314 - protein, 81 aa, Homo sapiens
MATNWGSLLQDKQQLEELARQAVDRALAEGVLLRTSQEPTSSECPAGASLCCADGLQPASGCCQPERCLPGANSFQHHQTG

SEQ ID NO: 43315 - protein, 55 aa, Homo sapiens
MASPDPPATSYAPSDVPSGVALFLTIPFAFFLPELFFAFIATLLYILHAFSIYYH

SEQ ID NO: 43316 - protein, 144 aa, Homo sapiens
MATSGAASAELVIGWCIFGLLLLAILAFCWIYVRKYQSRRESEVVSTITAIFSLAIALITSALLPVDIFLVSYMKNQNGTFKDWANANVSRQIEDTVLYGYYTLYSVILFCVFFWIPFVYFYYEEKDDDDTSKCTCLCSIECSQ

SEQ ID NO: 43317 - protein, 135 aa, Homo sapiens
MSQDTEVDMKEVELNELEPEKQPMNAASGAAMSLAGAEKNGLVKIKVAEDEAEAAAAAKFTGLSKEELLKVAGSPGWVRTRWALLLLFWLGWLGMLAGAVVIIVRAPRCRELPAQKWWHTGALYRIGDLQAFQGH

SEQ ID NO: 43318 - protein, 240 aa, Homo sapiens
DVDLGQLEQESCLDGWEFSQDVYLSTIVTEQDSGAYNAMKNRMGKKPALCLPAQWNLVCEDDWKAPLTISLFFVGVLLGSFISGQLSDRFGRKNVLFVTMGMQTGFSFLQIFSKNFEMFVVLFVLVGMGQISNYVAAFVLGTEILGKSVRIIFSTLGVCIFYAFGYMVLPLFAYFIRDWRMLLVALTMPGVLCVALWWFIPESPRWLISQGRFEEAEVIIRKAAKANGIVVPSTIFDPSE

SEQ ID NO: 43319 - protein, 97 aa, Homo sapiens
MQTSSSRSVHLSEWQKNYFAITSGICTGPKADAYRAQILRIQYAWANSEISQVCATKLFKKYAEKYSAIIDSDNVESGLNNYAENILTLAGSQQTDS

SEQ ID NO: 43320 - protein, 242 aa, Homo sapiens
MSLRCGDAARTLGPRVFGRYFCSPVRPLSSLPDKKKELLQNGPDLQDFVSGDLADRSTWDEYKGNLKRQKGERNPKILVECLTPDFRGDLKAIEKVALSGLDVYAHNVETVPELQSKVRDPRANFDQSLRVLKHAKKVQPDVISKTSIMLGLGENDEQVYATMKALREADVDCLTLGQYMQPTRRHLKVEEYITPEKFKYWEKVGNELGFHYTASGPLVRSSYKAGEFFLKNLVAKRKTKDL

SEQ ID NO: 43321 - protein, 130 aa, Homo sapiens
MSGDPDVLEYYKNDHSKKPLRIINLNFCEQVDAGLTFNKKELQDSFVFDIKTSERTFYLVAETEEDMNKWVQSICQICGFNQAEESTDSLRNVSSAGHGPRSSPAELSSSSQHLLRERKSSAPSHSSQPT

SEQ ID NO: 43322 - protein, 176 aa, Homo sapiens
MVIKVFVATSSGSIAIRKKQQEVVGFLEANKIDFKELDIAGDEDNRRWMRENVPGEKKPQNGIPLPPQIFNEEQYCGDFDSFFSAKEENIIYSFLGLAPPPDSKGSEKAEEGGETEAQKEGSEDVGNLPEAQEKNEEEGETATEETEEIAMEGAEGEAEEEEETAEGEEPGEDEDS

SEQ ID NO: 43323 - protein, 74 aa, Homo sapiens
  MOD_RES (1)..(1): Any amino acid
XSHESMESYELRSENALSLSTSSIGKPVMTTDFANATPWFMDTMLPIIATSGSAEGPNETEGRKKISFFLEAGT

SEQ ID NO: 43324 - protein, 111 aa, Homo sapiens
MKQIFFLDDSGPPFGHMVLALGGYLGGFDGNFLWNRIGAEYSSNVPVWSLRLLPALAGALSVPMAYQIVLELHFSHCAAMGAALLMLIENALITQSRLMLLESVLIFFNLL

SEQ ID NO: 43325 - protein, 84 aa, Homo sapiens
MLLSVTSRPGISTFGYNRNNKKPYVSLAQQMAPPSPSNSTPNSSSGSNGNDQLSKTNLYIRGLQPGTTDQDLVKLCQPLWLCRF

SEQ ID NO: 43326 - protein, 32 aa, Homo sapiens
  MOD_RES (1)..(1): Any amino acid
XHVGRHCLRAHFSPQLCIRKVSFCRPGWSVVA

SEQ ID NO: 43327 - protein, 402 aa, Homo sapiens
MLMRLVLTVRSNLIPSPPTYNSAHDYISWESFSNVSYYTRILPSVPKDCPTPMGTKGKKQLPDAQLLARRFLLRRKFIPDPQGTNLMFAFFAQHFTHQFFKTSGKMGPGFTKALGHGVDLGHIYGDNLERQYQLRLFKDGKLKYQVLDGEMYPPSVEEAPVLMHYPRGIPPQSQMAVGQEVFGLLPGLMLYATLWLREHNRVCDLLKAEHPTWGDEQLFQTTRLILIGETIKIVIEEYVQQLSGYFLQLKFDPELLFGVQFQYRNRIAMEFNHLYHWHPLMPDSFKIGGGRNMDHHILHVAVDVIRESREMRLQPFNEYRKRFGMKPYTSFQELVGEKEMAAELEELYGDIDALEFYPGLLLEKCHPNSIFGESMIEIGAPFSLKGLLGNPICSPEYWKPST

SEQ ID NO: 43328 - protein, 53 aa, Homo sapiens
MMLGSPTSPKPGVNAQFLPGFLMGDLPAPVTPQPRSISGPSVGVMEMRSPLLA

SEQ ID NO: 43329 - protein, 54 aa, Homo sapiens
MDSFDLALLQEWDLESLWGEDILNQRNDSLVVEFQSSASRCRSVYEPDRNALRR

SEQ ID NO: 43330 - protein, 1381 aa, Homo sapiens
MRDPNNQLHVIKNLKIAVSNIVTQPPQPGAIRKLLNDVVSGSQPAEGLVANVITAGDYDLNISATTPWFESYRETFLQSMPALDHEFLNHYLACMLVASSSEAEPVEQFSKLSQEQHRIQHNSDYSYPKWFIPNTLKYYVLLHDVSAGDEQRAESIYEEMKQKYGTQGCYLLKINSRTSNRASDEQIPDPWSQYLQKNSIQNQESYEDGPCTITSNKNSDNNLLSLDGLDNEVKDGLPNNFRAHPLQLEQSSDPSNSIDGPDHLRSASSLHETKKGNTGIIHGACLTLTDHDRIRQFIQEFTFRGLLPHIEKTIRQLNDQLISRKGLSRSLFSATKKWFSGSKVPEKSINDLKNTSGLLYPPEAPELQIRKMADLCFLVQHYDLAYSCYHTAKKDFLNDQAMLYAAGALEMAAVSAFLQPGAPRPYPAHYMDTAIQTYRDICKNMVLAERCVLLSAELLKSQSKYSEAAALLIRLTSEDSDLRSALLLEQAAHCFINMKSPMVRKYAFHMILAGHRFSKAGQKKHALRCYCQAMQVYKGKGWSLAEDHINFTIGRQSYTLRQLDNAVSAFRHILINESKQSAAQQGAFLREYLYVYKNVSQLSPDGPLPQLPLPYINSSATRVFFGHDRRPADGEKQAATHVSLDQEYDSESSQQWRELEEQVVSVVNKGVIPSNFHPTQYCLNSYSDNSRFPLAVVEEPITVEVAFRNPLKVLLLLTDLSLLWKFHPKDFSGKDNEEVKQLVTSEPEMIGAEVISEFLINGEESKVARLKLFPHHIGELHILGVVYNLGTIQGSMTVDGIGALPGCHTGKYSLSMSVRGKQDLEIQGPRLNNTKEEKTSVKYGPDRRLDPIITEEMPLLEVFFIHFPTGLLCGEIRKAYVEFVNVSKCPLTGLKVVSKRPEFFTFGGNTAVLTPLSPSASENCSAYKTVVTDATSVCTALISSASSVDFGIGTGSQPEVIPVPLPDTVLLPGASVQLPMWLRGPDEEGVHEINFLFYYESVKKQPKIRHRILRHTAIICTSRSLNVRATVCRSNSLENEEGRGGNMLVFVDVENTNTSEAGVKEFHIVQVSSSSKHWKLQKSVNLSENKDTKLASREKGKFCFKAIRCEKEEAATQSSEKYTFADIIFGNEQIISSASPCADFFYRSLSSELKKPQAHLPVHTEKQSTEDAVRLIQKCSEVDLNIVILWKAYVVEDSKQLILEGQHHVILRTIGKEAFSYPQKQEPPEMELLKFFRPENITVSSRPSVEQLSSLIKTSLHYPESFNHPFHQKSLCLVPVTLLLSNCSKADVDVIVDLRHKTTSPEALEIHGSFTWLGQTQYKLQLKSQEIHSLQLKACFVHTGVYNLGTPRVFAKLSDQVTVFETSQQNSMPALIIISNV

SEQ ID NO: 43331 - protein, 83 aa, Homo sapiens
AKYLTKKTQAASVEAVKMLDEILLQLSQPLHPCMFPLATAYSTLQLVTNPYQATIDGVRFLGTSGQNVSDIFRYSSMEDHLEI

SEQ ID NO: 43332 - protein, 126 aa, Homo sapiens
MDSLAESRWPPGLAVMKTIDDLLRCGICFEYFNIAMIIPQCSHNYCSLCIRKFLSYKTQCPTCCVTVTEPDLKNNRILDELESSAAVCFRVTSQISCFFLFKESCCQSIYSCSLQTVFKAGEQVNG

SEQ ID NO: 43333 - protein, 657 aa, Homo sapiens
MGTWMGLLNNKVGTFKFIYVDVLSEDEEKPKRPTRRRRKGRPPQPKSVEDLLDRINLKEHMPTFLFNGYEDLDTFKLLEEEDLDELNIRDPEHRAVLLTAVELLQEYDSNSDQSGSQEKLLVDSQGLSGCSPRDSGCYESSENLENGKTRKASLLSAKSSTEPSLKSFSRNQLGNYPTLPLMKSGDALKQGQEEGRLGGGLAPDTSKSCDPPGVTGLNKNRRSLPVSICRSCETLEGPQTVDTWPRSHSLDDLQVEPGAEQDVPTEVTEPPPQIVPEVPQKTTASSTKAQPLEQDSAVDNALLLTQSKRFSEPQKLTTKKLEGSIAASGRGLSPPQCLPRNYDAQPPGAKHGLARTPLEGHRKGHEFEGTHHPLGTKEGVDAEQRMQPKIPSQPPPVPAKKSRERLANGLHPVPMGPSGALPSPDAPCLPVKRGSPASPTSPSDCPPALAPRPLSGQAPGSPPSTRPPPWLSELPENTSLQEHGVKLGPALTRKVSCARGVDLETLTENKLHAEGIDLTEEPYSDKHGRCGIPEALVQRYAEDLDQPERDVAANMDQIRVKQLRKQHRMAIPSGGLTEICRKPVSPGCISSVSDWLISIGLPMYAGTLSTAGFSTLSQVPSLSHTCLQEAGITEERHIRKLLSAARLFKLPPGPEAM

SEQ ID NO: 43334 - protein, 410 aa, Homo sapiens
MVQRDMSKSPPTAAAAVAQEIQMELLENVAPAGALGAAAQSYGKGARRKNRFKGSDGSTSSDTTSNSFVRQGSADSYTSRPSDSDVSLEEDREAVRREAERQAQAQLEKAKTKPVAFAVRTNVSYSAAHEDDVPVPGMAISFEAKDFLHVKEVLQRLIKSRGKSQAKHLNVQMVAADKLAQCPPELFDVILDENQLEDACEHLADYLEAYWKATHPPSSSLPNPLLSRTLATSSLPLSPTLASNSQGSQGDQRTDRSAPIRSASQAEEEPSVEPVKKSQHRSSSSAPHHNHRSGTSRGLSRQETFDSETQESRDSAYVEPKEDYSHDHVDHYASHRDHNHRDETHGSSDHRHRESRHRSRDVDREQDHNECNKQRSRHKSKDRYCEKDGEVISKKRNEAGEWNRDVYIRQ

SEQ ID NO: 43335 - protein, 373 aa, Homo sapiens
MNHPFGKEEAASQKQLFGFFCECLRRGEWELAQACVPQLQEGQGDIPKRVEDILQALVVCPNLLRCGQDINPQRVAWVWLLVLEKWLAREKKLLPVVFRRKLEFLLLSEDLQGDIPENILEELYETLTQGAVGHVPDGNPRRESWTPRLSSEAVSVLWDLLRQSPQPAQALLELLLEEDDGTGLCHWPLQNALVDLIRKALRALQGPDSVPPGVVDAIYGALRTLRCPAEPLGVELHLLCEELLEACRTEGSPLREERLLSCLLHKASRGLLSLYGHTYAEKVTEKPPRATASGKVSPDHLDPERAMLALFSNPNPAEAWKVAYFYCLSNNKHFLEQILSFPRHPGWSGVARSRLIATSASWVQAILLPQPPK

SEQ ID NO: 43336 - protein, 30 aa, Homo sapiens
KHQTKHTAESLKTKFNVEKPLDVLLTSGFK

SEQ ID NO: 43337 - protein, 1668 aa, Homo sapiens
MSYDVLFQRTELGALEIWRQLICAHVCICVGWLYLRDRVCSKKDIILRTEQNSGRTILIKAVTEKNFETKDFRASLENGVLLCDLINKLKPGVIKKINRLSTPIAGLDNINVFLKACEQIGLKEAQLFHPGDLQDLSNRVTVKQEETDRRVKNVLITLYWLGRKAQSNPYYNGPHLNLKAFENLLGQALTKALEDSSFLKRSGRDSGYGDIWCPERGEFLAPPRHHKREDSFESLDSLGSRSLTSCSSDITLRGGREGFESDTDSEFTFKMQDYNKDDMSYRRISAVEPKTALPFNRFLPNKSRQPSYVPAPLRKKKPDKHEDNRRSWASPVYTEADGTFSSNQRRIWGTNVENWPTVQGTSKSSCYLEEEKAKTRSIPNIVKDDLYVRKLSPVMPNPGNAFDQFLPKCWTPEDVNWKRIKRETYKPWYKEFQGFSQFLLLQALQTYSDDILSSETHTKIDPTSGPRLITRRKNLSYAPGYRRDDLEMAALDPDLENDDFFVRKTGAFHANPYVLRAFEDFRKFSEQDDSVERDIILQCREGELVLPDLEKDDMIVRRIPAQKKEVPLSGAPDRYHPVPFPEPWTLPPEIQAKFLCVLERTCPSKEKSNSCRILVPSYRQKKDDMLTRKIQSWKLGTTVPPISFTPGPCSEADLKRWEAIREASRLRHKKRLMVERLFQKIYGENGSKSMSDVSAEDVQNLRQLRYEEMQKIKSQLKEQDQKWQDDLAKWKDRRKSYTSDLQKKKEEREEIEKQALEKSKRSSKTFKEMLQDRESQNQKSTVPSRRRMYSFDDVLEEGKRPPTMTVSEASYQSERVEEKGATYPSEIPKEDSTTFAKREDRVTTEIQLPSQSPVEEQSPASLSSLRSRSTQMESTRVSASLPRSYRKTDTVRLTSVVTPRPFGSQTRGISSLPRSYTMDDAWKYNGDVEDIKRTPNNVVSTPAPSPDASQLASSLSSQKEVAATEEDVTRLPSPTSPFSSLSQDQAATSKATLSSTSGLDLMSESGEGEISPQREVSRSQDQFSDMRISINQTPGKSLDFGFTIKWDIPGIFVASVEAGSPAEFSQLQVDDEIIAINNTKFSYNDSKEWEEAMAKAQETGHLVMDVRRYGKAGSPETKWIDATSGIYNSEKSSNLSVTTDFSESLQSSNIESKEINGIHDESNAFESKASESISLKNLKRRSQFFEQGSSDSVVPDLPVPTISAPSRWVWDQEEERKRQERWQKEQDRLLQEKYQREQEKLREEWQRAKQEAERENSKYLDEELMVLSSNSMSLTTREPSLATWEATWSEGSKSSDREGTRAGEEERRQPQEEVVHEDQGKKPQDQLVIERERKWEQQLQEEQEQKRLQAEAEEQKRPAEEQKRQAEIERETSVRIYQYRRPVDSYDIPKTEEASSGFLPGDRNKSRSTTELDDYSTNKNGNNKYLDQIGNMTSSQRRSKKEQVPSGAELERQQILQEMRKRTPLHNDNSWIRQRSASVNKEPVSLPGIMRRGESLDNLDSPRSNSWRQPPWLNQPTGFYASSSVQDFSRPPPQLVSTSNRAYMRNPSSSVPPPSAGSVKTSTTGVATTQSPTPRSHSPSASQSGSQLRNRSVSGKRICSYCNNILGKGAAMIIESLGLCYHLHCFKCVACECDLGGSSSGAEVRIRNHQLYCNDCYLRFKSGRPTAM

SEQ ID NO: 43338 - protein, 65 aa, Homo sapiens
  MOD_RES (1)..(1): Any amino acid
XIWMCGGKLFIIPCSRVGHIFRKRRPYGSPEGQDTMTHNSLRLAHVWLDEYKTQPTHADPPGSFP

SEQ ID NO: 43339 - protein, 319 aa, Homo sapiens
  MOD_RES (1)..(1): Any amino acid
XLAPPPALPPKQRQLSENASEEAGEGEYVNLYSSGQSSEELAPSRGEPPAGKDGHPRDPSAVSGVPGKDSRDGSERAPKSPDALESAQSEEEVDELSLIDHNEIMSRLTLKQEGDDGPDVRGGSGDILLVHATETDRKDLVLYCEAFLTTYRTFISPEELIKKLQYRYEKFSPFADTFKKRVSKNTFFVLVRVVDELCLVELTEEILKLLMELVFRLVCNGELSLARVLRKNILDKVDQKKLLRCATSSQPLAARGVAARPGTLHDFHSHEIAEQLTLLDAELFYKIEIPEVLLWAKEQNEEKSPNLTQFTEHFNNMSY

SEQ ID NO: 43340 - protein, 329 aa, Homo sapiens
MAEGERQPPPDSSEEAPPATQNFIIPKKEIHTVPDMGKWKRSQVPFGTVAYADYIGFILTLNEGVKGKKLTFEYRVSEAIEKLVALLNTLDRWIDETPPVDQPSRFGNKAYRTWYAKLDEEAENLVATVVPTHLAAAVPEVAVYLKESVGNSTRIDYGTGHEAAFAAFLCCLCKIGVLRVDDQIAIVFKVFNRYLEVMRKLQKTYRMEPAGSQGVWGLDDFQFLPFIWGSSQLIDHPYLEPRHFVDEKAVNENHKDYMFLECILFITEMKTGPFAEHSNQLWNISAVPSWSKVNQGLIRMYKAECLEKFPVIQHFKFGSLLPIHPVTSG

SEQ ID NO: 43341 - protein, 103 aa, Homo sapiens
MARGPLAARGLRLLLPLLPLLPLLPLPQVGRAAFSLGSATAGRVPARTTPLPGSPLSPQVALGFADGSCDPSDQCPPQARWSSLWHVGLILLAVLLLLLCGVT

SEQ ID NO: 43342 - protein, 142 aa, Homo sapiens
MGPGPSRAPRAPRLMLCALALMVAAGGCVVSAFNLDTRFLVVKEAGNPGSLFGYSVALHRQTERQQRYLLLAGAPRELAVPDGYTNRTGAVYLCPLTAHKDDCERMNITVKNDPGHHIIEDMWLGVTVASQGPAGRVLETAT

SEQ ID NO: 43343 - protein, 296 aa, Homo sapiens
MPYLGSEDVVKELKKALCNPHIQADRLRYRNVIQRVIRMPGVQEYIQQPILNGLRDKASYVRRVAVLGCAKMHNLHGDSEVDGALVNELYSLLRDQDPIVVVNCLRSLEEILKQEGGVVINKPIAHHLLNRMSKLDQWGQAEVLNFLLRYQPRSEEELFDILNLLDSFLKSSSPGVVMGATKLFLILAKMFPHVQTDVLVRVKGPLLAACSSESRELCFVALCHVRQILHSLPGHFSSHYKKFFCSYSEPHYIKLQKVEVLCELVNDENVQQVLEELRGYCTDVSADFAQAAIFAI

SEQ ID NO: 43344 - protein, 212 aa, Homo sapiens
MRPEDRMFHIRAVILRALSLAFLLSLRGAGAIKADHVSTYAAFVQTHRPTGEFMFEFDEDEMFYVDLDKKETVWHLEEFGQAFSFEVTVFPKEPVELGQPNTLICHIDKFFPPVLNVTWLCNGELVTEGVAESLFLPRTDYSFHKFHYLTFVPSAEDFYDCRVEHWGLDQPLLKHWEAQEPIQMPETTETVLCALGLVLGLVGIIVGTVLII

SEQ ID NO: 43345 - protein, 505 aa, Homo sapiens
GTDSIKMENGQSTAAKLGLPPLTPEQQEALQKAKKYAMEQSIKSVLVKQTIAHQQQQLTNLQMAAQRQRALAIMCRVYVGSIYYELGEDTIRQAFAPFGPIKSIDMSWDSVTMKHKGFAFVEYEVPEAAQLALEQMNSVMLGGRNIKVGRPSNIGQAQPIIDQLAEEARAFNRIYVASVHQDLSDDDIKSVFEAFGKIKSCTLARDPTTGKHKGYGFIEYEKAQSSQDAVSSMNLFDLGGQYLRVGKAVTPPMPLLTPATPGGLPPAAAVAAAAATAKITAQEAVAGAAVLGTLGTPGLVSPALTLAQPLGTLPQAVMAAQAPGVITGVTPARPPIPVTIPSVGVVNPILASPPTLGLLEPKKEKEEEELFPESERPEMLSEQEHMSISGSSARHMVMQKLLRKQESTVMVLRNMVDPKDIDDDLEGEVTEECGKFGAVNRVIIYQEKQGEEEDAEIIVKIFVEFSIASETHKAIQALNGRWFAGRKVVAEVYDQERFDNSDLSA

SEQ ID NO: 43346 - protein, 259 aa, Homo sapiens
MILYWSPKYFRAPGVWEVPWLDRQTQATTLVHQIFGGYLRSRVKCSVCKSVSDTYDPYLDVALEIRQAANIVRALELFVKADVLSGENAYMCAKCKKKVPASKRFTIHRTSNVLTLSLKRFANFSGGKITKDVGYPEFLNIRPYMSQNNGDPVMYGLYAVLVHSGYSCHAGHYYCYVKASNGQWYQMNDSLVHSSNVKVVLNQQAYVLFYLRIPGSKKSPEGLISRTGSSSLPGRPSVIPDHSKKNIGNGIISSPLTGK

SEQ ID NO: 43347 - protein, 162 aa, Homo sapiens
MDDFKTMFPNMDYDIIECVLRANSGAVDATIDQLLQMNLEGGGSSGGVYEDSSDSEDSIPPEILERTLEPDSSDEEPPPVYSPPAYHMHVFDRPYPLAPPTPPPRIDALGSGAPTSQRRYRNWNPPLLGNLPDDFLRILPQQLDSIQGNAGGPKPGSGEGCP

SEQ ID NO: 43348 - protein, 163 aa, Homo sapiens
MASESGKLWGGRFVGAVDPIMEKFNASIAYDRHLWEVDVQGSKAYSRGLEKAGLLTKAEMDQILHGLDKVAEEWAQGTFKLNSNDEDIHTANERRLKELIGATAGKLHTGRSRNDQVVTDLRLWMRQTCSTLSGLLWELIRTMVDRAEATQLWGHHSQQHGCH

SEQ ID NO: 43349 - protein, 94 aa, Homo sapiens
MFSTVTHKGPDRAIIPEMEWTSQALLTVDIVDSGNLVEITVFGRPRVQNRVKSMLLCLAWFHREHRARAEKMKHLEKNLKAHASDPHSPQDPVA

SEQ ID NO: 43350 - protein, 145 aa, Homo sapiens
MAVSDALLPSFSTFASGPAGREKTLRQAGAPNNLMPPGSCMPEEPKPKRGRRSWPRKRTATHTCDYAGCGKTYTKSSHLKAHLRTHTGEKPYHCDWDGCGWKFARSDELTRHYRKHTGHRPFQCQKCDRAFSRSDHLALHMKRHF

SEQ ID NO: 43351 - protein, 131 aa, Homo sapiens
MAPRSLLLLLSGALALTDTWAGSHSLRYFSTAVSRPGRGEPRYIAVEYVDDTQFLRFDSDAAIPRMEPREPWVEQEGPQYWEWTTGYAKANAQTDRVALRNLLRRYNQSEAGSHTLQGMNGCDMGPDGRLL

SEQ ID NO: 43352 - protein, 66 aa, Homo sapiens
  MOD_RES (1)..(1): Any amino acid
XENDDSKSPGKGRKKIRKILKDDKLRTETQNALKEEEERRKRIAEREREREKLREVTNFFLLLFLL

SEQ ID NO: 43353 - protein, 98 aa, Homo sapiens
MEIQLSVPWAIESLYLTLKTTNLTRCPWPLGTTSSAWGCPRMAASLSSSMKGAMRCWSAWSAGLCCTTSTSRALCTVCPSPLMAGSLLSQRVTLPRCI

SEQ ID NO: 43354 - protein, 47 aa, Homo sapiens
MSQDTEVDMKEAAAAAKFTGLSKEELLKVAGSPGWVRTRWALLLLFW

SEQ ID NO: 43355 - protein, 31 aa, Homo sapiens
MEQKPSKVECGSDPEENSARSPDGKRKRKNG

SEQ ID NO: 43356 - protein, 138 aa, Homo sapiens
MQTSETGSDTGSTVTLQTSVASQAAVPTQVVQQVPVQQQVQQVQTVQQVQHVYPAQVQYVEGSDTVYTNGAIRTTTYPYTETQMYSQNTGGNYFDTQGSSAQVTTVVSSHSMVGTGGIQMGVTGGQLISSSGGTYLIG

SEQ ID NO: 43357 - protein, 133 aa, Homo sapiens
MSTFFSDTAWICLAVPTVLCGTVFCKYKKSSGQLWSWMVCLAGLCAVCLLILSPFWGLILFSVSCFLMYTYLSGQELLPVDQKAVLVTGLWAVINNAGVLGFPTDGELLLMTDYKQCMAVNFFGTVEVTKTFL

SEQ ID NO: 43358 - protein, 156 aa, Homo sapiens
MASTDYSTYSQAAAQQGYSAYTAQPTQGYAQTTQQAYGQQSYGTYGQPTDVSYTQAQTTATYGQTAYATSYGQPPTVEGTSTGYTTPTAPQAYSQPVQGYGTGAYDTTTATVTTTQASYAAQSAYGTQPAYPAYGQQPAATAPTRPQDGNKPTETS

SEQ ID NO: 43359 - protein, 123 aa, Homo sapiens
MADAAATAGAGGSGTRSGSKQSTNPADNYHLARRRTLQVVVSSLLTEAGFESAEKASVETLTEMLQSYISEIGRSAKSYCEHTARTQPTLSDIVVTLVEMGFNVDTLPAYAKRSQRMVITARK

SEQ ID NO: 43360 - protein, 122 aa, Homo sapiens
MASPRTRKVLKEVRVQDENNVCFECGAFNPQWVSVTYGIWICLECSGRHRGLGVHLSFVRSVTMDKWKDIELEKMKAGGNAKFREFLESQEDYDPCWSLQEKYNSRAAALFRDKVVALAEGR

SEQ ID NO: 43361 - protein, 82 aa, Homo sapiens
MPKSGFTKPIQSENSDSDSNMVEKPYGRKSKDKIASYSKTPKIERSDVSKEMKEKSSMKRKLPFTISPSRNEERDSDTELTG

SEQ ID NO: 43362 - protein, 93 aa, Homo sapiens
MTMGDMKTPDFDDLLAAFDIPDMVDPKAAIESGHDDHESHMKQNAHGEDDSHAPSSSDVGVSVIVKNVRNIDSSEGGEKDGHNPTGNGLHNGF

SEQ ID NO: 43363 - protein, 210 aa, Homo sapiens
MEEEEAKRIAEMGKPVLGEHPKLEVIIEESYEFKTTVDKLIKKTNLALVVGTHSWRDQFMEAITVSAAGDEDEDESGEERLPSCFDYVMHFLTVFWKVLFACVPPTEYCHGWACFAVSILIIGMLTAIIGDLASHFGCTIGLKDSVTAVVFVAFGTSVPGESERCLNLQRGFYLVQMTPGLHLIIFHTISDLNLTEPLPLKCTKVNQRDE

SEQ ID NO: 43364 - protein, 275 aa, Homo sapiens
METWSVEQVCSWLVEKNLGELVHRFQEEEVSGAALLALNDRMVQQLVKKIGHQAVLMDLIKKYKQNTQGLKSPENPKKAALVMQTEAAREDEESSSPARHGEQMPSFYPAENLDNGLIDQRVLKQRRNVKQILARSKALQWTKSYVLPEFPYDVKCMLAEQKCPDHSMRIRIIEFLQADMTKYLEGSLYPSTQQYNDVVNALLQAHPFLDEDGCGFFLWKRALKDRFKYVRRPIEDDEQVIRNKCKFGHRRGQTRKSLADIRFDEIKLVQIKLSA

SEQ ID NO: 43365 - protein, 150 aa, Homo sapiens
  MOD_RES (1)..(1): Any amino acid
XFVSADYTRAQELDALDNSHPIEVSVGHPSEVDEIFDAISYSKGASVIRMLHDYIGDKDFKKGMNMYLTKFQQKNAATEDLWESLENASGKPIAAVMNTWTKQMGFPLIYVEAEQVEDDRLLRLSQKKFCAGGSYVGKLSPVDGPYHNLY

SEQ ID NO: 43366 - protein, 178 aa, Homo sapiens
MSELVPEPRPKPAVPMKPMSINSNLLGYIGIDTIIEQMRKKTMKTGFDFNIMVVGQSGLGKSTLVNTLFKSQVSRKASSWNREEKIPKTVEIKAIGHVIEEGGVKMKLTVIDTPGFGDQINNENCWEPIEKYINEQYEKFLKEEVNIARKKRIPDTRVHCCLYFISPTGHSLRPLDLE

SEQ ID NO: 43367 - protein, 463 aa, Homo sapiens
MEEFVGLREGSSGNPVTLQELWGPCPRIRRGIRGGLEWLKQKLFRLGEDWYFLMTLGVLMALVSCAMDLAVESVVRAHQWLYREIGDSHLLRYLSWTVYPVALVSFSSGFSQSITPSSGGSGIPEVKTMLAGVVLEDYLDIKNFGAKVVGLSCTLACGSTLFLGKVGPFVHLSVMMAAYLGRVRTTTIGEPENKSNKPVYSALATLVLASITYPPSAGRFLASRLSMKQHLDSLFDNHSWALMTQNSSPPWPEELDPQHLWWEWYHPRFTIFGTLAFFLVMKFWMLILATTIPMPAGYFMPIFVYGAAIGRLFGETLSFIFPEGIVAGGITNPIMPGGYALAGAAAFSGAVTHTISTALLAFEVTGQIVHALPVLMAVLAANAIAQSCQPSFYDGTVIVKKLPYLPRILGRNIGSHRVRVEHFMNHSITTLAITLMNDEIGVHCHQGQAQMPSGVVWFPVRGS

SEQ ID NO: 43368 - protein, 586 aa, Homo sapiens
MRPVSVWQWSPWGLLLCLLCSSCLGSPSPSTGPEKKAGSQGLRFRLAGFPRKPYEGRVEIQRAGEWGTICDDDFTLQAAHILCRELGFTEATGWTHSAKYGPGTGRIWLDNLSCSGTEQSVTECASRGWGNSDCTHDEDAGVICKDQRLPGFSDSNVIEARVRLKGGAHPGEGRVEVLKASTWGTVCDRKWDLHAASVVCRELGFGSAREALSGARMGQGMGAIHLSEVRCSGQELSLWKCPHKNITAEDCSHSQDAGVRCNLPYTGAETRIRLSGGRSQHEGRVEVQIGGPGPLRWGLICGDDWGTLEAMVACRQLGLGYANHGLQETWYWDSGNITEVVMSGVRCTGTELSLDQCAHHGTHITCKRTGTRFTAGVICSETASDLLLHSALVQETAYIEDRPLHMLYCAAEENCLASSARSANWPYGHRRLLRFSSQIHNLGRADFRPKAGRHSWVWHECHGHYHSMDIFTHYDILTPNGTKVAEGHKASFCLEDTECQEDVSKRYECANFGEQGITVGCWDLYRHDIDCQWIDITDVKPGNYILQVVINPNFEVAESDFTNNAMKCNCKYDGHRIWVHNCHIGI

SEQ ID NO: 43369 - protein, 952 aa, Homo sapiens
MVVAEDLSALRMAEDSCVDADLPDCNCDVTRVKKLKETLVAVQQLDKNMSSLRTWLAHIESELAKPIVYDSCNSEEIQRKLNEQQELQRDIEKHSTGVASVLNLCEVLLHDCDACATDAECDSIQQATRNLDRRWRNICAMSMERRLKIEETWRLWQKFLDDYSRFEDWLKSSERTAAFPSSSGVIYTVAKEELKKFEAFQRQVHECLTQLELINKQYRRLARENRTDSACSLKQMVHEGNQRWDNLQKRVTSILRRLKHFIGQREEFETARDSILVWLTEMDLQLTNIEHFSECDVQAKIKQLKAFQQEISLNHNKIEQIIAQGEQLIEKSEPLDAAIIEEELDELRRYCQEVFGRVERYHKKLIRLPLPDDEHDLSDRELELEDSAALSDLHWHDRSADSLLSPQPSSNLSLSLAQPLRSERSGRDTPASVDSIPLEWDHDYDLSRDLESAMSRALPSEDEEGQDDKDFYLRGAVGLSGDHSALESQIRQLGKALDDSRFQIQQTENIIRSKTPTGPELDTSYKGYMKLLGECSSSIDSVKRLEHKLKEEEESLPGFVNLHSTETQTAGVIDRWELLQAQALSKELRMKQNLQKWQQFNSDLNSIWAWLGDTEEELEQLQRLELSTDIQTIELQIKKLKELQKAVDHRKAIILSINLCSPEFTQADSKESRDLQDRLSQMNGRWDRVCSLLEEWRGLLQDALMQCQGFHEMSHGLLLMLENIDRRKNEIVPIDSNLDAEILQDHHKQLMQIKHELLESQLRVASLQDMSCQLLVNAEGTDCLEAKEKVHVIGNRLKLLLKEVSRHIKELEKLLDVSSSQQDLSSWSSADELDTSGSVSPTSGRSTPNRQKTPRGKCSLSQPGPSVSSPHSRSTKGGSDSSLSEPGPGRSGRGFLFRVLRAALPLQLLLLLLIGLACLVPMSEEDYSCALSNNFARSFHPMLRYTNGPPPL

SEQ ID NO: 43370 - protein, 49 aa, Homo sapiens
MEEGNNNEEVIHLNNFHCHRGQDGILLIAQARVQWRNLDSPRAPPPGFK

SEQ ID NO: 43371 - protein, 65 aa, Homo sapiens
MKYVFYLGVLAERRPCSLFGVPQVSLQPLCGRPHQTQLGAGPSSLLFTKSESDAGKFQEQSQRRY

SEQ ID NO: 43372 - protein, 53 aa, Homo sapiens
MQISSEKEEDDNEKRQDPGDNWEEGGGGGGGMEKSSGPWNKTAPVQAPPAPVI

SEQ ID NO: 43373 - protein, 140 aa, Homo sapiens
MFEEPEWAEAAPVAAGLGPVISRPPPAASSQNKVPLEDESVDVAVFCLSLMGTNIRDFLEEANRVLKPGGLLKVAEVSSRFEDVRTFLRAVTKLGFKIVSKDLTNSHFFLFDFQKTGPPLVGPKAQLSGLQLQPCLYKRR

SEQ ID NO: 43374 - protein, 100 aa, Homo sapiens
MAAPPKAPIRVRNLTIRAGALTGKENNMLQPETHIFTAPEEGSSQGALLLGQAPEPLSLPCTPVTLEQQLVSPSGDPHRAPALPSICSTLILQPCATLDP

SEQ ID NO: 43375 - protein, 224 aa, Homo sapiens
MRRRVHQINGHKFMATYLRQPTYCSHCREFIWGVFGKQGYQCQVCTCVVHKRCHHLIVTACTCQNNINKVDSKIAEQRFGINIPHKFSIHNYKVPTFCDHCGSLLWGIMRQGLQCKICKMNVHIRCQANVAPNCGVNAVELAKTLAGMGLQPGNISPTSKLVSRSTLRRQGKESSKEGNGIGVNSSNRLGIDNFEFIRVLGKGSFGKVMLARVKETGDLYAVKV

SEQ ID NO: 43376 - protein, 44 aa, Homo sapiens
MIEDSGKRGNTMAERRQLFAEMRAQDLDRIRLSTYRTACKLRFV

SEQ ID NO: 43377 - protein, 75 aa, Homo sapiens
RFSGVNDTDFRVYLLGNPVVWWLNLLSIALYLLSGSIIAVAMQRGARLPAEVAGHTARKGQSWTRAWNLCPLLVF

SEQ ID NO: 43378 - protein, 179 aa, Homo sapiens
KLFEVEEVNCICVDWKKGSQATYTQAANNVRVVGAQVAQMLDILLTEYSYPPSKVHLIGHSLGAHVAGEAGSKTPGLSRITGLDPVEASFESTPEEVRLDPSDADFVDVIHTDAAPLIPFLGFGTNQQMGHLDFFPNGGESMPGCKKNALSQIVDLDGIWAGQVLPVSRSRMPTDGSLC

SEQ ID NO: 43379 - protein, 134 aa, Homo sapiens
MDSFGQPRPEDNQSVVRRMQKKYWKTKQVFIKATGKKEDEHLVASDAELDAKLEVFHSVQETCTELLKIIEKYQLRLNVISEEENELGLFLKFQAERDATQAGKMMDATGKALCSSAKQRLALCTPLSRLKQEV

SEQ ID NO: 43380 - protein, 151 aa, Homo sapiens
LRAVPSPAAPCPPRPWQLGVGAVRTLRTGPALLSVRKFTEKHEWVTTENGIGTVGISNFAQEALGDVVYCSLPEVGTKLNKQDEFGALESVKAASELYSPLSGEVTEINEALAENPGLVNKSCYEDAQEKEDKVGEGSVSHSVLSSNTVEM

SEQ ID NO: 43381 - protein, 98 aa, Homo sapiens
MASLLQDQLTTDQDLLLMQEGMPMRKVRSKSWKKLRYFRLQNDGMTVWHARQARGSAKPSFSISDVETIRNGHDSELLRSLAEELPLEQGFTIVFHGR

SEQ ID NO: 43382 - protein, 870 aa, Homo sapiens
GGIFEYVESGPMGAEELAFRFAVNTINRNRTLLPNTTLTYDTQKINLYDSFEASKKACDQLSLGVAAIFGPSHSSSANAVQSICNALGVPHIQTRWKHQVSDNKDSFYVSLYPDFSSLSRAILDLVQFFKWKTVTVVYDDSTGLIRLQELIKAPSRYNLRLKIRQLPADTKDAKPLLKEMKRGKEFHVIFDCSHEMAAGILKQALAMGMMTEYYHYIFTTLDLFALDVEPYRYSGVNMTGFRILNTENTQVSSIIEKWSMERLQAPPKPDSGLLDGFMTTDAALMYDAVHVVSVAVQQFPQMTVSSLQCNRHKPWRFGTRFMSLIKEAHWEGLTGRITFNKTNGLRTDFDLDVISLKEEGLEKIGTWDPASGLNMTESQKGKPANITDSLSNRSLIVTTILEEPYVLFKKSDKPLYGNDRFEGYCIDLLRELSTILGFTYEIRLVEDGKYGAQDDANGQWNGMVRELIDHKADLAVAPLAITYVREKVIDFSKPFMTLGISILYRKPNGTNPGVFSFLNPLSPDIWMYILLAYLGVSCVLFVIARFSPYEWYNPHPCNPDSDVVENNFTLLNSFWFGVGALMQQGSELMPKALSTRIVGGIWWFFTLIIISSYTANLAAFLTVERMESPIDSADDLAKQTKIEYGAVEDGATMTFFKKSKISTYDKMWAFMSSRRQSVLVKSNEEGIQRVLTSDYAFLMESTTIEFVTQRNCNLTQIGGLIDSKGYGVGTPMGSPYRDKITIAILQLQEEGKLHMMKEKWWRGNGCPEEESKEASALGVQNIGGIFIVLAAGLVLSVFVAVGEFLYKSKKNAQLEKRSFCSAMVEELRMSLKCQRRLKHKPQAPVIVKTEEVINMHTFNDRRLPGKETMA

SEQ ID NO: 43383 - protein, 1011 aa, Homo sapiens
  MOD_RES (1)..(1): Any amino acid
XPTDGRHFVSQTTGNLYIARTNASDLGNYSCLATSHMDFSTKSVFSKFAQLNLAAEDTRLFAPSIKARFPAETYALVGQQVTLECFAFGNPVPRIKWRKVDGSLSPQWTTAEPTLQIPSVSFEDEGTYECEAENSKGRDTVQGRIIVQAQPEWLKVISDTEADIGSNLRWGCAAAGKPRPTVRWLRNGEPLASQNRVEVLAGDLRFSKLSLEDSGMYQCVAENKHGTIYASAELAVQALAPDFRLNPVRRLIPAARGGEILIPCQPRAAPKAVVLWSKGTEILVNSSRVTVTPDGTLIIRNISRSDEGKYTCFAENFMGKANSTGILSVRDATKITLAPSSADINLGDNLTLQCHASHDPTMDLTFTWTLDDFPIDFDKPGGHYRRTNVKETIGDLTILNAQLRHGGKYTCMAQTVVDSASKEATVLVRGPPGPPGGVVVRDIGDTTIQLSWSRGFDNHSPIAKYTLQARTPPAGKWKQVRTNPANIEGNAETAQVLGLTPWMDYEFRVIASNILGTGEPSGPSSKIRTREAAPSVAPSGLSGGGGAPGELIVNWTPMSREYQNGDGFGYLLSFRRQGSTHWQTARVPGADAQYFVYSNESVRPYTPFEVKIRSYNRRGDGPESLTALVYSAEEEPRVAPTKVWAKGVSSSEMNVTWEPVQQDMNGILLGYEIRYWKAGDKEAAADRVRTAGLDTSARVSGLHPNTKYHVTVRAYNRAGTGPASPSANATTMKPPPRRPPGNISWTFSSSSLSIKWDPVVPFRNESAVTGYKMLYQNDLHLTPTLHLTGKNWIEIPVPEDIGHALVQIRTTGPGGDGIPAEVHIVRNGGAAPPLPLSPREIQDPPRYLRGSFPPRPTPISTRKGKWKAGRNQVQSSLRTASPPPFYPAPRTSPRAREGRRVQGEAEDQPAIANGLQSTVGVGLRRPPSRPLPGLQLALHKHDGGEHGSPPSTTPWHRHFPLRGDADPHRLPGALILEPLPLRRSWTPPPTDTASPFLLPRWPDTVPESGWF

SEQ ID NO: 43384 - protein, 110 aa, Homo sapiens
MNKLRQSLRRRKPAYVPEASRPHQWQADEDAVRKGTCSFPVRYLGHVEVEESRGMHVCEDAVKKLKAMGRKSVKSVLWVSADGLRVVDDKTKDLLVDQTIEKVSFCAPDR

SEQ ID NO: 43385 - protein, 139 aa, Homo sapiens
MADTDLFMECEEEELEPWQKISDVIEDSVVEDYNSVDKTTTVSVSQQPVSAPVPIAAHASVAGHLSTSTTVSSSGAQNSDSTKKTLVTLIANNNAGNPLVQQGGQPLILTQNPAPGLGTMVTQPVLRPVQVMQNANHVT

SEQ ID NO: 43386 - protein, 112 aa, Homo sapiens
MTNGGKTTLTNSLLRALPNCCVIHQDDFFKPQDQIAVGEDGFKQWDVLESLDMEAMLDTVQAWLSSPQKFARAHGVSVQPEASDTHILLLEGFLLYSYNLPGRHEVPRGALP

SEQ ID NO: 43387 - protein, 93 aa, Homo sapiens
GAHVQVTCAKLVSRTGHLMKLLSGQQEVKASKIEWDTDQWKTENYINESTEAQSEQKEKSLEICCHRRSLQEDEEGFSRDSEAPTEEESEALP

SEQ ID NO: 43388 - protein, 45 aa, Homo sapiens
MATTAAPAGGARNGAGPEWGGFEENIQALASRIWVSCISACARKK

SEQ ID NO: 43389 - protein, 382 aa, Homo sapiens
MLDTNLILLPLFQFIVPKEWNSKYRPVCIHLAGTGDHHYWRRRTLMARPMIKEARMASLLLENPYYGCRKPKDQVRSSLKNVSDLFVMGGALVLESAALLHWLEREGYGPLGMTGISMGGHMASLAVSNWPKPMPLIPCLSWSTASGVFTTGVLSKSINWRELEKQYYTQTVYEEEIIHMLEYCGTDSFKMGQEFVKHFTSSADKLTNLNLVSRTLNLDISNQVVSQKPADCHNSSKTSVSATSEGLLLQDTSKMKRFNQTLSTNKSGYTSRNPQSYHLLSKEQSRNSLRKESLIFMKGVMDECTHVANFSVPVDPSLIIVVQAKEDAYIPRTGVRSLQEIWPGCEIRYLEGGHISAYLFKQGLFRQAIYDAFDRFLHKYAN

SEQ ID NO: 43390 - protein, 284 aa, Homo sapiens
MDLSGVKKKSLLGVKENNKKSSTRAPSPTKRKDRSDEKSKDRSKDKGATKESSEKDRGRDKTRKRRSASSGSSSTRSRSSSTSSSGSSTSTGSSSGSSSSSASSRSGSSSTSRSSSSSSSSGSPSPSRRRHDNRRRSRSKSKPPKRDEKERKRRSPSPKPTKVHIGRLTRNVTKDHIMEIFSTYGKIKMIDMPVERMHPHLSKGYAYVEFENPDEAEKALKHMDGGQIDGQEITATAVLAPWPRPPPRRFSPPRRMLPPPPMWRRSPPRMRRRSRSPRRRSPVR

SEQ ID NO: 43391 - protein, 66 aa, Homo sapiens
MALRAMRGIVNGAAPELPVPTGGPAVGAREQALAVSRNYLSQPRLTYKTVSGVNGPLVILDHVKVC

SEQ ID NO: 43392 - protein, 361 aa, Homo sapiens
MATAASNPYSILSSTSLVHADSAGMQQGSPFRNPQKLLQSDYLQGVPSNGHPLGHHWVTSLSDGGPWSSTLATSPLDQQDVKPGREDLQLGAIIHHRSPHVAHHSPHTNHPNAWGASPAPNPSITSSGQPLNVYSQPGFTVSGMLEHGGLTPPPAAASAQSLHPVLREPPDHGELGSHHCQDHSDEETPTSDELEQFAKQFKQRRIKLGFTQADVGLALGTLYGNVFSQTTICRFEALQLSFKNMCKLKPLLNKWLEEADSSTGSPTSIDKIAAQGRKRKKRTSIEVSVKGVLETHFLKCPKPAAQEISSLADSLQLEKEVVRVWFCNRRQKEKRMTPPGDQQPHEVYSHTVKTDTSCHDL

SEQ ID NO: 43393 - protein, 185 aa, Homo sapiens
MDRPAAAAAAGCEGGGGPNPGPAGGRRPPRAAGGATAGSRQPSVETLDSPTGSHVEWCKQLIAATISSQISGSVTSENVSRDYKEIQEEHNGYPSEAEADQALRDGNKLAQMEEAPLFPGESIKAIVKDVMYICPFMGAVSGTLTVTDFKLYFKNVERDPHFILDVPLGVISRVEKIGAQSHGDN

SEQ ID NO: 43394 - protein, 192 aa, Homo sapiens
  MOD_RES (1)..(1): Any amino acid
XRSTEIGKLLSSYLQKKSDVEDHSVHLLFSANRWEQVFILVAQTGVQWGDLGSLQPTPRRFKRFSCLSLSSSCDHRPLIKEKLSQGVTLVVDRYAFSGVAFTGAKENFSLDWCKQPDVGLPKPDLVLFLQLQLADAAKRGAFGHERYENGAFQERALRCFHQLMKDTTLNWKMVDASKSIEAVHEDIRVLSE

SEQ ID NO: 43395 - protein, 125 aa, Homo sapiens
MGRGWGFLFGLLGAVWLLSSGHGEEQPPETAAQRCFCQVSGYLDDCTCDVETIDRFNNYRLFPRLQKLLESDYFRYYKVNLKRPCPFWNDISQCGRRDCAVKPCQSDEVPDGIKSASYKVCTYTY

SEQ ID NO: 43396 - protein, 159 aa, Homo sapiens
MFHVSFRYIFGLPPLILVLLPVASSDCDIEGKDGKQYESVLMVSIDQLLDSMKEIGSNCLNNEFNFFKRHICDANKEGMFLFRAARKLRQFLKMNSTGDFDLHLLKVSEGTTILLNCTGQEENKSLKEQKKLNDLCFLKRLLQEIKTCWNKILMGTKEH

SEQ ID NO: 43397 - protein, 98 aa, Homo sapiens
DIKSNNGLAIHIFLCNTSMENRCFYNSDGDFLIVPQKGNLLIYTEFGKMLVQPNEICVIQDVSPFNVVAWHGNYTPYKYNLKNFMVINSVAFDHAGTA

SEQ ID NO: 43398 - protein, 224 aa, Homo sapiens
MAAVGAGGSTAAPGPGAVSAGALEPGTASAAHRRLKYISLAVLVVQNASLILSIRYARTLPGDRFFATTAVVMAEVLKGLTCLLLLFAQKRGNVKHLVLFLHEAVLVQYVDTLKLAVPSLIYTLQNNLQYVAISNLPAATFQPSPRCSQSHSLCLCLRLRALRSPAASRAATTTAAVFPPWRPHHGALSAKVAHQGEGFLAAGIEDIGLASFSLLALGPAGTKL

SEQ ID NO: 43399 - protein, 65 aa, Homo sapiens
  MOD_RES (1)..(1): Any amino acid
XPKSLYSRESVYDLLPKELQLPPSRETSVASMSQTSGGEAGSPPPAVVAAGFASEAGSVCIKNDL

SEQ ID NO: 43400 - protein, 96 aa, Homo sapiens
  MOD_RES (1)..(1): Any amino acid
XYYYQMVPRLTAVLQTAMAAGSLGLLLPGSHYLGRFQDRLMWIMILECGYTYCSINIKGLELQETSCHTAEARRVDEVFEDAFEQEYTRVYSETND

SEQ ID NO: 43401 - protein, 133 aa, Homo sapiens
MEEQDARVPALEPFRVEQAPPVIYYVPDFISKEEEEYLLRQVFNAPKPKWTQLSGRKLQNWGGLPHPRGMVPERLPPWLQRYVDKVSNLSLFGGLPANHVLVNQYLPGEGIMHHQPGLPHRAGLLRAAAARGR

SEQ ID NO: 43402 - protein, 86 aa, Homo sapiens
MKETPLSNCERRFLLRAIEEKKRLDGRQTYDYRNIRISFGTDYGCCIVELGKTRVLGQVSCELVSPKLNRATEGLANTCRPTFIKS

SEQ ID NO: 43403 - protein, 133 aa, Homo sapiens
MEYAMKSLSLLYPKSLSRHVSVRTSVVTQQLLSEPSPKAPRARPCRVSTADRSVRKGIMAYSLEDLLLKGSFPLGPLQHAGHRPRTAWHLLLPAAAPRCYGGRAAPQGQGLIPYPDLSEDTAVKAQVLGSFPQ

SEQ ID NO: 43404 - protein, 1334 aa, Homo sapiens
MALSPGANLVFHEDPKMTPSPPSCGAPGLGSGTIPQPHPDMAQVPMLNLLPSPGLALVPDLNDSLSPVSGEASGLVSENTPRPDDSRAIAPASLQITSSCSGEALDLDSKDVSRPDSQGRLCPASNPILSPSSTEAPRLSSGNHPQSNSEDAFKCLSSKIFKLGQRNSNPSRHELNPFIRHHSREGLVLGHCISRPSSKALLIPTSNSSLDLDSNPLLNMGSRNTSKLNLNVAPDSHGTLIPDTNETITLASHNISESVSKGAFSTTWSTSSKETMNVASSGHSRSDLSVTITQASYVTLIPGSSYGISLHSSTHEPNSTISPPSCMTLILGSNETLSLDSSLLFSDTSTLTLSSQQDDAKDNSIHTVPLEENLESWSEMASIKVGQFPLGFPISNPAGKDAVTLQGIPEGAFDEVTSCLVKVPEKTEGGNNMALVENVTTLQKSQDLLEAEGEKKTMIKKIMRQIQEEPLDSLSSSVRKQAMEILTQLSHTQPTLGMRERSELVNVCVHSVFSLPSVQAMQEKDEAKAETIQALYHQTLEALQTLLKALFIEDPTPAGLKSILEALGPWMNSGKAHERARAVNTNVSVLNHMLLTLPFFMPLGFPALGLLLGRLILHIGDPDEEIGCEALDGIIILYTILELQKRARDKEETNKKELYESNKHFLGPYNPVSPCQNILRVIEEFGDFLGPQQIKDLLLAALEGLKGSSEAPGKDSREMMQLASEVMLSSVLEWYRHRALEVIPEIMQGIYMQLSHIQEPRARQVALLPVSLLASSFMTEVVVALLMCPLPLNSNGAEMWRQLILCKPSCDVRDLLDLLLGSLKEKPVTKEGRASIVPLAAASGLCELLSVNSCMGRVRRIYPQLLLALLIQVHYHIGLNLPGCVAPPKDTKKGAQPSPFVPVRWVVKVVKTLLLRMGCSYETTFLEDQGGWELMEQVESHHRGVALLARAMVQYSCQELCRILYLLIPLLERGDEKHRITATAFFVELLQMEQVRRIPEEYSLGRMAEGLSHHDPIMKVLSIRGLVILARRSEKTAKVKALLPSMVKGLKNMDGMLVVEAVHNLKAVFKGRDQKLMDSAVYVEMLQILLPHFSDAREVVRSSCINLYGKVVQKLRAPRTQAMEEQLVSTLVPLLLTMQEGNSKVSQKCVKTLLRCSYFMAWELPKRAYSRKPWDNQQQTVAKICKCLVNTHRDSAFIFLSQSLEYAKNSRASLRKCSVMFIGSLVPCMESIMTEDRLNEVKAATPRGQRFHLLCPPLYSQPLEQAGSAERAKNLKRSPYLCRERHQKLIPGRILTWLVSSQLFLMRSVLQKNRPRPIKMRAMITLKKKTTRKL

SEQ ID NO: 43405 - protein, 259 aa, Homo sapiens
GARILIQERYEKFGESEEVEMEVESDEEDDKQEKAEEPPSQLDQDTQVQDMDEGSDDEEEGQKVPPPPETPMPPPLPPTPDQVIVRKDYDPKASKPLPPAPAPDEYLVSPITGEKIPASKMQEHMRIGLLDPRWLEQRDRSIREKQSDDEVTWDGHSGSMARTQQAAQANITLQEQIEAIHKAKGLVPEDDTKEKIGPSKPNEIPQQPPPPSSATNIPSSAPPITSVPRPPTMPPPVRTTVVSAVPVMPRPPMASVVRL

SEQ ID NO: 43406 - protein, 179 aa, Homo sapiens
MSQPRTPEQALDTPGDCPPGRRDEDAGEGIQCSQRMLSFSDALLSIIATVMQFDRSVQRLLATRIAVYLMTFLIVTVAWAAHTRLFQVVGKTDDTLALLNLACMMTITFLPYTFSLMVTFPDVPLGIFLFCVCVIAIGVVQALIVGYAFHFPHLLSPQIQRSAHRALYRRHVLGIVLQG

SEQ ID NO: 43407 - protein, 563 aa, Homo sapiens
MEPDSVIEDKTIELMCSVPRSLWLGCANLVESMCALSCLQSMPSVRCLQNTSVMEDQNEDESPKKNTLWQISNGTSSVIVSRKRPSEGNYQKEKDLCIKYFDQWSESDQVEFVEHLISRMCHYQHGHINSYLKPMLQRDFITALPEQGLDHIAENILSYLDARSLCAAELVCKEWQRVISEGMLWKKLIERMVRTDPLWKGLSERRGWDQYLFKNRPTDGPPNSFYRSLYPKIIQDIETIESNWRCGRHNLQRIQCRSENSKGVYCLQYDDEKIISGLRDNSIKIWDKTSLECLKVLTGHTGSVLCLQYDERVIVTGSSDSTVRVWDVNTGEVLNTLIHHNEAVLHLRFSNGLMVTCSKDRSIAVWDMASATDITLRRVLVGHRAAVNVVDFDDKYIVSASGDRTIKVWSTSTCEFVRTLNGHKRGIACLQYRDRLVVSGSSDNTIRLWDIECGACLRVLEGHEELVRCIRFDNKRIVSGAYDGKIKVWDLQAALDPRAPASTLCLRTLVEHSGRVFRLQFDEFQIISSSHDDTILIWDFLNVPPSAQNETRSPSRTYTYISR

SEQ ID NO: 43408 - protein, 285 aa, Homo sapiens
MTTNAGPLHPYWPQHLRLDNFVPNDRPTWHILAGLFSVTGVLVVTTWLLSGRAAVVPLGTWRRLSLCWFAVCGFIHLVIEGWFVLYYEDLLGDQAFLSQLWKEYAKGDSRYILGDNFTVCMETITACLWGPLSLWVVIAFLRQHPLRFILQLVVSVERPHQQKALTRCDSLTMDFPASRTKCESFLPPEFRSFAVDPQITSLDVLQHILIRAFDLSGKKNFGISYLGRDRLGQEVYLSLLSDWDLSTAFATASKPYLQLRVDIRPSEDSEYSVPPGALLWNPFTP

SEQ ID NO: 43409 - protein, 57 aa, Homo sapiens
MRYAVYWDELASEVRRCTWFYKGDKDNKYVPYSESFSQVLEETYMLAVTLDEWKKKL

SEQ ID NO: 43410 - protein, 40 aa, Homo sapiens
MFRMLNSSFEDDPFFSHTGGLTLQQLKLKHKKPLELSSGH

SEQ ID NO: 43411 - protein, 92 aa, Homo sapiens
MAAETQTLNFGPEWLRALSSGGSITSPPLSPALPKYKLADYRYGREEMLALFLKDNKIPSDLLDKEFLPILQEEPLPPLALVPFTEEEQRQR

SEQ ID NO: 43412 - protein, 971 aa, Homo sapiens
  MOD_RES (1)..(1): Any amino acid
XDAVPRPGAGTGQGLGAAGGGSPPRALAALEPRLDLLLGARRLPGGLGWGPALLLQPPASSLPGAFSCASGEYLEMKNQVCSKCGEGTYSLGSGIKFDEWDELPAGFSNIATFMDTVVGPSDSRPDGCNNSSWIPRGNYIESNRDDCTVSLIYAVHLKKSGYVFFEYQYVDNNIFFEFFIQNDQCQEMDTTTDKWVKLTDNGEWGSHSVMLKSGTNILYWRTTGILMGSKAVKPVLVKNITIEGVAYTSECFPCKPGTFSNKPGSFNCQVCPRNTYSEKGAKECIRCKDDSQFSEEGSSECTERPPCTTKDYFQIHTPCDEEGKTQIMYKWIEPKICREDLTDAIRLPPSGEKKDCPPCNPGFYNNGSSSCHPCPPGTFSDGTKECRPCPAGTEPALGFEYKWWNVLPGNMKTSCFNVGNSKCDGMNGWEVAGDHIQSGAGGSDNDYLILNLHIPGFKPPTSMTGATGSELGRITFVFETLCSADCVLYFMVDINRKSTNVVESWGGTKEKQAYTHIIFKNATFTFTWAFQRTNQGQDNRRFINDMVKIYSITATNAVDGVASSCRACALGSEQSGSSCVPCPPGHYIEKETNQCKECPPDTYLSIHQVYGKEACIPCGPGSKNNQDHSVCYSDCFFYHEKENQSLHYDFSNLSSVGSLMNGPSFTSKGTKYFHFFNISLCGHEGKKMALCTNNITDFTVKEIVAGSDDYTNLVGAFVCQSTIIPSESKGFRAALSSQSIILADTFIGVTVETTLKNINIKEDMFPVPTSQIPDVHFFYKSSTATTSCINGRSTAVKMRCNPTKSGAGVISVPSKCPAGTCDGCTFYFLWESAEACPLCTEHDFHEIEGACKRGFQETLYVWNEPKWCIKGISLPEKKLATCETVDFWLKVGAGVGAFTAVLLVALTCYFWKKNQKLEYKYSKLVMTTNSKECELPAADSCAIMEGEDNEEEVVYSNKQSLLGKLKSLATK

SEQ ID NO: 43413 - protein, 132 aa, Homo sapiens
  MOD_RES (1)..(1): Any amino acid
XAIREAATSNLKKLVEKFGKEWAHATIIPKVLAMSGDPNYLHRMTTLFCINVLSEVCGQDITTKHMLPTVLRMAGDPVANVRFNVAKSLQKIGPILDNSTLQSEVKPILEKLTQDQDVDVKYFAQEALTGKT

SEQ ID NO: 43414 - protein, 162 aa, Homo sapiens
MGPPRGLWRKSPSAPELGGVSAGLTVLSEKVPLSLAFCPLWPLASLLVVCAPEMERGPVTCTQAQTVRGAHGLREEPEFVTARAGESVVLRCDVIHPVTGQPPPYVVEWFKFGVPIPIFIKFGYYPPHVDPEYAGRASLHDKASLRLEQVRSEDQGWYECKV

SEQ ID NO: 43415 - protein, 379 aa, Homo sapiens
MPLLPAALTSSMLYFQMVIMAGTVMLAYYFEYTDTFTVNVQGFFCHDSAYRKPYPGPEDSSAVPPVLLYSLAAGVPVLVIIVGETAVFCLQLATRDFENQEKTILTGDCCYINPLVRRTVRFLGIYTFGLFATDIFVNAGQVVTGNLAPHFLALCKPNYTALGCQQYTQFISGEEACTGNPDLIMRARKTFPSKEAALSVYAAMYLTMYITNTIKAKGTRLAKPVLCLGLMCLAFLTGLNRVAEYRNHWSDVIAGFLVGISIAVFLVVCVVNNFKGRQAENEHIHMDNLAQMPMISIPRVESPLEKVCQNQPVENGQEENSQERSFKDCLARLFSWIMGISHCEHLQLRTTSLPSQKSHDIEADGFSLHWTSSLFTIHS

SEQ ID NO: 43416 - protein, 151 aa, Homo sapiens
MPASQSRARARDRNNVLNRAEFLSLNQPPKGGPEPRSSGRKASGPSAQPPPAGDGARERRQSQQLPEEDCMQLNPSFKGIAFNSLLAIDICMSKRLGVCAGRAASWASARSMVKLIGITGHGIPWIGGTILCLVKSSTLAGQEVLMNLLLD

SEQ ID NO: 43417 - protein, 13 aa, Homo sapiens
MSARLPVLSPPRW

SEQ ID NO: 43418 - protein, 833 aa, Homo sapiens
MNKAPQSTGPPPAPSPGLPQPAFPPGQTAPVVFSTPQATQMNTPSQPRQHFYPSRAQPPSSAASRVQSAAPARPGPAAHVYPAGSQVMMIPSQISYPASQGAYYIPGQGRSTYVVPTQQYPVQPGAPGFYPGASPTEFGTYAGAYYPAQGVQQFPTGVAPTPVLMNQPPQIAPKRERKTIRIRDPNQGGKDITEEIMSGARTASTPTPPQTGGGLEPQANGETPQVAVIVRPDDRSQGAIIADRPGLPGPEHSPSESQPSSPSPTPSPSPVLEPGSEPNLAVLSIPGDTMTTIQMSVEESTPISRETGEPYRLSPEPTPLAEPILEVEVTLSKPVPESEFSSSPLQAPTPLASHTVEIHEPNGMVPSEDLEPEVESSPELAPPPACPSESPVPIAPTAQPEELLNGAPSPPAVDLSPVSEPEEQAKEVTASMAPPTIPSATPATAPSATSPAQEEEMEEEEEEEEGEAGEAGEAESEKGGEELLPPESTPIPANLSQNLEAAAATQVAVSVPKRRRKIKELNKKEAVGDLLDAFKEANPAVPEVENQPPAGSNPGPESEGSGVPPRPEEADETWDSKEDKIHNAENIQPGEQKYEYKSDQWKPLNLEEKKRYDREFLLGFQFIFASMQKPEGLPHISDVVLDKANKTPLRPLDPTRLQGINCGPDFTPSFANLGRTTLSTRGPPRGGPGGELPRGPQAGLGPRRSQQGPRKEPRKIIATVLMTEDIKLNKAEKAWKPSSKRTAADKDRGEEDADGSKTQDLFRRVRSILNKLTPQMFQQLMKQVTQLAIDTEERLKGVIDLIFEKAISEPNFSVAYANMCRCLMALKVPTTEK

SEQ ID NO: 43419 - protein, 1722 aa, Homo sapiens
MSLLCVGVKKAKFDGAQEKFNTYVTLKVQNVKSTTIAVRGSQPSWEQDFMFEINRLDLGLTVEVWNKGLIWDTMVGTVWIPLRTIRQSNEEGPGEWLTLDSQVIMADSEICGTKDPTFHRILLDTRFELPLDIPEEEARYWAKKLEQLNAMRDQDEYSFQDEQDKPLPVPSNQCCNWNYFGWGEQHNDDPDSAVDDRDSDYRSETSNSIPPPYYTTSQPNASVHQYSVRPPPLGSRESYSDSMHSYEEFSEPQALSPTGSSRYASSGELSQGSSQLSEDFDPDEHSLQGSDMEDERDRDSYHSCHSSVSYHKDSPRWDQDEEELEEDLEDFLEEEELPEDEEELEEEEEEVPDDLGSYAQREDVAVAEPKDFKRISLPPAAPGKEDKAPVAPTEAPDMAKVAPKPATPDKVPAAEQIPEAEPPKDEESFRPREDEEGQEGQDSMSRAKANWLRAFNKVRMQLQEARGEGEMSKSLWFKGGPGGGLIIIDSMPDIRKRKPIPLVSDLAMSLVQSRKAGITSALASSTLNNEELKNHVYKKTLQALIYPISCTTPHNFEVWTATTPTYCYECEGLLWGIARQGMRCTECGVKCHEKCQDLLNADCLQRAAEKSSKHGAEDRTQNIIMVLKDRMKIRERNKPEIFELIQEIFAVTKTAHTQQMKAVKQSVLDGTSKWSAKISITVVCAQGLQAKDKTGSSDPYVTVQVGKTKKRTKTIYGNLNPVWEENFHFECHNSSDRIKVRVWDEDDDIKSRVKQRFKRESDDFLGQTIIEVRTLSGEMDVWYNLDKRTDKSAVSGAIRLHISVEIKGEEKVAPYHVQYTCLHENLFHFVTDVQNNGVVKIPDAKGDDAWKVYYDETAQEIVDEFAMRYGVESIYQAMTHFACLSSKYMCPGVPAVMSTLLANINAYYAHTTASTNVSASDRFAASNFGKERFVKLLDQLHNSLRIDLSMYRNNFPASSPERLQDLKSTVDLLTSITFFRMKVQELQSPPRASQVVKDCVKACLNSTYEYIFNNCHELYSREYQTDPAKKGEVLPEEQGPSIKNLDFWSKLITLIVSIIEEDKNSYTPCLNQFPQELNVGKISAEVMWNLFAQDMKYAMEEHDKHRLCKSADYMNLHFKVKWLYNEYVTELPAFKDRVPEYPAWFEPFVIQWLDENEEVSRDFLHGALERDKKDGFQQTSEHALFSCSVVDVFSQLNQSFEIIKKLECPDPQIVGHYMRRFAKTISNVLLQYADIISKDFASYCSKEKEKVPCILMNNTQQLRVQLEKMFEAMGGKELDAEASDILKELQVKLNNVLDELSRVFATSFQPHIEECVKQMGDILSQVKGTGNVPASACSSVAQDADNVLQPIMDLLDSNLTLFAKICEKTVLKRVLKELWKLVMNTMEKTIVLPPLTDQTMIGNLLRKHGKGLEKGRVKLPSHSDGTQMIFNAAKELGQLSKLKDHMVREEAKSLTPKQCAVVELALDTIKQYFHAGGVGLKKTFLEKSPDLQSLRYALSLYTQATDLLIKTFVQTQSAQVHGGKGTRFTLSEDIYPEKGLGVEDPVGEVSVHVELFTHPGTGEHKVTVKVVAANDLKWQTSGIFRPFIEVNIIGPQLSDKKRKFATKSKNNSWAPKYNESFQFTLSADAGPECYELQVCVKDYCFAREDRTVGLAVLQLRELAQRGSAACWLPLGRRIHMDDTGLTVLRILSQRSNDEVAKEFVKLKSDTRSAEEGGAAPAP

SEQ ID NO: 43420 - protein, 280 aa, Homo sapiens
MKDRTQELRTAKDSDDDDDVAVTVDRDRFMDEFFEQVEEIRGFIDKIAENVEEVKRKHSAILASPNPDEKTKEELEELMSDIKKTANKVRSKLKSIEQSIEQEEGLNRSSADLRIRKTQHSTLSRKFVEVMSEYNATQSDYRERCKGRIQRQLEITGRTTTSEELEDMLESGNPAIFASGIIMDSSISKQALSEIETRHSEIIKLENSIRELHDMFMDMAMLVESQVSAGPPCPPLQPTPAPRAALTSPFLPDTLPCRGGTKFSASGCFPEVLPRAPTQP

SEQ ID NO: 43421 - protein, 100 aa, Homo sapiens
MTPQSLLQTTLFLLSLLFLVQGAHGRGHREDFRFCSQRNQTHRSSLHYKPTPDLRISIENSEEALTVHAPFPAAHPASRSFPDPRGLYHFCLYWNRHAGR

SEQ ID NO: 43422 - protein, 151 aa, Homo sapiens
MQKLGFGTGVNVYLMKRSPRGLSHSPWAVKKINPICNDHYRSVYQKRLMDEAKILKSLHHPNIVGYRAFTEANDGSLCLAMEYGGEKSLNDLIEERYKASQDPFPAAIILKVALNMARGLKYLHQEKKLLHGDIKSSNVVIKGDFETIKIC

SEQ ID NO: 43423 - protein, 109 aa, Homo sapiens
MPLVRYRKVVILGYRCVGKTSLAHQFVEGEFSEGYDPTVENTYSKIVTLGKDEFHLHLVDTAGQVPVGDEYSILPYSFIIGVHGYVLVYSVTSLHSFQVIESLYQKLHE

SEQ ID NO: 43424 - protein, 171 aa, Homo sapiens
MPETSHIVALTSKSEQELYIPSVVSNSPSTVQSIENTSKSHGEIFKKDVCAENNNNMAMLICLIIIAVLFLICTFLFLSTVVLANKVSSLRRSKQVGKRQPRSNGDFLASGLWPAESDTWKRTKQLTGPNLVMQSTGVLTATRERKDEEGTEKLTNKQIAKSPKCPVRTRI

SEQ ID NO: 43425 - protein, 353 aa, Homo sapiens
MGCGTSKVLPEPPKDVQLDLVKKVEPFSGTKSDVYKHFITEVDSVGPVKAGFPAASQYAHPCPGPPTAGHTEPPSEPPRRARVAKYRAKFDPRVTAKYDIKALIGRGSFSRVVRVEHRATRQPYAIKMIETKYREGREVCESELRVLRRVRHANIIQLVEVFETQERVYMVMELATGGELFDRIIAKGSFTERDATRVLQMVLDGVRYLHALGITHRDLKPENLLYYHPGTDSKIIITDFGLASARKKGDDCLMKTTCGTPEYIAPEVLVRKPYTNSVDMWALGVIAYILLSGTMPFEDDNRTRLYRQILRGKYSYSGEVSLSCPCPGCWGGTCGGRYILQLSVRGMSSGPCS

SEQ ID NO: 43426 - protein, 99 aa, Homo sapiens
MRRTAFILGSGLLSFVAFWNSVTWHLQRFWGASGYFWQAQWERLLTTFEGKEWILFFIGGSCETAPVYPHSSFQPVHDIFPHGGLPLSLPQMVERPLPP

SEQ ID NO: 43427 - protein, 668 aa, Homo sapiens
MGPLRESKMSNFEKEHRVQHHDKEISRSRIPRLILRPHMPQQQHKVSPASESPFSEEESREFNPSSSGRSARTVSSNSFCSDDTGCPSSQSVSPVKTPSDAGNSPIGFCPGSDEGFTRKKCTIGMVGEGSIQSSRYKKESKSGLVKPGSEADFSSSSSTGSISAPEVHMSTAGSKRSSSSRNRGPHGRSNGASSHKPGSSPSSPREKDLLSMLCRNQLSPVNIHPSYAPSSPSSSNSGSYKGSDCSPIMRRSGRYMSCGENHGVRPPNPEQYLTPLQQKEVTVRHLKTKLKESERRLHERESEIVELKSQLARMREDWIEEECHRVEAQLALKEARKEIKQLKQVIETMRSSLADKDKGIQKYFVDINIQNKKLESLLQSMEMAHSGSLRDELCLDFPCDSPEKSLTLNPPLDTMADGLSLEEQVTGEGADRELLVGDSIANSTDLFDEIVTATTTESGDLELVHSTPGANVLELLPIVMGQEEGSVVVERAVQTDVVPYSPAISELIQSVLQKLQDPCPSSLASPDESEPDSMESFPESLSALVVDLTPRNPNSAILLSPVETPYANVDAEVHANRLMRELDFAACVEERLDGVIPLARGGVVRQYWSSSFLVDLLAVAAPVVPTVLWAFSTQRGGTDPVYNIGALLRGCCVVALHSLRRTAFRIKT

SEQ ID NO: 43428 - protein, 185 aa, Homo sapiens
GGAEEGAGGAGGSAGAGEGPVITALTPMTIPDVFPHLPLIAITRNPVFPRFIKIIEVKNKKLVELLRRKVRLAQPYVGVFLKRDDSNESDVVESLDEIYHTGTFAQIHEMQDLGDKLRMIVMGHRREASAGSSSQPQRLIHTCLAPVSESISADSWRWSPRSRRRRTSTSPAGSQSGARRRRRTS

SEQ ID NO: 43429 - protein, 584 aa, Homo sapiens
MGGRPSSPLDKQQRQHLRGQVDTLLRNFLPCYRGQLAASVLRQISRELGPQEPTGSQLLRSKKLPRVREHRGPLTQLRGHPPRWQPIFCVLRGDGRLEWFSHKEEYENGGHCLGSTALTGYTLLTSQREYLRLLDALCPESLGDHTQEEPDSLLEVPVSFPLFLQHPFRRHLCFSAATREAQHAWRLALQGGIRLQGIVLQRSQAPAARAFLDAVRLYRQHQGHFGDDDVTLGSDAEVLTAVLMREQLPALRAQTLPGLRGAGRARAWAWTELLDAVHAAVLAGASAGLCAFQPEKDELLASLEKTIRPDVDQLLRQRARVAGRLRTDIRGPLESCLRREVDPQLPRVVQTLLRTVEASLEAVRTLLAQGMDRLSHRLRQSPSGTRLRREVYSFGEMPWDLALMQTCYREAERSRGRLGQLAAPFGFLGMQSLVFGAQDLAQQLMADAVATFLQLADQCLTTALNCDQAAQRLERVRGRVLKELPEFEGDVLAVGSQALTTEGIYEDVIRGCLLQRIDQELKKTLGANDVSCTLDGCLEVPWEQEGADEETEAEREGGACPRQPDSGAQIQPLCPPPSPGTFRS

SEQ ID NO: 43430 - protein, 92 aa, Homo sapiens
MAAHHGDGPYKCKLCGKAFVWPSLFHLHERTHTGEKPYECKQCSKAFPFYSSYLRHERIHTGEKAYECKQCSKAFPDYSTYLRHERTHTGEK

SEQ ID NO: 43431 - protein, 177 aa, Homo sapiens
MVGGLKRKHSDLEEEEERWEWSPAGLQSYQQALLRISLDKVQRSLGPRAPSLRRHVLIHNTLQQLQAALRLAPAPALPPEPLFLGEEDFSLSATIGSILRELDTSMDGTEPPQNPVTPLGLQNEVPPQPDPVFLEALSSRYLGDSGLDDFFLDIDTSAVEKEPARAPPEPPHNLFCA

SEQ ID NO: 43432 - protein, 388 aa, Homo sapiens
MALRLLKLAATSASARVVAAGAQRVRGIHSSVQCKLRYGMWHFLLGDKASKRLTERSRVITVDGNICTGKGKLAKEIAEKLGFKHFPEAGIHYPDSTTGDGKPLATDYNGNCSLEKFYDDPRSNDGNSYRLQSWLYSSRLLQYSDALEHLLTTGQGVVLERSIFSDFVFLEAMYNQGFIRKQCVDHYNEVKSVTICDYLPPHLVIYIDVPVPEVQRRIQKKGDPHEMKITSAYLQDIENAYKKTFLPEMSEKCEVLQYSAREAQDSKKVVEDIEYLKFDKGPWLKQDNRTLYHLRLLVQDKFEVLNYTSIPIFLPEVTIGAHQTDRVLHQFRELMKSSDDSPRAEMFFWKVLHQAYYLDRRTLCSSAVMSVSLLSDVTSGIFLLFVCK

SEQ ID NO: 43433 - protein, 251 aa, Homo sapiens
  MOD_RES (1)..(1): Any amino acid
XLLKLTRDFPQRHEKYQSWAGTFHLCLKKNKYPDSRSTFIKHAGSYLKRGEFLAIHTAITCFFRQISARFLEYSTSECHFFNGTERVRYLDRYFHNQEENVRFDSDVGEFRAVTELGRPDAEYWNSQKDLLEQKRGRVDNYCRHNYGVVESFTVQRRVHPKVTVYPSKTQPLQHHNLLVCSVSGFYPGSIEVRWFRNGQEEKTGVVSTGLIHNGDWTFQTLVMLETVPRSGEVYTCQVEHPSVTSPLTVEW

SEQ ID NO: 43434 - protein, 182 aa, Homo sapiens
QGWEDKGSFTFQAALHHDGRIVFAYKEIPMSVPEISSSQHPVKTGLSDAFMILNPSPDVPESRRRSIFEYHRIELDPSKVTSMSAVEFTPLPTCLQHRSCDACMSSDLTFNCSWCHVLQRSLNNQDENTCSSGFDRYRQEWMDYGCAQEAEGRMCEDFQDEDHDSASPDTSFSPYDGDLTTT

SEQ ID NO: 43435 - protein, 157 aa, Homo sapiens
MPRRKKKVKEVSESRNLEKKDVETTSSVSVKRKRRLEDAFIVISDSDGEEPKEENGLQKTKTKQSNRAKCLAKRKIAQMTEEEQFALALKMSEQEAREVNSQEEEEEELLRKAIAESLNSCRPSDASATRSRPLATGPSSQSHQEKTTDSGLTEGIW

SEQ ID NO: 43436 - protein, 198 aa, Homo sapiens
MSHCSSRALTLLSSVFGACGLLLVGIAVSTDYWLYMEEGTVLPQNQTTEVKMALHAGLWRVCFFAGREKGRCVASEYFLEPEINLVTENTENILKTVRTATPFPMVSLFLVFTAFVISNIGHIRPQRTILAFVSGIFFILSGLSLVVGLVLYISSINDEVMNRPSSSEQYFHYRYGWSFAFAASSFLLKEVTSVGPRL

SEQ ID NO: 43437 - protein, 92 aa, Homo sapiens
MSTRNCQGMDSVIKPLDTIPEDKKVRVQRTQSTFDPFEKPANQVKRVHSENNACINFKTSSTGKESPKVRRHSSPSSPTSPKFGKADSYEKL

SEQ ID NO: 43438 - protein, 86 aa, Homo sapiens
  MOD_RES (1)..(1): Any amino acid
XVRPGSGRPEGGADSSGVGAEAELQANPFYDRYRDKIQLLRRSDPAAFESRLEKRSEFRKQPVGHSRQGDFIKCVEQKDGAQNKLV

SEQ ID NO: 43439 - protein, 119 aa, Homo sapiens
  MOD_RES (1)..(1): Any amino acid
XSPKQFSVKEFYLKIIPWRLYTFRVCPGTKFSYLGPDPVHKLLTLVVDDGIQPPVELSCKERNILAATFIRSLHKNIGGSETFQDKVNFFQRELRQVHMKRPHSKVTLKVSRHALLESE

SEQ ID NO: 43440 - protein, 343 aa, Homo sapiens
MEEPQSDPSVEPPLSQETFSDLWKLLPENNVLSPLPSQAMDDLMLSPDDIEQWFTEDPGPDEAPRMPEAAPPVAPAPAAPTPAAPAPAPSWPLSSSVPSQKTYQGSYGFRLGFLHSGTAKSVTCTYSPALNKMFCQLAKTCPVQLWVDSTPPPGTRVRAMAIYKQSQHMTEVVRRCPHHERCSDSDGLAPPQHLIRVEGNLRVEYLDDRNTFRHSVVVPYEPPEVGSDCTTIHYNYMCNSSCMGGMNRRPILTIITLEDSSGNLLGRNSFEVRVCACPGRDRRTEEENLRKKGEPHHELPPGSTKRALPNNTSSSPQPKKKPLDGEYFTLQKTFPARHGGSHL

SEQ ID NO: 43441 - protein, 186 aa, Homo sapiens
MVVVTGREPDSRRQDGAMSSSDAEDDFLEPATPTATQAGHALPLLPQEFPEVVPLNIGGAHFTTRLSTLRCYEDTMLAAMFSGRHYIPTDSEGRYFIDRDGTHFGDVLNFLRSGDLPPRERVRAVYKEAQYYAIGPLLEQLENMQPLKGEKVRQAFLGLMPYYKGEGQLPRMVGMWEEVCKASVSV

SEQ ID NO: 43442 - protein, 29 aa, Homo sapiens
MGAKSMRSWCLCQICSCGPGLTREPLPLP

SEQ ID NO: 43443 - protein, 95 aa, Homo sapiens
MGHMLLPFRLGLGGPIGSGHQFFPWIHIGDLAGILTHALEANHVHGVLNGVAPSSATNAEFAQTLGAALGRRAFIPLPSAVVQAVFGRQRAIMLL

SEQ ID NO: 43444 - protein, 528 aa, Homo sapiens
EVGLQHGGCGTGGGYGDGLARSGQSWRWWRSLSLGAVGSSAGTEPGRPAGASTFRLLRRRQQRHSGSKWLLRSWVQIFMYDFSLEKKTIEWAEEIKKIEEAEREAECKIAEAEAKVNSKSGPEGDSKMSFSKTHSTATMPPPINPILASLQHNSILTPTRVSSSATKQKVLSPPHIKADFNLADFECEEDPFDNLELKTIDEKEELRNILVGTTGPIMAQLLDNNLPRGGSGSVLQDEEVLASLERATLDFKPLHKPNGFITLPQLGNCEKMSLSSKVSLPPIPAVSNIKSLSFPKLDSDDSNQKTAKLASTFHSTSCLRNGTFQNSLKPSTQSSASELNGHHTLGLSALNLDSGTEMPALTSSQMPSLSVLSVCTEESSPPNTGPTVTPPNFSVSQVPNMPSCPQAYSELQMLSPSERQCVETVVNMGYSYECVLRAMKKKGENIEQILDYLFAHGQLCEKGFDPLLVEEALEMHQCSEEKMMEFLQLMSKFKEMGFELKDIKEVLLLHNNDQDNALEDLMARAGAS

SEQ ID NO: 43445 - protein, 96 aa, Homo sapiens
MRGHPSLLLLYMALTTCLDTSPSEETDQVLPLPGVQDPAPSSFRPRNLDSQPLLLPPGPHCFPSPYDSSPRDPPFFCPSCLWVQKSSWVPQRPRAS

SEQ ID NO: 43446 - protein, 471 aa, Homo sapiens
MLQLFIGTADDRLLRPHAFYQVHRITGKTVSTTSHEAILSNTKVLEIPLLPENSMRAVIDCAGILKLRNSDIELRKGETDIGRKNTRVRLVFRVHVPQPSGRTLSLQVASNPIECSQRSAQELPLVEKQSTDSYPVVGGKKMVLSGHNFLQDSKVIFVEKAPDGHHVWEMEAKTDRDLCKPNSLVVEIPPFRNQRITSPVHVSFYVCNGKRKRSQYQRFTYLPANVPIIKTEPTDDYEPAPTCGPVSQGLSPLPRPYYSQQLAMPPDPSSCLVAGFPPCPQRSTLMPAAPGVSPKLHDLSPAAYTKGVASPGHCHLGLPQPAGEAPAVQDVPRPVATHPGSPGQPPPALLPQQVSAPPSSSCPPGLEHSLCPSSPSPPLPPATQEPTCLQPCSPACPPATGRPQHLPSTVRRDESPTAGPRLLPEVHEDGSPNLAPIPVTVKREPEELDQLYLDDVNEIIRNDLSSTSTHS

SEQ ID NO: 43447 - protein, 117 aa, Homo sapiens
  MOD_RES (1)..(1): Any amino acid
XAEQFLDDSTALYTFAESYKKKISPKEEISLSTVELSGTVVKQGYLAKQEENRPVGGFSLRGSLVSALEDNGVPTGVKGNVQGNLFKVITKDDTHYYIQASSKAERAEWIEAIKKLT

SEQ ID NO: 43448 - protein, 475 aa, Homo sapiens [sequence omitted]

SEQ ID NO: 43449 - protein, 269 aa, Homo sapiens
MTGAKRKKKSMLWSKMHTPQCEDIIQWCRRRLPILDWAPHYNLKENLLPDTVSGIMLAVQQVTQGLAFAVLSSVHPVFGLYGSLFPAIIYAIFGMGHHVATGTFALTSLISANAVERIVPQNMQNLTTQSNTSVLGLSDFEMQRIHVAAAVSFLGGVIQVAMFVLQLGSATFVVTEPVISAMTTGAATHVVTSQVKYLLGMKMPYISGPLGFFYIYAYVFENIKSVRLEALLLSLLSIVVLVLVKELNEQFKRKIKVVLPVDLVLNSLT

SEQ ID NO: 43450 - protein, 228 aa, Homo sapiens
MAFLMHLLVCVFGMGSWVTINGLWVELPLLVMELPEGWYLPSYLTVVIQLANIGPLLVTLLHHFRPSCLSEVPIIFTLLGVGTVTCIIFAFLWNMTSWVLDGHHSIAFLVLTFFLALVDCTSSVTFLPFMSRLPTYYLTTFFVGEGLSGLLPALVALAQGSGLTTCVNVTEISDSVPSPVPTRETDIAQGVPRALVSALPGMEAPLSHLESRYLPAHFSPLVFFLLLS

SEQ ID NO: 43451 - protein, 204 aa, Homo sapiens
MEESHFNSNPYFWPSIPTVSGQIENTMFINKMKDQLLPEKGCGLAPPHYPTLLTVPASVSLPSGISMDTESKSDQLTPHSQASVTQNITVVPVPSTGLMTAGVSCSQRWRREGSQSRGPGLVITSPSGSLVTTASSAQTFPISAPMIVSALPPGSQALQVVPDLSKKVASTLTEEGGGGGGGGGSVAPKPPRGRKKKRMLESGL

SEQ ID NO: 43452 - protein, 178 aa, Homo sapiens
MDTEGFGELLQQAEQLAAETEGISELPHVERNLQEIQQAGERLRSRTLTRTSQETADVKASVLLGSRGLDISHISQRLESLSAATTFEPLEPVKDTDIQGFLKNEKDNALLSAIEESRKRTFGMAEEYHRESMLVEWEQVKQRILHTLLASGEDALDFTQESEPSYISDVGPPGRSSL

SEQ ID NO: 43453 - protein, 171 aa, Homo sapiens
MAASPHTLSSRLLTGCVGGSVWYLERRTIQDSPHKFLHLLRNVNKQWITFQHFSFLKRMYVTQLNRSHNQQVRPKPEPVASPFLEKTSSGQAKAEIYEMRPLSPPSLSLSRKPNEKELIELEPDSVIEDSIDVGKETKEEKRWKEMKLQVYDLPGILARLSKIKLTGTLFF

SEQ ID NO: 43454 - protein, 130 aa, Homo sapiens
LAGAGSMGSPGATTGWGLLDYKTEKYVMTRNWRVGALQRLLQFGIVVYVVGSPRQKRLPGAGPGTPVFHHHQTQRGFRHSDQGAWKPAVGCGRLREATSGRERVLLGDQLPCDASPSSGQMPRAPVRPTG

SEQ ID NO: 43455 - protein, 7 aa, Homo sapiens
MSKSVPA

SEQ ID NO: 43456 - protein, 111 aa, Homo sapiens
MLETFQNLASVDDETQFKASGSVSQQDIYGEKIPKESKIATFTRNVSWASVLGKIWDSLSIEDQTTNQGRNLSRNHGLERLCESNDQCGEALSQIPHLNLYKKIPPGVKQY

SEQ ID NO: 43457 - protein, 104 aa, Homo sapiens
MDTSLILEYCSTFQLDCDAVLQLFIETLLHNTNAGQGQGDASMDSAKRRHPKLLAKALEMVPLLTSTKDLVISLSGILHKLDPYDYEMIEVVLKVIERADEKIT

SEQ ID NO: 43458 - protein, 189 aa, Homo sapiens
MDSQELKTLINYYCQERYFHHVLLVASEGIKRYGSDPVFRFYHAYGTLMEGKTQEALREFEAIKNKQDVSLCSLLALIYAHKMSPNPDREAILESDARVKEQRKGAGEKALYHAGLFLWHIGRHDKAREYIDRMIKISDGSKQGHVLKAWLDITRGKEPYTKKALKYFEEGLQDGNDTFALLGKVAAPR

SEQ ID NO: 43459 - protein, 181 aa, Homo sapiens
  MOD_RES (1)..(1): Any amino acid
XVLHALPAAQRRAPGHGAHLRVGLGGLAAALRLPARPLLPSAGRPALLRLPEHGALLLRELHRGPEFLCKECPKIHIHIDRIDKKDVPEEQEHMRRWLHERFEIKDKMLIEFYESPDPERRKRFPGKSVNSKLSIKKTLPSMLILSGLTAGMLMTDAGRKLYVNTWIYGTLLGCLWVTIKA

SEQ ID NO: 43460 - protein, 93 aa, Homo sapiens
EALEKLENEPAIQQVLKRLCDLHAIHGILTNSGDFLHDAFLSGAQVDMARTAYLDLLRLIREIRCKAIQAKEMGKVDSVNLRIKEMEGCHPVN

SEQ ID NO: 43461 - protein, 4126 aa, Homo sapiens
MEPEDLPWPGELEEEEEEEEEEEEEEEEAAAAAAANVDDVVVVEEVEEEAGRELDSDSHYGPQHLESIDDEEDEEAKAWLQAHPGRILPPLSPPQHRYSEGERTSLEKKTESWHCLPQEMDSSQTLDTSQTRFNVRTEDTEVTDFPSLEEGILTQSENQVKEPNRDLFCSPLLVIQDSFASPDLPLLTCLTQDQEFAPDSLFHQSELSFAPLRGIPDKSEDTEWSSRPSEVSEALFQATAEVASDLASSRFSVSQHPLIGSTAVGSQCPFLPSEQGNNEETISSVDELKIPKDCDRYDDLCSYMSWKTRKDTQWPENNLADKDQVSVATSFDITDENIATKRSDHFDAARSYGQYWTQEDSSKQAETYLTKGLQGKVESDVITLDGLNENAVVCSERVAELQRKPTRESEYHSSDLRMLRMSPDTVPKAPKHLKAGDTSKGGIAKVTQSNLKSGITTTPVDSDIGSHLSLSLEDLSQLAVSSPLETTTGQHTDTLNQKTLADTHLTEETLKVTAIPEPADQKTATPTVLSSSHSHRGKPSIFYQQGLPDSHLTEEALKVSAAPGLADQTTGMSTLTSTSYSHREKPGTFYQQELPESNLTEEPLEVSAAPGPVEQKTGIPTVSSTSHSHVEDLLFFYRQTLPDGHLTDQALKVSAVSGPADQKTGTATVLSTPHSHREKPGIFYQQEFADSHQTEETLTKVSATPGPADQKTEIPAVQSSSYSQREKPSILYPQDLADSHLPEEGLKVSAVAGPADQKTGLPTVPSSAYSHREKLLVFYQQALLDSHLPEEALKVSAVSGPADGKTGTPAVTSTSSASSSLGEKPSAFYQQTLPNSHLTEEALKVSIVPGPGDQKTGIPSAPSSFYSHREKPIIFSQQTLPDFLFPEEALKVSAVSVLAAQKTGTPTVSSNSHSHSEKSSVFYQQELPDSDLPRESLKMSAIPGLTDQKTVPTPTVPSGSFSHREKPSIFYQQEWPDSYATEKALKVSTGPGPADQKTEIPAVQSSSYPQREKPSVLYPQVLSDSHLPEESLKVSAFPGPADQMTDTPAVPSTFYSQREKPGIFYQQTLPESHLPKEALKISVAPGLADQKTGTPTVTSTSYSQHREKPSIFHQQALPGTHIPEEAQKVSAVTGPGNQKTWIPRVLSTFYSQREKPGIFYQQTLPGSHIPEEAQKVSPVLGPADQKTGTPTPTSASYSHTEKPGIFYQQVLPDNHPTEEALKISVASEPVDQTTGTPAVTSTSYSQYREKPSIFYQQSLPSSHLTEEAKNVSAVPGPADQKTVIPILPSTFYSHTEKPGVFYQQVLPHSHPTEEALKISVASEPVDQTTGTPTVTSTSYSQHTEKPSIFYQQSLPGSHLTEEAKNVSAVPGPGDRKTGIPTLPSTFYSHTEKPGSFYQQVLPHSHLPEEALEVSVAPGPVDQTIGTPTVTSPSSSFGEKPIVIYKQAFPEGHLPEESLKVSVAPGPVGQTTGAPTITSPSYSQHRAKSGSFYQLALLGSQIPEEALRVSSAPGPADQTTGIPTITSTSYSFGEKPIVNYKQAFPDGHLPEEALKVSIVSGPTEKKTDIPAGPLGSSALGEKPITFYRQALLDSPLNKEVVKVSAAPGPADQKTETLPVHSTSYSNRGKPVIFYQQTLSDSHLPEEALKVPPVPGPDAQKTETPSVSSSLYSYREKPIVFYQQALPDSELTQEALKVSAVPQPADQKTGLSTVTSSFYSHTEKPNISYQQELPDSHLTEEALKVSNVPGPADQKTGVSTVTSTSYSHREKPIVSYQRELPHFTEAGLKILRVPGPADQKTGINILPSNSYPQREHSVISYEQELPDLTEVTLKAIGVPGPADQKTGIQIASSSSYSNREKASIFHQQELPDVTEEALNVFVVPGQGDRKTEIPTVPLSYYSRREKPSVISQQELPDSHLTEEALKVSPVSIPAEQKTGIPIGLSSSYSHSHKEKLKISTVHIPDDQKTEFPAATLSSYSQIEKPKISTVIGPNDQKTPSQTAFHSSYSQTVKPNILFQQQLPDRDQSKGILKISAVPELTDVNTGKPVSLSSSYFHREKSNIFSPQELPGSHVTEDVLKVSTIPGPAGQKTVLPTALPSSFSHREKPDIFYQKDLPDRHLTEDALKISSALGQADQITGLQTVPSGTYSHGENHKLVSEHVQRLIDNLNSSDSSVSSNNVLLNSQADDRVVINKPESAGFRDVGSEEIQDAENSAKTLKEIRTLLMEAENMALKRCNFPAPLARFRDISDISFIQSKKVVCFKEPSSTGVSNGDLLHRQPFTEESPSSRCIQKDIGTQTNLKCRRGIENWEFISSTTVRSPLQEAESKVSMALEETLRQYQAAKSVMRSEPEGCSGTIGNKIIIPMMTVIKSDSSSDASDGNGSCSWDSNLPESLESVSDVLLNFFPYVSPKTSITDSREEEGVSESEDGGGSSVDSLAAHVKNLLQCESSLNHAKEILRNAEEEESRVRAHAWNMKFNLAHDCGYSISELNEDDRRKVEEIKAELFGHGRTTDLSKGLQSPRGMGCKPEAVCSHIIIESHEKGCFRTLTSEHPQLDRHPCAFRSAGPSEMTRGRQNPSSCRAKHVNLSASLDQNNSHFKVWNSLQLKSHSPFQNFIPDEFKISKGLRMPFDEKMDPWLSELVEPAFVPPKEVDFHSSSQMPSPEPMKKFTTSITFSSHRHSKCISNSSVVKVGVTEGSQCTGASVGVFNSHFTEEQNPPRDLKQKTSSPSSFKMHSNSQDKEVTILAEGRRQSQKLPVDFERSFQEEKPLERSDFTGSHSEPSTRANCSNFKEIQISDNHTLISMGRPSSTLGVNRSSSRLGVKEKNVTITPDLPSCIFLEQRELFEQSKAPRADDHVRKHHSPSPQHQDYVAPDLPSCIFLEQRELFEQCKAPYVDHQMRENHSPLPQGQDSIASDLPSPISLEQCQSKAPGVDDQMNKHHFPLPQGQDCVVEKNNQHKPKSHISNINVEAKFNTVVSQSAPNHCTLAASASTPPSNRKALSCVHITLCPKTSSKLDSGTLDERFHSLDAASKARMNSEFNFDLHTVSSRSLEPTSKLLTSKPVAQDQESLGFLGPKSSLDFQVVQPSLPDSNTITQDLKTIPSQNSQIVTSRQIQVNISDFEGHSNPEGTPVFADRLPEKMKTPLSAFSEKLSSDAVTQITTESPEKTLFSSEIFINAEDRGHEIIEPGNQKLRKAPVKFASSSSVQQVTFSRGTDGQPLLLPYKPSGSTKMYYVPQLRQIPPSPDSKSDTTVESSHSGSNDAIAPDFPAQVLGTRDDDLSATVNIKHKEGIYSKRVVTKASLPVGEKPLQNENADASVQVLITGDENLSDKKQQEIHSTRAVTEAAQAKEKESLQKDTADSSAAAAAEHSAQVGDPEMKNLPDTKAITQKEEIHRKKTVPEEAWPNNKESLQINIEESECHSEFENTTRSVFRSAKFYIHHPVHLPSDQDICHESLGKSVFMRHSWKDFFQHHPDKHREHMCLPLPYQNMDKTKTDYTRIKSLSINVNLGNKEVMDTTKSQVRDYPKHNGQISDPQRDQKVTPEQTTQHTVSLNELWNKYRERQRQQRQPELGDRKELSLVDRLDRLAKILQNPITHSLQVSESTHDDSRGERSVKEWSGRQQQRNKLQKKKRFKSLEKSHKNTGELKKSKVLSHHRAGRSNQIKIEQIKFDKYILSKQPGFNYISNTSSDCRPSEESELLTDTTTNILSGTTSTVESDILTQTDREVALHERSSSVSTIDTARLIQAFGHERVCLSPRRIKLYSSITNQQRRYLEKRSKHSKKVLNTGHPLVTSEHTRRRHIQVANHVISSDSISSSASSFLSSNSTFCNKQNVHMLNKGIQAGNLEIVNGAKKHTRDVGITFPTPSSSEAKLEENSDVTSWSEEKREEKMLFTGYPEDRKLKKNKKNSHEGVSWFVPVENVESRSKKENVPNTCGPGISWFEPITKTRPWREPLREQNCQGQHLDGRGYLAGPGREAGRDLLRPFVRATLQESLQFHRPDFISRSGERIKRLKLIVQERKLQSMLQTERDALFNIDRERQGHQNRMCPLPKRVFLAIQKNKPISKKEMIQRSKRIYEQLPEVQKKREEEKRKSEYKSYRLRAQLYKKRVTNQLLGRKVPWD

SEQ ID NO: 43462 - protein, 95 aa, Homo sapiens
MTMTANKNSSITHGAGGTKAPRGTLSRSQSVSPPPVLSPPRSPIYPLSDSETSACRYPSHSSSRVLLKDRHPPAPSPQNPQDPSPDTSPPTCPFK

SEQ ID NO: 43463 - protein, 288 aa, Homo sapiens
MESVPGDYSKRVYQGVRVKHTVKDLLAEKRSGQTSNSRLNGSVSSSQSPFVQMPGSPVTSGYYGVRRSFLSDSDFHNSKQFSNDVYTSSVGKPFPCESSAGQSHAALLEPYFPQEPYGDYRPPALTPNAGSLFSASPLPPLLPPPFPGDPAHFLFRDSWEQTLPDGLSQPDPVSADALLTLPPSTSCLSQLESGSIAQHRGSSWGSSLAGAQSYSLHALEDLHHTPGYPTPPPYPFTPFMTVSNDLPPKVGPLSPDEEADTGSLHDPSPWVKEDGSIAWGSYECRRAY

SEQ ID NO: 43464 - protein, 137 aa, Homo sapiens
MSDKSELKAELERKKQRLAQIREEKKRKEEERKKKETDQKKEAVAPVQEESDLEKKRREAEALLQSMGLTPESPIAEQPLRVVTADTCLFHYLVPPPMSPSSKSVSTPSEAGSQDSGDGAVGSRRGPIKLGMAKITQ

SEQ ID NO: 43465 - protein, 200 aa, Homo sapiens
MIESQEEWQQLNPAQKTLHRDVMLETYNHLVSVGCSGIKPDVIFKLEHGKDPWIIESELSRWIYPDRVKGLESSQQIISGELLFQREILERAPKDNSLYSVLKIWHIDNQMDRYQGNQDRVLRQVTVISRETLTDEMGSKYSAFGKMFNRCTDLAPLSQKFHKFDSCENSLKSNSDLLNYNRSYARKNPTKRFRCGRPPK

SEQ ID NO: 43466 - protein, 228 aa, Homo sapiens
MMVLQVSAAPRTVALTALLMVLLTSVVQGRATPENYLFQGRQECYAFNGTQRFLERYIYNREEFVRFDSDVGEFRAVTELGRPDEEYWNSQKDILEEERAVPDRMCRHNYELGGPMTLQRRGSIQVRWFLNGQEETAGVVSTNLIRNGDWTFQILVMLEMTPQQGDVYTCQVEHTSLDSPVTVEWKAQSDSARSKTLTGAGGFVLGLIICGVGIFMHRRSKKVQRGSA

SEQ ID NO: 43467 - protein, 124 aa, Homo sapiens
MTALDLFLTNQFSEALSYLKPRTKESMYHSLTYATILEMQAMMTFDPQDILLAGNMMKEAQMLCQRHRRKSSVTDSFSSLVNRPTLGQFTEEEIHAEVCYAECLLQRAALTFLQGSSHGGAVRP

SEQ ID NO: 43468 - protein, 669 aa, Homo sapiens
MGRKYTSTPRHIEVFPPFRLLPEKMTLIPMNMMQVMSEGGPQPQSIVHFSISNQTVAVVNRRGQVTGKIVGTAVVHGTIQTVNEDTGKVIVFSQDEVQIEVVQLRAVRILAAATRLITATKMPVYVMGVTSTQTPFSFSNANPGLTFHWSMSKRDVLDLVPRHSEVFLQLPVEHNFAMVVHTKAAGRTSIKVTVHCMNSSSGQFEGNLLELSDEVQILVFEKLQLFYPECQPEQILMPINSQLKLHTNREGAAFVSSRVLKCFPNSSVIEEDGEGLLKAGSIAGTAVLEVTSIEPFGVNQTTITGVQVAPVTYLRVSSQPKLYTAQGRTLSAFPLGMSLTFTVQFYNSIGEKFHTHNTQLYLALNRDDLLHIGPGNKNYTYMAQAVNRGLTLVGLWDRRHPGMADYIPVAVEHAIEPDTKLTFVGDIICFSTHLVSQHGEPGIWMISANNILQTDIVTGVGVARSPGTAMIFHDIPGVVKTYREVVVNASSRLMLSYDLKTYLTNTLNSTVFKLFITTGRNGVNLKGFCTPNQALAITKVLLPATLMLCHVQFSNTLLDIPASKVFQVHSDFSMEKDHCEDSAILKRFTGSYQILLLTLFAVLASTASIFLAYNAFLNKIQTVPVVYVPTLGTPQPGFFNSTSSPPHFMSLQPPLAQSRLQHWLWSIRH

SEQ ID NO: 43469 - protein, 40 aa, Homo sapiens
MSTSWSDRLQNAADMPANMDKHALKKYRREAYHRVQVPRV

SEQ ID NO: 43470 - protein, 115 aa, Homo sapiens
MQCSALRKNGFVVLKGRPCKIVEMSTSKTGKHGHAKVHLVGIDIFTGKKYEDICPSTHNMDVPNIKRNDYQLICIQDGYLSLLTETGEVREDLKLPEGELGKEIEGKYNAGEDVQ

SEQ ID NO: 43471 - protein, 156 aa, Homo sapiens
MNDHLHVGSHAHGQIQVQQLFEDNSNKRTVLTTQPNGLTTVGKTGLPVVPERQLDSIHRRQGSSTSLKSMEGMGKVKATPMTPEQAMKQYMQKLTAFEHHEIFSYPEIYFLGLNAKKRQGMTGGPNNGGYDDDQGSYVQVPHDHVAYRYEVLKVIG

SEQ ID NO: 43472 - protein, 908 aa, Homo sapiens
MADDDVLFEDVYELCEVIGKGPFSVVRRCINRETGQQFAVKIVDVAKFTSSPGLSTEDLKREASICHMLKHPHIVELLETYSSDGMLYMVFEFMDGADLCFEIVKRADAGFVYSEAVASHYMRQILEALRYCHDNNIIHRDVKPHCVLLASKENSAPVKLGGFGVAIQLGESGLVAGGRVGTPHFMAPEVVKREPYGKPVDVWGCGVILFILLSGCLPFYGTKERLFEGIIKGKYKMNPRQWSHISESAKDLVRRMLMLDPAERITVYEALNHPWLKERDRYAYKIHLPETVEQLRKFNARRKLKGAVLAAVSSHKFNSFYGDPPEELPDFSEDPTSSGAVSQVLDSLEEIHALTDCSEKDLDFLHSVFQDQHLHTLLDLYDKINTKSSPQIRNPPSDAVQRAKEVLEEISCYPENNDAKELKRILTQPHFMALLQTHDVVAHEVYSDEALRVTPPPTSPYLNGDSPESANGDMDMENVTRVRLVQFQKNTDEPMGITLKMNELNHCIVARIMHGGMIHRQGTLHVGDEIREINGISVANQTVEQLQKMLREMRGSITFKIVPSYRTQSSSCERDSPSTSRQSPANGHSSTNNSVSIYVRAQFEYDPAKDDLIPCKEAGIRFRVGDIIQIISKDDHNWWQGKLENSKNGTAGLIPSPELQEWRVACIAMEKTKQEQQASCTWFGKKKKQYKDKYLAKHNAVFDQLDLVTYEEVVKLPAFKRKTLVLLGAHGVGRRHIKNTLITKHPDRFAYPIPHTTRPPKKDEENGKNYYFVSHDQMMQDISNNEYLEYGSHEDAMYGTKLETIRKIHEQGLIAILDVEPQALKVLRTAEFAPFVVFIAAPTITPGLNEDESLQRLQKESDILQRTYAHYFDLTIINNEIDETIRHLEEAVELVCTAPQWVPVSWVY

SEQ ID NO: 43473 - protein, 890 aa, Homo sapiens
  MOD_RES (1)..(1): Any amino acid
XRRVEQRKLLLDMSVSFHTHTKELWTWMEDLQKEMLEDVCADSVDAVQELIKQFQQQQTATLDATLNVIKEGEDLIQQLRSAPPSLGEPSEARDSAVSNNKTPHSSSISHIESVLQQLDDAQVQMEELFHERKIKLDIFLQLRIFEQYTIEVTAELDAWNEDLLRQMNDFNTEDLTLAEQRLQRHTERKLAMNNMTFEVIQQGQDLHQYITEVQASGIELICEKDIDLAAQVQELLEFLHEKQHELELNAEQTHKRLEQCLQLRHLQAEVKQVLGWIRNGESMLNASLVNASSLSEAEQLQREHEQFQLAIEKTHQSALQVQQKAEVLLQAGHYDADAIRECAEKVALHWQQLMLKMEDRLKLVNASVAFYKTSEQVCSVLESLEQEYRRDEDWCGGRDKLGPAAEIDHVIPLISKHLEQKEAFLKACTLARRNAEVFLKYIHRNNVSMPSVASHTRGPEQQVKAILSELLQRENRVLHFWTLKKRRLDQCQQYVVFERSAKQALDWIQETGEFYLSTHTSTGETTEETQELLKEYGEFRVPAKQTKEKVKLLIQLADSFVEKGHIHATEIRKWVTTVDKHYRDFSLRMGKYRYSLEKALGVNTEDNKDLELDIIPASLSDREVKLRDANHEVNEEKRKSARKKEFIMAELLQTEKAYVRDLHECLETYLWEMTSGVEEIPPGILNKEHIIFGNIQEIYDFHNNIFLKELEKYEQLPEDVGHCFVTWADKFQMYVTYCKNKPDSNQLILEHAGTFFDEIQQRHGLANSISSYLIKPVQRITKYQLLLKELLTCCEEGKGELKDGLEVMLSVPKKANDAMHVSMLEGFDENLDVQGELILQDAFQVWDPKSLIRKGRERHLFLFEISLVFSKEIKDSSGHTKYVYKNKLLP

SEQ ID NO: 43474 - protein, 172 aa, Homo sapiens
MGFWCRMSENQEQEEVITVRVQDPRVQNEGSWNSYVDYKIFLHTNSKAFTAKTSCVRRRYREFVWLRKQLQRNAGLVPVPELPGKSTFFGTSDEFIEKRRQGLQHFLEKVLQSVVLLSDSQLHLFLQSQLSVPEIEACVQGRSTMTVSDAILRYAMSNCGWAQEERQSSSHL

SEQ ID NO: 43475 - protein, 66 aa, Homo sapiens
  MOD_RES (1)..(1): Any amino acid
XHRGRSPEEGQKSRRRHSRRCSKTLCKDSPEAQSSRPPSQPLQMLGYLSARGVEEFLLDHWVGVCC

SEQ ID NO: 43476 - protein, 95 aa, Homo sapiens
MKLLAATVLLLTICSLEGALVRRQAKEPCVESLVSQYFQTVTDYGKDLMEKVKSPELQAEAKSYFEKSKEQLTPLIKKAGTELVNFLSYFVELGT

SEQ ID NO: 43477 - protein, 489 aa, Homo sapiens
MQLPRWWELGDPCAWTGQGRGTRRMSPATTGTFLLTAFLLSCADGINGTVNWKTRQANNFIISRKMAAGMKDVYSIFSKVHSDRNVYPSAGVLFVHVLEREYFKGEFPPYPKPGEISNDPITFNTNLMGYPDRPGWLRYIQRTPYSDGVLYGSPTAENVGKPTIIEITAYNRRTFETARHNLIINIMSAEDFPLPYQAEFFIKNMNVEEMLASEVLGDFLGAVKNVWQPERLNAINITSALDRGGRVPLPINDLKEGVYVMVGADVPFSSCLREVENPQNQLRCSQEMEPVITCDKKFRTQFYIDWCKISLVDKTKQVSTYQEVIRGEGILPDGGEYKPPSDSLKSRDYYTDFLITLAVPSAVALVLFLILAYIMCCRREGVIQLVHHSAIQKSTKELRDMSKNREIAWPLSTLPVFHPVTGEIIPPLHTDNYDSTNMPLMQTQQWSFAPVAQAGVQWSDLGSLQPPPPRNLPHQTQIPQQQTTGKWYP

SEQ ID NO: 43478 - protein, 428 aa, Homo sapiens
MEAETGSSVETGKKANRGTRIALVVFVGGTLVLGTILFLVSQGLLSLQAKQEYCLKPECIEAAAAILSKVNLSVDPCDNFFRFACDGWISNNPIPEDMPSYGVYPWLRHNVDLKLKELLEKSISRRRDTEAIQKAKILYSSCMNETIEKADAKPLLHILRHSPFRWPVLESNIGPEGVWSERKFSLLQTLATFRGQYSNSVFIRLYVSPDDKASNEHILKLDQATLSLAVREDYLDNSTEAKSYRDALYKFMVDTAVLLGANSSRAEHDMKSVLRLEIKIAEIMIPHENRTSEAMYNKMNISELSAMIPQFDWLGYIKKVIDTRLYPHLKDISPSENVVVRVPQYFKDLFRILGSERKKTIANYLVWRMVYSRIPNLSRRFQYRWLEFSRVIQGTTTLLPQWDKCVNFIESALPYVVGKMFVDVYFQE

SEQ ID NO: 43479 - protein, 187 aa, Homo sapiens
MSQKQEEENPAEETGEEKQDTQEKEGILPERAEEAKLKAKYPSLGQKPGGSDFLMKRLQKGDYKSLHWSVLLCADEMQKYFDSGDYNMAKAKMKNKQLPSAGPDKNLVTGDHIPTPQDLPQRKSSLVTSKLAGQSFALVAQAGVQWHDLCLLQPLPPGFKRFSCLSLLSSWDYRHATPRPANFVIFL

SEQ ID NO: 43480 - protein, 321 aa, Homo sapiens
  MOD_RES (1)..(1): Any amino acid
XMVYGLDQSKMNCDRVFNVFCLYGNVEKVKFMKSKPGAAMVEMADGYAVDRAITHLNNNFMFGQKLNVCVSKQPAIMPGQSYGLEDGSCSYKDFSESRNNRFSTPEQAAKNRIQHPSNVLHFFNAPLEVTEENFFEICDELGVKRPSSVKVFSGKSERSSSGLLEWESKSDALETLGFLNHYQMKNPRLTGSNYPGLSISLRLTGSSAQEEASGVALGEAPDHSYESLRVTSAQKHVLHVQLNRPNKRNAMNKVFWREMVECFNKISRDADCRAVVISGAGKMFTAGIDLMDMASDILQPKGDDVARISWYLRDIITRYQE

SEQ ID NO: 43481 - protein, 128 aa, Homo sapiens
MSGGEQKPERYYVGVDVGTGSVRAALVDQSGVLLAFADQPIKNWEPQFNHHEQSSEDIWAACCVVTKKVVQGIDLNQIRGLGFDATCSLVVLDKQFHPLPVNQEGLSAPWCVSGHIQQRKAGTTVSGK

SEQ ID NO: 43482 - protein, 132 aa, Homo sapiens
MKHATGNYIIIMDADLSHHPKFIPEFIRKQKEGNFDIVSGTRYKGNGGVYGWDLKRKIIRLYRKEVLEKLIEKCVSKGYVFQMEMIVRARQLNYTIGEVPISFVDRVYGESKLGGNEIVSFLKGLLTLFATT

SEQ ID NO: 43483 - protein, 167 aa, Homo sapiens
MRVEHARMHAKHRGHEAMHAEMVLILIATLVVAQLLLVQWKQRHPRSYNFYSESGMPTKHLSDSVCAVCGQQIFVDVSEEGIIENTYRLSCNHVFHEFCIRGWCIVGKKQTCPYCKEKVDLKRMFSNPWERPHVMYGQLLDWLRYLVAWQPVIIGVVQGINYILGLE

SEQ ID NO: 43484 - protein, 71 aa, Homo sapiens
MLAPCSGWELGCFRLCLRQVRLWAGAGRWACWACQARPYSSGGSERWPGSETEVPPPGPGRRTLKEWTLQV

SEQ ID NO: 43485 - protein, 89 aa, Homo sapiens
MSNYVNDMWPGSPQEKDSPSTSRSGGSSRLSSRSRSRSFSRSSRSHSRVSSRFSSRSRRSKSRSRSRRRHQRKYRRYSRSYSRSRSRSR

SEQ ID NO: 43486 - protein, 360 aa, Homo sapiens
TSTSRETQMTPLSLKVTPCTCPQSLRPGTAHSPSQMSPAQRRQPLTRLRAWRRLILGPLGATPIRKSSRPASHLPDTAPWLSSARLEAPTGWPWGLLLHSIFELNKHISAVECLLTYLENTVVPPLAKGLGAGVRTEADVEEEALRRKLEELTSNVSDQETSSEEEEAKDEKAEPNRDKSVGPLPQADPEVGTAAHQTNRQEKSPQDPGDPVQYNRTTDEELSELEDRVAVTASEVQQAESEVSDIESRIAALRAAGLTVKPSGKPRRKSNLPIFLPRVAGKLGKRPEDPNADPSSEAKAMAVPYLLRRKFSNSLKSQGKDDDSFDRKSVYRGSLTQRNPNARKGMASHTFAKPVVAHQS

SEQ ID NO: 43487 - protein, 373 aa, Homo sapiens
MDEVEQDQHEARLKELFDSFDTTGTGSLGQEELTDLCHMLSLEEVAPVLQQTLLQDNLLGRVHFDQFKEALILILSRTLSNEEHFQEPDCSLEAQPKYVRGGKRYGRRSLPEFQESVEEFPEVTVIEPLDEEARPSHIPAGDCSEHWKTQRSEEYEAEGQLRFWNPDDLNASQSGSSPPQDWIEEKLQEVCEDLGITRDGHLNRKKLVSICEQYGLQNVDGEMLEEVFHNLDPDGTMSVEDFFYGLFKNGKSLTPSASTPYRQLKRHLSMQSFDESGRRTTTSSAMTSTIGFRVFSCLDDGMGHASVERILDTWQEEGIENSQEILKALDFSLDGNINLTELTLALENELLVTKNSIHQAALASFKAEIRHLL

SEQ ID NO: 43488 - protein, 397 aa, Homo sapiens
VWILLLLSLYPGFTSQKSDDDYEDYASNKTWVLTPKVPEGDVTVILNNLLEGYDNKLRPDIGVKPTLIHTDMYVNSIGPVNAINMEYTIDIFFAQTWYDRRLKFNSTIKVLRLNSNMVGKIWIPDTFFRNSKKADAHWITTPNRMLRIWNDGRVLYTLRLTIDAECQLQLHNFPMDEHSCPLEFSSYGYPREEIVYQWKRSSVEVGDTRSWRLYQFSFVGLRNTTEVVKTTSGDYVVMSVYFDLSRRMGYFTIQTYIPCTLIVVLSWVSFWINKDAVPARTSLGITTVLTMTTLSTIARKSLPKVSYVTAMDLFVSVCFIFVFSALVEYGTLHYFVSNRKPSKDKDKKKKNPKVVLLRVGILPASYNKDMRTGFQTSSDESFGKSPLALSVSYAIAE

SEQ ID NO: 43489 - protein, 34 aa, Homo sapiens
MEPEFLYDLLQLPKGVEPPAEEELSKELEPLLSR

SEQ ID NO: 43490 - protein, 101 aa, Homo sapiens
MAANKPKGQNSLALHKVIMVGSGGVGKSALTLQFMYDEFVEDYEPTKADSYRKKVVLDGEEVQIDILDTAGQEDYAAIRDNYFRSGEGFLCVFSITEMESF

SEQ ID NO: 43491 - protein, 20 aa, Homo sapiens
VPEKQKGSRSQASGELASQC

SEQ ID NO: 43492 - protein, 740 aa, Homo sapiens
MTEELLKQQKLNSHETTITQQSVSDSHLAELQEKIQQTEATNKILQEKLNEMSYELKCAQESSQKQDGTIQNLKETLKSRERETEELYQVIEGQNDTMAKLREMLHQSQLGQLHSSEGTSPAQQQVALLDLQSALFCSQLEIQKLQRVVRQKERQLADAKQCVQFVEAAAHESEQQKEASWKHNQELRKALQQLQEELQNKSQQLRAWEAEKYNEIRTQEQNIQHLNHSLSHKEQLLQEFRELLQYRDNSDKTLEANEMLLEKLRQRIHDKAVALERAIDEKFSALEEKEKELRQLRLAVRERDHDLERLRDVLSSNEATMQSMESLLRAKGLEVEQLSTTCQNLQWLKEEMETKFSRWQKEQESIIQQLQTSLHDRNKEVEDLSATLLCKLGPGQSEIAEELCQRLQRKERMLQDLLSDRNKQVLEHEMEIQGLLQSVSTREQESQAAAEKLVQALMERNSELQALRQYLGGRDSLMSQAPISNQQAEVTPTGRLGKQTDQGSMQIPSRDDSTSLTAKEDVSIPRSTLGDLDTVAGLEKELSNAKEELELMAKKERESQMELSALQSMMAVQEEELQVQAADMESLTRNIQIKEDLIKDLQMQLVDPEDIPAMERLTQEVLLLREKVASVESQGQEISGNRRQQLLLMLEGLVDERSRLNEALQAERQLYSSLVKFHAHPESSERDRTLQVELEGAQVLRSRLEEVLGRSLERLNRLETLAAIGGGELESVRIHHKHAY

SEQ ID NO: 43493 - protein, 155 aa, Homo sapiens
MQIFVKTLTGKTITLEVEPSDTIENVKAKIQDKEGIPPDQQRLIFAGKQLEDGRTLSDYNIQKESTLHLVLRLRGGMQIFVKTLTGKTITLEVEPSDTIENVKAKIQDKEGIPPDQQRLIFAGKQLEDGRTLSDYNIQKESTLHLVLRLRGGMQI

SEQ ID NO: 43494 - protein, 143 aa, Homo sapiens
  MOD_RES (1)..(1): Any amino acid
XYFAIAVVKKSASDLTWDNLKGKKSCHTAVGRTAGWNIPMGLLYNKINHCRFDEFFSEGCAPGSKKDSSLCKLCMGSGLNLCEPNNKEGYYGYTGAFRCLVEKGDVAFVKHQTVPQNTGETIQKRRGKGAEMGYRPVSHRKKP

SEQ ID NO: 43495 - protein, 45 aa, Homo sapiens
MSGSKKKKVTKAERLKLLQEEEERRLKEEVTVLKKGELTLFSYLP

SEQ ID NO: 43496 - protein, 47 aa, Homo sapiens
MRLSVRRVLLAAGCALVLVLAVQLGQQVLECRAVLAGLRSPRGAMRP

SEQ ID NO: 43497 - protein, 949 aa, Homo sapiens
MAAEEGVASAASAGGSWGTAAMGRVLPMLLVPVPAEAMGQLGSRAQLRTQPEALGSLTAAGSLQVLSLTPGSRGGGRCCLEGPFWHFLWEDSRNSSTPTEKPKLLALGENYELLIYEFNLKDGRCDATILYSCSREALQKLIDDQDISISLLSLRILSFHNNTSLLFINKCVILHIIFPERDAAIRVLNCFTLPLPAQAVDMIIDTQLCRGILFVLSSLGWIYIFDVVDGTYVAHVDLALHKEDMCNEQQQEPAKISSFTSLKVSQDLDVAVIVSSSNSAVALNLNLYFRQHPGHLLCERILEDLPIQGPKGVDEDDPVNSAYNMKLAKFSFQIDRSWKAQLSSLNETIKNSKLEVSCCAPWFQDILHLESPESGNHSTSVQSWAFIPQDIMHGQYNVLQKDHAKTSDPGRSWKIMHISEQEEPIELKCVSVTGFTALFTWEVERMGYTITLWDLETQGMQCFSLGTKCIPVDSSGDQQLCFVLTENGLSLILFGLTQEEFLNRLMIHGSASTVDTLCHLNGWGRCSIPIHALEAGIENRQLDTVNFFLKSKENLFNPSSKSSVSDQFDHLSSHLYLRNVEELIPALDLLCSAIRESYSEPQSKHFSEQLLNLTLSFLNNQIKELFIHTEELDEHLQKGVNILTSYINELRTFMIKFPWKLTDAIDEYDVHENVPKVKESNIWKKLSFEEVIASAILNNKIPEAQTFFRIDSHSAQKLEELIGIGLNLVFDNLKKNNIKEASELLKNMGFDVKGQLLKICFYTTNKNIRDFLVEILKEKNYFSEKEKRTIDFVHQVEKLYLGHFQENMQIQSFPRYWIKEQDFFKHKSVLDSFLKYDCKDEFNKQDHRIVLNWALWWDQLTQESILLPRISPEEYKSYSPEALWRYLTARHDWLNIILWIGEFQTQHSYASLQQNKWPLLTVDVINQNTSCNNYMRNEILDKLARYYNC

SEQ ID NO: 43498 - protein, 110 aa, Homo sapiens
MCRMSFKKETPLANAAFWAARRGNLALLKLLLNSGRVDVDCRDSVRWFGRCMPSMHHCPLWAQEHLRNTFPFTMLIYFFMCLLALSFLKHPRYCGELKNMLGEVRKKRKQ

SEQ ID NO: 43499 - protein, 190 aa, Homo sapiens
MAGDVGGRSCTDSELLLHPELLSQEFLLLTLEQKNIAVETDVRVNKDSLTDLYVQHAIPLPQRDLPKNRWGKMMEKKREQHEIKNETKRSSTVDGLRKRPLIVFDGSSTSTSIKVKKTENGDNDRLKPPPQNHDLTHRKSPSGPVKSPPLSPVGTTPVKLKRAAPKEEAEAMNNLKPPQAKRKIQHVTWP

SEQ ID NO: 43500 - protein, 249 aa, Homo sapiens
MSTELFSSTREEGSSGSGPSFRSNQRKMLNLLLERDTSFTVCPDVPRTPVGKFLGDSANLSILSGGTPKRCLDLSNLSSGEITATQLTTSADLDETGHLDSSGLQEVHLAGMNHDQHLMKCSPAQLLCSTPNGLDRGHRKRDAMCSSSANKENDNGNLVDSEMKYLGSPITTVPKLDKNPNLGEDQAEEISDELMEFSLKDQEAKVSRSGLYRSPSMPENLNRPRLKQVEKFKDNTIPDKVKKKYFSGQ

SEQ ID NO: 43501 - protein, 102 aa, Homo sapiens
IFKKLFEEGLNIQKQRLRDLRNYAKEKRDEQRRRHQDELDSMENYYKDQFSLLAEAISQEHQELKAREKSQAQVLPTEQSPRPEKTGTFPALRGDRKLSSAT

SEQ ID NO: 43502 - protein, 75 aa, Homo sapiens
MLLLEILHEIKSFPLHFDENSFFAGDKKEAHKLKEDFRLHFRNISRIMDCVGCFKCRLWGKLQTQGLGTALKILF

SEQ ID NO: 43503 - protein, 154 aa, Homo sapiens
MKGFIDDANYSVGLLDEGTNLGNVIDNYVYEHTLTGKNAFFVGDLGKIVKKHSQWQNVVAQIKPFYTVKCNSAPAVLEILAALGTGFACSSKNEMALVQELGVPPENIIYISPCKQVSQIKYAAKVGVNILTCDNEIELKKIARNHPNAKIVFH

SEQ ID NO: 43504 - protein, 163 aa, Homo sapiens
MLDLLDIEGLYPLYNRVERYLEEFPEERKTLQIDGPYDEAFYQKLLDLSTEDDGTVAFALTKVQQYRVAMTAKDCSIMIALSPCLQDASSDQRPVVPSSRSRFAFSVSVLDLDLKPYESIPHQYKLDGKIVNYYSKTVRAKDNAVMSTRFKESEDCTLVLHKV

SEQ ID NO: 43505 - protein, 325 aa, Homo sapiens
MAVMAPRTLLLLLLGALALTQTWAGSHSMRYFTTSVSRPGRGEPRFIAVGYVDDTQFVRFDSDAASQRMEPRAPWIEQEGPEYWDLQTRNVKAQSQTDRANLGTLRGYYNQSEAGSHTIQMMYGCDVGSDGRFLRGYRQDAYDGKDYIALNEDLRSWTAADMAAQITQRKWEAARVAEQLRAYLEGTCVEWLRRYLENGKETLQRTDAPKTHMTHHAVSDHEATLRCWALSFYPAEITLTWQRDGEDQTQDTELVETRPAGDGTFQKWASVVVPSGQEQRYTCHVQHEGLPKPLTLRWDRKGGSYSQAASSDSAQGSDMSLTACK

SEQ ID NO: 43506 - protein, 25 aa, Homo sapiens
  MOD_RES (1)..(1): Any amino acid
XYLYHRSLEYSGTLSSVAHPSLLVI

SEQ ID NO: 43507 - protein, 191 aa, Homo sapiens
MALWRAYQRALAAHPWKVQVLTAAHPRRCPDNTCVPCIGSLMGLGDIISQQLVERRGLQEHQRGRTLTMVSLGCGFVGPVVGGWYKVLDRFIPGTTKVDALKKMLLDQGGFAPCFLGCFLPLVGALNGLSAQDNWAKLQRDYPDALITNYYLWPAVQLANFYLVPLHYRLAVVQCVAVIWNSYLSWKAHRL

SEQ ID NO: 43508 - protein, 896 aa, Homo sapiens
MMFSPSFLNLYSHPLQGEKNHGFEVLYHSVKQGPISTKELADFIRERATIEETYSKAMAKLSKLASNGTPMGTFAPLWEVFRVSSDKLALCHLELTRKLQDLIKDVLRYGEEQLKTHKKCKEEVVSTLDAVQVLSGVSQLLPKSRENYLNRCMDQERLRRESTSQKEMDKAETKTKKAAESLRRSVEKYNSARADFEQKMLDSALRFQAMEETHLRHMKALLGSYAHSVEDTHVQIGQVHEEFKQNIENVSVEMLLRKFAESKGTGREKPGPLDFEAYSAAALQEAMKRLRGAKAFRLPGLSRREREPEPPAAVDFLEPDSGTCPEVDEEGFTVRPDVTQNSTAEPSRFSSSDSDFDDEEPRKFYVHIKPAPARAPACSPEAAAAQLRATAGSLILPPGPGGTMKRHSSRDAAGKPQRPRSAPRTSSCAERLQSEEQVSKNLFGPPLESAFDHEDFTGSSSLGFTSSPSPFSSSSPENVEDSGLDSPSHAAPGPSPDSWVPRPGTPQSPPSCRAPPPEARGIRAPPLPDSPQPLASSPGPWGLEALAGGDLMPAPADPTAREGLAAPPRRLRSRKVSCPLTRSNGDLSRSLSPSPLGSSAASTALERPSFLSQTGHGVSRGPSPVVLGSQDALPIATAFTEYVHAYFRGHSPSCLARVTGELTMTFPAGIVRVFSGTPPPPVLSFRLVHTTAIEHFQPNADLLFSDPSQSDPETKDFWLNMAALTEALQRQAEQNPTASYYNVVLLRYQFSRPGPQSVPLQLSAHWQCGATLTQVSVEYGYRPGATAVPTPLTNVQILLPVGEPVTNVRLQPAATWNLEEKRLTWRLPDVSEAGGSGRLSASWEPLSGPSTPSPVAAQFTSEGTTLSGVDLELVGSGYRMSLVKRRFATGMYLVSC

SEQ ID NO: 43509 - protein, 88 aa, Homo sapiens
  MOD_RES (1)..(1): Any amino acid
XSRRLGGLRPESPESLTSVSRTRRALVEFESNPEETREPGSPPSVQRAGLGSPERPPKTSPGSPRLQQGAGLESPQGQPEPGAASPQP

SEQ ID NO: 43510 - protein, 123 aa, Homo sapiens
ISTSPLLTAPHKLQGTSGPLLLTEEEKRTLIAEGYPIPTKLPLTKAEEKALKRVRRKIKNKISAQESRRKKKEYVECLEKKVETFTSENNELWKKVETLENANSFSSGIQPLLCSLIGLENPT

SEQ ID NO: 43511 - protein, 135 aa, Homo sapiens
MMKTLLLFVGLLLTWESGQVLGDQTVSDNELQEMSNQGSKYVNKEIQNAVNGVKQIKTLIEKTNEERKTLLSNLEEAKKKKEDALNETRESETKLKELPGVCNETMMALWEECKPCLKQTCMKFYARVCRSGSGL

SEQ ID NO: 43512 - protein, 268 aa, Homo sapiens
VEKIKTTVKESATEEKLTPVLLAKQLAALKQQLVASHLEKLLGPDAAINLTDPDGALAKRLLLQLEATKNSKGGSGGKTTGTPPDSSLVTYELHSRPEQDKFSQAAKVAELEKRLTELETAVRCDQDAQNPLSAGLQGACLMETVELLQAKSVLGKVNEIAKHKASVEDADTQSKVHQLYETIQRWSPIASTLPELVQRLVTIKQLHEQAMQFGQLLTHLDTTQQMIANSLKDNTTLLTQVQTTMRENLATVEGNFASIDERMKKLGK

SEQ ID NO: 43513 - protein, 35 aa, Homo sapiens
  MOD_RES (1)..(1): Any amino acid
XGGLLLLAVVLLSACLCWLHRREAGEELEAASAQQ

SEQ ID NO: 43514 - protein, 203 aa, Homo sapiens
MRRLNRKKTLSLVKELDAFPKVPESYVETSASGGTVSLIAFTTMALLTIMEFSVYQDTWMKYEYEVDKDFSSKLRINIDITVAMKCQYVGADVLDLAETMVASADGLVYEPTVFDLSPQQKEWQRMLQLIQSRLQEEHSLQDVIFKSAFKSTSTALPPRAIPHPRGHAHLAALVNHESYNFSHRIDHLSFGELVPAIINPLDG

SEQ ID NO: 43515 - protein, 166 aa, Homo sapiens
MDMSDPNFWTVLSNFTLPHLRSGNRLRRTQSCRTSNRKSLIGNGQSPALPRPHSPLSAHAGNSPQDSPRNFSPSASAHFSFARRTDGRRWSLASLPSSGYGTNTPSSTVSSSCSSQEKLHQLPYQPTPDELHFLSKHFCTTESIATENRCRNTPMRPRSRSLSLKG

SEQ ID NO: 43516 - protein, 764 aa, Homo sapiens
MVAMAEAEAGVAVEVRGLPPAVPDELLTLYFENRRRSGGGPVLSWQRLGCGGVLTFREPADAERVLAQADHELHGAQLSLRPAPPRAPARLLLQGLPPGTTPQRLEQHVQALLRASGLPVQPCCALASPRPDRALVQLPKPLSEADVRVLEEQAQNLGLEGTLVSLARVPQARAVRVVGDGASVDLLLLELYLENERRSGGGPLEDLQRLPGPLGTVASFQQWQVAERVLQQEHRLQGSELSLVPHYDILEPEELAENTSGGDHPSTQGPRATKHALLRTGGLVTALQGAGTVTMGSGEEPGQSGASLRTGPMVQGRGIMTTGSGQEPGQSGTSLRTGPMGSLGQAEQVSSMPMGSLEHEGLVSLRPVGLQEQEGPMSLGPVGSAGPVETSKGLLGQEGLVEIAMDSPEQEGLVGPMEITMGSLEKAGPVSPGCVKLAGQEGLVEMVLLMEPGAMRFLQLYHEDLLAGLGDVALLPLEGPDMTGFRLCGAQASCQAAEEFLRSLLGSISCHVLCLEHPGSARFLLGPEGQHLLQGLEAQFQCVFGTERLATATLDTGLEEVDPTEALPVLPGNAHTLWTPDSTGGDQEDVSLEEVRELLATLEGLDLDGEDWLPRELEEEGPQEQPEEEVTPGHEEEEPVAPSTVAPRWLEEEAALQLALHRSLEPQGQVAEQEEAAALRQALTLSLLEQPPLEAEEPPDGGTDGKAQLVVHSAFEQDVEELDRALRAALEVHVQEETVGPWRRTLPAELRARLERCHGWRGRR

SEQ ID NO: 43517 - protein, 208 aa, Homo sapiens
  MOD_RES (1)..(1): Any amino acid
XLEEQQHAEGSPEPGTPAPTPESFTVHFLPLNSAQTLHHKSCYNGRFQLLYVACGMVHLLIPELGACVAPGGNLIVELARYLVDVRQEQLQGFNTRVRELAQAAGFAPQTGARPSETFARFCKSQESALGNTVPAVEPGTPPLDILAQPLEASNPALEGLTQPLQGGTPHCEPCQLPSESPGSLSEVLAQPQGALAPPNCESDSKTGV

SEQ ID NO: 43518 - protein, 26 aa, Homo sapiens
MASADKNGGSVSSVSSSRLQSRKPPN

SEQ ID NO: 43519 - protein, 136 aa, Homo sapiens
MTMETQMSQNVCPRNLWLLQPLTVLLLLASADSQAAPPKAVLKLEPPWINVLQEDSVTLTCQGARSPESDSIQWFHNGNLIPTHTQPSYRFKANNNDSGEYTCQTGQTSLSDPVHLTVLSGQWRKAPGWTWEGQDG

SEQ ID NO: 43520 - protein, 79 aa, Homo sapiens
MWSPEREAEAPAGGDPAGLLPPEWEEDEERMSFLFSAFKRSRESRGAAAGVRLHGQCRQQLDLLGGWGLPAEASQVDSF

SEQ ID NO: 43521 - protein, 540 aa, Homo sapiens
  MOD_RES (1)..(1): Any amino acid
XRDPGRAVDLEKFCSETIDIIQPALVLATGDLTDAKTKEQLGSRQHEVEWQTYQGILKKTRVMEKTKWLDIKGNHDAFNIPSLDSIKNYYRKYSAVRRDGSFHYVHSTPFGNYSFICVDATVNPGPKRPYNFFGILDKKKMEELLLLAKESSRSNHTIWFGHFTTSTILSPSPGIRSIMSSAIAYLCGHLHTLGGLMPVLHTRHFQGTLELEVGDWKDNRRYRIFAFDHDLFSFADLIFGKWPVVLITNPKSLLYSCGEHEPLERLLHSTHIRVLAFSLSSITSVTVKIDGVHLGQAVHVSGPIFVLKWNPRNYSSGTHNIEVIVQDSAGRSKSVHHIFSVQENNHLSFDPLASFILRTDHYIMARVLFVLIVLSQLTILIIFRYRGYPELKGPWFFGEIIDGKFGCCFSFGIFVNGHFLQGSITFIIGILQLAFFNIPLMAYMCWSLLQRCFGHNFRSHLHQRKYLKIMPVHLLMLLLYIWQVYSCYFLYATYGTLAFLFSPLRTWLTLLTPVLIRYVWTLNSTKFGIFMVQLKSHLSS

SEQ ID NO: 43522 - protein, 60 aa, Homo sapiens
MTGGTNKTSSSISEILDKVQEDAEDVLFSLGFGQEDHKDTSRIPARFFTTPSQAKGIDFQ

SEQ ID NO: 43523 - protein, 77 aa, Homo sapiens
MAETAAGVGRFKTNYAVERKIEPFYKGGKAQTSLSPAGPDWPAPLLRLWHQSQHSGSGLGGRAAESGAGGPGGHHCL

SEQ ID NO: 43524 - protein, 220 aa, Homo sapiens
MASGGSGGVSVPALWSEVNRYGQNGDFTRALKTVNKILQINKDDVTALHCKVVCLIQNGSFKEALNVINTHTKVLANNSLSFEKAYCEYRLNRIENALKTIESANQQTDKLKELYGQVLYRLERYDECLAVYRDLVRNSQDDYDEERKTNLSAVVAAQSNWEKVVPENLGLQEGTHELCYNTACALIGQGQLNQAMKILQKAEGWKFVKLICKYNVHITL

SEQ ID NO: 43525 - protein, 718 aa, Homo sapiens
MLMTLEMTELTDPHHTMGDYKVAHPQDPHHPSEKPVIHCHKCGEPCKGEVLRVQTKHFHIKCFTCKVCGCDLAQGGFFIKNGEYLCTLDYQRMYGTRCHGCGEFVEGEVVTALGKTYHPNCFACTICKRPFPPGDRVTFNGRDCLCQLCAQPMSSSPKETTFSSNCAGCGRDIKNGQALLALDKQWHLGCFKCKSCGKVLTGEYISKDGAPYCEKDYQGLFGVKCEACHQFITGKVLEAGDKHYHPSCARCSRCNQMFTEGEEMYLQGSTVWHPDCKQSTKTEEKLRPTRTSSESIYSRPGSSIPGSPGHTIYAKVDNEILDYKDLAAIPKVKAIYDIERPDLITYEPFYTSGYDDKQERQSLGESPRTLSPTPSAEGYQDVRDRMIHRSTSQGSINSPVYSRHSYTPTTSRSPQHFHRPGNEPSSGRNSPLPYRPDSRPLTPTYAQAPKHFHVPDQGINIYRKPPIYKQHAALAAQSKSSEDIIKFSKFPAAQAPDPSETPKIETDHWPGPPSFAVVGPDMKRRSSGREEDDEELLRRRQLQEEQLMKLNSGLGQLILKEEMEKESRERSSLLASRYDSPINSASHIPSSKTASLPGYGRNGLHRPVSTDFAQYNSYGDVSGGVRDFQTLPDGHMPAMRMDRGVSMPNMLEPKIFPYEMLMVTNRGRNKILREVDRTRLERHLAPEVFREIFGMSIQEFDRLPLWRRNDMKKKAKLF

SEQ ID NO: 43526 - protein, 168 aa, Homo sapiens
MKTVDTGQIPHSVSRPLRSQDSVFNSIQSNTGRSQGGWSYRDGNKNTSLKTWNKNDFKPQCKRTNLVANDGKNSCPVSSGAQQQKQLRIPEPPNLSRNKETELLRQTHSSKISGCTMRGLDKNSALQTLKPNFQQNQYKKQMLDDIPEDNTLKETSLYQLQFKEKASS

SEQ ID NO: 43527 - protein, 94 aa, Homo sapiens
MATEEFIIRIPPYHYIHVLDQNSNVSRVEVGPKTYIRQDNERVLFAPMRMVTVPPRHYCTVANPVSRDAQGLVLFDVTGQVRLRHADLEIRLAQ

SEQ ID NO: 43528 - protein, 394 aa, Homo sapiens
MDLGRDATRRFFNWFYWSINLGAVLSLLVVAFIQQNISFLLGYSIPVGCVGLAFFIFLFATPVFITKPPMGSQVSSMLKLALQNCCPQLWQRHSARDRQCARVLADERSPQPGASPQEDIANFQVLVKILPVMVTLVPYWMVYFQMQSTYVLQGLHLHIPNIFPANPANISVALRAQGSSYTIPEAWLLLANVVVVLILVPLKDRLIDPLLLRCKLLPSALQKMALGMFFGFTSVIVAGVLEMERLHYIHHNETVSQQIGEVLYNAAPLSIWWQIPQYLLIGISEIFASIPGLEFAYSEAPRSMQGAIMGIFFCLSGVGSLLGSSLVALLSLPGGWLHCPKDFGNINNCRMDLYFFLLAGIQAVTALLFVWIAGRYERASQGPASHSRFSRDRG

SEQ ID NO: 43529 - protein, 186 aa, Homo sapiens
MRGGGQVLGVAAAVMTPLPGGHAAGRTREARWDAMEYDEKLARFRQAHLNPFNKQSGPRQHEQGPGEEVPDVTPEEALPELPPGEPEFRCPERVMDLGLSEDHFSRPVGLFLASDVQQLRQAIEECKQVILELPEQSEKQKDAVVRLIHLRLKLQELKDPNEDEPNIRVLLEHRFYKEKSKSVKQT

SEQ ID NO: 43530 - protein, 67 aa, Homo sapiens
MLGGSLGSRLLRGVGGSHGRFGARGVREGGAAMAAGESMAQRMVWVDLEEIQFMKIRSFLTNTCPSS

SEQ ID NO: 43531 - protein, 172 aa, Homo sapiens
MGCCTGRCSLICLCALQLVSALERQIFDFLGFQWAPILGNFLHIIVVILGLFGTIQYRPRYIMVYTVWTALWVTWNVFIICFYLEVGGLSKDTDLMTFNISVHRSWWREHGPGCVRRVLPPSAHGMMDDYTYVSVTGCIVDFQYLEVIHSAVQILLSACSARMMHQVKVPDG

SEQ ID NO: 43532 - protein, 387 aa, Homo sapiens
MGTFCSVIKFENLQELKRLCHWGPIIALGVIAICSTMAMIDSVLWYWPLHTTGGSVNFIMLINWTVMILYNYFNAMFVGPGFVPLGWKPEISQDTMYLQYCKVCQAYKAPRSHHCRKCNRCVMKMDHHCPWINNCCGYQNHASFTLFLLLAPLGCIHAAFIFVMTMYTQLYHRLSFGWNTVKIDMSAARRDPLPIVPFGLAAFATTLFALGLALGTTIAVGMLFFIQMKIILRNKTSIESWIEEKAKDRIQYYQLDEVFVFPYDMGSRWRNFKQVFTWSGVPEGDGLEWPVREGCHQYSLTIEQLKQKADKRVRSVRYKVIEDYSGACCPLNKGIKTFFTSPCTEEPRIQLQKGEFILATRGLRYWLYGDKILDDSFIEGMEMEGHV

SEQ ID NO: 43533 - protein, 3551 aa, Homo sapiens
MANRRVGRGCWEVSPTERRPPAGLRGPAAEEEASSPPVLSLSHFCRSPFLCFGDVLLGASRTLSLALDNPNEEVAEVKISHFPAADLGFSVSQRCFVLQPKEKIVISVNWTPLKEGRVREIMTFLVNDVLKHQAILLGNAEEQKKKKRSLWDTIKKKKISASTSHNRRVSNIQNVNKTFSVSQKVDRVRSPLQACENLAMNEGGPPTENNSLILEENKIPISPISPAFNECHGATCLPLSVRRSTTYSSLHASENRELLNVHSANVSKVSFNEKAVTETSFNSVNVNGQRGENSKLSLTPNCSSTLNITQSQIHFLSPDSFVNNSHGANNELELVTCLSSDMFMKDNSQPVHLESTIAHEIYQKILSPDSFIKDNYGLNQDLESESVNPILSPNQFLKDNMAYMCTSQQTCKVPLSNENSQVPQSPEDWRKSEVSPRIPECQGSKSPKAIFEELVEMKSNYYSFIKQNNPKFSAVQDISSHSHNKQPKRRPILSATVTKRKATCTRENQTEINKPKAKRCLNSAVGEHEKVINNQKEKEDFHSYLPIIDPILSKSKSYKNEVTPSSTTASVARKRKSDGSMEDANVRVAITEHTEVREIKRIHFSPSEPKTSAVKKTKNVTTPISKRISNREKLNLKKKTDLSIFRTPISKTNKRTKPIIAVAQSSLTFIKPLKTDIPRHPMPFAAKNMFYDERWKEKQEQGFTWWLNFILTPDDFTVKTNISEVNAATLLLGIENQHKISVPRAPTKEEMSLRAYTARCRLNRLRRAACRLFTSEKMVKAIKKLEIEIEARRLIVRKDRHLWKDVGERQKVLNWLLSYNPLWLRIGLETTYGELISLEDNSDVTGLAMFILNRLLWNPDIAAEYRHPTVPHLYRDGHEEALSKFTLKKLLLLVCFLDYAKISRLIDHDPCLFCKDAEFKASKEILLAFSRDFLSGEGDLSRHLGLLGLPVNHVQTPFDEFDFAVTNLAVDLQCGVRLVRTMELLTQNWDLSKKLRIPAISRLQKMHNVDIVLQVLKSRGIELSDEHGNTILSKDIVDRHREKTLRLLWKIAFAFQVDISLNLDQLKEEIAFLKHTKSIKKTISLLSCHSDDLINKKKGKRDSGSFEQYSENIKLLMDWVNAVCAFYNKKVENFTVSFSDGRVLCYLIHHYHPCYVPFDAICQRTTQTVECTQTGSVVLNSSSESDDSSLDMSLKAFDHENTSELYKELLENEKKNFHLVRSAVRDLGGIPAMINHSDMSNTIPDEKVVITYLSFLCARLLDLRKEIRAARLIQTTWRKYKLKTDLKRHQEREKAARIIQLAVINFLAKQRLRKRVNAALVIQKYWRRVLAQRKLLMLKKEKLEKVQNKAASLIQGYWRRYSTRQRFLKLKYYSIILQSRIRMIIAVTSYKRYLWATVTIQRHWRAYLRRKQDQQRYEMLKSSTLIIQSMFRKWKQRKMQSQVKATVILQRAFREWHLRKQAKEENSAIIIQSWYRMHKELRKYIYIRSCVVIIQKRFRCFQAQKLYKRRKESILTIQKYYKAYLKGKIERTNYLQKRAAAIQLQAAFRRLKAHNLCRQIRAACVIQSYWRMRQDRVRFLNLKKTIIKFQAHVRKHQQRQKYKKMKKAAVIIQTHFRAYIFAMKVLASYQKTRSAVIVLQSAYRGMQARKMYIHILTSVIKIQSYYRAYVSKKEFLSLKNATIKLQSTVKMKQTRKQYLHLRAAALFIQQCYRSKKIAAQKREEYMQMRESCIKLQAFVRGYLVRKQMRLQRKAVISLQSYFRMRKARQYYLKMYKAIIVIQNYYHAYKAQVNQRKNFLQVKKAATCLQAAYRGYKVRQLIKQQSIAALKIQSAFRGYNKRVKYQSVLQSIIKIQRWYRAYKTLHDTRTHFLKTKAAVISLQSAYRGWKVRKQIRREHQAALKIQSAFRMAKAQKQFRLFKTAALVIQQNFRAWTAGRKQCMEYIELRHAVLVLQSMWKGKTLRRQLQRQHKCAIIIQSYYRMHVQQKKWKIMKKAALLIQKYYRAYSIGREQNHLYLKTKAAVVTLQSAYRGMKVRKRIKDCNKAAVTIQSKYRAYKTKKKYATYRASAIIIQRWYRGIKITNHQHKEYLNLKKTAIKIQSVYRGIRVRRHIQHMHRAATFIKAMFKMHQSRISYHTMRKAAIVIQVRCRAYYQGKMQREKYLTILKAVKVLQASFRGVRVRRTLRKMQTAATLIQSNYRRYRQQTYFNKLKKITKTVQQRYWAMKERNIQFQRYNKLRHSVIYIQAIFRGKKARRHLKMMHIAATLIQRRFRTLMMRRRFLSLKKTAILIQRKYRAHLCTKHHLQFLQVQNAVIKIQSSYRRWMIRKRMREMHRAATFIQSTFRMHRLHMRYQALKQASVVIQQQYQANRAAKLQRQHYLRQRHSAVILQAAFRGMKTRRHLKSMHSSATLIQSRFRSLLVRRRFISLKKATIFVQRKYRATICAKHKLYQFLHLRKAAITIQSSYRRLMVKKKLQEMQRAAVLIQATFRMYRTYITFQTWKHASILIQQHYRTYRAAKLQRENYIRQWHSAVVIQAAYKGMKARQLLREKHKASIVIQSTYRMYRQYCFYQKLQWATKIIQEKYRANKKKQKVFQHNELKKETCVQAGFQDMNIKKQIQEQHQAAIIIQKHCKAFKIRKHYLHLRATVVSIQRRYRKLTAVRTQAVICIQSYYRGFKVRKDIQNMHRAATLIQSFYRMHRAKVDYETKKTAIVVIQNYYRLYVRVKTERKNFLAVQKSVRTIQAAFRGMKVRQKLKNVSEEKMAAIVNQSALCCYRSKTQYEAVQSEGVMIQEWYKASGLACSQEAEYHSQSRAAVTIQKAFCRMVTRKLETQKCAALRIQFFLQMAVYRRRFVQQKRAAITLQHYFRTWQTRKQFLLYRKAAVVLQNHYRAFLSAKHQRQVYLQIRSSVIIIQARSKGFIQKRKFQEIKNSTIKIQYLLCCGIIKESERPRDLRRNYLIIYVHRPSRINIQRGLSPEQRVKLPFKHFVGHGEICAGGSVLQKRETKTVIQAMWRRYRAKKYLCKVKAACKIQAWYRCWRAHKEYLAILKAVKIIQGCFYTKLERTRFLNVRASAIIIQRKWRAILPAKIAHEHFLMIKRHRAACLIQAHYRGYKGRQVFLRQKSAALIIQKYIRAREAGKHERIKYIEFKKSTVILQALVRGWLVRKRFLEQRAKIRLLHFTAAAYYHLNAVRIQRAYKLYLAVKNANKQVNSVICIQRWFRARLQEKRFIQKYHSIKKIEHEGQECLSQRNRAASVIQKAVRHFLLRKKQEKFTSGIIKIQALWRGYSWRKKNDCTKIKAIRLSLQVVNREIREENKLYKRTALALHYLLTYKHLSAILEALKHLEVVTRLSPLCCENMAQSGAISKIFVLIRSCNRSIPCMEVIRYAVQVLLNVSKYEKTTSAVYDVENCIDILLELLQIYREKPGNKVADKGGSIFTKTCCLLAILLKTTNRASDVRSRSKVVDRIYSLYKLTAHKHKMNTERILYKQKKNSSISIPFIPETPVRTRIVSRLKPDWVLRRDNMEEITNPLQAIQMVMDTLGIPY

SEQ ID NO: 43534 - protein, 178 aa, Homo sapiens
  MOD_RES (1)..(1): Any amino acid
XIFEDCDEVTGQCRNCLRNTTGFKCERCAPGYYGDARIAKNCAVCNCGGGPCDSVTGECLEEGFEPPTGMDCPTISCDKCVWDLTDDLRLAALSIEEGKSGVLSVSSGAAAHRHVNEINATIYLLKTKLSERENQYALRKIQINNAENTMKSLLSDVEELVEKHWNKPRRRLELQEGV

SEQ ID NO: 43535 - protein, 130 aa, Homo sapiens
MMDEPWWEGRVASDVHCTLREKELKLPTFRAHSPLLKSRRFFVDILTLLSSHCQLCPAARHLAVYLLDHFMDRYNVTTSKQLYTVAVSCLLLANSSASKTRALCQVVVTHRVGCCKACREGSNPGLLRRG

SEQ ID NO: 43536 - protein, 225 aa, Homo sapiens
MGTPASGRKRTPVKDRFSAEDEALSNIAREAEARLAAKRAARAEARDIRMRELERQQKELDEKSDKQYAENYTRPSSRNSASATTPLSGNSSRRGSGDTSSLIDPDTSLSELRDIYDLKDQIQDVEGRYMQGLKELKESLSEVEEKYKKAMVSNAQLDNEKNNLIYQVDTLKDVIEEQEEQMAEFYRENEEKSKELERQKHMCSVLQHKMEELKEGLRQRDELIE

SEQ ID NO: 43537 - protein, 35 aa, Homo sapiens
MSQSGAVSCCPGATNGSLGRSDGVAKMSPKDLFGE

SEQ ID NO: 43538 - protein, 221 aa, Homo sapiens
MRPRLWLLLAAQLTVLHGNSVLQQTPAYIKVQTNKMVMLSCEAKISLSNMCIYWLRQRQAPSSDSHHEFLTLWDSAKGTIHGEEVEQEKIAVFRDASRFILNLTSVKPEDSGIYFCMIVGSPELTFGKGTQLSVVDFLPTTAQPTKKSTLKKRVCRLPRPETQKGPLCSPVTLGLLVAGVLVLLVSLGVAMHLCCRRRRARLRFMKQPRSCELFSHFPMDA

SEQ ID NO: 43539 - protein, 666 aa, Homo sapiens
MVQGGFPEKIRQRYADLPGELHIIELEKDKNGLGLSLAGNKDRSRMSIFVVGINPEGPAAADGRMRIGDELLEINNQILYGRSHQNASAIIKTAPSKVKLVFIRNEDAVNQMAVTPFPVPSSSPSSIEDQSGTEPISSEEDGSVEVGIKQLPESESFKLAVSQMKQQKYPTKVSFSSQEIPLAPASSYHSTDADFTGYGGFQAPLSVDPATCPIVPGQEMIIEISKGRSGLGLSIVGGKDTPLNAIVIHEVYEEGAAARDGRLWAGDQILEVNGVDLRNSSHEEAITALRQTPQKVRLVVYRDEAHYRDEENLEIFPVDLQKKAGRGLGLSIVGKRNGSGVFISDIVKGGAADLDGRLIQGDQILSVNGEDMRNASQETVATILKCAQGLVQLEIGRLRAGSWTSARTTSQNSQGSQQSAHSSCHPSFAPVITGLQNLVGTKRVSDPSQKNSGTDMEPRTVEINRELSDALGISIAGGRGSPLGDIPVFIAMIQASGVAARTQKLKVGDRIVSINGQPLDGLSHADVVNLLKNAYGRIILQVVADTNISAIAAQLENMSTGYHLGSPTAEHHPEDTETPPPKIITLEKGSEGLGFSIVGGYGSPHGDLPIYVKTVFAKGAAADDGRLKRGDQILAVNGETLEGVTHEQAVAILKHQRGTVTLTVLS

SEQ ID NO: 43540 - protein, 153 aa, Homo sapiens
MHKEEHEVAVLGPPPSTILPRSTVINIHSETSVPDHVVWSLFNTLFLNWCCLGFIAFAYSVKEDGWRRDRGPGLCLHRQVPEHLGPDSGHPHDHWIHPVTGIRLCDSLPYYVTDNTGKTGLLVAAHSLQPLHSTVQCWPCTLGLLPLPPWSCP

SEQ ID NO: 43541 - protein, 904 aa, Homo sapiens
MVILKLLSEEVFDFSSGQITQVKSKHLKDSMCNEFSQIFQLCQFVMENSQNAPLVHATLETLLRFLNWIPLGYIFETKLISTLIYKFLNVPMFRNVSLKCLTEIAGVSVSQYEEQFVTLFTLTMMQLKQMLPLNTNIRLAYSNGKDDEQNFIQNLSLFLCTFLKEHDQLIEKRLNLRETLMEALHYMLLVSEVEETEIFKICLEYWNHLAAELYRESPFSTSASPLLSGSQHFDVPPRRQLYLPMLFKVRLLMVSRMAKPEEVLVVENDQGEVVREFMKDTDSINLYKNMRETLVYLTHLDYVDTERIMTEKLHNQVNGTEWSWKNLNTLCWAIGSISGAMHEEDEKRFLVTVIKDLLGLCEQKRGKDNKAIIASNIMYIVGQYPRFLRAHWKFLKTVVNKLFEFMHETHDGVQDMACDTFIKIAQKCRRHFVQVQVGEVMPFIDEILNNINTIICDLQPQQVHTFYEAVGYMIGAQTDQTVQEHLIEKYMLLPNQVWDSIIQQATKNVDILKDPETVKQLGSILKTNVRACKAVGHPFVIQLGRIYLDMLNVYKCLSENISAAIQANGEMVTKQPLIRSMRTVKRETLKLISGWVSRSNDPQMVAENFVPPLLDAVLIDYQRNVPAAREPEVLSTMAIIVNKLGGHITAEIPQIFDAVFECTLNMINKDFEEYPEHRTNFFLLLQAVNSHCFPAFLAIPPTQFKLVLDSIIWAFKHTMRNVADTGLQILFTLLQNVAQEEAAAQSFYQTYFCDILQHIFSVVTDTSHTAGLTMHASILAYMFNLVEEGKISTSLNPGNPVNNQIFLQEYVANLLKSAFPHLQDAQVKLFVTGLFSLNQDIPAFKEHLRDFLVQIKEFAGEDTSDLFLEEREIALRQADEEKHKRQMSVPGIFNPHEIPEEMCD

SEQ ID NO: 43542 - protein, 29 aa, Homo sapiens
MESIRTTRQCSLSVHAGIRGEAMRFHFMD

SEQ ID NO: 43543 - protein, 259 aa, Homo sapiens
MAPLLLQLAVLGAALAAAALVLISIVAFTTATKMPALHRHEEEKFFLNAKGQKETLPSIWDSPTKQLSVVVPSYNEEKRLPVMMDEALSYLEKRQKRDPAFTYEVIVVDDGSKDQTSKVAFKYCQKYGSDKVRVITLVKNRGKGGAIRMGIFSSRGEKILMADADGATKFPDVEKLEKGLNDLQPWPNQMAIACGSRAHLEKESIAQRSYFRTLLMYGFHFLVWFLCVKGIRDTQCGFKLFTREAASRTFSSLHVERWF

SEQ ID NO: 43544 - protein, 76 aa, Homo sapiens
SNKLWCPTTENMDKDGKWSFCADTRISALVPGFPCHFPFNYKNKNYFNCTNEGSKENLVWCATSYNYDQDHTWVYC

SEQ ID NO: 43545 - protein, 48 aa, Homo sapiens
MKKVRLKELESRLQQVDGFEKPKLLLEQYPTRPHIAELRYDLPASYKF

SEQ ID NO: 43546 - protein, 64 aa, Homo sapiens
MDQNRDGFIDKEDLKDTYASLGRYPGRTPQSPWRRRTQRSSSSRRRGPSSNGARARASEAHQRP

SEQ ID NO: 43547 - protein, 67 aa, Homo sapiens
  MOD_RES (1)..(1): Any amino acid
XDRKRARKFIDSDFSERAETWRTDPRETTACFSWFKNFSMPQNRFSSYWHLYLWEERETRLAACLSA

SEQ ID NO: 43548 - protein, 518 aa, Homo sapiens
MANGVIPPPGGASPLPQVRVPLEEPPLSPDVEEEDDDLGKTLAVSRFGDLISKPPAWDPEKPSRSYSERDFEFHRHTSHHTHHPLSARLPPPHKLRRLPPTSARHTRRKRKKEKTSAPPSEGTPPIQEEGGAGVDEEEEEEEEEEGESEAEPVEPPHSGTPQKAKFSIGSDEDDSPGLPGRAAVTKPLPSVGPHTDKSPQHSSSSPSPRARASRLAGEKSRPWSPSASYDLRERLCPGSALGNPGGPEQQVPTDEAEAQMLGSADLDDMKSHRLEDNPGVRRHLVKKPSRTQGGRGSPSGLAPILRRKKKKKKLDRRPHEVFVELNELMLDRSQEPHWRETARWIKFEEDVEEETERWGKPHVASLSFRSLLELRRTIAHGAALLDLEQTTLPGIAHLVVETMIVSDQIRPEDRASVLRTLLLKHSHPNDDKDSGFFPRNPSSSSMNSVLGNHHPTPSHGPDGAVPTMADDLGEPAPLWPHDPDAKEPYSSSASSEAPPHAWGRWSPGEKPEAAGEDP

SEQ ID NO: 43549 - protein, 114 aa, Homo sapiens
MHNFEEELTCPICYSIFEDPRVLPCSHTFCRNCLENILQASGNFYIWRPLRIPLKCPNCRSITEIAPTGIESLPVNFALRAIIEKYQQEDHPDIVTCPEHYRQPLNVYCLLDKK

SEQ ID NO: 43550 - protein, 180 aa, Homo sapiens
MALTVDVAGPAPWGFRITGGRDFHTPIMVTKVAERGKAKDADLRPGDIIVAINGESAEGMLHAEAQSKIRQSPSPLRLQLDRSQATSPGQTNGDSSLEVLATRFQGSVRTYTESQSSLRSSYSSPTSLSPRAGSPFSPPPSSSSLTGEAAISRSFQSLACSPGLPAADRLSYSGRPGSRQ

SEQ ID NO: 43551 - protein, 91 aa, Homo sapiens
MSGLVLGQRDEPAGHRLSQEEILGSTRLVSQGLEALRSEHQAVLQSLSQTIECLQQGGHEEGLVHEKARQLRRSMENIELGLSEAQVMLAL

SEQ ID NO: 43552 - protein, 252 aa, Homo sapiens
AMKSSLEDMDALELDFRMRLAEVQRQYKEKQRELVKLQRRRDSELSSKSLLTSDDYELGAGIRKRHKGSEEEHDALIGMGKARGRNQTWDEHEASSDFISQLKIKKKKMASDQEQLASKLDKALSLTKQDKLKSPFKFSDSAGGKSKTSGGCGRYLTPYDSLLGKNRKALAKGLGLSLKSSREGKHKRAAKTRKMEVGFKARGQPKSAHSPFASEVSSYSYNTDSEEDEEFLKDEWPAQGPSSSKLTPSLLC

SEQ ID NO: 43553 - protein, 87 aa, Homo sapiens
MEESKTLKSENHEPKKNVICEESKAVQVIGNQTLKARNDKSVKEIENSSPNRNSSKKNKQNDICIEKTEVKSCKVNAANLPGPKDLG

SEQ ID NO: 43554 - protein, 132 aa, Homo sapiens
MEKKECPEKSSSSEEELPRRDSGSSRNIDASKLIRLQGSRKLLVDNSIRELQYTKTGIFFQAEACVTNDTVYRELPCVSETLCDISHFFQEDDETEAEPLLFRAVPECQLSGGDIPRRHLLRRESNSFLLCF

SEQ ID NO: 43555 - protein, 256 aa, Homo sapiens
MAMESTATAAVAAELVSADKIEDVPAPSTSADKVESLDVDSEAKKLLGLGQKHLVMGDIPAAVNAFQEAASLLGKKYGETANECGEAFFFYGKSLLELARMENGVLGNALEGVHVEEEEGEKTEDESLVENNDNIDETEGSEEDDKENDKTEEMPNDSVLENKSLQENEEEEIGNLELAWDMLDLAKIIFKRQETKEAQLYAAQAHLKLGEVSVESENYVQAVEEFQSCLNLQEQYLEAHDRLLAETHYQLGLAYG

SEQ ID NO: 43556 - protein, 597 aa, Homo sapiens
MEDSTILSDWTNSNKQKMKYDFSCELYRMSTYSTFPAGVPVSERSLARAGFYYTGVNDKVKCFCCGLMLDNWKLGDSPIQKHKQLYPSCSFIQNLVSASLGSTSKNTSPMRNSFAHSLSPTLEHSSLFSGSYSSLSPNPLNSRAVEDISSSRTNPYSYAMSTEEARFLTYHMWPLTFLSPSELARAGFYYIGPGDRVACFACGGKLSNWEPKDDAMSEHRRHFPNCPFLENSLETLRFSISNLSMQTHAARMRTFMYWPSSVPVQPEQLASAGFYYVGRNDDVKCFCCDGGLRCWESGDDPWVEHAKWFPRCEFLIRMKGQEFVDEIQGRYPHLLEQLLSTSDTTGEENADPPIIHFGPGESSSEDAVMMNTPVVKSALEMGFNRDLVKQTVQSKILTTGENYKTVNDIVSALLNAEDEKREEEKEKQAEEMASDDLSLIRKNRMALFQQLTCVLPILDNLLKANVINKQEHDIIKQKTQIPLQARELIDTILVKGNAAANIFKNCLKEIDSTLYKNLFVDKNMKYIPTEDVSGLSLEEQLRRLQEERTCKVCMDKEVSVVFIPCGHLVVCQECAPSLRKCPICRGIIKGTVRTFLS

SEQ ID NO: 43557 - protein, 262 aa, Homo sapiens
MLGRPAKFSKARGPKKHLKRVAAPKHWMLDKLTGVFAPRPSTGPHKLRECLPLIVFLRNRLKYALTGDEVKKICMQRFIKIDGKVRVDVTYPAGFMDVISIEKTGEHFRLVYDTKGRFAVHRITVEEAKYKLCKVRKITVGVKGIPHLVTHDARTIRYPDPVIKVNDTVQIDLGTGKIINFIKFDTGNLCMVIGGANLGRVGVITNRERHPGSFDVVHVKDANGNSFATRLSNIFVIGNGNKPWISLPRGKGIRLTVAEERD

SEQ ID NO: 43558 - protein, 669 aa, Homo sapiens
MATPAGLERWVQDELHSVLGLSERHVAQFLIGTAQRCTSAEEFVQRLRDTDTLDLSGPARDFALRLWNKVPRKAVVEKPARAAEREARALLEKNRSYRLLEDSEESSEETVSRAGSSLQKKRKKRKHLRKKREEEEEEEASEKGKKKTGGSKQQTEKPESEDEWERTERERLQDLEERDAFAERVRQRDKDRTRNVLERSDKKAYEEAQKRLKMAEEDRKAMVPELRKKSRREYLAKREREKLEDLEAELADEEFLFGDVELSRHERQELKYKRRVRDLAREYRAAGEQEKLEATNRYHMPKETRGQPARAVDLVEEESGAPGEEQRRWEEARLGAASLKFGARDAASQEPKYQLVLEEEETIEFVRATQLQGDEEPSAPPTSTQAQQKESIQAVRRSLPVFPFREELLAAIANHQVLIIEGETGSGKTTQIPQYLFEEGYTNKGMKIACTQPRRVAAMSVAARVAREMGVKLGNEVGYSIRFEDCTSERTVLRYMTDGMLLREFLSEPDLASYSVVMVDEAHERTLHTDILFGLIKDVARFRPELKVLVASATMDTARFSTFFDDAPVFRIPGRRFPVDIFYTKAPEADYLEACVVSVLQIHVTQPPGDILVFLTGQEEIEAACEMLQDRCRRLGSKIRELLVLPIYANLPSDMQARIFQPTPPGARK

SEQ ID NO: 43559 - protein, 44 aa, Homo sapiens
MDLENKVKKMGLGHEQGFGAPCLKCKEKCEGFELHFWSPAIAAN

SEQ ID NO: 43560 - protein, 113 aa, Homo sapiens
MEFVMKQALGGATKDMGKMLGGDEEKDPDAAKKEEERQEALRQGIRDKYGIKKKEEREAEAQAAMEANSEGSLTRPKKAIPPGCGDEVEEEDESILDTVIKYLPGPLQDMLKK

SEQ ID NO: 43561 - protein, 110 aa, Homo sapiens
MPAELLLLLIVAFASPSCQVLSSLRMAAILDDQTVCGRGERLALALAREQINGIIEVPAKARVEVDIFELQRDSQYETTDTIAMARRMEFCDSPRPASGASQSWEPWTEG

SEQ ID NO: 43562 - protein, 60 aa, Homo sapiens
MPAMRNSPTFKSFEEKVENLKSKVGGTKPAGGDFGEVLNSAANASATTTEPLPEKTQESL

SEQ ID NO: 43563 - protein, 553 aa, Homo sapiens
MPLAFCGSENHSAAYRVDQGVLNNGCFVDALNVVPHVFLLFITFPILFIGWGSQSSKVHIHHSTWLHFPGHNLRWILTFMLLFVLVCEIAEGILSDGVTESHHLHLYMPAGMAFMAAVTSVVYYHNIETSNFPKLLIALLVYWTLAFITKTIKFVKFLDHAIGFSQLRFCLTGLLVILYGMLLLVERYIFFKTPREVKPPEDLQDLGVRFLQPFVNLLSKGTYWWMNAFIKTAHKKPIDLRAIGKLPIAMRALTNYQRLCEAFDAQRKDIQGTQGARAIWQALSHAFGRRLVLSSTFRILADLLGFAGPLCIFGIVDHLGKENDVFQPKTQFLGVYFVSSQEFLANAYVLAVLLFLALLLQRTFLQASYYVAIETGINLRGAIQTKIYNKIMHLSTSNLSMGEMTAGQICNLVAIDTNQLMWFFFLCPNLWAMPVQIIVGVILLYYILGVSALIGAAVIILLAPVQYFVATKLSQAQRSTLEYSNERLKQTNEMLRGIKLLKLYAWENIFRTRVETTRRKEMTSLRAFAIYTSISSWPHWTALPPSHPGHLHV

SEQ ID NO: 43564 - protein, 100 aa, Homo sapiens
MEIDGFQQLDLEKSVPSKKTTPKRIIHFVDGDIMEEYSTEEEEEEEKEEQSTNSTLDPSKLSWGPYLRFWAGRIASTSFSTCEFLGGRFAVFFGLTQPKY

SEQ ID NO: 43565 - protein, 144 aa, Homo sapiens
MNHIVQTFSPVNSGQPPNYEMLKEEQEVAMLGVPHNPAPPMSTVIHIRSETSVPDHVVWSLFNTLFMNTCCLGFIAFAYSVKVRMALAEIQGVPSRDRKMVGDVTGAQAYASTAKCLNIWALILGIFMTILLIIIPVLVVQAQR

SEQ ID NO: 43566 - protein, 154 aa, Homo sapiens
MWRIFTGSLLVEEKSSALLHDLREIEAWIYRLLRSPVPVSGQKRVDIEVLPQELQPALTFALPDPSRFTLVDFPLHLPLELLGVDACLQVLTCILLEHKVVLQSRDYNALSMSVMAFVAMIYPLEYMFPVIPLLPTCMASAEQLLLAPTPYIIG

SEQ ID NO: 43567 - protein, 396 aa, Homo sapiens
MAALTIATGTGNWFSALALGVTLLKCLLIPTYHSTDFEVHRNWLAITHSLPISQWYYEATSEWTLDYPPFFAWFEYILSHVAKYFDQEMLNVHNLNYSSSRTLLFQRFSVIFMDVLFVYAVRECCKCIDGKKVGKELTEKPKFILSVLLLWNFGLLIVDHIHFQYNGFLFGLMLLSIARLFQKRHMEGAFLFAVLLHFKHIYLYVAPAYGVYLLRSYCFTANKPDGSIRWKSFSFVRVISLGLVVFLVSALSLGPFLALNQLPQVFSRLFPFKRGLCHAYWAPNFWALYNALDKVLSVIGLKLKFLDPNNIPKASMTSGLVQQFQHTVLPSVTPLATLICTLIAILPSIFCLWFKPQGPRGFLRCLTLCALSSFMFGWHVHEKAILLAILPMRTSH

SEQ ID NO: 43568 - protein, 44 aa, Homo sapiens
MSANEDQEMELEALRSIYEGDESFRELSPVSFQYRVKMVIPKPS

SEQ ID NO: 43569 - protein, 66 aa, Homo sapiens
MTDNSNNQLVVRAKFNFQQTNEDELSFSKGDVIHVTRVEEGGWWEGTLNGRTGWFPSNYVREVKAS

SEQ ID NO: 43570 - protein, 116 aa, Homo sapiens
MEPSSKVIEEFYNQTWVHRYGESILPTTLTTLWSLSVAIFSVGGMIGSFSVGLFVNRFGRRNSMLMMNLLAFVSAVLMGFSKLGKSFEMLILGRFIIGVYCGLTTGFVPMYVGEVS

SEQ ID NO: 43571 - protein, 57 aa, Homo sapiens
AKGVVNTAVSAAVQAVRGRGRGTLTRGAFVGATAAPGYIAPGYGTPYGYSTAAPAYG

SEQ ID NO: 43572 - protein, 185 aa, Homo sapiens
  MOD_RES (1)..(1): Any amino acid
XSPTQETQAPFIAKRVEVVEEDGPSEKSQDPPALARSTPGSNSADGGRTKASRAIWIECLPSMPSPAGSQELRSSPGNKDKEAPCSRELQRDLAGEEAFRAPNTDAASSSATSVSAVPADRKSNSTAAQEDAKADPKGVLTDFEGKDVATKVGEAWQDRPGAPRGGQGDPAVPTQQPADPSTPEQ

SEQ ID NO: 43573 - protein, 45 aa, Homo sapiens
MLVGNKIDKENREVDRNEGLKFARKHSMLFIEASAKTCDGVQCAF

SEQ ID NO: 43574 - protein, 338 aa, Homo sapiens
GWNAFFFDKTEELKKRLPSLGKNTESLGELWLGLLRFYTEEFDFKEYVISIRQKKLLTTFEKQWTSKCIAIEDPFDLNHNLGAGVSRKMTNFIMKAFINGRKLFGTPFYPLIGREAEYFFDSRVLTDGELAPNDRCCRVCGKIGHYMKDCPKRKRLKKKDSEEEKEGNEEEKDSRDVLDPRDLHDTRDFRDPRDLRCFICGDAGHVRRECPEVKLARQRNSSVAAAQLVRNLVNAQQVAGSAQQQGDQSIRTRQSSECSESPSYSPQPQPFPQNSSQSAAITQPSSQPGSQPKLGPPQQGAQPPHQIPAPSWPIHGPVIHSAPGSAPSNIGLNDPSII

SEQ ID NO: 43575 - protein, 183 aa, Homo sapiens
MDFLLLGLCLYWLLRRPSGVVLCLLGACFQMLPAAPSGCPQLCRCEGRLLYCEALNLTEAPHNLSGLLGLSLRYNSLSELRAGQFTGLMQLTWLYLDHNHICSVQGDAFQKLRRVKELTLSSNQITQLPNTTFRPMPNLRSVDLSYNKLQALAPDLFHGLRKLTTLHMRANAIQFVPVRIFQD

SEQ ID NO: 43576 - protein, 164 aa, Homo sapiens
MADQDPAGISPLQQMVASGTGAVVTSLFMTPLDVVKVRLQSQRPSMASELMPSSRLWSLSYTKWKCLLYCNGVLEPLYLCPNGARCATWFQDPTRFTGTMDAFVKIVRHEGTRTLWSGLPATLVMTVPATAIYFTAYDQLKAFLCGRALTSDLYAPMVAGALAR

SEQ ID NO: 43577 - protein, 102 aa, Homo sapiens
  MOD_RES (1)..(1): Any amino acid
XELLRRELGCSSVRATGHSGGGCISQGRSYDTDQGRVFVKVNPKAEARRMFEGEMASLTAILKTNTVKVPKPIKVLDAPGGGSVLVMEHMDMRHLSSCCRLI

SEQ ID NO: 43578 - protein, 194 aa, Homo sapiens
MAELQEVQITEEKPLLPGQTPEAAKEAELAARILLDQGQTHSVETPYGSVTFTVYGTPKPKRPAILTYHDVGLNYKSCFQPLFQFEDMQEIIQNFVRVHVDAPGMEEGAPVFPLGYQYPSLDQLADMIPCVLQYLNFSTIIGVGVGAGAYILARYALNHPDTVEGLVLINIDPNAKGWMDWAAHKLTGLTSSIP

SEQ ID NO: 43579 - protein, 79 aa, Homo sapiens
MAMVACYPGNGTGYVRHVDNPNGDGRCITCIYYLNKNWDAKLHGGILRIFPEGKSFIADVEPIFDRLLFFWSDRRNPHE

SEQ ID NO: 43580 - protein, 89 aa, Homo sapiens
MSYYQRPFSPSAYSLPASLNSSIVMQHGTSLDSTDTYPQHAQSLDGTTSSSIPLYRSSEEEKRVTVIKAPHYPGIGPVDESGIPTAIRT

SEQ ID NO: 43581 - protein, 381 aa, Homo sapiens
MAAGGDHGSPDSYRSPLASRYASPEMCFVFSDRYKFRTWRQLWLWLAEAEQTLGLPITDEQIQEMKSNLENIDFKMAAEEEKRLRHDVMAHVHTFGHCCPKAAGIIHLGATSCYVGDNTDLIILRNALDLLLPKLARVISRLADFAKERASLPTLGFTHFQPAQLTTVGKRCCLWIQDLCMDLQNLKRVRDDLRFRGVKGTTGTQASFLQLFEGDDHKVEQLDKMVTEKAGFKRAFIITGQTYTRKVDIEVLSVLASLGASVHKVIERRIRQELPFMATENIIMAMVKAGGSRQDCHEKIRVLSQQAASVVKQEGGDNDLIERIQVDAYFSPIHSQLDHLLDPSSFTGRASQQVQRFLEEEVYPLLKPYESVMKVKAELCL

SEQ ID NO: 43582 - protein, 1535 aa, Homo sapiens
MDPSAPQPRAETSGKDIWHPGERCLAPSPDNGKLCEASIKSITVDENGKSFAVVLYADFQERKIPLKQLQEVKFVKDCPRNLIFDDEDLEKPYFPNRKFPSSSVAFKLSDNGDSIPYTINRYLRDYQREGTRFLYGHYIHGGGCILGDDMGLGKTVQVISFLAAVLHKKGTREDIENNMPEFLLRSMKKEPLSSTAKKDELDTWGYFRVTVLHGNRKDNELIRVKQRKCEIALTTYETLRLCLDELNSLEWSAVIVDEAHRIKNPKARVTEVMKALKCNVRIGLTGTILQNNMKELWCVMDWAVPGLLGSGTYFKKQFSDPVEHGQRHTATKRELATGRKAMQRLAKKMSGWFLRRTKTLIKDQLPKKEDRMVYCSLTDFQKAVYQTVLETEDVTLILQSSEPCTCRSGQKRRNCCYKTNSHGETVKTLYLSYLTVLQKVANHVALLQAASTSKQQETLIKRICDQVFSRFPDFVQKSKDAAFETLSDPKYSGKMKVLQQLLNHCRKNRDKVLLFSFSTKLLDVLQQYCMASGLDYRRLDGSTKSEERLKIVKEFNSTQDVNICLVSTMAGGLGLNFVGANVVVLFDPTWNPANDLQAIDRAYRIGQCRDVKVLRLISLGTVEEIMYLRQIYKQQLHCVVVGSENAKRYFEAVQGSKEHQGELFGIHNLFKFRSQGSCLTKDILEREGQVEAGIMTATTWLKEGPPAHKLEMPRQPDCQECRGTEQAAEPLAKEACDLCSDFSDEEPVGATGIKTAKNKAPDSSKASSSPGQLTLLQCGFSKLLETKCKAVEDSDGNTASDDESSDEQPTCLSTEAKDAGCEKNQDSLGTSKHQKLDNILNPKEKHIFYKSEKILEQNISSKSDEKKIKNTDKHCILQNVTESEDSDVICPTQYTTERFPDNSIRFKPPLEGSEDSETEHTVKTRNNDNSRNTDDKRNGIISKKLSPENTTLKSILKRKGTSDISDESDDIEISSKSRVRKRASSLRFKRIKETKKELHNSPKTMNKTNQVYAANEDHNSQFIDDYSSSDESLSVSHFSFSKQSHRPRTIRDRTSFSSKLPSHNKKNSTFIPRKPMKCSNEKVVNQEQSYESMDKFLDGVQEVAYIHSNQNVIGSSKAENHMSRWAAHDVFELKQFSQLPANIAVCSSKTYKEKVDADTLPHTKKGQQPSEGSISLPLYISNPVNQKKKKVYHTNQTTFIIGETPKGIRRKQFEEMASYFNSSSVNEFAKHITNATSEERQKMLRDFYASQYPEVKEFFVDSVSQFNNSSFEKGEQRTRKKSDKRESLIKPRLSDSETLSFKDSTNKISQVCSLKTYKRKSVKFQNHISYREEVFFNDAETKKSPVSSTQEIDSGKNSQASEDTVTSRSLNSESETRERRLENTMKDQQDLTRTGISRKEPLLKLENKKIENPVLENTSVISLLGDTSILDDLFKSHGNSPTQLPKKVLSGPMEKAKQRPKDFWDILNEQNDESLSKLTDLAVIETLCEKAPLAAPFKRREEPATSLWKSNEKFLWKKFSPSDTDENATNTQSTT

SEQ ID NO: 43583 - protein, 115 aa, Homo sapiens
MAVPTSIYQTSTGQYIAIAQGGTIQISNPGSDGVQGLQALTMTNSGAPPPGATIVQYAAQSADGTQQFFVPGSQVVVQAATGDMPTYQIRAPTAALPQGVVMAASPGSLHSPQQL

SEQ ID NO: 43584 - protein, 460 aa, Homo sapiens
MNYFLLLGISMSATTVGLYLVPFCKTAILLTVMMSIFGVSIGILDTGGNVLILAIWGDKGAPHMQALHFSFALGAFLAPLLAKLALGPTASAENHTESDFHPALNQSSDADSEALFGVPNDKNLLWAYAVIGTYMFLVSVIFFCLFLKNSSKQEKARASAETFRRAKYHNALLCLLFLFFFFYVGAEVTYGSYVFSFATTHAGMKESEAAGLNSIFWGTFAACRGLAIFFATCLQPGTMIVLSNIGSLTSSLFLVLFDKNPICLWIATSVYGASMATTFPSGVSWIEQYTTIHGKSAAFFVIGASLGEMAIPAVIGILQGKYPDLPVVLYTSLGASIATGILFPVLYKLATSPLDRQRKEDRKSEDQKALLSSSGLNEYEEENEEEDAEKWNEMDFEMIETNDTMRHSIIETSRSSLTEPTAEVYNQYPSNALVFESSPFNTGSAHVKHLPETRTKGTNV

SEQ ID NO: 43585 - protein, 70 aa, Homo sapiens
MAAHRPGPLKQQNKAHKGGRHRGRGSAQRDGKGSGREETAGWQGWPSSSGTGGAPAQQNFPARGHAAASR

SEQ ID NO: 43586 - protein, 235 aa, Homo sapiens
  MOD_RES (1)..(1): Any amino acid
XPDIPSSKSTELPVDWSIKTRLLFTSSQPFTWADHLKAQEEAQGLVQHCRATEVTLPKSIQDPKLSSELRCTFQQSLIYWLHPALSWLPLFPRIGADRKMAGKTSPWSNDATLQHVLMSDWEQAISDEDEEESFSWLEEMGVQDKIKKPDILSIKLRKEKHEVQMDHRPESVVLVKGINTFTLLNFLINSKSLVATSGPQAGLPPTLLSPVAFRGATMQMLKARSVNVKTQALSG

SEQ ID NO: 43587 - protein, 728 aa, Homo sapiens
MQSTSNHLWLLSDILGQGATANVFRGRHKKTGDLFAIKVFNNISFLRPVDVQMREFEVLKKLNHKNIVKLFAIEEETTTRHKVLIMEFCPCGSLYTVLEEPSNAYGLPESEFLIVLRDVVGGMNHLRENGIVHRDIKPGNIMRVIGEDGQSVYKLTDFGAARELEDDEQFVSLYGTEEYLHPDMYERAVLRKDHQKKYGATVDLWSIGVTFYHAATGSLPFRPFEGPRRNKEVMYKIITGKPSGAISGVQKAENGPIDWSGDMPVSCSLSRGLQVLLTPVLANILEADQEKCWGFDQFFAETSDILHRMVIHVFSLQQMTAHKIYIHSYNTATIFHELVYKQTKIISSNQELIYEGRRLVLEPGRLAQHFPKTTEENPIFVVSREPLNTIGLIYEKISLPKVHPRYDLDGDASMAKAITGVVCYACRIASTLLLYQELMRKGIRWLIELIKDDYNETVHKKTEVVITLDFCIRNIEKTVKVYEKLMKINLEAAELGEISDIHTKLLRLSSSQGTIETSLQDIDSRLSPGGSLADAWAHQEGTHPKDRNVEKLQVLLNCMTEIYYQFKKDKAERLAYNEEQIHKFDKQKLYYHATKAMTHFTDECVKKYEAFLNKSEEWIRKMLHLRKQLLSLTNQCFDIEEEVSKYQEYTNELQETLPQKMFTASSGIKHTMTPIYPSSNTLVEMTLGMKKLKEEMEGVVKELAENNHILERFGSLTMDGGLRNVDCL

SEQ ID NO: 43588 - protein, 310 aa, Homo sapiens
MDSLAESRWPPGLAVMKTIDDLLRCGICFEYFNIAMIIPQCSHNYCSLCIRKFLSYKTQCPTCCVTVTEPDLKNNRILDELVKSLNFARNHLLQFALESPAKSPASSSSKNLAVKVYTPVASRQSLKQGSRLMDNFLIREMSGSTSELLIKENKSKFSPQKEASPAAKTKETRSVEEIAPDPSEAKRPEPPSTSTLKQVTKVDCPVCGVNIPESHINKHLDSCLSREEKKESLRSSVHKRKPLPKTVYNLLSDRDLKKKLKEHGLSIQGNKQQLIKRHQEFVHMYNAQCDALHPKSGNGFYKGPNRKGNR

SEQ ID NO: 43589 - protein, 57 aa, Homo sapiens
MILPCSISPWQKKSKISASRKLQLKPRVGCASLPPLCRLCCCRLQSKSWSERRRSGA

SEQ ID NO: 43590 - protein, 50 aa, Homo sapiens
MGDSDDEYDRRRRDKFRRERSDYDRSRERDERRRGDDWNDRDRVSLCHPG

SEQ ID NO: 43591 - protein, 519 aa, Homo sapiens
MDFLLLQDPASTCVPEPASQHTLRSGPGCLQQPEQQGVRDPGGIWAKLGAAEASAERLQGRRSRGASGSEPQQMGSDVRDLNALLPAVPSLGGGGGCALPVSGAAQWAPVLDFAPPGASAYGSLGGPAPPPAPPPPPPPPPHSFIKQEPSWGGAEPHEEQCLSAFTVHFSGQFTGTAGACRYGPFGPPPPSQASSGQARMFPNAPYLPSCLESQPAIRNQGYSTVTFDGTPSYGHTPSHHAAQFPNHSFKHEDPMGQQGSLGEQQYSVPPPVYGCHTPTDSCTGSQALLLRTPYSSDNLYQMTSQLECMTWNQMNLGATLKGVAAGSSSSVKWTEGQSNHSTGYESDNHTTPILCGAQYRIHTHGVFRGIQDVRRVPGVAPTLVRSASETSEKRPFMCAYPGCNKRYFKLSHLQMHSRKHTGEKPYQCDFKDCERRFSRSDQLKRHQRRHTGVKPFQCKTCQRKFSRSDHLKTHTRTHTGEKPFSCRWPSCQKKFARSDELVRHHNMHQRNMTKLQLAL

SEQ ID NO: 43592 - protein, 125 aa, Homo sapiens
MNEVSVIKEGWLHKRGEYIKTWRPRYFLLKSDGSFIGYKERPEAPDQTLPPLNNFSVAAPCCLFPLPAECQLMKTERPRPNTFVIRCLQWTTVIERTFHVDSPDEREEWMRAIQMVANSLKQRAP

SEQ ID NO: 43593 - protein, 246 aa, Homo sapiens
MSRQVVRSSKFRHVFGQPAKADQCYEDVRVSQTTWDSGFCAVNPKFVALICEASGGGAFLVLPLGKVWEIPDGGLMLPLREPVVTLEGHTKRVGIVAWHTTAQNVLLSAGCDNVIMVWDVGTGAAMLTLGPEVHPDTIYSVDWSRDGGLICTSCRDKRVRIIEPRKGTVVAEKDRPHEGTRPVRAVFVSEGKILTTGFSRMSERQVALWDTKHLEEPLSLQELDTSSGVLLPFFDPDTNIVYLCGK

SEQ ID NO: 43594 - protein, 149 aa, Homo sapiens
  MOD_RES (1)..(1): Any amino acid
XIILKRNEIQKLGVSKLNFWLIQGSAWWCGTIILKFLTSKILGVSDHIRLSDLIAARILRYTDFDTLIYTCAPEFDFMEKATPLRYTKTLLLPVVMVITCFIFKKTVRDISYVLATNIYLRQMEHREMCLGILKKNEWRTLDTVPIRST

SEQ ID NO: 43595 - protein, 184 aa, Homo sapiens
QNKAREAELRRLRKMNVAFEEQNAVLQRHTQSMSSARERLEQELALEERRTLALQQQLQAVRQALTASFASLPVPGTGETPTLGTLDFYMARLHGAIERDPAQHEKLIVRIKEILAQVASPLNPEKALAARYTQKNLTAEGAPPRRTATRYTGSPGHPQDTGQTKPTPSTRQDPPNYSLRGAVP

SEQ ID NO: 43596 - protein, 75 aa, Homo sapiens
MADLSLLQEDLQEDADGSLDFVSQDEMLTPLGRLDKYAASENIFNRYRPGAVTHACNPSTLGGQDKWWPGVCSIP

SEQ ID NO: 43597 - protein, 277 aa, Homo sapiens
MSTEKVDQKEEAGEKEVCGDQIKGPDKEEEPPAAASHGQGWRPGGRAARNARPEPGARHPALPAMVNDPPVPALLWAQEVGQVLAGRARRLLLQFGVLFCTILLLLWVSVFLYGSFYYSYMPTVSHLSPVHFYYRTDCDSSTTSLCSFPVANVSLTKGGRDRVLMYGQPYRVTLELELPESPVNQDLGMFLVTISCYTRGGRIISTSSRSVTSCYLALQSRSSCWRWNSTQTIERTRTCRPLERSLRSTASASSCMEPTSASTRTSLGSDTCYTTSR

SEQ ID NO: 43598 - protein, 720 aa, Homo sapiens
MQTQEILRILRLPELGDLGQFFRSLSATTLVSMGALAAILAYWFTHRPKALQPPCNLLMQSEEVETCCSKRWQALAQPRVAQIVLEEEDSGGARRSVIGSGPQLLTHYYDDARTMYQVFRRGLSISGNGPCLGFRKPKQPYQWLSYQEVADRAEFLGSGLLQHNCKACTDQFIGVFAQNRPEWIIVELACYTYSMVVVPLYDTLGPGAIRYIINTADISTVIVDKPQKAVLLLEHVERKETPGLKLIILMDPFEEALKERGQKCGVVIKSMQAVEDCGQENHQAPVPPQPDDLSIVCFTSGTTGNPKGAMLTHGNVVADFSGFLKVTESQWAPTCADVHISYLPLAHMFERMVQSVVYCHGGRVGFFQGDIRLLSDDMKALCPTIFPVVPRLLNRMYDKIFSQANTPLKRWLLEFAAKRKQAEVRSGIIRNDSIWDELFFNKIQASLGGCVRMIVTGAAPASPTVLGFLRAALGCQVYEGYGQTECTAGCTFTTPGDWTSGHVGAPLPCNHIKLVDVEELNYWACKGEGEICVRGPNVFKGYLKDPDRTKEALDSDGWLHTGDIGKWLPAGTLKIIDRKKHIFKLAQGEYVAPEKIENIYIRSQPVAQIYVHGDSLKAFLVGIVVPDPEVMPSWAQKRGIEGTYADLCTNKDLKKAILEDMVRLGKESGLHSFEQVKAIHIHSDMFSVQNGLLTPTLKAKRPELREYFKKQIEELYSISM

SEQ ID NO: 43599 - protein, 150 aa, Homo sapiens
MRYNEKELQALSRQPAEMAAELGMRGPKKGSVLKRRLVKLVVNFLFYFRTDEAEVGASRARGRVPGWAPRRPGAHCPVPAPVSPPARRSPAAGALQSRPGRARHLLHHYEFMRRSLIFYRNEIRKVTGKDPLEQFGISEEARFQLSGLQA

SEQ ID NO: 43600 - protein, 257 aa, Homo sapiens
  MOD_RES (1)..(1): Any amino acid
XGHKMHYPMVEYCTPTTSGEDVRDFAKVLKNKFRTKRYFAKHPRMGYLPVQTVLEGDNMETNLQAEYDRLKQQHEHKGLSPLPSPPEMMPTSPQSPRDAELIAEAKLLRQHKGRLEARMQILEDHNKQLESQLHRLRQLLEQPQAEAKVNGTTVSSPSTSLQRSDSSQPMLLRVVGSQTSDSMEVPCFPFAFHHDSKLIIMRPPEASSRIWNCEEDLLSPPQDTSTGLEEVMEQLNNSFPSSRGRNTPGKPMREDTM

SEQ ID NO: 43601 - protein, 77 aa, Homo sapiens
  MOD_RES (1)..(1): Any amino acid
XRRSKSDGEAKRSRDPPASASQVTGIRESCSIAQDRVQWRDLGSLQPPPPSFKRFSCLSLPTEPSPSPRITRKSTRQ

SEQ ID NO: 43602 - protein, 233 aa, Homo sapiens
  MOD_RES (1)..(1): Any amino acid
XDVVVQVLDARDPMGTRSPHIETYLKKEKPWKHLIFVLNKCDLVPTWATKRWVAVLSQDYPTLAFHASLTNPFGKGAFIQLLRQFGKPWHLTFHALLGFPGLLCILCPWSPCSFYVLWLERALPKFKLQIPGQTSAPEGSRGTRLPYQILKASCSLHTDKKQISVGFIGYPNVGKSSVINTLRSKKVCNVAPIAGETKVWQYITLMRRIFLIDCPGVVYPSEDSETDIVLKGV

SEQ ID NO: 43603 - protein, 168 aa, Homo sapiens
MASRGARQRLKGSGASSGDTAPAADKLRELLGSREAGGAEHRTELSGNKAGQVWAPEGSTAFKCLLSARLCAALLSNISDCDETFNYWEPTHYLIYGEGFQTWEYSPAYAIRSYAYLLLHAWPAAFHARILQTNKGCVQEVWVARESNDASLLGSQHWHVLLIISIPS

SEQ ID NO: 43604 - protein, 208 aa, Homo sapiens
MSRPLITRSPASPLNNQGIPTPAQLTKSNAPVHIDVGGHMYTSSLATLTKYPESRIGRLFDGTEPIVLDSLKQHYFIDRDGQMFRYILNFLRTSKLLIPDDFKDYTLLYEEAKYFQLQPMLLEMERWKQDRETGRFSRPCECLVVRVAPDLGERITLSGDKSLIEEVFPEIGDVMCNSVNAGWNHDSTHVIRFPLNGYCHLNSVQVLE

SEQ ID NO: 43605 - protein, 347 aa, Homo sapiens
MPSQEPPVDDKNEDADLPSEETDGIAYISSSRKHDSIKDDSEDLKPVIDGMDGIKISQGLGLQDFDLIRVIGRGSYAKVLLVRLKKNDQIYAMKVVKKELVHDDEDIDWVQTEKHVFEQASSNPFLVGLHSCFQTTSRLFLVIEYVNGGDLMFHMQRQRKLPEEHARFYAAEICIALNFLHERGIIYRDLKLDNVLLDADGHIKLTDYGMCKEGLGPGDTTSTFCGTPNYIAPEILRGEEYGFSVDWWALGVLMFEMMAGRSPFDIITDNPDMNTEDYLFQVILEKPIRIPRFLSVKASHVLKGFLNKDPKERLGCRPQTGFSDIKSHAFFRSIDWDLVFHTKNTSN

SEQ ID NO: 43606 - protein, 192 aa, Homo sapiens
  MOD_RES (1)..(1): Any amino acid
XGRFGARGVREGGAAMAAGESMAQRMVWVDLEGPNLIIKQPDELLDSMSDWCKEHHGKSGLTKAVKESTITLQQAEYEFLSFVRQQTPPGLCPLAGNSVHEDKKFLDKYMPQFMKHLHYRIIDVSTVKELCRRWYPEEYEFAPKKAASHRALDDISESIKELQFYRNNIFKKKIDEKKRKIIENGENEKTVS

SEQ ID NO: 43607 - protein, 21 aa, Homo sapiens
  MOD_RES (1)..(1): Any amino acid
XNNNAGNMLTFGGGTRLMVKP

SEQ ID NO: 43608 - protein, 91 aa, Homo sapiens
MATAQLSHCITIHKASKETVFPSQITNEHESLKMVKKLFATSISCITYLRGLFPESSYGERHLDDLSLKILREDKKCPGSLHIIRCYVWQY

SEQ ID NO: 43609 - protein, 163 aa, Homo sapiens
GCAKAESGPASLTICEKASGYLQDSLATTPASSSIDKAVQLFLCDLLLVVRTSLWRQQQPPAPAPAAQGTSSRPQASALELRGFQRDLSSLRRLAQSFRPAMRRVFLHEATARLMAGASPTRTHQLLDRSLRRRAGPGGKGGEGAAADQGCAVCSAGKGAHGM

SEQ ID NO: 43610 - protein, 159 aa, Homo sapiens
MESIFHEKQEGSLCAQHCLNNLLQGEYFSPVELSSIAHQLDEEERMRMAEGGVTSEDYRTFLQQPSGNMDDSGFFSIQVISNALKVWGLELILFNSPEYQRLRIDPINERSFICNYKEHWFTVRKLGKQWFNLNSLLTGPELISDTYLALFLAQLQQEG

SEQ ID NO: 43611 - protein, 131 aa, Homo sapiens
MNQPCNSMEPRVMDDDMLKLAVGDQGPQEEAGQLAKQEGILFKDVLSLQLDFRNILRIDNLWQFENLRKLQLDNNIIEKIEGLENLAHLVWLDLSFNNIETIEGLDTLVNLEDLSLFNNRISKIDSLDALV

SEQ ID NO: 43612 - protein, 125 aa, Homo sapiens
  MOD_RES (1)..(1): Any amino acid
XGSLSNNGDGCASSNDNGEQVDHTASLPLPTPATVYNATSEETSNNCPVKDATASEKNEPEVQWTASTSVEQVRERSYQRALLLSDHRKDKDSDPDPENPEPTTTNECPSPDTSQNTCKSPPKMS

SEQ ID NO: 43613 - protein, 46 aa, Homo sapiens
GCAFQLLLMTSFSAGEIFILTAMSYDRYVAICCPLNYEVIHVPIRA

SEQ ID NO: 43614 - protein, 71 aa, Homo sapiens
MERLQKQPLTSPGSVSPSRDSSVPGSPSSIVAKMDNQVLGYKDLAAIPKDKAILDIERPDLMIYEPHFTYS

SEQ ID NO: 43615 - protein, 99 aa, Homo sapiens
MALSRVCWARSAVWGSAVTPGHFVTRRLQLGRSGLAWGAPRSSKLHLSPKADVKNLMSYVVTKTKAINGKYHRFLGRHFPRFYVLYTIFMKGRIADVMG

SEQ ID NO: 43616 - protein, 496 aa, Homo sapiens
MSQLWQKTWKFLLIEWCWPPVVLIFMPCLQVLLPAAGLLQLQDVKKTCCEFLESQLHPVNCLGIRAFADMHACTDLLNKANTYAEQHFADVVLSEEFLNLGIEQVCSLISSDKLTISSEEKVFEAVIAWVNHDKDVRQEFMARLMEHVRLPLLPREYLVQRVEEEALVKNSSACKDYLIEAMKYHLLPTEQRILMKSVRTRLRTPMNLPKLMVVVGGQAPKAIRSVECYDFKEERWHQVAELPSRRCRAGMVYMAGLVFAVGGFNGSLRVRTVDSYDPVKDQWTSVANMRDRRSTLGAAVLNGLLYAVGGFDGSTGLSSVEAYNIKSNEWFHVAPMNTRRSSVGVGVVGGLLYAVGGYDGASRQCLSTVECYNATTNEWTYIAEMSTRRSGAGVGVLNNLLYAVGGHDGPLVRKSVEVYDPTTNAWRQVADMNMCRRNAGVCAVNGLLYVVGGDDGSCNLASVEYYNPTTDKWTVVSSCMSTGRSYAGVTVIDKPL

SEQ ID NO: 43617 - protein, 145 aa, Homo sapiens
MTKKRIAVIGGGVSGLSSIKCCVEEGLEPVCFERTDDIGGLWRFQENPEEGRASIYKSVIINTSKEMMCFSDYPIPDHYPNFMHNAQVLEYFRMYAKEFDLLKYIRFKTTVCSVKKQPDFATSGQWEVVTESEGKKEMNVFDGVM

SEQ ID NO: 43618 - protein, 226 aa, Homo sapiens
  MOD_RES (1)..(1): Any amino acid
XPSVPLHYLPHDPLHQELSFGVPYSHMMPRRLSTQRYRLQQPLPPPPPPPPPPPYYPSFLPYFLSMLPMSPTAMGPTISLDLDVDDVEMENYEALLNLAERLGDAKPRGLTKADIEQLPSYRFNPDSHQSEQTLCVVCFSDFEARQLLRVLPCNHEFHTKCVDKWLKVTLPRSAPGYSSCSDGGMGWPGLFPSLSLSSSRKFWLQRTKSPQVAAQMWWVGAGESNA

SEQ ID NO: 43619 - protein, 273 aa, Homo sapiens
MAPAGVVTRAVRSGELPLTSMASAENEACAVRSVACPSQAWRLQKVLCGRCGAASCPSQTWRPRGAGSGGVRMGSRADGPRTSGHVTGKMAVFPWHSRNRNYKAEFASCRLEAVPLEFGDYHPLKPITVTESKTKKVNRKGSTSSTSSSSSSSVVDPLSSVLDGTDPLSMFAATADPAALAAAMDSSRRKRDRDDNSVVGSDFEPWTNKRGEILARYTTTEKLSINLFMGSEKDGGYSEPRSRHRTPAWTTEQSWDCHIGNVREGADPAGGAG

SEQ ID NO: 43620 - protein, 90 aa, Homo sapiens
MVSPATRKSLPKVKAMDFITSTAILPLLFGCLGVFGLFRLLQWVRGKAYLRNAVVVITGATSGLGKGADTQALLGDLRPHRLWGHSCSSS

SEQ ID NO: 43621 - protein, 49 aa, Homo sapiens
MKRGRLPSSSEDSDDNGSLSTTWSQNSRSQHRRSSCSRHEDRKPSEGCV

SEQ ID NO: 43622 - protein, 41 aa, Homo sapiens
MKQPIMADGPRCKRRKQANPRRKNGSSRLSEKAWTTCLSQH

SEQ ID NO: 43623 - protein, 60 aa, Homo sapiens
MTDTVFSNSSNRWMYPSDRPLQSKLQHSRWTLKDWLCFQVSVKSLKPTNCPSSVDGFSFH

SEQ ID NO: 43624 - protein, 96 aa, Homo sapiens
MDVTVSELLELFLQSPLVTWVKTFGPFGSGSQDNLTMYMDLVDGIFLNQIMLQIDPRPTNQRINKHVNNDVNLRIQNLTILVRNIKTYYQDRPFFR

SEQ ID NO: 43625 - protein, 257 aa, Homo sapiens
  MOD_RES (1)..(1): Any amino acid
XTLQTAAQATLRQTEPLTKLHQEARAALTQASSSVQAATVTVMGARTLLADLEDTRKKTKQAERMLGNAAPLSSSAKKKGREAEVLAKDSAKLAKALLRERKQAHRRASRLTSQTQATLQQASQQVLASEARRQELEEAERVGAGLSEMEQQIRESRISLEKDIETLSELLARLGSLDTHQAPAQALNETQWALERLRLQLGSPGSLQRKLSLLEQESQQQELQIQGFESDLAEIRADKQNLEAILHSLPENCASWQ

SEQ ID NO: 43626 - protein, 1406 aa, Homo sapiens
MATRRTGLSEGDGDKLKACEVSKNKDGKEQSETVSLSEDETFSWPGPKTVTLKRTSQGFGFTLRHFIVYPPESAIQFSYKDEENGNRGGKQRNRLEPMDTIFVKQVKEGGPAFEAGLCTGDRIIKVNGESVIGKTYSQVIALIQNSDTTLELSVMPKDEDILQVAYSQDAYLKGNEAYSGNARNIPEPPPICYPWLPSAPSAMAQPVEISPPDSSLSKQQTSTPVLTQPGRAYRMEIQVPPSPTDVAKSNTAVCVCNESVRTVIVPSEKVVDLLSNRNNHTGPSHRTEEVRYGVSEQTSLKTVSRTTSPPLSIPTTHLIHQPAGSRSLEPSGILLKSGNYSGHSDGISSSRSQAVEAPSVSVNHYSPNSHQHIDWKNYKTYKEYIDNRRLHIGCRTIQERLDSLRAASQSTTDYNQVVPNRTTLQGRRRSTSHDRVPQSVQIRQRSVSQERLEDSVLMKYCPRSASQGALTSPSVSFSNHRTRSWDYIEGQDETLENVNSGTPIPDSNGEKKQTYKWSGFTEQDDRRGICERPRQQEIHKSFRGSNFTVAPSVVNSDNRRMSGRGVGSVSQFSSIPSIMRKTFEKKPTATGTFGVRLDDCPPAHTNRYIPLIVDICCKLVEERGLEYTGIYRVPGNNAAISSMQEELNKGMADIDIQDDKWRDLNVISSLLKSFFRKLPEPLFTNDKYADFIEANRKEDPLDRLKTLKRLIHDLPEHHYETLKFLSAHLKTVAENSEKNKMEPRNLAIVFGPTLVRTSEDNMTHMVTHMPDQYKIVETLIQHHDWFFTEEGAEEPLTTVQEESTVDSQPVPNIDHLLTNIGRTGVSPGDVSDSATSDSTKSKGSWGSGKDQYSRELLVSSIFAAASRKRKKPKEKAQPSSSEDELDNVFFKKENVEQCHNDTKEESKKESETLGRKQKIIIAKENSTRKDPSTTKDEKISLGKESTPSEEPSPPHNSKHNKSPTLSCRFAILKESPRSLLAQKSSHLEETGSDSGTLLSTSSQASLARFSMKKSTSPETKHSEFLANVSTITSDYSTTSSATYLTSLDSSRLSPEVQSVAESKGDEADDERSELISEGRPVETDSESEFPVFPTALTSERLFRGKLQEVTKSSRRNSEGSELSCTEGSLTSSLDSRRQLFSSHKLIECDTLSRKKSARFKSDSGSLGDAKNEKEAPSLTKVFDVMKKGKSTGSLLTPTRGESEKQEPTWKTKIADRLKLRPRAPADDMFGVGNHKVNAETAKRKSIRRRHTLGGHRDATEISVLNFWKVHEQSGERESELSAVNRLKPKCSAQDLSISDWLARERLRTSTSDLSRGEIGDPQTENPSTREIATTDTPLSLHCNTGSSSSTLASTNRPLLSIPPQSPDQINGESFQNVSKNASSAANAQPHKLSETPGSKAEFHPCL

SEQ ID NO: 43627 - protein, 377 aa, Homo sapiens
MWAFSELPMPLLINLIVSLLGFVATVTLIPAFRGHFIAARLCGQDLNKTSRQQIPESQGVISGAVFLIILFCFIPFPFLNCFVKEQCKAFPHHELLLPTAASLPLLMVYFTNFGNTTIVVPKPFRPILGLHLDLGILYYVYMGLLAVFCTNAINILAGINGLEAGQSLVISASIIVFNLVELEGDCRDDHVFSLYFMIPFFFTTLGLLYHNWYPSRVFVGDTFCYFAGMTFAVVGILGHFSKTMLLFFMPQVFNFLYSLPQLLHIIPCPRHRIPRLNIKTGKLEMSYSKFKTKSLSFLGTFILKVAESLQLVTVHQSETEDGEFTECNNMTLINLLLKVLGPIHERNLTLLLLLLQILGSAITFSIRYQLVRLFYDV

SEQ ID NO: 43628 - protein, 59 aa, Homo sapiens
MGTWARTLLGPDYSDENDYTHTSYNAMHVKHTSSNLERECSPKLMKRSQSVVEAGTLKH

SEQ ID NO: 43629 - protein, 148 aa, Homo sapiens
VLEYLAFSDSSKWVFEHPETLYAWEGACVWIPCTYRALDGDLESFILFHNPEYNKNTSKFDGTRLYESTKDGKVPSEQKRVQFLGDKNKNCTLSIHPVHLNDSGQLGLRMESKTEKWMERIHLNVSVESPWEDCDLPASGCRWEVPLQ

SEQ ID NO: 43630 - protein, 126 aa, Homo sapiens
MTPGTQSPFFLLLLLTVLTVVTGSGHASSTPGGEKETSATQRSSVPSSTEKNAALHQAQLLLWCTTAPLPGLPQPQPARALHSQFPATTLILLPPLPAIAPRLMPVALTIARSQHRLLPRAAERHF

SEQ ID NO: 43631 - protein, 74 aa, Homo sapiens
MAAGFGRCCRVLRSISRFHWRSQHTKANRQREPGLGFSFEFTEQQKEFQATARKFAREEIIPVAAEYDKTGESP

SEQ ID NO: 43632 - protein, 535 aa, Homo sapiens
MSDFHVHPQATVGEEGGVARFQCQIHGLPKPLITWEKNRVPIDTDNERYTLLPKGVLQITGLRAEDGGIFHCVASNIASIRISHGARLTVSGSGSGAYKEPAILVGPENLTLTVHQTAVLECVATGNPRPIVSWSRLDGRPIGVEGIQVLGTGNLIISDVTVQHSGVYVCAANRPGTRVRRTAQGRLVVQAPAEFVQHPQSISRPAGTTAMFTCQAQGEPPPHVTWLKNGQVLGPGGHVRLKNNNSTLTISGIGPEDEAIYQCVAENSAGSSQASARLTVLWAEGLPGPPRNVRAVSVSSTEVRVSWSEPLANTKEIIGYVLHIRKAADPPELEYQEAVSKSTFQHLVSDLEPSTAYSFYIKAYTPRGASSASVPTLASTLGEAPAPPPLSVRVLGSSSLQLLWEPWPRLAQHEGGFKLFYRPASKTSFTGPILLPGTVSSYNLSQLDPTAVYEVKLLAYNQHGDGNATVRFVSLRGASERTALSPPCDCRKEEAANQTSTTGIVIGIHIGVTCIIFCVLFLLFGQRGRVLLCKD

SEQ ID NO: 43633 - protein, 390 aa, Homo sapiens
TFQHGQNLSFINISIIDDNESEFEEPIEILLTGATGGAVLGRHLVSRIIIAKSDSPFGVIRFLNQSKISIANPNSTMILSLVLERTGGLLGEIQVNWETVGPNSQEALLPQNRDIADPVSGLFYFGEGEGGVRTIILTIYPHEEIEVEETFIIKLHLVKGEAKLDSRAKDVTLTIQEFGDPNGVVQFAPETLSKKTYSEPLALEGPLLITFFVRRVKGTFGEIMVYWELSSEFDITEDFLSTSGFFTIADGESEASFDVHLLPDEVPEIEEDYVIQLVSVEGGAELDLEKSITWFSVYANDDPHGVFALYSDRQSILIGQNLIRSIQINITRLAGTFGDVAVGLRISSDHKEQPIVTENAERQLVVKDGATYKVDVVPIKNQVCGISSVS

SEQ ID NO: 43634 - protein, 54 aa, Homo sapiens
MANIHTFSACLALADLHGDGEYKLVVGDLGPGGQQPRLKVLKGPLVMTESPLPA

SEQ ID NO: 43635 - protein, 144 aa, Homo sapiens
MKAKDLIVTPATILKEKPDPNNLVFGTVFTDHMLTVEWSSEFGWEKPHIKPLQNLSLHPGSSALHYAVELFEGLKAFRGVDNKIRLFQPNLNMDRMYRSAVRATLPVFDKEELLECIQQLVKLDQEWVPYSTSASLYIRPTFIG

SEQ ID NO: 43636 - protein, 52 aa, Homo sapiens
MGGCAGSRRRFSDSEGEETVPEPRLPLLDHQGAHWKNAVGFWLESSGTISAH

SEQ ID NO: 43637 - protein, 81 aa, Homo sapiens
MFGASRKKFVEGVDSDYHDENMYYSQSSMFPHRSEKDMLASPSTSGQLSQFGASLYGQQSALGLPMRGMSNNTPQLNRSLS

SEQ ID NO: 43638 - protein, 80 aa, Homo sapiens
MATHSPQKSHQCAHCEKTFNRKDHLKNHLQTHDPNKMAFGCEECGKKYNTMLGYKRHLALHAASSGDLTCGVCALELGST

SEQ ID NO: 43639 - protein, 144 aa, Homo sapiens
MEPIVHIHQELLTGIESEASLSKLSPTSQKGTSSSSSYIFQKISQGKQMCQKLKEQTDQLKTKVQEFSKRIKQDSPYHLQDKKLVLEKLQGHLELLEQNFLATKDKHLTLQQQVHKHESTIVGDFDPERKVEGEIFKLEMLLED

SEQ ID NO: 43640 - protein, 306 aa, Homo sapiens
  MOD_RES (1)..(1): Any amino acid
XETFCVGEDAKAAARDIFSPKRSWKRQRYRLSAQAEGLQLLPGLIHVHRRKMFQATIRSVENLQSSKSTRATILVRLDTGGQEGLQYQPGDHIGVCPPNRPGLVEALLSRVEDPPAPTEPVAVEQLEKGSPGGPPPGWVRDPRLPPCTLRQALTFFLDITSPPSPQLLRLLSTLAEEPREQQELEALSQDPRRYEEWKWFRCPTLLEVLEQFPSVALPAPLLLTQLPLLQPRYYSVSSAPSTHPGEIHLTVAVLAYRTQDGLGPLHYGVCSTWLSQLKPGDPVPCFIRGLGITGVSHRARTEGEGF

SEQ ID NO: 43641 - protein, 67 aa, Homo sapiens
MAAAAVARLWWRGILGASALTRGTGRPSVLLLPVRRESAGADTRREYVRAALFSELSAGPLRCLSLP

SEQ ID NO: 43642 - protein, 633 aa, Homo sapiens
MIAAYENSKWEPVKWENDMHCAVKIQDKNQWRRGQIIRMVTDTLVEVLLYDVGVELVVNVDCLRKLEENLKTMGRLSLECSLVDIRPAGGSDKWTATACDCLSLYLTGAVATIILQVDSEENNTTWPLPVKIFCRDEKGERVDVSKYLIKKGLALRERRINNLDNSHSLSEKSLEVPLEQEDSVVTNCIKTNFDPDKKTADIISEQKVSEFQEKILEPRTTRGYKPPAIPNMNVFEATVSCVGDDGTIFVVPKLSEFELIKMTNEIQSNLKCLGLLEPYFWKKGEACAVRGSDTLWYRGKVMEVVGGAVRVQYLDHGFTEKIPQCHLYPILLYPDIPQFCIPCQLHNTTPVGNVWQPDAIEVLQQLLSKRQVDIHIMKPRSDHDKKYEEEQWEIRFEELLSAETDTPLLPPYLSSSLPSPGELYAVQVKHVVSPNEVYICLDSIETSNQSNQHSDTDDSGVSGESESESLDEALQRVNKKVEALPPLTDFRTEMPCLAEYDDGLWYRAKIVAIKEFNPLSILVQFVDYGSTAKLTLNRLCQIPSHLMRYPARAIKVLLAGFKPPLRDLGETRIPYCPKWSMEALWAMIDCLQGKQLYAVSMAPAPEQIVTLYDDEQHPVHMPLVEMGLADKDE

SEQ ID NO: 43643 - protein, 652 aa, Homo sapiens
MTSAQYKIKILIEGLHHGQRPGPAPPRQPGSFCWALKADGIMWLAKACWSIQSEMPCIQAQYGTPAPSPGPRDHLASDPLTPEFIKPTMDLASPEAAPAAPTALPSFSTFMDGYTGEFDTFLYQLPGTVQPCSSASSSASSTSSSSATSPASASFKFEDFQVYGCYPGPLSGPVDEALSSSGSDYYGSPCSAPSPSTPSFQPPQLSPWDGSFGHFSPSQTYEGLRAWTEQLPKASGPPQPPAFFSFSPPTGPSPSLAQSPLKLFPSQATHQLGEGESYSMPTAFPGLAPTSPHLEGSGILDTPVTSTKARSGAPGGSEGRCAVCGDNASCQHYGVRTCEGCKGFFKRTVQKNAKYICLANKDCPVDKRRRNRCQFCRFQKCLAVGMVKEVVRTDSLKGRRGRLPSKPKQPPDASPANLLTSLVRAHLDSGPSTAKLDYSKFQELVLPHFGKEDAGDVQQFYDLLSGSLEVIRKWAEKIPGFAELSPADQDLLLESAFLELFILRLAYRSKPGEGKLIFCSGLVLHRLQCARGFGDWIDSILAFSRSLHSLLVDVPAFACLSALVLITDRHGLQEPRRVEELQNRIASCLKEHVAAVAGEPQPASCLSRLLGKLPELRTLCTQGLQRIFYLKLEDLVPPPPIIDKIFMDTLPF

SEQ ID NO: 43644 - protein, 140 aa, Homo sapiens
MTTDLSFVTGSHVGELIIWDALDWTMQAYERNFWDPSPQLDTQQEIKLCQKSNDISIHHFTCDEENVFAAVGRGLYVYSLQMKRVIACQKTAHDSNVLHVARLPNRQLISCSEDGSVRIWELREKQQLAAEPVPTGFFNM

SEQ ID NO: 43645 - protein, 1104 aa, Homo sapiens
MTVVKRQAQSPSGVSSEVEVLKALKSLFEHHKALDEKVRERLRVSLERVSALEEELAAANQEIVALREQNVHIQRKMASSEGSTESEHLEGMEPGQKVHEKRLSNGSIDSTDETSQIVELQELLEKQNYEMAQMKERLAALSSRVGEVEQEAETARKDLIKTEEMNTKYQRDIREAMAQKEDMEERITTLEKRYLSAQRESTSIHDMNDKLENELANKEAILRQMEEKNRQLQERLELAEQKLQQTMRKAETLPEVEAELAQRIAALTKAEERHGNIEERMRHLEGQLEEKNQELQRARQREKMNEEHNKRLSDTVDRLLTESNERLQLHLKERMAALEEKNVLIQESETFRKNLEESLHDKERLAEEIEKLRSELDQLKMRTGSLIEPTIPRTHLDTSAELRYSVGSLVDSQSDYRTTKVIRRPRRGRMGVRRDEPKVKSLGDHEWNRTQQIGVLSSHPFESDTEMSDIDDDDRETIFSSMDLLSPSGHSDAQTLAMMLQEQLDAINKEIRLIQEEKESTELRAEEIENRVASVSLEGLNLARVHPGTSITASVTASSLASSSPPSGHSTPKLTPRSPAREMDRMGVMTLPSDLRKHRRKIAVVEEDGREDKATIKCETSPPPTPRALRMTHTLPSSYHNDARSSLSVSLEPESLGLGSANSSQDSLHKAPKKKGIKSSIGRLFGKKEKARLGQLRGFMETEAAAQESLGLGKLGTQAEKDRRLKKKHELLEEARRKGLPFAQWDGPTVVAWLELWLGMPAWYVAACRANVKSGAIMSALSDTEIQREIGISNPLHRLKLRLAIQEMVSLTSPSAPPTSRTPSGNVWVTHEEMENLAAPAKTKESEEGSWAQCPVFLQTLAYGDMNHEWIGNEWLPSLGLPQYRSYFMECLVDARMLDHLTKKDLRVHLKMVDSFHRTSLQYGIMCLKRLNYDRKELERRREASQHEIKDVLVWSNDRVIRWIQAIGLREYANNILESGVHGSLIALDENFDYSSLALLLQIPTQNTQARQILEREYNNLLALGTERRLDESDDKNFRRGSTWRRQFPPREVHGISMMPGSSETLPAGFRLTTTSGQSRKMTTDVASSRLQRLDNSTVRTYSC

SEQ ID NO: 43646 - protein, 50 aa, Homo sapiens
  MOD_RES (1)..(1): Any amino acid
XGSRNLFLTNSPESSNDCEDNPTRNRGFSKRGGKDHILEQFVLNTETLNW

SEQ ID NO: 43647 - protein, 125 aa, Homo sapiens
MSGDTCLCPASGAKPKLSGFKGGGLGNKYVQLNVGGSLYYTTVRALTRHDTMLKAMFSGRMEVLTDKEGWILIDRCGKHFGTILNYLRDDTITLPQNRQEIKELMAEAKYYLIQGLVNMCQSALQ

SEQ ID NO: 43648 - protein, 262 aa, Homo sapiens
MPEESSPRRTPQSIPYQDLPHLVNADGQYLFCRYWKPTGTPKALIFVSHGAGEHSGRYEELARMLMGLDLLVFAHDHVGHGQSEGERMVVSDFHVFVRDVLQHVDSMQKDYPGLPVFLLGHSMGGAIAILTAAERPGHFAGMVLISPLVLANPESATTFKVLAAKVLNLVLPNLSLGPIDSSVLSRNKTEVDIYNSDPLICRAGLKVCFGIQLLNAVSRVERALPKLTVPFLLLQGSADRLCDSKGAYLLMELAKSQDKTLK

SEQ ID NO: 43649 - protein, 88 aa, Homo sapiens
MASASARGNQDKDAHFPPPSKQSLLFCPKSKLHIHRAEISKIMRECQEESFWKRALPFSLVSMLVTQGLVYQGYLAANSRFGSLPKVA

SEQ ID NO: 43650 - protein, 426 aa, Homo sapiens
MSKSKVDNQFYSVEVGDSTFTVLKRYQNLKPIGSGAQGIVCAAYDAVLDRNVAIKKLSRPFQNQTHAKRAYRELVLMKCVNHKNIISLLNVFTPQKTLEEFQDVYLVMELMDANLCQVIQMELDHERMSYLLYQMLCGIKHLHSAGIIHRDLKPSNIVVKSDCTLKILDFGLARTAGTSFMMTPYVVTRYYRAPEVILGMGYKENVDMWSVGCIMGEMIKGAVLFPGTDHIDQWNKVIEQLGTPCPEFMKKLQPTVRNYVENRPKYAGLTFPKLFPDSLFPADSEHNKLKASQARDLLSKMLVIDPAKRISVDDALQHPYINVWYDPAEVEAPPPQIYDKQLDEREHTIEEWKELIYKEVMNSEEKTKNGVVKGQPSPSGAAVNSSESLPPSSSVNDISSMSTDQTLASDTDSSLEASAGPLGCCR

SEQ ID NO: 43651 - protein, 247 aa, Homo sapiens
  MOD_RES (1)..(1): Any amino acid
XPGASPQEDIANFQVLVKILPVMVTLVPYWMVYFQIPEAWLLLANVVVVLILVPLKDRLIDPLLLRCKLLPSALQKMALGMFFGFTSVIVAGVLEMERLHYIHHNETVSQQIGEVLYNAAPLSIWWQIPQYLLIGISEIFASIPGLEFAYSEAPRSMQGAIMGIFFCLSGVGSLLGSSLVALLSLPGGWLHCPKDFGNINNCRMDLYFFLLAGIQAVTALLFVWIAGRYERASQGPASHSRFSRDRG

SEQ ID NO: 43652 - protein, 183 aa, Homo sapiens
MEPRAVAEAVETGEEDVIMEALRSYNQEFSLQHSQSFTFDDAQQEDRKRLAELLVSVLEQGLPPSHRVIWLQSVRILSRDRNCLDPFTSRQSLQALACYADISVSEGSVPESADMDVVLESLKCLCNLVLSSPVAQMLAAEARLVVKLTERVGLYRERSFPHDVQFFDLRLLFLLTALRTDVR

SEQ ID NO: 43653 - protein, 164 aa, Homo sapiens
MASLAAANAEFCFNLFREMDDNQGNGNVFFSSLSLFAALALVRLGAQDDSLSQIDKLLHVNTASGYGNSSNSQSGLQSQLKRVFSDINASHKDYDLSIVNGLFAEKVYGFHKDYIECAEKLYDAKVERVDFTNHLEDTRRNINKWVENETHGKIKNVIGEGGIS

SEQ ID NO: 43654 - protein, 177 aa, Homo sapiens
MRLLILTCLVAVALARPKLPLRYPERLQNPSESSEPIPLESREEYMNGMNRQRNILREKQTDEIKDTRNESTQNCVVAEPEKMESSISSSSEEQFCRLNEYNQLQLQAAHAQEQIRRMNENSHVQVPFQQLNQLAAYPYAVWYYPQIMQYVPFPPFSDISNPTAHENYEKNNVMLQW

SEQ ID NO: 43655 - protein, 88 aa, Homo sapiens
MEKRHDAIFRKVRGILNKLTPEKFDKLCLELLNVGVESKLILKGVILLIVDKALEEPKYSSLYAQLCLRLAEDAPNFDGPAAEGQPGQ

SEQ ID NO: 43656 - protein, 1451 aa, Homo sapiens
MSGSTQPVAQTWRATEPRYPPHSLSYPVQIARTHTDVGLLEYQHHSRDYASHLSPGSIIQPQRRRPSLLSEFQPGNERSQELHLRPESHSYLPELGKSEMEFIESKRPRLELLPDPLLRPSPLLATGQPAGSEDLTKDRSLTGKLEPVSPPSPPHTDPELELVPPRLSKEELIQNMDRVDREITMVEQQISKLKKKQQQLEEEAAKPPEPEKPVSPPPIESKHRSLVQIIYDENRKKAEAAHRILEGLGPQVELPLYNQPSDTRQYHENIKINQAMRKKLILYFKRRNHARKQWEQKFCQRYDQLMEAWEKKVERIENNPRRRAKESKVREYYEKQFPEIRKQRELQERMQSRVGQRGSGLSMSAARSEHEVSEIIDGLSEQENLEKQMRQLAVIPPMLYDADQQRIKFINMNGLMADPMKVYKDRQVMNMWSEQEKETFREKFMQHPKNFGLIASFLERKTVAECVLYYYLTKKNENYKSLVRRSYRRRGKSQQQQQQQQQQQQQQQQQPMPRSSQEEKDEKEKEKEAEKEEEKPEVENDKEDLLKEKTDDTSGEDNDEKEAVASKGRKTANSQGRRKGRITRSMANEANSEEAITPQQSAELASMELNESSRWTEEEMETAKKGLLEHGRNWSAIARMVGSKTVSQCKNFYFNYKKRQNLDEILQQHKLKMEKERNARRKKKKAPAAASEEAAFPPVVEDEEMEASGVSGNEEEMVEEAEALHASGNEVPRGECSGPATVNNSSDTESIPSPHTEAAKDTGQNGPKPPATLGADGPPPGPPTPPPEDIPAPTEPTPASEATGAPTPPPAPPSPSAPPPVVPKEEKEEETAAAPPVEEGEEQKPPAAEELAVDTGKAEEPVKSECTEEAEEGPAKGKDAEAAEATAEGALKAEKKEGGSGRATTAKSSGAPQDSDSSATCSADEVDEAEGGDKNRLLSPRPSLLTPTGDPRANASPQKPLDLKQLKQRAAAIPPIQVTKVHEPPREDAAPTKPAPPAPPPPQNLQPESDAPQQPGSSPRGKSRSPAPPADKEAEKPVFFPAFAAEAQKLPGDPPCWTSGLPFPVPPREVIKASPHAPDPSAFSYAPPGHPLPLGLHDTARPVLPRPPTISNPPPLISSAKHPSVLERQIGAISQGMSVQLHVPYSEHAKAPVGPVTMGLPLPMDPKKLAPFSGVKQEQLSPRGQAGPPESLGVPTAQEASVLRGTALGSVPGGSITKGIPSTRVPSDSAITYRGSITHGTPADVLYKGTITRIIGEDSPSRLDRGREDSLPKGHVIYEGKKGHVLSYEGGMSVTQCSKEDGRSSSGPPHETAAPKRTYDMMEGRVGRAISSASIEGLMGRAIPPERHSPHHLKEQHHIRGSITQGIPRSYVEAQEDYLRREAKLLKREGTPPPPPPSRDLTEAYKTQALGPLKLKPAHEGLVATVKEAGRSIHEIPREELRHTPELPLAP

SEQ ID NO: 43657 - protein, 322 aa, Homo sapiens
MTEMSFLSSEVAKHFKPHGFSSDKAKAGSSEWLAVDGLVSPSNNSKEDAFSGTDWMLEKMDLKEFDLDALLGIDDLETMPDDLLTTLDDTCDLFAPLVQETNKQPPQTVNPIGHLPESLTKPDQVAPFTFLQPLPLSPGVLSSTPDHSFSLELGSEVDITEGDRKPDYTAYVAMIPQCIKEEDTPSDNDSGICMSPESYLGSPQHSPSTRGSPNRSLPSPGVLCGSARPKPYDPPGEKMVAAKVKGEKLDKKLKKMEQNKTAATRYRQKKRAEQEALTGECKELEKKNEALKERADSLAKEIQYLKDLIEEVRKARGKKRVP

SEQ ID NO: 43658 - protein, 536 aa, Homo sapiens
MLSRLRVVSTTCTLACRHLHIKEKGKPLMLNPRTNKGMAFTLQERQMLGLQGLLPPKIETQDIQALRFHRNLKKMTSPLEKYIYIMGIQERNEKLFYRILQDDIESLMPIVYTPTVGLACSQYGHIFRRPKGLFISISDRGHVRSIVDNWPENHVKAVVVTDGERILGLGDLGVYGMGIPVGKLCLYTACAGIRPDRCLPVCIDVGTDNIALLKDPFYMGLYQKRDRTQQYDDLIDEFMKAITDRYGRNTLIQFEDFGNHNAFRFLRKYREKYCTFNDDIQGTAAVALAGLLAAQKVISKPISEHKILFLGAGEAALGIANLIVMSMVENGLSEQEAQKKIWMFDKYGLLVKGRKAKIDSYQEPFTHSAPESIPDTFEDAVNILKPSTIIGVAGAGRLFTPDVIRAMASINERPVIFALSNPTAQAECTAEEAYTLTEGRCLFASGSPFGPVKLTDGRVFTPGQGNNVYIFPGVALAVILCNTRHISDSVFLEAAKALTSQLTDEELAQGRLYPPLANIQEVSINIAIKYLLIDHF

SEQ ID NO: 43659 - protein, 778 aa, Homo sapiens [sequence omitted]

SEQ ID NO: 43660 - protein, 199 aa, Homo sapiens
  MOD_RES (1)..(1): Any amino acid
XRVRVADEGSFTCFVSIRDFGSAAVSLQVAAPYSKPSMTLEPNKDLRPGDTVTITCSSYRGYPEAEVFWQDGQGVPLTGNVTTSQMANEQGLFDVHSVLRVVLGANGTYSCLVRNPVLQQDAHGSVTITEALWVTVGLSVCLIALLVALAFVCWRKIKQSCEEENAGAEDQDGEGEGSKTALQPLKHSDSKEDDGQEIA

SEQ ID NO: 43661 - protein, 48 aa, Homo sapiens
MEGQDEVSAREQHFHSQVRESTICFLLFAILYVVSYFIITRYKRKSGK

SEQ ID NO: 43662 - protein, 168 aa, Homo sapiens
MPATRKPMRYGHTEGHTEVCFDDSGSFIVTCGSDGDVRIWEDLDDDDPKFINVGEKAYSCALKSGKLVTAVSNNTIQVHTFPEGVPDGILTRFTTNANHVVFNGDGTKIAAGSSDFLVKIVDVMDSSQQKTFRGHDAPVLSLSFDPKDIFLASASCDGSVRVWQISDQ

SEQ ID NO: 43663 - protein, 110 aa, Homo sapiens
MLDLLEDFLEYEGYKYERIDGGITGGLRQEAIDRFNAPGAQQFCFLLSTRAGGLGINLATADTVIIYDSDWNPHNDIQVCAAAAHHPPRGPLIPGLRPSAAPTASARTRR

SEQ ID NO: 43664 - protein, 139 aa, Homo sapiens
MESNLSGLVPAAGLVPALPPAVTLGLTAAYTTLYALLFFSVYAQLWLVLLYGHKRLSYQTVFLALCLLWAALRTTLFSFYFRDTPRANRLGPLPFWLLYCCPVCLQFFTLTLMNLYFAQVVFKAKVKRRPEMSRGFGSQ

SEQ ID NO: 43665 - protein, 216 aa, Homo sapiens
GSTSRELSRERDPQAGHPAAQMEAEPAEPLAAAVEAANGAEQTRVNKAPEGRSPLSAEELMTIEDEGVLDKMLDQSTDFEERKLIRAALRELRQRKRDGSGSTMMQTKTFSSSSSSKKMGSIFDREDQASPRAGSLAALEKRQAEKKKELMKAQSLPKTSASQARKAMIEKLEKEGAAGSPGGPRAAVQRSTSFGVPNANSIKQMLLDWCRAKTRG

SEQ ID NO: 43666 - protein, 32 aa, Homo sapiens
MSPTAPLVSAQPKTLMQRKSLDWFHRPFKKRT

SEQ ID NO: 43667 - protein, 76 aa, Homo sapiens
MADQPKPISPLKNLLAGGFGGVCLVFVGHPLDTVKGRLCLTMGDLKDNMRDFGCKGPTADTATEFAWTTSHVLWDL

SEQ ID NO: 43668 - protein, 42 aa, Homo sapiens
MIHTNLKKKFSCCVLVFLLFAVICVWKEKKKGSYYDSFKLQT

SEQ ID NO: 43669 - protein, 45 aa, Homo sapiens
MEEQGHSEMEIIPSESHPHIQLLKSNRELLVTHIRNTQCLVDNLL

SEQ ID NO: 43670 - protein, 127 aa, Homo sapiens
MYFFIRDATAPEQAPAPARPYQGVRVKEPVKELLRRKRGHASSGAAPAPTAVVLPHQPLATYTTVGPSCLDMEGSVSAVTEEAALCAGWLSQPTPATLQPLAPWTPYTEYVPHEAVSCPYSADMYVQ

SEQ ID NO: 43671 - protein, 68 aa, Homo sapiens
MAAGTAARKAAPVLEAPPQQEQLSHTKLSAEDTWKLRAFSDDLILLVPACSRRGCTRCTGATIPCTWK

SEQ ID NO: 43672 - protein, 321 aa, Homo sapiens
MAEIGEDLDKSDVSSLIFLMKDYMGRGKISKEKSFLDLVVELEKLNLVAPDQLDLLEKCLKNIHRIDLKTKIQKYKQSVQGAGTSYRNVLQAAIQKSLKDPSNNFREEPVKKSIQESEAFLPQSIPEERYKMKSKPLGICLIIDCIGNETELLRDTFTSLGYEVQKFLHLSMHGISQILGQFACMPEHRDYDSFVCVLVSRGGSQSVYGVDQTHSGLPLHHIRRMFMGDSCPYLAGKPKMFFIQNYVVSEGQLEDSSLLEVDGPAMKNVEFKAQKRGLCTVHREADFFWSLCTADMSLLEQSHSSPSLYLQCLSQKLRQER

SEQ ID NO: 43673 - protein, 15 aa, Homo sapiens
  MOD_RES (1)..(1): Any amino acid
XGLYQAPLSMDVHMV

SEQ ID NO: 43674 - protein, 86 aa, Homo sapiens
MATLLRPVLRRLCGLPGLQRPAAEMPLRARSDGAGPLYSHHLPTSPLQKGLLAAGSAAMALYNPYRHGKAARASPPWGRLGAVSCG

SEQ ID NO: 43675 - protein, 442 aa, Homo sapiens
MAGSGRLVLRPWIRELILGSETPSSPRAGQLLEDAEAAVAGPSHAPDTSDVGATLLVSDGTHSVRCLVTREALDTSDWEEKEFGFRGTEGRLLLLQDCGVHVQVAEGGAPAEFYLQVDRFSLLPTEQPRLRVPGCNQDLDVQKKLYDCLEEHLSESTSSNAGLSLSQLLDEMREDQEHQGALVCLAESCLTLEGPCTAPPVTHWAASRCKATGEAVYTVPSSMLCISENDQLILSSLGPCQRTQGPELPPPDPALQDLSLTLIASPPSSPSSSGTPALPGHMSSEESGTSISLLPALSLAAPDPGQRSSSQPSPAICSAPATLTPRSPHASRTPSSPLQSCTPSLSPRSHVPSPHQALVTRPQKPSLEFKEFVGLPCKNRPPFPRTGATRGAQEPCSVWYEYEPPCTSLCARVQAVRLPPQLMAWALHFLMDAQPGSEPTPM

SEQ ID NO: 43676 - protein, 269 aa, Homo sapiens
MAVVKTPSRGLKNAKEPFNNASPHLLKNLVEEPKKRKEVPNHLLESKVYAKLVNNKVIQARPGIIHFGGYQVEKQHQQILHLVNVSNEDTRVHILPPQTKYFEINYVRKEHHLVPGLSLTVTVTFSPDEWRYYYDCIRVHCKGDDTLLVPIHAYPVMNSLDFPSFINLSNVLLGESKTYVIPLQCSCPVDFEFYITLIQSHQAFAIEPTSGIIPANGKMTVTIKFTPFQYGTAQIKMQLWISQFNSQPYECVFTGTCYPNMALPSLSQL

SEQ ID NO: 43677 - protein, 89 aa, Homo sapiens
MCSPASPKILYRNPRFLRLAFLQLHHQQQSDVFCDVLLQAEGEAVPAHCCILSACSPFFTERLERERPAQGGKVVLELGGLKISTLRKL

SEQ ID NO: 43678 - protein, 133 aa, Homo sapiens
MSFIPVAEDSDFPIHNLPYGVFSTRGDPRPRIGVAIGDQILDLSIIKHLFTGPVLSKHQDVFNQPTLNSFMGLGQAAWKEARVFLQNLLSVSQARLRDDTELRKCAFISQASATMHLPATIAAYLSQELPSSS

SEQ ID NO: 43679 - protein, 100 aa, Homo sapiens
MSYYQRPFSPSAYSLPASLNSSIVMQHGTSLDSTDTYPQHAQSLDGTTSSSIPLYRSSEEEKRVTVIKAPHYPGIGPVDESGIPTAIRTTVDRPKDWYKT

SEQ ID NO: 43680 - protein, 599 aa, Homo sapiens
MENQAHNTMGTSPCEAELQELMEQIDIMVSNKKMDWERKMRALETRLDLRDQELANAQTCLDQKGQEVGLLRQKLDSLEKCNLAMTQNYEGQLQSLKAQFSKLTNNFEKLRLHQMKQNKVPRKELPHLKEEIPFELSNLNQKLEEFRAKSREWDKQEILYQTHLISLDAQQKLLSEKCNQFQKQAQSYQTQLNGKKQCLEDSSSEIPRLICDPDPNCEINERDEFIIEKLKSAVNEIALSRNKLQDENQKLLQELKMYQRQCQAMEAGLSEVKSELQSRDDLLRIIEMERLQLHRELLKIGECQNAQGNKTRLESSYLPSIKEPERKIKELFSVMQDQPNHEKELNKIRSQLQQVEEYHNSEQERMRNEISDLTEELHQKEITIATVTKKAALLEKQLKMELEIKEKMLAKQKVSDMKYKAVRTENTHLKGMMGDLDPGEYMSMDFTNREQSRHTSINKLQYENERLRNDLAKLHVNGKSTWTNQNTYEETGRYAYQSQIKVEQNEERLSHDCEPNRSTMPPLPPSTFQAKEMTSPLVSDDDVFPLSPPDMSFPASLAAQHFLLEEEKRAKELEKLLNTHIDELQRHTEFTLNKYSKLK

SEQ ID NO: 43681 - protein, 507 aa, Homo sapiens
MSSPNIWSTGSSVYSTPVFSQKMTVWILLLLSLYPGFTSQKSDDDYEDYASNKTWVLTPKVPEGDVTVILNNLLEGYDNKLRPDIGVKPTLIHTDMYVNSIGPVNAINMEYTIDIFFAQTWYDRRLKFNSTIKVLRLNSNMVGKIWIPDTFFRNSKKADAHWITTPNRMLRIWNDGRVLYTLRLTIDAECQLQLHNFPMDEHSCPLEFSSWSRSIAQAGMCSGVISAHYSLRFWGSTDPPTLASRVAGISDGYPREEIVYQWKRSSVEVGDTRSWRLYQFSFVGLRNTTEVVKTTSGDYVVMSVYFDLSRRMGYFTIQTYIPCTLIVVLSWVSFWINKDAVPARTSLGITTVLTMTTLSTIARKSLPKVSYVTAMDLFVSVCFIFVFSALVEYGTLHYFVSNRKPSKDKDKKKKNPAPTIDIRPRSATIQMNNATHLQERDEEYGYECLDGKDCASFFCCFEDCRTGAWRHGRIHIRIAKMDSYARIFFPTAFCLFNLVYWVSYLYL

SEQ ID NO: 43682 - protein, 74 aa, Homo sapiens
MVSQALRLLCLLLGLQGCLAAGGSPRRPAPAPARQRVPGGAAAGLPGEGVQGGAVLLRGGPGDLQGRGEDVVSG

SEQ ID NO: 43683 - protein, 398 aa, Homo sapiens
MDFRTACEETKTGICLLQDGNQEPFKVRLHLAKDILMIQEQDVICVSGEPFYSGERTVTIRRQTVGGFGLSIKGGAEHNIPVVVSKISKEQRAELSGLLFIGDAILQINGINVRKCRHEEVVQVLRNAGEEVTLTVSFLKRAPAFLKLPLNEDCACAPSDQSSGTSSPLCDSGLHLNYHPNNTDTLSCSSWPTSPGLRWEKRWCDLRLIPLLHSRFSQYVPGTDLSRQNAFQVIAVDGVCTGIIQCLSAEDCVDWLQAIATNISNLTKHNIKKINRNFPVNQQIVYMGWCEAREQDPLQDRVYSPTFLALRGSCLYKFLAPPVTTWDWTRAEKTFSVYEIMCKILKELEFSNLFAVLHCIHSFFAAKVACLDPLFLGNQATASTAASSATTSKAKYTT

SEQ ID NO: 43684 - protein, 186 aa, Homo sapiens
MAAHLSYGRVNLNVLREAVRRELREFLDKCAGSKAIVWDEYLTGPFGLIAQYSLLKEHEVEKMFTLKGNRLPAADVKNIIFFVRPRLELMDIIAENVLSEDRRGPTRDFHILFVPRRSLLCEQRLKDLGVLGSFIHREEYSLDLIPFDGDLLSMESEGAFKSCSVAPAGVQWHNLSSLQPPPPEFK

SEQ ID NO: 43685 - protein, 1180 aa, Homo sapiens
  MOD_RES (1)..(1): Any amino acid
XSTPQEEQTKEELLLDWRQSAEEVIVKLRVGVGPLQLEDVDAAFTDTDCVVRFAGGQQWGGVFYAEIKSSCAKVQTRKGSLLHLTLPKKVPMLTWPSLLVEADEQLCIPPLNSQTCLLGSEENLAPLAGEKAVPPGNDPVSPAMVRSRNPGKDDCAKEEMAVAADAATLVDEPESMVNLAFVKNDSYEKGPDSVVVHVYVKEICRDTSRVLFREQDFTLIFQTRDGNFLRLHPGCGPHTTFRWQVKLRNLIEPEQCTFCFTASRIDICLRKRQSQRWGGLEAPAARGAVGGAKVAVPTGPTPLDSTPPGGAPHPLTGQEEARAVEKDKSKARSEDTGLDSVATRTPMEHVTPKPETHLASPKPTCMVPPMPHSPVSGDSVEEEEEEEKKVCLPGFTGLVNLGNTCFMNSVIQSLSNTRELRDFFHDRSFEAEINYNNPLGTGGRLAIGFAVLLRALWKGTHHAFQPSKLKAIVASKASQFTGYAQHDAQEFMAFLLDGLHEDLNRIQNKPYTETVDSDGRPDEVVAEEAWQRHKMRNDSFIVDLFQGQYKSKLVCPVCAKVSITFDPFLYLPVPLPQKQKVLPVFYFAREPHSKPIKFLVSVSKENSTASEVLDSLSQSVHVKPENLRLAEVIKNRFHRVFLPSHSLDTVSPSDTLLCFELLSSELAKERVVVLEVQQRPQVPSVPISKCAACQRKQQSEDEKLKRCTRCYRVGYCNQLCQKTHWPDHKGLCRPENIGYPFLVSVPASRLTYARLAQLLEGYARYSVSVFQPPFQPGRMALESQSPGCTTLLSTGSLEAGDSERDPIQPPELQLVTPMAEGDTGLPRVWAAPDRGPVPSTSGISSEMLASGPIEVGSLPAGERVSRPEAAVPGYQHPSEAMNAHTPQFFIYKIDSSNREQRLEDKGDTPLELGDDCSLALVWRNNERLQEFVLVASKELECAEDPGSAGEAARAGHFTLDQCLNLFTRPEVLAPEEAWYCPQCKQHREASKQLLLWRLPNVLIVQLKRFSFRSFIWRDKINDLVEFPVRNLDLSKFCIGQKEEQLPSYDLYAVINHYGGMIGGHYTACARLPNDRSSQRSDVGWRLFDDSTVTTVDESQVVTRYAYVLFYRRRNSPVERPPRAGHSEHHPDLGPAAEAAASQGLGPGQAPEVAPTRTAPERFAPPVDRPAPTYSNMEEVD

SEQ ID NO: 43686 - protein, 196 aa, Homo sapiens
  MOD_RES (1)..(1): Any amino acid
XLDRIGAADYQPTEQDILRTRVKTTGIVETHFTFKNLHFRLFDVGGQRSERKKWIHCFEDVTAIIFCVALSGYDQVLHEDETTNRMHESLMLFDSICNNKFFIDTSIILFLNKKDLFGEKIKKSPLTICFPEYTGPNTYEDAAAYIQAQFESKNRSPNKEIYCHMTCATDTNNIQVVFDAVTDIIIANNLRGCGLY

SEQ ID NO: 43687 - protein, 124 aa, Homo sapiens
MAQSLALSLLILVLAFGIPRTQGSDGGAQDCCLKYSQRKIPAKVVRSYRKQEPSLGCSIPAILFLPRKRSQAELCADPKELWVQQLMQHLDKTPSPQKPAQGCRKDRGASKTGKKGKGSKGCKR

SEQ ID NO: 43688 - protein, 83 aa, Homo sapiens
MLENYGNVASLGFPLLKPAVISQLEGGSELGGSSPLAAGTGLQGLQTDGVSLCRPNWSAVARTWLTATSVSRVRAILLPHPPE

SEQ ID NO: 43689 - protein, 87 aa, Homo sapiens
MAERKNAKALACSSLQERANVNLDVPLQVDFPTPKTELVQKFHVQYLGMLPVDKPVGMDILNSAIENLMTSSNKEDWLSVNMNVADA

SEQ ID NO: 43690 - protein, 97 aa, Homo sapiens
WKYNEFYHVKTSCSQGPAYVCNITNLQPYTSYNVRVVVVYKTGENSTSLPESFKTKAGVPNKPGIPKLLEGSKNSIQWEKAEDNGCRITYYILEIRD

SEQ ID NO: 43691 - protein, 78 aa, Homo sapiens
MKRIFSLLEKTWLGAPIQFAWQKTSGNYLAVTGNCVAMDWDKDGDVLAVIAEKSSCIYLWDANTNKTSQLDNGMRKTY

SEQ ID NO: 43692 - protein, 36 aa, Homo sapiens
MAERPTAAPRSMTHAKRARQPLSEASNQQPLSGGEG

SEQ ID NO: 43693 - protein, 197 aa, Homo sapiens
  MOD_RES (1)..(1): Any amino acid
XFSCLPVSRVECMLKLPSLDLVFSSNRGELETLGTTYPAETLSPGGNATQSGTKTSASKTGIPGSSGLGSPLGRSRHSSSQSDLTSSSSSSSGLSFTACMSDFSLYVFHPYGAGKQKTAVSGLTPGSGGLGNVDEEPTSVTGRKDSLSINLEFVKVSLSRIRRSGGASFFESQSVSKSASKMDTTLINISGTQFYSF

SEQ ID NO: 43694 - protein, 464 aa, Homo sapiens
VKEITRDIKQLDHAKRHLTTSITTLNHLHMLAGGVDSLEAMTRRRQYGEVANLLQGVMNVLEHFHKYMGIPQIRQLSERVKAAQTELGQQILADFEEAFPSQGTKRPGGPSNVLRDACLVANILDPRIKQEIIKKFIKQHLSEYLVLFQENQDVAWLDKIDRRYAWIKRQLVDYEEKYGRMFPREWCMAERIAVEFCHVTRAELAKIMRTRAKEIEVKLLLFAIQRTTNFEGFLAKRFSGCTLTDGTLPKKPKAPDNPFHGIVSKCFEPHLYVYIESQDKNLGELIDRFVADFKAQGPPKPNTDEGGAVLPSCADLFVYYKKCMVQCSQLSTGEPMIALTTIFQKYLREYAWKILSGNLPKTTTSSGGLTISSLLKEKEGSEVAKFTLEELCLICNILSTAEYCLATTQQLEEKLKEKVDVSLIERINLTGEMDTFSTVISSSIQLLVQDLDAACDPALTAMSK

SEQ ID NO: 43695 - protein, 409 aa, Homo sapiens
  MOD_RES (1)..(1): Any amino acid
XVSTGADGTVCFWQWDLESLKFSPRPLKFTEKPRPGVQMLCSSFSVGGMFLATGSTDHVIRMYFLGFEAPEKIAELESHTDKVDSIQFCNNGDRFLSGSRDGTARIWRFEQLEWRSILLDMATRISGDLSSEEERFMKPKVTMIAWNQNDSIVVTAVNDHVLKVWNSYTGQLLHNLMGHADEVFVLETHPFDSRIMLSAGHDGSIFIWDITKGTKMKHYFNMIEGQGHGAVFDCKFSQDGQHFACTDSHGHLLIFGFGCSKPYEKIPDQMFFHTDYRPLIRDSNNYVLDEQTQQAPHLMPPPFLVDVDGNPHPTKYQRLVPGRENSADEHLIPQLGYVATSDGEVIEQIISLQTNDNDERSPESSILDGMIRQLQQQQDQRMGADQDTIPRGLSNGEETPRRGSWKTSD

SEQ ID NO: 43696 - protein, 904 aa, Homo sapiens
MRRSKADVERYVASVLGLTPSPRQKSMKGFYFAKLYYEAKEYDLAKKYICTYINVQERDPKAHRFLGLLYELEENTEKAVECYRRSVELNPTQKDLVLKIAELLCKNDVTDGRAKYWVERAAKLFPGSPAIYKLKEQLLDCEGEDGWNKLFDLIQSELYVRPDDVHVNIRLVELYRSTKRLKDAVAHCHEAERNIALRSSLEWNSCVVQTLKEYLESLQCLESDKSDWRATNTDLLLAYANLMLLTLSTRDVQENRELLESFDSALQSAKSSLGGNDELSATFLEMKGHFYMYAGSLLLKMGQHGNNVQWRALSELAALCYLIAFQVPRPKIKLREGKAGQNLLEMMACDRLSQSGHMLLSLSRGKQDFLKEVVETFANKIGQSALYDALFSSQSPKDTSFLGSDDIGKIDVQEPELEDLARYDVGAIRAHNGSLQHLTWLGLQWNSLPALPGIRKWLKQLFHRLPHETSRLETNAPESICILDLEVFLLGVVYTSHLQLKEKCNSHHSSYQPLCLPFPVCKQLCTERQKSWWDAVCTLIHRKAVPGNLAKLRLLVQHEINTLRAQEKHGLQPALLVHWAKYLQKTGSGLNSFYGQLEYIGRSVHYWKKVLPLLKIIKKNSIPEPIDPLFKHFHSVDIQASEIVEYEEDAHITFAILDAVNGNIEDAVTAFESIKSVVSYWNLALIFHRKAEDIENDALSPEEQEECRNYLTKTRDYLIKIIDDGDSNLSVVKKLPVPLESVKQMLNSVMQELEDYSEGGPLYKNGSLRNADSEIKHSTPSPTKYSLSPSKSYKYSPETPPRWTEDRNSLLNMICQQVEAIKKEMQELKLNSSKSASRHRWPTENYGPDSVPDGYQGSQTFHGAPLTEAAHRHFTIEKHGDSKWIIYRFTKQLCGTERARAKIS

SEQ ID NO: 43697 - protein, 93 aa, Homo sapiens
MFCVTPPELETKMNITKGGLVLFSANSNSSCMELSKKIAERLGVEMGKVQVYQEPNRETRVQIQESVRGKDVFIIQTVSKDVNTTIMELLIMV

SEQ ID NO: 43698 - protein, 76 aa, Homo sapiens
  MOD_RES (1)..(1): Any amino acid
XLLGIKTETPSTVSTNASTPQSVSSVVHYLAMALFQIEQGIERRFLKAPLGKTEINKDQKGDRKKKGQEKERGRSI

SEQ ID NO: 43699 - protein, 116 aa, Homo sapiens
ADGPLKRLLVPILLPEKCYDQLFVQWDLLHVPCLKILLSKGLGLGIVAGSLLVKLPQVFKILGAKSAEGLSLQSVMLELVALTGTMVYSITNNFPFSSWGEALFLMLQTITICFLV

SEQ ID NO: 43700 - protein, 58 aa, Homo sapiens
MLVHLFRVGIRGGPFPGRLLPPLRFQTFSAVSDTPVASRRLLRLQPRVSQKEGTLGVL

SEQ ID NO: 43701 - protein, 116 aa, Homo sapiens
MLTSLHYLDNRFVQPRLESLVSRSRWKEQYKERVENYSNVFTVGRICASRTRIYHKLKHFKFKLYQECCTIAMTEEVEDEQVKETVERIFRRSKENGWIKENSSCDLRVKKHLVPV

SEQ ID NO: 43702 - protein, 77 aa, Homo sapiens
MEVEAVCGGAGEVEAQDSDPAPAFSKAPGSAGHYELPWVEKYRPVKLNEIVGNEDTVSRLEVFAREGNVPNIIIAGH

SEQ ID NO: 43703 - protein, 106 aa, Homo sapiens
MLKALFLTMLTLALVKSQDTEETITYTQCTDGYEWDPVRQQCKDIDECDIVPDACKGGMKCVNHYGGYLCLPKTAQIIVNNEQPQQETQPAEGTSGATTGVVAASS

SEQ ID NO: 43704 - protein, 145 aa, Homo sapiens
MISREAADQLLIVAEGSYLIRESQRQPGTYTLALRFGSQTRNFRLYYDGKHFVGEKRFESIHDLVTDGLITLYIETKAAEYIAKMTINPIYEHVGYTTLNREPAYKKHMPVLKETHDERDSTGQDGVSEKRLTSLVRRATLKENE

SEQ ID NO: 43705 - protein, 39 aa, Homo sapiens
MPVLKWISITTYSCLSHWLHYPLDCGGLLIDLEVVLALE

SEQ ID NO: 43706 - protein, 47 aa, Homo sapiens
MEGQDEVSAREQHFHSQVRESTVVFEHVHSRSVSWGCFAFTLLNHQQ

SEQ ID NO: 43707 - protein, 79 aa, Homo sapiens
  MOD_RES (1)..(1): Any amino acid
XVLSGGTTMYPGIADRMQKEITALAPSTMKIKIIAPPERKYSVWIGGSILASLSTFQQMWISKQEYDESGPSIVHRKCF

SEQ ID NO: 43708 - protein, 155 aa, Homo sapiens
  MOD_RES (1)..(1): Any amino acid
XLVHQRPAPPSTVTTAGVTPQPESLSPSGKEPAASSPSSNNTAATTAAIVPGSQLMPSKSPSTGTTEISSHESSHGTPSQTTAKNWELTASASHQPPGVYPQGHSDTTVAISTSTVLLCGLSAVSLLACYLKSRASVCSCHPRSAGHTCSVGSVC

SEQ ID NO: 43709 - protein, 39 aa, Homo sapiens
MGNVPSAVKHCLSYQQLLREHLWIGDSVAGALDPAQEKE

SEQ ID NO: 43710 - protein, 171 aa, Homo sapiens
MSKGPAVGIDLGTTYSCVGVFQHGKVEIIANDQGNRTTPSYVAFTDTERLIGDAAKNQVAMNPTNTVFDAKRLIGRRFDDAVVQSDMKHWPFMVVNDAGRPKVQVEYKGETKSFYPEEVSSMVLTKMKEIAEAYLGKTVTNAVVTVPAYFNDSQRQATKDAGTIAGLNVLR

SEQ ID NO: 43711 - protein, 150 aa, Homo sapiens
MAVAAAAAAGPVFWRRLLGLLPGRPGLAALLGRLSDRLGRNRDRQRRRWSPTLSPRLECNGTISAHCKLRLPGSSDSPASASGVAGNTGHHGCYWLPCCPQLFPRSPPHLAACVQKACTGSSGSETWFQNLESPVLTLGCFLPRQSFSSS

SEQ ID NO: 43712 - protein, 236 aa, Homo sapiens
MESERSKRMGNACIPLKRIAYFLCLLSALLLTEGKKPAKPKCPAVCTCTKDNALCENARSIPRTVPPDVISLSFVRSGFTEISEGSFLFTPSLQLLLFTSNSFDVISDDAFIGLPHLEYLFIENNNIKSISRHTFRGLKSLIHLFRETQTQAENLHCRGAGAPQMAVGDAFLAAEPGGTETNAVFEPVWSALERRLSSGFHSHNRRFSWVNDENTKGQEMVIISVKKEWPSAFENT

SEQ ID NO: 43713 - protein, 33 aa, Homo sapiens
MVALRGLGSGLQPWCPLDLRLGSTGCLTCRHHQ

SEQ ID NO: 43714 - protein, 613 aa, Homo sapiens
MMAADIPRVTTPLSSLVQVPQEEDRQEEEVTTMILEDDSWVQEAVLQEDGPESEPFPQSAGKGGPQEEVTRGPQGALGRLRELCRRWLRPEVHTKEQMLTMLPKEIQAWLQEHRPESSEEAAALVEDLTQTLQDNFEIQSENGENCNQDMFENESRKIFSEMPEGESAQHSDGESDFERDAGIQRLQGHSPGEDHGEVVSQDREVGQLIGLQGTYLGEKPYECPQCGKTFSRKSHLITHERTHTGEKYYKCDECGKSFSDGSNFSRHQTTHTGEKPYKCRDCGKSFSRSANLITHQRIHTGEKPFQCAECGKSFSRSPNLIAHQRTHTGEKPYSCPECGKSFGNRSSLNTHQGIHTGEKPYECKECGESFSYNSNLIRHQRIHTGEKPYKCTDCGQRFSQSSALITHRRTHTGEKPYQCSECGKSFSRSSNLATHRRTHMVEKPYKCGVCGKSFSQSSSLIAHQGMHTGEKPYECLTCGESFSWSSNLLKHQRIHTGEKPYKCSECGKCFSQRSQLVVHQRTHTGEKPYKCLMCGKSFSRGSILVMHQRAHLGDKPYRCPECGKGFSWNSVLIIHQRIHTGEKPYKCPECGKGFSNSSNFITHQRTHMKEKLY

SEQ ID NO: 43715 - protein, 125 aa, Homo sapiens
MSKDEERAVKDELLGEKPEIKQKWASRLLAKLRKDIRPEFREDFVLTITGKKPPCCVLSNPDQKGKIRRIDCLRQADKVWRLDLVMVILFKGIPLESTDGERLYKSPQCSNPGLCVQPHHIGVTI

SEQ ID NO: 43716 - protein, 78 aa, Homo sapiens
MWAFSELPMPLLINLIVSLLGFVATVTLIPAFRGHFIAARLCGQDLNKTSRQQMNPVLCLHGAAGSVLYQCHQYPSRN

SEQ ID NO: 43717 - protein, 308 aa, Homo sapiens
MEQPWPPPGPWSLPRAEGEAEEESDFDVFPSSPRCPQLPGGGAQMYSHGIELACQKQKEFVKSSVACKWNLAEAQQKLGSLALHNSESLDQEHAKAQTAVSELRQREEEWRQKEEALVQREKMCLWSTDAISKDVFNKSFINQDKRKDTEDEDKSESFMQKYEQKIRHFGMLSRWDDSQRFLSDHPYLVCEETAKYLILWCFHLEAEKKGALMEQIAHQAVVMQFIMEMAKNCNVDPRGCFRLFFQKAKAEEEGYFEAFKNELEAFKSRVRLYSQSQSFQPMTVQNHVPHSGVGSIGLLESLPQAPRF

SEQ ID NO: 43718 - protein, 171 aa, Homo sapiens
  MOD_RES (1)..(1): Any amino acid
XFVADGIFKAELNEFLTRELAEDGYSGVEVRVTPTRTEIIILATRACYGVLRFIMESGAKGCEVVVSGKLRGQRAKSMKFVDGLMIHSGDPVNYYVDTAVRHVLLRQGVLGIKVKIMLPWDPTGKIGPKKPLPDHVSIVEPKDEILPTTPISEQKGGKPEPPAMPQPVPTA

SEQ ID NO: 43719 - protein, 187 aa, Homo sapiens
MAAAAVVEFQRAQSLLSTDREASIDILHSIVKRDIQENDEEAVQVKEQSILELGSLLAKTGQAAELGGLLKYVRPFLNSISKAKAARLVRSLLDLFLDMEAATGQEFLFVTGHLILWVCSMLCFVSGDCQWSLESSLHQGHKLILVFEVELCLECIEWAKSEKRTFLRQALEARLVSLYFDTKRYQE

SEQ ID NO: 43720 - protein, 16 aa, Homo sapiens
KPANAVLHKELLCLGV

SEQ ID NO: 43721 - protein, 26 aa, Homo sapiens
TVGSDGYVRDANGAIWKLDLSFSNII

SEQ ID NO: 43722 - protein, 828 aa, Homo sapiens
MHTPSIRSITHDAQTSSTGSSAPGTALCTEECVHGRCVSPDTCHCEPGWGGPDCSSGCDSDHWGPHCSNRCQCQNGALCNPITGACVCAAGFRGWRCEELCAPGTHGKGCQLPCQCRHGASCDPRAGECLCAPGYTGVYCEELCPPGSHGAHCELRCPCQNGGTCHHITGECACPPGWTGAVCAQPCPPGTFGQNCSQDCPCHHGGQCDHVTGQCHCTAGYMGDRCQEECPFGSFGFQCSQHCDCHNGGQCSPTTGACECEPGYKGPRCQERLCPEGLHGPGCTLPCPCDADNTISCHPVTGACTCQPGWSGHHCNESCPVGYYGDGCQLPCTCQNGADCHSITGGCTCAPGFMGEVCAVSCAAGTYGPNCSSICSCNNGGTCSPVDGSCTCKEGWQGLDCTLPCPSGTWGLNCNESCTCANGAACSPIDGSCSCTPGWLGDTCELPCPDGTFGLNCSEHCDCSHADGCDPVTGHCCCLAGWTGIRCDSTCPPGRWGPNCSVSCSCENGGSCSPEDGSCECAPGFRGPLCQRICPPGFYGHGCAQPCPLCVHSSRPCHHISGICECLPGFSGALCNQVCAGGYFGQDCAQLCSCANNGTCSPIDGSCQCFPGWIGKDCSQACPPGFWGPACFHACSCHNGASCSAEDGACHCTPGWTGLFCTQRCPAAFFGKDCGRVCQCQNGASCDHISGKCTCRTGFTGQHCEQRCAPGTFGYGCQQLCECMNNSTCDHVTGTCYCSPGFKGIRCDQAALMMEELNPYTKISPALGAERHSVGAVTGIMLLLFLIVVLLGLFAWHRRRQKEKGRDLAPRVSYTPAMRMTSTDYSLS

SEQ ID NO: 43723 - protein, 97 aa, Homo sapiens
MNCCIGLGEKARGSHRASYPSLSALFTEASILGFGSFAVKAQVGNQQLGGPEWIRFSLTPRPLNCSLSLTPRGQRTAENQPILLQDQRTEVQFHGTP

SEQ ID NO: 43724 - protein, 100 aa, Homo sapiens
MCNTPTYCDLGKAAKDVFNKGYGFGMVKIDLKTKSCSGVEFSTSGHAYTDTGKASGNLETKYKVCNYGLTFTQKWNTDNTLGTEISWENKKEEWEIEGLL

SEQ ID NO: 43725 - protein, 203 aa, Homo sapiens
MLPLLIICLLPAIEGKNCLRCWPELSALIDYDLQILWVTPGPPTELSQSIHSLFLEDNNFLKPWYLDRDHLEEETAKFFTQVHQAIKTLRDDKTVLLEEIYTHKNLFTERLNKISDGLKEKACNESCDIQSTLKVTSCADCRTHFLSCNDPTFCPARNRRTSLWAVSLSSALLLAIAGGGCFFYWQRKKEAVKVLGKETPTQF

SEQ ID NO: 43726 - protein, 77 aa, Homo sapiens
MAAQVTLEDALSNVDLLEELPLPDQQPCIEPPPSSLLYQPNFNTNFEDRNAFVTGIARYIEQATVHSSMYKNNTCWF

SEQ ID NO: 43727 - protein, 218 aa, Homo sapiens
  MOD_RES (1)..(1): Any amino acid
XKAASRNLAFYPPHPDYTWSFDDIIVFAFSCKQAVKHPPAEPSRFISAPTKTPDKMGFDEVFMINLRRRQDRRERMLRALQAQEIECRLVEAVDGKAMNTSQVEALGIQMLPGYRDPYHGRPLTKGELGCFLSHYNIWKEVVDRGLQKSLVFEDDLRFEIFFKRRLMNLMRDVEREGLDWDLIYVGRKRMQVEHPEKAVPRVRNLVEADYSYWTLAYV

SEQ ID NO: 43728 - protein, 148 aa, Homo sapiens
MVDSKPVNLGLWDTAGQEDYDRLRPLSYPQTDVFLICFSLVSPASYENVRAKWFPEVRHHCPSTPIILVGTKLDLRDDKDTIEKLKEKKLAPITYPQGLALAKEIDSVKYLECSALTQRGLKTVFDEAIRAVLCPQPTRQQKRACSLL

SEQ ID NO: 43729 - protein, 148 aa, Homo sapiens
MAGCCAALAAFLFEYDTPRIVLIRSRKVGLMNRAVQLLILAYVIGWVFVWEKGYQETDSVVSSVTTKVKGVAVTNTSKLGFRIWDVADYVIPAQEENSLFVMTNVILTMNQTQGLCPEIPDATTVCKSDASCTAGSAGTHSNAWHHPG

SEQ ID NO: 43730 - protein, 211 aa, Homo sapiens
MSLQWTAVATFLYAEVFVVLLLCIPFISPKRWQKIFKSRLVELLVSYGNTFFVVLIVILVLLVIDAVREIRKYDDVTEKVNLQNNPGAMEHFHMKLFRAQRNLYIAGFSLLLSFLLRRLVTLISQQATLLASNEAFKKQAESASEAAKKYMEENDQLKKGAAVDGELEKAENQVLAMRKQSEGLTKEYDRLLEEHAKLQAAVDGPMDKKEE

SEQ ID NO: 43731 - protein, 161 aa, Homo sapiens
MTSRFRLPAGRTYNVRASELARDRQHTEVVCNILLLDNTVQAFKVNKHDQGQVLLDVVFKHLDLTEQDYFGLQLADDSTDNPRWLDPNKPIRKQLKKLLLLILGGSPYSLNFRVKFFVSDPNKLQEEYTRYQYFLQIKQDILTGRLPCPSNTAALLASFAV

SEQ ID NO: 43732 - protein, 55 aa, Homo sapiens
  MOD_RES (1)..(1): Any amino acid
XPTQREDGNPCDFDWREVEILMFLSAIVMMKNRRSTLSFLLPPCCGGWDASSMIF

SEQ ID NO: 43733 - protein, 59 aa, Homo sapiens
LHFRILDYTLTGCYADQHSVQVFASGKPKISAHRKLISSDYYIWNSKAPAPVTYGSLLL

SEQ ID NO: 43734 - protein, 150 aa, Homo sapiens
  MOD_RES (1)..(1): Any amino acid
XFPSAEKATLFLGTLDTIFLFSYAVGLFISGIVGDRLNLRWVLSFGMCSSALVVFVFGALTEWLRFYNKWLYCCLWIVNGLLQSTGWPCVVAVMGNWFGKAGRGVVFGLWSACASVGNILGACLASSVLQYGYEICKDHLSPLSSSMPFW

SEQ ID NO: 43735 - protein, 154 aa, Homo sapiens
MTSRDQPRPKGPPKSTSPCPGISNSESSPTLNYQGILNRLKQFPRFSPHFAAELESIYYSLHKIQQDVAEHHKQIGNVLQIVESCSQLQGFQSEEVSPAEPASPGTPQQVKDKTLQESSFEDIMATRSSDWLRRPLGEDNQPETQLFWDKEPWF

SEQ ID NO: 43736 - protein, 96 aa, Homo sapiens
VEGGARRRGAELGGSGDGAWLLKEELEEVKGGASGSEAEGDGAEALGAGLQPVSGVATAPEKGSSSVEGGAAGPGAVPRPPKGGAKEPSEEPGPKT

SEQ ID NO: 43737 - protein, 133 aa, Homo sapiens
MRRQWGALLLGALLCAHVLPTCSPLDFHCDNGKCIRRSWVCDGDNDCEDDSDEQDCPPRECEEDEFPCQNGYCIRSLWHCDGDNDCGDNSDEQCDMRKCSDKEFRCSDGSCIAEHWYCDGDTDCKDGSDEENC

SEQ ID NO: 43738 - protein, 211 aa, Homo sapiens
GVPRPQPWALGLLLFLLPGSLGAESHLSLLYHLTAVSSPAPGTPAFWVSGWLGPQQYLSYNSLRGEAEPCGAWVWENQVSWYWEKETTDLRIKEKLFLEAFKALGGKGPYTLQGLLGCELGPDNTSVPTAKFALNGEEFMNFDLKQGTWGGDWPEALAISQRWQQQDKAANKELTFLLFSCPHRLREHLERGRGNLEWKEPKARQIFCAWI

SEQ ID NO: 43739 - protein, 70 aa, Homo sapiens
MSVQNSGWPHQEDSPKPQDPGPPANSDSDSGHLPGEDPEDTHAQEFLSLHLLRTWGFDFKLIHMSIHYLS

SEQ ID NO: 43740 - protein, 1902 aa, Homo sapiens
MASGLGSPSPCSAGSEEEDMDALLNNSLPPPHPENEEDPEEDLSETETPKLKKKKKPKKPRDPKIPKSKRQKKERMLLCRQLGDSSGEGPEFVEEEEEVALRSDSEGSDYTPGKKKKKKLGPKKEKKSKSKRKEEEEEEDDDDDSKEPKSSAQLLEDWGMEDIDHVFSEEDYRTLTNYKAFSQFVRPLIAAKNPKIAVSKMMMVLGAKWREFSTNNPFKGSSGASVAAAAAAAVAVVESMVTATEVAPPPPPVEVPIRKAKTKEGKGPNARRKPKGSPRVPDAKKPKPKKVAPLKIKLGGFGSKRKRSSSEDDDLDVESDFDDASINSYSVSDGSTSRSSRSRKKLRTTKKKKKDHQDYCEVCQQGGEIILCDTCPRAYHMVCLDPDMEKAPEGKWSCPHCEKEGIQWEAKEDNSEGEEILEEVGGDLEEEDDHHMEFCRVCKDGGELLCCDTCPSSYHIHCLNPPLPEIPNGEWLCPRCTCPALKGKVQKILIWKWGQPPSPTPVPRPPDADPNTPSPKPLEGRPERQFFVKWQGMSYWHCSWVSELQLELHCQVMFRNYQRKNDMDEPPSGDFGGDEEKSRKRKNKDPKFAEMEERFYRYGIKPEWMMIHRILNHSVDKKGHVHYLIKWRDLPYDQASWESEDVEIQDYDLFKQSYWNHRELMRGEEGRPGKKLKKVKLRKLERPPETPTVDPTVKYERQPEYLDATGGTLHPYQMEGLNWLRFSWAQGTDTILADEMGLGKTVQTAVFLYSLYKEGHSKGPFLVSAPLSTIINWEREFEMWAPDMYVVTYVGDKDSRAIIRENEFSFEDNAIRGGKKASRMKKEASVKFHVLLTSYELITIDMAILGSIDWACLIVDEAHRLKNNQSKFFRVLNGYSLQHKLLLTGTPLQNNLEELFHLLNFLTPERFHNLEGFLEEFADIAKEDQIKKLHDMLGPHMLRRLKADVFKNMPSKTELIVRVELSPMQKKYYKYILTRNFEALNARGGGNQVSLLNVVMDLKKCCNHPYLFPVAAMEAPKMPNGMYDGSALIRASGKLLLLQKMLKNLKEGGHRVLIFSQMTKMLDLLEDFLEHEGYKYERIDGGITGNMRQEAIDRFNAPGAQQFCFLLSTRAGGLGINLATADTVIIYDSDWNPHNDIQAFSRAHRIGQNKKVMIYRFVTRASVEERITQVAKKKMMLTHLVVRPGLGSKTGSMSKQELDDILKFGTEELFKDEATDGGGDNKEGEDSSVIHYDDKAIERLLDRNQDETEDTELQGMNEYLSSFKVAQYVVREEEMGEEEEVEREIIKQEESVDPDYWEKLLRHHYEQQQEDLARNLGKGKRIRKQVNYNDGSQEDRDWQDDQSDNQSDYSVASEEGDEDFDERSEAPRRPSRKGLRNDKDKPLPPLLARVGGNIEVLGFNARQRKAFLNAIMRYGMPPQDAFTTQWLVRDLRGKSEKEFKAYVSLFMRHLCEPGADGAETFADGVPREGLSRQHVLTRIGVMSLIRKKVQEFEHVNGRWSMPELAEVEENKKMSQPGSPSPKTPTPSTPGDTQPNTPAPVPPAEDGIKIEENSLKEEESIEGEKEVKSTAPETAIECTQAPAPASEDEKVVVEPPEGEEKVEKAEVKERTEEPMETEPKGKGAADVEKVEEKSAIDLTPIVVEDKEEKKEEEEKKEVMLQNGETPKDLNDEKQKKNIKQRFMFNIADGGFTELHSLWQNEERAATVTKKTYEIWHRRHDYWLLAGIINHGYARWQDIQNDPRYAILNEPFKGEMNRGNFLEIKNKFLARRFKLLEQALVIEEQLRRAAYLNMSEDPSHPSMALNTRFAEVECLAESHQHLSKESMAGNKPANAVLHKGILKQLEELLSDMKADVTRLPATIARIPPVAVRLQMSERNILSRLANRAPEPTPQQVAQQQ

SEQ ID NO: 43741 - protein, 85 aa, Homo sapiens
MSYVFVNDSSQTNVPLLQACIDGDFNYSKRLLESGFDPNIRDSRGRTGLHLAAARGNVDICQLLHKFGADLLATDYQGNTALHLC

SEQ ID NO: 43742 - protein, 133 aa, Homo sapiens
MESLRGNTAQGPTNEEDYKNEGQLSRQTKCPAQKKSSFENTVVRKVSVTLKEIFTGEEGPESSEFSLSPNLDAQQKIPKGHGSPISRKNSKDNSDLIKHQRLFSQRKPCKCNECEKAFSYQSDLLVHSRIHGG

SEQ ID NO: 43743 - protein, 293 aa, Homo sapiens
LPNIQALKEALTKAQAWIADVDEIQNGDHYPCLDDLEGLVAVGRDLPVGLEELRQLELQVLCPCADAGSDSTKRSRWMEKALGLYQCDTELLGLSAQDLRDPGSVIVAFKEGEQKEKEGILQLRRTNSAKPSPLAPSLMASSPTSICVCGQVPAGVGVLQCDLCQDWFHGQCVSVPHLLTSPKPSLTSSPLLAWWEWDTKFLCPLCMRSRRPRLETILALLVALQRLPVRLPEGEALQCLTERAIGWQDRARKALASEDVTALLRQLAELRQQLQAKPRPEEASVYTSATACD

SEQ ID NO: 43744 - protein, 850 aa, Homo sapiens
MVPWVRTMGQKLKQRLRLDVGREICRQYPLFCFLLLCLSAASLLLNRYIHILMIFWSFVAGVVTFYCSLGPDSLLPNIFFTIKYKPKVDIPSIITKKLLKAAMKHIEVIVKARQKVKNTEFLQQAALEEYGPELHVALRSRRDELHYLRKLTELLFPYILPPKATDCRSLTLLIREILSGSVFLPSLDFLADPDTVNHLLIIFIDDSPPEKATEPASPLVPFLQKFAEPRNKKPSVLKLELKQIREQQDLLFRFMNFLKQEGAVHVLQFCLTVEEFNDRILRPELSNDEMLSLHEELQKIYKTYCLDESIDKIRFDPFIVEEIQRIAEGPYIDVVKLQTMRCLFEAYEHVLSLLENVFTPMFCHSDEYFRQLLRGAESPTRNSKLNRGSLSLDDFRNTQKRGESFGISRIGSKIKGVFKSTTMEGAMLPNYGVAEGEDDFIEEGIVVMEDDSPVEAVSTPNTPRNLAAWKISIPYVDFFEDPSSERKEKKERIPVFCIDVERNDRRAVGHEPEHWSVYRRYLEFYVLESKLTEFHGAFPDAQLPSKRIIGPKNYEFLKSKREEFQEYLQKLLQHPELSNSQLLADFLSPNGGETQFLDKILPDVNLGKIIKSVPGKLMKEKGQHLEPFIMNFINSCESPKPKPSRPELTILSPTSENNKKLFNDLFKNNANRAENTERKQNQNYFMEVMTVEGVYDYLMYVGRVVFQVPDWLHHLLMGTRILFKNTLEMYTDYYLQCKLEQLFQEHRLVSLITLLRDAIFCENTEPRSLQDKQKGAKQTFEEMMNYIPDLLVKCIGEETKYESIRLLFDGLQQPVLNKQLTYVLLDIVIQELFPELNKVQKEVTSVTSWM

SEQ ID NO: 43745 - protein, 746 aa, Homo sapiens
MKKYRKISIGCFAMATQTSHVFHGQENMFLENHCIRRNTGRDSKKPLKQKNMNGLGQNSDNGLLVTHVNQTQDLLRLQGSETQSSDWEDSEDWLSAHSLKCQKLTLADLISQGTEVLEEGTNVVQKICFSTQIIRHFESKLSDTIEVYQERIQWLTENSKKAFGLIKGARVSILIDVSAISSGPQKEEFQKDLMSLIDEQLSHKEKLFVLSFGTNAGSLWPDPMEVSASTLQELKLWVKTLQPDGGSNLLQALKKIFTLKGLDSLVAIMRSCPDQPSEILSDYIQQSTMGRDLIIHFITYRCDDQMPPAVLKNLAEAVRGYYHCYSPKMEHYTSRDMDELLAEIQKAQSLLSHVQALQHSSPCEALTCTMEEISTEITNGPLISLLPKPPKHDAPLTIEFPNLDKTSAEWLKVNGLKAKKLSLYQVLAPNAFSPVEEFVPILQKTVSSTIHEKAMIQFEWHDGTVKNIHVDPPFLYKYQWNDYTAWIPRDLTHHSLKPTQQQLSRAMRMYERRIEWLSLASRRIWGTVCEKRVVVLLDISATNSMYIIHIQHSLRLLLEEQLSNKDCFNLIAFGSTIESWRPEMVPVSHNNLQSAWRWALNLRCRGSRNVLSALRKAVEVDFKDKDKHQSQGIYLFTGGIPDQDMPTLSAYMAEACGGCDLQLNVCLFYVGEPKMDTTPPARYASHTDTAAAYKEVTRAAGGRFHWFGDTGIYESDDINSIMSEMEKALNYSQKCAFLMASLKNHS

SEQ ID NO: 43746 - protein, 167 aa, Homo sapiens
MYLLWKLMWREPGAYIFLQNPPGLPSIAVCWFVGCLCGSKLVIDWHNYGYSIMGLVHGPNHPLVLLAKWYEKFFGRLSHLNLCVTNAMREDLADNWHIRAVTVYDKPASFFKETPLDLQHRLFMKLGSMHSPFRARSEPEDPVTERSAFTERDAGSGLVTRLRERPA

SEQ ID NO: 43747 - protein, 82 aa, Homo sapiens
MLCTDGQQLLRQVLHPEASRKNLVLPDMFFSFYDLRREFHMQHPSTCPARDLTVATMAQGLGLETDATEDDFGVWEVKTMVA

SEQ ID NO: 43748 - protein, 192 aa, Homo sapiens
MGCSWRKTLSFFLVFVPIYLHGASSQEAAPVGPRKPFFERLRRLEEQFRRFQEVTWTHLQNIASNYNVSYNVDVRFRSLAEESQAVAQAVNRSQASVQGELAQLKAWVRKLQRRGRKFAAWAPPSFSQTPPPGTWSSSALVSSLPCEPCPSAAGSARPPAAWAPSCPTPPRTMTTSWCCTAETPCCPDPSTS

SEQ ID NO: 43749 - protein, 80 aa, Homo sapiens
MASAVRGSRPWPRLGLQLQFAALLLGTLSPQGCGWATRMLGLLLGAQPHPVCSRRDWSRFILSGQRTSCWCPPWMEVSTH

SEQ ID NO: 43750 - protein, 164 aa, Homo sapiens
MNGKRPAEPGPARVGKKGKKEVMAEFSDAVTEETLKKQVAEAWSRRTPFKVIVMDMDPFLHCVIPNFIQSQDFLEGLQKELMNLDFHEKYNDLYKFQQSDDLKKRREPHISTLRKILFEDFRSWLSDISKIDLESTIDMSCAKYEFTDALLCHDDELEGRRIAF

SEQ ID NO: 43751 - protein, 144 aa, Homo sapiens
MTEEVIVIAKWDYTAQQDQELDIKKNERLWLLDDSKTWWRVRNAANRTGYVPSNYVERKNSLKKGSLVKNLKDTLGLGKTRRKTSARDASPTPSTDAEYPANGSGADRIYDLNIPAFVKFAYVAEREDELSLVKGSRVTVMEKC

SEQ ID NO: 43752 - protein, 63 aa, Homo sapiens
MAAANPWDPASAPNGAGLVLGHFIASGMVNQEMLNMSKKTVSCFVNFTRLQQITNIQAEIYQR

SEQ ID NO: 43753 - protein, 329 aa, Homo sapiens
MFRQFYLWTCLASGIILGSLFEICLGQYDDDCKLARGGPPATIVAIDEESRNGTILVDNMLIKGTAGGPDPTIELSLKDNVDYWVLMDPVKQMLFLNSTGRVLDRDPPMNIHSIVVQVQCINKKVGTIIYHEVRIVVRDRNDNSPTFKHESYYATVNELTPVGTTIFTGFSGDNGATDIDDGPNGQIEYVIQYNPDDPTSNDTFEIPLMLTGNIVLRKRLNYEDKTRYFVIIQANDRAQNLNERRTTTTTLTVDVLDGDDLGPMFLPCVLVPNTRDCRPLTYQAAIPELRTPDLGSLCSGTNSWCQGRSGVHWSSPAWRCLFPRRLHQM

SEQ ID NO: 43754 - protein, 72 aa, Homo sapiens
MKPALLEVMRMNRICRMVLATCLGSFILVIFYFQIMRRNPFGVDICCRKGSRSPLQELYNPIQVSFKHSVSM

SEQ ID NO: 43755 - protein, 826 aa, Homo sapiens
MHHGTGPQNVQHQLQRSRACPGSEGEEQPAHPNPPPSPAAPFAPSASPSAPQSPSYQIQQLMNRSPATGQNVNITLQSVGPVVGGNQQITLAPLPLPSPTSPGFQFSAQPRRFEHGSPSYIQVTSPLSQQVQTQSPTQPSPGPGQALQNVRAGAPGPGLGLCSSSPTGGFVDASVLVRQISLSPSSGGHFVFQDGSGLTQIAQGAQVQLQHPGTPITVRERRPSQPHTQSGGTIHHLGPQSPAAAGGAGLQPLASPSHITTANLPPQISSIIQGQLVQQQQVLQGPPLPRPLGFERTPGVLLPGAGGAAGFGMTSPPPPTSPSRTAVPPGLSSLPLTSVGNTGMKKVPKKLEEIPPASPEMAQMRKQCLDYHYQEMQALKEVFKEYLIELFFLQHFQGNMMDFLAFKKKHYAPLQAYLRQNDLDIEEEEEEEEEEEEKSEVINDEQALAGSLVAGAGSTVETDLFKRQQAMPSTGMAGGMPPTPQAAQLAGQRQSQQQYDPSTGPPVQNAASLHTPLPQLPGRLPPAGVPTAALSSALQFAQQPQVVEAQTQLQIPVKTQQPNVPIPAPPSSQLPIPPSQPAQLALHVPTPGKVQVQASQLSSLPQMVASTRLPVDPAPPCPRPLPTSSTSSLAPVSGSGPGPSPARSSPVNRPSSATNKALSPVTSRTPGVVASAPTKPQSPAQNATSSQDSSQDTLTEQITLENQVHQRIAELRKAGLWSQRRLPKLQEAPRPKSHWDYLLEEMQWMATDFAQERRWKVAAAKKLVRTVVRHHEEKQLREERGKKEEQSRLRRIAASTAREIECFWSNIEQVVEIKLRVELEEK

SEQ ID NO: 43756 - protein, 477 aa, Homo sapiens
YSPENFPYRRGPGMGVHVPATPQGSPMKDRLNLPSVLVLNSCGITCAGDEKEIAAFCAHVSELDLSDNKLEDWHEVSKIVSNVPQLEFLNLSSNPLNLSVLERTCAGSFSGVRKLVLNNSKASWETVHMILQELPDLEELFLCLNDYETVSCPSICCHSLKLLHITDNNLQDWTEIRKLGVMFPSLDTLVLANNHLNAIEEPDDSLARLFPNLRSISLHKSGLQSWEDIDKLNSFPKLEEVRLLGIPLLQPYTTEERRKLVIARLPSVSKLNGSVVTDGEREDSERFFIRYYVDVPQEEVPFRMNYSSFLRIWVSFIFALVQHQAQPRELMYPFWQNDTKTPKVDDGSSSEIKLAIPVFFFGVPYRTVYVNNNGVVSFNVLVSQFTPESFPLTDGRAFVAPFWADVHNGIRGEIYYRETMEPAILKRATKDIRKYFKDMATFSATWVFIVTWEEVTFYGGSSTTPVNTFQAVLVSDG

SEQ ID NO: 43757 - protein, 679 aa, Homo sapiens
MDSAAKDEMQPALSPGPEWPEQERAEQLARGAALKWASGIFYRPEQLARLGQYRSREVQRTCSLESRLKSVMQSYLEGVQTVPAAVSHTQTLIDGQQFLEAYVSLRELEQLREDTWAPLGGLELPVFQGLDLLFEALGQAVEAAAGAAGKLAREDPALLVAAVRVAEVETGRTTPLGQVPRDWRQRCLRALQEGLEQAHFGSPLLPAPGALPGWLEALRVALPVELATAEALVAPCCPPQYNVVQLWAHTLHSGLRRSLQNLLAGPELEAADAFALLHWALHVYLGQEMMGSLELGPEADVSQLEPLLTLENIEQLEATFVANIQILEENIRVASLVSESLQQRVHGMALSELGTFLRSFSDALIRFSRDHFRGKSMAPHYVPYLLAALNHKSALSSSVSVLQLDGAPSGALAPVEAALDELQRRIYRLVLEALQAELQPLFADLPSRQWLSSPELLQSVCERTGRFCRDFWRVRNPTVQLLLAEAERAVVLQYLSALMQGRLVCRGADERTQAAERLRHDAAQLQQLFLSLVRASWAGRRARVSVAGWERGLARDPTPTCSGPGGERALRAGAARPEGAAKPPRPRAAGPGGGWPAATISRRERGPRLRPLGPARGLVPGAAPGRAQLPAGCAAAVAPREPPRPLQPSARARARAGLLPALGVLRPSPAARRINHGCR

SEQ ID NO: 43758 - protein, 115 aa, Homo sapiens
MSVGVSTSAPLSPTSGTSVGMSTFSIMDYVVFVLLLVLSLAIGLYHACRGWGRHTVGELLMADRKMGCLPVALSLLATFQSAVAILGVPSEIYRFGTQYWFLGCCYFLGLLIPAH

SEQ ID NO: 43759 - protein, 57 aa, Homo sapiens
  MOD_RES (1)..(1): Any amino acid
XALKHELAFKLQSSDLGVKQKSELNSRLEEKTNQMAATIKQLEQRMGSTKCKRKMLN

SEQ ID NO: 43760 - protein, 50 aa, Homo sapiens
MATLPSAERRAFALKINSHALSPRLEYSGAISAHCNLCLPDSSDSPASAS

SEQ ID NO: 43761 - protein, 85 aa, Homo sapiens
MDDFERRRELRRQKREEMRLEAERIAYQRNDDDEEEAARERRRRARQERLRQKQEEESLGQVTDQQKMKLPRRKKKVKVAKKDTR

SEQ ID NO: 43762 - protein, 126 aa, Homo sapiens
  MOD_RES (1)..(1): Any amino acid
XFANARNARSLLSMLKDISAQIIQRAWLSHTNKMIFRLLKHAICAAEFYVTHEILKKVAPLEAKLIKDPTMQCKIRFRFRGETFPPFIVFKIFLHTDGHGYKYFSGKNVLMPSSKVTFHDVHFMLT

SEQ ID NO: 43763 - protein, 42 aa, Homo sapiens
MAGPAWISKVSRLLGAFHNPKQVTRGFTGGEMVLAQKFQLQL

SEQ ID NO: 43764 - protein, 155 aa, Homo sapiens
  MOD_RES (1)..(1): Any amino acid
XLESIRQCGVALCIVLGFSILSASIGSSVLFYLVSVCLCVAVIVAFQLTAFTFRKNLAATALLLSLFGYATLPWMYLMSRIFSSSDVAFISYVSLNFIFGLCTMLITIMPRLLAIISKAKNLQNIYDVLKWVFTIFPQFCLGQGLVELCYNQIKY

SEQ ID NO: 43765 - protein, 231 aa, Homo sapiens
MQLFLLLCLVLLSPQGASLHRHHPREMKKRVEDLHVGATVAPSSRRDFTFDLYRALASAAPSQSIFFSPVSISMSLAMLSLGAGSSTKMQILEGLGLNLQKSSEKELHRGFQQLLQELNQPRDGFQLSLGNALFTDLVVDLQDTFVSAMKTLYLADTFPTNFRDSAGAMKQINDYVAKQTKGKIVDLLKNLDSNAVVIMVNYIFFKAKWETSFNHKGTQEQDFYVTSETVV

SEQ ID NO: 43766 - protein, 59 aa, Homo sapiens
MNMPVNKSPMINTCGGISSPYHEELWKLNFQHLSGERGHKSRLAIWSSYDFLYFSCMVI

SEQ ID NO: 43767 - protein, 160 aa, Homo sapiens
  MOD_RES (1)..(1): Any amino acid
XLMVDRIFSFEINVSVAIITFASEPKVLMSVLNDNSRDMTEVISSLENANYKDHENGTGTNTYAALNSVYLMMNNQMRLLGMETMAWQEIRHAIILLTDGKSNMGGSPKTAVDHIREILNINQKRNDYLAPKPQESGDFPLPHQTSMPSGWASWMWTGEN

SEQ ID NO: 43768 - protein, 65 aa, Homo sapiens
MFRKGKKRHSSSSSQSSEISTKSKSVDSSLGGLSRSSTVASLDTDSTKSSGQSNNNSDTCAEFRI

SEQ ID NO: 43769 - protein, 83 aa, Homo sapiens
MYRAEVEIVDVNDHAPRFPRQQLDLEIGEAAPPGQRFPLEKAQDADVGSNSISSYRLSSNEHFALDVKKRSDGSLVPELLLEK

SEQ ID NO: 43770 - protein, 31 aa, Homo sapiens
  MOD_RES (1)..(1): Any amino acid
XGFDSYGYQGPQKTSHLQLQPMYMQIPLDNN

SEQ ID NO: 43771 - protein, 225 aa, Homo sapiens
  MOD_RES (1)..(1): Any amino acid
XLLSALSYLGFETYQVISQAAVVHATAKVEEILEQADYLYESGETEKLYQLLTQYKESEDAELLWRLARASRDVAQLSRTSEEEKKLLVYEALEYAKRALEKNESSFASHKWYAICLSDVGDYEGIKAKIANAYIIKEHFEKAIELNPKDATSIHLMGIWCYTFAEMPWYQRRIAKMLFATPPSSTYEKALGYFHRAEQGEEKQKQLKGQEVGLSRDVAFCWMAF

SEQ ID NO: 43772 - protein, 878 aa, Homo sapiens
MATGTGKHKLLSTGPTEPWSIREKLCLASSVMRSGDQNWVSVSRAIKPFAEPGRPPDWFSQKHCASQYSELLETTETPKRKRGEKGEVVETVEDVIVRKLTAERVEELKKVIKETQERYRRLKRDAELIQAGHMDSRLDELCNDIATKKKLEEEEAEVKRKATDAAYQARQAVKTPPRRLPTVMVRSPIDSASPGGDYPLGDLTPTTMEEATSGVNESEMAVASGHLNSTGVLLEVGGVLPMIHGGEIQQTPNTVAASPAASGAPTLSRLLEAGPTQFTTPLASFTTVASEPPVKLVPPPVESVSQATIVMMPALPAPSSAPAVSTTESVAPVSQPDNCVPMEAVGDPHTVTVSMDSSEISMIINSIKEECFRSGVAEAPVGSKAPSIDGKEELDLAEKMDIAVSYTGEELDFETVGDIIAIIEDKVDDHPEVLDVAAVEAALSFCEENDDPQSLPGPWEHPIQQERDKPVPLPAPEMTVKQERLDFEETENKGIHELVDIREPSAEIKVEPAEPEPVISGAEIVAGVVPATSMEPPELRSQDLDEELGSTAAGEIVEADVAIGKGDETPLTNVKTEASPESMLSPSHGSNPIEDPLEAETQHKFEMSDSLKEESGTIFGSQIKDAPGEDEEEDGVSEAASLEEPKEEDQGEGYLSEMDNEPPVSESDDGFSIHNATLQSHTLADSIPSSPASSQFSVCSEDQEAIQAQKIWKKAIMLVWRAAANHRYANVFLQPVTDDIAPGYHSIVQRPMDLSTIKKNIENGLIRSTAEFQRDIMLMFQNAVMYNSSDHDVYHMAVEMQRDVLEQIQQFLATQLIMQTSESGISAKSLRGRDSTRKQDASEKDSVPMGSPAFLLSLFDGGTRGRRCAIEADMKMKK

SEQ ID NO: 43773 - protein, 135 aa, Homo sapiens
MAAVTMSVPGRKAPPRPGPVPEAAQPFLFTPRGPSAGGGPGSGTSPQVEWTARRLVWVPSELHGFEAAALRDEGEEEAEVELAESGRRLRLPRDQIQRMNPPKFSKAEDMAELTCLNEASVLHNLRERYYSGLIY

SEQ ID NO: 43774 - protein, 124 aa, Homo sapiens
  MOD_RES (1)..(1): Any amino acid
XAVMWRKKSSGHFLPIDRNRGSYSQAAAYSVVSGNLMITWWSSLFLLGVLFQGYLGCLRSHSVLGRRKVGDMWILFFLWLWTSFNTAFLALQSLRFGFGFRRGRSFLLRSWHHLMKRVQIKIFD

SEQ ID NO: 43775 - protein, 350 aa, Homo sapiens
MERPEAGINSNECENVSRKKKMSEEFEANTMDSLVDMPFATVDIQDDCGITDEPQINLKRSQENEWVKSDQVKKRKKKRKDYQPNYFLSIPITNKEIIKGIKILQNAIIQQDERLAKAMVSDGSFHITLLVMQLLNEDEVNIGIDALLELKPFIEELLQGKHLTLPFQGIGTFGNQVGFVKLAEGDHVNSLLEIAETANRTFQEKGILVGESRSFKPHLTFMKLSKSPWLRKNGVKKIDPDLYEKFISHRFGEEILYRIDLCSMLKKKQSNGYYHCESSIVIGKKPIGIRDLINEALHRETMGLKSKVKQIKELLLKPETQARIRRELFEGRLINNSNSANDVDFSTTLT

SEQ ID NO: 43776 - protein, 47 aa, Homo sapiens
MEIKEEGASEEGQHFLPTAQANDPGDCQFTSIQKTPNEPQLEFILGN

SEQ ID NO: 43777 - protein, 981 aa, Homo sapiens
MSVKEGAQRKWAALKEKLGPQDSDPTEANLESADPELCIRLLQMPSVVNYSGLRKRLEGSDGGWMVQFLEQSGLDLLLEALARLSGRGVARISDALLQLTCVSCVRAVMNSRQGIEYILSNQGYVRQLSQALDTSNVMVKKQVFELLAALCIYSPEGHVLTLDALDHYKTVCSQQYRFSIVMNELSGSDNVPYVVTLLSVINAVILGPEDLRARTQLRNEFIGLQLLDVLARLRDLEDADLLIQLEAFEEAKAEDEEELLRVSGGVDMSSHQEVFASLFHKVSCSPVSAQLLSVLQGLLHLEPTLRSSQLLWEALESLVNRAVLLASDEHNSMWASLSSPDAEAVEPDFSSIERLFSFPAAKPKEPTMVAPRARKEPKEITFLDAKKSLNLNIFLKQFKCSNEEVAAMIRAGDTTKFDVEVLKQLLKLLPEKHEIENLRAFTEERAKLASADHFYLLLLAIPCYQLRIECMLLCEGAAAVLDMVRPKAQLVLAACESLLTSRQLPIFCQLILRIGNFLNYGSHTGDADGFKISTLLKLTETKSQQNRVTLLHHVLEEAEKSHPDLLQLPRDLEQPSQAAGINLEIIRSEASSNLKKLLETERKVSASVAEVQEQYTERLQASISAFRALDELFEAIEQKQRELADYLCEDAQQLSLEDTFSTMKAFRDLFLRALKENKDRKEQAAKAERRKQQLAEEEARRPRGEDGKPVRKGPGKQEEVCVIDALLADIRKGFQLRKTARGRGDTDGGSKAASMDPPRATEPVATSNPAGDPVGSTRCPASEPGLDATTASESRGWDLVDAVTPGPQPTLEQLEEGGPRPLERRSSWYVDASDVLTTEDPQCPQPLEGAWPVTLGDAQALKPLKFSSNQPPAAGSSRQDAKDPTSLLGVLQAEADSTSEGLEDAVHSRGARPPAAGPGGDEDEDEEDTAPESALDTSLDKSFSEDAVTDSSGSGTLPRARGRASKGTGKRRKKRPSRSQE

SEQ ID NO: 43778 - protein, 102 aa, Homo sapiens
MRLAVGALLVCAVLGLCLAVPDKTVRWCAVSEHEATKCQSFRDHMKSVIPSDGPFSYRRGPKYGRQGGLDLGASQPGPGTFWQRQIKRIPTIQLSSWEGPAV

SEQ ID NO: 43779 - protein, 197 aa, Homo sapiens
GGGGGGGTAMRILGGVISAISEAAAQYNPEPPPPRTHYSNIEANESEEVRQFRRLFAQLAGDDMEVSATELMNILNKVVTRHPDLKTDGFGIDTCRSMVAVMDSDTTGKLGFEEFKYLWNNIKRWQAIYKQFDTDRSGTICSSELPGAFEAAGFHLNEHLYNMIIRRYSDESGNMDFDNFISCLAQEEINMPQLLIS

SEQ ID NO: 43780 - protein, 210 aa, Homo sapiens
MRRSLAPSQLAKRKPEGRSCDDEDWQPGLVTPRKRKSSSETQIQECFLSPFRKPLSQLTNQPPCLDSSQHEAFIRSILSKPFKVPIPNYQGPLGSRALGLKRAGVRRALHDPLEKDALVLYEPPPLSAHDQLKLDKEKLPVHVVVDPILSKVLRPHQREGVKFLWECVTSRRIPGSHGCIMADEMGLGKTLQCITLMWTLLRQSPECKPE

SEQ ID NO: 43781 - protein, 96 aa, Homo sapiens
  MOD_RES (1)..(1): Any amino acid
XVTHRPPLSPKSGAEVEAGDAAERRAPEEELPPLDPEEIRKRLEHTERQFRNRRKILIRGLPGDVTNQEVHDLLSDYELKYCFVDKYKGTEPPAGA

SEQ ID NO: 43782 - protein, 371 aa, Homo sapiens
  MOD_RES (1)..(1): Any amino acid
XTDRTDQTPCTPDDDLEEGMAKEETELRFRQLTMEYQALQRAYALLQEQVGGTLDAEREVKTREQLQAEVQRAQARIEDLEKALAEQGQDMKWIEEKQALYRRNQELVEKIKQMETEEARLRHEVQDARDQNELLEFRILELEERERKSPAISFHHTPFVDGKSPLQVYCEAEGVTDIVVAELMKKLDILGDNANLTNEEQVVVIQARTVLTLAEKWLQQIEETEAALQRKMVDLESEKELFSKQKGYLDEELDYRKQALDQANKHILELEAMLYDALQQEAGAKVAELLSEEEREKLKVAVEQWKRQVMSELRERDAQILRERMELLQLAQQRIKELEERIEAQKRQIKELEEKFLFLFLFFSLAFILWS

SEQ ID NO: 43783 - protein, 1192 aa, Homo sapiens
  MOD_RES (1)..(1): Any amino acid
XIQWNNMYQALEQGGMTFGWVCWMILFDSSLYFLCGWYLSNLIPGTFGLRKPWYFPFTASYWKSVGFLVEKRQYFLSSSLFFFNENFDNKGSSLQNREGELEGSAPGVTLVSVTKEYEGHKAVVQDLSLTFYRDQITALLGTNGAGKTTIISMLTGLHPPTSGTIIINGKNLQTDLSRVRMELGVCPQQDILLDNLTVREHLLLFASIKAPQWTKKELHQQVNQTLQDVDLTQHQHKQTRALSGGLKRKLSLGIAFMGMSRTVVLDEPTSGVDPCSRHSLWDILLKYREGRTIIFTTHHLDEAEALSDRVAVLQHGRLRCCGPPFCLKEAYGQGLRLTLTRQPSVLEAHDLKDMACVTSLIKIYIPQAFLKDSSGSELTYTIPKDTDKACLKGLFQALDENLHQLHLTGYGISDTTLEEVFLMLLQDSNKKSHIALGTESELQNHRPTGHLSGYCGSLARPATVQGVQLLRAQVAAILARRLRRTLRAGKSTLADLLLPVLFVALAMGLFMVRPLATEYPPLRLTPGHYQRAETYFFSSGGDNLDLTRVLLRKFRDQDLPCADLNPRQKNSSCWRTDPFSHPEFQDSCGCLKCPNRSASAPYLTNHLGHTLLNLSGFNMEEYLLAPSEKPRLGGWSFGLKIPSEAGGANGNISKPPTLAKVWYNQKGFHSLPSYLNHLNNLILWQHLPPTVDWRQYGITLYSHPYGGALLNEDKILESIRQCGVALCIVLGFSILSASIGSSVVRDRVIGAKRLQHISGLGYRMYWFTNFLYDMLFYLVSVCLCVAVIVAFQLTAFTFRKNLAATALLLSLFGYATLPWMYLMSRIFSSSDVAFISYVSLNFIFGLCTMLITIMPRLLAIISKAKNLQNIYDVLKWVFTIFPQFCLGQGLVELCYNQIKYDLTHNFGIDSYVSPFEMNFLGWIFVQLASQGTVLLLLRVLLHWDLLRWPRGHSTLQGTVKSSKDTDVEKEEKRVFEGRTNGDILVLYNLSKHYRRFFQNIIAVQDISLGIPKGECFGLLGVNGAGKSTTFKMLNGEVSLTSGHAIIRTPMGDAVDLSSAGTAGVLIGYCPQQDALDELLTGWEHLYYYCSLRGIPRQCIPEVAGDLIRRLHLEAHADKPVATYSGGTKRKLSTALALVGKPDILLLDEPSSGMDPCSKRYLWQTIMKEVREGCAAVLTSHRFWYQDDAGLIK

SEQ ID NO: 43784 - protein, 91 aa, Homo sapiens
MLHFLTAVVGSTCDVKVKNGTTYEGIFKTLSSKFELAVDAVHRKASEPAGGPRREDIVDTMVFKPSDVMLVHFRNVDFNYATKDKFTDSAI

SEQ ID NO: 43785 - protein, 191 aa, Homo sapiens
MELSPRSPPEMLEESDCPSPLELKSAPSKKMWIKLRSLLRYMVKQLENGEINIEELKKNLEYTASLLEAVYIDETRVSRLWKHLLSFLCDSPSGVSGKSWTRRTSCRSCGQMPCLRRCGTGWPPPSPSRPGPKAAEQRRSPSSEALCTLCRLGSSWNGCSGEHTPLWAPLTLLRFSTVSRTWISGALMSFP

SEQ ID NO: 43786 - protein, 299 aa, Homo sapiens
  MOD_RES (1)..(1): Any amino acid
XLVDSSGHSVGCHAQNFVLFCFRTEVSDKSIATDLGKKSEETTVPFPEESIVPAAKPCHRRVLCFDSTTAPVANTQGPNHKMVSQNKERNAVSFPNLDSPNVSSTLKPPSNNAIKREKEKPPLPKILSKSESAISRHTTIRETQSEKKVSPTEIVLESFHKATANKENELCSDVERQKNPENSKLSIGQQNGGLRSEKSIASLQEMTKKQGTSSNNKNVLSVGTAVKDLKQEQTKSASSLITTEMLQDIQRHSSVSRLADSSDLPVPRTPGSGAGEKHKEEPIDIIKAPSSRRFSEDSS

SEQ ID NO: 43787 - protein, 91 aa, Homo sapiens
LHPFHVIRINKMLSCAGADRLQTGMRGAFGKPQGTVARVHIGQVIMSIRTKLQNKEHVIEALRRAKFKFPGRQKGAPIPAQTSLSPSLPHP

SEQ ID NO: 43788 - protein, 484 aa, Homo sapiens
MVTALMKPFVLLSDNEYIFMDLEQKLSKYFSKDWKKERNEGNEKPRAPFVAFLRVQHYVENGRVISDHRARHLYYCHLKERVLRSQCAHREEAYFLLAACALQADLGEHRESAHAGRYFEPHSYFPQWIITKRGIDYILRHMPTLHRERQGLSPKEAMLCFIQEACRLEDVPVHFFRLHKDKKEGRPTVILGLALRGVHIYQEVDRAPQLLYDLPWPHVGKLAFLGKKLEIQLDGLPAAQKLVYYTGCTWRSRHLLHLLRASHQLHLRVRPTLQQLRQREEAEEKQHYRESYISDELELDLASRSFPGSGVSSQHCPHCLSRHSADSHGSSYTSGIKANSWLRESREMSVDVPLEVHGLHEKEPSSSPRTSRSHPSTRGDSQATRQEPCTQVRTRGQSAEAVHQIQEMTAGVSEEQHSHGLDDMQLHQLALHPAPTSLSHTFHRALDCRLAGPCETRATLPSKRSSNCLALDLFGEAPPQEFVV

SEQ ID NO: 43789 - protein, 51 aa, Homo sapiens
STGSSLMPQKKNPDSLELIRSKAGRVFGRCAGLLMTLKGLPSTYNKDLQQA

SEQ ID NO: 43790 - protein, 89 aa, Homo sapiens
MRPADLLQLVLLLDLPRDLGGMGCSSPPCECHQEEDFRVTCKDIQRIPSLPPSTQTLYWRRERKKVWELEIKFNIEGDILNPSQEERKS

SEQ ID NO: 43791 - protein, 113 aa, Homo sapiens
MTPGKDEDQLPFSKAADVYAFGTVWYELQARDWPLKNQAAEASIWQIGSGEGMKRVLTSVSLGKEVSEILSACWAFDLQERPSFSLLMDMLEKLPKLNRRLSHPGHFWKSAEL

SEQ ID NO: 43792 - protein, 260 aa, Homo sapiens
MAQVSINNDYSEWDLSTDAGERARLLQSPCVDTAPKSEWEASPGGLDRGTTSTLGAIFIVVNACLGAGLLNFPAAFSTAGGVAAGIALQMGMLVFIISGLVILAYCSQASNERTYQEVVWAVCGKLTGVLCEVAIAVYTFGTCIAFLIIIGDQQDKIIAVMAKEPEGASGPWYTDRKFTISLTAFLFILPLSIPREIGFQKYASFLSVVGTWYVTAIVIIKYIWPDKEMTPGNILTRPASWMAVFNAMPTICFGFQHAAA

SEQ ID NO: 43793 - protein, 127 aa, Homo sapiens
MSSSMWYIMQSIQSKYSLSERLIRTIAAIRSFPHDNVEDLIRGGADVNCTHGTLKPLHCACMVSDADCVELLLEKGAEVNALDGYNRTALHYAAEKDEACVEVLLEYGANPNALDGNRDTPLHWAAF

SEQ ID NO: 43794 - protein, 110 aa, Homo sapiens
MSTPSPTMAACLRLDACQQESTVLEPGSPDFADESTLKCASFWKVNHVITSKSNDYLTLNAGSQQERDQAKLTCPSEVSGTILQEREFEANKLQGMQQSDLFKAEYVLIV

SEQ ID NO: 43795 - protein, 178 aa, Homo sapiens
NCSTECRCNRHSECAGVGARDHCLLCRNHTKGSHCEQCLPLFVGSAVGGGTCRPCHAFCRGNSHICISRKELQMSKGEPKKYSLDPEEIENWVTEGPSEDEAVCVNCQNNSYGEKCESCLQGYFLLDGKCTNAPSAGNHFTGVRWAASSATASSRWSRSAAWTPRPRPTASMSPNAGR

SEQ ID NO: 43796 - protein, 105 aa, Homo sapiens
MKWVTFISLLFLFSSAYSRGVFRRDAHTYMKLPEDILTFMPRNSFSLLKGIKLLLQNVAKLLIKLPACCQSSMNFGMKGRLRLPNRDSSVPVSKNLEKELSKHGQ

SEQ ID NO: 43797 - protein, 160 aa, Homo sapiens
MREWWVQVGLLAVPLLAAYLHIPPPQLSPALHSWKSSGKFFTYKGLRIFYQDSVGVVGSPEIVVLLHGFPTSSYDWYKIWEGLTLRFHRVIALDFLGFGFSDKPRPHHYSIFEQASIVEALLRHLGLQNRRINLLSHDYGDIVAQELLYRYKQNRSGRLT

SEQ ID NO: 43798 - protein, 171 aa, Homo sapiens
  MOD_RES (1)..(1): Any amino acid
XHGGSPQVTVTGPSRDCPNSGQASPCASEQSPSPQSPQNNCSGKSDPKNVAALKNRQMKHISAEQKRRFNIKMCFDMLNSLISNNSKLTSHAITLQKTVEYITKLQQERGQMQEEARRLREEIEELNATIIDPFSVGRYFPAPGERSTPVQPPSGLQSPAPLRACLFFNHT

SEQ ID NO: 43799 - protein, 992 aa, Homo sapiens
MWRCGGRQGLCVLRRLSGGHAHHRAWRWNSNRACERALQYKLGDKIHGFTVNQVTSVPELFLTAVKLTHDDTGARYLHLAREDTNNLFSVQFRTTPMDSTGVPHILEHTVLCGSQKYPCRDPFFKMLNRSLSTFMNAFTASDYTLYPFSTQNPKDFQNLLSVYLDATFFPCLRELDFWQEGWRLEHENPSDPQTPLVFKGVVFNEMKGAFTDNERIFSQHLQNRLLPDHTYSVVSGGDPLCIPELTWEQLKQFHATHYHPSNARFFTYGNFPLEQHLKQIHEEALSKFQKIEPSTVVPAQTPWDKPREFQITCGPDSFATDPSKQTTISVSFLLPDITDTFEAFTLSLLSSLLTSGPNSPFYKALIESGLGTDFSPDVGYNGYTREAYFSVGLQGIAEKDIETVRSLIDRTIDEVVEKGFEDDRIEALLHKIEIQMKHQSTSFGLMLTSNNQHKLTLSMRPDDKYHEKQAQVEATKLKQKVEALSPGDRQQIYEKGLELRSQQSKPQDASCLPALKVSDIEPTIPVTELDVVLTAGDIPVQYCAQPTNGMVYFRAFSSLNTLPEELRPYVPLFCSVLTKLGCGLLDYREQAQQIELKTGGMSASPHVLPDDSHMDTYEQGVLFSSLCLDRNLPDMMQLWSEIFNNPCFEEEEHFKVLVKMTAQELANGIPDSGHLYASIRAGRTLTPAGDLQETFSGMDQVRLMKRIAEMTDIKPILRKLPRIKKHLLNGDNMRCSVNATPQQMPQTEKAVEDFLRSIGRSKKERRPVRPHTVEKPVPSSSGGDAHVPHGSQVIRKLVMEPTFKPWQMKTHFLMPFPVNYVGECIRTVPYTDPDHASLKILARLMTAKFLHTEIREKGGAYGGGAKLSHNGIFTLYSYRDPNTIETLQSFGKAVDWAKSGKFTQQDIDEAKLSVFSTVDAPVAPSDKGMDHFLYGLSDEMKQAHREQLFAVSHDKLLAVSDRYLGTGKSTHGLAILGPENPKIAKDPSWIIQ

SEQ ID NO: 43800 - protein, 62 aa, Homo sapiens
MVDSQKCSDVSELSSSPPGPYHQEPYVCKPEERFRAPPILPPHLLQVILNKDTGISCDPALL

SEQ ID NO: 43801 - protein, 1180 aa, Homo sapiens
MEPNSLQWVGSPCGLHGPYIFYKAFQFHLEGKPRILSLGDFFFVRCTPKDPICIAELQLLWEERTSRQLLSSSKLYFLPEDTPQGRNSDHGEDEVIAVSEKVIVKLEDLVKWVHSDFSKWRCGFHAGPVKTEALGRNGQKEALLKYRQSTLNSGLNFKDVLKEKADLGEDEEETNVIVLSYPQYCRYRSMLKRIQDKPSSILTDQFALALGGIAVVSRNPQILYCRDTFDHPTLIENESICDEFAPNLKGRPRKKKPCPQRRDSFSGVKDSNNNSDGKAVAKVKCEARSALTKPKNNHNCKKVSNEEKPKVAIGEECRADEQAFLVALYKYMKERKTPIERIPYLGFKQTAQKLGGYETITARRQWKHIYDELGGNPGSTSAATCTRRHYERLILPYERFIKGEEDKPLPPIKPRKQENSSQENENKTKVSGTKRIKHEIPKSKKEKENAPKPQDAAEVSSEQEKEQETLISQKSIPEPLPAADMKKKIEGYQEFSAKPLASRVDPEKDNETDQGSNSEKVAEEAGEKGPTPPLPSAPLAPEKDSALVPGASKQPLTSPSALVDSKQESKLCCFTESPESEPQEASFPSFPTTQPPLANQNETEDDKLPAMADYIANCTVKVDQLGSDDIHNALKQTPKVLVVQSFDMFKDKDLTGPMNENHGLNYTPLLYSRGNPGIMSPLAKKKLLSQVSGASLSSSYPYGSPPPLISKKKLIARDDLCSSLSQTHHGQSTDHMAVSRPSVIQHVQSFRSKPSEERKTINDIFKHEKLSRSDPHRCSFSKHHLNPLADSYVLKQEIQEGKDKLLEKRALPHSHMPSFLADFYSSPHLHSLYRHTEHHLHNEQTSKYPSRDMYRESENSSFPSHRHQEKLHVNYLTSLHLQDKKSAAAEAPTDDQPTDLSLPKNPHKPTGKVLGLAHSTTGPQESKGISQFQVLGSQSRDCHPKACRVSPMTMSGPKKYPESLSRSGKPHHVRLENFRKMEGMVHPILHRKMSPQNIGAARPIKRSLEDLDLVIAGKKARAVSPLDPSKEVSGKEKASEQESEGSKAAHGGHSGGGSEGHKLPLSSPIFPGLYSGSLCNSGLNSRLPAGYSHSLQYLKNQTVLSPLMQPLAFHSLVMQRGIFTSPTNSQQLYRHLAAATPVGSSYGDLLHNSIYPLAAINPQAAFPSSQLSSVHPSTKL

SEQ ID NO: 43802 - protein, 40 aa, Homo sapiens
FPAVLASEAAMSYPADDYESEEIQSRTLLMNVSMNSKPIR

SEQ ID NO: 43803 - protein, 256 aa, Homo sapiens
MLTQAAVRLVRGSLRKTSWAEWGHRELRLGQLAPFTAPHKDKSFSDQRSELKRRLKAEKKVAEKEAKQKELSEKQLSQATAAATNHTTDNGVGPEEESVDPNQYYKIRSQAIHQLKVNGEDPYPHKFHVDISLTDFIQKYSHLQPGDHLTDITLKVAGRIHAKRASGGKLIFYDLRGEGVKLQVMANSRNYKSEEEFIHINNKLRRGDIIGVQGNPGKTKKGELSIIPYEITLLSPCLHMLPHLHFGLKDKETRYR

SEQ ID NO: 43804 - protein, 71 aa, Homo sapiens
NRELQIMRKLDHCNIVRLRYFFYSSGEKLYMYQLFRSLAYIHSFGICHRDIKPQNLLLDPDTAVLKLCDFG

SEQ ID NO: 43805 - protein, 124 aa, Homo sapiens
MAGANCGTLGKTRMRSLRKKREKPRPEQWKGLPGPPRAPEPEDVAVPGGVDLLTLPQLCFPGGVCVATEPKEDCVHFLVLTDVCGNRTYGVVAQYYRPLHDEYCFYNGKTHRECPGCFVPFAVC

SEQ ID NO: 43806 - protein, 69 aa, Homo sapiens
MGSKCCKGGPDEDAVERQRRQKLLLAQLHHRKRVKAAGQIQAWWRGVLVRRTLLVAALRAWMIQCWWRT

SEQ ID NO: 43807 - protein, 106 aa, Homo sapiens
MFVKHCKVEVYLTELKLCENGNMNNVVTRRFSKADTIDTIEKEIRKIFSIPDEKETRLWNKYMSNTFEPLNKPDSTIQDAGLYQGQVLVIEQKNEDGTWPRGPSTP

SEQ ID NO: 43808 - protein, 91 aa, Homo sapiens
MVGGLKRKHSDLEEEEERWEWSPAGLQSYQQALLRISLDKVQRSLGPRAPSLRRHVLIHNTLQQLQAALRLAPAPALPPEPLFLGEEDFSL

SEQ ID NO: 43809 - protein, 249 aa, Homo sapiens
MGKSLIKIHTRVRVQLRLTNHCFRPLSVRILRMGPRLQGRVLTAVTPGQGNQLEHFQGLESLRDSAHSTPVRSTSHGDTFLPHVRSSRTDSNERVAVIADEAYSPADSVLPTPVAEHSLELMLLSRQINGATCSIEEEKESEASTPTATEVEALGGELRALCQGHSGPEEEQVNKFVLSVLRLLLVTMGLLFVLLLLLIILTESDLDIAFFRDIRQTPEFEQFHYQYFCPLRRWFACKIRSVVSLLIDT

SEQ ID NO: 43810 - protein, 87 aa, Homo sapiens
MTKFQEAVTFKDVAVAFTEEELGLLDSAQRKLYRDVMLENFRNLVSVGHQSFKPDMISQLEREEKLWMKELQTQRGKHSGFLCCVFS

SEQ ID NO: 43811 - protein, 276 aa, Homo sapiens
  MOD_RES (1)..(1): Any amino acid
XSSPKTNGLSKDMSSLHISPNSDTGLGDSVCSSPSISSTTSPKLDPPPSPHANRKKHRRKKSTSNFKADGLSGTAEAKRKAWKLNRVGSLRNIYSSSTNTEEQEENFEFIIVSLTGQTWHFEATTYEERDAWVQAIESQILASLQSCESSKNKSRLTSQSEAMALQSIRNMRGNSHCVDCETQNPNWASLNLGALMCIECSGIHRNLGTHLSRVRSLDLDDWPVELIKVMSSIGNELANSVWEESSQGRTKPSVDSTREEKERWIRAKYEQKLFLA

SEQ ID NO: 43812 - protein, 79 aa, Homo sapiens
MTPQEIAVNLRPGDKTTFQLQVRQVEDYPVDLYYLMDLSLSMKDDLDNIRSLGTKLAEEMRKLTSNFRLGFGSFVDKDI

SEQ ID NO: 43813 - protein, 124 aa, Homo sapiens
MESGSTAASEEARSLRECELYVQKHNIQALLKDSIVQLCTARPERPMAFLREYFERRRQNRFRICRKQALVQTQGRMRFLLLHPTQWLKVGGDEVLSALRSTRRKMRHPMLERLYQKITRQWPL

SEQ ID NO: 43814 - protein, 77 aa, Homo sapiens
MGSSGLLSLLVLFVLLANVQGPGLTDWLFPRRCPKIREECEFQERDVCTKDRQCQDNKKCCVFSCGKKCLDLKQGKQ

SEQ ID NO: 43815 - protein, 163 aa, Homo sapiens
PQAGYFGLFSYCVGNVLSSELICKGGPLDFSSIPSRAFKTAMFFVALGMFLIIGSIICFSLFFICNTATVYKICAWMQLAAATGLMIGCLVYPDGWDSSEVRRMCGEQTGKYTLGHCTIRWAFMLAILSIGDALILSFLAFVLGYRQDKLLPDDYKADGTEEV

SEQ ID NO: 43816 - protein, 291 aa, Homo sapiens
  MOD_RES (1)..(1): Any amino acid
XCAAPNEGFCSAGVQTEAGVADLTWVGERGILVASDSGAVELWELDENETLIVSKFCKYEHDDIVSTVSVLSSGTQAVSGSKDICIKVWDLAQQVVLSSYRAHAAQVTCVAASPHKDSVFLSCSEDNRILLWDTRCPKPASQIGCSAPGYLPTSLAWHPQQSEVFVFGDENGTVSLVDTKSTSCVLSSAVHSQCVTGLVFSPHRLDLSQPSPPSDSVPFLASLSEDCSLAVLDSSLSELFRSQAHRDFVRDATWSPLNHSLLTTVGWDHQVVHHVVPTEPLPAPGPASVTE

SEQ ID NO: 43817 - protein, 345 aa, Homo sapiens
MSSKYPRSVRRCLPLWALTLEAALILLFYFFTHYDASLEDQKGLVASYQVGQDLTVMAAIGLGFLTSSFRRHSWSSVAFNLFMLALGVQWAILLDGFLSQFPSGKVVITLFSIRLATMSALSVLISVDAVLGKVNLAQLVVMVLVEVTALGNLRMVISNIFNTDYHMNMMHIYVFAAYFGLSVAWCLPKPLPEGTEDKDQTATIPSLSAMLGALFLWMFWPSFNSALLRSPIERKNAVFNTYYAVAVSVVTAISGSSLAHPQGKISKTYVHSAVLAGGVAVGTSCHLIPSPWLAMVLGLVAGLISVGGAKYLPDWLPGPPQHWGTQLGHRDSSHVWSPDRFAPKS

SEQ ID NO: 43818 - protein, 106 aa, Homo sapiens
MASVSALTEELDSITSELHAVEIQIQELTERQQELIQKKKVLTKKIKQCLEDSDAGASNEYDSSPAAWNKEDFPWSGKVKDILQNVFKLEKFRPLQLETINVTMAG

SEQ ID NO: 43819 - protein, 746 aa, Homo sapiens
LLVLGLLVAGAADGCELVPRHLRGRRATGSAATAASSPAAAAGDSPALMTDPCMSLSPPCFTEEDRFSLEALQTIHKQMDDDKDGGIEVEESDEFIREDMKYKDATNKHSHLHREDKHITIEDLWKRWKTSEVHNWTLEDTLQWLIEFVELPQYEKNFRDNNVKGTTLPRIAVHEPSFMISQLKISDRSHRQKLQLKALDVVLFGPLTRPPHNWMKDFILTVSIVIGVGGCWFAYTQNKTSKEHVAKMMKDLESLQTAEQSLMDLQERLEKAQEENRNVAVEKQNLERKMMDEINYAKEEACRLRELREGAECELSRRQYAEQELEQVRMALKKAEKEFELRSSWSVPDALQKWLQLTHEVEVQYYNIKRQNAEMQLAIAKDEAEKIKKKRSTVFGTLHVAHSSSLDEVDHKILEAKKALSELTTCLRERLFRWQQIEKICGFQIAHNSGLPSLTSSLYSDHSWVVMPRVSIPPYPIAGGVDDLDEDTPPIVSQFPGTMAKPPGSLARSSSLCRSRRSIVPSSPQPQRAQLAPHAPHPSHPRHPHHPQHTPHSLPSPDPDILSVSSCPALYRNEEEEEAIYFSAEKQWEVPDTASECDSLNSSIGRKQSPPLSLEIYQTLSPRKISRDEVSLEDSSRGDSPVTVDVSWGSPDCVGLTETKSMIFSPASKVYNGILEKSCSMNQLSSGIPVPKPRHTSCSSAGNDSKPVQEAPSVARISSIPHDLCHNGEKSKKPSKIKSLFKKKSK

SEQ ID NO: 43820 - protein, 251 aa, Homo sapiens
GRYVPPSSTDRSPYEKSGSRRTRYEESLRTRAVAEDAPSTHYFLPVARGRCVQALRGRKRRTRGVASPRGGYGHLAGALLPPVPAALCWDADVQPSAGLHRVAHHPGRPAWFGSLRVLAHCILPAVGGGGPRRHVPFPFPTQLCPRCTPYSLTPSTRPSIIWRILSLAKDSKQRSSLRFSCASCWLSLHLASSTESVSPPASSSPWLVCTTSTRSPPPCTRQQLQSSHQPRSQARARRETDPECSIKLILC

SEQ ID NO: 43821 - protein, 147 aa, Homo sapiens
MDDTLFQLKFTAKQLEKLAKKAEKDSKAEQAKVKKVTKNMAQVTKALDKALSTMDLQKVSSVMDRFEQQVQNLDVHTSVMEDSMSSATTLTTPQEQVDSLIMQIAEENGLEVLDQLSQLPEGASAVGESSVRSQEDQLSRRLAALRN

SEQ ID NO: 43822 - protein, 146 aa, Homo sapiens
  MOD_RES (1)..(1): Any amino acid
XEIPCFQNSSSKISSEFTYAWSVEDNGTQETLISQNHLISNSTLLKDRVKLGTDYRLHLSPVQIFDDGRKFSCHIRVGPNKILRSSTTVKVFGKGFCSTDSLASSCLLPCSSLKRKHPIMLQSSHMWVTVLESVSLDTCHSCWAGG

SEQ ID NO: 43823 - protein, 58 aa, Homo sapiens
MLRSGPASGPSVPTGRAMPSRRVARPPAAPELGALGSPDLSSLSLAVSRSTGSSSTDA

SEQ ID NO: 43824 - protein, 307 aa, Homo sapiens
MGTRQKELLDIDSSSVILEDGITKLNTIGHYEISNGSTIKVFKKIANFTSDVEYSDDHCHLILPDSEAFQDVQGKRHRGKHKFKVKEMYLTKLLSTKVAIHSVLEKLFRSIWSLPNSRAPFAIKYFFDFLDAQAENKKITDPDVVHIWKTNSLPLRFWVNILKNPQFVFDIKKTPHIDGCLSVIAQAFMDAFSLTEQQLGKEAPTNKLLYAKDIPTYKEEVKSYYKAIRDLPPLSSSEMEEFLTQESKKHENEFNEEVALTEIYKYIVKYFDEILNKLERERGLEEAQKQLLHVKVLFDEKKKCKWM

SEQ ID NO: 43825 - protein, 389 aa, Homo sapiens
MSRQVVRSSKFRHVFGQPAKADQCYEDVRVSQTTWDSGFCAVNPKFVALICEASGGGAFLVLPLGKTGRVDKNAPTVCGHTAPVLDIAWCPHNDNVIASGSEDCTVMVWEIPDGGLMLPLREPVVTLEGHTKRVGIVAWHTTAQNVLLSAGCDNVIMVWDVGTGAAMLTLGPEVHPDTIYSVDWSRDGGLICTSCRDKRVRIIEPRKGTVVAEKDRPHEGTRPVRAVFVSEGKILTTGFSRMSERQVALWDTKHLEEPLSLQELDTSSGVLLPFFDPDTNIVYLCGKGDSSIRYFEITSEAPFLHYLSMFSSKESQRGMGYMPKRGLEVNKCEIARFYKLHERRCEPIAMTVPRKDAVSRLEEEMRKLQATVQELQKRLDRLEETVQAK

SEQ ID NO: 43826 - protein, 205 aa, Homo sapiens
NEEKDRKIEDLRQCLNRYKKMQDTVVLAQGKKGKDGEYEELLNSSSISSLLDAQGFSDLEKSPSPTPVMGSPSCDPFNTSVPEEFHTTILQVSIPSLLPATVSMETSEKSKLTPKPETSFEENDGNIILGATVDTQLCDKLLTSSLQKSSSLGNLKKETSDGDRAPAESRPFGTLPPRPPGQDTSMDDNPFGTRKVRSSFGRGFF

SEQ ID NO: 43827 - protein, 171 aa, Homo sapiens
MSGVRPPIMNGPLHPRPLVALLDGRDCTVEMPILKDVATVAFCDAQSTQEIHEKVLNEAVGALMYHTITLTREDLEKFKALRIIVRIGSGFDNIDIKSAGDLGIAVCNVPAASVEETADSTLCHILNLYRRATWLHQALREGTRVQSVEQIREVASGAARIRGETLGIIGL

SEQ ID NO: 43828 - protein, 263 aa, Homo sapiens
MALDGPEQMELEEGKAGSGLRQYYLSKIEELQLIVNDKSQNLRRLQAQRNELNAKVRLLREELQLLQEQGSYVGEVVRAMDKKKVLVKVTPNCRVALRNDSYTLHKILPNKVDPLVSLMMVEKVPDSTYEMIGGLDKQIKEIKEVIELPVKHPELFEALGIAQPKGVLLYGPPGTGKTLLARAVAHHTDCTFIRVSGSELVQKFIGEGARMVRELFVMAREHAPSIIFMDEIDSIGSSRLEGGSGGDSEVQRTMLELLNQLDG

SEQ ID NO: 43829 - protein, 399 aa, Homo sapiens
  MOD_RES (1)..(1): Any amino acid
XGNASFGQLGLGGIDEEIVLEPRKSDFFINKRVRDVGCGLRHTVFVLDDGTVYTCGCNDLGQLGHEKSRKKPEQVVALDAQNIVAVSCGEAHTLALNDKGQVYAWGLDSDGQLGLVGSEECIRVPRNIKSLSDIQIVQVACGYYHSLALSKASEVFCWGQNKYGQLGLGTDCKKQTSPQLLKSLLGIPFMQVAAGGAHSFVLTLSGAIFGWGRNKFGQLGLNDENDRYVPNLLKSLRSQKIVYICCGEDHTAALTKEGGVFTFGAGGYGQLGHNSTSHEINPRKVFELMGSIVTEIACGRQHTSAFVPSSGRIYSFGLGGNGQLGTGSTSNRKSPFTVKGNWYPYNGQCLPDIEARSCHVVQAGLELLGSSDPPTLASQSAGITVNEHQCLLPPQKRTQ

SEQ ID NO: 43830 - protein, 472 aa, Homo sapiens
MYDNLYLHGIEDSEAGSADSYTSRPSDSDVSLEEDREAIRQEREQQAAIQLERAKSKPVAFAVKTNVSYCGALDEDVPVPSTAISFDAKDFLHIKEKYNNDWWIGRLVKEGCEIGFIPSPLRLENIRIQQEQKRGRFHGGKSSGNSSSSLGEMVSGTFRATPTSTAKQKQKVTEHIPPYDVVPSMRPVVLVGPSLKGYEHRFDGRISITRVTADISLAKRSVLNNPSKRAIIERSNTRSSLAEVQSEIERIFELARSLQLVVLDADTINHPAQLIKTSLAPIIVHVKVSSPKVLQRLIKSRGKSQSKHLNVQLVAADKLAQCPPEMFDVILDENQLEDACEHLGEYLEAYWRATHTTSSTPMTPLLGRNLGSTALSPYPTAISGLQSQRMRHSNHSTENSPIERRSLMTSDENYHNERARKSRNRLSSSSQHSRDHYPLVEEDYPDSYQDTYKPHRNRGSPGGYSHDSRHRL

SEQ ID NO: 43831 - protein, 213 aa, Homo sapiens
MQTQEILRILRLPELGDLGQFFRSLSATTLVSMGALAAILAYWFTHRPKALQPPCNLLMQSEEVEDSGGARRSVIGSGPQLLTHYYDDARTMYQVFRRGLSISGNGPCLGFRKPKQPYQWLSYQEVADRAEFLGSGLLQHNCKACTDQFIGVFAQNRPEWIIVELACYTYSMVVVPLYDTLGPGAIRYIINTADISTVIVDKPQKAVLLLEHV

SEQ ID NO: 43832 - protein, 407 aa, Homo sapiens
  MOD_RES (1)..(1): Any amino acid
XNALSKQSALQMETAGPEEEPAGATESLQGQDLFNRASPLEQAQDSPIDFHLQSWMNNKEPKIVVLDAGKHFEDKTLKSDLSHTSLLENEKLILPTSLEDSSDDDIDDEMFYDDHLEAYFEQLAIPGMIYEDLEGPEPPEKGFKLPTNGLRQANENGSLNCKFQSENNSSLISLDSHSSETTHKESEESQVICLPGTSNSIGTGDSRRYTDGMLPFSSGTWGTEKEIENLKGIVPDLNSECASKDVLVKTLRAIDVKLNSDNFHDANANRGGFDLTDPVKQGAECPHQNKTVLHMDGCLDTETPTVSIQENVDVASLKPISDSGINFTDAIWSPTCERRTCECHESIEKNKDKTDLPQSVVYQNEEGRWVTDLAYYTSFNSKQNLNVSLSDEMNEDFRSGSIIWLFY

SEQ ID NO: 43833 - protein, 161 aa, Homo sapiens
MLQALKVHASKPASEVINEYSWKVDFLKGMLQAEKLTSSSEKALANQFLAPGRVPTTARERVPATKTVHLQSRARYTSEMRSELLGTDSAEPEMDVRKRTGVAGSQPVSEKQLAAELDLVLQRHQNLQEKLAEEMLGLARSLKTNTLAAQSVIKKDNQTLS

SEQ ID NO: 43834 - protein, 246 aa, Homo sapiens
MADFGISAGQFVAVVWDKSSPVEALKGLVDKLQALTGNEGRVSVENIKQLLQSAHKESSFDIILSGLVPGSTTLHSAEILAEIARILRPGGCLFLKEPVETAVDNNSKVKTASKLCSALTLSGLVEVKELQREPLTPEEVQSVREHLGHESDNLLFVQITGKKPNFEVGSSRQLKLSITKKSSPSVKPAVDPAAAKLWTLSANDMEDDSMCYLGDAFRCASCPYLGMPAFKPGEKVLLSDSNLHDA

SEQ ID NO: 43835 - protein, 145 aa, Homo sapiens
MELVPATPHYPADVLFQTDPTAEMAAESLPFSFGTLSSWELEAWYEDLQEVLSSDENGGTYVSPPGNEEEESKIFTTLDPASLAWLTEEEPEPAEVTSTSQSPHSPDSSQSSLAQEEEEEDQGRTRKRKQSGHSPARAGKQRMKE

SEQ ID NO: 43836 - protein, 348 aa, Homo sapiens
MHQDGISSMNQLGGLFVNGRPLPLDTRQQIVRLAVSGMRPCDISRILKVSNGCVSKILGRYYRTGVLEPKGIGGSKPRLATPPVVARIAQLKGECPALFAWEIQRQLCAEGLCTQDKTPSVSSINRVLRALQEDQGLPCTRLRSPAVLAPAVLTPHSGSETPRGTHPGTGHRNRTIFSPSQAEALEKEFQRGQYPDSVARGKLATATSLPEDTVRVWFSNRRAKWRRQEKLKWEMQLPGASQGLTVPRVAPGIISAQQSPGSVPTAALPALEPLGPSCYQLCWATAPERCLSDTPPKACLKPCWDCGSFLLPVIAPSCVDVAWPCLDASLAHHLIGGAGKATPTHFSH

SEQ ID NO: 43837 - protein, 61 aa, Homo sapiens
RNIRVNCLAPGLIKTSFSRMLWMDKEKEESMKETLRIRRPRIHKHYHYSDLSKKSASLSKG

SEQ ID NO: 43838 - protein, 68 aa, Homo sapiens
MRLLRRRHMPLRLAMVGCAFVLFLFLLHRDVSSREEATEKPWLKSLVSRKDHVLDLMLEAMNNLRDSM

SEQ ID NO: 43839 - protein, 167 aa, Homo sapiens
MEHPSKMEFFQKLGYDREDVLRVLGKLGEGALVNDVLQELIRTGSRPGALEHPAAPRLVPRGSCGVPDSAQRGPGTALEEDFRTLASSLRPIVIDGSNVAMSHGNKETFSCRGIKLAVDWFRDRGHTYIKVFVPSWRKDPPRADTPIRGIGMGNEWRSILLGAAARE

SEQ ID NO: 43840 - protein, 207 aa, Homo sapiens
MSSKNSESGTATTGTSLSAPDITVRNVVNIARPSSQQSSWTSANNDVIVTGIYSPASSSSRQGTNKHTDTQITEAHKIPIQKTATKNDTEFQLHIPVQRQVAHCKNASLLLGEKTIILSRQTSVLNAGNSVFNHAKKNYGNSSVQASEMTVPQKPSVCHRPCKIEPVGIQRSYKPEHTGPALHNLCGQKPTIRDPYCRTQNLEIREV

SEQ ID NO: 43841 - protein, 33 aa, Homo sapiens
  MOD_RES (1)..(1): Any amino acid
XKINEKRKEELKRAEKKDKDKQAINEYEKWLIE

SEQ ID NO: 43842 - protein, 125 aa, Homo sapiens
MDSLEEPQKKVFKARKTMRVSDRQQLEAVYKVKEELLKTDVKLLNGNHENGDLDPTSPLENMDYIKDKEEVNGIEEICFDPEGSKAEWKETPCILSVNVKNKQDDDLNCEPLSPHNITPEPVSKL

SEQ ID NO: 43843 - protein, 97 aa, Homo sapiens
  MOD_RES (1)..(1): Any amino acid
XVEIGESVRGEDVYIVQSGCGEINDNLMELLIMINACKIASASRVTAVIPCFPYARQDKKDKPGANLSQACCKYAICSRCRSYYHHGPTCFSNSGLF

SEQ ID NO: 43844 - protein, 675 aa, Homo sapiens
DRACGFCQSTTGHEPEMVELVNIEPVCVRGGLYEVDVTQGECYPVYWNQADKIPVMRGQWFIDGTWQPLEEEESNLIEQEHLNCFRGQQMQENFDIEVSKSIDGKDVVYHLPPFSLPSLFKWRRYKESTDATGLKRKHSQAVHSFKLSRNHVDWHSVDEVYLYSDATTSKIARTVTQKLGFSKASSSGTRLHRGYVEEATLEDKPSQTTHIVFVVHGIGQKMDQGRIIKNTAMMREAARKIEERHFSNHATHVEFLPVEWRSKLTLDGDTVDSITPDKVRGLRDMLNSSAMDIMYYTSPLYRDELVKGLQQELNRLYSLFCSRNPDFEEKGGKVSIVSHSLGCVITYDIMTGWNPVRLYEQLLQKEEELPDERWMSYEERHLLDELYITKRRLKEIEERLHGLKASSMTQTPALKFKVENFFCMGSPLAVFLALRGIRPGNTGSQDHILPREICNRLLNIFHPTDPVAYRLEPLILKHYSNISPVQIHWYNTSNPLPYEHMKPSFLNPAKEPTSVSENEGISTIPSPVTSPVLSRRHYGESITNIGKASILGAASIGKGLGGMLFSRFGRSSTTQSSETSKDSMEDEKKPVASPSATTVGTQTLPHSSSGFLDSALELDHRIDFELREGLVESRYWSAVTSHTAYWSSLDVALFLLTFMYKHEHDDDAKPNLDPI

SEQ ID NO: 43845 - protein, 340 aa, Homo sapiens
MKAGGNAKFREFLESQEDYDPCWSLQEKYNSRAAALFRDKVVALAEGREWSLESSPAQNWTPPQPRTLPSMVHRVSGQPQSVTASSDKAFEDWLNDDLGSYQGAQGNRYVGFGNTPPPQKKEDDFLNNAMSSLYSGWSSFTTGASRFASAAKEGATKFGSQASQKFWGHKQQPEPASELGHSLNENVLKPAQEKVKEGKIFDDVSSGVSQLASKGVGSKGWRDVTTFFSGKAEGPLDSPSEGHSYQNSGLDHFQNSNIDQSFWETFGSAEPTKTRKSPSSDSWTCADTSTERRSSDSWEVWGSASTNRNSNSDGGEGGEGTKKAVPPAVPTDDGWDNQNW

SEQ ID NO: 43846 - protein, 36 aa, Homo sapiens
METPSQRRATRSGAQASSTPLSPTRITRAAPSHHRV

SEQ ID NO: 43847 - protein, 864 aa, Homo sapiens
MPTAAAPIISSVQKLVLYETRARYFLVGSNNAETKYRVLKIDRTEPKDLVIIDDRHVYTQQEVRELLGRLDLGNRTKMGQKGSSGLFRAVSAFGVVGFVRFLEGYYIVLITKRRKMADIGGHAIYKVEDTNMIYIPNDSVRVTHPDEARYLRIFQNVDLSSNFYFSYSYDLSHSLQYNLTVLRMPLEMLKSEMTQNRQESFDIFEDEGLITQGGSELLIYGRPVYVTLIARRSSKFAGTRFLKRGANCEGDVANEVETEQILCDASVMSFTAGSYSSYVQVRGSVPLYWSQDISTMMPKPPITLDQADPFAHVAALHFDQMFQRFGSPIIILNLVKEREKRKHERILSEELVAAVTYLNQFLPPEHTIVYIPWDMAKYTKSKLCNVLDRLNVIAESVVKKTGFFVNRPDSYCSILRPDEKWNELGGCVIPTGRLQTGILRTNCVDCLDRTNTAQFMVGKCALAYQLYSLGLIDKPNLQFDTDAVRLFEELYEDHGDTLSLQYGGSQLVHRVKTYRKIAPWTQHSKDIMQTLSRYYSNAFSDADRQDSINLFLGVFHPTEGKPHLWELPTDFYLHHKNTMRLLPTRRSYTYWWTPEVIKHLPLPYDEVICAVNLKKLIVKKFHKYEEEIDIHNEFFRPYELSSFDDTFCLAMTSSARDFMPKTVGIDPSPFTVRKPDETGKSVLGNKSNREEAVLQRKTAASAPPPPSEEAVSSSSEDDSGTDREEEGSVSQRSTPVKMTDAGDSAKVTENVVQPMKELYGINLSDGLSEEDFSIYSRFVQLGQSQHKQDKNSQQPCSRCSDGVIKLTPISAFSQDNIYEVQPPRVDRKSTEIFQAHIQASQGIMQPLGKEDSSMYREYIRNRYL

SEQ ID NO: 43848 - protein, 44 aa, Homo sapiens
RSPSADQSLEDSPSKVPKSWSFGDRSRARQAFRIKGAASRQNSE

SEQ ID NO: 43849 - protein, 292 aa, Homo sapiens
MQRMIQQFAAEYTSKNSSTQDPSQPNSTKNQSLPKASPVTTSPTAATTQNPVLSKLLMADQDSPLDLTVRKSQSEPSEQDGVLDLSTKKSPCAGSTSLSHSPGCSSTQGNGRPGRPSQYRPDGLRSGDGVPPRSLQDGTREGFGHSTSLKVPLARSLQISEELLSRNQLSTAASLGPSGLQNHGQHLILSREASWAKPHYEFNLSRMKFRGNGALSNISDLPFLAENSAFPKMALQAKQDGKKDVSHSSPVDLKIPQVRGMDLSWESRTGDQYSYSSLWMTIEQQKNGVPTL

SEQ ID NO: 43850 - protein, 225 aa, Homo sapiens
  MOD_RES (1)..(1): Any amino acid
XADLPSCWGAGPCYTGHKVGALRRDTVICCCRHGDYSTPCLFTPGKPSRNPSPWKRTLWTLSAPWAGPAGWTGEEQNATKTGLITRRPRPLRRRPHPAPASPLPEIIRGNIPRMLGKFVPVNWEPPQPLPFPKYLRCYRCLLETKELGCLLGSDICLTPAGSSCITLHKKNSSGSDVMVSDCRSKEQMSDCSNTRTSPVSGFWIFSQYCFLDFCNDPQNRGLYTP

SEQ ID NO: 43851 - protein, 242 aa, Homo sapiens
  MOD_RES (1)..(1): Any amino acid
XEASSSEEEPPSPDDKENQAPKRTGPHLRFEISSEDGFSVEAESLEGAWRTLIEKVQEARGHARLRHLSFSGMSGARLLGIHHDAVIFLAEQLPGAQRCQHYKFRYHQQGEGQEEPPLNPHGAARAEVYLRSVFNSIFLLPLLPPAGSAPLTCSTSWPPSTGCSLRGPPVMRKRMRCSSGQPDVPPAWSCPWPCVFVTLRRRPKKLWVSTDQPSTGEACSVSATSTRGRWSSSTLALSSARC

SEQ ID NO: 43852 - protein, 136 aa, Homo sapiens
MSWKKALRIPGGLRVATVTLMLAMLSTPVAEGRDSPEDFVYQFKGMCYFTNGTERVRLVTRYIYNREEYARFDSDVGVYRAVTPLGPPDAEYWNSQKEVLERTRAELDTVCRHNYQLELRTTLQRRGTVTGPSRSW

SEQ ID NO: 43853 - protein, 29 aa, Homo sapiens
MSGCRKRCKREILKFAQYLLRLLTGSLHT

SEQ ID NO: 43854 - protein, 314 aa, Homo sapiens
  MOD_RES (1)..(1): Any amino acid
XQVYNWFANYRRRQRALPQHMKPAQQATAEDPGARERGPDLLQPSGNPRVDSGFVDRPQWSEEREEKGPPQSPQTTQGPWEPLALAPDFPADETVSKPLDVRSLPGGEMYQEGPGHDPATLPLFCPGPGLCPLAAGNDMLNPSLAAPESWLMSLALASSKEVSFQTGQLVHSHGLDFMMGPADTAVAVSIATLGDPSPTVCRGISLHAGFSGPPSGHPQSVQLEEGLGTSSGRTELRVGSFLVTQPPLQAPEFILTQSPPELAPAPSAFPGPVSAMELSQALPSSQVQCSDSQASGDAFWGARMLLEFSGSSLG

SEQ ID NO: 43855 - protein, 149 aa, Homo sapiens
  MOD_RES (1)..(1): Any amino acid
XNTAASLQQWKVGDKCSAIWSEDGCIYPATIASIDFKRETCVVVYTGYGNREEQNLSDLLSPICEVANNIEQNAQEPGLKFNGPPPPPPPPPPHLLSCWLPPFPSGPPIIPPPPPICPDSLDDADALGSMLISWYMSGYHTGYYMEMLA

SEQ ID NO: 43856 - protein, 34 aa, Homo sapiens
  MOD_RES (1)..(1): Any amino acid
XTAPTSAYSSPARSLGDTGITPLSPSHIVAMGGR

SEQ ID NO: 43857 - protein, 81 aa, Homo sapiens
  MOD_RES (1)..(1): Any amino acid
XAQSDSELPSYHQNDVSLDRGYTSDSEVYTDHGRPGKIHRSATDADVVNSGWLVLLCVLYRLGRMTLITPSQGPAAQALHP

SEQ ID NO: 43858 - protein, 279 aa, Homo sapiens
  MOD_RES (1)..(1): Any amino acid
XIQTIEEGINTHTHAAKDFWKLLGGQTSYQSAGDPKEDELYEAAIIETNCIYRLMDDKLVPDDDYWGKIPKCSLLQPKEVLVFDFGSEVYVWHGKEVTLAQRKIAFQLAKHLWNGTFDYENCDINPLDPGECNPLIPRKGQGRPDWAIFGRLTEHNETILFKEKFLDWTELKRSNEKNPGELAQHKEDPRTDVKAYDVTRMVSMPQTTAGTILDGVNVGRGYGLVEGHDRRQFEITSVSVDVWHILEFDYSRLPKQSIGQFHEGDAYVVKWKFMVSTAG

SEQ ID NO: 43859 - protein, 59 aa, Homo sapiens
MSGRPRTTSFAESCKPVQQPSAFGSMKVSSEQGRQQGDNSGGNSWAGSRQATRSQLYRH

SEQ ID NO: 43860 - protein, 122 aa, Homo sapiens
  MOD_RES (1)..(1): Any amino acid
XDRVGCVWQTVRDHLYHLCVQAQDFCFLVERAVVGLLRLAIRLLRREEISAQDASPRRNVARVTNMTAKGTASRRNPKRDQCFAGLEPPANMPLGAGRVMMMRTKACLPATIRCLYRSVRTC

SEQ ID NO: 43861 - protein, 333 aa, Homo sapiens
MLLILLSVALLALSSAQNLNEDVSQEESPSLIAGKPQGPPPQGGNQPQGPPPPPGKPQGPPPQGGNKPQGPPPPGKPQGPPPQGDNKSRSARSPPGKPQGPPPQGGNQPQGPPPPPGKPQGPPPQGGNKPQGPPPPGKPQGPPPQGDKSRSPRSPPGKPQGPPPQGGNQPQGPPPPPGKPQGPPPQGGNKPQGPPPPGKPQGPPPQGDNKSRSARSPPGKPQGPPPQGGNQPQGPPPPPGKPQGPPPQGGNKPQGPPPPGKPQGPPPQGGSKSRSARSPPGKPQGPPQQEGNNPQGPPPPAGGNPQQPQAPPAGQPQGPPRPPQGGRPSRPPQ

SEQ ID NO: 43862 - protein, 191 aa, Homo sapiens
MDPKQTTLLCLVLCLGQRIQAQEGDFPMPFISAKSSPVIPLDGSVKIQCQAIREAYLTQLMIIKNSTYREIGRRLKFWNETDPEFVIDHMDANKAGRYQCQYRIGHYRFRYSNTLELVVTDSIHQDYTTQNLIRMAVAGLVLVALLAILVENWHSHTALNKEASADVAEPSWSQQMCQPGLTFARTPSVCK

SEQ ID NO: 43863 - protein, 85 aa, Homo sapiens
MYLWLKLLAFGFAFLDTEVFVTGQSPTPSPTGHLQAEEQGSQSKSPNLKSREADSSAFSWWPKAREPLTNHWSKSKSPKAEELGV

SEQ ID NO: 43864 - protein, 100 aa, Homo sapiens
  MOD_RES (1)..(1): Any amino acid
XLQQCSITKLGCRYLSEALQEACSLTNLDLSINQIARGLWILCQALENPNCNLKHLRLKTYETNLEIKKLLEEVKEKNPKLTIDCNASGATAPPCCDFFC

SEQ ID NO: 43865 - protein, 41 aa, Homo sapiens
  MOD_RES (1)..(1): Any amino acid
XLKLECEKLASEKTEMQRHYVMYYEMSYGLNIEMHKQERGS

SEQ ID NO: 43866 - protein, 25 aa, Homo sapiens
EYLEQQKQTVQMRAQMPAFPLPYAQ

SEQ ID NO: 43867 - protein, 24 aa, Homo sapiens
MILNKALMLGALALTTVMSPCGGE

SEQ ID NO: 43868 - protein, 290 aa, Homo sapiens
VSCWLSDSCQELQRRGIILCSYGVTSPIAVFGRPGRLRNRRHFERRLVPMKWLKKCLDTAPTPMWPDDLQNHTFLHTVYCQDGSPSVGLSEAYDEDQLFFFDFSQNTRVPRLPEFADWAQEQGDAPAILFDKEFCEWMIQQIGPKLDGKIPVSRGFPIAEVFTLKPLEFGKPNTLVCFVSNLFPPMLTVNWQHHSVPVEGFGPTFVSAVDGLSFQAFSYLNFTPEPSDIFSCIVTHEIDRYTAIAYWVPRNALPSDLLENVLCGVAFGLGVLGIIVGIVLIIYFRKPCSG

SEQ ID NO: 43869 - protein, 218 aa, Homo sapiens
  MOD_RES (1)..(1): Any amino acid
XLQIPGGFWAAAVTVMLVMLSTPVAEARDFPKDFLVQFKGMCYFTNGTERVRGVARYIYNREEYGRFDSDVGEFQAVTELGRSIEDWNNYKDFLEQERAAVDKVCRHNYEAELRTTLQRQVEPTVTISPSRTEALNHHNLLVCSVTDFYPAQIKVRWFRNDQEETAGVVSTSLIRNGDWTFQILVMLEITPQRGDIYTCQVEHPSLQSPITVEWRLLH

SEQ ID NO: 43870 - protein, 210 aa, Homo sapiens
  MOD_RES (1)..(1): Any amino acid
XKETPSKDPTVSSECIASSEYKEKCFLPQNINPDLTLSFCVKSRSRRCVNGPLQEAARRRLWALENEDQEVRMLFKDLSARLVSIQSQRAQFLITFKTMEEIWKFSTYLNLGYVSMCLEHLLFDHKYWLNCILVEDTEIQVSVDDKHLETIYLGLLIQEGHFFCRALCSVTPPAEKEGECLTLCKNELISVKMAEAGSELEGVSLVTGGS

SEQ ID NO: 43871 - protein, 133 aa, Homo sapiens
LFSKTEMSEVLTEILRVDPAFDKDRFLKQCENDIIPNVLEAMISGELDILKDWCYEALAMGKMMEQGPVLIITFQAQLVMVVRNPKGEVVEGDPDKVLRMLYVWALCRDQDELNPYAAWRLLDISASSTEQIL

SEQ ID NO: 43872 - protein, 375 aa, Homo sapiens
MNQPGGAAAPQADGASAAGRKSTASRERLKRSQKSTKVEGPEPVPAEASLSAEQGTMTEVKVKTELPDDYIQEVIWQGEAKEEKKAVSKDGTSDVPAEICVVIGGVRNQQTLGSYECGICGKKYKYYNCFQTHVRAHRDTEATSGEGASQSNNFRYTCDICGKKYKYYSCFQEHRDLHAVDVFSVEGAPENRADPFDQGVVATDEVKEEPPEPFQKIGPMNNITSDIFKKKEVRQCQKRETGNYTCEFCGKQYKYYTPYQEHVALHAPISTAPGWEPPDDPDTGSECSHPEVSPSPRFVAAKTQTNQSGKKAPASVVRCATLLHRTPPATQTQTFRTPNSGSPASKATAESAFSRRVEGKAQNHFEETNSSSQNS

SEQ ID NO: 43873 - protein, 104 aa, Homo sapiens
LDPPAVVAESVSSLTIADAFIAAGESSAPTPPRPALPRRFICSFPDCSANYSKAWKLDAHLCKHTGEVRGARLPTLGLGMARGPGVATAVVARAAGPAVQRVQL

SEQ ID NO: 43874 - protein, 121 aa, Homo sapiens
MRPRGLPPLLVVLLGCWASVSAQTDATPAVTTEGLNSTEAALATFGTFPSTRPPGTPRAPGPSSGPRPTPVTDVAVLCVCDLSPAQCDINCCCDPDCSSVDFSVFSACSVPVVTSSSGNIS

SEQ ID NO: 43875 - protein, 3135 aa, Homo sapiens
  MOD_RES (1)..(1): Any amino acid
XSLKMSAIPGLTDQKTVPTPTVPSGSFSHREKPSIFYQQEWPDSYATEKALKVSTGPGPADQKTEIPAVQSSSYPQREKPSVLYPQVLSDSHLPEESLKVSAFPGPADQMTDTPAVPSTFYSQREKPGIFYQQTLPESHLPKEALKISVAPGLADQKTGTPTVTSTSYSQHREKPSIFHQQALPGTHIPEEAQKVSAVTGPGNQKTWIPRVLSTFYSQREKPGIFYQQTLPGSHIPEEAQKVSPVLGPADQKTGTPTPTSASYSHTEKPGIFYQQVLPDNHPTEEALKISVASEPVDQTTGTPAVTSTSYSQYREKPSIFYQQSLPSSHLTEEAKNVSAVPGPADQKTVIPILPSTFYSHTEKPGVFYQQVLPHSHPTEEALKISVASEPVDQTTGTPTVTSTSYSQHTEKPSIFYQQSLPGSHLTEEAKNVSAVPGPGDRKTGIPTLPSTFYSHTEKPGSFYQQVLPHSHLPEEALEVSVAPGPVDQTIGTPTVTSPSSSFGEKPIVIYKQAFPEGHLPEESLKVSVAPGPVGQTTGAPTITSPSYSQHRAKSGSFYQLALLGSQIPEEALRVSSAPGPADQTTGIPTITSTSYSFGEKPIVNYKQAFPDGHLPEEALKVSIVSGPTEKKTDIPAGPLGSSALGEKPITFYRQALLDSPLNKEVVKVSAAPGPADQKTETLPVHSTSYSNRGKPVIFYQQTLSDSHLPEEALKVPPVPGPDAQKTETPSVSSSLYSYREKPIVFYQQALPDSELTQEALKVSAVPQPADQKTGLSTVTSSFYSHTEKPNISYQQELPDSHLTEEALKVSNVPGPADQKTGVSTVTSTSYSHREKPIVSYQRELPHFTEAGLKILRVPGPADQKTGINILPSNSYPQREHSVISYEQELPDLTEVTLKAIGVPGPADQKTGIQIASSSSYSNREKASIFHQQELPDVTEEALNVFVVPGQGDRKTEIPTVPLSYYSRREKPSVISQQELPDSHLTEEALKVSPVSIPAEQKTGIPIGLSSSYSHSHKEKLKISTVHIPDDQKTEFPAATLSSYSQIEKPKISTVIGPNDQKTPSQTAFHSSYSQTVKPNILFQQQLPDRDQSKGILKISAVPELTDVNTGKPVSLSSSYFHREKSNIFSPQELPGSHVTEDVLKVSTIPGPAGQKTVLPTALPSSFSHREKPDIFYQKDLPDRHLTEDALKISSALGQADQITGLQTVPSGTYSHGENHKLVSEHVQRLIDNLNSSDSSVSSNNVLLNSQADDRVVINKPESAGFRDVGSEEIQDAENSAKTLKEIRTLLMEAENMALKRCNFPAPLARFRDISDISFIQSKKVVCFKEPSSTGVSNGDLLHRQPFTEESPSSRCIQKDIGTQTNLKCRRGIENWEFISSTTVRSPLQEAESKVSMALEETLRQYQAAKSVMRSEPEGCSGTIGNKIIIPMMTVIKSDSSSDASDGNGSCSWDSNLPESLESVSDVLLNFFPYVSPKTSITDSREEEGVSESEDGGGSSVDSLAAHVKNLLQCESSLNHAKEILRNAEEEESRVRAHAWNMKFNLAHDCGYSISELNEDDRRKVEEIKAELFGHGRTTDLSKGLQSPRGMGCKPEAVCSHIIIESHEKGCFRTLTSEHPQLDRHPCAFRSAGPSEMTRGRQNPSSCRAKHVNLSASLDQNNSHFKVWNSLQLKSHSPFQNFIPDEFKISKGLRMPFDEKMDPWLSELVEPAFVPPKEVDFHSSSQMPSPEPMKKFTTSITFSSHRHSKCISNSSVVKVGVTEGSQCTGASVGVFNSHFTEEQNPPRDLKQKTSSPSSFKMHSNSQDKEVTILAEGRRQSQKLPVDFERSFQEEKPLERSDFTGSHSEPSTRANCSNFKEIQISDNHTLISMGRPSSTLGVNRSSSRLGVKEKNVTITPDLPSCIFLEQRELFEQSKAPRADDHVRKHHSPSPQHQDYVAPDLPSCIFLEQRELFEQCKAPYVDHQMRENHSPLPQGQDSIASDLPSPISLEQCQSKAPGVDDQMNKHHFPLPQGQDCVVEKNNQHKPKSHISNINVEAKFNTVVSQSAPNHCTLAASASTPPSNRKALSCVHITLCPKTSSKLDSGTLDERFHSLDAASKARMNSEFNFDLHTVSSRSLEPTSKLLTSKPVAQDQESLGFLGPKSSLDFQVVQPSLPDSNTITQDLKTIPSQNSQIVTSRQIQVNISDFEGHSNPEGTPVFADRLPEKMKTPLSAFSEKLSSDAVTQITTESPEKTLFSSEIFINAEDRGHEIIEPGNQKLRKAPVKFASSSSVQQVTFSRGTDGQPLLLPYKPSGSTKMYYVPQLRQIPPSPDSKSDTTVESSHSDASVQVLITGDENLSDKKQQEIHSTRAVTEAAQAKEKESLQKDTADSSAAAAAEHSAQVGDPEMKNLPDTKAITQKEEIHRKKTVPEEAWPNNKESLQINIEESECHSEFENTTRSVFRSAKFYIHHPVHLPSDQDICHESLGKSVFMRHSWKDFFQHHPDKHREHMCLPLPYQNMDKTKTDYTRIKSLSINVNLGNKEVMDTTKSQVRDYPKHNGQISDPQRDQKVTPEQTTQHTVSLNELWNKYRERQRQQRQPELGDRKELSLVDRLDRLAKILQNPITHSLQVSESTHDDSRGERSVKEWSGRQQQRNKLQKKKRFKSLEKSHKNTGELKKSKVLSHHRAGRSNQIKIEQIKFDKYILSKQPGFNYISNTSSDCRPSEESELLTDTTTNILSGTTSTVESDILTQTDREVALHERSSSVSTIDTARLIQAFGHERVCLSPRRIKLYSSITNQQRRYLEKRSKHSKKVLNTGHPLVTSEHTRRRHIQVANHVISSDSISSSASSFLSSNSTFCNKQNVHMLNKGIQAGNLEIVNGAKKHTRDVGITFPTPSSSEAKLEENSDVTSWSEEKREEKMLFTGYPEDRKLKKNKKNSHEGVSWFVPVENVESRSKKENVPNTCGPGISWFEPITKTRPWREPLREQNCQGQHLDGRGYLAGPGREAGRDLLRPFVRATLQESLQFHRPDFISRSGERIKRLKLIVQERKLQSMLQTERDALFNIDRERQGHQNRMCPLPKRVFLAIQKNKPISKKEMIQRSKRIYEQLPEVQKKREEEKRKSEYKSYRLRAQLYKKRVTNQLLGRKVPWD

SEQ ID NO: 43876 - protein, 67 aa, Homo sapiens
MEFVKCLGHPEEFYNLVRFRIGGKRKVMPKMDQTGGSWRARRRIARCWRTSQRSPLSLEIWLRNTKQ

SEQ ID NO: 43877 - protein, 172 aa, Homo sapiens
MKYSCCALVLAVLGTELLGSLCSTVRSPRFRGRIQQERKNIRPNIILVLTDDQDVELGSLQVMNKTRKIMEHGGATFINAFVTTPMCCPSRSSMLTGKYVHNHNVYTNNENCSSPSWQAMHEPRTFAVYLNNTGYRTAFFGKYLNEYNGSYIPPGWREWLGLIKNSRFYNYT

SEQ ID NO: 43878 - protein, 116 aa, Homo sapiens
MGNLEIVLTGHNADLSFLQWIREVTGYVLVAMNEFSTLPLPNLRVVRGTQVYDGKFAIFVMLNYNTNSSHALRQLRLTQLTEILSGGVYIEKNDKLCHMDTIDWRDIVRDRDAEIV

SEQ ID NO: 43879 - protein, 3007 aa, Homo sapiens
GIHNTPLDMMSIVQAKKCQVLVSDIDYRNYLHQWTCLPDQNDVIQAKKAYDLQSDNLYKSDLEWLKGIGWLPEGSVEVMRVKNAQNLLNERLYRIKPEALKFTSIVDTPEVIQAKINAVQISEPLYRDAWEKEKANVNVPADTPLMLQSKINALQISNKRYQQAWEDVKMTGYDLRADAIGIQHAKASRDIASDYLYKTAYEKQKGHYIGCRSAKEDPKLVWAANVLKMQNDRLYKKAYNDHKAKISIPVDMVSISAAKEGQALASDVDYRHYLHRWSCFPDQNDVIQARKAYDLQSDALYKADLEWLRGIGWMPQGSPEVLRVKNAQNIFCDSVYRTPVVNLKYTSIVDTPEVVLAKSNAENISIPKYREVWDKDKTSIHIMPDTPEINLARANALNVSNKLYREGWDEMKAGCDVRLDAIPIQAAKASREIASDYKYKLDHEKQKGHYVGTLTARDDNKIRWALIADKLQNEREYRLDWAKWKAKIQSPVDMLSILHSKNSQALVSDMDYRNYLHQWTCMPDQNDVIQAKKAYELQSDNVYKADLEWLRGIGWMPNDSVSVNHAKHAADIFSEKKYRTKIETLNFTPVDDRVDYVTAKQSGEILDDIKYRKDWNATKSKYTLTETPLLHTAQEAARILDQYLYKEGWERQKATGYILPPDAVPFVHAHHCNDVQSELKYKAEHVKQKGHYVGVPTMRDDPKLVWFEHAGQIQNERLYKEDYHKTKAKINIPADMVSVLAAKQGQTLVSDIDYRNYLHQWMCHPDQNDVIQARKAYDLQSDNVYRADLEWLRGIGWIPLDSVDHVRVTKNQEMMSQIKYKKNALENYPNFRSVVDPPEIVLAKINSVNQSDVKYKETFNKAKGKYTFSPDTPHISHSKDMGKLYSTILYKGAWEGTKAYGYTLDERYIPIVGAKHADLVNSELKYKETYEKQKGHYLAGKVIGEFPGVVHCLDFQKMRSALNYRKHYEDTKANVHIPNDMMNHVLAKRCQYILSDLEYRHYFHQWTSLLEEPNVIRVRNAQEILSDNVYKDDLNWLKGIGCYVWDTPQILHAKKSYDLQSQLQYTAAGKENLQNYNLVTDTPLYVTAVQSGINASEVKYKENYHQIKDKYTTVLETVDYDRTRNLKNLYSSNLYKEAWDRVKATSYILPSSTLSLTHAKNQKHLASHIKYREEYEKFKALYTLPRSVDDDPNTARCLRVGKLNIDRLYRSVYEKNKMKIHIVPDMVEMVTAKDSQKKVSEIDYRLRLHEWICHPDLQVNDHVRKVTDQISDIVYKDDLNWLKGIGCYVWDTPEILHAKHAYDLRDDIKYKAHMLKTRNDYKLVTDTPVYVQAVKSGKQLSDAVYHYDYVHSVRGKVAPTTKTVDLDRALHAYKLQSSNLYKTSLRTLPTGYRLPGDTPHFKHIKDTRYMSSYFKYKEAYEHTKAYGYTLGPKDVPFVHVRRVNNVTSERLYRELYHKLKDKIHTTPDTPEIRQVKKTQEAVSELIYKSDFFKMQGHMISLPYTPQVIHCRYVGDITSDIKYKEDLQVLKGFGCFLYDTPDMVRSRHLRKLWSNYLYTDKARKMRDKYKVVLDTPEYRKVQELKTHLSELVYRAAGKKQKSIFTSVPDTPDLLRAKRGQKLQSQYLYVELATKERPHHHAGNQTTALKHAKDVKDMVSEKKYKIQYEKMKDKYTPVPDTPILIRAKRAYWNASDLRYKETFQKTKGKYHTVKDALDIVYHRKVTDDISKIKYKENYMSQLGIWRSIPDRPEHFHHRAVTDTVSDVKYKEDLTWLKGIGCYAYDTPDFTLAEKNKTLYSKYKYKEVFERTKSDFKYVADSPINRHFKYATQLMNEKKYRADYEQRKDKYHLVVDEPRHLLAKTAGDQISQIKYRKNYEKSKDKFTSIVDTPEHLRTTKVNKQISDILYKLEYNKAKPRGYTTIHDTPMLLHVRKVKDEVSDLKYKEVYQRNKSNCTIEPDAVHIKAAKDAYKVNTNLDYKKQYEANKAHWKWTPDRPDFLQAAKSSLQQSDFEYKLDREFLKGCKLSVTDDKNTVLALRNTLIESDLKYKEKHVKERGTCHAVPDTPQILLAKTVSNLVSENKYKDHVKKHLAQGSYTTLPETRDTVHVKEVTKHVSDTNYKKKFVKEKGKSNYSIMLEPPEVKHAMEVAKKQSDVAYRKDAKENLHYTTVADRPDIKKATQAAKQASEVEYRAKHRKEGSHGLSMLGRPDIEMAKKAAKLSSQVKYRENFDKEKGKTPKYNPKDSQLYKVMKDANNLASEVKYKADLKKLHKPVTDMKESLIMNHVLNTSQLASSYQYKKKYEKSKGHYHTIPDNLEQLHLKEATELQSIVKYKEKYEKERGKPMLDFETPTYITAKESQQMQSGKEYRKDYEESIKGRNLTGLEVTPALLHVKYATKIASEKEYRKDLEESIRGKGLTEMEDTPDMLRAKNATQILNEKEYKRDLELEVKGRGLNAMANETPDFMRARNATDIASQIKYKQSAEMEKANFTSVVDTPEIIHAQQVKNLSSQKKYKEDAEKSMSYYETVLDTPEIQRVRENQKNFSLLQYQCDLKNSKGKITVVQDTPEILRVKENQKNFSSVLYKEDVSPGTAIGKTPEMMRVKQTQDHISSVKYKEAIGQGTPIPDLPEVKRVKETQKHISSVMYKENLGTGIPTTVTPEIERVKRNQENFSSVLYKENMGKGTPLAVTPEMERVKHNQENISSVLYKENVGKATATPVTPEMQRVKRNQENISSVLYSDSFRKQIQGKAAYVLDTPEMRRVRETQRHISTVKYHEDFEKHKGCFTPVVTDPITERVKKNMQDFSDINYRGIQRKVVEMEQKRNDQDQETITGLRVWRTNPGSVFDYDPAEDNIQSRSLHMINVQAQRRSREQSRSASALSISGGEEKSEHSEAPDHHLSTYSDGGVFAVSTAYKHAKTTELPQQRSSSVATQQTTVSSIPSHPSTAGKIFRAMYDYMAADADEVSFKDGDAIINVQAIDEGWMYGTVQRTGRTGMLPANYVEAI

SEQ ID NO: 43880 - protein, 145 aa, Homo sapiens
MAESGGSSGGAGGGGAFGAGPGPERPNSTADKNGALKCTFSAPSHSTSLLQGLATLRAQGQLLDVVLTINREAFPAHKVVLAACSDYFRAMFTGGMREASQDVIELKGVSARGLRHIIDFAYSAEVTLDLDCVQDVAPKTPGTLA

SEQ ID NO: 43881 - protein, 106 aa, Homo sapiens
  MOD_RES (1)..(1): Any amino acid
XAARGGFNVFGDGLVRLDGQLYRLSSYIKRYVELTNYCDYKDYRETILSKPMLFFINVQTKKDTSKERTYAFLVNTRHPKIRRQIEQGMDMVISSVIGESYRLQVQ

SEQ ID NO: 43882 - protein, 795 aa, Homo sapiens
MGRGSGTFERLLDKATSQLLLETDWESILQICDLIRQGDTQAKYAVNSIKKKVNDKNPHVALYALEEGPCPDHWPNPSLPGHLQVMESVVKNCGQTVHDEVANKQTMEELKDLLKRQVEVNVRNKILYLIQAWAHAFRNEPKYKVVQDTYQIMKVEGHVFPEFKESDAMFAAERAPDWVDAEECHRCRVQFGVMTRKHHCRACGQIFCGKCSSKYSTIPKFGIEKEVRVCEPCYEQLNRKAEGKATSTTELPPEYLTSPLSQQSQLPPKRDETALQEEEELQLALALSQSEAEEKERLRQKSTYTSYPKAEPMPSASSAPPASSLYSSPVNSSAPLAEDIDPELARYLNRNYWEKKQEEARKSPTPSAPVPLTEPAAQPGEGHAAPTNVVENPLPETDSQPIPPSGGPFSEPQFHNGESEESHEQFLKALQNAVTTFVNRMKSNHMRGRSITNDSAVLSLFQSINGMHPQLLELLNQLDERRLYYEGLQDKLAQIRDARGALSALREEHREKLRRAAEEAERQRQIQLAQKLEIMRQKKQEYLEVQRQLAIQRLQEQEKERQMRLEQQKQTVQMRAQMPAFPLPYAQLQAMPAAGGVLYQPSGPASFPSTFSPAGSVEGSPMHGVYMSQPAPAAGPYPSMPSTAADPSMVSAYMYPAGATGAQAAPQAQAGPTASPAYSSYQPTPTAGYQNVASQAPQSLPAISQPPQSSTMGYMGSQSVSMGYQPYNMQNLMTTLPSQDASLPPQQPYIAGQQPMYQQMAPSGGPPQQQPPVAQQPQAQGPPAQGSEAQLISFD

SEQ ID NO: 43883 - protein, 122 aa, Homo sapiens
MAASAAETRVFLEVRGQLQSALLILGEPKEGGMPMNISIMPSSLQMKTPEGCTEIQLPAEVRLVPSSCRGLQFVVGDGLHLRLQTQAKLGTKLISMFNQSSQTQECCTFYCQSCGEVIIKDR

SEQ ID NO: 43884 - protein, 182 aa, Homo sapiens
  MOD_RES (1)..(1): Any amino acid
XLAVHPDRITIATGQVAGTSKDGKQLPPHVRIWDSVTLNTLHVIGIGFFDRAVTCIAFSKSCSNEAVFAADFHPTDTNIIVTCGKSHLYFWTLEGSSLNKKQGLFEKQEKPKFVLCVTFSENGDTITGDSSGNILVWGKGTNRISYAVQGAHEGGIFALCMLRDGTLVSGGGKDRKLISWSG

SEQ ID NO: 43885 - protein, 458 aa, Homo sapiens
MESSKLCGLEGSIFRNDWQSKSKIDLQGPEVGYFSQMKIISENVPSYKTHESLTLPRRTHDSEKPYEYKEYEKVFSCDLEFDEYQKIHTGGKNYECNQCWKTFGIDNSSMLQLNIHTGVKPCKYMEYGNTCSFYKDFNVYQKIHNEKFYKCKEYRRTFERVGKVTPLQRVHDGEKHFECSFCGKSFRVHAQLTRHQKIHTDEKTYKCMECGKDFRFHSQLTEHQRIHTGEKPYKCMHCEKVFRISSQLIEHQRIHTGEKPYACKECGKAFGVCRELARHQRIHTGKKPYECKACGKVFRNSSSLTRHQRIHTGEKPYKCKECEKAFGVGSELTRHERIHSGQKPYECKECGKFFRLTSALIQHQRIHSGEKPYECKVCGKAFRHSSALTEHQRIHTGEKPYECKACGKAFRHSSSFTKHQRIHTDDKPYECKECGNSFSVVGHLTCQPKIYTGEKSFD

SEQ ID NO: 43886 - protein, 44 aa, Homo sapiens
MAEDEPDAKSPKTGGRAPPGGAEAGEPTTLLQRLRGTISPCRTK

SEQ ID NO: 43887 - protein, 832 aa, Homo sapiens
MKPPGSSSRQPPLAGCSLAGASCGPQRGPAGSVPASAPARTPPCRLLLVLLLLPPLAASSRPRAWGAAAPSAPHWNETAEKNLGVLADEDNTLQQNSSSNISYSNAMQKEITLPSRLIYYINQDSESPYHVLDTKARHQQKHNKAVHLAQASFQIEAFGSKFILDLILNNGLLSSDYVEIHYENGKPQYSKGGEHCYYHGSIRGVKDSKVALSTCNGLHGMFEDDTFVYMIEPLELVHDEKSTGRPHIIQKTLAGQYSKQMKNLTMERGDQWPFLSELQWLKRRKRAVNPSRGIFEEMKYLELMIVNDHKTYKKHRSSHAHTNNFAKSVVNLVDSIYKEQLNTRVVLVAVETWTEKDQIDITTNPVQMLHEFSKYRQRIKQHADAVHLISRVTFHYKRSSLSYFGGVCSRTRGVGVNEYGLPMAVAQVLSQSLAQNLGIQWEPSSRKPKCDCTESWGGCIMEETGVSHSRKFSKCSILEYRDFLQRGGGACLFNRPTKLFEPTECGNGYVEAGEECDCGFHVECYGLCCKKCSLSNGAHCSDGPCCNNTSCLFQPRGYECRDAVNECDITEYCTGDSGQCPPNLHKQDGYACNQNQGRCYNGECKTRDNQCQYIWGTKAAGSDKFCYEKLNTEGTEKGNCGKDGDRWIQCSKHDVFCGFLLCTNLTRAPRIGQLQGEIIPTSFYHQGRVIDCSGAHVVLDDDTDVGYVEDGTPCGPSMMCLDRKCLQIQALNMSSCPLDSKGKVCSGHGVCSNEATCICDFTWAGTDCSIRDPVRNLHPPKDEGPKVNMATSRLIGAVAGTILALGVIFGGTGWGIENVKKRRFDPTQQGPI

SEQ ID NO: 43888 - protein, 112 aa, Homo sapiens
MEPNSLRTKVPAFLSDLGKATLRGIRKCPRCGTYNGTRGLSCKNKTCGTIFRYGARKQPSVEAVKIITGSDLQVYSVRQRDRGPDYRCFVELGVSETTIQTVDGTIITQLSS

SEQ ID NO: 43889 - protein, 62 aa, Homo sapiens
MRMLVSGRRVKKWQLIIQLFATCFLASLMFFWEPIDNHIVSHMKSYSYRYLINSYDFVNDTL

SEQ ID NO: 43890 - protein, 142 aa, Homo sapiens
MTGGRAQSIGRRGKVEQETDQLEDEKSALQTEIANLLKEKEKLEFILAAHRPACKIPDDLGFPEEMSVASLDLTGGLPEVATPESEEAFTLPLLNDPEPKPSVEPVKSISSMELKTEPFDDFLFPASSRPSGSETARSVPDM

SEQ ID NO: 43891 - protein, 368 aa, Homo sapiens
MRVMAPRALLLLLSGGLALTETWACSHSMRYFDTAVSRPGRGEPRFISVGYVDDTQFVRFDSDAASPRGEPRAPWVEQEGPEYWDRETQNYKRQAQADRVSLRNLRGYYNQSEDGSHTLQRMYGCDLGPDGRLLRGYDQSAYDGKDYIALNEDLRSWTAADTAAQITQRKLEAARAAEQLRAYLEGTCVEWLRRYLENGKETLQRAEPPKTHVTHHPLSDHEATLRCWALGFYPAEITLTWQRDGEDQTQDTELVETRPAGDGTFQKWAAVVVPSGQEQRYTCHMQHEGLQEPLTLSWEPSSQPTIPIMGIVAGLAVLVVLAVLGAVVTAMMCRRKSSAACVGLRCRISSHLSFVTSRASGISFCKGV

SEQ ID NO: 43892 - protein, 698 aa, Homo sapiens
GTSDSLNENETSTDFSFADTNEKDADGILAAGDSEITPGFPQSPTSSVTSENSEVFHVSEAEASNSSHESRIGLAEGLESEKKAVIPLVIVSALTFICLVVLVGILIYWRKCFQTAHFYLEDSTSPRVISTPPTPIFPISDDVGAIPIKHFPKHVADLHASSGFTEEFEEVQSCTVDLGITADSSNHPDNKHKNRYINIVAYDHSRVKLAQLAEKDGKLTDYINANYVDGYNRPKAYIAAQGPLKSTAEDFWRMIWEHNVEVIVMITNLVEKGRRKCDQYWPADGSEEYGNFLVTQKSVQVLAYYTVRNFTLRNTKIKKGSQKGRPSGRVVTQYHYTQWPDMGVPEYSLPVLTFVRKAAYAKRHAVGPVVVHCSAGVGRTGTYIVLDSMLQQIQHEGTVNIFGFLKHIRSQRNYLVQTEEQYVFIHDTLVEAILSKETEVLDSHIHAYVNALLIPGPAGKTKLEKQFQGLTLSPRLECRGTISAHCNLPLPGLTDPPTSASRVARTILLSQSNIQQSDYSAALKQCNREKNRTSSIIPVERSRVGISSLSGEGTDYINASYIMGYYQSNEFIITQHPLLHTIKDFWRMIWDHNAQLVVMIPDGQNMAEDEFVYWPNKDEPINCESFKVTLMAEEHKCLSNEEKLIIQDFILEATQAWRSDGRNFLCSDNPYAPTRKRKFRGCLPGSQDDQSDEARSLC

SEQ ID NO: 43893 - protein, 967 aa, Homo sapiens
MEDEEGPEYGKPDFVLLDQVTMEDFMRNLQLRFEKGRIYTYIGEVLVSVNPYQELPLYGPEAIARYQGRELYERPPHLYAVANAAYKAMKHRSRDTCIVISGESGAGKTEASKHIMQYIAAVTNPSQRAEVERVKDVLLKSTCVLEAFGNARTNRNHNSSRFGKYMDINFDFKGDPIGGHIHSYLLEKSRVLKQHVGERNFHAFYQLLRGSEDKQLHELHLERNPAVYNFTHQGAGLNMTVHSALDSDEQSHQAVTEAMRVIGFSPEEVESVHRILAAILHLGNIEFVETEEGGLQKEGLAVAEEALVDHVAELTATPRDLVLRSLLARTVASGGRELIEKGHTAAEASYARDACAKAVYQRLFEWVVNRINSVMEPRGRDPRRDGKDTVIGVLDIYGFEVFPVNSFEQFCINYCNEKLQQLFIQLILKQEQEEYEREGITWQSVEYFNNATIVDLVERPHRGILAVLDEACSSAGTITDRIFLQTLDMHHRHHLHYTSRQLCPTDKTMEFGRDFRIKHYAGDVTYSVEGFIDKNRDFLFQDFKRLLYNSTDPTLRAMWPDGQQDITEVTKRPLTAGTLFKNSMVALVENLASKEPFYVRCIKPNEDKVAGKLDENHCRHQVAYLGLLENVRVRRAGFASRQPYSRFLLRYKMTCEYTWPNHLLGSDKAAVSALLEQHGLQGDVAFGHSKLFIRSPRTLVTLEQSRARLIPIIVLLLQKAWRGTLARWRCRRLRAIYTIMRWFRRHKVRAHLAELQRRFQAARQPPLYGRDLVWPLPPAVLQPFQDTCHALFCRWRARQLVKNIPPSDMPQIKAKVAAMGALQGLRQDWGCRRAWARDYLSSATDNPTASSLFAQRLKTLQDKDGFGAVLFSSHVRKVNRFHKIRNRALLLTDQHLYKLDPDRQYRVMRAVPLEAVTGLSVTSGGDQLVVLHARGQDDLVVCLHRSRPPLDNRVGELVGVLAAHCQG

SEQ ID NO: 43894 - protein, 344 aa, Homo sapiens
MPEIRVTPLGAGQDVGRSCILVSIAGKNVMLDCGMHMGFNDDRRFPDFSYITQNGRLTDFLDCVIISHFHLDHCGALPYFSEMVGYDGPIYMTHPTQAICPILLEDYRKIAVDKKGEANFFTSQMIKDCMKKVVAVHLHQTVQVRFPGPQLAQSLPTPTPTMPSARSTQFLEGWGLRVSPPHLTLASSTVGTPGGVSARMRVPDQTGRRPGRARAGWGAAWIDKCRPNLLITESTYATTIRDSKRCRERDFLKKVHETVERGGKVLIPVFALGRAQELCILLETFWERMNLKVPIYFSTGLTEKANHYYKLFIPWTNQKIRKTFVQRNMFEFKHIKAFDRAFAD

SEQ ID NO: 43895 - protein, 52 aa, Homo sapiens
MAFSQGLLTFRDVAIEFSQEEWKCLDPAQRTLYRDVMLENYRNLVSLERRIT

SEQ ID NO: 43896 - protein, 81 aa, Homo sapiens
MPSDFISLLSADLDLESPKSLYSRESVYDLLPKELQLPPSRETSVASMSQTSGGEAGSPPPAVVAAGFASEAGSVCIKNDL

SEQ ID NO: 43897 - protein, 177 aa, Homo sapiens
MFVASERKMRAHQVLTFLLLFVITSVASENASTSRGCGLDLLPQYVSLCDLDAIWGIVVEAVAGAGALITLLLMLILLVRLPFIKEKEKKSPVGLHFLFLLGTLGLFGLTFAFIIQEDETICSVRRFLWGVLFALCFSCLLSQAWRVRRLVRHGTGPAGWQLVGLALCLMLVQVIIA

SEQ ID NO: 43898 - protein, 241 aa, Homo sapiens
MTQQPLRGVTSLRFNQDQSCFCCAMETGVRIYNVEPLMEKGHLAVLIWDDAREGKDSKEKLVLEFTFTKPVLSVRMRHDKIVIVLKNRIYVYSFPDNPRKLFEFDTRDNPKGLCDLCPSLEKQLLVFPGHKCGSLQLVDLASTKPGTSSAPFTINAHQSDIACVSLNQPGTVVASASQKGTLIRLFDTQSKEKLVELRRGTDPATLYCINFSHDSSFLCASSDKGTVHIFALKDTRLNRRS

SEQ ID NO: 43899 - protein, 313 aa, Homo sapiens
  MOD_RES (1)..(1): Any amino acid
XLGDVEASEAEDHFFNPRLSISTQFLSSLQKASRFTHTFPPRATQCLVKSPEVKLMDRGGSQPRAGTGYASPDRTHVLAAGKAEETLEAWRPPPPCLTSLASCVPASSVLPTDRNLPTPTSAPTPGLAQGVHAPSTCSYMEATASSRARISRSISLGDSEGPIVATLAQPLRRPSSVGELASLGQELQAITTATTPSLDSEGQEPALRSWGNHEARANLRLTLSSACDGLLQPPVDTQPGVTVPAVSFPAPSPVEESALRLHGSAFRPSLPAPESPGLPAHPSNPQLPEARPGIPGGTASLLEPTSGQPCPLE

SEQ ID NO: 43900 - protein, 192 aa, Homo sapiens
  MOD_RES (1)..(1): Any amino acid
XELRFFPDMIPVSSIYMDSRAGCSKSCEAAQYWSSGFTVLQASIDAAIIQLKTNVSLWKELESTKAVIMGETAVVEIDTFPRGVILIYLVIAFSPFGYFLAIHIVAEKEKKIKEFLKIMGLHDTAFWLSWVLLYTSLIFLMSLLMAVIATASLLFPQSSSIVIFLLFFLYGLSSVSILTCDRNKELSKCLIT

SEQ ID NO: 43901 - protein, 77 aa, Homo sapiens
MSKSFQQSSLSRDSQGHGRDLSAAGIGLLAAATQSLSMPASLGRMNQGTARLASLMNLGMSSSLNQQGAHSALSSAS

SEQ ID NO: 43902 - protein, 15 aa, Homo sapiens
MIIKEYRIPLPMTVE

SEQ ID NO: 43903 - protein, 261 aa, Homo sapiens
MSSTQFNKGPSYGLSAEVKNRLLSKYDPQKEAELRTWIEGLTGLSIGPDFQKGLKDGTILCTLMNKLQPGSVPKINRSMQNWHQLENLSNFIKAMVSYGMNPVDLFEANDLFESGNMTQVQVSLLALAGKAKTKGLQSGVDIGVKYSEKQERNFDDATMKAGQCVIGLQMGTNKCASQSGMTAYGTRRHLYDPKNHILPPMDHSTISLQMGTNKCASQDLTLLSRLECSGTISAHCNLCLPGSRDSPSCLSLPSSWDYRWA

SEQ ID NO: 43904 - protein, 507 aa, Homo sapiens
MGPSRLVRGPRPQGMRSPYRRPGMGWPRPRFPRMFKCSRRRYQQGLRGRTASSAAINPATRAMGINNTHTDTTIVWIFPPQALPPKPPKPMTSAVPNGMKDSSVSLQDAEWYWGDISREEVNDKLRDMPDGTFLVRDASTKMQGDYTLTLRKGGNNKLIKIYHRDGKYGFSDPLTFNSVVELINHYHHESLAQYNPKLDVKLMYPVSRYQQDQLVKEDNIDAVGKKLQEYHSQYQEKSKEYDRLYEEYTRTSQEIQMKRTAIEAFNETIKIFEEQCHTQEQHSKEYIERFRREGNEKEIERIMMNYDKLKSRLGEIHDSKMRLEQDLKNQALDNREIDKKMNSIKPDLIQLRKIRDQHLVWLNHKGVRQKRLNVWLGIKNEDADENYFINEEDENLPHYDEKTWFVEDINRVQAEDLLYGKPDGAFLIRESSKKGCYACSVVADGEVKHCVIYSTARGYGFAEPYNLYSSLKELVLHYQQTSLVQHNDSLNVRLAYPVHAQMPSLCR

SEQ ID NO: 43905 - protein, 142 aa, Homo sapiens
MFKYESLGICRRTHGSAACFSHSVADSPEVAFCQAKLPFLPPTTVTSEAPPTVRIVHSGLACNIEEERYSERVYTIREGETLELTCLVTGHPRPQIRWTKTAGSASDRFQDSSVFNETLRITNIQRHQGGRYYCKAENGLGS

SEQ ID NO: 43906 - protein, 62 aa, Homo sapiens
  MOD_RES (1)..(1): Any amino acid
XSEFLDSLRQYLRGTTGVRNCFQHLQSPLCKAFRHVKVDTLSQPEALSRILVPAAWCTVGRD

SEQ ID NO: 43907 - protein, 216 aa, Homo sapiens
MAAPAPGLISVFSSSQELGAALAQLVAQRAACCLAGARARFALGLSGGSLVSMLARELPAAVAPAGPASLARWTLGFCDERLVPFDHAESTYGLYRMEKLRPEETHLLSRLPIPESQVITINPELPVEEAAEDYAKKLRQAFQGDSIPVFDLLILGVGPDGHTCSLFPDHPLLQEREKIVAPISDSPKPPPQRVTLTLPVLNAARTVIFVATGEGK

SEQ ID NO: 43908 - protein, 51 aa, Homo sapiens
MFRKKKKKRPEISAPQNFQHRVHTSFDPKEGKFVGLPPQWQNILDTLRRPK

SEQ ID NO: 43909 - protein, 212 aa, Homo sapiens
MPNSEPASLLELFNSIATQGELVRSLKAGNASKDEIDSAVKMLVSLKMSYKAAAGEDYKADCPPGNPAPTSNHGPDATEAEEDFVDPWTVQTSSAKGIDYDKLIVRFGSSKIDKELINRIERATGQRPHHFLRRGIFFSHRDMNQVLDAYENKKPFYLYTGRGPSSEAMHVGHLIPFIFTKWLQDVFNVPLVIQMTDDEKYLWKDLTLDQAY

SEQ ID NO: 43910 - protein, 361 aa, Homo sapiens
AELASPLNEADGHRGIIPANTRLHTTLSVSLGNETQTAHTELRISTSNDTIIRAVLIFAEGIFTGESHVVHPSIHNLSSSICIPIVPPKDVPVDLHLKAFVGYRSSTQFHVFESTRQLPRFSMYALTSLDPASEPISYVNFTIAERAQRVVVWLGQNFLLPEDTHIQNAPFQVCFTSLRNGGHLHIKIKLSGEITINTDDIDLAGDIIQSMASFFAIEDLQVEADFPVYFEELRKVLVKVDEYHSVHQKLSADMADHSNLIRSLLVGAEDARLMRDMKTMKSRYMELYDLNRDLLNGYKIRCNNHTELLGNLKAVNQAIQRAGRLRVGKPKNQVITACRDAIRSNNINTLFKIMRVGTASS

SEQ ID NO: 43911 - protein, 265 aa, Homo sapiens
MSRRALRRLRGEQRGQEPLGPGALHFDLRDDDDAEEEGPKRELGVRRPGGAGKEGVRVNNRFELINIDDLEDDPVVNGERSGCALTDAVAPGNKGRGQRGNTESKTDGDDTETVPSEQSHASGKLRKKKKKQKNKKSSTGEASENGLEDIDRILERIEDSTGLNRPGPAPLSSRKHVLYVEHRHLNPDTELKSEEYQQAQHKFLVAVESMEPNNIVLSDACRFQEDQEMARDLVERALYSMECAFHPLFSLTSGACRLDYRRPEN

SEQ ID NO: 43912 - protein, 66 aa, Homo sapiens
MYQPEDDNNSDVTSDDDMTRNRRESSPPHSVHSFSGDRDWDRRGRSRDMEPRDRWSHTRNPRSSES

SEQ ID NO: 43913 - protein, 38 aa, Homo sapiens
MNLGDGLKLETELLDGKTKLILSPYEHKSKISVKADLL

SEQ ID NO: 43914 - protein, 123 aa, Homo sapiens
MPSTVDVATALPLQVAPSAVPMDLRLDHQFSLPVAEPALREQQLQQELLALKQKQQIQRQILIAEFQRQHEQLSRQHEAQLHEHIKQQQEMLAMKHQQELLEHQRKLERHRQEQELEKQHREQ

SEQ ID NO: 43915 - protein, 145 aa, Homo sapiens
MIAKLAKTCTLRISPDKLNFILCDKLANGGVSMWCELEQENFFNEFQMEGVSAENNEIYLELTSENLSRALKTAQNARALKIKLTNKHFPCLTVSVELLSMSSSSRIVTHDIPIKVIPRKLWKDLQEPVVPDPDVSIYLPVLKTM

SEQ ID NO: 43916 - protein, 81 aa, Homo sapiens
MPPKGKSGSGKAGKACQLSLVLAYFVWPKIILPLWPREAERLDTLVVKCLAEFPFEVWRYDGNIHSGCVLDLSVNMEVQFK

SEQ ID NO: 43917 - protein, 375 aa, Homo sapiens [sequence omitted]

SEQ ID NO: 43918 - protein, 368 aa, Homo sapiens
MAPKQKKKTSRGKKRLKPVLAASEDMEPVNMESMGHPEIYPLVLTTKTQEIFNCRIDEDVTDEQPYKLINKEDIFEDLRNRAAVSDFHPVKKIVQEYPGNELLLVYDKDFKYGLNFYLIATEEGKENYLNPPEVPEEQEEYKEHIPEDVYIYKPPVSKPWVSLGSEKEIEEESVTESTKQITYMISRKRSEFGAPIKFSDQNASSVKDAYIECTAYPDKNFTLKQLEKDVGMQVIPQIKDISTQTKWTYPKNATTQYYPREFSEEEKETLKQSKPLVDFLNNASISVEIALQQNEIMNTFIDDWKYLAEEEGTFGDKTDTHLKEYQSFTDLHSPTEKMITCVSWHPTIYGTCHVLSTPSLSCVLPTTL

SEQ ID NO: 43919 - protein, 171 aa, Homo sapiens
MANETQKVGAIHFPFPFTPYSIQEDFMAELYRVLEAGKIGIFESPTGTGKSLSLICGALSWLRDFEQKKREEEARLLETGTGPLHDEKDESLCLSSSCEGAAGTPRPAGEPAWVTQFVQKKEERDLVDRLKAEQARRKQREERLQQLQHRVQLKYAAKRLKLGCEWLRRGS

SEQ ID NO: 43920 - protein, 66 aa, Homo sapiens
  MOD_RES (1)..(1): Any amino acid
XYGAIQGPPGQKGEMGTPGPKGDRGPAGPPGHPGPPGPRGHKGEKGDKGDQVYAGRRRRRSIAVKP

SEQ ID NO: 43921 - protein, 170 aa, Homo sapiens
MARVRARSWEGGSRRSRPAARASSKAPARLSRPRAREEPPDPGRRYIQEEIIQARKHKLIKMCSSVAAKLWFLTDRRIREDYPQKEILRALKAKCCEEELDFRAVVMDEVVLTIEQGNLGLRINGELITAYPQVVVVRVPTPWVQSDSDITVLRHLEKMGCRLMNRPQAI

SEQ ID NO: 43922 - protein, 1069 aa, Homo sapiens
LIAVFEEQEPLHKIESPSGNPADRQSPDAFETEVAAQLAAFKPIGGEIEVTPSALKLGTPLLVRRSSDPVPGPPADTQPSASHPGGQSLKLVVPDSTQNLEDREVLNGVQTELLTSPRTKDTLSDMTRTVEISGEGGPLGIHVVPFFSSLSGRILGLFIRGIEDNSRSKREGLFHENECIVKINNVDLVDKTFAQAQDVFRQAMKSPSVLLHVLPPQNREQYEKSVIGSLNIFGNNDGVLKTKVPPPVHGKSGLKTANLTGTDSPETDASASLQQNKSPRVPRLGGKPSSPSLSPLMGFGSNKNAKKIKIDLKKGPEGLGFTVVTRDSSIHGPGPIFVKNILPKGAAIKDGRLQSGDRILEVNGRDVTGRTQEELVAMLRSTKQGETASLVIARQEGHFLPRELDGRLRMNDQLIAVNGESLLGKSNHEAMETLRRSMSMEGNIRGMIQLVILRRPERPMEDPAECGAFSKPCFENCQNAVTTSRRNDNSILHPLGTCSPQDKQKGLLLPNDGWAESEVPPSPTPHSALGLGLEDYSHSSGVDSAVYFPDQHINFRSVTPARQPESINLKASKSMDLVPDESKVHSLAGQKSESPSKDFGPTLGLKKSSSLESLQTAVAEVRKNDLPFHRPRPHMVRGRGCNESFRAAIDKSYDGPEEIEADGLSDKSSHSGQGALNCESAPQGNSELEDMENKARKVKKTKEKEKKKEKGKLKVKEKKRKEENEDPERKIKKKGFGAMLRFGKKKEDKGGKAEQKGTLKHGGLREEELEKMKEERERIGAKHQELREKQARGLLDYATGAIGSVYDMDDDEMDPNYARVNHFREPCTSANVFRSPSPPRAGPFGYPRDGHPLSPERDHLEGLYAKVNKPYHPLVPADSGRPTGGSTDRIQKLRKEYYQARREGFPLYEDDEGRARPSEYDLLWVPGRGPDGNAHNLRFEGMERQYASLPRGGPADPVDYLPAAPRGLYKERELPYYPGAHPMHPPKGSYPRPTELRVADLRYPQHYPPPPAPQHKGPFRQDVPPSPPQHQRMPAYQETGRPGPRGGSPDQYPYRTQDSRQKNPMTAAV

SEQ ID NO: 43923 - protein, 71 aa, Homo sapiens
MSSSGLNSEKVAALIQKLNSDPQFVLAQNVGTTHDLLDICLKRATVQRAQHVFQHAVPQEGKPITNQKSSG

SEQ ID NO: 43924 - protein, 74 aa, Homo sapiens
  MOD_RES (1)..(1): Any amino acid
XAAPAVSGLSRQVRCFSTSVVRPFAKLVRPPVQVYGIEGRYATALYSAASKQNKLEQVEKELLRVAICLLKMVD

SEQ ID NO: 43925 - protein, 160 aa, Homo sapiens
MSKSVPAFLQDEVSGSVMSVYSGDFGNLEVKGNIQFAIEYVESLKELHVFVAQCKDLAAADVKKQRSDPYVKAYLLPDKGKMGKKKTLVVKKTLNPVYNEILRYKIEKQILKTQKLNLSIWHRDTFKRNSFLGEVELDLETWDWDNKQNKQLRWYPLKRK

SEQ ID NO: 43926 - protein, 129 aa, Homo sapiens
MCQLGLLQKPHVYEFASDIAPFLCHPNLWIRYGAVGFITVVARQISTADVYCKLMPYLDPYITQPIIQIERKLVLLSVLKEPVSRSIFDYALRSKDITSLFRHLHMRQKKRNGSLPDCPPPEDPAIAQL

SEQ ID NO: 43927 - protein, 877 aa, Homo sapiens [sequence omitted]

SEQ ID NO: 43928 - protein, 109 aa, Homo sapiens
MTTPNKTPPGADPKQLERTGTVREIGSQAVWSLSSCKPGFGVDQLRDDNLETYWQSDGSQPHLVNIQFRRKTTVKTLCIYADYKSDESYTPSKISVRVGNNFHNLQEIR

SEQ ID NO: 43929 - protein, 166 aa, Homo sapiens
MKLKEVDRTAMQAWSPAQNHPIYLATGTSAQQLDATFSTNASLEIFELDLSDPSLDMKSCATFSSSHRYHKLIWGPYKMDSKGDVSGVLIAGGENGNIILYDPSKIIAGDKEVVIAQNDKHTGPVRALDVNIFQTNLVASGANESEIYIWDLNNFATPMTPGAKTQ

SEQ ID NO: 43930 - protein, 186 aa, Homo sapiens
VAKTKQQIEEQRVQVQVVERAQQVAVQEQEIARREKELEARVRKPAEAERYKLERLAEAEKSQLIMQAEAEAASVRMRGEAEAFAIGARARAEAEQMAKKAEAFQLYQEAAQLDMLLEKLPQVAEEISGPLTSANKITLVSSGSGTMGAAKVTGEVLDILTRLPESVERLTGVSISQVNHKPLRTA

SEQ ID NO: 43931 - protein, 211 aa, Homo sapiens
MSLLMISENVKLAREYALLGNYDSAMVYYQGVLDQMNKYLYSVKDTYLQQKWQQVWQEINVEAKHVKDIMKTLESFKLDSTPLKAAQHDLPASEGEVWSMPVPVERRPSPGPRKRQSSQYSDPKSHGNRPSTTVRVHRSSAQNVHNDRGKAVRCREKKEQNKGREEKNKSPAAVTEPETNKFDSTGYDKDLVEALERDIISQNPNVRWDDI

SEQ ID NO: 43932 - protein, 454 aa, Homo sapiens
  MOD_RES (1)..(1): Any amino acid
XTGGRIVEGLKFPNEFDELEIQGKLPDPVKEYGCAPWPMVEKLIKQCLKENPQERPTSAQVFDILNSAELVCLTRRILLPKNVIVECMVATHHNSRNASIWLGCGHTDRGQLSFLDLNTEGYTSEEVADSRILCLALVHLPVEKESWIVSGTQSGTLLVINTEDGKKRHTLEKMTDSVTCLYCNSFSKQSKQKNFLLVGTADGKLAIFEDKTVKLKGAAPLKILNIGNVSTPLMCLSESTNSTERNVMWGGCGTKIFSFSNDFTIQKLIETRTSQLFSYAAFSDSNIITVVVDTALYIAKQNSPVVEVWDKKTEKLCGLIDCVHFLREVMVKENKESKHKMSYSGRVKTLCLQKNTALWIGTGGGHILLLDLSTRRLIRVIYNFCNSVRVMMTAQLGSLKNVMLVLGYNRKNTEEIQSCLTVWDINLPHEVQNLEKHIEVRKELAEKMRRTSVE

SEQ ID NO: 43933 - protein, 575 aa, Homo sapiens
MASATEDPVLERYFKGHKAAITSLDLSPNGKQLGAGRARELGSRRLSDLQKNTEDLSRPLYKKPPADSRALGEWGKASKLQLNEDELKQQEELIERYAINIYLSDRISLHRHIEDKRMYECKSQKFNYRTLPTTSVIIAFYNEAWSTLLRTIHSVLETSPAVLLKEIILVDDLSDRVYLKTQLETYISNLDRVRLIRTNKREGLVRARLIGATFATGDVLTFLDCHCECNSGWLEPLLERIGRDETAVVCPVIDTIDWNTFEFYMQIGEPMIGGFDWRLTFQWHSVPKQERDRRISRIDPIRSPTMAGGLFAVSKKYFQYLGTYDTGMEVWGGENLELSFRVWQCGGKLEIHPCSHVGHVFPKRAPYARPNFLQNTARAAEVWMDEYKEHFYNRNPPARKEAYGDISERKLLRERLRCKSFDWYLKNVFPNLHVPEDRPGWHGAIRSRGISSECLDYNSPDNNPTGANLSLFGCHGQGGNQFFEYTSNKEIRFNSVTELCAEVPEQKNYVGMQNCPKDGFPVPANIIWHFKEDGTIFHPHSGLCLSAYRTPEGRPDVQMRTCDALDKNQIWSFEK

SEQ ID NO: 43934 - protein, 926 aa, Homo sapiens
IMLLTDPEIESSLLISSDEGATYQKYRLNFYIQSLLFHPKQEDWILAYSQDQKLYSSAEFGRRWQLIQEGVVPNRFYWSVMGSNKEPDLVHLEARTVDGHSHYLTCRMQNCTEANRNQPFPGYIDPDSLIVQDHYVFVQLTSGGRPHYYVSYRRNAFAQMKLPKYALPKDMHVISTDENQVFAAVQEWNQNDTYNLYISDTRGVYFTLALENVQSSRGPEGNIMIDLYEVAGIKGMFLANKKIDNQVKTFITYNKGRDWRLLQAPDTDLRGDPVHCLLPYCSLHLHLKVSENPYTSGIIASKDTAPSIIVASGNIGSELSDTDISMFVSSDAGNTWRQIFEEEHSVLYLDQGGVLVAMKHTSLPIRHLWLSFDEGRSWSKYSFTSIPLFVDGVLGEPGEETLIMTVFGHFSHRSEWQLVKVDYKSIFDRRCAEEDYRPWQLHSQGEACIMGAKRIYKKRKSERKCMQGKYAGAMESEPCVCTEADFDCDYGYERHSNGQCLPAFWFNPSSLSKDCSLGQSYLNSTGYRKVVSNNCTDGVREQYTAKPQKCPGKAPRGLRIVTADGKLTAEQGHNVTLMVQLEEGDVQRTLIQVDFGDGIAVSYVNLSSMEDGIKHVYQNVGIFRVTVQVDNSLGSDSAVLYLHVTCPLEHVHLSLPFVTTKNKEVNATAVLWPSQVGTLTYVWWYGNNTEPLITLEGSISFRFTSEGMNTITVQVSAGNAILQDTKTIAVYEEFRSLRLSFSPNLDDYNPDIPEWRRDIGRVIKKSLVEATGVPGQHILVAVLPGLPTTAELFVLPYQDPAGENKRSTDDLEQISELLIHTLNQNSVHFELKPGVRVLVHAAHLTAAPLVDLTPTHSGSAMLMLLSVVFVGLAVFVIYKFKRRVALPSPPSPSTQPGDSSLRLQRARHATPPSTPKRGSAGAQYAI

SEQ ID NO: 43935 - protein, 305 aa, Homo sapiens
MAHCVTLVQLSISCDHLIDKDIGSKSDPLCVLLQDVGGGSWAELGRTERVRNCSSPEFSKTLQLEYRFETVQKLRFGIYDIDNKTPELRDDDFLGGAECSLGQIVSSQVLTLPLMLKPGKPAGRGTITDFLGKSDPFLEFFRQGDGKWHLVYRSEVIKNNLNPTWKRFSVPVQHFCGGNPSTPIQVQCSDYDSDGSHDLIGTFHTSLAQLQAVPAEFECIHPEKQQKKKSYKNSGTIRVKICRVETEYSFLDYVMGGCQINFTVGVDFTGSNGDPSSPDSLHYLSPTGVNEYLMALWSVGSVVQD

SEQ ID NO: 43936 - protein, 53 aa, Homo sapiens
MSVLDALWEDRDVRFDLSAQQMKTRPGEVLIDCLDSIEDTKGNNGDREITRPN

SEQ ID NO: 43937 - protein, 484 aa, Homo sapiens
MFSALKKLVGSDQAPGRDKNIPAGLQSMNQALQRRFAKGVQYNMKIVIRGDRNTGKTALWHRLQGRPFVEEYIPTQEIQVTSIHWSYKTTDDIVKVEVWDVVDKGKCKKRGDGLKMENDPQEAESEMALDAEFLDVYKNCNGVVMMFDITKQWTFNYILRELPKVPTHVPVCVLGNYRDMGEHRVILPDDVRDFIDNLDRPPGSSYFRYAESSMKNSFGLKYLHKFFNIPFLQLQRETLLRQLETNQLDMDATLEELSVQQETEDQNYGIFLEMMEARSRGHASPLAANGQSPSPGSQSPVVPAGAVSTGSSSPGTPQPAPQLPLNAAPPSSVPPVPPSEALPPPACPSAPAPRRSIISRLFGTSPATEAAPPPPEPVPAAEGPATVQSVEDFVPDDRLDRSFLEDTTPARDEKKVRRSAAAPGPLLRWSRGRVSRPPRRRVTPRDPLLHKCCPSSWMTPTLRARDQTHSAGRMTFPCEMTPPM

SEQ ID NO: 43938 - protein, 52 aa, Homo sapiens
NNNLERALDWIFSHPEFEEDSDFVIEMENNANANIISEAKPEGPRVKDGSGT

SEQ ID NO: 43939 - protein, 940 aa, Homo sapiens
MDSTLTASEIRQRFIDFFKRNEHTYVHSSATIPLDDPTLLFANAGMNQFKPIFLNTIDPSHPMAKLSRAANTQKCIRAGGKHNDLDDVGKDVYHHTFFEMLGSWSFGDYFKELACKMALELLTQEFGIPIERLYVTYFGGDEAAGLEADLECKQIWQNLGEIHYDRIGGRDAAHLVNQDDPNVLEIWNLVFIQYNREADGILKPLPKKSIDTGMGLERLVSVLQNKMSNYDTDLFVPYFEAIQKGTGARPYTGKVGAEDADGIDMAYRVLADHARTITVALADGGRPDNTGRGYVLRRILRRAVRYAHEKLNASRGFFATLVDVVVQSLGDAFPELKKDPDMVKDIINEEEVQFLKTLSRGRRILDRKIQSLGDSKTIPGDTAWLLYDTYGFPVDLTGLIAEEKGLVVDMDGFEEERKLAQLKSQGKGAGGEDLIMLDIYAIEELRARGLEVTDDSPKYNYHLDSSGSYVFENTVATVMALRREKMFVEEVSTGQECGVVLDKTCFYAEQGGQIYDEGYLVKVDDSSEDKTEFTVKNAQVRGGYVLHIGTIYGDLKVGDQVWLFIDEPRRRPIMSNHTATHILNFALRSVLGEADQKGSLVAPDRLRFDFTAKGAMSTQQIKKAEEIANEMIEAAKAVYTQDCPLAAAKAIQGLRAVFDETYPDPVRVVSIGVPVSELLDDPSGPAGSLTSVEFCGGTHLRNSSHAGAFVIVTEEAIAKGIRRIVAVTGAEAQKALRKAESLKKCLSVMEAKVKAQTAPNKDVQREIADLGEALATAVIPQWQKDELRETLKSLKKVMDDLDRASKADVQKRVLEKTKQFIDSNPNQPLVILEMESGASAKALNEALKLFKMHSPQTSAMLFTVDNEAGKITCLCQVPQNAANRGLKASEWVQQVSGLMDGKGGGKDVSAQATGKNVGCLQEALQLATSFAQLRLGDVKN

SEQ ID NO: 43940 - protein, 68 aa, Homo sapiens
  MOD_RES (1)..(1): Any amino acid
XRKKAAATGLPEGPAVPVPSRGNLAQPGGSSWRRIALLILAITIHNVPGRVCFTFCHDCKFPEASPAV

SEQ ID NO: 43941 - protein, 19 aa, Homo sapiens
  MOD_RES (1)..(1): Any amino acid
XNTGNQFYFGTGTSLTVIP

SEQ ID NO: 43942 - protein, 1537 aa, Homo sapiens
TELHFPSLAGDITQKGYEKKRSKLIGAYLPQPPRVDQALPQERRAPVTPSSASRYHRRRSSGSRDERYRSDVHTEAVQAALAKHKERKMAVPMPSKRRSLVVQTSMDAYTPPDTSSGSEDEGSVQGDSQGTPTSSQGSINMEHWISQAIHGSTTSTTSSSSTQSGGSGAAHRLADVMAQTHIENHSAPPDVTTYTSEHSIQVERPQGSTGSRTAPKYGNAELMETGDGVPVSSRVSAKIQQLVNTLKRPKRPPLREFFVDDFEELLEVQQPDPNQPKPEGAQMLAMRGEQLGVVTNWPPSLEAALQRWGTISPKAPCLTTMDTNGKPLYILTYGKLWTRSMKVAYSILHKLGTKQEPMVRPGDRVALVFPNNDPAAFMAAFYGCLLAEVVPVPIEVPLTRKDAGSQQIGFLLGSCGVTVALTSDACHKGLPKSPTGEIPQFKGWPKLLWFVTESKHLSKPPRDWFPHIKDANNDTAYIEYKTCKDGSVLGVTVTRTALLTHCQALTQACGYTEAETIVNVLDFKKDVGLWHGILTSVMNMMHVISIPYSLMKVNPLSWIQKVCQYKAKVACVKSRDMHWALVAHRDQRDINLSSLRMLIVADGANPWSISSCDAFLNVFQSKGLRQEVICPCASSPEALTVAIRRPTDDSNQPPGRGVLSMHGLTYGVIRVDSEEKLSVLTVQDVGLVMPGAIMCSVKPDGVPQLCRTDEIGELCVCAVATGTSYYGLSGMTKNTFEVFPMTSSGAPISEYPFIRTGLLGFVGPGGLVFVVGKMDGLMVVSGRRHNADDIVATALAVEPMKFVYRGRIAVFSVTVLHDERIVIVAEQRPDSTEEDSFQWMSRVLQAIDSIHQVGVYCLALVPANTLPKTPLGGIHLSETKQLFLEGSLHPCNVLMCPHTCVTNLPKPRQKQPEIGPASVMVGNLVSGKRIAQASGRDLGQIEDNDQARKFLFLSEVLQWRAQTTPDHILYTLLNCRGAIANSLTCVQLHKRAEKIAVMLMERGHLQDGDHVALVYPPGIDLIAAFYGCLYAGCVPITVRPPHPQNIATTLPTVKMIVEVSRSACLMTTQLICKLLRSREAAAAVDVRTWPLILDTDDLPKKRPAQICKPCNPDTLAYLDFSVSTTGMLAGVKMSHAATSAFCRSIKLQCELYPSREVAICLDPYCGLGFVLWCLCSVYSGHQSILIPPSELETNPALWLLAVSQYKVRDTFCSYSVMELCTKGLGSQTESLKARGLDLSRVRTCVVVAEERPRIALTQSFSKLFKDLGLHPRAVSTSFGCRVNLAICLQGTSGPDPTTVYVDMRALRHDRVRLVERGSPHSLPLMESGKILPGVRIIIANPETKGPLGDSHLGEIWVHSAHNASGYFTIYGDESLQSDHFNSRLSFGDTQTIWARTGYLGFLRRTELTDANGERHDALYVVGALDEAMELRGMRYHPIDIETSVIRAHKSVTECAVFTWTNLLVVVVELDGSEQEALDLVPLVTNVVLEEHYLIVGVVVVVDIGVIPINSRGEKQRMHLRDGFLADQLDPIYVAYNM

SEQ ID NO: 43943 - protein, 39 aa, Homo sapiens
  MOD_RES (1)..(1): Any amino acid
XCHIFLTRFKKPAEFTTVSSYKMGVTMSTYSIVWTKGDG

SEQ ID NO: 43944 - protein, 25 aa, Homo sapiens
MVLYLVWAFIPESWLNSLGLTYWPQ

SEQ ID NO: 43945 - protein, 153 aa, Homo sapiens
MAENSESLGTVPEHERILQEIESTDTACVGPTLRSVYDDQPNAHKKFMEKLDACIRNHDKEIEKMCNFHHQGFVDAITELLKVRTDAEKLKVQVTDTNRRFQDAGKEVIVHTEDIIRCRIQQRNITTVVEKLQLCLPVLEMYSKLKEQMSAKR

SEQ ID NO: 43946 - protein, 210 aa, Homo sapiens
MTVVGNPRSWSCQWLPILILLLGTGHGPGVEGVTHYKAGDPVILYVNKVGPYHNPQETYHYYQLPVCCPEKIRHKSLSLGEVLDGDRMAESLYEIRFRENVEKRILCHMQLSSAQVEQLRQAIEELYYFEFVVDDLPIRGFVGYMEESGFLPHSHKIGLWTHLDFHLEFHGDRIIFANVSVRDVKPHSLDGLRPDEFLGLTHTYSVRWSE

SEQ ID NO: 43947 - protein, 96 aa, Homo sapiens
MADSQLFCVAEERSGHCAVVDGNFLYVWGGYVSIEDNEVYLPNDEIWTYDIDSGLWRMHLMEGELPASMSGSCGACINGKLYIFGGYDDKGYSNRR

SEQ ID NO: 43948 - protein, 135 aa, Homo sapiens
LDAMLQEGKGPINFTVFLTLFGEKLNGTDPEEAILSAFRMFDPSGKGVVNKDEFKQLLLTQADKFSPAEVRLPSPFNTHPQHLLWAFTHDPEPSTSEAVAGRVEQMFALTPMDLAGNIDYKSLCYIITHGDEKEE

SEQ ID NO: 43949 - protein, 64 aa, Homo sapiens
MDTGVIEGGLNVTLTIRLLMHGKEVGSIIGKKGESVKKMREESGARINISEGNCPERIITLAGP

SEQ ID NO: 43950 - protein, 57 aa, Homo sapiens
MALVLGSLLLLGLCGNSFSGGQPSSTDAPKAWNYELPATNYETQDSHKAGPIGILFE

SEQ ID NO: 43951 - protein, 132 aa, Homo sapiens
MLLVQTEADVNPKAYPLADAHLTKKLLDLVQQSCNYKQLRKGANEATKTLNRGISEFIVMAADAEPLEIILHLPLLCEDKNVPYVFVRSKQALGRACGVSRPVIACSVTIKEGSQLKQQIQSIQQSIERLLV

SEQ ID NO: 43952 - protein, 35 aa, Homo sapiens
  MOD_RES (1)..(1): Any amino acid
XLAVALLPWTCASRALQHLDPPAPLPLVIWHGMGE

SEQ ID NO: 43953 - protein, 199 aa, Homo sapiens
  MOD_RES (1)..(1): Any amino acid
XINFLRKLVQNGPEVHPGANFIQQRHTQMKRFLKYGNREKMAQELKYGDIVERHLIDGDVVLFNRQPSLHKLSIMAHLARVKPHRTFRFNECVCTPYNADFDGDEMNLHLPQTEEAKAEALVLMGTKANLVTPRNGEPLIAAIQDFLTGAYLLTLKDTFFDRAKACQIIASILVGKDEKIKVRLPPPTILKMLQSRTVS

SEQ ID NO: 43954 - protein, 150 aa, Homo sapiens
MATALVSAHSLAPLNLKKEGLRVVREDHYSTWEQGFKLQGNSKGLGQEPLCKQFRQLRYEETTGPREALSRLRELCQQWLQPETHTKEQILELLVLEQFLIILPKELQARVQEHHPESREDVVVVLEDLQLDLGETGQQDPDQPKKQKIL

SEQ ID NO: 43955 - protein, 352 aa, Homo sapiens
KAEVGHGYMDRPCLNPADPDCPATAPNKNSTKPLDMALVLNGGCHGLSRKYMHWQEELIVGGTVKNSTGKLVSAHALQTMFQLMTPKQMYEHFKGYEYVSHINWNEDKAAAILEAWQRTYVEVVHQSVAQNSTQKVLSFTTTTLDDILKSFSDVSVIRVASGYLLMVLPFLALGVGVDDVFLLAHAFSETGQNKRIPFEDRTGECLKRTGASVALTSISNVTAFFMAALIPIPALRAFSLQAAVVVVFNFAMVLLIFPAILSMDLYRREDRRLDIFCCFTSPCVSRVIQVEPQAYTDTHDNTRYSPPPPYSSHSFAHETQITMQSTVQLRTEYDPHTHVYYTTAEPRSEISV

SEQ ID NO: 43956 - protein, 308 aa, Homo sapiens
MPNVAETERSNDSGNGEHKSERKSPEENLQGAVKSFCTSASGAPLGPKGDGHYPWSCPVTHTREKIYAICSDYAFLNQATSIYKTPNPSRSPCLPDSTSLSAGNNSSRYIGIPTSTSEIIYNEENSLENLSNSLGKLPLAWEIDKSEFDGVTTNSKHKSGNAKKQVSKRKTSDKKGRYQKECPQHSPLEDIKQRKVLDLRRWYCISRPQYKTSCGISSLISCWNFLYSTMGAGNLPPITQEEALHILGFQPPFEDIRFGPFTGNTTLMRWFRQINDHFHVKGCSYVLYKPHGKNKTAGETDGQILLLI

SEQ ID NO: 43957 - protein, 52 aa, Homo sapiens
MRRPRRPGGLGGSGGLRLLLCLLLLSSRPGGCSAVSAHGSGEGHGVHVGRGT

SEQ ID NO: 43958 - protein, 180 aa, Homo sapiens
  MOD_RES (1)..(1): Any amino acid
XPTTALLDKVADNLAIQLAAVTEDKYEILQSVDDAAIVIKNTKEPPLSLTIHLTSPVVREEMEKVLAGETLSVNDPPDVLDRQKCLAALASLRHAKWFQARANGLKSCVIVIRVLRDLCTRVPTWGPLRGWPLELLCEKSIGTANRPMGAGEALRRVLECLASGIVMPARTAARCLRPAP

SEQ ID NO: 43959 - protein, 203 aa, Homo sapiens
  MOD_RES (1)..(1): Any amino acid
XNDLKAALDKIDQQYLNEIVGGQEPGEEDTQNDLKVHEENTTIEELEALGESLGKGDDHKDMDIITKFLKFLLGVWAKELNAREDYVKRSVQGKLNSATQKQTESYLRPLFRKLRKRNLPADIKESITDIIKFMLQREYVKANDAYLQMAIGNAPWPIGVTMVGIHARTGREKIFSKHVAHVLNDETQRKYIQDLNVYDTLSS

SEQ ID NO: 43960 - protein, 29 aa, Homo sapiens
MAETSEEVAVLVQRVVKDITNAFRRNPHM

SEQ ID NO: 43961 - protein, 112 aa, Homo sapiens
MFVLLYVTSFAICASGQPRGNQLKGENYSPRYICSIPGLPGPPGPPGANGSPGPHGRIGLPGRDGRDGRKGEKGEKGTAGLRGKTGPLGLAGEKGDQGETGKKGPIGPEGEK

SEQ ID NO: 43962 - protein, 184 aa, Homo sapiens
MTETRREGRERAREGERQVGRGRIGGKSPDTNYLFMGDYVDRGYYSVETVTLLVALKVRYPERITILRGNHESRQITQVYGFYDECLRKYGNANVWKYFTDLFDYLPLTALVDGQIFCLHGGLSPSIDTLDHIRALDRLQEVPHEGPMCDLLWSDPDDRGGWGISPRGAGYTFGQDISETFNHA

SEQ ID NO: 43963 - protein, 928 aa, Homo sapiens
KKEELELKCEQCEQRLGRAGKLINGLSDEKVRWQETVENLQYMLNNISGDVLVAAGFVAYLGPFTGQYRTVLYDSWVKQLRSHNVPHTSEPTLIGTLGNPVKIRSWQIAGLPNDTLSVENGVINQFSQRWTHFIDPQSQANKWIKNMEKDNGLDVFKLSDRDFLRSMENAIRFGKPCLLENVGEELDPALEPVLLKQTYKQQGNTVLKLGDTVIPYHEDFRMYITTKLPNPHYTPEISTKLTLINFTLSPSGLEDQLLGQVVAEERPDLEEAKNQLIISNAKMRQELKDIEDQILYRLSSSEGNPVDDMELIKVLEASKMKAAEIQAKVRIAEQTEKDIDLTRMEYIPVAIRTQILFFCVSDLANVDPMYQYSLEWFLNIFLSGIANSERADNLKKRISNINRYLTYSLYSNVCRSLFEKHKLMFAFLLCVRIMMNEGKINQSEWRYLLSGGSISIMTENPAPDWLSDRAWRDILALSNLPTFSSFSSDFVKHLSEFRVIFDSLEPHREPLPGIWDQYLDQFQKLLVLRCLRGDKVTNAMQDFVATNLEPRFIEPQTANLSVVFKDSNSTTPLIFVLSPGTDPAADLYKFAEEMKFSKKLSAISLGQGQGPRAEAMMRSSIERGKWVFFQNCHLAPSWMPALERLIEHINPDKVHRDFRLWLTSLPSNKFPVSILQNGSKMTIEPPRGVRANLLKSYSSLGEDFLNSCHKVMEFKSLLLSLCLFHGNALERRKFGPLGFNIPYEFTDGDLRICISQLKMFLDEYDDIPYKVLKYTAGEINYGGRVTDDWDRRCIMNILEDFYNPDVLSPEHSYSASGIYHQIPPTYDLHGYLSYIKSLPLNDMPEIFGLHDNANITFAQNETFALLGTIIQLQPKSSSAGSQGREEVQSAAAGDHTDTARPTQGTQGAGSDVLSAGADGCQPVQQYCA

SEQ ID NO: 43964 - protein, 151 aa, Homo sapiens
MQESQETHISNHLDEVVAAVSITHRKKFQNKLLQTALFQPPREKLHLCEEKAKSYSNSHEYKQAVHELVRCVALTRICYGDSHWKLAEAHVNLAQGYLQLKGLSLQAKQHAEKARQILANSIVPPYSENTDVFKFSIELFHTMGRALLSLQ

SEQ ID NO: 43965 - protein, 454 aa, Homo sapiens
LDFFRVVENQQPPATMPLNVSFTNRNYDLDYDSVQPYFYCDEEENFYQQQQQSELQPPAPSEDIWKKFELLPTPPLSPSRRSGLCSPSYVAVTPFSLRGDNDGGGGSFSTADQLEMVTELLGGDMVNQSFICDPDDETFIKNIIIQDCMWSGFSAAAKLVSEKLASYQAARKDSGSPNPARGHSVCSTSSLYLQDLSAAASECIDPSVVFPYPLNDSSSPKSCASQDSSAFSPSSDSLLSSTESSPQGSPEPLVLHEETPPTTSSDSEEEQEDEEEIDVVSVEKRQAPGKRSESGSPSAGGHSKPPHSPLVLKRCHVSTHQHNYAAPPSTRKDYPAAKRVKLDSVRVLRQISNNRKCTSPRSSDTEENVKRRTHNVLERQRRNELKRSFFALRDQIPELENNEKAPKVVILKKATAYILSVQAEEQKLISEEDLLRKRREQLKHKLEQLRNSCA

SEQ ID NO: 43966 - protein, 240 aa, Homo sapiens
MMGIFLVYVGFVFFSVLYVQQGLSSQAKFTEFPRNVTATEGQNVEMSCAFQSGSASVYLEIQWWFLRGPEDLDPGAEGAGAQVELLPDRDPDSDGTKISTVKVQGNDISHKLQISKVRKKDEGLYECRVTDANYGELQEHKAQAYLKVNANSHARRMQAFEASPMWLQDMKPRKNVSAAIPSSIHGSANQRTHSTSSPQVVAKIPKQSPQSAKSKSPVKSTERTAKLTLNSKHHPAPTVL

SEQ ID NO: 43967 - protein, 15 aa, Homo sapiens
MVQKYQSPVRVYKYP

SEQ ID NO: 43968 - protein, 195 aa, Homo sapiens
MPGFDYKFLEKPKRRLLCPLCGKPMREPVQVSTCGHRFCDTCLQEFLSEGVFKCPEDQLPLDYAKIYPDPELEVQVLGLPIRCIHSEEGCRWSGPLRHLQGHLNTCSFNVIPCPNRCPMKLSRRDLPAHLQHDCPKRRLKCEFCGCDFSGEAYESSLGFGYPKFISHQDIRKRNYVRDDAVFIRAAVELPRKILS

SEQ ID NO: 43969 - protein, 143 aa, Homo sapiens
HHPISDHEATLRCWALGFYPAEITLTWQRDGEEQTQDTELVETRPAGDGTFQKWAAVVVPPGEEQRYTCHVQHEGLPQPLILRWEQSPQPTIPIVGIVAGLVVLGAVVTGAVVAAVMWRKKSSDRNRGSYSQAAGKLTHTGVQ

SEQ ID NO: 43970 - protein, 32 aa, Homo sapiens
MGSSQSVEIPGGGTEGYHVLRVQENSPGHRAE

SEQ ID NO: 43971 - protein, 112 aa, Homo sapiens
HNCMRTKSRDPLAIYFTSGTTGAPKMVEHSQSSYGLGFVASGRRWVALTESDIFWNTTDTGWVKAAWTLFSAWPNGSCIFVHELPRVDAKVILNVPVSEPEALSDRRRGPQP

SEQ ID NO: 43972 - protein, 139 aa, Homo sapiens
DHCQAQAAAGLGDGEDAPVRPLCKPRGICSRAYFLVLMVFVHLYLGNVLALLLFVHYSNGDESSDPGPQHRAQGPGPEPTLGPLTRLEGIKVGHERKVQLVTDRDHFIRTLSLKPLLFASPVSPAATAPAPSLPSVPWP

SEQ ID NO: 43973 - protein, 234 aa, Homo sapiens
MACPQLPPLLLLVLVVLLKAGVNYNTPFTDIVTSENSMETSPVSSLISSPFAHSTHSSGEPPKSYSSTMSLETDSITHLSPSSSGATPTIQPSPSSTDSRMIPSSPQPETITHPSSGSPSAELTPSSHSTLPSSESLTPHWSPTSHSPGTEPLTSTDQTLEPPGPAPGDTGPRELHRNPSVVVVVCLLVSLLLIGSVVMAVRFCHRNESKFENLDEVSMGSVNDRLSFAHHLQE

SEQ ID NO: 43974 - protein, 46 aa, Homo sapiens
  MOD_RES (1)..(1): Any amino acid
XISSCLKVQEQMANCPKFVPVVPTSQPIPSNIPNRVLALARCHLQS

SEQ ID NO: 43975 - protein, 42 aa, Homo sapiens
MTELPAPLSYFQNAQMSEDNHLSNTVRSQRRVLAILARLISN

SEQ ID NO: 43976 - protein, 73 aa, Homo sapiens
MVQKKPAELQGFHRSFKGQNPFELAFSLDQPDHGDSDFGLQCSARPGEGPEGEEGTGQLLSLPWQWPAPAGGW

SEQ ID NO: 43977 - protein, 222 aa, Homo sapiens
MLILTKTAGVFFKPSKRKVYEFLRSFNFHPGTLFLHKIVLGIETSCDDTAAAVVDETGNVLGEAIHSQTEVHLKTGGIVPPAAQQLHRENIQRIVQEALSASGVSPSDLSAIATTIKPGLALSLGVGLSFSLQLVGQLKKPFIPIHHMEAHALTIRLTNKVEFPFLVLLISGGHCLLALVQGVSDFLLLGKSLDIAPGDMLDKVARRLSLIKHPECSTMSGG

SEQ ID NO: 43978 - protein, 511 aa, Homo sapiens
MAERAALEELVKLQGERVRGLKQQKASAELIEEEVAKLLKLKAQLGPDESKQKFVLKTPKGTRDYSPRQMAVREKVFDVIIRCFKRHGAEVIDTPVFELKETLMGKYGEDSKLIYDLKDQGGELLSLRYDLTVPFARYLAMNKLTNIKRYHIAKVYRRDNPAMTRGRYREFYQCDFDIAGNFDPMIPDAECLKIMCEILSSLQIGDFLVKVNDRRILDGMFAICGVSDSKFRTICSSVDKLDKVSWEEVKNEMVGEKGLAPEVADRIGDYVQQHGGVSLVEQLLQDPKLSQNKQALEGLGDLKLLFEYLTLFGIDDKISFDLSLARGLDYYTGVIYEAVLLQTPAQAGEEPLGVGSVAAGGRYDGLVGMFDPKGRKVPCVGLSIGVERIFSIVEQRLEALEEKIRTTETQVLVASAQKKLLEERLKLVSELWDAGIKAELLYKKNPKLLNQLQYCEEAGIPLVAIIGEQELKDGVIKLRSVTSREEVREVGRKAKGQRMYAILAGPCPFKT

SEQ ID NO: 43979 - protein, 43 aa, Homo sapiens
  MOD_RES (1)..(1): Any amino acid
XALALLNSKQNTGKSLYCQAITTHSKSDLLVYSSKWKSSLSKI

SEQ ID NO: 43980 - protein, 74 aa, Homo sapiens
MSPVDDTFISGSLDKTIRLWDLRSPNCQGLMHLQGKPVCSFDPEGLIFAAGVNSEMVKLYDLRSFDKGPFATFK

SEQ ID NO: 43981 - protein, 129 aa, Homo sapiens
MQKIVQTDEITNTQAFRKGKRKRTETMDSENANSDMDKGQRDPYSGNAFLPGESSSEDEEPLAELSKEELCAKIKSLKEKLTNTRKENSRLRQSLVMLQGNKLDITTEKTILHGGMKTLNVVTTSSHPV

SEQ ID NO: 43982 - protein, 270 aa, Homo sapiens
LLAALRRGGREPPTGGSRLASSSEVLASIENIIQDIITSLARNEAPAFTIDNRSSWENIKFEDSVGLQMVSHCTTRKIKSDSPKSAQKFSLILKILSMIYKLVQSNTYATKRDIYYTDSQLFGNQTVVDNIINDISCMLKVSRRSLHILSTSKGLIAGNLRYIEEDGTKVNCTCGATAVAVPSNIQGIRITDAKFVLIVEKDATFQRLLDDNFCNKLSPCIMITGKGVPDLNTRLLVKKLWDTFHVPVFTLVDADPHGIEIMCIYKYGSM

SEQ ID NO: 43983 - protein, 378 aa, Homo sapiens
MFNSVNLGNFCSPSRKERGADFGERGSCASNLYLPSCTYYMPEFSTVSSFLPQAPSRQISYPYSAQVPPVREVSYGLEPSGKWHHRNSYSSCYAAADELMHRECLPPSTVTEILMKNEGSYGGHHHPSAPHATPAGFYSSVNKNSVLPQAFDRFFDNAYCGGGDPPAEPPCSGKGEAKGEPEAPPASGLASRAEAGAEAEAEEENTNPSSSGSAHSVAKEPAKGAAPSRRPPHPQEALPLFEIPDPGTGARVFLQRVYQQREAAAAVPDAEPDGPTSENLVSEQKDERKETEQRPAAVFLGKSSAVTCRPGPFGGGGRGKLFYFIFIFYFLTRLLSAGGKLDCGQGWPPPLWPALHSGTSWTLYLTLAVGQGPGLERG

SEQ ID NO: 43984 - protein, 142 aa, Homo sapiens
MKLFGFGSRRGQTAQGSIDHVYTGSGYRIRDSELQKIHRAAVKGDAAEVERCLARRSGDLDALDKQHRLSIARKRLVPLFCWNMAPIQTLRISTATLLSIMPCIVRAPHWQKNCFPMVHILKHWTRYRSINFLSKIFVLTLT

SEQ ID NO: 43985 - protein, 46 aa, Homo sapiens
MAESGGSSGGAGGGGAFGAGPGPERPNRTVLGLWIASHGLGSRPWR

SEQ ID NO: 43986 - protein, 2263 aa, Homo sapiens
MACWPQLRLLLWKNLTFRRRQTCQLLLEVAWPLFIFLILISVRLSYPPYEQHECHFPNKAMPSAGTLPWVQGIICNANNPCFRYPTPGEAPGVVGNFNKSIVARLFSDARRLLLYSQKDTSMKDMRKVLRTLQQIKKSSSNLKLQDFLVDNETFSGFLYHNLSLPKSTVDKMLRADVILHKVFLQGYQLHLTSLCNGSKSEEMIQLGDQEVSELCGLPREKLAAAERVLRSNMDILKPILRTLNSTSPFPSKELAEATKTLLHSLGTLAQELFSMRSWSDMRQEVMFLTNVNSSSSSTQIYQAVSRIVCGHPEGGGLKIKSLNWYEDNNYKALFGGNGTEEDAETFYDNSTTPYCNDLMKNLESSPLSRIIWKALKPLLVGKILYTPDTPATRQVMAEVNKTFQELAVFHDLEGMWEELSPKIWTFMENSQEMDLVRMLLDSRDNDHFWEQQLDGLDWTAQDIVAFLAKHPEDVQSSNGSVYTWREAFNETNQAIRTISRFMECVNLNKLEPIATEVWLINKSMELLDERKFWAGIVFTGITPGSIELPHHVKYKIRMDIDNVERTNKIKDGYWDPGPRADPFEDMRYVWGGFAYLQDVVEQAIIRVLTGTEKKTGVYMQQMPYPCYVDDIFLRVMSRSMPLFMTLAWIYSVAVIIKGIVYEKEARLKETMRIMGLDNSILWFSWFISSLIPLLVSAGLLVVILKLGNLLPYSDPSVVFVFLSVFAVVTILQCFLISTLFSRANLAAACGGIIYFTLYLPYVLCVAWQDYVGFTLKIFASLLSPVAFGFGCEYFALFEEQGIGVQWDNLFESPVEEDGFNLTTSVSMMLFDTFLYGVMTWYIEAVFPGQYGIPRPWYFPCTKSYWFGEESDEKSHPGSNQKRISEICMEEEPTHLKLGVSIQNLVKVYRDGMKVAVDGLALNFYEGQITSFLGHNGAGKTTTMSILTGLFPPTSGTAYILGKDIRSEMSTIRQNLGVCPQHNVLFDMLTVEEHIWFYARLKGLSEKHVKAEMEQMALDVGLPSSKLKSKTSQLSGGMQRKLSVALAFVGGSKVVILDEPTAGVDPYSRRGIWELLLKYRQGRTIILSTHHMDEADVLGDRIAIISHGKLCCVGSSLFLKNQLGTGYYLTLVKKDVESSLSSCRNSSSTVSYLKKVVPELPPAGQSGGRGGEVQRLVALTQDVSAISNLIRKHVSEARLVEDIGHELTYVLPYEAAKEGAFVELFHEIDDRLSDLGISSYGISETTLEEIFLKVAEESGVDAETSDGTLPARRNRRAFGDKQSCLRPFTEDDAADPNDSDIDPESRETDLLSGMDGKGSYQVKGWKLTQQQFVALLWKRLLIARRSRKGFFAQIVLPAVFVCIALVFSLIVPPFGKYPSLELQPWMYNEQYTFVSNDAPEDTGTLELLNALTKDPGFGTRCMEGNPIPDTPCQAGEEEWTTAPVPQTIMDLFQNGNWTMQNPSPACQCSSDKIKKMLPVCPPGAGGLPPPQRKQNTADILQDLTGRNISDYLVKTYVQIIAKSLKNKIWVNEFRYGGFSLGVSNTQALPPSQEVNDAIKQMKKHLKLAKDSSADRFLNSLGRFMTGLDTKNNVKVWFNNKGWHAISSFLNVINNAILRANLQKGENPSHYGITAFNHPLNLTKQQLSEVALMTTSVDVLVSICVIFAMSFVPASFVVFLIQERVSKAKHLQFISGVKPVIYWLSNFVWDMCNYVVPATLVIIIFICFQQKSYVSSTNLPVLALLLLLYGWSITPLMYPASFVFKIPSTAYVVLTSVNLFIGINGSVATFVLELFTDNKLNNINDILKSVFLIFPHFCLGRGLIDMVKNQAMADALERFGENRFVSPLSWDLVGRNLFAMAVEGVVFFLITVLIQYRFFIRPRPVNAKLSPLNDEDEDVRRERQRILDGGGQNDILEIKELTKIYRRKRKPAVDRICVGIPPGECFGLLGVNGAGKSSTFKMLTGDTTVTRGDAFLNKNSILSNIHEVHQNMGYCPQFDAITELLTGREHVEFFALLRGVPEKEVGKVGEWAIRKLGLVKYGEKYAGNYSGGNKRKLSTAMALIGGPPVVFLDEPTTGMDPKARRFLWNCALSVVKEGRSVVLTSHSMEECEALCTRMAIMVNGRFRCLGSVQHLKNRFGDGYTIVVRIAGSNPDLKPVQDFFGLAFPGSVLKEKHRNMLQYQLPSSLSSLARIFSILSQSKKRLHIEDYSVSQTTLDQVFVNFAKDQSDDDHLKDLSLHKNQTVVDVAVLTSFLQDEKVKESYV

SEQ ID NO: 43987 - protein, 75 aa, Homo sapiens
MKSVIPSDGPSVACVKKASYLDCIRAIAANEADAVTLDAGLVYDAYLAPNNLKPVVAEFYGSKEDPQTFYYAVAV

SEQ ID NO: 43988 - protein, 181 aa, Homo sapiens
MSQSNRELVVDFLSYKLSQKGYSWSQFSDVEENRTEAPEGTESEMETPSAINGNPSWHLADSPAVNGATGHSSSLDAREVIPMAAVKQALREAGDEFELRYRRAFSDLTSQLHITPGTAYQSFEQVVNELFRDGVNWGRIVAFFSFGGALCVESVDKEMQVLVSRIAAWMATYLNDHLEPW

SEQ ID NO: 43989 - protein, 559 aa, Homo sapiens
MVSANNMPKQVEVRMHDSHLGSEEPKHRHLGLRLCDKLGKNLLLTLTVFGVILGAVCGGLLRLASPIHPDVVMLIAFPGDILMRMLKMLILPLIISSLITGLSGLDAKASGRLGTRAMVYYMSTTIIAAVLGVILVLAIHPGNPKLKKQLGPGKKNDEVSSLDAFLDLIRNLFPENLVQACFQQIQTVTKKVLVAPPPDEEANATSAVVSLLNETVTEVPEETKMVIKKGLEFKDGMNVLGLIGFFIAFGIAMGKMGDQAKLMVDFFNILNEIVMKLVIMIMWYSPLGIACLICGKIIAIKDLEVVARQLGMYMVTVIIGLIIHGGIFLPLIYFVVTRKNPFSFFAGIFQAWITALGTASSAGTLPVTFRCLEENLGIDKRVTRFVLPVGATINMDGTALYEAVAAIFIAQMNGVVLDGGQIVTVSLTATLASVGAASIPSAGLVTMLLILTAVGLPTEDISLLVAVDWLLDRMRTSVNVVGDSFGAGIVYHLSKSELDTIDSQHRVHEDIEMTKTQSIYDDMKNHRESNSNQCVYAAHNSVIVDECKSLHYVEYQSWV

SEQ ID NO: 43990 - protein, 52 aa, Homo sapiens
MATYLEFIQQNEERDGVRFSWNVWPSSRLEATRMVVPLACLLTPLKERPDLP

SEQ ID NO: 43991 - protein, 15 aa, Homo sapiens
MSEQEAQAPGGRGLP

SEQ ID NO: 43992 - protein, 115 aa, Homo sapiens
  MOD_RES (1)..(1): Any amino acid
XLNIILILAILREHRVDDSGRQCKSINFEEASTDEAQVPQGNIDQVAVVAINVLFFVTLFIFALFETIITPLTMDMYAWTQEQAVLYNGIILAALGVEAVVIFLGVKLLSKKFAQ

SEQ ID NO: 43993 - protein, 110 aa, Homo sapiens [sequence omitted]

SEQ ID NO: 43994 - protein, 908 aa, Homo sapiens
  MOD_RES (1)..(1): Any amino acid
XMDSSYAKRDAFTDSAISAKVNGEHKEKDLEPWDAGELTANEELEALENDVSNGWDPNDMFRYNEENYGVVSTYDSSLSSYTVPLERDNSEEFLKREARANQLAEEIESSAQYKARVALENDDRSEEEKYTAVQRNSSEREGHSINTRENKYIPPGQRNREVISWGSGRQNSPRMGQPGSGSMPSRSTSHTSDFNPNSGSDQRVVNGVFILSFISFVLSGVPWPSPCPSPSSRPPSRYQSGPNSLPPRAATPTRPPSRPPSRPSRPPSHPSAHGSPAPVSTMPKRMSSEGPPRMSPKAQRHPRNHRVSAGRGSISSGLEFVSHNPPSEAATPPVARTSPSGGTWSSVVSGAASPTPASPASNRAVTPSSEAKDSRLQDQRQNSPAGNKENIKPNETSPSFSKAENKGISPVVSEHRKQIDDLKKFKNDFRLQPSSTSESMDQLLNKNREGEKSRDLIKDKIEPSAKDSFIENSSSNCTSGSSKPNSPSISPSILSNTEHKRGPEVTSQGVQTSSPACKQEKDDKEEKKDAAEQVRKSTLNPNAKEFNPRSFSQPKPSTTPTSPRPQAQPSPSMVGHQQPTPVYTQPVCFAPNMMYPVPVSPGVQPLYPIPMTPMPVNQAKTYRAVPNMPQQRQDQHHQSAMMHPASAAGPPIAATPPAYSTQYVAYSPQQFPNQPLVQHVPHYQSQHPHVYSPVIQGNARMMAPPTHAQPGLVSSSATQYGAHEQTHAMYACPKLPYNKETSPSFYFAISTGSLAQQYAHPNATLHPHTPHPQPSATPTGQQQSQHGGSHPAPSPVQHHQHQAAQALHLASPQQQSAIYHAGLAPTPPSMTPASNTQSPQNSFPAAQQTVFTIHPSHVQPAYTNPPHMAHVPQYKPTTNSSCKAALEEPKGQIPSSLLLLLPTGSTEN

SEQ ID NO: 43995 - protein, 42 aa, Homo sapiens
MFIFIKHGDNQQFLVNTNCAVVVLLYYIRSKTPSICVNKRGK

SEQ ID NO: 43996 - protein, 191 aa, Homo sapiens
MWLMSEAHGAEPVLLREAARPFTQTLRLCVPSGNSKNKVVTVDGVRVKLQIWDTAGQERFRSVTHAYYRDAQALLLLYDITNKSSFDNIRAWLTEIHEYAQRDVVIMLLGNKADMSSERVIRSEDGETLAREYGVPFLETSAKTGMNVELAFLAIAKELKYRAGHQADEPSFQIRDYVESQKKRSSCCSFM

SEQ ID NO: 43997 - protein, 276 aa, Homo sapiens
LLLLLLGAAEGARVSSSLSTTHHVHHFHSKHGTVPIAINRMPFLTRGGHAGTTYIFGKGGALITYTWPPNDRPSTRMDRLAVGFSTHQRSAVLVRVDSASGLGDYLQLHIDQGTVGVIFNVGTDDITIDEPNAIVSDGKYHVVRFTRSGGNATLQVDSWPVNERYPAGRQLTIFNSQAAIKIGGRDQGRPFQGQVSGLYYNGLKVLALAAESDPNVRTEGHLRLVGEGPSVLLSAETTATTLLADMATTIMETTTTMATTTTRRGRSPTLRDSTTQ

SEQ ID NO: 43998 - protein, 43 aa, Homo sapiens
  MOD_RES (1)..(1): Any amino acid
XLAYGSVITVKNLRMAIGYLHSHRHLYPEGIGARQQQKAGWNF

SEQ ID NO: 43999 - protein, 106 aa, Homo sapiens
  MOD_RES (1)..(1): Any amino acid
XRGTPAITSSMEAAGAIRTATALRRPACSAASAVCSLPGQQENPPLPLGSKVVVLAGLFVMVLILFLGASMVYLIRVARRNQERALRTVWSSGDDKEQLVKNTYVL

SEQ ID NO: 44000 - protein, 412 aa, Homo sapiens
  MOD_RES (1)..(1): Any amino acid
XYWERLLLGSGSGQASVSLRLTSPLRPPEGVRLREKTLTEHALLGRQPRTPERQKPCAQEVPGRTFGSAQDLEAAGGRGHHRMGAVWQEPHRLLGGQEPSTWDELGEALHAGEKSFECRACSKVFVKSSDLLKHLRTHTGERPYECAQCGKAFSQTSHLTQHQRIHSGETPYACPVCGKAFRHSSSLVRHQRIHTAEKSFRCSECGKAFSHGSNLSQHRKIHAGGRPYACAQCGRRFCRNSHLIQHERTHTGEKPFVCALCGAAFSQGSSLFKHQRVHTGEKPFACPQCGRAFSHSSNLTQHQLLHTGERPFRCVDCGKAFAKGAVLLSHRRIHTGEKPFVCTQCGRAFRERPALFHHQRIHTGEKTVRRSRASLHPQARSVAGASSEGAPAKETEPTPASGPAAVSQPAEV

SEQ ID NO: 44001 - protein, 135 aa, Homo sapiens
MGSLSTANVEFCLDVFKELNSNNIGDNIFFSSLSLLYALSMVLLGARGETEEQLEKVLHFSHTVDSLKPGFKDSPKCSQAGRIHSEFGVEFSQINQPDSNCTLSIANRLYGTKTMAFHQEKSQISLERAQLTLHL

SEQ ID NO: 44002 - protein, 198 aa, Homo sapiens
  MOD_RES (1)..(1): Any amino acid
XPAASSPSSNNTAATTAAIVPGSQLMPSKSPSTGTTEISSHESSHGTPSQTTAKNWELTASASHQPPGVYPQGHSDTTVAISTSTVLLCGLSAVSLLACYLKSSSQRKVTYLRLSVNYKAPPGVGDVYREDTSVWAPPNDPVSSCAARTDREPEKVEEMLSPVNPLHRRIQEEENSSQRHFTYICIYTSLSVISTHYI

SEQ ID NO: 44003 - protein, 260 aa, Homo sapiens
MEALSRAGQEMSLAALKQHDPYITSIADLTGQEKTDIEGTLFVYRRSASPYHGFTIVNRLNMHNLVEPVNKDLEFQLHEPFLLYRNASLSIYSIWFYDKNDCHRIAKLMADVVEEETRRSQQAARDKQSPSQANGCSDHRPIDILEMLSRAKDEYERNQMGDSNISSPGLQPSTQLSNLGSTETLEEMPSGSQDKSAPSGHKHLTVEELFGTSLPKEQPAVVGLDSEEMERLPGDASQKEPNSFLPFPFEQLGGAPQSET

SEQ ID NO: 44004 - protein, 48 aa, Homo sapiens
MAETVWSTDTGEAVYRSRDPVRNLRLRWTPPRGRRRGGDCDWVAGEAL

SEQ ID NO: 44005 - protein, 184 aa, Homo sapiens
  MOD_RES (1)..(1): Any amino acid
XIHELHFMDELVKVEAHDAEVLCLEYSKPETGLTLLASASRDRLIHVLNVEKNYNLEQTLDDHSSSITAIKFAGNRDIQMISCGADKSIYFRSAQQGSDGLHFVRTHHVAEKTTLYDMDIDITQKYVAVACQDRNVRVYNTVNGKQKKCYKGSQGDEGSLLKLRVHLAPGPGDHQLHEAALAGD

SEQ ID NO: 44006 - protein, 168 aa, Homo sapiens
MRDVSAAPEKEEEEAEGPLRAQDLRESYIQLVQGVQEWQDGCMYQGEFGLNMKLGYGKFSWPTGESYHGQFYRDHCHGLGTYMWPDGSSFTGTFYLSHREGYGTMYMKTRLFQTHCHNDIVNLLLDCGADVNKCSDEGLTALSMCFLLHYPAQSFKPNVAERTIPEPQ

SEQ ID NO: 44007 - protein, 30 aa, Homo sapiens
SLLQVATFKGWMDIMYAAVDSRNPLSGSKT

SEQ ID NO: 44008 - protein, 115 aa, Homo sapiens
  MOD_RES (1)..(1): Any amino acid
XKVLLSGATFLVTFGNSEKPETMTCRLSNNQRYLFLDGDSHYEIEIVHISTVQILTEGFPPGEKDIHAYTSLRGSQPASEGQPLPPHRGSPHAAGPFLPSPPGFCPRGGPCQGSL

SEQ ID NO: 44009 - protein, 4983 aa, Homo sapiens
MDLAPDRATGRPWLPLHTLSVSQLLRVFWLLSLLPGQAWVHGAEPRQVFQVLEEQPPGTLVGTIQTRPGFTYRLSESHALFAINSSTGALYTTSTIDRESLPSDVINLVVLSSAPTYPTEVRVLVRDLNDNAPVFPDPSIVVTFKEDSSSGRQVILDTATDSDIGSNGVDHRSYRIIRGNEAGRFRLDITLNPSGEGAFLHLVSKGGLDREVTPQYQLLVEVEDKGEPKRRGYLQVNVTVQDINDNPPVFGSSHYQAGVPEDAVVGSSVLQVAAADADEGTNADIRYRLQDEGTPFQMDPETGLITVREPLDFEARRQYSLTVQAMDRGVPSLTGRAEALIQLLDVNDNDPVVKFRYFPATSRYASVDENAQVGTVVALLTVTDADSPAANGNISVQILGGNEQRHFEVQSSKVPNLSLIKVASALDRERIPSYNLTVSVSDNYGAPPGAAVQARSSVASLVIFVNDINDHPPVFSQQVYRVNLSEEAPPGSYVSGISATDGDSGLNANLRYSIVSGNGLGWFHISEHSGLVTTGSSGGLDRELASQIVLNISARDQGVHPKVSYAQLVVTLLDVNDEKPVFSQPEGYDVSVVENAPTGTELLMLRATDGDLGDNGTVRFSLQEAETDRRSFRLDPVSGRLSTISSLDREEQAFYSLLVLATDLGSPPQSSMARINVSLLDINDNSPVFYPVQYFAHIKENEPGGSYITTVSATDPDLGTNGTVKYSISAGDRSRFQVNAQSGVISTRMALDREEKTAYQLQIVATDGGNLQSPNQAIVTITVLDTQDNPPVFSQVAYSFVVFENVALGYHVGSVSASTMDLNSNISYLITTGDQKGMFAINQVTGQLTTANVIDREEQSFYQLKVVASGGTVTGDTMVNITVKDLNDNSPHFLQAIESVNVVENWQAGHSIFQAKAVDPDEGVNGMVLYSLKQNPKNLFAINEKNGTISLLGPLDVHAGSYQIEILASDMGVPQLSSSVILTVYVHDVNDNSPVFDQLSYEVTLSESEPVNSRFFKVQASDKDSGANGEIAYTIAEGNTGDAFGIFPDGQLYIKSELDRELQDRYVLMVVASDRAVEPLSATVNVTVILEDVNDNRPLFNSTNYTFYFEEEQRAGSFVGKVSAVDKDFGPNGEVRYSFEMVQPDFELHAISGEITNTHQFDRESLMRRRGTAVFSFTVIATDQGIPQPLKDQATVHVYMKDINDNAPKFLKDFYQATISESAANLTQVLRVSASDVDEGNNGLIHYSIIKGNEERQFAIDSTSGQVTLIGKLDYEATPAYSLVIQAVDSGTIPLNSTCTLNIDILDENDNTPSFPKSTLFVDVLENMRIGELVSSVTATDSDSGDNADLYYSITGTNNHGTFSISPNTGSIFLAKKLDFETQSLYKLNITAKDQGRPPRSSTMSVVIHVRDFNDNPPSFPPGDIFKSIVENIPIGTSVISVTAHDPDADINGQLSYTIIQQMPRGNHFTIDEVKGTIYTNAEIDREFANLFELTVKANDQAVPIETRRYALKNVTILVTDLNDNVPMFISQNALAADPSAVIGSVLTTIMAADPDEGANGEIEYEIINGDTDTFIVDRYSGDLRVASALVPSQLIYNLIVSATDLGPERRKSTTELTIILQGLDGPVFTQPKYITILKEGEPIGTNVISIEAASPRGSEAPVEYYIVSVRCEEKTVGRLFTIGRHTGIIQTAAILDREQGACLYLVDVYAIEKSTAFPRTQRAEVEITLQDINDNPPVFPTDMLDLTVEENIGDGSKIMQLTAMDADEGANALVTYTIISGADDSFRIDPESGDLIATRRLDRERRSKYSLLVRADDGLQSSDMRINITVSDVNDHTPKFSRPVYSFDIPEDTIPGSLVAAILATDDDSGVNGEITYIVNEDDEDGIFFLNPITGVFNLTRLLDYEVQQYYILTVRAEDGGGQFTTIRVYFNILDVNDNPPIFSLNSYSTSLMENLPVGSTVLVFNVTDADDGINSQLTYSIASGDSLGQFTVDKNGVLKVLKALDRESQSFYNLVVQVHDLPQIPASRFTSTAQVSIILLDVNDNPPTFLSPKLTYIPENTPIDTVVFKAQATDPDSGPNSYIEYTLLNPLGNKFSIGTIDGEVRLTGELDREEVSNYTLTVVATDKGQPSLSSSTEVVVMVLDINDNNPIFAQALYKVEINENTLTGTDIIQVFAADGDEGTNGQVRYGIVNGNTNQEFRIDSVTGAITVAKPLDREKTPTYHLTVQATDRGSTPRTDTSTVSIVLLDINDFVPVFELSPYSVNVPENLGTLPRTILQVVARDDDRGSNSKLSYVLFGGNEDNAFTLSASGELGVTQSLDRETKERFVLMITATDSGSPALTGTGTINVIVDDVNDNVPTFASKAYFTTIPEDAPTGTDVLLVNASDADASKNAVISYRIIGGNSQFTINPSTGQIITSALLDRETKDNYTLVVVCSDAGSPEPLSSSTSVLVTVTDVNDNPPRFQHHPYVTHIPSPTLPGSFVFAVTVTDADIGPNSELHYSLSGRNSEKFHIDPLRGAIMAAGPLNGASEVTFSVHVKDGGSFPKTDSTTVTVRFVNKADFPKVRAKEQTFMFPENQPVSSLVTTITGSSLRGEPMSYYIASGNLGNTFQIDQLTGQVSISQPLDFEKIQKYVVWIEARDGGFPPFSSYEKLDITVLDVNDNAPIFKEDPFISEILENLSPRKILTVSAMDKDSGPNGQLDYEIVNGNMENSFSINHATGEIRSVRPLDREKVSHYVLTIKSSDKGSPSQSTSVKVMINILDENDNAPRFSQIFSAHVPENSPLGYTVTRVTTSDEDIGINAISRYSIMDASLPFTINPSTGDIVISRPLNREDTDRYRIRVSAHDSGWTVSTDVTIFVTDINDNAPRFSRTSYYLDCPELTEIGSKVTQVFATDPDEGSNGQVFYFIKSQSEYFRINATTGEIFNKQILKYQNVTGFSNVNINRHSFIVTSSDRGKPSLISETTVTINIVDSNDNAPQFLKSKYFTPVTKNVKVGTKLIRVTAIDDKDFGLNSEVEYFISNDNHLGKFKLDNDTGWISVASSLISDLNQNFFITVTAKDKGNPPLSSQATVHITVTEENYHTPEFSQSHMSATIPESHSIGSIVRTVSARDRDAAMNGLIKYSISSGNEEGIFAINSSTGILTLAKALDYELCQKHEMTISAIDGGWVARTGYCSVTVNVIDVNDNSPVFLSDDYFPTVLENAPSGTTVIHLNATDADSGTNAVIAYTVQSSDSDLFVIDPNTGVITTQGFLDFETKQSYHLTVKAFNVPDEERCSFATVNIQLKGTNEYVPRFVSKLYYFEISEAAPKGTIVGEVFASDRDLGTDGEVHYLIFGNSRKKGFQINKKTGQIYVSGILDREKEERVSLKVLAKNFGSIRGADIDEVTVNVTVLDANDPPIFTLNIYSVQISEGVPIGTHVTFVSAFDSDSIPSWSRFSYFIGSGNENGAFSINPQTGQITVTAELDRETLPIYNLSVLAVDSGTPSATGSASLLVTLEDINDNGPMLTVSEGEVMENKRPGTLVMTLQSTDPDLPPNQGPFTYYLLSTGPATSYFSLSTAGVLSTTREIDREQIADFYLSVVTKDSGVPQMSSTGTVHITVIDQNDNPSQSRTVEIFVNYYGNLFPGGILGSVKPQDPDVLDSFHCSLTSGVTSLFSIPGGTCDLNSQPRSTDGTFDLTVLSNDGVHSTVTSNIRVFFAGFSNATVDNSILLRLGVPTVKDFLTNHYLHFLRIASSQLTGLGTAVQLYSAYEENNRTFLLAAVKRNHNQYVNPSGVATFFESIKEILLRQSGVKVESVDHDSCVHGPCQNGGSCLRRLAVSSVLKSRESLPVIIVANEPLQPFLCKCLPGYAGSWCEIDIDECLPSPCHSGGTCHNLVGGFSCSCPDGFTGRACERDINECLQSPCKNGAICQNFPGSFNCVCKTGYTGKMCESSVNYCECNPCFNGGSCQSGVDSYYCHCPFGVFGKHCELNSYGFEELSYMEFPSLDPNNNYIYVKFATIKSHALLLYNYDNQTGDRAEFLALEIAEERLRFSYNLGSGTYKLTTMKKVSDGHFHTVIARRAGMAASLTVDSCSENQEPGYCTVSNVAVSDDWTLDVQPNRVTVGGIRSLEPILQRRGHVESHDFVGCIMEFAVNGRPLEPSQALAAQGILDQCPRLEGACTRSPCQHGGTCMDYWSWQQCHCKEGLTGKYCEKSVTPDTALSLEGKGRLDYHMSQNEKREYLLRQSLRGAMLEPFGVNSLEVKFRTRSENGVLIHIQESSNYTTVKIKNGKVYFTSDAGIAGKVERNIPEVYVADGHWHTFLIGKNGTATVLSVDRIYNRDIIHPTQDFGGLDVLTISLGGIPPNQAHRDAQTAGFDGCIASMWYGGESLPFSGKHSLASISKTDPSVKIGCRGPNICASNPCWGDLLCINQWYAYRCVPPGDCASHPCQNGGSCEPGLHSGFTCSCPDSHTGRTCEMVVACLGVLCPQGKVCKAGSPAGHVCVLSQGPEEISLPLWAVPAIVGSCATVLALLVLSLILCNQCRGKKAKNPKEEKKPKEKKKKGSENVAFDDPDNIPPYGDDMTVRKQPEGNPKPDIIERENPYLIYDETDIPHNSETIPSAPLASPEQEIEHYDIDNASSIAPSDADIIQHYKQFRSHTPKFSIQRHSPLGFARQSPMPLGASSLTYQPSYGQGLRTSSLSHSACPTPNPLSRHSPAPFSKSSTFYRNSPARELHLPIRDGNTLEMHGDTCQPGIFNYATRLGRRSKSPQAMASHGSRPGSRLKQPIGQIPLESSPPVGLSIEEVERLNTPRPRNPSICSADHGRSSSEEDCRRPLSRTRNPADGIPAPESSSDSDSHESFTCSEMEYDREKPMVYTSRMPKLSQVNESDADDEDNYGARLKPRRYHGRRAEGGPVGTQAAAPGTADNTLPMKLGQQAGTFNWDNLLNWGPGFGHYVDVFKDLASLPEKAAANEEGKAGTTKPVPKDGEAEQYV

SEQ ID NO: 44010 - protein, 798 aa, Homo sapiens
MLLFFTLGLLIHFVFFASIFDIYFTSPLVHGMTPQFTPLPPPARRLVLFVADGLRADALYELDENGNSRAPFIRNIIMHEGSWGISHTRVPTESRPGHVALIAGFYEDVSAVAKGWKENPVEFDSLFNESKYTWSWGSPDILPMFAKGASGDHVYTYSYDAKREDFGAQDATKLDTWVFDNVKDFFHHARNNQSLFSKINEEKIVFFLHLLGIDTNGHAHRPSSRDYKHNIKKVDDGVKEIVSMFNHFYGNDGKTTFIFTSDHGMTDWGSHGAGHPSETLTPLVTWGAGIKYPQRVSAQQFDDAFLKEWRLENWKRLDVNQADIAPLMTSLIGVPFPLNSVGILPVDYLNNTDLFKAESMFTNAVQILEQFKVKMTQKKEVTLPFLFTPFKLLSDSKQFNILRKARSYIKHRKFDEVVSLCKELIHLALKGLSYYHTYDRFFLGVNVVIGFVGWISYASLLIIKSHSNLIKGVSKEVKKPSHLLPCSFVAIGILVAFFLLIQACPWTYYVYGLLPLPIWYAVLREFQVIQDLVVSVLTYPLSHFVGYLLAFTLGIEVLVLSFFYRYMLTAGLTAFAAWPFLTRLWTRAKMTSLSWTFFSLLLAVFPLMPVVGRKPDISLVMGAGLLVLLLSLCVVTSLMKRKDSFIKEELLVHLLQVLSTVLSMYVVYSTQSSLLRKQGLPLMNQIISWATLASSLVVPLLSSPVLFQRLFSILLSLMSTYLLLSTGYEALFPLVLSCLMFVWINIEQETLQQSGVCCKQKLTSIQFSYNTDITQFRQLYLDDIRRAFFLVSFVETLV

SEQ ID NO: 44011 - protein, 143 aa, Homo sapiens
  MOD_RES (1)..(1): Any amino acid
XESPSVSSTHRVSDPKFHPLHSKIIIIKKGHAKDSQRYKVDYESQSTDTQNFSSESKRETEYGPCRREMEDTLNHLKFLNVLSPRGVHIPNCDKKGFYKKKQCRPSKGRKRGFCWCVDKYGQPLPGYTTKGKEDVHCYSMQSK

SEQ ID NO: 44012 - protein, 21 aa, Homo sapiens
  MOD_RES (1)..(1): Any amino acid
XKKSSGDKLTFGTGTRLAVRP

SEQ ID NO: 44013 - protein, 248 aa, Homo sapiens
MASGQFVNKLQEEVICPICLDILQKPVTIDCGHNFCLKCITQIGETSCGFFKCPLCKTSVRKNAIRFNSLLRNLVEKIQALQASEVQSKRKEATCPRHQEMFHYFCEDDGKFLCFVCRESKDHKSHNVSLIEEAAQNYQGQIQEQIQVLQQKEKETVQVKAQGVHRVDVFTDQVEHEKQRILTEFELLHQVLEEEKNFLLSRIYWLGHEGTEAGKHYVASTEPQLNDLKKLVDSLKTKQNMPPRQLLE

SEQ ID NO: 44014 - protein, 3964 aa, Homo sapiens
MTTMLQKSDSNASFLRAARAGNLDKVVEYLKGGIDINTCNQNGLNALHLAAKEGHVGLVQELLGRGSSVDSATKKGNTALHIASLAGQAEVVKVLVKEGANINAQSQNGFTPLYMAAQENHIDVVKYLLENGANQSTATEDGFTPLAVALQQGHNQAVAILLENDTKGKVRLPALHIAARKDDTKSAALLLQNDHNADVQSKMMVNRTTESGFTPLHIAAHYGNVNVATLLLNRGAAVDFTARNGITPLHVASKRGNTNMVKLLLDRGGQIDAKTRDGLTPLHCAARSGHDQVVELLLERGAPLLARTKNGLSPLHMAAQGDHVECVKHLLQHKAPVDDVTLDYLTALHVAAHCGHYRVTKLLLDKRANPNARALNGFTPLHIACKKNRIKVMELLVKYGASIQAITESGLTPIHVAAFMGHLNIVLLLLQNGASPDVTNIRGETALHMAARAGQVEVVRCLLRNGALVDARAREEQTPLHIASRLGKTEIVQLLLQHMAHPDAATTNGYTPLHISAREGQVDVASVLLEAGAAHSLATKKGFTPLHVAAKYGSLDVAKLLLQRRAAADSAGKNGLTPLHVAAHYDNQKVALLLLEKGASPHATAKNGYTPLHIAAKKNQMQIASTLLNYGAETNIVTKQGVTPLHLASQEGHTDMVTLLLDKGANIHMSTKSGLTSLHLAAQEDKVNVADILTKHGADQDAHTKLGYTPLIVACHYGNVKMVNFLLKQGANVNAKTKNGYTPLHQAAQQGHTHIINVLLQHGAKPNATTANGNTALAIAKRLGYISVVDTLKVVTEEVTTTTTTITEKHKLNVPETMTEVLDVSDEEGDDTMTGDGGEYLRPEDLKELGDDSLPSSQFLDGMNYLRYSLEGGRSDSLRSFSSDRSHTLSHASYLRDSAVMDDSVVIPSHQVSTLAKEAERNSYRLSWGTENLDNVALSSSPIHSGFLVSFMVDARGGAMRGCRHNGLRIIIPPRKCTAPTRVTCRLVKRHRLATMPPMVEGEGLASRLIEVGPSGAQFLGPVIVEIPHFAALRGKERELVVLRSENGDSWKEHFCDYTEDELNEILNGMDEVLDSPEDLEKKRICRIITRDFPQYFAVVSRIKQDSNLIGPEGGVLSSTVVPQVQAVFPEGALTKRIRVGLQAQPMHSELVKKILGNKATFSPIVTLEPRRRKFHKPITMTIPVPKASSDVMLNGFGGDAPTLRLLCSITGGTTPAQWEDITGTTPLTFVNECVSFTTNVSARFWLIDCRQIQESVTFASQVYREIICVPYMAKFVVFAKSHDPIEARLRCFCMTDDKVDKTLEQQENFAEVARSRDVEVLEGKPIYVDCFGNLVPLTKSGQHHIFSFFAFKENRLPLFVKVRDTTQEPCGRLSFMKEPKSTRGLVHQAICNLNITLPIYTKESESDQEQEEEIDMTSEKNDETESTETSVLKSHLVNEVPVLASPDLLSEVSEMKQDLIKMTAILTTDVSDKAGSIKVKELVKAAEEEPGEPFEIVERVKEDLEKVNEILRSGTCTRDESSVQSSRSERGLVEEEWVIVSDEEIEEARQKAPLEITEYPCVEVRIDKEIKGKVEKDSTGLVNYLTDDLNTCVPLPKEQLQTVQDKAGKKCEALAVGRSSEKEGKDIPPDETQSTQKQHKPSLGIKKPVRRKLKEKQKQKEEGLQASAEKAELKKGSSEESLGEDPGLAPEPLPTVKATSPLIEETPIGSIKDKVKALQKRVEDEQKGRSKLPIRVKGKEDVPKKTTHRPHPAASPSLKSERHAPGSPSPKTERHSTLSSSAKTERHPPVSPSSKTEKHSPVSPSAKTERHSPASSSSKTEKHSPVSPSTKTERHSPVSSTKTERHPPVSPSGKTDKRPPVSPSGRTEKHPPVSPGRTEKRLPVSPSGRTDKHQPVSTAGKTEKHLPVSPSGKTEKQPPVSPTSKTERIEETMSVRELMKAFQSGQDPSKHKTGLFEHKSAKQKQPQEKGKVRVEKEKGPILTQREAQKTENQTIKRGQRLPVTGTAESKRGVRVSSIGVKKEDAAGGKEKVLSHKIPEPVQSVPEEESHRESEVPKEKMADEQGDMDLQISPDRKTSTDFSEVIKQELEDNDKYQQFRLSEETEKAQLHLDQVLTSPFNTTFPLDYMKDEFLPALSLQSGALDGSSESLKNEGVAGSPCGSLMEGTPQISSEESYKHEGLAETPETSPESLSFSPKKSEEQTGETKESTKTETTTEIRSEKEHPTTKDITGGSEERGATVTEDSETSTESFQKEATLGSPKDTSPKRQDDCTGSCSVALAKETPTGLTEEAACDEGQRTFGSSAHKTQTDSEVQESTATSDETKALPLPEASVKTDTGTESKPQGVIRSPQGLELALPSRDSEVLSAVADDSLAVSHKDSLEASPVLEDNSSHKTPDSLEPSPLKESPCRDSLESSPVEPKMKAGIFPSHFPLPAAVAKTELLTEVASVRSRLLRDPDGSAEDDSLEQTSLMESSGKSPLSPDTPSSEEVSYEVTPKTTDVSTPKPAVIHECAEEDDSENGEKKRFTPEEEMFKMVTKIKMFDELEQEAKQKRDYKKEPKQEESSSSSDPDADCSVDVDEPKHTGSGEDESGVPVLVTSESRKVSSSSESEPELAQLKKGADSGLLPEPVIRVQPPSPLPSSMDSNSSPEEVQFQPVVSKQYTFKMNEDTQEEPGKSEEEKDSESHLAEDRHAVSTEAEDRSYDKLNRDTDQPKICDGHGCEAMSPSSSAAPVSSGLQSPTGDDVDEQPVIYKESLALQGTHEKDTEGEELDVSRAESPQADCPSESFSSSSSLPHCLVSEGKELDEDISATSSIQKTEVTKTDETFENLPKDCPSQDSSITTQTDRFSMDVPVSDLAENDEIYDPQITSPYENVPSQSFFSSEESKTQTDANHTTSFHSSEVYSVTITSPVEDVVVASSSSGTVLSKESNFEGQDIKMESQQESTLWEMQSDSVSSSFEPTMSATTTVVGEQISKVIITKTDVDSDSWSEIREDDEAFEARVKEEEQKIFGLMVDRQSQGTTPDTTPARTPTEEGTPTSEQNPFLFQEGKLFEMTRSGAIDMTKRSYADESFHFFQIGQESREETLSEDVKEGATGADPLPLETSAESLALSESKETVDDEADLLPDDVSEEVEEIPASDAQLNSQMGISASTETPTKEAVSVGTKDLPTVQTGDIPPLSGVKQISCPDSSEPAVQVQLDFSTLTRSVYSDRGDDSPDSSPEEQKSVIEIPTAPMENVPFTESKSKIPVRTMPTSTPAPPSAEYESSVSEDFLSSVDEENKADEAKPKSKLPVKVPLQRVEQQLSDLDTSVQKTVAPQGQDMASIAPDNRSKSESDASSLDSKTKCPVKTRSYTETETESRERAEELELESEEGATRPKILTSRLPVKSRSTTSSCRGGTSPTKESKEHFFDLYRNSIEFFEEISDEASKLVDRLTQSEREQEIVSDDESSSALEVSVIENLPPVETEHSVPEDIFDTRPIWDESIETLIERIPDENGHDHAEDPQDEQERIEERLAYIADHLGFSWTELARELDFTEEQIHQIRIENPNSLQDQSHALLKYWLERDGKHATDTNLVECLTKINRMDIVHLMETNTEPLQERISHSYAEIEQTITLDHSEGFSVLQEELCTAQHKQKEEQAVSKESETCDHPPIVSEEDISVGYSTFQDGVPKTEGDSSATALFPQTHKEQVQQDFSGKMQDLPEESSLEYQQEYFVTTPGTETSETQKAMIVPSSPSKTPEEVSTPAEEEKLYLQTPTSSERGGSPIIQEPEEPSEHREESSPRKTSLVIVESADNQPETCERLDEDAAFEKGDDMPEIPPETVTEEEYIDEHGHTVVKKVTRKIIRRYVSSEGTEKEEIMVQGMPQEPVNIEEGDGYSKVIKRVVLKSDTEQSEVTLCEPSILSSTSQFQAEPVEGRRVSKVVKTTVVLGERMEKHLGDSSLATDLPSAKDDFEEDNNE

SEQ ID NO: 44015 - protein, 32 aa, Homo sapiens
MQRDHTMDYKESCPSVSIPSSDEHREKKKRFT

SEQ ID NO: 44016 - protein, 518 aa, Homo sapiens
MSCQKAVLELNIGSQLGPKSPERTEGVTAFEDYGTGLLENQLSVGDFVKIQKAFESPQPRKIICMSREDFTQKMTEIVGWGTKEEYGELFDKVDVAQDGFINWDKLTSFILLELYEQDERAKATVVPQWKDLEFLPVKHKDTIQKVIFLKNSSHYLTISKEGLLAIWGEHLKLQETFPITSDATKLKHLWVTSLVSLENVNKIAVAFTSKEVCFYDLLSKEEFACQYKLQGLKGTPICMDYWYDPLDANESILSFGDITGKVQAIAFTAALISLFERPASACEDGEATMTINWAELLSGCHKCCHILEHKLHQGDWVRQVTYNASLDAIISSTTSNTNSVVMAWREKSKKRLNMTSFNIAQGIHAFDYHSRLNLIATAGINNKVCLWNPYVVSKPVGVLWGHSASVIAVQFFVERKQLFSFSKDKVLRLWDIQHQLSIQRIACSFPKSQDFRCLFHFDEAHGRLFISFNNQLALLAMKSEASKRVKSHEKAVTCVLYNSILKQPSQCEDDTNEDPYDN

SEQ ID NO: 44017 - protein, 66 aa, Homo sapiens
MSAHNRGTELDLSWISKIQVNHPAVLRRAEQIQARRTVKKEWQVMIHLPTFKGSVIKPNTQSGKIS

SEQ ID NO: 44018 - protein, 835 aa, Homo sapiens
MGNRGMEDLIPLVNRLQDAFSAIGQNADLDLPQIAVVGGQSAGKSSVLENFVGRDFLPRGSGIVTRRPLVLQLVNATTEYAEFLHCKGKKFTDFEEVRLEIEAETDRVTGTNKGISPVPINLRVYSPHVLNLTLVDLPGMTKVPVGDQPPDIEFQIRDMLMQFVTKENCLILAVSPANSDLANSDALKVAKEVDPQGQRTIGVITKLDLMDEGTDARDVLENKLLPLRRGYIGVVNRSQKDIDGKKDITAALAAERKFFLSHPSYRHLADRMGTPYLQKVLNQQLTNHIRDTLPGLRNKLQSQLLSIEKEVEEYKNFRPDDPARKTKALLQMVQQFAVDFEKRIEGSGDQIDTYELSGGARINRIFHERFPFELVKMEFDEKELRREISYAIKNIHGIRTGLFTPDLAFEATVKKQLQQYPRLREEMERIVTTHIREREGRTKEQVMLLIDIELAYMNTNHEDFIGFANAQQRSNQMNKKKTSGNQDEILVIRKGWLTINNIGIMKGGSKEYWFVLTAENLSWYKDDEEKEKKYMLSVDNLKLRDVEKGFMSSKHIFALFNTEQRNVYKDYRQLELACETQEEVDSWKASFLRAGVYPERVGDKEKASETEENGSDSFMHSMDPQLERQVETIRNLVDSYMAIVNKTVRDLMPKTIMHLMINNTKEFIFSELLANLYSCGDQNTLMEESAEQAQRRDEMLRMYHALKEALSIIGDINTTTVSTPMPPPVDDSWLQVQSVPAGRRSPTSSPTPQRRAPAVPPARPGSRGPAPGPPPAGSALGGAPPVPSRPGASPDPFGPPPQVPSRPNRAPPGVPSRSGQASPSRPESPRPPFDL

SEQ ID NO: 44019 - protein, 798 aa, Homo sapiens
  MOD_RES (1)..(1): Any amino acid
XSNKKCIPMDLQCDRLDDCGDGSDEQGCRIAPTEYTCEDNVNPCGDDAYCNQIKTSVFCRCKPGFQRNMKNRQCEDLNECLVFGTCSHQCINVEGSYKCVCDQNFQERNNTCIAEGSEDQVLYIANDTDILGFIYPFNYSGDHQQISHIEHNSRITGMDVYYQRDMIIWSTQFNPGGIFYKRIHGREKRQANSGLICPEFKRPRDIAVDWVAGNIYWTDHSRMHWFSYYTTHWTSLRYSINVGQLNGPNCTRLLTNMAGEPYAIAVNPKRGMMYWTVVGDHSHIEEAAMDGTLRRILVQKNLQRPTGLAVDYFSERIYWADFELSIIGSVLYDGSNSVVSVSSKQGLLHPHRIDIFEDYIYGAGPKNGVFRVQKFGHGSVEYLALNIDKTKGVLISHRYKQLDLPNPCLDLACEFLCLLNPSGATCVCPEGKYLINGTCNDDSLLDDSCKLTCENGGRCILNEKGDLRCHCWPSYSGERCEVNHCSNYCQNGGTCVPSVLGRPTCSCALGFTGPNCGKTVCEDFCQNGGTCIVTAGNQPYCHCQPEYTGDRCQYYVCHHYCVNSESCTIGDDGSVECVCPTRYEGPKCEVDKCVRCHGGHCIINKDSEDIFCNCTNGKIASSCQLCDGYCYNGGTCQLDPETNVPVCLCSTNWSGTQCERPAPKSSKSDHISTRSIAIIVPLVLLVTLITTLVIGLVLCKRKRRTKTIRRQPIINGGINVEIGNPSYNMYEVDHDHNDGGLLDPGFMIDPTKPTNYSNPVYAKLYMDGQNCRNSLGSVDERKELLPKKIEIGIRETVA

SEQ ID NO: 44020 - protein, 52 aa, Homo sapiens
MPAALVENSQVICEVWASNLEEEMRKIREIVLSYSYIAMRGHVLPGFHRSPC

SEQ ID NO: 44021 - protein, 117 aa, Homo sapiens
MAAGERSWCLCKLLRFFYSLFFPGLIVCGTLCVCLVIVLWGIRLLLQRKKKLVSTSKNGKNQMVIAFFHPYCNAGGGGERVLWCALRALQKKNFKAAANLQPRQARDGTSPIHQMGQ

SEQ ID NO: 44022 - protein, 465 aa, Homo sapiens
MAEAPQQQLGIPVVKLEKELPWGRGREDPSPETFRLRFRQFRYQEAAGPQEALRELQELCRRWLRPELHTKEQILELLVLEQFLTILPREFYAWIREHGPESGKALAAMVEDLTERALEAKAVPCHRQGEQEETALCRGAWEPGIQLGPVEVKPEWGMPPGEGVQGPDPGTEEQLSQDPGDETRAFQEQGGGSKEKEAKPPQEDLKGALVALTSERFGEASLQGPGLGRVCEQEPGGPAGSAPGLPPPQHGAIPLPDEVKTHSSFWKPFQCPECGKGFSRSSNLVRHQRTHEEKSYGCVECGKGFTLREYLMKHQRTHLGKRPYVCSECWKTFSQRHHLEVHQRSHTGEKPYKCGDCWKSFSRRQHLQVHRRTHTGEKPYTCECGKSFSRNANLAVHRRAHTGEKPYGCQVCGKRFSKGERLVRHQRIHTGEKPYHCPACGRSFNQRSILNRHQKTQHRQEPLVQ

SEQ ID NO: 44023 - protein, 161 aa, Homo sapiens
MLAFAARTVVKPLGFLKPFSLMKASSRFKAHQDALPRLPVPPLQQSLDHYLKALQPIVSEEEWAHTKQLVDEFQASGGVGERLQKGLERRARKTENWVSEGILTVTCCWLHMHSSPVPTALARPFVCCPEFREHILCVWHLAGCWVIKKDTVTSSLELTFK

SEQ ID NO: 44024 - protein, 473 aa, Homo sapiens
MQNSHSGVNQLGGVFVNGRPLPDSTRQKIVELAHSGARPCDISRILQVSNGCVSKILGRYYETGSIRPRAIGGSKPRVATPEVVSKIAQYKRECPSIFAWEIRDRLLSEGVCTNDNIPSVSSINRVLRNLASEKQQMGADGMYDKLRMLNGQTGSWGTRPGWYPGTSVPGQPTQDGCQQQEGGGENTNSISSNGEDSDEAQMRLQLKRKLQRNRTSFTQEQIEALEKEFERTHYPDVFARERLAAKIDLPEARIQVWFSNRRAKWRREEKLRNQRRQASNTPSHIPISSSFSTSVYQPIPQPTTPVSSFTSGSMLGRTDTALTNTYSALPPMPSFTMANNLPMQDSFPLVCQFQFKFPEVNLICLNTGQDYSKKKKKKKKERKYCVNSVSDYGDTTVELSGKKEKWLLEPLQFYNCVLYCTTGEGMDLKQGPLYTEGTISVGTNLHFGIQTFIHFGVLFVNGHLYVIMKKRTM

SEQ ID NO: 44025 - protein, 600 aa, Homo sapiens
MEVQLGLGRVYPRPPSKTYRGAFQNLFQSVREVIQNPGPRHPEAASAAPPGASLLLLQQQQQQQQQQQQQQQQQQQQQQQETSPRQQQQQQGEDGSPQAHRRGPTGYLVLDEEQQPSQPQSALECHPERGCVPEPGAAVAASKGLPQQLPAPPDEDDSAAPSTLSLLGPTFPGLSSCSADLKDILSEASTMQLLQQQQQEAVSEGSSSGRAREASGAPTSSKDNYLGGTSTISDNAKELCKAVSVSMGLGVEALEHLSPGEQLRGDCMYAPLLGVPPAVRPTPCAPLAECKGSLLDDSAGKSTEDTAEYSPFKGGYTKGLEGESLGCSGSAAAGSSGTLELPSTLSLYKSGALDEAAAYQSRDYYNFPLALAGPPPPPPPPHPHARIKLENPLDYGSAWAAAAAQCRYGDLASLHGAGAAGPGSGSPSAAASSSWHTLFTAEEGQLYGPCGGGGGGGGGGGGGGGGGGGGGGGEAGAVAPYGYTRPPQGLAGQESDFTAPDVWYPGGMVSRVPYPSPTCVKSEMGPWMDSYSGPYGDMRLETARDHVLPIDYYFPPQKTCLICGDEASGCHYGALTCGSCKVFFKRAAEGFFRMNKLKES

SEQ ID NO: 44026 - protein, 179 aa, Homo sapiens
MSFLKSFPPPGPAEGLLRQQPDTEAVLNGKGLGTGTLYIAESRLSWLDGSGLGFSLEYPTISLHALSRDRSDCLGEHLYVMVNAKFEEESKEPVADEEEEDSDDDVEPITEFRFVPSDKSALEAMFTAMCECQALHPDPEDEDSDDYDGEEYDVEAHDGMEVDTTPTVAGQFEDADVDH

SEQ ID NO: 44027 - protein, 70 aa, Homo sapiens
MDHTGAIDTEDEVGPLAHLAPSPQSEAVAHEFQELSLQSSQNLPPLNERKNVLQLRLQQRRTREQLVDQG

SEQ ID NO: 44028 - protein, 154 aa, Homo sapiens
MEINTKLLISVTCISFFTFQLLFYFVSYWFSAKVSPGFNSLSFKKKIEWNSRVVSTCHSLVVGIFGLYIFLFDEATKADPLWGGPSLANVNIAIASGYLISDLSIIILYWKVIGDKFFIMHHCASLYAYYLVLKNGVLAYIGNFRLLAELSSPF

SEQ ID NO: 44029 - protein, 145 aa, Homo sapiens
  MOD_RES (1)..(1): Any amino acid
XDAISENYRIMSYFKEAELKDLLLQVGRGLRYIHSMSLVHMDIKPSNIFISRTSIPNAASEEGDEDDWASNKVMFKIGDLGHVTRISSPQVEEGDSRFLANEVLQEWYVLLVLNLFREMEINGMKSDRVDYLGYHKCFPKNLQSC

SEQ ID NO: 44030 - protein, 36 aa, Homo sapiens
MGSELIGRLAPRLGLAEPDMLRPAVQSCAWTLQLPG

SEQ ID NO: 44031 - protein, 4609 aa, Homo sapiens
MDKLQRLKGEKEAKRALLDARHNYLFAIVASCLDLNKTEVEDAILEGNQIERIDQLFAVGGLRHLMFYYQDVEEAETGQLGSLGGVNLVSGKIKKPKVFVTEGNDVALTGVCVFFIRTDPSKAITPDNIHQEVSFNMLDAADGGLLNSVRRLLSDIFIPALRATSHGWGELEGLQDAANIRQEFLSSLEGFVNVLSGAQESLKEKVNLRKCDILELKTLKEPTDYLTLANNPETLGKIEDCMKVWIKQTEQVLAENNQLLKEADDVGPRAELEHWKKRLSKFNYLLEQLKSPDVKAVLAVLAAAKSKLLKTWREMDIRITDATNEAKDNVKYLYTLEKCCDPLYSSDPLSMMDAIPTLINAIKMIYSISHYYNTSEKITSLFVKVTNQIISACKAYITNNGTASIWNQPQDVVEEKILSAIKLKQEYQLCFHKTKQKLKQNPNAKQFDFSEMYIFGKFETFHRRLAKIIDIFTTLKTYSVLQDSTIEGLEDMATKYQGIVATIKKKEYNFLDQRKMDFDQDYEEFCKQTNDLHNELRKFMDVTFAKIQNTNQALRMLKKFERLNIPNLGIDDKYQLILENYGADIDMISKLYTKQKYDPPLARNQPPIAGKILWARQLFHRIQQPMQLFQQHPAVLSTAEAKPIIRSYNRMAKVLLEFEVLFHRAWLRQIEEIHVGLEASLLVKAPGTGELFVNFDPQILILFRETECMAQMGLEVSPLATSLFQKRDRYKRNFSNMKMMLAEYQRVKSKIPAAIEQLIVPHLAKVDEALQPGLAALTWTSLNIEAYLENTFAKIKDLELLLDRVNDLIEFRIDAILEEMSSTPLCQLPQEEPLTCEEFLQMTKDLCVNGAQILHFKSSLVEEAVNELVNMLLDVEVLSEEESEKISNENSVNYKNESSAKREEGNFDTLTSSINARANALLLTTVTRKKKETEMLGEEARELLSHFNHQNMDALLKVTRNTLEAIRKRIHSSHTINFRDSNSASNMKQNSLPIFRASVTLAIPNIVMAPALEDVQQTLNKAVECIISVPKGVRQWSSELLSKKKIQERKMAALQSNEDSDSDVEMGENELQDTLEIASVNLPIPVQTKNYYKNVSENKEIVKLVSVLSTIINSTKKEVITSMDCFKRYNHIWQKGKEEAIKTFITQSPLLSEFESQILYFQNLEQEINAEPEYVCVGSIALYTADLKFALTAETKAWMVVIGRHCNKKYRSEMENIFMLIEEFNKKLNRPIKDLDDIRIAMAALKEIREEQISIDFQVGPIEESYALLNRYGLLIAREEIDKVDTLHYAWEKLLARAGEVQNKLVSLQPSFKKELISAVEVFLQDCHQFYLDYDLNGPMASGLKPQEASDRLIMFQNQFDNIYRKYITYTGGEELFGLPATQYPQLLEIKKQLNLLQKIYTLYNSVIETVNSYYDILWSEVNIEKINNELLEFQNRCRKLPRALKDWQAFLDLKKIIDDFSECCPLLEYMASKAMMERHWERITTLTGHSLDVGNESFKLRNIMEAPLLKYKEEIEDICISAVKERDIEQKLKQVINEWDNKTFTFGSFKTRGELLLRGDSTSEIIANMEDSLMLLGSLLSNRYNMPFKAQIQKWVQYLSNSTDIIESWMTVQNLWIYLEAVFVGGDIAKQLPKEAKRFSNIDKSWVKIMTRAHEVPSVVQCCVGDETLGQLLPHLLDQLEICQKSLTGYLEKKRLCFPRFFFVSDPALLEILGQASDSHTIQAHLLNVFDNIKSVKFHEKIYDRILSISSQEGETIELDKPVMAEGNVEVWLNSLLEESQSSLHLVIRQAAANIQETGFQLTEFLSSFPAQVGLLGIQMIWTRDSEEALRNAKFDKKIMQKTNQAFLELLNTLIDVTTRDLSSTERVKYETLITIHVHQRDIFDDLCHMHIKSPMDFEWLKQCRFYFNEDSDKMMIHITDVAFIYQNEFLGCTDRLVITPLTDRCYITLAQALGMSMGGAPAGPAGTGKTETTKDMGRCLGKYVVVFNCSDQMDFRGLGRIFKGLAQSGSWGCFDEFNRIDLPVLSVAAQQISIILTCKKEHKKSFIFTDGDNVTMNPEFGLFLTMNPGYAGRQELPENLKINFRSVAMMVPDRQIIIRVKLASCGFIDNVVLARKFFTLYKLCEEQLSKQVHYDFGLRNILSVLRTLGAAKRANPMDTESTIVMRVLRDMNLSKLIDEDEPLFLSLIEDLFPNILLDKAGYPELEAAISRQVEEAGLINHPPWKLKVIQLFETQRVRHGMMTLGPSGAGKTTCIHTLMRAMTDCGKPHREMRMNPKAITAPQMFGRLDVATNDWTDGIFSTLWRKTLRAKKGEHIWIILDGPVDAIWIENLNSVLDDNKTLTLANGDRIPMAPNCKIIFEPHNIDNASPATVSRNGMVFMSSSILDWSPILEGFLKKRSPQEAEILRQLYTESFPDLYRFCIQNLEYKMEVLEAFVITQSINMLQGLIPLKEQGGEVSQAHLGRLFVFALLWSAGAALELDGRRRLELWLRSRPTGTLELPPPAGPGDTAFDYYVAPDGTWTHWNTRTQEYLYPSDTTPEYGSILVPNVDNVRTDFLIQTIAKQGKAVLLIGEQGTAKTVIIKGFMSKYDPECHMIKSLNFSSATTPLMFQRTIESYVDKRMGTTYGPPAGKKMTVFIDDVNMPIINEWGDQVTNEIVRQLMEQNGFYNLEKPGEFTSIVDIQFLAAMIHPGGGRNDIPQRLKRQFSIFNCTLPSEASVDKIFGVIGVGHYCTQRGFSEEVRDSVTKLVPLTRRLWQMTKIKMLPTPAKFHYVFNLRDLSRVWQGMLNTTSEVIKEPNDLLKLWKHECKRVIADRFTVSSDVTWFDKALVSLVEEEFGEEKKLLVDCGIDTYFVDFLRDAPEAAGETSEEADAETPKIYEPIESFSHLKERLNMFLQLYNESIRGAGMDMVFFADAMVHLVKISRVIRTPQGNALLVGVGGSGKQSLTRLASFIAGYVSFQITLTRSYNTSNLMEDLKVLYRTAGQQGKGITFIFTDNEIKDESFLEYMNNVLSSGEVSNLFARDEIDEINSDLASVMKKEFPRCLPTNENLHDYFMSRVRQNLHIVLCFSPVGEKFRNRALKFPALISGCTIDWFSRWPKDALVAVSEHFLTSYDIDCSLEIKKEVVQCMGSFQDGVAEKCVDYFQRFRRSTHVTPKSYLSFIQGYKFIYGEKHVEVRTLANRMNTGLEKLKEASESVAALSKELEAKEKELQVANDKADMVLKEVTMKAQAAEKVKAEVQKVKDRAQAIVDSISKDKAIAEEKLEAAKPALEEAEAALQTIRPSDIATVRTLGRPPHLIMRIMDCVLLLFQRKVSAVKIDLEKSCTMPSWQESLKLMTAGNFLQNLQQFPKDTINEEVIEFLSPYFEMPDYNIETAKRVCGNVAGLCSWTKAMASFFSINKEVLPLKANLVVQENRHLLAMQDLQKAQAELDDKQAELDVVQAEYEQAMTEKQTLLEDAERCRHKMQTASTLISGLAGEKERWTEQSQEFAAQTKRLVGDVLLATAFLSYSGPFNQEFRDLLLNDWRKEMKARKIPFGKNLNLSEMLIDAPTISEWNLQGLPNDDLSIQNGIIVTKASRYPLLIDPQTQGKIWIKNKESRNELQITSLNHKYFRNHLEDSLSLGRPLLIEDVGEELDPALDNVLERNFIKTGSTFKVKVGDKEVDVLDGFRLYITTKLPNPAYTPEISARTSIIDFTVTMKGLEDQLLGRVILTEKQELEKERTHLMEDVTANKRRMKELEDNLLYRLTSTQGSLVEDESLIVVLSNTKRTAEEVTQKLEISAETEVQINSAREEYRPVATRGSILYFLITEMRLVNEMYQTSLRQFLGLFDLSLARSVKSPITSKRIANIIEHMTYEVYKYAARGLYEEHKFLFTLLLTLKIDIQRNRVKHEEFLTLIKGGASLDLKACPPKPSKWILDITWLNLVELSKLRQFSDVLDQISRNEKMWKIWFDKENPEEEPLPNAYDKSLDCFRRLLLIRSWCPDRTIAQARKYIVDSMGEKYAEGVILDLEKTWEESDPRTPLICLLSMGSDPTDSIIALGKRLKIETRYVSMGQGQEVHARKLLQQTMANGGWALLQNCHLGLDFMDELMDIIIETELVHDAFRLWMTTEAHKQFPITLLQMSIKFANDPPQGLRAGLKRTYSGVSQDLLDVSSGSQWKPMLYAVAFLHSTVQERRKFGALGWNIPYEFNQADFNATVQFIQNHLDDMDVKKGVSWTTIRYMIGEIQYGGRVTDDYDKRLLNTFAKVWFSENMFGPDFSFYQGYNIPKCSTVDNYLQYIQSLPAYDSPEVFGLHPNADITYQSKLAKDVLDTILGIQPKDTSGGGDETREAVVARLADDMLEKLPPDYVPFEVKERLQKMGPFQPMNIFLRQEIDRMQRVLSLVRSTLTELKLAIDGTIIMSENLRDALDCMFDARIPAWWKKASWISSTLGFWFTELIERNSQFTSWVFNGRPHCFWMTGFFNPQGFLTAMRQEITRANKGWALDNMVLCNEVTKWMKDDISAPPTEGVYVYGLYLEGAGWDKRNMKLIESKPKVLFELMPVIRIYAENNTLRDPRFYSCPIYKKPVRTDLNYIAAVDLRTAQTPEHWVLRGVALLCDVK

SEQ ID NO: 44032 - protein, 176 aa, Homo sapiens
DTYCFNASAPPEEDCTSVTGPLSMTTQQSNSQSFSTSHEGLEEDKDHPTTSTLTSSNRNDVTGGRRDPNHSEGSTTLLEGYTSHYPHTKESRTFIPVTSAKTGSFGVTAVTVGDSNSNVNRSLSGDQDTFHPSGGSHTTHGSESDGHSHGSQEGGANTTSGPIRTPQIPEWLIILA

SEQ ID NO: 44033 - protein, 51 aa, Homo sapiens
MKQDASRNAAYTVDCEDYVHVVEFNPFENGDSGNLIAYGGNNYVVIGTCTF

SEQ ID NO: 44034 - protein, 97 aa, Homo sapiens
MAATQKLVKDIIDSKTGETASKRWKGAKNSETAAKVALMKLKMHADGDKSLPQTERIYFQVFLPKGSKEKSKPMFFCHRWSIGKAIDFAASLARLKN

SEQ ID NO: 44035 - protein, 165 aa, Homo sapiens
SKEPQRGMGYMPKRGLDVNKCEIARFFKLHERKCEPIIMTVPRKSDLFQDDLYPDTAGPEAALEAEEWFEGKNADPILISLKHGYIPGKNRDLKVVKKNILDSKPTANKKCDLISIPKKTTDTASVQNEAKLDEILKEIKSIKDTICNQDERISKLEQQMAKIAA

SEQ ID NO: 44036 - protein, 283 aa, Homo sapiens
MIMNKMKNFKRRFSLSVPRTETIEESLAEFTEQFNQLHNRRNENLQLGPLGRDPPQECSTFSPTDSGEEPGQLSPGVQFQRRQNQRRFSMEVRASGALPRQVAGCTHKGVHRRAAALQPDFDVSKRLSLPMDIRLPQEFLQKLQMESPDLPKPLSRMSRRASLSDIGFGKLETYVKLDKLGEGTYATVFKGRSKLTENLVALKEIRLEHEEGAPCTAIREVSLLKNLKHANIVTLHDLIHTDRSLTLVFEYLDSDLKQYLDHCGNLMSMHNVKIFMFQLLRGL

SEQ ID NO: 44037 - protein, 116 aa, Homo sapiens
MEESHFNSNPYFWPSIPTVSGQIENTMFINKMKDQLLPEKGCGLAPPHYPTLLTVPASVSLPSGISMDTESKSDQLTPHSQASVTQNITVVPVPSTGLMTAGVSCSQRWRREGSQS

SEQ ID NO: 44038 - protein, 2229 aa, Homo sapiens
MFPGCPRLWVLVVLGTSWVGWGSQGTEAAQLRQFYVAAQGISWSYRPEPTNSSLNLSVTSFKKIVYREYEPYFKKEKPQSTISGLLGPTLYAEVGDIIKVHFKNKADKPLSIHPQGIRYSKLSEGASYLDHTFPAEKMDDAVAPGREYTYEWSISEDSGPTHDDPPCLTHIYYSHENLIEDFNSGLIGPLLICKKGTLTEGGTQKTFDKQIVLLFAVFDESKSWSQSSSLMYTVNGYVNGTMPDITVCAHDHISWHLLGMSSGPELFSIHFNGQVLEQNHHKVSAITLVSATSTTANMTVGPEGKWIISSLTPKHLQAGMQAYIDIKNCPKKTRNLKKITREQRRHMKRWEYFIAAEEVIWDYAPVIPANMDKKYRSQHLDNFSNQIGKHYKKVMYTQYEDESFTKHTVNPNMKEDGILGPIIRAQVRDTLKIVFKNMASRPYSIYPHGVTFSPYEDEVNSSFTSGRNNTMIRAVQPGETYTYKWNILEFDEPTENDAQCLTRPYYSDVDIMRDIASGLIGLLLICKSRSLDRRGIQRAADIEQQAVFAVFDENKSWYLEDNINKFCENPDEVKRDDPKFYESNIMSNFTLSAINGYVPESITTLGFCFDDTVQWHFCSVGTQNEILTIHFTGHSFIYGKRHEDTLTLFPMRGESVTVTMDNVGTWMLTSMNSSPRSKKLRLKFRDVKCIPDDDEDSYEIFEPPESTVMATRKMHDRLEPEDEESDADYDYQNRLAAALGIRSFRNSSLNQEEEEFNLTALALENGTEFVSSNTDIIVGSNYSSPSNISKFTVNNLAEPQKAPSHQQATTAGSPLRHLIGKNSVLNSSTAEHSSPYSEDPIEDPLQPDVTGIRLLSLGAGEFKSQEHAKHKGPKVERDQAAKHRFSWMKLLAHKVGRHLSQDTGSPSGMRPWEDLPSQDTGSPSRMRPWKDPPSDLLLLKQSNSSKILVGRWHLASEKGSYEIIQDTDEDTAVNNWLISPQNASRAWGESTPLANKPGKQSGHPKFPRVRHKSLQVRQDGGKSRLKKSQFLIKTRKKKKEKHTHHAPLSPRTFHPLRSEAYNTFSERRLKHSLVLHKSNETSLPTDLNQTLPSMDFGWIASLPDHNQNSSNDTGQASCPPGLYQTVPPEEHYQTFPIQDPDQMHSTSDPSHRSSSPELSEMLEYDRSHKSFPTDISQMSPSSEHEVWQTVISPDLSQVTLSPELSQTNLSPDLSHTTLSPELIQRNLSPALGQMPISPDLSHTTLSPDLSHTTLSLDLSQTNLSPELSQTNLSPALGQMPLSPDLSHTTLSLDFSQTNLSPELSHMTLSPELSQTNLSPALGQMPISPDLSHTTLSLDFSQTNLSPELSQTNLSPALGQMPLSPDPSHTTLSLDLSQTNLSPELSQTNLSPDLSEMPLFADLSQIPLTPDLDQMTLSPDLGETDLSPNFGQMSLSPDLSQVTLSPDISDTTLLPDLSQISPPPDLDQIFYPSESSQSLLLQEFNESFPYPDLGQMPSPSSPTLNDTFLSKEFNPLVIVGLSKDGTDYIEIIPKEEVQSSEDDYAEIDYVPYDDPYKTDVRTNINSSRDPDNIAAWYLRSNNGNRRNYYIAAEEISWDYSEFVQRETDIEDSDDIPEDTTYKKVVFRKYLDSTFTKRDPRGEYEEHLGILGPIIRAEVDDVIQVRFKNLASRPYSLHAHGLSYEKSSEGKTYEDDSPEWFKEDNAVQPNSSYTYVWHATERSGPESPGSACRAWAYYSAVNPEKDIHSGLIGPLLICQKGILHKDSNMPMDMREFVLLFMTFDEKKSWYYEKKSRSSWRLTSSEMKKSHEFHAINGMIYSLPGLKMYEQEWVRLHLLNIGGSQDIHVVHFHGQTLLENGNKQHQLGVWPLLPGSFKTLEMKASKPGWWLLNTEVGENQRAGMQTPFLIMDRDCRMPMGLSTGIISDSQIKASEFLGYWEPRLARLNNGGSYNAWSVEKLAAEFASKPWIQVDMQKEVIITGIQTQGAKHYLKSCYTTEFYVAYSSNQINWQIFKGNSTRNVMYFNGNSDASTIKENQFDPPIVARYIRISPTRAYNRPTLRLELQGCEVNGCSTPLGMENGKIENKQITASSFKKSWWGDYWEPFRARLNAQGRVNAWQAKANNNKQWLEIDLLKIKKITAIITQGCKSLSSEMYVKSYTIHYSEQGVEWKPYRLKSSMVDKIFEGNTNTKGHVKNFFNPPIISRFIRVIPKTWNQSIALRLELFGCDIY

SEQ ID NO: 44039 - protein, 333 aa, Homo sapiens
MAMMVFPREEKLSQDEIVLGTKAVIQGLETLRGEHRALLAPLVAPEAGEAEPGSQERCILLRRSLEAIELGLGEAQVILALSSHLGAVESEKQKLRAQVRRLVQENQWLREELAGTQQKLQRSEQAVAQLEEEKQHLLFMSQIRKLDEDASPNEEKGDVPKDTLDDLFPNEDEQSPAPSPGGGDVSGQHGGYEIPARLRTLHNLVIQYASQGRYEVAVPLCKQALEDLEKTSGHDHPDVATMLNILALVYRFGPAGGAGWSLHHRLSGLASPDPRAKNTKHSPALRHPRPPSRLNPAVASVYREISYWPRASLQSTVLPGPPLVPLLVVPPRP

SEQ ID NO: 44040 - protein, 121 aa, Homo sapiens
MMMGSARVAELLLLHGAEPNCADPATLTRPVHDAAREGFLDTLVVLHRAGARLDVRDAWGRLPVDLAEELGHRDVARYLRAAAGGTRGSNHARIDAAEGPSVTASIQVPGGEEGDFGSSYS

SEQ ID NO: 44041 - protein, 32 aa, Homo sapiens
MWTRNLMARALYDNVPECAEELAFRKGDILTV

SEQ ID NO: 44042 - protein, 64 aa, Homo sapiens
MFEKYYAKLEPRDQRPPRLSEIKISAADYAQFRGRRRSKSRTGMDRGVGLTADQKLELVQKEVA

SEQ ID NO: 44043 - protein, 133 aa, Homo sapiens
MASEDIAKLAETLAKTQVAGGQLSFKGKSLKLNTAEDAKDVIKEIEDFDSLEALRLEGNTVGVEAARVIAKALEKKSELKRCHWSDMFTGRLRTEIPPALISLGEGLITAGAQLVELDLSDNAFGPDGVQGFE

SEQ ID NO: 44044 - protein, 318 aa, Homo sapiens [sequence omitted]

SEQ ID NO: 44045 - protein, 55 aa, Homo sapiens
MRPVVLVGPSLKGYEVTDMMQKALFDFLKHRFDGRISITRVTADLSLAKRSVLNN

SEQ ID NO: 44046 - protein, 35 aa, Homo sapiens
MPGIKRILTVTILALCLPSPGNAQQQERWTPVCQP

SEQ ID NO: 44047 - protein, 553 aa, Homo sapiens
VEAVPSQTPDKEKAWKVKDEKSGKDDTQIIKRDEWMTVDFMSVKTVSSSSLKAEKETMRKIEQEKNQALEQSKLMERELNPYWKDGGTGLPPEDCSVSSITKVSVVEDGGLSWLRKSYLRMKEQAEKQSRNFEDIVAERYGSMEIFQSKLEDAEKAASTKEDYRRERWRKPTYSDKAQNCQESRESDLVKYGNSSRDRYATTDTAKNSNNEKFIGDEKDKRPGSLETCRRESNPRQNQEFSFGNLRAKFLRPSDDEELSFHSKGRKFEPLSSSSALVAQGSLCSGFRKPTKNSEERLTSWSRSDGRGDKKHSNQKPSETSTDEHQHVPEDPREKSQDEVLRDDPPKKEHLRDTKSTFAGSPERESIHILSVDEKNKLGAKIIKAEMMGNMELAEQLKVQLEKANKFKETITQIPKKSGVENEDQQEVILVRTDQSGRVWPVNTPGKSLESQGGRRKRQMVSTHEERERVRYFHDDDNLSLNDLVKNEKMGTAENQNKLFMRMASKQLRENVLVKRKRTKGKKLLLSIGVLLHKWKNVCIVLTALNFPSILLLQ

SEQ ID NO: 44048 - protein, 153 aa, Homo sapiens
MNQNTTEPVAATETLAEVPEHVLRGLPEEVRLFPSAVDKTRIGVWATKPILKGKKFGPFVGDKKKRSQVYYPNLGWMCIDATDPEKGNWLRYVNWACSGEEQNLFPLEINRAIYYKTLKPIAPGEELLVWYNGEDNPEIAAAIEEERASARSK

SEQ ID NO: 44049 - protein, 98 aa, Homo sapiens
MAGVLKKTTGLVGLAVCNTPHERLRILYTKILDVLEEIPKNAAYRKYTEQITNEKLAMVKAEPDVKKLEDQLQGGQLEEVILQICIFFLQLLVRLNMN

SEQ ID NO: 44050 - protein, 92 aa, Homo sapiens
MVDTEMPFWPTNFGISSVDLSVMEDHSHSFDIKPFTTVDFSSISTPHYEDIPFTRTDPVVADYKYDLKLQEYQSAIKVEPASPPYYSEKTQL

SEQ ID NO: 44051 - protein, 145 aa, Homo sapiens
  MOD_RES (1)..(1): Any amino acid
XSDSADPFYWMRVILASNRGTLMELGISPIVTSGLIMQLLAGAKIIEVGDTPKDRALFNGAQKLFGMIITIGQAIVYVMTGMYGDPAEMGAGICLLIIIQGFRVDLPIKSARYRGQYSSYPIKLFYTSNIPIILQSALVSNLYVI

SEQ ID NO: 44052 - protein, 28 aa, Homo sapiens
MIWRSRAGAELFSLMALWEWIALSLHCW

SEQ ID NO: 44053 - protein, 1709 aa, Homo sapiens
MDPRNTAMLGLGSDSEGFSRKSPSAISTGTLVSKREVELEKNTKEEEDLRKRNRERNIEAGKDDGLTDAQQQFSVKETNFSEGNLKLKIGLQAKRTKKPPKNLENYVCRPAIKTTIKHPRKALKSGKMTDEKNEHCPSKRDPSKLYKKADDVAAIECQSEEVIRLHSQGENNPLSKKLSPVHSEMADYINATPSTLLGSRDPDLKDRALLNGGTSVTEKLAQLIATCPPSKSSKTKPKKLGTGTTAGLVSKDLIRKAGVGSVAGIIHKDLIKKPTISTAVGLVTKDPGKKPVFNAAVGLVNKDSVKKLGTGTTAVFINKNLGKKPGTITTVGLLSKDSGKKLGIGIVPGLVHKESGKKLGLGTVVGLVNKDLGKKLGSTVGLVAKDCAKKIVASSAMGLVNKDIGKKLMSCPLAGLISKDAINLKAEALLPTQEPLKASCSTNINNQESQELSESLKDSATSKTFEKNVVRQNKESILEKFSVRKEIINLEKEMFNEGTCIQQDSFSSSEKGSYETSKHEKQPPVYCTSPDFKMGGASDVSTAKSPFSAVGESNLPSPSPTVSVNPLTRSPPETSSQLAPNPLLLSSTTELIEEISESVGKNQFTSESTHLNVGHRSVGHSISIECKGIDKEVNDSKTTHIDIPRISSSLGKKPSLTSESSIHTITPSVVNFTSLFSNKPFLKLGAVSASDKHCQVAESLSTSLQSKPLKKRKGRKPRWTKVVARSTCRSPKGLELERSELFKNVSCSSLSNSNSEPAKFMKNIGPPSFVDHDFLKRRLPKLSKSTAPSLALLADSEKPSHKSFATHKLSSSMCVSSDLLSDIYKPKRGRPKSKEMPQLEGPPKRTLKIPASKVFSLQSKEEQEPPILQPEIEIPSFKQGLSVSPFPKKRGRPKRQMRSPVKMKPPVLSVAPFVATESPSKLESESDNHRSSSDFFESEDQLQDPDDLDDSHRPSVCSMSDLEMEPDKKITKRNNGQLMKTIIRKINKMKTLKRKKLLNQILSSSVESSNKGKVQSKLHNTVSSLAATFGSKLGQQINVSKKGTIYIGKRRGRKPKTVLNGILSGSPTSLAVLEQTAQQAAGSALGQILPPLLPSSASSSEILPSPICSQSSGTSGGQSPVSSDAGFVEPSSVPYLHLHSRQGSMIQTLAMKKASKGRRRLSPPTLLPNSPSHLSELTSLKEATPSPISESHSDETIPSDSGIGTDNNSTSDRAEKFCGQKKRRHSFEHVSLIPPETSTVLSSLKEKHKHKCKRRNHDYLSYDKMKRQKRKRKKKYPQLRNRQDPDFIAELEELISRLSEIRITHRSHHFIPRDLLPTIFRINFNSFYTHPSFPLDPLHYIRKPDLKKKRGRPPKMREAMAEMPFMHSLSFPLSSTGFYPSYGMPYSPSPLTAAPIGLGYYGRYPPTLYPPPPSPSFTTPLPPPSYMHAGHLLLNPAKYHKKKHKLLRQEAFLTTSRTPLLSMSTYPSVPPEMAYGWMVEHKHRHRHKHREHRSSEQPQVSMDTGSSRSVLESLKRYRFGKDAVGERYKHKEKHRCHMSCPHLSPSKSLINREEQWVHREPSESSPLALGLQTPLQIDCSESSPSLSLGGFTPNSEPASSDEHTNLFTSAIGSCRVSNPNSSGRKKLTDSPGLFSAQDTSLNRLHRKESLPSNERAVQTLAVSQELLPIMLPIMISMDLTPIPSPTASEAPDVTKRRSFEESACTLFLP

SEQ ID NO: 44054 - protein, 5093 aa, Homo sapiens
MDQRKNESIVPSITQLEDFLTEHNSNVVWLLVATILSCGWIIYLTYYNSRNVGLILTLVLNRLYKHGYIHIGSFSFSVLSGKVMVREIYYITEDMSIRIQDGFIIFRWWKMYNPKQKQHDPKAETRLYITVNDFEFHVYNRSDLYGRLQELFGLEPTIIPPKKDDDKTREIGRTRTQSKIERVKVKTESQDPTSSWRSLIPVIKVNVSTGRLAFGNHYQPQTLCINFDDAFLTYTTKPPSSHLDQFMHIVKGKLENVRVMLVPSPRYVGLQNDEPPRLMGEGFVVMQSNDVDIYYYMDEPGLVPEETEENIEGEMSSEDCKLQDLPPCWGLDIVCGKGTDFNYGPWADRQRDCLWKFFFPPDYQVLKVSEIAQPGRPRQILAFELRMNIIADATIDLLFTKNRETNAVHVNVGAGSYLEINIPMTVEENGYTPAIKGQLLHVDATTSMQYRTLLEAEMLAFHINASYPRIWNMPQTWQCELEVYKATYHFIFAQKNFFTDLIQDWSSDSPPDIFSFVPYTWNFKIMFHQFEMIWAANQHNWIDCSTKQQENVYLAACGETLNIDFSLPFTDFVPATCNTKFSLRGEDVDLHLFLPDCHPSKYSLFMLVKNCHPNKMIHDTGIPAECQSGQKTVKPKWRNVTQEKSGWVECWTVPSVMLTIDYTWHPIYPQKADEQLKQSLSEMEETMLSVLRPSQKTSDRVVSSPSTSSRPPIDPSELPPDKLHVEMELSPDSQITLYGPLLNAFLCIKENYFGEDDMYMDFEEVISSPVLSLSTSSSSGWTAVGMENDKKENEGSAKSIHPLALRPWDITVLVNLYKVHGRLPVHGTTDGPECPTAFLERLCFEMKKGFRETMLQLILSPLNVFVSDNYQQRPPVDEVLREGHINLSGLQLRAHAMFSAEGLPLGSDSLEYAWLIDVQAGSLTAKVTAPQLACLLEWGQTFVFHVVCREYELERPKSVIICQHGIDRRFCESKLSCIPGPCPTSDDLKYTMIRLAVDGADIYIVEHGCATNIKMGAIRVANCNLHNQSVGEGISAAIQDFQVRQYIEQLNNCRIGLQPAVLRRAYWLEAGSANLGLITVDIALAADHHSKHEAQRHFLETHDARTKRLWFLWPDDILKNKRCRNKCGCLGGCRFFGGTVTGLDFFKLEELTPSSSSAFSSTSAESDMYYGQSLLQPGEWIITKEIPKIIDGNVNGMKRKEWENKSVGIEVERKTQHLSLQVPLRSHSSSSSSEENSSSSAAQPLLAGEKESPSSVADDHLVQKEFLHGTKRDDGQASIPTEISGNSPVSPNTQDKSVGQSPLRSPLKRQASVCSTRLGSTKSLTAAFYGDKQPVTVGVQFSSDVSRSDENVLDSPKQRRSFGSFPYTPSADSNSFHQYRSMDSSMSMADSEAYFSAAEEFEPISSDEGPGTYPGRKKKKKQTQQIDYSRGSIYHSVEGPLTGHGESIQDSRTLPFKTHPSQASFVSALGGEDDVIEHLYIVEGEKTVESEQITPQQPVMNCYQTYLTQFQVINWSVKHPTNKRTSKSSLHRPLDLDTPTSEESSSSFEQLSVPTFKVIKQGLTANSLLDRGMQLSGSTSNTPYTPLEKKLADNTDDETLTEEWTLDQPVSQTRTTAIVEVKGTVDIVLTPLVAEALDRYIEAMVHCASTRHPAAIVDDLHAKVLREAVQNSKTTFSENLSSKQDIRGTKTEQSTIGTTNQGQAQTNLTMKQDNVTIKGLQTNVSIPKVNLCLLQASVEESPTTAPSRSVTHVSLVALCFDRIATQVRMNRGVVEETSNNAEPGRTSNFDRYVHATKMQPQSSGSLRSNAGAEKGKEIAAKLNIHRVHGQLRGLDTTDIGTCAITAIPFEKSKVLFTLEELDEFTFVDETDQQAVPDVTRIGPSQEKWGWIMFECGLENLTIKGGRQSGAVLYNSFGIMGKASDTERGGVLTSNNSSDSPTGSGYNTDVSDDNLPCDRTSPSSDLNGNSVSDEQDEGVESDDLKKDLPLMPPPPDSCSMKLTIKEIWFSFAAPTNVRSHTHAFSRQLNLLSTATPAVGAWLVPIDQLKSSLNKLETEGTLRICAVMGCIMTEALENKSVHFPLRSKYNRLTKVARFLQENPSCLLCNILHHYLHQANYSIIDDATMSDGLPALVTLKKGLVALARQWMKFIVVTPAFKGVSLHRPAQPLKPQIAMDHEHEDGLGLDNGGGLQSDTSADGAEFEFDAATVSEHTMLLEGTANRPPPGSSGPVTGAEIMRKLSKTHTHSDSALKIKGIHPYHSLSYTSGDTATDSPVHVGRAGMPVKDSPRKESLLSYLTGSFPSLHNLLEGTPQRSSAAVKSSSLTRTGNTVATDMLSEHPLLSEPSSVSFYNWMSNAVGNRGSVLQESPVTKSGHNSLPTGVAPNLPTIPSASDFNTVLSSDQNTLDGTHSQHSTSQDDVAGVEEANQGFPAVQLADAQVVFKPLLSHTGIQSQDTMPFCYRMYFGEHLSFSGTLDCLRADIVDSDTAKERKGKRARRQGHVNLPPLEFKPALMLGTFSISAVVMEKSVCTPQNSTSALSFHDLSKRYYNTFHCNFTISCQSISQHVDMALVRLIHQFSTMIDDIKATQTDIKLSRYTAGSASPTPTFKTRKHRDFRSSDFSRSSRGSLNGGNRVNNAKNKRTNNENNKKESRNKNSLGRSERRTSKVSRKGSKDVVDHMTIHMDDSDSITVSEQSEPSAECWQNMYKLLNFYSLISDPTGILEKSSETFGPAGVRSPTEPTCKVVFENEQDNSSLTKTQRKRSLVTSEPQHVTLIVFGIGMVNRTHLEADIGGLTMESELKRIHGSFTLKEKMKDVLHQKMTETCATAHIGGVNIVLLEGITPNIQLEDFPTSPTSTAKQEFLTVVKCSIAKSQALYSAQRGLKTNNAAVFKVGAISINIPQHPATLHSMMVRSSHQLSKQISDLIRQPSTAPQPVKEDIATPLPSEKTPTSVNQTPVETNEFPQLPEGLEKKPIVLKFSAMLDGIAIGAALLPSLKAEYKMGRMRSHGMTGAQTRFTFELPNHRLRFTSKVSATDMSTIPPSASLNLPPVTMSGKYIMEEHDSYSDQVWSIDELPSKQGYYLQGNYLRCVAEVGSFEHNLTTDLLNHLVFVQKVFMKEVNEVIQKVSGGEQPIPLWNEHDGTADGDKPKILLYSLNLQFKGIQVTATTPSMRAVRFETGLIELELSNRLQTKASPGSSSYLKLFGKCQVDLNLALGQIVKHQVYEEAGSDFHQVAYFKTRIGLRNALREEISGSSDREAVLITLNRPIVYAQPVAFDRAVLFWLNYKAAYDNWNEQRMALHKDIHMATKEVVDMLPGIQQTSAQAFGTLFLQLTVNDLGICLPITNTAQSNHTGDLDTGSALVLTIESTLITACSSESLVSKGHFKNFCIRFADGFETSWDDWKPEIHGDLVMNACVVPDGTYEVCSRTTGQAAAESSSAGTWTLNVLWKMCGIDVHMDPNIGKRLNALGNTLTTLTGEEDIDDIADLNSVNIADLSDEDEVDTMSPTIHTSSDGSSISGDGHKLTFGQRLVNHLLGLTPPNQRHSVPAEYLCDPEMWGSPQSSQSHLKACRAHSWGNEATDYRRQAASASQPGELRGRKIMKRIVDIRELNEQAKVIDDLKKLGASEGTINQEIQRYQQLESVAVNDIRRDVRKKLRRSSMRAASLKDKWGLSYKPSYSRSKSISASGRPPLKRMERASSRVGETEELPEIRVDAASPGPRVTFNIQDTLKNTVWGSTPQSSCPGEGYFQFPEETELDLLSVTIEGPSHYSSNSEGSCSVFSSPKTPGGFSPGIPFQTEEGRRDDSLSSTSEDSEKDEKDEDHERERFYIYRKPSHTSRKKATGFAAVHQLFTERWPTTPVNRSLSGTATERNIDFELDIRVEIDSGKCVLHPTTLLQEHDDISLRRSYDRSSRSLDQDSPSKKKKFQTNYASTTHLMTGKKVPSSLQTKPSDLETTVFYIPGVDVKLHYNSKTLKTESPNASRGSSLPRTLSKESKLYGMKDSATSPPSPPLPSTVQSKTNTLLPPQPPPIPAAKGKGSGGVKTAKLYAWVALQSLPEEMVISPCLLDFLEKALETIPITPVERNYTAVSSQDEDMGHFEIPDPMEESTTSLVSSSTSAYSSFPVDVVVYVRVQPSQIKFSCLPVSRVECMLKLPSLDLVFSSNRGELETLGTTYPAETLSPGGNATQSGTKTSASKTGIPGSSGLGSPLGRSRHSSSQSDLTSSSSSSSGLSFTACMSDFSLYVFHPYGAGKQKTAVSGLTPGSGGLGNVDEEPTSVTGRKDSLSINLEFVKVSLSRIRRSGGASFFESQSVSKSASKMDTTLINISAVCDIGSASFKYDMRRLSEILAFPRAWYRRSIARRLFLGDQTINLPTSGPGTPDSIEGVSQHLSPESSRKAYCKTWEQPSQSASFTHMPQSPNVFNEHMTNSTMSPGTVGQSLKSPASIRSRSVSDSSVPRRDSLSKTSTPFNKSNKAASQQGTPWETLVVFAINLKQLNVQMNMSNVMGNTTWTTSGLKSQGRLSVGSNRDREISMSVGLGRSQLDSKGGVVGGTIDVNALEMVAHISEHPNQQPSHKIQITMGSTEARVDYMGSSILMGIFSNADLKLQDEWKVNLYNTLDSSITDKSEIFVHGDLKWDIFQVMISRSTTPDLIKIGMKLQEFFTQQFDTSKRALSTWGPVPYLPPKTMTSNLEKSSQEQLLDAAHHRHWPGVLKVVSGCHISLFQIPLPEDGMQFGGSMSLHGNHMTLACFHGPNFRSKSWALFHLEEPNIAFWTEAQKIWEDGSSDHSTYIVQTLDFHLGHNTMVTKPCGALESPMATITKITRRRHENPPHGVASVKEWFNYVTATRNEELNLLRNVDANNTENSTTVKNSSLLSGFRGGSSYNHETETIFALPRMQLDFKSIHVQEPQEPSLQDASLKPKVECSVVTEFTDHICVTMDAELIMFLHDLVSAYLKEKEKAIFPPRILSTRPGQKSPIIIHDDNSSDKDREDSITYTTVDWRDFMCNTWHLEPTLRLISWTGRKIDPVGVDYILQKLGFHHARTTIPKWLQRGVMDPLDKVLSVLIKKLGTALQDEKEKKGKDKEEH

SEQ ID NO: 44055 - protein, 70 aa, Homo sapiens
RYSRSRSRSRGRRSRSASPRRSRSISLRRSRSASLRRSRSGSIKGSRYFHLLSSWDCHCVPQCPAEGSVP

SEQ ID NO: 44056 - protein, 104 aa, Homo sapiens
  MOD_RES (1)..(1): Any amino acid
XEMKVRILSERKKPLDIDYMGEEQLREKAQELSDWIHQLESEKFDLMAKLKQQKYEINVLYNRISHAQKLLRLALSPRLECSGVISAHCNFHLPGSSDSPASAP

SEQ ID NO: 44057 - protein, 165 aa, Homo sapiens
MSEMAELSELYEESSDLQMDVMPGEGDLPQMEEGPMEEEEAQPMAAPEGKRSLANGPNAGEQPGQVAGADFESEDEGEEFDDWEDDYDYPEEEQLSGAGYRVSAALEEADKMFLRTREPALDGGFQMHYEKTPFDQLAFIEELFSLMVVNRLTEELGCDEIIDRE

SEQ ID NO: 44058 - protein, 81 aa, Homo sapiens
MPRPGSAQRWAAVAGRWGCRLLALLLLVPGPGGASEITFELPDNAKQCFYEDIAQGTKCTLEFQVITGGHYDVDCRLEDPD

SEQ ID NO: 44059 - protein, 78 aa, Homo sapiens
MAVFLEAKDAHSVLKRFPRANEFLEELRQGTIERECMEEICSYEEVKEVFENKEKTMEFWKGYPNAVYSVRDPSQSSD

SEQ ID NO: 44060 - protein, 99 aa, Homo sapiens
MNSLTLNRHTEILEILEIPQLMDTCVRNSYYEEALELAAYVRRLERKYSSIPVIQGIVNEVRQSMQLMLSQLIQQLRTNIQLPACLRVIGYLRRMDVFT

SEQ ID NO: 44061 - protein, 187 aa, Homo sapiens
  MOD_RES (1)..(1): Any amino acid
XISSATYTQIQPHSLIQQQQQIHLQQKQVVIQQQIAIHHQQQFQHRQSQLLHTATHLQLAQQQQQQQQQQQQQQQPQATTLTAPQPPQVPPTQQECPPTLAPGMTLAPVQGTAHVVKGGATTSSPVVAQVPAAFYMQSVHLPGKPQTLAVKRKADSEEERDDVSTLGSMLPAKASPVAESPKVMDEK

SEQ ID NO: 44062 - protein, 1083 aa, Homo sapiens
MPPPGRAPPLGLLLALTALQCPVTESRGIVDSLQKFSSLPAYLPTNLHISNAEESFFLKEANQDLTRNSSLQARVEPFFIYRARTPPIINASYGPFSVEKIIPQELLLTSTAFGNMDKFPFNWKLKSHILDSSIYSNRPKVQTLFYVTGMGWDDSDLTEDLPCVKMFAFPEAREVAASCRLQGAPGLCVAELELLPEWFSSGLDLEPEEEIPALLGGTTMELFFTLYPADKAGQCPLEEEGKWENNIHSGLESPQQAFPARERIGSVVVYPTQDDLKWSLVSLDENVVISVPLNLVREGDTATFLVSLTSSSVADQFTLRIKAAAGVKITAVRVSSEDQWAVQEEIDNGSTQTSATLTCMGHRPDTQSRVNGSFYEILQVDFGIDNSSDLAGAQQITWQVEYPIEDSMSELVVSEIFVSQTTFVGIVPLAMDTEVLNTAILTGKPVSVPVKVVGVQEDGSVVDVSESVECKSADEDVIKVSNNCDSIFVNGKEMKSKVDTIVNFTHQHFTSQFEVTVWAPRLPLQIEISDTELSQIKGWRIPVAANRRPTRESDDEDDEEKKGRGCSLQYQHATVRVLTQFVAESPDLGQLTYMLGPDWQFDITDLVTEFMKVEEPKIAQLQDGRTLAGREPGITTVQVLSPLSDSILAEKTVIVLDDRVTIAELGVQLVAGMSLSLQPHRADKRAIVSTAAALDVLQSPQQEAIVSSWILFSDGSVTPLDIYDPKDYSVTVSSLDEMVVSVQANLESKWPIVVAEGEGQGPLIKLEMMISEPCQKTKRKSVLAVGKGNVKVKFEPSSDEHQGGSNDIEGINREYKDHLSNSIEREGNQERAVQEWFHRGTPVGQEESTNKSTTPQSPMEGKNKLLKSGGPDAFTSFPTQGKSPDPNNPSDLTVTSRGLTDLEIGMYALLCVFCLAILVFLINCVAFAWKYRHKRFAVSEQGNIPHSHDWVWLGNEVELLENPVDITLPSEECTTMIDRGLQFEERNFLLNGSSQKTFHSQLLRPSDYVYEKEIKNEPMNSSGPKRKRVKFTSYTTILPEDGGPYTNSILFDSDDNIKWVCQDMGLGDSQDFRDYMESLQDQM

SEQ ID NO: 44063 - protein, 181 aa, Homo sapiens
MEAIGHAGTCLGILANDGVLLAAERRNIHKLLDEVFFSEKIYKLNEDMACSVAGITSDANVLTNELRLIAQRYLLQYQEPIPCEQLVTALCDIKQAYTQFGGKRPFGVSLLYIGWDKHYGFQLYQSDPSGNYGGWKATCIGNNSAAAVSMLKQDYKEGEMTLKSALALAIKVLNKTMDVSK

SEQ ID NO: 44064 - protein, 130 aa, Homo sapiens
  MOD_RES (1)..(1): Any amino acid
XVLDDVRCSGYESYLWSCPHNGWLSHNCQHSEDAGVICSDTLPTITLPASTVGSESSLALRLVNGGDRCQGRVEVLYQGSWGTVCDDSWDTNDANVVCRQLGCGWAMSAPGNARFGQGSGPIVLDDVRCS

SEQ ID NO: 44065 - protein, 91 aa, Homo sapiens
MKRMMKMRTPQYSTSNTGKTCFPAWWHPVESWSAATWGVKDWTWKPSCVGGVETKTNVMYKTPAPSCVSGICSDCHWQARFHVTTMELLLP

SEQ ID NO: 44066 - protein, 169 aa, Homo sapiens
MDPLEENRQILARQKSNSQSDSHDEEVSPTPPNPVVKARRRRGGVSAEVYTEEDAVSYVRKVIPKDYKTMTALAKAISKNVLFAHLDDNERSDIFDAMFPVTHIAGETVIQQGNEGDNFYVVDQGEVDVYVNGEWVTNISEGGSFGELALIYGTPRAATVKAKTDLKLW

SEQ ID NO: 44067 - protein, 757 aa, Homo sapiens
MALLAMHSWRWAAAAAAFEKRRHSAILIRPLVSVSGSGPQWRPHQLGALGTARAYQQIPESLKSITWQRLGKGNSGQFLDAAKMNKKALQVWPLIEKRTCWHGHAGGGLHTDPKEGLKDVDTRKIIKAMLSYVWPKDRPDLRARVAISLGFLGGAKAMNIVVPFMFKYAVDSLNQMSGNMLNLSDAPNTVATMATAVLIGYGVSRAGAAFFNEVRNAVFGKVAQNSIRRIAKNVFLHLHNLDLGFHLSRQTGALSKAIDRGTRGISFVLSALVFNLLPIMFEVMLVSGVLYYKCGAQFALVTLGTLGTYTAFTVAVTRWRTRFRIEMNKADNDAGNAAIDSLLNYETVKYFNNERYEAQRYDGFLKTYETASLKSTSTLAMLNFGQSAIFSVGLTAIMVLASQGIVAGTLTVGDLVMVNGLLFQLSLPLNFLGTVYRETRQALIDMNTLFTLLKVDTQIKDKVMASPLQITPQTATVAFDNVHFEYIEGQKVLSGISFEVPAGKKVAIVGGSGSGKSTIVRLLFRFYEPQKGSIYLAGQNIQDVSLESLRRAVGVVPQDAVLFHNTIYYNLLYGNISASPEEVYAVAKLAGLHDAILRMPHGYDTQVGERGLKLSGGEKQRVAIARAILKDPPVILYDEATSSLDSITEETILGAMKDVVKHRTSIFIAHRLSTVVDADEIIVLDQGKVAERGTHHGLLANPHSIYSEMWHTQSSRVQNHDNPKWEAKKENISKEEERKKLQEEIVNSVKGCGNCSC

SEQ ID NO: 44068 - protein, 146 aa, Homo sapiens
LKSLLRDYEQEKVLLRKELEEIQSEKEALQSDLLEMKNANEKTRLENQNLLIQVEEVSQTCSKSEIHNEKEKCFIKEHENLKPLLEQKELRDRRAELILLKDSLAKSPSVKNDPLSSVKELEEKIGKNRLERGKLLLQKKEGELLL

SEQ ID NO: 44069 - protein, 98 aa, Homo sapiens
MLAAALLKAKSQELVTFEDVAVYFIRKEWKRLEPAQRDLYRDVMLENYGNVFSLDRETRTENDQEISEDTRSHGVLLGRFQKDISQGLKFKEAYEREV

SEQ ID NO: 44070 - protein, 49 aa, Homo sapiens
MALKRINKELSDLARDPPAQCSAGPVGDDMFHWQATIMGPNDSPYQGGV

SEQ ID NO: 44071 - protein, 112 aa, Homo sapiens
MKYSSSHTLYCLKEEMRDKMRKWREENSRNSEQIVEVGEELINEYASKLGDDIWIIYEQVMIAALDYGRDDLALFCLQELRRQFPGSHRVKRLTGMRFEAMERYDDAIQLYD

SEQ ID NO: 44072 - protein, 76 aa, Homo sapiens
MPVQLSEHPEWNESMHSLRISVGGLPVLASMTKAADPRFRPRWKVILTFFVGAAILWLLCSHRPAPGRPPTHNAHN

SEQ ID NO: 44073 - protein, 841 aa, Homo sapiens
MEREPAGTEEPGPPGRRRRREGRTRTVRSNLLPPPGAEDPAAGAAKGERRRRRGCAQHLADNRLKTTKYTLLSFLPKNLFEQFHRPANVYFVFIALLNFVPAVNAFQPGLALAPVLFILAITAFRDLWEDYSRHRSDHKINHLGCLVFSREEKKYVNRFWKEIHVGDFVRLRCNEIFPADILLLSSSDPDGLCHIETANLDGETNLKRRQVVRGFSELVSEFNPLTFTSVIECEKPNNDLSRFRGCIIHDNGKKAGLYKENLLLRGCTLRNTDAVVGIVIYAGHETKALLNNSGPRYKRSKLERQMNCDVLWCVLLLVCMSLFSAVGHGLWIWRYQEKKSLFYVPKSDGSSLSPVTAAVYSFLTMIIVLQVLIPISLYVSIEIVKACQVYFINQDMQLYDEETDSQLQCRALNITEDLGQIQYIFSDKTGTLTENKMVFRRCTVSGVEYSHDANAQRLARYQEADSEEEEVVPRGGSVSQRGSIGSHQSVRVVHRTQSTKSHRRTGSRAEAKRASMLSKHTAFSSPMEKDITPDPKLLEKVSECDKSLAVARHQEHLLAHLSPELSDVFDFFIALTICNTVVVTSPDQPRTKVRVRFELKSPVKTIEDFLRRFTPSCLTSGCSSIGSLAANKSSHKLGSSFPSTPSSDGMLLRLEERLGQPTSAIASNGYSSQADNWASELAQEQESERELRYEAESPDEAALVYAARAYNCVLVERLHDQVSVELPHLGRLTFELLHTLGFDSVRKRMSVVIRHPLTDEINVYTKGADSVVMDLLQPCSSGTPTPAQLHPSSGEEVLRNIPTQFLLLSKVIFINPFPTEMPIGELHGFFRSVFACLKGLD

SEQ ID NO: 44074 - protein, 59 aa, Homo sapiens
  MOD_RES (1)..(1): Any amino acid
XEWVLVSAHRMKRPWQGQVEPQLLKTVPRHDPLNPLCPGAIRANGEGGPSLLPCSLSSL

SEQ ID NO: 44075 - protein, 3859 aa, Homo sapiens
MEPEDLPWPGELEEEEEEEEEEEEEEEEAAAAAAANVDDVVVVEEVEEEAGRELDSDSHYGPQHLESIDDEEDEEAKAWLQAHPGRILPPLSPPQHRYSEGERTSLEKIVPLTCHVWQQIVYQGNSRTQISDTNVVCLETTAQRGSGDDQKTESWHCLPQEMDSSQTLDTSQTRFNVRTEDTEVTDFPSLEEGILTQSENQVKEPNRDLFCSPLLVIQDSFASPDLPLLTCLTQDQEFAPDSLFHQSELSFAPLRGIPDKSEDTEWSSRPSEVSEALFQATAEVASDLASSRFSVSQHPLIGSTAVGSQCPFLPSEQGNNEETISSVDELKIPKDCDRYDDLCSYMSWKTRKDTQWPENNLADKDQVSVATSFDITDENIATKRSDHFDAARSYGQYWTQEDSSKQAETYLTKGLQGKVESDVITLDGLNENAVVCSERVAELQRKPTRESEYHSSDLRMLRMSPDTVPKAPKHLKAGDTSKGGIAKVTQSNLKSGITTTPVDSDIGSHLSLSLEDLSQLAVSSPLETTTGQHTDTLNQKTLADTHLTEETLKVTAIPEPADQKTATPTVLSSSHSHRGKPSIFYQQGLPDSHLTEEALKVSAAPGLADQTTGMSTLTSTSYSHREKPGTFYQQELPESNLTEEPLEVSAAPGPVEQKTGIPTVSSTSHSHVEDLLFFYRQTLPDGHLTDQALKVSAVSGPADQKTGTATVLSTPHSHREKPGIFYQQEFADSHQTEETLTKVSATPGPADQKTEIPAVQSSSYSQREKPSILYPQDLADSHLPEEGLKVSAVAGPADQKTGLPTVPSSAYSHREKLLVFYQQALLDSHLPEEALKVSAVSGPADGKTGTPAVTSTSSASSSLGEKPSAFYQQTLPNSHLTEEALKVSIVPGPGDQKTGIPSAPSSFYSHREKPIIFSQQTLPDFLFPEEALKVSAVSVLAAQKTGTPTVSSNSHSHSEKSSVFYQQELPDSDLPRESLKMSAIPGLTDQKTVPTPTVPSGSFSHREKPSIFYQQEWPDSYATEKALKVSTGPGPADQKTEIPAVQSSSYPQREKPSVLYPQVLSDSHLPEESLKVSAFPGPADQMTDTPAVPSTFYSQREKPGIFYQQTLPESHLPKEALKISVAPGLADQKTGTPTVTSTSYSQHREKPSIFHQQALPGTHIPEEAQKVSAVTGPGNQKTWIPRVLSTFYSQREKPGIFYQQTLPGSHIPEEAQKVSPVLGPADQKTGTPTPTSASYSHTEKPGIFYQQVLPDNHPTEEALKISVASEPVDQTTGTPAVTSTSYSQYREKPSIFYQQSLPSSHLTEEAKNVSAVPGPADQKTVIPILPSTFYSHTEKPGVFYQQVLPHSHPTEEALKISVASEPVDQTTGTPTVTSTSYSQHTEKPSIFYQQSLPGSHLTEEAKNVSAVPGPGDRKTGIPTLPSTFYSHTEKPGSFYQQVLPHSHLPEEALEVSVAPGPVDQTIGTPTVTSPSSSFGEKPIVIYKQAFPEGHLPEESLKVSVAPGPVGQTTGAPTITSPSYSQHRAKSGSFYQLALLGSQIPEEALRVSSAPGPADQTTGIPTITSTSYSFGEKPIVNYKQAFPDGHLPEEALKVSIVSGPTEKKTDIPAGPLGSSALGEKPITFYRQALLDSPLNKEVVKVSAAPGPADQKTETLPVHSTSYSNRGKPVIFYQQTLSDSHLPEEALKVPPVPGPDAQKTETPSVSSSLYSYREKPIVFYQQALPDSELTQEALKVSAVPQPADQKTGLSTVTSSFYSHTEKPNISYQQELPDSHLTEEALKVSNVPGPADQKTGVSTVTSTSYSHREKPIVSYQRELPHFTEAGLKILRVPGPADQKTGINILPSNSYPQREHSVISYEQELPDLTEVTLKAIGVPGPADQKTGIQIASSSSYSNREKASIFHQQELPDVTEEALNVFVVPGQGDRKTEIPTVPLSYYSRREKPSVISQQELPDSHLTEEALKVSPVSIPAEQKTGIPIGLSSSYSHSHKEKLKISTVHIPDDQKTEFPAATLSSYSQIEKPKISTVIGPNDQKTPSQTAFHSSYSQTVKPNILFQQQLPDRDQSKGILKISAVPELTDVNTGKPVSLSSSYFHREKSNIFSPQELPGSHVTEDVLKVSTIPGPAGQKTVLPTALPSSFSHREKPDIFYQKDLPDRHLTEDALKISSALGQADQITGLQTVPSGTYSHGENHKLVSEHVQRLIDNLNSSDSSVSSNNVLLNSQADDRVVINKPESAGFRDVGSEEIQDAENSAKTLKEIRTLLMEAENMALKRCNFPAPLARFRDISDISFIQSKKVVCFKEPSSTGVSNGDLLHRQPFTEESPSSRCIQKDIGTQTNLKCRRGIENWEFISSTTVRSPLQEAESKVSMALEETLRQYQAAKSVMRSEPEGCSGTIGNKIIIPMMTVIKSDSSSDASDGNGSCSWDSNLPESLESVSDVLLNFFPYVSPKTSITDSREEEGVSESEDGGGSSVDSLAAHVKNLLQCESSLNHAKEILRNAEEEESRVRAHAWNMKFNLAHDCGYSISELNEDDRRKVEEIKAELFGHGRTTDLSKGLQSPRGMGCKPEAVCSHIIIESHEKGCFRTLTSEHPQLDRHPCAFRSAGPSEMTRGRQNPSSCRAKHVNLSASLDQNNSHFKVWNSLQLKSHSPFQNFIPDEFKISKGLRMPFDEKMDPWLSELVEPAFVPPKEVDFHSSSQMPSPEPMKKFTTSITFSSHRHSKCISNSSVVKVGVTEGSQCTGASVGVFNSHFTEEQNPPRDLKQKTSSPSSFKMHSNSQDKEVTILAEGRRQSQKLPVDFERSFQEEKPLERSDFTGSHSEPSTRANCSNFKEIQISDNHTLISMGRPSSTLGVNRSSSRLGVKEKNVTITPDLPSCIFLEQRELFEQSKAPRADDHVRKHHSPSPQHQDYVAPDLPSCIFLEQRELFEQCKAPYVDHQMRENHSPLPQGQDSIASDLPSPISLEQCQSKAPGVDDQMNKHHFPLPQGQDCVVEKNNQHKPKSHISNINVEAKFNTVVSQSAPNHCTLAASASTPPSNRKALSCVHITLCPKTSSKLDSGTLDERFHSLDAASKARMNSEFNFDLHTVSSRSLEPTSKLLTSKPVAQDQESLGFLGPKSSLDFQVVQPSLPDSNTITQDLKTIPSQNSQIVTSRQIQVNISDFEGHSNPEGTPVFADRLPEKMKTPLSAFSEKLSSDAVTQITTESPEKTLFSSEIFINAEDRGHEIIEPGNQKLRKAPVKFASSSSVQQVTFSRGTDGQPLLLPYKPSGSTKMYYVPQLRQIPPSPDSKSDTTVESSHSGSNDAIAPDFPAQVLGTRDDDLSATVNIKHKEGIYSKRVVTKASLPVGEKPLQNENADASVQVLITGDENLSDKKQQEIHSTRAVTEAAQAKEKESLQKDTADSSAAAAAEHSAQVGDPEMKNLPDTKAITQKEEIHRKKTVPEEAWPNNKESLQINIEESECHSEFENTTRSVFRSAKFYIHHPVHLPSDQDICHESLGKSVFMRHSWKDFFQHHPDKHREHMCLPLPYQNMDKTKTDYTRIKSLSINVNLGNKEVMDTTKSQVRDYPKHNGQISDPQRDQKVTPEQTTQHTVSLNELWNKYRERQRQQRQPELGDRKELSLVDRLDRLAKILQNPITHSLQVSESTHDDSRGERSVKEWSGRQQQRNKLQKKKRFKSLEKSHKNTGELKKSKVLSHHRAGRSNQIKIEQIKFDKYILSKQPGFNYISNTSSDCRPSEESELLTDTTTNILSGTTSTVESDILTQTDREVALHERSSSVSTIDTARLIQAFGHERVCLSPRRIKLYSSITNQQRRYLEKRSKHSKKVLNTGHPLVTSEHTRRRHIQVHGYRFHLAM

SEQ ID NO: 44076 - protein, 197 aa, Homo sapiens
VLLKHQASINELKRTLKEPNSKLIHRDRDWERERRLPSSPASPSPKGTPEKANEPVKTETMTVSSLAIRKKIEPEAVLQTRVSAMDNTQQVDGSASVGREFIATTPSITTETISTTMENSLKSGKGAAAMIPGPQTVATEIRSLSPIIGKDVLTSTYGATAETLSTSTTTHVTKTVKGGFSETRIEKRIIITGDEDV

SEQ ID NO: 44077 - protein, 2276 aa, Homo sapiens
EPTSPAAAVPTLEEPTSSAAAVLTPEELSSPAASVPTPEEPASPAAAVSNLEEPASPAAAVPTPEVAAIPAASVPTPEVPAIPAAAVPPMEEVSPIGVPFLGVSAHTDSVPISEEGTPVLEEASSTGMWIKEDLDSLVFGIKEVTSTVLHGKVPLAATAGLNSDEMFQKEQVDPLQMKLQQVNGLGQGLIQSAGKDCDVQGLEHDMEEINARWNTLNKKVAQRIAQLQEALLHCGKFQDALEPLLSWLADTEELIANQKPPSAEYKVVKAQIQEQKLLQRLLDDRKATVDMLQAEGGRIAQSAELADREKITGQLESLESRWTELLSKAAARQKQLEDILVLAKQFHETAEPISDFLSVTEKKLANSEPVGTQTAKIQQQIIRHKALNEEIVNRKKNVDQAIKNGQALLKQTTGEEVLLIQEKLDGIKTRYADITVTSSKALRTLEQARQLATKFQSTYEELTGWLREVEEELATSGGQSPTGEQIPQFQQRQKELKKEVMEHRLVLDTVNEVSRALLELVPWRAREGLDKLVSDANEQYKLVSDTIGQRVDEIDAAIQRSQQYEQAADAELAWVAETKRKLMALGPIRLEQDQTTAQLQVQKAFSIDIIRHKDSMDELFSHRSEIFGTCGEEQKTVLQEKTESLIQQYEAISLLNSERYARLERAQVLVNQFWETYEELSPWIEETRALIAQLPSPAIDHEQLRQQQEEMRQLRESIAEHKPHIDKLLKIGPQLKELNPEEGEMVEEKYQKAENMYAQIKEEVRQRALALDEAVSQSTQITEFHDKIEPMLETLENLSSRLRMPPLIPAEVDKIRECISDNKSATVELEKLQPSFEALKRRGEELIGRSQGADKDLAAKEIQDKLDQMVFFWEDIKARAEEREIKFLDVLELAEKFWYDMAALLTTIKDTQDIVHDLESPGIDPSIIKQQVEAAETIKEETDGLHEELEFIRILGADLIFACGETEKPEVRKSIDEMNNAWENLNKTWKERLEKLEDAMQAAVQYQDTLQAMFDWLDNTVIKLCTMPPVGTDLNTVKDQLNEMKEFKVEVYQQQIEMEKLNHQGELMLKKATDETDRDIIREPLTELKHLWENLGEKIAHRQHKLEGALLALGQFQHALEELMSWLTHTEELLDAQRPISGDPKVIEVELAKHHVLKNDVLAHQATVETVNKAGNELLESSAGDDASSLRSRLEAMNQCWESVLQKTEEREQQLQSTLQQAQGFHSEIEDFLLELTRMESQLSASKPTGGLPETAREQLDTHMELYSQLKAKEETYNQLLDKGRLMLLSRDDSGSGSKTEQSVALLEQKWHVVSSKMEERKSKLEEALNLATEFQNSLQEFINWLTLAEQSLNIASPPSLILNTVLSQIEEHKVFANEVNAHRDQIIELDQTGNQLKFLSQKQDVVLIKNLLVSVQSRWEKVVQRSIERGRSLDDARKRAKQFHEAWKKLIDWLEDAESHLDSELEISNDPDKIKLQLSKHKEFQKTLGGKQPVYDTTIRTGRALKEKTLLPEDSQKLDNFLGEVRDKWDTVCGKSVERQHKLEEALLFSGQFMDALQALVDWLYKVEPQLAEDQPVHGDLDLVMNLMDAHKVFQKELGKRTGTVQVLKRSGRELIENSRDDTTWVKGQLQELSTRWDTVCKLSVSKQSRLEQALKQAEVFRDTVHMLLEWLSEAEQTLRFRGALPDDTEALQSLIDTHKEFMKKVEEKRVDVNSAVAMGEVILAVCHPDCITTIKHWITIIRARFEEVLTWAKQHQQRLETALSELVANAELLEELLAWIQWAETTLIQRDQEPIPQNIDRVKALIAEHQTFMEEMTRKQPDVDRVTKTYKRKNIEPTHAPFIEKSRSGGRKSLSQPTPPPMPILSQSEAKNPRINQLSARWQQVWLLALERQRKLNDALDRLEELKEFANFDFDVWRKKYMRWMNHKKSRVMDFFRRIDKDQDGKITRQEFIDGILASKFPTTKLEMTAVADIFDRDGDGYIDYYEFVAALHPNKDAYRPTTDADKIEDEVTRQVAQCKCAKRFQVEQIGENKYRFGDSQQLRLVRILRSTVMVRVGGGWMALDEFLVKNDPCRARGRTNIELREKFILPEGASQGMTPFRSRGRRSKPSSRAASPTRSSSSASQSNHSCTSMPSSPATPASGTKVIPSSGSKLKRPTPTFHSSRTSLAGDTSNSSSPASTGAKTNRADPKKSASRPGSRAGSRAGSRASSRRGSDASDFDLLETQSACSDTSESSAAGGQGNSRRGLNKPSKIPTMSKKTTTASPRTPGPKR

SEQ ID NO: 44078 - protein, 295 aa, Homo sapiens
MASLEVSRSPRRSRRELEVRSPRQNKYSVLLPTYNERENLPLIVWLLVKSFSESGINYEIIIIDDGSPDGTRDVAEQLEKIYGSDRILLRPREKKLGLGTAYIHGMKHATGNYIIIMDADLSHHPKFIPEFIRKQKEGNFDIVSGTRYKGNGGVYGWDLKRKIISDGVLPCCPGWSLLGSSDPAILASWDYRCEPPRLASRGANFLTQILLRPGASDLTGSFRLYRKEVLEKLIEKCVSKGYVFQMEMIVRARQLNYTIGEVPISFVDRVYGESKLGGNEIVSFLKGLLTLFATT

SEQ ID NO: 44079 - protein, 171 aa, Homo sapiens
MAPGVLAGVVSVVAGLGDAVGRELHRERDMRLSWFRVLTVLSICLSAVATATGAEGKRKLQIGVKKRVDHCPIKSRKGDVLHMHYTGKLEDGTEFDSSLPQNQPFVFSLGTGQVIKGWDQGLLGMCEGEKRKLVIPSELGYGERGAPPKIPGGATLVFEVELLKIERRTEL

SEQ ID NO: 44080 - protein, 174 aa, Homo sapiens
  MOD_RES (1)..(1): Any amino acid
XKAVLLNLGTIELYGSNDPYRREPRSPRKSRQPSGAGLCDISEGTVVPEDRCKSPTSGSSSPHNSDDEQKMNNFIEKAKMSRKLSLPTDLKPDLDVKDNSFSRSRSSSVTSIDKESREAISALHFCETFTRKTDSSPSPCLWVGTTLGTVLVIALNLPPGGEQRLLQPVIVSPS

SEQ ID NO: 44081 - protein, 97 aa, Homo sapiens
MAEKVNNFPPLPKFIPLKPCFYQDFEADIPPQHVSMTKRLYYLWMLNSVTLAVNLVGCLAWLIGGGGATNFGLAFLWLILFTPCSYVCWFRPIYKAF

SEQ ID NO: 44082 - protein, 203 aa, Homo sapiens
MKMFESADSTATRSGQDLWAEICSCLPNPEQEDGANNAFSDSFVDSCPEGEGQREVADFAVQPAVKPWAPLQDSEVYLASLEKKLRRIKGLNQEVTSKDMLRTLAQAKKECWDRFLQEKLASEFFVDGLDSDERPCNSRTPGSSSFSEDGAWDSHQCAEQRWRRTFPAQQSSWHGLGKIKSLNPRPHRYQVADHTAKPSDPDI

SEQ ID NO: 44083 - protein, 102 aa, Homo sapiens
MGQPSLTWMLMVVVASWFITTAATDTSEARWCSECHSNATCTEDEAVTTCTCQEGFTGDGLTCVDLDECAIPGAHNCSANSSCVNTPGSFSCVCPEGFRLSP

SEQ ID NO: 44084 - protein, 224 aa, Homo sapiens
MQAARMAASLGRQLLRLGGGSSRLTALLGQPRPGPARRPYAGGAAQLALDKSDSHPSDALTRKKPAKAESKSFAVGMFKGQLTTDQVFPYPSVLNEEQTQFLKELVEPVSRFFEEVNDPAKNDALEMVEETTWQGLKELGAFGLQVPSELGGVGLCNTQYARLVEIVGMHDLGVGITLGAHQSIGFKGILLFGTKAQKEKYLPKLASALSPTGETVAAFCLTEP

SEQ ID NO: 44085 - protein, 716 aa, Homo sapiens
MAPQKHGGGGGGGSGPSAGSGGGGFGGSAAVAAATASGGKSGGGSCGGGGSYSASSSSSAAAAAGAAVLPVKKPKMEHVQADHELFLQAFEKPTQIYRFLRTRNLIAPIFLHRTLTYMSHRNSRTNIKSLSAHLQLTFTGFFHKNDKPSPNSENEQNSVTLEVLLVKVCHKKRKDVSCPIRQVPTGKKQVPLNPDLNQTKPGNFPSLAVSSNEFEPSNSHMVKSYSLLFRVTRPGRREFNGMINGETNENIDVNEELPARRKRNREDGEKTFVAQMTVFDKNRRLQLLDGEYEVAMQEMEECPISKKRATWETILDGKRLPPFETFSQGPTLQFTLRWTGETNDKSTAPIAKPLATRNSESLHQENKPGSVKPTQTIAVKESLTTDLQTRKEKDTPNENRQKLRIFYQFLYNNNTRQQTEARDDLHCPWCTLNCRKLYSLLKHLKLCHSRFIFNYVYHPKGARIDVSINECYDGSYAGNPQDIHRQPGFAFSRNGPVKRTPITHILVCRPKRTKASMSEFLESEDGEVEQQRTYSSGHNRLYFHSDTCLPLRPQEMEVDSEDEKDPEWLREKTITQIEEFSDVNEGEKEVMKLWNLHVMKHGFIADNQMNHACMLFVENYGQKIIKKNLCRNFMLHLVSMHDFNLISIMSIDKAVTKLREMQQKLEKGESASPANEEITEEQNGTANGFSEINSKEKALETDSVSGVSKQSKKQKL

SEQ ID NO: 44086 - protein, 193 aa, Homo sapiens
  MOD_RES (1)..(1): Any amino acid
XFHPPVRGDSGGRDVAELFYRKLTGLPGDESPVVMHHHGRHFIHIRHSGLYLVVTTSENVSPFSLLELLSRLATLLGDYCGSLGEGTISRNVALVYELLDEVLDYGYVQTTSTEMLRNFIQTEAVVSKPFSLFDLSSVGLFGAETQQSKVAPSSAASRPVLSSRSDQSQKNEVFLDVVERLSVLIASNRCALA

SEQ ID NO: 44087 - protein, 41 aa, Homo sapiens
  MOD_RES (1)..(1): Any amino acid
XKEQEKEKKSVGLMYHDASRWGLTLQTYVQLTMLDRHTRPQ

SEQ ID NO: 44088 - protein, 651 aa, Homo sapiens
MVAERTHKAAATGARGPGELGAPGTVALVAARAERGARLPSPGSCGLLTLALCSLALSLLAHFRTAELQARVLRLEAERGEQQMETAILGRVNQLLDEKWKLHSRRRREAPKTSPGCNCPPGPPGPTGRPGLPGVKGQPGEKGSPGDAGLSIIGPRGPPGQPGTRGFPGFPGPIGLDGKPGHPGPKGDMGLTGPPGQPGPQGQKGEKGQCGEYPHRLLPLLNSVRLAPPPVIKRRTFQGEQSQASIQGPPGPPGPPGPSGPLGHPGLPGPMGPPGLPGPPGPKGDPGIQGYHGRKGERGMPGMPGKHGAKGAPGIAVAGMKGEPGIPGTKGEKGAEGSPGLPGLLGQKGEKGDAGNSIGGGRGEPGPPGLPGPPGPKGEAGVDGQVGPPGQPGDKGERGAAGEQGPDGPKGSKGEPGKGEMVDYNGNINEALQEIRTLALMGPPGLPGQIGPPGAPGIPGQKGEIGLPGPPGHDGEKGPRGKPGDMGPPGPQGPPGKDGPPGVKGENGHPGSPGEKGEKGETGQAGSPGLQGVPGPKGEAGLDGAKGEKGFQGEKGDRGPLGLPGTPGPIGVPGPAGPKGERGSKGDPGMTGPTGAAGLPGLHGPPGDKGNRGHRGFKGEKGEPGLPGLDGLDAPCPLGEDGLPVQGCWNK

SEQ ID NO: 44089 - protein, 114 aa, Homo sapiens
MFTSEKGVVEEWLSEFKTLPETSLPNYATNLKDKSSLVSSLYKVIQEPQSELLEPVCHQLFEFYRSGEEQLLQFTLQFLPELIWCYLAVSASRNVHSSGCIEALLLGVYNLVCI

SEQ ID NO: 44090 - protein, 172 aa, Homo sapiens
  MOD_RES (1)..(1): Any amino acid
XCYNPMTNQWSPCAPMSVPRNRIGVGVIDGHIYAVGGSHGCIHHNSVERYEPERDEWHLVAPMLTRRIGVGVAVLNRLLYAVGGFDGTNRLNSAECYYPERNEWRMITAMNTIRSGAGGYDGHTFLDSVECYDPDTDTWSEVTRMTSGRSGVGVAVTMEPCRKQIDQQNCTC

SEQ ID NO: 44091 - protein, 63 aa, Homo sapiens
  MOD_RES (1)..(1): Any amino acid
XPDPHFKRTKHKWRIISPTLLAEYAYVLRVGGDFAYAGAGVYHNRCAGATRLDVHSFRRAPTV

SEQ ID NO: 44092 - protein, 109 aa, Homo sapiens
MACTREAKYEENMRHHQLHPVIKAFLCGSISGTCSTLLFQPLDLLKTRLQTLQPSDHGSRRVGMLAVLLKVVRTESLLGLWKGMSPSIVRCVPGVGIYFGTLYSLKQYF

SEQ ID NO: 44093 - protein, 636 aa, Homo sapiens
MSQWYELQQLDSKFLEQVHQLYDDSFPMEIRQYLAQWLEKQDWEHAANDVSFATIRFHDLLSQLDDQYSRFSLENNFLLQHNIRKSKRNLQDNFQEDPIQMSMIIYSCLKEERKILENAQRFNQAQSGNIQSTVMLDKQKELDSKVRNVKDKVMCIEHEIKSLEDLQDEYDFKCKTLQNREHETNGVAKSDQKQEQLLLKKMYLMLDNKRKEVVHKIIELLNVTELTQNALINDELVEWKRRQQSACIGGPPNACLDQLQNWFTIVAESLQQVRQQLKKLEELEQKYTYEHDPITKNKQVLWDRTFSLFQQLIQSSFVVERQPCMPTHPQRPLVLKTGVQFTVKLRLLVKLQELNYNLKVKVLFDKDVNERNTVKGFRKFNILGTHTKVMNMEESTNGSLAAEFRHLQLKEQKNAGTRTNEGPLIVTEELHSLSFETQLCQPGLVIDLETTSLPVVVISNVSQLPSGWASILWYNMLVAEPRNLSFFLTPPCARWAQLSEVLSWQFSSVTKRGLNVDQLNMLGEKLLGPNASPDGLIPWTRFCKENINDKNFPFWLWIESILELIKKHLLPLWNDGCIMGFISKERERALLKDQQPGTFLLRFSESSREGAITFTWVERSQNGGGLLSADQGCESM

SEQ ID NO: 44094 - protein, 238 aa, Homo sapiens
MAGGQTNMIYAVRSVVPNKSNNEIVLVLQQFDFNVDKAVQAFVDGSAIQVLKEWNMTGKKKNNKRKRSKSKQHQGNKDAKDKVERPEAGPLQPQPPQIQNGPMNGCEKDSSSTDSANEKPALIPREKKISILEEPSKALRGVTGPNIEKSVKDLQRCTVSLTRYRVMIKEEVDSSVKKIKAAFAELHNCIIDKEVSLMAEMDKVKEEAMEILTARQKKAEELKRLTDLASQMAEMQLA

SEQ ID NO: 44095 - protein, 1047 aa, Homo sapiens
MTTANCGAHDELDFKLVFGEDGAPAPPPPGSRPADLEPDDCASIYIFNVDPPPSTLTTPLCLPHHGLPSHSSVLSPSFQLQSHKNYEGTCEIPESKYSPLGGPKPFECPSIQITSISPNCHQELDAHEDDLQINDPEREFLERPSRDHLYLPLEPSYRESSLSPSPASSISSRSWFSDASSCESLSHIYDDVDSELNEAAARFTLGSPLTSPGGSPGGCPGEETWHQQYGLGHSLSPRQSPCHSPRSSVTDENWLSPRPASGPSSRPTSPCGKRRHSSAEVCYAGSLSPHHSPVPSPGHSPRGSVTEDTWLNASVHGGSGLGPAVFPFQYCVETDIPLKTRKTSEDQAAILPGKLELCSDDQGSLSPARETSIDDGLGSQYPLKKDSCGDQFLSVPSPFTWSKPKPGHTPIFRTSSLPPLDWPLPAHFGQCELKIEVQPKTHHRAHYETEGSRGAVKASTGGHPVVKLLGYNEKPINLQMFIGTADDRYLRPHAFYQVHRITGKTVATASQEIIIASTKVLEIPLLPENNMSASIDCAGILKLRNSDIELRKGETDIGRKNTRVRLVFRVHIPQPSGKVLSLQIASIPVECSQRSAQELPHIEKYSINSCSVNGGHEMVVTGSNFLPESKIIFLEKGQDGRPQWEVEGKIIREKCQGAHIVLEVPPYHNPAVTAAVQVHFYLCNGKRKKSQSQRFTYTPVLMKQEHREEIDLSSVPSLPVPHPAQTQRPSSDSGCSHDSVLSGQRSLICSIPQTYASMVTSSHLPQLQCRDESVSKEQHMIPSPIVHQPFQVTPTPPVGSSYQPMQTNVVYNGPTCLPINAASSQEFDSVLFQQDATLSGLVNLGCQPLSSIPFHSSNSGSTGHLLAHTPHSVHTLPHLQSMGYHCSNTGQRSLSSPVADQITGQPSSQLQPITYGPSHSGSATTASPAASHPLASSPLSGPPSPQLQPMPYQSPSSGTASSPSPATRMHSGQHSTQAQSTGQGGLSAPSSLICHSLCDPASFPPDGATVSIKPEPEDREPNFATIGLQDITLDDGFVKAEKPLSHD

SEQ ID NO: 44096 - protein, 308 aa, Homo sapiens
MAALGGDGLRLLSVSRPERPPESAALGGLGPGLCCWVSVFSCLSLACSYVGSLYVWKSELPRDHPAVIKRRFTSVLVVSSLSPLCVLLWRELTGIQPGTSLLTLMGFRLEGIFPAALLPLLLTMILFLGPLMQLSMDCPCDLADGLKVVLAPRSWARCLTDMRWLRNQVIAPLTEELVFRACMLPMLAPCMGLGPAVFTCPLFFGVAHFHHIIEQLRFRQSSVGNIFLSAGHLIGPVLCHSFCNYMGFPAVCAALEHPQRRPLLAGYALGVGLFLLLLQPLTDPKLYGSLPLCVLLERAGDSEAPLCS

SEQ ID NO: 44097 - protein, 117 aa, Homo sapiens
MIVSIFSNKETLFQREMKKKTVCTLNMGDKKYEDMEGEENGDNTISTGLLYSEADRCPICLNCLLEKEVGFPESCNHVFCMTCILKWAETLASCPIDRKPFQAVFKFSALEGYVKVQ

SEQ ID NO: 44098 - protein, 128 aa, Homo sapiens
  MOD_RES (1)..(1): Any amino acid
XSIAGTRPSVRNGQLLVSTGLPALDQLLGGGLAVGTVLLIEEDKYNIYSPLLFKYFLAEGIVNGHTLLVASAKEDPANILQIKKELFLVSLLIRVLLCHPGWSAVAQSWLTAAPASRTQEIFPPQPPK

SEQ ID NO: 44099 - protein, 126 aa, Homo sapiens
MADLDSPPKLSGVQQPSEGVGGGRCSEISAELIRSLTELQELEAVYERLCGEEKVVERELDALLEQQNTIESKMVTLHRMGPNLQLIEGDAKQLAGMITFTCNLAENVSSKVRQLDLAKKHSTNLE

SEQ ID NO: 44100 - protein, 86 aa, Homo sapiens
MKHTTDFYFNIAGHQAMHYSRPSTDAAPGGVPAACAAGEGTHRVRALQRWGGPLHRGCLRLAPVCDGLESEEGAVFPHGQEAGCLH

SEQ ID NO: 44101 - protein, 360 aa, Homo sapiens
MAEAVERTDELVREYLLFRGFTHTLRQLDAEIKADKEKGFRVDKIVDQLQQLMQVYDLAALRDYWSYLERRLFSRLEDIYRPTIHKLKTSLFRFYLVYTIQTNRNDKAQEFFAKQATELQNQAEWKDWFVLPFLPSPDTNPTFATYFSRQWADTFIVSLHNFLSVLFQCMPVPVILNFDAECQRTNQVQEENEVLRQKLFALQAEIHRLKKEEQQPEEEEALVQHKLPPYVSNMDRLGDSELAMVCSQRNASLSQSPRVGFLSSLLPQSKKSPSRLSPAQGPPQPQSSAKKESFGGQGTKGKDPTSGAKDGKSLLSGLATGESGWSQHRQRRLQDHGKERKELFSTTTSQLLLFLPDTPD

SEQ ID NO: 44102 - protein, 53 aa, Homo sapiens
MMAADIPRVTTPLSSLVQVPQEEDRQEEEVTTMILEDDSWVQEAVLQEDGPES

SEQ ID NO: 44103 - protein, 249 aa, Homo sapiens
MTSETLWWLITLKKQLGDNEAITQEIVGCAHLENYALKMFLYADNEDRAGRFHKNMIKSFYTASLLIDVITVFGELTDENVKHRKYARWKATYIHNCLKNGETPQAGPVGIEEDNDIEENEDAGAASLPTQPTQPSSSSTYDPSNMPSGNYTGIQIPPGAHAPANTPAEVPHSTGVASNTIQPTPQTIPAIDPALFNTISQGDVRLTPEDFARAQKYCKYAGSALQYEDVSTAVQNLQKALKLLTTGRE

SEQ ID NO: 44104 - protein, 79 aa, Homo sapiens
MFECITENFSIDPARTLMVGDRLETDILFGHRCGMTTVLTLTGVSRLEEAQAYLAAGQHDLVPHYYVESIADLTEGLED

SEQ ID NO: 44105 - protein, 307 aa, Homo sapiens
PGVTPIDGAPHRSYSECYPVLLDGVMVGWVDKDLAPGIADSLRHFKVLREKRIPPWMEVVLIPMTGKPSLYPGLFLFTTPCRLVRPVQNLALGKEELIGTMEQSPLVRPSMYDYYDMDNYPIGTNAIVAVISYTGYDMEDAMIVNKASWERGFAHGSVYKSEFIDLSEKIKQGDSSLVFGIKPGDPRVLQKLDDDGLPFIGAKLQYGDPYYSYLNLNTGESFVMYYKSKENCVVDNIKVCSNDTGSGKFKCVCITMRVPRNPTIGDKFASRHGQKGILSRLWPAEDMPFTESGMVPDILFNPHGFPS

SEQ ID NO: 44106 - protein, 145 aa, Homo sapiens
PPGPGTRWPYRSRDTRRSFPEPEEPPEGGSYAGSLAEPYEELEAEECGILDGCTNGRCVRVPEGFTCRCFDGYRLDMTRMACVAFSSDRCLPSADINECDEAEAASPLCVNARCLNTDGSFRCICRPGFAPTHQPHHCAPARPRA

SEQ ID NO: 44107 - protein, 201 aa, Homo sapiens
ASRGTPCERPVRVYADGIFDLFHSGHARALMQAKNLFPNTYLIVGVCSDELTHNFKGFTVMNENERYDAVQHCRYVDEVVRNAPWTLTPEFLAEHRIDFVAHDDIPYSSAGSDDVYKHIKEAGMFAPTQRTEGISTSDIITRIVRDYDVYARRNLQRGYTAKELNVSFINVSSSLTPEFPDSVGDISPPTPSQLNWLCSWL

SEQ ID NO: 44108 - protein, 56 aa, Homo sapiens
  MOD_RES (1)..(1): Any amino acid
XWPAMCIHGDKSQPERDWVLNEFRSGKAPILIATDVASRGLGSPALGNQMGLQRSI

SEQ ID NO: 44109 - protein, 49 aa, Homo sapiens
MTTLDHVIATHQSEWVSFNEEPPFPAHSQGGTEEHLPGLSSSPDQSESS

SEQ ID NO: 44110 - protein, 38 aa, Homo sapiens
METDLNSQDRKDLDKFIKFFALKTVQVIVQARLGEKIC

SEQ ID NO: 44111 - protein, 4242 aa, Homo sapiens
MMPAQYALTSSLVLLVLLSTARAGPFSSRSNVTLPAPRPPPQPGGHTVGAGVGSPSSQLYEHTVEGGEKQVVFTHRINLPPSTGCGCPPGTEPPVLASEVQALRVRLEILEELVKGLKEQCTGGCCPASAQAGTGQTDVRTLCSLHGVFDLSRCTCSCEPGWGGPTCSDPTDAEIPPSSPPSASGSCPDDCNDQGRCVRGRCVCFPGYTGPSCGWPSCPGDCQGRGRCVQGVCVCRAGFSGPDCSQRSCPRGCSQRGRCEGGRCVCDPGYTGDDCGMRSCPRGCSQRGRCENGRCVCNPGYAGEDCGVRSCPRGCSQRGRCKDGRCVCDPGYTGEDCGTRSCPWDCGEGGRCVDGRCVCWPGYTGEDCSTRTCPRDCRGRGRCEDGECICDTGYSGDDCGVRSCPGDCNQRGRCEDGRCVCWPGYTGTDCGSRACPRDCRGRGRCENGVCVCNAGYSGEDCGVRSCPGDCRGRGRCESGRCMCWPGYTGRDCGTRACPGDCRGRGRCVDGRCVCNPGFTGEDCGSRRCPGDCRGHGLCEDGVCVCDAGYSGEDCSTRSCPGGCRGRGQCLDGRCVCEDGYSGEDCGVRQCPNDCSQHGVCQDGVCICWEGYVSEDCSIRTCPSNCHGRGRCEEGRCLCDPGYTGPTCATRMCPADCRGRGRCVQGVCLCHVGYGGEDCGQEEPPASACPGGCGPRELCRAGQCVCVEGFRGPDCAIQTCPGDCRGRGECHDGSCVCKDGYAGEDCGEEVPTIEGMRMHLLEETTVRTEWTPAPGPVDAYEIQFIPTTEGASPPFTARVPSSASAYDQRGLAPGQEYQVTVRALRGTSWGLPASKTITTMIDGPQDLRVVAVTPTTLELGWLRPQAEVDRFVVSYVSAGNQRVRLEVPPEADGTLLTDLMPGVEYVVTVTAERGRAVSYPASVRANTGSSPLGLLGTTDEPPPSGPSTTQGAQAPLLQQRPQELGELRVLGRDETGRLRVVWTAQPDTFAYFQLRMRVPEGPGAHEEVLPGDVRQALVPPPPPGTPYELSLHGVPPGGKPSDPIIYQGIMDKDEEKPGKSSGPPRLGELTVTDRTSDSLLLRWTVPEGEFDSFVIQYKDRDGQPQVVPVEGPQRSAVITSLDPGRKYKFVLYGFVGKKRHGPLVAEAKILPQSDPSPGTPPHLGNLWVTDPTPDSLHLSWTVPEGQFDTFMVQYRDRDGRPQVVPVEGPERSFVVSSLDPDHKYRFTLFGIANKKRYGPLTADGTTAPERKEEPPRPEFLEQPLLGELTVTGVTPDSLRLSWTVAQGPFDSFMVQYKDAQGQPQAVPVAGDENEVTVPGLDPDRKYKMNLYGLRGRQRVGPESVVAKTAPQEDVDETPSPTELGTEAPESPEEPLLGELTVTGSSPDSLSLFWTVPQGSFDSFTVQYKDRDGRPRAVRVGGKESEVTVGGLEPGHKYKMHLYGLHEGQRVGPVSAVGVTAPQQEETPPATESPLEPRLGELTVTDVTPNSVGLSWTVPEGQFDSFIVQYKDKDGQPQVVPVAADQREVTVYNLEPERKYKMNMYGLHDGQRMGPLSVVIVTAPLPPAPATEASKPPLEPRLGELTVTDITPDSVGLSWTVPEGEFDSFVVQYKDRDGQPQVVPVAADQREVTIPDLEPSRKYKFLLFGIQDGKRRSPVSVEAKTVARGDASPGAPPRLGELWVTDPTPDSLRLSWTVPEGQFDSFVVQFKDKDGPQVVPVEGHERSVTVTPLDAGRKYRFLLYGLLGKKRHGPLTADGTTEARSAMDDTGTKRPPKPRLGEELQVTTVTQNSVGLSWTVPEGQFDSFVVQYKDRDGQPQVVPVEGSLREVSVPGLDPAHRYKLLLYGLHHGKRVGPISAVAITAGREETETETTAPTPPAPEPHLGELTVEEATSHTLHLSWMVTEGEFDSFEIQYTDRDGQLQMVRIGGDRNDITLSGLESDHRYLVTLYGFSDGKHVGPVHVEALTVPEEEKPSEPPTATPEPPIKPRLGELTVTDATPDSLSLSWTVPEGQFDHFLVQYRNGDGQPKAVRVPGHEEGVTISGLEPDHKYKMNLYGFHGGQRMGPVSVVGVTAAEEETPSPTEPSMEAPEPAEEPLLGELTVTGSSPDSLSLSWTVPQGRFDSFTVQYKDRDGRPQVVRVGGEESEVTVGGLEPGRKYKMHLYGLHEGRRVGPVSAVGVTAPEEESPDAPLAKLRLGQMTVRDITSDSLSLSWTVPEGQFDHFLVQFKNGDGQPKAVRVPGHEDGVTISGLEPDHKYKMNLYGFHGGQRVGPVSAVGLTAPGKDEEMAPASTEPPTPEPPIKPRLEELTVTDATPDSLSLSWTVPEGQFDHFLVQYKNGDGQPKATRVPGHEDRVTISGLEPDNKYKMNLYGFHGGQRVGPVSAIGVTAAEEETPSPTEPSMEAPEPPEEPLLGELTVTGSSPDSLSLSWTVPQGRFDSFTVQYKDRDGRPQVVRVGGEESEVTVGGLEPGRKYKMHLYGLHEGRRVGPVSTVGVTAPQEDVDETPSPTEPGTEAPEPPEEPLLGELTVTGSSPDSLSLSWTVPQGRFDSFTVQYKDRDGRPQAVRVGGQESKVTVRGLEPGRKYKMHLYGLHEGRRLGPVSAVGVTEDEAETTQAVPTMTPEPPIKPRLGELTMTDATPDSLSLSWTVPEGQFDHFLVQYRNGDGQPKAVRVPGHEDGVTISGLEPDHKYKMNLYGFHGGQRVGPISVIGVTAAEEETPSPTELSTEAPEPPEEPLLGELTVTGSSPDSLSLSWTIPQGHFDSFTVQYKDRDGRPQVMRVRGEESEVTVGGLEPGRKYKMHLYGLHEGRRVGPVSTVGVTEDEAETTQAVPTTTPEPPNKPRLGELTVTDATPDSLSLSWMVPEGQFDHFLVQYRNGDGQPKVVRVPGHEDGVTISGLEPDHKYKMNLYGFHGGQRVGPISVIGVTAAEEETPAPTEPSTEAPEPPEEPLLGELTVTGSSPDSLSLSWTIPQGRFDSFTVQYKDRDGRPQVVRVRGEESEVTVGGLEPGCKYKMHLYGLHEGQRVGPVSAVGVTAPKDEAETTQAVPTMTPEPPIKPRLGELTVTDATPDSLSLSWMVPEGQFDHFLVQYRNGDGQPKAVRVPGHEDGVTISGLEPDHKYKMNLYGFHGGQRVGPVSAIGVTEEETPSPTEPSTEAPEAPEEPLLGELTVTGSSPDSLSLSWTVPQGRFDSFTVQYKDRDGQPQVVRVRGEESEVTVGGLEPGRKYKMHLYGLHEGQRVGPVSTVGITAPLPTPLPVEPRLGELAVAAVTSDSVGLSWTVAQGPFDSFLVQYRDAQGQPQAVPVSGDLRAVAVSGLDPARKYKFLLFGLQNGKRHGPVPVEARTAPDTKPSPRLGELTVTDATPDSVGLSWTVPEGEFDSFVVQYKDKDGRLQVVPVAANQREVTVQGLEPSRKYRFLLYGLSGRKRLGPISADSTTAPLEKELPPHLGELTVAEETSSSLRLSWTVAQGPFDSFVVQYRDTDGQPRAVPVAADQRTVTVEDLEPGKKYKFLLYGLLGGKRLGPVSALGMTAPEEDTPAPELAPEAPEPPEEPRLGVLTVTDTTPDSMRLSWSVAQGPFDSFVVQYEDTNGQPQALLVDGDQSKILISGLEPSTPYRFLLYGLHEGKRLGPLSAEGTTGLAPAGQTSEESRPRLSQLSVTDVTTSSLRLNWEAPPGAFDSFLLRFGVPSPSTLEPHPRPLLQRELMVPGTRHSAVLRDLRSGTLYSLTLYGLRGPHKADSIQGTARTLSPVLESPRDLQFSEIRETSAKVNWMPPPSRADSFKVSYQLADGGEPQSVQVDGQARTQKLQGLIPGARYEVTVVSVRGFEESEPLTGFLTTVPDGPTQLRALNLTEGFAVLHWKPPQNPVDTYDVQVTAPGAPPLQAETPGSAVDYPLHDLVLHTNYTATVRGLRGPNLTSPASITFTTGLEAPRDLEAKEVTPRTALLTWTEPPVRPAGYLLSFHTPGGQNQEILLPGGITSHQLLGLFPSTSYNARLQAMWGQSLLPPVSTSFTTGGLRIPFPRDCGEEMQNGAGASRTSTIFLNGNRERPLNVFCDMETDGGGWLVFQRRMDGQTDFWRDWEDYAHGFGNISGEFWLGNEALHSLTQAGDYSMRVDLRAGDEAVFAQYDSFHVDSAAEYYRLHLEGYHGTAGDSMSYHSGSVFSARDRDPNSLLISCAVSYRGAWWYRNCHYANLNGLYGSTVDHQGVSWYHWKGFEFSVPFTEMKLRPRNFRSPAGGG

SEQ ID NO: 44112 - protein, 88 aa, Homo sapiens
MAQDLSEKDLLKMEVEQLKKEVKNTRIPISKAGKEIKEYVEAQAGNDPFLKGIPEDKNPFKEKGPTFNALLLLLGRASWLELTWSRTP

SEQ ID NO: 44113 - protein, 142 aa, Homo sapiens
MSGVVPTAPEQPAGEMENQTKPPDPRPDAPPEYNSHFLPGPPGTAVPPPTGYPGGLPMGYYSPQQPSTFPLYQPVGGIHPVRYQPGKYPMPNQSVPITWMPGPTPMANCPPGLEYLVQLDNIHVLQHFEPLEMMTCFETNNR

SEQ ID NO: 44114 - protein, 244 aa, Homo sapiens
  MOD_RES (1)..(1): Any amino acid
XTVRWEFGTCQPLSDEKDLTQLFMFARNAFTVLAMMDYPYPTDFLGPLPANPVKVGCDRLLSEAQRITGLRALAGALPPAPDGCADPTGCGTGPDARAWDYQACTEINLTFASNNVTDMFPDLPFTDELRQRYCLDTWGVWPRPDWLLTSFWGGDLRAASNIIFSNGNLDPWAGGGIRRNLSASVIAVTIQGGAHHLDLRASHPEDPASVVEARKLEATIIGEWVKAARREQQPALRGGPRLSL

SEQ ID NO: 44115 - protein, 14 aa, Homo sapiens
MGRKNRNLYAKLLL

SEQ ID NO: 44116 - protein, 165 aa, Homo sapiens
MSAPRPGALFLLSCAVGADGGAPAGGRVDGGVIGLVALYLVFGYGASLLCNLIGFGYPAYISIKAIESPNKEDDTQWLTYWVVYGVFSIAEFFSDIFLSWFPFYYMLKCGFLLWCMAPSPSNGAELLYKRIIRPFFLKHESQMDSVVKDLKDKAKETADAITKEA

SEQ ID NO: 44117 - protein, 162 aa, Homo sapiens
MAVSEIKPKLKLNPLTKVPISHNKRDRDLPGSLQCQLQHKEKKLSASQMAAFQDAYNFFYKDKTGCIDFHGLMCTVAKLGMNLTKHDVYNELKCADIDRDGKVNFSDFIKVLTDKNLFLKAVVPEKETCLDLAGNPGILLFEILSRLLETSALPRKSIIEIV

SEQ ID NO: 44118 - protein, 62 aa, Homo sapiens
KAMTAAAGSAGRAAVPLLLCALLAPGGAYVLDDSDGLGREFDGIGAVSGGGDWCLKVSLKGR

SEQ ID NO: 44119 - protein, 132 aa, Homo sapiens
MSEACLHRKSHSERRSTLKNEQSSPHLIQTTWTSSIFHLDHDDVNDQSVSSAQTFQTEEKKCKGYIPSYLDKDELCVVCGDKATGYHYRCITCEGCKGFFRRTIQKNLHPSYSCKYEGKCVIDKVTRNQCQE

SEQ ID NO: 44120 - protein, 175 aa, Homo sapiens
MGGPRAWALLCLGLLLPGGGAAWSIGAAPFSGRRNWCSYVVTRTISCHVQNGTYLQRVLQNCPWPMSCPGSSYRTVVRPTYKVMYKIVTAREWRCCPGHSGVSCEEGCLNCSKVSELTERLKVLEAKMTMLTVIEQPVPPTPATPEDPAPLWGPPPAQGSPGDGGLQDQVGAWGL

SEQ ID NO: 44121 - protein, 80 aa, Homo sapiens
MLLGFRRGRRSHFKQGLALSPRLECSGAIIAHCILELLGSSDLPTPASRGAETTGARHYSRLIVQYFCGNRDLAMFLWWS

SEQ ID NO: 44122 - protein, 991 aa, Homo sapiens
MSKKPPNRPGITFEIGARLEALDYLQKWYPSRIEKIDYEEGKMLVHFERWSHRYDEWIYWDSNRLRPLERPALRKEGLKDEEDFFDFKAGEEVLARWTDCRYYPAKIEAINKEGTFTVQFYDGVIRCLKRMHIKAMPEDAKGQDWIALVKAAAAAAAKNKTGSKPRTSANSNKDKDKDERKWFKVPSKKEETSTCIATPDVEKKEDLPTSSETFGLHVENVPKMVFPQPESTLSNKRKNNQGNSFQAKRARLNKITGLLASKAVGVDGAEKKEDYNETAPMLEQAISPKPQSQKKNEADISSSANTQKPALLSSTLSSGKARSKKCKHESGDSSGCIKPPKSPLSPELIQVEDLTLVSQLSSSVINKTSPPQPVNPPRPFKHSERRRRSQRLATLPMPDDSVEKVSSPSPATDGKVFSISSQNQQESSVPEVPDVAHLPLEKLGPCLPLDLSRGSEVTAPVASDSSYRNECPRAEKEDTQMLPNPSSKAIADGRGAPAAAGISKTEKKVKLEDKSSTAFGKRKEKDKERREKRDKDHYRPKQKKKKKKKKKSKQHDYSDYEDSSLEFLERCSSPLTRSSGSSLASRSMFTEKTTTYQYPRAILSVDLSGENLSDVDFLDDSSTESLLLSGDEYNQDFDSTNFEESQDEDDALNEIVRCICEMDEENGFMIQCEECLCWQHSVCMGLLEESIPEQYICYICRDPPGQRWSAKYRYDKEWLNNGRMCGLSFFKENYSHLNAKKIVSTHHLLADVYGVTEVLHGLQLKIGILKNKHHPDLHLWACSGKRKDQDQIIAGVEKKIAQDTVNREEKKYVQNHKEPPRLPLKMEGTYITSEHSYQKPQSFGQDCKSLADPGSSDDDDVSSLEEEQEFHMRSKNSLQYSAKEHGMPEKNPAEGNTVFVYNDKKGTEDPGDSHLQWQLNLLTHIENVQNEVTSRMDLIEKEVDVLESWLDFTGELEPPDPLARLPQLKRHIKQLLIDMGKVQQIATLCSV

SEQ ID NO: 44123 - protein, 197 aa, Homo sapiens
MYPESTTGSPARLSLRQTGSPGMIYRNLGKSGLRVSCLGLGTWVTFGGQITDEMAEQLMTLAYDNGINLFDTAEVYAAGKAEVVLGNIIKKKGWRIFAASQPLRSSLFPSVRGCVWDRSGRAILRVSGPKSVNHPPSSGRDVSHSSGKWSPPAQTGERSPGVMEPKGRRSGAIHPSLPGAYGPFPGQGPHPPWDQLG

SEQ ID NO: 44124 - protein, 166 aa, Homo sapiens
MASKRKSTTPCMVRTSQVVEQDVPEEVDRAKEKGIGTPQPDVAKDSWAAELENSSKENEVIEVKSMGESQSKKLQGGYECKYCPYSTQNLNEFTEHVDMQHPNVILNPLYVCAECNFTTKKYDSLSDHNSKFHPGEANFKLKLIKRNNQTVLEQSIETTNHVVSIT

SEQ ID NO: 44125 - protein, 177 aa, Homo sapiens
MPNSEPASLLELFNSIATQGELVRSLKAGNASKAESHSVAQAGVHWHSLGSLQPLPPEFERFSCPGLDEIDSAVKMLVSLKMSYKAAAGEDYKADCPPGNPAPTSNHGPDATEAEEDFVDPWTVQTSSAKGIDYDKLIVRFGSSKIDKELINRIERATGQRPHHFLRRGIFFSHRDM

SEQ ID NO: 44126 - protein, 180 aa, Homo sapiens
MAAAAECDVVMAATEPELLDDQEAKREAETFKEQGNAYYAKKDYNEAYNYYTKAIDMCPKNASYYGNRAATLMMLGRFREALGDAQQSVRLDDSFVRGHLREGKCHLSLGNAMAACRSFQRALELDHKNAQAQQEFKNANAVMEYEKIAETDFEKRDFRKSQNPEFVTESSVCDIPAPPL

SEQ ID NO: 44127 - protein, 980 aa, Homo sapiens
MRPVALLLLPSLLALLAHGLSLEAPTVGKGQAPGIEETDGELTAAPTPEQPERGVHFVTTAPTLKLLNHHPLLEEFLQEGLEKGDEELRPALPFQPDPPAPFTPSPLPRLANQDSRPVFTSPTPAMAAVPTQPQSKEGPWSPESESPMLRITAPLPPGPSMAVPTLGPGEIASTTPPSRAWTPTQEGPGDMGRPWVAEVVSQGAGIGIQGTITSSTASGDDEETTTTTTIITTTITTVQTPGPCSWNFSGPEGSLDSPTDLSSPTDVGLDCFFYISVYPGYGVEIKVQNISLREGETVTVEGLGGPDPLPLANQSFLLRGQVIRSPTHQAALRFQSLPPPAGPGTFHFHYQAYLLSCHFPRRPAYGDVTVTSLHPGGSARFHCATGYQLKGARHLTCLNATQPFWDSKEPVCIAACGGVIRNATTGRIVSPGFPGNYSNNLTCHWLLEAPEGQRLHLHFEKVSLAEDDDRLIIRNGDNVEAPPVYDSYEVEYLPIEGLLSSGKHFFVELSTDSSGAAAGMALRYEAFQQGHCYEPFVKYGNFSSSTPTYPVGTTVEFSCDPGYTLEQGSIIIECVDPHDPQWNETEPACRAVCSGEITDSAGVVLSPNWPEPYGRGQDCIWGVHVEEDKRIMLDIRVLRIGPGDVLTFYDGDDLTARVLGQYSGPRSHFKLFTSMADVTIQFQSDPGTSVLGYQQGFVIHFFEVPRNDTCPELPEIPNGWKSPSQPELVHGTVVTYQCYPGYQVVGSSVLMCQWDLTWSEDLPSCQRVTSCHDPGDVEHSRRLISSPKFPVGATVQYICDQGFVLMGSSILTCHDRQAGSPKWSDRAPKCLLEQLKPCHGLSAPENGARSPEKQLHPAGATIHFSCAPGYVLKGQASIKCVPGHPSHWSDPPPICRAVAKAPAASSTLDAAHIAAAIFLPLVAMVLLVGGVYFYFSRLQGKSSLQLPRPRPRPYNRITIESAFDNPTYETGETREYEVSI

SEQ ID NO: 44128 - protein, 120 aa, Homo sapiens
MNDDPSMEENGVERVCPESLLQSREYSSLPLPRHTSSTDGTITSSDPGLEILNMASCDLDRNSLCKKEEDTRSASPTIEAQGTSPAHDNIAFQDSTSKDKTILNLEAKEEPETIEEHKKE

SEQ ID NO: 44129 - protein, 81 aa, Homo sapiens
MPDINSRDRSGPRATRIDGSGEEIRWRPSCADTRGGEGRALPARKGSPSSLSRRGEEETQEETPGAEPQFLLHGCEMPRML

SEQ ID NO: 44130 - protein, 107 aa, Homo sapiens
MAAAYLDPNLNHTPNSSTKTHLGTGMERSPGAMERVLKVFHYFESNSEPTTWASIIRHGDATDVRGIIQKIVDSHKVKHVACYGFRLSHLRSEEVHWLHVDMGVSSV

SEQ ID NO: 44131 - protein, 53 aa, Homo sapiens
MSLLFLGQPWLQSRSPGYRLRALRRRRAGRQEGRRTPSAPPLRPSRPYPQRSA

SEQ ID NO: 44132 - protein, 149 aa, Homo sapiens
FNEDPETWVDADLYCQNMNSGNLVSVLTQAEGAFVASLIKESSTDDSNVWIGLHDPKKNRRWHWSSGSLVSYKSWDTGSPSSANAGYCASLTSCSGERQTIYPPVAISFPLISGDEHGDWDRGKDSRNGRMNLVRRSSPLFASSKTRGS

SEQ ID NO: 44133 - protein, 1035 aa, Homo sapiens
NLDQHFRLLAQKQSLPYLEAANLLLQAQLPPKPPAWAWAEGWTRYGPEGEAVPVAIPEERALVFDVEVCLAEGTCPTLAVAISPSAWYSWCSQRLVEERYSWTSQLSPADLIPLEVPTGASSPTQRDWQEQLVVGHNVSFDRAHIREQYLIQGSRMRFLDTMSMHMAISGLSSFQRSLWIAAKQGKHKVQPPTKQGQKSQRKARRGPAISSWDWLDISSVNSLAEVHRLYVGGPPLEKEPRELFVKGTMKDIRENFQDLMQYCAQDVWATHEVFQQQLPLFLERCPHPVTLAGMLEMGVSYLPVNQNWERYLAEAQGTYEELQREMKKSLMDLANDACQLLSGERYKEDPWLWDLEWDLQEFKQKKAKKVKKEPATASKLPIEGAGAPGDPMDQEDLGPCSEEEEFQQDVMARACLQKLKGTTELLPKRPQHLPGHPGWYRKLCPRLDDPAWTPGPSLLSLQMRVTPKLMALTWDGFPLHYSERHGWGYLVPGRRDNLAKLPTGTTLESAGVVCPYRAIESLYRKHCLEQGKQQLMPQEAGLAEEFLLTDNSAIWQTVEELDYLEVEAEAKMENLRAAVPGQPLALTARGGPKDTQPSYHHGNGPYNDVDIPGCWFFKLPHKDGNSCNVGSPFAKDFLPKMEDGTLQAGPGGASGPRALEINKMISFWRNAHKRISSQMVVWLPRSALPRAVIRHPDYDEEGLYGAILPQVVTAGTITRRAVEPTWLTASNARPDRVGSELKAMVQAPPGYTLVGADVDSQELWIAAVLGDAHFAGMHGCTAFGWMTLQGRKSRGTDLHSKTATTVGISREHAKIFNYGRIYGAGQPFAERLLMQFNHRLTQQEAAEKAQQMYAATKGLRWYRLSDEGEWLVRELNLPVDRTEGGWISLQDLRKVQRETARKSQWKKWEVVAERAWKGGTESEMFNKLESIATSDIPRTPVLGCCISRALEPSAVQEEFMTSRVNWVVQSSAVDYLHLMLVAMKWLFEEFAIDGRFCISIHDEVRYLVREEDRYRAALALQITNLLTSKIPSSYG

SEQ ID NO: 44134 - protein, 2280 aa, Homo sapiens
MMPAQYALTSSLVLLVLLSTARAGPFSSRSNVTLPAPRPPPQPGGHTVGAGVGSPSSQLYEHTVEGGEKQVVFTHRINLPPSTGCGCPPGTEPPVLASEVQALRVRLEILEELVKGLKEQCTGGCCPASAQAGTGQTDVRTLCSLHGVFDLSRCTCSCEPGWGGPTCSDPTDAEIPPSSPPSASGSCPDDCNDQGRCVRGRCVCFPGYTGPSCGWPSCPGDCQGRGRCVQGVCVCRAGFSGPDCSQRSCPRGCSQRGRCEGGRCVCDPGYTGDDCGMRSCPRGCSQRGRCENGRCVCNPGYTGEDCGVRSCPRGCSQRGRCKDGRCVCDPGYTGEDCGTRSCPWDCGEGGRCVDGRCVCWPGYTGEDCSTRTCPRDCRGRGRCEDGECICDTGYSGDDCGVRSCPGDCNQRGRCEDGRCVCWPGYTGTDCGSRACPRDCRGRGRCENGVCVCNAGYSGEDCGVRSCPGDCRGRGRCESGRCMCWPGYTGRDCGTRACPGDCRGRGRCVDGRCVCNPGFTGEDCGSRRCPGDCRGHGLCEDGVCVCDAGYSGEDCSTRSCPGGCRGRGQCLDGRCVCEDGYSGEDCGVRQCPNDCSQHGVCQDGVCICWEGYVSEDCSIRTCPSNCHGRGRCEEGRCLCDPGYTGPTCATRMCPADCRGRGRCVQGVCLCHVGYGGEDCGQEEPPASACPGGCGPRELCRAGQCVCVEGFRGPDCAIQTCPGDCRGRGECHDGSCVCKDGYAGEDCGEEVPTIEGMRMHLLEETTVRTEWTPAPGPVDAYEIQFIPTTEGASPPFTARVPSSASAYDQRGLAPGQEYQVTVRALRGTSWGLPASKTITTMIDGPQDLRVVAVTPTTLELGWLRPQAEVDRFVVSYVSAGNQRVRLEVPPEADGTLLTDLMPGVEYVVTVTAERGRAVSYPASVRANTGSSPLGLLGTTDEPPPSGPSTTQGAQAPLLQQRPQELGELRVLGRDETGRLRVVWTAQPDTFAYFQLRMRVPEGPGAHEEVLPGDVRQALVPPPPPGTPYELSLHGVPPGGKPSDPIIYQGIMDKDEEKPGKSSGPPRLGELTVTDRTSDSLLLRWTVPEGEFDSFVIQYKDRDGQPQVVPVEGPQRSAVITSLDPGRKYKFVLYGFVGKKRHGPLVAEAKILPQSDPSPGTPPHLGNLWVTDPTPDSLHLSWTVPEGQFDTFMVQYRDRDGRPQVVPVEGPERSFVVSSLDPDHKYRFTLFGIANKKRYGPLTADGTTAPERKEEPPRPEFLEQPLLGELTVTGVTPDSLRLSWTVAQGPFDSFMVQYKDAQGQPQAVPVAGDENEVTVPGLDPDRKYKMNLYGLRGRQRVGPESVVAKTAPQEDVDETPSPTELGTEAPESPEEPLLGELTVTGSSPDSLSLFWTVPQGSFDSFTVQYKDRDGRPRAVRVGGKESEVTVGGLEPGHKYKMHLYGLHEGQRVGPVSAVGVTAPQQEETPPATESPLEPRLGELTVTDVTPNSVGLSWTVPEGQFDSFIVQYKDKDGQPQVVPVAADQREVTVYNLEPERKYKMNMYGLHDGQRMGPLSVVIVTAPLPPAPATEASKPPLEPRLGELTVTDITPDSVGLSWTVPEGEFDSFVVQYKDRDGQPQVVPVAADQREVTIPDLEPSRKYKFLLFGIQDGKRRSPVSVEAKTVARGDASPGAPPRLGELWVTDPTPDSLRLSWTVPEGQFDSFVVQFKDKDGPQVVPVEGHERSVTVTPLDAGRKYRFLLYGLLGKKRHGPLTADGTTEARSAMDDTGTKRPPKPRLGEELQVTTVTQNSVGLSWTVPEGQFDSFVVQYKDRDGQPQVVPVEGSLREVSVPGLDPAHRYKLLLYGLHHGKRVGPISAVAITAGREETETETTAPTPPAPEPHLGELTVEEATSHTLHLSWMVTEGEFDSFEIQYTDRDGQLQMVRIGGDRNDITLSGLESDHRYLVTLYGFSDGKHVGPVHVEALTVPEEEKPSEPPTATPEPPIKPRLGELTVTDATPDSLSLSWTVPEGQFDHFLVQYRNGDGQPKAVRVPGHEEGVTISGLEPDHKYKMNLYGFHGGQRMGPVSVVGVTAAEEETPSPTEPSMEAPEPAEEPLLGELTVTGSSPDSLSLSWTVPQGRFDSFTVQYKDRDGRPQVVRVGGEESEVTVGGLEPGRKYKMHLYGLHEGRRVGPVSAVGVTAPEEESPDAPLAKLRLGQMTVRDITSDSLSLSWTVPEGQFDHFLVQFKNGDGQPKAVRVPGHEDGVTISGLEPDHKYKMNLYGFHGGQRVGPVSAVGLT

SEQ ID NO: 44135 - protein, 156 aa, Homo sapiens
MAEEYHRESMLVEWEQVKQRILHTLLASGEDALDFTQESEPSYISDVGPPGRSSLDNIEMAYARQIYIYNEKIVNGHLQPNLVDLCASVAELDDKSISDMWTMVKQMTDVLLTPATDALKNRSSVEVRMEFVRQALAYLEQSYKNYTLVTVFGNLH

SEQ ID NO: 44136 - protein, 129 aa, Homo sapiens
MDHLNEATQGKEHSEMSNNVSDPKGPPAKIARLEQNGSPLGRGRLGSTGAKMQGVPLKHSGHLMKTNLRKGTMLPVFCVVEHYENAIEYDCKEEHAEFVLVRKDMLFNQLIEMALLSLGYSHSSAAQAK

SEQ ID NO: 44137 - protein, 299 aa, Homo sapiens
  MOD_RES (1)..(1): Any amino acid
XTELNRPSSGDRNLERRCRPNLSREVLYEIFRSLHTLVGQLDLRDDVVKITIDWNKLQSLSAFQPALLFSALEQHILYLQPFLAKLQSPIKEENTTAVEEIGRTEMGNKNEVNDKFSIGDLQEEEKHKESDLRDVKKTQIHFDPEVVQIKAGKAEIDRRISAFIERKQAEINENNVREFCNVIDCNQENSCARTDAIFTPYPGFKSHVKVSRVVNTYGPQTRPEGIPGSGHKPNSMLRDCGNQAVEERLQNIEAHLRLQTGGPVPRDIYQRIKKLEDKILELEGISPEYFQSVVSISVF

SEQ ID NO: 44138 - protein, 220 aa, Homo sapiens
MHSVQMGVQWRGPADILSRGPKSMISLAGGLPNPNMFPFKTAVITVENGKTIQFGEEMMKRALQYSPSAGIPELLSWLKQLQIKLHNPPTIHYPPSQGQMDLCVTSGSQQGLCKVFEMIINPGDNVLLDEPAYSGTLQSLHPLGCNIINVASDESGIVPDSLRDILSRWKPEDAKNPQKNTPKFLYTVPNGNNPTGNSLTSERKKEIYELARKYDFLIIE

SEQ ID NO: 44139 - protein, 95 aa, Homo sapiens
MPTILWLMDWSDMNSNLDLLALLGLGISSFVLITGCANMLLMAALWGLYMSLVNVGHVWYSFAAQHVTLDCRAEIQKTRSSFGSALPAFRAAMRL

SEQ ID NO: 44140 - protein, 486 aa, Homo sapiens
MSAANPETPNSTISREASTQSSSAAASQGWVLPEGKIVPNTVFVGGIDARMDETEIGSCFGRYGSVKEVKIITNRTGVSKGYGFVSFVNDVDVQKIVGSQIHFHGKKLKLGPAIRKQKLCARHVQPRPLVVNPPPPPQFQNVWRNPNTETYLQPQITPNPVTQHVQAYSAYPHSPGQVITGCQLLVYNYQEYPTYPDSAFQVTTGYQLPVYNYQPFPAYPRSPFQVTAGYQLPVYNYQAFPAYPNSPFQVATGYQFPVYNYQPFPAYPSSPFQVTAGYQLPVYNYQAFPAYPNSPFQVATGYQFPVYNYQAFPAYPNSPVQVTTGYQLPVYNYQAFPAYPNSPFQVATGYQFPVYNYQAFPAYPNSPVQVTTGYQLPVYNYQAFPAYPSSPFQVTTGYQLPVYNYQAFPAYPSSPFQVTTGYQLPVYNYQAFPAYPNSAVQVTTGYQFHVYNYQMPPQCPVGEQRRNLWTEAYKWWYLVCLIQRRD

SEQ ID NO: 44141 - protein, 156 aa, Homo sapiens
MHDLKGEHLRICPQGYTCCTSEMEENLANRSHAELETALRDSSRVLQAMLATQLRSFDDHFQHLLNDSERTLQATFPGAFGELYTQNARAFRDLYSELRLYYRGANLHLEETLAEFWARLLERLFKQLHPQLLLPDDYLDCLGKQAEALRPFGEAP

SEQ ID NO: 44142 - protein, 43 aa, Homo sapiens
MILLAVLFLCFISSYSASVKGHTTGLSLNNDRLYKLTYSTEVL

SEQ ID NO: 44143 - protein, 230 aa, Homo sapiens
MTLQWAAVATFLYAEIGLILIFCLPFIPPQRWQKIFSFNVWGKIATFWNKAFLTIIILLIVLFLDAVREVRKYSSVHTIEKSSTSRPDAYEHTQMKLFRSQRNLYISGFSLFFWLVLRRLVTLITQLAKELSNKGVLKTQAENTNKAAKKFMEENEKLKRILKSHGKDEECVLEAENKKLVEDQEKLKTELRKTSDALSKAQNDVMEMKMQSERLSKEYDQLLKEHSELQ

SEQ ID NO: 44144 - protein, 54 aa, Homo sapiens
MYRWLVRILGTIFRFCDRSVPPARALLKRRRSDSTLFSTVDTDEIPAKRPRLVC

SEQ ID NO: 44145 - protein, 155 aa, Homo sapiens
MLLLAAAFLVAFVLLLYMVSPLISPKPLALPGAHVVVTGGSSGIGKCIAIECYKQGAFITLVARNEDKLLQAKKEIEMHSINDKQVVLCISVDVSQDYNQVENVIKQAQEKLGPVDMLVNCAGMAVSGKFEDLERLMSINYLGSVYPSRAVITTM

SEQ ID NO: 44146 - protein, 121 aa, Homo sapiens
MASILDEYENSLSRSAVLQPGCPSVGIPHSGYVNAQLEKEVPIFTKQRIDFTPSERITSLVVSSNQLCMSLGKDTLLRIDLGKANEPNHVELGRKDDAKVHKMFLDHTGGCGPGQAVCRPA

SEQ ID NO: 44147 - protein, 89 aa, Homo sapiens
MYGSARSVGKVEPSSQSPGRSPRLPRSPRLGHRRTNSTGGSSGSSVGGGSGKTLSMENIQSLNAAYATSGPMYLSDHENVGSETPKSTM

SEQ ID NO: 44148 - protein, 331 aa, Homo sapiens
MTTMQGMEQTTPGAGPDVPQLGNIDVIHSYLCKGLQEKFFKRKPKVLGVLCGHKFSTHSVSLSVAAGIRTTKGLVGGSLGKNITSSVLAISGILINAISLTFYSFRYHYCNHDQLSSNCYMTMSILMGTDGMVLLLSVLEFCIAVALSAFGCKVLCCSPSESKNKIRSNTFMCYLLSIQMQYDGKRLNVDVDSTVWCSGDGQYLEKVYYDILSSWLRIESIYRVLNGAQAGVQWRDLGSLQPPPPSRLPWPPKVPRVQPLPGRHPVWEVRSVSAWPPIVWDVRSPSAWLPSLESEERLCPAAIPSRKWGAPLPGHHPIWEVRSVSARPPIF

SEQ ID NO: 44149 - protein, 225 aa, Homo sapiens
  MOD_RES (1)..(1): Any amino acid
XCHGPLGEEKSPGDIWTANCHRGTCTDAKTIDCKPEECPSPPTCKTGEKLVKFQSNDTCCEIGYCEPRTCLFNNTDYEIGASFDDPSNPCVSYSCKDTGFAAVVQDCPKQTWCAEANRIYDSKKCCYTCKNNCRSSLVNVTVIYSGCKKRVQMAKCTGECEKTAKYNYDILLLEHSCLCCREENYELRDIVLDCPDGSTIPYQYKHITTCSCLDICQLYTTFMYS

SEQ ID NO: 44150 - protein, 142 aa, Homo sapiens
LDPLASLKSLTYLSILRNPVTNKKHYRLYVIYKVPQVRVLDFQKVKLKERQEAEKMFKGKRGAQLAKDIARRSKTFNPGAGLPTDKKKGGPSPGDVEAIKNAIANASTLAEVERLKGLLQSGQIPGRERRSGEQMVFFVCSN

SEQ ID NO: 44151 - protein, 67 aa, Homo sapiens
LRNSISAFLFTVTFAWCPPGLSNLTILSCPGLGISKQEEGLGEESDEQGEGSQGWSEIQEMRSCCVA

SEQ ID NO: 44152 - protein, 143 aa, Homo sapiens
MPVAATNSETAMQQVLDNLGSLPSATGAAELDLIFLRGIMESPIVRSLAKVQCSREAHERLEETKLEAVRDNNLELVQEILRDLAQLAEQSSTAAELAHILQEPHFQSLLETHDSVASKTYETPPPSPGLDPTFSNQPVPPDA

SEQ ID NO: 44153 - protein, 623 aa, Homo sapiens
MELQPPEASIAVVSIPRQLPGSHSEAGVQGLSAGDDSGTGSRAKLGRRSPLVGPFRESMSGQTGSDCVTQAGLQLLASSDPPALASKNAEVTGTMSQDTEVDMKEVELNELEPEKQPMNAASGAAMSLAGAEKNGLVKIKVAEDEAEAAAAAKFTGLSKEELLKVAGSPGWVRTRWALLLLFWLGWLGMLAGAVVIIVRAPRCRELPAQKWWHTGALYRIGDLQAFQGHGAGNLAGLKGRLDYLSSLKVKGLVLGPIHKNQKDDVAQTDLLQIDPNFGSKEDFDSLLQSAKKKSIRVILDLTPNYRGENSWFSTQVDTVATKVKDALEFWLQAGVDGFQVRDIENLKDASSFLAEWQNITKGFSEDRLLIAGTNSSDLQQILSLLESNKDLLLTSSYLSDSGSTGEHTKSLVTQYLNATGNRWCSWSLSQARLLTSFLPAQLLRLYQLMLFTLPGTPVFSYGDEIGLDAAALPGQPMEAPVMLWDESSFPDIPGAVSANMTVKGQSEDPGSLLSLFRRLSDQRSKERSLLHGDFHAFSAGPGLFSYIRHWDQNERFLVVLNFGDVGLSAGLQASDLPASASLPAKADLLLSTQPGREEGSPLELERLKLEPHEGLLLRFPYAA

SEQ ID NO: 44154 - protein, 554 aa, Homo sapiens
  MOD_RES (1)..(1): Any amino acid
XALHFQSLAELEVLCTHLYIGTDLTQRIEAEKALLELIDSPECLSKCQLLLEQGTTSYAQLLAATCLSKLVSRVSPLPVEQRMDIRNYILNYVASQPKLAPFVIQALIQVIAKITKLGWFEVQKDQFVFREIIADVKKFLQVDYSRPSAKHRKIATSFRDTSLKDVLVLACSLLKEVFAKPLNLQDQCQQNLVMQVLKLVLNCLNFDFIGSSADESADDLCTVQIPTTWRTIFLEPETLDLFFNLYHSLPPLLSQLALSCLVQFASTRRSLFNSPERAKYLGNLIKGVKRILENPQGLSDPGNYHEFCRFLARLKTNYQLGELVMVKEYPEVIRLIANFTITSLQHWEFAPNSVHYLLTLWQRMVASVPFVKSTEPHLLDTYAPEITKAFITSRLDSVAIVVRDHLDDPLDDTATVFQQLEQLCTVSRCEYEKTCALLVQLFDQNAQNYQKLLHPYSGVTVDITIQEGRLAWLVYLVGTVVGGRLTYTSTDEHDAMDGELSCRVFQLISLMDTGLPRCCNEKIELAILWFLDQFRKTYVGDQLQRTSKKTDIFL

SEQ ID NO: 44155 - protein, 265 aa, Homo sapiens
  MOD_RES (1)..(1): Any amino acid
XDAQMARKVKQYLSNLELEMDEESLQTLSLQCEPATNTLPKNPGDKKPVKSETSPVAPRAGSQQKAQSLPQPQQQPPPAHKINQGLQVPAVSLYPSRKKVPVKDLPPFGINSPQALKKILSLSEEGSLERHKKQAEDTISNASSQLSSPPTSPQSSPRKGGSGNQLRSFGSGQLDLTSSSSSLGSYTLAPSGTVDNFSDSGHSEISSRSSIVSNSSFDSVPVSLHDERRQRHSVSIVETNLGMGRMERRTMIEPDQYSLGSYAPM

SEQ ID NO: 44156 - protein, 181 aa, Homo sapiens
  MOD_RES (1)..(1): Any amino acid
XVIQAAQPSVIQSPQVQTVQSSCKDLKRLFSGTQISTIAESEDSQESVDSVTDSQKRREILSRRPSYRKILNDLSSDAPGVPRIEEEKSEEETSAPAITTVTVPTPIYQTSSGQYIAITQGGAIQLANNGTDGVQGLQTLTMTNAAATQPGTTILQYAQTTDGQQILVPSNQVVVQGTQKL

SEQ ID NO: 44157 - protein, 262 aa, Homo sapiens
KFPLRMKDNDLLVSELYRDPAEDGVTALSVYLTPKTSDSGNWIEIAYGTSSGGVRVIVQHPETVGSGPQLFQTFTVHRSPVTKIMLSEKHLISVCADNNHVRTWSVTRFRGMISTQPGSTPLASFKILALESADGHGGCSAGNDIGGLTEQELMEQLEHCELAPPAPSAPSWGCLPSPSPRISLTSLHSASSNTSLSGHRGSPSPPQAEARRRGGGSFVERCQELVRSGPDLRRPPTPAPWPSSGLGTPLTPPKMKLNETSF

SEQ ID NO: 44158 - protein, 435 aa, Homo sapiens
MEPPGPVRGPLQDSSWYEPSAELVQTRMAVSLTAAETLALQGTQGQEKMMMMGPKEEEQSCEYETRLPGNHSTSQEIFRQRFRHLRYQETPGPREALSQLRVLCCEWLRPEKHTKEQILEFLVLEQFLTILPEELQSWVRGHHPKSGEEAVTVLEDLEKGLEPEPQVPGPAHGPAQEEPWEKKESLGAAQEALSIQLQPKETQPFPKSVVTEDGPEPKDKGSLPQPPITEVESQVFSEKLATDTSTFEATSEGTLELQQRNPKAERLRWSPAQEESFRQMVVIHKEIPTGKKDHECSECGKTFIYNSHLVVHQRVHSGEKPYKCSDCGKTFKQSSNLGQHQRIHTGEKPFECNECGKAFRWGAHLVQHQRIHSGEKPYECNECGKAFSQSSYLSQHRRIHSGEKPFICKECGKAYGWCSELIRHRRVHARKEPSH

SEQ ID NO: 44159 - protein, 904 aa, Homo sapiens
MFPALETHLKQTIPDPYEDFMYRHLQYYGYFKAQRGSLPNSATHQHVRKNNPQCLLNGSLGEKDDLIPDTLQKEKLLWPISLSSAVHRQIEAINRDFHSCLGWMQWRGLSSLQPPPPRFKDSPASAFRVAGITDSHMLSLPHLRSRQLLYDELDEVNPRLREPQELFSILSTKRPLQAPRWPIECEVIKENIHHIEWAPPQPEYFYQPKGNEKVPEIVGEKKGTVVYQLDSVPIEGSYFTSSRVGGKRGIVKELAVTLQGPEDNTLLFESRFESGNLQKAVRVDTYEYELTLRTDLYTNKHTQWFYFRVQNTRKDATYRFTIVNLLKPKSLYTVGMKPLLYSQLDANTRNIGWRREGNEIKYYKNNTDDGQQPFYCLTWTIQFPYDQDTCFFAHFYPYTYTDLQCYLLSVANNPIQSQFCKLQTLCRSLAGNTVYLLTITNPSQTPQEAAAKKAVVLSARVHPGESNGSWVMKGFLDFILSNSPDAQLLRDIFVFKVLPMLNPDGVIVGNYRCSLAGRDLNRHYKTILKESFPCIWYTRNMIKRLLEEREVLLYCDFHGHSRKNNIFLYGCNNNNRKYWLHERVFPLMLCKNAPDKFSFHSCNFKVQKCKEGTGRVVMWRMGILNSYTMESTFGGSTLGNKRDTHFTIEDLKSLGYHVCDTLLDFCDPDQMKFTQCLAELKELLRQEIHKKFHELGQDVDLEGSWSDISLSDIESRNSTSGSDSSLSDGLPVHLANIADELTQKKKMFKKKKKKSLQTRKQRNEQYQKKNLMQKLKLTEDTSEKAGFASTLQKQPTFFKNSENSSFLPMKNENPRLNETNLNRRDKDTPLDPSMATLILPKNKGRMQNKKPGFTVSCSPKRTINSSQEPAPGMKPNWPRSRYPATKRGCAAMAAYPSLHIYTYP

SEQ ID NO: 44160 - protein, 110 aa, Homo sapiens
MTPQSLLQTTLFLLSLLFLVQGAHGRGHREDFRFCSQRNQTHRSSLHYKPTPDLRISIENSEEALTVHAPFPAAHPASRSFPDPRGLYHFCLYWNRHAGRLHLLYGKRDF

SEQ ID NO: 44161 - protein, 592 aa, Homo sapiens
  MOD_RES (1)..(1): Any amino acid
XGEAESQWLQDTGLSGLLGGLGLDGDHQELLSTLTQTQVAAVCRRLDIYARSVRRQHKTPVRDVRDVFGVFNSGKMSSENGDSGMKGAQLSSGASKFPPAAEPGGLQEQAGREEAFNMDSAYSEQAAVLLQRSRPSRGGTSAWGKCSLPKFTVPKGRLGVTRIGDLSLQDMRKVPSLALIELTALCDILGLDLKRSKAGKWKAAETRLFGVPLDSLLEADHKVLPSTQVPLVLQALLSCLEKRGLDMEGILRVPGSQARVKGLEQKLERDFYAGLFSWDEVHHNDASDLLKRFIRKLPTPLLTAEYLPAFAVVPNIPNLKQRLQVLHLLILILPEPNRNALKALLEFLRKVVAREQHNKMTLRNVSTVMAPNLFLHQGRPPKLPKGKEKQLAEGAAEVVQIMVHYQDLLWTVASFLVAQVRKLNDSSSRRPQLCDAGLKTWLRRMHADRDKAGDGLEATPKVAKIQVVWPIKDPLKVPLTPSTKVAHVLRQFTEHLSPGSKGQEDSEDMDSLLLHHRSMESANILLYEVGGNINEHRLDPDAYLLDLYRANPHGKIVSKVALQCVVAAAPETKPGELCDLGQAPCPLRILSG

SEQ ID NO: 44162 - protein, 430 aa, Homo sapiens
FVETEFHHGAQAGLELLRSSNSPTSASQSAGMTVTDQAFVTLATNDIYCQGALVLGQSLRRHRLTRKLVVLITPQVSSLLRVILSKVFDEVIEVNLIDSADYIHLAFLKRPELGLTLTKLHCWTLTHYSKCVFLDADTLVLSNVDELFDRGEFSAAPDPGWPDCFNSGVFVFQPSLHTHKLLLQHAMEHGSFDGADQGLLNSFFRNWSTTDIHKHLPFIYNLSSNTMYTYSPAFKQFGSSAKVVHFLGSMKPWNYKYNPQSGSVLEQGSASSSQHQAAFLHLWWTVYQNNVLPLYKSVQAGEARASPGHTLCHSDVGGPCADSASGVGEPCENSTPSAGVPCANSPLGSNQPAQGLPEPTQIVDETLSLPEGRRSEDVDLAVSVSQISIEEKVKELSPEEERRKWEEGRIDYMGKDAFARIQEKLDRFLQ

SEQ ID NO: 44163 - protein, 35 aa, Homo sapiens
MTSHYVIAIFALMSSCLATAGPEPGALCELSPVSA

SEQ ID NO: 44164 - protein, 1640 aa, Homo sapiens
MNSQPQTRSPFAAGPRPPHHQGGFRPIQFFQRPQIQPPRATIPNSSPSIRPGAQTPTAVYQANQHIMMVNHLPMPYPVPQGPQYCIPQYRHSGPPYVGPPQQYPVQPPGPGPFYPGPGPGDFPNAYGTPFYPSQPVYQSAPIIVPTQQQPPPAKREKKTIRIRDPNQGGKDITEEIMSGGGSRNPTPPIGRPTSTPTPPQQLPSQVPEHSPVVYGTVESAHLAASTPVTAASDQKQEEKPKPDPVLKSPSPVLRLVLSGEKKEQEGQTSETTAIVSIAELPLPPSPTTVSSVARSTIAAPTSSALSSQPIFTTAIDDRCELSSPREDTIPIPSLTSCTETSDPLPTNENDDDICKKPCSVAPNDIPLVSSTNLINEINGVSEKLSATESIVEIVKQEVLPLTLELEILENPPEEMKLECIPAPITPSTVPSFPPTPPTPPASPPHTPVIVPAAATTVSSPSAAITVQRVLEEDESIRTCLSEDAKEIQNKIEVEADGQTEEILDSQNLNSRRSPVPAQIAITVPKTWKKPKDRTRTTEEMLEAELELKAEEELSIDKVLESEQDKMSQGFHPERDPSDLKKVKAVEENGEEAEPVRNGAESVSEGEGIDANSGSTDSSGDGVTFPFKPESWKPTDTEGKKQYDREFLLDFQFMPACIQKPEGLPPISDVVLDKINQPKLPMRTLDPRILPRGPDFTPAFADFGRQTPGGRGVPICKVQSRHGLPILEQSKAPTCPPLVMSHPPMKSLPLGLLNVGSRRSQPGQRREPRKIITVSVKEDVHLKKAENAWKPSQKRDSQADDPENIKTQELFRKVRSILNKLTPQMFNQLMKQVSGLTVDTEERLKGVIDLVFEKAIDEPSFSVAYANMCRCLVTLKVPMADKPGNTVNFRKLLLNRCQKEFEKDKADDDVFEKKQKELEAASAPEERTRLHDELEEAKDKARRRSIGNIKFIGELFKLKMLTEAIMHDCVVKLLKNHDEESLECLCRLLTTIGKDLDFEKAKPRMDQYFNQMEKIVKERKTSSRIRFMLQDVIDLRLCNWVSRRADQGPKTIEQIHKEAKIEEQEEQRKVQQLMTKEKRRPGVQRVDEGGWNTVQGAKNSRVLDPSKFLKITKPTIDEKIQLVPKAQLGSWGKGSSGGAKASETDALRSSASSLNRFSALQPPAPSGSTPSTPVEFDSRRTLTSRGSMGREKNDKPLPSATARPNTFMRGGSSKDLLDNQSQEEQRREMLETVKQLTGGVDVERNSTEAERNKTRESAKPEISAMSAHDKAALSEEELERKSKSIIDEFLHINDFKEAMQCVEELNAQGLLHVFVRVGVESTLERSQITRDHMGQLLYQLVQSEKLSKQDFFKGFSETLELADDMAIDIPHIWLYLAELVTPMLKEGGISMRELTIEFSKPLLPVGRAGVLLSEILHLLCKQMSHKKVGALWREADLSWKDFLPEGEDVHNFLLEQKLDFIESDSPCSSEALSKKELSAEELYKRLEKLIIEDKANDEQIFDWVEANLDEIQMSSPTFLRALMTAVCKAAIIADSSTFRVDTAVIKQRVPILLKYLDSDTEKELQALYALQASIVKLDQPANLLRMFFDCLYDEEVISEDAFYKWESSKDPAEQNGKGVALKSVTAFFTWLREAEEESEDN

SEQ ID NO: 44165 - protein, 113 aa, Homo sapiens
MTPPRLFWVWLLVAGTQGVNDGDMRLADGGATNQGRVEIFYRGQWGTVCDNLWDLTDASVVCRALGFENATQALGRAAFGQGRACCLTGRLQVPGLAEEQLQARERRWCGLHQ

SEQ ID NO: 44166 - protein, 199 aa, Homo sapiens
  MOD_RES (1)..(1): Any amino acid
XLFVPCSRVGHIYRLEGWQGNPPPIYVGSSPTLKNYVRVVEVWWDEYKDYFYASRPESQALPYGDISELKKFREDHNCKSFKWFMEEIAYDITSHYPLPPKNVDWGEIRGFETAYCIDSMGKTNGGFVELGPCHRMGGNQLFRINEANQLMQYDQCLTKGADGSKVMITHCNLNEFKEWQYFKVFCILTSEILYAFHFQ

SEQ ID NO: 44167 - protein, 95 aa, Homo sapiens
MPKAKGKTRRQKFGYSVNRKRLNRNARRKAAPRIECSHIRHAWDHAKSVRQNLAEMGLAVDPNRAVPLRKRKILLVSRALFSAGEGHGGGHRGEA

SEQ ID NO: 44168 - protein, 131 aa, Homo sapiens
MKESKLPGDKGLVLMSRAKHHAISAKLNKPFLFDTKPLIVQYEVNFQNGIECGGAYVKLLSKTPELNLDQFHDKTPYTIMFGPDKCGEDYKLHFIFRHKNPKTGIYEEKHAKRPDADLKTYFTDKKTHLYT

SEQ ID NO: 44169 - protein, 898 aa, Homo sapiens
MPLRLDIKRKLTARSDRVKSVDLHPTEPWMLASLYNGSVCVWNHETQTLVKTFEVCDLPVRAAKFVARKNWVVTGADDMQIRVFNYNTLERVHMFEAHSDYIRCIAVHPTQPFILTSSDDMLIKLWDWDKKWSCSQVFEGHTHYVMQIVINPKDNNQFASASLDRTIKVWQLGSSSPNFTLEGHEKGVNCIDYYSGGDKPYLISGADDRLVKIWDYQNKTCVQTLEGHAQNVSCASFHPELPIIITGSEDGTVRIWHSSTYRLESTLNYGMERVWCVASLRGSNNVALGYDEGSIIVKLGREEPAMSMDANGKIIWAKHSEVQQANLKAMGDAEIKDGERLPLAVKDMGSCEIYPQTIQHNPNGRFVVVCGDGEYIIYTAMALRNKSFGSAQEFAWAHDSSEYAIRESNSIVKIFKNFKEKKSFKPDFGAESIYGGFLLGVRSVNGLAFYDWDNTELIRRIEIQPKHIFWSDSGELVCIATEESFFILKYLSEKVLAAQETHEGVTEDGIEDAFEVLGEIQEIVKTGLWVGDCFIYTSSVNRLNYYVGGEIVTIAHLDRTMYLLGYIPKDNRLYLGDKELNIISYSLLVSVLEYQTAVMRRDFSMADKVLPTIPKEQRTRVAHFLEKQGFKQQALTVSTDPEHRFELALQLGELKIAYQLAVEAESEQKWKQLAELAISKCQFGLAQECLHHAQDYGGLLLLATASGNANMVNKLAEGAERDGKNNVAFMSYFLQGKVDACLELLIRTGRLPEAAFLARTYLPSQVSRVVKLWRENLSKVNQKAAESLADPTEYENLFPGLKEAFVVEEWVKETHADLWPAKQYPLVTPNEERNVMEEGKDFQPSRSTAQQELDGKPASPTPVIVASHTANKEEKVGQTSYSNLPLPHLPPHQYLEDT

SEQ ID NO: 44170 - protein, 103 aa, Homo sapiens
MGGRPFGLVINLNYKDLNGNVFQDAVFNQTVTVIEREDGLDGETIFMYMFLAGLGLLVIVGLHQLLESRKRKRPIQKVEMGTSSQNDVDMSWIPQETLNQISK

SEQ ID NO: 44171 - protein, 69 aa, Homo sapiens
  MOD_RES (1)..(1): Any amino acid
XISEAEKAKQKIAPVFFREEYMLNNAVGSCQKPYVALIHGITMGGDCSLMWVEVISCHDSKENLVTSLH

SEQ ID NO: 44172 - protein, 799 aa, Homo sapiens
KDTPSYQSMTSLHTSSESIDLPLSHHGSLSGLTTGTHEVQSLLMRTGSVRSTLSERYTPSSRQANQEEGKEWLRSHSTGGLQDTGNQSPLVSPSAMSSSAAGKYHFSNLVSPTNLSQFNLPGPSMMRSNSIPAQDSSFDLYDDSQLCGSATSLEERPRAISHSGSFRDSMEEVHGSSLSLVSSTSSLYSTAEEKAHSEQIHKLRRELVASQEKVATLTSQLSANAHLVAAFEKSLGNMTGRLQSLTMTAEQKESELIELRETIEMLKAQNSAAQAAIQGALNGPDHPPKDLRIRRQHSSESVSSINSATSHSSIGSGNDADSKKKKKKNWLRSSFKQAFGKKKSTKPPSSHSDIEELTDSSLPASPKLPHNAGDCGSASMKPSQSASAICECTEAEAEIILQLKSELREKELKLTDIRLEALSSAHHLDQIREAMNRMQNEIEILKAENDRLKAETGNTAKPTRPPSESSSSTSSSSSRQSLGLSLNNLNITEAVSSDILLDDAGDATGHKDGRSVKIIVSISKGYGRAKDQKSQAYLIGSIGVSGKTKWDVLDGVIRRLFKEYVFRIDTSTSLGLSSDCIASYCIGDLIRSHNLEVPELLPCGYLVGDNNIITVNLKGVEENSLDSFVFDTLIPKPITQRYFNLLMEHHRIILSGPSGTGKTYLANKLAEYVITKSGRKKTEDAIATFNVDHKSSKELQQYLANLAEQCSADNNGVELPVVIILDNLHHVGSLSDIFNGFLNCKYNKCPYIIGTMNQGVSSSPNLELHHNFRWVLCANHTEPVKGFLGRYLRRKLIEI

SEQ ID NO: 44173 - protein, 616 aa, Homo sapiens
MAASAKKKNKKGKTISLTDFLAEDGGTGGGSTYVSKPVSWADETDDLEGDVSTTWHSNDDDVYRAPPIDRSILPTAPRAAREPNIDRSRLPKSPPYTAFLGNLPYDVTEESIKEFFRGLNISAVRLPREPSNPERLKGFGYAEFEDLDSLLSALSLNEESLGNRRIRVDVADQAQDKDRDDRSFGRDRNRDSDKTDTDWRARPATDSFDDYPPRRGDDSFGDKYRDRYDSDRYRDGYRDGYRDGPRRDMDRYGGRDRYDDRGSRDYDRGYDSRIGSGRRAFGSGYRRDDDYRGGGDRYEDRYDRRDDRSWSSRDDYSRDDYRRDDRGPPQRPKLNLKPRSTPKEDDSSASTSQSTRAASIFGGAKPVDTAAREREVEERLQKEQEKLQRQLDEPKLERRPRERHPSWRSEETQERERSRTGSESSQTGTSTTSSRSKSDQDARRRESEKSLENETLNKEEDCHSPTSKPPKPDQPLKVMPAPPPKENAWVKRSSNPPARSQSSDTEQQSPTSGGGKVAPAQPSEEGPGRKDENKVDGMNAPKGQTGNSSRGPGDGGNRDHWKESDRKDGKKDQDSRSAPEPKKPEENPASKFSSASKYAALSVDGEDENEGEDYAE

SEQ ID NO: 44174 - protein, 309 aa, Homo sapiens
MAAGCLLALTLTLFQSLLIGPSSEEPFPSAVTIKSWVDKMQEDLVTLAKTASGVNQLVDIYEKYQDLYTVEPNNARQLVEIAARDIEKLLSNRSKALVRLALEAEKVQAAHQWREDFASNEVVYYNAKDDLDPEKNDSEPGSQRIKPVFIEDANFGRQISYQHAAVHIPTDIYEGSTIVLNELNWTSALDEVFKKNREEDPSLLWQVFGSATGLARYYPASPWVDNSRTPNKIDLYDVRRRPWYIQGAASPKDMLILVDVSGSVSGLTLKLIRTSVSEMLETLSDDDFVNVASDSKEISPSPEEIFNAE

SEQ ID NO: 44175 - protein, 112 aa, Homo sapiens
MRSRKLTGAVRSSARLKARSCSAARLASAQEVAGSTSAKTACLRAMESCWPIAVQPHRQRLEEKGRVGGERNLMPSAVHPSPAIDSEERVPELTDFLIPQSHRHANVQEVQM

SEQ ID NO: 44176 - protein, 161 aa, Homo sapiens
MALPDVGPFTLDYSAFRTDVDMMDQNGMTPLMWAAYRTHSVDPTRLLLTFNVSVNLGDKYHKNTALHWAVLAGNTTVISLLLEAGANVDAQNIKGESALDLAKQRKNVWMINHLQEARQAKGYDNPSFLRKLKADKEFRQKVMLGTPFLVIWLVGFIADLN

SEQ ID NO: 44177 - protein, 203 aa, Homo sapiens
EQVELPGPGQWVVAECPARVDFSGGWSDTPPLAYELGGAVLGLAVRVDGRRPIGARARRIPEPELWLAVGPRQDEMTVKIVCRCLADLRDYCQPHAPGALLKAAFICAGIVHVHSELQLSEQLLRTFGGGFELHTWSELPHGSGLGTSSILAGTALAALQRAAGRVVGTEALIHAVLHLEQVLTTVETGFHRVSQDGLDLLTS

SEQ ID NO: 44178 - protein, 404 aa, Homo sapiens
MNPAAEAEFNILLATDSYKKYDGHLPIEIKAVPEGFVIPRGNVLFTVENTDPECYWLTNWIETILVQSWYPITVATNSREQKKILAKYLLETSGNLDGLEYKLHDFGYRGVSSQETAGIGASAHLVNFKGTDTVAGLALIKKYYGTKDPVPGYSVPAAEHSTITAWGKDHEKDAFEHIVTQFSSVPVSVVSDSYDIYNACEKIWGEDLRHLIVSRSTQAPLIIRPDSGNPLDTVLKVLEILGKKFPVTENSKGYKLLPPYLRVIQGDGVDINTLQEIVEGMKQKMWSIENIAFGSGGGLLQKLTRDLLNCSFKCSYVVTNGLGINVFKDPVADPNKRSKKGRLSLHRTPAGNFVTLEEGKGDLEEYGQDLLHTVFKNGKVTKSYSFDEIRKNAQLNIELEAAHH

SEQ ID NO: 44179 - protein, 154 aa, Homo sapiens
  MOD_RES (1)..(1): Any amino acid
XQLIFPDLVEGLVLVNIDPNGKGWIDWAATKLSGLTSTLPDTVLSHLFSQEELVNNTELVQSYRQQIGNVVNQANLQLFWNMYNSRRDLDINRPGTVPNAKTLRCPVMLVVGDNAPAEDGVVECNSKLDPTTTTFLKMADSGGLPQVTQCPQPA

SEQ ID NO: 44180 - protein, 132 aa, Homo sapiens
MSQRDTLVHLFAGGCGGTVGAILTCPLEVVKTRLQSSSVTLYISEVQLNTMAGASVNRVVSPGPLHCLKVILEKEGPRSLFRGLGPNLVGVAPSRAIYFAAYSNCKEKLNDVFDPDSTQVHMISAAMAGMNV

SEQ ID NO: 44181 - protein, 55 aa, Homo sapiens
  MOD_RES (1)..(1): Any amino acid
XGCCYTCASQRNESCGGTFGIYGTCDRGLRCVIRPPLNGDSLTEYEAGVCEAAGY

SEQ ID NO: 44182 - protein, 1300 aa, Homo sapiens
MANRRVGRGCWEVSPTERRPPAGLRGPAAEEEASSPPVLSLSHFCRSPFLCFGDVLLGASRTLSLALDNPNEEVAEVKISHFPAADLGFSVSQRCFVLQPKEKIVISVNWTPLKEGRVREIMTFLVNDVLKHQAILLGNAEEQKKKKRSLWDTIKKKKISASTSHNRRVSNIQNVNKTFSVSQKVDRVRSPLQACENLAMNEGGPPTENNSLILEENKIPISPISPAFNECHGATCLPLSVRRSTTYSSLHASENRELLNVHSANVSKVSFNEKAVTETSFNSVNVNGQRGENSKLSLTPNCSSTLNITQSQIHFLSPDSFVNNSHGANNELELVTCLSSDMFMKDNSQPVHLESTIAHEIYQKILSPDSFIKDNYGLNQDLESESVNPILSPNQFLKDNMAYMCTSQQTCKVPLSNENSQVPQSPEDWRKSEVSPRIPECQGSKSPKAIFEELVEMKSNYYSFIKQNNPKFSAVQDISSHSHNKQPKRRPILSATVTKRKATCTRENQTEINKPKAKRCLNSAVGEHEKVINNQKEKEDFHSYLPIIDPILSKSKSYKNEVTPSSTTASVARKRKSDGSMEDANVRVAITEHTEVREIKRIHFSPSEPKTSAVKKTKNVTTPISKRISNREKLNLKKKTDLSIFRTPISKTNKRTKPIIAVAQSSLTFIKPLKTDIPRHPMPFAAKNMFYDERWKEKQEQGFTWWLNFILTPDDFTVKTNISEVNAATLLLGIENQHKISVPRAPTKEEMSLRAYTARCRLNRLRRAACRLFTSEKMVKAIKKLEIEIEARRLIVRKDRHLWKDVGERQKVLNWLLSYNPLWLRIGLETTYGELISLEDNSDVTGLAMFILNRLLWNPDIAAEYRHPTVPHLYRDGHEEALSKFTLKKLLLLVCFLDYAKISRLIDHDPCLFCKDAEFKASKEILLAFSRDFLSGEGDLSRHLGLLGLPVNHVQTPFDEFDFAVTNLAVDLQCGVRLVRTMELLTQNWDLSKKLRIPAISRLQKMHNVDIVLQVLKSRGIELSDEHGNTILSKDIVDRHREKTLRLLWKIAFAFQVDISLNLDQLKEEIAFLKHTKSIKKTISLLSCHSDDLINKKKGKRDSGSFEQYSENIKLLMDWVNAVCAFYNKKVENFTVSFSDGRVLCYLIHHYHPCYVPFDAICQRTTQTVECTQTGSVVLNSSSESDDSSLDMSLKAFDHENTSELYKELLENEKKNFHLVRSAVRDLGGIPAMINHSDMSNTIPDEKVVITYLSFLCARLLDLRKEIRAARLIQTTWRKYKLKTDLKRHQVLLEYETTIV

SEQ ID NO: 44183 - protein, 175 aa, Homo sapiens
MFDDFSEGRECVNCGAMSTPLWRRDGTGHYLCNACGLYHKMNGINRPLIKPQRRLSASRRVGLSCANCQTTTTTLWRRNAEGEPVCNACGLYMKLHGVPRPLAMRKEGIQTRKRKPKNLNKSKTPAAPSGSESLPPASGASSNSSNATTSSSEEMRPIKTEPGLSSHYGHSSSVS

SEQ ID NO: 44184 - protein, 467 aa, Homo sapiens
MLIFWTITLFLLGAAKGKEVCYEDLGCFSDTEPWGGTAIRPLKILPWSPEKIGTRFLLYTNENPNNFQILLLSDPSTIEASNFQMDRKTRFIIHGFIDKGDESWVTDMCKKLFEVEEVNCICVDWKKGSQATYTQAANNVRVVGAQVAQMLDILLVKYSYPPSKVHLIGHSLGAHVAGEAGSKTPGLSRITGLDPVEASFESTPEEVRLDPSDADFVDVIHTDAAPLIPFLGFGTNQQMGHLDFFPNGGESMPGCKKNALSQIVDLDGIWAGTRDFVACNHLRSYKYYLESILNPDGFAAYPCTSYKSFESDKCFPCPDQGCPQMGHYADKFAGRTSEEQQKFFLNTGEASNFARWRYGVSITLSGRTATGQIKVALFGNKGNTHQYSIFRGILKPGSTHSYEFDAKLDVGTIEKVKFLWNNNVINPTLPKVGATKITVQKGEEKTVYNFCSEDTVREDTLLTLTPC

SEQ ID NO: 44185 - protein, 172 aa, Homo sapiens
MGDFVRYHYNGTFEDGKKFDSSYDRNTLVAIVVGVGRLITGMDRGLMGMCVNERRRLIVPPHLGYGSIGLAGLIPPDATLYFDVVLLDVWNKEDTVQVSTLLRPPHCPRMVQDGDFVRYHYNGTLLDGTSFDTSYSKGGTYDTYVGSGWLIKGMDQGLLGMCPGERRKIIIP

SEQ ID NO: 44186 - protein, 165 aa, Homo sapiens
MAVGNINELPENILLELFTHVPARQLLLNCRLVCSLWRDLIDLVTLWKRKCLREGFITEDWDQPVADWKIFYFLRSLHRNLLHNPCAEEGFEFWSLDVNGGDEWKVEDLSRDQRKEFPNDQVRSQARLRVQVPAVRSAPVVRARASGDLPARPGDHPAEERCQVE

SEQ ID NO: 44187 - protein, 128 aa, Homo sapiens
MQSLSTEARYVPRVPQHRDQISPRSPQHGGQICPRSPLHRGQICPRSPPARRYQQILHRNLVYLATIADSNQNMQSLLPAPPTQNMNLGPGALTQSGSSQGLHSQGSLSDAISTGLPPSSLLQGQIGN

SEQ ID NO: 44188 - protein, 186 aa, Homo sapiens
MESQEPTESSQNGKQYIISEELISEGKWVKLEKTTYMDPTGKTRTWESVKRTTRKEQTADGVAVIPVLQRTLHYECIVLVKQFRPPMGGYCIEFPAGLIDDGETPEAAALRELEEETGYKGDIAECSPAVCMDPGLSNCTIHIVTVTINGDDAENARPKPKPGDGEFVEVISLPKNDLLQRLDETL

SEQ ID NO: 44189 - protein, 217 aa, Homo sapiens
MTLLTFRDVAIEFSLEEWKCLDLAQQNLYRDVMLENYRNLFSVGLTVCKPGLITCLEQRKEPWNVKRQEAADGHPGWKCSGVIVAHCGLHFPGSEMGFHHATQACLELLGSSDLPASASQSAGITGVNHRAQPGLNVSVDKFTAMSSHFTQDLLPEQGIQDAFPKRILRGYGNCGLDNLYLRKDWESLDECKLQKDYNGLNQCSSTTHSKIFQYNKY

SEQ ID NO: 44190 - protein, 19 aa, Homo sapiens
MSSVAVLTQESFAEHRSGL

SEQ ID NO: 44191 - protein, 283 aa, Homo sapiens
MASMRESDTGLWLHNKLGATDELWAPPSIASLLTAAVIDNIRLCFHGLSSAVKLKLLLGTLHLPRRTVDEHPILQMKGALMEIIQLASLDSDPWVLMVADILKSFPDTGSLNLELEEQNPNVQDILGELREKVGECEASAMLPLECQYLNKNALTTLAGPLTPPVKHFQLKRKPKSATLRAELLQKSTETAQQLKRSAGVPFHAKGRGLLRKMDTTTPLKGIPKQAPFRSPTAPSVFSPTGNRTPIPPSRTLLRKERGVKLLDISELDMVGAGREAKRRRKTL

SEQ ID NO: 44192 - protein, 129 aa, Homo sapiens
  MOD_RES (1)..(1): Any amino acid
XAAAHGAALLSHWDPTLSSDWDGERTAPQCLLRIKRDIMSIYKEPPPGMFVVPDTVDMTKIHALITGPFDTPYEGGFFLFVFRCPPDYPIHPPRVKLMTTGNNTYMDWTCLEPSPEHLLSAHLYPVPDD

SEQ ID NO: 44193 - protein, 86 aa, Homo sapiens
MVDGVMILPVLIMIALPSPSMEDEKPKVNPKLYMCVCEGLSCGNEDHCEGQQCFSSLSINDGFHVYQKGCFQVYEQGKMTCKTPPS

SEQ ID NO: 44194 - protein, 144 aa, Homo sapiens
VRELEAELDAEQKKHAEALKGVRKHERRVKELAYQAEEDRKNLARMQDLVDKLQSKVKSYKRQFEEAVSALGPGHLDRAPQLCPRVCGQEQQANTNLAKYRKAQHELDDAEERADMAETQANKLRARTRDALGPKLSLSPQHKE

SEQ ID NO: 44195 - protein, 482 aa, Homo sapiens
MPRNQGFSEPEYSAEYSAEYSVSLPSDPDRGVGRTHEISVRNSGSCLCLPRFMRLTFVPESLENLYQTYFKRQRHETLLVLVVFAALFDCYVVVMCAVVFSSDKLASLAVAGIGLVLDIILFVLCKKGLLPDRVTRRVLPYVLWLLITAQIFSYLGLNFARAHAASDTVGWQVFFVFSFFITLPLSLSPIVIISVVSCVVHTLVLGVTVAQQQQEELKGMQLLREENLMLSILPKHVADEMLKDMKKDESQKDQQQFNTMYMYRHENVSILFADIVGFTQLSSACSAQELVKLLNELFARFDKLAAKYHQLRIKILGDCYYCICGLPDYREDHAVCSILMGLAMVEAISYVREKTKTGVDMRVGVHTGTVLGGVLGQKRWQYDVWSTDVTVANKMEAGGIPGRVHISQSTMDCLKGEFDVEPGDGGSRCDYLEEKGIETYLIIASKPEVKKTATQNGLNGSALPNGAPASSKSSSPALIETK

SEQ ID NO: 44196 - protein, 149 aa, Homo sapiens
  MOD_RES (1)..(1): Any amino acid
XVPPQNIAQTPATQNGNLVQSVSQPPLIATNTNLPLAQQIPLSSTQFSAQSLAQAIGSQIEDARRAAEPSLVGLPQTISGDSGGMSAVSDGSSSSLAASASLFPLKVLPLTTPLVDGEDESSLFQCFSPTRGARSDPRTTDTAKTTESF

SEQ ID NO: 44197 - protein, 214 aa, Homo sapiens
MSPKPRASGPPAKAKEAGKRKSSSQPSPSDPKKKTTKVAKKGKAVRRGRRGKKGAATKMAAVTAPEAESGPAAPGPSDQPSQELPQHELPPEEPVSEVEEPLSQESQVEEPLSQESEVEEPLSQESQVEEPLSQESEVEEPLSQESQVEEPLSQESEVEEPLSQESQVEEPLSQESEMEEPLSQESQVEEPLSQESEMEEPLSQESEMEELPSV

SEQ ID NO: 44198 - protein, 183 aa, Homo sapiens
  MOD_RES (1)..(1): Any amino acid
XEPLQIDHLVFVVHGIGPACDLRFRSIVQCVNDFRSVSLNLLQTHFKKAQENQQIGRVEFLPVNWHSPLHSTGVDVDLQRITLPSINRLRHFTNDTILDVFFYNSPTYCQTIVDTVASEMNRIYTLFLQRNPDFKGGVSIAGHSLGSLILFDILTNQKDSLGDIDSEKGIKRPAPQPASGANI

SEQ ID NO: 44199 - protein, 873 aa, Homo sapiens
MFFYLSKKISIPNNVKLQCVSWNKEQGFIACGGEDGLLKVLKLETQTDDAKLRGLAAPSNLSMNQTLEGHSGSVQVVTWNEQYQKLTTSDENGLIIVWMLYKGSWIEEMINNRNKSVVRSMSWNADGQKICIVYEDGAVIVGSVDGNRIWGKDLKGIQLSHVTWSADSKVLLFGMANGEIHIYDNQGNFMIKMKLSCLVNVTGAISIAGIHWYHGTEGYVEPDCPCLAVCFDNGRCQIMRHENDQNPVLIDTGMYVVGIQWNHMGSVLAVAGFQKAAMQDKDVNIVQFYTPFGEHLGTLKVPGKEISALSWEGGGLKIALAVDSFIYFANIRPNYKWGYCSNTVVYAYTRPDRPEYCVVFWDTKNNEKYVKYVKGLISITTCGDFCILATKADENHPQEENEMETFGATFVLVLCNSIGTPLDPKYIDIVPLFVAMTKTHVIAASKEAFYTWQYRVAKKLTALEINQITRSRKEGRERIYHVDDTPSGSMDGVLDYSKTIQGTRDPICAITASDKILIVGRESGTIQRYSLPNVGLIQKYSLNCRAYQLSLNCNSSRLAIIDISGVLTFFDLDARVTDSTGQQVVGELLKLERRDVWDMKWAKDNPDLFAMMEKTRMYVFRNLDPEEPIQTSGYICNFEDLEIKSVLLDEILKDPEHPNKDYLINFEIRSLRDSRALIEKVGIKDASQFIEDNPHPRLWRLLAEAALQKLDLYTAEQAFVRCKDYQGIKFVKRLGKLLSESMKQAEVVGYFGRFEEAERTYLEMDRRDLAIGLRLKLGDWFRVLQLLKTGSGDADDSLLEQANNAIGDYFADRQKWLNAVQYYVQGRNQERLAECYYMLEDYEGLENLAISLPENHKLLPVGNSTNVCQSWNV

SEQ ID NO: 44200 - protein, 204 aa, Homo sapiens
MDDEEETYRLWKIRKTIMQLCHDRGYLVTQDELDQTLEEFKAQSGDKPSEGRPRRTDLTVLVAHNDDPTDQMFVFFPEEPKVGIKTIKVYCQRMQEENITRALIVVQQGMTPSAKQSLVDMAPKYILEQFLQQELLINITEHELVPEHVVMTKEEVTELLARYKLRENQLPRIQAGDPVARYFGIKRGQPLLSVSAGGEDHPAQ

SEQ ID NO: 44201 - protein, 46 aa, Homo sapiens
MAGYLSESDFVMVEEGFSTRDLLKELTLGASQATTSFLASHQCCLS

SEQ ID NO: 44202 - protein, 77 aa, Homo sapiens
  MOD_RES (1)..(1): Any amino acid
XLGTSGWHRARRCTTTSTNGNRCCAWSGIKSHPRSWTRPPRMRRMRTETSRCTSARAWPRGTSGGCRDLRISGLLAD

SEQ ID NO: 44203 - protein, 161 aa, Homo sapiens
ILTDDEPDHGPLGAPEGDHDLLTCGQCQMNFPLGDILIFIEHKRKQCNGSLCLEKAVDKPPSPSPIEMKKASNPVEVGIQVTPEDDDCLSTSSRGICPKQEHIAESTAVRSSCGRSTKRIKKNTRFLKQNTWKNKLLRTGELEVCRQGTEVSSLGSPWRLM

SEQ ID NO: 44204 - protein, 437 aa, Homo sapiens
MKQERKMHFQEGRRAQQQLENGFKQLENSKRKFERDCREAEKAAQTAERLDQDINATKADVEKAKQQAHLRSHMAEESKNEYAAQLQRFNRDQAHFYFSQMPQIFDKLQDMDERRATRLGAGYGLLSEAELEVVPIIAKCLEGMKVAANAVDPKNDSHVLIELHKSGFARPGDVEFEDFSQPMNRAPSDSSLGTPSDGRPELRGPGRSRTKRWPFGKKNKTVVTEDFSHLPPEQQRKRLQQQLEERSRELQKEVDQREALKKMKDVYEKTPQMGDPASLEPQIAETLSNIERLKLEVQKYEAWLAEAESRVLSNRGDSLSRHARPPDPPASAPPDSSSNSASQDTKESSEEPPSEESQDTPIYTEFDEDFEEEPTSPIGHCVAIYHFEGSSEGTISMAEGEDLSLMEEDKGDGWTRVRRKEGGEGYVPTSYLRVTLN

SEQ ID NO: 44205 - protein, 752 aa, Homo sapiens
MYTGPCKVLHLSSGLLPNSGRFGIVLSDEYQVVTSLWCQLYTTHAPQQASGMLLLNYLVIPSKAQVNKPGYIPNLGECSHYRSKIHLKAGDKLQSPEGKPKTGRIQEKCEGPCISSSNCSQPCAKDFHGEIGFTCNQKKWQKSAETCTSLSVEKLFKDSTGASRLSVAAPSIPLHILDFRAPETIESVAQGIRKNCPFDYACITDMVKSSETTSGNIAFIVELLKNISTDLSDNVTREKMKSYSEVANHILDTAAISNWAFIPNKNASSDLLQSVNLFARQLHIHNNSENIVNELFIQTKGFHINHNTSEKSLNFSMSMNNTTEDILGMVQIPRQELRKLWPNASQAISIAFPTLGAILREAHLQNVSLPRQVNGLVLSVVLPERLQEIILTFEKINKTRNARAQCVGWHSKKRRWDEKACQMMLDIRNEVKCRCNYTSVVMSFSILMSSKSMTDKVLDYITCIGLSVSILSLVLCLIIEATVWSRVVVTEISYMRHVCIVNIAVSLLTANVWFIIGSHFNIKAQDYNMCVAVTFFSHFFYLSLFFWMLFKALLIIYGILVIFRRMMKSRMMVIGFAIGYGCPLIIAVTTVAITEPEKGYMRPEACWLNWDNTKALLAFAIPAFVIVAVNLIVVLVVAVNTQRPSIGSSKSQDVVIIMRISKNVAILTPLLGLTWGFGIATLIEGTSLTFHIIFALLNAFQGFFILLFGTIMDHKIRDALRMRMSSLKGKSRAAENASLGPTNGSKLMNRQG

SEQ ID NO: 44206 - protein, 182 aa, Homo sapiens
MWPQDPSRKEVLRFAVSCRILTLMLQALFNAIIPDHHAEAFSPPRLAPSGFVDQLVEGLLGGLSHWDAEHFLFIAEHGYLYEHNFAFFPGFPLALLVGTELLRPLRGLLSLRSCLLISVASLNFLFFMLAAVALHDLGCLVLHCPHQSFYAALLFCLSPANVFLAAGYSEALFALLTFSAMG

SEQ ID NO: 44207 - protein, 202 aa, Homo sapiens
  MOD_RES (1)..(1): Any amino acid
XVISNSWDAHLGLGACGEAEGLGVQGAEEEEEEEEEEEEEGAGVPACPPKGPGDVPLSPGAPLERPAEEEEDEEDGQEPGGLALPPPPPPPPPPPPRSREQRRNYQPRWRGEYLMDYDGSRRGLVCMVCGGALATLKVSTIKRHILQVHPFSMDFTPEERQTILEAYEEAALRCYGHEGFGPPAPAPRDGGADLKSGAVCRA

SEQ ID NO: 44208 - protein, 124 aa, Homo sapiens
MLTQAAVRLVRGSLRKTSWAEWGHRELRLGQLAPFTAPHKDKSFSDQRSELKRRLKAEKKVAEKEAKQKELSEKQLSQATAAATNHTTDNGVGPEEESVDPNVGSMPKELLGESSSSMIFEERG

SEQ ID NO: 44209 - protein, 105 aa, Homo sapiens
MNRSIPVEVDESEPYPSQLLKPIPEYSPEEESEPPAPNIRNMAPNSLSAPTMLHNSSGDFSQAHSTLKLANHQRPVSRQVTCLRTQVLEDSEDSFCRRHPGLGKA

SEQ ID NO: 44210 - protein, 129 aa, Homo sapiens
MRKPRRKSRQNAEGRRSPSPYSLKCSPTRETLTYAQAQRIVEVDIDGRLHRISIYDPLKIITEDELTAQDITECNSNKENSEQPQFPGKSKKPSSKGKKKESCSKHASGTSFHLPQPSFRMVDSGIQPE

SEQ ID NO: 44211 - protein, 158 aa, Homo sapiens
MDFLKPTADCPDAVPSSAETGGTNYLAPGGLSDSQLLLEPGDRSHWCVVAYWEEKTRVGRLYCVQEPSLDIFYDLPQGNGFCLGQLNSDNKSQLVQKVRSKIGCGIQLTREVDGVWVYNRSSYPIFIKSATLDNPDSRTLLVHKVFPGFSIKAFDYEK

SEQ ID NO: 44212 - protein, 159 aa, Homo sapiens
AAASEIKREEKEDEENTSAADHSEEEKKELKAPRARTSTDEVLSLEEKDLRDRERRMANNARERVRVRDINEAFRELGRMCQMHLKSDKAQTKLLILQQAVQVILGLEQQVRERNLNPKAACLKRREEEKVSGVVGDPQMVLSAPHPGLSEAHNPAGHM

SEQ ID NO: 44213 - protein, 217 aa, Homo sapiens
MLEKFCNSTFWNSSFLDSPEADLPLCFEQTVLVWIPLGYLWLLAPWQLLHVYKSRTKRSSTTKLYLAKQVFVGFLLILAAIELALVLTEDSGQATVPAVRYTNPSLYLGTWLLVLLIQYSRQWCVQKNSWFLSLFWILSILCGTFQFQTLIRTLLQGDNSNLAYSCLFFISYGFQILILIFSAFSENNESSNNPSSIASFLSSITYSWYDRRGGVCL

SEQ ID NO: 44214 - protein, 177 aa, Homo sapiens
MAAATGAVAASAASGQAEGKKITDLRVIDLKSELKRRNLDITGVKTVLISRLKQAIEEEGGDPDNIELTVSTDTPNKKPTKGKGKKHEADELSGDASVEDDAFIKEIEAQEGEDDTFLTAQDGEEEENEKALQRNLKTARHHLKMTKEVQVVLVVAVEAQLKISGLVDFHLIPKLLI

SEQ ID NO: 44215 - protein, 73 aa, Homo sapiens
MPKYYEDKPQGGACAGLKEDLGACLLQSDCVVQEGKSPRQCLKEGYCNSLKYAFFECKRSVMESRSVARAGVQ

SEQ ID NO: 44216 - protein, 121 aa, Homo sapiens
MATSEQSICQARASVMVYDDTSKKWVPIKPGQQGFSRINIYHNTASNTFRVVGVKLQDQQVVINYSIVKGLKYNQATPTFHQWRDARQVYGLNFASKEEATTFSNAMLFALNIMNSQEGDK

SEQ ID NO: 44217 - protein, 133 aa, Homo sapiens
MTKSNGEEPKMGGRMERFQQGVRKRTLLAKKKVQNITKEDVKSYLFRNAFVLLTVTAVIVGTILGFTLRPYRMSYREVKYFSFPGELLMRMLQMLVLPLIISSLVTGIASGPPPTYWETPWELGLWSTCHDMN

SEQ ID NO: 44218 - protein, 47 aa, Homo sapiens
MNGGNESSGADRAGGPVATSVPIGWQRCVREGAVLYIRRICNLSTVL

SEQ ID NO: 44219 - protein, 182 aa, Homo sapiens
  MOD_RES (1)..(1): Any amino acid
XEHLSESTSSNAGLSLSQLLDEMREDQEHQGALVCLAESCLTLEGPCTAPPVTHWAASRCKATGEAVYTVPSSMLCISENDQLILSSLGPCQRTQGPELPPPDPALQDLSLTLIASPPSSPSSSGPELPGEPRSPALSGNPQRGIVMVLPSSMSMSHPARPSVLGSKLSGFLPSSWPGPCTF

SEQ ID NO: 44220 - protein, 198 aa, Homo sapiens
MVGREKELSIHFVPGSCRLVEPHVIVHCAAERRPDVVENQPDAASQLNVDASGNLAKEAAAVGAFLIYISSDYVFDGTNPPYREEDIPAPLNLYGKTKLDGEKAVLENNLGAAVLRIPILYGEVEKLEESAVTVMFDKVQFSNKSANMDHWQQRFPTHVKDVATVCRQLAEKRMLDPSIKGTFHWSGNEQMTKYEMAC

SEQ ID NO: 44221 - protein, 228 aa, Homo sapiens
MDNQGVIYSDLNLPPNPKRQQRKPKGNKNSILATEQEITYAELNLQKASQDFQGNDKTYHCKDLPSAPEKLIVGILGIICLILMASVVTIVVIPSTLIQRHNNSSLNTRTQKARHCGHCPEEWITYSNSCYYIGKERRTWEESLLACTSKNSSLLSIDNEEEMKFLSIISPSSWIGVFRNSSHHPWVTMNGLAFKHEIKDSDNAELNCAVLQVNRLKSAQCGSSIIYH

SEQ ID NO: 44222 - protein, 95 aa, Homo sapiens
MPVRGPDVEAYCLRCECKYEERSSVTIKVTIIIYLSILGLLLLYMVYLTLVEPILKRRLFGHAQLIQSDDDIGVSSQPALAAHGQSLSSFDVKCK

SEQ ID NO: 44223 - protein, 113 aa, Homo sapiens
  MOD_RES (1)..(1): Any amino acid
XAGVGGSSSSLGSGSRKRPLLAPLCNGLINSYEDKSNDFVCPICFDMIEEAYMTKCGHSFCYKCIHQSLEDNNRCPKCNYVVDNIDHLYPNFLGITCSPTTDSYGIPQGCKKK

SEQ ID NO: 44224 - protein, 183 aa, Homo sapiens
MASLFKKKTVDDVIKEQNRELRGTQRAIIRDRAALEKQEKQLELEIKKMAKIGNKEACKVLAKQLVHLRKQKTRTFATMQAVNKKMDPQKTLQTMQNFQKENMKMEMTEEMINDTLDDIFDGSDDEEESQDIVNQVLDEIGIEISGKMAKAPSAARSLPSASTSKATISDEEIERQLKALGVD

SEQ ID NO: 44225 - protein, 470 aa, Homo sapiens
  MOD_RES (1)..(1): Any amino acid
XCAQFSKLHVRVTPHPWTHTERFLRQAFGDDWGSILSFENREPVGSGCVAQVYKAYANTAFLETDSVQRLGRASCLPPFSHTGAVGGLRELFGYLGNGRKPPENLADQSFLERLLLPKADLVGSNAGVSRAQVPGHQPEATNLISVAVKVLHPGLLAQVHMDLLLMKIGSRVLGVLPGIKWLSLPEIVEEFEKLMVQQIDLRYEAQNLEHFQVNFRNVKAVKFPTPLRPFVTREVLVETYEESVPVSSYQQAGIPVDLKRKIARLGINMLLKMIFVDNFVHADLHPGNILVQGANGLSSSQEAQLQQADICDTLVVAVPSSLCPLRLVLLDAGIVAELQAPDLRNFRAVFMAVVMGQGQRVAELILHHARASECRDVEGFKTEMAMLVTQARKNTITLEKLHVSSLLSSVFKLLMTHKVLRGHSKQAERGWDGSRWLGGRTPAGHAAPRASAHQVQCGGGKGTKRRQSLP

SEQ ID NO: 44226 - protein, 323 aa, Homo sapiens
MWQLWASLCCLLVLANARSRPSFHPLSDELVNYVNKRNTTWQAGHNFYNVDMSYLKRLCGTFLGGPKPPQRVMFTEDLKLPASFDAREQWPQCPTIKEIRDQGSCGSCWAFGAVEAISDRICIHTNAHVSVEVSAEDLLTCCGSMCGDGELVVFLSTLGKFSVCSVENQCSTRKGTRSLVCCNGGYPAEAWNFWTRKGLVSGGLYESHVGYNSYSVSNSEKDIMAEIYKNGPVEGAFSVYSDFLLYKSGVYQHVTGEMMGGHAIRILGWGVENGTPYWLVANSWNTDWGDNGFFKILRGQDHCGIESEVVAGIPRTDQYWEKI

SEQ ID NO: 44227 - protein, 218 aa, Homo sapiens
MLTFNHDAPWHTQKTLKTSEFGKSFGTLGHIGNISHQCWAGCAAGGRAVLSGEPEANMDQETVGNVVLLAIVTLISVVQNGFFAHKVEHESRTQNGRSFQRTGTLAFERVYTANQNCVDAYPTFLAVLWSAGLLCSQVPAAFAGLMYLFVRQKYFVGYLGERTQSTPGYIFGKRIILFLFLMSVAGIFNYYLIFFFGSDFENYIKTISTTISPLLLIP

SEQ ID NO: 44228 - protein, 607 aa, Homo sapiens
MARGLGKASGFPAGPSGAELPASGRRRGPLISLFPAVLASEAAMSYPADDYESEAAYDPYAYPSDYDMHTGDPKQDLAYERQYEQQTYQVIPEVIKNFIQYFHKTVSDLIDQKVYELQASRVSSDVIDQKVYEIQDIYENSWTKLTERFFKNTPWPEAEAIAPQVGNDAVFLILYKELYYRHIYAKVSGGPSLEQRFESYYNYCNLFNYILNADGPAPLELPNQWLWDIIDEFIYQFQSFSQYRCKTAKKSEEEIDFLRSNPKIWNVHSVLNVLHSLVDKSNINRQLEVYTSGGDPESVAGEYGRHSLYKMLGYFSLVGLLRLHSLLGDYYQAIKVLENIELNKKSMYSRVPECQVTTYYYVGFAYLMMRRYQDAIRVFANILLYIQRTKSMFQRTTYKYEMINKQNEQMHALLAIALTMYPMRIDESIHLQLREKYGDKMLRMQKGDPQVYEELFSYSCPKFLSPVVPNYDNVHPNYHKEPFLQQLKVFSDEVQQQAQLSTIRSFLKLYTTMPVAKLAGFLDLTEQEFRIQLLVFKHKMKNLVWTSGISALDGEFQSASEVDFYIDKDMIHIADTKVARRYGDFFIRQIHKFEELNRTLKKMGQRP

SEQ ID NO: 44229 - protein, 22 aa, Homo sapiens
  MOD_RES (1)..(1): Any amino acid
XNKAKTLATWATKELRKLKNQA

SEQ ID NO: 44230 - protein, 151 aa, Homo sapiens
MNPSAPSYPMASLYVGDLHPDVTEAMLYEKFSPAGPILSIRVCRDMITRRSLGYAYVNFQQPADGERRAPRSAGRAGGHEARAAAAGGVGRRARGGGREGMSPRDGRREGAGVPGAAFPEPAGTRAAGSHTPGYFLLCDHFLGLRRSQTLG

SEQ ID NO: 44231 - protein, 436 aa, Homo sapiens
MWTLVSWVALTAGLVAGTRCPDGQFCPVACCLDPGGASYSCCRPLLDKWPTTLSRHLGGPCQVDAHCSAGHSCIFTVSGTSSCCPFPEAVACGDGHHCCPRGFHCSADGRSCFQRSGNNSVGAIQCPDSQFECPDFSTCCVMVDGSWGCCPMPQAVCCEDHIHCCPAGFTCDTQKGTCEQGPHQVPWMEKAPAHLSLPDPQALKRDVPCDNVSSCPSSDTCCQLTSGEWGCCPIPEAVCCSDHQHCCPQGYTCVAEGQCQRGSEIVAGLEKMPARRASLSHPRDIGCDQHTSCPVGQTCCPSLGGSWACCQLPHAVCCEDRQHCCPAGYTCNVKARSCEKEVVSAQPATFLARSPHVGVKDVECGEGHFCHDNQTCCRDNRQGWACCPYRQGVCCADRRHCCPAGFRCAARGTKCLRREAPRWDAPLRDPALRQLL

SEQ ID NO: 44232 - protein, 924 aa, Homo sapiens
MWLAAAAPSLARRLLFLGPPPPPLLLLVFSRSSRRRLHSLGLAAMPEKRPFERLPADVSPINYSLCLKPDLLDFTFEGKLEAAAQVRQATNQIVMNCADIDIITASYAPEGDEEIHATGFNYQNEDEKVTLSFPSTLQTGTGTLKIDFVGELNDKMKGFYRSKYTTPSGEVRYAAVTQFEATDARRAFPCWDEPAIKATFDISLVVPKDRVALSNMNVIDRKPYPDDENLVEVKFARTPVMSTYLVAFVVGEYDFVETRSKDGVCVRVYTPVGKAEQGKFALEVAAKTLPFYKDYFNVPYPLPKIDLIAIADFAAGAMENWGLVTYRETALLIDPKNSCSSSRQWVALVVGHELAHQWFGNLVTMEWWTHLWLNEGFASWIEYLCVDHCFPEYDIWTQFVSADYTRAQELDALDNSHPIEVSVGHPSEVDEIFDAISYSKGASVIRMLHDYIGDKDFKKGMNMYLTKFQQKNAATEDLWESLENASGKPIAAVMNTWTKQMGFPLIYVEAEQVEDDRLLRLSQKKFCAGGSYVGEDCPQWMVPITISTSEDPNQAKLKILMDKPEMNVVLKNVKPDQWVKLNLGTVGFYRTQYSSAMLESLLPGIRDLSLPPVDRLGLQNDLFSLARAGIISTVEVLKVMEAFVNEPNYTVWSDLSCNLGILSTLLSHTDFYEEIQEFVKDVFSPIGERLGWDPKPGEGHLDALLRGLVLGKLGKAGHKATLEEARRRFKDHVEGKQILSADLRSPVYLTVLKHGDGTTLDIMLKLHKQADMQEEKNRIERVLGATLLPDLIQKVLTFALSEEVRPQDTVSVIGGVAGGSKHGRKAAWKFIKDNWEELYNRYQGGFLISRLIKVQWLTPVIPALWDAEVGRSPEVGSSRLSWPTCYQLRDLQLIKWLERLRLSSRVTQLLQLSVPSSSVVKIFC

SEQ ID NO: 44233 - protein, 807 aa, Homo sapiens
  MOD_RES (1)..(1): Any amino acid
XTDDTSSVTSSASSTTSSQSGSGTSRKKSIPLSIKNLKRKHKRKKNKITRDFKPGDRVAVEVVTTMTSADVMWQDGSVECNIRSNDLFPVHHLDNNEFCPGDFVVDKRVQSCPDPAVYGVVQSGDHIGRTCMVKWFKLRPSGDDVELIGEEEDVSVYDIADHPDFRFRTTDIVIRIGNTEDGAPHKEDEQPSVGQVARVDVSSKVEVVWADNSKTIILPQHLYNIESEIEESDYDSVEGSTSGASSDEWEDDSDSWETDNGLVEDEHPKIEEPPIPPLEQPVAPEDKGVVISEEAATAAVQGAVAMAAPMAGLMEKAGKDGPPKSFRELKEAIKILESLKNMTVEQLLTGSPTSPTVEPEKPTREKKFLDDIKKLQENLKKTLDNVAIVEEEKMEAVPDVERKEDKPEGQSPVKAEWPSETPVLCQQCGGKPGVTFTSAKGEVFSVLEFAPSNHSFKKIEFQPPEAKKFFSTVRKEMALLATSLPEGIMVKTFEDRMDLFSALIKGPTRTPYEDGLYLFDIQLPNIYPAVPPHFCYLSQCSGRLNPNLYDNGKVCVSLLGTWIGKGTERWTSKSSLLQVLISIQGLILVNEPYYNEAGFDSDRGLQEGYENSRCYNEMALIRVVQSMTQLVRRPPEVFEQEIRQHFSTGGWRLVNRIESWLETHALLEKAQALPNGVPKASSSPEPPAVAELSDSGQQEPEDGGPAPGEASQGSDSEGGAQGLASASRDHTDQTSETAPDASVPPSVKPKKRRKSYRSFLPEKSGYPDIGFPLFPLSKGFIKSIRGVLTQFRAALLEAGMPECTEDK

SEQ ID NO: 44234 - protein, 205 aa, Homo sapiens
MVRHSSSPYVVYPSDKPFLNSDLRRSPSKPTLAYPESNSRAIFSALKNLQDKIRRLELERIQAEESVKTLSRETIEYKKVLDEQIQERENSKNEESKHNQELTSQLLAAENKCNLLEKQLEYMRNMIKHAEMERTSVLEKQVSLERERQHDQTHVQSQLEKLDLLEQEYNKLTTMQALAEKKMQELEAKLHEEEQERKRMQAKAA

SEQ ID NO: 44235 - protein, 170 aa, Homo sapiens
MPRKGTQPSTARRREEGPPPPSPDGASSDAEPEPPSGRTESPATAAETASEELDNRSLEEILNSIPPPPPPAMTNEAGAPRLMITHIVNQNFKSYAGEKILGPFHKRFSCIIGPNGSGKSNVIDSMLFVFGYRAQKIRSKKLSVLIHNSDEHKDIQSCTVEVHFQKIIDK

SEQ ID NO: 44236 - protein, 57 aa, Homo sapiens
MSAFDTNPFADPVDVNPFQDPSVTQLTNAPQGGLAEFNPFSEPCLHWIIIPWPYQSS

SEQ ID NO: 44237 - protein, 274 aa, Homo sapiens
MAVQESAAQLSMTLKVQEYPTLKVPYETLNKRFRAAQKNIDRETSHVTMVVAELEKTLSGCPAVDSVVSLLDGVVEKLSVLKRKAVESIQAEDESAKLCKRRIEHLKEHSSDQPAAASVWKRKRMDRMMVEHLLRCGYYNTAVKLARQSGIEDLVNIEMFLTAKEVEESLERRETATCLAWCHDNKSRLRKMKTCKKALQPSRREPAGRGAPGHGHAGLPARHAHLPVQGPSGPCTVADADPAVPVRQLPTTPAGKQFCVHPHPAGWPLSHQDT

SEQ ID NO: 44238 - protein, 149 aa, Homo sapiens
  MOD_RES (1)..(1): Any amino acid
XRFTEYETQVKVMSQRHMIDGRWCDCKLPNSKQSQDEPLRSRKVFVGRCTEDMTEDELREFFSQYGDVMDVFIPKPFRAFAFVTFADDQIAQSLCGEDLIIKGISVHISNAEPKHNSNRQLERSGRFGGNPVHLISNVYGRSTSLKVVL

SEQ ID NO: 44239 - protein, 4005 aa, Homo sapiens
KTESWHCLPQEMDSSQTLDTSQTRFNVRTEDTEVTDFPSLEEGILTQSENQVKEPNRDLFCSPLLVIQDSFASPDLPLLTCLTQDQEFAPDSLFHQSELSFAPLRGIPDKSEDTEWSSRPSEVSEALFQATAEVASDLASSRFSVSQHPLIGSTAVGSQCPFLPSEQGNNEETISSVDELKIPKDCDRYDDLCSYMSWKTRKDTQWPENNLADKDQVSVATSFDITDENIATKRSDHFDAARSYGQYWTQEDSSKQAETYLTKGLQGKVESDVITLDGLNENAVVCSERVAELQRKVGHSNLGINESFSFLLPSFVPHKPTRESEYHSSDLRMLRMSPDTVPKAPKHLKAGDTSKGGIAKVTQSNLKSGITTTPVDSDIGSHLSLSLEDLSQLAVSSPLETTTGQHTDTLNQKTLADTHLTEETLKVTAIPEPADQKTATPTVLSSSHSHRGKPSIFYQQGLPDSHLTEEALKVSAAPGLADQTTGMSTLTSTSYSHREKPGTFYQQELPESNLTEEPLEVSAAPGPVEQKTGIPTVSSTSHSHVEDLLFFYRQTLPDGHLTDQALKVSAVSGPADQKTGTATVLSTPHSHREKPGIFYQQEFADSHQTEETLTKVSATPGPADQKTEIPAVQSSSYSQREKPSILYPQDLADSHLPEEGLKVSAVAGPADQKTGLPTVPSSAYSHREKLLVFYQQALLDSHLPEEALKVSAVSGPADGKTGTPAVTSTSSASSSLGEKPSAFYQQTLPNSHLTEEALKVSIVPGPGDQKTGIPSAPSSFYSHREKPIIFSQQTLPDFLFPEEALKVSAVSVLAAQKTGTPTVSSNSHSHSEKSSVFYQQELPDSDLPRESLKMSAIPGLTDQKTVPTPTVPSGSFSHREKPSIFYQQEWPDSYATEKALKVSTGPGPADQKTEIPAVQSSSYPQREKPSVLYPQVLSDSHLPEESLKVSAFPGPADQMTDTPAVPSTFYSQREKPGIFYQQTLPESHLPKEALKISVAPGLADQKTGTPTVTSTSYSQHREKPSIFHQQALPGTHIPEEAQKVSAVTGPGNQKTWIPRVLSTFYSQREKPGIFYQQTLPGSHIPEEAQKVSPVLGPADQKTGTPTPTSASYSHTEKPGIFYQQVLPDNHPTEEALKISVASEPVDQTTGTPAVTSTSYSQYREKPSIFYQQSLPSSHLTEEAKNVSAVPGPADQKTVIPILPSTFYSHTEKPGVFYQQVLPHSHPTEEALKISVASEPVDQTTGTPTVTSTSYSQHTEKPSIFYQQSLPGSHLTEEAKNVSAVPGPGDRKTGIPTLPSTFYSHTEKPGSFYQQVLPHSHLPEEALEVSVAPGPVDQTIGTPTVTSPSSSFGEKPIVIYKQAFPEGHLPEESLKVSVAPGPVGQTTGAPTITSPSYSQHRAKSGSFYQLALLGSQIPEEALRVSSAPGPADQTTGIPTITSTSYSFGEKPIVNYKQAFPDGHLPEEALKVSIVSGPTEKKTDIPAGPLGSSALGEKPITFYRQALLDSPLNKEVVKVSAAPGPADQKTETLPVHSTSYSNRGKPVIFYQQTLSDSHLPEEALKVPPVPGPDAQKTETPSVSSSLYSYREKPIVFYQQALPDSELTQEALKVSAVPQPADQKTGLSTVTSSFYSHTEKPNISYQQELPDSHLTEEALKVSNVPGPADQKTGVSTVTSTSYSHREKPIVSYQRELPHFTEAGLKILRVPGPADQKTGINILPSNSYPQREHSVISYEQELPDLTEVTLKAIGVPGPADQKTGIQIASSSSYSNREKASIFHQQELPDVTEEALNVFVVPGQGDRKTEIPTVPLSYYSRREKPSVISQQELPDSHLTEEALKVSPVSIPAEQKTGIPIGLSSSYSHSHKEKLKISTVHIPDDQKTEFPAATLSSYSQIEKPKISTVIGPNDQKTPSQTAFHSSYSQTVKPNILFQQQLPDRDQSKGILKISAVPELTDVNTGKPVSLSSSYFHREKSNIFSPQELPGSHVTEDVLKVSTIPGPAGQKTVLPTALPSSFSHREKPDIFYQKDLPDRHLTEDALKISSALGQADQITGLQTVPSGTYSHGENHKLVSEHVQRLIDNLNSSDSSVSSNNVLLNSQADDRVVINKPESAGFRDVGSEEIQDAENSAKTLKEIRTLLMEAENMALKRCNFPAPLARFRDISDISFIQSKKVVCFKEPSSTGVSNGDLLHRQPFTEESPSSRCIQKDIGTQTNLKCRRGIENWEFISSTTVRSPLQEAESKVSMALEETLRQYQAAKSVMRSEPEGCSGTIGNKIIIPMMTVIKSDSSSDASDGNGSCSWDSNLPESLESVSDVLLNFFPYVSPKTSITDSREEEGVSESEDGGGSSVDSLAAHVKNLLQCESSLNHAKEILRNAEEEESRVRAHAWNMKFNLAHDCGYSISELNEDDRRKVEEIKAELFGHGRTTDLSKGLQSPRGMGCKPEAVCSHIIIESHEKGCFRTLTSEHPQLDRHPCAFRSAGPSEMTRGRQNPSSCRAKHVNLSASLDQNNSHFKVWNSLQLKSHSPFQNFIPDEFKISKGLRMPFDEKMDPWLSELVEPAFVPPKEVDFHSSSQMPSPEPMKKFTTSITFSSHRHSKCISNSSVVKVGVTEGSQCTGASVGVFNSHFTEEQNPPRDLKQKTSSPSSFKMHSNSQDKEVTILAEGRRQSQKLPVDFERSFQEEKPLERSDFTGSHSEPSTRANCSNFKEIQISDNHTLISMGRPSSTLGVNRSSSRLGVKEKNVTITPDLPSCIFLEQRELFEQSKAPRADDHVRKHHSPSPQHQDYVAPDLPSCIFLEQRELFEQCKAPYVDHQMRENHSPLPQGQDSIASDLPSPISLEQCQSKAPGVDDQMNKHHFPLPQGQDCVVEKNNQHKPKSHISNINVEAKFNTVVSQSAPNHCTLAASASTPPSNRKALSCVHITLCPKTSSKLDSGTLDERFHSLDAASKARMNSEFNFDLHTVSSRSLEPTSKLLTSKPVAQDQESLGFLGPKSSLDFQVVQPSLPDSNTITQDLKTIPSQNSQIVTSRQIQVNISDFEGHSNPEGTPVFADRLPEKMKTPLSAFSEKLSSDAVTQITTESPEKTLFSSEIFINAEDRGHEIIEPGNQKLRKAPVKFASSSSVQQVTFSRGTDGQPLLLPYKPSGSTKMYYVPQLRQIPPSPDSKSDTTVESSHSGSNDAIAPDFPAQVLGTRDDDLSATVNIKHKEGIYSKRVVTKASLPVGEKPLQNENADASVQVLITGDENLSDKKQQEIHSTRAVTEAAQAKEKESLQKDTADSSAAAAAEHSAQVGDPEMKNLPDTKAITQKEEIHRKKTVPEEAWPNNKESLQINIEESECHSEFENTTRSVFRSAKFYIHHPVHLPSDQDICHESLGKSVFMRHSWKDFFQHHPDKHREHMCLPLPYQNMDKTKTDYTRIKSLSINVNLGNKEVMDTTKSQVRDYPKHNGQISDPQRDQKVTPEQTTQHTVSLNELWNKYRERQRQQRQPELGDRKELSLVDRLDRLAKILQNPITHSLQVSESTHDDSRGERSVKEWSGRQQQRNKLQKKKRFKSLEKSHKNTGELKKSKVLSHHRAGRSNQIKIEQIKFDKYILSKQPGFNYISNTSSDCRPSEESELLTDTTTNILSGTTSTVESDILTQTDREVALHERSSSVSTIDTARLIQAFGHERVCLSPRRIKLYSSITNQQRRYLEKRSKHSKKVLNTGHPLVTSEHTRRRHIQVANHVISSDSISSSASSFLSSNSTFCNKQNVHMLNKGIQAGNLEIVNGAKKHTRDVGITFPTPSSSEAKLEENSDVTSWSEEKREEKMLFTGYPEDRKLKKNKKNSHEGVSWFVPVENVESRSKKENVPNTCGPGISWFEPITKTRPWREPLREQNCQGQHLDGRGYLAGPGREAGRDLLRPFVRATLQESLQFHRPDFISRSGERIKRLKLIVQERKLQSMLQTERDALFNIDRERQGHQNRMCPLPKRVFLAIQKNKPISKKEMIQRSKRRHFLENEEVGL

SEQ ID NO: 44240 - protein, 140 aa, Homo sapiens
MIETQEDIYVGSIETDRGVREQVRFYDTRGLRDGAELPRHCFSCTDGYVLVYSTDSRESFQRVELLKKEIDKSKDKKEVTIVVLGNKCDLQEQRRVDPDVAQHWAKSEKVKLWEVSVADRRSLLEPFVYLASKMTQPQSK

SEQ ID NO: 44241 - protein, 132 aa, Homo sapiens
MDEDVLTTLKILIIGESGVGKSSLLLRFTDDTFDPELAATIGVDFKVKTISVDGNKAKLAIWDTAGQERFRTLTPSYYRGAQGVILVYDVTRRDTFVKLDNWLNELETYCTRNDIVNMLVGNKIDKSIEMKA

SEQ ID NO: 44242 - protein, 295 aa, Homo sapiens
  MOD_RES (1)..(1): Any amino acid
XEQQLDDEDDDEEDCPNPEEYNLDEPNAESDYTYSSSYEQFNGELPNGRHKIPESQFPEFSTSLFSGSLEPVACGSVLSEGSPLTEQEESSPSHDRSRTVSASSTGDLPKAKTRAADLLVNPLDPRNADKIRVKIADLGNACWVHKHFTEDIQTRQYRSIEVLIGAGYSTPADIWSTACMAFELATGDYLFEPHSGEDYSRDEDHIALIIELLGKVPRKYAMLGKYSKEFFTRKGELRHITKLKPWSLFDVLVEKYGWPHEDAAQFTDFLIPMLEMVPEKRASAGECLRHPWLNS

SEQ ID NO: 44243 - protein, 367 aa, Homo sapiens
MLTFMASDSEEEVCDERTSLMSAESPTPRSCQEGRQGPEDGENTAQWRSQENEEDGEEDPDRYVCSGVPGRPPGLEEELTLKYGAKHVIMLFVPVTLCMIVVVATIKSVRFYTEKNGQLIYTPFTEDTPSVGQRLLNSVLNTLIMISVIVVMTIFLVVLYKYRCYKFIHGWLIMSSLMLLFLFTYIYLGEVLKTYNVAMDYPTLLLTVWNFGAVGMVCIHWKGPLVLQQAYLIMISALMALVFIKYLPEWSAWVILGAISVYDLVAVLCPKGPLRMLVETAQERNEPIFPALIYSSAMVWTVGMAKLDPSSQGALQLPYDPEMEEDSYDSFGEPSYPEVFEPPLTGYPGEELEEEEENLSLEIKPTF

SEQ ID NO: 44244 - protein, 182 aa, Homo sapiens
MGSRNSSSAGSGSGDPSEGLPRRGAGLRRSEEEEEEDEDVDLAQALLDSEEENDRAWDGRLGDRYNPPVDATPDTRELEFNEIKTQVELATGQLGLRRAAQKHSFPRMLHQRERGLCHRGSFSLGEQSRVISHFLPNDLGFTDSYSQKAFCGIYSKDGQIFMSACQDQTIRLYDCRYGRFRK

SEQ ID NO: 44245 - protein, 1215 aa, Homo sapiens
MLFPLQVAAVTSSVRDDPLEHCVSPRTRARSPEICKMADNLDEFIEEQKARLAEDKAELESDPPYMEMKGKLSAKLSENSKILISMAKENIPPNSQQTRGSLGIDYGLSLPLGEDYERKKHKLKEELRQDYRRYLTQKNFLSTSETDPSTLGVSLPIGERLSAKERLKLERNKEYNQFLRGKEESSEKFRQVEKSTEPKSQRNKKPIGQVKPDLTSQIQTSCENSEGPRKDVLTPSEAYEELLNQRRLEEDRYRQLDDEIELRNRRIIKKANEEVGISNLKHQRFASKAGIPDRRFHRFNEDRVFDRRYHRPDQDPEVSEEMDERFRYESDFDRRLSRVYTNDSAPDNETSKSANQDTCSPFAGMLFGGEDRELIQRRKEKYRLELLEQMAEQQRNKRREKDLELRVAASGAQDPEKSPDRLKQFSVAPRHFEEMIPPERPRIAFQTPLPPLSAPSVPPIPSVHPVPSQNEDLRSGLSSALGEMVSPRIAPLPPPPLLPPLATNYRTPYDDAYYFYGSRNTFDPSLAYYGSGMMGVQPAAYVSAPVTHQLAQPVVNTVGQNELKITSDQVINSGLIFEDKPKPSKQSLQSYQEALQQQIREREERRKKEREEKEEYEAKLEAEMRTYNPWGKGGGGAPLRDAKGNLITDLNRMHRQNIDAYHNPDARTYEDKRAVVSLDPNLATSNAENLEDAANKSSGHMQTQSSPFARGNVFGEPPTELQIKQQELYKNFLRFQIEEKKQREEAERERLRIAEEKEERRLAEQRARIQQEYEEEQEKKREKEEEQRLKNEEHIRLAEERQKEAERKKKEEEEKYNLQLQHYCERDNLIGEETKHMRQPSPIVPALQNKIASKLQRPPSVDSIIRSFIHESSMSRAQSPPVPARKNQLRAEEEKKNVIMELSEMRKQLRSEERRLQERLLHMDSDDEIPIRKKERNPMDIFDMARHRLQAPVRRQSPKGLDAATFQNVHDFNELKDRDSETRVDLKFMYLDPPRDHHTLEIQQQALLREQQKRLNRIKMQEGAKVDLDAIPSAKVREQRMPRDDTSDFLKNSLLESDSAFIGAYGETYPAIEDDVLPPPSQLPSARERRRNKWKGLDIDSSRPNVAPDGLSLKSISSVNVDELRVRNEERMRRLNEFHNKPINTDDESSLVDPDDIMKHIGDDGSNSVATEPWLRPGTSETLKRFMAEQLNQEQQQIPGKPGTFTWQGLSTAHG

SEQ ID NO: 44246 - protein, 48 aa, Homo sapiens
MALPRLTGALRSFSNVTKQDNYNEEVADLKLELIMGEKQLKVGLHFSS

SEQ ID NO: 44247 - protein, 123 aa, Homo sapiens
MTIFRCQDNCAERGYLYGGLEFGAECYCGHKIQATNVSEAECDMECKGERGSVCGGANRLSVYRLQLAQESARRYGSAVFRGCFRRPDNLSLALPVTAAMLNMSVDKCVDFCTEKEYPLAALA

SEQ ID NO: 44248 - protein, 130 aa, Homo sapiens
MAASSRAQVLSLYRAMLRESKRFSAYNYRTYAVRRIRDAFRENKNVKDPVEIQTLVNKAKRDLGVIRRQMDSHSVAQAGVHWNDLSSLQPLPPWFKQFSCLSLPSSWDYRRTPPRLANFCILSRDVISLY

SEQ ID NO: 44249 - protein, 131 aa, Homo sapiens
MACEEFNFGEILMTQVIHSIEYCLGCISNTASYLRLWALSLAHAQLSDVLWAMLMRVGLRVDTTYGVLLLLPVIALFAVLTIFILLIMEGLSAFLHAIRLHWVEFQNKFYVGAGTKFVPFSFSLLSSKFNN

SEQ ID NO: 44250 - protein, 1381 aa, Homo sapiens
MPEQERQITAREGASRKILSKLSLPTRAWEPAMKKSFAFDNVGYEGGLDGLGPSSQVATSTVRILGMTCQSCVKSIEDRISNLKGIISMKVSLEQGSATVKYVPSVVCLQQVCHQIGDMGFEASIAEGKAASWPSRSLPAQEAVVKLRVEGMTCQSCVSSIEGKVRKLQGVVRVKVSLSNQEAVITYQPYLIQPEDLRDHVNDMGFEAAIKSKVAPLSLGPIDIERLQSTNPKRPLSSANQNFNNSETLGHQGSHVVTLQLRIDGMHCKSCVLNIEENIGQLLGVQSIQVSLENKTAQVKYDPSCTSPVALQRAIEALPPGNFKVSLPDGAEGSGTDHRSSSSHSPGSPPRNQVQGTCSTTLIAIAGMTCASCVHSIEGMISQLEGVQQISVSLAEGTATVLYNPSVISPEELRAAIEDMGFEASVVSESCSTNPLGNHSAGNSMVQTTDGTPTSVQEVAPHTGRLPANHAPDILAKSPQSTRAVAPQKCFLQIKGMTCASCVSNIERNLQKEAGVLSVLVALMAGKAEIKYDPEVIQPLEIAQFIQDLGFEAAVMEDYAGSDGNIELTITGMTCASCVHNIESKLTRTNGITYASVALATSKALVKFDPEIIGPRDIIKIIELLGGWYFYVQAYKSLRHRSANMDVLIVLATSIAYVYSLVILVVAVAEKAERSPVTFFDTPPMLFVFIALGRWLEHLAKSKTSEALAKLMSLQATEATVVTLGEDNLIIREEQVPMELVQRGDIVKVVPGGKFPVDGKVLEGNTMADESLITGEAMPVTKKPGSTVIAGSINAHGSVLIKATHVGNDTTLAQIVKLVEEAQMSKAPIQQLADRFSGYFVPFIIIMSTLTLVVWIVIGFIDFGVVQRYFPNPNKHISQTEVIIRFAFQTSITVLCIACPCSLGLATPTAVMVGTGVAAQNGILIKGGKPLEMAHKIKTVMFDKTGTITHGVPRVMRVLLLGDVATLPLRKVLAVVGTAEASSEHPLGVAVTKYCKEELGTETLGYCTDFQAVPGCGIGCKVSNVEGILAHSERPLSAPASHLNEAGSLPAEKDAVPQTFSVLIGNREWLRRNGLTISSDVSDAMTDHEMKGQTAILVAIDGVLCGMIAIADAVKQEAALAVHTLQSMGVDVVLITGDNRKTARAIATQVGINKVFAEVLPSHKVAKVQELQNKGKKVAMVGDGVNDSPALAQADMGVAIGTGTDVAIEAADVVLIRNDLLDVVASIHLSKRTVRRIRINLVLALIYNLVGIPIAAGVFMPIGIVLQPWMGSAAMAASSVSVVLSSLQLKCYKKPDLERYEAQAHGHMKPLTASQVSVHIGMDDRWRDSPRATPWDQVSYVSQVSLSSLTSDKPSRHSAAADDDGDKWSLLLNGRDEEQYI

SEQ ID NO: 44251 - protein, 119 aa, Homo sapiens
  MOD_RES (1)..(1): Any amino acid
XFLMASLGAHDPQTTQELLTTLRDASESPGENCQHLLARDVGLPLCQALVEAEDGNPDRVLELLLPIRYRIVQLGGSNAQRDVFNQLLIHAALNCTSSVHKNVARGKVSLGHPGWNAVV

SEQ ID NO: 44252 - protein, 113 aa, Homo sapiens
MDKRDFVRKILQKEEEAEEESLMNKEESYGGRDQHDRPLVEAESTLPQNRYTQEGDIPEDSCFHCRGSGSATCSLCHGSKFSMLANRFKESYRALRCPACNENGLQPCQICNQ

SEQ ID NO: 44253 - protein, 332 aa, Homo sapiens
MESYDVIANQPVVIDNGSGVIKAGFAGDQIPKYCFPNYVGRPKHVRVMAGALEGDIFIGPKAEEHRGLLSIRYPMEHGIVKDWNDMERIWQYVYSKDQLQTFSEEHPVLLTEAPLNPRKNRERAAEVFFETFNVPALFISMQAVLSLYATGRTTGVVLDSGDGVTHAVPIYEGFAMPHSIMRIDIAGRDVSRFLRLYLRKEGYDFHSSSEFEIVKAIKERACYLSINPQKDETLETEKAQYYLPDGSTIEIGPSRFRAPELLFRPDLIGEESEGIHEVLVFAIQKSDMDLRRTLFSNIVLSGGSTLFKDICTSGETVFHVDWGLHPCLPGHL

SEQ ID NO: 44254 - protein, 109 aa, Homo sapiens
MLALRLLNVVAPAYFLCISLVTFVLQLFLFLPSMREDPAAARLFSPALLHGALFLFLSANALGNYVLVIQNSPDDLGACQGASARKTPCPSPSTHFCRVCARVTLRHDH

SEQ ID NO: 44255 - protein, 63 aa, Homo sapiens
APNLVPMDYRKSPIVHVPMSLIIQMPELRMGKPRLRGIWSLLQGHTGCPQSGSGALLLILHPQ

SEQ ID NO: 44256 - protein, 120 aa, Homo sapiens
MDLSANQDEETDQETFQLEIDRDTKKCAFRTHTGKYWTLTATGGVQSTASSKNASCYFDIEWRDRRITLRASNGKFVTSKKNGQLAASVETAGDSELFLMKLINRPIIVFRGEHGFIGCR

SEQ ID NO: 44257 - protein, 69 aa, Homo sapiens
EAGKDDYVKALPGQLKPFETLLSQNQGGKTFIVGDQVSIWPHAVPSSPPSASRWTQVSPSLTTTCWTCC

SEQ ID NO: 44258 - protein, 216 aa, Homo sapiens
MSSYLYIIKSELPLVIQTFLNLEEKTSDWYMNGNYLVILVSVTIILPLALMRQLGYLGYSSGFSLSCMVFFLIAVIYKKFHVPCPLPPNFNNTTGNFSHVEIVKEKVQLQVEPEASAFCTPSYFTLNSQTAYTIPIMAFAFVCHPEVLPIYTELKDPSKKKMQHISNLSIAVMYIMYFLAALFGYLTFYNGVESELLHTYSKVDPFDVLILCVRVA

SEQ ID NO: 44259 - protein, 460 aa, Homo sapiens
MGDAESCLLRQQTREVRKKPLINYRFLRAAANAEPRGPQAQRTSCAKRECGAFTQRVRERAGRQPPAGGTRHSRAERGRRRSHPRSRTRTTALLRSSQTKEMATKEKLQCLKDFHKDILKPSPGKSPGTRPEDEAEGKPPQREKWSSKIDFVLSVAGGFVGLGNVWRFPYLCYKNGGGAFLIPYFIFLFGSGLPVFFLEIIIGQYTSEGGITCWEKICPLFSGIGYASVVIVSLLNVYYIVILAWATYYLFQSFQKELPWAHCNHSWNTPHCMEDTMRKNKSVWITISSTNFTSPVIEFWERNVLSLSPGIDHPGSLKWDLALCLLLVWLVCFFCIWKGVRSTGKVVYFTATFPFAMLLVLLVRGLTLPGAGAGIKFYLYPDITRLEDPQVWIDAGTQIFFSYAICLGAMTSLGSYNKYKYNSYRSWPGLHCLPKSCDNDAAAHILVHSFFYYASLAWTG

SEQ ID NO: 44260 - protein, 133 aa, Homo sapiens
  MOD_RES (1)..(1): Any amino acid
XIDLGAAAHYTGDKASPDQNASTHTPQSSVKTSVPSSKSSGDLVDLFDGTSQSTVTATSGNGDFGDWSAFNQAPSGPVASSGEFFGSASQPAVELVSGSQSALGPPPAASNSSDLFDLMGSSQATMTSSQSMN

SEQ ID NO: 44261 - protein, 99 aa, Homo sapiens
MYRISQLMSTPVASSSRLEREYAGELSPTCIFPSFTCDSLDGYHSFECGSIDPLTGSHYTCRRSPRLLTNGYYIWTEDSFLCDKDGNITLNPSQTSVMY

SEQ ID NO: 44262 - protein, 98 aa, Homo sapiens
MDLSALRVEEVQNVINAMQKILECPICLELIKEPVSTKCDHIFCKSLQESTRFSQLVEELLKIICAFQLDTGLEYANSYNFAKKENNSPEHLKDEVSI

SEQ ID NO: 44263 - protein, 122 aa, Homo sapiens
GWKEAEADKLSIWYDVGGIIVFSVSDPGQARMDVGFLLFHSHDKLYNCVYLAINSEGNILSRAKETGSHIEGVTGARETERTMSATSGPLGLRVCPNLGLSRSSSLILDCQASLNTASHLRC

SEQ ID NO: 44264 - protein, 396 aa, Homo sapiens
MSKISEAVKRARAAFSSGRTRPLQFRIQQLEALQRLIQEQEQELVGALAADLHKNEWNAYYEEVVYVLEEIEYMIQKLPEWAADEPVEKTPQTQQDELYIHSEPLGVVLVIGTWNYPFNLTIQPMVGAIAAGNSVVLKPSELSENMASLLATIIPQYLDKDLYPVINGGVPETTELLKERFDHILYTGSTGVGKIIMTAAAKHLTPVTLELGGKSPCYVDKNCDLDVACRRIAWGKFMNSGQTCVAPDYILCDPSIQNQIVEKLKKSLKEFYGEDAKKSRDYGRIISARHFQRVMGLIEGQKVAYGGTGDAATRYIAPTILTDVDPQSPVMQEEIFGPVLPIVCVRSLEEAIQFINQREKPLALYMFSSNDKGTAAWDPTMARRASRLSLTAALAW

SEQ ID NO: 44265 - protein, 2038 aa, Homo sapiens
MFNLMKKDKDKDGGRKEKKEKKEKKERMSAAELRSLEEMSLRRGFFNLNRSSKRESKTRLEISNPIPIKVASGSDLHLTDIDSDSNRGSVILDSGHLSTASSSDDLKGEEGSFRGSVLQRAAKFGSLAKQNSQMIVKRFSFSQRSRDESASETSTPSEHSAAPSPQVEVRTLEGQLVQHPGPGIPRPGHRSRAPELVTKKFPVDLRLPPVVPLPPPTLRELELQRRPTGDFGFSLRRTTMLDRGPEGQACRRVVHFAEPGAGTKDLALGLVPGDRLVEINGHNVESKSRDEIVEMIRQSGDSVRLKVQPIPELSELSRSWLRSGEGPRREPSDAKTEEQIAAEEAWNETEKVWLVHRDGFSLASQLKSEELNLPEGKVRVKLDHDGAILDVDEDDVEKANAPSCDRLEDLASLVYLNESSVLHTLRQRYGASLLHTYAGPSLLVLGPRGAPAVYSEKVMHMFKGCRREDMAPHIYAVAQTAYRAMLMSRQDQSIILLGSSGSGKTTSCQHLVQYLATIAGISGNKVFSVEKWQALYTLLEAFGNSPTIINGNATRFSQILSLDFDQAGQVASASIQTMLLEKLRVARRPASEATFNVFYYLLACGDGTLRTELHLNHLAENNVFGIVPLAKPEEKQKAAQQFSKLQAAMKVLGISPDEQKACWFILAAIYHLGAAGATKPAVAGRKQFARHEWAQKAAYLLGCSLEELSSAIFKHQHKGGTLQRSTSFRQGPEESGLGDGTGPKLSALECLEGMAAGLYSELFTLLVSLVNRALKSSQHSLCSMMIVDTPGFQNPEQGGSARGASFEELCHNYTQDRLQRLFHERTFVQELERYKEENIELAFDDLEPPTDDSVAAVDQASHQSLVRSLARTDEARGLLWLLEEEALVPGASEDTLLERLFSYYGPQEGDKKGQSPLLHSSKPHHFLLGHSHGTNWVEYNVTGWLNYTKQNPATQNAPRLLQDSQKKIISNLFLGRAGSATVLSGSIAGLEGGSQLALRRATSMRKTFTTGMAAVKKKSLCIQMKLQVDALIDTIKKSKLHFVHCFLPVAEGWAGEPRSASSRRVSSSSELDLPSGDHCEAGLLQLDVPLLRTQLRGSRLLDAMRMYRQGYPDHMVFSEFRRRFDVLAPHLTKKHGRNYIVVDERRAVEELLECLDLEKSSCCMGLSRVFFRAGTLARLEEQRDEQTSRNLTLFQAACRGYLARQHFKKRKIQDLAIRCVQKNIKKNKGVKDWPWWKLFTTVRPLIEVQLSEEQIRNKDEEIQQLRSKLEKAEKERNELRLNSDRLESRISELTSELTDERNTGESASQLLDAETAERLRAEKEMKELQTQYDALKKQMEVMEMEVMEARLIRAAEINGEVDDDDAGGEWRLKYERAVREVDFTKKRLQQEFEDKLEVEQQNKRQLERRLGDLQADSEESQRALQQLKKKCQRLTAELQDTKLHLEGQQVRNHELEKKQRRFDSELSQAHEEAQREKLQREKLQREKDMLLAEAFSLKQQLEEKDMDIAGFTQKVVSLEAELQDISSQESKDEASLAKVKKQLRDLEAKVKDQEEELDEQAGTIQMLEQAKLRLEMEMERMRQTHSKEMESRDEEVEEARQSCQKKLKQMEVQLEEEYEDKQKVLREKRELEGKLATLSDQVNRRDFESEKRLRKDLKRTKALLADAQLMLDHLKNSAPSKREIAQLKNQLEESEFTCAAAVKARKAMEVEIEDLHLQIDDIAKAKTALEEQLSRLQREKNEIQNRLEEDQEDMNELMKKHKAAVAQASRDLAQINDLQAQLEEANKEKQELQEKLQALQSQVEFLEQSMVDKSLVSRQEAKIRELETRLEFERTQVKRLESLASRLKENMEKLTEERDQRIAAENREKEQNKRLQRQLRDTKEEMGELARKEAEASRKKHELEMDLESLEAANQSLQADLKLAFKRIGDLQAAIEDEMESDENEDLINSEGDSDVDSELEDRVDGVKSWLSKNKGPSKAASDDGSLKSSSPTSYWKSLAPDRSDDEHDPLDNTSRPRYSHSYLSDSDTEAKLTETNA

SEQ ID NO: 44266 - protein, 1005 aa, Homo sapiens
RIQDFVRRVEQRKLLLDMSVSFHTHTKELWTWMEDLQKEMLEDVCADSVDAVQELIKQFQQQQTATLDATLNVIKEGEDLIQQLRDSAVSNNKTPHSSSISHIESVLQQLDDAQVQMEELFHERKIKLDIFLQLRIFEQYTIEVTAELDAWNEDLLRQMNDFNTEDLTLAEQRLQRHTERKLAMNNMTFEVIQQGQDLHQYITEVQASGIELICEKDIDLAAQVQELLEFLHEKQHELELNAEQTHKRLEQCLQLRHLQAEVKQVLGWIRNGESMLNASLVNASSLSEAEQLQREHEQFQLAIESLFHATSLQKTHQSALQVQQKAEVLLQAGHYDADAIRECAEKVALHWQQLMLKMEDRLKLVNASVAFYKTSEQVCSVLESLEQEYRRDEDWCGGRDKLGPAAEIDHVIPLISKHLEQKEAFLKACTLARRNAEVFLKYIHRNNVSMPSVASHTRGPEQQVKAILSELLQRENRVLHFWTLKKRRLDQCQQYVVFERSAKQALDWIQETGEFYLSTHTSTGETTEETQELLKEYGEFRVPAKQTKEKVKLLIQLADSFVEKGHIHATEIRKWVTTVDKHYRDFSLRMGKYRYSLEKALGVNTEDNKDLELDIIPASLSDREVKLRDANHEVNEEKRKSARKKEFIMAELLQTEKAYVRDLHECLETYLWEMTSGVEEIPPGILNKEHIIFGNIQEIYDFHNNIFLKELEKYEQLPEDVGHCFVTWADKFQMYVTYCKNKPDSNQLILEHAGTFFDEIQQRHGLANSISSYLIKPVQRITKYQLLLKELLTCCEEGKGELKDGLEVMLSVPKKANDAMHVSMLEGFDENLDVQGELILQDAFQVWDPKSLIRKGRERHLFLFEISLVFSKEIKDSSGHTKYVYKNKLLTSELGVTEHVEGDPCKFALWSGRTPSSDNKTVLKASNIETKQEWIKNIREVIQERIIHLKGALKEPLQLPKTPAKQRNNSKRMATLFLGGTWDLEILSPLTFSAHPGTCPCSSPG

SEQ ID NO: 44267 - protein, 100 aa, Homo sapiens
MNKDAQMRAAINQKLIETGERERLKELLRAKLIECGWKDQLKAHCKEVIKEKGLEHVTVDDLVAEITPKGRETGFAMLPRLVLSSRTQAILLPQPSRLLG

SEQ ID NO: 44268 - protein, 131 aa, Homo sapiens; identical to SEQ ID NO: 43351

SEQ ID NO: 44269 - protein, 40 aa, Homo sapiens
MPIRRTVNSTRETPPKSKLAEGEEEKPEPDISSEESVSTV

SEQ ID NO: 44270 - protein, 57 aa, Homo sapiens
MPLRLDIKRKLTARSDRVKSVDLHPTEPWMLASLYNGSVCVWNHETQCEKYSCLWRA

SEQ ID NO: 44271 - protein, 158 aa, Homo sapiens
  MOD_RES (1)..(1): Any amino acid
XSFHLKDVLTTIGEKVCLEVSSCLSLCGSSPFTTDKETVLKGQIQAVASPDDPIRRIMESRILTFLETYLASGHQKPLPTVPGGLSPVQRELEEVAIKFARLVNYNKMVFCPYYDAILISPELFNVDHRINTTSLINSSDSCYSLIFCIRSYSFPEIG

SEQ ID NO: 44272 - protein, 84 aa, Homo sapiens
MTILTYPFKNLPTASKWALRFSIRPLSCSSQLRAAPAVQTKTKKTLAKPNIRNVVVVDGVRTPFLLSGTSYKDLMPHDLARAAL

SEQ ID NO: 44273 - protein, 389 aa, Homo sapiens
GYQYLNGVNPGLIRRCTRIPDKFPVTDDMVAPFLGEGTCLQAELELSQTPGPDCPIFLPSDSEWDWLLAKTWVRYAEFYSHEAIAHLLETHLIAEAFCLALLRNLPMCHPLYKLLIPHTRYTVQINSIGRAVLLNEGGLSAKGMSLGVEGFAGVMVRALSELTYDSLYLPNDFVERGVQDLPGYYYRDDSLAVWNALEKYVTEIITYYYPSDAAVEGDPELQSWVQEIFKECLLGRESSGFPRCLRTVPELIRYVTIVIYTCSAKHAAVNTGQMEFTAWMPNFPASMRNPPIQTKGLTTLETFMDTLPDVKTTCITLLVLWTLSREPDDRRPLGHFPDIHFVEEAPRRSIEAFRQRLNQISHDIRQRNKCLPIPYYYLDPVLIENSISI

SEQ ID NO: 44274 - protein, 110 aa, Homo sapiens
MSRINKNVVLALLTLTSSAFLLFQLYYYKHYLSTKNGAGLSKSKGSRIGFDSTQWNQLDTFPRSVNDCIDNNLEDVFRSIFHLILKMFIFLRRLLIESRDHMCYLIICIF

SEQ ID NO: 44275 - protein, 239 aa, Homo sapiens
  MOD_RES (1)..(1): Any amino acid
XLLQEENEELRRRLASATRRTEALERELEIGQDCLELELGQSREELDKFKDKFRRLQNSYTASQRTNQELEDKLHTLIKKAEMDRKTLDWEIVELTNKLLDAKNTINKLEELNERYRLDCNLAVQLLKCNKSHFRNHKFADVSRTHPLPAHIDHSGHCRTPLTPVSAPLSVLLFPLCPPLASMSPLKPVNSATGWCPVYCPGPITSSGGPALLVSVTETEREDPGQEGEGSQSYLPKEY

SEQ ID NO: 44276 - protein, 229 aa, Homo sapiens
MSLVAEAFVSQIAAAEPWPENATLYQQLKGEQILLSDNAASLAVQAFLQMCNLPIKVVCRANAEYMSPSGKVPFIHVGNQVVSELGPIVQFVKAKGHSLSDGLEEVQKAEMKAYMELVNNMLLTAELYLQWCDEATVGEWEVKRKMKAIGWGKKTLDQVLEDVDQCCQALSQRLGTQPYFFNKQPTELDALVFGHLYTILTTQLTNDELSEKVKNYSNLLAFCRRIEQH

SEQ ID NO: 44277 - protein, 32 aa, Homo sapiens
  MOD_RES (1)..(1): Any amino acid
XCLEFDEVKVNQILKTLSEVEESISTLISQPN

SEQ ID NO: 44278 - protein, 237 aa, Homo sapiens
HYSTASFVLAWLLRIEPFTTYFLNLQGGKFDHADRTFSSISRAWRNSQRDTSDIKELIPEFYYLPEMFVNFNNYNLGVMDDGTVVSDVELPPWAKTSEEFVHINRLQGPEAVRALNVFYYLTYEGAVNLNSITDPVLREAVEAQIRSFGQTPSQLLIEPHPPRGSAMQVYLLLQSPLMFTDKAQQDVIMVLKFPSNSPVTHVAANTQPGLATPAVITVTANRLFAVNKWHNLPAHQG

SEQ ID NO: 44279 - protein, 237 aa, Homo sapiens
MLYFSLFWAARPLQRCGQLVRMAIRAQHSNAAQTQTGEANRGWTGQESLSDSDPEMWELLQREKDRQCRGLELIASENFCSRAALEALGSCLNNKYSEGYPGKRYYGGAEVVDEIELLCQRRALEAFDLDPAQWGVNVQPYSGSPANLAVYTALLQPHDRIMGLDLPDGGHLTHGYMSDVKRISATSIFFESMPYKLNVCDEVKAHLLADMAHISGLVAAKVIPSPFKHADIVTTTT

SEQ ID NO: 44280 - protein, 601 aa, Homo sapiens
MLKLLNQKKGPSQCPLCKNDITKRSLQESTRFSQLVEELLKIICAFQLDTGLEYANSYNFAKKENNSPEHLKDEVSIIQSMGYRNRAKRLLQSEPENPSLQETSLSVQLSNLGTVRTLRTKQRIQPQKTSVYIELGSDSSEDTVNKATYCSVGDQELLQITPQGTRDEISLDSAKKAACEFSETDVTNTEHHQPSNNDLNTTEKRAAERHPEKYQGSSVSNLHVEPCGTNTHASSLQHENSSLLLTKDRMNVEKAEFCNKSKQPGLARSQHNRWAGSKETCNDRRTPSTEKKVDLNADPLCERKEWNKQKLPCSENPRDTEDVPWITLNSSIQKVNEWFSRSDELLGSDDSHDGESESNAKVADVLDVLNEVDEYSGSSEKIDLLASDPHEALICKSERVHSKSVESNIEDKIFGKTYRKKASLPNLSHVTENLIIGAFVTEPQIIQERPLTNKLKRKRRPTSGLHPEDFIKKADLAVQKTPEMINQGTNQTEQNGQVMNITNSGHENKTKGDSIQNEKNPNPIESLEKESAFKTKAEPISSSISNMELELNIHNSKAPKKNRLRRKSSTRHIHALELVVSRNLSPPNCTELQIDSCSSSE

SEQ ID NO: 44281 - protein, 266 aa, Homo sapiens
MFANLKYVSLGILVFQTTSLVLTMRYSRTLKEEGPRYLSSTAVVVAELLKIMACILLVYKDSKCSLRALNRVLHDEILNKPMETLKLAIPSGIYTLQNNLLYVALSNLDAATYQWPSDSQLDSKELSAGSQFVGLMAVLTACFSSGFAGVYFEKILKETKQSVWIRNIQLGFFGSIFGLMGVYIYDGELVSKNGFFQGYNRLTWIVVVLQALGGLVIAAVIKYADNILKGFATSLSIILSTLISYFWLQDFVPTRWLYASSSSSCS

SEQ ID NO: 44282 - protein, 690 aa, Homo sapiens
MEDGKPVWAPHPTDGFQMGNIVDIGPDSLTIEPLNQKGKTFLALINQVFPAEEDSKKDVEDNCSLMYLNEATLLHNIKVRYSKDRIYTYVANILIAVNPYFDIPKIYSSEAIKSYQGKSLGTRPPHVFAIADKAFRDMKVLKMSQSIIVSGESGAGKTENTKFVLRYLTESYGTGQDIDDRIVEANPLLEAFGNAKTVRNNNSSRFGKFVEIHFNEKSSVVGGFVSHYLLEKSRICVQGKEERNYHIFYRLCAGASEDIREKLHLSSPDNFRYLNRGCTRYFANKETDKQILQNRKSPEYLKAGSMKDPLLDDHGDFIRMCTAMKKIGLDDEEKLDLFRVVAGVLHLGNIDFEEAGSTSGGCNLKNKSAQSLEYCAELLGLDQDDLRVSLTTRVMLTTAGGTKGTVIKVPLKVEQANNARDALAKTVYSHLFDHVVNRVNQCFPFETSSYFIGVLDIAGFEYFEHNSFEQFCINYCNEKLQQFFNERILKEEQELYQKEGLGVNEVHYVDNQDCIDLIEAKLVGILDILDEENRLPQPSDQHFTSAVHQKHKDHFRLTIPRKSKLAVHRNIRDDEGFIIRHFAGAVCYETTQFVEKNNDALHMSLESLICESRDKFIRELFESSTNNNKDTKQKAGKLSFISVGNKFKTQLNLLLDKLRSTAGVQWCNHNSLQPPPLWLKWSSHLSLPTS

SEQ ID NO: 44283 - protein, 63 aa, Homo sapiens
MERGKKKRISNKLQQTFHHSKEPTFLINQAGLLSSDSYSSLSPETESVNPGENIKTDTQKKRP

SEQ ID NO: 44284 - protein, 37 aa, Homo sapiens
MGWLTRIVCLFWGVLLTARANYQNGKNNVPRLKLSYK

SEQ ID NO: 44285 - protein, 308 aa, Homo sapiens
MDLTGLLLDEEGTFSLAGFQDFTFLPGHQKLSARIRRRLYYGWDWEADCSLEELSSPVADIAVELLQKAAPSPIRRLQKKYVAHVSREACISPCAMMLALVYIERLRHRNPDYLQHVSSSDLFLISMMVASKYLYDEGEEEEVFNDEWGAAGGVAVPTLNALERGFLSAMDWHLYTDPREIFEVLSWLESCVAEQQGRWRGWYTYTDLCVLLEQPTWQLALGSLCQRLVKLSCLLAVAYVSSVALAVASVAVIHQSLGLSCIPTPGPPDLGLTSRCLLEPCIPSVPQCLPSLANVSSCLEGSMGLRSL

SEQ ID NO: 44286 - protein, 344 aa, Homo sapiens
MTCCSCTSLSALLDFWAEVCWLAPEQTAGKKKPFVYTQGQAVLNRAFFPCFDTPAVKYKYSALIEVPDGFTAVMSASTWEKRGPNKFFFQMCQPIPSYLIALAIGDLVSAEVGPRSRVWAEPCLIDAAKEEYNGVIEEFLATGEKLFGPYVWGRYDLLFMPPSFPFGGMENPCLTFVTPCLLAGDRSLADVIIHEISHSWFGNLVTNANWGEFWLNEGFTMYAQRRISTILFGAAYTCLEAATGRALLRQHMDITGEENPLNKLRVKIEPGVDPDDTYNETPYEKGFCFVSYLAHLVGDQDQFDSFLKAYVHEFKFRSILADDFLDFYLEYFPELKKKRVDIIP

SEQ ID NO: 44287 - protein, 90 aa, Homo sapiens
  MOD_RES (1)..(1): Any amino acid
XGLKKMLRTCAVHITLDPDTANPWLILSEDRRQVRLGDTQQSIPGNEERFDSYPMVLGAQHFHSGKHYWEDLCGPSSVLVSMMEEKTQPL

SEQ ID NO: 44288 - protein, 276 aa, Homo sapiens
  MOD_RES (1)..(1): Any amino acid
XVDLEAATRKGILVMNTPNGNSLSAAELTCGMIMCLARQIPQATASMKDGKWERKKFMGTELNGKTLGILGLGRIGREVATRMQSFGMKTIGYDPIISPEVSASFGVQQLPLEEIWPLCDFITVHTPLLPSTTGLLNDNTFAQCKKGVRVVNCARGGIVDEGALLRALQSGQCAGAALDVFTEEPPRDRALVDHENVISCPHLGASTKEAQSRCGEEIAVQFVDMVKGKSLTGVASWQRQACGCCPTRLHWCQMGRPGTSWASPPCCPAWKRGSSM

SEQ ID NO: 44289 - protein, 161 aa, Homo sapiens
MPDSWDKDVYPEPPRRTPVQPNPIVYMMKAFDLIVDRPVTLVREFIERQHAKNRYYYYHRQYRRVPDITECKEEDIMCIKVDQEIINIMQDRLKACQQREGQNYQQNCIKEVEQFTQVAKAYQDRYQDLGAYSSARKCLAKQRQRMLQERKAAKEAAAATS

SEQ ID NO: 44290 - protein, 39 aa, Homo sapiens
MAKAPQGVHLICYSQGGLVCRALLSVMDDHNVDSFISLS

SEQ ID NO: 44291 - protein, 106 aa, Homo sapiens
MGKEKTHINIVVIGHVDSGKSTTTGHLIYKCGGIDKRTIEKFEKEAAEMGKGSFKYAWVLDKLKAERERGITIDISLWKFETTKYYITIIDAPGHRDFIKNMITGT

SEQ ID NO: 44292 - protein, 79 aa, Homo sapiens
MNSNVENLPPHIIRLVYKEVTTLTADPPDGIKVFPNEEDLTDLQVTIEGPGLLPDQDLPPERGRQWRDLRQRAQEGLDG

SEQ ID NO: 44293 - protein, 153 aa, Homo sapiens
MIGLEDFVADNYSKIGNQVLPPGASLGNGLTPEAARDLGLLPGIAVAASLIDAHAGGLGVIGADVRGHGLICEGQPVTSRLAVICGTSSCHMGISKDPIFVPGVWGPYFSAMVPGFWLNEGGQSVTGKLIDHMVQGHAAFPELQVKATARSPD

SEQ ID NO: 44294 - protein, 134 aa, Homo sapiens
MQRRSRGINTGLILLLSQIFHVGINNIPPVTLATLALNIWFFLNPQKPLYSSCLSVEKCYQQKDWQRLLLSPLHHADDWHLYFNMASMLWKGINLERRLGSRWFAYVITAFSVLTGVVYLLLQFAVAEFMDEPD

SEQ ID NO: 44295 - protein, 147 aa, Homo sapiens
MWDVAEELKAMLVFAEHRYYGESLPFGDNSFKDSRHLNFLTSEQALADFAELIKHLKRTIPGAENQPVIAIGGSYGGMLAAWFRMKYPHMVVGALAASAPIWQFEDLVPCGVFMKIVTTDFRKSGPHCSESIHRSWDAINRLSNTGS

SEQ ID NO: 44296 - protein, 18 aa, Homo sapiens
MMVSMGAVSKETPVVTIV

SEQ ID NO: 44297 - protein, 43 aa, Homo sapiens
YRDVVAAPFCIFYSYCQMGLQFPGHLSTRQDLRLSKLPSQQSL

SEQ ID NO: 44298 - protein, 797 aa, Homo sapiens
MVWDRQTKMEYEWKPDEQGLQQILQLLKESQSPDTTIQRTVQQKLEQLNQYPDFNNYLIFVLTKLKSEDEPTRSLSGLILKNNVKAHFQNFPNGVTDFIKSECLNNIGDSSPLIRATVGILITTIASKGELQNWPDLLPKLCSLLDSEDYNTCEGAFGALQKICEDSAEILDSDVLDRPLNIMIPKFLQFFKHSSPKIRSHAVACVNQFIISRTQALMLHIDSFIENLFALAGDEEPEVRKNVCRALVMLLEVRMDRLLPHMHNIVEYMLQRTQDQDENVALEACEFWLTLAEQPICKDVLVRHLPKLIPVLVNGMKYSDIDIILLKGDVEEDETIPDSEQDIRPRFHRSRTVAQQHDEDGIEEEDDDDDEIDDDDTISDWNLRKCSAAALDVLANVYRDELLPHILPLLKELLFHHEWVVKESGILVLGAIAEGCMQGMIPYLPELIPHLIQCLSDKKALVRSITCWTLSRYAHWVVSQPPDTYLKPLMTELLKRILDSNKRVQEAACSAFATLEEEACTELVPYLAYILDTLVFAFSKYQHKNLLILYDAIGTLADSVGHHLNKPEYIQMLMPPLIQKWNMLKDEDKDLFPLLECLSSVATALQSGFLPYCEPVYQRCVNLVQKTLAQAMLNNAQPDQYEAPDKDFMIVALDLLSGLAEGLGGNIEQLVARSNILTLMYQCMQDKMPEVRQSSFALLGDLTKACFQHVKPCIADFMPILGTNLNPEFISVCNNATWAIGEISIQMGIEMQPYIPMVLHQLVEIINRPNTPKTLLENTDIFSVGYKNHNPLSLPTM

SEQ ID NO: 44299 - protein, 102 aa, Homo sapiens
MRPLTCNSFTESLPEQYYSLTWFLSPILGLIFTPLIGSASDRCTLSWGRRRPFILALCVGVLFGVALFLNGSAIGLALGDVPNRQPIGIVLTVLGVVVLDFS

SEQ ID NO: 44300 - protein, 138 aa, Homo sapiens
MTFEDVAVYFSQEEWGLLDTAQRALYRHVMLENFTLVTSLGLSTSRPRVVIQLERGEEPWVPSGKDMTLARNTYGRLNSGSWSLTEDRDVSGEWPRAFPDTPPGMTTSVFPVADACHSVKSLQRQPGASPSQERKPTG

SEQ ID NO: 44301 - protein, 315 aa, Homo sapiens
MDFADLPALFGATLSQEGLQGFLVEAHPDNACSPIAPPPPAPVNGSVFIALLRRFDCNFDLKVLNAQKAGYGAAVVHNVNSNELLNMVWNSEEIQQQIWIPSVFIGERSSEYLRALFVYEKGARVLLVPDNTFPLGYYLIPFTGIVGLLVLAMGAVMIARCIQHRKRLQRNRLTKEQLKQIPTHDYQKGDQYDVCAICLDEYEDGDKLRVLPCAHAYHSRCVDPWLTQTRKTCPICKQPVHRGPGDEDQEEETQGQEEGDEGEPRDHPASERTPLLGSSPTLPTSFGSLAPAPLVFPGPSTDPPLSPPSSPVILV

SEQ ID NO: 44302 - protein, 48 aa, Homo sapiens
MARGQQKIQSQQKNAKKQAGQKKKQGHDQKAAAKAALIYTCTVCRVNS

SEQ ID NO: 44303 - protein, 72 aa, Homo sapiens
MPAPTQLFFPLIRNCELSRIYGTACYCHHKHLCCSSSYIPQSRLRYTPHPAYATFCRPKENWWQYTQGRRYA

SEQ ID NO: 44304 - protein, 255 aa, Homo sapiens
MILGYRLSPFGTSPPPPRPDWGGRRRLRSSPLPIGFRAKSRGACAAAAASAEASEMPARTAPARVPTLAVPAISLPDDVRRRLKDLERDSLTEKECVKEKLNLLHEFLQTEIKNQLCDLETKLRKEELSEEGYLAKVKSLLNKDLSLENGAHAYNREVNGRLENGNQARSEARRVGMADANSPPKPLSKPRTPRRSKSDGEAKPEPSPSPRITRKSTRQTTITSHFAKGPAKRKPQEESERAKSDESIKEEDKDQ

SEQ ID NO: 44305 - protein, 1858 aa, Homo sapiens
MTTMLQKSDSNASFLRAARAGNLDKVVEYLKGGIDINTCNQNGLNALHLAAKEGHVGLVQELLGRGSSVDSATKKGNTALHIASLAGQAEVVKVLVKEGANINAQSQNGFTPLYMAAQENHIDVVKYLLENGANQSTATEDGFTPLAVALQQGHNQAVAILLENDTKGKVRLPALHIAARKDDTKSAALLLQNDHNADVQSKMMVNRTTESGFTPLHIAAHYGNVNVATLLLNRGAAVDFTARNGITPLHVASKRGNTNMVKLLLDRGGQIDAKTRDGLTPLHCAARSGHDQVVELLLERGAPLLARTKNGLSPLHMAAQGDHVECVKHLLQHKAPVDDVTLDYLTALHVAAHCGHYRVTKLLLDKRANPNARALNGFTPLHIACKKNRIKVMELLVKYGASIQAITESGLTPIHVAAFMGHLNIVLLLLQNGASPDVTNIRGETALHMAARAGQVEVVRCLLRNGALVDARAREEQTPLHIASRLGKTEIVQLLLQHMAHPDAATTNGYTPLHISAREGQVDVASVLLEAGAAHSLATKKGFTPLHVAAKYGSLDVAKLLLQRRAAADSAGKNGYTPLHIAAKKNQMQIASTLLNYGAETNIVTKQGVTPLHLASQEGHTDMVTLLLDKGANIHMSTKSGLTSLHLAAQEDKVNVADILTKHGADQDAHTKLGYTPLIVACHYGNVKMVNFLLKQGANVNAKTKNGYTPLHQAAQQGHTHIINVLLQHGAKPNATTANGNTALAIAKRLGYISVVDTLKVVTEEVTTTTTTITEKHKLNVPETMTEVLDVSDEEGDDTMTGDGGEYLRPEDLKELGDDSLPSSQFLDGMNYLRYSLEGGRSDSLRSFSSDRSHTLSHASYLRDSAVMDDSVVIPSHQVSTLAKEAERNSYRLSWGTENLDNVALSSSPIHSGRASPCLERDNSSFLVSFMVDARGGAMRGCRHNGLRIIIPPRKCTAPTRVTCRLVKRHRLATMPPMVEGEGLASRLIEVGPSGAQFLGPVIVEIPHFAALRGKERELVVLRSENGDSWKEHFCDYTEDELNEILNGMDEVLDSPEDLEKKRICRIITRDFPQYFAVVSRIKQDSNLIGPEGGVLSSTVVPQVQAVFPEGALTKRIRVGLQAQPMHSELVKKILGNKATFSPIVTLEPRRRKFHKPITMTIPVPKASSDVMLNGFGGDAPTLRLLCSITGGTTPAQWEDITGTTPLTFVNECVSFTTNVSARFWLIDCRQIQESVTFASQVYREIICVPYMAKFVVFAKSHDPIEARLRCFCMTDDKVDKTLEQQENFAEVARSRDVEVLEGKPIYVDCFGNLVPLTKSGQHHIFSFFAFKENRLPLFVKVRDTTQEPCGRLSFMKEPKSTRGLVHQAICNLNITLPIYTKESESDQEQEEEIDMTSEKNPQDEQERIEERLAYIADHLGFSWTELARELDFTEEQIHQIRIENPNSLQDQSHALLKYWLERDGKHATDTNLVECLTKINRMDIVHLMETNTEPLQERISHSYAEIEQTITLDHSEGFSVLQEELCTAQHKQKEEQAVSKESETCDHPPIVSEEDISVGYSTFQDGVPKTEGDSSATALFPQTHKEQVQQDFSGKMQDLPEESSLEYQQEYFVTTPGTETSETQKAMIVPSSPSKTPEEVSTPAEEEKLYLQTPTSSERGGSPIIQEPEEPSEHREESSPRKTSLVIVESADNQPETCERLDEDAAFEKGDDMPEIPPETVTEEEYIDEHGHTVVKKVTRKIIRRYVSSEGTEKEEIMVQGMPQEPVNIEEGDGYSKVIKRVVLKSDTEQSEVTLCEPSILSSTSQFQAEPVEGRRVSKVVKTTVVLGERMEKHLGDSSLATDLPSAKDDFEEDNNE

SEQ ID NO: 44306 - protein, 94 aa, Homo sapiens
MDAEAEDKTLRTRSKGTEVPMDSLIQELSVAYDCSMAKKRTAEDQALGVPVNKRKSLLMKPRHYSPKADCQEDRSDRTEDDGPLETHGHSTRKS

SEQ ID NO: 44307 - protein, 112 aa, Homo sapiens
MAGAAPTTAFGQAVIGPPGSGKTTYCLGMSEFLRALGRRVAVVNLDPANEGRLAQHLLPNGAVGPQADCRPPRGFSLLHRPCQVHFSTVYLPGHHAARGTAPHQPPFQDGPH

SEQ ID NO: 44308 - protein, 56 aa, Homo sapiens
MPGRSCVALVLLAAAVSCAVAQHAPPWTEDCRKSTYPPSGPTLAYLATFLALLKRK

SEQ ID NO: 44309 - protein, 1699 aa, Homo sapiens
MSGEVRLRQLEQFILDGPAQTNGQCFSVETLLDILICLYDECNNSPLRREKNILEYLEWAKPFTSKVKQMRLHREDFEILKVIGRGAFGEVAVVKLKNADKVFAMKILNKWEMLKRAETACFREERDVLVNGDNKWITTLHYAFQDDNNLYLVMDYYVGGDLLTLLSKFEDRLPEDMARFYLAEMVIAIDSVHQLHYVHRDIKPDNILMDMNGHIRLADFGSCLKLMEDGTVQSSVAVGTPDYISPEILQAMEDGKGRYGPECDWWSLGVCMYEMLYGETPFYAESLVETYGKIMNHKERFQFPAQVTDVSENAKDLIRRLICSREHRLGQNGIEDFKKHPFFSGIDWDNIRNCEAPYIPEVSSPTDTSNFDVDDDCLKNSETMPPPTHTAFSGHHLPFVGFTYTSSCVLSDRSCLRVTAGPTSLDLDVNVQRTLDNNLATEAYERRIKRLEQEKLELSRKLQESTQTVQALQYSTVDGPLTASKDLEIKNLKEEIEKLRKQVTESSHLEQQLEEANAVRQELDDAFRQIKAYEKQIKTLQQEREDLNKELVQASERLKNQSKELKDAHCQRKLAMQEFMEINERLTELHTQKQKLARHVRDKEEEVDLVMQKVESLRQELRRTERAKKELEVHTEALAAEASKDRKLREQSEHYSKQLENELEGLKQKQISYSPGVCSIEHQQEITKLKTDLEKKSIFYEEELSKREGIHANEIKNLKKELHDSEGQQLALNKEIMILKDKLEKTRRESQSEREEFESEFKQQYEREKVLLTEENKKLTSELDKLTTLYENLSIHNQQLEEEVKDLADKKESVAHWEAQITEIIQWVSDEKDARGYLQALASKMTEELEALRNSSLGTRATDMPWKMRRFAKLDMSARLELQSALDAEIRAKQAIQEELNKVKASNIITECKLKDSEKKNLELLSEIEQLIKDTEELRSEKASKGRRTVDSTPLSVHTPTLRKKGCPGSTGFPPKRKTHQFFVKSFTTPTKCHQCTSLMVGLIRQGCSCEVCGFSCHITCVNKAPTTCPVPPEQTKGPLGIDPQKGIGTAYEGHVRIPKPAGVKKGWQRALAIVCDFKLFLYDIAEGKASQPSVVISQVIDMRDEEFSVSSVLASDVIHASRKDIPCIFRVTASQLSASNNKCSILMLADTENEKNKWVGVLSELHKILKKNKFRDRSVYVPKEAYDSTLPLIKTTQAAAIIDHERIALGNEEGLFVVHVTKDEIIRVGDNKKIHQIELIPNDQLVAVISGRNRHVRLFPMSALDGRETDFYKLSETKGCQTVTSGKVRHGALTCLCVAMKRQVLCYELFQSKTRHRKFKEIQVPYNVQWMAIFSEQLCVGFQSGFLRYPLNGEGNPYSMLHSNDHTLSFIAHQPMDAICAVEISSKEYLLCFNSIGIYTDCQGRRSRQQELMWPANPSSCCYNAPYLSVYSENAVDIFDVNSMEWIQTLPLKKVRPLNNEGSLNLLGLETIRLIYFKNKMAEGDELVVPETSDNSRKQMVRNINNKRRYSFRVPEEERMQQRREMLRDPEMRNKLISNPTNFNHIAHMGPGDGIQILKDLPMNPRPQESRTVFSGSVSIPSITKSRPEPGRSMSASSGLSARSSAQNGSALKREFSGGSYSAKRQPMPSPSEGSLSSGGMDQGSDAPARDFDGEDSDSPRHSTASNSSNLSSPPSPASPRKTKSLSLESTDRGSWDP

SEQ ID NO: 44310 - protein, 81 aa, Homo sapiens
  MOD_RES (1)..(1): Any amino acid
XWTCPSRSMWSSCCTPRTPPPWAMTPCTSSGTTTSPSGPLSFGTTPHPHLACWEPLQLTALESQELARGCPSTGMDPGTQK

SEQ ID NO: 44311 - protein, 107 aa, Homo sapiens
MEEGGNLGGLIKMVHLLVLSGAWGMQMWVTFVSGFLLFRSLPRHTFGLVQSKLFPFYFHISMGCAFINLCILASQHAWAQLTFWEASQLYLLFLSLTLATVNARWLE

SEQ ID NO: 44312 - protein, 304 aa, Homo sapiens
  MOD_RES (1)..(1): Any amino acid
XGYKRFDFRPKPDPYCQAKYTFCPTGSPIPVMEGDDDIEVFRLQAPVWEFKYGDLLGHLKIMHDAIGFRSTLTGKNYTMEWYELFQLGNCTFPHLRPEMDAPFWCNQGAACFFEGIDDVHWKENGTLVQVATISGNMFNQMAKWVKQDNETGIYYETWNVKASPEKGAETWFDSYDCSKFVLRTFNKLAEFGAEFKNIETNYTRIFLYSGEPTYLGNETSVFGPTGNKTLGLAIKRFYYPFKPHLPTKEFLLSLLQIFDAVIVHKQFYLFYNFEYWFLPMKFPFIKITYEEIPLPIRNKTLSGL

SEQ ID NO: 44313 - protein, 80 aa, Homo sapiens
MESMAVATDGGERPGVPAGSGLSASQRRAELRRRKLLMNSEQRINRIMGFHRPGSGAVHICSISYFTTCVHGIIQIFSQE

SEQ ID NO: 44314 - protein, 147 aa, Homo sapiens
MTELPAPLSYFQNAQMSEDNHLSNTNDNRERQEHNDRRSLGHPEPLSNGRPQGNSRQVVEQDEEEDEELTLKYGAKHVIMLFVPVTLCMVVVVATIKSVSFYTRKDGQLIYTPFTEDTETVGQRALHSILNAAIMISVIVVMTILLV

SEQ ID NO: 44315 - protein, 164 aa, Homo sapiens
MGLQFPECTKAGTRPRGIEASKELQQAQTTRPESTQIQPQPGFCIKTNSSEGKVFINICHSPSIPPPADVTEEELLQMLEEDQAGFRIPMSLGEPHAELDAKGQGCTAYDVAVNSDFYRRMQNSDFLRELVITIAREGLEDKYNLQLNPEWRMMKNRPFMGSIS

SEQ ID NO: 44316 - protein, 125 aa, Homo sapiens
MSEVEHFMPILMEKEEEGMLSPILAHGGVRFMWIKHNNLYLVATSKKNACVSLVFSFLYKVVQVFSEYFKELEEESIRDNFVIIYELLDELMDFGYPQTTDSKILQEYITQEGHKLETGAPRPPA

SEQ ID NO: 44317 - protein, 443 aa, Homo sapiens
  MOD_RES (1)..(1): Any amino acid
XTPNAISLLFSVYLNEAGFNFVRKCIQAVETRGITILGLYRIGGVNSKVQKLMNTTFSPKSPPDIDIDIELWDNKTITSGLKNYLRCLAEPLMTYKLHKDFIIAVKSDDQNYRVEAVHALVHKLPEKNREMLDILIKHLVKVSLHSQQNLMTVSNLGVIFGPTLMRAQEETVAAMMNIKFQNIVVEILIEHYEKIFHTAPDPSIPLPQPQSRSGSRRTRAICLSTGSRKPRGRYTPCLAEPDSDSYSSSPDSTPMGSIESLSSHSSEQNSTTKSASCQPREKSGGIPWIATPSSSNGQKSLGLWTTSPESSSREDATKTDAESDCQSVASVTSPGDVSPPIDLVKKEPYGLSGLKRASASSLRSISAAEGNKSYSGSIQSLTSVGSKETPKASPNPDLPPKMCRRLRLDTASSNGYQRPGSVVAAKAQLFENVGSPKPVSSGR

SEQ ID NO: 44318 - protein, 125 aa, Homo sapiens
AEGQWTLEIQDLPSQVRNPEKQGKLKEWSLILYGTAEHPYHTFSAHQSRSRMLELSAPELEPPKAALSPSQVEVPEDEEDYTAQSTPGSANILQTRDIWQRLETFWVVTTGRMYSHPVGGGQECC

SEQ ID NO: 44319 - protein, 403 aa, Homo sapiens
MCASVKYNIRGPALIPRMKTKHRIYYITLFSIVLLGLIATGMFQFWPHSIESSNDWNVEKRSIRDVPVVRLPADSPIPERGDLSCRMHTCFDVYRCGFNPKNKIKVYIYALKKYVDDFGVSVSNTISREYNELLMAISDSDYYTDDINRACLFVPSIDVLNQNTLRIKETAQAMAQLSRWDRGTNHLLFNMLPGGPPDYNTALDVPRDRALLAGGGFSTWTYRQGYDVSIPVYSPLSAEVDLPEKGPGPRQYFLLSSQVGLHPEYREDLEALQVKHGESVLVLDKCTNLSEGVLSVRKRCHKHQVFDYPQVLQEATFCVVLRGARLGQAVLSDVLQAGCVPVVIADSYILPFSEVLDWKRPGGSGKRTSSQLKPLPWPPCRLSMTGSIHMLPSPMKNGMTLLL

SEQ ID NO: 44320 - protein, 252 aa, Homo sapiens
MPECDWRQPSGGDGGWDLSLLTGERDSDGRRLTEPSGYLTDGPINYKYKTKCTWLIEGYPNAVLRLRFNHFATECSWDHMYVYDGDSIYAPLIAVLSGLIVPEIRGNETVPEVVTTSGYALLHFFSDAAYNLTGFNIFYSINSCPNNCSGHGKCTTSVSVPSQVYCECDKYWKGEACDIPYCKANCGSPDHGYCDLTGEKLCVCNDSWQGPDCSLNVPSTESYWILPNVKPFSPSVGRASHKAVLHGKFMWV

SEQ ID NO: 44321 - protein, 76 aa, Homo sapiens
MDETVAEFIKRTILKIPMNELTTILKAWDFLSENQLQTVNFRQRKESVVQHLIHLCEEKRASISDAALLDIICKCQ

SEQ ID NO: 44322 - protein, 511 aa, Homo sapiens
MQSTSNHLWLLSDILGQGATANVFRGRHKKTGDLFAIKVFNNISFLRPVDVQMREFEVLKKLNHKNIVKLFAIEEETTTRHKVLIMEFCPCGSLYTVLEEPSNAYGLPESEFLIVLRDVVGGMNHLRENGIVHRDIKPGNIMRVIGEDGQSVYKLTDFGAARELEDDEQFVSLYGTEEYLHPDMYERAVLRKDHQKKYGATVDLWSIGVTFYHAATGSLPFRPFEGPRRNKEVMYKIITGKPSGAISGVQKAENGPIDWSGDMPVSCSLSRGLQVLLTPVLANILEADQEKCWGFDQFFAETSDILHRMVIHVFSLQQMTAHKIYIHSYNTATIFHELVYKQTKIISSNQELIYEGRRLVLEPGRLAQHFPKTTEENPIFVVSREPLNTIGLIYEKISLPKVHPRYDLDGDASMAKAITGVVCYACRIASTLLLYQELMRKGIRWLIELIKDDYNETVHKKTEVVITLDFCIRNIEKTVKVYEKLMKINLEAAELGEISDIHTKLLRIIKA

SEQ ID NO: 44323 - protein, 110 aa, Homo sapiens
MNGRADFREPNAEVPRPIPHIGPDYIPTEEERRVFAECNDESFWFRSVPLAATSMLITQGLISKGILSSHPKYGSIPKLILACIMGYFAGKLSYVKTCQEKFKKLENSPL

SEQ ID NO: 44324 - protein, 167 aa, Homo sapiens
MGSCGYQPGTPLYHRVDFFQQMIDSQNSKETKSHKALSDLELVAQSIIIIFAAYDTTSTTLPFIMYELATHPDVQQKLQEEIDAVLPNKAPVTYDALVQMEYLDMVVNETLRLFPVVSRVTRVCKKDIEINGVFIPKGLAVMVPIYALHHDPKYWTEPEKFCPERSH

SEQ ID NO: 44325 - protein, 166 aa, Homo sapiens
  MOD_RES (1)..(1): Any amino acid
XLDSDGADLLTKLLQFEGRNRISAEDAMKHPFFLSLGERIHKLPDTTSIFALKEIQLQKEASLRSSSMPDSAICSAFPHRQASFPRGGHRVLSHRPRPQQAAAGGMPHPSQGSPQLHLPCLLSAYLPEPCSPAHLSPAACPNTPPLACQPTHWPVCWVLTKLSSLL

SEQ ID NO: 44326 - protein, 257 aa, Homo sapiens
MEPEGVIESNWNEIVDSFDDMNLSESLLRGIYAYGFEKPSAIQQRAILPCIKGYDVIAQAQSGTGKTATFAISILQQIELDLKATQALVLAPTRELAQQIQKVVMALGDYMGASCHACIGGTNVRAEVQKLQMEAPHIIVGTPGRVFDMLNRRYLSPKYIKMFVLDEADEMLSRGFKDQIYDIFQKLNSNTQVVLLSATMPSDVLEVTKKFMRDPIRILVKKEELTLEGIRQFYINVEREEWKLDTLCDLYETLTIT

SEQ ID NO: 44327 - protein, 131 aa, Homo sapiens
MLIFWTITLFLLGAAKGKEVCYEDLGCFSDTEPWGGTAIRPLKILPWSPEKIGTRFLLYTNENPNNFQILLLSDPSTIEASNFQMDRKTRFIIHGFIDKGDESWVTDMCKKLFEVEEVNCICVDWKKGSQA

SEQ ID NO: 44328 - protein, 477 aa, Homo sapiens
  MOD_RES (1)..(1): Any amino acid
XNSFNKNSKTHSNSNTTENCVISETPLVLPYNNSKVTGKDSDVLIRASEQQIGSLDSPSGMLMNPVEDATGDQNGICFQSEESKARACSETEESNTCCSDWQRHFDVALGRMVYVNKMTGLSTFIAPTEDIQAACTKDLTTVAVDVVLENDTVDDTVSSESLQSLFSEWDNPVFARYPEVAVDVSSGQAESLAVKIHNILYPYRFTKGMIHSMQVLQQVDNKFIACLMSTKTEENGEAGGNLLVLVDQHAAHERIRLEQLIIDSYEKQQAQGSGRKKLLSSTLIPPLEITVTEEQRRLLWCYHKNLEDLGLEFVFPDTSDSLVLVGKVPLCFVEREANELRRGRSTVTKSIVEEFIREQLELLQTTGGIQGTLPLTVQKVLASQACHGAIKFNDGLSLQESCRLIEALSSCQLPFQCAHGRPSMLPLADIDHLEQEKQIKPNLTKLRKMAQAWRLFGKAECDTRQSLQQSMPPCEPP

SEQ ID NO: 44329 - protein, 196 aa, Homo sapiens
MENLESRLKNAPYFRCEKGTDSIPLCRKCETCVLAWKIFSTKEWFCRINDISQRRFLVGILKQLNSLYLLHYFQNILQTTQGKDFIYNRSRINLSKKEGKVVKSSLNQMLDKTVEQKMKEILYWFANSTQWTKANYTLLLLQMCNPKLLLTAANVIRVLFLREENNISGKQGHRQRLEGPRRPEGKASEICKELQL

SEQ ID NO: 44330 - protein, 60 aa, Homo sapiens
ADWVPLELCFGIPLFSSELNRKVCRKIAAHGLCRKESLQNLLHSSRKLSLQVLNFVHSFQ

SEQ ID NO: 44331 - protein, 156 aa, Homo sapiens
MRGAAPGKKTSGLQQKNVEVKTKKNKQKTPGNGDGGSTSETPQPPRKKRARVDPTVENEETFMNRVEVKVKIPEELKPWLVDDWDLITRQKQLFYLPAKKNVDSILEDYANYKKSRGNTDNKEYAVNEVVAGIKEYFNVMLGTQLLYKFERPQYAE

SEQ ID NO: 44332 - protein, 192 aa, Homo sapiens
MSINLTVDIYIYLLSNARSVCGKQRSKQLYFLFSPKHYWRISHISLQRGFHTNIIRCKWTKSEAHSCSKHCYSPSNHGLHIGILKLSTSAPKGLTKVNICMSRIKSTLNSVSKAVFGNQNEMISRLAQFKPSSQILRKVSDSGWLKQKNIKQAIKSLKKYSDKSAEKSPFPEEKSHIIDKEEDIGKRSLFHY

SEQ ID NO: 44333 - protein, 21 aa, Homo sapiens
MLTFMASDSEEEVCDERTSLM

SEQ ID NO: 44334 - protein, 136 aa, Homo sapiens
  MOD_RES (1)..(1): Any amino acid
XNSFLHQRIPQSVRILGSLVAILLVFLITAILVKVQLDALPFFVITMIKIVLINWQPVWSGWPSACQLHGPHHEWPGPSRLLCLRGHDLRYCQWLGAIRKCLRLLYHSLCCYHFDHHLLPGPAPPGILPLLPAAQA

SEQ ID NO: 44335 - protein, 77 aa, Homo sapiens
MVNVPKTRRTFCKKCGKHQPHKVTQYKKGKDSLYAQGKRRYDRKQSGYGGQTKPIFRKKLHQNCIEPNLPPRAQQSP

SEQ ID NO: 44336 - protein, 1027 aa, Homo sapiens
MGNLESAEGVPGEPPSVPLLLPPGKMPMPEPCELEERFALVLSSMNLPPDKARLLRQYDNEKKWDLICDQERFQVKNPPHTYIQKLQSFLDPSVTRKKFRRRVQESTKVLRELEISLRTNHIGWVREFLNDENKGLDVLVDYLSFAQCSVMFDFEGLESGDDGAFDKLRSWSRSIEDLQPPSALSAPFTNSLARSARQSVLRYSTLPGRRALKNSRLVSQKDDVHVCILCLRAIMNYQYGFNLVMSHPHAVNEIALSLNNKNPRTKALVLELLAAVCLVRGGHEIILAAFDNFKEVCKELHRFEKLMEYFRNEDSNIDFMVACMQFINIVVHSVEDMNFRVHLQYEFTKLGLEEFLQKSRHTESEKLQVQIQAYLDNVFDVGGLLEDAETKNVALEKVEELEEHVSHLTEKLLDLENENMMRVAELEKQLLQREKELESIKETYENTSHQVHTLRRLIKEKEEAFQRRCHLEPNVRGLESVDSEALARVGPAELSEGMPPSDLDLLAPAPPPEEVLPLPPPPAPPLPPPPPPLPDKCPPAPPLPGAAPSVVLTVGLSAIRIKKPIKTKFRLPVFNWTALKPNQISGTVFSELDDEKILEDLDLDKFEELFKTKAQGPALDLICSKNKTAQKAASKVTLLEANRAKNLAITLRKAGRSAEEICRAIHTFDLQTLPVDFVECLMRFLPTEAEVKLLRQYERERQPLEELAAEDRFMLLFSKVERLTQRMAGMAFLGNFQDNLQMLTPQLNAIIAASASVKSSQKLKQMLEIILALGNYMNSSKRGAVYGFKLQSLDLLLDTKSTDRKMTLLHFIALTVKEKYPDLANFWHELHFVEKAAAVSLENVLLDVKELGRGMELIRRECSIHDNSVLRNFLSTNEGKLDKLQRDAKTAEAYNAVVRYFGESPKTTPPSVFFPVFVRFIRSYKEAEQENEARKKQEEVMREKQLAQEAKKLDAKTPSQRNKWQQQELIAELRRRQAKEHRPVYEGKDGTIEDIITVLKSVPFTARTAKRGSRFFCDAAHHDESNC

SEQ ID NO: 44337 - protein, 101 aa, Homo sapiens
EWKGHKEKHREALRQLTTCLKKFMKILKLLERIAINTLKGLFSHFFSRCHSMLFMPYPRQNHTLFLLLLLSTYPSLQSLLWALRLIIGMLTFKQIHTLQNM

SEQ ID NO: 44338 - protein, 163 aa, Homo sapiens
MEGDAVEAIVEESETFIKGKERKTYQRRREGGQEEDACHLPQNQTDGGEVVQDVNSSVQMVMMEQLDPTLLQMKTEVMEGTVAPEAEAAVDDTQIITLQVVNMEEQPINIGELQLVQVPVPVTVPVATTSVEELQGAYENEVSKEGLAESEPMICHTLPLPEG

SEQ ID NO: 44339 - protein, 147 aa, Homo sapiens
MPAPTQLFFPLIRNCELSRIYGTACYCHHKHLCCSSSYIPQSRLRYTPHPAYATFCRPKENWWQYTQGRRYASTPQKFYLTPPQVNSILKANEYSFKVPEFDGKNVSSILGFDSNQLPANAPIEDRRSAATCLQTRGMLLGVFDGHA

SEQ ID NO: 44340 - protein, 421 aa, Homo sapiens
  MOD_RES (1)..(1): Any amino acid
XMASRPPGDLAEAGGRALQSLQLRLLTPTFEGINGLLLKQHLVQNPVRLWQLLGGTFYFNTSRLKQKNKEKDKSKGKAPEEDEEERRRRERDDQMYRERLRTLLVIAVVMSLLNALSTSGGSISWNDFVHEMLAKGEVQRVQVVPESDVVEVYLHPGAVVFGRPRLALMYRMQVANIDKFEEKLRAAEDELNIEAKDRIPVSYKRTGFFGNALYSVGMTAVGLAILWYVFRLAGMTGREGGFSAFNQLKMARFTIVDGKMGKGVSFKDVAGMHEAKLEVREFVDYLKSPERFLQLGAKVPKGALLLGPPGCGKTLLAKAVATEAQVPFLAMAGPEFVEVIGGLGAARVRSLFKEARARAPCIVYIDEIDAVGKKRSTTMSGFSNTEEEQTLNQLLVEMDVFYAEIEELKLVYPYHGVLHSD

SEQ ID NO: 44341 - protein, 93 aa, Homo sapiens
GDKLRTSFLAFNMDTVDDLAFLLKAVKFRERVLQRGLVARIYYKVKTKKEDFFHAWNSCLHHVASLSLAHTHRVLSVVWNQAGVSGAGLVFRT

SEQ ID NO: 44342 - protein, 136 aa, Homo sapiens
MKVQPSVTCVASWGGIVHLEAFGDPVIVLRGAWAVPRVDCLIDTLRTPNASCMRKGTHLLVPCLEEEELALHRRRLDMSEALPCPGKETPTPGCRLGALYWACVHNDPTQLQAILDGGVSPEEATQVDSNGRATCL

SEQ ID NO: 44343 - protein, 131 aa, Homo sapiens
MASVSALTEELDSITSELHAVEIQIQELTERQQELIQKKKVLTKKIKQCLEDSDAGASNEYDSSPAAWNKEDFPWSGKVKDILQNVFKLEKFRPLQLETINVTMAGKEVFLVMPTGGGKSLCYQLPALCSD

SEQ ID NO: 44344 - protein, 134 aa, Homo sapiens
ELEQFNSDIQKLLEPLEAEIQQGVNLKEEDFNKDMNEDNEGTVKELLQRGDNLQQRITDERKREEIKIKQQLLQTKHNALKDLRSQRRKKALEISHQWYQYKRQADDLLKCLDDIEKKLASLPEPRDERKIKMN

SEQ ID NO: 44345 - protein, 170 aa, Homo sapiens
MAAEEPQQQKQEPLGSDSEGVNCLAYDEAIMAQQDRIQQEFMDLIEQVEKQTSVADLLASFNDQSTSDYLVVYLRLLTSGYLQRESKFFEHFIEGGRTVKEFCQQEVEPMCKESDHIHIIALAQALSVSIQVEYMDRGEGGTTNPHIFPEGSEPKVYLLYRPGHYDILYK

SEQ ID NO: 44346 - protein, 96 aa, Homo sapiens
MEPAAALHFSLPASLLLLLLLLLLSLCALVSAQFTVVGPANPILAMVGENTTLRCHLSPEKNAEDMEVRWFRSQFSPAVFVYKGGRERTEEQMEEY

SEQ ID NO: 44347 - protein, 76 aa, Homo sapiens
MASATRLIQRLRNWASGHDLQGKLQLRYQEISKRRNGVSPCWPVWSRTPDFIIRLPRPPKVLGLQNSASSQAPCGS

SEQ ID NO: 44348 - protein, 287 aa, Homo sapiens
MESERSKRMGNACIPLKRIAYFLCLLSALLLTEGKKPAKPKCPAVCTCTKDNALCENARSIPRTVPPDVISLSFVRSGFTEISEGSFLFTPSLQLLLFTSNSFDVISDDAFIGLPHLEYLFIENNNIKSISRHTFRGLKSLIHLSLANNNLQTLPKDIFKGLDSLTNVDLRGNSFNCDCKLKWLVEWLGHTNATVEDIYCEGPPEYKKRKINSLSSKDFDCIITEFAKSQDLPYQSLSIDTFSYLNDEYVVIAQPFTGKCIFLEWDHVEKTFRNYDNITGQSCWCPQ

SEQ ID NO: 44349 - protein, 360 aa, Homo sapiens
  MOD_RES (1)..(1): Any amino acid
XKHLYGLFHYNPMMLGLESLPDPTDTWEIIETIGKGTYGKVYKVTNKRDGSLAAVKILDPVSDMDEEIEAEYNILQFLPNHPNVVKFYGMFYKADHCVGGQLWLVLELCNGGSVTELVKGLLRCGQRLDEAMISYILYGALLGLQHLHNNRIIHRDVKGNNILLTTEGGVKLVDFGVSAQLTSTRLRRNTSVGTPFWMAPEVIACEQQYDSSYDARCDVWSLGITAIELGDGDPPLFDMHPVKTLFKIPRNPPPTLLHPEKWCEEFNHFISQCLIKDFERRPSVTHLLDHPFIKGVHGKVLFLQKQLAKVLQDQKHQNPVAKTRHERMHTRRPYHVEDAEKYCLEDDLVNLEVLDEVLNI

SEQ ID NO: 44350 - protein, 63 aa, Homo sapiens
  MOD_RES (1)..(1): Any amino acid
XIYLFNMCLQQLFEVKVFKEKHHSWFINQSVQSGGLLHFATPVDPLFLLLHYLIKADKEVIQK

SEQ ID NO: 44351 - protein, 277 aa, Homo sapiens
APASSRTSTGNVWMTHEEMESLTATTKPILAYGDMNHEWVGNDWLPSLGLPQYRSYFMESLVDARMLDHLNKKELRGQLKMVDSFHRVSLHYGIMCLKRLNYDRKDLERRREESQTQIRDVMVWSNERVMGWVSGLGLKEFATNLTESGVHGALLALDETFDYSDLALLLQIPTQNAQARQLLEKEFSNLISLGTDRRLDEDSAKSFSRSPSWRKMFREKDLRGVTPDSAEMLPPNFRSAAAGALGSPGLPLRKLQPEGQTSGSSRADGVSVRTYSC

SEQ ID NO: 44352 - protein, 197 aa, Homo sapiens
MLQDMNFINNYKIDCPTLARFCLMVKKGYRDPPYHNWMHAFSVSHFCYLLYKNLELTNYLEDIEIFALFISCMCHDLDHRGTNNSFQVASKSVLAALYSSEGSVMERHHFAQAIAILNTHGCNIFDHFSRKDYQRMLDLMRDIILATDLAHHLRIFKDLQKMAEVGYDRNNKQHHRLLLCLLMTSCDLSDQTKGWKT

SEQ ID NO: 44353 - protein, 115 aa, Homo sapiens
MAGAQTLLTFRDVAIEFSLEEWKCLDLAQQNLYRDVMLENYRNLFSVGLTVCKPGLITCLEQRKEPWNVKRQEAADGHPEMGFHHATQACLELLGSSDLPASASQSAGITGVNHR

SEQ ID NO: 44354 - protein, 68 aa, Homo sapiens
MSLDFGSVALPVQNEDEEYDEEDYEREKELQQLLTDLPHDMLDDDLSSPELQYSDCSEDGTDGQPHHP

SEQ ID NO: 44355 - protein, 556 aa, Homo sapiens
MTFEDVAIYFSQEEWELLDESQRFLYCDVMLENFAHVTSLGYCHGMENEAIASEQSVSIQVRTSKGNTPTQKTHLSEIKMCVPVLKDILPAAEHQTTSPVQKSYLGSTSMRGFCFSADLHQHQKHYNEEEPWKRKVDEATFVTGCRFHVLNYFTCGEAFPAPTDLLQHEATPSGEEPHSSSSKHIQAFFNAKSYYKWGEYRKASSHKHTLVQHQSVCSEGGLYECSKCEKAFTCKNTLVQHQQIHTGQKMFECSECEESFSKKCHLILHKIIHTGERPYECSDREKAFIHKSEFIHHQRRHTGGVRHECGECRKTFSYKSNLIEHQRVHTGERPYECGECGKSFRQSSSLFRHQRVHSGERPYQCCECGKSFRQIFNLIRHRRVHTGEMPYQCSDCGKSFSCKSELIQHQRIHSGERPYECRECGKSFRQFSNLIRHRSIHTGDRPYECSECEKSFSRKFILIQHQRVHTGERPYECSECGKSFTRKSDLIQHRRIHTGTRPYECSECGKSFRQRSGLIQHRRLHTGERPYECSECGKSFSQSASLIQHQRVHTGE

SEQ ID NO: 44356 - protein, 154 aa, Homo sapiens
MKRIYTYRRAKEIFKDTPKAPQRNFEIAFKMFDLNGDGEVDMEEFEQVQSIIRSQTSMGMRHRDRPTTGNTLKSGLCSALTTYFFGADLKGKLTIKNFLEFQRKLQHDVLKLEFERHDPVDGRITERQFGGMLLAYSGVQSKKLTAMQRQLKKH

SEQ ID NO: 44357 - protein, 160 aa, Homo sapiens
MGQNLILNMNDHGFVVCAFNRTVSKVDDFLANEAKGTKVVGAQSLKEMVSKLKKPRRIILLVKAGQAVDDFIEKLVPLLDTGDIIIDGGNSEYRDTTRRCRDLKAKGILFVGSGVSGGEEGARYGPSLMPGGNKEAWPHIKTIFQGIAAKVGTGEPCCDW

SEQ ID NO: 44358 - protein, 83 aa, Homo sapiens
MAAATASPRSLLVLLQVVVLALAQIRGPPGERGPPGPPGPPGVPGSDGIDGPPGPVGLPGEIGIRGPKGDPGPDGPSGPPGPP

SEQ ID NO: 44359 - protein, 271 aa, Homo sapiens
MMMMALSKTFGQKPVKFQLEDDGEFYMIGSEVGNYLRMFRGSLYKRYPSLWRRLATVEERKKIVASSHGKKTKPNTKDHGYTTLATSVTLLKASEVEEILDGNDEKYKAVSISTEPPTYLREQKAKRNSQWVPTLPNSSHHLDAVPCSTTINRNRMGRDKKRTFPLWCGCIAALTLRADSALVLQHVSVPSSPEKHSALTLCSPQRHSTSSPLNCCVSLTSRTLSIASLALSAVTLPCPPHLSGPSSGVTQGAVLGPFLCPQFHMSGPQPV

SEQ ID NO: 44360 - protein, 415 aa, Homo sapiens
MGKRQHQKDKMYITCAEYTHFYGGKKPDLPQTNFRRLPFDHCSLSLQPFVYPVCTPDGIVFDLLNIVPWLKKYGTNPSNGEKLDGRSLIKLNFSKNSEGKYHCPVLFTVFTNNTHIVAVRTTGNVYAYEAVEQLNIKAKNFRDLLTDEPFSRQDIITLQDPTNLDKFNVSNFYHVKNNMKIIDPDEEKAKQDPSYYLKNTNAETRETLQELYKEFKGDEILAATMKAPEKKKVDKLNAAHYSTGKVSASFTSTAMVPETTHEAAAIDEDVLRYQFVKKKGYVRLHTNKGDLNLELHCDLTPKTCENFIRLCKKHYYDGTIFHRSIRNFVIQGGDPTGTGTGGESYWGKPFKDEFRPNLSHTGRGILSMANSGPNSNRSQLFSRRRPGAVAHAYNPSTLGGRGRRITRSGDRDHPR

SEQ ID NO: 44361 - protein, 69 aa, Homo sapiens
  MOD_RES (1)..(1): Any amino acid
XINDIAFKPDGTQLILAAGSRLLVYDTSDGTLLQPLKGHKDTVYCVAYAKDVETGFHRVGQDGLDLLTS

SEQ ID NO: 44362 - protein, 96 aa, Homo sapiens
MMSLSVRPQRRLLSARVNRSQSFAGVLGSHERGPRSFPVFSPPGPPRKPPALSRVSRMFSVAHPAAKVPQPERLDLVYTALKRGLTAYLEVHQQEQ

SEQ ID NO: 44363 - protein, 651 aa, Homo sapiens
ETVEKAEAPLITESAFDAGFEKLLKEITEAPPYQPQVSVREETHEKESSQSEQTRFLGTVPHFYRAASQTSEMKDKSNGLESQVNQCDKMLGGDALVTDLLVDFCGSRSGVEIPRTPQLYVAHEIGTIKTVTPPEDRDSESGVAGGQGTLQEPGFGEASEAISVSRNRQPIPLLMNKENSTKTSKVELTLASPYMKQEKEEEKEGFSESDFSDGNTSSNAESWRNPSSSEEEPSPVLKTLERSAARKMPSKSLEDISSDSSNQAKVDNQPEELVRSAEDDEKPDQKPVTNECVPRISTVPTQPDNPFSHPDKLKRMSKSVPAFLQDEVSGSVMSVYSGDFGNLEVKGNIQFAIEYVESLKELHVFVAQCKDLAAADVKKQRSDPYVKAYLLPDKGKMGKKKTLVVKKTLNPVYNEILRYKIEKQILKTQKLNLSIWHRDTFKRNSFLGEVELDLETWDWDNKQNKQLRWYPLKRKTAPVALEAENRGEMKLALQYVPEPVPGKKLPTTGEVHIWVKECLDLPLLRGSHLNSFVKCTILPDTSRKSRQKTRAVGKTTNPIFNHTMVYDGFRPEDLMEACVELTVWDHYKLTNQFLGGLRIGFGTGKSYGTEVDWMDSTSEEVALWEKMVNSPNTWIEATLPLRMLLIAKISK

SEQ ID NO: 44364 - protein, 1178 aa, Homo sapiens
MSLKPQQQQQQQQQQQQQQQQQQQQQQQPPPAAANVRKPGGSGLLASPAAAPSPSSSSVSSSSATAPSSVVAATSGGGRPGLGRGRNSNKGLPQSTISFDGIYANMRMVHILTSVVGSKCEVQVKNGGIYEGVFKTYSPKCDLVLDAAHEKSTESSSGPKREEIMESILFKCSDFVVVQFKDMDSSYAKRDAFTDSAISAKVNGEHKEKDLEPWDAGELTANEELEALENDVSNGWDPNDMFRYNEENYGVVSTYDSSLSSYTVPLERDNSEEFLKREARANQLAEEIESSAQYKARVALENDDRSEEEKYTAVQRNSSEREGHSINTRENKYIPPGQRNREVISWGSGRQNSPRMGQPGSGSMPSRSTSHTSDFNPNSGSDQRVVNGGVPWPSPCPSPSSRPPSRYQSGPNSLPPRAATPTRPPSRPPSRPSRPPSHPSAHGSPAPVSTMPKRMSSEGPPRMSPKAQRHPRNHRVSAGRGSISSGLEFVSHNPPSEAATPPVARTSPSGGTWSSVVSGVPRLSPKTHRPRSPRQNSIGNTPSGPVLASPQAGIIPTEAVAMPIPAASPTPASPASNRAVTPSSEAKDSRLQDQRQNSPAGNKENIKPNETSPSFSKAENKGISPVVSEHRKQIDDLKKFKNDFRLQPSSTSESMDQLLNKNREGEKSRDLIKDKIEPSAKDSFIENSSSNCTSGSSKPNSPSISPSILSNTEHKRGPEVTSQGVQTSSPACKQEKDDKEEKKDAAEQVRKSTLNPNAKEFNPRSFSQPKPSTTPTSPRPQAQPSPSMVGHQQPTPVYTQPVCFAPNMMYPVPVSPGVQPLYPIPMTPMPVNQAKTYRAVPNMPQQRQDQHHQSAMMHPASAAGPPIAATPPAYSTQYVAYSPQQFPNQPLVQHVPHYQSQHPHVYSPVIQGNARMMAPPTHAQPGLVSSSATQYGAHEQTHAMYACPKLPYNKETSPSFYFAISTGSLAQQYAHPNATLHPHTPHPQPSATPTGQQQSQHGGSHPAPSPVQHHQHQAAQALHLASPQQQSAIYHAGLAPTPPSMTPASNTQSPQNSFPAAQQTVFTIHPSHVQPAYTNPPHMAHVPQCASEALARCGLEMRLSWIYLSEGYLAHVQSGMVPSHPTAHAPMMLMTTQPPGGPQAALAQSALQPIPVSTTAHFPYMTHPSVQAHHQQQL

SEQ ID NO: 44365 - protein, 673 aa, Homo sapiens
MCGGTANTTNQPESWQDSARCVSDAVPGAGRIYRALLCTKIKKHTGVDRSTDHTELDNSWSCSEFDLNEIRLIVYQDCDRRGRQVLFDSKAVQKIEEVTAQKTEDVPIKISAKCCQGSSSVSSSSSSSISSHSSSGGSSHHAKEQLPKYQYTRPASDVNMLGEMMFGSVAMSYKGSTLKIHYIRSPPQLMISKVFSARMGSFCGSTNNLQDSFEYINQDPNLGKLNTNQNSLGPCRTGSNLAHSTPVDMPSRGQNEDRDSGIARSASLSSLLITPFPSPSSSTSSSSSYQRRWLRSQTTSLENGIIPRRSTDETFSLAEETCSSNPAMVRRKKIAISIIFSLCEKEEAQRNFQDFFFSHFPLFESHMNRLKSAIEKAMISCRKIAESSLRVQFYVSRLMEALGEFRGTIWNLYSVPRIAEPVWLTMMSGTLEKNQLCQRFLKEFTLLIEQINKNQFFAALLTAVLTYHLAWVPTVMPVDHPPIKAFSEKRTSQSVNMLAKTHPYNPLWAQLGDLYGAIGSPVRLTRTVVVGKQKDLVQRILYVLTYFLRCSELQENQLTWSGNHGEGDQVLNGSKIITALEKGEVEESEYVVITVRNEPALVPPILPPTAAERHNPWPTGFPECPEGTDSRDLGLKPDKEANRRPEQGSEACSAGCLGPASDASWKPQNAFCG

SEQ ID NO: 44366 - protein, 1565 aa, Homo sapiens
MLTDSGGGGTSFEEDLDSVAPRSAPAGASEPPPPGGVGLGIRTVRLFGEAGPASGVGSSGGGGSGSGTGGGDAALDFKLAAAVLRTGGGGGASGSDEDEVSEVESFILDQEDLDNPVLKTTSEIFLSSTAEGADLRTVDPETQARLEALLEAAGIGKLSTADGKAFADPEVLRRLTSSVSCALDEAAAALTRMKAENSHNAGQVDTRSLAEACSDGDVNAVRKLLDEGRSVNEHTEEGESLLCLACSAGYYELAQVLLAMHANVEDRGNKGDITPLMAASSGGYLDIVKLLLLHDADVNSQSATGNTALTYACAGGFVDIVKVLLNEGANIEDHNENGHTPLMEAASAGHVEVARVLLDHGAGINTHSNEFKESALTLACYKGHLDMVRFLLEAGADQEHKTDEMHTALMEACMDGHVEVARLLLDSGAQVNMPADSFESPLTLAACGGHVELAALLIERGANLEEVNDEGYTPLMEAAREGHEEMVALLLAQGANINAQTEETQETALTLACCGGFSEVADFLIKAGADIELGCSTPLMEASQEGHLELVKYLLASGANVHATTATGDTALTYACENGHTDVADVLLQAGADLDKQEDMKTILEGIDPAKHQEHESEGGRTPLMKAARAGHLCTVQFLISKGANVNRATANNDHTVVSLACAGGHLAVVELLLAHGADPTHRLKDGSTMLIEAAKGGHTNVVSYLLDYPNNVLSVPTTDVSQLPPPSQDQSQVPRVPTHTLAMVVPPQEPDRTSQENSPALLGVQKGTSKQKSSSLQVADQDLLPSFHPYQPLECIVEETEGKLNELGQRISAIEKAQLKSLELIQGEPLNKDKIEELKKNREEQVQKKKKILKELQKVERQLQMKTQQQFTKEYLETKGQKDTVSLHQQCSHRGVFPEGEGDGSLPEDHFSELPQVDTILFKDNDVDDEQQSPPSAEQIDFVPVQPLSSPQCNFSSDLGSNGTNSLELQKVSGNQQIVGQPQIAITGHDQGLLVQEPDGLMVATPAQTLTDTLDDLIAAVSTRVPTGSNSSSQTTECLTPESCSQTTSNVASQSMPPVYPSVDIDAHTESNHDTALTLACAGGHEELVSVLIARDAKIEHRDKKGFTPLILAATAGHVGVVEILLDKGGDIEAQSERTKDTPLSLACSGGRQEVVDLLLARGANKEHRNVSDYTPLSLAASGGYVNIIKILLNAGAEINSRTGSKLGISPLMLAAMNGHVPAVKLLLDMGSDINAQIETNRNTALTLACFQGRAEVVSLLLDRKANVEHRAKTGLTPLMEAASGGYAEVGRVLLDKGADVNAPPVPSSRDTALTIAADKGHYKFCELLIHRGAHIDVRNKKGNTPLWLASNGGHFDVVQLLVQAGADVDAADNRKITPLMSAFRKGHVKVVQYLVKEVNQFPSDIECMRYIATITDKELLKKCHQCVETIVKAKDQQAAEANKNASILLKELDLEKSREESRKQALAAKREKRKEKRKKKKEEQKRKQEEDEENKPKENSELPEDEDEEENDEDVEQEVPIEPPSATTTTTIGISATSATFTNVFGKKRANVVTTPSTNRKNK

SEQ ID NO: 44367 - protein, 106 aa, Homo sapiens
MENRALDPGTRDSYGATSHLPNKGALAKVKNNFKDLMSKLTEGQYVLCRWTDGLYYLGKIKRVSSSKQSCLVTFEDNSKYWVLWKDIQHAGVPGEEPKCNICLGKT

SEQ ID NO: 44368 - protein, 382 aa, Homo sapiens
MAVLFLLLFLCGTPQAADNMQAIYVALGEAVELPCPSPPTLHGDEHLSWFCSPAAGSFTTLVAQVQVGRPAPDPGKPGRESRLRLLGNYSLWLEGSKEEDAGRYWCTVLGQHHNYQNWRVYDVLVLKGSQLSARAADGSPCNVLLCSVVPSRRMDSVTWQEGKGPVRGRVQSFWGSEAALLLVCPGEGLSEPRSRRPRIIRCLMTHNKGVSFSLAASIDASPALCAPSTGWDMPWILMLLLTMGQGVVILALSIVLWRQRVRGAPGRGNRMRCYNCGGSPSSTCKEAVTTCGEGRPQPGLEQIKLPGNPPVTLIHQHPACVAAHHCNQVETESVGDVTYPAHRDCYLGDLCNSAVASHVAPAGILAAAATALTCLLPGLWSG

SEQ ID NO: 44369 - protein, 167 aa, Homo sapiens
MASALSYVSKFKSFVILFVTPLLLLPLVILMPAKILDSRQVCVQYMKDTNMLFLGGLIVAVAVERWNLHKRIALRTLLWVGAKPARLMLGFMGVTALLSMWISNTATTAMMVPIVEAILQQMEATSAATEAGLELVDKGKAKELPGSQVIFEGPTLGQQEDQERKRL

SEQ ID NO: 44370 - protein, 244 aa, Homo sapiens
MYGCDVGPDGRLLRGYDQYAYDGKDYIALNEDLRSWTAADTAAQITQRKWEAAREAEQLRAYLEGLCVEWLRRYLKNGKETLQRAEHPKTHVTHHPVSDHEATLRCWALGFYPAEITLTWQWDGEDQTQDTELVETRPAGDGTFQKWAAVVVPSGEEQRYTCHVQHEGLPEPLTLRWEPSSQPTIPIVGIVAGLAVLAVLAVLGAVVAVVMCRRKSSGGKGGSCSQAASSNSAQGSDESLIACK

SEQ ID NO: 44371 - protein, 680 aa, Homo sapiens
MFSCVKPYEDQNYSALRRDCRRRKVLFEDPLFPATDDSLYYKGTPGPAVRWKRPKYSGHSLAPHRPGWGDARRMENVPRPGSSGCPSSSLRARDLGICEDPRLFVDGISSHDLHQGQVGNCWFVAACSSLASRESLWQKVIPDWKEQEWDPEKPNAYAGIFHFHFWRFGEWVDVVIDDRLPTVNNQLIYCHSNSRNEFWCALVEKAYAKLAGCYQALDGGNTADALVDFTGGVSEPIDLTEGDFANDETKRNQLFERMLKVHSRGGLISASIKAVTAADMEARLACGLVKGHAYAVTDVRKVRLGHGLLAFFKSEKLDMIRLRNPWGEREWNGPWSDTSEEWQKVSKSEREKMGVTVQDDGEFWMTFEDVCRYFTDIIKCRVINTSHLSIHKTWEEARLHGAWTLHEDPRQNRGGGCINHKDTFFQNPQYIFEVKKPEDEVLICIQQRPKRSTRREGKGENLAIGFDIYKVEENRQYRMHSLQHKAASSIYINSRSVFLRTDQPEGRYVIIPTTFEPGHTGEFLLRVFTDVPSNCRELRLDEPPHTCWSSLCGYPQLVTQVHVLGAAGLKDSPTGANSYVIIKCEGDKVRSAVQKGTSTPEYNVKGIFYRKKLSQPITVQVWNHRVLKDEFLGQVHLKADPDNLQALHTLHLRDRNSRQPSNLPGTVAVHILSSTSLMAV

SEQ ID NO: 44372 - protein, 172 aa, Homo sapiens
MADRMQIVVILSEFFNTTWQEANCANCLTNNSEELSNSTVYFLNLFNHTLTCFEHNLQGNAHSLLQTKNYSEVCKNCREAYKTLSSLYSEMQKMNELENKAEPGTHLCIDVEDAMNITRKLWSRTFNCSVPCSDTVPVIAVSVFILFLPVVFYLSSFLHSEQKKRKLILPKR

SEQ ID NO: 44373 - protein, 197 aa, Homo sapiens
MLWSLQKARPLWITNLQEDETEEMEGPQSPGQLLNPALAHSISVASCGNIFSCGAEDGKVRIFRVMGVKCEQELGFKGHTSGVSQVCFLPESYLLLTGGNDGKITLWDANSEVEKKQKSPTKRTHRKKPKRGTCTKQGGNTNASVTDEEEHGNILPKLNIEHGEKVNWLLGTKIKGHQNILVADQTSCISVYPLNEF

SEQ ID NO: 44374 - protein, 40 aa, Homo sapiens
  MOD_RES (1)..(1): Any amino acid
XLGLSRVDDAVAAKHPAPAWPLACRCSFRGSFHTLCSGAS

SEQ ID NO: 44375 - protein, 112 aa, Homo sapiens
MATTVTCTRFTDEYQLYEDIGKGAFSVVRRCVKLCTGHEYAAKIINTKKLSARDHQKLEREARICRLLKHSNIVTVSSRSWRPFSIVTKWGSSTETSSRRTCFWPASAKGLQ

SEQ ID NO: 44376 - protein, 164 aa, Homo sapiens
  MOD_RES (1)..(1): Any amino acid
XGQNSLALHKVIMVGSGGVGKSALTLQFMYDEFVEDYEPTKADSYRKKVVLDGEEVQIDILDTAGQEDYAAIRDNYFRSGEGFLCVFSITEMESFAATADFREQILRVKEDENVPFLLVGNKSDLEDKRQVSVEEAKNRAEQWNVNYVETSAKTRANVDKSGPS

SEQ ID NO: 44377 - protein, 182 aa, Homo sapiens
EACRQRFRQFCYGDVHGPHEAFSQLWELCCRWLRPELRTKEQILELLVLEQFLTVLPGEIQGWVREQHPGSGEEAVALVEDLQKQPVKAWRQDVPSEEAEPEAAGRGSQATGPPPTVGARRRPSVPQEQHSHSGTCGIGRHPILFLPGRMGHPGPCSAGSLLGHKAGELPEHHPGFWAQRPK

SEQ ID NO: 44378 - protein, 70 aa, Homo sapiens
MASDASHALEAALEQMDGIIAGTKTGADLSDGTCEPGLASPASYMNPFPVLHLIEDLRLALEMLELPQER

SEQ ID NO: 44379 - protein, 131 aa, Homo sapiens
MFGKRKKRVEISAPSNFEHRVHTGFDQHEQKFTGLPRQWQSLIEESARRPKPLVDPACITSIQPGAPKTIVRGSKGAKDGALTLLLDEFENMSVTRSNSLRRDSPPPPARARQENGMPEEPATTARGGPGK

SEQ ID NO: 44380 - protein, 45 aa, Homo sapiens
MGNSRSRVGRSFCSQFLPEEQAEIDQLFDALSSDKNSPNVSSKSF

SEQ ID NO: 44381 - protein, 104 aa, Homo sapiens
MKDEVALLAAVTLLGVLLQAYFSLQVISARRAFRVSPPLTTGPPEFERVYRAQVNCSEYFPLFLATLWVAGIFFHEGAAALCGLVYLFARLRYFQGYARSAQLR

SEQ ID NO: 44382 - protein, 370 aa, Homo sapiens
MSASAVYVLDLKGKVLICRNYRGDVDMSEVEHFMPILMEKEEEGMLSPILAHGGVRFMWIKHNNLYLVATSKKNACVSLVFSFLYKVVQVFSEYFKELEEESIRDNFVIIYELLDELMDFGYPQTTDSKILQEYITQEGHKLETGAPRPPATVTNAVSWRSEGIKYRKNEVFLDVIESVNLLVSANGNVLRSEIVGSIKMRVFLSGMPELRLGLNDKVLFDNTGRGKSKSVELEDVKFHQCVRLSRFENDRTISFIPPDGEFELMSYRLNTHVKPLIWIESVIEKHSHSRIEYMIKGGKEYLMRAHFGLPSVEAEDKEGKPPISVKFEIPYFTTSGIQVRYLKIIEKSGYQALPWVRYITQNGDYQLRTQ

SEQ ID NO: 44383 - protein, 1002 aa, Homo sapiens
MKKFNFRKVLDGLTASSPGSGSSSGSNSGGGAGSGSVHPAGTAGVLREEIQETLTSEYFQICKTVRHGFPHQPTALAFDPVQKILAIGTRTGAIRILGRPGVDCYCQHESGAAVLQLQFLINEGALVSASSDDTLHLWNLRQKRPAILHSLKFNRERITYCHLPFQSKWLYVGTERGNTHIVNIESFILSGYVIMWNKAIELSTKTHPGPVVHLSDSPRDEGKLLIGYENGTVVFWDLKSKRAELRVYYDEAIHSIDWHHEGKQFMCSHSDGSLTLWNLKSPSRPFQTTIPHGKSQREGRKSESCKPILKVEYKTCKNSEPFIIFSGGLSYDKACRRPSLTIMHGKAITVLEMDHPIVEFLTLCETPYPNEFQEPYAVVVLLEKDLIVVDLTQSNFPIFENPYPMDIHESPVTCTAYFADCPPDLILVLYSIGVKHKKQGYSNKEWPISGGAWNLGAQTYPEIIITGHADGSIKFWDASAITLQMLYKLKTSKVFEKQKVGEGKQTCEIVEEDPFAIQMIYWCPESRIFCVSGVSAYVIIYKFSRHEITTEIVSLEVRLQYDVEDIITPEPETSPPFPDLSAQLPSSRSLSGSTNTVASEGVTKDSIPCLNVKTRPVRMPPGYQAELVIQLVWVDGEPPQQITSLAVSSAYGIVAFGNCNGLAVVDFIQKTVLLSMGTIDLYRSSDLYQRQPRSPRKNKQFIAGLTELNDSPVPLELERCKSPTSDHVNGHCTSPTSQSCSSGKRLSSADVSKVNRWGPGRPPFRKAQSAACMEISLPVTTEENRENSYNRSRSSSISSIDKDSKEAITALYFMDSFARKNDSTISPCLFVGTSLGMVLIISLNLPLADEQRFTEPVMVLPSGTFLSLKGAVLTFSCMDRMGGLMQPPYEVWRDPNNIDENEKSWRRKVVMNSSSASQEIGDHQYTIICSEKQAKVFSLPSQTCLYVHNITETSFILQANVVVMCSSACLACFCANGHIMIMRYLPSYKLSGNHNNTSKVQS

SEQ ID NO: 44384 - protein, 282 aa, Homo sapiens
  MOD_RES (252)..(252): Any amino acid
MGARASGGPLARAGLLLLLLLLLLLGLLAPGAQGARGRGGAEKNSYRRTVNTFSQSVSSLFGEDNVRAAQKFLARLTERFVLGVDMFVETLWKVWTELLDVLGLDVSNLSQYFSPASVSSSPARALLLVGVVLLAYWFLSLTLGFTFSVLHVVFGRFFWIVRVVLFSMSCVYILHKYEGEPENAVLPLCFVVAVYFMTGPMGFYWRSSPSGPSNPSNPSVEEKLEHLEKQVRLLNIRLNRVLESLDRSKDKXRSAGRAGPQLPARCLRKRKRRKKTPNPKQS

SEQ ID NO: 44385 - protein, 148 aa, Homo sapiens
  MOD_RES (1)..(1): Any amino acid
XRAMALFFVLCWIQGYSQQKSLNNAAFASGSNEREEHLAKIFDEILLQVFPKFPYDPSFNEATAVRSITKTDMRKGTSIAWNSPKPEYFLGSVDKIPDKDHLSEEKNFKESCLFDRDLREQLTTIDKETLQGAAKPDLLWQTRHIIFL

SEQ ID NO: 44386 - protein, 272 aa, Homo sapiens
MAMRELVEAECGGANPLMKLAGHFTQDKALRQEGLRPGPWPPGAPASEALVAEFLQDQNAPLVSRAPQTFKMDDLLAEMQQIEQSNFRQAPQRAPGVADLALSENWAQEFLAAGDAVDVTQDYNETDWSQEFISEVTDPLSVSPARWAEEYLEQSEEKLWLGEPEGTATDRWYDEYHPEEDLQHTASDFVAKVDDPKLANSEGTSDAWVDQFTRPVNTSALDMEFERAKSAIESDVDFWDKLQAELEEMAKRDAEAHPWLSDYDDLTSATYD

SEQ ID NO: 44387 - protein, 75 aa, Homo sapiens
MTDVFLICFSVVNPASFQNVKEEWVPELKEYAPNVPFLLIGTQIDLRDDPKTLARLNDMKEKPICVEQGQKLAKE

SEQ ID NO: 44388 - protein, 486 aa, Homo sapiens
MRYSLSPDNHLEDGIMNMANFLRGFEEKGIKNDRPEDQLSKEKKKILFSFCEVCNIQLNSAAQAQVHSNGKSHRKRVKQLSDGQPPPPAQASPSSNSSTGSTCHTTTLPALVRTPTLMMQPSLDIKPFMSFPVDSSSAVGLFPNFNTMDPVQKAVINHTFGVSIPPKKKQVISCNVCQLRFNSDSQAEAHYKGSKHAKKVKALDATKNKPKMVPSKDSAKANPSCSITPITGNNSDKSEDKGKLKASSSSQPSSSESGSFLLKSGTTPLPPGAATSPSKSTNGAPGTVVESEEEKAKKLLYCSLCKVAVNSLSQLEAHNTGSKHKTMVEARNGAGPIKSYPRPGSRLKMQNGSKGSGLQNKTFHCEICDVHVNSEIQLKQHISSRRHKDRVAGKPLKPKYSPYNKLQRSPSILAAKLAFQKDMMKPLAPAFLSSPLAAAAAVSSALSLPPRPSASLFQAPAIPPALLRPGHGPIRATPASILFAPY

SEQ ID NO: 44389 - protein, 221 aa, Homo sapiens
  MOD_RES (1)..(1): Any amino acid
XEKYLDNPNALTERELKVAYTTVLQEWLRLACRSDAHPELVRRHLVTFRAMSARLLDYVVNIADSNGNTALHYSVSHANFPVVQQLLDSGVCKVDKQNRAGYSPIMLTALATLKTQDDIETVLQLFRLGNINAKASQAGQTALMLAVSHGRVDVVKALLACEADVNVQDDDGSTALMCACEHGHKEIAGLLLAVPSCDISLTDRFAPMSDDESPTSSSAEE

SEQ ID NO: 44390 - protein, 203 aa, Homo sapiens
MQSRDGVSPCWPGWSQSLDLVIRLPRPPQVLGLQAEEEFNIEKGRLVQTQRLKIMEYYEKKEKQIEQQKKIQMSNLMNQARLKVLRARDDLITDLLNEAKQRLSKVVKDTTRYQVLLDGLVLQGLYQLLEPRMIVRCRKQDFPLVKAAVQKAIPMYKIATKNDVDVQIDQESYLPEDIAGGVEIYNGDRKIKVSNTLESRLDL

SEQ ID NO: 44391 - protein, 1288 aa, Homo sapiens
MEPSSPQDEGLRKKQPKKPVPEILPRPPRALFCLTLENPLRKACISIVEWKPFETIILLTIFANCVALAVYLPMPEDDNNSLNLGLEKLEYFFLIVFSIEAAMKIIAYGFLFHQDAYLRSGWNVLDFTIVFLGVFTVILEQVNVIQSHTAPMSSKGAGLDVKALRAFRVLRPLRLVSGVPSLQVVLNSIFKAMLPLFHIALLVLFMVIIYAIIGLELFKGKMHKTCYFIGTDIVATVENEEPSPCARTGSGRRCTINGSECRGGWPGPNHGITHFDNFGFSMLTVYQCITMEGWTDVLYWVNDAIGNEWPWIYFVTLILLGSFFILNLVLGVLSGEFTKEREKAKSRGTFQKLREKQQLDEDLRGYMSWITQGEVMDVEDFREGKLSLDEGGSDTESLYEIAGLNKIIQFIRHWRQWNRIFRWKCHDIVKSKVFYWLVILIVALNTLSIASEHHNQPLWLTRLQDIANRVLLSLFTTEMLMKMYGLGLRQYFMSIFNRFDCFVVCSGILEILLVESGAMTPLGISVLRCIRLLRIFKITKYWTSLSNLVASLLNSIRSIASLLLLLFLFIVIFALLGMQLFGGRYDFEDTEVRRSNFDNFPQALISVFQVLTGEDWTSMMYNGIMAYGGPSYPGMLVCIYFIILFVCGNYILLNVFLAIAVDNLAEAESLTSAQKAKAEEKKRRKMSKGLPDKSEEEKSTMAKKLEQKPKGEGIPTTAKLKIDEFESNVNEVKDPYPSADFPGDDEEDEPEIPLSPRPRPLAELQLKEKAVPIPEASSFFIFSPTNKIRVLCHRIVNATWFTNFILLFILLSSAALAAEDPIRADSMRNQILKHFDIGFTSVFTVEIVLKMTTYGAFLHKGSFCRNYFNMLDLLVVAVSLISMGLESSAISVVKILRVLRVLRPLRAINRAKGLKHVVQCMFVAISTIGNIVLVTTLLQFMFACIGVQLFKGKFFRCTDLSKMTEEECRGYYYVYKDGDPMQIELRHREWVHSDFHFDNVLSAMMSLFTVSTFEGWPQLLYKAIDSNAEDVGPIYNNRVEMAIFFIIYIILIAFFMMNIFVGFVIVTFQEQGETEYKNCELDKNQRQCVQYALKARPLRCYIPKNPYQYQVWYIVTSSYFEYLMFALIMLNTICLGMQHYNQSEQMNHISDILNVAFTIIFTLEMILKLMAFKARGYFGDPWNVFDFLIVIGSIIDVILSEIDTFLASSGGLYCLGGGCGNVDPDESARISSAFFRLFRVMRLIKLLSRAEGVRTLLWTFIKSFQALPYVALLIVMLFFIYAVIGMQV

SEQ ID NO: 44392 - protein, 259 aa, Homo sapiens
MTADKEKKRSSSERRKEKSRDAARCRRSKETEVFYELAHELPLPHSVSSHLDKASIMRLAISFLRTHKLLSSVCSENESEAEADQQMDNLYLKALEGFIAVVTQDGDMIFLSENISKFMGLTQVELTGHSIFDFTHPCDHEEIRENLSLKNGSGFGKKSKDMSTERDFFMRMKCTVTNRGRTVNLKSATWKVLHCTGQVKVYNNCPPHNSLCGYKEPLLSCLIIMCEPIQHPSHMDIPLDSKTFLSRHSMDMKFTYCDD

SEQ ID NO: 44393 - protein, 245 aa, Homo sapiens
MGLLKEFLAKAKEDFLKKWENPTQNNAGLEDFERKKTLGTGSFGRVMLVKHKATEQYYAMKILDKQKVVKLKQIEHTLNEKRILQAVNFPFLVRLEYAFKDNSNLYMVMEYVPGGEMFSHLRRIGRFSEPHARFYAAQIVLTFEYLHSLDLIYRDLKPENLLIDHQGYIQVTDFGFAKRVKGRTWTLCGTPEYLAPEIILSKGYNKAVDWWALGVLIYEMAAGYPPFFADQPIQIYEKIVSGKNF

SEQ ID NO: 44394 - protein, 74 aa, Homo sapiens
MDPAGRARGQGATAGGLLLRAAAAAKGLREDLWGAAALPWRSLSRIPKREGLGEEDTAVAGHELQAANPSACSC

SEQ ID NO: 44395 - protein, 165 aa, Homo sapiens
LVDQTEDILAKSKKGIEESLRKVAKKKFAENLKAGDEFVEKTLSTIATSTDAASVVHSTDLVVEAIVENLKVKNELFKRLDKFAAEHTIFASNTSSLQITSIANATTRQDRFAGLHFFNPVPVMKLVEVIKTPMTSQKTFESLVDFSKALGKHPVSCKFELTVLY

SEQ ID NO: 44396 - protein, 1495 aa, Homo sapiens
MGTALLQRGGCFLLCLSLLLLGCWAELGSGLEFPGAEGQWTRFPKWNACCESEMSFQLKTRSARGLVLYFDDEGFCDFLELILTRGGRLQLSFSIFCAEPATLLADTPVNDGAWHSVRIRRQFRNTTLFIDQVEAKWVEVKSKRRDMTVFSGLFVGGLPPELRAAALKLTLASVREREPFKGWIRDVRVNSSQVLPVDSGEVKLDDEPPNSGGGSPCEAGEEGEGGVCLNGGVCSVVDDQAVCDCSRTGFRGKDCSQEDNNVEGLAHLMMGDQGKEEYIATFKGSEYFCYDLSQNPIQSSSDEITLSFKTLQRNGLMLHTGKSADYVNLALKNGAVSLVINLGSGAFEALVEPVNGKFNDNAWHDVKVTRNLRQVTISVDGILTTTGYTQEDYTMLGSDDFFYVGGSPSTADLPGSPVSNNFMGCLKEVVYKNNDVRLELSRLAKQGDPKMKIHGVVAFKCENVATLDPITFETPESFISLPKWNAKKTGSISFDFRTTEPNGLILFSHGKPRHQKDAKHPQMIKVDFFAIEMLDGHLYLLLDMGSGTIKIKALLKKVNDGEWYHVDFQRDGRSGTISVNTLRTPYTAPGESEILDLDDELYLGGLPENKAGLVFPTEVWTALLNYGYVGCIRDLFIDGQSKDIRQMAEVQSTAGVKPSCSKETAKPCLSNPCKNNGMCRDGWNRYVCDCSGTGYLGRSCEREATVLSYDGSMFMKIQLPVVMHTEAEDVSLRFRSQRAYGILMATTSRDSADTLRLELDAGRVKLTVNLDCIRINCNSSKGPETLFAGYNLNDNEWHTVRVVRRGKSLKLTVDDQQAMTGQMAGDHTRLEFHNIETGIITERRYLSSVPSNFIGHLQSLTFNGMAYIDLCKNGDIDYCELNARFGFRNIIADPVTFKTKSSYVALATLQAYTSMHLFFQFKTTSLDGLILYNSGDGNDFIVVELVKGYLHYVFDLGNGANLIKGSSNKPLNDNQWHNVMISRDTSNLHTVKIDTKITTQITAGARNLDLKSDLYIGGVAKETYKSLPKLVHAKEGFQGCLASVDLNGRLPDLISDALFCNGQIERGCEGPSTTCQEDSCSNQGVCLQQWDGFSCDCSMTSFSGPLCNDPGTTYIFSKGGGQITYKWPPNDRPSTRADRLAIGFSTVQKEAVLVRVDSSSGLGDYLELHIHQGKIGVKFNVGTDDIAIEESNAIINDGKYHVVRFTRSGGNATLQVDSWPVIERYPAGNNDNERLAIARQRIPYRLGRVVDEWLLDKGRQLTIFNSQATIIIGGKEQGQPFQGQLSGLYYNGLKVLNMAAENDANIAIVGNVRLVGEVPSSMTTESTATAMQSEMSTSIMETTTTLATSTARRGKPPTKEPISQTTDDILVASAECPSDDEDIDPCEPSSGGLANPTRAGGREPYPGSAEVIRESSSTTGMVVGIVAAAALCILILLYAMYKYRNRDEGSYHVDESRNYISNSAQSNGAVVKEKQPSSAKSSNKNKKNKDKEYYV

SEQ ID NO: 44397 - protein, 190 aa, Homo sapiens
MTLSVNHPAAGPWALLAATWRGPRAGGEAALPPRGGGTPAPTTSEPPPAPDRRRHLSLLQEDLQEDADGSLDFVSQDEMLTPLGRLDKYAASENIFNRQMVARSLLDTLREVCDDERDCIAVLERISRLADDSEPTVRAELMEQVPHIALFCQENRPSIPYAFSKFLLPIVVRYLADQNNQVRKTSQAAL

SEQ ID NO: 44398 - protein, 22 aa, Homo sapiens
  MOD_RES (1)..(1): Any amino acid
XNILLTNEQLESARKIVHDYRK

SEQ ID NO: 44399 - protein, 96 aa, Homo sapiens
MAPVHGDDCEIGASALSDSGSFVSSRARREKKSKKGRQEALERLKKAKAGEKYKYEMVLAMWKMAERFLMMTLKMMPLMLMRKEKMVKHAIKTRGM

SEQ ID NO: 44400 - protein, 487 aa, Homo sapiens
MYSPLCLTQDEFHPFIEALLPHVRAFAYTWFNLQARKRKYFKKHEKRMSKEEERAVKDELLSEKPEVKQKWASRLLAKLRKDIRPEYREDFVLTVTGKKPPCCVLSNPDQKGKMRRIDCLRQADKVWRLDLVMVILFKGIPLESTDGERLVKSPQCSNPGLCVQPHHIGVSVKELDLYLAYFVHAAGHLGFQDSFVTSGVFSVTELVRVSQTPIAAGTGPNFSLSDLESSSYYSMSPGAMRRSLPSTSSTSSTKRLKSVEDEMDSPGEEPFYTGQGRSPGSGSQSSGWHEVEPGMPSPTTLKKSEKSGFSSPSPSQTSSLGTAFTQHHRPVITGPRASPHATPSTLHFPTSPIIQQPGPYFSHPAIRYHPQETLKEFVQLVCPDAGQQAGQVGFLNPNGSSQGKVHNPFLPTPMLPPPPPPPMARPVPLPVPDTKPPTTSTEGGAASPTSPTYSTPSTSPANRFVSVGPRDPSFVNIPQQTQSWYLG

SEQ ID NO: 44401 - protein, 519 aa, Homo sapiens
MQSTSNHLWLLSDILGQGATANVFRGRHKKTGDLFAIKVFNNISFLRPVDVQMREFEVLKKLNHKNIVKLFAIEEETTTRHKVLIMEFCPCGSLYTVLEEPSNAYGLPESEFLIVLRDVVGGMNHLRENGIVHRDIKPGNIMRVIGEDGQSVYKLTDFGAARELEDDEQFVSLYGTEEYLHPDMYERAVLRKDHQKKYGATVDLWSIGVTFYHAATGSLPFRPFEGPRRNKEVMYKIITGKPSGAISGVQKAENGPIDWSGDMPVSCSLSRGLQVLLTPVLANILEADQEKCWGFDQFFAETSDILHRMVIHVFSLQQMTAHKIYIHSYNTATIFHELVYKQTKIISSNQELIYEGRRLVLEPGRLAQHFPKTTEENPIFVVSREPLNTIGLIYEKISLPKVHPRYDLDGDASMAKAITGVVCYACRIASTLLLYQELMRKGIRWLIELIKDDYNETVHKKTEVVITLDFCIRNIEKTVKVYEKLMKINLEAAELGEISDIHTKLLRVSVYKITKFVSS

SEQ ID NO: 44402 - protein, 323 aa, Homo sapiens
MSRLLGGTLERVCKAVLLLCLLHFLVAVILYFDVYAQHLAFFSRFSARGPAHALHPAASSSSSSSNCSRPNATASSSGLPEVPSALPGPTAPTLPPCPDSPPGLVGRLLIEFTSPMPLERVQRENPGVLMGGRYTPPDCTPAQTVAVIIPFRHREHHLRYWLHYLHPILRRQRLRYGVYVINQHGEDTFNRAKLLNVGFLEALKEDAAYDCFIFSDVDLVPMDDRNLYRCGDQPRHFAIAMDKFGFRLPYAGYFGGVSGLSKAQFLRINGFPNEYWGWGGEDDDIFNRISLTGMKISRPDIRIGRYRMIKHDRDKHNEPNPQR

SEQ ID NO: 44403 - protein, 517 aa, Homo sapiens
ERLKLERNKEYNQFLRGKEESSEKFRQVEKSTEPKSQRNKKPIGQVKPDLTSQIQTSCENSEGPRKDVLTPSEAYEELLNQRRLEEDRYRQLDDEIELRNRRIIKKANEEVGISNLKHQRFASKAGIPDRRFHRFNEDRVFDRRYHRPDQDPEVSEEMDERFRYESDFDRRLSRVYTNDRMHRNKRGNMPPMEHDGDVIEQSNIRISSAENKSAPDNETSKSANQDTCSPFAGMLFGGEDRELIQRRKEKYRLELLEQMAEQQRNKRREKDLELRVAASGAQDPEKSPDRLKQFSVAPRHFEEMIPPERPRIAFQTPLPPLSAPSVPPIPSVHPVPSQNEDLRSGLSSALGEMVSPRIAPLPPPPLLPPLATNYRTPYDDAYYFYGSRNTFDPSLAYYGSGMMGVQPAAYVSAPVTHQLAQPVVNTVGQNELKITSDQVINSGLIFEDKPKPSKQSLQSYQEALQQQIREREERRKKEREEKEEYEAKLEAEMRTYNPWGKGGGGAPLRDAKGNLIN

SEQ ID NO: 44404 - protein, 49 aa, Homo sapiens
MSKSKVDNQFYSVEVGDSTFTVLKRYQNLKPIGSGAQGIVWTSEYGWEV

SEQ ID NO: 44405 - protein, 56 aa, Homo sapiens
MSLVPATNYIYTPLNQLKGGTIVNVYGVVKFFKPPYLSKGTGYVQRNAHPDKTFSM

SEQ ID NO: 44406 - protein, 169 aa, Homo sapiens
  MOD_RES (1)..(1): Any amino acid
XNLSLKLTKDVDQEARCSHISRMPNSPSADWPLQGVEENGGIDSLPFRLMLQDCTAVKTLLLKMKRVLQESADMSPASSTTSLPVSPLTEEPVPFKDIMKDECSMLKLQLKEKDELISQLQEELGKVRHLQKAFASRVDKSTQTELLCYDALWNPTCTEGLFKPVLIST

SEQ ID NO: 44407 - protein, 61 aa, Homo sapiens
MTDNSNNQLVVRAKFNFQQTNEDELSFSKGDVIHVTRVEEGGWWEGTLNGRTGWFPSNYVR

SEQ ID NO: 44408 - protein, 169 aa, Homo sapiens
  MOD_RES (1)..(1): Any amino acid
XDYVVMTIYFELSRRMGYFTIQTYIPCILTVVLSWVSFWIKKDATPARTALGITTVLTMTTLSTIARKSLPRVSYVTAMDLFVTVCFLFVFAALMEYATLNYYSSCRKPTTTKKTTSLLHPDSSRWIPERISLQAPSKPSCCPACGLQGLPFRSLVSHPRISRAFCLPV

SEQ ID NO: 44409 - protein, 91 aa, Homo sapiens
MFAEFFGGRNPFDTFFGQRNGEEGMDIDDPFSGFPMGMGGFTNVNFGRSRSAQEPARKKQDPPVTHDLRVSLEEIYSGCTKKMKISHKRLN

SEQ ID NO: 44410 - protein, 34 aa, Homo sapiens
MVMATVKKGKPELRKKVHPAVVIRQRKSYRRKDG

SEQ ID NO: 44411 - protein, 134 aa, Homo sapiens
MQIFVKTLTGKTITLEVEPSDTIENVKAKIQDKEGIPPDQQRLIFAGKQLEDGRTLSDYNIQKESTLHLVLRLRGGMQIFVKTLTGKTITLEVEPSDTIENVKAKIQDKEGIPPDQQRLIFAGKQLEDGRTLSD

SEQ ID NO: 44412 - protein, 244 aa, Homo sapiens
MEGKWLLCMLLVLGTAIVEAHDGHDDDVIDIEDDLDDVIEEVEDSKPDTTAPPSSPKVTYKAPVPTGEVYFADSFDRGTLSGWILSKAKKDDTDDEIAKYDGKWEVEEMKESKLPGDKGLVLMSRAKHHAISAKLNKPFLFDTKPLIVQYEVNFQNGIECGGAYVKLLSKTPELNLDQFHDKTPYTIMFGPDKCGEDYKLHFIFRHKNPKTGIYEEKHAKRPDADLKTYFTDKKTHLYTLRNGR

SEQ ID NO: 44413 - protein, 152 aa, Homo sapiens
MGRSGATSRKALETLRRVGDGVQRNHETAFQGMLRKLDIKNEDDVKSLSRVMIHVFSDGVTNWGRIVTLISFGAFVAKHLKTINQESCIEPLAESITDVLVRTKRDWLVKQRGWDGFVEFFHVEDLEGGIRNVLLAFAGVAGVGAGLAYLIR

SEQ ID NO: 44414 - protein, 214 aa, Homo sapiens
MAEAEFKDHSTAMDTEPNPGTSSVSTTTSSTTTTTITTSSSRMQQPQISVYSGSDRHAVQVIQQALHRPPSSAAQYLQQMYAAQQQHLMLHTAALQQQHLSSSQLQSLAAVQASLSSGRPSTSPTGSVTQQSTSYSPIQPHSLIKHQQIPLHSPPSKVSHHQLILQQQQQQIQPITLQNSTQDPPPSQHCIPLQNHGLPPAPSNAQSQHCSPIQ

SEQ ID NO: 44415 - protein, 1348 aa, Homo sapiens
MFNKSFGTPFGGGTGGFGTTSTFGQNTGFGTTSGGAFGTSAFGSSNNTGGLFGNSQTKPGGLFGTSSFSQPATSTSTGFGFGTSTGTANTLFGTASTGTSLFSSQNNAFAQNKPTGFGNFGTSTSSGGLFGTTNTTSNPFGSTSGSLFGPSSFTAAPTGTTIKFNPPTGTDTMVKAGVSTNISTKHQCITAMKEYESKSLEELRLEDYQANRKGPQNQVGAGTTTGLFGSSPATSSATGLFSSSTTNSGFAYGQNKTAFGTSTTGFGTNPGGLFGQQNQQTTSLFSKPFGQATTTQNTGFSFGNTSTIGQPSTNTMGLFGVTQASQPGGLFGTATNTSTGTAFGTGTGLFGQTNTGFGAVGSTLFGNNKLTTFGSSTTSAPSFGTTSGGLFGFGTNTSGNSIFGSKPAPGTLGTGLGAGFGTALGAGQASLFGNNQPKIGGPLGTGAFGAPGFNTTTATLGFGAPQAPVALTDPNASAAQQAVLQQHINSLTYSPFGDSPLFRNPMSDPKKKEERLKPTNPAAQKALTTPTHYKLTPRPATRVRPKALQTTGTAKSHLFDGLDDDEPSLANGAFMPKKSIKKLVLKNLNNSNLFSPVNRDSENLASPSEYPENGERFSFLSKPVDENHQQDGDEDSLVSHFYTNPIAKPIPQTPESAGNKHSNSNSVDDTIVALNMRAALRNGLEGSSEETSFHDESLQDDREEIENNSYHMHPAGIILTKVGYYTIPSMDDLAKITNEKGECIVSDFTIGRKGYGSIYFEGDVNLTNLNLDDIVHIRRKEVVVYLDDNQKPPVGEGLNRKAEVTLDGVWPTDKTSRCLIKSPDRLADINYEGRLEAVSRKQGAQFKEYRPETGSWVFKVSHFSKYGLQDSDEEEEEHPSKTSTKKLKTAPLPPASQTTPLQMALNGKPAPPPQSQSPEVEQLGRVVELDSDMVDITQEPVLDTMLEESMPEDQEPVSASTHIASSLGINPHVLQIMKASLLTDEEDVDMALDQRFSRLPSKADTSQEICSPRLPISASHSSKTRSLVGGLLQSKFTSGAFLSPSVSVQECRTPRAASLMNIPSTSSWSVPPPLTSVFTMPSPAPEVPLKTVGTRRQLGLVPREKSVTYGKGKLLMDMALFMGRSFRVGWGPNWTLANSGEQLNGSHELENHQIADSMEFGFLPNPVAVKPLTESPFKVHLEKLSLRQRKPDEDMKLYQTPLELKLKHSTVHVDELCPLIVPNLGVAVIHDYADWVKEASGDLPEAQIVKHWSLTWTLCEALWGHLKELDSQLNEPREYIQILERRRAFSRWLSCTATPQIEEEVSLTQKNSPVEAVFSYLTGKRISEACSLAQQSVSLCTPGWSAVA

SEQ ID NO: 44416 - protein, 2134 aa, Homo sapiens
MSGGAAEKQSSTPGSLFLSPPAPAPKNGSSSDSSVGEKLGAAAADAVTGRTEEYRRRRHTMDKDSRGAAATTTTTEHRFFRRSVICDSNATALELPGLPLSLPQPSIPAAVPQSAPPEPHREETVTATATSQVAQQPPAAAAPGEQAVAGPAPSTVPSSTSKDRPVSQPSLVGSKEEPPPARSGSGGGSAKEPQEERSQQQDDIEELETKAVGMSNDGRFLKFDIEIGRGSFKTVYKGLDTETTVEVAWCELQDRKLTKSERQRFKEEAEMLKGLQHPNIVRFYDSWESTVKGKKCIVLVTELMTSGTLKTYLKRFKVMKIKVLRSWCRQILKGLQFLHTRTPPIIHRDLKCDNIFITGPTGSVKIGDLGLATLKRASFAKSVIGTPEFMAPEMYEEKYDESVDVYAFGMCMLEMATSEYPYSECQNAAQIYRRVTSGVKPASFDKVAIPEVKEIIEGCIRQNKDERYSIKDLLNHAFFQEETGVRVELAEEDDGEKIAIKLWLRIEDIKKLKGKYKDNEAIEFSFDLERDVPEDVAQEMVESGYVCEGDHKTMAKAIKDRVSLIKRKREQRQLVREEQEKKKQEESSLKQQVEQSSASQTGIKQLPSASTGIPTASTTSASVSTQVEPEEPEADQHQQLQYQQPSISVLSDGTVDSGQGSSVFTESRVSSQQTVSYGSQHEQAHSTGTVPGHIPSTVQAQSQPHGVYPPSSVAQGQSQGQPSSSSLTGVSSSQPIQHPQQQGIQQTAPPQQTVQYSLSQTSTSSEATTAQPVSQPQAPQVLPQVSAGKQSTQGVSQVAPAEPVAVAQTQATQPTTLASSVDSAHSDVASGMSDGNENVPSSSGRHEGRTTKRHYRKSVRSRSRHEKTSRPKLRILNVSNKGDRVVECQLETHNRKMVTFKFDLDGDNPEEIATIMVNNDFILAIERESFVDQVREIIEKADEMLSEDVSVEPEGDQGLESLQGKDDYGFSGSQKLEGEFKQPIPASSMPQQIGIPTSSLTQVVHSAGRRFIVSPVPESRLRESKVFPSEITDTVAASTAQSPGMNLSHSASSLSLQQAFSELRRAQMTEGPNTAPPNFSHTGPTFPVVPPFLSSIAGVPTTAAATAPVPATSSPPNDISTSVIQSEVTVPTEEGIAGVATSTGVVTSGGLPIPPVSESPVLSSVVSSITIPAVVSISTTSPSLQVPTSTSEIVVSSTALYPSVTVSATSASAGGSTATPGPKPPAVVSQQAAGSTTVGATLTSVSTTTSFPSTASQLCIQLSSSTSTPTLAETVVVSAHSLDKTSHSSTTGLAFSLSAPSSSSSPGAGVSSYISQPGGLHPLVIPSVIASTPILPQAAGPTSTPLLPQVPSIPPLVQPVANVPAVQQTLIHSQPQPALLPNQPHTHCPEVDSDTQPKAPGIDDIKTLEEKLRSLFSEHSSSGAQHASVSLETSLVIESTVTPGIPTTAVAPSKLLTSTTSTCLPPTNLPLGTVALPVTPVVTPGQVSTPVSTTTSGVKPGTAPSKPPLTKAPVLPVGTELPAGTLPSEQLPPFPGPSLTQSQQPLEDLDAQLRRTLSPEMITVTSAVGPVSMAAPTAITEAGTQPQKVSQVKEGPVLATSSGAGVFKMGRFQVSVAADGAQKEGKNKSEDAKSVHFESSTSESSVLSSSSPESTLVKPEPNGITIPGISSDVPESAHKTTASEAKSDTGQPTKVGRFQVTTTANKVGRFSVSKTEDKITDTKKEGPVASPPFMDLEQAVLPAVIPKKEKPELSEPSHLNGPSSDPEAAFLSRDVDDGSGSPHSPHQLSSKSLPSQNLSQSLSNSFNSSYMSSDNESDIEDEDLKLELRRLRDKHLKEIQDLQSRQKHEIESLYTKLGKVPPAVIIPPAAPLSGRRRRPTKSKGSKSSRSSSLGNKSPQLSGNLSGQSAASVLHPQQTLHPPGNIPESGQNQLLQPLKPSPSSDNLYSAFTSDGAISVPSLSAPGQGTSSTNTVGATVNSQAAQAQPPAMTSSRKGTFTDDLHKLVDNWARDAMNLSGRRGSKGHMNYEGPGMARKFSAPGQLCISMTSNLGGSAPISAASATSLGHFTKSMCPPQQYGFPATPFGAQWSGTGGPAPQPLGQFQPVGTASLQNFNISNLQKSISNPPGSNLRTT

SEQ ID NO: 44417 - protein, 34 aa, Homo sapiens
  MOD_RES (1)..(1): Any amino acid
XFMRLPLISVALVQGWALGGGAEFTTACDFSFRH

SEQ ID NO: 44418 - protein, 116 aa, Homo sapiens
MKLLTRAGSFSRFYSLKVAPKVKATAAPAGAPPQPQDLEFTKLPNGLVIASLENYSPVSRIGLFIKAGSRYEDFSNLGTTHLLRLTSSLTTKGASSFKITRGIEAVGGKLREMGKV

SEQ ID NO: 44419 - protein, 606 aa, Homo sapiens
MIQSDKGADPPDKKDMKLSTATNPQNGLSQILRLVLQELSLFYGRDVNGVCLLYDLLHSPWLQALLKIYDCLQEFKEKKLVPATPHAQVLSYEVVELLRETPTSPEIQELRQMLQAPHFKALLSAHDTIAQKDFEPLLPPLPDNIPESEEAMRIVCLVKNQQPLGATIKRHEMTGDILVARIIHGGLAERSGLLYAGDKLVEVNGVSVEGLDPEQVIHILAMSRGTIMFKVVPVSDPPVNSQQMVYVRAMTEYWPQEDPDIPCMDAGLPFQKGDILQIVDQNDALWWQARKISDPATCAGLVPSNHLLKRKQREFWWSQPYQPHTCLKSTLYKEEFVGYGQKFFIAGFRRSMRLCRRKSHLSPLHASVCCTGSCYSAVGAPYEEVVRYQRRPSDKYRLIVLMGPSGVGVNELRRQLIEFNPSHFQSAVPHTTRTKKSYEMNGREYHYVSKETFENLIYSHRMLEYGEYKGHLYGTSVDAVQTVLVEGKICVMDLEPQDIQGVRTHELKPYVIFIKPSNMRCMKQSRKNAKVITDYYVDMKFKDEDLQEMENLAQRMETQFGQFFDHVIVNDSLHDACAQLLSAIQKAQEEPQWVPATWISSDTESQ

SEQ ID NO: 44420 - protein, 243 aa, Homo sapiens
MSEYIRVTEDENDEPIEIPSEDDGTVLLSTVTAQFPGACGLRYRNPVSQCMRGVRLVEGILHAPDAGWGNLVYVVNYPKDNKRKMDETDASSAVKVKRAVQKTSDLIVLGLPWKTTEQDLKEYFSTFGEVLMVQVKKDLKTGHSKGFGFVRFTEYETQVKVMSQRHMIDGRWCDCKLPNSKIAQSLCGEDLIIKGISVHISNAEPKHNSNRQLERSGRFGGNPGGFGNQGGFGNSRGGGAGLG

SEQ ID NO: 44421 - protein, 1847 aa, Homo sapiens
MPRGRPPKPRESKARGDSDGVLTLNAENTNYAYQVPNFHKCEICLLSFPKESQFQRHMRDHERNDKPHRCDQCPQTFNVEFNLTLHKCTHSGEDPTCPVCNKKFSRVASLKAHIMLHEKEENLICSECGDEFTLQSQLAVHMEEHRQELAGTRQHACKACKKEFETSSELKEHMKTHYKIRVSSTRSYNRNIDRSGFTYSCPHCGKTFQKPSQLTRHIRIHTGERPFKCSECGKAFNQKGALQTHMIKHTGEKPHACAFCPAAFSQKGNLQSHVQRVHSEVKNGPTYNCTECSCVFKSLGSLNTHISKMHMGGPQNSTSSTETAHVLTATLFQTLPLQQTEAQATSASSQPSSQAVSDVIQQLLELSEPAPVESGQSPQPGQQLSITVGINQDILQQALENSGLSSIPAAAHPNDSCHAKTSAPHAQNPDVSSVSNEQTDPTDAEQEKEQESPEKLDKKEKKMIKKKSPFLPGSIREENGVRWHVCPYCAKEFRKPSDLVRHIRIHTHEKPFKCPQCFRAFAVKSTLTAHIKTHTGIKAFKCQYCMKSFSTSGSLKVHIRLHTGVRPFACPHCDKKFRTSGHRKTHIASHFKHTELRKMRHQRKPAKVRVGKTNIPVPDIPLQEPILITDLGLIQPIPKNQFFQSYFNNNFVNEADRPYKCFYCHRAYKKSCHLKQHIRSHTGEKPFKCSQCGRGFVSAGVLKAHIRTHTGLKSFKCLICNGAFTTGGSLRRHMGIHNDLRPYMCPYCQKTFKTSLNCKKHMKTHRYELAQQLQQHQQAASIDDSTVDQQSMQASTQMQVEIESDELPQTAEVVAANPEAMLDLEPQHVVGTEEAGLGQQLADQPLEADEDGFVAPQDPLRGHVDQFEEQSPAQQSFEPAGLPQGFTVTDTYHQQPQFPPVQQLQDSSTLESQALSTSFHQQSLLQAPSSDGMNVTTRLIQESSQEELDLQAQGSQFLEDNEDQSRRSYRCDYCNKGFKKSSHLKQHVRSHTGEKPYKCKLCGRGFVSSGVLKSHEKTHTGVKAFSCSVCNASFTTNGSLTRHMATHMSMKPYKCPFCEEGFRTTVHCKKHMKRHQTVPSAVSATGETEGGDICMEEEEEHSDRNASRKSRPEVITFTEEETAQLAKIRPQESATVSEKVLVQSAAEKDRISELRDKQAELQDEPKHANCCTYCPKSFKKPSDLVRHVRIHTGEKPYKCDECGKSFTVKSTLDCHVKTHTGQKLFSCHVCSNAFSTKGSLKVHMRLHTGAKPFKCPHCELRFRTSGRRKTHMQFHYKPDPKKARKPMTRSSSEGLQPVNLLNSSSTDPNVFIMNNSVLTGQFDQNLLQPGLVGQAILPASVSAGGDLTVSLTDGSLATLEGIQLQLAANLVGPNVQISGIDAASINNITLQIDPSILQQTLQQGNLLAQQLTGEPGLAPQNSSLQTSDSTVPASVVIQPISGLSLQPTVTSANLTIGPLSEQDSVLTTNSSGTQDLTQVMTSQGLVSPSGGPHEITLTINNSSLSQVLAQAAGPTATSSSGSPQEITLTISELNTTSGSLPSTTPMSPSAISTQNLVMSSSGVGGDASVTLTLADTQGMLSGGLDTVTLNITSQGQQFPALLTDPSLSGQGGAGSPQVILVSHTPQSASAACEEIAYQVAGVSGNLAPGNQPEKEGRAHQCLECDRAFSSAAVLMHHSKEVHGRERIHGCPVCRKAFKRATHLKEHMQTHQAGPSLSSQKPRVFKCDTCEKAFAKPSQLERHSRIHTGERPFHCTLCEKAFNQKSALQVHMKKHTGERPYKCAYCVMGFTQKSNMKLHMKRAHSYAGALQESAGHPEQDGEELSRTLHLEEVVQEAAGEWQALTHVF

SEQ ID NO: 44422 - protein, 115 aa, Homo sapiens
MEARDKQVLRSLRLELGAEVLVEGLVLQYLYQEGILTENHIQEINAQTTGLRKTMLLLDILPSRGPKAFDTFLDSLQEFPWVREKLKKAREEAMTDLPAVAIIRLPRELSLPTLL

SEQ ID NO: 44423 - protein, 489 aa, Homo sapiens
IADSQKSSEDSGSRKDSSSEVFSDAAKEGWLHFRPLVTDKGKRVGGSIRPWKQMYVVLRGHSLYLYKDKREQTTPSEEEQPISVNACLIDISYSETKRKNVFRLTTSDCECLFQAEDRDDMLAWIKTIQESSNLNEEDTGVTNRDLISRRIKEYNNLMSKAEQLPKTPRQSLSIRQTLLGAKSEPKTQSPHSPKEESERKLLSKDDTSPPKDKGTWRKGIPSIMRKTFEKKPTATGTFGVRLDDCPPAHTNRYIPLIVDICCKLVEERGLEYTGIYRVPGNNAAISSMQEELNKGMADIDIQDDKWRDLNVISSLLKSFFRKLPEPLFTNDKYADFIEANRKEDPLDRLKTLKRLIHDLPEHHYETLKFLSAHLKTVAENSEKNKMEPRNLAIVFGPTLVRTSEDNMTHMVTHMPDQYKIVETLIQHHDWFFTEEGAEEPLTTVQEESTVDSQPVPNIDHLLTNIGRTGVSPGDVSVLVLVLKGFFSSY

SEQ ID NO: 44424 - protein, 95 aa, Homo sapiens
MMMKPSCSWCKDYEQFEENKQLSILVNCYKKLCEYITQTTLARDIIEAVDCSSDILALLNDGSLFCEETEKPSDSSFTLCLTHSPLPSTSEPTTD

SEQ ID NO: 44425 - protein, 182 aa, Homo sapiens
MAAISTSIPVISQPQFTAMNEPQCFYNESIAFFYNRSGKHLATEWNTVSKLVMGLGITVCIFIMLANLLVMVAIYVNRRFHFPIYYLMANLAAADFFAGLAYFYLMFNTGPNTRRLTVSTWLLRQGLIDTSLTASVANLLAIAIERHITVFRMQLHTRMSNRRVVVVIVVIWTMAIVMGAIP

SEQ ID NO: 44426 - protein, 206 aa, Homo sapiens
MILFLGPLMQLSMDCPCDLADGLKVVLAPRSWARCLTDMRWLRNQVIAPLTEELVFRACMLPMLAPCMGLGPAVFTCPLFFGVAHFHHIIEQLRFRQSSVGNIFLSAAFQFSYTAVFGAYTAFLFIRTGHLIGPVLCHSFCNYMGFPAVCAALEHPQRRPLLAGYALGVGLFLLLLQPLTDPKLYGSLPLCVLLERAGDSEAPLCS

SEQ ID NO: 44427 - protein, 180 aa, Homo sapiens
MGLADASGPRDTQALLSATQAMDLRRRDYHMERPLLNQEHLEELGRWGSAPRTHQWRTWLQCSRARAYALLLQHLPVLVWLPRYPVRDWLLGDLLSGLSVAIMQLPQGLAYALLAGLPPVFGLYSSFYPVFIYFLFGTSRHISVGGAGPDPLRLRGHLPVRTSCPRLYHSCSCAGLRLTA

SEQ ID NO: 44428 - protein, 368 aa, Homo sapiens
MFGQNLEVQLSSARTENTTVVWKSFHDSITLIVLSSEVGISELRLERLLQMVFGAMVLLVGLEELTNIRNVERLKKDLRASYCLIDSFLGDSELIGDLTQCVDCVIPPEGSLLQEALSGFAEAAGTTFVSLVVSGRVVAATEGWWRLGTPEAVLLPWLVGSLPPQTARDYPVYLPHGSPTVPHRLLTLTLLPSLELCLLCGPSPPLSQLYPQLLERWWQPLLDPLRACLPLGPRALPSGFPLHTDILGLLLLHLELKRCLFTVEPLGDKEPSPEQRRRLLRNFYTLVTSTHFPPEPGPPEKTEDEVYQAQLPRACYLVLGTEEPGTGVRLVALQLGLRRLLLLLSPQSPTHGLRSLATHTLHALTPLL

SEQ ID NO: 44429 - protein, 138 aa, Homo sapiens
MKEDQVVAEEPGFQDEEESLFQDIDLLQKHGINVADIKKLKSVGICTIKGIQMTTRRALCNVKGLSEAKVDKIKEAANKLIEPGFLTAFEYSEKRKMVFHITTGSQEFDKLLGGGIESMAITEAFGEFRTGKTQLSHT

SEQ ID NO: 44430 - protein, 180 aa, Homo sapiens
  MOD_RES (1)..(1): Any amino acid
XMVCEQPEVFASACALARAFPLFTHRSGASRRLEKKTVTVEFFLVGQDNGPVEVSTLQCLANATDGVRLAARIVDTPCNEMNTDTFLEEINKVGKELGIIPTIIRDEELKTRGFGGIYGVGKAALHPPALAVLSHTPDGATQTIAWVGKGIVYDTGGLSIKGKRARKRIQWLPDLFGTVA

SEQ ID NO: 44431 - protein, 46 aa, Homo sapiens
MTMETVESQHDGSITASLTESKSAHVQTQTGQNSIPALAQKILYYR

SEQ ID NO: 44432 - protein, 171 aa, Homo sapiens
MGEPRREGRKWDHEARGASNSSGQGDLNWGEEQNLQNKEEVVIMETDLAEMPEKGALSSQDSPHFQEKSTEEGEVAALRLTARSQETVTFKDVAMDFTPEEWGKLDPAQRDVMLENYRNLVSLWLPVSKPESYNLENGKEPLKLERKAPKSSYSDMETRPQSKDSTSVQDF

SEQ ID NO: 44433 - protein, 70 aa, Homo sapiens
MNGEAICSALPTIPYHKLADLRYLSRGASGTVSSARHADWRVQVAVKHLHIHTPLLDRDLTRPSIQFLVS

SEQ ID NO: 44434 - protein, 154 aa, Homo sapiens
MMGQLMKNDQDWNAKLVGLMCCMDERDKVQKKTFTKWINQHLMKVRKHVNDLYEDLRDGHNLISLLEVLSGDTLPREKGRMRFHRLQNVQIALDYLKRRQVKLVNIRNDDITDGNPKLTLGLIWTIILHFQISDIHVTGESEDMSAKERLLLWT

SEQ ID NO: 44435 - protein, 232 aa, Homo sapiens
MDPLFQQTHKQVHEIQSCMGRLETADKQSVHIVENEIQASIDQIFSRLERLEILSSKEPPNKRQNARLRVDQLKYDVQHLQTALRNFQHRRHAREQQERQREELLSRTFTTNDSDTTIPMDESLQFNSSLQKVHNGMDDLILDGHNILDGLRTQRLTLKGTQKKILDIANMLGLSNTVMRLIEKRAFQDKYFMIETRSHHVAQNGPELLSSRDPPASASRSAGIIEFSEKIT

SEQ ID NO: 44436 - protein, 190 aa, Homo sapiens
MKSLESQLEKQQKDLSEDHSSLLLHVKQFVSDLRSLSCQMAALQGNGSERTCCPVNWVEHERSCYWFSRSGKAWADADNYCRLEDAHLVVVTSWEEQKFVQHHIGPVNTWMGLHDQNGPWKWVDGTDYETGFKNWRPEQPDDWYGHGLGGGEDCAHFTDDGRWNDDVCQRPYRWVCETELDKASQEPPLL

SEQ ID NO: 44437 - protein, 66 aa, Homo sapiens
MSKRWWSGSGTATSASCMETWPTPTATSSAASRSSLLSPGPRCLGGEVTRPLEVSRDLHILPPPLI

SEQ ID NO: 44438 - protein, 295 aa, Homo sapiens
MNPSLAWGREAAASAGGRGWEAAGVCVPSAEPLAWEAGSRRPSRLRVCCPSRPHAPTSQSCLLLAVKYWVHFPGTLPFPRRRRGKMTKFQEAVTFKDVAVAFTEEELGLLDSAQRKLYRDVMLENFRNLVSVGHQSFKPDMISQLEREEKLWMKELQTQRGKHSGDRNQNEMATLHKAGLRCFSLGELSCWQIKRHIASKLARSQDSMINIEGKSSQFPKHHDSPCQVGAGESIQASVDDNCLVNHIGDHSSIIENQEFPTGKVPNSWSKIYLNETQNYQRSCKQTQMKNKLCIF

SEQ ID NO: 44439 - protein, 556 aa, Homo sapiens
MRVLGGRCGALLACLLLVLPVSEANFLSKQQASQVLVRKRRANSLLEETKQGNLERECIEELCNKEEAREVFENDPETDYFYPKYLVCLRSFQTGLFTAARQSTNAYPDLRSCVNAIPDQCSPLPCNEDGYMSCKDGKASFTCTCKPGWQGEKCEFDINECKDPSNINGGCSQICDNTPGSYHCSCKNGFVMLSNKKDCKDVDECSLKPSICGTAVCKNIPGDFECECPEGYRYNLKSKSCEDIDECSENMCAQLCVNYPGGYTCYCDGKKGFKLAQDQKSCEVVSVCLPLNLDTKYELLYLAEQFAGVVLYLKFRLPEISRFSAEFDFRTYDSEGVILYAESIDHSAWLLIALRGGKIEVQLKNEHTSKITTGGDVINNGLWNMVSVEELEHSISIKIAKEAVMDINKPGPLFKPENGLLETKVYFAGFPRKVESELIKPINPRLDGCIRSWNLMKQGASGIKEIIQEKQNKHCLVTVEKGSYYPGSGIAQFHIDYNNVSSAEGWHVNVTLNIRPSTGTGVMLALVSGNNTVPFAVSLVDSTSEKSQMFHSVPHQ

SEQ ID NO: 44440 - protein, 49 aa, Homo sapiens
MQRNGSASRGLEKTRLRLCREARIPESAFLTGLTRESWEARCWCAVGHS

SEQ ID NO: 44441 - protein, 63 aa, Homo sapiens
  MOD_RES (1)..(1): Any amino acid
XQQGSFSSFQNSSSDEDLMDIPATAMDFSMRDDVPPLDREVGVPPNCLPKCQSGYTILHSYQL

SEQ ID NO: 44442 - protein, 71 aa, Homo sapiens
MVVSAGPWSSEKAETNILEINEKLRPQLAENKQQFRNLKEKCFVTQLAGFLANRQKKYSNIKSWFTLRNES

SEQ ID NO: 44443 - protein, 72 aa, Homo sapiens
MGNVLQSSSDAIYLARHVGLRVGIPKETPALTINRLCGSGFQSIVNGCQEICVKEAEVVLCGGTESMSQAPY

SEQ ID NO: 44444 - protein, 67 aa, Homo sapiens
MEGVTDTKPERPAGWAESVLEEDASELEPAFSRTVGTIQHCLHLTSVYTHFLPQRGRPEVTTMPLGL

SEQ ID NO: 44445 - protein, 195 aa, Homo sapiens
MLLLINVILTLWVSCANGQVKPCDFPDIKHGGLFHENMRRPYFPVAVGKYYSYYCDEHFETPSGSYWDYIHCTQNGWSPAVPCLRKCYFPYLENGYNQNYGRKFVQGNSTEVACHPGYGLPKAQTTVTCTEKGWSPTPRCIRVRTCSKSDIEIENGFISESSSIYILNKEIQYKCKPGYATADGNSSDMVFCISY

SEQ ID NO: 44446 - protein, 362 aa, Homo sapiens
  MOD_RES (1)..(1): Any amino acid
XAICLDYFTDPVSIGCGHNFCRVCVTQLWGGEDEEDRDELDREEEEEDGEEEEVEAVGAGAGWDTPMRDEDYEGDMEEEVEEEEEGVFWTSGMSRSSWDNMDYVWEEEDEEEDLDYYLGDMEEEDLRGEDEEDEEEVLEEVEEEDLDPVTPLPPPPAPRRCFTCPQCRKSFPRRSFRPNLQLANMVQVIRQMHPTPGRGSRVTDQGICPKHQEALKLFCEVDEEAICVVCRESRSHKQHSVVPLEEVVQEYKAKLQGHVEPLRKHLEAVQKMKAKEERRVTELKSQMKSELAAVASEFGRLTRFLAEEQAGLERRLREMHEAQLGRAGAAASRLAEQAAQLSRLLAEAQERSQQGGLRLLQV

SEQ ID NO: 44447 - protein, 215 aa, Homo sapiens
MPSQNYDLPQKKQEKMTKFQEAVTFKDVAVVFSREELRLLDLTQRKLYRDVMVENFKNLVAVGSKHQNKMETLQKFALKYLSNQELSCWQIWKQVASELTRCLQGKSSQLLQGDSIQVSENENNIMNPKGDSSIYIENQEFPFWRTQHSCGNTYLSESQIQSRGKQIDVKNNLQIHEDFMKKSPFHEHIKTDTEPKPCKGNEYGKIISDGSNQKL

SEQ ID NO: 44448 - protein, 636 aa, Homo sapiens
MQQRAGSKTAGPPCQWSRMASEGTNIPSPVVRQIDKQFLICSICLERYKNPKVLPCLHTFCERCLQNYIPAHSLTLSCPVCRQTSILPEKGVAALQNNFFITNLMDVLQRTPGSNAEESSILETVTAVAAGKPLSCPNHDGNVMEFYCQSCETAMCRECTEGEHAEHPTVPLKDVVEQHKASLQVQLDAVNKRLPEIDSALQFISEIIHQLTNQKASIVDDIHSTFDELQKTLNVRKSVLLMELEVNYGLKHKVLQSQLDTLLQGQESIKSCSNFTAQALNHGTETEVLLVKKQMSEKLNELADQDFPLHPRENDQLDFIVETEGLKKSIHNLGTILTTNAVASETVATGEGLRQTIIGQPMSVTITTKDKDGELCKTGNAYLTAELSTPDGSVADGEILDNKNGTYEFLYTVQKEGDFTLSLRLYDQHIRGSPFKLKVIRSADVSPTTEGVKRRVKSPGSGHVKQKAVKRPASMYSTGKRKENPIEDDLIFRVGTKGRNKGEFTNLQGVAASTNGKILIADSNNQCVQIFSNDGQFKSRFGIRGRSPGQLQRPTGVAVHPSGDIIIADYDNKWVSIFSSDGKFKTKIGSGKLMGPKGVSVDRNGHIIVVDNKACCVFIFQPNGKIVTRSPFCSCK

SEQ ID NO: 44449 - protein, 498 aa, Homo sapiens
  MOD_RES (1)..(1): Any amino acid
XDEVVPYSDDETEDELDDQGSAVEPEQNRVNREAEENREPFRKECTWQVKANDRKYHEQPHFMNTKFLCIKESKYAAVPQISTLAWYTTLVPLLVVLGVTAIKDLVDDVARHKMDKEINNRTCEVIKDGRFKVAKWKEIQVGDVIRLKKNDFVPADILLLSSSEPNSLCYVETAELDGETNLKFKMSLEITDQYLQREDTLATFDGFIECEEPNNRLDKFTGTLFWRNTSFPLDADKILLRGCVIRNTDFCHGLVIFAGADTKIMKNSGKTRFKRTKIDYLMNYMVYTIFVVLILLSAGLAIGHAYWEAQVGNSSWYLYDGEDDTPSYRGFLIFWGYIIVLNTMVPISLYVSVEVIRLGQSHFINWDLQMYYAEKDTPAKARTTTLNEQLGQIHYIFSDKTGTLTQNIMTFKKCCINGQIYGDHRDASQHNHNKIEQVDFSWNTYADGKLAFYDHYLIEQIQSGKEPEVRQFFFLLAVCHTVMVDRTDAFLGFLSLPC

SEQ ID NO: 44450 - protein, 120 aa, Homo sapiens
MAAAYLDPNLNHTPNSSTKTHLGTGMERSPGAMERVLKVFHYFESNSEPTTWASIIRHGDATDVRGIIQKIVDSHKVKHVACYGFRLSHLRSEEVHWLHVDMGVSSVREKYELAHPPEEW

SEQ ID NO: 44451 - protein, 370 aa, Homo sapiens
GLGRPTPGLSQGPGKETLESALIALDSEKPKKLRFHPKQLYFSARQGELQKVLLMLVDGIDPNFKMEHQNKRSPLHAAAEAGHVDICHMLVQAGANIDTCSEDQRTPLMEAAENNHLEAVKYLIKAGALVDPKDAEGSTCLHLAAKKGHYEVVQYLLSNGQMDVNCQDDGGWTPMIWATEYKHVDLVKLLLSKGSDINIRDNEENICLHWAAFSGCVDIAEILLAAKCDLHAVNIHGDSPLHIAARENRYDCVVLFLSRDSDVTLKNKEGETPLQCASLNSQVWSALQMSKALQDSAPDRPSPVERIVSRDIARGYERIPIPCVNAVDSEPCPSNYKYVSQNCVTSPMNIDRNITHLQALDMFLPAQPSP

SEQ ID NO: 44452 - protein, 77 aa, Homo sapiens
  MOD_RES (1)..(1): Any amino acid
XVYGVKQKDGQELSNDLDAQTKKLRPKSLASKQGQLRFEPWPPGVRAWALTCLRAQRGLKGAICHNINKHVAFAGRK

SEQ ID NO: 44453 - protein, 120 aa, Homo sapiens
MGSDKRVSRTERSGRYGSIIDRDDRDERESRSRRRDSDYKRSSDDRRGDRYDDYRDYDSPERERERRNSDRSEDGYHSDGDYGEHDYRHDISDERESKTIMLRGLPITITESDIREMMES

SEQ ID NO: 44454 - protein, 106 aa, Homo sapiens
MNPYKQLPIYGDAIIHAYSGQNMGDMDPHIFAVAEEAYKQMARNNRNQSIIVSGESGAGKTVSARYAMRYFATVSKSGSNAHVEDKVLASNPITEAVGNAKTTRND

SEQ ID NO: 44455 - protein, 554 aa, Homo sapiens
AFSRAHRIGQNKKVMIYRFVTRASVEERITQVAKKKMMLTHLVVRPGLGSKTGSMSKQELDDILKFGTEELFKDEATDGGGDNKEGEDSSVIHYDDKAIERLLDRNQDETEDTELQGMNEYLSSFKVAQYVVREEEMGEEEEVEREIIKQEESVDPDYWEKLLRHHYEQQQEDLARNLGKGKRIRKQVNYNDGSQEDRDWQDDQSDNQSDYSVASEEGDEDFDERSEAPRRPSRKGLRNDKDKPLPPLLARVGGNIEVLGFNARQRKAFLNAIMRYGMPPQDAFTTQWLVRDLRGKSEKEFKAYVSLFMRHLCEPGADGAETFADGVPREGLSRQHVLTRIGVMSLIRKKVQEFEHVNGRWSMPELAEVEENKKMSQPGSPSPKTPTPSTPGDTQPNTPAPVPPAEDGIKIEENSLKEEESIEGEKEVKSTAPETAIECTQAPAPASEDEKVVVEPPEGEEKVEKAEVKERTEEPMETEPKGKGAADVEKVEEKSAIDLTPIVVEDKEEKKEEEEKKEVMLQNGETPKDLNDEKQKKNIKQRFMFNIADGGFTE

SEQ ID NO: 44456 - protein, 308 aa, Homo sapiens
MKSCGSMLGLWGQRLPAAWVLLLLPFLPLLLLAAPAPHRESYKPVIVVHGLFDSSYSFRHLLEYINETHPGTVVTVLDLFDGRESLRPLWEQVQGFREAVVPIMAKAPQGVHLICYSQGGLVCRALLSVMDDHNVDSFISLSSPQMGQYGDTDYLKWLFPTSMRSNLYRICYSPWGQEFSICNYWHDPHHDDLYLNASSFLALINGERDHPNATVWRKNFLRVGHLVLIGGPDDGVITPWQSSFFGFYDANETVLEMEEQLVYLRDSFGLKTLLARGAIVRCPMAGISHTAWHSNRTLYETCIEPWLS

SEQ ID NO: 44457 - protein, 570 aa, Homo sapiens
MGANNMPKQVEVRMHDSHLGSEEPKHRHLGLRLCDKLGKNLLLTLTVFGVILGAVCGGLLRLASPIHPDVVMLIAFPGDILMRMLKMLILPLIISSLITGLSGLDAKASGRLGTRAMVYYMSTTIIAAVLGVILVLAIHPGNPKLKKQLGPGKKNDEVSSLDAFLDLIRNLFPENLVQACFQQIQTVTKKVLVAPPPDEEANATSAVVSLLNETVTEVPEETKMVIKKGLEFKDGMNVLGLIGFFIAFGIAMGKMGDQAKLMVDFFNILNEIVMKLVIMIMWYSPLGIACLICGKIIAIKDLEVVARQLGMYMVTVIIGLIIHGGIFLPLIYFVVTRKNPFSFFAGIFQAWITALGTASSAGTLPVTFRCLEENLGIDKRVTRFVLPVGATINMDGTALYEAVAAIFIAQMNGVVLDGGQIVTVSLTATLASVGAASIPSAGLVTMLLILTAVGLPTEDISLLVAVDWLLDRMRTSVNVVGDSFGAGIVYHLSKSELDTIDSQHRVHEDIEMTKTQSIYDDMKNHRESNSNQCVYAAHNSVIVDECKVTLAANGKSADCSVEEEPWKREK

SEQ ID NO: 44458 - protein, 94 aa, Homo sapiens
MEAYEQVQKGPLKLKGVAELGVTKRKKKKKDKDKAKLLEAMGTSKKNEEEKRRGLDKRTPAQAAFEKMQEKRDFNRHLDTLTEHYDIPKVSWTK

SEQ ID NO: 44459 - protein, 158 aa, Homo sapiens
MSGGLGLRRSPEMSGKIEKADSQRSHLSSFTMKLMDKFHSPKIKRTPSKKGKPAEVSVKIPEKPVNKNLSWLEEKEKEVVSALRYFKTIVDKMAIDKKVLEMLPGSASKVLEAILPLVQNDPRIQHSSALSSCYSRVYQSLANLIRWSDQVMLEGVNS

SEQ ID NO: 44460 - protein, 1069 aa, Homo sapiens
MAAVQVVGSWPSVQPREAPREAIPERGNGFRLLSARLCALRPDDSSSARTEIHLLFDQLISENYSEGSGVAPEDVSALLVQACRLVPLNQNHLVSKVSQLIHHLLNRLQVIVDEQHLDFLLAYTISAIHQCSSWTHREILQALAALVYCNGSKCQKYLPELLGNTGLLMKLSDLAQSDPEVRRAAVHCMANLCLSVPGQPYLEEPYQNVCFQAFLTILQSPKSSDMDDITFCMLLQNALKGIQSLLNGGRMKLTQTDELGALLAVLKKFMFHGLPGLNIEMPTVLYPTPLPQYDGRTPIKPQQSESSASRPTLNKKKKSKVKPKKIQQGEEEEKESSGEIEAAPVTGTGRVNLHEGNTWCPSSLGVQSLPLDGSGAAEKDGVSSSFSSSSWKRVSSSESDFSDAEGGMQSKMRSYQAKVRQGALVCFLSTIKSIEKKVLYGYWSAFIPDTPELGSPQSVSLMTLTLKDPSPKTRACALQVLSAILEGSKQFLSVAEDTSDHRRAFTPFSVMIACSIRELHRCLLLALVAESSSQTVTQIIKCLANLVSNAPYDRLKLSLLTKVWNQIKPYIRHKDVNVRVSSLTLLGAIVSTHAPLPEVQLLLQQPCSSGLGNSNSATPHLSPPDWWKKAPAGPSLEETSVSSPKGSSEPCWLIRLCISIVVLPKEDSCSGSDAGSAAGSTYEPSPMRLEAFSNLPNDRQMLCITVLLGLNDSKNRLVKAATSRALGVYVLFPCLRQDVIFVADAANAILMSLEDKSLNVRAKAAWSLGNLTDTLIVNMETPDPSFQEEFSGLLLLKMLRSAIEASKDKDKVKSNAVRALGNLLHFLQPSHIEKPTFAEIIEESIQALISTVLTEAAMKVRWNACYAMGNVFKNPALPLGTAPWTSQAYNALTSVVTSCKNFKVRIRSAAALSVPGKREQYGSVDQYARIWNALVTALQKSEDTIDFLEFKYCVSLRTQICQALIHLLSLASASDLPCMKETLELSGNMVQSYILQFLKSGAEGDDTGAPHSPQERDQMVRMALKHMGSIQAPTGDTARRAIMGFLEEILAVCFDSSGSQGALPGLTNQ

SEQ ID NO: 44461 - protein, 652 aa, Homo sapiens
MGLKAAQKTLFPLRSIDDVVRLFAAELGREEPDLVLLSLVLGFVEHFLAVNRVIPTNVPELTFQPSPAPDPPGGLTYFPVADLSIIAALYARFTAQIRGAVDLSLYPREGGVSSRELVKKVSDVIWNSLSRSYFKDRAHIQSLFSFITGTKLDSSGVAFAVVGACQALGLRDVHLALSEDHAWVVFGPNGEQTAEVTWHGKGNEDRRGQTVNAGVAERSWLYLKGSYMRCDRKMEVAFMVCAINPSIDLHTDSLELLQLQQKLLWLLYDLGHLERYPMALGNLADLEELEPTPGRPDPLTLYHKGIASAKTYYRDEHIYPYMYLAGYHCRNRNVREALQAWADTATVIQETVSNLQCLTTIIQQWDFHPRPHAPLLILAFFLWADPDSIILHYNYCREDEEIYKEFFEVANDVIPNLLKEAASLLEAGEERPGEQSQGTQSQGSALQDPECFAHLLRFYDGICKWEEGSPTPVLHVGWATFLVQSLGRFEGQVRQKVRIVSREAEAAEAEEPWGEEAREGRRRGPRRESKPEEPPPPKKPALDKGLGTGQGAVSGPPRKPPGTVAGTARGPEGGSTAQVPAPTASPPPEGPVLTFQSEKMKGMKELLVATKINSSAIKLQLTAQSQVQMKKQKVSTPSDYTLSFLKRQRKGL

SEQ ID NO: 44462 - protein, 738 aa, Homo sapiens
MRKIRDQNSFEKLKRHHSYPLGRMAADESSQNTLRLQFKAMQEMQHKRLQKQMEKKREKELSLKSRADDQEEPLEVSDGLSLLHAGEPNSKNSFEKRVLEDEIEHLRNELRETVDENGRLYKLLKERDFEIKHLKKKIEEDRFAFTGTAGVAGDVVATKIVELSKKNRLLMAESEGAKTRVKQLTNRIQELERELQTALTRLSAKGATDAGAKPPRAQMGDRALLETPEVKALQDRLVATNLKMSDLRNQIQSVKQELRMAQKVLAREVGEDINVQQLLSSPGTWRGRAQQILVLQSKVQELEKQLGQARSQSAGTASDELSVYPDPRKLSAQEKNLLRIRSLEREKQEGLEKLASERDVLQRELEELKKKFEGMRSRNKLLSSEMKTLKSQMGTLVEKGRHDDELIDALMDQLKQLQEILGSLSLQEEKTRVSQHHLDQQLNSEAQRSNSLVAQLQAMVAEREAKVRQLEMEIGQLNVHYLRNKGVGEGSSGREVSPAYTQFLEDPGLTKSPASAGDHVGRLGSSRSVTSLGHTLVESALTRPSLPSPHRTSPRFSDSPEQKGWQAQVSEIKALWQAAEVERDRLTEFVTVLQKRVEESNSKLLESERKLQEERHRTVVLEQHLEKIRLEPGKASASQRAAPRTKTGLPTSNNRHNPTGSEKKDPSFAQLSDVPVESQMEELTTRLAIQVEENEMLKAALGSALRGKEEDFRMYHEILGQVKSVFLQALRQQKTGKQ

SEQ ID NO: 44463 - protein, 1196 aa, Homo sapiens
MLESYVTPILMSYVNRYIKNLKPSDLQLSLWGGDVVLSKLELKLDVLEQELKLPFTFLSGHIHELRIHVPWTKLGSEPVVITINTMECILKLKDGIQDDHESCGSNSTNRSTAESTKSSIKPRRMQQAAPTDPDLPPGYVQSLIRRVVNNVNIVINNLILKYVEDDIVLSVNITSAECYTVGELWDRAFMDISATDLVLRKVINFSDCTVCLDKRNASGKIEFYQDPLLYKCSFRTRLHFTYENLNSKMPSVIKIHTLVESLKLSITDQQLPMFIRIMQLGIALYYGEIGNFKEGEIEDLTCHNKDMLGNITGSEDETRIDMQYPAQHKGQELYSQQDEEQPQGWVSWAWSFVPAIVSYDDGEEDFVGNDPASTMHQQKAQTLKDPIVSIGFYCTKATVTFKLTEMQVESSYYSPQKVKSKEVLCWEQEGTTVEALMMGEPFFDCQIGFVGCRAMCLKGIMGVKDFEENMNRSETEACFFICGDNLSTKGFTYLTNSLFDYRSPENNGTRAEFILDSTHHKETYTEIAGMQRFGAFYMDYLYTMENTSGKGSTNQQDFSSGKSEDLGTVQEKSTKSLVIGPLDFRLDSSAVHRILKMIVCALEHEYEPYSRLKSDIKDENETILNPEEVALLEEYIPTRHTSVTLLKCTCTISMAEFNLLDHLLPVIMGEKNSSNFMNTTNFQSLRPLPSIRILVDKINLEHSVPMYAEQLVHVVSSLTQPSDNLLHYCYVHCYLKIFGFQAGLTSLDCSGSYCLPVPVIPSFSTALYGKLLKLPTCWTKRSQIAITEGIFELPNLTIQATRAQTLLLQAIYQSWSHLGNVSSSAVIEALINEIFLSIGVKSKNPLPTLEGSIQNVELKYCSTSLVKCASGTMGSIKICAKAPVDSGKEKLIPLLQGPSDTKDLHSTKWLNESRKPESLLAPDLMAFTIQVPQYIDYCHNSGAVLLCSIQGLAVNIDPILYTWLIYQPQKRTSRHMQQQPVVAVPLVMPVCRRKEDEVSIGSAPLAKQQSYQASEYASSPVKTKTVTESRPLSVPVKAMLNISESCRSPEERMKEFIGIVWNAVKHLTLQLEVQSCCVFIPNDSLPSPSTIVSGDIPGTVRSWYHGQTSMPGTLVLCLPQIKIISAGHKYMEPLQEIPFVIPRPILEEDGVLLCRLGWSTVAQSRLTAASASQVQTILLPQPPEQLGLQALATTPR

SEQ ID NO: 44464 - protein, 190 aa, Homo sapiens
MASLTVKAYLLGKEDAAREIRRFSFCCSPEPEAEAEAAAGPGPCERLLSRVAALFPALRPGGFQAHYRAHSSSLCPAENPWVLTCCLLNNLDEDGDLVAFSSDEELTMAMSYVKDDIFRIYIKEKKECRRDHRPPCAQEAPRNMVHPNVICDGCNGPVVGTRYKCSVCPDYDLCSVCEGKGLHRGHTKLA

SEQ ID NO: 44465 - protein, 43 aa, Homo sapiens
MLATRRLLGWSLPARVSVRFSGDTSSAWRKFCRQHPRKPHLAR

SEQ ID NO: 44466 - protein, 237 aa, Homo sapiens
  MOD_RES (1)..(1): Any amino acid
XENFSPNQTKFTVQRTDPVSRYRFTLSARTQVGSGEAVTEESPAPPNEATPTAAPDEQSIWNVTVLPNSKWANITWKHNFGPGTDFVVEYIDSNHTKKTVPVKAQAQPIQLTDLYPGMTYTLRVYSRDNEGISSTVITFMTSTAYTNNQADIATQGWFIGLMCAIALLVLILLIVCFIKRSRGGKYPVREKKDVPLGPEDPKEEDGSFDYSDEDNKPLQGSQTSLDGTIKQQESDDS

SEQ ID NO: 44467 - protein, 114 aa, Homo sapiens
MRTKAAGCAERRPLQPRTEAAAAPAGRAMPSEYTYVKLRSDCSRPSLQWYTRAQSKMRRPSLLLKDILKCTLLVFGVWILYILKLNYTTEECDMKKMHYVDPDHVKLLKVRHSP

SEQ ID NO: 44468 - protein, 105 aa, Homo sapiens
LQPRSCLQCSESLVGLQEGKSTEQGNHDQLKELYSAGNLTVLATDPLLHQDPVQLDFHFRLTSQTSAHWHGLLCDRRLFLDIPYQALDQGNRERCPAAGLQLHGL

SEQ ID NO: 44469 - protein, 122 aa, Homo sapiens
MHPAAFPLPVVVAAVLWGAAPTRGLIRATSDHNASMDFADLPALFGATLSQEGLQGFLVEAHPDNACSPIAPPPPAPVNGSVFIALLRRFDCNFDLKVLNAQKAGYGAAVVHNVNSNELLNM

SEQ ID NO: 44470 - protein, 345 aa, Homo sapiens
MQYLNIKEDCNAMAFCAKMRSSKKTEVNLEAPEPGVEVIFYLSDREPLRLGSGEYTAEELCIRAAQACRISPLCHNLFALYDENTKLWYAPNRTITVDDKMSLRLHYRMRFYFTNWHGTNDNEQSVWRHSPKKQKNGYEKKKIPDATPLLDASSLEYLFAQGQYDLVKCLAPIRDPKTEQDGHDIENECLGMAVLAISHYAMMKKMQLPELPKDISYKRYIPETLNKSIRQRNLLTRMRINNVFKDFLKEFNNKTICDSSVSTHDLKVKYLATLETLTKHYGAEIFETSMLLISSENEMNWFHSNDGGNVLYYEVMVTGNLGIQWRHKPNVVSVEKEKNKLKRKK

SEQ ID NO: 44471 - protein, 106 aa, Homo sapiens
GYMMENRISGLKCDTDVFATFEGDDVVMLQVVGRELLAQYTKQYEEKPLFGLLQNWAESVGDKLRTSFLAFNMDTVDDLAFLLKAVKFRERVLQRGLVARIYYKLP

SEQ ID NO: 44472 - protein, 158 aa, Homo sapiens
  MOD_RES (1)..(1): Any amino acid
XGSADDERILRFLELAGLSNLVARTEGLDQQVDWNWYDVLSPGEMQRLSFARLFYLQPKYAVLDEATSALTEEVESELYRIGQQLGMTFISVGHRQSLEKGSLISMWWWSLVVSFLGSETLWRRKMGADENQSGMKLWLLEGEPHCGGSAALRRDQED

SEQ ID NO: 44473 - protein, 123 aa, Homo sapiens
MTGQGQSASGSSAWSTVFRHVRYENLIAGVSGGVLSNLALHPLDLVKIRFAVSDGLELRPKYNGILHCLTTIWKLDGLRGLYQGVTPNIWGAGLSWGLYFFLSHDPLHYKPIMGNKNSPYVTV

SEQ ID NO: 44474 - protein, 114 aa, Homo sapiens
  MOD_RES (1)..(1): Any amino acid
XPQDFFLASQVKFEDLIKDLRKLKRQLEASEKQMVVVCKESPKEYLQPFKDKLEEFFQKGHPFPMSACCASVGVKHLFLLESAQRGFSKKWKTIATLTSDGSHVKQSAVPLFPR

SEQ ID NO: 44475 - protein, 144 aa, Homo sapiens
MSENLDKSNVNEAGKSKSNDSEEGLEDAVEGADEALQKAIKSDSSSPQRVQRPHSSPPRFVTVEELLETARGVTNMALAHEIVVNGDFQIKPVELPENSLKKRVKEIVHKAFWDCLSVQLSEDPPAYDHAIKLVGEIKETLLSF

SEQ ID NO: 44476 - protein, 42 aa, Homo sapiens
IIMLVLAWKLEAESMGFFTKEEWLKGMTSLQLSITELAFLFV

SEQ ID NO: 44477 - protein, 104 aa, Homo sapiens
  MOD_RES (1)..(1): Any amino acid
XKAYSPEFYFDTPNPTRSHKLSKNYSYVLQWTQREPDAVDPVLNYRLSIRQLNQHNAVVKAIPVRRVEKGQLLEYILTDLRVPHSYETTPATLRMRRSVAIPRT

SEQ ID NO: 44478 - protein, 260 aa, Homo sapiens
  MOD_RES (1)..(1): Any amino acid
XEKQSRVGVFGRSEEPICWIGNLEDYYHFYHSKTFKRSTLSSRGPHTFLRMDPQVKWLQQQEVKRRVKRQVRSDPQALYFNDPIWSNMWYLHCGDKNSRCRSEMNVQAAWKRGYTGKNVVVTILDDGIERNHPDLAPNYDSYASYDVNGNDYDPSPRYDASNENKYVTSPHLPGFSSPPCSVTIECVCEGAGEAVAAGVSSLPGREAGFSRSHRPCQAQPFRHGQLLWSQPVPLGCHRCRAARNGCLTDIVPVSNFLEIF

SEQ ID NO: 44479 - protein, 320 aa, Homo sapiens
MGNRGMEDLIPLVNRLQDAFSAIGQNADLDLPQIAVVGGQSAGKSSVLENFVGRDFLPRGSGIVTRRPLVLQLVNATTEYAEFLHCKGKKFTDFEEVRLEIEAETDRVTGTNKGISPVPINLRVYSPHVLNLTLVDLPGMTKVPVGDQPPDIEFQIRDMLMQFVTKENCLILAVSPANSDLANSDALKVAKEVDPQGQRTIGVITKLDLMDEGTDARDVLENKLLPLRRGYIGVVNRSQKDIDGKKDITAALAAERKFFLSHPSYRHLADRMGTPYLQKVLNQMEFCSCHPGWSAMVRSQLTATSASWIQGILLPQPPSN

SEQ ID NO: 44480 - protein, 116 aa, Homo sapiens
  MOD_RES (1)..(1): Any amino acid
XEEENVEWETNRDDSDNGDINYDYVHELSLEMKRQKIQRELMKLEQENMEKREEIIIKKEVSPEVVRSKLSPSPSLRKSSKSPKRKSSPKSSSASKKDRKTSAVSSPLLDQQRSVG

SEQ ID NO: 44481 - protein, 62 aa, Homo sapiens
MTKAGSKGGNLRDKLDGNELDLSLSDLNEVPVKELVSIVPRGPGAHLRRALAPTWATYFPLL

SEQ ID NO: 44482 - protein, 208 aa, Homo sapiens
MILTKAQYDEIAQCLVSVPPTRQSLRKLKQRFPSQSQATLLSIFSQEYQKHIKRTHAKHHTSEAIESYYQRYLNGVVKNGAAPVLLDLANEVDYAPSLMARLILERFLQEHEETPPSKSIINSMLRDPSQIPDGVLANQVYQCIVNDCCYGPLVDCIKHAIGHEHEVLLRDLLLEKNLSFLDEDQLRAKGYDKTPDFILQVPVDLGQA

SEQ ID NO: 44483 - protein, 68 aa, Homo sapiens
MAVTPREVQRLYVQVNKFALASHFFWALWALIQNQYSTIDFDFLRYAVIRFNQYFKVKPQASALEMPK

SEQ ID NO: 44484 - protein, 144 aa, Homo sapiens
  MOD_RES (1)..(1): Any amino acid
XEESSEQLIKILSEIEKEEFMRSKTDCATPDFVPEPSPHDLPMDEHVLPDDADINFGYCEVEEKCRQSFEAWQEKQKELEDKEKQTLKAQRDREEKQFQEEEEKRHCWMKQFKVEKKKLENIQKEYIRNLHLQMEEERTRFKDQ

SEQ ID NO: 44485 - protein, 725 aa, Homo sapiens [sequence omitted]

SEQ ID NO: 44486 - protein, 504 aa, Homo sapiens
MGGAGARGLAGCGAPRVNLLGLGEAVWTKQVRSVAMFSEQAAQRAHTLLSPPSANNATFARVPVATYTNSSQPFRLGERSFSRQYAHIYATRLIQMRPFLENRAQQHWGSGVGVKKLCELQPEEKCCVVGTLFKAMPLQPSILREVSEEHNLLPQPPRSKYIHPDDELVLEDELQRIKLKGTIDVSKLVTGTVLAVFGSVRDDGKFLVEDYCFADLAPQKPAPPLDTDRFVLLVSGLGLGGGGGESLLGTQLLVDVVTGQLGDEGEQCSAAHVSRVILAGNLLSHSTQSRDSINKAKYLTKKTQAASVEAVKMLDEILLQLSASVPVDVMPGEFDPTNYTLPQQPLHPCMFPLATAYSTLQLVTNPYQATIDGVRFLGTSGQNVSDIFRYSSMEDHLEILEWTLRVRHISPTAPDTLGCYPFYKTDPFIFPECPHVYFCGNTPSFGSKIIRGPEDQTVLLVTVPDFSATQTACLVNLRSLACQPISFSGFGAEDDDLGGLGLGP

SEQ ID NO: 44487 - protein, 49 aa, Homo sapiens
  MOD_RES (1)..(1): Any amino acid
XIECYNRISGALFTNDKFQVSTNKLTFMDLELKLKDKNTLFTRILNGQV

SEQ ID NO: 44488 - protein, 202 aa, Homo sapiens
MAVLPGPLQLLGVLLTISLSSIRLIQAGAYYGIKPLPPQIPPQMPPQIPQYQPLGQQVPHMPLAKDGLAMGKEMPHLQYGKEYPHLPQYMKEIQPAPRMGKEAVPKKGKEIPLASLRGEQGPRGEPGPRGPPGPPGLPGHGIPGIKGKPGPQGYPGVGKPGMPGMPGKPGAMGMPGAKGEIGQKGEIGPMGIPGPQGPPGPH

SEQ ID NO: 44489 - protein, 486 aa, Homo sapiens
MQSWSRVYCSLAKRGHFNRISHGLQGLSAVPLRTYADQPIDADVTVIGSGPGGYVAAIKAAQLGFKALLNNSHYYHMAHGKDFASRGIEMSEVRLNLDKMMEQKSTAVKALTGGIAHLFKQNKVVHVNGYGKITGKNQVTATKADGGTQVIDTKNILIATGSEVTPFPGITIDEDTIVSSTGALSLKKVPEKMVVIGAGVIGVELGSVWQRLGADVTAVEFLGHVGGVGIDMEISKNFQRILQKQGFKFKLNTKVTGATKKSDGKIDVSIEAASGGKAEVITCDVLLVCIGRRPFTKNLGLEELGIELDPRGRIPVNTRFQTKIPNIYAIGDVVAGPMLAHKAEDEGIICVEGMAGGAVHIDYNCVPSVIYTHPEVAWVGKSEEQLKEEGIEYKVGKFPFAANSRAKTNADTDGMVKILGQKSTDRVLGAHILGPGAGEMVNEAALALEYGASCEDIARVCHAHPTLSEAFREANLAASFGKSINF

SEQ ID NO: 44490 - protein, 53 aa, Homo sapiens
MTMTANKNSSITHGAGGTKAPRGTLSRSQSVSPPPVLSPPRSPIYPLSDSETS

SEQ ID NO: 44491 - protein, 162 aa, Homo sapiens
MAFLASGPYLTHQQKVLRLYKRALRHLESWCVQRDKYRYFACLMRARFEEHKNEKDMAKATQLLKEAEEEFWYRQHPQPYIFPDSPGGTSYERYDCYKVPEWCLDDWHPSEKAMYPDYFAKREQWKKLRRESWEREVKQLQEETPPGGPLTEALPPARKEAT

SEQ ID NO: 44492 - protein, 85 aa, Homo sapiens
  MOD_RES (1)..(1): Any amino acid
XDLSEYKWIVPDIVWEIDEYIDFEKIRKALPSSEDLVKLAPDFDKIVESLSLLKDFFTSGHKLVSEVIGASDLLLLLGYQSCSLK

SEQ ID NO: 44493 - protein, 105 aa, Homo sapiens
MEHIRTPKVENVRLVDRVSPKKAALGTLYLTATHVIFVENSPDPRKETWILHSQISTIEKQATTATGCPLLIRCKNFQIIQLIIPQERDCHDVYISLIRLARPGL

SEQ ID NO: 44494 - protein, 23 aa, Homo sapiens
  MOD_RES (1)..(1): Any amino acid
XHFKTLQTRKEVLLSPGLQGVGV

SEQ ID NO: 44495 - protein, 343 aa, Homo sapiens
  MOD_RES (1)..(1): Any amino acid
XASFRGAEKHRNSADYSSESKKQKTEEKEIAARYDSDGEKSDDNLVVDVSNEDPSSPRGSPAHSPRENGLDKTRLLKKDAPISPASIASSSSTPSSKSKELSLNEKSTTPVSKSNTPTPRTDAPTPGSNSTPGLRPVPGKPPGVDPLASSLRTPMAVPCPYPTPFGIVPHAGMNGELTSPGAAYAGLHNISPQMSAAAAAAAAAAAYGRSPVVGFDPHHHMRVPAIPPNLTGIPGGKPTKCFYHLRAFPGNELEMELPRDTHRAYSFHVSADGQMQPVPFPPDALIGPGIPRHARQINTLNHGEVVCAVTISNPTRHVYTGGKGCVKVWDISHPGNKSPVSQL

SEQ ID NO: 44496 - protein, 386 aa, Homo sapiens
MLSRSHRSVLTVACEQTEVLLFDPISSKHIKTLSEAHEDCVNNIRFLDNRLFATCSDDTTIALWDLRKLNTKVCTLHGHTSWVKNIEYDTNTRLLVTSGFDGNVIIWDTNRYTEDGCPHKKFFHTRFLMRMRLTPDCSKMLISTSSGYLLILHDLDLTKSLEVGSYPILRARRTTSSSDLTTSSSSSGPRVSGSPCHHSDSNSSEKHMSRASQREGVSPRNSLEVVTPEVLGESDHGNCITSLQLHPKGWATLLRCSSNSDDEECTCVYEFQEGAPVRPVSPRCSLRLTHYIEEANVGRGYIKELCFSPDGRMISSPHGYGIRLLGFDKQCSELVDCLPKEASPLRVIRSLYSHNDVVLTTKFSPTHCQIASGCLSGRVSLYQPKF

SEQ ID NO: 44497 - protein, 161 aa, Homo sapiens
MVSKRIAQETFDAAVRENIEEFAMGPEEAVKEAVEQFESQGVDLSNIVKTAPKVSADGSQEPTHDILQMLSDLQESVASSRPQEVSAYLTRFCDQCKQDKACRFLAAQKGAYPIIFTAWKLATAGDQGLLLQSLNALSVLTDGQPDLLDAQGLQLLVATLT

SEQ ID NO: 44498 - protein, 204 aa, Homo sapiens
MASCAEPSEPSAPLPAGVPPLEDFEVLDGVEDAEGEEEEEEEEEEEDDLSELPPLEDMGQPPAEEAEQPGALAREFLAAMEPEPAPAPAPEEWLDILGNGLLRKKTLVPGPPGSSRPVKGQVVTVHLQTSLENGTRVQEEPELVFTLGDCDVIQALDLSVPLMDVGETAMVTADSKYCYGPQGSRSPYIPPHAALCLEVTLKTA

SEQ ID NO: 44499 - protein, 53 aa, Homo sapiens
MAFTFAAFCYMLALLLTAALIFFAIWHIIAFDELKTDYKNPIDQCNTLNPVYE

SEQ ID NO: 44500 - protein, 881 aa, Homo sapiens
MAVVIRLLGLPFIAGPVDIRHFFTGLTIPDGGVHIIGGEIGEAFIIFATDEDARRAISRSGGFIKDSSVELFLSSKAEMQKTIEMKRTDRVGRGRPGSGTSGVDSLSNFIESVKEEASNSGYGSSINQDAGFHTNGTGHGNLRPRKTRPLKAENPYLFLRGLPYLVNEDDVRVFFSGLCVDGVIFLKHHDGRNNGDAIVKFASCVDASGGLKCHRSFMGSRFIEVMQGSEQQWIEFGGNAVKEGDVLRRSEEHSPPRGINDRHFRKRSHSKSPRRTRSRSPLGFYVHLKNLSLSIDERDLRNFFRGTDLTDEQIRFLYKDENRTRYAFVMFKTLKDYNTALSLHKTVLQYRPVHIDPISRKQMLKFIARYEKKRSGSLERDRPGHVSQKYSQEGNSGQKLCIYIRNFPFDVTKVEVQKFFADFLLAEDDIYLLYDDKGVGLGEALVKFKSEEQAMKAERLNRRRFLGTEVLLRLISEAQIQEFGVNFSVMSSEKMQARSQSRERGDHSHLFDSKDPPIYSVGAFENFRHQLEDLRQLDNFKHPQRDFRQPDRHPPEDFRHSSEDFRFPPEDFRHSPEDFRRPREEDFRRPSEEDFRRPWEEDFRRPPEDDFRHPREEDWRRPPPEHFRRPPPEHFRRPPPEHFRRPPPEHFRRPPPEHFRRPPQEHFRRPPQEHFRRSREEDFRHPPDEDFRGPPDEDFRHPPDEDFRSPQEEDFRCPSDEDFRQLPEEDLREAPEEDPRLPDNFRPPGEDFRSPPDDFRSHRPFVNFGRPEGGKFDFGKHNMGSFPEGRFMPDPKINCGSGRVTPIKIMNLPFKANVNEILDFFHGYRIIPDSVSIQYNEQGLPTGEAIVAMINYNEAMAAIKDLNDRPVGPRKVKLTLL

SEQ ID NO: 44501 - protein, 1698 aa, Homo sapiens [sequence omitted]

SEQ ID NO: 44502 - protein, 174 aa, Homo sapiens
  MOD_RES (1)..(1): Any amino acid
XGKDGPPGVKGENGHPGSPGEKGEKGETGQAGSPVPGLPGPEGPPGPPGLQGVPGPKGEAGLDGAKGEKGFQGEKGDRGPLGLPGTPGPIGVPGPAGPKGERGSKGDPGMTGPTGAAGLPGLHGPPGDKGNRGERGKKGSRGPKGDKGDQGAPGLDAPCPLGEDGLPVQGCWNK

SEQ ID NO: 44503 - protein, 153 aa, Homo sapiens
HIQLPPEIQESQEVTLTCLLNFSCYGYPIQLQWLLEGVPMRQAAVTSTSLTIKSVFTRSELKFSPQWSHHGKIVTCQLQDADGKFLSNDTVQLNVKRESPRHACGKGKVCVTFSPAPQGACTQGRGKPAQTAASSSPGHAALSALVFREKDLL

SEQ ID NO: 44504 - protein, 789 aa, Homo sapiens
MNIDVEFHIRHNYPWNKLPANVRQSLGNSQREYEKQVVLYSIRNQLRYRNNLVKHVKKDERRYYEELLKYSRDHLMLYPYHLSDIMVKGLRITPFSYYTGIMEDIMNSEKSYDSLPNFTAADCLRLLGIGRNQYIDLMNQCRSSKKFFRRKTARDLLPIKPVEIAIEAWWVVQAGYITEDDIKICTLPEKCAVDKIIDSGPQLSGSLDYNVVHSLYNKGFIYLDVPISDDSCIAVPPLEGFVMNRVQGDYFETLLYKIFVSIDEHTNVAELANVLEIDLSLVKNAVSMYCRLGFAHKKGQVINLDQLHSSWKNVPSVNRLKSTLDPQKMLLSWDGGESRSPVQEASSATDTDTNSQEDPADTASVSSLSLSTGHTKRIAFLFDSTLTAFLMMGNLSPNLKSHAVTMFEVGKLSDESLDSFLIELEKVQSTGEGEAQRYFDHALTLRNTILFLRHNKDLVAQTAQPDQPNYGFPLDLLRCESLLGLDPATCSRVLNKNYTLLVSMAPLTNEIRPVSSCTPQHIGPAIPEVSSVWFKLYIYHVTGQGPPSLLLSKGTRLRKLPDIFQSYDRLLITSWGHDPGVVPTSNVLTMLNDALTHSAVLIQGHGLHGIGETVHVPFPFDETELQGEFTRVNMGVHKALQILRNRVDLQHLCGYVTMLNASSQLADRKLSDASDERGEPDLASGSDVNGSTESFEMVIEEATIDSATKQTSGATTEADWVPLELCFGIPLFSSELNRKVCRKIAAHGLCRKESLQNLLHSSRKLSLQVLNFVHSFQVTKTKKSKWYLY

SEQ ID NO: 44505 - protein, 70 aa, Homo sapiens
MNESHKSEFIELRKWLKARKFQDSNLAPACFPGTGRGLMSQTSLQEGQMIISLPESCLLTTDTVIRSYLG

SEQ ID NO: 44506 - protein, 98 aa, Homo sapiens
MFFRVFLHFIRSHSATAVDFLPVMVHRLPVFKRYMGNTPQKKAVFGQCRGLPCVAPLLTTVEEAPRGISARVWGHFPKWLNGSLLRIGPGKFEFGKDK

SEQ ID NO: 44507 - protein, 57 aa, Homo sapiens
MLVIPPGLSEEEEALQKKFNKLKKKVRDCVWTWPNLSQTLHSEKIWEKGIAGSEEAK

SEQ ID NO: 44508 - protein, 99 aa, Homo sapiens
MGHPPVSPSAPAPAGTTAIPGLIPDLVAGTPWPRWALIAGALAAGVLLVSCLLCAACCCCRRHRKKPRDKESVGLGSARGTTTTHLVQPDVDGLESSPG

SEQ ID NO: 44509 - protein, 146 aa, Homo sapiens
MMCEVMPTISEDGRRGSALGPDEAGGELERLMVTMLTERERLLETLREAQDGLATAQLRLRELGHEKDSLQRQLSIALPQEFAALTKELNLCREQLLEREEEIAELKAERNNTRLLLEHLECLVSRHERSLRMTVVKRQAQSPGGV

SEQ ID NO: 44510 - protein, 131 aa, Homo sapiens
MSQWTPEYNELYTLKVDMKSEIPSDAPKTQESLKGILLHPEPIGAAKSFPAGVEMINSKVGNEFSHLCDDSQKQEKEMNGNQQEQEKSLVVRKKRKSQQAGPSYVQNCVKENQGILGLRQHLGTPSDEDND

SEQ ID NO: 44511 - protein, 163 aa, Homo sapiens
RIHVRPSRANTLATSDVSRRKWLIPGAEYSIFTGQPLDTQDSNVDNQLEETCSLGHRSPLEKDSSPGSSSTSLLIKKQRETSDTPIMRALKELDEGKIFKNWGTQTEKEDTSNINPRQTETSVNASRSPEKCAQQRQKRLNSASQRSSSLPPSNRKSSTPSKS

SEQ ID NO: 44512 - protein, 205 aa, Homo sapiens
MSLWLGAPVPDIPPDSAVELWKPGAQDASSQAQGGSSCILREEARMPHSAGGTAGVGLEAAEPTALLTRAEPPSEPTEIRPQKRKKGPAPKMLGNELCSVCGDKASGFHYNVLSCEGCKGFFRRSVIKGAHYICHSGGHCPMDTYMRRKCQECRLRKCRQAGMREECVLSEEQIRLKKLKRQEEEQAHATSLPPRASSPPQILPQ

SEQ ID NO: 44513 - protein, 202 aa, Homo sapiens
MEESGYESVLCVKPDVHVYRIPPRATNRGYRGALCSGPGGSVSWHSCGECDGFQQVLRDPHRRWKWWVKQQCEFAKQAQNPDQGPKLDLGFKEGQTIKLNIANMKKKEGAAGNPRVRPASTGGLSLLPPPPGGKTSTLIPPPGEQLAVGGSLVQPAVAPSSGGAPVPWPQPNPATADIWGDFTKSTGSTSSQTQPGTGWVQF

SEQ ID NO: 44514 - protein, 88 aa, Homo sapiens
MSLSHLYRDGEGRIDDDDDERENFEITDWDLQNEFNPNRQRHWQTKEEATYGVWAERDSDDERPSFGGKRARDYSAPVNFISAGLKKG

SEQ ID NO: 44515 - protein, 187 aa, Homo sapiens
MLAANPGKTPISLLQEYGTRIGKTPVYDLLKAEGQAHQPNFTFRVTVGDTSCTGQGPSKKAAKHKAAEVALKHLKGGSMLEPALEDSSSFSPLDSSLPEDIPVFTAAAAATPVPSVVLTRSPPMELQPPVSPQQSECNPVGALQSLRLLRGDQRGCEKPFFTQPHAPCVSLPRSWWCRKAGGCRSTQ

SEQ ID NO: 44516 - protein, 203 aa, Homo sapiens
MSGCFPVSGLRCLSRDGRMAAQGAPRFLLTFDFDETIVDENSDDSIVRAAPGQRLPESLRATYREGFYNEYMQRVFKYLGEQGVRPRDLSAIYEAIPLSPGMSDLLQFVAKQGACFEVILISDANTFGVESSLRAAGHHSLFRRILSNPSGPDARGLLALRPFHTHSCARCPANMCKHKVLSDYLRERAHDGVHFERLFYVGD

SEQ ID NO: 44517 - protein, 84 aa, Homo sapiens
TPRKHRWRQKEGKSLGCAPSTGPEEEHAPGEDESSPQPSQPSRERLPWPKRKPPHNHPMGMPGARKAAALSGGLLSDPELQRKI

SEQ ID NO: 44518 - protein, 464 aa, Homo sapiens
MKPRAECCSPKFWLVLAVLAVSGSRARSQKSPPSIGIAVILVGTSDEVAIKDAHEKDDFHHLSVVPRVELVAMNETDPKSIITRICDLMSDRKIQGVVFADDTDQEAIAQILDFISAQTLTPILGIHGGSSMIMADKDESSMFFQFGPSIEQQASVMLNIMEEYDWYIFSIVTTYFPGYQDFVNKIRSTIENSFVGWELEEVLLLDMSLDDGDSKIQNQLKKLQSPIILLYCTKEEATYIFEVANSVGLTGYGYTWIVPSLVAGDTDTVPAEFPTGLISVSYDEWDYGLPARVRDGIAIITTAASDMLSEHSFIPEPKSSCYNTHEKRIYQSNMLNRYLINVTFEGRNLSFSEDGYQMHPKLVIILLNKERKWERVGKWKDKSLQMKYYVWPRMCPETEEQEDDHLSIVTLEEAPFVIVESVDPLSGTCMRNTVPCQKRIVTENKTDEEPGYIKKCCKGFCIDI

SEQ ID NO: 44519 - protein, 84 aa, Homo sapiens
MAASCLVLLALCLLLPLLLLGGWKRWRRGRAARHVVAVVLGDVGRSPRMQYHALSLAMHGFSVTLLGFCSEWPRVWEGRCSLSR

SEQ ID NO: 44520 - protein, 86 aa, Homo sapiens
MWASPAPTLIDSGDSVVAKYINRFRQAQPTSREERQPAGPTPADFWWLQSDSPDPSSQSAAGANKPEGRPHTAVPTAVNVTSASHA

SEQ ID NO: 44521 - protein, 80 aa, Homo sapiens
MTDSKYFTTNKKGEIFELKAELNNEKKEKRKEAVKKVIAAMTVGKDVSSLFPDVVNCMQTDNLELKKLVYLYLMNYAKSQ

SEQ ID NO: 44522 - protein, 173 aa, Homo sapiens
  MOD_RES (1)..(1): Any amino acid
XTENRVALHALTRPPALLLLAAASSGLRFVLASFALALLLPVFLAVAAVKLGLRARWGSLPPPGGLGGPWVAVRGSGDVCGVLALAPGTNAGDGARVTRLSVSRWHRRRGVGRRLLAFAEARARAWAGGMGEPRARLVVPVAVAAWGSVLSVPQAGRAIWGGGEEAEQNTPQS

SEQ ID NO: 44523 - protein, 106 aa, Homo sapiens
MAVLAALLRSGARSRSPLLRRLVQEIRYVERSYVSKPTLKEVVIVSATRTPIGSFLGSLSLLPATKLGSIAIQGAIEKAGIPKEEVKEAYMGNVLQGGEGQAPTRM

SEQ ID NO: 44524 - protein, 320 aa, Homo sapiens
MKALQALQNEPIPERSPQNGESGKDVDDDKDANKSEISLVFEIALKRNMPVSFEVIKESGPPHMKSFVTRVSVGEFSAEGEGNSKKLSKKRAATTVLQELKKLPPLPVVEKPKLFFKKRPKTIVKAGPEYGQGMNPISRLAQIQQAKKEKEPDYVLLSERGMPRRREFVMQVKVGNEVATGTGPNKKIAKKNAAEAMLLQLGYKASTNLQDQLEKTGENKGWSGPKPGFPEPTNNTPKGILHLSPDVYQEMEASRHKVISGTTLGYLSPKDMNQPSSSFFSISPTSNSSATIARELLMNGTSSTAEAIGLKGSSPTPPCS

SEQ ID NO: 44525 - protein, 1078 aa, Homo sapiens
  MOD_RES (1)..(1): Any amino acid
XPYKPQWCRSREAWALYLFSPQNRFRVSCQKVITHKMFDHVVLVFIFLNCVTIALERPDIDPGSTERVFLSVSNYIFTAIFVAEMMVKVVALGLLSGEHAYLQSSWNLLDGLLVLVSLVDIVVAMASAGGAKILGVLRVLRLLRTLRPLRVISRAPGLKLVVETLISSLRPIGNIVLICCAFFIIFGILGVQLFKGKFYYCEGPDTRNISTKAQCRAAHYRWVRRKYNFDNLGQALMSLFVLSSKDGWVNIMYDGLDAVGVDQQPVQNHNPWMLLYFISFLLIVSFFVLNMFVGVVVENFHKCRQHQEAEEARRREEKRLRRLERRRRKAQRRPYYADYSPTRRSIHSLCTSHYLDLFITFIICVNVITMSMEHYNQPKSLDEALKYCNYVFTIVFVFEAALKLVAFGFRRFFKDRWNQLDLAIVLLSLMGITLEEIEMSAALPINPTIIRIMRVLRIARVLKLLKMATGMRALLDTVVQALPQVGNLGLLFMLLFFIYAALGVELFGRLECSEDNPCEGLSRHATFSNFGMAFLTLFRVSTGDNWNGIMKDTLRECSREDKHCLSYLPALSPVYFVTFVLVAQFVLVNVVVAVLMKHLEESNKEAREDAELDAEIELEMAQGPGSARRVDADRPPLPQESPGARDAPNLVARKVSVSRMLSLPNDSYMFRPVVPASAPHPRPLQEVEMETYGAGTPLESCASLQIPLAVSSPARSGEPLHALSPRGTARSPSLSRLLCRQEAVHTDSLEGKIDSPRDTLDPAEPGEKTPVRPVTQGGSLQSPPRSPRPASVRTRKHTFGQRCVSSRPAAPGGEEAEASDPADEEVSHITSSACPWQPTAEPHGPEASPVAGGERDLRRLYSVDAQGFLDKPGRADEQWRPSAELGSGEPGEAKAWGPEAEPALGARRKKKMSPPCISVEPPAEDEGSARPSAAEGGSTTLRRRTPSCEATPHRDSLEPTEGSGAGGDPAAKGERWGQASCRAEHLTVPSFAFEPLDLGVPSGDPFLDGSHSVTPESRASSSGAIVPLEPPESEPPMPVGDPPEKRRGLYLTVPQCPLEKPGSPSATPAPGGGADDPV

SEQ ID NO: 44526 - protein, 84 aa, Homo sapiens
MTPLLTLILVVLMGLPLAQALDCHVCAYNGDNCFNPMRCPAMVAYCMTTRTYYTPTRMKVSKSCVPRCFETVYDGYSKHASTTS

SEQ ID NO: 44527 - protein, 258 aa, Homo sapiens
QQRREREARRQQEREQRRREQEEKRRLEELERRRKEEEERRRAEEEKRRVEREQEYIRRQLEEEQRHLEVLQQQLLQEQAMLLECRWREMEEHRQAERLQRQLQQEQAYLLSLQHDHRRPHPQHSQQPPPPQQERSKPSFHAPEPKAHYEPADRAREVQWSHLASLKNNVSPVSRSHSFSDPSPKFAHHHLRSQDPCPPSRSEVLSQSSDSKSEAPDPTQKAWSRSDSDEVPPRVPVRTTSRSPVLSRRDSPLQGSGQ

SEQ ID NO: 44528 - protein, 90 aa, Homo sapiens
MCGNTMSVPLLTDAATVSGAERETAAVIFLHGLGDTGHSWADALSTIRLPHVKYICPHAPRIPVTLNMKMVMPSWFDLMGLSPDAPEDEA

SEQ ID NO: 44529 - protein, 133 aa, Homo sapiens
MSELSDEASEPELLNRSLSMWHGLGTQVSGEELDVPLDLHTAASIGQYEVVKECVQREPICGFTPLMEAAAAGHEIIVQYFLNHGVKVDARDHSGATARMLAKQYGHMKIVALMDTYSPSLPKSLYRSPEKYE

SEQ ID NO: 44530 - protein, 1411 aa, Homo sapiens
MVSEKSHLGNPQEPVQEEPKTRLLSMTVRRGPRSLPPIPSTSRTGFAEFSMRGRMREKLQAARSKAESALLQEIPTPRPRRLRSPSKKELETEFGTEPGKEVERTQQEVDSQSYSRVKFHDSARKIKPKPQVPPGFPSAEEAYNFFTFNFDPEPEGSEEKPKARHRAGTNQEEEEGEEEEPPAQGGGKEMDEEELLNGDDAEDFLLGLDHVADDFVAVRPADYESIHDRLQMEREMLFIPSRQTVPTYKKLPENVQPRFLEDEGLYTGVRPEVARTNQNIMENRLLMQDPERRWFGDDGRILALPNPIKPFPSRPPVLTQEQSIKAELETLYKKAVKYVHSSQHVIRSGDPPGNFQLDIDISGLIFTHHPCFSREHVLAAKLAQLYDQYLARHQRNKAKFLTDKLQALRNAVQTGLDPEKPHQSLDTIQKTINEYKSEIRQTRKFRDAEQEKDRTLLKTIIKVWKEMKSLREFQRFTNTPLKLVLRKEKADQKADEEAYEAEIQAEISELLEEHTEEYAQKMEEYRTSLQQWKAWRKVQRAKKKKRKQAAEEHPGDEIAEPYPEEDLVKPSPPEPTDRAVIEQEVRERAAQSRRRPWEPTLVPELSLAGSVTPNDQCPRAEVSRREDVKKRSVYLKVLFNNKEVSRTVSRPLGADFRVHFGQIFNLQIVNWPESLTLQVYETVGHSSPTLLAEVFLPIPETTVVTGRAPTEEVEFSSNQHVTLDHEGVGSGVPFSFEADGSNQLTLMTSGKVSHSVAWAIGENGIPLIPPLSQQNIGFRSALKKADAISSIGTSGLTDMKKLAKWAAESKLDPNDPNNAPLMQLISVATSGESYVPDFFRLEQLQQEFNFVSDQELNRSKRFRLLHLRSQEVPEFRNYKQVPVYDREIMEKVFQDYEKRLRDRNVIETKEHIDTHRAIVAKYLQQVRESVINRFLIAKQYFLLADMIVEEEVPNISILGLSLFKLAEQKRPLRPRRKGRKKVTAQNLSDGDIKLLVNIVRAYDIPVRKPAVSKFQQPSRSSRMFSEKHAASPSTYSPTHNADYPLGQVLVRPFVEVSFQRTVCHTTTAEGPNPSWNEELELPFRAPNGDYSTASLQSVKDVVFINIFDEVLHDVLEDDRERGSGIHTRIERHWLGCVKMPFSTIYFQARIDGTFKIDIPPVLLGYSKERNMILERGFDSVRSLSEGSYITLFITIEPQLVPGESIREKFESQEDEKLLQATEKFQAECALKFPNRQCLTTVIDISGKTVFITRYLKPLNPPQELLNVYPNNLQATAELVARYVSLIPFLPDTVSFGGICDLWSTSDQFLDLLAGDEEEHAVLLCNYFLSLGKKAWLLMGNAIPEGPTAYVLTWEQGRYLIWNPCSGHFYGQFDTFCPLKNVGCLIGPDNAQAMEIFLFKKPSISWPFQCSA

SEQ ID NO: 44531 - protein, 57 aa, Homo sapiens
MQTACQAVQHQRGRRQYNKLRNLLKDARHDCILFANEFQQCCYLPRERGESMEKWQT

SEQ ID NO: 44532 - protein, 423 aa, Homo sapiens
MATVWDEAEQDGIGEEVLKMSTEEIIQRTRLLDSEIKIMKSEVLRVTHELQAMKDKIKENSEKIKVNKTLPYLVSNVIELLDVDPNDQEEDGANIDLDSQRKGKCAVIKTSTRQTYFLPVIGLVDAEKLKPGDLVGVNKDSYLILETLPTEYDSRVKAMEVDERPTEQYSDIGGLDKQIQELVEAIVLPMNHKEKFENLGIQPPKGVLMYGPPGTGKTLLARACAAQTKATFLKLAGPQLVQMFIGDGAKLVRDAFALAKEKAPSIIFIDELDAIGTKRFDSEKAGDREVQRTMLELLNQLDGFQPNTQVKVIAATNRVDILDPALLRSGRLDRKIEFPMPNEEARARIMQIHSRKMNVSPDVNYEELARCTDDFNGAQCKAVCVEAGMIALRRGATELTHEDYMEGILEVQAKKKANLQYYA

SEQ ID NO: 44533 - protein, 277 aa, Homo sapiens
MPHPQRQAEETCLLSGATKRYVDAGTDPTPEPSAPSLPLLSSLGRVGGMAEEMESSLEASFSSSGAVSGASGFLPPARSRIFKIIVIGDSNVGKTCLTYRFCAGRFPDRTEATIGVDFRERAVEIDGERIKIQLWDTAGQERFRKSMVQHYYRNVHAVVFVYDMTNMASFHSLPSWIEECKQHLLANDIPRILVGNKCDLRSAIQVPTDLAQKFADTHSMPLFETSAKNPNDNDHVEAIFMTLAHKLKSHKPLMLSQPPDNGIILKPEPKPAMTCWC

SEQ ID NO: 44534 - protein, 158 aa, Homo sapiens
HESLKLLQRVLDEINPQSVVTSAKQDENMTRFLGKLASQEHREPKRPEIIFLPSVDFGLEISKQRLLSGNYSFIPDAMTATEKILFLSSIIPFDCLLTIPSQVRALGGLLKFLGRRRIGVELEDYNVSVPILGFKKFMLTHLVNIDQDTYRNPQQMPL

SEQ ID NO: 44535 - protein, 49 aa, Homo sapiens
QYGIHSDVWSLGISFMEPLQLLQCIVDEDSPVLPVGEFSEPFVHFITQW

SEQ ID NO: 44536 - protein, 244 aa, Homo sapiens
  MOD_RES (1)..(1): Any amino acid
XSLSRRGWQPRGYPDGGAAQAFSKRTLSWRLLGEALSSQLSVADQRRIVALAFRMWSEVTPLDFREDLAAPGAAVDIKLGFGRGSCEGSFDTAFDWIRKERNQYGEVMVRFSTYFFRNSWYWLYENRNNRTRYGDPIQILTGWPGIPTHNIDAFVHIWTWKRDERYFFQGNQYWRYDSDKDQALTEDEQGKSYPKLISEGFPGIPSPLDTAFYDRRQKLIYFFKESLAKRHRRTSDSGIWLEEL

SEQ ID NO: 44537 - protein, 267 aa, Homo sapiens
MAPWPPKGLVPAMLWGLSLFLNLPGPIWLQPSPPPQSSPPPQPHPCHTCRGLVDSFNKGLERTIRDNFGGGNTAWEEENLSKYKDRQQEAPDLFQWLCSDSLKLCCPAGTFGPSCLPCPGGTERPCGGYGQCEGEGTRGGSGHCDCQAGYGGEACGQCGLGYFEAERNASHLVCSACFGPCARCSGPEESNCLQCKKGWALHHLKCVDIDECGTEGANCGADQFCVNTEGSYECRDCAKACLGCMGAGPGRCKKCSPGYQQVGSKCL

SEQ ID NO: 44538 - protein, 141 aa, Homo sapiens
  MOD_RES (1)..(1): Any amino acid
XRVVAAFEPITVGLAIGAASAITGYLSYNDIYCRFAECCREERPLNASALKLDLEEKLFGQHLATEVIFKALTGFRNNKNPKKPLTLSLHGWAGTGKNFVSQIVAENLHPKGLKSNFVHLFVSTLHFPHEQKIKLYQSSLT

SEQ ID NO: 44539 - protein, 53 aa, Homo sapiens
MDPELEKKLKENKISLESEYEKIKDSKFDDWKNIRGPRPWEDPDLLQGRNPES

SEQ ID NO: 44540 - protein, 184 aa, Homo sapiens
KPVPSSSGGDAHVPHGSQVIRKLVMEPTFKPWQMKTHFLMPFPVNYVGECIRTVPYTDPDHASLKILARLMTAKFLHTEIREKGGAYGGGAKLSHNGIFTLYSYRDPNTIETLQSFGKAVDWAKSGKFTQQDIDEAKLSVFSTVDAPVAPSDKGILSITVRISTHSLTDDVAVFQVPGMHGQEH

SEQ ID NO: 44541 - protein, 80 aa, Homo sapiens
MNTRNRVVNSGLGASPASRPTRDPQDPSGRQGELSPVEDQREGLEAAPKGPSRESVVHAGQRRCGAGAGQPGEVEGAEQS

SEQ ID NO: 44542 - protein, 156 aa, Homo sapiens
MLSFQGLAELAHREYQAGDFEAAERHCMQLWRQEPDNTGVLLLLSSIHFQCRRLDRSAHFSTLAIKQNPLLAEAYSNLGNVYKERGQLQEAIEHYRHALRLKPDFIDGYINLAAALVAAGDMEGAVQAYVSALQYNPDLYCVRSDLGNLLKALGRL

SEQ ID NO: 44543 - protein, 68 aa, Homo sapiens
MLRLRSGLRHLRATPNTRGSARLLCAEMPKKAGATTKGGKSREKVVKLLASTTPEEILEKLKKEAKKT

SEQ ID NO: 44544 - protein, 73 aa, Homo sapiens
  MOD_RES (1)..(1): Any amino acid
XIEYGARPCLVTSVGWTPAHFAAEAGHLNILKTLHALHAAIDAPDFFGDTPKRIAQIYGQKACVAFLEKGIEF

SEQ ID NO: 44545 - protein, 569 aa, Homo sapiens
MWRLRRAAVACEVCQSLVKHSSGIKGSLPLQKLHLVSRSIYHSHHPTLKLQRPQLRTSFQQFSSLTNLPLRKLKFSPIKYGYQPRRNFWPARLATRLLKLRYLILGSAVGGGYTAKKTFDQWKDMIPDLSEYKWIVPDIVWEIDEYIDFEKIRKALPSSEDLVKLAPDFDKIVESLSLLKDFFTSGSPEETAFRATDRGSESDKHFRKVSDKEKIDQLQEELLHTQLKYQRILERLEKENKELRKLVLQKDDKGIHHRKLKKSLIDMYSEVLDVLSDYDASYNTQDHLPRVVVVGDQSAGKTSVLEMIAQARIFPRGSGEMMTRSPVKVTLSEGPHHVALFKDSSREFDLTKEEDLAALRHEIELRMRKNVKEGCTVSPETISLNVKGPGLQRMVLVDLPGVINTVTSGMAPDTKETIFSISKAYMQNPNAIILCIQDGSVDAERSIVTDLVSQMDPHGRRTIFVLTKVDLAEKNVASPSRIQQIIEGKLFPMKALGYFAVVTGKGNSSESIEAIREYEEEFFQNSKLLKTSMLKAHQVTTRNLSLAVSDCFWKMVRESVEQQADSFKE

SEQ ID NO: 44546 - protein, 115 aa, Homo sapiens
MMLDNYVRDFKALIDWIQLQEKLEKTDAQSRPTSLAWEVKKMSPGRHVIPSPSTDRINVTSNARRSLNFGGSTGTVPAPRLAPTGVSWADKVKAHHTGSTASSEITPAQSCPPMT

SEQ ID NO: 44547 - protein, 124 aa, Homo sapiens
  MOD_RES (1)..(1): Any amino acid
XDIIMQLDDVVSSTVTGPRVEEAMYRSIRWLDRCIAAHQRPDKQNLFAIIQGGLDADLRATCLEGPQSESLKSRTLAGYHSSHLNPSTLGGQEMTKRDVPGFAIGGLSGGESKSQFWRMVALST

SEQ ID NO: 44548 - protein, 36 aa, Homo sapiens
SQENQSKHLWEVVFINNEMLTKEQDVISLRREWYVP

SEQ ID NO: 44549 - protein, 170 aa, Homo sapiens
MLSEVLLVSAPGKVILHGEHAVVHGKVALAVSLNLRTFLRLQPHSNGKVDLSLPNIGIKRAWDVARLQSLDTSFLEQGDVTTPTSEQVEKLKEVAGLPDDCAVTERLAVLAFLYLYLSICRKQRALPSLDIVVWSELPPGAGLGSSAAYSVCLAAALLTVCEEIPNPLKD

SEQ ID NO: 44550 - protein, 231 aa, Homo sapiens
MGCAPSIHISERLVAEDAPSPAAPPLSSGGPRLPQGQKTAALPRTRGAGLLESELRDGSGKKVAVADVQFGPMRFHQDQLQVLLVFTKEDNQCNGFCRACEKAGFKCTVTKEAQAVLACFLDKHHDIIIIDHRNPRQLDAEALCRSIRSSKLSENTVIVGVVRRVDREELSVMPFISAGFTRRYVENPNIMACYNELLQLEFGEVRSQLKLRSGKEFTMPKRKTEIIYNKM

SEQ ID NO: 44551 - protein, 172 aa, Homo sapiens
MICTFLRAVQYTEKLHRSSAKRLLLPYIVLNKACLKTEPSLRCGLQYQKKTLRPRCILGVTQKTIWTQGPSPRKAKEDGSKQVSVHRSQRGGTAVPTSQKVKEAGRDFTYLIVVLFGISITGGLFYTIFKELFSSSSPSKIYGRALEKCRSHPEGCSSHRPRSNVIARICSP

SEQ ID NO: 44552 - protein, 159 aa, Homo sapiens
MAAIEVITSKEKEITITKANGETSVGTVRIWNETVSNLTLMALGSSAPEILLSVIEVCGHNFQAGELGPGTIVGSAAFNMFVVIAVCIYVIPAGESRKIKHLRVFFVTASWSIFAYVWLYLILAVFSPGVVQVWEALLTLVFFPVCVVFAWMADKRLLF

SEQ ID NO: 44553 - protein, 871 aa, Homo sapiens
MEHGTLLAQPGLWTRDTSWALLYFLCYILPQTAPQVLRIGGIFETVENEPVNVEELAFKFAVTSINRNRTLMPNTTLTYDIQRINLFDSFEASRRACDQLALGVAALFGPSHSSSVSAVQSICNALEVPHIQTRWKHPSVDNKDLFYINLYPDYAAISRAILDLVLYYNWKTVTVVYEDSTGLIRLQELIKAPSRYNIKIKIRQLPSGNKDAKPLLKEMKKGKEFYVIFDCSHETAAEILKQILFMGMMTEYYHYFFTTLDLFALDLELYRYSGVNMTGFRLLNIDNPHVSSIIEKWSMERLQAPPRPETGLLDGMMTTEAALMYDAVYMVAIASHRASQLTVSSLQCHRHKPWRLGPRFMNLIKEARWDGLTGHITFNKTNGLRKDFDLDIISLKEEGTEKAAGEVSKHLYKVWKKIGIWNSNSGLNMTDSNKDKSSNITDSLANRTLIVTTILEEPYVMYRKSDKPLYGNDRFEGYCLDLLKELSNILGFIYDVKLVPDGKYGAQNDKGEWNGMVKELIDHRADLAVAPLTITYVREKVIDFSKPFMTLGISILYRKPNGTNPGVFSFLNPLSPDIWMYVLLACLGVSCVLFVIARFTPYEWYNPHPCNPDSDVVENNFTLLNSFWFGVGALMQQGSELMPKALSTRIVGGIWWFFTLIIISSYTANLAAFLTVERMESPIDSADDLAKQTKIEYGAVRDGSTMTFFKKSKISTYEKMWAFMSSRQQTALVRNSDEGIQRVLTTDYALLMESTSIEYVTQRNCNLTQIGGLIDSKGYGVGTPIGSPYRDKITIAILQLQEEGKLHMMKEKWWRGNGCPEEDNKEASALGVENIGGIFIVLAAGLVLSVFVAIGEFIYKSRKNNDIEQHY

SEQ ID NO: 44554 - protein, 163 aa, Homo sapiens
MLTLASKLKRDDGLKGSRTAATASDSTRRVSVRDKLLVKEVAELEANLPYEGYYQGGKFQFETEVPDAYNMVPPKVKCLTKIWHPNITETGEICLSLLREHSIDGTGWAPTRTLKDVVWGLNSLFTDLLNFDDPLNIEAAEHHLRDKEDFRNKVDDYIKRYAR

SEQ ID NO: 44555 - protein, 268 aa, Homo sapiens
MDNSGKEAEAMALLAEAERKVKNSQSFFSGLFGGSSKIEEACEIYARAANMFKMAKNWSGMSSPLELLQAAGNAFCQAAQLHLQLQSKHDAATCFVDAGNAFKKADPQEAINCLMRAIEIYTDMGRFTIAAKHHISIAEIYETELVDIEKAIAHYEQSADYYKGEESNSSANKCLLKVAGYAALLEQYQKAIDIYEQVGTNAMDSPLLKYSAKDYFFKAALCHFCIDMLNAKLAVQKYEELFPAFSDSRECKLMKKLLEAHEEQNVDS

SEQ ID NO: 44556 - protein, 161 aa, Homo sapiens
MFSLMASCCGWFKRWREPVRKVTLLMVGLDNAGKTATAKGIQGEYPEDVAPTVGFSKINLRQGKFEVTIFDLGGGIRIRGIWKNYYAESYGVIFVVDSSDEERMEETKEAMSEMLRHPRISGKPILVNHVQQSRGMERKLTSPLKKAFIGCYMLLQETLMP

SEQ ID NO: 44557 - protein, 52 aa, Homo sapiens
MHRRRSRSCREDQKPVMDDQRDLISNNEQLPMLGRRPGAPESPCRMPPSMAT

SEQ ID NO: 44558 - protein, 152 aa, Homo sapiens
MAFTCVFRCFPCDPSCGSASWAAPEFTPHSAAPMVKMTRSKTFQAYLPSCHRTYSCIHCRAHLANHDELISKSFQGSQGRAYLFNSVVNVGCGPAEERVLLTGLHAVADIYCENCKTTLGWKYEHAFESSQKYKEGKYIIELAHMIKDNGWD

SEQ ID NO: 44559 - protein, 62 aa, Homo sapiens
TITGLLQEFDVQKHDGGLGLAGFGVLQEQDIETLHGSVHVTLCGTPKGNRPVILTYHDIGMN

SEQ ID NO: 44560 - protein, 82 aa, Homo sapiens
MRKTSNSCIMENGHQPGAEKNSSFTWSVPSSGYGAVTASKHSNSPPLVTPPQSPVSPQPPAITQVHRQGERRRELVRSQTLP

SEQ ID NO: 44561 - protein, 135 aa, Homo sapiens
MDKPEFLPTSDQNIIPENLPAPTDKCKLKYQQCKTEIKEGYKQYSQRNAENTKSNVTHKQSPRNKIDEKCVQDEEANTDDLTTLDRKAILQQGYADNSCDKQQRARKLDAEIVAAEKKKQIVAEQVMIDHLSRAV

SEQ ID NO: 44562 - protein, 137 aa, Homo sapiens
  MOD_RES (1)..(1): Any amino acid
XIRELTPKFDVILLEPPLEEYYRETGITANEKCWTWDDIMKLEIDEIAAPRSFIFLWCGSGEGLDLGRVCLRKWGYRRCEDICWIKTNKNNPGKTKTLDPKAVFQRTKAGSQLDQRLQIATTMQKHMHPISVLLIPT

SEQ ID NO: 44563 - protein, 153 aa, Homo sapiens
MLPLPSCSLPILLLFLLPSVPIESQPPPSTLPPFLAPEWDLLSPRVVLSRGAPAGPPLLFLLEAGAFRESAGAPANRSRRGSTVADPLPPTAKQDSRIWAFDEVLSRWETTSGSAYVPKTHGGPCAQPRAPEPADPTRTVGIKDSGEKLRHRS

SEQ ID NO: 44564 - protein, 204 aa, Homo sapiens
LRDKVLREKDLAQQQMQSDLDKADLSARVTELGLAVKRLEKQNLEKDQVNKDLTEKLEALAVLSDSESGVQLSGSERTADASNGSLRGLSGQRTPSPPRRSSPGRGRSPRRGPSPACSDSSTLALIHSALHKRQLQVQDMRGRYEASQDLLGTLRKQLSDSESERRALEEQLQRLRDKTDGAMQAHEDAQREVQRLRSANELLS

SEQ ID NO: 44565 - protein, 141 aa, Homo sapiens
MSSVAVLTQESFAEHRSGLVPQQIKVATLNSEEESDPPTYKDAFPPLPEKAACLESAQEPAGAWGNKIRPIKASVITQVFHVPLEERKYKDMNQFGEGEQAKICLEIMQRTGAHLELSLAKDQGLSIMVSGKLDAVMKARK

SEQ ID NO: 44566 - protein, 942 aa, Homo sapiens
MLLLLGLCLGLSLCVGSQEEAQSWGHSSEQDGLRVPRQVRLLQRLKTKPLMTEFSVKSTIISRYAFTTVSCRMLNRASEDQDIEFQMQIPAAAFITNFTMLIGDKVYQGEITEREKKSGDRVKEKRNKTTEENGEKGTEIFRASAVIPSKDKAAFFLSYEELLQRRLGKYEHSISVRPQQLSGRLSVDVNILESAGIASLEVLPLHNSRQRGSGRGEDDSGPPPSTVINQNETFANIIFKPTVVQQARIAQNGILGDFIIRYDVNREQSIGDIQVLNGYFVHYFAPKDLPPLPKNVVFVLDSSASMVGTKLRQTKDALFTILHDLRPQDRFSIIGFSNRIKVWKDHLISVTPDSIRDGKVYIHHMSPTGGTDINGALQRAIRLLNKYVAHSGIGDRSVSLIVFLTDGKPTVGETHTLKILNNTREAARGQVCIFTIGIGNDVDFRLLEKLSLENCGLTRRVHEEEDAGSQLIGFYDEIRTPLLSDIRIDYPPSSVVQATKTLFPNYFNGSEIIIAGKLVDRKLDHLHVEVTASNSKKFIILKTDVPVRPQKAGKDVTGSPRPGGDGEGDTNHIERLWSYLTTKELLSSWLQSDDEPEKERLRQRAQALAVSYRFLTPFTSMKLRGPVPRMDGLEEAHGMSAAMGPEPVVQSVRGAGTQPGPLLKKPYQPRIKISKTSVDGDPHFVVDFPLSRLTVCFNIDGQPGDILRLVSDHRDSGVTVNGELIGAPAPPNGHKKQRTYLRTITILINKPERSYLEITPSRVILDGGDRLVLPCNQSVVVGSWGLEVSVSANANVTVTIQGSIAFVILIHLYKKPAPFQRHHLGFYIANSEGLSSNCHGLLGQFLNQDARLTEDPAGPSQNLTHPLLLQVGEGPEAVLTVKGHQVPVVWKQRKIYNGEEQIDCWFARNNAAKLIDGEYKDYLASHPFDTGMTLGRGMSREL

SEQ ID NO: 44567 - protein, 68 aa, Homo sapiens
MATAPSYPAGLPGSPGPGSPPPPGGLELQSPPPLLPQIPAPGSGVSFHIQIGLTREFVLLPAASELAH

SEQ ID NO: 44568 - protein, 163 aa, Homo sapiens
MRLAGPLRIVVLVVSVGVTWIVVSILLGGPGSGFPRIQQLFTSPESSVTAAPRARKYKCGLPQPCPEEHLAFRVVSGAANVIGPKICLEDKMLMSSVKDNVGRGLNIALVNGPLPPDTGVSGELIEARAFDMWAGDVNDLLKFIRPLHEGTLVFVASYDDPAT

SEQ ID NO: 44569 - protein, 85 aa, Homo sapiens
MATGQVLFQRFFYTKSFVKHSMEHVSMACVHLASKIEEAPRRIRDVINVFHRLRQLRDKKKPVPLLLDQDYVNLKNQIIKAERRV

SEQ ID NO: 44570 - protein, 43 aa, Homo sapiens
MWTRRINHQLHTNKKALGTVSSQEQPNLLSGQTFQESYGKGLI

SEQ ID NO: 44571 - protein, 127 aa, Homo sapiens
MADKQISLPAKLINGGIAGLIGVTCVFPIDLAKTRLQNQQNGQRVYTSMSDCLIKTVRSEGYFGMYRGAAVNLTLVTPEKAIKLAANDFFRHQLSKDGQKLTLLKEMLAGCGAGTCQVIVTTPMEML

SEQ ID NO: 44572 - protein, 196 aa, Homo sapiens
MSKNPSGKNRETVPIKDNFELEVLQAQYKELKEKMKVMEEEVLIKNGEIKILRDSLHQTESVLEEQRRSHFLLEQEKTQALSDKEKEFSKKLQSLQSELQFKDAEMNELRTKLQTSERANKLAAPSVSHVSPRKNPSVVIKPEACSPQFGKTSFPTKESFSANMSLPHPCQTESGYKPLVGREDSKPHSLRGDSIK

SEQ ID NO: 44573 - protein, 609 aa, Homo sapiens
  MOD_RES (1)..(1): Any amino acid
XQNGESSPSSSSSAGDLAHANGLLPSAPSAASNNSNSLNVNNGVPGGAAAASSATVAAASATTAASSSLATPELGSSLKKKKRLSQSDEDVIRLIGQHLNGLGLNQTVDLLMQESGCRLEHPSATKFRNHVMEGDWDKAENDLNELKPLVHSPHAIVRMKFLLLQQKYLEYLEDGKVLEALQVLRCELTPLKYNTERIHVLSGYLMCSHAEDLRAKAEWEGKGTASRSKLLDKLQTYLPPSVMLPPRRLQTLLRQAVELQRDRCLYHNTKLDNNLDSVSLLIDHVCSRRQFPCYTQQILTEHCNEVWFCKFSNDGTKLATGSKDTTVIIWQVDPDTHLLKLLKTLEGHAYGVSYIAWSPDDNYLVACGPDDCSELWLWNVQTGELRTKMSQSHEDSLTSVAWNPDGKRFVTGGQRGQFYQCDLDGNLLDSWEGVRVQCLWCLSDGKTVLASDTHQRIRGYNFEDLTDRNIVQEDHPIMSFTISKNGRLALLNVATQGVHLWDLQDRVLVRKYQGVTQGFYTIHSCFGGHNEDFIASGSEDHKVYIWHKRSELPIAELTGHTRTVNCVSWNPQIPSMMASASDDGTVRIWGPAPFIDHQNIEEECSSMDS

SEQ ID NO: 44574 - protein, 250 aa, Homo sapiens
MRVLWMLFWLLFWLLLEFISHQSTCVINTLADHHHRGTDFGGSPWLRIIIAFPRSYKVVLTLWTVYLWLSFLKTIFQSENGHDVSTDVQQRARRSNRRRQEGNKIGLKDVITLRRHVETKGRAKIRKMKVTTKINHHDKINGKRKTAKKQKMFQRAQELRRRAEDYHKCKIPPSARKALCNWVSLLVFLAFGHSLPGQDMDTFFSLQLCAQALQREMAERKAAYKHHSPIPVGNRVAQKHLHPHPVGPLI

SEQ ID NO: 44575 - protein, 104 aa, Homo sapiens
  MOD_RES (1)..(1): Any amino acid
XNSFPASLVVAAEEGEREQNSLDSWGPKVEHTYELHNNGPGTVNGLHLSIHLPGQSQPSDLLYILDIQPQGGLQCFPQPPVNPLKVGFFKRNRPPLEEDDEEGE

SEQ ID NO: 44576 - protein, 210 aa, Homo sapiens
MLLLEVISGERLAKPERGKMRVHKISNVNKALDFIASKGVKLVSIGAEEIVDGNVKMTLGMIWTIILRFAIQDISVEETSAKEGLLLWCQRKTAPYKNVNIQNFHISWKDGLGFCALIHRHRPELIDYGKLRKDDPLTNLNTAFDVAEKYLDIPKMLDAEDIVGTARPDEKAIMTYVSSFYHAFSGAQKAETAANRICKVLAVNQENEQL

SEQ ID NO: 44577 - protein, 162 aa, Homo sapiens
MLFKQAELWMPHQGKGNKGEPPSALGLSTRKALSVLKEQLEAVLEGHLRERKKCLTWKEVWRSSFLHHSNRCSCFHWPGASLMLLAVLLLLGCCGGQPAGSRGVGLVNASALFLLLLLNLVLIGRQDRLKRREVERRLRGIIDQIQASSLPPHSDAETTHQS

SEQ ID NO: 44578 - protein, 1463 aa, Homo sapiens
MVSESDFSKDVAVQVLPLDKIEENNKQKANDIFISQYTMGQKDALRTVLKQKAQSMPVFKEVKVHLLEDAGIEKDAVTQETRISPSGIDSATTVAAATAAAIATAAPLIKVQSDLEAKVNSVTELLSKLQETDKHLQRVTEQQTSIQRKQEKLHCHDHEKQMNVFMEQHIRHLEKLQQQQIDIQTHFISAALKTSSFQPVSMPSSRAVEKYSVKPEHPNLGSCNPSLYNTFASKQAPLKEVEDTSFDKQKSPLETPAPRRFAPVPVSRDDELSKRENLLEEKENMEVSCHRGNVRLLEQILNNNDSLTRKSESSNTTSLTRSKIGWTPEKTNRFPSCEELETTKVTMQKSDDVLHDLGQKEKETNSMVQPKESLSMLKLPDLPQNSVKLQTTNTTRSVLKDAEKILRGVQNNKKVLEENLEAIIRAKDGAAMYSLINALSTNREMSEKIRIRKTVDEWIKTISAEIQDELSRTDYEQKRFDQKNQRTKKGQNMTKDIRTNTQDKTVNKSVIPRKHSQKQIEEHFRNLPMRGMPASSLQKERKEGLLKATTVIQDEDYMLQVYGKPVYQGHRSTLKKGPYLRFNSPSPKSRPQRPKVIERVKGTKVKSIRTQTDFYATKPKKMDSKMKHSVPVLPHGDQQYLFSPSREMPTFSGTLEGHLIPMAILLGQTQSNSDTMPPAGVIVSKPHPVTVTTSIPPSSRKVETGVKKPNIAIVEMKSEKKDPPQLTVQVLPSVDIDSISNSSADVLSPLSSPKEASLPPVQTWIKTPEIMKVDEEEVKFPGTNFDEIIDVIQEEEKCDEIPDSEPILEFNRSVKADSTKYNGPPFPPVASTFQPTADILDKVIERKETLENSLIQWVEQEIMSRIISGLFPVQQQIAPSISVSVSETSEPLTSDIVEGTSSGALQLFVDAGVPVNSNVIKHFVNEALAETIAVMLGDREAKKQGPVATGVSGDASTNETYLPARVCTPLPTPQPTPPCSPSSPAKECVLVKTPDSSPCDSDHDMAFPVKEICAEKGDDMPAIMLVNTPTVTPTTTPPPAAAVFTPTLSDISIDKLKVSSPELPKPWGDGDLPLEEENPNSPQEELHPRAIVMSVAKDEEPESMDFPAQPPPPEPVPFMPFPAGTKAPSPSQMPGSDSSTLESTLSVTVTETETLDKPISEGEILFSCGQKLAPKILEDIGLYLTNLNDSLSSTLHDAVEMEDDPPSEGQVIRMSHKKFHADAILSFAKQNQESAVSQQAVYHSEDLENSVGELSEGQRPQLTAAAENILMGHSLYMQPPVTNTQSLDQQCDPKPLSRQFDTVSGSIYEDSCASHGPMSLGELELEPNSKLVLPTTLLTAQENDVNLPVAAEDFSQYQLKQNQDVKQVEHKPSQSYLRVRNKSDIAPSQQQVSPGDMDRTQIELNPYLTCVFSGGKAVPLSASQMPPAKMSVMLPSVNLEDCSQSLSLSTMQEDMESSGADTF

SEQ ID NO: 44579 - protein, 128 aa, Homo sapiens
PQLFTGILSPWKGLLLYGPPGTGKTLLAKAVATECKTTFFNISASTIVSKWRGDSEKLVRVLFELARYHAPSTIFLDELESVMSQRGTASGGEHEGSLRMKTELLVQMDGLARSEDLVFVLAASNLPW

SEQ ID NO: 44580 - protein, 76 aa, Homo sapiens
MAQEEEDVRDYNLTEEQKAIKAKYPPVNRKYEYLDHTADVHGLYYTEHEYTSLGYTHGEILWRKHLSNVQWPCLVT

SEQ ID NO: 44581 - protein, 288 aa, Homo sapiens
LEKFLFILSRKNLSVWKEEAIIEPVIKWTAHDVENRIECLYNLLSYINIDIDPVYLKTALGLQRSCLLTENKIRSLIYNALNPMHKEISQRSTATMYIIGGYYWHPLSEVHIWDPLTNVWIQGAEIPDYTRESYGVTCLGPNIYVTGGYRTDNIEALDTVWIYNSESDEWTEGLPMLNARYYHCAVTLGGCVYALGGYRKGAPAEEAEFYDPLKEKWIPIANMIKGVGNATACVLHDVIYVIGGHCGYRGSCTYDKVQSYNSDINEWSLITSSPHPGKKTWYVGAFSI

SEQ ID NO: 44582 - protein, 38 aa, Homo sapiens
  MOD_RES (1)..(1): Any amino acid
XATGSGIVIIRSCDDVITGRGSGETLGTSLSAASSRQN

SEQ ID NO: 44583 - protein, 158 aa, Homo sapiens
MWLAREGIVAPLPGEWKPCQDITGDIYYFNFANGQSMWDHPCDEHYRSLVIQERAKLSTSGAIKKKKKKKEKKDKKDRDPPKSSLALGSSLAPVHVPLGGLAPLRGLVDTPPSALRGSQSVSLGSSVESGRQLGELMLPSQGLKTSAYTKGLLGSIYE

SEQ ID NO: 44584 - protein, 312 aa, Homo sapiens
VMENQSSISEFFLRGISAPPEQQQSLFGIFLCMYLVTLTGNLLIILAIGSDLHLHTPMYFFLANLSFVDMGLTSSTVTKMLVNIQTRHHTISYTGCLTQMYFFLMFGDLDSFFLAAMAYDRYVAICHPLCYSTVMRPQVCALMLALCWVLTNIVALTHTFLMARLSFCVTGEIAHFFCDITPVLKLSCSDTHINEMMVFVLGGTVLIVPFLCIVTSYIHIVPAILRVRTRGGVGKAFSTCSSHLCVVCVFYGTLFSAYLCPPSIASEEKDIAAAAMYTIVTPMLNPFIYSLRNKDMKGALKRLFSHRSIVSS

SEQ ID NO: 44585 - protein, 543 aa, Homo sapiens
MMKLRHKNKKPGEGSKGHKKISWPYPQPAKQNGKKATSKVPSAPHFVHPNDHANREAELKKKWEEVLQELNMFPQLDDEATRKAYYKEFRKVVEYSDVILEVLDARDPLGCRCFQMEEAVLRAQGNKKLVLVLNKIDLVPKEVVEKWLDYLRNELPTVAFKASTQHQVKNLNRCSVPVDQASESLLKSKACFGAENLMRVLGNYCRLGEVRTHIRVGVVGLPNVGKSSLINSLKRSRACSVGAVPGITKFMQEVYLDKFIRLLDAPGIVPGPNSEVGTILRNCVHVQKLADPVTPVETILQRCNLEEISNYYGVSGFQTTEHFLTAVAHRLGKKKKGGLYSQEQAAKAVLADWVSGKISFYIPPPATHTLPTHLSAEIVKEMTEVFDIEDTEQANEDTMECLATGESDELLGDTDPLEMEIKLLHSPMTKIADAIENKTTVYKIGDLTGYCTNPNRHQMGWAKRNVDHRPKSNSMVDVCSVDRRSVLQRIMETDPLQQGQALASALKNKKKMQKRADKIASKLSDSMMSALDLSGNADDGVGD

SEQ ID NO: 44586 - protein, 162 aa, Homo sapiens
MTTEVGSVSEVKKDSSQLGTDATKEKPKEVAENQQNQSSDPEEEKGSQPPPAAESQSSLRRQKREKETSESRGISRFIPPWLKKQKSYTLVVAKDGGDKKEPTQAVVEEQVLDKEEPLPEEQRQAKGDAEEMAQKKQEIKVEVKEEKPSVSKEEKPSVSKVE

SEQ ID NO: 44587 - protein, 335 aa, Homo sapiens
MWLLGPLCLLLSSAAAKAKSKCGPTFFPCASGIHCIIGRFRCNGFEDCPDGSDEENCTANPLLCSTARYHCKNGLCIDKSFICDGQNNCQDNSDEESCESSQVSLLLPRLECSGTISAHCKLRLPGSRHSPASASRVAGTTEPGSGQVFVTSENQLVYYPSITYAIIGSSVIFVLVVALLALVLHHQRKRNNLMTLPVHRLQHPVLLSRLVVLDHPHHCNVTYNVNNGIQYVASQAEQNASEVGSPPSYSEALLDQRPAWYDLPPPPYSSDTESLNQADLPPYRSRSGSANSASSQAASSLLSVEDTSHSPGQPGPQEGTAEPRDSEPSQGTEEV

SEQ ID NO: 44588 - protein, 520 aa, Homo sapiens
MNSSLGPTIEKLSVSHIMAAKAVANTMRTSLGPNGLDKMMVDKDGDVTVTNDGATILSMMDVDHQIAKLMVELSKSQDDEIGDGTTGVVVLAGALLEEAEQLLDRGIHPIRIADGYEQAARVAIEHLDKISDSVLVDIKDTEPLIQTAKTTLGSKVVNSCHRQMAEIAVNAVLTVADMERRDVDFELIKVEGKVGGRLEDTKLIKGVIVDKDFSHPQMPKKVEDAKIAILTCPFEPPKPKTKHKLDVTSVEDYKALQKYEKEKFEEMIQQIKETGANLAICQWGFDDEANHLLLQNNLPAVRWVGGPEIELIAIATGGRIVPRFSELTAEKLGFAGLVQEISFGTTKDKMLVIEQCKNSRAVTIFIRGGNKMIIEEAKRSLHDALCVIRNLIRDNRVVYGGGAAEISCALAVSQEADKCPTLEQYAMRAFADALEVIPMALSENSGMNPIQTMTEVRARQVKEMNPALGIDCLHKGTNDMKQQHVIETLIGKKQQISLATQMVRMILKIDDIRKPGESEE

SEQ ID NO: 44589 - protein, 26 aa, Homo sapiens
  MOD_RES (1)..(1): Any amino acid
XRGRVCFEMKVSRSKRRGRDREVHPL

SEQ ID NO: 44590 - protein, 125 aa, Homo sapiens
MLVELKNGETYNGHLVSCDNWMNINLREVICTSRDGDKFWRMPECYIRGSTIKYLRIPDEIIDMVKEEVVAKGRGRGGLQQQKQQKGRGMGGAGRGVFGGRGRGGIPGTGRGQPEKKPGRQAGKQ

SEQ ID NO: 44591 - protein, 389 aa, Homo sapiens
MALYDEDLLKNPFYLALQKCRPDLCSKVAQIHGIVLVPCKGSLSSSIQSTCQFESYILIPVEEHFQTLNGKDVFIQGNRIKLGAGFACLLSVPILFEETFYNEKEESFSILCIAHPLEKRESSEEPLAPSDPFSLKTIEDVREFLGRHSERFDRNIASFHRTFRECERKSLRHHIDSANALYTKCLQQLLRDSHLKMLAKQEAQMNLMKQAVEIYVHHEIYNLIFKYVGTMEASEDAAFNKITRSLQDLQQKDIGVKPEFSFNIPRAKRELAQLNKCTSPQQKLVCLRKVVQLITQSPSQRVNLETMCADDLLSVLLYLLVKTEIPNWMANLSYIKNFRFSSLAKDELGYCLTSFEAAIEYIRQGSLSAKPPVRSHPCPGLPLWASWFP

SEQ ID NO: 44592 - protein, 494 aa, Homo sapiens
MKLGKKPMYKPVDPYSRMQSTYNYNMRGGAYPPRYFYPFPVPPLLYQVELSVGGQQFNGKGKTRQAAKHDAAAKALRILQNEPLPERLEVNGRESEEENLNKSEISQVFEIALKRNLPVNFEVARESGPPHMKNFVTKVSVGEFVGEGEGKSKKISKKNAAIAVLEELKKLPPLPAVERVKPRIKKKTKPIVKTSPEYGQGINPISRLAQIQQAKKEKEPEYTLLTERGLPRRREFVMQVKVGNHTAEGTGTNKKVAKRNAAENMLEILGFKVPQAQPTKPALKSEEKTPIKKPGDGRKVTFFEPGSGDENGTSNKEDEFRMPYLSHQQLPAGILPMVPEVAQAVGVSQGHHTKDFTRAAPNPAKATVTAMIARELLYGGTSPTAETILKNNISSGHVPHGPLTRPSEQLDYLSRVQGFQVEYKDFPKNNKNEFVSLINCSSQPPLISHGIGKDVESCHDMAALNILKLLSELDQQSTEMPRTGNGPMSVCGRC

SEQ ID NO: 44593 - protein, 262 aa, Homo sapiens
  MOD_RES (1)..(1): Any amino acid
XEEIQRLTDELQVKEKEQCKLDSALKKAQLEIDKLKENLVKLKENDAADLQKAKEQNQRLDEEILALRNRVRSLDSEKKVLGEMVERLKGEVCESQENKQLGNHSPGKTHPSSGEKLKYNQQGEVQQLHQNLHRLQILCNSAENELRYERGQNLDLKQHNSLLQEENIKIKIELKHAQQKLLDSTKMCSSLTAEYKHCQQKIKELELEVLKHTQSIKSQNNLQEKLVQEKSKVADAEEKILDLQRKLEHAHKVCLTDTCISE

SEQ ID NO: 44594 - protein, 346 aa, Homo sapiens
MAQQANVGELLAMLDSPMLGVRDDVTAVFKENLNSDRGPMLVNTLVDYYLETSSQPALHILTTLQEPHDKMDTDVVVLTTGVLVLITMLPMIPQSGKQHLLDFFDIFGRLSSWCLKKPGHVAEVYLVHLHASVYALFHRLYGMYPCNFVSFLRSHYSMKENLETFEEVVKPMMEHVRIHPELVTGSKDHELDPRRWKRLETHDVVIECAKISLDPTEASYEDGYSVSHQISARFPHRSADVTTSPYADTQNSYGCATSTPYSTSRLMLLNMPGQLPQTLSSPSTRLITEPPQEERMDSARPCLHRQHHLLNDRGSEEPPGSKGSVTLSDLPGFLGDLASEEDSIEK

SEQ ID NO: 44595 - protein, 86 aa, Homo sapiens
MAVLAPLIALVYSVPRLSRWLAQPYYLLSALLSAAFLLVRKLPPLCHGLPTQREDGNPCDFDWREVEILMFLSAIVMMKNRRSSTK

SEQ ID NO: 44596 - protein, 139 aa, Homo sapiens
MSAAKENPCRKFQANIFNKSKCQNCFKPRESHLLNDEDLTQAKPIYGGWLLLAPDGTDFDNPVHRSRKWQRRFFILYEHGLLRYALDEMPTTLPQGTINMNQCTDVVDGEGRTGQKFSLCILTPEKEHFIRAETKEIVS

SEQ ID NO: 44597 - protein, 791 aa, Homo sapiens
QLSSACSAQELVKLLNELFARFDKLAAKYHQLRIKILGDCYYCICGLPDYREDHAVCSILMGLAMVEAISYVREKTKTGVDMRVGVHTGTVLGGVLGQKRWQYDVWSTDVTVANKMEAGGIPGGSKIEERLYSCVVAPTLRLRWERVHISQSTMDCLKGEFDVEPGDGGSRCDYLEEKGIETYLIIASKPEVKKTATQNGLNGSALPNGAPASSKSSSPALIETKEPNGSAHSSGSTSEKPEEQDAQADNPSFPNPRRRLRLQDLADRVVDASEDEHELNQLLNEALLERESAQVVKKRNTFLLSMRFMDPEMETRYSVEKEKQSGAAFSCSCVVLLCTALVEILIDPWLMTNYVTFMVGEILLLILTICSLAAIFPRAFPKKLVAFSTWIDRTRWARNTWAMLAIFILVMANVVDMVSHMVKLTLMLLVAGAVATINLYAWRPVFDEYDHKRFREHDLPMVALEQMQGFNPGLNGTDRLPLVPSKYSMTVMVFLMMLSFYYFSRHVEKLARTLFLWKIEVHDQKERVYEMRRWNEALVTNMLPEHVARHFLGSKKRDEELYSQTYDEIGVMFASLPNFADFYTEESINNGGIECLRFLNEIISDFDSLLDNPKFRVITKIKTIGSTYMAASGVTPDVNTNGFASSNKEDKSERERWQHLADLADFALAMKDTLTNINNQSFNNFMLRIGMNKGGVLAGVIGARKPHYDIWGNTVNVASRMESTGVMGNIQVVEETQVILREYGFRFVRRGPIFVKGKGELLTFFLKGRDKLATFPNGPSVTLPHQVVDNS

SEQ ID NO: 44598 - protein, 226 aa, Homo sapiens
MPLENLEEEDFWNRIRQEQTEDCPPSSPSRGWHCQDWPSRKPPTSIRLCFAKPIIKRHRMPSYMAPYYEALCKSLDWQIDVDLLNKMKKANEDELKRLDEELEDAEKNLGESEIRDAMMAKAEYLCRIGDKEGALTAFRKTYDKTVALGHRLDIVFYLLRIGLFYMDNDLITRNTEKAKSLIEEGGDWDRRNRLKVYQGLYCVAIRDFKQAAELFLDTVSTFTSYE

SEQ ID NO: 44599 - protein, 184 aa, Homo sapiens
MNEVSVIKEGWLHKRGEYIKTWRPRYFLLKSDGSFIGYKERPEAPDQTLPPLNNFSVAECQLMKTERPRPNTFVIRCLQWTTVIERTFHVDSPDEREEWMRAIQMVANSLKQRAPGEDPMDYKCGSPSDSSTTEEMEVAVSKARAKVTMNDFDYLKLLGKGTFGKVILVREKATGRYYAMKILR

SEQ ID NO: 44600 - protein, 161 aa, Homo sapiens
  MOD_RES (1)..(1): Any amino acid
XGCCNIYRSIIGFVKLRSNKVKRSQKLVYMGKLKEKESFGEISVLLQVPFTCTIITKKEVEMAIIEDKDLFELDPVTKQLMLQTAKPTFGHLTDEDVKNEYLKKEQQKEWKDFKIASWTKEITDFICLYEKHQDNFTLPKIAHLERITKRIKNNSILIHLE

SEQ ID NO: 44601 - protein, 46 aa, Homo sapiens
MPAGVPMSTYLKMFAASLLAMCAGAEVVHRYYRPDLVSAGGLLFYF

SEQ ID NO: 44602 - protein, 10 aa, Homo sapiens
  MOD_RES (1)..(1): Any amino acid
XRSDSAKESK

SEQ ID NO: 44603 - protein, 95 aa, Homo sapiens
MSLNLPEASLLRASWPEQAKEPRREGHTDKQQTEDVLAAGLRCLPHLPAICARRMSPAFRAMDVEPRAKGVLLEPFVHQVGGHSCVLRFNETTLC

SEQ ID NO: 44604 - protein, 127 aa, Homo sapiens
MQCRLPRGLAGALLTLLCMGLLCLRYHLNLSPQRVQGTPELSQPNPGPPKLQLHDVFIAVKTTRAFHRLRLELLLDTWVSRTREQVTNICLHRQPRQRPPGETGVPPCGHQLLRGTQPPSSVLQDGC

SEQ ID NO: 44605 - protein, 408 aa, Homo sapiens
MPQLNGGGGDDLGANDELISFKDEGEQEEKSSENSSAERDLADVKSSLVNESETNQNSSSDSEAERRPPPRSESFRDKSRESLEEAAKRQDGGLFKGPPYPGYPFIMIPDLTSPYLPNGSLSPTARTSNKVPVVQHPHHVHPLTPLITYSNEHFTPGNPPPHLPADVDPKTGIPRPPHPPDISPYYPLSPGTVGQIPHPLGWLVPQQGQPVYPITTGGFRHPYPTALTVNASMSRFPPHMVPPHHTLHTTGIPHPAIVTPTVKQESSQSDVGSLHSSKHQDSKKEEEKKKPHIKKPLNAFMLYMKEMRAKVVAECTLKESAAINQILGRRWHALSREEQAKYYELARKERQLHMQLYPGWSARDNYGKKKKRKRDKQPGETNGEKKSAFATYKVKAAASAHPLQMEAY

SEQ ID NO: 44606 - protein, 213 aa, Homo sapiens
  MOD_RES (1)..(1): Any amino acid
XPGDFNQAAMELGATVCTPQRPLCSQCPVESLCRARQRVEQEQLLASGSLSGSPDVEECGLLAGLWEFPSVTWEPSEQLQRKALLQELQRWAGPLPATHLRHLGEVVHTFSHIKLTYQVYGLALEGQTPVTTVPPGARWLTQEEFHTAAVSTAMKKVFRVYQGQQPGTCMGSKRSQVSSPCSRKKPRMGQQVLDNFFRSHISTDAHSLNSAAQ

SEQ ID NO: 44607 - protein, 114 aa, Homo sapiens
MMYGGMRGMKGLVYETSVLDPDEGIRFRGFSIPECQKLLPKAKGGEEPLPEGLFWLLVTGHIPTEEQVSWLSKEWAKRAALPSHVVTMLDNFPTNLHPMSQLSAAVTALNSESN

SEQ ID NO: 44608 - protein, 115 aa, Homo sapiens
  MOD_RES (1)..(1): Any amino acid
XLSLPCTLNLQLMRFVFDRQTGHKKKLNTYIGFSEILDMEPYVEHKGGSYVYELSAVLIHRGVSAYSGHYIAHVKDPQSGEWYKFNDEDIEKMEGKKLQLGIEEDLGKTFKFRTF

SEQ ID NO: 44609 - protein, 206 aa, Homo sapiens
MVTQTHIAEATGWVPGDRKRARKFIDSDFSESKRSKKGDKNGKGLRHFSMKVCEKVQRKGTTSYNEVADELVSEFTNSNNHLAADSQAYDQKNIRRRVYDALNVLMAMNIISKEKKEIKWIGLPTNSAQECQNLEIEKQRRIERIKQKRAQLQELLLQQIAFKNLVQRNRQNEQQNQGPPALNSTIQLPFIIINTSRKTVIDCSIS

SEQ ID NO: 44610 - protein, 103 aa, Homo sapiens
  MOD_RES (1)..(1): Any amino acid
XRKDLAKLHREVRSTPLTATPGGRGDMKYGIYAVENEHMNRLQSQRAMLLQGTESLNRATQSIERSHRIATETDQIGSEIIEELGEQRDQLERTKSRVTGKHK

SEQ ID NO: 44611 - protein, 149 aa, Homo sapiens
  MOD_RES (1)..(1): Any amino acid
XSVEKLCSVEQDLAMGSDAEGEKIKDSMKLIVPVLLDAAVPAYDKIRVLLLYILLRNGVSEENLAKLIQHANVQAHSSLIRNLEQLGGTVTNPGPHQAQPLCDQPPSPQSPCCPPCPACRARGPPAGWSRENAWSPPISCPAGPRSSRM

SEQ ID NO: 44612 - protein, 311 aa, Homo sapiens
  MOD_RES (1)..(1): Any amino acid
XRKLIRAALRELRQRKRDQRDKERERRLQEARGRPGEGRGNTATETTTRHSQRAADGSAVSTVTKTERLVHSNDGTRTARTTTVESSFVRRSENGSGSTMMQTKTFSSSSSSKKMGSIFDREDQASPRAGSLAALEKRQAEKKKELMKAQSLPKTSASQARKAMIEKLEKEGAAGPGGPRAAVQRSTSFGVPNANSIKQMLLDWCRAKTRGYEHVDIQNFSSSWSDGMAFCALVHNFFPEAFDYGQLSPQNRRQNFEVAFSSAETHADCPQLLDTEDMVRLREPDWKCVYTYIQEFYRCLVQKGLVKTKKS

SEQ ID NO: 44613 - protein, 170 aa, Homo sapiens
LASRLLPDFLLERRLTLADALEKCLKKGKGEEQALAAAVLGLLCVQLGPGPKGEELFHSLQPLLVSVLSDSTASPAARLHCASALGLGCYVAAADIQDLVSCLACLESVFSRFYGLGGSSTSPVVPASLHGLLSAALQAWALLLTICPSTQISHILDSCPGCPSSCPVKV

SEQ ID NO: 44614 - protein, 59 aa, Homo sapiens
MTPQEIAVNLRPGDKTTFQLQVRQVEDYPVDLYYLMDLSLSMKDDLDNIRSLGTKLAEE

SEQ ID NO: 44615 - protein, 192 aa, Homo sapiens
  MOD_RES (1)..(1): Any amino acid
XCRVQPLCEQLQFMASHGNDAARARFESKVPSFYYRPTPSDCQLLREQWIRAKYERQEFIYPEKQEPYSAGYREGFLWKRGRDNGQFLSRKFVLTEREGALKYFNRNDAKEPKAVMKIEHLNATFQPAKIGHPHGLQVTYLKDNSTRNIFIYHEDGKEIVDWFNALRAARFHYLQVAFPGAGDADLVPKLSR

SEQ ID NO: 44616 - protein, 128 aa, Homo sapiens
MHVFSLIDGSSGLAVLRLSLKFPMSQWTPEYNELYTLKVDMKSEIPSDAPKTQESLKGILLHPEPIGAAKSFPAGVEMINSKVGNEFSHLCDDSQKQEKEMNGNQQEQEKSLVVRKKRKSQQAGPSYV

SEQ ID NO: 44617 - protein, 114 aa, Homo sapiens
MLREEATKKSKEKEPGMALPQGRLTFRDVAIEFSLEEWKCLNPAQRALYRAVMLENYRNLEFVDSSLKSMMEFSSTRHSITGEVIHTGTLQRHKSHHIGDFCFPEMKKDIHHFE

SEQ ID NO: 44618 - protein, 329 aa, Homo sapiens [sequence omitted]

SEQ ID NO: 44619 - protein, 186 aa, Homo sapiens
  MOD_RES (1)..(1): Any amino acid
XKDTQSVSAIGEEKSHESKHQESVKKKGREEEDMEEEENDDDDDDDDEEDGVFDDEDEEEENIESKVTKPVQIQKRAVKRPAPAKSSDHSEEDSDLEESDSIDDGEELAQSDTSTEEQEDKAVQVSNKKKRKLPSDVNEGKTVFIRNLSFDSEEEELGELLQQFGELKYVRIVLHPDTEHSKGWWA

SEQ ID NO: 44620 - protein, 92 aa, Homo sapiens
MAYDDSVKKEDCFDGDHTFEDIGLAAGRSQREKKRSYKDFLREEEEIAAQVRNSSKKKLKDSELYFLGTDTHKKKRKHSSDDYYYGGQWFLF

SEQ ID NO: 44621 - protein, 157 aa, Homo sapiens
MGRLHCTEDPVPEAVGGDMQQLNQLGAQQFSALTEVLFHFLTEPKEARVFTVLSLQVERFLAQLSEFATTNQISLGSLRSIVKSLLLVPNGALKKSLTAKQVQADFITLGLSEEKATYFSEKWKQNAPTLARWAIGQTLMINQLIDMEWKFGVTSGS

SEQ ID NO: 44622 - protein, 91 aa, Homo sapiens
MAPKKRPETQKTSEIVLRPRNKRSRSPLELEPEAKKLCAKGSDHTDMERPQEVMRQRLTVPNETRLPFGEFSRKTFREIGEENMSVLLGRS

SEQ ID NO: 44623 - protein, 157 aa, Homo sapiens
  MOD_RES (1)..(1): Any amino acid
XGRKEPDSYDGITTNQRGVTIAALGADCIPIVFADPVKKACGVAHAGWKGTLLGVAMATVNAMIAEYGCSLEDIVVVLGPSVGPCCFTLPRESAEAFHNLHPACVQLFDSPNPCIDIRKATRYIFPGTFSCQHPYFFSYCFGYWENKLLLSFEKYFS

SEQ ID NO: 44624 - protein, 564 aa, Homo sapiens
MSLLMFTQLLLCGFLYVRVDGSRLRQEDFPPRIVEHPSDVIVSKGEPTTLNCKAEGRPTPTIEWYKDGERVETDKDDPRSHRMLLPSGSLFFLRIVHGRRSKPDEGSYVCVARNYLGEAVSRNASLEVALLRDDFRQNPTDVVVAAGEPAILECQPPRGHPEPTIYWKKDKVRIDDKEERISIRGGKLMISNTRKSDAGMYTCVGTNMVGERDSDPAELTVFERPTFLRRPINQVVLEEEAVEFRCQVQGDPQPTVRWKKDDADLPRGRYDIKDDYTLRIKKTMSTDEGTYMCIAENRVGKMEASATLTVRAPPQFVVRPRDQIVAQGRTVTFPCETKGNPQPAVFWQKEGSQNLLFPNQPQQPNSRCSVSPTGDLTITNIQRSDAGYYICQALTVAGSILAKAQLEVTDVLTDRPPPIILQGPANQTLAVDGTALLKCKATGDPLPVISWLKEGFTFPGRDPRATIQEQGTLQIKNLRISDTGTYTCVATSSSGETSWSAVLDVTESGATISKNYDLSDLPGPPSKPQVTDVTKNSVTLSWQPGTPGTLPASAYIIEAFRYVV

SEQ ID NO: 44625 - protein, 121 aa, Homo sapiens
MLRTAMGLRSWLAAPWGALPPRPPLLLLLLLLLLLQPPPPTWALSPRISLPLGSEERPFLRFEAEHISNYTALLLSRDGRTLYVGAREALFALSSNLSFLPGGEYQELLWGADAEKKQQCS

SEQ ID NO: 44626 - protein, 247 aa, Homo sapiens
  MOD_RES (1)..(1): Any amino acid
XGTTTRRFVGHTKDVLSVAFSSDNRQIVSGSRDKTIKLWNTLGVCKYTVQDESHSEWVSCVRFSPNSSNPIIVSCGWDKLVKVWNLANCKLKTNHIGHTGYLNTVTVSPDGSLCASGGKDGQAMLWDLNEGKHLYTLDGGDIINALCFSPNRYWLCAATGPSIKIWDLEGKIIVDELKQEVISTSSKAEPPQCTSLAWSADGQEYITTTYKLAVEMRAVSYSLPGVVAHAYWRLRWEDLLNCRGLRL

SEQ ID NO: 44627 - protein, 162 aa, Homo sapiens
MAAETLLSSLLGLLLLGLLLPASLTGGVGSLNLEELSEMRYGIEILPLPVMGGQSQSSDVVIVSSKYKQRYECRLPAGAIHFQREREEETPAYQGPGIPELLSPMRDAPCLLKTYGNGSKCDLNGRPREAEVRFLCDEGAGISGDYIDRVDEPLSCSYVLTI

SEQ ID NO: 44628 - protein, 182 aa, Homo sapiens
AKSGVAGGILLVVPNVMGMMCWSPPLDKMGNSVKGIHFCHDLVSLCNFHNYDNLRHFAKKLDPRREGGDQRVKSVINLLFAAYTGDVSALRRFALSAMDMEQRDYDSRTALHVAAAEGGITLPWMKHCTLDTMMYLKFSKNTKSSTHLKEILTTGRKIKPSIRILMDCCNGLKSQDLNHLPI

SEQ ID NO: 44629 - protein, 42 aa, Homo sapiens
MVRWPRSMCVSRHRLPAPAAYGDPKALAGSVPLVPTAPMPGC

SEQ ID NO: 44630 - protein, 155 aa, Homo sapiens
MAFLVRCYANCLQPWSSKLPADFTKLHLTDSLHPQVTHVSSSHSGCSITSDSGSSSLSDIYQATESEAGDMDLSGLPETAVDSEDDDDEEDIERASDPLMSRDIVRDCLEKDPIDRTDDDIEQLLEFMHQLPAFANMTMSVRRELCAVMVFAVVE

SEQ ID NO: 44631 - protein, 272 aa, Homo sapiens
MPGGAGAARLCLLAFALQPLRPRAAREPGWTRGSEEGSPKLQHELIIPQWKTSESPVREKHPLKAELRVMAEGRELILDLEKNEQLFAPSYTETHYTSSGNPQTTTRKLEDHCFYHGTVRETELSSVTLSTCRGIRGLITVSSNLSYVIEPLPDSKGQHLIYRSEHLKPPPGNCGFEHSKPTTRDWALQFTQQTKKRPRRMKREDLNSMKYVELYLVADYLEFQKNRRDQDATKHKLIEIANYVDKVRPVLPILEHPDCSRGLGSVDPREHV

SEQ ID NO: 44632 - protein, 125 aa, Homo sapiens
MFKGVGLAAAVLSFWLNIYYIVIISWAIYYLYNSFTTTLPWKQCDNPWNTDRCFSNYSMVNTTNMTSAVVEFWERNMHQMTDGLDKPGQIRWPLAITLAIAWILVYFCIWKGVGWTGKVVYFSAT

SEQ ID NO: 44633 - protein, 706 aa, Homo sapiens
MEENPTLESEAWGSSREWLAPREARGGPSLSSVLNELPSAATLRYRDPGVLPWGALEEEEEDGGRSRKAFTEVTQTELQDPHPSRELPWPMQARRAYRQRNASRDQVVYGSGTKTDRWARLLRRSKEKTKEGLRSLQPWAWTLKRIGGQFGAGTESYFSLLRFLLLLNVLASVLMACMTLLPTWLGGAPPGPPGPDISSPCGSYNPHSQGLVTFATQLFNLLSGEGYLEWSPLFYGFYPPRPRLAVTYLCWAFAVGLICLLLILHRSVSGLKQTLLAESEALTSYSHRVFSAWDFGLCGDVHVRLRQRIILYELKVELEETVVRRQAAVRTLGQQARVWLVRVLLNLLVVALLGAAFYGVYWATGCTVELQEMPLVQELPLLKLGVNYLPSIFIAGVNFVLPPVFKLIAPLEGYTRSRQIVFILLRTVFLRLASLVVLLFSLWNQITCGGDSEAEDCKTCGYNYKQLPCWETVLGQEMYKLLLFDLLTVLAVALLIQFPRKLLCGLCPGALGRLAGTQEFQVPDEVLGLIYAQTVVWVGSFFCPLLPLLNTVKFLLLFYLKKLTLFSTCSPAARTFRASAANFFFPLVLLLGLAISSVPLLYSIFLIPPSKLCGPFRGQSSIWAQIPESISSLPETTQNFLFFLGTQAFAVPLLLISSILMAYTVALANSYGRLISELKRQRETEAQNKVFLARRAVALTSTKPAL

SEQ ID NO: 44634 - protein, 121 aa, Homo sapiens
MASPADSCIQFTRHASDVLLNLNRLRSRDILTDVVIVVSREQFRAHKTVLMACSGLFYSIFTDQLKCNLSVINLDPEINPEGFCILLDFMYTSRLNLREGNIMAVMATAMYLQMEHVVDTC

SEQ ID NO: 44635 - protein, 70 aa, Homo sapiens
MAAGLARLLLLLGLSAGGPAPAGAAKMKVVEEPNAFGVNNPFLPQASRLQAKRDPSPVSGTSMSSARSTT

SEQ ID NO: 44636 - protein, 95 aa, Homo sapiens
  MOD_RES (1)..(1): Any amino acid
XDEYWHAHVDKVTYGSFDYTSLLYLSNYLEDFGGGRFMFMEEGANKTVEPRAGEGFGRPASASRSPACLPSPQKSQSQQFCGKMKNSQSTRQAFS

SEQ ID NO: 44637 - protein, 97 aa, Homo sapiens
MELTLQKYGSYEKFEQATGGSLLSKTRIWSHVRKYMMKEGCLGEIVVHLTEDLLSRASMTVVNGCPTLTINVSTAREHWLEGMLRHEIGTHYFRGIN

SEQ ID NO: 44638 - protein, 20 aa, Homo sapiens
  MOD_RES (1)..(1): Any amino acid
XQTGANNLFFGTGTRLTVIP

SEQ ID NO: 44639 - protein, 102 aa, Homo sapiens
MLCQAQPRSASDVEERVQKSFPHPIDKWAIADAQSAIEKRKRRNPLSLPVEKIHPLLKEVLGYKIDHQVSVYIVAVLEYISADILKLVGNYVRNIRHYEITK

SEQ ID NO: 44640 - protein, 72 aa, Homo sapiens
MPGEATETVPATEQELPQPQAETGSGTESDSDESVPELEEQELLESLSGNLRISSLSSQNQMSTRALLQILT

SEQ ID NO: 44641 - protein, 390 aa, Homo sapiens [sequence omitted]

SEQ ID NO: 44642 - protein, 237 aa, Homo sapiens
MKMASSLAFLLLNFHVSLFLVQLLTPCSAQFSVLGPSGPILAMVGEDADLPCHLFPTMSAETMELRWVSSSLRQVVNVYADGKEVEDRQSAPYRGRTSILRDGITAGKAALRIHNVTASDSGKYLCYFQDGDFYEKALVELKVAALGSDLHIEVKGYEDGGIHLECRSTGWYPQPQIKWSDTKGENIPAVEAPVVADGVGLYAVAASVIMRGSSGGGVSCIIRNSLLGLEKTASISI

SEQ ID NO: 44643 - protein, 214 aa, Homo sapiens
AVKLKIDLANRETSIFSYREDPIVYEIHPTKSFISGGSTITGVGKNLNSVSVPRMVINVHEAGRNFTVACQHRSNSEIICCTTPSLQQLNLQLPLKTKAFFMLDGILSKYFDLIYVHNPVFKPFEKPVMISMGNENVLEIKGNDIDPEAVKGEVLKVGNKSCENIHLHSEAVLCTVPNDLLKLNSELNIEVGFLHSSHDVNKEASVIMLFSGLK

SEQ ID NO: 44644 - protein, 375 aa, Homo sapiens
MLLFFTLGLLIHFVFFASIFDIYFTSPLVHGMTPQFTPLPPPARRLVLFVADGLRADALYELDENGNSRAPFIRNIIMHEGSWGISHTRVPTESRPGHVALIAGFYEDVSAVAKGWKENPVEFDSLFNESKYTWSWGSPDILPMFAKGASGDHVYTYSYDAKREDFGAQDATKLDTWVFDNVKDFFHHARNNQSLFSKINEEKIVFFLHLLGIDTNGHAHRPSSRDYKHNIKKVDDGVKEIVSMFNHFYGNDGKTTFIFTSDHGMTDWGSHGAGHPSETLTPLVTWGAGIKYPQRVSAQQFDDAFLKEWRLENWKRLDVNQGILPVDYLNNTDLFKAESMFTNAVQILEQFKVKMTQKKEVTLPFLFTPFNCAGS

SEQ ID NO: 44645 - protein, 815 aa, Homo sapiens
MATQVEPLLPGGATLLQAEEHGGLVRKKPPPAPEGKGEPGPNDVRGGEPDGSARRPRPPCAKPHKEGTGQQERESPRPLQLPGAEGPAISDGEEGGGEPGAGGGAAGAAGAGRRDFVEAPPPKVNPWTKNALPPVLTTVNGQSPPEHSAPAKVVRAAVPKQRKGSKVGDFGDAINWPTPGEIAHKSVQPQSHKPQPTRKLPPKKDMKEQEKGEGSDSKESPKTKSDESGEEKNGDEDCQRGGQKKKGNKHKWVPLQIDMKPEVPREKLASRPTRPPEPRHIPANRGEIKGSESATYVPVAPPTPAWQPEIKPEPAWHDQDETSSVKSDGAGGARASFRGRGRGRGRGRGRGRGGTRTHFDYQFGYRKFDGVEGPRTPKYMNNITYYFDNVSSTELYSVDQELLKDYIKRQIEYYFSVDNLERDFFLRRKMDADGFLPITLIASFHRVQALTTDISLIFAALKDSKVVEIVDEKVRRREEPEKWPLPPIVDYSQTDFSQLLNCPEFVPRQHYQKETESAPGSPRAVTPVPTKTEEVSNLKTLPKGLSASLPDLDSENWIEVKKRPRPSPARPKKSEESRFSHLTSLPQQLPSQQLMSKDQDEQEELDFLFDEEMEQMDGRKNTFTAWSDEESDYEIDDRDVNKILIVTQTPHYMRRHPGGDRTGNHTSRAKMSAELAKVINDGLFYYEQDLWAEKFEPEYSQIKQEVENFKKVNMISREQFDTLTPEPPVDPNQEVPPGPPRFQQVPTDALANKLFGAPEPSTIARSLPTTVPESPNYRNTRTPRTPRTPQLKDSSQTSRFYPVVKEGRTLDAKMP

SEQ ID NO: 44646 - protein, 40 aa, Homo sapiens
  MOD_RES (1)..(1): Any amino acid
XSSSGGLQNAQFGIRRDGTLVTGMGIGIASLQSLFIIQYH

SEQ ID NO: 44647 - protein, 81 aa, Homo sapiens
MWLGRRALCALVLLLACASLGLLYASTRDAPGLRLPLAPWAPPQSPRRPELPDLAPEPRYAHIPVRIKEQVVGLLAWNNCS

SEQ ID NO: 44648 - protein, 54 aa, Homo sapiens
  MOD_RES (1)..(1): Any amino acid
XIDVVKTGIEQGSDAGYLCESQDEESFTMGQWQRQDLSNPRYYAFNHQVETFSP

SEQ ID NO: 44649 - protein, 355 aa, Homo sapiens
MHGGQGCAPMWGVVTQLPVRALGLEVRVWGLCLHLLSLGLRAFLLFFLVLLRELCVCVQEAGRAVLMAARSVALTAHVCSVYVFLQGVAWSAQLVGSWVMLHIWLYRALLETPRRVPLLPQCEQAARWLVWASMQAGKGLARVWGVATFVQLCAHTVFLSMYLCMHICFAAISSKVRVRVNAPFCVSVPLKVHAPLSLGIKVGLQGQKHGRATGEAGMPQGEMLGKQEPQTSRSPKPTRRREVSRSELSPVIPSAATLIIVVCVGFLVLMVVLGLVRIHSLHRRVSGAGGPPGASSDPKDPDLFWDDSALTIIVNPMEVRGLGKRGSVGSRLWSTHVLPESAVLCDGGCWGPAGG

SEQ ID NO: 44650 - protein, 609 aa, Homo sapiens
MCEQQDMDLDIEFDVHLGIAHTRWATHGEPSPVNSHPQRSDKNNEFIVIHNGIITNYKDLKKFLESKGYDFESETDTETIAKLVKYMYDNRESQDTSFTTLVERVIQQLEGAFALVFKSVHFPGQAVGTRRGSPLLIGVRSEHKLSTDHIPILYRTGKDKKGSCNLSRVDSTTCLFPVEEKAVEYYFASDASAVIEHTNRVIFLEDDDVAAVVDGRLSIHRIKRTAGDHPGRAVQTLQMELQQIMKGNFSSFMQKEIFEQPESVVNTMRGRVNFDDYTVNLGGLKDHIKEIQRCRRLILIACGTSYHAGVATRQVLEELTELPVMVELASDFLDRNTPVFRDDVCFFLSQSGETADTLMGLRYCKERGALTVGITNTVGSSISRETDCGVHINAGPEIGVASTKAYTSQFVSLVMFALMMCDDRISMQERRKEIMLGLKRLPDLIKEVLSMDDEIQKLATELYHQKSVLIMGRGYHYATCLEGALKIKEITYMHSEGILAGELKHGPLALVDKLMPVIMIIMRDHTYAKCQNALQQVVARQGRPVVICDKEDTETIKNTKRTIKVPHSVDCLQGILSVIPLQLLAFHLAVLRGYDVDFPRNLAKSVTVE

SEQ ID NO: 44651 - protein, 309 aa, Homo sapiens [sequence omitted]

SEQ ID NO: 44652 - protein, 125 aa, Homo sapiens
IVSGSDDGSFFIWEKETTNLVRVLQGDESIVNCLQPHPSYCFLATSGIDPVVRLWNPRPESEDLTGRVVEDMEGASQANQRRMNADPLEVMLLNMGYRITGLSSGGAGASDDEDSSEGQVQCRPS

SEQ ID NO: 44653 - protein, 87 aa, Homo sapiens
MAGLPRRIIKETQRLLAEPVPGIKAEPDESNARYFHVVIAGPQDSPFEGGTFKLELFLPEEYPMAAPKISGPQHCRSAQFCYRSRPC

SEQ ID NO: 44654 - protein, 52 aa, Homo sapiens
RASPSRDPTRQRPRRLCLRMSCSPRPSWAPRSLLEPSLRGISLGPTQCPTMS

SEQ ID NO: 44655 - protein, 89 aa, Homo sapiens
MSEKKQPVDLGLLEEDDEFEEFPAEDWAGLDEDEDAHVWEDNWDDDNVEDDFSNQLRHGHASAGLLQEKLLGEEPRWPNRNSSSLQLPA

SEQ ID NO: 44656 - protein, 41 aa, Homo sapiens
MEESVNQMQPLNEKQIANSQDGYVWQVTDMNRLHRFLCFGS

SEQ ID NO: 44657 - protein, 124 aa, Homo sapiens
  MOD_RES (1)..(1): Any amino acid
XEGNEKEMQRILLNSERLKSRIAEIHESRTKLEQQLRAQASDNREIDKRMNSLKPDLMQLRKIRDQYLVWLTQKGARQKKINEWLGIKNETEDTHSWRTRTISRTTRNALGTWARSTARRQRRC

SEQ ID NO: 44658 - protein, 135 aa, Homo sapiens
MAASMARRLWPLLTRRGFRPRGGCISNDSPRRSFTTEKRNRNLLYEYAREGYSALPQLDIERFCACPEEAAHALELRKGELRSADLPAIISTWQELRQLQEQIRSLEEEKAAVTEAVRALLANQDSGEVQQGGPA

SEQ ID NO: 44659 - protein, 1708 aa, Homo sapiens
MAAQENHIDVVKYLLENGANQSTATEDGFTPLAVALQQGHNQAVAILLENDTKGKVRLPALHIAARKDDTKSAALLLQNDHNADVQSKSGFTPLHIAAHYGNVNVATLLLNRGAAVDFTARNGITPLHVASKRGNTNMVKLLLDRGGQIDAKTRDGLTPLHCAARSGHDQVVELLLERGAPLLARTKNGLSPLHMAAQGDHVECVKHLLQHKAPVDDVTLDYLTALHVAAHCGHYRVTKLLLDKRANPNARALNGFTPLHIACKKNRIKVMELLVKYGASIQAITESGLTPIHVAAFMGHLNIVLLLLQNGASPDVTNIRGETALHMAARAGQVEVVRCLLRNGALVDARAREEQTPLHIASRLGKTEIVQLLLQHMAHPDAATTNGYTPLHISAREGQVDVASVLLEAGAAHSLATKKGFTPLHVAAKYGSLDVAKLLLQRRAAADSAGKNGLTPLHVAAHYDNQKVALLLLEKGASPHATAKNGYTPLHIAAKKNQMQIASTLLNYGAETNIVTKQGVTPLHLASQEGHTDMVTLLLDKGANIHMSTKSGLTSLHLAAQEDKVNVADILTKHGADQDAHTKLGYTPLIVACHYGNVKMVNFLLKQGANVNAKTKNGYTPLHQAAQQGHTHIINVLLQHGAKPNATTANGNTALAIAKRLGYISVVDTLKVVTEEVTTTTTTITEKHKLNVPETMTEVLDVSDEEGDDTMTGDGGEYLRPEDLKELGDDSLPSSQFLDGMNYLRYSLEGGRSDSLRSFSSDRSHTLSHASYLRDSAVMDDSVVIPSHQVSTLAKEAERNSYRLSWGTENLDNVALSSSPIHSGRASPCLERDNSSFLVSFMVDARGGAMRGCRHNGLRIIIPPRKCTAPTRVTCRLVKRHRLATMPPMVEGEGLASRLIEVGPSGAQFLGPVIVEIPHFAALRGKERELVVLRSENGDSWKEHFCDYTEDELNEILNGMDEVLDSPEDLEKKRICRIITRDFPQYFAVVSRIKQDSNLIGPEGGVLSSTVVPQVQAVFPEGALTKRIRVGLQAQPMHSELVKKILGNKATFSPIVTLEPRRRKFHKPITMTIPVPKASSDVMLNGFGGDAPTLRLLCSITGGTTPAQWEDITGTTPLTFVNECVSFTTNVSARFWLIDCRQIQESVTFASQVYREIICVPYMAKFVVFAKSHDPIEARLRCFCMTDDKVDKTLEQQENFAEVARSRDVEVLEGKPIYVDCFGNLVPLTKSGQHHIFSFFAFKENRLPLFVKVRDTTQEPCGRLSFMKEPKSTRGLVHQAICNLNITLPIYTKESESDQEQEEEIDMTSEKNPQDEQERIEERLAYIADHLGFSWTELARELDFTEEQIHQIRIENPNSLQDQSHALLKYWLERDGKHATDTNLVECLTKINRMDIVHLMETNTEPLQERISHSYAEIEQTITLDHSEGFSVLQEELCTAQHKQKEEQAVSKESETCDHPPIVSEEDISVGYSTFQDGVPKTEGDSSATALFPQTHKEQVQQDFSGKMQDLPEESSLEYQQEYFVTTPGTETSETQKAMIVPSSPSKTPEEVSTPAEEEKLYLQTPTSSERGGSPIIQEPEEPSEHREESSPRKTSLVIVESADNQPETCERLDEDAAFEKGDDMPEIPPETVTEEEYIDEHGHTVVKKVTRKIIRRYVSSEGTEKEEIMVQGMPQEPVNIEEGDGYSKVIKRVVLKSDTEQSEDNNE

SEQ ID NO: 44660 - protein, 91 aa, Homo sapiens
MADEIAKAQVARPGGDTIFGKIIRKEIPAKIIFEDDRCLAFHDISPQAPTHFLVIPKKHISQISVAEDDDESCCHIFIFLRSLLRKNQKNH

SEQ ID NO: 44661 - protein, 61 aa, Homo sapiens
  MOD_RES (1)..(1): Any amino acid
XNIISWTGMVAHTCNPSTLGGQDGVSFCHPDRSAVAPSQLTATSTSQVQAILLPQPPEYPG

SEQ ID NO: 44662 - protein, 204 aa, Homo sapiens
MNDVKLAVLGGEGTGKSALTVRFLTKRFIGEYASNFESIYKKHLCLERKQLNLEIYDPCSQTQKAKFSLTSELHWADGFVIVYDISDRSSFAFAKALIYRIREPQTSHCKRAVESAVFLVGNKRDLCHVREVGWEEGQKLALENRCQFCELSAAEQSLEVEMMFIRIIKDILINFKLKEKRRPSGSKSMAKLINNVFGKRRKSV

SEQ ID NO: 44663 - protein, 173 aa, Homo sapiens
  MOD_RES (1)..(1): Any amino acid
XSKELAAMGPGASGDGVRTETAPHIALDSRVGLHAYDISVVVIYFVFVIAVGIWSSIRASRGTIGGYFLAGRSMSWWPIGASLMSSNVGSGLFIGLAGTGAAGGLAVGGFEWNATWLLLALGWVFVPVYIAAGVVTMPQYLKKRFGGQRIQVYMSVLSLILYIFTKISGSCWW

SEQ ID NO: 44664 - protein, 507 aa, Homo sapiens
MAVLLLLLRALRRGPGPGPRPLWGPGPAWSPGFPARPGRGRPYMASRPPGDLAEAGGRALQSLQLRLLTPTFEGINGLLLKQHLVQNPVRLWQLLGGTFYFNTSRLKQKNKEKDKSKGKAPEEDEEERRRRERDDQMYRERLRTLLVIAVVMSLLNALSTSGGSISWNDFVHEMLAKGEVQRVQVVPESDVVEVYLHPGAVVFGRPRLALMYRMQVANIDKFEEKLRAAEDELNIEAKDRIPVSYKRTGFFGNALYSVGMTAVGLAILWYVFRLAGMTGREGGFSAFNQLKMARFTIVDGKMGKGVSFKDVAGMHEAKLEVREFVDYLKSPERFLQLGAKVPKGALLLGPPGCGKTLLAKAVATEAQVPFLAMAGPEFVEVIGGLGAARVRSLFKEARARAPCIVYIDEIDAVGKKRSTTMSGFSNTEEEQTLNQLLVEMDATLPGDHEEAQRKDPRLLLSHGAHRVTEGNGGSFALLGLPFALKIETTFLSDLSPKASVYQTIFST

SEQ ID NO: 44665 - protein, 372 aa, Homo sapiens
MKSVLVVALLVIFQVCLCQDEVTDDYIGDNTTVDYTLFESLCSKKDVRNFKAWFLPIMYSIICFVGLLGNGLVVLTYIYFKRLKTMTDTYLLNLAVADILFLLTLPFWAYSAAKSWVFGVHFCKLIFAIYKMSFFSGMLLLLCISIDRYVAIVQAVSAHRHRARVLLISKLSCVGIWILATVLSIPELLYSDLQRSSSEQAMRCSLITEHVEAFITIQVAQMVIGFLVPLLAMSFCYLVIIRTLLQARNFERNKAIKVIIAVVVVFIVFQLPYNGVVLAQTVANFNITSSTCELSKQLNIAYDVTYSLACVRCCVNPFLYAFIGVKFRNDLFKLFKDLGCLSQEQLRQWSSCRHIRRSSMSVEAETTTTFSP

SEQ ID NO: 44666 - protein, 42 aa, Homo sapiens
  MOD_RES (1)..(1): Any amino acid
XRVEVVLLHGKAFNSHTWEQLGTLQLLSQRGYRAVALDLPAP

SEQ ID NO: 44667 - protein, 194 aa, Homo sapiens
  MOD_RES (1)..(1): Any amino acid
XQTTADWWWGERAGCCGYIPANHVGKHVDEYDPEDTWQDEEYFGSYGTLKLHLEMLADQPRTTKYHSVILQNKESLTDKVILDVGCGTGIISLFCAHYARPRAVYAVEASEMAQHTGQLVLQNGFADIITVYQQKVEDVVLPEKVDVLVSEWMGTCLLLLQDLACSPEATPRFPRSRLHTQQSPTSQWHCRCRG

SEQ ID NO: 44668 - protein, 210 aa, Homo sapiens
MGNIFGNLLKSLIGKKEMRILMVGLDAAGKTTILYKLKLGEIVTTIPTIGFNVETVEYKNISFTVWDVGGQDKIRPLWRHYFQNTQGLIFVVDSNDRERVNEAREELMRMLAEDELRDAVLLVFANKQDGHDLGSLQPPPPGFKQFSCLSLPSVHFYKPSSEPLGSPRSSKREPRSLSGTSLTDMSKLSVTGGNPEVLTTGFVEGSRVRS

SEQ ID NO: 44669 - protein, 108 aa, Homo sapiens
MAELQEVQITEEKPLLPGQTPEAAKTHSVETPYGSVTFTVYGTPKPKRPAILTYHDVGLNSTVSVRGHAGNHSELCAGSCGCPWNGRGSPCVPFGISVPISGPACRHD

SEQ ID NO: 44670 - protein, 91 aa, Homo sapiens
EEGDTFFFQPRPLKNLVLVDELDSLSPILFCQIADLANEDTPQLYVACGRGPRSSLRVLRHGLEVSEMAVSELPGNPNAVWTVRRHIEGGW

SEQ ID NO: 44671 - protein, 317 aa, Homo sapiens
MHGRAYLLLHRDFCDLKENNYKGITAKPVSEDMMEWEVEIEGLQNSVWQGLVFQLTIHFTSEYNYAPPVVKFITIPFHPNVDPHTGQPCIDFLDNPEKWNTNYTLSSILLALQVMLSNPVLENPVNLEAARILVKDESLYRTILRLFNRPLQMKDDSQELPKDPRKCIRPIKTTSFSDYYQTWSRIATSKATEYYRTPLLKVPNFIGQYYKWKKMDLQHQKEWNLKYSVIKCWLARKRMPHEVTHSMEEIKLCPTLNEIFLESPTAINSITDIYETEEEGWKSDTSLYENDTDEPREEEVEDLISWTNTLNTNTSED

SEQ ID NO: 44672 - protein, 128 aa, Homo sapiens
  MOD_RES (1)..(1): Any amino acid
XNTLICHIDKFFPPVLNVTWLCNGELVTEGVAESLFLPRTDYSFHKFHYLTFVPSAEDFYDCRVEHWGLDQPLLKHWEAQEPIQMPETTETVLCALGLVLGLVGIIVGTVLIIKSLRSGHDPRAQGTL

SEQ ID NO: 44673 - protein, 397 aa, Homo sapiens
  MOD_RES (1)..(1): Any amino acid
XGVAAYMKSEDPLFVLEHSLPIDTQYYLEQQLAKPLLRIFEPILGEGRAEAVLLRGDHTRCKTVLTGKVGGLLAFAKRRNCCIGCRTVLSHQGAVCEFCQPRESELYQKEVSHLNALEERFSRLWTQCQRCQGSLHEDVICTRLDGPHFSCLYPDGVFYDLDSCKHSSYPDSEGAPDSLWDWTVAPPVPATPYEAFDPAAAAFSHPQAAQLCYEPPTYSPAGNLELAPSLEAPGPGLPAYPTENFASQTLVPPAYAPYPSPVLSEEEDLPLDSPALEVSDSESDEALVAGPEGKGSEAGTRKKLRLYQFLLGLLTRGDMRECVWWVEPGAGVFQFSSKHKELLARRWGQQKGNRKRMTYQKLARALRNYAKTGEIRKVKRKLTYQFDSALLPAVRRA

SEQ ID NO: 44674 - protein, 109 aa, Homo sapiens
MLSSIKCVLVGDSAVGKTSLLVRFTSETFPEAYKPTVYENTGVDVFMDGIQISLGLWDTAGNDAFRSIRPLSYQQADVVLMCYSVANHNSFLNLKNKWIGEIRSNLPCT

SEQ ID NO: 44675 - protein, 60 aa, Homo sapiens
  MOD_RES (1)..(1): Any amino acid
XLLMLPPKTEHAKRRLTGWRLCLASRTIPCRASREVSRPNSLTAQYSWAVTGHLLFEETN

SEQ ID NO: 44676 - protein, 130 aa, Homo sapiens
VFYLKMKGDYYRYLAEVAAGDDKKGIVDQSQQAYQEAFEISKKEMQPTHPIRLGLALNFSVFYYEILNSPEKACSLAKTAFDEAIAELDTLSEESYKDSTLIMQLLRDNLTLWTSDTQGDEAEAGEGGEN

SEQ ID NO: 44677 - protein, 60 aa, Homo sapiens
MPEGPLVRKFHHLVSPFVGQQVVKTGGSSKKLQPASLQSLWLQDTQVGPALWWWWLPGIL

SEQ ID NO: 44678 - protein, 28 aa, Homo sapiens
HIGRPHSGIGPRRLMRLPGMADLLSCSQ

SEQ ID NO: 44679 - protein, 124 aa, Homo sapiens
MSGSDGGLEEEPELSITLTLRMLMHGKEVGSIIGKKGETVKRIREQSSARITISEGSCPERITTITGSTAAVFHAVSMIAFKLDEDLCAAPANGGNVSRPPVTLRLVIPASQCGSLIGKAGTKI

SEQ ID NO: 44680 - protein, 1101 aa, Homo sapiens
MKTSKASQRYRGIRRNASQCYLYQESLLLSNLDDSFSADETGDSNDPEQIFQNIQFQKDLMANIRCRPWTMGQKLRALRQAKNIVLKFEGRLTRTRGYQAAGAELWRKFARLACNFVVIFIPWEMRIKKIESHFGSGVASYFIFLRWLFGINIVLTIMTGAFIVIPELIAGQPFGSTARKTIPKEQVSSAQDLDTVWSLGGYLQYSVLFYGYYGRERKIGRAGYRLPLAYFLVGMAVFAYSFIILLKKMAKNSRTSLASASNENYTFCWRVFCAWDYLIGNPEAAESKTAAIVNSIREAILEEQEKKKSKNLAVTICLRIIANILVLLSLAGSIYLIYFVVDRSQKLEQSKKELTLWEKNEQVSVVVSLVTMIAPSAFDLIAALEMYHPRTTLRFQLARVLVLYLGNLYSLIIALLDKVNSMSIEEMATKNNTSHWIDSTTFFATRTAPEEEKWSTSRPGMGLRRNNTWALEETSISAYTMPLIKANKTSLHTQSPQDQCWETYVGQEMLKLSIIDMLFTVASILLIDFFRGLFVRYLSDYWCWDLESKFPEYGEFKIAENVLHLVYNQGMIWMGAFFSPCLPAFNVLKLIGLMYLRSWAVLTCNVPHQQVFRASRSNNFYLAMLLFMLFLCMLPTIFAIVRYKPSLNCGPFSGQEKIYDIVSETIEKDFPVWFGSVVGHISSPVVILPAVLLLFMLIYYLQSIARSLKLSNHQLKMQIQNARSEDKKKVAQMVEARIQTQEESTKKLPNDSDLTSQLSSAHSGTPQNNGNVAHFDSGSSKSGRIETVAQSMPQSPRPGDRAPSSPLPGVPKSRLEHETNRYLHGLCASTSDLHRNRSRTPMTFTTHIEDVHSEPLFRKDFQQINPPHRGPQASTLLAQGPRPHAPRYYVINECDSYKKKHLNVWPERHFKIDASGDIVELYPRNVRQYASRVPRQPPSPQLSEEEEETPSRDWIKRSLPPRSLIDLRRAPHFYIGERSESQTRDPEHQGRVHYKSWNEDFEGHLERPAYVPRKPRSRNFQYPQPPLKPRGKPRFEPSLTESDSVSAASSSDQQNSSADQYLQVTHSQGRFPRSVGQPSRRKAKSGQELTVDLDDLICSDV

SEQ ID NO: 44681 - protein, 94 aa, Homo sapiens
VLLSLRILLLMKPSVLSRVSHQVAYGLHELLKTNAANIHSGAQSDSELPSYHQNDVSLDRGYTSDSEVYTDHGRPGKIHRSATDADVVNSGWLV

SEQ ID NO: 44682 - protein, 262 aa, Homo sapiens
  MOD_RES (1)..(1): Any amino acid
XKEITKCLEFKSKHEEIDLVSLEEFYKEAPPDISKAEVTMGDPHQQTLARLDWELEQRKRLAEKYRECLSNKEKILKEIEVKKEYLSSLQPRLNSIMQASLPVQEYLFMPFDQAHKQYETARHLPPPLYVLFVQATAYGQACAHMKSSQPPRQDKTLSVAIEGSVDEAKALFKPPEDSQDDESDSDAEEEQTTKRRRPTLGVQLDDKRKEMLKRHPLSVMLDLKCKDDSVLHLTFYYLMNLNIMTVKAKVTTAMELITPISA

SEQ ID NO: 44683 - protein, 271 aa, Homo sapiens
  MOD_RES (1)..(1): Any amino acid
XITLPDFSDPETVSDSSSSSSPLSRTESPLHLFVSSHLHSPKPDTFVWPPAAHSFSDAGPRREPSLCNSPEAYFHGFPSLFSVSSVHATSVAASRVEQALSEVASSLQSSAPKQGPLHPWMTLAQIWLHAAEVYIGIGKPAEATACTQEAANLFPMSHNVLYMRGQIAELRGSMDEARRWYEEALAISPTHVKSMQRLALILHQLGRYSLAEKILRDAVQVNSTAHEVWNGLGEVLQAQGNDAAATECFLTALELEASSPAVPFTIIPRVL

SEQ ID NO: 44684 - protein, 112 aa, Homo sapiens
  MOD_RES (1)..(1): Any amino acid
XKKHRRRSSSSSSSDSRTYSRKKGGRKSRSKSRSWSRDLQPRSHSYDRRRRHRSSSSSSYGSRRKRSRSRSRGRGKSYRVQRSRSKSRTRRYPPTSTSWVAGTTGTHRHTQL

SEQ ID NO: 44685 - protein, 108 aa, Homo sapiens
  MOD_RES (1)..(1): Any amino acid
XGMPFIDVPTPISSASSEAASAVVSPSTDSGLEFSSQTTSKEDLTDLEQPGSPGYSTATEPGSSELGVPEQPDLQLLSIERLNLYAASLRVCFLLFESMREHLKFQME

SEQ ID NO: 44686 - protein, 207 aa, Homo sapiens
  MOD_RES (1)..(1): Any amino acid
XLREAQLYSVDVTLDPDTAYPSLILSDNLRQVRYSYLQQDLPDNPERFNLFPCVLGSPCFIAGRHYWEVEVGDKAKWTIGVCEDSVCRKGGVTSAPQNGFWAVSLWYGKEYWALTSPMTALPLRTPLQRVGIFLDYDAGEVSFYNVTERCHTFTFSHATFCGPVRPYFSLSYSGGKSAAPLIICPMSGIDGFSGHVGNHGHSMETSP

SEQ ID NO: 44687 - protein, 100 aa, Homo sapiens
WLWLRADPAGLHGSQPPRRCLALLHLLQLGYLYRCVQELRQGLLVWQQEEPSEFDLAYADFLALDISMLRLFETFLETAPQLTLVLAIMLQSGRAEYYQC

SEQ ID NO: 44688 - protein, 174 aa, Homo sapiens
MTERRVPFSLLRGPSWDPFRDWYPHSRLFDQAFGLPRLPEEWSQWLGGSSWPGYVRPLPPAAIESPAVAAPAYSRALSRQLSSGVSEIRHTADRWRVSLDVNHFAPDELTVKTKDGVVEITGEPPCSCRGEEEASTRSGRTSMATSPGASRGNTRCPPVWTPPKFPPPCPLRAH

SEQ ID NO: 44689 - protein, 166 aa, Homo sapiens
MASFSMDCSPSFCVPGLWNPFIIFRSRSSRRRLHSLGLAAMPEKRPFERLPADVSPINYSLCLKPDLLDFTFEGKLEAAAQVRQATNQIVMNCADIDIITASYAPEGDEEIHATGFNYQNEDEKVTLSFPSTLQTVCHFLEVVTVNILLWFDGLGDLKPSKSVREP

SEQ ID NO: 44690 - protein, 47 aa, Homo sapiens
MALNSGSPPAIGPYYENHGYQPENPYPAQPTVVPTVYERLRKHCASP

SEQ ID NO: 44691 - protein, 328 aa, Homo sapiens
MSLMVVSMACVGFFLLQGAWPHEGGQDKPFLSAWPSPVVSEGEHVALQCRSRLGFNEFSLSKEDGVPVPELYNRVFRNTVFIGPVTPAHAGTYRCRGSHPHFLTGWSAPSNPLVIMVTGVHRKPSLLAHPGPLVKSEETVILQCWSDVMFEHFLLHREGKFNDTLRLTGELHDGVSKANFSIGRMTQDLAGTYRCYGSVPHSPYQLSAPSDPLDIVITGLCGKPSLSAQPRPMVKAGESVTLSCSSRSSYDIYHLSREGEAHELRFPAVPKVNGTFQANFPLGPATHGGTYRCFGSFRDSPYEWSDLSDPLLVSVTDSMKEKGKDVIL

SEQ ID NO: 44692 - protein, 507 aa, Homo sapiens
PLANEKTTLSPAEPTENGERTPFTNEKTTPSSAEPTEHGERTPLANEITTPSRAEPTEHGERIANEKATPSPAKPTEHGETTVNEDTTPSSAEPTENGERTPLANENTTTSPTESTEHGERTANEKTTPSPAEPTEHGERTPSANEKTIPSPAKPTEHEEMTPSANENTTPSPVKPTEHGEKTTLANEKITLSPEGPTEHGAKTTSANEKITPSLAKPTEHGERTTSPNDKITSSAAESTEHRDRATSANVITPAPAEPIKHAKRTTLAHEKMTQVTEKSTEHPEKTTSTTEKTTRTPEKPTLYSEKTICTKGKNTPVPEKPTENLGNTTLTTETIKAPVKSTENPEKTAAVTKTIKPSVKVTGDKSLTTTSSHLNKTEVTHQVPTGSFTLITSRTKLSSITSEATGNKSHPYLNKDGSQKGIHAGQMGENDSFPAWAIVIVVLVAVILLLVFLGLIFLVSYMMRTRRTLTQNTQYNDAEDEGGPNSYPVYLMEQQNLGMGQIPSPR

SEQ ID NO: 44693 - protein, 197 aa, Homo sapiens
  MOD_RES (1)..(1): Any amino acid
XAASQENLEQFRENNFASMKSQMELRIKDLESELSKIKTSQEDFNKTELEKYKQLYLEELKVRKSLSSKLTKTNERLAEVNTKLLVEKQQSRSLFTTLTTRPVMEPPCVGNLNNSLDLNRKLIPRENLVISTSNPRASNNSMENYLSKMQQELEKNITRELKEGCRNGMCLQLRQCATEKSRVMVAQRSALTEEAVA

SEQ ID NO: 44694 - protein, 33 aa, Homo sapiens
SLVIPEKFQHILRVLNTNIDGRRKIAFAITAIK

SEQ ID NO: 44695 - protein, 960 aa, Homo sapiens
MDDRCYPVIFPDERNFRPFTSDSLAAIEKRIAIQKEKKKSKDQTGEVPQPRPQLDLKASRKLPKLYGDIPRELIGKPLEDLDPFYRNHKTFMVLNRKRTIYRFSAKHALFIFGPFNSIRSLAIRVSVHSLFSMFIIGTVIINCVFMATGPAKNSNSNNTDIAECVFTGIYIFEALIKILARGFILDEFSFLRDPWNWLDSIVIGIAIVSYIPGITIKLLPLRTFRVFRALKAISVVSRLKVIVGALLRSVKKLVNVIILTFFCLSIFALVGQQLFMGSLNLKCISRDCKNISNPEAYDHCFEKKENSPEFKMCGIWMGNSACSIQYECKHTKINPDYNYTNFDNFGWSFLAMFRLMTQDSWEKLYQQTLRTTGLYSVFFFIVVIFLGSFYLINLTLAVVTMAYEEQNKNVAAEIEAKEKMFQEAQQLLKEEKEALVAMGIDRSSLTSLETSYFTPKKRKLFGNKKRKSFFLRESGKDQPPGSDSDEDCQKKPQLLEQTKRLSQNLSLDHFDEHGDPLQRQRALSAVSILTITMKEQEKSQEPCLPCGENLASKYLVWNCCPQWLCVKKVLRTVMTDPFTELAITICIIINTVFLAMEHHKMEASFEKMLNIGNLVFTSIFIAEMCLKIIALDPYHYFRRGWNIFDSIVALLSFADVMNCVLQKRSWPFLRSFRVLRVFKLAKSWPTLNTLIKIIGNSVGALGSLTVVLVIVIFIFSVVGMQLFGRSFNSQKSPKLCNPTGPTVSCLRHWHMGDFWHSFLVVFRILCGEWIENMWECMQEANASSSLCVIVFILITVIGKLVVLNLFIALLLNSFSNEERNGNLEGEARKTKVQLALDRFRRAFCFVRHTLEHFCHKWCRKQNLPQQKEVAGGCAAQSKDIIPLVMEMKRGSETQEELGILTSVPKTLGVRHDWTWLAPLAEEEDDVEFSGEDNAQRITQPEPEQQHFEYIISLPFGLHYF

SEQ ID NO: 44696 - protein, 37 aa, Homo sapiens
  MOD_RES (1)..(1): Any amino acid
XAKQLVRGEPNVSYICSRYYRAPELIFGATDYTSSIA

SEQ ID NO: 44697 - protein, 47 aa, Homo sapiens
  MOD_RES (1)..(1): Any amino acid
XPEIMSKLADSWRGGAAHCITVVDPHGWPKAEGTCDCYGSNQQTQQH

SEQ ID NO: 44698 - protein, 190 aa, Homo sapiens
MKDLKKRVALGYISTHTGEAALRGEPRIQTLPVASALSSHRTGPPPISPSKRKFSMEPGDEDLDCDNDHVSKMSRIFNPHLNKTANGDCRRDPRERSRSPIERAVAPTMSLHGSHLYTSLPSLGLEQPLALTKNSLDASRPAGLSPTLTPGERQQNRPSVITCASAGARNCNLSHCPIAHSGCAAPGPAS

SEQ ID NO: 44699 - protein, 432 aa, Homo sapiens
  MOD_RES (1)..(1): Any amino acid
XGEETPMAADEGSAEKQAGEAHMAADGETNGSCENSDASSHANAAKHTQDSARVNPQDGTNTLTRIAENGVSERDSEAAKQNHVTADDFVQTSVIGSNGYILNKPALQAQPLRTTSTLASSLPGHAAKTLPGGAGKGRTPSAFPQTPAAPPATLGEGSADTEDRKLPAPGADVKVHRARKTMPKSVVGLHAASKDPREVREARDHKEPKEEINKNISDFGRQQLLPPFPSLHQSLPQNQCYMATTKSQTAAAVSRKKKRRMGTYSLVPKKKTKVLKQRTVIEMFKSITHSTVGSKGEKDLGASSLHVNGESLEMDSDEDDSEELEEDDGHGAEQAAAFPTEDSRTSKESMSEADRAQKMDGESEEEQESVDTGEEEEGGDESDLSSESSIKKKFLKRKGKTDSPWIKPARKRRRRSRKKPSGALGSESYKSS

SEQ ID NO: 44700 - protein, 183 aa, Homo sapiens
MKGLYFQQSSTDEEITFVFQEKEDLPVTEDNFVKLQVKACALSQINTKLLAEMKMKKDLFPVGREIAGIVLDGILPLDSEDPGLCEVVRVHEHYLVHKPEKVTWTEAAGSIRDGVRAYTALHYLSHLSPGKSVLIMDGASAFGTIAIQLAHHRGAKVISTACSLEDKQCLERFRPPIENSTIA

SEQ ID NO: 44701 - protein, 160 aa, Homo sapiens
EYQLLLQVTYRDSKEKRDLRNFLKLLKPPLLWSHGLIRIIRAKATTDCNSLNGVLQCTCEDSYTWFPPSCLDPQNCYLHTAGALPSCECHLNNLSQSVNFCERTKIWGTFKINERFTNDLLNSSSAIYSKYANGIEIQLKKAYERIQGFESVQVTQFRPV

SEQ ID NO: 44702 - protein, 112 aa, Homo sapiens
MATPCQNMELNCLVQDQIPGQVASASALQNLVEHLPNVPSYRIPITRIPVLTSRRTSLSNSSFAKETRSSIRQLVPATKQHPEVQVEDTDADSCPLMAEENPPSTVLPPPSP

SEQ ID NO: 44703 - protein, 281 aa, Homo sapiens
MAASCLVLLALCLLLPLLLLGGWKRWRRGRAARHVVAVVLGDVGRSPHSKPHDELLQNNRIQIVGLTELQSLAVGPRVFQYGVKVVLQAMYLLWKLMWREPGAYIFLQNPPGLPSIAVCWFVGCLCGSKLVIDWHNYGYSIMGLVHGPNHPLVLLAKWYEKFFGRLSHLNLCVTNAMREDLADNWHIRAVTVYDKPASFFKETPLDLQHRLFMKLGSMHSPFRARSEPEDPVTERSAFTERDAGSGLVTRLRERPALLVSSTSWTEDEDFSILLAALESRV

SEQ ID NO: 44704 - protein, 258 aa, Homo sapiens
MGPGKKGRCREEGPGRGRRAWIIRGSGSSRQGWVGSVESSKRSANVTRQRQIEQILPALAAGSCFHPAFILSCRFSSRTRATSREEKNLQGFLEQPKEKWVESAFEVDGPYYFTVLALHILPPEQWRATRVEILRRLLVTSQARAVAPGGATRLTDKAVKDYSAYRSSLLFWALVDLIYNMFKKVPTSNTEGGWSCSLAEYIRHNDMPIYEAADKALKTFQEEFMPVETFSEFLDVAGLLSEITDPESFLKDLLNSVP

SEQ ID NO: 44705 - protein, 396 aa, Homo sapiens
MAEYDLTTRIAHFLDRHLVFPLLEFLSVKEIYNEKELLQGKLDLLSDTNMVDFAMDVYKNLYSDDIPHALREKRTTVVAQLKQLQAETEPIVKMFEDPETTRQMQSTRDGRMLFDYLADKHGFRQEYLDTLYRYAKFQYECGNYSGAAEYLYFFRVLVPATDRNALSSLWGKLASEILMQNWDAAMEDLTRLKETIDNNSVSSPLQSLQQRTWLIHWSLFVFFNHPKGRDNIIDLFLYQPQYLNAIQTMCPHILRYLTTAVITNKDVRKRRQVLKDLVKVIQQESYTYKDPITEFVECLYVNFDFDGAQKKLRECESVLVNDFFLVACLEDFIENARLFIFETFCRIHQCISINMLADKLNMTPEEAERWIVNLIRNARLDAKIDSKLDQFPCVSF

SEQ ID NO: 44706 - protein, 72 aa, Homo sapiens
MAVQLVPDSALGLLMDRATHMTTEGGTWREDTFWWWRWPFRLLKSCLSHLCKNLRQRKKILLCSPTREEASD

SEQ ID NO: 44707 - protein, 232 aa, Homo sapiens
MARSPGRAYALLLLLICFNVGSGLHLQVLSTRNENKLLPKHPHLVRQKRAWITAPVALREGEDLSKKNPIAKIHSDLAEERGLKITYKYTGKGITEPPFGIFVFNKDTGELNVTSILDREETPFFLLTGYALDARGNNVEKPLELRIKVLDINDNEPVFTQDVFVGSVEELSAAHTLVMKINATDADEPNTLNSKISYRIVSLEPAYPPVFYLNKDTGEIYTTSVTLDREVS

SEQ ID NO: 44708 - protein, 374 aa, Homo sapiens
MTDGILGKAATMEIPIHGNGEARQLPEDDGLEQDLQQVMVSGPNLNETSIVSGGYGGSGDGLIPTGKSISCARREVWVGPQRCLVYLREAGVRELDPLGSGRHPSHSTTPSGPGDEVARGIAGEKFDIVKKWGINTYKCTKQLLSERFGRGSRTVDLELELQIELLRETKRKYESVLQLGRALTAHLYSLLQTQHALGDAFADLSQKSPELQEEFGYNAETQKLLCKNGETLLGAVNFFVSSINTLVTKTMEDTLMTVKQYEAARLEYDAYRTDLEELSLGPRDAGTRGRLESAQATFQAHRDKYEKLRGDVAIKLKFLEENKIKVMHKQLLLFHNAVSAYFAGNQKQLEQTLQQFNIKLRPPGAEKPSWLEEQ

SEQ ID NO: 44709 - protein, 522 aa, Homo sapiens
  MOD_RES (1)..(1): Any amino acid
XFLLSTRAGGLGLNLQSADTVIIFDSDWNPHQDLQAQDRAHRIGQQNEVRVLRLCTVNSVEEKILAAAKYKLNVDQKVIQAGMFDQKSSSHERRAFLQAILEHEEQDESRHCSTGSGSASFAHTAPPPAGVNPDLEEPPLKEEDEVPDDETVNQMIARHEEEFDLFMRMDLDRRREEARNPKRKPRLMEEDELPSWIIKDDAEVERLTCEEEEEKMFGRGSRHRKEVDYSDSLTEKQWLKAIEEGTLEEIEEEVRQKKSSRKRKRDSDAGSSTPTTSTRSRDKDDESKKQKKRGRPPAEKLSPNPPNLTKKMKKIVDAVIKYKDSSGRQLSEVFIQLPSRKELPEYYELIRKPVDFKKIKERIRNHKYRSLNDLEKDVMLLCQNAQTFNLEGSLIYEDSIVLQSVFTSVRQKIEKEDDSEGEESEEEEEGEEEGSESESRSVKVKIKLGRKEKAQDRLKGGRRRPSRGSRAKPVVSDDDSEEEQEELRTCQITASLFPSNCNGSAHHWEMEDLAAQVFVDQD

SEQ ID NO: 44710 - protein, 751 aa, Homo sapiens
MSVKEGAQRKWAALKEKLGPQDSDPTEANLESADPELCIRLLQMPSVVNYSGLRKRLEGSDGGWMVQFLEQSGLDLLLEALARLSGRGVARISDALLQLTCVSCVRAVMNSRQGIEYILSNQGYVRQLSQALDTSNVMVKKQVFELLAALCIYSPEGHVLTLDALDHYKTVCSQQYRFSIVMNELSGSDNVPYVVTLLSVINAVILGPEDLRARTQLRNEFIGLQLLDVLARLRDLEDADLLIQLEAFEEAKAEDEEELLRVSGGVDMSSHQEVFASLFHKVSCSPVSAQLLSVLQGLLHLEPTLRSSQLLWEALESLVNRAVLLASDAQECTLEEVVERLLSVKGRPRPSPLVKAHKSVQANLDQSQRGSSPQNTTTPKPSVEGQQPAAAAACEPVDHAQSESILKVSQPRALEQQASTPPPPPPPPLLPGSSAEPPPPPPPPPLPSVGAKALPTAPPPPPLPGLGAMAPPAPPLPPPLPGSCEFLPPPPPPLPGLGCPPPPPPLLPGMGWGPPPPPPPLLPCTCSPPVAGGMEEVIVAQVDHGLGSAWVPSHRRVNPPTLRMKKLNWQKLPSNVAREHNSMWASLSSPDAEAVEPDFSSIERLFSFPAAKPKEPTMVAPRARKEPKEITFLDAKKSLNLNIFLKQFKCSNEEVAAMIRAGDTTKFDVEVLKQLLKLLPEKHEIENLRAFTEERAKLASADHFYLLLLAIPCYQLRIECMLLCEGAAAVLDMVRPKAQLVLAACERQPHR

SEQ ID NO: 44711 - protein, 176 aa, Homo sapiens
MAAPWASLRLVAPMWNGRIRGIHRLGAAVAPEGNQKKKRTILQFLTNYFYDVEALRDYLLQREMYKILHLAGEATWSIRRRFRDKEWIRPDKYGHFSQEFWNFCEVPVEAVDAGDCDINYEGLDNLLRLKELQSLSLQRCCHVDDWCLSRLYPLADSLQELSLAGCPRISERGLAC

SEQ ID NO: 44712 - protein, 65 aa, Homo sapiens
MPEEGSGCSVRRRPYGCVLRAALVPLVAGLVICLVVCIQRFAQAQQQLPLESLGWDVAELQLNHT

SEQ ID NO: 44713 - protein, 26 aa, Homo sapiens
MNQKLLKLENLLRFHTIYRQLHSLCQ

SEQ ID NO: 44714 - protein, 511 aa, Homo sapiens
MDKILEGLVSSSHPLPLKRVIVRKVVESAEHWLDEAQCEAMFDLTTRLILEGQDPFQRQVGHQVLEAYARYHRPEFESFFNKTFVLGLLHQGYHSLDRKDVAILDYIHNGLKLIMSCPSVLDLFSLLQVEVLRMVCERPEPQLCARLSDLLTDFVQCIPKGKLSITFCQQLVRTIGHFQCVSTQERELREYVSQVTKVSNLLQNIWKAEPATLLPSLQEVFASISSTDASFEPSVALASLVQHIPLQMITVLIRSLTTDPNVKDASMTQALCRMIDWLSWPLAQHVDTWVIALLKGLAAVQKFTILIDVTLLKIELVFNRLWFPLVRPGALAVLSHMLLSFQHSPEAFHLIVPHVVNLVHSFKNDGLPSSTAFLVQLTELIHCMMYHYSGFPDLYEPILEAIKDFPKPSEEKIKLILNQSAWTSQSNSLASCLSRLSGKSETGKTGLINLGNTCYMNSVIQALFMATEGKHTHLGYSLRLPDLHGLLPDHSKTVLNTSDFSLTGSMKKKRS

SEQ ID NO: 44715 - protein, 258 aa, Homo sapiens
MAVLLLLLRALRRGPGPGPRPLWGPGPAWSPGFPARPGRGRPYMASRPPGDLAEAGGRALQSLQLRLLTPTFEGINGLLLKQHLVQNPVRLWQLLGGTFYFNTSRLKQKNKEKDKSKGKAPEEDEEERRRRERDDQMYRERLRTLLVIAVVMSLLNALSTSGGSISWNDFVHEMLAKGEVQRVQVVPESDVVEVYLHPGAVVFGRPRLALMYRMQVANIDKFEEKLRAAEDELNIEAKDRIPVSYKRTGFFGKLILPA

SEQ ID NO: 44716 - protein, 340 aa, Homo sapiens
MAFSSRFAFWEQKEKEDKTLPKPGSPGKEEGALEGSSKEGSGPSRSPQPPTSPIPPETSQRARSPAPTLAMNGPGAATAEGLSEEAQGLSRKRVANAVRKVVSKVLPSEELGNAKETPGRGVKSPEHPTRSKRGEKAASSPKPPPPPPPPPAPPKPEVKKEAAKDELSLGLRSLMSRGRGKEHKARGKQSSGKGEKPSSQEPGSPDWADSPEKAGSPAKPEAPKKQRSPAPPEELVTPGSTGPKSDLTGEQQSKSPVPGVKQEAGAAKVQLTPVEEAHQRLERIFTASLDSEAASHAHSQAKTEEQIAAEEAWNETEKVWLVHRDGFSLASQLKSEELNL

SEQ ID NO: 44717 - protein, 61 aa, Homo sapiens
EIHRKVMSQNFTNCHTKIRHVDAHATLNDGVVVQVMGLLSNNNQALRRFMQTFVLAPEIPR

SEQ ID NO: 44718 - protein, 31 aa, Homo sapiens
  MOD_RES (1)..(1): Any amino acid
XPAEERVLLTGLHAVADIHCENCKTTLGWKY

SEQ ID NO: 44719 - protein, 112 aa, Homo sapiens
METDLAEMPEKGGENCGRVELVAWKDEIPAPEGKTVGSGEVALGWLSPLSWGWMGFLSETEELGMGAPPFPWQLGTQWTLQSYPQNFCLPRILPISKRRAQKREKWLLCASR

SEQ ID NO: 44720 - protein, 103 aa, Homo sapiens
MESGAKGCEVVVSGKLRGQRAKSMKFVDGLMIHSGDPVNYYVDTAVRHVLLRQGVLGIKVKIMLPWDPTGKIGPKKPLPDHVSIVEPKDEILPTTPISEQKGG

SEQ ID NO: 44721 - protein, 75 aa, Homo sapiens
  MOD_RES (1)..(1): Any amino acid
XAEREQDPRVAPQQCAVCLQPFCHLYWGCTRTGCYGCLAPFCESVMKRNMFILSVGQTVLSCDIIINRITWQPEV

SEQ ID NO: 44722 - protein, 181 aa, Homo sapiens
  MOD_RES (1)..(1): Any amino acid
XEYGEEVLEEIKNSKHNTPRKKTNPSRIRIALGNEASTVQEEEQDRKGSHTDLESINENLVESALRRVNREEKGNKSVHLRKASSPNLHRRQWEKNVPNTALTALENASILTSSLTAEDDRGSEGFLKGPLSEETEASDSVDGGHDSVILDPERLEPGLDEEDTDFEEEDDNPDWVSELKK

SEQ ID NO: 44723 - protein, 247 aa, Homo sapiens
MPGPGRRAAASRRMKSSVGGRREKLLGAPKAQPSRDFTCVHDGESEAELIPDDFEEKPEREKKHTNFTLCNVCNIQLNSAAQAQIHYNGKSHQKRLKQLSNGTLKNDNGGTCQSPALPALVRPPAPPLQPSLDIKPFLPFPLDTAAAVNLFPNFNAMDPIQKAVINHTFGVPLPHRRKQIISCNICQLRFNSDSQAAAHYKGTKHAKKLKALEAMKNKQKSVTAKDSAKTTFTSITTNTINTSSDKT

SEQ ID NO: 44724 - protein, 213 aa, Homo sapiens
MELCEFAFNMKKDEVCVNPYHYQRVETPVLPPVLVPRHTEIPAEFPPLDDYSHSIPENTNFPAGIEPQSNIPETPPPGYLSEDGETSDHQMNHSMDAGSPNLSPNPMSPAHNNLDLQPVTYCEPAFWCSISYYELNQRVGETFHASQPSMTVDGFTDPSNSERFCLGLLSNVNRNAAVELTRRHIGCNLKIFNNQEFAALLAQSVNQGFEAVY

SEQ ID NO: 44725 - protein, 54 aa, Homo sapiens
MAAAEAANCIMENFVATLANGMSLQPPLEEVTPFALPCVCPHFPSPPLPSCGLS

SEQ ID NO: 44726 - protein, 338 aa, Homo sapiens
MLTFFLVSGGSLWLFVEFVLSLLEKMQTQEILRILRLPELGDLGQFFRSLSATTLVSMGALAAILAYWFTHRPKALQPPCNLLMQSEEVEDSGGARRSVIGSGPQLLTHYYDDARTMYQVFRRGLSISGNGPCLGFRKPKQPYQWLSYQEVADRAEFLGSGLLQHNCKACTDQFIGVFAQNRPEWIIVELACYTYSMVVVPLYDTLGPGAIRYIINTADISTVIVDKPQKAVLLLEHVERKETPGLKLIILMDPFEEALKERGQKCGVVIKSMQAVEDCGQENHQAPVPPQPDDLSIVCFTSGTTGNPKGAMLTHGNVVADFSGFLKVTEDHFLFIVL

SEQ ID NO: 44727 - protein, 122 aa, Homo sapiens
MQKSEGSGGTQLKNRATGNYDQRTSSSTQLKHRNAVQGSKSSLSTSSPESARKLHPRPSDKLNPKTINPFGEQSRVPSAFAAIYSKGGIPCRLVHGSVKHRLQWECPPESLSFDPLLITLAE

SEQ ID NO: 44728 - protein, 78 aa, Homo sapiens
MFPYEGPLRLLRAKYAYSPSEIKEILHLAGLNELEVIPLVQTFGHMEFVLKHTAFAHLREVGSFPCTLNPHEAESLAL

SEQ ID NO: 44729 - protein, 568 aa, Homo sapiens
MDVGELLSYQPNRGTKRPRDDEEEEQKMRRKQTGTRERGRYREEEMTVVEEADDDKKRLLQIIDRDGEEEEEEEEPLDESSVKKMILTFEKRSYKNQELRIKFPDNPEKFMESELDLNDIIQEMHVVATMPDLYHLLVELNAVQSLLGLLGHDNTDILSDLTSVAVVDLLQELTDIDTLHESEEGAEVLIDALVDGQVVALLVQNLERLDESVKEEADGVHNTLAIVENMAEFRPEMCTEGAQQGLLQWLLKRLKAKMPFDANKLYCSEVLAILLQDNDENRELLGELDGIDVLLQQLSVFKRHNPSTAEEQEMMENLFDSLCSCLMLSSNRERFLKGEGLQLMNLMLREKKISRSSALKVLDHAMIGPEGTDNCHKFVDILGLRTIFPLFMKSPRKIKKVGTTEKEHEEHVCSILASLLRNLRGQQRTRLLNKFTENDSEKVDRLMELHFKYLGAMQVADKKIEGEKHDMVRRGEIIDNDTEEEFYLRRLDAGLFVLQHICYIMAEICNANVPQIRQRVHQILNMRGSSIKIVRHIIKEYAENIGDGRSPEFRENEQKRILGLLENF

SEQ ID NO: 44730 - protein, 58 aa, Homo sapiens
MVESTLIETNIIFHLDWCISSPLVGFLASILFYKLFCLKRGTETFCTHPCVQVVEEDP

SEQ ID NO: 44731 - protein, 604 aa, Homo sapiens
MGASSPRSPEPVGPPAPGLPFCCGGSLLAVVVLLALPVAWGQCNAPEWLPFARPTNLTDEFEFPIGTYLNYECRPGYSGRPFSIICLKNSVWTGAKDRCRRKSCRNPPDPVNGMVHVIKGIQFGSQIKYSCTKGYRLIGSSSATCIISGDTVIWDNETPICDRIPCGLPPTITNGDFISTNRENFHYGSVVTYRCNPGSGGRKVFELVGEPSIYCTSNDDQVGIWSGPAPQCIIPNKCTPPNVENGILVSDNRSLFSLNEVVEFRCQPGFVMKGPRRVKCQALNKWEPELPSCSRVCQPPPDVLHAERTQRDKDNFSPGQEVFYSCEPGYDLRGAASMRCTPQGDWSPAAPTCEVKSCDDFMGQLLNGRVLFPVNLQLGAKVDFVCDEGFQLKGSSASYCVLAGMESLWNSSVPVCEQIFCPSPPVIPNGRHTGKPLEVFPFGKTVNYTCDPHPDRGTSFDLIGESTIRCTSDPQGNGVWSSPAPRCGILGHCQAPDHFLFAKLKTQTNASDFPIGTSLKYECRPEYYGRPFSITCLDNLVWSSPKDVCKRKSCKTPPDPVNGMVHVITDIQVGSRINYSCTTGSLSSPRSFSVCQVENPNQCI

SEQ ID NO: 44732 - protein, 105 aa, Homo sapiens
MGAPPGYRPSAWVHLLHQLPRADFQLRPVPSVFAPQEQEYQQVGPASRLHNGHLQQRRSTGSGLGPDSRPLWPGDLPKPHAGIRGPSHRQRPCCWWRPWRAWAWA

SEQ ID NO: 44733 - protein, 241 aa, Homo sapiens
LMISKVFSARMGSFCGSTNNLQDSFEYINQDPNLGKLNTNQNSLGPCRTGSNLGLLQACSSKLLQGVAEGGPLRLTRSASFFAAHSTPVDMPSRGQNEDRDSGIARSASLSSLLITPFPSPSSSTSSSSSYQRRWLRSQTTSLENGIIPRRSTDETFSLAEETCSSNPAMVRRKKIAISIIFSLCEKEEAQRNFQDFFFSHFPLFESHMNRLKSAIEKAMISCRKIAESSLRVQFYVSRLM

SEQ ID NO: 44734 - protein, 28 aa, Homo sapiens
MAMAPSPSLVQVYTSPAAVAVWEWQDGL

SEQ ID NO: 44735 - protein, 161 aa, Homo sapiens
  MOD_RES (1)..(1): Any amino acid
XVNFAIAKGGRLLLADDMGLGKTIQAICIAAFYRKEWPLLVVVPSSVRFTWEQAFLRWLPSLSPDCINVVVTGKDRLTAGLINIVSFDLLSKLEKQLKTPFKVVIIDESHFLKNSRTARCRAAMPVLKHTVNIYWLLGVRHMLQKIKVAKRVILLSGTPAM

SEQ ID NO: 44736 - protein, 547 aa, Homo sapiens
  MOD_RES (1)..(1): Any amino acid
XGLLPRRRRCFPARAPLLRVALCLLCWTPAAVRAVPELGLWLETVNDKSGPLIFRKTMFNSTDIKLSVKSFHCSGPVKFTIVWHLKYHTCHNEHSNLEELFQKHKLSVDEDFCHYLKNDNCWTTKNENLDCNSDSQVFPSLNNKELINIRNVSNQERSMDVVARTQKDGFHIFIVSIKTENTDASWNLNVSLSMIGPHGYISASDWPLMIFYMVMCIVYILYGILWLTWSACYWKDILRIQFWIAAVIFLGMLEKAVFYSEYQNISNTGLSTQGLLIFAELISAIKRTLARLLVIIVSLGYGIVKPRLGTVMHRVIGLGLLYLIFAAVEGVMRVIGVSDSDLVLLASLPLSLLDSGLCWWIFISLAQTMKTLRLRKNTVKFSLYRHFKNTLIFAVLASIVFMGWTTKTFRIAKCQSDWMERWVDDAFWSFLFSLILIVIMFLWRPSANNQRYAFMPLIDDSDDEIEEFMVTSENLTEGIKLRASKSVSNGTAKPATSENFDEDLKWVEENIPSSFTDVALPVLVDSDEEIMTRSEMAEKMFSSEKIM

SEQ ID NO: 44737 - protein, 79 aa, Homo sapiens
MVFFTCNACGESVKKIQVEKHVSVCRNCECLSCIDCGKDFWGDDYKNHVKCISEDQKYGGKGYEGKTHKGDIKQQAWIQ

SEQ ID NO: 44738 - protein, 118 aa, Homo sapiens
MRRIVFAGVILFRLLGVILFRLLGVILFGRLGDLGTCQTKPGQYWKEEVHIQDLGTCQAEPGQYCKEEVHIQGGIQWYSVKGCTKNTSECFKSTLVKRILQLHELVTTHCCNHSLCNF

SEQ ID NO: 44739 - protein, 144 aa, Homo sapiens
MALLLTTVIALTCLGGFASPGPVPPSTALRELIEELVNITQNQKAPLCNGSMVWSINLTAGMYCAALESLINVSGCSAIEKTQRMLSGFCPHKVSAGQFSSLHVRDTKIEVAQFVKDLLLHLKKLFREGQFNNFESIIICRDRT

SEQ ID NO: 44740 - protein, 26 aa, Homo sapiens
MKDEPRSTNLFMKLDSVFIWKEPFGL

SEQ ID NO: 44741 - protein, 113 aa, Homo sapiens
MGSSGLGKAATLDELLCTCIEMFDDNGELDNSYLPRIVLLMHRWYLSSTELAEKLLCMYRNATGESCNEFRLKICYFMRYWILKFPAEFNLDLGLIRMTEEFREVASQLGYEK

SEQ ID NO: 44742 - protein, 933 aa, Homo sapiens
MEENESQKCEPCLPYSADRRQMQEQGKGNLHVTSPEDAECRRTKERLSNGNSRGSVSKSSRNIPRRHTLGGPRSSKEILGMQTSEMDRKREAFLEHLKQKYPHHASAIMGHQERLRDQTRSPKLSHSPQPPSLGDPVEHLSETSADSLEAMSEGDAPTPFSRGSRTRASLPVVRSTNQTKERSLGVLYLQYGDETKQLRMPNEITSADTIRALFVSAFPQQLTMKMLESPSVAIYIKDESRNVYYELNDVRNIQDRSLLKVYNKDPAHAFNHTPKTMNGDMRMQRELVYARGDGPGAPRPGSTAHPPHAIPNSPPSTPVPHSMPPSPSRIPYGGTRSMVVPGNATIPRDRISSLPVSRPISPSPSAILERRDVKPDEDMSGKNIAMYRNEGFYADPYLYHEGRMSIASSHGGHPLDVPDHIIAYHRTAIRSASAYCNPSMQAEMHMEQSLYRQKSRKYPDSHLPTLGSKTPPASPHRVSDLRMIDMHAHYNAHGPPHTMQPDRASPSRQAFKKEPGTLVYIEKPRSAAGLSSLVDLGPPLMEKQVFAYSTATIPKDRETSEKMMKTTANRNHTDSAGTPHVSGGKMLSALESTVPPSQPPPVGTSAIHMSLLEMRRSVAELRLQLQQMRQLQLQNQELLRAMMKKAELEISGKVMETMKRLEDPVQRQRVLVEQERQKYLHEEEKIVKKLCELEDFVEDLKKDSTAASRLVTLKDVEDGAFLLRQVGEAVATLKGEFPTLQNKMRAILRIEVEAVRFLKEEPHKLDSLLKRVRSMTDVLTMLRRHVTDGLLKGTDAAQAAQYMAMEKATAAEVLKSQEEAAHTSGQPFHSTGAPGDAKSEVVPLSGMMVRHAQSSPVVIQPSQHSVALLNPAQNLPHVASSPAVPQEATSTLQMSQAPQSPQIPMNGSAMQSLFIEEIHSVSAKNRAVSIEKA

SEQ ID NO: 44743 - protein, 247 aa, Homo sapiens [sequence omitted]

SEQ ID NO: 44744 - protein, 966 aa, Homo sapiens
MSNSNTTQETLEIMKESEKKLVEESVNKNKFISKTPSKEEIEKECEDTSLRQETQDYEFLFDKRRTSNHGHARKRAKSNSKLKLVRSLAVCEESSTPFADGPLETQDIIQLHISCPSDKEEEKSTKDVSEKEDKDKNKEKIPRKMLSRDSSQEYTDSTGIDLHEFLVNTLKKNPRDRMMLLKLEQEILEFINDNNNQFKKFPQMTSYHRMLLHRVAAYFGMDHNVDQTGKAVIINKTSNTRIPEQRFSEHIKDEKNTEFQQRFILKRDDASMDRDDNQTGQNGYLNDIRGNREGLSRTSSSRQSSTDSELKSLEPRPWSSTDSDGSVRSMRPPVTKASSFSGISILTRGDSIGSSKGGSAGRISRPGMALGAPEVCNQVTSSQSVRGLLPCTAQQQQQQQQQQLPALPPTPQQQPPLNNHMISQADDLSNPFGQMSLSRQGSTEAADPSAALFQTPLISQHPQQTSFIMASTGQPLPTSNYSTSSHAPPTQQVLPPQGYMQPPQQIQVSYYPPGQYPNSNQQYRPLSHPVAYSPQRGQQLPQPSQQPGLQPMMPNQQQAAYQGMIGVQQPQNQGLLSSQRSSMGGQMQGLVVQYTPLPSYQVPVGSDSQNVVQPPFQQPMLVPVSQSVQGGLPAAGVPVYYSMIPPAQQNGTSPSVGFLQPPGSEQYQMPQSPSPCSPPQMPQQYSGVSPSGPGVVVMQLNVPNGPQPPQNPSMVQWSHCKYYSMDQRGQKPGDLYSPDSSPQANTQMSSSPVTSPTQSPAPSPVTSLSSVCTGLSPLPVLTQFPRPGGPAQGDGRYSLLGQPLQYNLSICPPLLHGQSTYTVHQGQSGLKHGNRGKRQALKSASTDLGTADVVLGRVLEVTDLPEGITRTEADKLFTQLAMSGAKIQWLKDAQGLPGGGGGDNSGTAENGRHSDLAALYTIVAVFPSPLAAQNASLRLNNSVSRFKLRMAKKNYDLRILERASSQ

SEQ ID NO: 44745 - protein, 641 aa, Homo sapiens
QVLGHVEQLKVRVKELEQQLQESAREAEMERALLQGEREAERALLQKEQKAVDQLQEKLVALETGIQKERDKERAELAAGRRHLEARQALYAELQTQLDNCPESVREQLQEQLRREAEALETETKLFEDLEFQQLERESRVEEERELAGQGLLRSKAELLRSIAKRKERLAILDSQAGQIRAQAVQESERLARDKNASLQLLQKEKEKLTVLERRYHSLTGGRPFPKTTSTLKEVYRSKMDGEATSPLPRTRSGPLPSSSGSSSSSSQLSVATLGRSPSPKSALLTQNGTGSLPRNLAATLQDIETKRQLALQQKGQQVIEEQRRRLAELKQKAAAEAQCQWDALHGAAPFPAGPSGFPPLMHHSILHHLPAGRERGEEGEHAYDTLSLESSDSMETSISTGGNSACSPDNMSSASGLDMGKIEEMEKMLKEAHAEKNRLMESREREMELRRQALEEERRRREQVERRLQSESARRQQLVEKEVKMREKQFSQARPLTRYLPIRKEDFDLKTHIESSGHGVDTCLHVVLSSKVCRGYLVKMGGKIKSWKKRWFVFDRLKRTLSYYVDKHETKLKGVIYFQAIEEVYYDHLRSAAKSPNPALTFCVKTHDRLYYMVAPSAEAMRIWMDVIVTGAEGYTQFMN

SEQ ID NO: 44746 - protein, 305 aa, Homo sapiens
  MOD_RES (1)..(1): Any amino acid
XDGLHNMGGDPITVIDEIRDLLYIGKDRKNPREDYLDVYVFGVGPLVNQVNINALASKKDNEQHVFKVKDMENLEDVFYQMIGGEKRDLEIEVVLFHPNYNINGKKEAGIPEFYDYDVALIKLKNKLKYGQTIRPICLPCTEGTTRALRLPPTTTCQQQKEELLPAQDIKALFVSEEEKKLTRKEVYIKNGDKKGSCERDAQYAPGYDKVKDISEVVTPRFLCTGGVSPYADPNTCRGDSGGPLIVHKRSRFIQVGVISWGVVDVCKNQKRQKQVPAHARDFHINLFQVLPWLKEKLQDEDLGFL

SEQ ID NO: 44747 - protein, 90 aa, Homo sapiens
  MOD_RES (1)..(1): Any amino acid
XKTIWEVPERYQNLSPVGSGAYGSVCAAFDTKTGLRVAVKKLSRPFQSIIHAKRTYRELRLLKHMKHENVIGLLDVFTPARSLEEFNDVA

SEQ ID NO: 44748 - protein, 44 aa, Homo sapiens
MCPQSHCWSQGWLSSWLPTWRPTSMSQLKNVEARILQCLQNKFL

SEQ ID NO: 44749 - protein, 58 aa, Homo sapiens
IYQELTRLKAAVGELPEKSKQQEIYQELTQLKAAVAELARLHHRLQRSGGPARRNQKC

SEQ ID NO: 44750 - protein, 125 aa, Homo sapiens
MSDKDDIETPLLTEAAPILEDGNCEPAKNSESVDQGAKPESKSEPVVSTRKRPETKPSSDLETSKVLPIQDNVSKDVPQTRWGYWGSWGKSILSSASATVATVGQGISNVIEKAETSLGIPGPSE

SEQ ID NO: 44751 - protein, 270 aa, Homo sapiens
QKQPVKAWRQDVPSEEAEPEAAGRGSQATGPPPTVGARRRPSVPQEQHSHSGFGLKGQSEKSLLQEMVPVVPGQTGSDVTVSWSPEEAEAWESENRPRAALGPVVGARRGRPPTRRRQFRDLAAEKPHSCGQCGKRFRWGSDLARHQRTHTGEKPHKCPECDKSFRSSSDLVRHQGVHTGEKPFSCSECGKSFSRSAYLADHQRIHTGEKPFGCSDCGKSFSLRSYLLDHRRVHTGERPFGCGECDKSFKQRAHLIAHQSLHAKMAQPVG

SEQ ID NO: 44752 - protein, 926 aa, Homo sapiens
MADVDPDTLLEWLQMGQGDERDMQLIALEQLCMLLLMSDNVDRCFETCPPRTFLPALCKIFLDESAPDNVLEVTARAITYYLDVSAECTRRIVGVDGAIKALCNRLVVVELNNRTSRDLAEQCVKVLELICTRESGAVFEAGGLNCVLTFIRDSGHLVHKDTLHSAMAVVSRLCGKMEPQDSSLEICVESLSSLLKHEDHQVSDGALRCFASLADRFTRRGVDPAPLAKHGLTEELLSRMAAAGGTVSGPSSACKPGRSTTGAPSTTADSKLSNQVSTIVSLLSTLCRGSPVVTHDLLRSELPDSIESALQGDERCVLDTMRLVDLLLVLLFEGRKALPKSSAGSTGRIPGLRRLDSSGERSHRQLIDCIRSKDTDALIDAIDTGAFEVNFMDDVGQTLLNWASAFGTQEMVEFLCERGADVNRGQRSSSLHYAACFGRPQVAKTLLRHGANPDLRDEDGKTPLDKARERGHSEVVAILQSPGDWMCPVNKGDDKKKKDTNKDEEECNEPKGDPEMAPIYLKRLLPVFAQTFQQTMLPSIRKASLALIRKMIHFCSEALLKEVCDSDVGHNLPTILVEITATVLDQEDDDDGHLLALQIIRDLVDKGGDIFLDQLARLGVISKVSTLAGPSSDDENEEESKPEKEDEPQEDAKELQQGKPYHWRDWSIIRGRDCLYIWSDAAALELSNGSNGWFRFILDGKLATMYSSGSPEGGSDSSESRSEFLEKLQRARGQVKPSTSSQPILSAPGPTKLTVGNWSLTCLKEGEIAIHNSDGQQATILKEDLPGFVFESNRGTKHSFTAETSLGSEFVTGWTGKRGRKLKSKLEKTKQKVRTMARDLYDDHFKAVESMPRGVVVTLRNIATQLESSWELHTNRQCIESENTWRDLMKTALENLIVLLKDENTISPYEMCSSGLVQALLTVLNN

SEQ ID NO: 44753 - protein, 186 aa, Homo sapiens
MAAETLLSSLLGLLLLGLLLPASLTGGVGSLNLEELSEMRYGIEILPLPVMGGQSQSSDVVIVSSKYKQRYECRLPAGAIHFQREREEETPAYQGPGIPELLSPMRDAPCLLKTKDWWTYEFCYGRHIQQYHMEGILLPSDRDRLRSEVKAGMERELENIIQETEKELDPDGLKKESERDRAMLAL

SEQ ID NO: 44754 - protein, 129 aa, Homo sapiens
MSLKMDNRDVAGKANRWFGVAPPKSGKMNMNILHQEELIAQKKREIEAKMEQKAKQNQVASPQPPHPGERPDQCAQRPSQHTHPQRWEEVPAHQQADRPGAGQPAGPCEELLPRQAAARGAPPECLPVP

SEQ ID NO: 44755 - protein, 291 aa, Homo sapiens [sequence omitted]

SEQ ID NO: 44756 - protein, 1245 aa, Homo sapiens
MAVRKKDGGPNVKYYEAADTVTQFDNVRLWLGKNYKKYIQAEPPTNKSLSSLVVQLLQFQEEVFGKHVSNAPLTKLPIKCFLDFKAGGSLCHILAAAYKFKSDQGWRRYDFQNPSRMDRNVEMFMTIEKSLVQNNCLSRPNIFLCPEIEPKLLGKLKDIIKRHQGTVTEDKNNASHVVYPVPGNLEEEEWVRPVMKRDKQVLLHWGYYPDSYDTWIPASEIEASVEDAPTPEKPRKVHAKWILDTDTFNEWMNEEDYEVNDDKNPVSRRKKISAKTLTDEVNSPDSDRRDKKGGNYKKRKRSPSPSPTPEAKKKNAKKGPSTPYTKSKRGHREEEQEDLTKDMDEPSPVPNVEEVTLPKTVNTKKDSESAPVKGGTMTDLDEQEDESMETTGKDEDENSTGNKGEQTKNPDLHEDNVTEQTHHIIIPSYAAWFDYNSVHAIERRALPEFFNGKNKSKTPEIYLAYRNFMIDTYRLNPQEYLTSTACRRNLAGDVCAIMRVHAFLEQWGLINYQVDAESRPTPMGPPPTSHFHVLADTPSGLVPLQPKTPQGRQVDADTKAGRKGKELDDLVPETAKGKPELQTSASQQMLNFPDKGKEKPTDMQNFGLRTDMYTKKNVPSKSKAAASATREWTEQETLLLLEALEMYKDDWNKVSEHVGSRTQDECILHFLRLPIEDPYLEDSEASLGPLAYQPIPFSQSGNPVMSTVAFLASVVDPRVASAAAKSALEEFSKMKEEVPTALVEAHVRKVEEAAKVTGKADPAFGLESSGIAGTTSDEPERIEESGNDEARVEGQATDEKKEPKEPREGGGAIEEEAKEKTSEAPKKDEEKGKEGDSEKESEKSDGDPIVDPEKEKEPKEGQEEVLKEVVESEGERKTKVERDIGEGNLSTAAAAALAAAAVKAKHLAAVEERKIKSLVALLVETQMKKLEIKLRHFEELETIMDREREALEYQRQQLLADRQAFHMEQLKYAEMRARQQHFQQMHQQQQQPPPALPPGSQPIPPTGAAGPPAVHGLAVAPASVVPAPAGSGAPPGSLGPSEQIGQAGSTAGPQQQQPAGAPQPGAVPPGVPPPGPHGPSPFPNQQTPPSMMPGAVPGSGHPGVAGNAPLGLPFGMPPPPPPPAPSIIPFGSLADSISINLPAPPNLHGHHHHLPFAPGTLPPPNLPVSMANPLHPNLPATTTMPSSLPLGPGLGSAAAQSPAIVAAVQGNLLPSASPLPDPGTPLPPDPTAPSPGTVTPVPPPQ

SEQ ID NO: 44757 - protein, 95 aa, Homo sapiens
MQAFLKGTSISTKPPLTKDRGVAASAGSSGENKKAKPVPWVEKYRPKCVDEVAFQEEVVAVLKKSLEGADLPNLLFYGPPGTGKTSTILAAAREL

SEQ ID NO: 44758 - protein, 116 aa, Homo sapiens
MQRLRWLRDWKSSGRGLTAAKEPGARSSPLQAMRILQLILLALATGLVGGETRIIKGFECKPHSQPWQAALFEKTRLLCGATLIAPRWLLTAAHCLKPWPLHSSPGAAQPPEGGGL

SEQ ID NO: 44759 - protein, 604 aa, Homo sapiens
MKRCETPEILHHQIKCCGDLIVLKTNTVTAQVTVRPKMCILTELERGMVGPVTLHKKIHTTTVLFIVQIHILLIQAITQAKLQMHLMILQMTGLSILALLGKSTTTIVEQKFHNGKNQKSGLKEQRQKEANKMAVNSFPKDRDYRREVMQATATSGFASGMEDKHSSDASSLLPQNILSQTSRHNDRDYRLPRAETHSSSTPVQHPIKPVVHPTATPSTVPSSPFTLQSDHQPKKSFDANGASTLSKLPTPTSSVPAQKTERKESTSGDKPVSHSCTTPSTSSASGLNPTSAPPTSASAVPVSPVPQSPIPPLLQDPNLLRQLLPALQATLQLNNSNVDISKINEVLTAAVTQASLQSIIHKFLTAGPSAFNITSLISQAAQLSTQAQPSNQSPMSLTSDASSPRSYVSPRISTPQTNTVPIKPLISTPPVSSQPKVSTPVVKQGPVSQSATQQPVTADKQQGHEPVSPRSLQRSSSQRSPSPGPNHTSNSSNASNATVVPQNSSARSTCSLTPALAAHFSENLIKHVQGWPADHAEKQASRLREEAHNMGTIHMSEICTELKNLRSLVRVCEIQATLREQRILFLRQQIKELEKLKNQNSFMV

SEQ ID NO: 44760 - protein, 165 aa, Homo sapiens
  MOD_RES (1)..(1): Any amino acid
XTVEERQTGMWWRHLVAGGGAGAVSRTCTAPLDRLKVLMQVLKTRMALRKTGQYSGMLDCARRILAREGVAAFYKGYVPNMLGIIPYAGIDLAVYETLKNAWLQHYAVNSADPGVFVLLACGTMSSTCGQLASYPLALVRTRMQAQGKAGPGQSPGRSGGADRSI

SEQ ID NO: 44761 - protein, 304 aa, Homo sapiens
MTKVKVGKEDSSSAEFLEKRRAALERYLQRIVNHPTMLQDPDVREFLEKEELPRAVGTQTLSGAGLLKMFNKATDAVSKMTIKMNESDIWFEEKLQEVECEEQRLRKLHAVVETLVNHRKELALNTAQFAKSLAMLGSSEDNTALSRALSQLAEVEEKIEQLHQEQANNDFFLLAELLSDYIRLLAIVRAAFDQRMKTWQRWQDAQATLQKKREAEARLLWANKPDKLQQAKDEILEWESRVTQYERDFERISTVVRKEVIRFEKEKSKDFKNHVIKYLETLLYSQQQLAKYWEAFLPEAKAIS

SEQ ID NO: 44762 - protein, 256 aa, Homo sapiens
MNHSERFVFIAEWYDPNASLLRRYELLFYPGDGSVEMHDVKNHRTFLKRTKYDNLHLEDLFIGNKVNVFSRQLVLIDYGDQYTARQLGSRKEKTLALIKPDAISKAGEIIEIINKAGFTITKLKMMMLSRKEALDFHVDHQSRPFFNELIQFITTGPIIAMEILRDDAICEWKRLLGPANSGVARTDASESIRALFGTDGIRNAAHGPDSFASAAREMELFFPSSGGCGPANTAKFTNCTCCIVKPHAVSEVRRNP

SEQ ID NO: 44763 - protein, 748 aa, Homo sapiens
MKTSPRRPLILKRRRLPLPVQNAPSETSEEEPKRSPAQQESNQAEASKEVAESNSCKFPAGIKIINHPTMPNTQVVAIPNNANIHSIITALTAKGKESGSSGPNKFILISCGGAPTQPPGLRPQTQTSYDAKRTEVTLETLGPKPAARDVNLPRPPGALCEQKRETCDGEAAGCTINNSLSNIQWLRKMSSDGLGSRSIKQEMEEKENCHLEQRQVKVEEPSRPSASWQNSVSERPPYSYMAMIQFAINSTERKRMTLKDIYTWIEDHFPYFKHIAKPGWKNSIRHNLSLHDMFVRETSANGKVSFWTIHPSANRYLTLDQVFKQQQKRPNPELRRNMTIKTELPLGARRKMKPLLPRVSSYLVPIQFPVNQSLVLQPSVKVPLPLAASLMSSELARHSKRVRIAPKVLLAEEGIAPLSSAGPGKEEKLLFGEGFSPLLPVQTIKEEEIQPGEEMPHLARPIKVESPPLEEWPSPAPSFKEESSHSWEDSSQSPTPRPKKSYSGLRSPTRCVSEMLVIQHRERRERSRSRRKQHLLPPCVDEPELLFSEGPSTSRWAAELPFPADSSDPASQLSYSQEVGGPFKTPIKETLPISSTPSKSVLPRTPESWRLTPPAKVGGLDFSPVQTSQGASDPLPDPLGLMDLSTTPLQSAPPLESPQRLLSSEPLDLISVPFGNSSPSDIDVPKPGSPEPQVSGLAANRSLTEGLVLDTMNDSLSKILLDISFPGLDEDPLGPDNINWSQFIPELQ

SEQ ID NO: 44764 - protein, 284 aa, Homo sapiens
MLGFVGRVAAAPASGALRRLTPSASLPPAQLLLRAAPTAVHPGESTVRTIAMDGTEGLVRGQKVLDSGAPIKIPVGPETLGRIMNVIGEPIDERGPIKTKQFAPIHAEAPEFMEMSVEQEILVTGIKVVDLLAPYAKGGKIGLFGGAGVGKTVLIMELINNVAKAHGGYSVFAGVGERTREGNDLYHEMIESGVINLKDATSKVSALLGRIPSAVGYQPTLATDMGTMQERITTTKKGSITSVQDYKSLQDIIAILGMDELSEEDKLTVSRARKIQRFLSQPFQ

SEQ ID NO: 44765 - protein, 164 aa, Homo sapiens
MVDSTEYEVASQPEVETSPLGDGASPGPEQVKLKKEISLLNGVCLIVGNMIGSGIFVSPKGVLIYSASFGLSLVIWAVGGLFSVFGALCYAELGTTIKKSGASYAYILEAFGGFLAFIRLWTSLLIIEPTSQAIIAITFANYMVQPLFPSCFAPYAASRLLAAA

SEQ ID NO: 44766 - protein, 173 aa, Homo sapiens
CLHSKEHSIKATLIWRLFFLIMFLTIIVCGMVAALSAIRANCHQEPSVCLQAACPESWIGFQRKCFYFSDDTKNWTSSQRFCDSQDADLAQVESFQELNFLLRYKGPSDHWIGLSREQGQPWKWINGTEWTRQLVMKEDGANLYVAKVSQVPRMNPRPVMVSYPGSRRVCLFE

SEQ ID NO: 44767 - protein, 107 aa, Homo sapiens
  MOD_RES (1)..(1): Any amino acid
XISRLMGDYLLRGYRMLGETCADCGTILLQDKQRKIYCVACQELDSDVDKDNPGGAAAVGHVLVVPAVGPVRVNPGLQTPVPRPELLPGPVILPPFGQLLPTGCGPV

SEQ ID NO: 44768 - protein, 129 aa, Homo sapiens
  MOD_RES (1)..(1): Any amino acid
XNDPEMDGEDGVSFISPLGILYTPALKVMEGHGEVNIKHYLNCSHCEVDECHMDPESHKVICFCDHGTVLAEDGVSCIVSPTPEPHLPLSLILSVVTSALVAALVLAFSGIMIGNPNLITVGPLHRGGN

SEQ ID NO: 44769 - protein, 44 aa, Homo sapiens
CNSHSKSDNIPVTPQKCPSSTGFHIQENEESHYEGTLPYLRYSL

SEQ ID NO: 44770 - protein, 588 aa, Homo sapiens
MPLRKRKSPERTASSKSPEISRSHVNSIKERTSSVGLPSVIPNSTRRVSFAPNLPSMKTSQDIGDSRISLKTLLNAIKTMEGRLEGKIEILASRPLINDESPNFLKQDSVKSILERSKEELSRTVKCRNAALKESQKLKEDLEAVEDRENKKVGNFQRQLAEAKEDNCKVTIMLENVLASHSKMQGALEKVQIELGRRDSEIAGLKKERDLNQQRVQKLEAEVDQWQARMLVMEDQHNSEIESLQKALGVAREDNRKLAMSLEQALQTNNHLQTKLDHIQEQLESKELERQNLETFKDRMTEESKVEAELHAERIEALRKQFQTERETTKKVAQREVAELKKALDEANFRSVEVSRTNRELRQKLAELEKILESNKEKIKNQKTQIKLHLSAKANNAQNIERMKQIEKELKQMELIKDQYQKKNYEQSLSIQRFVCEMTNLQKEMQMLAKSQYDASVRNKQQELHLEAERKIRQELENRCQELEETVRHLKKCKEATENTLKEASVESEQITANLEEAHRWFKHRFDGLQLELTKNRLQRPSGEDRWQEKDQDVKHDVMSNQSVLHRWERKQNLRPMPKKYHSEVQRK

SEQ ID NO: 44771 - protein, 245 aa, Homo sapiens
MEKLAASTEPQGPRPVLGRESVQCRMECCDVPAETLYDVLHDIEYRKKWDSNVIETFDIARLTVNADVGYYSWRCPKPLKNRDVITLRSWLPMGADYIIMNYSVKHPKYPPRKDLVRAVSIQTGYLIQSTGPKSCVITYLAQVDPKGSLPKWVVNKSSQFLAPKAMKKMYKACLKYPEWKQKHLPHFKPWLHPEQSPLPSLALSELSVQHADSLENIDESAVAESREERMGGAGGEGSDDDTSLT

SEQ ID NO: 44772 - protein, 804 aa, Homo sapiens
MKVRLLRQLSAAAKVKAPSGLQGPPQAHQFISLLLEEYGALCQAARSISTFLGTLENEHLKKFQVTWELHNKHLFENLVFSEPLLQSNLPALVSQIRLGTTTHDTCSEDTYSTLLQRYQRSEEELRRVAEEWLECQKRIDAYVDEQMTMKTKQRMLTEDWELFKQRRFIEEQLTNKKAVTGENNFTDTMRHMLSSRLSMPDCPNCNYRRRCACDDCSLSHILTCGIMDPPVTDDIHIHQLPLQVDPAPDYLAERSPPSVSSASSGSGSSSPITIQQHPRLILTDSGSAPTFCSDDEDVAPLSAKFADIYPLSNYDDTEVVANMNGIHSELNGGGENMALKDESPQISSTSSSSSEADDEEADGESSGEPPGAPKEDGVLGSRSPRTEESKADSPPPSYPTQQAEQAPNTCECHVCKQEASGLTPSAMTAGALPPGHQFLSPEKPTHPALHLYPHIHGHVPLHTVPHLPRPLIHPTLYATPPFTHSKALPPAPVQNHTNKHQVFNASLQDHIYPSCFGNTPEWNSSKFISLWGSEVMNDKNWNPGTFLPDTISGSEILGPTLSETRPEALPPPSSNETPAVSDSKEKKNAAKKKCLYNFQDAFMEANKVVMATSSATSSVSCTATTVQSSNSQFRVSSKRPPSVGDVFHGISKEDHRHSAPAAPRNSPTGLAPLPALSPAALSPAALSPASTPHLANLAAPSFPKTATTTPGFVDTRKSFCPAPLPPATDGSISAPPSVCSDPDCEGHRCENGVYDPQQDDGDESADEDSCSEHSSSTSTSTNQKEGKYCDCCYCEFFGHGGVSA

SEQ ID NO: 44773 - protein, 71 aa, Homo sapiens
MSPRRQGLMGHRLRPAVLPLHLQPLPGLWGGHARVGCPPLLRPVHRDLPVWLGLHTDLPPQPHPGARHQRP

SEQ ID NO: 44774 - protein, 55 aa, Homo sapiens
MSSKYPRSVRRCLPLCALTLEAALILLFYFFTHYDASLEDQKGLVASYQVFGWPP

SEQ ID NO: 44775 - protein, 148 aa, Homo sapiens
MATEEFIIRIPPYHYIHVLDQNSNVSRVEVGPKTYIRQDNERVLFAPMRMVTVPPRHYCTVANPVSRDAQGLVLFDVTGQVRLRHADLEIRLAQDPFPLYPGEVLEKDITPLQVVLPNTALHLKALLDFEDKDGDKVVAGDEWLFEGP

SEQ ID NO: 44776 - protein, 258 aa, Homo sapiens
MGRQGLGGASAAGRSMQRSQSRSSLSASFEALAGYFPCMNSLEEEEGEAGGKKLRSTVQRSTETGLAVEMRNWMTRQASRESTDGSMNSYSSEGNLIFPGVRLASDSQFSDFLDGLGPAQLVGRQTLATPAMGDIQVGMMDKKGQLEVEIIRARGLVVKPGSKTLPAPYVKVYLLDNGVCIAKKKTKVARKTLEPLYQQLLSFEESPQGKVLQIIVWGDYGRMDHKSFMGVAQILLDELELSNMVIGWFKLFPPSSLV

SEQ ID NO: 44777 - protein, 366 aa, Homo sapiens
MSDQIKFIMDSLNKEPFRKNYNLITFDSLEPMQLLQVLSDVLAEIDPKQLVDIREEMPEQTAKRMLSLLGILKYKPSGNATDMSTFRQGLVIGSKPVIYPVLHWLLQRTNELKKRAYLARFLIKLEVPSEFLQDETVADTNKQDISAMEEEKDQLIKRVEHLKKRVETAQNHQWMLKIARQLRVEKEREEYLAQQKQEQKNQLFHAVQRLQRVQNQLKSMRQAAADAKPESLMKRLEEEIKFNLYMVTEKFPKELENKKKELHFLQKVVSEPAMGHSDLLELESKINEINTEINQLIEKKMMRNEPIEGKLSLYRQQASIISRKKEAKAEELQEAKEKLASLEREASVKRNQTREFDGTEVLKGDE

SEQ ID NO: 44778 - protein, 145 aa, Homo sapiens
MARHGPPWSRLDAQQERDVRELVRGVAGLQDEADPNFQLALNFAWSNFRFHRFLDVNSHKIEKTIEGIYEKFVIHSDLSKAASWKRLTEEFLNAPLPSIKEIKMHIIPYCHFFCVCQTLLQTAVMWRHQEIKKWKRKMISTGENT

SEQ ID NO: 44779 - protein, 37 aa, Homo sapiens
  MOD_RES (1)..(1): Any amino acid
XYREASLPSVWASLRRREMVRSGARPGQDLFKKNTTF

SEQ ID NO: 44780 - protein, 47 aa, Homo sapiens
MSGEATVLAYHAPEEQEGLLVVKVEEENYVLDQDFGLQENPWSQEVF

SEQ ID NO: 44781 - protein, 297 aa, Homo sapiens
MEACKDSRIGGMMKTLLLFVGLLLTWESGQVLGDQTVSDNELQEMSNQGSKYVNKEIQNAVNGVKQIKTLIEKTNEERKTLLSNLEEAKKKKEDALNETRESETKLKELPGVCNETMMALWEECKPCLKQTCMKFYARVCRSGSGLVGRQLEEFLNQSSPFYFWMNGDRIDSLLENDRQQTHMLDVMQDHFSRASSIIDELFQDRFFTREPQDTYHYLPFSLPHRRPHFFFPKSRIVRSLMPFSPYEPLNFHAMFQPFLEMIHEAQQAMDIHFHSPAFQHPPTEFIREGDDDRTVCR

SEQ ID NO: 44782 - protein, 121 aa, Homo sapiens
EADDNCLVMEFDDQATVEINSSGCYSTVCVELDLQNLAVNTILQSHHVNDMEGADSMGISFDVIQQASLEDMITGGQAASAPASYDETALCSNTFRCHPLWEGVLLIEGSYPLPLIWKAKV

SEQ ID NO: 44783 - protein, 90 aa, Homo sapiens
MNQPESANDPEPLCAVCGQAHSLEENHFYSYPEEVDDDLICHICLQALLDPLDTPCGHTYCTLCLTNFLVEKDFCPMDRKPLVLQHCKKS

SEQ ID NO: 44784 - protein, 670 aa, Homo sapiens
  MOD_RES (1)..(1): Any amino acid
XCNTECLYRQTFQAFSEMLQSLVVKDPHLENLDTIIKLPLRFQRLGHLVALMALLCGDPQEKVAEEAAEGIHSLLHITLRLKYITHDKKDQQNLKRALTKCREFLELHSSAAKCFYNCPFRIAQVPEIMGVICAQLSIISQPRVRQQIINTVSLFISRPKYTDIVLSFLLCHPVPYNRHLAEVWRMLSVELPSTTWILWRLLRKLQKCHNEPAQEKMAYVAVAATDALYEVFLGNRLRAATFRLFPQLLMTLLIQIHHSIGLTMSDVDIPSGLYTEQEVPSEVTPLCFAMQATKTLLLRTCCLQEFNIMEKNKGWALLGGKDGHLQGLFLLANALLERNQLLAQKVMYLLVPLLNRGNDKHKLTSAGFFVELLRSPVAKRLPSIYSVARFKDWLQDGNHLFRILGLRGLYNLVGHQEMREDIKSLLPYIVDSLRETDEKIVLSAIQILLQLVRTMDFTTLAAMMRTLFSLFGDVRSDVHRFSVTLFGAAIKSVKNPDKKSIENQVLDSLVPLLLYSQDENDAVAEESRQVLTICAQFLKWKLPQEVYSKDPWHIKPTEAGTICRFFEKKCKGKINILEQTLMYSKNPKLPIRRSAVLFVGLLSKYMDHNELRRMGTDWIEDDLRDLLCDPEPSLCIIASQTLLLVQMARAEPKPKQRVNWLQKLMGRSSA

SEQ ID NO: 44785 - protein, 19 aa, Homo sapiens
RGPTPGGQCIWKPICLGAE

SEQ ID NO: 44786 - protein, 227 aa, Homo sapiens
MDSRVSELFGGCCRPGGGPAVGGTLKARGAGSSSGCGGPKGKKKNGRNRGGKANNPPYLPPEAEDGNIEYKYRFEHLVTQMKWRLQEGRGEAVYQIGVEDNGLLVGLAEEEMRASLKTLHRMAEKVGADITVLREREVDYDSDMPRKITEVLVRKVPDNQQFLDLRVAVLGNVDSGKSTLLGVLTQGELDNGRGRARLNLFRHLHEIQSGRTSSISFEILGFNSKGE

SEQ ID NO: 44787 - protein, 1224 aa, Homo sapiens
  MOD_RES (1)..(1): Any amino acid
XQEQAGSLACVPCPVGRTTISAGAFSQTHCVTDCQRNEAGLQCDQNGQYRASQKDRGSGKAFCVDGEGRRLPWWETEAPLEDSQCLMMQKFEKVPESKVIFDANAPVAVRSKVPDSEFPVMQCLTDCTEDEACSFFTVSTTEPEISCDFYAWTSDNVACMTSDQKRDALGNSKATSFGSLRCQVKVRSHGQDSPAVYLKKGAIICGLLSSPSVLLCNVKDWMDPSEAWANATCPGVTYDQESHQVILRLGDQEFIKSLTPLEGTQDTFTNFQQVYLWKDSDMGSRPESMGCRKDTVPRPASPTEAGLTTELFSPVDLNQVIVNGNQSLSSQKHWLFKHLFSAQQANLWCLSRCVQEHSFCQLAEITESASLYFTCTLYPEAQVCDDIMESNAQGCRLILPQMPKALFRKKVILEDKVKNFYTRLPFQKLMGISIRNKVPMSEKSISNGFFECERRCDADPCCTGFGFLNVSQLKGGEVTCLTLNSLGIQMCSEENGGAWRILDCGSPDIEVHTYPFGWYQKPIAQNNAPSFCPLVVLPSLTEKVSLDSWQSLALSSVVVDPSIRHFDVAHVSTAATSNFSAVRDLCLSECSQHEACLITTLQTQPGAVRCMFYADTQSCTHSLQGQNCRLLLREEATHIYRKPGISLLSYEASVPSVPISTHGRLLGRSQAIQVGTSWKQVDQFLGVPYAAPPLAERRFQAPEPLNWTGSWDASKPRASCWQPGTRTSTSPGVSEDCLYLNVFIPQNVAPNASVLVFFHNTMDREESEGWPAIDGSFLAAVGNLIVVTASYRVGVFGFLSSGSGEVSGNWGLLDQVAALTWVQTHIRGFGGDPRRVSLAADRGGADVASIHLLTARATNSQLFRRAVLMGGSALSPAAVISHERAQQQAIALAKEVSCPMSSSQEVVSCLRQKPANVLNDAQTKLLAVSGPFHYWGPVIDGHFLREPPARALKRSLWVEVDLLIGSSQDDGLINRAKAVKQFEESRGRTSSKTAFYQALQNSLGGEDSDARVEAAATWYYSLEHSTDDYASFSRALENATRDYFIICPIIDMASAWAKRARGNVFMYHAPENYGHGSLELLADVQFALGLPFYPAYEGQFSLEEKSLSLKIMQYFSHFIRSGNPNYPYEFSRKVPTFATPWPDFVPRAGGENYKEFSELLPNRQGLKKADCSFWSKYISSLKTSADGAKGGQSAESEEEELTAGSGLREDLLSLQEPGSKTYSK

SEQ ID NO: 44788 - protein, 665 aa, Homo sapiens
MAAVFVDRAGEWKLGGLDYMYSAQGNGGGPPRKGIPELEQYDPPELADSSGRVVREKWSADMWRLGCLIWEVFNGPLPRAAALRNPGKIPKTLVPHYCELVGANPKVRPNPARFLQNCRAPGGFMSNRFVETNLFLEEIQIKEPAEKQKFFQELSKSLDAFPEDFCRHKVLPQLLTAFEFGNAGAVVLTPLFKVGKFLSAEEYQQKIIPVVVKMFSSTDRAMRIRLLQQMEQFIQYLDEPTVNTQIFPHVVHGFLDTNPAIREQTVKSMLLLAPKLNEANLNVELMKHFARLQAKDEQGPIRCNTTVCLGKIGSYLSASTRHRVLTSAFSRATRDPFAPSRVAGVLGFAATHNLYSMNDCAQKILPVLCGLTVDPEKSVRDQAFKAIRSFLSKLESVSEDPTQLEEVEKDVHAASSPGMGGAAASWAGWAVTGVSSLTSKLIRSHPTTAPTETNIPQRPTPEGVPAPAPTPVPATPTTSGHWETQEEDKDTAEDSSTADRWDDEDWGSLEQEAESVLAQQDDWSTGGQVSRASQVSNSDHKSSKSPESDWSSWEAEGSWEQGWQEPSSQEPPPDGTRLASEYNWGGPESSDKGDPFATLSARPSTQPRPDSWGEDNWEGLETDSRQVKAELARKKREERRREMEAKRAERKVAKGPMKLGARKLD

SEQ ID NO: 44789 - protein, 95 aa, Homo sapiens
MGNPGTFKRGLLLSALSYLGFETYQVISQAAVVHATAKVEEILEQADYLYESGETEKLYQLLTQYKESEDAELLWRLARASRDVAQLSRTSEEEK

SEQ ID NO: 44790 - protein, 121 aa, Homo sapiens
MSSNTMLQKTLLILISFSVVTWMIFIISQNFTKLWSALNLSISVHYWNNSAKSLFPKTSLIPLKPLTETELRIKEIIEKLDQQIPPRPFTHVNTTTSATHSTATILNPRDTYCRGDQLDIL

SEQ ID NO: 44791 - protein, 2575 aa, Homo sapiens
MASEDNRVPSPPPTGDDGGGGGREETPTEGGALSLKPGLPIRGIRMKFAVLTGLVEVGEVSNRDIVETVFNLLVGGQFDLEMNFIIQEGESINCMVDLLEKCDITCQAEVWSMFTAILKKSIRNLQVCTEVGLVEKVLGKIEKVDNMIADLLVDMLGVLASYNLTVRELKLFFSKLQGDKGRWPPHAGKLLSVLKHMPQKYGPDAFFNFPGKSAAAIALPPIAKWPYQNGFTFHTWLRMDPVNNINVDKDKPYLYCFRTSKGLGYSAHFVGGCLIVTSIKSKGKGFQHCVKFDFKPQKWYMVTIVHIYNRWKNSELRCYVNGELASYGEITWFVNTSDTFDKCFLGSSETADANRVFCGQMTAVYLFSEALNAAQIFAIYQLGLGYKGTFKFKAESDLFLAEHHKLLLYDGKLSSAIAFTYNPRATDAQLCLESSPKDNPSIFVHSPHALMLQDVKAVLTHSIQSAMHSIGGVQVLFPLFAQLDYRQYLSDEIDLTICSTLLAFIMELLKNSIAMQEQMLACKGFLVIGYSLEKSSKSHVSRAVLELCLAFSKYLSNLQNGMPLLKQLCDHVLLNPAIWIHTPAKVQLMLYTYLSTEFIGTVNIYNTIRRVGTVLLIMHTLKYYYWAVNPQDRSGITPKGLDGPRPNQKEMLSLRAFLLMFIKQLVMKDSGVKEDELQAILNYLLTMHEDDNLMDVLQLLVALMSEHPNSMIPAFDQRNGLRVIYKLLASKSEGIRVQALKAMGYFLKHLAPKRKAEVMLGHGLFSLLAERLMLQTNLITMTTYNVLFEILIEQIGTQVIHKQHPDPDSSVKIQNPQILKVIATLLRNSPQCPESMEVRRAFLSDMIKLFNNSRENRRSLLQCSVWQEWMLSLCYFNPKNSDEQKITEMVYAIFRILLYHAVKYEWGGWRVWVDTLSITHSKVTFEIHKENLANIFREQQGKVDEEIGLCSSTSVQAASGIRRDINVSVGSQQPDTKDSPVCPHFTTNGNENSSIEKTSSLESASNIELQTTNTSYEEMKAEQENQELPDEGTLEETLTNETRNADDLEVSSDIIEAVAISSNSFITTGKDSMTVSEVTASISSPSEEDASEMPEFLDKSIVEEEEDDDYVELKVEGSPTEEANLPTELQDNSLSPAASEAGEKLDMFGNDDKLIFQEGKPVTEKQTDTETQDSKDSGIQTMTASGSSAMSPETTVSQIAVESDLGQMLEEGKKATNLTRETKLINDCHGSVSEASSEQKIAKLDVSNVATDTERLELKASPNVEAPQPHRHVLEISRQHEQPGQGIAPDAVNGQRRDSRSTVFRIPEFNWSQMHQRLLTDLLFSIETDIQMWRSHSTKTVMDFVNSSDNVIFVHNTIHLISQVMDNMVMACGGILPLLSAATSATHELENIEPTQGLSIEASVTFLQRLISLVDVLIFASSLGFTEIEAEKSMSSGGILRQCLRLVCAVAVRNCLECQQHSQLKTRGDKALKPMHSLIPLGKSAAKSPVDIVTGGISPVRDLDRLLQDMDINRLRAVVFRDIEDSKQAQFLALAVVYFISVLMVSKYRDILEPQNERHSQSCTETGSENENVSLSEITPAAFSTLTTASVEESESTSSARRRDSGIGEETATGLGSHVEVTPHTAPPGVSAGPDAISEVLSTLSLEVNKSPETKNDRGNDLDTKATPSVSVSKNVNVKDILRSLVNIPADGVTVDPALLPPACLGALGDLSVEQPVQFRSFDRSVIVAAKKSAVSPSTFNTSIPTNAVSVVSSVDSAQASDMGGESPGSRSSNAKLPSVPTVDSVSQDPVSNMSITERLEHALEKAAPLLREIFVDFAPFLSRTLLGSHGQELLIEGTSLVCMKSSSSVVELVMLLCSQEWQNSIQKNAGLAFIELVNEGRLLSQTMKDHLVRVANEAEFILSRQRAEDIHRHAEFESLCAQYSADKREDEKMCDHLIRAAKYRDHVTATQLIQKIINILTDKHGAWGNSAVSRPLEFWRLDYWEDDLRRRRRFVRNPLGSTHPEATLKTAVEHATDEDILAKGKQSIRSQALGNQNSENEILLEGDDDTLSSVDEKDLENLAGPVSLSTPAQLVAPSVVVKGTLSVTSSELYFEVDEEDPNFKKIDPKILAYTEGLHGKWLFTEIRSIFSRRYLLQNTALEIFMANRVAVMFNFPDPATVKKVVNYLPRVGVGTSFGLPQTRRISLASPRQLFKASNMTQRWQHREISNFEYLMFLNTIAGRSYNDLNQYPVFPWVITNYESEELDLTLPTNFRDLSKPIGALNPKRAAFFAERYESWEDDQVPKFHYGTHYSTASFVLAWLLRIEPFTTYFLNLQGGKFDHADRTFSSISRAWRNSQRDTSDIKELIPEFYYLPEMFVNFNNYNLGVMDDGTVVSDVELPPWAKTSEEFVHINRLALESEFVSCQLHQWIDLIFGYKQQGPEAVRALNVFYYLTYEGAVNLNSITDPVLREAVEAQIRSFGQTPSQLLIEPHPPRGSAMQVSPLMFTDKAQQDVIMVLKFPSNSPVTHVAANTQPGLATPAVITVTANRLFAVNKWHNLPAHQGAVQDQPYQLPVEIDPLIGLSLPSLFAIH

SEQ ID NO: 44792 - protein, 75 aa, Homo sapiens
MLREEAAQKRKGKEPGMALPQVESHFVTQAGVQWCDPGSLQPLPPRYLFQMHDEGGLVNRARQYRSDPHRDIAKT

SEQ ID NO: 44793 - protein, 146 aa, Homo sapiens
  MOD_RES (1)..(1): Any amino acid
XDQPWEWKKERISKAFAVDIKVIKDLPWPPPVGQLDSSPSLPDGDRDISGPASPLPEPSLEDSSAQFEGPEKSCLSPGREEKGRLPPRLSAGNPKSAKPLSMEPSSPLGEWTDPALPLENQVGHPQWVGLDSEGPSRDAPLPLSHP

SEQ ID NO: 44794 - protein, 455 aa, Homo sapiens
MAGGGGDLSTRMFTEDQGVDDRLLYDIVFKHFKRNKVEISNAIKKTFPFLEGLRDRDLITNKMFEDSQDSCRNLVPVQRVVYNVLSELEKTFNLPVLEALFSDVNMQEYPDLIHIYKGFENVIHDKLPLQESEEEEREERSGLQLSLEQGTGENSFRSLTWPPSGSPSHAGTTPPENGLSEHPCETEQINAKRKDTTSDKDDSLGSQQTNEQCAQKAEPTESCEQIAVQVNNGDAGREMPCPLPCDEESPEAELHNHGIQINSCSVRLVDIKKEKPFSNSKVECQAQARTHHNQASDIIVISSEDSEGSTDVDEPLEVFISAPRSEPVINNDNPLESNDEKEGQEATCSRPQIVPEPMDFRKLSTFRESFKKRVIGQDHDFSESSEEEAPAEASSGALRSKHGEKAPMTSRSTSTWRIPSRKRRFSSSDFSDLSNGEELQETCSSSLRRGSGKED

SEQ ID NO: 44795 - protein, 104 aa, Homo sapiens
MASIWVGHRGTVRDYPDFSPSVDAEAIQKAIRGIGTDEKMLISILTERSNAQRQLIVKEYQAAYGKELKDDLKGDLSGHFEHLMVALVTPPAVFDAKQLKKSMK

SEQ ID NO: 44796 - protein, 213 aa, Homo sapiens
  MOD_RES (1)..(1): Any amino acid
XMTPEIERVRRNQEQLSAVKYKGELQRGTAISDPPELKRAKENQKNISNVYYRGQLGRATTLSVTPEMERVKKNQENISSVKYTQDHKQMKGRPSLILDTPAMRHVKEAQNHISMVKYHEDFEKTKGRGFTPVVDDPVTERVRKNTQVVSDAAYKGVHPHIVEMDRRPGIIVGFVAPAETEDLTYKTHLFFPEPISKAIPKAMATCTRPVCHP

SEQ ID NO: 44797 - protein, 108 aa, Homo sapiens
  MOD_RES (1)..(1): Any amino acid
XKGESNDGKSKVTHVMIRCQELKYDVGGGERFDSLTDLVEHYKKNPMVETLGTVLQLKQPLNTTRINAAEIESRVRELSKLAETTDKVKQGFWEEFEFAENDGFQLHP

SEQ ID NO: 44798 - protein, 59 aa, Homo sapiens
MDRIWAEREKKFQLVKNKQDGPRSAGWREHMERRRSTERAYSRRAGDGLPACGRRGGVL

SEQ ID NO: 44799 - protein, 240 aa, Homo sapiens
MPLHKYPVWLWKRLQLREGICSRLPGHYLRSLEEERTPTPVHYRPHGAKFKINPKNGQRERVEDVPIPIYFPPESQRGLWGGEGWILGQIYANNDKLSKRLKKVWKPQLFEREFYSEILDKKFTVTVTMRTLDLIDEAYGLDFYILKTPKEDLCSKFGMDLKRGMLLRLARQDPQLHPEDPERRAAIYDKYKEFAIPEEEAEWVGLTLEEAIEKQRLLEEKDPVPLFKIYVAELIQQLQQ

SEQ ID NO: 44800 - protein, 22 aa, Homo sapiens
MGILEKISEIEKEIARTQKNKD

SEQ ID NO: 44801 - protein, 224 aa, Homo sapiens
MDNRKEPPFFNDDNMGPFYYRLHFCDTMELFIETLTGTCFELRVSPFETVISVKAKIRRLEGIPICRQHLIWNNMELENDYCLNDYNISEGCTLKLVLAMRGGPINTRRVPTDDPLRKMAEYLDSSRVEVWEKTSCSKQVTFLVYQEGDQLNFFPAVDRGDGTLTPLSDSSKKIDFHLHVLRRKGEHRMRRMYYSSPPTCESPSSDKEENNKSLFSLWKENRTG

SEQ ID NO: 44802 - protein, 241 aa, Homo sapiens
MCPDLHPSKYVQPPLSSSSSPLKGGQEAFSPLGLNAGAFYALSTLLNRMVIWHYPGEEVNAGRIGLTIVIAGMLGAVISGIWLDRSKTYKETTLVVYIMTLVGMVVYTFTLNLGHLWVVFITAGTMGFFMTGYLPLGFEFAVELTYPESEGISSGLLNISAQVFGIIFTISQGQIIDNYGTKPGNIFLCVFLTLGAALTAFIKADLRRQKANKETLENKLQEEEEESNTSKVPTAVSEDHL

SEQ ID NO: 44803 - protein, 143 aa, Homo sapiens
  MOD_RES (1)..(1): Any amino acid
XGQKRDVCEHHGKKLQIFCKEDGKVICWVCELSQEHQGHQTFRINEVVKECQEKLQVALQRLIKEDQEAEKLEDDIRQERTAWKNYIQIERQKILKGFNEMRVILDNEEQRELQKLEEGCQHAHLRSPAEVEGIVSRDAAGCD

SEQ ID NO: 44804 - protein, 569 aa, Homo sapiens
MEPWSSRWKTKRWLWDFTVTTLALTFLFQAREVRGAAPVDVLKALDFHNSPEGISKTTGFCTNRKNSKGSDTAYRVSKQAQLSAPTKQLFPGGTFPEDFSILFTVKPKKGIQSFLLSIYNEHGIQQIGVEVGRSPVFLFEDHTGKPAPEDYPLFRTVNIADGKWHRVAISVEKKTVTMIVDCKKKTTKPLDRSERAIVDTNGITVFGTRILDEEVFEGDIQQFLITGDPKAAYDYCEHYSPDCDSSAPKAAQAQEPQIDEKKKSNFKKKMRTVATKSKEKSKKFTPPKSEKFSSKKKKSYQASAKAKLGVKANIVDDFQEYNYGTMESYQTEAPRHVSGTNEPNPVEEIFTEEYLTGEDYDSQRKNSEDTLYENKEIDGRDSDLLVDGDLGEYDFYEYKEYEDKPTSPPNEEFGPGVPAETDITETSINGHGAYGEKGQKGEPAVVEPGMLVEGPPGPAGPAGIMGPPGLQGPTGPPGDPGDRGPPGRPGLPGADGLPGPPGTMLMLPFRYGGDGSKGPTISAQEAQAQAILQQARIALRGPPGPMGLTGRPGPVGGPGSSGAKGESGD

SEQ ID NO: 44805 - protein, 2343 aa, Homo sapiens
MKQRKGQGSGGSRGRKKRGLSDISPSTSLPPLVEGQLRCFLKLTVNRVIWKIAKPPTCVLVRVRWWGETSDGTLFCPRDALQTEPKAVRTTTRYAIRCGPKQFTSYLTDMAVLVLEVITKLDGLPIGRVQINGLAQLSPTHQINGFFTIVSSTSKKLGELQVSLALEPLSETYDSYHPLPTTDMTENVLLSKQGFRENTEPSSTQFQVPSRPRDIHTIKIDGKELAANSSRSTTPRGKDHVCFAENPDTIKDSSFGLQHSLNSGQSLESVTLKGRAPRKQMSLLNSSEFQPQIRTVAKSHSDSCILSSNNLPTKDLLSALLEQGNKLRNAMVISAMKSSPETSMLLDQVHPPINEDSLRASTQIRAFSRNRFKDHIEDHLLPSTENTFWRHDTKADTRAIQLLLGSAELSQGNFWDGLGSPPDSPSPGSDVYCISELNDPQYDQSLLENLFYTAPKSDTSISDFLSEEDDIVPSKKISQSTALARSSKVLESSDHKLKKRSAGKRNRNLVEQQMLSETPEDAQTMTLSVDRLALLGRTHSVRIIIETMGVPPDSPQMTPGKKSYAGPPPKVTTAKKRTFFVEYHFPVGFSESGLGKTALITEVVRLASSKITDGKVKFQQRFVFPVQFGGPMIEHWWNSNLTFQIYVKKTPQKKPEVIGSVSLSLRAVIQSELLSFSDQLPVQQENGQSPFGPLKVTMELITDNKDFTGINTKLSGNTHYTPLCAPTSPNKALPELNQDMTCTKNPQNLNQIHEETAKKAQNLVLPNRKSPSPVAPHPSTFVATPASHNLVNQTNGTTKESALLLHVLLMVPDGKDFISGESEKQSPCNVYLNCKLFSTEEVTRSVIAWGTTQPVFNFSQVIPVSLSSKYLERLKNNVMVIETWNKVRSPGQDKLLGLVKLPLHQFYMSFKDAKISRLLLDAQYPVVAVDSYMPVIDVFSGHQNGSLRVFLAMGSSNQIMALQRLKNEEGTLPPFSPRPAHFLDQPTAASVAMAEDRGNGLMEHCFEIHIEMVKGLAPLQATVWGEADCYVQYYFPVQHSQSSVLKGPEFLENGITLKPFRTATTLCVPDPIFNSEHHHSLLLPAEVPVQRLLLSAFSAQGLVPGGGVQFEIWCRYYYPNVRDQKVAKGTLPLSRICAMVTTQHREDVGIQTFNLPLTPRIENRKELRNQSSGLLDVGLRYRRSPRTAEGVLAARTVSISVQIIRACGLQAAAKALAEREPALQFSATVGVNASVTTHLSFLPQGEQRRTHPVACSFCPEFSHHVEFTCNLVTQHCSGEACFLAELLEFAEVIFAVYHENTKSASDIISIESCKEYLLGVVKVPTKELLIKRSGITGWYPIILPEDGGLPHGLELMQKIVGGLELSISFTHRGDRERVLEAAEHLGWSFENSLKDFVRMDEGEPATVTISTPRLWLPIHCVLLAGHNHIHKNTYCYLRYKFYDHEAFWTPLKKPKESVNKKQIMVTFKASKRAEVTRGPSLLWYFREERLEIQVWRAYGNDSVERPHQTDSWIGSAYVDLARLGERSARTLTVSGVYPLFGRNASNLSGAALRVHVVLSSLSSHLEPTHELDSMDCSSHSESEQLPRRNDEVQLSPPEVISCHQKSPASTQVPCSSTTAEVRLTQEGPADLDGTFAVSILVERAMHLSLKGSPLTERKVSIPSCCVSFATADESSPVYTQVVENTDSPIWNFQQQSRLSKELLLDPQQTLVFKVWHKGDEERVIGFASVDLSPLLSGFQFVCGWYNITDFSGECQGQIKVAVSPLESLIHFKEERQARRGVETSKSLIPIYSPFSFPASDTYAAFSSHMARQTLDQLAHASSKELDFSSPGRSDTTRSQASRHEEHVQNIRRFHESLHLQGEAPLPCDDKLTTSPLSSQTSILTSLRKNLSELDQIQRYFRQKLTKPFLPLSPQTQTAISQHQESCRDHLGPGASSLDPGSQCILEKSSNLVLQVSSLITDLQTITRDSQAALSSHRARSRSNKATTLPDAQDTEALQERCTMPDEPLVRAPDKGTDSPSPPPLEETSNGGRMLHESLRHAVPITRMQSSEDTEAGPAYSDEDYEEDIIEPRTLNEITTVTDKTSPWSSVISDTSEVISPQPDEVQREGPSCPSPGPFCREELMVKSSFLSSPERAVNPHLPRQGSPSQSLVACECEASKARVGGESASANPQPIPCPTLSGAQQSSTFVGWSSPQTDQNKEPKSEAPAENEAATSELGDSADSFKKLPLNLASQSRRENHKGPPIDSSDIRQRQVTTGSETSTKQSLLLPGPIVVPNFFLPPQQLEASLRMLSLSATLPPAATTDQVYSQKCRSISEEWMIHLRVSLLWPISPLANPTRVVC

SEQ ID NO: 44806 - protein, 71 aa, Homo sapiens
  MOD_RES (1)..(1): Any amino acid
XQDAIEDSRQARTETVVDDWDEEFDRGKEKKIKKFKREKRRNFNAFQKLQTRRNFWSVTHPAKAASLSYRR

SEQ ID NO: 44807 - protein, 771 aa, Homo sapiens
MNYPGRGSPRSPEHNGRGGGGGAWELGSDARPAFGGGVCCFEHLPGGDPDDGDVPLALLRGEPGLHLAPGTDDHNHHLALDPCLSDENYDFSSAESGSSLRYYSEGESGGGGSSLSLHPPQQPPLVPTNSGGGLYEVDVTQGECYPVYWNQADKIPVMRGQWFIDGTWQPLEEEESNLIEQEHLNCFRGQQMQENFDIEVSKSIDGKDAVHSFKLSRNHVDWHSVDEVYLYSDATTSKIARTVTQKLGFSKASSSGTRLHRGYVEEATLEDKPSQTTHIVFVVHGIGQKMDQGRIIKNTAMMREAARKIEERHFSNHATHVEFLPVEWRSKLTLDGDTVDSITPDKVRGLRDMLNSSAMDIMYYTSPLYRDELVKGLQQELNRLYSLFCSRNPDFEEKGGKVSIVSHSLGCVITYDIMTGWNPVRLYEQLLQKEEELPDERWMSYEERHLLDELYITKRRLKEIEERLHGLKASSMTQTPALKFKVENFFCMGSPLAVFLALRGIRPGNTGSQDHILPREICNRLLNIFHPTDPVAYRLEPLILKHYSNISPVQIHWYNTSNPLPYEHMKPSFLNPAKEPTSVSENEGISTIPSPVTSPVLSRRHYGESITNIGKASILGAASIGKGLGGMLFSRFGRSSTTQSSETSKDSMEDEKKPVASPSATTVGTQTLPHSSSGFLDSAYFRLQESFFNLPQLLFPENVMQNKDNALVELDHRIDFELREGLVESRYWSAVTSHTAYWSSLDVALFLLTFMYKHEHDDDAKPNLDPI

SEQ ID NO: 44808 - protein, 114 aa, Homo sapiens
MDSPSLRELQQPLLEGTECETPAQKPGRHELGSPLREIAFAESLRGLQFLSPPLPSVSAGLGEPRPPDVEDMSSSDSDSDWDGGSRLSPFLPHDHLGLAVFSMLCCFWPVGIAA

SEQ ID NO: 44809 - protein, 210 aa, Homo sapiens
MASHRHSGPSSYKVGTMAEKFDCHYCRDPLQGKKYVQKDGHHCCLKCFDKFCANTCVECRKPIGADSKEVHYKNRFWHDTCFRCAKCLHPLANETFVAKDNKILCNKCTTREDSPKCKGCFKAIVAGDQNVEYKGTVWHKDCFTCSNCKQVIGTGSFFPKGEDFYCVTCHETKFAKHCVKCNKGLVKAPVWWPMKDNPGTTTASTAKNAP

SEQ ID NO: 44810 - protein, 32 aa, Homo sapiens
MVKCCSAIGCASRCLPNSKLKGLTFHVFPTDE

SEQ ID NO: 44811 - protein, 764 aa, Homo sapiens
MGTATRRKPHLLLVAAVALVSSSAWSSALGSQTTFGPVFEDQPLSVLFPEESTEEQVLLACRARASPPATYRWKMNGTEMKLEPGSRHQLVGGNLVIMNPTKAQDAGVYQCLASNPVGTVVSREAILRFGFLQEFSKEERDPVKAHEGWGVMLPCNPPAHYPGLSYRWLLNEFPNFIPTDGRHFVSQTTGNLYIARTNASDLGNYSCLATSHMDFSTKSVFSKFAQLNLAAEDTRLFAPSIKARFPAETYALVGQQVTLECFAFGNPVPRIKWRKVDGSLSPQWTTAEPTLQIPSVSFEDEGTYECEAENSKGRDTVQGRIIVQAQPEWLKVISDTEADIGSNLRWGCAAAGKPRPTVRWLRNGEPLASQNRVEVLAGDLRFSKLSLEDSGMYQCVAENKHGTIYASAELAVQALAPDFRLNPVRRLIPAARGGEILIPCQPRAAPKAVVLWSKGTEILVNSSRVTVTPDGTLIIRNISRSDEGKYTCFAENFMGKANSTGILSVRDATKITLAPSSADINLGDNLTLQCHASHDPTMDLTFTWTLDDFPIDFDKPGGHYRRTNVKETIGDLTILNAQLRHGGKYTCMAQTVVDSASKEATVLVRGPPGPPGGVVVRDIGDTTIQLSWSRGFDNHSPIAKYTLQARTPPAGKWKQVRTNPANIEGNAETAQVLGLTPWMDYEFRVIASNILGTGEPSGPSSKIRTREAAPSVAPSGLSGGGGAPGELIVNWTAGQHSLADRPGAWRRCPVLCLQQRERPALHAL

SEQ ID NO: 44812 - protein, 95 aa, Homo sapiens
MLPPQKKPWESMAKGLVLGALFTSFLLLVYSYAVPPLHAGLASTTPEAAASCSPPALEPEAVIRANGSAGECQPRRNIVFLKTHKTASSTLLNIL

SEQ ID NO: 44813 - protein, 205 aa, Homo sapiens
YVRRDSEVVLLFFYAPWCGQSIAARAEIEQAASRLSDQPGVLGYFEFSGSPQPPGYLTFFTSALHSLKKDYLGTVRFGVITNKHLAKLVSLVHSGSVYLHRHFNTSLVFPREVLNYTAENICKWALENQETLFRWLRPHGGKSLLLNNELKKGPALFLFIPFNPLAESHPLIDEITEVALEYNNCHGDQVVERLLQHLRRVDAPV

SEQ ID NO: 44814 - protein, 40 aa, Homo sapiens
MTMTANKNSSITHGAGGTKAPRGTLSRSQSVSPPPVLSPP

SEQ ID NO: 44815 - protein, 277 aa, Homo sapiens
MEESHFNSNPYFWPSIPTVSGQIENTMFINKMKDQLLPEKGCGLAPPHYPTLLTVPASVSLPSGISMDTESKSDQLTPHSQASVTQNITVVPVPSTGLMTAGPGLVITSPSGSLVTTASSAQTFPISAPMIVSALPPGSQALQVVPDLSKKVASTLTEEGGGGGGGGGSVAPKPPRGRKKKRMLESGLPEMNDPYVLSPEDDDDHQKDGKTYRCRMCSLTFYSKSEMQIHSKSHTETKPHKCPHCSKTFANSSYLAQHIRIHSGAKPYSCNFCEKSF

SEQ ID NO: 44816 - protein, 1494 aa, Homo sapiens
MIESENLNQEEIIKELCLCNGLSYEMVGQEGSDTSKLEMFFLGYPRIVGLSLFPNLTSLTIVAQDIKEISGLEPCLQLKELWIAECCIEKIEGLQECRNLEKLYLYFNKISKIENLEKLIKLKVLWLNHNTIKNIEGLQTLKNLKDLNLAGNLINSIGRCLDSNEQLERLNLSGNQICSFKELTNLTRLPCLKDLCLNDPQYTTNPVCLLCNYSTHVLYHLPCLQRFDTLDVSAKQIKELADTTAMKKIMYYNMRIKTLQRHLKEDLEKLNDQKCKLQKLPEERVKLFSFVKKTLERELAELKGSGKGHSDGSNNSKVTDPETLKSCETVTEEPSLQQKILAKLNALNERVTFWNKKLDEIEAIYHIEVKQKKKSHGLLIPLLLIELETVGNFHFEEGTRSDDWFNFCYELILSRFCAWDFRTYGITGVKVKRIIKVNNRILRLKFEEKFQKFLENEDMHDSESYRRMLECLFYVFDPEVSVKKKHLLQILEKGFKDSETSKLPLKKEAIIVSNSLSISECPRIEFLQQKHKDEKKISLKHELFRHGILLITKVFLGQSVQAHEKESISQSNYPMVNSVFIPRKYLLNSVMGQRNCDCSVRQCKWFVFDHDLVLPEYVVEFEYITMVKAPSLFSVFNNVILEESKKNPEVSVFSKDLKFDDEVIKMEPRIKARPKLISLDDKTILSLAKTSVYSHIVSLNLHGNSLSKLRDLSKLTGLRKLNISFNEFTCLDDVYHLYNLEYLDASHNHVITLEGFRGLMKLKHLDLSWNQLKKSGNEINMLCKHTTSLLTLDIQHNPWQKPATLRLSVIGRLKTLTHLNGVFISEEEATAAMKFIAGTRITQLSLLRHSSTKEERPRILSIWPSAKILTQVSKLGPHLHLSGNCYLKITALNLDGQHLFEITNLEKLENLKWASFSNNNLTKMEGLESCINLEELTLDGNCISKIEGISKMTKLTRLSINNNLLTGWEEHTFDNMLHLHSLSLENNRITSLSGLQKSFTLVELYISNNYIAVNQEMHNLKGLCNLVILDMCGNIIIWNQENYRLFVIFHLPELKALDGIPIEPSETDSAKDLFGGRLTSDMIAERQGHSNFKQMQELNWTSSSIRTVDLIPVDQFRNVCNVNLQNNHLTSFSGLIYLPNVKVLCLNYNHIESIMPRLKPQTHLTSRQLLYQKVPSSGYGQQGISKTNRDIMSSENLPPIMHSLEVLHLGYNGICNLIQLQLNRLRNLKFLFLQGNEISQVEGLDNLVVLQELVVDHNRIRSFNDSAFAKPSSLLALHLEENRLRELGKLQSLVKLEKLFLGYNKIQDITELEKLDVISTLRELTVYGNPICRKMLHRHMLIFRLPNLQMLDGSPVNSDDRAKAEFHLAELQAKKNSLIPVTHSPMDGRSFGQVKTPPIEITNVLLPSGFSHYLGSDVTLTPEVEDKKNKNAGILTNNPRSIHAEIAFRQLRGISISPSLLSHQNIASPTAQIYQSNQDKRRIFGSNFPRSNRM

SEQ ID NO: 44817 - protein, 43 aa, Homo sapiens
GGMINWNRLFPPLRQRQNVNYQGGRQSEPAAPPLEVSEEQTNE

SEQ ID NO: 44818 - protein, 47 aa, Homo sapiens
MNQNTDKISGSGSNSDMMENSKEEGTSSSEKSKSSGSSRSKRKPSIV

SEQ ID NO: 44819 - protein, 1261 aa, Homo sapiens
MMMNVPGGGAAAVMMTGYNNGRCPRNSLYSDCIIEEKTVVLQKKDNEGFGFVLRGAKADTPIEEFTPTPAFPALQYLESVDEGGVAWQAGLRTGDFLIEVNNENVVKVGHRQVVNMIRQGGNHLVLKVVTVTRNLDPDDTARKKAPPPPKRAPTTALTLRSKSMTSELEELVDKASVRKKKDKPEEIVPASKPSRAAENMAVEPRVATIKQRPSSRCFPAGSDMNSVYERQGIAVMTPTVPGSPKAPFLGIPRGTMRRQKSIDSRIFLSGITEEERQFLAPPMLKFTRSLSMPDTSEDIPPPPQSVPPSPPPPSPTTYNCPKSPTPRVYGTIKPAFNQNSAAKVSPATRSDTVATMMREKGMYFRRELDRYSLDSEDLYSRNAGPQANFRNKRGQMPENPYSEVGKIASKAVYVPAKPARRKGMLVKQSNVEDSPEKTCSIPIPTIIVKEPSTSSSGKSSQGSSMEIDPQAPEPPSQLRPDESLTVSSPFAAAIAGAVRDREKRLEARRNSPAFLSTDLGDEDVGLGPPAPRTRPSMFPEEGDFADEDSAEQLSSPMPSATPREPENHFVGGAEASAPGEAGRPLNSTSKAQGPESSPAVPSASSGTAGPGNYVHPLTGRLLDPSSPLALALSARDRAMKESQQGPKGEAPKADLNKPLYIDTKMRPSLDAGFPTVTRQNTRGPLRRQETENKYETDLGRDRKGDDKKNMLIDIMDTSQQKSAGLLMVHTVDATKLDNALQEEDEKAEVEMKPDSSPSEVPEGVSETEGALQISAAPEPTTVPGRTIVAVGSMEEAVILPFRIPPPPLASVDLDEDFIFTEPLPPPLEFANSFDIPDDRAASVPALSDLVKQKKSDTPQSPSLNSSQPTNSADSKKPASLSNCLPASFLPPPESFDAVADSGIEEVDSRSSSDHHLETTSTISTVSSISTLSSEGGENVDTCTVYADGQAFMVDKPPVPPKPKMKPIIHKSNALYQDALVEEDVDSFVIPPPAPPPPPGSAQPGMAKVLQPRTSKLWGDVTEIKSPILSGPKANVISELNSILQQMNREKLAKPGEGLDSPMGAKSASLAPRSPEIMSTISGTRSTTVTFTVRPGTSQPITLQSRPPDYESRTSGTRRAPSPVVSPTEMNKETLPAPLSAATASPSPALSDVFSLPSQPPSGDLFGLNPAGRSRSPSPSILQQPISNKPFTTKPVHLWTKPDVADWLESLNLGEHKEAFMDNEIDGSHLPNLQKEDLIDLGVTRVGHRMNIERALKQLLDR

SEQ ID NO: 44820 - protein, 156 aa, Homo sapiens
MGRDAAGQLWYTGLTNSDAWEAWYNLPRAPASPFREAYNRWHSCYQHRECSMPSAYTQHLRETAWHDPIVPAQYQAPSTRWGSALWKDRPIRGKEYVLNRNRYGVEPLWRASDYVPSLSAPQRPPGTTQNYREWVLEPYCPSTCQRSPPSLTPTPR

SEQ ID NO: 44821 - protein, 119 aa, Homo sapiens
MASQKRPSQRHGSKYLATASTMDHARHGFLPRHRDTGILDSIGRFFGGDRGAPKRGSGKDSHHPARTAHYGSLPQKSHGRTQDENPVVHFFKNIVYTSSPTRTEVGRLGTRVLLAADGC

SEQ ID NO: 44822 - protein, 361 aa, Homo sapiens
MELDFGHFDERDKTSRNMRGSRMNGLPSPTHSAHCSFYRTRTLQALSNEKKAKKVRFYRNGDRYFKGIVYAVSSDRFRSFDALLADLTRSLSDNINLPQGVRYIYTIDGSRKIGSMDELEEGESYVCSSDNFFKKVEYTKNVNPNWSVNVKTSANMKAPQSLASSNSAQARENKDFVRPKLVTIIRSGVKPRKAVRVLLNKKTAHSFEQVLTDITEAIKLETGVVKKLYTLDGKQVTCLHDFFGDDDVFIACGPEKFRYAQDDFSLDENECRVMKGNPSATAGPKASPTPQKTSAKSPGPMRRSKSPADSANGTSSSQLSTPKSKQSPISTPTSPGSLRKHKVDLYLPLSLDDSDSLGDSM

SEQ ID NO: 44823 - protein, 87 aa, Homo sapiens
MNTPSQPRQHFYPSRAQPPSSAASRVQSAAPARPGPAAHVYPAGSQVMMIPSQISYPASQGAYYIPGQGRSTYVVPTQQYPVQPGAP

SEQ ID NO: 44824 - protein, 107 aa, Homo sapiens
  MOD_RES (1)..(1): Any amino acid
XDVIGLQVDYWLGHPGERRREGDKRDASSKNTLKSVFRSVQVSRLPHSGEAQLSGTMAMTVVTKEKNKKVSIDGVEWSDIKFFQLAAQWPTHVKHFPVGLFSGSKAT

SEQ ID NO: 44825 - protein, 20 aa, Homo sapiens
  MOD_RES (1)..(1): Any amino acid
XLEKAKPSLLGSAQQSICYI

SEQ ID NO: 44826 - protein, 154 aa, Homo sapiens
MALAPERAAPRVLFGEWLLGEISSGCYEGLQWLDEARTCFRVPWKHFARKDLSEADARIFKAWAVARGRWPPSSRGGGPPPEAETAERAGWKTNFRCALRSTRRFVMLRDNSGDPADPHKVYALSRELCWRGPGTDQTEAEAPAAVPPPQGGPP

SEQ ID NO: 44827 - protein, 223 aa, Homo sapiens
  MOD_RES (1)..(1): Any amino acid
XQSLVSGQPNSIGNQIQGVVIPYTSVPTYQVSLPQGSQGIPHQTYQQPVMFPNQSNQGSMPTTGMPVYYSVIPPGQQNNLSSSVGYLQHPGSEQVQFPRTTSPCSSQQLQGHQCTAGPPPPPGGGMVMMQLSVPNNPQSCAHSPPQWKQNKYYCDHQRGQKCVEFSSVDNIVQEIPGIHYLASHCSTILLLFCTDTFQTNRVSLAAGMETEEGDKLKKLHPQT

SEQ ID NO: 44828 - protein, 63 aa, Homo sapiens
MSWIPFKIGQPKKQIVPKTVERDFEREYGKLQQLEEQTRRLQKDMKKSTDADLAPKPQPVTDV

SEQ ID NO: 44829 - protein, 425 aa, Homo sapiens
MGFSEQGRQRLHPEEALYLLECGSIHLFHQDLPLSIQEAYQLLLTDHTVTFLQYQVFSHLKRLGYVVRRFQPSSVLSPYERQLNLDASVQHLEDGDGKRKRSSSSPRSINKKAKALDNSLQPKSLAASSPPPCSQPSQCPEEKPQESSPMKGPGGPFQLLGSLGPSPGPAREGVGCSWESGRAENGVTGAGKRRWNFEQISFPNMASDSRHTLLRAPAPELLPANVAGRETDAESWCQKLNQRKEKLSRREREHHAEAAQFQEDVNADPEVQRCSSWREYKELLQRRQVQRSQRRAPHLWGQPVTPLLSPGQASSPAVVLQHISVLQTTHLPDGGARLLEKSGGLEIIFDVYQADAVATFRKNNPGKPYARMCISGFDEPVPDLCSLKRLSYQSGDVPLIFALVDHGDISFYSFRDFTLPQDVGH

SEQ ID NO: 44830 - protein, 166 aa, Homo sapiens
MEIPNPPTSKCITYWKRKVKSEYMRLRQLKRLQANMGAKALYVANFAKVQEKTQILNEEWKKLRVQPVQSMKPVSGHPFLKKCTIESIFPGFASQHMLMRSLNTVALVPIMYSWSPLQQNFMVEDETVLCNIPYMGDEVKEEDETFIEELINNYDGKVHGEEEMIP

SEQ ID NO: 44831 - protein, 148 aa, Homo sapiens
MTQKGSMKPVKKKKTEEPELEPLCCCEYIDRNGEKNHVATCLCDCQDLDEGCDRWITCKSLQPETCERIMDTISDRLRIPWLRGAKKVNISIIPPLVLLPVFLHVASWHFLLGVVVLTSLPVLALWYYYLTHRRKEQTLFFLSLGLFS

SEQ ID NO: 44832 - protein, 261 aa, Homo sapiens
  MOD_RES (1)..(1): Any amino acid
XRVMAPRTLILLLSGALALTETWACSHSMRYFDTAVSRPGRGEPRFISVGYVDDTQFVRFDSDAASPRGEPRAPWVEQEGPEYWDRETQKYKRQAQADRVNLRKLRGYYNQSEDGSHTLQWMYGCDLGPDGRLLRGYDQSAYDGKDYIALNEDLRSWTAADTAAQITQRKWEAAREAEQWRAYLEGTCVEWLRRYLENGKETLQRAEHPKTHVTHHPVSDHEASRRWNLPEVGSCGGAFWRRAEIHVPCAARGAARAPHPE

SEQ ID NO: 44833 - protein, 41 aa, Homo sapiens
MAQPLAFILDVPETPGDQGSSRSRASARPRRGWSCSRESGR

SEQ ID NO: 44834 - protein, 77 aa, Homo sapiens
MATCSSDQSVKVWDKSESGDWHCTASWKTHSGSVWRVTWAHPEFGQVLASCSFDRTAAVWEEIVGESNDKLRGQSHW

SEQ ID NO: 44835 - protein, 41 aa, Homo sapiens
MKWKHVPFLVMISLLSLSPNHLFLAQLIPGLKPTKEPRKIL

SEQ ID NO: 44836 - protein, 140 aa, Homo sapiens
  MOD_RES (1)..(1): Any amino acid
XEMLASYGLAYSLMKFFTGPMSDFKNVGLVFVNSKRDRTKAVLCMVVAGAIAAVFHTLIGSYSILFKDKTKCSCDSILSMKQQESCIIHTVTGLQFNQDPGKAALLQGWSSAAAFLVGIKPSGHDFRRGFKTALLTWHKN

SEQ ID NO: 44837 - protein, 83 aa, Homo sapiens
  MOD_RES (1)..(1): Any amino acid
XLCCQAGAGDSSELHGGRPGHPPAALGLPGVLQAAQEAWLRRPQETYNHGRRRRGSKPRPYMAEQGRERAKEEVLHTSKQPIL

SEQ ID NO: 44838 - protein, 88 aa, Homo sapiens
  MOD_RES (1)..(1): Any amino acid
XRCCRRRCCCRQPPHALRPLLLLPLVLLPPLAAAAAGPNRCDTIYQGFAECLIRLGDSMGRGGELETICSTVDKEYLIVLREPGGWMS

SEQ ID NO: 44839 - protein, 75 aa, Homo sapiens
MCNPVSLYLGSPPPAWPWGARPMESGLLRPAPVSEVIVLHYNYTGKLRGARYQPGAGLRADAVVCLAVCAFIVLE

SEQ ID NO: 44840 - protein, 84 aa, Homo sapiens
MVLGEVNINNSVFKQYFFETKCRDPNPVDSGCRGIDSKHWNSYCTTTHTFVKALTMDGKQAAWRFIRIDTACVCVLSRKAVRRA

SEQ ID NO: 44841 - protein, 89 aa, Homo sapiens
MASADKNGGSVSSVSSSRLQSRKPPNLSITIPPPEKETQAPGEQDSMLPERKNPAYLKSVSLQEPRSRWQESSEKRPGFRRQASLSQSI

SEQ ID NO: 44842 - protein, 27 aa, Homo sapiens
  MOD_RES (1)..(1): Any amino acid
XSRPPGDLAEAGGRALQVVLSILTPQG

SEQ ID NO: 44843 - protein, 72 aa, Homo sapiens
  MOD_RES (1)..(1): Any amino acid
XELIAYELTRREAEANRRPLPELVRAKIPFSACLQAFSEPENVDDFWSSALQAKSAGVKSPDEPIDRPIRHR

SEQ ID NO: 44844 - protein, 33 aa, Homo sapiens
MPLEQRSQHCKPEEGLEARGEALGLVGAQAPAT

SEQ ID NO: 44845 - protein, 522 aa, Homo sapiens [sequence omitted]

SEQ ID NO: 44846 - protein, 687 aa, Homo sapiens
MDQHQHLNKTAESASSEKKKTRRCNGFKMFLAALSFSYIAKALGGIIMKISITQIERRFDISSSLAGLIDGSFEIGNLLVIVFVSYFGSKLHRPKLIGIGCLLMGTGSILTSLPHFFMGYYRYSKETNIDPSENSTSNLPNCLINQMLSLNRTPSEIIERGCVKESGSHMWIYVFMGNMLRGIGETPIVPLGISYIDDFAKEGHSSLYLGTVNVMGMTGLVFAFMLGSLFAKMYVDIGYVDLSTIRITPKDSRWVGAWWLGFLVSGIVSIISSIPFFFLPLNPNKPQKERKVSLFLHVLKTNDKRNQIANLTNRRKYITKNVTGFFQSLKSILTNPLYVIFVIFTLLHMSSYIASLTYIIKMVEQQYGWSASKTNFLLGVLALPAVAIGMFSGGYIIKKFKLSLVGLAKLAFCSATVHLLSQVLYFFLICESKSVAGLTLTYDGNSPVRSHVDVPLSYCNSECNCDESQWEPVCGNNGITYLSPCLAGCKSSSGNKEPIVFYNCSCVEVIGLQNKNYSAHLGECPRDDACTRKSYVYFVIQVLDAFLCAVGLTSYSVLVIRIVQPELKALAIGFHSMIMRSLGGILVPIYFGALIDTTCMKWSTNSCGARGACRIYNSTYLGRAFFGLKVALIFPVLVLLTVFIFVVRKKSHGKDTKVLENERQVMDEANLEFLNDSEHFVPSAEEQ

SEQ ID NO: 44847 - protein, 22 aa, Homo sapiens
  MOD_RES (1)..(1): Any amino acid
XMAGIPKAKQRLKRSCTPYSTL

SEQ ID NO: 44848 - protein, 46 aa, Homo sapiens
  MOD_RES (1)..(1): Any amino acid
XSKPDVISLLEQEKDPWVIKGGMNRGLCPAPPNAGLYHHQIYLLKS

SEQ ID NO: 44849 - protein, 1250 aa, Homo sapiens
MEPPGGSLGPGRGTRDKKKGRSPDELPSAGGDGGKSKKFTLKRLMADELERFTSMRIKKEKEKPNSAHRNSSASYGDDPTAQSLQDVSDEQVLVLFEQMLLDMNLNEEKQQPLREKDIIIKREMVSQYLYTSKAGMSQKESSKSAMMYIQELRSGLRDMPLLSCLESLRVSLNNNPVSWVQTFGAEGLASLLDILKRLHDEKEETAGSYDSRNKHEIIRCLKAFMNNKFGIKTMLETEEGILLLVRAMDPAVPNMMIDAAKLLSALCILPQPEDMNERVLEAMTERAEMDEVERFQPLLDGLKSGTTIALKVGCLQLINALITPAEELDFRVHIRSELMRLGLHQVLQDLREIENEDMRVQLNVFDEQGEEDSYDLKGRLDDIRMEMDDFNEVFQILLNTVKDSKAEPHFLSILQHLLLVRNDYEARPQYYKLIEECISQIVLHKNGADPDFKCRHLQIEIEGLIDQMIDKTKVEKSEAKAAELEKKLDSELTARHELQVEMKKMESDFEQKLQDLQGEKDALHSEKQQIATEKQDLEAEVSQLTGEVAKLTKELEDAKKEMASLSAAAITVPPSVPSRAPVPPAPPLPGDSGTIIPPPPAPGDSTTPPPPPPPPPPPPPLPGGVCISSPPSLPGGTAISPPPPLSGDATIPPPPPLPEGVGIPSPSSLPGGTAIPPPPPLPGSARIPPPPPPLPGSAGIPPPPPPLPGEAGMPPPPPPLPGGPGIPPPPPFPGGPGIPPPPPGMGMPPPPPFGFGVPAAPVLPFGLTPKKLYKPEVQLRRPNWSKLVAEDLSQDCFWTKVKEDRFENNELFAKLTLTFSAQTKTSKAKKDQEGGEEKKSVQKKKVKELKVLDSKTAQNLSIFLGSFRMPYQEIKNVILEVNEAVLTESMIQNLIKQMPEPEQLKMLSELKDEYDDLAESEQFGVVMGTVPRLRPRLNAILFKLQFSEQVENIKPEIVSVTAACEELRKSESFSNLLEITLLVGNYMNAGSRNAGAFGFNISFLCKLRDTKSTDQKMTLLHFLAELCENDYPDVLKFPDELAHVEKASRVSAENLQKNLDQMKKQISDVERDVQNFPAATDEKDKFVEKMTSFVKDAQEQYNKLRMMHSNMETLYKELGEYFLFDPKKLSVEEFFMDLHNFRNMFLQAVKENQKRRETEEKMRRAKLAKEKAEKERLEKQQKREQLIDMNAEGDETGVMDSLLEALQSGAAFRRKRGPRQDNLLCPWEVEEEEETFKLPTGRPGVQSHLC

SEQ ID NO: 44850 - protein, 182 aa, Homo sapiens
MAASWRLGCDPRLLRYLVGFPGRRSVGLVKGALGWSVSRGANWRWFHSTQWLRGEAVSAGDALCEIETDKAVVTLDASDDGILAKIVVEEGSKNIRLGSLIGLIVEEGEDWKHVEIPKDVGPPPPVSKPSEPRPSPEPQISIPVKKEHIPGTLRFRLSPAARNILEKHSLDASQGTATGPRG

SEQ ID NO: 44851 - protein, 95 aa, Homo sapiens
  MOD_RES (1)..(1): Any amino acid
XKNVKKVPHHMGHSRNPSAASAISFCSVISEPISEVNEKEYETNWRNMVETSDGLEASENEKEVSCKHSTSEKPSKLPFDTPPIEILQEFMTPHK

SEQ ID NO: 44852 - protein, 52 aa, Homo sapiens
MSGDGATEQTGSGSVTQARVQWRQSQFPATSPSRAQAIPPQLPKQLSMSQRR

SEQ ID NO: 44853 - protein, 33 aa, Homo sapiens
SRLHNKPTFSQTIVLLNLYRNPQNTAQTADGSH

SEQ ID NO: 44854 - protein, 38 aa, Homo sapiens
MASDSIFESFPSYPQCFMRGGGPRGCSRWHSGHCDGWQ

SEQ ID NO: 44855 - protein, 287 aa, Homo sapiens
MLDNGFPLATESNILKELIKPPTILRTVVNTITGSTNVGDQLPTGQLSVVPWRRTGVKYTNNEAYFDVIEEIDAIIDKSGSTITAEIQGVIDACVKLTGMPDLTLSFMNPRLLDDVSFHPCVRFKRWESERILSFIPPDGNFRLLSYHVSAQNLVAIPVYVKHNISFRDSSSLGRFEITVGPKQTMGKTIEGVTVTSQMPKGVLNMSLTPSQGTHTFDPVTKMLSWDVGKINPQKLPSLKGTMSLQAGASKPDENPTINLQFKIQQLAISGLKVNRLDMYGEKYKPF

SEQ ID NO: 44856 - protein, 772 aa, Homo sapiens
MYPQGRHPAPHQPGQPGFKFTVAESCDRIKDEFQFLQAQYHSLKVEYDKLANEKTEMQRHYVMYYEMSYGLNIEMHKQTEIAKRLNTILAQIMPFLSQEHQQQVAQAVERAKQVTMTELNAIIGQQQLQAQHLSHATHGPPVQLPPHPSGLQPPGIPPVTGSSSGLLALGALGSQAHLTVKDEKNHHELDHRGAAGLGNNSVSPSESLRASEKHRGSADYSMEAKKRKAEEKDSLSRYDSDGDKSDDLVVDVSNEDPATPRVSPAHSPPENGLDKARSLKKDAPTSPASVASSSSTPSSKTKDLGHNDKSSTPGLKSNTPTPRNDAPTPGTSTTPGLRSMPGKPPGMDPIGIMASALRTPISITSSYAAPFAMMSHHEMNGSLTSPGAYAGLHNIPPQMSAAAAAAAAAYGRSPMVSFGAVGFDPHPPMRATGLPSSLASIPGGKPAYSFHVSADGQMQPVPFPHDALAGPGIPRHARQINTLSHGEVVCAVTISNPTRHVYTGGKGCVKIWDISQPGSKSPISQLDCLNRDNYIRSCKLLPDGRTLIVGGEASTLTIWDLASPTPRIKAELTSSAPACYALAISPDAKVCFSCCSDGNIAVWDLHNQTLVRQFQGHTDGASCIDISHDGTKLWTGGLDNTVRSWDLREGRQLQQHDFTSQIFSLGYCPTGEWLAVGMESSNVEVLHHTKPDKYQLHLHESCVLSLKFAYCGKWFVSTGKDNLLNAWRTPYGASIFQSKESSSVLSCDISADDKYIVTGSGDKKATVYEVIY

SEQ ID NO: 44857 - protein, 49 aa, Homo sapiens
MDPLQKRNPASPSKSSPMTAAETSQEGPAPSQPSYSEQPMMGLSNLSPG

SEQ ID NO: 44858 - protein, 23 aa, Homo sapiens
MRPEDRMFHIRAVILRALSLAFL

SEQ ID NO: 44859 - protein, 1131 aa, Homo sapiens
MAGARSRDPWGASGICYLFGSLLVELLFSRAVAFNLDVMGALRKEGEPGSLFGFSVALHRQLQPRPQSWLLVGAPQALALPGQQANRTGGLFACPLSLEETDCYRVDIDQGADMQKESKENQWLGVSVRSQGPGGKIVTCAHRYEARQRVDQILETRDMIGRCFVLSQDLAIRDELDGGEWKFCEGRPQGHEQFGFCQQGTAAAFSPDSHYLLFGAPGTYNWKGLLFVTNIDSSDPDQLVYKTLDPADRLPGPAGDLALNSYLGFSIDSGKGLVRAEELSFVAGAPRANHKGAVVILRKDSASRLVPEVMLSGERLTSGFGYSLAVADLNSDGWPDLIVGAPYFFERQEELGGAVYVYLNQGGHWAGISPLRLCGSPDSMFGISLAVLGDLNQDGFPDIAVGAPFDGDGKVFIYHGSSLGVVAKPSQVLEGEAVGIKSFGYSLSGSLDMDGNQYPDLLVGSLADTAVLFRARPILHVSHEVSIAPRSIDLEQPNCAGGHSVCVDLRVCFSYIAVPSSYSPTVDADTDRRLRGQVPRVTFLSRNLEEPKHQASGTVWLKHQHDRVCGDAMFQLQENVKDKLRAIVVTLSYSLQTPRLRRQAPGQGLPPVAPILNAHQPSTQRAEIHFLKQGCGEDKICQSNLQLVRARFCTRVSDTEFQPLPMDVDGTTALFALSGQPVIGLELMVTNLPSDPAQPQADGDDAHEAQLLVMLPDSLHYSGVRALDPAEKPLCLSNENASHVECELGNPMKRGAQVTFYLILSTSGISIETTELEVELLLATISEQELHPVSARARVFIELPLSIAGMAIPQQLFFSGVVRGERAMQSERDVGSKVKYEVTVSNQGQSLRTLGSAFLNIMWPHEIANGKWLLYPMQVELEGGQGPGQKGLCSPRPNILHLDVDSRDRRRRELEPPEQQEPGERQEPSMSWWPVSSAEKKKNITLDCARGTANCVVFSCPLYSFDRAAVLHVWGRLWNSTFLEEYSAVKSLEVIVRANITVKSSIKNLMLRDASTVIPVMVYLDPMAVVAEGVPWWVILLAVLAGLLVLALLVLLLWKMGFFKRAKHPEATVPQYHAVKIPREDRQQFKEEKTGTILRNNWGSPRREGPDAHPILAADGHPELGPDGHPGPGTA

SEQ ID NO: 44860 - protein, 167 aa, Homo sapiens
  MOD_RES (1)..(1): Any amino acid
XTLSGNTEGAFISRTAQPPLKSFHPQIKWFQKEDVVILKIRIRNVKDYKCQYLRDRVVFSAWVGDKFYLADLELRGNIRKDDCQCVIRNDEPVITLAKERREAWCHLLRQRNPNVAFDFDHWEDCEEDSHFPKVVNSKNLPYTVTEVVEDSSSTSEDDDSESEREGE

SEQ ID NO: 44861 - protein, 639 aa, Homo sapiens
RKKMVRNDMFYNHYPYVPETEQETNVAKPARYRRAVSYDSKEYYMRLASGNPAIVQDAIVESSEGEAAQQEPEHGEDTIAKVKGLVKPPLKRSRSAPDGGDEENQEQLQDQIAEGSSIEEEEKTDNATLLRLLEEGEKIQHMYRCARVQGLDTSEGLLLFGKEHFYVIDGFTMTATREIRDIETLPPNMHEPIIPRGARQGPSQLKRTCSIFAYEDIKEVHKRRYLLQPIAVEVFSGDGRNYLLAFQKGIRNKVYQRFLAVVPSLTDSSESVSGQRPNTSVEQGSGLLSTLVGEKSVTQRWERGEISNFQYLMHLNTLAGRSYNDLMQYPVFPWILADYDSEEVDLTNPKTFRNLAKPMGAQTDERLAQYKKRYKDWEDPNGETPAYHYGTHYSSAMIVASYLVRMEPFTQIFLRLQGGHFDLADRMFHSVREAWYSASKHNMADVKELIPEFFYLPEFLFNSNNFDLGCKQNGTKLGDVILPPWAKGDPREFIRVHREALECDYVSAHLHEWIDLIFGYKQQGPAAVEAVNVFHHLFYEGQVDIYNINDPLKETATIGFINNFGQIPKQLFKKPHPPKRVRSRLNGDNAGISVLPGSTSDKIFFHHLDNLRPSLTPVKELKEPVGQIVCTDKGILAVE

SEQ ID NO: 44862 - protein, 199 aa, Homo sapiens
MPEGPELHLASQFVNEACRALVFGGCVEKSSVSRNPEVPFESSAYRISASARGKELRLILSPLPGAQPQQEPLALVFRFGMSGSFQLVPREELPRHAHLRFYTAPPGPRLALCFVDIRRFGRWDLGGKWQPGRGPCVLQEYQQFRLKIPPFEKARSVLEALQQHRPSPELTLSQKIRTKLQNPDLLELCHSVPKEVVQL

SEQ ID NO: 44863 - protein, 53 aa, Homo sapiens
VCYFVALYYNVIIGWSLFYFSQSFQQPLPWDQCPLVKNASHTCKICIIQCFGI

SEQ ID NO: 44864 - protein, 1112 aa, Homo sapiens
AHIYSLGATLKAALEYVAEPTLEPRLSQDLEALLSRMQAEDPGDRPDLESIIALCEEKLQLTSSCRVCRSLSAVGRRVLSIESFGALQDVSESSWRERPAPGNAGPRRPPGDPSTDPEVLPTPEGPESETSRGPRASPTKALLSTPVRNGESHSREGLAGLVLDAERTLGELDRDALRRSRLRKVQTFPRLLSDSPEATLCLPLTRGKSQLPISELFSPDPRKAFLDRKNGLSSFQAQPKCRLWPEQEPEHQLGRVPCAGRSTDRGPGVPGSPGQPETSHPSQGPAEAPADPRDASGEAQTPRDDERIPEGARQLESAAAEQWVSLQDLLSQLGRPFREYELWALCLACLRALQTRPEHPAYLCLDSVLVAEDGAVLFQPPPANGSYDSFFLAPELAEERLVTEKASVYCVAAVLWTAAKFSVPRNHKLALPRRLKTLLLDMARRSAPERPSAAEAIKVCGSYLLQRGMDSRKILAHLRASICQVYQEEETISLQNAFSVVELKPSVAPAPEPSPGFLPVNSDTGLVAVPGPVPGQHPCGEEATQLPAAFTSEATHFKPIVLAQNASVARDQPALAQEESEERGGQREGEGEEKLSLEAHAGSPSLKTPDGPVPGPGPQGAAPEPLGASVQRDSAQGRPCPPPQAPANQPEGASSAAPGSPVPAPPTKASALPVEQGPAEPIPPGVASGGLRPDALGPTTAHHGPRHPPKPPRSKATERPGQEPEGPGATPAGERDDQSPDSVPERPRPADRRLCLPCVDASPLPGRTACPSLQEATRLIQEEFAFDGYLDNGLEALIMGEYIFALKDLTFATFCGAISEKFCDLYWDEKLLQNLFKVVNGQASPSPSTAEEAGSQLEGSQSPRSPSSKRPSLHRLGKEKPAMARTSSRAPCSPTSVSDVDSDALSRGNFEVGFRPQRSVKAERAQQPEAGEDRRPAGGASDVEAVTRLARSKGVGPALSPGPAGFQSCSPGWCSAFYEADCFGADVHNYVKDLGRQQADGALPDAQSPELEQQLMMEKRNYRKTLKFYQKLLQKEKRNKGHVRGTLGPGALHPPSDREHRGRTLRHAGLQPPGRVLLAHLLQRQQAPGRPAEGPHPAGRHAAGAHGLPVLQ

SEQ ID NO: 44865 - protein, 255 aa, Homo sapiens
  MOD_RES (1)..(1): Any amino acid
XKGVFNVEVVAVSSIHTQDPYLDKFFALVNALDEHLFPVRIGDMRIMENNLENELKSSISALNSSQLEPVVRFLHLLLDKLILLVIRPPVIAGQIVNLGQASFEAMASIINRLHKNLEGNHDQHGRNSLLASYIHYVFRLPNTYPNSSSPGPGGLGGSVHYATMARSAVRPASLNLNRSRSLSNSNPDISGTPTSPDDEVRSIIGSKLFHEELALQWVVCSGSVRESALQQAWFFFELMVKSMVHHLYFNDKLEA

SEQ ID NO: 44866 - protein, 160 aa, Homo sapiens
MLAPKDFSERIQPSWEGGWCANAASRWLEVQVANLTSPQRWVQYLLLLQESIWPGGVLPKFPRPVRTQEQKLAAEKQALQSLMGVLPDLVVEILGVNKCRLSWGLVLESLQQPLINRHLIYCLGDIILEFLDLSASVEESAATTSASDTPGNSKRMGVSS

SEQ ID NO: 44867 - protein, 1264 aa, Homo sapiens
MKSCAVSLTTAAVAFGDEAKKMAEGKASRESEEESVSLTVEEREALGGMDSRLFGFVRLHEDGARTKTLLGKNAAFLYGLGLVYFYYNAFHWAIKAFQDVLYVDPSFCRAKEIHLRLGLMFKVNTDYKSSLKRKYHSAKEAYEQLLQTENLPAQVKATVLQQLGWMHHNMDLVGDKATKESYAIQYLQKSLEADPNSGQSWYFLGRCYSSIGKVQDAFISYRQSIDKSEASADTWCSIGVLYQQQNQPMDALQAYICAVQLDHGHAAAWMDLGTLYESCNQPQDAIKCYLNAARSKRCSNTSTLAARIKFLQNGSDNWNGGQSLSHHPVQQVYSLCLTPQKLQHLEQLRANRDNLNPAQKHQLEQLESQFVLMQQMRHKEVAQVRTTGIHNGAITDSSLPTNSVSNRQPHGALTRVSSVSQPGVRPACVEKLLSSGAFSAGCIPCGTSKILGSTDTILLGSNCIAGSESNGNVPYLQQNTHTLPHNHTDLNSSTEEPWRKQLSNSAQGLHKSQSSCLSGPNEEQPLFSTGSAQYHQATSTGIKKANEHLTLPSNSVPQGDADSHLSCHTATSGGQQGIMFTKESKPSKNRSLVPETSRHTGDTSNGCADVKGLSNHVHQLIADAVSSPNHGDSPNLLIADNPQLSALLIGKANGNVGTGTCDKVNNIHPAVHTKTDHSVASSPSSAISTATPSPKSTEQRSINSVTSLNSPHSGLHTVNGEGLGKSQSSTKVDLPLASHRSTSQILPSMSVSICPSSTEVLKACRNPGKNGLSNSCILLDKCPPPRPPTSPYPPLPKDKLNPPTPSIYLENKRDAFFPPLHQFCTNPKNPVTVIRGLAGALKLDLGLFSTKTLVEANNEHMVEVRTQLLQPADENWDPTGTKKIWRCESNRSHTTIAKYAQYQASSFQESLREENEKRTQHKDHSDNESTSSENSGRRRKGPFKTIKFGTNIDLSDNKKWKLQLHELTKLPAFARVVSAGNLLTHVGHTILGMNTVQLYMKVPGSRTPGHQENNNFCSVNINIGPGDCEWFVVPEDYWGVLNDFCEKNNLNFLMSSWWPNLEDLYEANVPVYRFIQRPGDLVWINAGTVHWVQAVGWCNNIAWNVGPLTACQYKLAVERYEWNKLKSVKSPVPMVHLSWNMARNIKVSDPKLFEMIKYCLLKILKQYQTLREALVAAGKEVIWHGRTNDEPAHYCSICEVEVFNLLFVTNESNTQKTYIVHCHDCARKTSKSLENFVVLEQYKMEDLIQVYDQFTLALSLSSSS

SEQ ID NO: 44868 - protein, 203 aa, Homo sapiens
VKSSLIDDNNEINLNIKVTDFGLAVKKQSRSEAMLQATCGTPIYMAPEVISAHDYSQQCDIWSIGVVMYMLLRGEPPFLASSEEKLFELIRKGELHFENAVWNSISDCAKSVLKQLMKVDPAHRITAKELLDNQWLTSTAYEKQFPATSKDNFDMCSSSFTSSKLLPAEIKGEMEKTPVTPSQGTATKYPAKSGALSRTKKKL

SEQ ID NO: 44869 - protein, 92 aa, Homo sapiens
  MOD_RES (1)..(1): Any amino acid
XFVKDAGSYSKKVVDDLLDQITGGDHSRTLFQLKQRRNVPMKPPDEAKVGDTLGDSSSSVLEFMSMKSYPDVSVDISMLSSLGPAIYHVMLY

SEQ ID NO: 44870 - protein, 220 aa, Homo sapiens
MRRLNRKKTLSLVKELDAFPKVPESYVETSASGGTVSLIAFTTMALLTIMEFSVYQDTWMKYEYEVDKDFSSKLRINIDITVAMKCQYVGADVLDLAETMVASADGLVYEPTVFDLSPQQKEWQRMLQLIQSRLQEEHSLQDVIFKSAFKSTSTALPPREDDSSQSPNACRIHGHLYVNKVAGNFHITVGKAIPHPRGHAHLAALVNHESYNFSHRIDHL

SEQ ID NO: 44871 - protein, 181 aa, Homo sapiens
  MOD_RES (1)..(1): Any amino acid
XGGITMAARMKRKVGAENVAIVEPSERHFYQPIWTLVGAGAKQLSSSGRPTASVIPSGVEWIKARVTELNPDKNCIHTDDDEKISYRYLIIALGIQLDYEKIKGLPEGFAHPKIGSNYSVKTVEKTWKALQDFKEGNAIFTFPNTPVKCAGAPQKIMYLSEAYFRKVCFLSGDRDEQGGQC

SEQ ID NO: 44872 - protein, 76 aa, Homo sapiens
MVRTDGHTLSEKRNYQPPALSFPIPRVANVERSCTDVVSLCHPGWTAVASSWLTATSASQVQVILLPRPPSSWDYR

SEQ ID NO: 44873 - protein, 377 aa, Homo sapiens
MERAGATSRGGQAPGFLLRLHTEGRAEAARVQEQDLRQWGLTGIHLRSYQLEGVNWLAQRFHCQNGCILGDEMGLGKTCQTIALFIYLAGRLNDEGPFLILCPLSVLSNWKEEMQRFAPGLSCVTYAGDKEERACLQQDLKQESRFHVLLTTYEICLKDASFLKSFPWSVLVVDEAHRLKNQSSLLHKTLSEFSVVFSLLLTGTPIQNSLQELYSLLSFVEPDLFSKEEVGDFIQRYQDIEKESESASELHKLLQPFLLRRVKAEVATELPKKTEVVIYHGMSALQKKYYKAILMKDLDAFENETAKKVKLQNILSQLRKCVDHPYLFDGVEPEPFEVGDHLTEASGKLHLLDKLLAFLYSGWSWHELNSSRYCDFC

SEQ ID NO: 44874 - protein, 134 aa, Homo sapiens
  MOD_RES (1)..(1): Any amino acid
XLLPQFLGMYRVSVDNEDSYMLVMRNMFSHRLPVHRKYDLKVKELPTLKDMDFLNKNQKVYIGEEEKKIFLEKLKRDVEFLVQLKIMDYSLLLGIHDIIRGSEPEEEAPVREDESEVDGDCSLTGPPALVGSYG

SEQ ID NO: 44875 - protein, 107 aa, Homo sapiens
MKFNPFVTSDRSKNRKRHFNAPSHIRRKIMSSPLSKELRQKYNVRSMPIRKDDEVQVVRGHYKGQQIGKVVQVYRKKYVIYIERVQREKANGTTVHVGIHPSKVVYI

SEQ ID NO: 44876 - protein, 1432 aa, Homo sapiens
MGAAAGRSPHLGPAPARRPQRSLLLLQLLLLVAAPGSTQAQAAPFPELCSYTWEAVDTKNNVLYKINICGSVDIVQCGPSSAVCMHDLKTRTYHSVGDSVLRSATRSLLEFNTTVSCDQQGTNHRVQSSIAFLCGKTLGTPEFVTATECVHYFEWRTTAACKKDIFKANKEVPCYVFDEELRKHDLNPLIKLSGAYLVDDSDPDTSLFINVCRDIDTLRDPGSQLRACPPGTAACLVRGHQAFDVGQPRDGLKLVRKDRLVLSYVREEAGKLDFCDGHSPAVTITFVCPSERREGTIPKLTAKSNCRYEIEWITEYACHRDYLESKTCSLSGEQQDVSIDLTPLAQSGGSSYISDGKEYLFYLNVCGETEIQFCNKKQAAVCQVKKSDTSQVKAAGRYHNQTLRYSDGDLTLIYFGGDECSSGFQRMSVINFECNKTAGNDGKGTPVFTGEVDCTYFFTWDTEYACVKEKEDLLCGATDGKKRYDLSALVRHAEPEQNWEAVDGSQTETEKKHFFINICHRVLQEGKARGCPEDAAVCAVDKNGSKNLGKFISSPMKEKGNIQLSYSDGDDCGHGKKIKTNITLVCKPGDLESAPVLRTSGEGGCFYEFEWHTAAACVLSKTEGENCTVFDSQAGFSFDLSPLTKKNGAYKVETKKYDFYINVCGPVSVSPCQPDSGACQVAKSDEKTWNLGLSNAKLSYYDGMIQLNYRGGTPYNNERHTPRATLITFLCDRDAGVGFPEYQEEDNSTYNFRWYTSYACPEEPLECVVTDPSTLEQYDLSSLAKSEGGLGGNWYAMDNSGEHVTWRKYYINVCRPLNPVPGCNRYASACQMKYEKDQGSFTEVVSISNLGMAKTGPVVEDSGSLLLEYVNGSACTTSDGRQTTYTTRIHLVCSRGRLNSHPIFSLNWECVVSFLWNTEAACPIQTTTDTDQACSIRDPNSGFVFNLNPLNSSQGYNVSGIGKIFMFNVCGTMPVCGTILGKPASGCEAETQTEELKNWKPARPVGIEKSLQLSTEGFITLTYKGPLSAKGTADAFIVRFVCNDDVYSGPLKFLHQDIDSGQGIRNTYFEFETALACVPSPVDCQVTDLAGNEYDLTGLSTVRKPWTAVDTSVDGRKRTFYLSVCNPLPYIPGCQGSAVGSCLVSEGNSWNLGVVQMSPQAAANGSLSIMYVNGDKCGNQRFSTRITFECAQISGSPAFQLQDGCEYVFIWRTVEACPVVRVEGDNCEVKDPRHGNLYDLKPLGLNDTIVSAGEYTYYFRVCGKLSSDVCPTSDKSKVVSSCQEKREPQGFHKVAGLLTQKLTYENGLLKMNFTGGDTCHKVYQRSTAIFFYCDRGTQRPVFLKETSDCSYLFEWRTQYACPPFDLTECSFKDGAGNSFDLSSLSRYSDNWEAITGTGDPEHYLINVCKSLAPQAGTAWTWFGRETAGRRMI

SEQ ID NO: 44877 - protein, 180 aa, Homo sapiens
  MOD_RES (1)..(1): Any amino acid
XSVAGIVCHVGKAEDREQLVAKALEHCGGVDFLVCSAGVNPLVGSTLGTSEQIWDKILSVNVKSPALLLSQLLPYMENRRGAVILVSSIAAYNPVVALGVYNVSKTALLGLTRTLALELAPKDIRFHGNESLWKNFKEHHQLQRIGESEDCAGIVSFLCSPDASYVNGENIAVAGYSTRL

SEQ ID NO: 44878 - protein, 64 aa, Homo sapiens
MRFARSKRGLRLKTVDSCFQDLKESRLVEDTFTIDEVSEVLNGLQAVVHSEVESELINTAYTNV

SEQ ID NO: 44879 - protein, 176 aa, Homo sapiens
  MOD_RES (1)..(1): Any amino acid
XPAWGSRRFEAVGWWALLALVTLLSFATRFHRLDEPPHICWDETHFGKMGSYYINRTFFFDVHPPLGKMLIGLAGYLSGYDGTFLFQKPGDKYEHHSYMGMRGFCAFLGSWLVPFAYLTVLDLSKSLSAALLTAALLTFDTGCLTLSQYILLDPILMFFIMAAMLSMVKYNSCADR

SEQ ID NO: 44880 - protein, 73 aa, Homo sapiens
MDSVMPSQEPPVDDKNEDADLPSEETDGIAYISSSRKHDSIKDDSEDLKPVIDGMDGIKISQGLGLQDFDLIR

SEQ ID NO: 44881 - protein, 29 aa, Homo sapiens
MAGRVPSLLVLLVFPSSCLAFRSPLSVFK

SEQ ID NO: 44882 - protein, 506 aa, Homo sapiens
MGFHHVGQAGLEPLTSGDPSALASQSAGITGVSYCAWPGFSIEVGEWGRLEGFPTSRVAVRLVLALFTDGPSNNACGNPFCQLWPHVICLLCLQWARDEFEGLFKQPAENVNQYLTDPKFVERTLRLAGTQPLEVLEAVQRSLVLQRPQTWADCVTWACHHWHTQYSNNIRQLLHNFPPDQLTSSGAPFWSGPKRCPHPLTFDVNNPLHLDYVMAAANLFAQTYGLTGSQDRAAVATFLQSVQVPEFTPKSGVKIHVSDQELQSANASVDDSRLEELKATLPSPDKLPGFKMYPIDFEKDDDSNFHMDFIVAASNLRAENYDIPSADRHKSKLIAGKIIPAIATTTAAVVGLVCLELYKVVQGHRQLDSYKNGFLNLALPFFGFSEPLAAPRHQYYNQEWTLWDRFEVQGLQPNGEEMTLKQFLDYFKTEHKLEITMLSQGVSMLYSFFMPAAKLKERLDQPMTEIVSRVSKRKLGRHVRALVLELCCNDESGEDVEVPYVRYTIR

SEQ ID NO: 44883 - protein, 60 aa, Homo sapiens
PGWSARDNYGKKKKRKRDKQPGETNACRPLLINCTAVDFFLTFPQLPGRDPAPAAVARHQ

SEQ ID NO: 44884 - protein, 275 aa, Homo sapiens
MAWVPAESAVEELMPRLLPVEPCDLTEGFDPSVPPRTPQEYLRRVQIEAAQCPDVVVAQIDPKKLKRKQSVNISLSGCQPAPEGYSPTLQWQQQQVAQFSTVRQNVNKHRSHWKSQQLDSNVTMPKSEDEEGWKKFCLGEKLCADGAVGPATNESPGIDYVQIGFPPLLSIVSRMNQATVTSVLEYLSNWFGERDFTPELGRWLYALLACLEKPLLPEAHSLIRQLARRCSEVRLLVDSKDDERVPALNLLICLVSSISRPHVVAQACNSSTSRD

SEQ ID NO: 44885 - protein, 110 aa, Homo sapiens
MGIQRRSGPLLTGLSVGLLLLFSWVTLVQPTSLSALVHHPHLCQTTRDVHGRHYPGFFCPRLSDSPEEAYCCHLQAAGGSCCTRAEFEALYQVNLSALPPPPILRGPGPL

SEQ ID NO: 44886 - protein, 54 aa, Homo sapiens
MSANRRWWVPPDDEDCVSEKLLRKTRESPLVPIGAVYTMYSDYVKRMAQDAGEK

SEQ ID NO: 44887 - protein, 98 aa, Homo sapiens
MAVNGCLEGPSSNFLSCLFIVALVGSESTHPLCLEQPATQRCGLAMLPKLIFNSWPQGILPLQPPKALGLQSQQDFQAPGDCLSSGSNTKDLDCKESL

SEQ ID NO: 44888 - protein, 566 aa, Homo sapiens
MAEDWLDCPALGPGWKRREVFRKSGATCGRSDTYYQSPTGDRIRSKVELTRYLGPACDLTLFDFKQGILCYPAPKAHPVAVASKKRKKPSRPAKTRKRQVGPQSGEVRKEAPRDETKADTDTAPASFPAPGCCENCGISFSGDGTQRQRLKTLCKDCRAQRIAFNREQRMFKRVGCGECAACQVTEDCGACSTCLLQLPHDVASGLFCKCERRRCLRIVERSRGCGVCRGCQTQEDCGHCPICLRPPRPGLRRQWKCVQRRCLRHLAHRLRRRHQRCQRRTPLAVAPPTGKHARRKGGCDSKMAARRRPGAQPLPPPPPSQSPEPTEPHPRALAPSPPAEFIYYCVDEDELKRLLPSVWSESEDGAGSPPPYRRRKRPSSARRHHLGPTLKPTLATRTAQPDHTQAPTKQEAGGGFVLPPPGTDLVFLREGASSPVQVPGPVAASTEALLQEAQCSGLSWVVALPQVKQEKADTQDEWTPGTAVLTSPVLVPGCPSKAVDPGLPSVKQEPPDPEEDKEENKDDSASKLAPEEEITEIFSLGGTRFRDTAVWLPRSKDLKKPGARKQ

SEQ ID NO: 44889 - protein, 112 aa, Homo sapiens
MAAASAVSVLLVAAERNRWHRLPSLLLPPRTWVWRQRTMKYTTATGRNITKVLIANRGEIACRVMRTAKKLGVQTVAVYSEADRNSMHVDMQDDLDFTEKIKLRFLPQNLLT

SEQ ID NO: 44890 - protein, 162 aa, Homo sapiens
  MOD_RES (1)..(1): Any amino acid
XGGFLGAGQRLSRAMSRCVLEPRPPGKRWMVAGLGNPGLPGTRHSVGMAVLGQLARRLGVAESWTRDRHCAADLALAPLGDAQLVLLRPRRLMNANGRSVARAGATMESVPALAASTPMQCQGCGWVSGARRTLRRFRPMCWAASPLLSRSCCLCCWIEPPT

SEQ ID NO: 44891 - protein, 127 aa, Homo sapiens
MSGARTASTPTPPQTGGGLEPQANGETPQVAVIVRPDDRSQGAIIADRPGLPGPEHSPSESQPSSPSPTPSPSPVLEPGSEPNLAVLSIPGDTMTTIQMSVEESTPISRETGEPYRLSPEPTPLAEP

SEQ ID NO: 44892 - protein, 156 aa, Homo sapiens
MAFQDLLDQVGGLGRFQILQMVFLIMFNVIVYHQTQLENFAAFILDHRCWVHILDNDTIPDNDPGTLSQDALLRISIPFDSNLRPEKCRRFVHPQWKLIHLNGTFPNTSEPDTEPCVDGWVYDQSSFPSTIVTKVAGRVCSVAHYQQQTRRGLKGT

SEQ ID NO: 44893 - protein, 154 aa, Homo sapiens
YVGHSQGTTIGFITFSTISKIAERIKIFFALAPVFSTKYLKSPLIRMTYKWKSIVMSRLDVYFSHNPAGTSVQNMLHWSQLLNSTHLKAYDWGSPDLNLVHYNQTTSPLYNMTNMNVATAIWNGKSDLLADPEDVNILHSEITNHIYYKTISYY

SEQ ID NO: 44894 - protein, 243 aa, Homo sapiens
MSFPPHLNRPPMGIPALPPGIPPPQFPGFPPPVPPGTPMIPVPMSIMAPAPTVLVPTVSMVGKHLGARKDHPGLKAKENDENCGPTTTVFVGNISEKASDMLIRQLLAKCGLVLSWKRVQGASGKLQAFGFCEYKEPESTLRALRLLHDLQIGEKKLLVKVDAKTKAQLDEWKAKKKASNGNARPETVTNDDEEALDEETKRRDQMIKGAIEVLIREYSSELNAPSQESDSHPRKKKKEKKED

SEQ ID NO: 44895 - protein, 135 aa, Homo sapiens
VDHLDKNGQCALVHAALRGHLEVVKFLIQCDWTMAGQQQGVFKKSHAIQQALIAAASMGYTEIVSYLLDLPEKDEEEVERAQINSFDSLWGETGTSHGRCPQECVVFVWTLESHPLIFSLAYIWQSSVSGFCNAD

SEQ ID NO: 44896 - protein, 566 aa, Homo sapiens
MTVLEITLAVILTLLGLAILAILLTRWARRKQSEMYISRYSSEQSARLLDYEDGRGSRHAYHKVTLHMITERISKRDYTPSTNSLALSRSSIALPQGSMSSIKCLQTTEEPPSRTAGAMMQFTAPIQPELQDLSSSLKKPLCKLQDIGYNTWVTDQIASSHNHTVHLQHPGPPMAPIIISQRTASQLAAPIRIPQVHTMDSSGKITLTPVVILTGYMDEELAKKSCSKIQILKCGGTARSQNSREENKEALKNDIIFTNSVESLKSAHIKEPEREGKGTDLEKDKIGMEVKVDSDAGIPKRQETQLKISDEYTTRTGSPNKEKCVRCTKRTGQVKKSESGVPKGQEAQVTKSGLVVLKGQEAQVEKSEMGVPRRQESQVKKSQSGVSKGQEAQVKKRESVVLKGQEAQVEKSELKVPKGQEGQVEKTEADVPKEQEVQEKKSEAGVLKGPESQVKNTEVSVPETLESQVKKSESGVLKGQEAQEKKESFEDKGNNDKEKERDAEKDPNKKEKGDKNTKGDKGKDKVKGKRESEINGEKSKGSKRRQIQEGSTTKKWKSKDKFFKGP

SEQ ID NO: 44897 - protein, 233 aa, Homo sapiens
MASTDYSTYSQAAAQQGYSAYTAQPTQGYAQTTQAYGQQSYGTYGQPTDVSYTQAQTTATYGQTAYATSYGQPPTGYTTPTAPQAYSQPVQGYGTGAYDTTTATVTTTQASYAAQSAYGTQPAYPAYGQQPAATAPTSYSSTQPTSYDQSSYSQQNTYGQPSSYGQQSSYGQQSSYGQQPPTSYPPQTGSYSQAPSQYSQQSSSYGQQSSFRQDHPSSMGVYGQESGGFSGPG

SEQ ID NO: 44898 - protein, 124 aa, Homo sapiens
MDENSLEFDMVGIDAAIANAFRRILLAEVPTMAVEKVLVYNNTSIVQDEILAHRLGLIPIHADPRLFEYRNQGDEEGTEIDTLQFRLQVRCTRNPHAAKDSSDPNELYVNHKVYTRHMTWIPLG

SEQ ID NO: 44899 - protein, 123 aa, Homo sapiens
MEPEGRGSLFEDSDLLHAGNPKENDVTAVLLTPGSQELMIRDMAEALTQWRQLNSPQGDVPEKPRNLVLLGLPISTPDVISQLEHEEELEREVSKAASQKRNSLGDNSPLKNVPFFWRKEGTF

SEQ ID NO: 44900 - protein, 228 aa, Homo sapiens
MDKLSGSRPRLGPPLPPPRCVDSPGWREDAPSPSFLPAPGTWRHKHPFLQAQEEDEEENKYELPPCEALPLSLAPAHLPGTEEDSLYLDHSGPLGPSKPSPPLPQPTMVRGLSRSPSFPTRPIPGCHFPLKGAVSLPVAGKQGPIFGRREQGASSRVVPGPPKKPDEDLYLECEPDPVLALTQTLSFQVLMPSGPLPRTSVVPRPTTAPQETRNPPLGVPQLLRTVIC

SEQ ID NO: 44901 - protein, 136 aa, Homo sapiens
MQLLQESLAQARLGSRRPARLLMPSQLVSQVGKELLRLAYSEPCGLRGALLDVCVEQGKSCHSVGQLALDPSLVPTFQLTLVLRLDSRLWPKIQGLFSSANSPFLPGFSQSLTLSTGFRVIKKKLYSSEQLLIEEC

SEQ ID NO: 44902 - protein, 294 aa, Homo sapiens
MMEGLKKRTRKAFGIRKKEKDTDSTGSPDRDGIKKSNGAPNGFYAEIDWERYNSPELDEEGYSIRPEEPGSTKGKHFYSSSESEEEEESHKKFNIKIKPLQSKDILKNAATVDELKASIGNIALSPSPVGAIKRNLSSEEVARPRRSTPTPELISKKPPDDTTALAPLFGPPLESAFDEQKTEVLLDQPEIWGSGQPINPSMESPKLTRPFPTGTPPPLPPKNVPATPPRTGSPLTIGPGASSPARPATPLVPCRSTTPPPPPPRPPSRPKLPPGKPGVGDVVCSLLPWLAQKQ

SEQ ID NO: 44903 - protein, 237 aa, Homo sapiens
MPMILGYWDIRGLAHAIRLLLEYTDSSYEEKKYTMGDAPDYDRSQWLNEKFKLGLDFPNGMLGSLVAQLSFAGFPSIQLPYLIDGAHKITQSNAILCYIARKHNLCGETEEEKIRVDILENQTMDNHMQLGMICYNPEFEKLKPKYLEELPEKLKLYSEFLGKRPWFAGNKITFVDFLVYDVLDLHRIFEPKCLDAFPNLKDFISRFEGLEKISAYMKSSRFLPRPVFSKMAVWGNK

SEQ ID NO: 44904 - protein, 240 aa, Homo sapiens
SQSPEPTEPHPRALAPSPPAEFIYYCVDEDELKRLLPSVWSESEDGAGSPPPYRRRKRPSSARRHHLGPTLKPTLATRTAQPDHTQAPTKQEAGGGFVLPPPGTDLVFLREGASSPVQVPGPVAASTEALLQVKQEKADTQDEWTPGTAVLTSPVLVPGCPSKAVDPGLPSVKQEPPDPEEDKEENKDDSASKLAPEEEAGGAGTPVITEIFSLGGTRFRDTAVWLPRSKDLKKPGARKQ

SEQ ID NO: 44905 - protein, 87 aa, Homo sapiens
MMSKRYLQKATKGKLLIIIFIVTLWGKVVSSANHHKAHHVKTGTCEVVALHRCCNKNKIEERSQTVKCSCFPGQVAGTTRAAPSCVD

SEQ ID NO: 44906 - protein, 186 aa, Homo sapiens
MATTVSTQRGPAKLAKNYGMTRMDPYCRLRLGYAVYETPTAHNGAKNPRWNKVIHCTVPPGVDSFYLEIFDERAFSMDDRIAWTHITIPESLRQGKVEDKWYSLSGRQGDDKEGMINLVMSYALLPAAMVMPPQPVVLMPTVYQQGVGYVPITGMPAVCSPGMVPVALPPAAVNAQPRCSEEDLKA

SEQ ID NO: 44907 - protein, 213 aa, Homo sapiens
MLQARNQSPSSQRPLDVLRRNQDPQSPASISVIIFITPKEEPALQEGLHLQEDGLPATAEDAATCLTVLSSQPASCRASCCLRADGPGMLAHPVSTVWEMGAQYEMGAQYWEMGAHSTGKWEHSTEKWEHSTEKWEYTTEKWEHSTGKWAYSTEKWEHSTGKWETVLGNGSPQYWERGVTVLGNGSTGKWEHSTGKWEHSTGKPQTWILSFSA

SEQ ID NO: 44908 - protein, 225 aa, Homo sapiens
MGTPGEGLGRCSHALIRGVPESLASGEGAGAGLPALDLAKAQREHGVLGGKLRQRLGLQLLELPPEESLPLGPLLGDTAVIQGDTALITRPWSPARRPEVDGVRKALQDLGLRIVEIGDENATLDGTDVLFTGREFFVGLSKWTNHRGAEIVADTFRDFAVSTVPVSGPSHLRGLCGMGGPRTVVAGSSDAAQKAVRAMAVLTDHPYASLTLPDDAAADCLFLRP

SEQ ID NO: 44909 - protein, 33 aa, Homo sapiens
  MOD_RES (1)..(1): Any amino acid
XVFFRRHYPLTTLRFCGMDPEQRKWQKYCKPSW

SEQ ID NO: 44910 - protein, 749 aa, Homo sapiens
MASVVPVKDKKLLEVKLGELPSWILMRDFSPSGIFGAFQRGPGGTGKPEMDFVRLARLFARARPMGLFILQHLDPCRARWAGGREGLMRPMWAPFSSSSSQLPLGQERQENTGSLGSDPSHSNSTATQEEDEEEEESFGTLSDKYSSRRLFRKSAAQFHNLRFGERRDEQMEPEPKLWRGRRNTPYWYFLQCKHLIKEGKLVEALDLFERQMLKEERLQPMESNYTVLIGGCGRVGYLKKAFNLYNQMKKRDLEPSDATYTALFNVCAESPWKDSALQSALKLRQQLQAKNFELNLKTYHALLKMAAKCADLRMCLDVFKEIIHKGHVVTEETFSFLLMGCIQDKKTGFRYALQVWRLMLSLGLQPSRDSYNLLLVAARDCGLGDPQVASELLLKPREEATVLQPPVSRQRPRRTAQAKAGNLMSAMLHVEALERQLFLEPSQALGPPEPPEARVPGKAQPEVDTKAEPSHTAALTAVALKPPPVELEVNLLTPGAVPPTVVSFGTVTTPADRLALIGGLEGFLSKMAEHRQQPDIRTLTLLAEVVESGSPAESLLLALLDEHQVEADLTFFNTLVRKKSKLGDLEGAKALLPVLAKRGLVPNLQTFCNLAIGCHRPKDGLQLLTDMKKSQVTPNTHIYSALINAAIRKLNYTYLISILKDMKQNRVPVNEVVIRQLEFAAQYPPTFDRYQGKNTYLEKIDGFRAYYKQWLTVMPAEETPHPWQKFRTKPQGDQDTGKEADDGCALGGR

SEQ ID NO: 44911 - protein, 499 aa, Homo sapiens
MRGLLCWPVLLLLLQPWETQLQLTGPRCHTGPLDLVFVIDSSRSVRPFEFETMRQFLMGLLRGLNVGPNATRVGVIQYSSQVQSVFPLRAFSRREDMERAIRDLVPLAQGTMTGLAIQYAMNVAFSVAEGARPPEERVPRVAVIVTDGRPQDRVAEVAAQARARGIEIYAVGVQRADVGSLRAMASPPLDEHVFLVESFDLIQEFGLQFQSRLCVRDLCNGVDHGCEFQCVSEGLSYRCLCPEGRQLQADGKSCNRCREGHVDLVLLVDGSKSVRPQNFELVKRFVNQIVDFLDVSPEGTRVGLVQFSSRVRTEFPLGRYGTAAEVKQAVLAVEYMERGTMTGLALRHMVEHSFSEAQGARPRALNVPRVGLVFTDGRSQDDISVWAARAKEEGIVMYAVGVGKAVEAELREIASEPAELHVSYAPDFGTMTHLLENLRGSICPEEGISAGTELRSPCECESLVEFQGRTLGALESLTLNLAQLTARLEDLENQLANQK

SEQ ID NO: 44912 - protein, 109 aa, Homo sapiens
MGGRGADAGSSGGTGPTEGYSPPAASTRAAARAKARGGGRGGRRNTTPSVPSLRGAAPRSFHPPAAMSERLRPRIPGTQSLQAVTVVGAAAAAAAASIARTGPAGRKAA

SEQ ID NO: 44913 - protein, 138 aa, Homo sapiens
MIEYQIPVSFKDVVVGFTQEEWHRLSPAQRALYRDVMLETYSNLVSVGYEGTKPDVILRLEQEEAPWIGEAACPGCHCWEDIWRVNIQRKRRQDMLLRPGAAISKKTLPKEKSCEYNKFGKISLLSTDLFSSIQSPTW

SEQ ID NO: 44914 - protein, 141 aa, Homo sapiens
MRIFAPNHVVAKSRFWYFVSQLKKMKKSSGEIVYCGQVFEKSPLRVKNFGIWLRYDSRSGTHNMYREYRDLTTAGAVTQCYRDMGARHRARAHSIQIMKVEEIAASKCRRPAVKQFHDSKIKFPLPHRVLRRQHKPRFTTK

SEQ ID NO: 44915 - protein, 144 aa, Homo sapiens
MAPPAAPGRDRVGREDEDGWETRGDRKVQAKLENAEVLELTVRRVQGVLRGRARGEWRRGGRGRRPRAPVTPARRRTSLPAPLSCRRRGLPPEQGAPPRLLGEPRPRGPGGLGHAVAAHRAGRGSLPPTLGPRARAAAGGSERA

SEQ ID NO: 44916 - protein, 263 aa, Homo sapiens
  MOD_RES (1)..(1): Any amino acid
XYKLFPNCVPSFGFRHLLPLTDRVDSFNEEVRKQRVSRNRDAPEGGFDAVLQAAVCKEKIGWRKDALHLLVFTTDDVPHIALDGKLGGLVQPHDGQCHLNEANEYTASNQMDYPSLALLGEKLAENNINLIFAVTKNHYMLYKSIRSKVELSVWDQPEDLNLFFTATCQDGVSYPGQRKCEGLKIGDTASFEVSLEARSCPSRHTEHVFALRPVGFRDSLEVGVTYNCTCGCSVGLEPNSARCNGSGTYVCGLCECSPGYLGT

SEQ ID NO: 44917 - protein, 61 aa, Homo sapiens
MAPLDLLLSCLAVSRIFLQLFIFYVNVIVIFFIEFIMCSANCAILLFINELELWLATWLGV

SEQ ID NO: 44918 - protein, 57 aa, Homo sapiens
  MOD_RES (1)..(1): Any amino acid
XQIEQKKERELLPLLHAAWDHYRIALLCKCIELWLQYTQKRRYKQVSLCHPGWSTVA

SEQ ID NO: 44919 - protein, 256 aa, Homo sapiens
  MOD_RES (1)..(1): Any amino acid
XLGLLLLLLGAACLIPRSAQVRRLARCPATCSCTKESIICVGSSWVPRIVPGDISSLSLVNGTFSEIKDRMFSHLPSLQLLLLNSNSFTIIRDDAFAGLFHLEYLFIEGNKIETISRNAFRGLRDLTHLSLANNHIKALPRDVFSDLDSLIELDLRGNKFECDCKAKWLYLWLKMTNSTVSDVLCIGPPEYQEKKLNDVTSFDYECTTTDKQEEICEGKIQNLNARVVMNCSRPSSAFRKHTGNGRVAFFLPHGVR

SEQ ID NO: 44920 - protein, 150 aa, Homo sapiens
MSSAPRRPAKGADSFCTPEPESLGPGTPGFPEQEEDELHRTLGVERFEEILQEAGSRGGEEPGRSYGEEDFEYHRQSSHHIHHPLSTHLPPDARRRKTPQGPGRKPRRRPGASPTGETPTIEEGEEDEDEASEAEGARALTQPSPVSTPS

SEQ ID NO: 44921 - protein, 152 aa, Homo sapiens
  MOD_RES (1)..(1): Any amino acid
XLLVFKDVGKLEDAQNRLAIKQLIKEIGEPRNYGLTDEEKAEEERKAAEERLAREAAEEAEREHQEAVEMAEKIARWEEWNKRLEEVKREERELLEAQSIPLRNYLMTYVMPTLIQGLNECCNVRPEDPVDFLVGMQWHNLGLLQPPPPGFK

SEQ ID NO: 44922 - protein, 66 aa, Homo sapiens
MKTPCVMRRPSLHSPWTEHEMRGPLDVSSSHTPTWRKLLLTDSLQLMPLKTFPAAIRGVIQSELNY

SEQ ID NO: 44923 - protein, 55 aa, Homo sapiens
  MOD_RES (1)..(1): Any amino acid
XSMPGYKCSIKERMLYSSCKSRLLDSVEQDFHLEIAKKPLLPLWEGTSSVKHPSL

SEQ ID NO: 44924 - protein, 764 aa, Homo sapiens
MEDAGEDPTTFAAHSLPSDPRLLATVTNAYLGTRVFHDTLHVSGVYNGAGGDTHRAMLPSPLNVRLEAPAGMGEQLTETFALDTNTGSFLHTLEGPRFRASQCIYAHRTLPHVLAFRVSIARLAPGSGPITLLLRSAFSPESPDLDLHQGPDFQGARYLYGHTLTPEQPGGPQQEVHMLWTPAPPDLTLGEGEEARTWDFLTAVGGSQAEAQACLTEALQLQARGALYTAHAQAWAQLWVECGLDVVGPLQLRQALRGSLYYLLSALPQPKAPGYICHGLSPGGLSNGSREECYWGHVFWDQDLWMFPSILMFHPEAARAILEYRIRTLDGALENAQNLGYQGAKFAWESADSGLEVCPEDIYGVQEVHVNGAVVLAFELYYHTTQDLQLFREAGGWDVVRAVAEFWCSRVEWSPREEKHLTCASPTLTTGVEGRPLRLCTEHHLGLVCPGVMSPDEYHSGVNNSVYTNVLVQNSLRFAAALAQDLGLPIPSQWLAVADKIKVPFDVEQNFHPEFDGYEPGEVVKQADVVLLGYPVPFSLSPDVRRKNLEIYEAVTSPQGPAMTWSMFAVGWMELKDAVRARGLLDRSFANMAEPFKVWTENADGSGAVNFLTGMGGFLQAVVFGCTGFRVTRAGVTFDPVCLSGISRVSVSGIFYQGNKLNFSFSEDSVTVEVTARAGPWAPHLEAELWPSQSRLSLLPGHKVSFPRSAGRIQMSPPKLPGSSSSEFPGRTFSDVRDPLQSPLWVTLGSSSPTESLTVDPASE

SEQ ID NO: 44925 - protein, 163 aa, Homo sapiens
  MOD_RES (1)..(1): Any amino acid
XQKGSAGPMRLYVGSLHFNITEDMLRGIFEPFGRIESIQLMMDSETGRSKGYGFITFSDSECAKKALEQLNGFELAGRPMKVGHVTERTDASSASSFLDSDELERTGIDLGTTGRLQLMARLAEGTGLQIPPAAQQALQMSGSLAFGAVAGKKRQILLLFKVY

SEQ ID NO: 44926 - protein, 148 aa, Homo sapiens
  MOD_RES (1)..(1): Any amino acid
XQLSLISGCPNIQEAVEGAMHIQECVPEDLELKKKIFAQLDSIIDDRVILSSSTSCLMPSKLFAGLVHVKQCIVAHPVNPPYYIPLVELVPHPETAPTTVDRTHALMKKIGQCPMRVQKEVAGFVLNRLQYAIISEAWRLVELASVLG

SEQ ID NO: 44927 - protein, 164 aa, Homo sapiens
MDFVRLARLFARARPMGLFILQHLDPCRARWAGGREGLMRPMWAPFSSSSSQLPLGQERQENTGSLGSDPSHSNSTATQEEDEEEEESFGTLSDKYSSRRLFRKSAAQFHNLRFGERRDEQMEPEPKLWRGRRNTPYWYFLQCKHLIKEGKLVEALDLFERQML

SEQ ID NO: 44928 - protein, 187 aa, Homo sapiens
  MOD_RES (1)..(1): Any amino acid
XGHHTFLTEEVAREYQVKLQAALEMLRQKQQEAEELEADIREEKASWKTQIQYDKTNVLADFEQLRDILDWEESNELQNLEKEEEDILKSLTNSETEMVQQTQSLRELISDLEHRLQGSVMELLQGVDGVIKRADRCPTLLGLECNGTISVHCNLHLSDSSNSPASASQVAGITGAHHHPWLNLYFQ

SEQ ID NO: 44929 - protein, 204 aa, Homo sapiens
MPALRTRRGWWPGRPRGGPAPGVVAGTRGTEPAPRLLLVTGPCLVGLPSQLPDGSEIPLPPILLGRLGSDPQKKTVCIYGHLDVQPAALEDGWDSEPFTLVERDGKLYGRGSTDDKGPVAGWINALEAYQKTGQEIPVNVRFCLEGMEESGSEGLDELIFARKDTFFKDVDYVCISDNYWLGKKKPCITYGLRGICYFFIEVEC

SEQ ID NO: 44930 - protein, 351 aa, Homo sapiens
MALSLWPLLLLLLLLLLLSFAVTLAPTGPHSLDPGLSFLKSLLSTLDQAPQGSLSRSRFFTFLANISSSFEPGRMGEGPVGEPPPLQPPALRLHDFLVTLRGSPDWEPMLGLLGDMLALLGQEQTPRDFLVHQAGVLGGLVEVLLGALVPGGPPTPTRPPCTRDGPSDCVLAADWLPSLLLLLEGTRWQALVQVQPSVDPTNATGLDGREAAPHFLQGLLGLLTPTGELGSKEALWGGLLRTVGAPLYAAFQEGLLRVTHSLQDEVFSILGQPEPDTNGQCQGGNLQQLLLWGVRHNLSWDVQALGFLSGSPPPPPALLHCLSTGVPLPRASQPSAHISPRQRRAITVEAL

SEQ ID NO: 44931 - protein, 205 aa, Homo sapiens
MTSKDYYFDSYAHFGIHEEMLKDEVRTLTYRNSMFHNRHLFKDKVVLDVGSGTGILCMFAAKAGARKVIGIECSSISDYAVKIVKANKLDHVVTIIKGKVEEVELPVEKVDIIISEWMGYCLFYESMLNTVLYARDKWLAPDGLIFPDRATLYVTAIEDRQYKDYKIHWWENVYGFDMSCIKDVAIKEPLVDVVDPKQLVTNACL

SEQ ID NO: 44932 - protein, 365 aa, Homo sapiens
  MOD_RES (1)..(1): Any amino acid
XALGAVIALLLWGQLFAVDSGNDVTDIADDGCPKPPEIAHGYVEHSVRYQCKNYYKLRTEGDGVYTLNDKKQWINKAVGDKLPECEADDGCPKPPEIAHGYVEHSVRYQCKNYYKLRTEGDGVYTLNNEKQWINKAVGDKLPECEAGATLINEQWLLTTAKNLFLNHSENATAKDIAPTLTLYVGKKQLVEIEKVVLHPNYSQVDIGLIKLKQKVSVNERVMPICLPSKDYAEVGRVGYVSGWGRNANFKFTDHLKYVMLPVADQDQCIRHYEGSTVPEKKTPKSPVGVQPILNEHTFCAGMSKYQEDTCYGDAGSAFAVHDLEEDTWYATGILSFDKSCAVAEYGVYVKVTSIQDWVQKTIAEN

SEQ ID NO: 44933 - protein, 44 aa, Homo sapiens
MWGIGTAIGELPPYFMARAARLSGAEPDDEEYQEFEEMLEHAES

SEQ ID NO: 44934 - protein, 123 aa, Homo sapiens
LRDYIWNTLNSGRVVPGYGHAVLRKTDPRYTCQREFALKHLPNDPMFKLVAQLYKIVPNVLLEQGKAKNPWPNVDAHSGVLLQYYGMTEMNYYTVLFGVSRALGVLAQLIWSRALGFPLERKD

SEQ ID NO: 44935 - protein, 1887 aa, Homo sapiens
MTDPLLDSQPASSTGEMDGLCPELLLIPPPLSNRGILGPVQSPCPSRDPAPIPTEPGCLLVEATATEEGPGNMEIIVETVAGTLTPGAPGETPGVLVKVVEVYFCERCEQSFAEPTLLALHQCSETHIQPVQGLSSPPCSVELPPSNPTLPGPLQGQSPPVSPLSCPVCRQEFAQPQALKSHFKIHRGTPDTFSCPESGCVFSAEDRKGLQHHLRQTHRAVPVPCSFRGCPLLFGSQQGMELHRQAHYPFHCSHCSFIGSNVKLFRQHQRSHGAGTQGELSAVQGLPSQELLPAPKLPPGEREPSQEAGTPLPGQETAEEENVEKEEKSDTQKDSQKAVDKGQGAQRLEGDVVSGTESLFKTHMCPECKRCFKKRTHLVEHLHLHFPDPSLQCPNCQKFFTSKSKLKTHLLRELGEKAHHCPLCHYSAVERNALNRHMASMHEDISNFYSDTYACPVCREEFRLSQALKEHLKSHTAAAAAEPLPLRCFQEGCSYAAPDRKAFIKHLKETHGVRAVECRHHSCPMLFATAEAMEAHHKSHYAFHCPHCDFACSNKHLFRKHKKQGHPGSEELRCTFCPFATFNPVAYQDHVGKMHAHEKIHQCPECNFATAHKRVLIRHMLLHTGEKPHKCELCDFTCRDVSYLSKHMLTHSNTKDYMCTECGYVTKWKHYLRVHMRKHAGDLRYQCNQCSYRCHRADQLSSHKLRHQGKSLMCEVCAFACKRKYELQKHMASQHHPGTPAPLYPCHYCSYQSRHKQAVLSHENCKHTRLREFHCALCDYRTFSNTTLLFHKRKAHGYVPGDQAWQLRYASQEPEGAMQGPTPPPDSEPSNQLSARPEGPGHEPGTVVDPSLDQALPEMSEEVNTGRQEGSEAPHGGDLGGSPSPAEVEEGSCTLHLEALGVELESVTEPPLEEVTETAPMEFRPLGLEGPDGLEGPELSSFEGIGTSDLSAEENPLLEKPVSEPSTNPPSLEEAPNNWVGTFKTTPPAETAPLPPLPESESLLKALRRQDKEQAEALVLEGRVQMVVIQGEGRAFRCPHCPFITRREKALNLHSRTGCQGRREPLLCPECGASFKQQRGLSTHLLKKCPVLLRKNKGLPRPDSPIPLQPVLPGTQASEDTESGKPPPASQEAELLLPKDAPLELPREPEETEEPLATVSGSPVPPAGNSLPTEAPKKHCFDPVPPAGNSSPTEAPKKHHLDPVPPAGNSSPTEALKKHRFEQGKFHCNSCPFLCSRLSSITSHVAEGCRGGRGGGGKRGTPQTQPDVSPLSNGDSAPPKNGSTESSSGDGDTVLVQKQKGARFSCPTCPFSCQQERALRTHQIRGCPLEESGELHCSLCPFTAPAATALRLHQKRRHPTAAPARGPRPHLQCGDCGFTCKQSRCMQQHRRLKHEGVKPHQCPFCDFSTTRRYRLEAHQSRHTGIGRIPCSSCPQTFGTNSKLRLHRLRVHDKTPTHFCPLCDYSGYLRHDITRHVNSCHQGTPAFACSQCEAQFSSETALKQHALRRHPEPAQPAPGSPAETTEGPLHCSRCGLLCPSPASLRGHTRKQHPRLECGACQEAFPSRLALDEHRRQQHFSHRCQLCDFAARERVGLVKHYLEQHEETSAAVAASDGDGDAGQPPLHCPFCDFTCRHQLVLDHHVKGHGGTRLYKCTDCAYSTKNRQKITWHSRIHTGEKPYHCHLCPYACADPSRLKYHMRIHKEERKYLCPECGYKCKWVNQLKYHMTKHTGLKPYQCPECEYCTNRADALRVHQETRHREARAFMCEQCGKAFKTRFLLRTHLRKHSEAKPYVCNVCHRAFRWAAGLRHHALTHTDRHPFFCRLCNYKAKQKFQVVKHVRRHHPDQADPNQGVGKDPTTPTVHLHDVQLEDPSPPAPAAPHTGPEG

SEQ ID NO: 44936 - protein, 161 aa, Homo sapiens
MSQEGDYGRWTISSSDESEEEKPKPDKPSTSSLLCARQGAANEPRYTCSEAQKAAHKRKISPVKFSNTDSVLPPKRQKSGSQEDLGWCLSSSDDELQPEMPQKQAEKVVIKKEKDISAPNDGTAQRTENHGAPACHRLKEEEDEYETSGEGQDIWDMLDKG

SEQ ID NO: 44937 - protein, 158 aa, Homo sapiens
MSEGDSVGESVHGKPSVVYRFFTRLGQIYQSWLDKSTPYTAVRWVVTLGLSFVYMIRVYLLQGWYIVTYALGIYHLNLFIAFLSPKVDPSLMEDSDDGPSLPTKQNEEFRPFIRRLPEFKFWHAATKGILVAMVCTFFDAFNVPVFWPILVMYFIMLF

SEQ ID NO: 44938 - protein, 79 aa, Homo sapiens
LSAAGLVFTLWPVVREDTRLVATVLLSVVVLLHALLAMGCKLYFFQSLPPENVAPPPQITSLPSNIALSPTLPQSLAPS

SEQ ID NO: 44939 - protein, 265 aa, Homo sapiens
PPGYPCPAGEYMNHLTVHNREVLYELIEKRGPATPLITVSNHQSCMDDPHLWGILKLRHIWNLKLMRWTPAAADICFTKELHSHFFSLGKCVPVCRGAEFFQAENEGKGVLDTGRHMPGAGKRREKGDGVYQKGMDFILEKLNHGDWVHIFPEGKVNMSSEFLRFKWGIGRLIAECHLNPIILPLWHVGMNDVLPNSPPYFPRFGQKITVLIGKPFSALPVLERLRAENKSAVEMRKALTDFIQEEFQHLKTQAEQLHNHLQPGR

SEQ ID NO: 44940 - protein, 437 aa, Homo sapiens
MAACEGRRSGALGSSQSDFLTPPVGGAPWAVATTVVMYPPPPPPPHRDFISVTLSFGENYDNSKSWRRRSCWRKWKQLSRLQRNMILFLLAFLLFCGLLFYINLADHWKALAFRLEEEQKMRPEIAGLKPANPPVLPAPQKADTDPENLPEISSQKTQRHIQRGPPHLQIRPPSQDLKDGTQEEATKRQEAPVDPRPEGDPQRTVISWRGAVIEPEQGTELPSRRAEVPTKPPLPPARTQGTPVHLNYRQKGVIDVFLHAWKGYRKFAWGHDELKPVSRSFSEWFGLGLTLIDALDTMWILGLRKEFEEARKWVSKKLHFEKDVDVNLFESTIRILGGLLSAYHLSGDSLFLRKAEDFGNRLMPAFRTPSKIPYSDVNIGTGVAHPPRWTSDSTVAEVTSIQLEFRELSRLTGDKKFQMLSLRVRDESHPEDGSALW

SEQ ID NO: 44941 - protein, 88 aa, Homo sapiens
MENPQDIFSSNGGCLSDIVIEKYLVESKESVSHVQLACSMQDCAFPLDGTELCIWNTKDPSHQLLILRGHHQPITAMAFGNKVNPLLI

SEQ ID NO: 44942 - protein, 430 aa, Homo sapiens
MPDYLGADQRKTKEDEKDDKPIRALDEGDIALLKTYGQSTYSRQIKQVEDDIQQLLKKINELTGIKESDTGLAPPALWDLAADKQTLQSEQPLQVARCTKIINADSEDPKYIINVKQFAKFVVDLSDQVAPTDIEEGMRVGNKYQIHIPLPPKIDPTVTMMQVEEKPDVTYSDVGGCKEQIEKLREVVETPLLHPERFVNLGIEPPKGVLLFGPPGTGKTLCARAVANRTDACFIRVIGSELVQKYVGEGARMVRELFEMARTKKACLIFFDEIDAIGGARFDDGAGGDNEVQRTMLELINQLDGFDPRGNIKVLMATNRPDTLDPALMRPGRLDRKIEFSLPDLEGRTHIFKIHARSMSVERDIRFELLARLCPNSTGAEIRSVCTEAGMFAIRARRKIATEKDFLEAVNKVIKSYAKFSATPRYMTYN

SEQ ID NO: 44943 - protein, 2649 aa, Homo sapiens
MNGDMPHVPITTLAGIASLTDLLNQLPLPSPLPATTTKSLLFNARIAEEVNCLLACRDDNLVSQLVHSLNQVSTDHIELKDNLGSDDPEGDIPVLLQAVLARSPNVFREKSMQNRYVQSGMMMSQYKLSQNSMHSSPASSNYQQTTISHSPSSRFVPPQTSSGNRFMPQQNSPVPSPYAPQSPAGYMPYSHPSSYTTHPQMQQASVSSPIVAGGLRNIHDNKVSGPLSGNSANHHADNPRHGSSEDYLHMVHRLSSDDGDSSTMRNAASFPLRSPQPVCSPAGSEGTPKGSRPPLILQSQSLPCSSPRDVPPDILLDSPERKQKKQKKMKLGKDEKEQSEKAAMYDIISSPSKDSTKLTLRLSRVRSSDMDQQEDMISGVENSNVSENDIPFNVQYPGQTSKTPITPQDINRPLNAAQCLSQQEQTAFLPANQVPVLQQNTSVAAKQPQTSVVQNQQQISQQGPIYDEVELDALAEIERIERESAIERERFSKEVQDKDKPLKKRKQDSYPQEAGGATGGNRPASQETGSTGNGSRPALMVSIDLHQAGRVDSQASITQDSDSIKKPEEIKQCNDAPVSVLQEDIVGSLKSTPENHPETPKKKSDPELSKSEMKQSESRLAESKPNENRLVETKSSENKLETKVETQTEELKQNESRTTECKQNESTIVEPKQNENRLSDTKPNDNKQNNGRSETTKSRPETPKQKGESRPETPKQKSDGHPETPKQKGDGRPETPKQKGESRPETPKQKNEGRPETPKHRHDNRRDSGKPSTEKKPEVSKHKQDTKSDSPRLKSERAEALKQRPDGRSVSESLRRDHDNKQKSDDRGESERHRGDQSRVRRPETLRSSSRNEHGIKSDSSKTDKLERKHRHESGDSRERPSSGEQKSRPDSPRVKQGDSNKSRSDKLGFKSPTSKDDKRTEGNKSKVDTNKAHPDNKAEFPSYLLGGRSGALKNFVIPKIKRDKDGNVTQETKKMEMKGEPKDKVEKIGLVEDLNKGAKPVVVLQKLSLDDVQKLIKDREDKSRSSLKPIKNKPSKSNKGSIDQSVLKELPPELLAEIESTMPLCERVKMNKRKRSTVNEKPKYAEISSDEDNDSDEAFESSRKRHKKDDDKAWEYEERDRRSSGDHRRSGHSHEGRRSSGGGRYRNRSPSDSDMEDYSPPPSLSEVARKMKKKEKQKKRKAYEPKLTPEEMMDSSTFKRFTASIENILDNLEDMDFTAFGDDDEIPQELLLGKHQLNELGSESAKIKAMGIMDKLSTDKTVKVLNILEKNIQDGSKLSTLLNHNNDTEEEERLWRDLIMERVTKSADACLTTINIMTSPNMPKAVYIEDVIERVIQYTKFHLQNTLYPQYDPVYRLDPHGGGLLSSKAKRAKCSTHKQRVIVMLYNKVCDIVSSLSELLEIQLLTDTTILQVSSMGITPFFVENVSELQLCAIKLVTAVFSRYEKHRQLILEEIFTSLARLPTSKRSLRNFRLNSSDMDGEPMYIQMVTALVLQLIQCVVHLPSSEKDSNAEEDSNKKIDQDVVITNSYETAMRTAQNFLSIFLKKCGSKQGEEDYRPLFENFVQDLLSTVNKPEWPAAELLLSLLGRLLVHQFSNKSTEMALRVASLDYLGTVAARLRKDAVTSKMDQGSIERILKQVSGGEDEIQQLQKALLDYLDENTETDPSLVFSRKFYIAQWFRDTTLETEKAMKSQKDEESSEGTHHAKEIETTGQIMHRAENRKKFLRSIIKTTPSQFSTLKMNSDTVDYDDACLIVRYLASMRPFAQSFDIYLTQILRVLGENAIAVRTKAMKCLSEVVAVDPSILARLDMQRGVHGRLMDNSTSVREAAVELLGRFVLCRPQLAEQYYDMLIERILDTGISVRKRVIKILRDICIEQPTFPKITEMCVKMIRRVNDEEGIKKLVNETFQKLWFTPTPHNDKEAMTRKILNITDVVAACRDTGYDWFEQLLQNLLKSEEDSSYKPVKKACTQLVDNLVEHILKYEESLADSDNKGVNSGRLVACITTLFLFSKIRPQLMVKHAMTMQPYLTTKCSTQNDFMVICNVAKILELVVPLMEHPSETFLATIEEDLMKLIIKYGMTVVQHCVSCLGAVVNKVTQNFKFVWACFNRYYGAISKLKSQHQEDPNNTSLLTNKPALLRSLFTVGALCRHFDFDLEDFKGNSKVNIKDKVLELLMYFTKHSDEEVQTKAIIGLGFAFIQHPSLMFEQEVKNLYNNILSDKNSSVNLKIQVLKNLQTYLQEEDTRMQQADRDWKKVAKQEDLKEMGDVSSGMSSSIMQLYLKQVLEAFFHTQSSVRHFALNVIALTLNQGLIHPVQCVPYLIAMGTDPEPAMRNKADQQLVEIDKKYAGFIHMKAVAGMKMSYQVQQAINTCLKDPVRGFRQDESSSALCSHLYSMIRGNRQHRRAFLISLLNLFDDTASMVKDKRKERKSSPSKENESSDSEEEVSRPRKSRKRVDSDSDSDSEDDINSVMKCLPENSAPLIEFANVSQGILLLLMLKQHLKNLCGFSDSKIQKYSPSESAKVYDKAINRKTGVHFHPKQTLDFLRSDMANSKITEEVKRSIVKQYLDFKLLMEHLDPDEEEEEGEVSASTNARNKAITSLLGGGSPKNNTAAETEDDESDGEDRGGGTSGVRRRRSQRISQRITH

SEQ ID NO: 44944 - protein, 321 aa, Homo sapiens
CDQLFESKAELADHQKFPCSTPHSAFSMVEEDFQQKLESENDLQEIHTIQECKECDQVFPDLQSLEKHMLSHTEEREYKCDQCPKAFNWKSNLIRHQMSHDSGKHYECENCAKVFTDPSNLQRHIRSQHVGARAHACPECGKTFATSSGLKQHKHIHSSVKPFISFSQSMYPFPDRDLRSLPLKMEPQSPGEVKKLQKGSSESPFDLTTKRKDEKPLTPVPSKPPVTPATSQDQPLDLSMGSRSRASGTKLTEPRKNHVFGGKKGSNVESRPASDGSLQHARPTPFFMDPIYRVEKRKLTDPLEALKEKYLRPSPGFLFHP

SEQ ID NO: 44945 - protein, 159 aa, Homo sapiens
MHYPIGLLFDLLASSSALPWNITVHFKSFPEKDLLHCPSKDAIEAHFMSCMKEADALKHKSQVINEMQKKDHKQLWMGLQNDRFDQFWAINRKLMEYPAEENGFRYIPFRIYQTTTERPFIQKLFRPVAADGQLHTLGDLLKEVCPSAIDPEEIPPGED

SEQ ID NO: 44946 - protein, 110 aa, Homo sapiens
MAAGGSDPRAGDVEEDASQLIFPKEFETAETLLNSEVHMLLEHRKQQNESAEDEQELSEVFMKTLNYTARFSRFKNRETIASVRSLEGRFEDEELQQILDDIQTKRSFQY

SEQ ID NO: 44947 - protein, 166 aa, Homo sapiens
PESESDHEHEEADLELSLPECLEYEEEFDYETESETESEIESETDFETEPETAPTTEPETEPEDDRGPVVPKHSTFGQSLTQRLHALKLRSPDASPSRAPPSTQEPQSPREGEELKPEDKDPRDPEESKEPKEEKQRRRCKPKKPTRRDASPESPSKKGPIPIRRH

SEQ ID NO: 44948 - protein, 74 aa, Homo sapiens
MSKISEAVKRARAAFSSGRTRPLQFRIQQLEALQRLIQEQEQELVGALAADLHKNEWNAYYEEVVYVLEEIEYM

SEQ ID NO: 44949 - protein, 117 aa, Homo sapiens
CQYKHIVDWCGCSPNDFKPQDFLRLQQVSRPTFFARKFESTVNQEVLEILDFHLYGSYPPGTPALKAYWENTYDAADGPSGLSDVMLTAYTAFARLSLHHAATAAPPMGTPLCRATW

SEQ ID NO: 44950 - protein, 158 aa, Homo sapiens
MEPLAAYPLKCSGPRAKVSLVVNVASDCQLTDRNYLGLKELHKEFGPSHFSVLAFPCNQFGESEPRPSKEVESFARKNYGVTFPIFHKIKILGSEGEPAFRFLVDSSKKEPRWNFWKYLVNPEGQVVKFWKPEEPIEVIRPDIAALVRQVIIKKKEDL

SEQ ID NO: 44951 - protein, 187 aa, Homo sapiens
MERPQPDSMPQDLSEALKEATKEVHTQAENAEFMRNFQKGQVTRDGFKLVMASLYHIYVALEEEIERNKESPVFAPVYFPEELHRKAALEQDLAFWYGPRWQEVIPYTPAMQRYVKRLHEVGRTEPELLVAHAYTRYLGDLSGGQVLKKIAQKALDLPSSGEGLAFFTFPNIASATKFKQLYRSRMN

SEQ ID NO: 44952 - protein, 189 aa, Homo sapiens
MLRWLIGGGREPQGLAEKSPLQTIGEEQTQNPYTELLVLKAHHDIVRFLVQLDDYRFASAGDDGIVVVWNAQTGEKLLELNGHTQKITAIITFPSLESCEEKNQLILTASADRTVIVWDGDTTRQVQRISCFQSTVKRLDVWLSGGNDLCVWNRKLDLLCKTSHLSDTGISALVEIPKNCVVAAVGKEL

SEQ ID NO: 44953 - protein, 126 aa, Homo sapiens
DIEEVSQGLLSLLGANRAEAQQRRLLGRHEQVVERLLETQDGAEKQLRGTWLNFTTKLVKLSGIMSVSQGWSKASIMAPVWPSPSTWTAPSSPGNSSATTSGVWWTPSGSQEPRGCVLHPAGICRG

SEQ ID NO: 44954 - protein, 667 aa, Homo sapiens
MGSPVHRVSLGDTWSRQMHPDIESERYMQSFDVERLTNILDGGAQNTALRRKVESIIHSYPEFSCKDNYFMTQNERYKAAMRRAFHIRLIARRLGWLEDGRELGYAYRALSGDVALNIHRVFVRALRSLGSEEQIAKWDPLCKNIQIIATYAQTELGHGTYLQGLETEATYDAATQEFVIHSPTLTATKWWPGDLGRSATHALVQAQLICSGARRGMHAFIVPIRSLQDHTPLPGIIIGDIGPKMDFDQTDNGFLQLNHVLPDGTYVKLGTAQSNYLPMVVVRVELLSGEILPILQKACVIAMRYSVIRRQSRLRPSDPEAKVLDYQTQQQKLFPQLAISYAFHFLAVSLLEFFQHSYTAILNQDFSFLPELHALSTGMKAMMSEFCTQGAEMCRRACGGHGYSKLSGLPSLVTKLSASCTYEGENTVLYLQVARFLVKSYLQTQMSPGSTPQRSLSPSVAYLTAPDLARCPAQRAADFLCPELYTTAWAHVAVRLIKDSVQHLQTLTQSGADQHEAWNQTTVIHLQAAKVHCYYVTVKGFTEALEKLENEPAIQQVLKRLCDLHAIHGILTNSGDFLHDAFLSGAQVDMARTAYLDLLRLIRKDAILLTDAFDFTDQCLNSALGCYDGNVYERLFQWAQKSPTNTQENPAYEEYIRPLLQSWRSKL

SEQ ID NO: 44955 - protein, 324 aa, Homo sapiens
  MOD_RES (1)..(1): Any amino acid
XRNVYPSAGVLFVHVLEREYFKGEFPPYPKPGEISNDPITFNTNLMGYPDRPGWLRYIQRTPYSDGVLYGSPTAENVGKPTIIEITAYNRRTFETARHNLIINIMSAEDFPLPYQAEFFIKNMNVEEMLASEVLGDFLGAVKNVWQPERLNAINITSALDRGGRVPLPINDLKEGVYVMVGADVPFSSCLREVENPQNQLRCSQEMEPVITCDKKFRTQFYIDWCKISLVDKTKQVSTYQEVIRGEGILPDGGEYKPPSDSLKSRDYYTDFLITLAVPSAVALVLFLILAYIMCCRREGVEKRNMQTPEEQMKRPFIQVFQNLQ

SEQ ID NO: 44956 - protein, 95 aa, Homo sapiens
MGGCFCIPRERSLTRGPGKETPSKDPTVSSECIASSEYKEKCFLPQNINPDLTLSFCVKSRSRRCVNGPLQEAARRRLWALENEDQEVRMLFKVL

SEQ ID NO: 44957 - protein, 127 aa, Homo sapiens
MPGLLNWITGAALPLTASDVTSCVSGYALGLTASLTYGNLEAQPFQGLFVYPLDECTTVIGFEAVIADRVVTVQIKDKAKLESGHFDASHVRSPTVTGNILQDGVSIAPHSCTPGKVTLDEDLERIL

SEQ ID NO: 44958 - protein, 329 aa, Homo sapiens
MMLIPTHHFRNIERKPEYLQPEKCVPPPYPGPVGTMWFIRDGCGIACAIVTWFLVLYAEFVVLFVMLIPSRDYVYSIINGIVFNLLAFLALASHCRAMLTDPGAVPKGNATKEFIESLQLKPGQVVYKCPKCCSIKPDRAHHCSVCKRCIRKMDHHCPWVNNCVGENNQKYFVLFTMYIALISLHALIMVGFHFLHCFEEDWTKCSSFSPPTTVILLILLCFEGLLFLIFTSVMFGTQVHSICTDETGIERLKRKNQPREHMGSWQSVKETFGGDFSLNWFNPFSRPCQPEIPSDKDMVRQVTSLSDTETMEDPSEETKDEDSVEVTDE

SEQ ID NO: 44959 - protein, 157 aa, Homo sapiens
MELRCGGLLFSSRFDSGNLAHVEKVESLSSDGEGVGGGASALTSGIASSPDYEFNVWTRPDCAETEFENGNRSWFYFSVRGGMPGKLIKINIMNMNKQSKLYSQGMAPFVRTLPTRPRWERIRDRPTFEMTETQFVLSFVHRFVEGRGATTFFAFCY

SEQ ID NO: 44960 - protein, 41 aa, Homo sapiens
PEALTSPPKPTLATPRWTLPWPWDTGKMEFRSCCPGWSAMA

SEQ ID NO: 44961 - protein, 167 aa, Homo sapiens
MREPEELMPDSGAVFTFGKSKFAENNPGKFWFKNDVPVHLSCGDEHSAVVTGNNKLYMFGSNNWGQLGLGSKSAISKPTCVKALKPEKVKLAACGRNHTLVSTEGGNVYATGGNNEGQLGLGDTEERNTFHVISFFTSEHKIKQLSAGSNTSAALTVLPRARSSRLF

SEQ ID NO: 44962 - protein, 119 aa, Homo sapiens
MILQRLFRFSSVIRSAVSVHLRRNIGVTAVAFNKELDPIQKLFVDKIREYKSKRQTSGGPVDASSEYQQELERELFKLKQMFGNADMNTFPTFKFEEHFSQHLRSWQPSRDDDILILSS

SEQ ID NO: 44963 - protein, 612 aa, Homo sapiens
MATEGGGKEMNEIKTQFTTREGLYKLLPHSEYSRPNRVPFNSQGSNPVRVSFVNLNDQSGNGDRLCFNVGRELYFYIYKGVRKAADLSKPIDKRIYKGTQPTCHDFNHLTATAESVSLLVGFSAGQVQLIDPIKKETSKLFNEENSCQHLWKVDWNEERQNEGSKTSEEALVTVQRLIDKSRVTCVKWVPGSESLFLVAHSSGNMYLYNVEHTCGTTAPHYQLLKQGESFAVHTCKSKSTRNPLLKWTVGEGALNEFAFSPDGKFLACVSQDGFLRVFNFDSVELHGTMKSYFGGLLCVCWSPDGKYIVTGGEDDLVTVWSFVDCRVIARGHGHKSWVSVVAFDPYTTSVEEGDPMEFSGSDEDFQDLLHFGRDRANSTQSRLSKRNSTDSRPVSVTYRFGSVGQDTQLCLWDLTEDILFPHQPLSRARTHTNVMNATSPPAGSNGNSVTTPGNSVPPPLPRSNSLPHSAVSNAGSKSSVMDGAIASGVSKFATLSLHDRKERHHEKDHKRNHSMGHISSKSSDKLNLVTKTKTDPAKTLGTPLCPRMEDVPLLEPLICKKIAHERLTVLIFLEDCIVTACQEGFICTWGRPGKVGSLSSPSQASSPGGTVV

SEQ ID NO: 44964 - protein, 263 aa, Homo sapiens
MPTESASCSTARQTKQKRKSHSLSIRRTNSSEQERTGLPRDMLEGQDSKLPSSVRSTLLELFGQIEREFENLYIENLELRREIDTLNERLAAEGQAIDGAELSKGQLKTKASHSTSQLSQKLKTTYKASTSKIVSSFKTTTSRAACQLVKEYIGHRDGIWDVSVAKTQPVVLGTASADHTALLWSIETGKCLVKYAGHVGSVNSIKFHPSEQLALTASGDQTAHIWRYAVQLPTPQPVADTSVSTFPYLMCRMLMSANLRIHL

SEQ ID NO: 44965 - protein, 1253 aa, Homo sapiens
MPRLSGKSVRVYDEEVEEPVLKAEAEKTEQEKTREQKEVDLIPKVQEAVNYGLQVLDSAFEQLDIKAGNSDSEEDDANGRVELILEPKDLYIDRPLPYLIGSKLFMEQEDVGLGELSSEEGSVGSDRGSIVDTEEEKEEEESDEDFAHHSDNEQNRHTTQMSDEEEDDDGCDLFADSEKEEEDIEDIEENTRPKRSRPTSFADELAARIKGDAVGRVDEEPTTLPSGEAKPRKTLKEKKERRTPSDDEEDNLFAPPKLTDEDFSPFGSGGGLFSGGKGLFDDEDEESDLFTEAPQDRQAGASVKEESSSSKPGKKIPAGAVSVFLGDTDVFGAASVPSMKEPQKPEQPTPRKSPYGPPPTGLFDDDDGDDDDDFFSAPHSKPSKTGKVQSTADIFGDEEGDLFKEKAVASPEATVSQTDENKARAEKKVTLSSSKNLKPSSETKTQKGLFSDEEDSEDLFSSQSASKLKGASLLPGKLPTLVSLFDDEDEEDNLFGGTAAKKQTLCLQAQREEKAKASELSKKKASALLFSSDEEDQWNIPASQTHLASDSRSKGEPRDSGTLQSQEAKAVKKTSLFEEDEEDDLFAIAKDSQKKTQRVSLLFEDDVDSGGSLFGSPPTSVPPATKKKETVSEAPPLLFSDEEEKEAQLGVKSVDKKVESAKESLKFGRTDVAESEKEGLLTRSAQETVKHSDLFSSSSPWDKGTKPRTKTVLSLFDEEEDKMEDQNIIQAPQKEVGKGRDPDAHPKSTGVFQDEELLFSHKLQKDNDPDVDLFAGTKKTKLLEPSVGSLFGDDEDDDLFSSAKSQPLVQEKKRVVKKDHSVDSFKNQKHPESIQGSKEKGIWKPETPQDSSGLAPFKTKEPSTRIGKIQANLAINPAALLPTAASQISEVKPVLPELAFPSSEHRRSHGLESVPVLPGSGEAGVSFDLPAQADTLHSANKSRVKMRGKRRPQTRAARRLAAQESSETEDMSVPRGPIAQWADGAISPNGHRPQLRAASGEDSTEEALAAAAAPWEGGPVPGVDRSPFAKSLGHSRGEADLFDSGDIFSTGTGSQSVERTKPKAKIAENPANPPVGGKAKSPMFPALGEASSDDDLFQSAKPKPAKKTNPFPLLEDEDDLFTDQKVKKNETKSNSQQDVILTTQDIFEDDIFATEAIKPSQKTREKEKTLESNLFDDNIDIFADLTVKPKEKSKKKVEAKSIFDDDMDDIFSSGIQAKTTKPKSRSAQAAPEPRFEHKVSNIFDDPLNAFGGQ

SEQ ID NO: 44966 - protein, 1292 aa, Homo sapiens
  MOD_RES (1)..(1): Any amino acid
XFTSHHWASLSVCFPNLHPKFQLYIYNQLVRFLTKREQKLMQRRQHAEELLEWKRRLDAEEAEIRQMEKQALAAWDKELIKPKTPKKELEDQRTEQKEIASEEESPVPLYSHLNSESSIPEELGSPAVEYVPSESIGQEQPGSPDHSILTEEMICSQELESSTSPSKHSLPKSCTSVSKQESSKGSHRTGGQCHLPIKSHQHCYSWSDESLSMTQSETTSDQSDIEGRIRALKDELRKRKSVVNQLKKEQKKRQKERLKAQEASLIKQLESYDEFIKKTEAELSQDLETSPTAKPQIKTLSSASEKPKIKPLTPLHRSETAKNWKSLTESERSRGSLESIAEHVDASLSGSERSVSERSLSAYAKRVNEWDSRTEDFQTPSPVLRSSRKIREESGDSLENVPALHLLKELNATSRILDMSDGKVGESSKKSEIKEIEYTKLKKSKIEDAFSKEGKSDVLLKLVLEQGDSSEILSKKDLPLDSENVQKDLVGLAIENLHKSEEMLKERQSDQDMNHSPNIQSGKDIHEQKNTKEKDLSWSEHLFAPKEIPYSEDFEVSSFKKEISAELYKDDFEVSSLLSLRKDSQSCRDKPQPMRSSTSGATSFGSNEEISECLSEKSLSIHSNVHSDRLLELKSPTELMKSKERSDVEHEQQVTESPSLASVPTADELFDFHIGDRVLIGNVQPGILRFKGETSFAKGFWAGVELDKPEGNNNGTYDGIAYFECKEKHGIFAPPQKISHIPENFDDYVDINEDEDCYSDERYQCYNQEQNDTEGPKDREKDVSEYFYEKSLPSVNDIEASVNRSRSLKIETDNVQDISGVLEAHVHQQSSVDSQISSKENKDLISDATEKVSIAAEDDTLDNTFSEELEKQQQFTEEEDNLYAEASEKLCTPLLDLLTREKNQLEAQLKSSLNEEKKSKQQLEKISLLTDSLLKVFVKDTVNQLQQIKKTRDEKIQLSNQELLGDDQKKVTPQDLSQNVEEQSPSISGCFLSSELEDEKEEISSPDMCPRPESPVFGASGQEELAKRLAELELSREFLSALGDDQDWFDEDFGLSSSHKIQKNKAEETIVPLMAEPKRVTQQPCETLLAVPHTAEEVEILVHNAAEELWKWKELGHDLHSISIPTKLLGCASKGLDIESTSKRVYKQAVFDLTKEIFEEIFAEDPNLNQPVWMKPCRINSSYFRRVKNPNNLDEIKSFIASEVLKLFSLKKEPNHKTDWQKMMKFGRKKRDRVDHILVQELHEEEAQWVNYDEDELCVKMQLADGIFETLIKDTIDVLNQISEKQGRMLLV

SEQ ID NO: 44967 - protein, 143 aa, Homo sapiens
MRAPHLHLSAASGARALAKLLPLLMAQLWAAEAALLPQNDTRLDPEAYGSPCARGSQPWQVSLFNGLSFHCAGVLVDQSWVLTAAHCGNKPLWARVGDDHLLLLQGEQLRRTTRSVVHPKYHQGSGPILPRRTDEHDLMLLKL

SEQ ID NO: 44968 - protein, 223 aa, Homo sapiens
MAGPEGFQYRALYPFRRERPEDLELLPGDVLVVSRAALQALGVAEGGERCPQSVGWMPGLNERTRQRGDFPGTYVEFLGPVALARPGPRPRGPRPLPARPRDGAPEPGLTLPDLPEQFSPPDVAPPLLVKLVEAIERTGLDSESHYRPELPAPRTGVSPALTSRRCWWRSCFRNTWKSRRLRPQRCRLNPPRQSRPPQSWPMEGAHPPCRMLSGTGGTFQGRR

SEQ ID NO: 44969 - protein, 96 aa, Homo sapiens
MPSALAIFTCRPNSHPFQERHVYLDEPIKIGRSVARCRPAQNNATFDCKVLSRNHALVWFDHKTGKGNLDLCQHCRIDSALLATISERLQRAIPGR

SEQ ID NO: 44970 - protein, 40 aa, Homo sapiens
MALCEAAGCGSALLWPRLLLFGDSITQVTIPGGPKLSFQD

SEQ ID NO: 44971 - protein, 1341 aa, Homo sapiens
MTKRKKTINLNIQDAQKRTALHWACVNGHEEVVTFLVDRKCQLDVLDGEHRTPLMKALQCHQEACANILIDSGADINLVDVYGNTALHYAVYSEILSVVAKLLSHGAVIEVHNKASLTPLLLSITKRSEQIVEFLLIKNANANAVNKYKCTALMLAVCHGSSEIVGMLLQQNVDVFAADICGVTAEHYAVTCGFHHIHEQIMEYIRKLSKNHQNTNPEGTSAGTPDEAAPLAERTPDTAESLVEKTPDEAAPLVERTPDTAESLVEKTPDEAASLVEGTSDKIQCLEKATSGKFEQSAEETPREITSPAKETSEKFTWPAKGRPRKIAWEKKEDTPREIMSPAKETSEKFTWAAKGRPRKIAWEKKETPVKTGCVARVTSNKTKVLEKGRSKMIACPTKESSTKASANDQRFPSESKQEEDEEYSCDSRSLFESSAKIQVCIPESIYQKVMEINREVEEPPKKPSAFKPAIEMQNSVPNKAFELKNEQTLRADPMFPPESKQKDYEENSWDSESLCETVSQKDVCLPKATHQKEIDKINGKLEESPNKDGLLKATCGMKVSIPTKALELKDMQTFKAEPPGKPSAFEPATEMQKSVPNKALELKNEQTLRADEILPSESKQKDYEENSWDTESLCETVSQKDVCLPKAAHQKEIDKINGKLEGSPVKDGLLKANCGMKVSIPTKALELMDMQTFKAEPPEKPSAFEPAIEMQKSVPNKALELKNEQTLRADEILPSESKQKDYEESSWDSESLCETVSQKDVCLPKATHQKEIDKINGKLEESPDNDGFLKAPCRMKVSIPTKALELMDMQTFKAEPPEKPSAFEPAIEMQKSVPNKALELKNEQTLRADQMFPSESKQKKVEENSWDSESLRETVSQKDVCVPKATHQKEMDKISGKLEDSTSLSKILDTVHSCERARELQKDHCEQRTGKMEQMKKKFCVLKKKLSEAKEIKSQLENQKVKWEQELCSVRLTLNQEEEKRRNADILNEKIREELGRIEEQHRKELEVKQQLEQALRIQDIELKSVESNLNQVSHTHENENYLLHENCMLKKEIAMLKLEIATLKHQYQEKENKYFEDIKILKEKNAELQMTLKLKEESLTKRASQYSGQLKVLIAENTMLTSKLKEKQDKEILEAEIESHHPRLASAVQDHDQIVTSRKSQEPAFHIAGDACLQRKMNVDVSSTIYNNEVLHQPLSEAQRKSKSLKINLNYAGDALRENTLVSEHAQRDQRETQCQMKEAEHMYQNEQDNVNKHTEQQESLDQKLFQLQSKNMWLQQQLVHAHKKADNKSKITIDIHFLERKMQHHLLKEKNEEIFNYNNHLKNRIYQYEKEKAETENS

SEQ ID NO: 44972 - protein, 424 aa, Homo sapiens
MGKVGRARFAQKDVLQIEEIGPVKLFVRDWPRWASWNIGVFICIRCAGIHRNLGVHISRVKSVNLDQWTQEQIQCMQEMGNGKANRLYEAYLPETFRRPQIDPAVEGFIRDKYEKKKYMDRSLDINAFRKEKDDKWKRGSEPVPEKKLEPVVFEKVKMPQKKEDPQLPRKSSPKSTAPVMDLLGLDAPVACSIANSKTSNTLEKDLDLLASVPSPSSSGSRKVVGSMPTAGSAGSVPENLNLFPEPGSKSEEIGKKQLSKDSILSLYGSQTPQMPTQAMFMAPAQMAYPTAYPSFPGVTPPNSIMGSMMPPPVGMVAQPGASGMVAPMAMPAGYMGGMQASMMGVPNGMMTTQQAGYMAGMAAMPQTVYGVQPAQQLQWNLTQMTQQMAGMNFYGANGMMNYGQSMSGGNGQAANQTLSPQMWK

SEQ ID NO: 44973 - protein, 97 aa, Homo sapiens
MMEGSRQTRVSRPYKISESSKVYRWADHSSTVLQRLNEQRLRGLFCDVVLVADEQRVPAHRNLLAVCSDYFNSMFTIGMREAFQKEVELIGASYIGL

SEQ ID NO: 44974 - protein, 187 aa, Homo sapiens
MIPVAEFKQFTEQQPAFKVLKPWWDVLAEYLTVAMLMIGVFGCTLQVTQDKIICLPNHELQENLSEAPCQQLLPRGIPEQIGALQEVKGLKNNLDLQQYSFINQLCYETALHWYAKYFPYLVVIHTLIFMVCTSFWFKFPGTSSKIEHFISILGKCFDSPWTTRALSEVSGENQKGPAATERAAATI

SEQ ID NO: 44975 - protein, 69 aa, Homo sapiens
MKEEAFLRRRFSLCPPSSTPQKVDPRKLTRNLLLSGDNELYPLSPGKDMEPNGPSLPRDEGPPTPSSAT

SEQ ID NO: 44976 - protein, 132 aa, Homo sapiens
SFLQPDIHLFKQNLFYLETLNTKQKLYHKKIFRTAMLFQFVNVLLQVLVHKSHDLLQEEIGIAIYNMASVDFDGFFAAFLPEFLTSCDGVDANQKSVLGRNFKMDRNVHRLVNDLRYYRLCNDSLPPGTVKL

SEQ ID NO: 44977 - protein, 120 aa, Homo sapiens
MGSEDHGAQNPSCKIMTFRPTMEEFKDFNKYVAYIESQGAHRAGLAKIIPPKEWKPRQTYDDIDDVVIPAPIQQVVTGQSGLFTQYNIQKKAMTVGEYRRLANSEKYCTPRHQDFDDLER

SEQ ID NO: 44978 - protein, 776 aa, Homo sapiens
MSVKEGAQRKWAALKEKLGPQDSDPTEANLESADPELCIRLLQMPSVVNYSGLRKRLEGSDGGWMVQFLEQSGLDLLLEALARLSGRGVARISDALLQLTCVSCVRAVMNSRQGIEYILSNQGYVRQLSQALDTSNVMVKKQVFELLAALCIYSPEGHVLTLDALDHYKTVCSQQYRFSIVMNELSGSDNVPYVVTLLSVINAVILGPEDLRARTQLRNEFIGLQLLDVLARLRDLEDADLLIQLEAFEEAKAEDEEELLRVSGGVDMSSHQEVFASLFHKVSCSPVSAQLLSVLQGLLHLEPTLRSSQLLWEALESLVNRAVLLASDAQECTLEEVVERLLSVKGRPRPSPLVKAHKSVQANLDQSQRGSSPQNTTTPKPSVEGQQPAAAAACEPVDHAQSESILKVSQPRALEQQASTPPPPPPPPLLPGSSAEPPPPPPPPPLPSVGAKALPTAPPPPPLPGLGAMAPPAPPLPPPLPGSCEFLPPPPPPLPGLGCPPPPPPLLPGMGWGPPPPPPPLLPCTCSPPVAGGMEEVIVAQVDHGLGSAWVPSHRRVNPPTLRMKKLNWQKLPSNVAREHNSMWASLSSPDAEAVEPDFSSIERLFSFPAAKPKEPTMVAPRARKEPKEITFLDAKKSLNLNIFLKQFKCSNEEVAAMIRAGDTTKFDVEVLKQLLKLLPEKHEIENLRAFTEERAKLASADHFYLLLLAIPCYQLRIECMLLCEGAAAVLDMVRPKAQLVLAACESLLTSRQLPIFCQLILRIGNFLNYVRQPHR

SEQ ID NO: 44979 - protein, 573 aa, Homo sapiens
MMSEGKPPDKKRPRRSLSISKNKKKASNSIISCFNNAPPAKLACPVCSKMVPRYDLNRHLDEMCANNDFVQVDPGQVGLINSNVSMVDLTSVTLEDVTPKKSPPPKTNLTPGQSDSAKREVKQKISPYFKSNDVVCKNQDELRNRSVKVICLGSLASKLSRKYVKAKKSIDKDEEFAGSSPQSSKSTVVKSLIDNSSEIEDEDQILENSSQKENVFKCDSLKEECIPEHMVRGSKIMEAESQKATRECEKSALTPGFSDNAIMLFSPDFTLRNTLKSTSEDSLVKQECIKEVVEKREACHCEEVKMTVASEAKIQLSDSEAKSHSSADDASAWSNIQEAPLQDDSCLNNDIPHSIPLEQGSSCNGPGQTTGHPYYLRSFLVVLKTVLENEDDMLLFDEQEKGIVTKFYQLSATGQKLYVRLFQRKLSWIKMTKLEYEEIALDLTPVIEELTNAGFLQTESELQELSEVLELLSAPELKSLAKTFHLVNPNGQKQQLVDAFLKLAKQRSVCTWGKNKPGIGAVILKRLEAVSTGASPGLCVEVDEMGTLGQSVDEWLSVQWWCDRNPTPSPSTP

SEQ ID NO: 44980 - protein, 45 aa, Homo sapiens
  MOD_RES (1)..(1): Any amino acid
XCENCADLVEVLNEISDVEGGDGLQLRKEHTLKIFTYINSWTQRM

SEQ ID NO: 44981 - protein, 394 aa, Homo sapiens
MENTDSDNLLRRAACQEAQVFGNQLIPPNAQVKKATVFLNPAACKGKARTLFEKNAAPILHLSGMDVTIVKTDYEGQAKKLLELMENTDVIIVAGGDGTLQEVVTGVLRRTDEATFSKIPIGFIPLGETSSLSHTLFAESGNKVQHITDATLAIVKGETVPLDVLQIKGEKEQPVFAMTGLRWGSFRDAGVKVSKYWYLGPLKIKAAHFFSTLKEWPQTHQASISYTGPTERPPNEPEETPVQRPSLYRRILRRLASYWAQPQDALSQEVSPEVWKDVQLSTIELSITTRNNQLDPTSKEDFLNICIEPDTISKGDFITIGSRKVRNPKLHVEGTECLQASQCTLLIPEGAGGSFSIDSEEYEAMPVEVKLLPRKLQFFCDPRKREQMLTSPTQ

SEQ ID NO: 44982 - protein, 60 aa, Homo sapiens
  MOD_RES (1)..(1): Any amino acid
XKPSTNGTTAAGGFDTEPDEFSDFDRLRTALPTSGSSAAYWTRLPPGFYSLNSYRSCFIR

SEQ ID NO: 44983 - protein, 105 aa, Homo sapiens
MAGLPRRIIKETQRLLAEPVPGIKAEPDESNARYFHVVIAGPQDSPFEGGTFKLELFLPEEYPMAAPKVRFMTKIYHPNVDKLGRICLDILKARAWTRLYAMNNI

SEQ ID NO: 44984 - protein, 84 aa, Homo sapiens
  MOD_RES (1)..(1): Any amino acid
XKTVLLEEIYTHKNLFTERLNKISDGLKEKARNRRTSLWAVSLSSALLLAIAGGGRNRAARMSSRSEQRPQLPPSQSSLISGSR

SEQ ID NO: 44985 - protein, 92 aa, Homo sapiens
MALWMRLLPLLALLALWGPDPAAAFVNQHLCGSHLVEALYLVCGERGFFYTPKTRREAEDLQAGELLQLDAARRQPHTRRLLHRERWNKALE

SEQ ID NO: 44986 - protein, 79 aa, Homo sapiens
MKGLGTDEDSLIEIICSRTNQELQEINRVYKEMYKTDLEKDIISDTSGDFRKLMVALAKGRRAEDGSVIDYELIDQDAR

SEQ ID NO: 44987 - protein, 119 aa, Homo sapiens
MEANHCSLGVYPSYPDLVIDVGEVTLGEENRKKLQKTQRDQERARVIRAACALLNSGGGVIQMEMANRDERPTEMGLDLEESLRKLIQYPYLQAFFETKQHGSSQVMDGEGEVHPPLDN

SEQ ID NO: 44988 - protein, 678 aa, Homo sapiens [sequence omitted]

SEQ ID NO: 44989 - protein, 178 aa, Homo sapiens
VYAAPKKDSPPKNSVKVDELSLYSVPEGQSKYVEEARSQLEESISQLRHYCEPYTTWCQETYSQTKPKMQSLVQWGLDSYDYLQNAPPGFFPRLGVIGFAGLIGLLLARGSKIKKLVYPPGFMGLAASLYYPQQAIVFAQVSGERLYDWGLRGYIVIEDLWKENFQKPGNVKNSPGTK

SEQ ID NO: 44990 - protein, 155 aa, Homo sapiens
MFSEQAAQRAHTLLSPPSANNATFARVPVATYTNSSQPFRLGERSFSRQYAHIYATRLIQMRPFLENRAQQHWGSGVGVKKLCELQPEEKCCVVGTLFKAMPLQPSILREVSEEHNLLPQPPRSKYIHPDDELVLEDELQRIKLKGTIDVSKLVT

SEQ ID NO: 44991 - protein, 64 aa, Homo sapiens
MANRELAFKAGDVIKVLDASNKDWWWGQIDDEEGWFPASFVRSESANAICVPSHLCWLKNQSQG

SEQ ID NO: 44992 - protein, 247 aa, Homo sapiens
  MOD_RES (1)..(1): Any amino acid
XSGLYSPVSEDSTVPQFEAPSPSHSLEFSSDMHRIFVNGILIISIIDSTEYSQPPGFSGSSQTKKQPWYNSTLASRRKRLTAHFEDLEQCYFSTRMSRISDDSRTASQLDEFQECLSKFTRYNSVRPLATLSYASDLYNGSSIVSSIEFDRDCDYFAIAGVTKKIKVYEYDTVIQDAVDIHYPENEMTCNSKISCISWSSYHKNLLASSDYEGTVILWDGFTGQRSKVYQEHEKRCWSVDFNLMDPK

SEQ ID NO: 44993 - protein, 140 aa, Homo sapiens
MDEDTHYDKVEDVVGSHIEDAVTFWAQASSVLGNLDPNKIYGGLFSEDQCWYRCKVLKIISVEKCLVRYIDYGNTEILNRSDIVEIPLELQFSSVAKKYKLWGLHIPSDQEVTQFDQGTTFLGSLIFEKEIKMRIKATSE

SEQ ID NO: 44994 - protein, 126 aa, Homo sapiens
MVAFSMRKVPNREATEISHVLLCNVTQRVSFWFVVTDPSKNHTLPAVEVQSAIRMNKNRINNAFFLNDQTLEFLKIPSTLAPPMDPSVPIWIIIFGVIFCIIIVAIALLILSGIWQRRSAQPKFKG

SEQ ID NO: 44995 - protein, 370 aa, Homo sapiens
MDSELKEEIPVHEEFILCGGAETQVLKCGPWTDLFHDQSVKRPKLLIFIIPGNPGFSAFYVPFAKALYSLTNRRFPVWTISHAGHALAPKDKKILTTSEDSNAQEIKDIYGLNGQIEHKLAFLRTHVPKDMKLVLIGHSIGSYFTLQMLKRVPELPVIRAFLLFPTIERMSESPNGRIATPLLCWFRYVLYVTGYLLLKPCPETIKSLLIRRGLQVMNLENEFSPLNILEPFCLANAAYLGGQEMMEVVKRDDETIKEHLCKLTFYYGTIDPWCPKEYYEDIKKDFPEGDIRLCEKNIPHAFITHFNQEMADMIADSLKDDLSKIGNPSWHYHSLRTMRCPSAQILKPPDERFGSDLLPTYWWKNQISRD

SEQ ID NO: 44996 - protein, 396 aa, Homo sapiens
  MOD_RES (1)..(1): Any amino acid
XKTWRPRYFLLKSDGSFIGYKERPEAPDQTLPPLNNFSVAECQLMKTERPRPNTFVIRCLQWTTVIERTFHVDSPDEREEWMRAIQMVANSLKQRAPGEDPMDYKCGSPSDSSTTEEMEVAVSKARAKVTMNDFDYLKLLGKGTFGKVILVREKATGRYYAMKILRKEVIIAKALKYAFQTHDRLCFVMEYANGGELFFHLSRERVFTEERARFYGAEIVSALEYLHSRDVVYRDIKLENLMLDKDGHIKITDFGLCKEGISDGATMKTFCGTPEYLAPEVLEDNDYGRAVDWWGLGVVMYEMMCGRLPFYNQDHERLFELILMEEIRFPRTLSPEAKSLLAGLLKKDPKQRLGGGPSDAKEVMEHRFFLSINWQDVVQKKLLPPFKPQVTSEVDT

SEQ ID NO: 44997 - protein, 75 aa, Homo sapiens
FNLTFGASTGPGYWDQHYLSWSMLLGVGFPPVDGLSPLVLGIMAVALGAPGLMLLGGGLVLLLHHKKYSEYQSIN

SEQ ID NO: 44998 - protein, 62 aa, Homo sapiens
MAQGFAVGFDPLGLGDLSSGSLSSLSSRGHLGSDSGSTATRYLLRKQQRLLNGPPRGIRASS

SEQ ID NO: 44999 - protein, 70 aa, Homo sapiens
MLPPMALPSVSWMLLSCLMLLSQVQGEEPQRELPSARIRCPKGSKAYGSHCYALFLSPKSWTDADLACQK

SEQ ID NO: 45000 - protein, 286 aa, Homo sapiens
MARHGLPLLPLLSLLVGAWLKLGNGQATSMVQLQGGRFLMGTNSPDSRDGDGPVREATVKPFAIDIFPVTNKDFRDFVREKKYRTEAEMFGWSFVFEDFVSDELRNKATQPMKPAGPGSGIRERLEHPVLHVSWNDARAYCAWRGKRLPTEEEWEFAARGGLKGQVYPWGNWFQPNRTNLWQGKFPKGDKAEDGFHGVSPVNAFPAQNNYGLYDLLGNVWEWTASPYQAAEQDMRVLRGASWIDTADGSANHRARVTTRMGNTPDSASDNLGFRCAADAGRPPGEL

SEQ ID NO: 45001 - protein, 49 aa, Homo sapiens
MALLTAAARLLGTKNASCLVLAATWQDGGGPNHCGHDVWWHERHEGIGL

SEQ ID NO: 45002 - protein, 144 aa, Homo sapiens
MKVKEEKAGVGKLDHTNHRRRFPDQKECPPIHIGLPVPTYPQRKTDQKGHLSGLQKVHWGLRPDQPQQELTGPGSGASSQDSSMDLISRTRSPAAEQLQDILGEEDEAPNPTLFTEMDTLQHDGDQMEWKESARWIKFEEKVEE

SEQ ID NO: 45003 - protein, 394 aa, Homo sapiens
MANMQGLVERLERAVSRLESLSAESHRPPGNCGEVNGVIAGVAPSVEAFDKLMDSMVAEFLKNSRILAGDVETHAEMVHSAFQAQRAFLLMASQYQQPHENDVAALLKPISEKIQEIQTFRERNRGSNMFNHLSAVSESIPALGWIAVPPPPPPLPPPGPPPLFENEGKKEESSPSRSALFAQLNQGEAITKGLRHVTDDQKTYKNPSLRAQGGQTQSPTKSHTPSPTSPKSYPSQKHAPVLELEGKKWRVEYQEDRNDLVISETELKQVAYIFKCEKSTIQIKGKVNSIIIDNCKKLGLVFDNVVGIVEVINSQDIQIQVMGRVPTISINKTEGCHIYLSEDALDCEIVSAKSSEMNILIPQDGDYREFPIPEQFKTAWDGSKLITEPAEIMA

SEQ ID NO: 45004 - protein, 145 aa, Homo sapiens
MNQEKLAKLQAQVRIGGKGTARRKKKVVHRTATADDKKLQSSLKKLAVNNIAGIEEVNMIKDDGTVIHFNNPKVQASLSANTFAITGHAEAKPITEMLPGILSQLGADSLTSLRKLAEQFPRQVLDSKAPKPEDIDEEDDDVPGK

SEQ ID NO: 45005 - protein, 85 aa, Homo sapiens
  MOD_RES (1)..(1): Any amino acid
XSENATMTLPGIHPPTLNQIMDWICLLLDANFTVVVMMPEAKRLLINLYKLVKSQARTVFCLRPSQCQEKRVSEYLDHHLTDAPG

SEQ ID NO: 45006 - protein, 258 aa, Homo sapiens
MEDFEVILLDITLELQKQIMSELEILYKCDSSYIIGFYGAFFVENRISICTEFMDGGSLDVYRKMPEHVLGRIAVAVVKGLTYLWSLKILHRDVKPSNMLVNTRGQVKLCDFGVSTQLVNSIAKTYVGTNAYMAPERISGEQYGIHSDVWSLGISFMELALGRFPYPQIQKNQGSLMPLQLLQCIVDEDSPVLPVGEFSEPFVHFITQCMRKQPKERPAPEELMGHPFIVQFNDGNAAVVSMWVCRALEERRSQQGPP

SEQ ID NO: 45007 - protein, 306 aa, Homo sapiens
MLPQNKDQADMALASVQGHWVRVPWSGGEMRAKREGSCTVQGPRGPGPGPGGPAGAPPHRTRPAATAFAAPVARQNRPGPSRGVSYMPGVPPAPQPLLPPPQVQDWTPAACFPSTTALCAGPGIWATPDRHRLRPPPASGPGQGLASAAREKAEGSRASGQGYSGLWASIASISASSSSGPGRPSPRHTLPDQELQVCRPSITKLPTMFLRASTSGTKTGHYLPEAQALPWPKEASFSGAHSPKVISLVPEPRRPPGTPPPNPTLPTRPQISGSPRDTLKGWLAGGQVCSPALNPGSPLWSLLSPG

SEQ ID NO: 45008 - protein, 86 aa, Homo sapiens
MKPHRIRMTHNLLLNYGLYRKMEIYRPHKATAEEMTKYHSDEYIKFLRSIRPDNMSEYSKQMQRFNVGEDCPVFDGLFEFCQLSTG

SEQ ID NO: 45009 - protein, 108 aa, Homo sapiens
MAELQEVQITEEKPLLPGQTPEAAKTHSVETPYGSVTFTVYGTPKPKRPAILTYHDVGLNYKSCFQPLFQFEDMQEIIQNFVRVHVDAPGMEEGAPVFPLGYQYPSLD

SEQ ID NO: 45010 - protein, 86 aa, Homo sapiens
MSGSDGGLEEEPELSITLTLRMLMHGKEVGSIIGKKGETVKRIREQSSARITISEGSCPERITTITGSTAAVFHAVSMIAFKLDEV

SEQ ID NO: 45011 - protein, 116 aa, Homo sapiens
KPVPADQMIVSPSSNTSTSTSTLQSPVGAGTHTVTKIQSGITGTVISAPSSTPITPAMPLDEDPSKLCRHSLKCLECNEVFQDETSLATHFQQAADTSGQNGMEPARWLTPVVPAL

SEQ ID NO: 45012 - protein, 238 aa, Homo sapiens
  MOD_RES (1)..(1): Any amino acid
XDIKVTLIETELLAEYVIRTFAVEKGGAGGEANCSPSREVSQRGVHEIREIRQFHFTGWPDHGVPYHATGLLGFVRQVKSKSPPSAGPLVVHCSAGAGRTGCFIVIDIMLDMAEREGVVDIYNCVRELRSRRVNMVQTEEQYVFIHDAILEACLCGDTSVPASQVRSLYYDMNKLDPQTNSSQIKEEFRTLNMVTPTLRVEDCSIALLPRNHEKNRCMDILPPDRCLPFLITIDGESS

SEQ ID NO: 45013 - protein, 68 aa, Homo sapiens
MLKFRTVHGGLRLLGIRRTSTAPAASPNVRRLEYKPIKKVMVANRGEIAIRVFRACTELGIRTVAIYS

SEQ ID NO: 45014 - protein, 235 aa, Homo sapiens
MPLEQRSQHCKPEEGLEARGEALGLVGAQAPATEEQEAASSSSTLVEVTLGEVPAAESPDPPQSPQGASSLPTTMNYPLWSQSYEDSSNQEEEGPSTFPDLESEFQAALSRKVAKLVHFLLLKYRAREPVTKAEMLGSVVGNWQYFFPVIFSKASDSLQLVFGIELMEVDPIGHVYIFATCLGLSYDGLLGDNQIMPKTGFLIIILAIIAKEGDCAPEEKIWEELSVLEVFEGRE

SEQ ID NO: 45015 - protein, 789 aa, Homo sapiens
MSAQTSPAEKGLNPGLMCQESYACSGTDEAIFECDECCSLQCLRCEEELHRQERLRNHERIRLKPGHVPYCDLCKGLSGHLPGVRQRAIVRCQTCKINLCLECQKRTHSGGNKRRHPVTVYNVSNLQESLEAEEMDEETKRKKMTEKVVSFLLVDENEEIQVTNEEDFIRKLDCKPDQHLKVVSIFGNTGDGKSHTLNHTFFYGREVFKTSPTQESCTVGVWAAYDPVHKVAVIDTEGLLGATVNLSQRTRLLLKVLAISDLVIYRTHADRLHNDLFKFLGDASEAYLKHFTKELKATTARCGLDVPLSTLGPAVIIFHETVHTQLLGSDHPSEVPEKLIQDRFRKLGRFPEAFSSIHYKGTRTYNPPTDFSGLRRALEQLLENNTTRSPRHPGVIFKALKALSDRFSGEIPDDQMAHSSFFPDEYFTCSSLCLSCGVGCKKSMNHGKEGVPHEAKSRCRYSHQYDNRVYTCKACYERGEEVSVVPKTSASTDSPWMGLAKYAWSGYVIECPNCGVVYRSRQYWFGNQDPVDTVVRTEIVHVWPGTDGFLKDNNNAAQRLLDGMNFMAQSVSELSLGPTKAVTSWLTDQIAPAYWRPNSQILSCNKCATSFKDNDTKHHCRACGEGFCDSCSSKTRPVPERGWGPAPVRVCDNCYEARNVQLAVTEAQVDDEGGTLIARKVGEAVQNTLGAVVTAIDIPLGLVKDAARPAYWVPDHEILHCHNCRKEFSIKLSKHHCRACGQGFCDECSHDRRAVPSRGWDHPVRVCFNCNKKPAWTSLSVMTGKGPLC

SEQ ID NO: 45016 - protein, 330 aa, Homo sapiens
MLGFLSARQTGLEDPLRLRRAESTRRDHPDVHRYSVETVQWYPHDTGMFTSSSFDKTLKVWDTNTLQTADVFNFEETVYSHHMSPVSTKHCLVAVGTRGPKVQLCDLKSGSCSHILQGHRQEILAVSWSPRYDYILATASADSRVKLWDVRRASGCLITLDQHNGKKSQAVESANTAHNGKVNGLCFTSDGLHLLTVGTDNRMRLWNSSNGENTLVNYGKVCNNSKKGLKFTVSCGCSSEFVFVPYGSTIAVYTVYSGEQITMLKGHYKTVDCCVFQSNFQELYSGSRDCNILAWVPSLYEPVPDDDETTTKSQLNPAFEDAWSSSDEEG

SEQ ID NO: 45017 - protein, 100 aa, Homo sapiens
MTSRSTARPNGQPQASKICQFKLVLLGESAVGKSSLVLRFVKGQFHEYQESTIGAAFLTQSVCLDDTTVKFEIWDTAGQERYHSLAPMYYRGAQAAIVVY

SEQ ID NO: 45018 - protein, 25 aa, Homo sapiens
MAQLGKLLKEQKYDRQLRYWFVYNY

SEQ ID NO: 45019 - protein, 30 aa, Homo sapiens
MEPEFLYDLLQLPKGVEPPAEEELSKGVCP

SEQ ID NO: 45020 - protein, 41 aa, Homo sapiens
MAHELVMFRDVAIDVSQEEWECLNPAQRNLYKEDFLFLSQP

SEQ ID NO: 45021 - protein, 74 aa, Homo sapiens
MKNVDSDDLVTGTLPKLKSSKEWLEPKPLCFMEVLAKEDTEAAIQSILYKENSVIKKQRVILSRKRTAVLSGGK

SEQ ID NO: 45022 - protein, 88 aa, Homo sapiens
TWRTGLRRNFYGNCFVICGVLYAVDSYNQRNANISYAFDTHTNTQIVPRLLFENEYSYTTQIDYNPKDRLLYAWDNGHQVTYHVIFAY

SEQ ID NO: 45023 - protein, 112 aa, Homo sapiens
MHVDLGLPWWGAIAACTVFARCLIFPLIVTGQREAARIHNHLPEIQKFSSRIREAKLAGDHIEYYKASSEMALYQKKHGIKLYKPLILPVTQAPIFISFFIALREMANLPVP

SEQ ID NO: 45024 - protein, 130 aa, Homo sapiens
GMPGTSIPGPPGPKGDRGGPGIPGFKGEPGLSIRGPKGVQGPRGPVGAPGLKGDGYPGVPGPRGLPGPPGPMGLRGVGDTGAKTLNTSHGLEDPSCPDCSFCHFSLAADIQPKWPALLQLIPASGTRQDG

SEQ ID NO: 45025 - protein, 62 aa, Homo sapiens
MPKNKKRNTPHRGSSAGGGGSGAAAATAATAGGQHRNVQPFSDEDASIETMSHCSGYSDPSS

SEQ ID NO: 45026 - protein, 51 aa, Homo sapiens
MLSNCRQNTLGHNTQTSIAQDFSSEQGRTAPQDQKASIQIYPWMQRMNSHS

SEQ ID NO: 45027 - protein, 796 aa, Homo sapiens
MDSKKRSSTEAEGSKERGLVHIWQAGSFPITPERLPGWGGKTVLQAALGVKHGVLLTEDGEVYSFGTLPWRSGPVEICPSSPILENALVGQYVITVATGSFHSGAVTDNGVAYMWGENSAGQCAVANQQYVPEPNPVSIADSEASPLLAVRILQLACGEEHTLALSISREIWAWGTGCQLGLITTAFPVTKPQKVEHLAGRVVLQVACGAFHSLALVQCLPSQDLKPVPERCNQCSQLLITMTDKEDHVIISDSHCCPLGVTLTESQAENHASTALSPSTETLDRQEEVFENTLVANDQSVATELNAVSAQITSSDAMSSQQNVMGTTEISSARNIPSYPDTQAVNEYLRKLSDHSVREDSEHGEKPVPSQPLLEEAIPNLHSPPTTSTSALNSLVVSCASAVGVRVAATYEAGALSLKKVMNFYSTTPCETGAQAGSSAIGPEGLKDSREEQVKQESMQGKKSSSLVDIREEETEGGSRRLSLPGLLSQVVLTPTYSGEADALLPSLRTEVWTWGKGKEGQLGHGDVLPRLQPLCVKCLDGKEVIHLEAGGYHSLALTAKSQVYSWGSNTFGQLGHSDFPTTVPRLAKISSENGVWSIAAGRDYSLFLVDTEDFQPGLYYSGRQDPTEGDNLPENHSGSKTPVLLSCSKLGYISRVTAGKDSYLALVDKNIMGYIASLHELATTERRFYSKLSDIKSQILRPLLSLENLGTTTTVQLLQEVASRFSKLCYLIGQHGASLSSFLHGVKEARSLVILKHSSLFLDSYTEQVSSPVSCSISAGLFCQGEQLLNQKRLD

SEQ ID NO: 45028 - protein, 99 aa, Homo sapiens
MNEVSVIKEGWLHKRGEYIKTWRPRYFLLKSDGSFIGYKERPEAPDQTLPPLNNFSVAECQLMKTERPRPNTFVIRCLQWTTVIERTFHVDSPDEREEW

SEQ ID NO: 45029 - protein, 129 aa, Homo sapiens
MAAAAVNGAAGFSSSGPAATSGAVLQAATGMYEQLKGEWNRKSPNLSKCGEELGRLKLVLLELNFLPTTGTKLTKQQLILARECHWGEIGLGAVAPAHQGGSSHLGSLWEAEVGGSPEVRSSRPAWSTW

SEQ ID NO: 45030 - protein, 150 aa, Homo sapiens
MSLQMVTVSNNIALIQPGFSLMNFDGQVFFFGQKGWPKRSCPTGVFHLDVKHNHVKLKPTIFSKDSCYLPPLRYPATCTFKGSLESEKHQYIIHGGKTPNNEVSDKIYVMSIVCKNNKKVTFRCTEKDLVGDVPEARYGHSINVVYSRGK

SEQ ID NO: 45031 - protein, 409 aa, Homo sapiens
MRRRAARGPGPPPPGPGLSRLPLPLLLLLALGTRGGCAAPAPAPRAEDLSLGVEWLSRFGYLPPADPTTGQLQTQEELSKAITAMQQFGGLEATGILDEATLALMKTPRCSLPDLPVLTQARRRRQAPAPTKWNKRNLSWRVRTFPRDSPLGHDTVRALMYYALKVWSDIAPLNFHEVAGSAADIQIDFSKADHNDGYPFDGPGGTVAHAFFPGHHHTAGDTHFDDDEAWTFRSSDAHGMDLFAVAVHEFGHAIGLSHVAAAHSIMRPYYQGPVGDPLRYGLPYEDKVRVWQLYGVRESVSPTAQPEEPPLLPEPPDNRSSAPPRKDVPHRCSTHFDAVAQIRGEAFFFKGKYFWRLTRDRHLVSLQPAQMHRFWRGLPLHLDSVDAVYERTSDHKIVFFKGPAVLALR

SEQ ID NO: 45032 - protein, 174 aa, Homo sapiens
MTLHATRGAALLSWVNSLHVADPVEAVLQLQDCSIFIKIIDRIHGTEEGQQILKQPVSERLDFVCSFLQKNRKHPSSPECLVSAQKVLEGSELELAKMTMLLLYHSTMSSKSPRDWEQFEYKIQAELAVILKFVLDHEDGLNLNEDLENFLQKAPVPSTCSSTFPEELSPPSHQ

SEQ ID NO: 45033 - protein, 168 aa, Homo sapiens
  MOD_RES (1)..(1): Any amino acid
XMRDILASDAVAVTFADQIFGIFNWIIPLSVALSCFGGLNASIVAASRLFFVGSREGHLPDAICMIHVERFTPVPSLLFNLSVFFPIVFCLCTIFLVAVPLYSDTINSLIGIAIALSGLPFYFLIIRVPEHKRPLYLRRIVGSATRYLQVLCMSVAAEMDLEDGGEMP

SEQ ID NO: 45034 - protein, 77 aa, Homo sapiens
MDAVAVYHGKISRETGEKLLLATGLDGSYLLRDSESVPGVYCLCVLYHGYIYTYRVSQTETGSWSAEFAMLQEKSRQ

SEQ ID NO: 45035 - protein, 119 aa, Homo sapiens
MKQVPTLKIDGITIHQSNLSVLKQVGEEMQLTWAQNAITCGFNALEQILQSTAGIYCVGDEVTMADLCLVPQVANAERFKVDLTPYPTISSINKRLLVLEAFQVSHPCRQPDTPTELRA

SEQ ID NO: 45036 - protein, 395 aa, Homo sapiens
MAAADGDDSLYPIAVLIDELRNEDVQVRRLRGTWGRRGGVPGGTGGPRGEDSAFAGSGGRGRRPISLRLNSIKKLSTIALALGVERTRSELLPFLTDTIYDEDEVLLALAEQLGTFTTLVGGPEYVHCLLPPLESLATVEETVVRDKAVESLRAISHEHSPSDLEAHFVPLVKRLAGGDWFTSRTSACGLFSVCYPRVSSAVKAELRQYFRNLCSDDTPMVRRAAASKLGEFAKVLELDNVKSEIIPMFSNLASDEQDSVRLLAVEACVNIAQLLPQEDLEALVMPTLRQAAEDKSWRVRYMVADKFTELQKAVGPEITKTDLVPAFQNLMKDCEAEVRAAASHKVKEFCENLSADCRENVIMSQILPCIKELVSDANQHVKSALASVIMGLSPI

SEQ ID NO: 45037 - protein, 594 aa, Homo sapiens
MRPAAGAARRPRCCTSWLTRCPSPAASAPTWTRPLSCASPSATCACTASAPQLELIGHSIFDFIHPCDQEELQDALTPQQTLSRRKVEAPTERCFSLRMKSTLTSRGRTLNLKAATWKVLNCSGHMRAYKPPAQTSPAGSPDSEPPLQCLVLICEAIPHPGSLEPPLGRGAFLSRHSLDMKFTYCDDRIAEVAGYSPDDLIGCSAYEYIHALDSDAVSKSIHTLLSKGQAVTGQYRFLARSGGYLWTQTQATVVSGGRGPQSESIVCVHFLISQVEETGVVLSLEQTEQHSRRPIQRGAPSQKDTPNPGDSLDTPGPRILAFLHPPSLSEAALAADPRRFCSPDLRRLLGPILDGASVAATPSTPLATRHPQSPLSADLPDELPVGTENVHRLFTSGKDTEAVETDLDIAQDADALDLEMLAPYISMDDDFQLNASEQLPRAYHRPLGAVPRPRARSFHGLSPPALEPSLLPRWGSDPRLSCSSPSRGDPSASSPMAGARKRTLAQSSEDEDEGVELLGVRPPKRSPSPEHENFLLFPLSLSFLLTGGPAPGSLQDPSTPLLNLNEPLGFHFVTQSGVQWHKHSSPQPRPPGLK

SEQ ID NO: 45038 - protein, 1618 aa, Homo sapiens
MTEGARAADEVRVPLGAPPPGPAALVGASPESPGAPGREAERGSELGVSPSESPAAERGAELGADEEQRVPYPALAATVFFCLGQTTRPRSWCLRLVCNPWFEHVSMLVIMLNCVTLGMFRPCEDVECGSERCNILEAFDAFIFAFFAVEMVIKMVALGLFGQKCYLGDTWNRLDFFIVVAGMMEYSLDGHNVSLSAIRTVRVLRPLRAINRVPSMRILVTLLLDTLPMLGNVLLLCFFVFFIFGIVGVQLWAGLLRNRCFLDSAFVRNNNLTFLRPYYQTEEGEENPFICSSRRDNGMQKCSHIPGRRELRMPCTLGWEAYTQPQAEGVGAARNACINWNQYYNVCRSGDSNPHNGAINFDNIGYAWIAIFQVITLEGWVDIMYYVMDAHSFYNFIYFILLIIVGSFFMINLCLVVIATQFSETKQRESQLMREQRARHLSNDSTLASFSEPGSCYEELLKYVGHIFRKVKRRSLRLYARWQSRWRKKVDPSAVQGQGPGHRQRRAGRHTASVHHLVYHHHHHHHHHYHFSHGSPRRPGPEPGACDTRLVRAGAPPSPPSPGRGPPDAESVHSIYHADCHIEGPQERARVAHAAATAAASLRLATGLGTMNYPTILPSGVGSGKGSTSPGPKGKWAGGPPGTGGHGPLSLNSPDPYEKIPHVVGEHGLGQAPGHLSGLSVPCPLPSPPAGTLTCELKSCPYCTRALEDPEGELSGSESGDSDGRGVYEFTQDVRHGDRWDPTRPPRATDTPGPGPGSPQRRAQQRAAPGEPGWMGRLWVTFSGKLRRIVDSKYFSRGIMMAILVNTLSMGVEYHEQPEELTNALEISNIVFTSMFALEMLLKLLACGPLGYIRNPYNIFDGIIVVISVWEIVGQADGGLSVLRTFRLLRVLKLVRFLPALRRQLVVLVKTMDNVATFCTLLMLFIFIFSILGMHLFGCKFSLKTDTGDTVPDRKNFDSLLWAIVTVFQILTQEDWNVVLYNGMASTSSWAALYFVALMTFGNYVLFNLLVAILVEGFQAEGDANRSDTDEDKTSVHFEEDFHKLRELQTTELKMCSLAVTPNGHLEGRGSLSPPLIMCTAATPMPTPKSSPFLDAAPSLPDSRRGSSSSGDPPLGDQKPPASLRSSPCAPWGPSGAWSSRRSSWSSLGRAPSLKRRGQCGERESLLSGEGKGSTDDEAEDGRAAPGPRATPLRRAESLDPRPLRPAALPPTKCRDRDGQVVALPSDFFLRIDSHREDAAELDDDSEDSCCLRLHKVLEPYKPQWCRSREAWALYLFSPQNRFRVSCQKVITHKMFDHVVLVFIFLNCVTIALERPDIDPGSTERVFLSVSNYIFTAIFVAEMMVKVVALGLLSGEHAYLQSSWNLLDGLLVLVSLVDIVVAMASAGGAKILGVLRVLRLLRTLRPLRVISRAPGLKLVVETLISSLRPIGNIVLICCAFFIIFGILGVQLFKGKFYYCEGPDTRNISTKAQCRAAHYRWVRRKYNFDNLGQALMSLFVLSSKDGWVNIMYDGLDAVGVDQQLLRAQHVRGRRGRELPQVPAAPGGGGGAAARGEAAAAPREEAQEHFPQPRGPAPALLCRLLAHAPLHSLAVHQPLSRPLHHLHHLCQRHHHVHGAL

SEQ ID NO: 45039 - protein, 478 aa, Homo sapiens [sequence omitted]

SEQ ID NO: 45040 - protein, 404 aa, Homo sapiens
  MOD_RES (1)..(1): Any amino acid
XYEGYDSTANPTVSNVFSTAAFRFGHATIHPLVRRLDASFQEHPDLPGLWLHQAFFSPWTLLRGGYNEWREFCGLPRLETPADLSTAIASRSVADKILDLYKHPDNIDVWLGGLAENFLPRARTGPLFACLIGKQMKALRDGDWFWWENSHVFTDAQRRELEKHSLSRVICDNTGLTRVPMDAFQVGKFPEDFESCDSITGMNLEAWRETFPQDDKCGFPESVENGDFVHCEESGRRVLVYSCRHGYELQGREQLTCTQEGWDFQPPLCKDVNECADGAHPPCHASARCRNTKGGFQCLCADPYELGDDGRTCVDSGRLPRVTWISMSLAALLIGGFAGLTSTVICRWRVLGWKAGILTGCREPSEGKVAGHCRTASCSQNHRTTLFQTQANPKSAGRLFSQHG

SEQ ID NO: 45041 - protein, 103 aa, Homo sapiens
MKPSLLCRPLSCFLMLLPWPLATLTSTTLWQCPPGEEPDLDPGQGTLCRPCPPGTFSAAWGSSPCQPHARCSLWRRLEAQVGMATRDTLCGDCWPGNQPCLPD

SEQ ID NO: 45042 - protein, 212 aa, Homo sapiens
MPLLDGDLEGSGKHSSRKVDSPFGPGSPSKGFFSRGPQPRPSSPMSAPVRPKTSPGSPKTVFPFSYQESPPRSPRRMSFSGIFRSSSKESSPNSNPATSPGGIRFFSRSRKTSGLSSSPSTPTQVTKQHTFPLESYKHEPERLENRIYASSSPPDTGQRFCPSSFQSPTRPPLASPTHYAPSKAAALAAALGPAEAGMLEKLEFEDEGGSRL

SEQ ID NO: 45043 - protein, 162 aa, Homo sapiens
TTELLKQRFDHIFYTGNTAVGKIVMEAAAKHLTPVTLELGGKSPCYIDKDCDLDIVCRRITWGKYMNCGQTCIAPDYILCEASLQNQIVWKIKETVKEFYGENIKESPDYERIINLRHFKRILSLLEGQKIAFGGETDEATRYIGNGNSPFPMGRWQFGSFC

SEQ ID NO: 45044 - protein, 179 aa, Homo sapiens
MEKRLGVKPNPASWILSGYYWQTSAKWLRSLYLFYTCFCFSVLWLSTDASESRCQQGKTQFGVGLRSGGENHLWLLEGTPSLQSCWAACCQDSACHVFWWLEGMCIQADCSRPQSCRAFRTHSSNSMLVFLKKFQTADDLGFLPEDDVPHLLGLGWNWASWRQSPPRAALRPAVSSSDQ

SEQ ID NO: 45045 - protein, 53 aa, Homo sapiens
MSIAGVAAQEIRVPLKTGFLHNGRAMGNMRKTYWSSRSEFKNTGRKLPGTVGD

SEQ ID NO: 45046 - protein, 231 aa, Homo sapiens
EALVSKGLATVIRYRQDDDQRSSHYDELLAAEARAIKNGKGLHSKKEVPIHRVADISGDTQKAKQFLPFLQRAGRSEAVVEYVFSGSRLKLYLPKETCLITFLLAGIECPRGARNLPGLVQEGEPFSEEATLFTKELVLQREVWAHYEEQPVEEVMPVLEEKERSASYKPVFVTEITDDLHFYVQDVETGTQLEKLMENMRNDIASHPPVEGSYAPRRGEFCIAKFVDGEW

SEQ ID NO: 45047 - protein, 216 aa, Homo sapiens
  MOD_RES (1)..(1): Any amino acid
XHSHFIWNRTELLTLDPHNVDYLLGGRIDHGHHEGKAKQALHEAVEMDRAIGQAGSLTSSEDTLTVVTADHSHVFTFGGYTPRGNSIFGLAPMLSDTDKKPFTAILYGNGPGYKVVGGERENVSMVDYAHNNYQAQSAVPLRHETHGGEDVAVFSKGPMAHLLHGVHEQNYVPHVMAYAACIGANLGHCAPASSAGSLAAGPLLLALALYPLSVLF

SEQ ID NO: 45048 - protein, 18 aa, Homo sapiens
MADSGDAGSSGPWWKSLT

SEQ ID NO: 45049 - protein, 170 aa, Homo sapiens
MSENSSDSDSSCGWTVISHEGSDIEMLNSVTPTDSCEPAPECSSLEQEELQALQIEQGESSQNGTVLMEETAYPALEETSSTIEAEEQKIPEDSIYIGTASDDSDIVTLEPPKLEEIGNQEVVIVEEAQSSEDFNMGSSSSSQYTFCQPETVFSSQPSDDESSSDETSNQ

SEQ ID NO: 45050 - protein, 201 aa, Homo sapiens
  MOD_RES (1)..(1): Any amino acid
XEACRQYLMNLEQAVVLEQNLQMLQTFISHRCDGNRNILHACVSVCFPTSNKETKEEEEAERSERNTFAERLSAVEAIANAISVVSSNGPGNRAGSSSSRSLRLREMMRRSLRAAGLGRHEAGASSSDHQDPVSPPIAPPSWVPDPPAMDPAATGTGQGPSTSTIPGPSTEPSVVESKDRKANAHFILKLLCDSVVLQPYL

SEQ ID NO: 45051 - protein, 565 aa, Homo sapiens
MTVLEITLAVILTLLGLAILAILLTRWARRKQSEMHISRYSSEQSARLLDYEDGRGSRHAYHKVTLHVITERISKRDYTPSTNSLALSRSSIALPQGSMSSIKCLQTTEELPSRTAGAMMQFTAPIQPELQDLSSSLKKPLCKLQDLLARVQQQCIVAIHTVLVHLQHPGPPMAPIIISQRTASQLAAPIRIPQVHTMDSSGKITLTPVVILTGYMDEELAKKPCSKIQILKCGGTARSQNSREENKEALKNDIIFTNSVESLKSAHIKEPEREGKGTDLEKDKIGMEVKVDSDAGIPKRQETQLKISDEYTTRTGSPNKEKCVRCTKRTGQVKKSESGVPKGQEAQVTKSGLVVLKGQEAQVEKSEMGVPRRQESQVKKSQSGVSKGQEAQVKKRESVVLKGQEAQVEKSELKVPKGQEGQVEKTEADVPKEQEVQEKKSEAGVLKGPESQVKNTEVSVPETLESQVKKSESGVLKGQEAQEKKESFEDKGNNDKEKERDAEKDPNKKEKGDKNTKGDKGKDKVKGKRESEINGEKSKGSKRRQIQEGSTTKKWKSKDKFFKGP

SEQ ID NO: 45052 - protein, 206 aa, Homo sapiens
MQIIRHSEQTLKTALISKNPVLVSQYEKLNAGEQRLMNEAFQPASDLFGPITLHSPSDWITSHPEAPQDFEQFFSDPYRKTPSPNKRSIYIQSIGSLGNTRIISEEYIKWLTGYCKAYFYGLRVKLLEPVPVSVTRCSFRVNENTHNLQIHAGDILKFLKKKKPEDAFCVVGITMIDLYPRDSWNFVFGQASLTDGVGIFSFARYG

SEQ ID NO: 45053 - protein, 173 aa, Homo sapiens
MEEMRPAGHGVSNVCVAFKVACHSCLPRLFNALIPSPDRNGAALLGGQASADSKSEARRNQCDSMLLRNQQLCSTCQEMKMVQPRTMKIPDDPKASFENCMSYRMSLHQPKFQTTPEPFHDDIPTESIHYRLPILGPRTAVFHGLLTEAYKTLKERQRSSLPRKEPIGKTTRQ

SEQ ID NO: 45054 - protein, 153 aa, Homo sapiens
EEKGGASLSPQYVSYNQSSYTQWDLQPDTDYEIHLFKERMFRHQMAVKTNGTVKDKEDTQVDSEARPMKDETFGEYSDNEEKAFGSSQPSLNGDIKPLGSDDSLADYGGSVDVQFNEDGSFIGQYSGKKEKEAAGGNDSSGATSPINPAVALE

SEQ ID NO: 45055 - protein, 115 aa, Homo sapiens
MEFPEHSQQLLQSLREQRSQGFLCDCTVMVGSTQFLAHRAVLASCSPFFQLFYKERELDKRDLVCIHNEIVTAPAFGLLLDFMYAGQLTLRGDTPVEDVLAAASYLHMNDIVKVC

SEQ ID NO: 45056 - protein, 487 aa, Homo sapiens
MWEPQPDVGSLLRSTAKMPTTPVKAKRVSTFQEFESNTSDAWDAGEDDDELLAMAAESLNSEVVMETANRVLRNHSQRQGRPTLQEGPGLQQKPRPEAEPPSPPSGDLRLVKSVSESHTSCPAESASDAAPLQRSQSLPHSATVTLGGTSDPSTLSSSALSEREASRLDKFKQLLAGPNTDLEELRRLSWSGIPKPVRPMTWKLLSGYLPANVDRRPATLQRKQKEYFAFIEHYYDSRNDEVHQDTYRQIHIDIPRMSPEALILQPKVTEIFERILFIWAIRHPASGYVQGINDLVTPFFVVFICEYIEAEEVDTVDVSGVPAEVLCNIEADTYWCMSKLLDGIQDNYTFAQPGIQMKVKMLEELVSRIDEQVHRHLDQHEVRYLQFAFRWMNNLLMREVPLRCTIRLWDTYQSEPDGFSHFHLYVCAAFLVRWRKEILEEKDFQELLLFLQNLPTAHWDDEDISLLLAEAYRLKFAFADAPNHYKK

SEQ ID NO: 45057 - protein, 180 aa, Homo sapiens
MLPAVGSADEEEDPAEEDCPELVPIETTQSEEEEKSGLGAKIPVTIITGYLGAGKTTLLNYILTEQHSKRVAVILNEFGEGSALEKSLAVSQGGELYEEWLELRNGCLCCSVKDSGLRAIENLMQKKGKFDYILLETTGLADPGAVASMFWVDAELGSDIYLDGIITIVDSKYGLKVKYH

SEQ ID NO: 45058 - protein, 144 aa, Homo sapiens
MVILEAPHLLRRKEPETPGLSSRIGPSLCPGFCRKRSVSCCFQNLCNNPMEKIISQCRFFVSMNDLGGDFKGVGKGSLAADKVVEEIRRRGGKAVANYDSVEEGEKVVKTALDAFGRIDVVVNNAGILRDRSFARISDEDWELK

SEQ ID NO: 45059 - protein, 501 aa, Homo sapiens
MAGSHARPPRRLGAICDSGGGGGGGGGSGNFAASSGRACLTAVWRRPRPRRQEPGGRRRNMSEREVSTAPAGTDMPAAKKQKLSSDENSNPDLSGDENDDAVSIESGTNTERPDTPTNTPNAPGRKSWGKGKWKSKKCKYSFKCVNSLKEDHNQPLFGVQFNWHSKEGDPLVFATVGSNRVTLYECHSQGEIRLLQSYVDADADENFYTCAWTYDSNTSHPLLAVAGSRGIIRIINPITMQCIKHYVGHGNAINELKFHPRDPNLLLSVSKDHALRLWNIQTDTLVAIFGGVEGHRDEVLSADYDLLGEKIMSCGMDHSLKLWRINSKRMMNAIKESYDYNPNKTNRPFISQKIHFPDFSTRDIHRNYVDCVRWLGDLILSKSCENAIVCWKPGKMEDDIDKIKPSESNVTILGRFDYSQCDIWYMRFSMDFWQKMLALGNQVGKLYVWDLEVEDPHKAKCTTLTHHKCGAAIRQTSFSRDSSILIAVCDDASIWRWDRLR

SEQ ID NO: 45060 - protein, 175 aa, Homo sapiens
  MOD_RES (1)..(1): Any amino acid
XGCDRGWHKFQGHCYRYFAHRRAWEDAEKDCRRRSGHLTSVHSPEEHSFINSFGHENTWIGLNDRIVERDFQWTDNTGLQFENWRENQPDNFFAGGEDCVVMVAHESGRWNDVPCNYNLPYVCKKGTARRSHRMRRHHHHHQHHHQHHHHKSRKERRKHKKHPTEDWEKDEGNFC

SEQ ID NO: 45061 - protein, 105 aa, Homo sapiens
MAAAAAATAAAAASIRERQTVALKRMLNFNVPHIKNSTGEPVWKVLIYDRFGQDIISPLLSVKELRDMGITLHLLLHSDRDPIPDVPAVYFVMPTEENIDRMCQK

SEQ ID NO: 45062 - protein, 505 aa, Homo sapiens
MERRRITSAARRSYVSSGEMMVGGLAPGRRLGPGTRLSLARMPPPLPTRVDFSLAGALNAGFKETRASERAEMMELNDRFASYIEKVRFLEQQNKALAAELNQLRAKEPTKLADVYQAELRELRLRLDQLTANSARLEVERDNLAQDLATVRQKLQDETNLRLEAENNLAAYRQEADEATLARLDLERKIESLEEEIRFLRKIHEEEVRELQEQLARQQVHVELDVAKPDLTAALKEIRTQYEAMASSNMHEAEEWYRSKFADLTDAAARNAELLRQAKHEANDYRRQLQSLTCDLESLRGTNESLERQMREQEERHVREAASYQEALARLEEEGQSLKDEMARHLQEYQDLLNVKLALDIEIATYRKLLEGEENRITIPVQTFSNLQIRETSLDTKSVSEGHLKRNIVVKTVEMRDGEGTKQLRTSTSGVWSLALVRSFLGTALEPQDTTSGTALRTLALTQEWVKGNRNEKGGPRCSGREISASVLQALPCQPGGKVFHQPGG

SEQ ID NO: 45063 - protein, 333 aa, Homo sapiens
MDGTMEDSEAVQRATALIEQRLAQEEENEKLRGDARQKLPMDLLVLEDEKHHGAQSAALQKVKGQERVRKTSLDLRREIIDVGGIQNLIELRKKRKQKKRDALAASHEPPPEPEEITGPVDEETFLKAAVEGKMKVIEKFLADGGSADTCDQFRRTALHRASLEGHMEILEKLLDNGATVDFQDRLDCTAMHWACRGGHLEVVKLLQSHGADTNVRDKLLSTPLHVAVRTGQVEIVEHFLSLGLEINARDREGDTALHDAVRLNRYKIIKLLLLHGADMMTKNLAGKTPTDLVQLWQADTRHALEHPEPGAEHNGLEGPNDSGRETPQPVPAQ

SEQ ID NO: 45064 - protein, 284 aa, Homo sapiens
MSPEVALNRISPMLSPFISSVVRNGKVGLDATNCLRITDLKSGCTSLTPGPNCDRFKLHIPYAGETLKWDIIFNAQYPELPPDFIFGEDAEFLPDPSALQNLASWNPSNPECLLLVVKELVQQYHQFQCSRLRESSRLMFEYQTLLEEPQYGENMEIYAGKKNNWTGEFSARFLLKLPVDFSNIPTYLLKDVNEDPGEDVALLSVSFEDTEATQVYPKLYLSPRIEQLSLSPCHTDFLLTRFLPAPLWGSEVSVPSGPFHLLIILPQPLSGLVRPCLLFSQPCS

SEQ ID NO: 45065 - protein, 205 aa, Homo sapiens
DFPWTNVGKLVFVGKKFEILPDGLPSARKLIYYTGCPMRSRHLLQLLSNSHRLYMNLQPVLRHIRKLEENEEKKQYRESYISDNLDLDMDQLEKRSRASGSSAGSMKHKRLSRHSTASHSSSHTSGIEADTKPRDTGPEDSYSSSAIHRKLKTCSSMTSHGSSHTSGVESGGKDRLEEDLQDDGNSTVPSLALCLVSQFFQALVL

SEQ ID NO: 45066 - protein, 22 aa, Homo sapiens
  MOD_RES (1)..(1): Any amino acid
XNDKFDKSVQTKSLSANSSHDV

SEQ ID NO: 45067 - protein, 160 aa, Homo sapiens
MASSNPVYMEMEKGDLPTRLKLLDDEVPFDSPLLVVYATRLYEKFGESALRSLIKFFPSILPSDIIQLCHHHPAEFLAYLDSLVKSRPEDQRSSFLESLLQPESLRLDWLLLAVSLDAPPSTSTMDDEGYPRPHSHLLSWGYSQLILHLIKLPADFITKE

SEQ ID NO: 45068 - protein, 227 aa, Homo sapiens
FPHFSEPGDDFGEFGDINAVSCQEETILTKSDLKQTSDNLSEECQLARKSSGTGTEPVAKLKNGQEGEIGHFDSVPNIQDDCNGFQDSDDFADFSSAGPSQVVDWNAFEDEQKDSCSWAAFGDQQATESHHRKEAWQSHRTDENIDTPGTPKTHSVPSATSKGAVASGHLQESATSVQGMLEPTKEPLKPLSAAEKIASIGQTATMSPDMNTCTSDQFQVWIRSCMS

SEQ ID NO: 45069 - protein, 229 aa, Homo sapiens
MDTEGFELDDKSISDMWTMVKQMTDVLLTPATDALKNRSSVEVRMEFVRQALAYLEQSYKNYTLVTVFGNLHQAQLGGVPGTYQLVRSFLNIKLPAPLPGLQDGEVEGHPVWALIYYCMRCGDLLAASQVVNRAQHQLGEFKTWFQEYMNSKDRRLSPATENKLRLHYRRALRNNTDPYKRAVYCIIGRCDVTDNQSEVADKTEDYLWLKLNQVCFDDDGTSSPQDRLT

SEQ ID NO: 45070 - protein, 92 aa, Homo sapiens
MDEEPERTKRWEGGYERTWEILKEDESGSLKATIEDILFKAKRKRVFEHHGQVRLGMMRHLYVVVDGSRTMEDQDLKPNRLTCTLKETQENI

SEQ ID NO: 45071 - protein, 155 aa, Homo sapiens
MHLTENPHPQVTHVSSSQSGCSIASDSGSSSLSDIYQATESEVGDVDLTRLPEGPVDSEDDEEEDEEIDRTDPLQGRDLVRECLEKEPADKTDDDIEQLLEFMHQLPAFANMTMSVRRELCSVMIFEVVEQAGAIILEDGQELDSWYVILNGTVE

SEQ ID NO: 45072 - protein, 602 aa, Homo sapiens
MLRNERQFKEEKLAEQLKQAEELRQYKVLVHAQERELTQLREKLREGRDASRSLNEHLQALLTPDEPDKSQGQDLQEQLAEGCRLAQHLVQKLSPENDNDDDEDVQVEVAEKVQKSSAPREMQKAEEKEVPEDSLEECAITCSNSHGPYDCNQPHRKTKITFEEDKVDSTLIGSSSHVEWEDAVHIIPENESDDEEEEEKGPVSPRNLQESEEEEVPQESWDEGYSTLSIPPEMLASYKSYSSTFHSLEEQQVCMAVDIGRHRWDQVKKEDHEATGPRLSRELLDEKGPEVLQDSLDRCYSTPSGCLELTDSCQPYRSAFYVLEQQRVGLAVDMDEIEKYQEVEEDQDPSCPRLSRELLDEKEPEVLQDSLGRCYSTPSGYLELPDLGQPYSSAVYSLEEQYLGLALDVDRIKKDQEEEEDQGPPCPRLSRELLEVVEPEVLQDSLDRCYSTPSSCLEQPDSCQPYGSSFYALEEKHVGFSLDVGEIEKKGKGKKRRGRRSKKERRRGRKEGEEDQNPPCPRLNSMLMEVEEPEVLQDSLDICYSTPSMYFELPDSFQHYRSVFYSFEEEHISFALYVDNRFFTLTVTSLHLVFQMGVIFPQ

SEQ ID NO: 45073 - protein, 660 aa, Homo sapiens
MSHVAVENALGLDQQFAGLDLNSSDNQSGGSTASRRYIPPHLRNREATKGFYDKDSSGWSSSKDKDAYSSFGSRSDSRGKSSFFSDRGSGSRGRFDDRGRSDYDGIGSRGDRSGFGKFERGGNSRWCDKSDEDDWSKPLPPSERLEQELFSGGNTGINFEKYDDIPVEATGNNCPPHIESFSDVEMGEIIMGNIELTRYTRPTPVQKHAIPIIKEKRDLMACAQTGSGKTAAFLLPILSQIYSDGPGEALRAMKENGRYGRRKQYPISLVLAPTRELAVQIYEEARKFSYRSRVRPCVVYGGADIGQQIRDLERGCHLLVATPGRLVDMMERGKIGLDFCKYLVLDEADRMLDMGFEPQIRRIVEQDTMPPKGVRHTMMFSATFPKEIQMLARDFLDEYIFLAVGRVGSTSENITQKVVWVEESDKRSFLLDLLNATGKDSLTLVFVETKKGADSLEDFLYHEGYACTSIHGDRSQRDREEALHQFRSGKSPILVATAVAARGLDISNVKHVINFDLPSDIEEYVHRIGRTGRVGNLGLATSFFNERNINITKDLLDLLVEAKQEVPSWLENMAYEHHYKGSSRGRSKSRFSGGFGARDYRQSSGASSSSFSSSRASSSRSGGGGHGSSRGFGGGGYGGFYNSDGYGGNYNSQGVDWWGN

SEQ ID NO: 45074 - protein, 259 aa, Homo sapiens
AEAKPKFLSKAEREAEALKRRQQEVEERQRMLEEERKKRKQFQDLGRKMLEDPQERERRERRERMERETNGNEDEEGRQKIREEKDKSKELHAIKERYLGGIKKRRRTRHLNDRKFVFEWDASEDTSIDYNPLYKERHHPHQEAPGRDHLCLTQHSSCGLRASPKLPDACFSEPSHPSFQVLTLGIWGLRKTIQLPSPDPQVRRPACGAAKGEDDAVGGRESKLPQLLGPVLPFFALGLHWAISSCQAMGAASWHCSPD

SEQ ID NO: 45075 - protein, 990 aa, Homo sapiens
MSKRGMSSRAKGDKAEALAALQAANEDLRAKLTDIQIELQQEKSKVSKVEREKNQELRQVREHEQHKTAVLLTELKTKLHEEKMKELQAVRETLLRQHEAELLRVIKIKDNENQRLQALLSALRDGGPEKVKTVLLSEAKEEAKKGFEVEKVKMQQEISELKGAKRQVEEALTLVIQADKIKAAEIRSVYHLHQEEITRIKKECEREIRRLMEEIKFKDRAVFVLERELGVQAGHAQRLQLQKEALDEQLSQVREADRHPGSPRRELPHAAGAGDASDHSGSPEQQLDEKDARRFQLKIAELSAIIRKLEDRNALLSEERNELLKRVREAESQYKPLLDKNKRLSRKNEDLSHALRRMENKLKFVTQENIEMRQRAGIIRRPSSLNDLDQSQDEREVDFLKLQIVEQQNLIDELSKTLETAGYVKSVLERDKLLRFRKQRKKMAKLPKPVVVETFFGYDEEASLESDGSSVSYQTDRTDQTPCTPDDDLEEGMAKEETELRFRQLTMEYQALQRAYALLQEQVGGTLDAEREVKTREQLQAEVQRAQARIEDLEKALAEQGQDMKWIEEKQALYRRNQELVEKIKQMETEEARLRHEVQDARDQNELLEFRILELEERERKSPAISFHHTPFVDGKSPLQVYCEAEGVTDIVVAELMKKLDILGDNAVSNLTNEEQVVVIQARTVLTLAEKWLQQIEETEAALQRKMVDLESEKELFSKQKGYLDEELDYRKQALDQANKHILELEAMLYDALQQEAGAKVAELLSEEEREKLKVAVEQWKRQVMSELRERDAQILRERMELLQLAQQRIKELEERIEAQKRQIKELEEKLSFSGHSPSWHPDVPHIESDPFPPVGPESRDKMGRRVSILKTQGDLVSARPSRGGRVRRGSVWGVELPSTWDVPELELALPTSRGLLRDGPGLGCWTLGPFSRTAAPIPFPGMCSIPCQAGVRTASVQKHQPRVPSSLLVLTVAATGVWRKIFRNNRGLA

SEQ ID NO: 45076 - protein, 278 aa, Homo sapiens
  MOD_RES (1)..(1): Any amino acid
XQKNWLREFYQVVHTHKPHFMALHCQEFGGKNYEASMSHVDKFVKELLSSDAMKEYNRARVYLDENYKSQEHFTALGSFYFLHESLKNIYQFDFKAKKYRKVAGKEIYSDTLESTPMLEKEKFPQDYFPECKWSRKGFIRTRWCIADCAFDLVNIHLFHDASNLVAWETSPSVYSGIRHKALGYVLDRIIDQRFEKVSYFVFGDFNFRLDSKSVVELLEFDKELSVFKDRLYELDISFPPSYPYSEDARQGEQYMNTRCPAWCDRILMSPSAKELVLR

SEQ ID NO: 45077 - protein, 679 aa, Homo sapiens
  MOD_RES (1)..(1): Any amino acid
XAGAAAAAGTHSAKSGGSEAALKEGGSAAALSSSSSSSAAAAAASSSSSSGPGSAMETGLLPNHKLKTVGEAPAAPPHQQHHHHHHAHHHHHHAHHLHHHHALQQQLNQFQQQQQQQQQQQQQQQQQQHPISNNNSLGGAGGGAPQPGPDMEQPQHGGAKDSAAGGQADPPGPPLLSKPGDEDDAPPKMGEPAGGRYEHPGLGALGTQQPPVAVPGGGGGPAAVPEFNNYYGSAAPASGGPGGRAGPCFDQHGGQQSPGMGMMHSASAAAAGAPGSMDPLQNSHEGYPNSQCNHYPGYSRPGAGGGGGGGGGGGGGSGGGGGGGGAGAGGAGAGAVAAAAAAAAAAAGGGGGGGYGGSSAGYGVLSSPRQQGGGMMMGPGGGGAASLSKAAAGSAAGGFQRFAGQNQHPSGATPTLNQLLTSPSPMMRSYGGSYPEYSSPSAPPPPPSQPQSQAAAAGAAAGGQQAAAGMGLGKDMGAQYAAASPAWAAAQQRSHPAMSPGTPGPTMGRSQGSPMDPMVMKRPQLYGMGSNPHSQPQQSSPYPGGSYGPPGPQRYPIGIQGRTPGAMAGMQYPQQQMPPQYGQQGVSGYCQQGQQPYYSQQPQPPHLPPQAQYLPSQSQQRYQPQQDMSQEGYGTRSQPPLAPGKPNHEDLNLIQQERPSSLPVEVLASEDAAFGLKEA

SEQ ID NO: 45078 - protein, 88 aa, Homo sapiens
MELREKLRALQLQRWKARKKSAASPHAGQESHTLALEPAFGKISPLSADEETIPKYAGHKNQSATLLGQRSSSNNSAPPKVTLCAYHL

SEQ ID NO: 45079 - protein, 262 aa, Homo sapiens
MEAWKHSPLSPVELHSDVIEYAKQKLDFFIRTSDSFDKFDFCEPSFVTGNCLEISPDCSQYDRVYCGAGVQKEHEEYMKNLLKVGGILVMPLEEKLTKITRTGPSAWETKKILAVSFAPLIQPCHSESGKSRLVQLPPVAVRSLQDLARIAIRGTIKKIIHQETVSKNGNGLKNTPRFKRRRVRRRRMETIVFLDKEVFASRISNPSDDNSCEDLEEERREEEEKTPPETKPDPPVNFLRQKVLSLPLPDPLKYYLLYYREK

SEQ ID NO: 45080 - protein, 91 aa, Homo sapiens
AIIRELGGIPIVANKINHSNQSIKEKALNALNNLSVNVENQIKIKVDSSFLSLYDSHVAKEILLRVLTLFQNIKNCLKIEGHLAVQPTFTE

SEQ ID NO: 45081 - protein, 70 aa, Homo sapiens
MVSKSDQLLIVVSILEGFLRFQKCSGGNSLYTSCWRTQGTTVLKRVYYTFLKRSAFPQTSKAYACSGSKV

SEQ ID NO: 45082 - protein, 98 aa, Homo sapiens
MADQIPLYPVRSAAAAAANRKRAAYYSAAGPRPGADRHSRNEHPAPLCMYPTMTARLGWMSPLLTWSALTPPGQWGECLPTAGACGSPGFTHSLLFNV

SEQ ID NO: 45083 - protein, 371 aa, Homo sapiens
  MOD_RES (1)..(1): Any amino acid
XLALAFHDGSVHIVHRLSLQTMAVFYSSAAPRPVDEPAMKRPRTAGPAVHLKAMQLSWTSLALVGIDSHGKLSVLRLSPSMGHPLEVGLALRHLLFLLEYCMVTGYDWWDILLHVQPSMVQSLVEKLHEEYTRQTAALQQVLSTRILAMKASLCKLSPCTVTRVCDYHTKLFLIAISSTLKSLLRPHFLNTPDKSPGDRLTEICTKITDVDIDKVMINLKTEEFVLDMNTLQALQQLLQWVGDFVLYLLASLPNQVAMRAQRASRTRRWWMNAACCPASCLSPAWTGCQPATAWSAACSPSSPFVCSLAGRPRCLAVLPPCSSTASPGPQASPRSTTCGGCTLALAPRRNARPAPGAAVSPCSSRPTEPRR

SEQ ID NO: 45084 - protein, 64 aa, Homo sapiens
MAAGFGRCCRVLRSISRFHWRSQHTKANRQREPGLGFSFGAVSLGMVSHACNPSTLGDHGRRIA

SEQ ID NO: 45085 - protein, 568 aa, Homo sapiens
MLCSLLLCECLLLVAGYAHDDDWIDPTDMLNYDAASGTMRKSQAKYGISGEKDVSPDLSCADEISECYHKLDSLTYKIDECEKKKREDYESQSNPVFRRYLNKILIEAGKLGLPDENKGDMHYDAEIILKRETLLEIQKFLNGEDWKPGALDDALSDILINFKFHDFETWKWRFEDSFGVDPYNVLMVLLCLLCIVVLVATELWTYVRWYTQLRRVLIISFLFSLGWNWMYLYKLAFAQHQAEVAKMEPLNNVCAKKMDWTGSIWEWFRSSWTYKDDPCQKYYELLLVNPIWLVPPTKALAVTFTTFVTEPLKHIGKGTGEFIKALMKEIPALLHLPVLIIMALAILDLFAVLKIEAHKQLLLKSFCYGAGKSVHVLRHIGGPESEPPQALRPRDRRRQEEIDYRPDGGAGDADFHYRGQMGPTEQGPYAKTYEGRREILRERDVDLRFQTGNKSPEVLRAFDVPDAEAREHPTVVPSHKSPVLDTKPKETGGILGEGTPKESSTESSQSAKPVSGQDTSGNTEGSPAAEKAQLKSEAAGSPDQGSTYSPARGVAGPRGQDPVSSPCG

SEQ ID NO: 45086 - protein, 132 aa, Homo sapiens
FTQTYRRSRQHEQLPGQRHMDLLTGYSKLIQSRLKLLLHLGSQPPVGKTFFFSCWCHPLFHGSKTTPNVWYKFSETALSILNSCQASQLGVRKMPGDMSSSPRVREFSALVAIKEKIHILPTNAKVGSKFGS

SEQ ID NO: 45087 - protein, 137 aa, Homo sapiens
MALLVDRVRGHWRIAAGLLFNLLVSICIVFLNKWIYVYHGFPNMSLTLVHFVVTWLGLYICQKLDIFAPKSLPPSRLLLLALSFCGFVVFTNLSLQNNTIGTYQLAKAMTTPVIIAIQTFCYQKTFSTRIQLTLQIS

SEQ ID NO: 45088 - protein, 272 aa, Homo sapiens
  MOD_RES (1)..(1): Any amino acid
XDKGRERMAAAAAAAAAAAAAAQCRSPRCAAERRGFRRELDSWRHRLMHCVGFESILEGLYGPRLRRDLSLFEDCEPEELTDWSMDEKCSFCNLQREAVSDCIPSLDSSQSTPTEELSSQGQSNTDKIECQAENYLNALFRKKDLPQNCDPNIPLVAQELMKKMIRQFAIEYISKSGKTQENRNGSIGPSIVCKSIQMNQAENSLQEEQEGPLDLTVNRMQEQNTQQGDGVLDLSTKKTSIKSEESSICDPSSENSVAGLQTCFLYLSPWII

SEQ ID NO: 45089 - protein, 293 aa, Homo sapiens
  MOD_RES (1)..(1): Any amino acid
XGLGLTPEQKQKKAALSASEGEEVPQDKAPSHVPFLLIGGGTAAFAAARSIRARDPGARVLIVSEDPELPYMRPPLSKELWFSDDPNVTKTLRFKQWNGKERSIYFQPPSFYVSAQDLPHIENGGVAVLTGKKVVQLDVRDNMVKLNDGSQITYEKCLIATGGTPRSLSAIDRAGAEVKSRTTLFRKIGDFRSLEKISREVKSITIIGGGFLGSELACALGRKARALGTEVIQLFPEKGNMGKILPEYLSNWTMEKVRREGVKVMPNAIVQSVGVSSGKLLIKLKDGRKKLTT

SEQ ID NO: 45090 - protein, 39 aa, Homo sapiens
MYLGDSHVLLNTLCWCCHRKIWLHSGEDCYHCRTEPLRP

SEQ ID NO: 45091 - protein, 80 aa, Homo sapiens
TWAEERRLNAETFGIPLRPNRGRGGYRGRGGLGFRGGRGRGGGRGGTFTAPRGFRGGFRGGRGGREFADFEYRKDNKVAA

SEQ ID NO: 45092 - protein, 113 aa, Homo sapiens
MKSFEHMKKSGDYYVTVVEDVTLGQIVATATLIIEHKFIHSCAKRGRVEDVVVSDECRGKQLGKLLLSTLTLLSKKLNCYKITLECLPQNVGFYKKFGYTVSEENYMCRRFLK

SEQ ID NO: 45093 - protein, 169 aa, Homo sapiens
GDHRVELYKVLSSLGYHVVTFDYRGWGDSVGTPSERGMTYDALHVFDWIKARSGDNPVYIWGHSLGTGVATNLVRRLCERETPPDALILESPFTNIREEAKSHPFSVIYRYFPGFDWFFLDPITSSGIKFANDENVKHISCPLLILHAEDDPVVPFQLGRKGIPGEVGA

SEQ ID NO: 45094 - protein, 260 aa, Homo sapiens
MASALRPPRVPKPKGVLPSHYYESFLEKKGPCDRDYKKFWAGLQGLTIYFYNSNRDFQHVEKLNLGAFEKLTDEIPWGSSRDPGTHFSLILRDQEIKFKVETLECREMWKGFILTVVELRVPTDLTLLPGHLYMMSEVLAKEEARRALETPSTHVVRHYKVKREGPKYVIDVEQPFSCTSLDAVVNYFVSHTKKALVPFLLDEDYEKVLGYVEADKENGENVWVAPSAPGPGPAPCTGGPKPLSPASSQDKLPPLPPLPN

SEQ ID NO: 45095 - protein, 141 aa, Homo sapiens
SCGDSSPDTFSDGLSSSTLPDDHSSYTVPGYMQDLEVEQALTPGELVQVWQETPQLLEQSEWQPTNVDGKGYLLNEPGVQPTSVYGDFSCKEEPEIDSPGGDIGLSLQRVFTDLKNMDATWLDSLLTPVRLPSIQAIPCAP

SEQ ID NO: 45096 - protein, 175 aa, Homo sapiens
MPHSYPALSAEQKKELSDIALRIVAPGKGILAADESVGSMAKRLSQIGVENTEENRRLYRQVLFSADDRVKKCIGGVIFFHETLYQKDDNGVPFVRTIQDKGIVVGIKVDKGVVPLAGTDGETTTQGLDGLSERCAQYKKDGADFAKWRCVLKISERTPSALAILENANVLARYA

SEQ ID NO: 45097 - protein, 17 aa, Homo sapiens
MTLLFAVGCVFFPLCFT

SEQ ID NO: 45098 - protein, 490 aa, Homo sapiens
MAGSADSYTSRPSDSDVSLEEDREAIRQEREQQAAIQLERAKSKPVAFAVKTNVSYCGALDEDVPVPSTAISFDAKDFLHIKEKYNNDWWIGRLVKEGCEIGFIPSPLRLENIRIQQEQKRGRFHGGLFVASLVSWYLGEDSFRKSSGNSSSSLGEMVSGTFRATPTSTAKQKQKVTEHIPPYDVVPSMRPVVLVGPSLKGYEVTDMMQKALFDFLKHRFDGRISITRVTADISLAKRSVLNNPSKRAIIERSNTRSSLAEVQSEIERIFELARSLQLVVLDADTINHPAQLIKTSLAPIIVHVKVSSPKVLQRLIKSRGKSQSKHLNVQLVAADKLAQCPPEMFDVILDENQLEDACEHLGEYLEAYWRATHTTSSTPMTPLLGRNLGSTALSPYPTAISGLQSQRMRHSNHSTENSPIERRSLMTSDENYHNERARKSRNRLSSSSQHSRDHYPLVEEDYPDSYQDTYKPHRNRGSPGGYSHDSRHRL

SEQ ID NO: 45099 - protein, 163 aa, Homo sapiens
MSERCCSRYSSGASIGCTPTSTQAKMVSKRIAQETFDAAVRENIEEFAMGPEEAVKEAVEQFESQGVDLSNIVKTAPKVSADGSQEPTHDILQMLSDLQESVASSRPQEVSAYLTRFCDQCKQDKACRFLAAQKGAYPIIFTAWKLATAGDQGLLLQSLNALS

SEQ ID NO: 45100 - protein, 71 aa, Homo sapiens
MIKSYFRNKATFFQDLMTFEDVAVEFSQWEWGQLNPAQKDLYREVMLENFRNLAILGLLVSKPYVICQLEE

SEQ ID NO: 45101 - protein, 80 aa, Homo sapiens
WRRGSASFRRTNPQRVRRQRQPLKRIGAQEKANLEVGIRKKIEHDVVMKASSSLPKKLALLKAPAKKKGAAAATSSKTPS

SEQ ID NO: 45102 - protein, 135 aa, Homo sapiens
MQDQSIWGNPSDGELIRTQPQRLPQLQTSAQVPSGEEIGKIKNGHTGLSNGNGIHHGAKHGSADNRKLSAPVSQKMHRKIQSSLSVNSDISKKSKVNAVFSQKTGSSPEDCCVHCILACLFCEFLTLCNIVLGQA

SEQ ID NO: 45103 - protein, 104 aa, Homo sapiens
MRPDLKGALLSLIEYYQWDKFAYLYDSDRGLSTLQAVLDSAAEKKWQVTAINVGNINNDKKDEMYRSLFQDLELKKERRVILDCERDKVNDIVDQVITIGKHVK

SEQ ID NO: 45104 - protein, 107 aa, Homo sapiens
MADTPRDAGLKQAPASRNEKAPVDFGYVGIDSILEQMRRKAMKQGFEFNIMVVGQSGLGKSTLINTLFKSKISRKSVQPTSEERIPKTIEIKSITHDIEEKGVRMKL

SEQ ID NO: 45105 - protein, 210 aa, Homo sapiens
  MOD_RES (1)..(1): Any amino acid
XQAALPWSGTARLAGRQDAGPAQGAPVQVAGDWRPGRGEDQYHQALRAPELLFALPGHNRRGLRAQGQERFGNMTRVYYREAMGAFIVFDVTRPATFEAVAKWKNDLDSKLSLPNGKPVSVVLLANKCDQGKDVLMNNGLKMDQFCKEHGFVGWFETSAKENINIDEASRCLVKHILANECDLMESIEPDVVKPHLTSTKVASCSGCAKS

SEQ ID NO: 45106 - protein, 573 aa, Homo sapiens
MGYSVVAGAAGRLLFGYDSFGNMCGKKNSPVEGAPLSGQDMTLKKHVFFMNSCNLEVKGSFLCVYSLNSFNYTHSPKADSLCPRLPVPPSKSFPLFNRCVPQTPECYSLFASVLINDVDTLHRILSGIMSGRDTILGLCILALALSLAMMFTFRFITTLLVHIFISLVILGLLFVCGVLWWLYYDYTNDLSIELDTERENMKCVLGFAIVSTGITAVLLVLIFVLRKRIKLTVELFQITNKAISSAPFLLFQPLWTFAILIFFWVLWVAVLLSLGTAGAAQVMEGGQVEYKPLSGIRYMWSYHLIGLIWTSEFILACQQMTIAGAVVTCYFNRSKNDPPDHPILSSLSILFFYHQGTVVKGSFLISVVRIPRIIVMYMQNALKEQQHGALSRYLFRCCYCCFWCLDKYLLHLNQNAYTTTAINGTDFCTSAKDAFKILSKNSSHFTSINCFGDFIIFLGKVLVVCFTVFGGLMAFNYNRAFQVWAVPLLLVAFFAYLVAHSFLSVFETVLDALFLCFAVDLETNDGSSEKPYFMDQEFLSFVKRSNKLNNARAQQDKHSLRNEEGTELQAIVR

SEQ ID NO: 45107 - protein, 127 aa, Homo sapiens
  MOD_RES (1)..(1): Any amino acid
XFHLWPQVQRQLRPRERPRGCPCTGRASSLARDSAAAASDPGTIVHNFSRTEPRTEPAGGSHSGSSSKLQALFAHPLYNVPEEPPLLGAEDSLLASQEALRYYRRKVARWNRPQFLLLKGRGGVCDP

SEQ ID NO: 45108 - protein, 30 aa, Homo sapiens
MKPDRETRSHSVAQPGLKLMSSSNLPVSAS

SEQ ID NO: 45109 - protein, 45 aa, Homo sapiens
MARSLSIMFVPNSWLNGYHKHLLKVEIPGPQPKSSKSGVSGGHER

SEQ ID NO: 45110 - protein, 291 aa, Homo sapiens
MLRVVKEEISDDNARLPCFNGRVVSWLVSSDNPQPEMAPPVHEPRAELAPPAPPLPPLPPERTSGIGDSRPPSFHPNVSSSHENLEPETETESVVSLRRERPRRRDSTGGHRTGGPSRLERHLAGYESSSTLMTSELESTSLGDSDEEDTMSRFSSSTEQSSASRLLKRHRRRRKQRPPRLERTSSFSSVTDSTMSLNIITVTLNMEKYNFLGISIVGQSNERGDGGIYIGSIMKGGAVAADGRIEPGDMLLQVNDMNFENMSNDDAVRVLRDIVHKPGPIVLTVAKCWDP

SEQ ID NO: 45111 - protein, 120 aa, Homo sapiens [sequence omitted]

SEQ ID NO: 45112 - protein, 781 aa, Homo sapiens
MEEELKCPVCGSLFREPIILPCSHNVCLPCARTIAVQTPDGEQHLPQPLLLSRGSGLQAGAAAAASLEHDAAAGPACGGAGGSAAGGLGGGAGGGGDHADKLSLYSETDSGYGSYTPSLKSPNGVRVLPMVPAPPGSSAAAARGAACSSLSSSSSSITCPQCHRSASLDHRGLRGFQRNRLLEAIVQRYQQGRGAVPGTSAAAAVAICQLCDRTPPEPAATLCEQCDVLYCSACQLKCHPSRGPFAKHRLVQPPPPPPPPAEAASGPTGTAQGAPSGGGGCKSPGGAGAGATGGSTARKFPTCPEHEMENYSMYCVSCRTPVCYLCLEEGRHAKHEVKPLGAMWKQHKAQLSQALNGVSDKAKEAKEFLVQLKNILQQIQENGLDYEACLVAQCDALVDALTRQKAKLLTKVTKEREHKLKMVWDQINHCTLKLRQSTGLMEYCLEVIKENDPSGFLQISDALIKRVQVSQEQWVKGALEPKVSAEFDLTLDSEPLLQAIHQLDFIQMKLPPVPLLQLEKCCTRNNSVTLAWRMPPFTHSPVDGYILELDDGAGGQFREVYVGKETLCTIDGLHFNSTYNARVKAFNSSGVGPYSKTVVLQTSDVAWFTFDPNSGHRDIILSNDNQTATCSSYDDRVVLGTAAFSKGVHYWELHVDRYDNHPDPAFGVARASVVKDMMLGKDDKAWAMYVDNNRSWFMHCNSHTNRTEGGVCKGATVGVLLDLNKHTLTFFINGQQQGPTAFSHVDGVFMPALSLNRNVQVTLHTGLEVPTNLGRPKLSGN

SEQ ID NO: 45113 - protein, 98 aa, Homo sapiens
MAASKTQGAVARMQEDRDGSCSTVGGVGYGDSKDCILEPLSLPESPGGTTTLEGSPSVPCIFCEEHFPVAEQDKLLKHMIIEHKIVIADVKLVADFQR

SEQ ID NO: 45114 - protein, 188 aa, Homo sapiens
  MOD_RES (1)..(1): Any amino acid
XRKARGRPRLTESDRARRRLESRKKYDVRRVYLGEAHGPWVDLRRRSGWSDAKLAAYLISLERGQRSGRHGKPWEQVPKKPKRKKRRRRNVNCLKNVVIWYEDHKHRCPYEPHLAELDPTFGLYTTAVWQCEAGHRYFQDLHSPLKPLSDSDPDSDKADTGGHGVSGGGGPGRPGPAQRATPWYKWSH

SEQ ID NO: 45115 - protein, 327 aa, Homo sapiens
  MOD_RES (1)..(1): Any amino acid
XRPRLRSGSQRQPGAHGPSAHGSTMPALLERPKLSNAMARALHRHIMMERERKRQEEEEVDKMMEQKMKEEQERRKKKEMEERMSLEETKEQILKLEEKLLALQEEKHQLFLQLKKVLHEEEKRRRKEQSDLTTLTSAAYQQSLTVHTGTHLLSMQGSPGGHNRPGTLMAADRAKQMFGPQVLTTRHYVGSAAAFAGTPEHGQFQGSPGGAYGTAQPPPHYGPTQPAYSPSQQLRAPSAFPAVQYLSQPQPQPYAVHGHFQPTQTGFLQPGGALSLQKQMEHANQQTGFSDSSSLRPMHPQALHPAPGLLASPQLPVQMQPAGKTAP

SEQ ID NO: 45116 - protein, 121 aa, Homo sapiens
MAAASVTPPGSLELLQPGFSKTLLGTKLEAKYLCSACRNVLRRPFQAQCGHRYCSFCLASILSSGPQNCAACVHEGIYEEGISILESSSAFPDNAARREVESLPAVCPSDGCTWKGTLKEY

SEQ ID NO: 45117 - protein, 198 aa, Homo sapiens
MPEARSSGPDLTRWRKQQQPVRRTVSQVCPPPRRPLTVADIRSGMENERLGVVRDSMFQNPLIVKAELGKPRERSYSLPGINFNYGLYIRGLDGGVPEAIGRWNVFKQQPTCPHELTRNYIAMNRGAVKAGLVTARENLLYRQLNDIRISDQDDRRMKKEPPPLPPNMTFGIRARKLSKQIEKFRSNITNSREPTTWI

SEQ ID NO: 45118 - protein, 577 aa, Homo sapiens
MGEPAGVAGTMESPFSPGLFHRLDEDWDSALFAELGYFTDTDELQLEAANETYENNFDNLDFDLDLMPWESDIWDINNQICTVKDIKAEPQPLSPASSSYSVSSPRSVDSYSSTQHVPEELDLSSSSQMSPLSLYGENSNSLSSAEPLKEDKPVTGPRNKTENGLTPKKKIQVNSKPSIQPKPLLLPAAPKTQTNSSVPAKTIIIQTVPTLMPLAKQQPIISLQPAPTKGQTVLLSQPTVVQLQAPGVLPSAQPVLAVAGGVTQLPNHVVNVVPAPSANSPVNGKLSVTKPVLQSTMRNVGSDIAVLRRQQRMIKNRESACQSRKKKKEYMLGLEARLKAALSENEQLKKENGTLKRQLDEVVSENQRLKVPSPKRRVVCVMIVLAFIILNYGPMSMLEQDSRRMNPSVSPANQRRHLLGFSAKEAQDTSDGIIQKNSYRYDHSVSNDKALMVLTEEPLLYIPPPPCQPLINTTESLRLNHELRGWVHRHEVERTKSRRMTNNQQKTRILQGALEQGSNSQLMAVQYTETTSSISRNSGSELQVYYASPRSYQDFFEAIRRRGDTFYVVSFRRVSSS

SEQ ID NO: 45119 - protein, 384 aa, Homo sapiens
MEASCLELALEGERLCKSGDCRAGVSFFEAAVQVGTEDLKTLSAIYSQLGNAYFYLHDYAKALEYHHHDLTLARTIGDQLGEAKASGNLGNTLKVLGNFDEAIVCCQRHLDISRELNDKVGEARALYNLGNVYHAKGKSFGCPGPQDVGEFPEEVRDALQAAVDFYEENLSLVTALGDRAAQGRAFGNLGNTHYLLGNFRDAVIAHEQRLLIAKEFGDKAAERRAYSNLGNAYIFLGEFETASEYYKKTLLLARQLKDRAVEAQSCYSLGNTYTLLQDYEKAIDYHLKHLAIAQELNDRIGEGRACWSLGNAYTALGNHDQAMHFAEKHLEISREVGDKSGELTARLNLSDLQMVLGLSYSTNNSIMSENTEIDSSLNGTELEQ

SEQ ID NO: 45120 - protein, 116 aa, Homo sapiens
MDKLANKSMDGTVSYPDPSSTYIRQLESKVRLLEGDKLLAQQAGSGEFRTLRKGFSPYHSESQLASLPPSYQDSLQNGPACPAPELPSPPSAGYSPAGQKPEAVVHAMKVLEVHEN

SEQ ID NO: 45121 - protein, 90 aa, Homo sapiens
  MOD_RES (1)..(1): Any amino acid
XEQHVPGSPFTARVTGDDSMRMSHLKVGSAADIPINISETDLSLLTATVVPPSGREEPCLLKRLRNGHVAMPCVQGFHSCPRRRGSTWCM

SEQ ID NO: 45122 - protein, 240 aa, Homo sapiens
MGYKLQDLTDVQIMARLQEESLRQDYASTSASVSRHSSSVSLSSGKKGTCSDQEYDQYSLEDEEEFDHLPPPQPRLPRCSPFQRGIPHSQTFSSIRECRRSPSSQYFPSNNYQQQQYYSPQAQTPDQQPNRTNGDKLRRSMPNLARMPSTTAISSNISSPVTVRNSQSFDSSLHGAGNGISRIQSCIPSPGQLQHRVHSVGHFPVSIRQPLKATAYVSPTVQGSSNMPLSNGLQLYSNTG

SEQ ID NO: 45123 - protein, 160 aa, Homo sapiens
MHRRRLALGLGFCLLAGTSLSVLWVYLENWLPVSYVPYYLPCPEIFNMKLHYKREKPLQPVVWSQYPQPKLLEHRGGSQCPRPPCCQAHTAADTHTLVGAHRLRGNLQPRASAAHLPATEPDHWGHGVCRGEVHSFHPVLPGVSRGVLHAWVPGALLHLH

SEQ ID NO: 45124 - protein, 242 aa, Homo sapiens
  MOD_RES (1)..(1): Any amino acid
XSYVVDGEIIIYGPAYSGRETAYSNASLLIQNVTREDAGSYTLHIIKGDDGTRGVTGRFTFTLHLETPKPSISSSNLNPRETMEAVSLTCDPETPDASYLWWMNGQSLPMTHSLKLSETNRTLFLLGVTKYTAGPYECEIRNPVSASRSDPVTLNLLHGPDLPRIYPSFTYYRSGEVLYLSCSADSNPPAQYSWTINEKFQLPGQKLFIRHITTKHSGLYVCSVRNSATGKESSKSMTVEVS

SEQ ID NO: 45125 - protein, 375 aa, Homo sapiens
MEEPEEPADSGQSLVPVYIYSPEYVSMCDSLAKIPKRASMVHSLIEAYALHKQMRIVKPKVASMEEMATFHTDAYLQHLQKVSQEGDDDHPDSIEYGLGYDCPATEGIFDYAAAIGGATITAAQCLIDGMCKVAINWSGGWHHAKKDEASGFCYLNDAVLGILRLRRKFERILYVDLDLHHGDGVEDAFSFTSKVMTVSLHKFSPGFFPGTGDVSDVGLGKGRYYSVNVPIQDGIQDEKYYQICESVLKEVYQAFNPKAVVLQLGADTIAGDPMCSFNMTPVGIGKCLKYILQWQLATLILGGGGYNLANTARCWTYLTGVILGKTLSSEIPDHEFFTAYGPDYVLEITPSCRPDRNEPHRIQQILNYIKGSKSW

SEQ ID NO: 45126 - protein, 35 aa, Homo sapiens
  MOD_RES (1)..(1): Any amino acid
XWNEEILFRVHPQQHRLLFEVFDENRLPWLVTNQE

SEQ ID NO: 45127 - protein, 42 aa, Homo sapiens
MMDGPRSDVGRWGGNPLQPPTTPSPEPEPEPDGRSRRGGGRS

SEQ ID NO: 45128 - protein, 133 aa, Homo sapiens
MLWFSGVGALAERYCRRSPGITCCVLLLLNCSGVPMSLASSFLTGSVAKCENEGEVLQIPFITDNPCIMCVCLNKEVTCKREKCPVLSRDCALAIKQRGACCEQCKVLVSRVLRDTVLFTLKYWRLPVFWLHL

SEQ ID NO: 45129 - protein, 55 aa, Homo sapiens
MTAVHAGNINFKWDPKSLEIRTLAVERLLEPLVTQILHLSSEGKPKKGGVWILDC

SEQ ID NO: 45130 - protein, 184 aa, Homo sapiens
LTVPQGHAGCHTSFTGQGTNASETPATRMSIIQTDNFPAEPNYMGSRQQFVQSSSTFKDPERASLRDSGHGDSDQADSDQDTNKGSCCDMSVREALKMKTTSTKSQPLEQAFPTLLSFAILTLHTITSRLQSVDLLPPEPEECVNCTDECRVLGHSDRCWMPQFPAANQAENADYRTNLFVPTV

SEQ ID NO: 45131 - protein, 108 aa, Homo sapiens
MALFDFLLQIYNRLDTNCCGFRPRKEDACVQNGLRPKCDDQGSAALAHIIQRKHDPRHLVFIDNKGFFDRSEDNLNFKLLEGIKEFPASAVSVLKSQHLRQKLLQSLF

SEQ ID NO: 45132 - protein, 55 aa, Homo sapiens
MVLADLGRKITSALRSLSNATIINEEVLNAMLKEVCTALLEDLFNMCRHIQSRGF

SEQ ID NO: 45133 - protein, 848 aa, Homo sapiens
MKDYVQVPAAELEKPYEFTSTRESPTFLYLRVCCCCSALRPRYKRLVDNIFPEDPKDGLVKTDMEKLTFYAVSAPEKLDRIGSYLAERLSRDVVRHRSGYVLIAMEALDQLLMACHSQSIKPFVESFLHMVAKLLESGEPKLQVLGTNSFVKFANIEEDTPSYHRRYDFFVSRFSAMCHSCHSDPEIRTEIRIAGIRGIQGVVRKTVNDELRATIWEPQHMDKIVPSLLFNMQKIEEVDSRIGPPSSPSATDKEENPAVLAENCFRELLGRATFGNMNNAVRPVFAHLDHHKLWDPNEFAVHCFKIIMYSIQAQYSHHVIQEILGHLDARKKDAPRVRAGIIQVLLEAVAIAAKGSIGPTVLEVFNTLLKHLRLSVEFEANDLQGGSVGSVNLNTSSKDNDEKIVQNAIIQTIGFFGSNLPDYQRSEIMMFIMGKVPVFGTSTHTLDISQLGDLGTRRIQIMLLRSLLMVTSGYKAKTIVTALPGSFLDPLLSPSLMEDYELRQLVLEVMHNLMDRHDNRAKLRGIRIIPDVADLKIKREKICRQDTSFMKKNGQQLYRHIYLGCKEEDNVQKNYELLYTSLALITIELANEEVVIDLIRLAIALQDSAIINEDNLPMFHRCGIMALVAAYLNFVSQMIAVPAFCQHVSKVIEIRTMEAPYFLPEHIFRDKCMLPKSLEKHEKDLYFLTNKIAESLGGSGYSVERLSVPYVPQVTDEDRLSRRKSIVDTVSIQVDILSNNVPSDDVVSNTEEITFEALKKAIDTSGMEEQEKEKRRLVIEKFQKAPFEEIAAQCESKANLLHDRLAQILELTIRPPPSPSGTLTITSGHAQYQSVPVYEMKFPDLCVY

SEQ ID NO: 45134 - protein, 26 aa, Homo sapiens
MAVVLPAVVEELLSEMAAAVQESARS

SEQ ID NO: 45135 - protein, 203 aa, Homo sapiens
  MOD_RES (1)..(1): Any amino acid
XGKHQHFQEPEVGCCGKYFLFGFNIVFWFSVFLGLIFFLELATGILAFVFKDWIRDQLNLFINNNVKAYRDDIDLQNLIDFAQEYWSCCGARGPNDWNLNIYFNCTDLNPSRERCGVPFSCCVRDPAEDVLNTQCGYDVRLKLELEQQGFIHTKGCVGQFEKWLQDNLIVVAGVFMGIALLQIFGICLAQNLVSDIKAVKANW

SEQ ID NO: 45136 - protein, 252 aa, Homo sapiens
MTSEFFAAQLRAQISDDTTHPISYYKPEFYTPVDGGTAHLSVVAEDGSAVSATSTINLYFGSKVRSPVSEILFNDEMDDFSSPNITNEFGVPPSPANFIQPGKQPLSSMCPTIMVGQDGQVRMVVGAAGGTQITTATALICVTPFLPGRAHPAQPPSHADHTPMPQAIIYNLWFGYDVKRAVEEPRLHNQLLPNVTTVERNIDQAVTAALETRHHHTQIASTFIAVVQAIVRTAGGWAAASDSRKGGEPAGY

SEQ ID NO: 45137 - protein, 1804 aa, Homo sapiens
MKASSGDQGSPPCFLRFPRPVRVVSGAEAELKCVVLGEPPPVVVWEKGGQQLAASERLSFPADGAEHGLLLTAALPTDAGVYVCRARNAAGEAYAAAAVTVLEPPASDPELQPAERPLPSPGSGEGAPVFLTGPRSQWVLRGAEVVLTCRAGGLPEPTLYWEKDGMALDEVWDSSHFALQPGRAEDGPGASLALRILAARLPDSGVYVCHARNAHGHAQAGALLQVHQPPESPPADPDEAPAPVVEPLKCAPKTFWVNEGKHAKFRCYVMGKPEPEIEWHWEGRPLLPDRRRLMYRDRDGGFVLKVLYCQAKDRGLYVCAARNSAGQTLSAVQLHVKEPRLRFTRPLQDVEGREHGIAVLECKVPNSRIPTAWFREDQRLLPCRKYEQIEEGTVRRLIIHRLKADDDGIYLCEMRGRVRTVANVTVKGPILKRLPRKLDVLEGENAVLLVETLEAGVEGRWSRDGEELPVICQSSSGHMHALVLPGVTREDAGEVTFSLGNSRTTTLLRVKCVKHSPPGPPILAEMFKGHKNTVLLTWKPPEPAPETPFIYRLERQEVGSEDWIQCFSIEKAGAVEVPGDCVPSEGDYRFRICTVSGHGRSPHVVFHGSAHLVPTARLVAGLEDVQVYDGEDAVFSLDLSTIIQGTWFLNGEELKSNEPEGQVEPGALRYRIEQKGLQHRLILHAVKHQDSGALVGFSCPGVQDSAALTIQESPVHILSPQDRVSLTFTTSERVVLTCELSRVDFPATWYKDGQKVEESELLVVKMDGRKHRLILPEAKVQDSGEFECRTEGVSAFFGVTVQDPPVHIVDPREHVFVHAITSECVMLACEVDREDAPVRWYKDGQEVEESDFVVLENEGPHRRLVLPATQPSDGGEFQCVAGDECAYFTVTITDVSSWIVYPSGKVYVAAVRLERVVLTCELCRPWAEVRWTKDGEEVVESPALLLQKEDTVRRLVLPAVQLEDSGEYLCEIDDESASFTVTVTEPPVRIIYPRDEVTLIAVTLECVVLMCELSREDAPVRWYKDGLEVEESEALVLERDGPRCRLVLPAAQPEDGGEFVCDAGDDSAFFTVTVTAPPERIVHPAARSLDLHFGAPGRVELRCEVAPAGSQVRWYKDGLEVEASDALQLGAEGPTRTLTLPHAQPEDAGEYVCETRHEAITFNVILAEPPVQFLALETTPSPLCVAPGEPVVLSCELSRAGAPVVWSHNGRPVQEGEGLELHAEGPRRVLCIQAAGPAHAGLYTCQSGAAPGAPSLSFTVQVAEPLLVKLVSELTPLTVHEGDDATFRCEVSPPDADVTWLRNGAVVTPGPQVEMAQNGSSRILTLRGCQLGDAGTVTLRAGSTATSARLHVRETELLFLRRLQDVRAEEGQDVCLEVETGRVGAAGAVRWVRGGQPLPHDSRLSMAQDGHIHRLFIHGVILADQGTYGCESHHDRTLARLSVRPRQLRVLRPLEDVTISEGGSATFQLELSQEGVTGEWARGGVQLYPGPKCHIHSDGHRHRLVLNGLGLADSGCVSFTADSLRCAARLIVREVPVTIVRGPHDLEVTEGDTATFECELSQALADVTWEKDGNALTPSPRLRLQALGTRRLLQLRRCGPSDAGTYSCAVGTARAGPVRLTVRERTVAVLSELRSVSAREGDGATFECTVSEVETTGRWELGGRPLRPGARVRIRQEGKKHILVLSELRAEDAGEVRFQAGPAQSLALLEVEALPLQMCRHPPREKTVLVGRRAVLEVTVSRSGGHVCWLREGAELCPGDKYEMRSHGPTHSLVIHDVRPEDQGTYCCQAGQDSTHTRLLVEGN

SEQ ID NO: 45138 - protein, 76 aa, Homo sapiens
MTTEQRRSLQAFQDYIRKTLDPTYILSYMAPWFREGECSIFRLRKTTRAQWRLPHFFSSSCWSSRRKAGSVAFWMP

SEQ ID NO: 45139 - protein, 336 aa, Homo sapiens
  MOD_RES (1)..(1): Any amino acid
XENGEGYEKAPSYSYKQSLNMAAVGITENVKGDAKKFEIWYNAREEVYIVQAPTPEIKAAWVNEIRKVLTSQLQACREASQHRALEQSQSLPLPAPTSTSPSRGNSRNIKKLEERKTDPLSLEGYVSSAPLTKPPEKGKDDTVTSSASESSALSRKRFTLQGFANLKGQKASPTSPDKKAKRHEVKSDPTPFGVRGWSKTSHSLEAPEDDGGWSSAEEQINSSDAEEDGGLGPKKLVPGKYTVVADHEKGGPDALRVRSGDVVELVQEGDEGLWYVRDPTTGKEGWVPASSLSVRLGPSGSAQCLSSSESSPGSAVLSNSSSCSEGGQAPFSDLQG

SEQ ID NO: 45140 - protein, 210 aa, Homo sapiens
  MOD_RES (1)..(1): Any amino acid
XCVFIWHLGPEITNCMKQHLLEIDHRQQQQHTNDKKRSGHPRQDTYVSTPSEIHSLSPGEQTEDDLEEECEPEEMLKTPSKDSLDPDPRCLLTNGKLPLWAKRLLGDDDVADGLAFHAKRSYQPHGRWAERAGQEPLKTILDAQDLDCYFTPMKPESLENSILDSLEPQSLASLLSEPVLQEGGGGRAWRPAGRLLPQGVLRQPKGPEPA

SEQ ID NO: 45141 - protein, 24 aa, Homo sapiens
MRQEVFVTIADLSYQDVHLLLGSE

SEQ ID NO: 45142 - protein, 358 aa, Homo sapiens
MDAKSLTAWSRTLVTFKDVFVDFTREEWKLLDTAQQIVYRNVMLENYKNLVSLGYQLTKPDVILRLEKGEEPWLVEREIHQETHPDSETAFEIKSSVSSRSIFKDKQSCDIKMEGMARNDLWYLSLEEVWKCRDQLDKYQENPERHLSIPRVLSLPARHTKLTVGMATRVRTASIWVPPLQERNSSWDRIRKLQGQESILGQGTPGLQPLPGTPRQKQKSRRIEKVLEWLFISQEQPKITKSWGPLSFMDVFVDFTWEEWQLLDPAQKCLYRSVMLENYSNLVSLGYQHTKPDIIFKLEQGEELCMVQAQVPNQTCPILKAGKSKAKVLAGLVSGEGLLCASKMTPCCCILWRHSLEN

SEQ ID NO: 45143 - protein, 206 aa, Homo sapiens
MEEPEEPADSGQSLVPVYIYSPEYVSMCDSLAKIPKRASMVHSLIEAYALHKQMRIVKPKVASMEEMATFHTDAYLQHLQKVSQEGDDDHPDSIEYGLGYDCPATEGIFDYAAAIGGATITAAQCLIDGMCKVAINWSGGWHHAKKDEASGFCYLNDAVLGILRLRRKFERILYVDLDLHHGDGTNLLPQIQACRSSCRSLSSPFA

SEQ ID NO: 45144 - protein, 146 aa, Homo sapiens
MSDGDYDYLIKFLALGDSGVGKTSVLYQYTDGKFNSKFITTVGIDFREKRVVYRASGPDGATGRGQRIHLQLWDTAGQERFRSLTTAFFRDAMGFLLLFDLTNEQSFLNVRNWISQLQMHAYCENPDIVLCGNKSDLEDQRVVKEE

SEQ ID NO: 45145 - protein, 284 aa, Homo sapiens
  MOD_RES (1)..(1): Any amino acid
XGENFKGPDRELRTVRQTMIDFLQNHTEGSRPPACPRLDPIHVKPLRAFFSSYLKSLPDVRKKSLPLPEKPHKEENSEIVVWREFDKSKLYTVDLESGLHYLLRVELAAHKSLAGAELKTLKDFVTVLAKLFPGRPPVKKLLEMLQEWLASLPLDRIPYNAVLDLVNNKMRISGIFLTNHIKWVGCQGSRSELRGYPCSLWKLFHTLTVEASTHPDALVGTGFEDDPQAVLQTMRRYVHTFFGCKECGEHFEEMAKESMDSVKTPDQAILWLWKKHNMVNGRLA

SEQ ID NO: 45146 - protein, 96 aa, Homo sapiens
  MOD_RES (1)..(1): Any amino acid
XTYFEIFTAGAGTGEVEVVIQDPMGQKGTVEPQLEARGDSTYRCSYQPTMEGVHTVHVTFAGVPIPRSPYTVTVGQACNPSACRAVGRGLQPKASR

SEQ ID NO: 45147 - protein, 1663 aa, Homo sapiens
MMDLVLEEDVTVPGTLSGCSGLVPSVPDDLDGINPNAGLGNGLLPNVSEETVSPTRARNMKDFENQITELKKENFNLKLRIYFLEERMQQEFHGPTEHIYKTNIELKVEVESLKRELQEREQLLIKASKAVESLAEAGGSEIQRVKEDARKKVQQVEDLLTKRILLLEKDVTAAQAELEKAFAGTETEKALRLRLESKLSEMKKMHEGDLAMALVLDEKDRLIEELKLSLKSKEALIQCLKEEKSQMACPDENVSSGELRGLCAAPREEKERETEAAQMEHQKERNSFEERIQALEEDLREKEREIATEKKNSLKRDKAIQGLTMALKSKEKKVEELNSEIEKLSAAFAKAREALQKAQTQEFQGSEDYETALSGKEALSAALRSQNLTKSTENHRLRRSIKKITQELSDLQQERERLEKDLEEAHREKSKGDCTIRDLRNEVEKLRNEVNEREKAMENRYKSLLSESNKKLHNQEQVIKHLTESTNQKDVLLQKFNEKDLEVIQQNCYLMAAEDLELRSEGLITEKCSSQQPPGSKTIFSKEKKQSSDYEELIQVLKKEQDIYTHLVKSLQESDSINNLQAELNKIFALRKQLEQDVLSYQNLRKTLEEQISEIRRREESFSLYSDQTSYLSICLEENNRFQVEHFSQEELKKKVSDLIQLVKELYTDNQHLKKTIFDLSCMGFQGNGFPDRLASTEQTEEAKKSRLPILIKPSRSLGNMYRLPATQEVVTQLQSQILELQGELKEFKTCNKQLHQKLILAEAVMEGRPTPDKTLLNAQPPVGAAYQDSPGEQKGIKTTSSVWRDKEMDSDQQRSYEIDSEICPPDDLASLPSCKENPEDVLSPTSVATYLSSKSQPSAKVSVMGTDQSESINTSNETEYLKQKIHDLETELEGYQNFIFQLQKHSQCSEAIITVLCGTEGAQDGLSKPKNGSDGEEMTFSSLHQVRYVKHVKILGPLAPEMIDSRVLENLKQQLEEQEYKLQKEQNLNMQLFSEIHNLQNKFRDLSPPRYDSLVQSQARELSLQRQQIKDGHGICVISRQHMNTMIKAFEELLQASDVDYCVAEGFQEQLNQCAELLEKLEKLFLNGKSVGVEMNTQNELMERIEEDNLTYQHLLPESPEPSASHALSDYETSEKSFFSRDQKQDNETEKTSVMVNSFSQDLLMEHIQEIRTLRKRLEESIKTNEKLRKQLERQGSEFVQGSTSIFASGSELHSSLTSEIHFLRKQNQALNAMLIKGSRDKQKENDKLRESLSRKTVSLEHLQREYASVKEENERLQKEGSEKERHNQQLIQEVRCSGQELSRVQEEVKLRQQLLSQNDKLLQSLRVELKAYEKLDEEHRRLREASGEGWKGQDPFRDLHSLLMEIQALRLQLERSIETSSTLQSRLKEQLARGAEKAQEGALTLAVQAVSIPEVPLQPDKHDGDKYPMESDNSFDLFDSSQAVTPKSVSETPPLSGNDTDSLSCDSGSSATSTPCVSRLVTGHHLWASKNGRHVLGLIEDYEALLKQISQGQRLLAEMDIQTQEAPSSTSQELGTKGPHPAPLSKFVSSVSTAKLTLEEAYRRLKLLWRVSLPEDGQCPLHCEQIGEMKAEVTKLHKKLFEQEKKLQNTMKLLQLSKRQEKVIFDQLVVTHKILRKARGNLELRPGGAHPGTCSPSRPGS

SEQ ID NO: 45148 - protein, 165 aa, Homo sapiens
MARHGLPLLPLLSLLVGAWLKLGNGQATSMVQLQGGRFLMGTNSPDSRDGDGPVREATVKPFAIDIFPVTNKDFRDFVREKKYRTEAEMFGWSFVFEDFVSDELRNKATQPMKSVLWWLPVEKAFWRQVKFTHGGTGSSQTAPTCGRESSPRETKLRMASMESPQ

SEQ ID NO: 45149 - protein, 463 aa, Homo sapiens
ICEEPVAKKREELAHFSNSSSNSGKKELGTAGLYLHSKLEQIPEGSSKEKGQEDFSETRIDSCSQVCQRGEKQPGQTALAGKKEIEVTATQSTPSFLFEKPPRDGIARPEEGRPVVSGTGNDITTPPNKELPPSPEKKTKPIADAKAPEKRASPSKPASAPASRSGSKSTQTVAKTTTAAAVASTGPSSRSPSTLLPKKPTAIKTEGKPAEVKKMTAKSVPADLSRPKSTSTSSMKKTTTLSGTAPAAGVVPSRVKATPMPSRPSTTPFIDKKPTSAKPSSTTPRLSRLATNTSAPDLKNVRSKVGSTENIKHQPGGGRVQIVSKKVSYSHIQSKCGSKDNIKHVPGGGNVQIQNKKVDISKVSSKCGSKANIKHKPGGGDVKIESQKLNFKEKAQAKVGSLDNVGHLPAGGAVKIETYRLTFRANARARTDHGADIVSRPPHFPGGPNSGSRVLGPLSRAVH

SEQ ID NO: 45150 - protein, 80 aa, Homo sapiens
MMYGGMRGMKGLVYETSVLDPDEGIRFRGFSIPECQKLLPKAKGGEEPLPEGLFWLLVTGHIPTEEQVSWLSKEWAKRAA

SEQ ID NO: 45151 - protein, 685 aa, Homo sapiens
MEVVTFGDVAVHFSREEWQCLDPGQRALYREVMLENHSSVAGLGFLVFKPELISRLEQGEEPWVLDLQGAEGTEAPRTSKTDSTIRTENEQACEDMDILKSESYGTVVRISPQDFPQNPGFGDVSDSEVWLDSHLGSPGLKVTGFTFQNNCLNEETVVPKTFTKDAPQGCKELGSSGLDCQPLESQGESAEGMSQRCEECGKGIRATSDIALHWEINTQKISRCQECQKKLSDCLQGKHTNNCHGEKPYECAECGKVFRLCSQLNQHQRIHTGEKPFKCTECGKAFRLSSKLIQHQRIHTGEKPYRCEECGKAFGQSSSLIHHQRIHTGERPYGCRECGKAFSQQSQLVRHQRTHTGERPYPCKECGKAFSQSSTLAQHQRMHTGEKAQILKASDSPSLVAHQRIHAVEKPFKCDECGKAFRWISRLSQHQLIHTGEKPYKCNKCTKAFGCSSRLIRHQRTHTGEKPFKCDECGKGFVQGSHLIQHQRIHTGEKPYVCNDCGKAFSQSSSLIYHQRIHKGEKPYECLQCGKAFSMSTQLTIHQRVHTGERPYKCNECGKAFSQNSTLFQHQIIHAGVKPYECSECGKAFSRSSYLIEHQRIHTRAQWFYEYGNALEGSTFVSRKKVNTIKKLHQCEDCEKIFRWRSHLIIHQRIHTGEKPYKCNDCGKAFNRSSRLTQHQKIHMG

SEQ ID NO: 45152 - protein, 369 aa, Homo sapiens
MARSLCPGAWLRKPYYLQARFSYVRMKYLFFSWLVVFVGSWIIYVQYSTYTELCRGKDCKKIICDKYKTGVIDGPACNSLCVTETLYFGKCLSTKPNNQAKLGDQGNLSELVNLILTVADGDKDGQVSLGEAKSAWALLQLNEFLLMVILQDKEHTPKLMGFCGDLYVMESVEYTSLYGISLPWVIELFIPSGFRRSMDQLFTPSWPRKAKIAIGLLEFVEDVFHGPYGNFLMCDTSAKNLGYNDKYDLKMVDMRKIVPETNLKELIKDRHCESDLDCVYGTDCRTSCDQSTMKCTSEVIQPNLAKACQLLKDYLLRGAPSEIREELEKQLYSCIALKVTANQMEMEHSLILNNLKTLLWKKISYTNDS

SEQ ID NO: 45153 - protein, 425 aa, Homo sapiens
MMRNKDKSQEEDSSLHSNASSHSASEEASGSDSGSQSESEQGSDPGSGHGSESNSSSESSESQSESESESAGSKSQPVLPEAKEKPASKKERIADVKKMWEEYPDVYGVRRSNRSRQEPSRFNIKEEASSGSESGSPKRRGQRQLKKQTVPKPRVKKQPKTQRGKRKKQDSSDEDDDDDEAPKRQTRRRAAKNVSYKEDDDFETDSDDLIEMTGEGVDEQQDNSETIEKVLDSRLGKKGATGASTTVYAIEANGDPSGDFDTEKDEGEIQYLIKWKGWSYIHSTWESEESLQQQKVKGLKKLENFKKKEDEIKQWLGKVSPEDVEYFNCQQELASELNKQYQIVERVIAVKTSKSTLGQTDFPAHSRKPAPSNEPEYLCKWMGLPYSECSWEDEALIGKKFQNCIDSFHSRNNSKTIPTRECKVW

SEQ ID NO: 45154 - protein, 463 aa, Homo sapiens [sequence omitted]

SEQ ID NO: 45155 - protein, 1178 aa, Homo sapiens
MANGGGGGGGSSGGGGGGGGSSLRMSSNIHANHLSLDASSSSSSSSSSSSSSSSSSSSSSVHEPKMDALIIPVTMEVPCDSRGQRMWWAFLASSMVTFFGGLFIILLWRTLKYLWTVCCHCGGKTKEAQKINNGSSQADGTLKPVDEKEEAVAAEVGWMTSVKDWAGVMISAQTLTGRVLVVLVFALSIGALVIYFIDSSNPIESCQNFYKDFTLQIDMAFNVFFLLYFGLRFIAANDKLWFWLEVNSVVDFFTVPPVFVSVYLNRSWLGLRFLRALRLIQFSEILQFLNILKTSNSIKLVNLLSIFISTWLTAAGFIHLVENSGDPWENFQNNQALTYWECVYLLMVTMSTVGYGDVYAKTTLGRLFMVFFILGGLAMFARYVPEIAALILSRNKFGGTFNKHGGRKHIVVCGHITLESVSNFLKDFLHKDRDDVNVEIVFLHNISPNLELEALFKRHFTQVEFYQGSVLNPHDLARVKIESADACLILANKYCADPDAEDASNIMRVISIKNYHPKIRIITQMLQYHNKAHLLNIPSWNWKEGDDAICLAELKLGFIAQSCLAQGLSTMLANLFSMRSFIKIEEDTWQKYYLEGVSNEMYTEYLSSAFVGLSFPTVCELCFVKLKLLMIAIEYKSANRESRILINPGNHLKIQEGTLGFFIASDAKEVKRAFFYCKACHDDITDPKRIKKCGCKRLEDEQPSTLSPKKKQRNGGMRNSPNTSPKLMRHDPLLIPGNDQIDNMDSNVKKYDSTGMFHWCAPKEIEKVILTRSEAAMTVLSGHVVVCIFGDVSSALIGLRNLVMPLRASNFHYHELKHIVFVGSIEYLKREWETLHNFPKVSILPGTPLSRADLRAVNINLCDMCVILSANQNNIDDTSLQDKECILASLNIKSMQFDDSIGVLQANSQGFTPPGMDRSSPDNSPVHGMLRQPSITTGVNIPIITELVNDTNVQFLDQDDDDDPDTELYLTQPFACGTAFAVSVLDSLMSATYFNDNILTLIRTLVTGGATPELEALIAEENALRGGYSTPQTLANRDRCRVAQLALLDGPFADLGDGGCYGDLFCKALKTYNMLCFGIYRLRDAHLSTPSQCTKRYVITNPPYEFELVPTDLIFCLMQFDHNAGQSRASLSHSSHSSQSSSKKSSSVHSIPSTANRQNRPKSRESRDKQKYVQEERL

SEQ ID NO: 45156 - protein, 44 aa, Homo sapiens
  MOD_RES (1)..(1): Any amino acid
XIDDHQSSRLSSSLTVQQKIKSATIHAASKVFITFEKLLRRGGV

SEQ ID NO: 45157 - protein, 126 aa, Homo sapiens
MILGHCSLDLLGSSNPPTSASQAATGFHVRGRWRTEDCHLRTKAIETLRVAGRHQLPDRSFISFGISSLQMVSSQKLEKPIEMGSSEPLPIADGDRRRKKKRRGRATDSLPGKFEDMYKLTSELLG

SEQ ID NO: 45158 - protein, 1262 aa, Homo sapiens
MNRTTPDQELVPASEPVWERPWSVEEIRRSSQSWSLAADAGRVYDEEVEEPVLKAEAEKTEQEKTREQKEVDLIPKVQEAVNYGLQVLDSAFEQLDIKAGNSDSEEDDANGRVELILEPKDLYIDRPLPYLIGSKLFMEQEDVGLGELSSEEGSVGSDRGSIVDTEEEKEEEESDEDFAHHSDNEQNQHTTQMSDEEEDDDGCDLFADSEKEEEDIEDIEENTRPKRSRPTSFADELAARIKGDAMGRVDEEPTTLPSGEAKPRKTLKEKKERRTPSDDEEDNLFAPPKLTDEDFSPFGSGGGLFSGGKGLFDDEDEESDLFTEASQDRQAGASVKEESSSSKPGKKIPAGAVSVFLGDTDVFGAASVPSLKEPQKPEQPTPRKSPYGPPPTGLFDDDDGDDDDDFFSAPHSKPSKTRKVQSTADIFGDEEGDLFKEKAVASPEATVSQTDENKARAEKKVTLSYSKNLKPSSETKTQKGLFSDEEDSEDLFSSQSASNLKGASLLPGKLPTSVSLFDDEDEEDNLFGGTAAKKQTLSLQAQREEKAKASELSKKKASALLFSSDEEWNIPASQTHLASDSRSKGEPRDSGTLQSQEAKAVKKTSLFEEDKEDDLFAIAKDSQKKTQRVSLLFEDDVDSGGSLFGSPPTSVPPATKKKETVSEAPPLLFSDEEEKEAQLGVKSVDKKVESAKESLKFGRTDVAESEKEGLLTRSAQETVKHSDLFSSSSPWDKGTKPRTKTVLSLFDEEEDKMEDQNIIQAPQKEVGKGCDPDAHPKSTGVFQDEELLFSHKLQKDNDPDVDLFAGTKKTKLLEPSVGSLFGDDEDDDLFSSAKSQPLVQEKKRVVKKDHSVNSFKNQKHPESIQGSKEKGIWKPETPQANLAINPAALLPTAASQISEVKPVLPELAFPSSEHRRSHGLESVPVLPGSGEAGVSFDLPAQADTLHSANKSRVKMRGKRRPQTRAARRLAAQESSEAEDMSVPRGPIAQWADGAISPNGHRPQLRAASGEDSTEEALAAAAAPWEGGPVPGVDTSPFAKSLGHSRGEADLFDSGDIFSTGTGSQSVERTKPKAKIAENPANPPVGGKAKSPMFPALGEASSDDDLFQSAKPKPAKKTNPFPLLEDEDDLFTDQKVKKNETKSSSQQDVILTTQDIFEDDIFATEAIKPSQKTREKEKTLESNLFDDNIDIFADLTVKPKEKSKKKVEAKSIFDDDMDDIFSTGIQAKTTKPKSRSAQAAPEPRFEHKVSNIFDDPLNAFGGQ

SEQ ID NO: 45159 - protein, 52 aa, Homo sapiens
MAGLRNESEQEPLLGDTPGSREWDILETEEHYKSRWRSIRILYLTMFLSSVD

SEQ ID NO: 45160 - protein, 70 aa, Homo sapiens
MEVLREKVEEEEEAEREEAAEWAEWARMEKMMRPVEVRKEEITLKQETLRDLEKKLSEIQITVSAELPSS

SEQ ID NO: 45161 - protein, 195 aa, Homo sapiens
MARVPPTGQFRFRAPHQPAQPFKFTISESCDRIKEEFQFLQAQYHSLKLECEKLASEKTEMQRHYVMYYEMSYGLNIEMHKQAEIVKRLNAICAQVIPFLSQEHQQQVVQAVERAKQVTMAELNAIIGQQLQAQHLSHGHGLPVPLTPHPSGLQPPAIPPIGSSAGLLALSSALGGQSHLPIKDEKKHHDNDHQR

SEQ ID NO: 45162 - protein, 92 aa, Homo sapiens
MEWYRVLSARCQGPGHPLPGQRPAPVRGLVRPDQPRGGPPPGRRASHGADKPYTCPECGKGFSKTSHLTKHQRTHTGERPYKCLVCGKGFSD

SEQ ID NO: 45163 - protein, 50 aa, Homo sapiens
MFLHSVNLWNLAFYVFMVFLATLGLWDVFFGFEENKCSMSYMFEYPEYQR

SEQ ID NO: 45164 - protein, 974 aa, Homo sapiens
MAHAYKGHEHLRAARMAFAECIAPACVMSWLRFWGPWPLLTWQLLSLLVKEAQPLVWVKDPLQLTSNPLGPPEPWSSRSSHLPWESPHAPAPPAAPGDFDYLGPSASSQMSALPQEPTENLAPFLKELDSAGELPLGPEPFLAAHQDLNDKRTPEERLPEVVPLLNRDQNQALVQLPRLKWVQTTDLDRAAGHQADEILVPLDSKVSRPTKFVVSPKNLKKDLAERWSLPEIVGIPHQLSKPQRQKQTLPDDYLSMDTLYPGSLPPELRVNADEPPGPPEQVGLSQFHLEPKSQNPETLEDIQSSSLQEEAPAQLLQLPQEVEPSTQQEAPALPPESSMESLAQTPLNHEVTVQPPGEDQAHYNLPKFTVKPADVEVTMTSEPKNETESTQAQQEAPIQPPEEAEPSSTALRTTDPPPEHPEVTLPPSDKGQAQHSHLTEATVQPLDLELSITTEPTTEVKPSPTTEETSAQPPDPGLAITPEPTTEIGHSTALEKTRAPHPDQVQTLHRSLTEVTGPPTKLESSQDSLVQSETAPEEQKASTSTNICELCTCGDETLSCVGLSPKQRLRQVPVPEPDTYNGIFTTLNFQGNYISYLDGNVWKAYSWTEKLILSENYLTELPKDSFEGLLYLQYLDLSCNKIRYIERQTFESLPFLQYINLGCNLITKLSLGTFQAWHGMQFLHNLILNRNPLTTVEDPYLFELPALKYLDMGTTHITLTTLKNILTMTVELEKLILPSHMACCLCQFKNSIEAVCKTVKLHCNTACLTNSIHCPEEASVGNPEGAFMKMLQARKQHMSTQLTIESEAPSDSSGINLSGFGGDQLEIQLTEQLRSLIPNEDVRKFMSHVIRTLKMECSETHVQGSCAKLMLRTGLLMKLLSEQQEAKALNVEWDTDQQKTNYINENMEQNEQKEQKSSELMKEVPGDDYKNKLIFAISVTVILIILIIIFCLIEVNSHKRASEKYKDNPSISGA

SEQ ID NO: 45165 - protein, 492 aa, Homo sapiens
MGDWNLLGGILEEVHSHSTIVGKIWLTILFIFRMLVLRVAAEDVWDDEQSAFACNTRQPGCNNICYDDAFPISLIRFWVLQIIFVSSPSLVYMGHALYRLRAFEKDRQRKKSHLRAQMENPDLDLEEQQRIDRELRRLEEQKRIHKVPLKGCLLRTYVLHILTRSVLEVGFMIGQYILYGFQMHPLYKCTQPPCPNAVDCFVSRPTEKTIFMLFMHSIAAISLLLNILEIFHLGIRKIMRTLYKKSSSEGIEDETGPPFHLKKYSVAQQCMICSSLPERISPLQANNQQQVIRVNVPKSKTMWQIPQPRQLEVDPSNGKKDWSEKDQHSGQLHVHSPCPWAGSAGNQHLGQQSDHSSFGLQNTMSQSWLGTTTAPRNCPSFAVGTWEQSQDPEPSGEPLTDLHSHCRDSEGSMRESGVWIDRSRPGSRKASFLSRLLSEKRHLHSDSGSSGSRNSSCLDFPHWENSPSPLPSVTGHRTSMNMLLELSSIMKK

SEQ ID NO: 45166 - protein, 81 aa, Homo sapiens
MALGLQRARSTTELRKEKSRDAARSRRSQETEVLYQLAHTLPFARGVSAHLDKASIMRLTISYLRMHRLCAAAGAHWTQHL

SEQ ID NO: 45167 - protein, 92 aa, Homo sapiens
MFRQFYLWTCLASGIILGSLFEICLGQYDDDCKLARGGPPATIVAIDEESRNGTILVDNMLIKGTAGGPDPTIELSLKDNVDYWVLMDPVKQ

SEQ ID NO: 45168 - protein, 241 aa, Homo sapiens
MAGPFSRLLSARPGLRLLALAGAGSLAAGFLLRPEPVRAASERRRLYPPSAEYPDLRKHNNCMASHLTPAVYARLCDKTTPTGWTLDQCIQTGVDNPGHPFIKTVGMVAGDEETYEVFADLFDPVIQERHNGYDPRTMKHTTDLDASKIRSGYFDERYVLSSRVRTGRSIRGLSLPPACTRAERREVERVVVDALSGLKGDLAGRYYRLSEMTEAEQQQLIDDHFLFDKPVSPLLTAAGMA

SEQ ID NO: 45169 - protein, 238 aa, Homo sapiens
TFGRPAEWPGYLSHLCGRSAAMDLGPMRKSYRGDREAFEETHLTSLDPVKQFAAWFEEAVQCPDIGEANAMCLATCTRDGKPSARMLLLKGFGKDGFRFFTNFESRKGKELPLNRQVRVEGPVKKLPEEEAECYFHSRPKSSQIGAVVSHQSSVIPDREYLRKKNEELEQLYQDQEVPKPKSWGGYVLYPQVMEFWQGQTNRLHDRIVFRRGLPTGDSPLGPMTHRGEEDWLYERLAP

SEQ ID NO: 45170 - protein, 447 aa, Homo sapiens
MSPTISHKDSSRQRRPGNFSHSLDMKSGPLPPGGWDDSHLDSAGREGDREALLGDTGTGDFLKAPQSFRAELSSILLLLFLYVLQGIPLGLAGSIPLILQSKNVSYTDQAFFSFVFWPFSLKLLWAPLVDAVYVKNFGRRKSWLVPTQYILGLFMIYLSTQVDRLLGNTDDRTPDVIALTVAFFLFEFLAATQDIAVDGWALTMLSRENVGYASTCNSVGQTAGYFLGNVLFLALESADFCNKYLRFQPQPRGIVTLSDWFFSSRCCNRTEIGRRGSTQRTFSLIGSSNGSFADNTASDYQQIHCRSPAIKHILQSHALQVTVYSMYVSIMAFNAKVSDPLIGGTYMTLLNTVSNLGGNWPSTVALWLVDPLTVKECVGASNQNCRTPDAVELCKKLGGSCVTALDGYYVESIICVFIGFGWWFFLGPKFKKLQDEGSSSWKCKRNN

SEQ ID NO: 45171 - protein, 78 aa, Homo sapiens
  MOD_RES (1)..(1): Any amino acid
XIEKKRTIIPTLVEAIKEQDGREVDWEYFYGLLFTSENLKLVHIVCHKKTTHKLNCDPSRIYKPQTRLKRKQPVRKRQ

SEQ ID NO: 45172 - protein, 61 aa, Homo sapiens
MDLDLLDLNPRIIAAIKKAKLKSVKEVLHFSGPDLKRLTNLSSPEVWHLLRTASLHLRGSS

SEQ ID NO: 45173 - protein, 52 aa, Homo sapiens
MAPSRLQLGLRAAYSGISSVAGFSIFLVWTVVYRQPGTAAMGGLGCWHCGSW

SEQ ID NO: 45174 - protein, 185 aa, Homo sapiens
MSSPLASLSKTRKVPLPSEPMNPGRRGIRIYGDVPASHDSELMAFMTRKLWDLEQQVKAQTDEILSKDQKIAALEDLVQTLRPHPAEATLQRQEELETMCVQLQRQVREMERFLSDYGLQWVGEPMDQEDSESKTVSEHGERDWMTAKKFWKPGDSLAPPEVDFDRLLASLQDLSELVVEGDTQV

SEQ ID NO: 45175 - protein, 282 aa, Homo sapiens
MPPSKPHPPVVGKVTHHSIELYWDLEKKAKRQGPQEQWFRFSIEEEDPKMHTYGIIYTGYATKHVVEGLEPRTLYRFRLKVTSPSGECEYSPLVSVSTTSSIWLGGEPISSEHLHRAVSVNDEDLLVRILQGGRVKVDVPNKFGFTALMVAAQKGYTSLMLACYAGHLDVVKYLRRHGASWQARDLGGCTALHWAADGGHCSVIEWMIKDGCEVDVVDTGSGWTPLMRVSAVSGNQRVASLLIDAGANVNVKDRNGKTPLMSVVSLLEERKKKQRPKKSCVC

SEQ ID NO: 45176 - protein, 145 aa, Homo sapiens
MLVLERPLPAQDLFDYITEKGPLGEGPSRCFFGQVVAAIQHCHSRGVVHRDIKDENILIDLRRGCAKLIDFGSGALLHDEPYTDFDGTRVYSPPEWISRHQYHALPATVWSLGILLYDMVCGDIPFERDQEILEAELHFPAHVSP

SEQ ID NO: 45177 - protein, 36 aa, Homo sapiens
  MOD_RES (1)..(1): Any amino acid
XNDDRPEGSVEDEEKKEYLMYGNPPVKYNPAQLANR

SEQ ID NO: 45178 - protein, 170 aa, Homo sapiens
MSQDGASQFQEVIRQELELSVKKELEKILTTASSHEFEHTKKDLDGFRKLFHRFLQEKGPSVDWGKIQRPPEDSIQPYEKIKARGLPDNISSVLNKLVVVKLNGGLGTSMGCKGPKSLIGVRNENTFLDLTVQQIEHLNKTYNTDVPLVLMNSFNTDEDTKKILQKYNHC

SEQ ID NO: 45179 - protein, 165 aa, Homo sapiens
MEMKKKINLELRNRSPEEVTELVLDNCLCVNGEIEGLNDTFKELEFLSMANVELSSLARLPSLNKLRKLELSDNIISGGLEVLAEKCPNLTYLNLSGNKIKDLSTVEALMAMKMMKRKRKMKLVHRKDMRKRRRKRKRRMRMRMKMKMKQVQSWEREKRKWASHT

SEQ ID NO: 45180 - protein, 604 aa, Homo sapiens
MRGAGPSPRQSPRTLRPDPGPAMSFFRRKVKGKEQEKTSDVKSIKASISVHSPQKSTKNHALLEAAGPSHVAINAISANMDSFSSSRTATLKKQPSHMEAAHFGDLGRSCLDYQTQETKSSLSKTLEQVLHDTIVLPYFIQFMELRRMEHLVKFWLEAESFHSTTWSRIRAHSLNTVKQSSLAEPVSPSKKHETTASFLTDSLDKRLEDSGSAQLFMTHSEGIDLNNRTNSTQNHLLLSQECDSAHSLRLEMARAGTHQVSMETQESSSTLTVASRNSPASPLKELSGKLMKSIEQDAVNTFTKYISPDAAKPIPITEAMRNDIIARICGEDGQVDPNCFVLAQSIVFSAMEQEHFSEFLRSHHFCKYQIEVLTSGTVYLADILFCESALFYFSEYMEKEDAVNILQFWLAADNFQSQLAAKKGQYDGQEAQNDAMILYDKYFSLQATHPLGFDDVVRLEIESNICREGGPLPNCFTTPLRQAWTTMEKSSVKKASIKILKNFDEAIIVDAASLDPESLYQRTYAGKMTFGRVSDLGQFIRESEPEPDVRKSKGSMFSQAMKKWVQGNTDEAQEELAWKIAKMIVSDIMQQAQYDQPLEKSTKL

SEQ ID NO: 45181 - protein, 80 aa, Homo sapiens
TALTAKGKESGSSGPNKFILISCGGAPTQPPGLRPQTQTSYDAKRTEVTLETLGPKPAARDVNLPRPPGALCEQKRETCG

SEQ ID NO: 45182 - protein, 49 aa, Homo sapiens
MGEPGFFVTGDRAGGRSWCLRRVGMSAGWLLLEDGCEGCYELDWSNRKV

SEQ ID NO: 45183 - protein, 183 aa, Homo sapiens
MMEQRSRDPGMVRSPQNQYPAELMRRFELYFQGPSSNKPRVIREVRADSVGKLVTVRGIVTRVSEVKPKMVVATYTCDQCGAETYQPIQSPTFMPLIMCPSQECQTNRSGGRLYLQTRGSRFIKFQEMKMQEHSDQVPVGNIPRSITVLVEGENTRIAQPGDHVSVTGIFLPILRTGFRQVVQ

SEQ ID NO: 45184 - protein, 179 aa, Homo sapiens; identical to SEQ ID NO: 39464

SEQ ID NO: 45185 - protein, 260 aa, Homo sapiens
SRQDFFPPVVGHSNSSPRHSEAATAQREEWKMFIGGLSWDTTKKDLKDYFSKFGEVVDCTLKLDPITGRSRGFGFVLFKESESVDKVMDQKEHKLNGKVIDPKRAKAMKTKEPVKKIFVGGLSPDTPEEKIREYFGGFGEVESIELPMDNKTNKRRGFCFITFKEEEPVKKIMEKKYHNVGLSKCEIKVAMSKEQYQQQQQWGSRGGFAGRARGRGGGPSQNWNQGYSNYWNQGYGNYGYNSQGYGGYGGYDYTGYNNYY

SEQ ID NO: 45186 - protein, 186 aa, Homo sapiens
  MOD_RES (1)..(1): Any amino acid
XTNTTQDEQRRWPGCDQQDEMLNLGFTIGSFVLSATTLPLGILMDRFGPRPVRLVGSACFTASCTLMALASRDVEALSPLIFLALSLNGFGGICLTFTSLTGRGCYQIHQTTLLQDPKAHQCHQCLHPDQPAACGFWHHLSHQQLTPPVCDLCPAHHCSRFLPLSLWESLCCSVPIQPLWDADRPA

SEQ ID NO: 45187 - protein, 1122 aa, Homo sapiens
MCDGALLPPLVLPVLLLLVWGLDPGTAVGDAAADVEVVLPWRVRPDDVHLPPLPAAPGPRRRRRPRTPPAAPRARPGERALLLHLPAFGRDLYLQLRRDLRFLSRGFEVEEAGAARRRGRPAELCFYSGRVLGHPGSLVSLSACGAAGGLVGLIQLGQEQVLIQPLNNSQGPFSGREHLIRRKWSLTPSPSAEAQRPEQLCKVLTEKKKPTWGRPSRDWRERRNAIRLTSEHTVETLVVADADMVQYHGAEAAQRFILTVMNMVYNMFQHQSLGIKINIQVTKLVLLRQRPAKLSIGHHGERSLESFCHWQNEEYGGARYLGNNQVPGGKDDPPLVDAAVFVTRTDFCVHKDEPCDTVGIAYLGGVCSAKRKCVLAEDNGLNLAFTIAHELGHNLGMNHDDDHSSCAGRSHIMSGEWVKGRNPSDLSWSSCSRDDLENFLKSKVSTCLLVTDPRSQHTVRLPHKLPGMHYSANEQCQILFGMNATFCRNMEHLMCAGLWCLVEGDTSCKTKLDPPLDGTECGADKWCRAGECVSKTPIPEHVDGDWSPWGAWSMCSRTCGTGARFRQRKCDNPPPGPGGTHCPGASVEHAVCENLPCPKGLPSFRDQQCQAHDRLSPKKKGLLTAVVVDDKPCELYCSPLGKESPLLVADRVLDGTPCGPYETDLCVHGKCQKIGCDGIIGSAAKEDRCGVCSGDGKTCHLVKGDFSHARGTGYIEAAVIPAGARRIRVVEDKPAHSFLALKDSGKGSINSDWKIELPGEFQIAGTTVRYVRRGLWEKISAKGPTKLPLHLMVLLFHDQDYGIHYEYTVPVNRTAENQSEPEKPQDSLFIWTHSGWEGCSVQCGGGERRTIVSCTRIVNKTTTLVNDSDCPQASRPEPQVRRCNLHPCQSRWVAGPWSPCSATCEKGFQHREVTCVYQLQNGTHVATRPLYCPGPRPAAVQSCEGQDCLSIWEASEWSQCSASCGKGVWKRTVACTNSQGKCDASTRPRAEEACEDYSGCYEWKTGDWSTCSSTCGKGLQSRVVQCMHKVTGRHGSECPALSKPAPYRQCYQEVCNDRINANTITSPRLAALTYKCTRDQWTVYCRVIREKNLCQDMRWYQRCCQTCRDFYANKMRQPPPNS

SEQ ID NO: 45188 - protein, 1258 aa, Homo sapiens
MDGPTRGHGLRKKRRSRSQRDRERRSRGGLGAGAAGGGGAGRTRALSLASSSGSDKEDNGKPPSSAPSRPRPPRRKRRESTSAEEDIIDGFAMTSFVTFEALEKDVALKPQERVEKRQTPLTKKKREALTNGLSFHSKKSRLSHPHHYSSDRENDRNLCQHLGKRKKMPKALRQLKPGQNSCRDSDSESASGESKGFHRSSSRERLSDSSAPSSLGTGYFCDSDSDQEEKASDASSEKLFNTVIVNKDPELGVGTLPEHDSQDAGPIVPKISGLERSQEKSQDCCKEPIFEPVVLKDPCPQVAQPIPQPQTEPQLRAPSPDPDLVQRTEAPPQPPPLSTQPPQGPPEAQLQPAPQPQVQRPPRPQSPTQLLHQNLPPVQAHPSAQSLSQPLSAYNSSSLSLNSLSSRSSTPAKTQPAPPHISHHPSASPFPLSLPNHSPLHSFTPTLQPPAHSHHPNMFAPPTALPPPPPLTSGSLQVAGHPAGSTYSEQDILRQELNTRFLASQSADRGASLGPPPYLRTEFHQHQHQHQHTHQHTHQHTFTPFPHAIPPTAIMPTPAPPMFDKYPTKVDPFYRHSLFHSYPPAVSGIPPMIPPTGPFGSLQGAFQPKTSNPIDVAARPGTVPHTLLQKDPRLTDPFRPMLRKPGKWCAMHVHIAWQIYHHQQKVKKQMQSDPHKLDFGLKPEFLSRPPGPSLFGAIHHPHDLARPSTLFSAAGAAHPTGTPFGPPPHHSNFLNPAAHLEPFNRPSTFTGLAAVGGNAFGGLGNPSVTPNSMFGHKDGPSVQNFSNPHEPWNRLHRTPPSFPTPPPWLKPGELERSASAAAHDRDRDVDKRDSSVSKDDKERESVEKRHSSHPSPAPVLPVNALGHTRSSTEQIRAHLNTEAREKDKPKERERDHSESRKDLAADEHKAKEGHLPEKDGHGHEGRAAGEEAKQLARVPSPYVRTPVVESARPNSTSSREAEPRKGEPAYENPKKSSEVKVKEERKEDHDLPPEAPQTHRASEPPPPNSSSSVHPGPLASMPMTVGVTGIHPMNSISSLDRTRMMTPFMGISPLPGGERFPYPSFHWDPIRDPLRDPYRELDIHRRDPLGRDFLLRNDPLHRLSTPRLYEADRSFRDREPHDYSHHHHHHHHPLSVDPRREHERGGHLDERERLHMLREDYEHTRLHSVHPASLDGHLPHPSLITPGLPSMHYPRISPTAGNQNGLLNKTPPTAALSAPPPLISTLGGRPVSPRRTTPLSAEIRERPPSHTLKDIEAR

SEQ ID NO: 45189 - protein, 100 aa, Homo sapiens
MCAQYCISFADVEKAHINIRDSIHLTPVLTSSILNQLTGRNLFFKCELFQKTGSFKIRGALNAVRSLVPDALERKPKAVVTHSSGNHGQALTYAAKLEGI

SEQ ID NO: 45190 - protein, 193 aa, Homo sapiens
MSLWLGAPVPDIPPDSAVELWKPGAQDASSQAQGGSSCILREEARMPHSAGGTAGVGLEAAEPTALLTRAEPPSEPTEIRPQKRKKGPAPKMLGNELCSVCGDKASGFHYNVLSCEGCKGFFRRSVIKGAHYICHSGGHCPMDTYMRRKCQECRLRKCRQAGMREECVLSEEQIRLKKLKRQEEEQAHATSLP

SEQ ID NO: 45191 - protein, 539 aa, Homo sapiens
MYFPSWLSQLYRGLSRPIRRTTQPIWGSLYRSLLQSSQRRIPEFSSFVVRTNTCGELRSSHLGQEVTLCGWIQYRRQNTFLVLRDFDGLVQVIIPQDESAASVKKILCEAPVESVVQVSGTVISRPAGQENPKMPTGEIEIKVKTAELLNACKKLPFEIKNFVKKTEALRLQYRYLDLRSFQMQYNLRLRSQMVMKMREYLCNLHGFVDIETPTLFKRTPGGAKEFLVPSREPGKFYSLPQSPQQFKQLLMVGGLDRYFQVARCYRDEGSRPDRQPEFTQIDIEMSFVDQTGIQSLIEGLLQYSWPNDKDPVVVPFPTMTFAEVLATYGTDKPDTRFGMKIIDISDVFRNTEIGFLQDALSKPHGTVKAICIPEGAKYLKRKDIESIRNFAADHFNQCSLLGKLRLECADLLETRGVVLRDPTLFSFLWVVDFPLFLPKEENPRELESAHHPFTAPHPSDIHLLYTEPKKARSQHYDLVLNGNEIGGGSIRIHNAELQRYILATLLKEDVKMLSHLLQALDYGAPPHGGIALGKQLFLL

SEQ ID NO: 45192 - protein, 215 aa, Homo sapiens
MPARLRAGGYSLTAAAREPGRRLSLRLRAASADPGAPARVALRALAQIQALLAPPKTDEAEKRSRKPEKEPRRSGRATNHDSCDSCKEGGDLLCCDHCPAAFHLQCCNPPLSEEMLPPGEWMCHRCTVRRKKREQKKELGHVNGLVDKSGKRTTSPSSDTDLLDRSASKTELKAIAHARILERRASRPGTPTSSASTETPTSEQNDVDEDIIDVD

SEQ ID NO: 45193 - protein, 108 aa, Homo sapiens
MDLSHKAVKRQASFCNAITFSNRPVLIYEQVRLKITKKQCCWSGALRLGFTSKDPSRIHPDSLPKYACPDLVSQSGFWAKALPEEFANEGNIIAFWVDKKGRVFHRIN

SEQ ID NO: 45194 - protein, 317 aa, Homo sapiens
MEVLRPQLIRIDGRNYRKNPVQEQTYQHEEDEEDFYQGSMECADEPCDAYEVEQTPQGFRSTLRAPSLLYKHIVGKRGDTRKKIEMETKTSISIPKPGQDGEIVITGQHRNGVISARTRIDVLLDTFRRKQPFTHFLAFFLNEVEVQEGFLRFQEEVLAKCSMDHGVDSSIFQNPKKLHLTIGMLVLLSEEEIQQTCEMLQQCKEEFIKLQELVDRVLERFQASGLIVKEWNSVKLHATVMNTLFRKDPNAEGRYNLYTAEGKYIFKERESFDGRNILKLFENFYFGSLKLNSIHISQRFTVDSFGNYASCGQIDFS

SEQ ID NO: 45195 - protein, 43 aa, Homo sapiens
MSLLKHQSLRPDEDSSHDLMLLRLSEPAKITDVVKVLGLPTQE

SEQ ID NO: 45196 - protein, 303 aa, Homo sapiens
  MOD_RES (1)..(1): Any amino acid
XIFGSFKTGLYLPTSDIDLVVFGKWENLPLWTLEEALRKHKVADEDSVKVLDKATVPIIKLTDSFTEVKVDISFNVQNGVRAADLIKDFTKKYPVLPYLVLVLKQFLLQRDLNEVFTGGIGSYSLFLMAVSFLQLHPREDACIPNTNYGVLLIEFFELYGRHFNYLKTGIRIKDGGSYVAKDEVQKNMLDGYRPSMLYIEDPLQPGNDVGRSSYGAMQVKQAFDYAYVVLSHAVSPIAKYYPNNETESILGRIIRVTDEVATYRDWISKQWGLKNRPEPSCNGKIFSLVQCRPLLPHSPALVM

SEQ ID NO: 45197 - protein, 68 aa, Homo sapiens
MATRVRTASIWTQSGKLMILWIGIRKIKTSWEVRQKALNALHLENYVFLVQSIFQDKNLINVARMERV

SEQ ID NO: 45198 - protein, 78 aa, Homo sapiens
MALSEPILPSFSTFASPCRERGLQEVRSPTTATGTAAAGSLRAQTSSRATTESTRATGHSSAICAIVPSRAPITWRCT

SEQ ID NO: 45199 - protein, 2963 aa, Homo sapiens
MDPRNTAMLGLGSDSEGFSRKSPSAISTGTLVSKREVELEKNTKEEEDLRKRNRERNIEAGKDDGLTDAQQQFSVKETNFSEGNLKLKIGLQAKRTKKPPKNLENYVCRPAIKTTIKHPRKALKSGKMTDEKNEHCPSKRDPSKLYKKADDVAAIECQSEEVIRLHSQGENNPLSKKLSPVHSEMADYINATPSTLLGSRDPDLKDRALLNGGTSVTEKLAQLIATCPPSKSSKTKPKKLGTGTTAGLVSKDLIRKAGVGSVAGIIHKDLIKKPTISTAVGLVTKDPGKKPVFNAAVGLVNKDSVKKLGTGTTAVFINKNLGKKPGTITTVGLLSKDSGKKLGIGIVPGLVHKESGKKLGLGTVVGLVNKDLGKKLGSTVGLVAKDCAKKIVASSAMGLVNKDIGKKLMSCPLAGLISKDAINLKAEALLPTQEPLKASCSTNINNQESQELSESLKDSATSKTFEKNVVRQNKESILEKFSVRKEIINLEKEMFNEGTCIQQDSFSSSEKGSYETSKHEKQPPVYCTSPDFKMGGASDVSTAKSPFSAVGESNLPSPSPTVSVNPLTRSPPETSSQLAPNPLLLSSTTELIEEISESVGKNQFTSESTHLNVGHRSVGHSISIECKGIDKEVNDSKTTHIDIPRISSSLGKKPSLTSESSIHTITPSVVNFTSLFSNKPFLKLGAVSASDKHCQVAESLSTSLQSKPLKKRKGRKPRWTKVVARSTCRSPKGLELERSELFKNVSCSSLSNSNSEPAKFMKNIGPPSFVDHDFLKRRLPKLSKSTAPSLALLADSEKPSHKSFATHKLSSSMCVSSDLLSDIYKPKRGRPKSKEMPQLEGPPKRTLKIPASKVFSLQSKEEQEPPILQPEIEIPSFKQGLSVSPFPKKRGRPKRQMRSPVKMKPPVLSVAPFVATESPSKLESESDNHRSSSDFFESEDQLQDPDDLDDSHRPSVCSMSDLEMEPDKKITKRNNGQLMKTIIRKINKMKTLKRKKLLNQILSSSVESSNKGKVQSKLHNTVSSLAATFGSKLGQQINVSKKGTIYIGKRRGRKPKTVLNGILSGSPTSLAVLEQTAQQAAGSALGQILPPLLPSSASSSEILPSPICSQSSGTSGGQSPVSSDAGFVEPSSVPYLHLHSRQGSMIQTLAMKKASKGRRRLSPPTLLPNSPSHLSELTSLKEATPSPISESHSDETIPSDSGIGTDNNSTSDRAEKFCGQKKRRHSFEHVSLIPPETSTVLSSLKEKHKHKCKRRNHDYLSYDKMKRQKRKRKKKYPQLRNRQDPDFIAELEELISRLSEIRITHRSHHFIPRDLLPTIFRINFNSFYTHPSFPLDPLHYIRKPDLKKKRGRPPKMREAMAEMPFMHSLSFPLSSTGFYPSYGMPYSPSPLTAAPIGLGYYGRYPPTLYPPPPSPSFTTPLPPPSYMHAGHLLLNPAKYHKKKHKLLRQEAFLTTSRTPLLSMSTYPSVPPEMAYGWMVEHKHRHRHKHREHRSSEQPQVSMDTGSSRSVLESLKRYRFGKDAVGERYKHKEKHRCHMSCPHLSPSKSLINREEQWVHREPSESSPLALGLQTPLQIDCSESSPSLSLGGFTPNSEPASSDEHTNLFTSAIGSCRVSNPNSSGRKKLTDSPGLFSAQDTSLNRLHRKESLPSNERAVQTLAGSQPTSDKPSQRPSESTNCSPTRKRSSSESTSSTVNGVPSRSPRLVASGDDSVDSLLQRMVQNEDQEPMEKSIDAVIATASAPPSSSPGRSHSKDRTLGKPDSLLVPAVTSDSCNNSISLLSEKLTSSCSPHHIKRSVVEAMQRQARKMCNYDKILATKKNLDHVNKILKAKKLQRQARTGNNFVKRRPGRPRKCPLQAVVSMQAFQAAQFVNPELNRDEEGAALHLSPDTVTDVIEAVVQSVNLNPEHKKGLKRKGWLLEEQTRKKQKPLPEEEEQENNKSFNEAPVEIPSPSETPAKPSEPESTLQPVLSLIPREKKPPRPPKKKYQKAGLYSDVYKTTDPKSRLIQLKKEKLEYTPGEHEYGLFPAPIHVGKYLRQKRIDFQLPYDILWQWKHNQLYKKPDVPLYKKIRSNVYVDVKPLSGYEATTCNCKKPDDDTRKGCVDDCLNRMIFAECSPNTCPCGEQCCNQRIQRHEWVQCLERFRAEEKGWGIRTKEPLKAGQFIIEYLGEVVSEQEFRNRMIEQYHNHSDHYCLNLDSGMVIDSYRMGNEARFINHSCDPNCEMQKWSVNGVYRIGLYALKDMPAGTELTYDYNFHSFNVEKQQLCKCGFEKCRGIIGGKSQRVNGLTSSKNSQPMATHKKSGRSKEKRKSKHKLKKRRGHLSEEPSENINTPTRLTPQLQMKPMSNRERNFVLKHHVFLVRNWEKIRQKQEEVKHTSDNIHSASLYTRWNGICRDDGNIKSDVFMTQFSALQTARSVRTRRLAAAEENIEVARAARLAQIFKEICDGIISYKDSSRQALAAPLLNLPPKKKNADYYEKISDPLDLITIEKQILTGYYKTVEAFDADMLKVFRNAEYYGRKSPVGRDVCRLRKAYYNARHEASAQIDEIVGETASEADSSETSVSEKENGHEKDDDVIRCICGLYKDEGLMIQCDKCMVWQHCDCMGVNSDVEHYLCEQCDPRPVDREVPMIPRPHYAQPGCVYFICLLRDDLLLRQGDCVYLMRDSRRTPDGHPVRQSYRLLSHINRDKLDIFRIEKLWKNEKEERFAFGHHYFRPHETHHSPSRRFYHNELFRVPLYEIIPLEAVVGTCCVLDLYTYCKGRPKGVKEQDVYICDYRLDKSAHLFYKIHRNRYPVCTKPYAFDHFPKKLTPKKDFSPHYVPDNYKRNGGRSSWKSERSKPPLKDLGQEDDALPLIEEVLASQEQAANEIPSLEEPEREGATANVSEGEKKTEESSQEPQSTCTPEERRHNQRERLNQILLNLLEKIPGKNAIDVTYLLEEGSGRKLRRRTLFIPENSFRK

SEQ ID NO: 45200 - protein, 110 aa, Homo sapiens
MATELEYESVLCVKPDVSVYRIPPRASNRGYRASDWKLDQPDWTGRLRITSKGKTAYIKLEDKVSGELFAQAPVEQYPGIAVETVTDSSRYFVIRIQDGTEHYKQERRCF

SEQ ID NO: 45201 - protein, 62 aa, Homo sapiens
MTMETVESQHDGSITASLTESKSAHVQTQTGQNSIPALAQLPLVTCQLTRSELLLLLCHREW

SEQ ID NO: 45202 - protein, 75 aa, Homo sapiens
MEFYESAYFIVLIPSIVITVIFLFFWLFMKETLYDEVLAKQKREQKLIPTKTDKKKAEKKKNKKKEIQNGNLHES

SEQ ID NO: 45203 - protein, 84 aa, Homo sapiens
ERFNKLVVRMTKSLAELQRALAGEVGMSNELDDVARSLFIGHIPNIWRRLAPDTLKSLGNWMVYFLRRFSQYMLWLLLDGSWKG

SEQ ID NO: 45204 - protein, 137 aa, Homo sapiens
MAELQEVQITEEKPLLPGQTPEAAKTHSVETPYGSVTFTVYGTPKPKRPAILTYHDVGLNSTVSVRGHAGNHSELCAGSCGCPWNGRGSPCVPFGISVPISGPACRHDPLRPAVPKFLYNNWSWCWSWSLHPGEICS

SEQ ID NO: 45205 - protein, 190 aa, Homo sapiens
  MOD_RES (1)..(1): Any amino acid
XEWSKMADHVQSLAQLENLCKQLYETTDTTTRLQAEKALVEFTNSPDCLSKCQLLLERGSSSYSQLLAATCLTKLVSRTNNPLPLEQRIDIRNYVLNYLATRPKLATFVTQALIQLYARITKLGWFDCQKDDYVFRNAITDVTRFLQDSVEYCIIGVTILSQLTNEINQVSATAFLIEADTTHPLTKHRK

SEQ ID NO: 45206 - protein, 87 aa, Homo sapiens
MPGVIPSESNGLSRGSPSKKNRLSLKFFQKKETKRALDFTDSQENEEKASEYRASEIDQVVPAAQSSPINCEKRENLLPFVGLNNLG

SEQ ID NO: 45207 - protein, 40 aa, Homo sapiens
MVTICPCSFWIQWPLRMWLSASPRRSGLCWILPRRISTGM

SEQ ID NO: 45208 - protein, 251 aa, Homo sapiens; identical to SEQ ID NO: 43433
  MOD_RES (1)..(1): Any amino acid

SEQ ID NO: 45209 - protein, 603 aa, Homo sapiens
MHRGLIHPQSRAVGGDAMTPIVTVLICLGTIPKPTLWAEPDSVITQGSPVTLSCQGSLEAQEYRLYREKKSASWITRIRPELVKNGQFHIPSITWEHTGRYGCQYYSRARWSELSDPLVLVMTGAYPKPTLSAQPSPVVTSGGRVTLQCESQVAFGGFILCKEGEEEHPQCLNSQPHARGSSRAIFSVGPVSPNRRWSHRCYGYDLNSPYVWSSPSDLLELLVPGVSKKPSLSVQPGPVVAPGESLTLQCVSDVGYDRFVLYKEGERDLRQLPGRQPQAGLSQANFTLGPVSRSYGGQYRCYGAHNLSSECSAPSDPLDILITGQIRGTPFISVQPGPTVASGENVTLLCQSWRQFHTFLLTKAGAADAPLRLRSIHEYPKYQAEFPMSPVTSAHAGTYRCYGSLNSDPYLLSHPSEPLELVVSGPSMGSSPPPTGPISTPAGPEDQPLTPTGSDPQSGLGRHLGVVIGILVAVVLLLLLLLLLFLILRHRRQGKHWTSTQRKADFQHPAGAVGPEPTDRGLQWRSSPAADAQEENLYAAVKDTQPEDGVEMDTRAAASEAPQDVTYAQLHSLTLRRKATEPPPSQEREPPAEPSIYATLAIH

SEQ ID NO: 45210 - protein, 23 aa, Homo sapiens
  MOD_RES (1)..(1): Any amino acid
XFPVGLGQSSSFRILRGQAERVT

SEQ ID NO: 45211 - protein, 470 aa, Homo sapiens
MQLRNPELHLGCALALRFLALVSWDIPGARALDNGLARTPTMGWLHWERFMCNLDCQEEPDSCISWSFALVAQAGVQCHDLGSPQPPPPRFKQFSCLILASSWNYSEKLFMEMAELMVSEGWKDAGYEYLCIDDCWMAPQRDSEGRLQADPQRFPHGIRQLANYVHSKGLKLGIYADVGNKTCAGFPGSFGYYDIDAQTFADWGVDLLKFDGCYCDSLENLADGYKHMSLALNRTGRSIVYSCEWPLYMWPFQKPNYTEIRQYCNHWRNFADIDDSWKSIKSILDWTSFNQERIVDVAGPGGWNDPDMLVIGNFGLSWNQQVTQMALWAIMAAPLFMSNDLRHISPQAKALLQDKDVIAINQDPLGKQGYQLRQGDNFEVWERPLSGLAWAVAMINRQEIGGPRSYTIAVASLGKGVACNPACFITQLLPVKRKLGFYEWTSRLRSHINPTGTVLLQLENTMQMSLKDLL

SEQ ID NO: 45212 - protein, 297 aa, Homo sapiens
  MOD_RES (1)..(1): Any amino acid
XGMKLPWLYVGMCFSSFCWHIEDHWSYSINYLHWGEPKTWYGVPGYAAEQLENVMKKLAPELFVSQPDLLHQLVTIMNPNTLMTHEVPVYRTNQCAGEFVITFPRAYHSGFNQGFNFAEAVNFCTVDWLPLGRQCVEHYRLLHRYCVFSHDEMICKMASKADVLDVVVASTVQKDMAIMIEDEKALRETVRKLGVIDSERMDFELLPDDERQCVKCKTTCFMSAISCSCKPGLLVCLHHVKELCSCPPYKYKLRYRYTLDDLYPMMNALKLRAESYNEWALNVNEALEAKINKKKSM

SEQ ID NO: 45213 - protein, 245 aa, Homo sapiens
MLQACKMEGFPLVPPPSEDLVPYDTDLYQRQTHEYYPYLSSDGESHSDHYWDFHPHHVHSEFESFAENNFTELQSVQPPQLQQLYRHMELEQMHVLDTPMVPPHPSLGHQVSYLPRMCLQYPSLSPAQPSSDEEEGERQSPPLEVSDGEADGLEPGPGLLPGETGGAPGPPPWPRPWPCLCPAPTQPGQLTQQPRHRVACVCVCMFASVCVLWGCLWLSLCVCICCVVHTGISMKCARCVCLSVP

SEQ ID NO: 45214 - protein, 140 aa, Homo sapiens
MSIPLLLQDKVALVERYVAGFPDLQRRLLVLMDSWCQPGFDIKDVARRYPEVTSLSLEKLSPKALSRQVLRLQERYGVAPALCPNAAIQQRLAALRHLCHKRFVEVREQEGVLGAASRGLSHRVWPGILTAHCRVHRHIK

SEQ ID NO: 45215 - protein, 624 aa, Homo sapiens
  MOD_RES (1)..(1): Any amino acid
XMQLLQVLSDVLAEIDPKQLVDIREEMPEQTAKRMLSLLGILKYKPSGNATDMSTFRQGLVIGSKPVIYPVLHWLLQRTNELKKRAYLARFLIKLEVPSEFLQDETVADTNKQYEELMEAFKTLHKEYEQLKISGFSTAEIRKDISAMEEEKDQLIKRVEHLKKRVETAQNHQWMLKIARQLRVEKEREEYLAQQKQEQKNQLFHAVQRLQRVQNQLKSMRQAAADAKPESLMKRLEEEIKFNLYMVTEKFPKELENKKKELHFLQKVVSEPAMGHSDLLELESKINEINTEINQLIEKKMMRNEPIEGKLSLYRQQASIISRKKEAKAEELQEAKEKLASLEREASVKRNQTREFDGTEVLKGDEFKRYVNKLRSKSTVFKKKHQIIAELKAEFGLLQRTEELLKQRHENIQQQLQTMEEKKGISGYSYTQEELERVSALKSEVDEMKGRTLDDMSEMVKKLYSLVSEKKSALASVIKELRQLRQKYQELTQECDEKKSQYDSCAAGLESNRSKLEQEVRRLREECLQEESRYHYTNCMIKNLEVQLRRATDEMKAYISSDQQEKRKAIREQYTKNTAEQENLGKRRNLTLLPRLECSGTILAHSAFQYRWDFTMLARLVSNS

SEQ ID NO: 45216 - protein, 598 aa, Homo sapiens
PAEEGGITTACCHRSWEQAERALDTMNFDVIKGKPIRIMWSQRDPSLRKSGVGNVFIKNLDKSIDNKALYDTFSAFGNILSCKVVCDENGSKGYAFVHFETQEAADKAIEKMNGMLLNDRKVFVGRFKSRKEREAELGAKAKEFTNVYIKNFGEEVDDESLKELFSQFGKTLSVKVMRDPNGKSKGFGFVSYEKHEDANKAVEEMNGKEISGKIIFVGRAQKKVERQAELKRKFEQLKQERISRYQGVNLYIKNLDDTIDDEKLRKEFSPFGSITSAKVMLEDGRSKGFGFVCFSSPEEATKAVTEMNGRIVGSKPLYVALAQRKEERKAHLTNQYMQRVAGMRALPANAILNQFQPAAGGYFVPAVPQAQGRPPYYTPNQLAQMRPNPRWQQGGRPQGFQGMPSAIRQSGPRPTLRHLAPTGSECPDRLAMDFGGAGAAQQGLTDSCQSGGVPTAVQNLAPRAAVAAAAPRAVAPYKYASSVRSPHPAIQPLQAPQPAVHVQGQEPLTASMLAAAPPQEQKQMLGERLFPLIQTMHSNLAGKITGMLLEIDNSELLHMLESPESLRSKVDEAVAVLQAHHAKKEAAQKVGAVAAATS

SEQ ID NO: 45217 - protein, 185 aa, Homo sapiens
MACAEFSFHVPSLEELAGVMQKGLKDNFADVQVSVVDCPDLTKEPFTFPVKGICGKTRIAEVGGVPYLLPLVNQKKVYDLNKIAKEIKLPGAFILGAGAGPFQTLGFNSEVIEVKAKRRTGPLNFVTCMRETLEKHYGNKPIGMGGTFIIQKGKVKSHIMPAEFSSCPLNSDEEVNKWLHFYEMK

SEQ ID NO: 45218 - protein, 494 aa, Homo sapiens
GEIKIAVSIEDEANKDLPPAALLYRPVRQYVYGVLFSLAESRKKTERLAFRKNRLPPEFSPVIIKEWAAYKGKSPQTPELVEALAFREWTCPNLKRLWLGKAVEDKNRRMRAFLACMRSDTPAMLNPANVPTHLMVLCCVLRYMVQWPGARILRRQELDAFLAQALSPKLYEPDQLQELKIENLDPRGIQLSALFMSGVDMALFANDACGQPIPWEHCCPWMYFDGKLFQSKLLKASREKTPLIDLCDGQADQAAKVEKMRQSVLEGLSFSRQSHTLPFPPPPALPFYPASAYPRHFGPVPPSQGRGRGFAGVQPIPSQGGKLEIAGTVVGHWAGSRRGRGGRGPFPLQVVSVGGPARGRPRGVISTPVIRTFGRGGRYYGRGYKNQAAIQGRPPYAASAEEVAKELKSKSGESKSSAMSSDGSLAENGVMAEEKPAPQMNGSTGDARAPSHSESALNNDSKTCNTNPHLNALSTDSACRREAALEAAVLNKEE

SEQ ID NO: 45219 - protein, 218 aa, Homo sapiens
MVSIHSLSELERLKLQETAYHELVARHFLSEFKPDRALPIDRPNTLDKWFLILRGQQRAVSHKTFGISLEEVLVNEFTRRKHLELTATMQVEEATGQAAGRRRGNVVRRVFGRIRRFFSRRRNEPTLPREFTRRGRRGAVSVDSLAELEDGALLLQTLQLSKISFPIGQRLLGSKRKMSLNPIAKQIPQVVEACCQFIEKHGLSAVGIFTLEYSVQRV

SEQ ID NO: 45220 - protein, 48 aa, Homo sapiens
  MOD_RES (1)..(1): Any amino acid
XAASLLTELLQFEPTRRLGMGEGGVSKLKSHPFFSTIQWSKLVGQQTR

SEQ ID NO: 45221 - protein, 161 aa, Homo sapiens
MAAQVTLEDALSNVDLLEELPLPDQQPCIEPPPSSLLYQPNFNTNFEDRNAFVTGIARYIEQATVHSSMNEMLEEGQEYAVMLYTWRSCSRAIPQVKCNEQPNRVEIYEKTVEVLEPEVTKLMNFMYFQRNAIERFCGEVRRLCHAERRKDFVSEAYLITL

SEQ ID NO: 45222 - protein, 47 aa, Homo sapiens
MADPDPRYPRSSIEDDFNYGSSVASATVHIRMDAVGSSDCGSCCYFL

SEQ ID NO: 45223 - protein, 852 aa, Homo sapiens
MGLKDHLGHDLGHLYVESTDPQLSPAVPWSTVENPSMDTVNVGKDEKEASEENASSGDSEENTNSDHESEQLGSISVEPGLITKTHRQLCRSPCLEPHILKRNEILQDFKPEESQTTSKEAKKPPDVVREYQTKLEFALKLGYSEEQVQLVLNKLGTDALINDILGELVKLGNKSEADQTVSTINTITRETSSLESQRSESPMQEIVTDDGENLRPIVIDGSNVAMSHGNKEVFSCRGIKLAVDWFLERGHKDITVFVPAWRKEQSRPDALITDQEILRKLEKEKILVFTPSRRVQGRRVVCYDDRFIVKLAFESDGIIVSNDNYRDLANEKPEWKKFIDERLLMYSFVNDKFMPPDDPLGRHGPSLDNFLRKKPIVPEHKKQPCPYGKKCTYGHKCKYYHPERGSQPQRSVADELRAMSRNTAAKTANEGGLVKSNSVPCSTKADSTSDVKRGAPKRQSDPSIRTQVYQDLEEKLPTKNKLETRSVPSLVSIPATSTAKPQSTTSLSNGLPSGVHFPPQDQRPQGQYPSMMMATKNHGTPMPYEQYPKCDSPVDIGYYSMLNAYSNLSLSGPRSPERRFSLDTDYRISSVASDCSSEGSMSCGSSDSYVGYNDRSYVSSPDPQLEENLKCQHMHPHSRLNPQPFLQNFHDPLTRGQSYSHEEPKFHHKPPLPHLALHLPHSAVGARSSCPGDYPSPPSSAHSKAPHLGRSLVATRIDSISDSRLYDSSPSRQRKPYSRQEGLGSWERPGYGIDAYGYRQTYSLPDNSTQPCYEQFTFQSLPEQQEPAWRIPYCGMPQDPPRYQDNREKIYINLCNIFPPDLVRIVMKRNPHMTDAQQLAAAILVEKSQLGY

SEQ ID NO: 45224 - protein, 84 aa, Homo sapiens
MESAIAEGGASRFSASSGGGGSRGAPQHYPKTAGNSEFLGKTPGQNAQKWIPARSTRRDDNSAANNSANEKERHDAIFRKVRGI

SEQ ID NO: 45225 - protein, 87 aa, Homo sapiens
LRWTRAWRLPREGLGPHGPSFARVPVAPSSSSGGRGGAEPRPLPLSYRLLDGEAALPAVVFLHGLFGSKTNFNSIAKILAQQTGRRG

SEQ ID NO: 45226 - protein, 88 aa, Homo sapiens
MSKASPSSLLAKFSEDTLSSYTEAVSSQEMLRCIWGHFLRVLGGTSPTLSHSSSLLHSLGSVTVLCCVDKQGILSWPNPSPETVLFFS

SEQ ID NO: 45227 - protein, 143 aa, Homo sapiens
MGDEDKRITYEDSEPSTGMNYTPSMHQEAQEETVMKLKGIDANEPTEGSILLKSSEKKLQETPTEANHVQRLRQMLACPPHGLLDRVITNVTIIVLLWAVVWSITGSECLPGGNLFGIIILFYCAIIGGKLLGLIKLPTLPPL

SEQ ID NO: 45228 - protein, 253 aa, Homo sapiens
MLHEEAAQKRKGKEPGMALPQGRLTFRDVAIEFSLAEWKFLNPAQRALYREVMLENYRNLEAVDISSKRMMKEVLSTGQGNTEVIHTGMLQRHESYHTGDFCFQEIEKDIHDFEFQSQKDERNGHEASMPKIKELMGSTDRHDQRHAGNKPIKDQLGLSFHLHLPELHIFQPEEKIANQVEKSVNDASSISTSQRISCRPETHTPNNYGNNFFHSSLLTQKQEVHMREKSFQCNETGEAFNCSSFVRKHQIIH

SEQ ID NO: 45229 - protein, 39 aa, Homo sapiens
MLVPLAKLSCLDGLQLLLCLELLPIILFIPGIRTRDGKE

SEQ ID NO: 45230 - protein, 141 aa, Homo sapiens
MELFLAGRRVLVTGAGKGGRRGKCPGIEPVCVDLGDWEATERALGSVGPVDLLVNNAAVALLQPFLEVTKEAFDRSFEVNLRAVIQVSQIVARGLIARGVPGAIVNVSSQCSQRAVTNHSVYCSTKGALDMLTKVMALELG

SEQ ID NO: 45231 - protein, 203 aa, Homo sapiens
  MOD_RES (1)..(1): Any amino acid
XQDGIVADESQNMQFMSSQSMKLPPSNSALPNQALGSIAGLGMQNLNSVRQNGNPSMFGVGNTAAQPRGMQQPPAQPLSSSQPNLRAQVPPPLLSPQVAMLNQLSQLNQLSQISQLQRLLAQQQRAQSQRSVPSGNRPQQDQQGRPLSVQQQMMQQSRQLDPNLLVKQQTPPSQQQPLHQPAMKSFLDNVMPHTTPELQKGPS

SEQ ID NO: 45232 - protein, 955 aa, Homo sapiens
MDPDPQAGVQVGMRVVRGVDWKWGQQDGGEGGVGTVVELGRHGSPSTPDRTVVVQWDQGTRTNYRAGYQGAHDLLLYDNAQIGVRHPNIICDCCKKHGLRGMRWKCRVCLDYDLCTQCYMHNKHELAHAFDRYETAHSRPVTLSPRQGLPRIPLRGIFQGAKVVRGPDWEWGSQDGGEGKPGRVVDIRGWDVETGRSVASVTWADGTTNVYRVGHKGKVDLKCVGEAAGGFYYKDHLPRLGKPAELQRRVSADSQPFQHGDKVKCLLDTDVLREMQEGHGGWNPRMAEFIGQTGTVHRITDRGDVRVQFNHETRWTFHPGALTKHHSFWVGDVVRVIGDLDTVKRLQAGHGEWTDDMAPALGRVGKVVKVFGDGNLRVAVAGQRWTFSPSCLVAYRPEEDANLDVAERARENKSSLSVALDKLRAQKSDPEHPGRLVVEVALGNAARALDLLRRRPEQVDTKNQGRTALQVAAYLGQVELIRLLLQARAGVDLPDDEGNTALHYAALGNQPEATRVLLSAGCRADAINSTQSTALHVAVQRGFLEVVRALCERGCDVNLPDAHSDTPLHSAISAGTGASGIVEVLTEVPNIDVTATNSQGFTLLHHASLKGHALAVRKILARARQLVDAKKEDGFTALHLAALNNHREVAQILIREGRCDVNVRNRKLQSPLHLAVQQAHVGLVPLLVDAGCSVNAEDEEGDTALHVALQRHQLLPLVADGAGGDPGPLQLLSRLQASGLPGSAELTVGAAVACFLALEGADVSYTNHRGRSPLDLAAEGRVLKALQGCAQRFRERQAGGGAAPGPRQTLGTPNTVTNLHVGAAPGPEAAECLVCSELALLVLFSPCQHRTVCEECARRMKKCIRCQVVVSKKLRPDGSEVASAAPAPGPPRQLVEELQSRYRQMEERITCPICIDSHIRLVFQCGHGACAPCGSALSACPICRQPIRDRIQIFV

SEQ ID NO: 45233 - protein, 338 aa, Homo sapiens
  MOD_RES (1)..(1): Any amino acid
XAPFVRLQGNPLGEASPDAPSSPVAALIPEMPRLFLTSDLDSFPVTPQGCSVTLACGVRLQFPAGATATPITIRYRLLLPEPGLVPLGPHDALLSHVLELQPHGVAFQQDVGLWLLFTPPQARRCREVVVRTRNDNSWGDLETYLEEEAPQRLWAHCQVPHFSWFLVVSRPVSNACLVPPEGTLLCSSGHPGVKVIFPPGATEEPRRVSMQVVRMAGRELQALLGEPEAAVSPLLCLSQSGPPSFLQPVTVQLPLPSGITGLSLDRSRLHLLYWAPPAATWDDITAQVVLELTHLYARFQVLALVHHQELCGRPGSEGLGAAAAAPCEPHRSAAAPGP

SEQ ID NO: 45234 - protein, 89 aa, Homo sapiens
MNMPSTPLAPTTGTATCSWSASTCTTTRPAVAGTCPALCSWIWSRAPWTLCARGPSGRSSGQTTSSSVSCGRGLGCGSLARAAQNPGVC

SEQ ID NO: 45235 - protein, 529 aa, Homo sapiens
MSTRTPLPTVNERDTENHTSHGDGRQEVTSRTSRSGARCRNSIASCADEQPHIGNYRLLKTIGKGNFAKVKLARHILTGREVAIKIIDKTQLNPTSLQKLFREVRIMKILNHPNIVKLFEVIETEKTLYLIMEYASGGEVFDYLVAHGRMKEKEARSKFRQIVSAVQYCHQKRIVHRDLKAENLLLDADMNIKIADFGFSNEFTVGGKLDTFCGSPPYAAPELFQGKKYDGPEVDVWSLGVILYTLVSGSLPFDGQNLKELRERVLRGKYRIPFYMSTDCENLLKRFLVLNPIKRGTLEQIMKDRWINAGHEEDELKPFVEPELDISDQKRIDIMVGMGYSQEEIQESLSKMKYDEITATYLLLGRKSSELDASDSSSSSNLSLAKVRPSSDLNNSTGQSPHHKVQRSVSSSQKQRRYSDHAGPAIPSVVAYPKRSQTSTADSDLKEDGISSRKSSGSAVGGKGIAPASPMLGNASNPNKADIPERKKSSTVPSSNTASGGMTRRNTYVCSERTTADRHSVIQNGKENS

SEQ ID NO: 45236 - protein, 50 aa, Homo sapiens
MLCERHCTEEDENHSKPNKGNAEEIFSAEYWKVRFPASRISGNVNEQHEA

SEQ ID NO: 45237 - protein, 152 aa, Homo sapiens
MGAMEQRKGWMHEGGGVRGARDPQTPGPQMRGPIGDPQVVSPPHAERNAQLKREVGSRPGHLPGDHMARCRHHSGYLADDEASHSMCSARVQLPKKPLVPEMRPACKPGRVPHPPSTCGSSALQGQRRNKRHPQPFGHFLDFLTESQVLDSL

SEQ ID NO: 45238 - protein, 154 aa, Homo sapiens
  MOD_RES (1)..(1): Any amino acid
XHYKPNRYFKCENCLLRFRTHRSLFKHLHVCAEHAQSPAPPPPPALDREPPAPERPPEVDPASAPGLPFPLLEPFTTPAPAPTGPFLPYLNPAPFGLSPPRLRPFLAAAPGPPASSAAVWKKSQGAGSSPRRPQGGSDAPSGACRARGPEPHRV

SEQ ID NO: 45239 - protein, 24 aa, Homo sapiens
MILNKALLLGALALTTVMSPCGGE

SEQ ID NO: 45240 - protein, 60 aa, Homo sapiens
MAALTIATGTGNWFSALALGVTLLKCLLIPTYHSTDFEVHRNWLAITHSLPISQWYYEVL

SEQ ID NO: 45241 - protein, 114 aa, Homo sapiens
MDKLTIISGCLFLAADIFAIASIANPDWINTGESAGALTVGLVRQCQTIHGRDRTCIPPRLPPEWVTTLFFIIMGIISLTVTCGLLVASHWRREATKYARWIAFTGKCVHSSHT

SEQ ID NO: 45242 - protein, 83 aa, Homo sapiens
MGLDKMKKTACGFCFVEYYSRADAENAMRYINGTRLDDRIIRTDWDAGFKEGRQYGRGRSGGQVRDEYRQDYDAGRGGYGKLA

SEQ ID NO: 45243 - protein, 148 aa, Homo sapiens
MHRRRSRSCREDQKPVMDDQRDLISNNEQLPMLGRRPGAPESKCSRGALYTGFSILVTLLLAGQATTAYFLYQQQGRLDKLTVTSQNLQLENLRMKLPKPPKPVSKMRMATPLLMQALPMGALPQGPMQNATKYGNMTEDHVMHLLQY

SEQ ID NO: 45244 - protein, 412 aa, Homo sapiens
MFYGRINGRNFAASSLPVAFAATPLMLFLPNPQLIFSFPISSRNHITGLMPPGKLKLENLFHMCTRLGDQFYKEAIEHCRSYNSRLCAERSVRLPFLDSQTGVAQNNCYIWMEKRHRGPGLAPGQLYTYPARCWRKKRRLHPPEDPKLRLLEIKPEVELPLKKDGFTSESTTLEALLRGEGVEKKVDAREEESIQEIQRVLENDENVEEGNEEEDLEEDIPKRKNRTRGRARGSAGGRRRHDAASQEDHDKPYVCDICGKRYKNRPGLSYHYAHTHLASEEGDEAQDQETRSPPNHRNENHRPQKGPDGTVIPNNYCDFCLGGSNMNKKSGRPEELVSCADCGRSAHLGGEGRKEKEAAAAARTTEDLFGSTSESDTSTFHGFDEDDLEEPRSCRGRRSGRGSPTADKKGSC

SEQ ID NO: 45245 - protein, 61 aa, Homo sapiens
MRDSGSKAATDAQDANQCCTSCEDNAPATSYCVECSEPLCETCVEAHQRVKYTKDHTVRST

SEQ ID NO: 45246 - protein, 824 aa, Homo sapiens
MDERRRQNIAYEYLCHLEEAKRWMEVCLVEELPPTTELEEGLRNGVYLAKLAKFFAPKMVSEKKIYDVEQTRYKKSGLHFRHTDNTVQWLRAMESIGLPKIFYPETTDVYDRKNIPRMIYCIHALSLYLFKLGIAPQIQDLLGKVDFTEEEISNMRKELEKYGIQMPSFSKIGGILANELSVDEAALHAAVIAINEAVEKGIAEQTVVTLRNPNAVLTLVDDNLAPEYQKELWDAKKKKEENARLKNSCISEEERDAYEELLTQAEIQGNINKVNRQAAVDHINAVIPEGDPENTLLALKKPEAQLPAVYPFAAAMYQNELFNLQKQNTMNYLAHEELLIAVEMLSAVALLNQALESNDLVSVQNQLRSPAIGLNNLDKAYVERYANTLLSVKLEVLSQGQDNLSWNEIQNCIDMVNAQIQEENDRVVAVGYINEAIDEGNPLRTLETLLLPTANISDVDPAHAQHYQDVLYHAKSQKLGDSESVSKVLWLDEIQQAVDDANVDKDRAKQWVTLVVDVNQCLEGKKSSDILSVLKSSTSNANDIIPECADKYYDALVKAKELKSERVSSDGSWLKLNLHKKYDYYYNTDSKESSWVTPESCLYKESWLTGKEIEDIIEEVTVGYIRENIWSASEELLLRFQATSSGPILREEFEARKSFLHEQEENVVKIQAFWKGYKQRKEYMHRRQTFIDNTDSIVKIQSWFRMATARKSYLSRLQYFRDHNNEIVKIQSLLRANKARDDYKTLVGSENPPLTVIRKFVYLLDQSDLDFQEELEVARLREEVVTKIRANQQLEKDLNLMDIKIGLLVKNRITLEDVISHSKK

SEQ ID NO: 45247 - protein, 81 aa, Homo sapiens
MARGLPTIASLARLCQKLNRLKPLEDSTMETSLRRCLSTLDLTLLGVGGMVGSGLYVLTGAVAKEVAGPAVLLSFGVAAVA

SEQ ID NO: 45248 - protein, 1259 aa, Homo sapiens
MIYMDDGVSSFVQIRGSVPLFWEQPGLQVGSHHLRLHRGLEANAPAFDRHMVLLKEQYGQQVVVNLLGSRGGEEVLNRAFKKLLWASCHAGDTPMINFDFHQFAKGGKLEKLETLLRPQLKLHWEDFDVFTKGENVSPRFQKGTLRMNCLDCLDRTNTVQSFIALEVLHLQLKTLGLSSKPIVDRFVESFKAMWSLNGHSLSKVFTGSRALEGKAKVGKLKDGARSMSRTIQSNFFDGVKQEAIKLLLVGDVYGEEVADKGGMLLDSTALLVTPRILKAMTERQSEFTNFKRIRIAMGTWNVNGGKQFRSNVLRTAELTDWLLDSPQLSGATDSQDDSSPADIFAVGFEEMVELSAGNIVNASTTNKKMWGEQLQKAISRSHRYILLTSAQLVGVCLYIFVRPYHVPFIRDVAIDTVKTGMGGKAGNKGAVGIRFQFHSTSFCFICSHLTAGQSQVKERNEDYKEITQKLCFPMGRNVFSHDYVFWCGDFNYRIDLTYEEVFYFVKRQDWKKLLEFDQLQLQKSSGKIFKDFHEGAINFGPTYKYDVGSAAYDTSDKCRTPAWTDRVLWWRKKHPFDKTAGELNLLDSDLDVDTKVRHTWSPGALQYYGRAELQASDHRPVLAIVEVEVQEVDVGARERVFQEVSSFQGPLDATVVVNLQSPTLEEKNEFPEDLRTELMQTLGSYGTIVLVRINQGQMLVTFADSHSALSVLDVDGMKVKGRAVKIRPKTKDWLKGLREEIIRKRDSMAPVSPTANSCLLEENFDFTSLDYESEGDILEDDEDYLVDEFNQPGVSDSELGGDDLSDVPGPTALAPPSKSPALTKKKQHPTYKDDADLVELKRELEAVGEFRHRSPSRSLSVPNRPRPPQPPQRPPPPTGLMVKKSASDASISSGTHGQYSILQTARLLPGAPQQPPKARTGISKPYNVKQIKTTNAQEAEAAIRCLLEARGGASEEALSAVAPRDLEASSEPEPTPGAAKPETPQAPPLLPRRPPPRVPAIKKPTLRRTGKPLSPEEQFEQQTVHFTIGPPETSVEAPPVVTAPRVPPVPKPRTFQPGKAAERPSHRKPASDEAPPGAGASVPPPLEAPPLVPKVPPRRKKSAPAAFHLQVLQSNSQLLQGLTYNSSDSPSGHPPAAGTVFPQGDFLSTSSATSPDSDGTKAMKPEAAPLLGDYQDPFWNLLHHPKLLNNTWLSKSSDPLDSGTRSPKRDPIDPVSAGASAAKAELPPDHEHKTLGHWVTISDQEKRTALQVFDPLAKT

SEQ ID NO: 45249 - protein, 229 aa, Homo sapiens
MVNEARGNSSLNPCLEGSASSGSESSKDSSRCSTPGLDPERHERLREKMRRRLESGDKWFSLEFFPPRTAEGAVNLISRFDRMAAGGPLYIDVTWHPAGDPGSDKETSSMMIASTAVNYCGLETILHMTCCRQRLEEITGHLHKAKQLGLKNIMALRGDPIGDQWEEEEGGFNYAVDLVKHIRSEFGDYFDICVAGYPKGHPEAGSFEADLKHLKEKVSAGADFIITQL

SEQ ID NO: 45250 - protein, 55 aa, Homo sapiens
GRGLMGISSTLCKAGADSLLRNVEDETPQDLTEESLVLLPFDDLKISGKLLLCTD

SEQ ID NO: 45251 - protein, 938 aa, Homo sapiens
MAVQPKETLQLESAAEVGFVRFFQGMPEKPTTTVRLFDRGDFYTAHGEDALLAAREVFKTQGVIKYMGPAGAKNLQSVVLSKMNFESFVKDLLLVRQYRVEVYKNRAGNKASKENDWYLAYKASPGNLSQFEDILFGNNDMSASIGVVGVKMSAVDGQRQVGVGYVDSIQRKLGLCEFPDNDQFSNLEALLIQIGPKECVLPGGETAGDMGKLRQIIQRGGILITERKKADFSTKDIYQDLNRLLKGKKGEQMNSAVLPEMENQVAVSSLSAVIKFLELLSDDSNFGQFELTTFDFSQYMKLDIAAVRALNLFQGSVEDTTGSQSLAALLNKCKTPQGQRLVNQWIKQPLMDKNRIEERLNLVEAFVEDAELRQTLQEDLLRRFPDLNRLAKKFQRQAANLQDCYRLYQGINQLPNVIQALEKHEGKHQKLLLAVFVTPLTDLRSDFSKFQEMIETTLDMDQVENHEFLVKPSFDPNLSELREIMNDLEKKMQSTLISAARDLGLDPGKQIKLDSSAQFGYYFRVTCKEEKVLRNNKNFSTVDIQKNGVKFTNSKLTSLNEEYTKNKTEYEEAQDAIVKEIVNISSGYVEPMQTLNDVLAQLDAVVSFAHVSNGAPVPYVRPAILEKGQGRIILKASRHACVEVQDEIAFIPNDVYFEKDKQMFHIITGPNMGGKSTYIRQTGVIVLMAQIGCFVPCESAEVSIVDCILARVGAGDSQLKGVSTFMAEMLETASILRSATKDSLIIIDELGRGTSTYDGFGLAWAISEYIATKIGAFCMFATHFHELTALANQIPTVNNLHVTALTTEETLTMLYQVKKGVCDQSFGIHVAELANFPKHVIECAKQKALELEEFQYIGESQGYDIMEPAAKKCYLERENLRVTEPKDQCLILLTWKRKLRGGKRSACSRPERQNQGSDPTPTRNTQPLTQSWACVGSH

SEQ ID NO: 45252 - protein, 110 aa, Homo sapiens
MVAVLEVISSLEKYPITKEALEETRLGKLINDVRKKTKNEELAKRAKKLLRSWQKLIEPAHQHEAALRGLAGATGSANGGAHNCRPEVGAAGPPRSIHDLKSRNDLQRLP

SEQ ID NO: 45253 - protein, 519 aa, Homo sapiens
  MOD_RES (1)..(1): Any amino acid
XPKHLSATKPKKSWAPNLYELDSDLTKEPDVIIGEGPTDSEFFHQRFRNLIYVEFVGPRKTLIKLRNLCLDWLQPETRTKEEIIELLVLEQYLTIIPEKLKPWVRAKKPENCEKLVTLLENYKEMYQPEDDNNSDVTSDDDMTRNRRESSPPHSVHSFSGDRDWDRRGRSRDMEPRDRWSHTRNPRSRMPPRDLSLPVVAKTSFEMDREDDRDSRAYESRSQDAESYQNVVDLAEDRKPHNTIQDNMENYRKLLSLGLKTMPEAKKSTHRRGICEDESSHGVIMEKFIKDVSRSSKSGRARESSDRSQRFPRMSDDNWKDISLNKRESVIQQRVYEGNAFRGGFRFNSTLVSRKRVLERKRRYHFDTDGKGSIHDQKGCPRKKPFECGSEMRKAMSVSSLSSLSSPSFTESQPIDFGAMPYVCDECGRSFSVISEFVEHQIMHTRENLYEYGESFIHSVAVSEVQKSQVGGKRFECKDCGETFNKSAALAEHRKIHARGYLVECKNQECEEAFMPSPTF

SEQ ID NO: 45254 - protein, 840 aa, Homo sapiens
MMYNEIGEAKKITERFIDPDKELEIMILNDSASAASSMEVTDRIASLEQRVQMQEDDIQLLKSALADVVRRLNITEEQQAVLNRKGPTKARPLMQTLPLRTTVNNGTVLPKKPTGSLPSPSGVRKETAVPATKRLNRSVSLLNACKLNRSTPSNIKRTSSSERVSPGGRRESNGDSRGNRNRTGSTSSSSSGKKNSESKPKEPVFSAEEGYVKMFLRGRPVTMYMPKDQVDSYSLEAKVELPTKRLKLEWVYGYRGRDCRNNLYLLPTGETVYFIASVVVLYNVEEQLQRHYAGHNDDVKCLAVHPDRITIATGQVAGTSKDGKQLPPHVRIWDSVTLNTLHVIGIGFFDRAVTCIAFSKSNGGTNLCAVDDSNDHVLSVWDWQKEEKLADVKCSNEAVFAADFHPTDTNIIVTCGKSHLYFWTLEGSSLNKKQGLFEKQEKPKFVLCVTFSENGDTITGDSSGNILVWGKGTNRISYAVQGAHEGGIFALCMLRDGTLVSGGGKDRKLISWSGNYQKLRKTEIPEQFGPIRTVAEGKGDVILIGTTRNFVLQGTLSGDFTPITQGHTDELWGLAIHASKSQFLTCGHDKHATLWDAVGHRPVWDKIIEDPAQSSGFHPSGSVVAVGTLTGRWFVFDTETKDLVTVHTDGNEQLSVMRYSPDGNFLAIGSHDNCIYIYGVSDNGRKYTRVGKCSGHSSFITHLDWSVNSQFLVSNSGDYEILYWVPSACKQVVSVETTRDIEWATYTCTLGFHVFGVWPEGSDGTDINAVCRAHEKKLLSTGDDFGKVHLFSYPCSQFRAPSHIYGGHSSHVTNVDFLCEDSHLISTGGKDTSIMQWRVI

SEQ ID NO: 45255 - protein, 193 aa, Homo sapiens
  MOD_RES (1)..(1): Any amino acid
XLQPSFPEILLESHMVMIRGNSGLKPKDNEFTSKPWHWPINYQGLRFSGVNDTDFRVYLLGNPVVWWLNLLSIALYLLSGSIIAVAMQRGARLPAEVAGQVLWALPPLTWRQQGTCTPGEGRLPADGPSFAFTTPHLPLSFAFERKPRNHEIKKLAPGHTARLSQVLLRGGGQVLLGWTLHYFPFFLMGRVLY

SEQ ID NO: 45256 - protein, 67 aa, Homo sapiens
MAASAGGPGSWSENILEYFLRNSQITAEDGAEITWYHAANHKAQTNEALKKTRFHRVGQTGLELLTS

SEQ ID NO: 45257 - protein, 27 aa, Homo sapiens
TTLSSQYCRIKINLMKLKKRWCTSIIP

SEQ ID NO: 45258 - protein, 173 aa, Homo sapiens
MSRQEKDAELDRRIVALRKKNQALLRRYQEIQEDRRQAEQGGMAVTTPALLQPDGLTVTISQVPGEKRVVSRNWARGTCGPRVTNEMLEDEDAEDHGGTFCLGELVELAVTMENKAEGKRIVSEKPTRARNQGIEGSPGGRVTRSPPTQVAISSDSARKGSWEPWSRPVGEPP

SEQ ID NO: 45259 - protein, 1110 aa, Homo sapiens
VEGMTCQSCVSSIEGKVRKLQGVVRVKVSLSNQEAVITYQPYLIQPEDLRDHVNDMGFEAAIKSKVAPLSLGPIDIERLQSTNPKRPLSSANQNFNNSETLGHQGSHVVTLQLRIDGMHCKSCVLNIEENIGQLLGVQSIQVSLENKTAQVKYDPSCTSPVALQRAIEALPPGNFKVSLPDGAEGSGTDHRSSSSHSPGSPPRNQVQGTCSTTLIAIAGMTCASCVHSIEGMISQLEGVQQISVSLAEGTATVLYNPSVISPEELRAAIEDMGFEASVVSESCSTNPLGNHSAGNSMVQTTDGTPTSVQEVAPHTGRLPANHAPDILAKSPQSTRAVAPQKCFLQIKGMTCASCVSNIERNLQKEAGVLSVLVALMAGKAEIKYDPEVIQPLEIAQFIQDLGFEAAVMEDYAGSDGNIELTITGMTCASCVHNIESKLTRTNGITYASVALATSKALVKFDPEIIGPRDIIKIIESKTSEALAKLMSLQATEATVVTLGEDNLIIREEQVPMELVQRGDIVKVVPGGKFPVDGKVLEGNTMADESLITGEAMPVTKKPGSTVIAGSINAHGSVLIKATHVGNDTTLAQIVKLVEEAQMSKNPNKHISQTEVIIRFAFQTSITVLCIACPCSLGLATPTAVMVGTGVAAQNGILIKGGKPLEMAHKIKTVMFDKTGTITHGVPRVMRVLLLGDVATLPLRKVLAVVGTAEASSEHPLGVAVTKYCKEELGTETLGYCTDFQAVPGCGIGCKVSNVEGILAHSERPLSAPASHLNEAGSLPAEKDAVPQTFSVLIGNREWLRRNGLTISSDVSDAMTDHEMKGQTAILVAIDGVLCGMIAIADAVKQEAALAVHTLQSMGVDVVLITGDNRKTARAIATQVGINKVFAEVLPSHKVAKVQELQNKGKKVAMVGDGVNDSPALAQADMGVAIGTGTDVAIEAADVVLIRNDLLDVVASIHLSKRTVRRIRINLVLALIYNLVGIPIAAGVFMPIGIVLQPWMGSAAMAASSVSVVLSSLQLKCYKKPDLERYEAQAHGHMKPLTASQVSVHIGMDDRWRDSPRATPWDQVSYVSQVSLSSLTSDKPSRHSAAADDDGDKWSLLLNGRDEEQYI

SEQ ID NO: 45260 - protein, 54 aa, Homo sapiens
HVGSGDLFSGMNSPSRTFCSEDSHIQLWEIIISLIIPSTFEDYQISQQQYCGLE

SEQ ID NO: 45261 - protein, 283 aa, Homo sapiens
MDSELKEEIPVHEEFILCGGAETQVLKCGPWTDLFHDQSVKRPKLLIFIIPGERKSLDSNAQEIKDIYGLNGQIEHKLAFLRTHVPKDMKLVLIGHSIGSYFTLQMLKRVPELPVIRAFLLFPTIERMSESPNGRIATPLLCWFRYVLYVTGYLLLKPCPETIKSLLIRRGLQVMNLENEFSPLNILEPFCLANAAYLGGQEMMEVVKRDDETIKEHLCKLTFYYGTIDPWCPKEYYEDIKKDFPEGDIRLCEKNIPHAFITHFNQEMADMIADSLKDDLSKM

SEQ ID NO: 45262 - protein, 64 aa, Homo sapiens
MAAYQQEEQMQLPRADAIRSRLIDTFSLIEHLQGLSQAVPRHTIRELLDPSRQKKLVLGDQHQL

SEQ ID NO: 45263 - protein, 99 aa, Homo sapiens
VVTVWKREIEAPEVRDQGYLRLLQTRSPGETFRGEQSAFKAQVSTLLTLLPPPVLRCRQFTVAGKHLTVLKGKQGCRLQPPGATRELIGCSSSGQAGGC

SEQ ID NO: 45264 - protein, 88 aa, Homo sapiens
MAPLLLQLAVLGAALAAAALVLISIVAFTTATKMPALHRHEEEKFFLNAKGQKETLPSIWDSPTKQLSVVVPSYNEEKRNEILRSLMK

SEQ ID NO: 45265 - protein, 116 aa, Homo sapiens
MEGKIFGSSFLCPTRCDQLLLPGVPGSMPNASWTGNLRAIKWSDMEDRHGGCHGHYVHGICIYGNGDLKWLVNSPSLFANKFELNTYPLTVECLELRHRERTLNQSETAIQPSWYF

SEQ ID NO: 45266 - protein, 147 aa, Homo sapiens
MALSRVCWARSAVWGSAVTPGHFVTRRLQLGRSGLAWGAPRSSKLHLSPKADVKNLMSYVVTKTKAINGKYHRFLGRHFPRFYVLYTIFMKESLEPGHASHILPASSLVETSFEDSYNCDSPTGQGFGKAGDWPADCSGSKIGPFLF

SEQ ID NO: 45267 - protein, 86 aa, Homo sapiens
MAILLSYSERDPVPGGCNLEFDLDIDPNIYLEYNFFETTIKFAPANLGYARGVDPPPCDAGTDQDSRWRLQYDVYQYFLPENDLTE

SEQ ID NO: 45268 - protein, 437 aa, Homo sapiens
  MOD_RES (1)..(1): Any amino acid
XSPVNIDRQAWLGEEVLAEPRPDMFRAQQLQIFNLMKFDSYARFVKSPLYRECLLAEAEGRPLREPGSSRLGSPDATRKKPKLKPGKSLPLGVEELGQLPPVEGPGGRPLRKSFRRELGGTANAALRRESQGSLNSSASLDLGFLAFVSSKSESHRKSLGSTEGESESRPGKYCCVYLPDGTASLALARPGLTIRDMLAGICEKRGLSLPDIKVYLVGNEQKALVLDQDCTVLADQEVRLENRITFELELTALERVVRISAKPTKRLQEALQPILEKHGLSPLEVVLHRPGEKQPLDLGKLVSSVAAQRLVLDTLPGVKISKARDKSPCRSQGCPPRTQDKATHPPPASPSSLVKVPSSATGKRQTCDIEGLVELLNRVQSSGAHDQRGLLRKEDLVLPEFLQLPAQGPSSEETPPQTKSAAQPIGGSLNSTTDSAL

SEQ ID NO: 45269 - protein, 125 aa, Homo sapiens
MLSDELESKPELLVQFVQNTSIPLGQGLVESEAKDITCLSLLPVTEASECSRLMLPDDTTNHSNSSKEVPSSAVLRSLRVNVGPDGEETRAQTVQKSPEFLSTSESSSLLQDLQPSDSTSFILLN

SEQ ID NO: 45270 - protein, 43 aa, Homo sapiens
IRDYHFVNATEESDALAKLRKTIINESLNFKESFFIFKTQHCS

SEQ ID NO: 45271 - protein, 220 aa, Homo sapiens
MGAAAAEADRTLFVGNLETKVTEELLFELFHQAGPVIKVKIPKDKDGKPKQFAFVNFKHEVSVPYAMNLLNGIKLYGRPIKIQFRSGSSHAPQDVSLSYPQHHVGNSSPTSTSPSRYERTMDNMTSSAQIIQRSFSSPENFQRQAVVVSSNLYTDQLSHEYGRKPAGLREFSPCATYRFSVLCTGHSSCLCFAGLSAVSSELSEFARLCLPCPPTPHNAA

SEQ ID NO: 45272 - protein, 46 aa, Homo sapiens
MEPDGTYEPGFVGIRFCQECAGTVITSRRPTTAASMSTRSRTKWTN

SEQ ID NO: 45273 - protein, 116 aa, Homo sapiens
  MOD_RES (1)..(1): Any amino acid
XLLSASALFISCSLTALCLGFFYGCEDETENAASTQRASVSSYRRRRHRLLPLASVFSHLLVLRCLPLGKHRFVLFLPQEVRGGHTSGSSVQSRGAQPSSMRPGYLFPQPVGSPSS

SEQ ID NO: 45274 - protein, 46 aa, Homo sapiens
MSGSTPFQMRLVHLDLKGAPPKVSYLSEVQTASSLSMKTCFPTRAL

SEQ ID NO: 45275 - protein, 139 aa, Homo sapiens
IQVLRFHLLELEKVHELCDNFCHRYISCLKGKMPIDLVIDERDGSSKSDHEELSGSSTNLADHNPSSWRDHDDATSTHSAGTPGPSSGGHASQSGDNSSEQEFFRFIPIFQMKWLGLGEGQLLDCHDRKRKQKNEDKAI

SEQ ID NO: 45276 - protein, 162 aa, Homo sapiens
MAPSVPAAEPEYPKGIRAVLLGPPGAGKGTQAPRLAENFCVCHLATGDMLRAMVASGSELGKKLKATMDAGKLVSDEMVVELIEKNLETPLCKNGFLLDGFPRTVRQAEMLDDLMEKRKEKLDSVIEFSIPDSLLIRRITGRSMTEAFNCKWTLHSLLYCGL

SEQ ID NO: 45277 - protein, 745 aa, Homo sapiens
MRKGLRATAARCGLGLGYLLQMLVLPALALLSASGTGSAAQDDDFFHELPETFPSDPPEPLPHFLIEPEEAYIVKNKPVNLYCKASPATQIYFKCNSEWVHQKDHIVDERVDETSGLIVREVSIEISRQQVEELFGPEDYWCQCVAWSSAGTTKSRKAYVRIAYLRKTFEQEPLGKEVSLEQEVLLQCRPPEGIPVAEVEWLKNEDIIDPVEDRNFYITIDHNLIIKQARLSDTANYTCVAKNIVAKRKSTTATVIVYVNGGWSTWTEWSVCNSRCGRGYQKRTRTCTNPAPLNGGAFCEGQSVQKIACTTLCPVDGRWTPWSKWSTCGTECTHWRRRECTAPAPKNGGKDCDGLVLQSKNCTDGLCMQSFIYPISTEQRTQNEYGFSSAPDSDDVALYVGIVIAVIVCLAISVVVALFVYRKNHRDFESDIIDSSALNGGFQPVNIKAARQDLLAVPPDLTSAAAMYRGPVYALHDVSDKIPMTNSPILDPLPNLKIKVYNTSGAVTPQDDLSEFTSKLSPQMTQSLLENEALSLKNQSLARQTDPSCTAFGSFNSLGGHLIVPNSGVSLLIPAGAIPQGRVYEMYVTVHRKETMRPPMDDSQTLLTPVVSCGPPGALLTRPVVLTMHHCADPNTEDWKILLKNQAAQGQWEDVVVVGEENFTTPCYIQLDAEACHILTENLSTYALVGHSTTKAAAKRLKLAIFGPLCCSSLEYSIRVYCLDDTQDALKEILHLERQMGGQLL

SEQ ID NO: 45278 - protein, 88 aa, Homo sapiens
SSSVAESSSPLRNFSCGFERTTRNEKLAAKTDEFNRTVFRTDRNCQAIQQNHSCSKSSEDLKPCDTSSTHTGIHVSERLTWKRIFPTC

SEQ ID NO: 45279 - protein, 219 aa, Homo sapiens
MGSYRCTCKIGFGPDPTFSSCVPDPPVISEEKGPCYRLVSSGRQCMHPLSVHLTKQLCCCSVGKAWGPHCEKCPLPGTGKGPVFVKPKNTQPVAKSTHPPPLPAKEEPVEALTFSREHGPGVAEPEVATAPPEKEIPSLDQEKTKLEPGQPQLSPGISTIHLHPQFPVVIEKTSPPVPVEVAPEASTSSASQVIAPTQVTEINECTVNPDICGAGHCIN

SEQ ID NO: 45280 - protein, 60 aa, Homo sapiens
MGGQVSASNSFSRLHCRNANEDWMSALCPRLWDVPLHHLSIPGSHDTMTYCLNKKSPISH

SEQ ID NO: 45281 - protein, 149 aa, Homo sapiens
MQTCPLAFPGHVSQALGTLLFLAASLSAQNEGWDSPICTEGVVSVSWGENTVMSCNISNAFSHVNIKLRAHGQESAIFNEVAPGYFSRDGWQLQVQGGVAQLVIKGARDSHAGLYMWHLVGHQRNNRQVTLEVSGAAVPSNAGRRSSSS

SEQ ID NO: 45282 - protein, 55 aa, Homo sapiens
  MOD_RES (1)..(1): Any amino acid
XRSWSCSREKKEDIKAFEKQGPRAIEAGALGARFLCLCQRCQFGAEIITAESYSL

SEQ ID NO: 45283 - protein, 142 aa, Homo sapiens
DLGMLKKLVEDGVININERADNGSTPMHKAAGQGHIECLQWLIKMGADSNITNKAGERPSDVAKRTIKELQGQLEYERLRREKLECQLDEYRAEVDQLRETLEKIQVPNFVAMEDSASCESNKEKRRVKKKVSSGGVFVRRY

SEQ ID NO: 45284 - protein, 234 aa, Homo sapiens
MDLIDILWRQDIDLGVSREVFDFSQRRKEYELEKQKKLEKERQEQLQKEQEKAFFAQLQLDEETGEFLPIQPAQHIQSETSGSANYSQVAHIPKSDALYFDDCMQLLAQTFPFVDDNEVSSATFQSLVPDIPGHIESPVFIATNQAQSPETSVAQVAPVDLDGMQQDIEQVWEELLSIPELQCLNIENDKLVETTMVPSPEAKLTEVDNYHFYSSIPSMEKEVGNCSPHFLNAF

SEQ ID NO: 45285 - protein, 64 aa, Homo sapiens
  MOD_RES (1)..(1): Any amino acid
XEEEEEEEEEEEEAPPPPRVVSEEHLRRYAPDPVLVRGAGHITVFGLSNKFDTEFPSVLTGKKF

SEQ ID NO: 45286 - protein, 96 aa, Homo sapiens
MAEDEPDAKSPKTGGRAPPGGAEAGEPTTLLQRLRGTISKAVQNKVEGILQDVQKFSDNDKLYLYLQLPSGPTTGDKSSEPSTLSNEEYMYAYRWI

SEQ ID NO: 45287 - protein, 110 aa, Homo sapiens
  MOD_RES (1)..(1): Any amino acid
XFCPGSQCCVEDGPESIDSIIDMDAVCKRVTTLGLDVSVTISQDAGRKKPFPAKGDCVFCRRRRARSLQAQCGFSLTPALELLPVPFLKLLCPGPPRRRRICRILPGAGL

SEQ ID NO: 45288 - protein, 229 aa, Homo sapiens
MSAELNVPIDPSAPACPEPGHKGMDYRDWVRRSYLELVTSNHHSVQALSWRKLYLSRAKLKASSRTSALLSGFAMVAMVEVQLETQYQYPRPLLIAFSACTTVLVAVHLFALLISTCILPNVEAVSNIHNLNSISESPHERMHPYIELAWGFSTVLGILLFLAEVVLLCWIKFLPVDARRQPGPPPGPGSHTGWQAALVSTIIMVPVGLIFVVFTIHFYRSLVRHKTER

SEQ ID NO: 45289 - protein, 101 aa, Homo sapiens
MAEDKTKPSELDQGKYDADDNVKIICLGDSAVGKSKLMERFLMDGFQPQQLSTYALTLYKHTATVDGKTILVDFWDTAGQERFQSMHASYYHKAHACIMQT

SEQ ID NO: 45290 - protein, 645 aa, Homo sapiens
MLLPVFTLKLRHKISPRMVAIGRYDGTHPCLAAATQTGKVADGANAIVLGTLGDISSPLAIIGGNCALQGFNHEGSDLFWTVTGDNVNSLALCDFDGDGKKELLVGSEDFDIRVFKEDEIVAEMTETEIVTSLCPMYGSRFGYALSNGTVGVYDKTSRYWRIKSKNHAMSIHAFDLNSDGVNELITGWSNGKVDARSDRTGEVIFKDNFSSAIAGVVEGDYRMDGHIQLICCSVDGEIRGYLPGTAEMRGNLMDTSAEQDLIRELSQKKQNLLLELRNYEENAKAELASPLNEADGHRGIIPANTRLHTTLSVSLGNETQTAHTELRISTSNDTIIRAVLIFAEGIFTGESHVVHPSIHNLSSSICIPIVPPKDVPVDLHLKAFVGYRSSTQFHVFESTRQLPRFSMYALTSLDPASEPISYVNFTIAERAQRVVVWLGQNFLLPEDTHIQNAPFQVCFTSLRNGGHLHIKIKLSGEITINTDDIDLAGDIIQSMASFFAIEDLQVEADFPVYFEELRKVLVKVDEYHSVHQKLSADMADHSNLIRSLLVGAEDARLMRDMKTMKSRYMELYDLNRDLLNGYKIRCNNHTELLGNLKAVNQAIQRAGRLRVGKPKNQVITACRDAIRSNNINTLFKIMRVGTASS

SEQ ID NO: 45291 - protein, 171 aa, Homo sapiens
MAERAALEELVKLQGERVRGLKQQKASAELIEEEVAKLLKLKAQLGPDESKQKFVLKTPKALEEKIRTTETQVLVASAQKKLLEERLKLVSELWDAGIKAELLYKKNPKLLNQLQYCEEAGIPLVAIIGEQELKDGVIKLRSVTSREEVDVRREDLVEEIKRRTGQPLCIC

SEQ ID NO: 45292 - protein, 203 aa, Homo sapiens
  MOD_RES (1)..(1): Any amino acid
XLKYPESLRPAFPRLKEKLEDPDPGVQSAAVNVICELARRNPKNYLSLAPLFFKLMTSSTNNWVLIKIIKLFGALTPLEPRLGKKLIEPLTNLIHSAHLAVLRHAQPQRQHPALCSEIKDIDRGLRSELEVPGAAGNVQDPEDPPQVRAVPQGPHPAVPGRQGRVHPAAGPGPALWDGVQEEPDGDREEADDPRRQGRGYHLP

SEQ ID NO: 45293 - protein, 171 aa, Homo sapiens
MHVYSLAEAPAGRMIQSDKGADPPDKKDMKLSTATNPQNGLSQILRLVLQELSLFYGRDVNGVCLLYDLLHSPWLQALLKIYDCLQEFKEKKLVPATPHAQVLSYEVVELLRETPTSPEIQELRQMLQAPHFKALLSAHDTIAQKDFEPLLPPLPDNIPESEEAMRIVCLV

SEQ ID NO: 45294 - protein, 48 aa, Homo sapiens
MATPPKRSCPSFSASSEGTRIKKISIEGNIGKEPPEMWDARLGCRGSG

SEQ ID NO: 45295 - protein, 189 aa, Homo sapiens
MQPQCPLRRESCGMELCGKKGNEASYPLEMCSHFDADEIKRLGKRFKKLDLDNSGSLSVEEFMSLPELQQNPLVQRVIDIFDTDGNGEVDFKEFIEGVSQFSVKGDKEQKLRFAFRIYDMDKDGYISNGELFQVLKMMVGNNLKDTQLQQIVDKTIINADKDGDGRISFEEFCAVVGGLDIHKKMVVDV

SEQ ID NO: 45296 - protein, 93 aa, Homo sapiens
MGELFRSEEMTLAQLFLQSEAAYCCVSELGELGKVQFRDLNPDVNVFQRKFVNEVRRCEEMDRKLRFVEKEIRKANIPIMDTGENPEVPFPRD

SEQ ID NO: 45297 - protein, 48 aa, Homo sapiens
GFKKQMADTGKLNTLLQRAPQCLGKFIEIAARKKRNFILDQETLPSQR

SEQ ID NO: 45298 - protein, 324 aa, Homo sapiens
  MOD_RES (1)..(1): Any amino acid
XEEEEEEEDVDKDPHPTQNTCLRCRHFSLRERKREPRRTMGGCEVREFLLQFGFFLPLLTAWPGDCSHVSNNQVVLLDTTTVLGELGWKTYPLNGWDAITEMDEHNRPIHTYQVCNVMEPNQNNWLRTNWISRDAAQKIYVEMKFTLRDCNSIPWVLGTCKETFNLFYMESDESHGIKFKPNQYTKIDTIAADESFTQMDLGDRILKLNTEIREVGPIERKGFYLAFQDIGACIALVSVRVFYKKCPFTVRNLAMFPDTIPRVDSSSLVEVRGSCVKSAEERDTPKLYCGADGDWLVPLGRCICSTGYEEIEGSCHGASKGRCF

SEQ ID NO: 45299 - protein, 196 aa, Homo sapiens
MWTLGRRAVAGLLASPSPAQAQTLTRVPRPAELAPLCGRRGLRTDIDATCTPRRASSNQRGLNQIWNVKKQSVYLMNLRKSGTLGHPGSLDETTYERLAEETLDSLAEFFEDLADKPYTFEDYDVSFGVNVAPVAVPSLRKSEDHALQTGHVLDYLCFCLLGFQSASEQRSNPDSVVHRMAGDGVWLCRPGWSAMA

SEQ ID NO: 45300 - protein, 184 aa, Homo sapiens
VDIADIENEENRYCLFMELLESSHHEAEFQHLVLLLQAWPPMKSEYVITNNPWVRLATVMLTRCTMENKEGLGNEVLKMCRSLYNTKQMLPAEVNDSNCDQELLSLLLDAKLLVKCVSTPFYPRIVDHLLASLQQGRWDAEELGRHLREAGHEAEAGSLLLAVRGTHQAFRTFSTALRAAQHWV

SEQ ID NO: 45301 - protein, 373 aa, Homo sapiens
MIEDSGKRGNTMAERRQLFAEMRAQDLDRIRLSTYRTACKLRFVQKKCNLHLVDIWNVIEALRENALNNLDPNTELNVSRLEAVLSTIFYQLNKRMPTTHQIHVEQSISLLLNFLLAAFDPEGHGKISVFAVKMALATLCGGKIMDKLRYIFSMISDSSGVMVYGRYDQFLREVLKLPTAVFEGPSFGYTEQSARSCFSQQKKVTLNGFLDTLMSDPPPQCLVWLPLLHRLANVENVFHPVECSYCHSESMMGFRYRCQQCHNYQLCQDCFWRGHAGGSHSNQHQMKEYTSWKSPAKKLTNALSKSLSCASSREPLHPMFPDQPEKPLNLAHIVDTWPPRPVTSMNDTLFSHSVPSSGSPFITRSMLESSNRL

SEQ ID NO: 45302 - protein, 141 aa, Homo sapiens
  MOD_RES (1)..(1): Any amino acid
XKELVSVMDLSLAKELLKVMRTIDDRIVHELNTTVPTASFAGKIDASQTCKQLYESLMAAHASRDRVIKNCIAQTSAVVKNLREEREKNLDDLTLLKQLRKEQTKLKWMQSELNVEEVVNDRSWKVFNERCRIHFKPPKNE

SEQ ID NO: 45303 - protein, 102 aa, Homo sapiens
MADWARAQSPGAVEEILDRENKRMADSLASKVTRLKSLALDIDRDAEDQNRYLDGMVRAHGVRVSVPCPSTTCCRACSVSFSTGAGGWSNHHFCVILLGFLP

SEQ ID NO: 45304 - protein, 11 aa, Homo sapiens
MEKLAASTEPQ

SEQ ID NO: 45305 - protein, 592 aa, Homo sapiens
MAAAAAATAAAAASIRERQTVALKRMLNFNVPHIKNSTGEPVWKVLIYDRFGQDIISPLLSVKELRDMGITLHLSKLEDIANAALAASAVTQVAKVFDQYLNFITLEDDMFVLCNQNKELVSYRAINRPDITDTEMETVMDTIVDSLFCFFVTLGAVPIIRCSRGTAAEMVAVKLDKKLRENLRDARNSLFTGDTLGAGQFSFQRPLLVLVDRNIDLATPLHHTWTYQALVHDVLDFHLNRVNLEESSGVENSPAGARPKRKNKKSYDLTPVDKFWQKHKGSPFPEVAESVQQELESYRAQEDEVKRLKSIMGLEGEDEGAISMLSDNTAKLTSAVSSLPELLEKKRLIDLHTNVATAVLEHIKARKLDVYFEYEEKIMSKTTLDKSLLDIISDPDAGTPEDKMRLFLIYYISTQQAPSEADLEQYKKALTDAGCNLNPLQYIKQWKAFTKMASAPASYGSTTTKPMGLLSRVMNTGSQFVMEGVKNLVLKQQNLPVTRILDNLMEMKSNPETDDYRYFDPKMLRGNDSSVPRNKNPFQEAIVFVVGGGNYIEYQNLVDYIKGKQGKHILYGCSELFNATQFIKQLSQLGQK

SEQ ID NO: 45306 - protein, 141 aa, Homo sapiens
MTHLLLTATVTPSEQNSSREPGWETAMAKDILGEAGLHFDELNKLRVLDPEVTQQTIELKEECKDFVDKIGQFQKIVGGLIELVDQLAKEAENEKMKAIGARNLLKSIAKQREAQQQQLQALIAEKKMQLERNSISLVILI

SEQ ID NO: 45307 - protein, 66 aa, Homo sapiens
  MOD_RES (1)..(1): Any amino acid
XENTPENHPDHSHLKHALEKAEELCSQVNEGVREKENSDRLEWIQAHVQCEGLSEDCLGAENQSCF

SEQ ID NO: 45308 - protein, 201 aa, Homo sapiens
MVDNRGFMVTRSYTVGVMMMHRTGLYNYYDDEKEKLQIVEMPLAHKLSSLIILMPHHVEPLERLEKLLTKEQLKIWMGKMQKKAVAISLPKGVVEVTHDLQKHLAGLGLTEAIDKNKADLSRMSGKKDLYLASVFHATAFELDTDGNPFDQDIYGREELRSPKLFYADHPFIFLVRDTQSGSLLFIGRLVRPKGDKMRDEL

SEQ ID NO: 45309 - protein, 209 aa, Homo sapiens
GLAVRAESRRLVGIGPRAPPGRVGLQPSGRLDRRGGAGTMGYKDNDGEEEEREGGAAGPRGSRLPPITGGASELAKRKVKKKKRKKKTKGSGKGDDKHQSQSLKSQPLSSSFHDILSPCKERGPKPEHRQSKVEKKHLPSDSSTVSLPDFAEIENLANRINESLRWDGILADPEAEKERIRIYKLNRRKRWQLQPQAAHVESRVPQSLF

SEQ ID NO: 45310 - protein, 33 aa, Homo sapiens
  MOD_RES (1)..(1): Any amino acid
XLGLTYLSLLLIPAAGASSCPRTPLPAMAPLPQ

SEQ ID NO: 45311 - protein, 168 aa, Homo sapiens
MKLRRKTGYSFVNCKKALETCGGDLKQAEIWLHKEAQKEGWSKAAKLQGRKTKEGLIGLLQEGNTTVLVEVNCETDFVSRNLKFQLLVQQVALGTMMHCQTLKDQPSAYSKGFLNSSELSGLPAGPDREGSLKDQLALAIGKLGENMILKRAAWVKVPSGFYVGSYVH

SEQ ID NO: 45312 - protein, 138 aa, Homo sapiens
  MOD_RES (1)..(1): Any amino acid
XMEEKELQASKNLVTFTPSKDSTKDSFQIATLICSTKLTQNVDLLGLLNWRSNSQNIKHNLKKLMEVDGGEIVKFLQDTLDALFNIMMEMSDSETYDFLVFDALVFIISLIGDIKFQHFNPVLETYIYKHFSATLAYV

SEQ ID NO: 45313 - protein, 18 aa, Homo sapiens
MIEDSGKRGNTMAERRQL

SEQ ID NO: 45314 - protein, 126 aa, Homo sapiens
MVLLPGPPLESTFHQSLETDTLLTKLCGQDRLLRRLQEEIDQKQEEKEQLEAALELTRQQLGQATREAGAPGRAWGRQRLLQDRLVSVRATLCHLTQERERVWDTYSGLEQELGTLRETLEYLLHL

SEQ ID NO: 45315 - protein, 119 aa, Homo sapiens
MIEDSGKRGNTMAERRQLFAEMRAQDLDRIRLSTYRTACKLRFVQKKCNLHLVDIWNVIEALRENALNNLDPNTELNVSRLEAVLSTIFYQLNKRMPTTHQIHVEQSISLLLNFLLAAF

SEQ ID NO: 45316 - protein, 107 aa, Homo sapiens
MEAAENNHLEAVKYLIKAGALVDPKDAEGSTCLHLAAKKGHYEVVQYLLSNGQMDVNCQDDGGWTPMIWATEYKHVDLVKLLLSKGSDINIRDNRVPEARNGKSSHK

SEQ ID NO: 45317 - protein, 486 aa, Homo sapiens
GKATGRKAPLWLRAKFQRLLFKLGCYIQKNCGKFLVVGLLIFGAFAVGLKAANLETNVEELWVEVGGRVSRELNYTRQKIGEEAMFNPQLMIQTPKEEGANVLTTEALLQHLDSALQASRVHVYMYNRGKPPLRWTNFDPLEFLEELKKINYQVDSWEEMLNKAEVGHGYMDRPCLNPADPDCPATAPNKNSTKPLDMALVLNGGCHGLSRKYMHWQEELIVGGTVKNSTGKLVSAHALQTMFQLMTPKQMYEHFKGYEYVSHINWNEDKAAAILEAWQRTYVEVVHQSVAQNSTQKVLSFTTTTLDDILKSFSDVSVIRVASGYLLMLAYACLTMLRWDCSKSQGAVGLAGVLLVALSVAAGLGLCSLIGISFNAATTQVLPFLALGVGVDDVFLLAHAFSETGQNKRIPFEDRTGECLKRTGASVALTSISNVTAFFMAALIPIPALRAFSLQYILMAHRGRLSFNDTLWCGGLKSYMRFPYEE

SEQ ID NO: 45318 - protein, 291 aa, Homo sapiens
  MOD_RES (1)..(1): Any amino acid
XSEEEKRVTVIKAPHYPGIGPVDESGIPTAIRTTVDRPKDWYKTMFKQIHMVHKPDDDTDMYNTPYTYNAGLYNPPYSAQSHPAAKTQTYRPLSKSHSDNSPNAFKDASSPVPPPHVPPPVPPLRPRDRSSTEKHDWDPPDRKVDTRKFRSEPRSIFEYEPGKSSILQHERPASLYQSSIDRSLERPMSSASMASDFRKRRKSEPAVGPPRGLGDQSASRTSPGRVDLPGSSTTLTKSFTSSSPSSPSRAKDRESPRSYSSTLTDMGRSAPRERRGTPEKEKLPAKAVYDF

SEQ ID NO: 45319 - protein, 146 aa, Homo sapiens
MTLLTFRDVAIEFSLEEWKCLDLAQQNLYRDVMLENYRNLFSVGLTVCKPGLITCLEQRKEPWNVKRQEAADGHPEFHSITQAVVQWCHLSSLQPLLPGLEPSSHFSLLRTWNYRGTPPHPANFCVFNRDRVLPCCPGWSRTPGLK

SEQ ID NO: 45320 - protein, 223 aa, Homo sapiens
GVSKQDIREQIWGYMESQNLADFPRPVHHRIPNFKGSYLACQNIKDLDVFARTQEVKVDPDKPLEGVRLLVLQSKKTLLVPTPRLRTGLFNKITPPPGATKDILRKCATSQGVRNYSVPIGLDSRVLVDLVVVGSVAVSEKGWRIGKGEGYADLEYAMMVSMGAVSKETPVVTIVHDCQVVDIPEELVEEHDITVDYILTPTRVIATGCKRPKPMGITWFKIR

SEQ ID NO: 45321 - protein, 69 aa, Homo sapiens
MSGEATVLAYHAPEEQEGLLVVKVEEENYVLDQDFGLQENPWSQEVFRQKFRQFSYSDSTGPREALSRL

SEQ ID NO: 45322 - protein, 91 aa, Homo sapiens
MGLEKLHPFDAGKWGKVINFLKEEKLLSDSMLVEAREASEEDLLVVHTRRYLNELKWSFAVATITEIPPVIFLPNFLVQRKVLRPLRTQTG

SEQ ID NO: 45323 - protein, 163 aa, Homo sapiens
MEGPGGSGFHLRLEAFCKCKSPINVFDPVRPALQVGLTRVLPTNPEESWQVYSSAQDSEGRCICTVVAPQQTMCSRDARTKQLRQLLEKVQNMSQSIEVLDRRTQRDLQYVEKMENQMKGLESKFKQVEESHKQHLARQFKAIKAKMDELRPLIPVLEEYKAD

SEQ ID NO: 45324 - protein, 197 aa, Homo sapiens
MRTPQLALLQVFFLVFPDGVRPQPSSSPSGAVPTSLELQRGTDGGTLQSPSEATATRPAVPGLPTVVPTLVTPSAPGNRTVDLFPVLPICVCDLTPGACDINCCCDRDCYLLHPRTVFSFCLPGSVRSSSWVCVDNSVIFRSNSPFPSRVFMDSNGIRQFCVHVNNCWGPHSYLLPQVVCNKLAETTCRSWSWGTLC

SEQ ID NO: 45325 - protein, 229 aa, Homo sapiens
  MOD_RES (1)..(1): Any amino acid
XAGGLVPASGPAPGPAQLRCYAGRLAGLSAALLRTDSFVGGRWLPAAATFPVQDPASGAALGMVADCGVREARAAVRAAYEAFCRWREVSAKERSSLLRKWYNLMIQNKDDLARIITAESGKPLKEAHGEILYSAFFLEWFSEEARRVYGDIIHTPAKDRRALVLKQPIGVAAVITPWNFPSAMITRKVGAALAAGCTVVVKPAEDTPFSALALAEFGKLLAHVCCFSL

SEQ ID NO: 45326 - protein, 141 aa, Homo sapiens
MDLIDILWRQDIDLGVSREVFDFSQRRKEYELEKQKKLEKERQEQLQKEQEKAFFAQLQLDEETGEFLPIQPAQHIQSETSGSANYSQVAHIPKSDALYFDDCMQLLAQTFPFVDDNEVRYKITWLIEKLHHNYKITIYSM

SEQ ID NO: 45327 - protein, 142 aa, Homo sapiens
MDWDKDGDVLAVIAEKSSCIYLWDANTNKTSQLDNGMRDQMSFLLWSKVGSFLAVGTVKGNLLIYNHQTSRKIPVLGKHTKRITCGCWNAENLLALGGEDKMITVSNQEGDTIRQTQVRSEPSNMQFFLMKMDDRTSAAESM

SEQ ID NO: 45328 - protein, 150 aa, Homo sapiens
  MOD_RES (1)..(1): Any amino acid
XVRRKSLVLKFPKQQLPPKKKRRVGTTVHCDYLNRPHKSIHRRRTDPMVTLSSILESIINDMRDLPNTYPFHTPVNAKVVKDYYKIITRPMDLQTLRENVRKRLYPSREEFREHLELIVKNSATYNGIGIRIKHTRSIEKGHSHHHLPRE

SEQ ID NO: 45329 - protein, 34 aa, Homo sapiens
MDIIETAKLEEHLENQPSDPTNTYARPAEPVEEE

SEQ ID NO: 45330 - protein, 249 aa, Homo sapiens
MWLDHRAVSQVNRINETKHSVLQYVGGVMSVEMQAPKLLWLKENLREICWDKAGHFFDLPDFLSWKATGVTARSLCSLVCKWTYSAEKGWDDSFWKMIGLEDFVADNYSKIGNQVLPPGASLGNGLTPEAARDLGLLPGIAVAASLIDAHAGGLGVIGADVRGHGLICEGQPVTSRLAVICGTSSCHMGISKDPIFVPGVWGPYFSAMVPGFWLNEGGQSVTGKLIDHMVQGHAAFPELQVKATARSPD

SEQ ID NO: 45331 - protein, 253 aa, Homo sapiens
MNTVGPYHNRQETYKYFSLPFCVGSKKSISHYHETLGEALQGVELEFSGLDIKFKDDVMPATYCEIDLDKEKRDAFVYAIKNHYWYQMYIDDLPIWGIVGEADENGEDYYLWTYKKLEIGFNGNRIVDVNLTSEGKVKLVPNTKIQMSYSVKWKKSDVKFEDRFDKYLDPSFFQHRIHWFSIFNSFMMVIFLVGLVSMILMRTLRKDYARYSKEEEMDDMDRDLGDEYGWKQVHGDVFRPSSHPLIFSSLIGS

SEQ ID NO: 45332 - protein, 291 aa, Homo sapiens
  MOD_RES (1)..(1): Any amino acid
XMVFQQVGVSMQSINSHATEWSPSHPGEDAVASFADVGWVAKEEGECSARLRTEVRSRPPLQDDLLFFEKAPSRQISLPDLSQEEPQLKTPALANEEALQKICALENELAALRAQIAKIVTQQEQQNLTAGDLDSTTFGTIPPHPPPPPPPLPPPALGLHQSTSAVDLIKERREKRANAGKTLVKNNPKKPEMPNMLEILKEMNSVKLRSVKRSEQDVKPKPVDATDPAALIAEALKKKFAYRYRSDSQDEVEKGIPKSESEATSERVLFGPHMLKPTGKMKALIENVSDS

SEQ ID NO: 45333 - protein, 144 aa, Homo sapiens
MRSCFRLCERDVSSSLRLTRSSDLKRINGFCTKPQESPGAPSRTYNRVPLHKPTDWQKKILIWSGRFKKEDEIPETVSLEMLDAAKNKMRVKISYLMIALTVVGCIFMVIEGKKAAQRHETLTSLNLEKKARLKEEAAMKAKTE

SEQ ID NO: 45334 - protein, 120 aa, Homo sapiens
MIEPFGNQYIVARPVYSTNAFEENHKKTGRHHKTFLDHLKVCCSCSPQKAKRIVLSLFPIASWLPAYRLKEWLLSDIVSGISTGIVAVLQGLAFALLVDIPPVYGLYASFFPAIIYLFFG

SEQ ID NO: 45335 - protein, 95 aa, Homo sapiens
MAIQFRSLFPLALPGMLALLGWWWFFSRKKGHVSSHDEQQVEAGAVQLRADPAIKEPLPVEDVCPKVVSTPPSVTEPPEKELSTVSKLPAEPPAL

SEQ ID NO: 45336 - protein, 337 aa, Homo sapiens
HLFILEGLADQGLRQLWENHQSWIPRSEHRKYKVLYNSQLLFRSRLYGDLEAILYHVHLFQPTELLLQQAVFFLRDTERRRVFQALARIHDICYNSTTLWDVTVRDLLPSSAMIKDLSQEFGMPLSQEELTDEKLFALPPQPAPNLEDYHSRNSTLTLEIHAHQEKYLQWRSAMLMKNKDKKHSFIQKNITEAYQVSKKPPKSVAKVIKISAPANKAVYNYSTQTMNSTELAKKELYQEIAKEPRKRFTYSQDYLSAMVEPLDLKEEEKKAQKKSRQAWLTARGFQVTGLQSDTESSFQDLKLPPIKELNEVHREEQGLRWGVHRDLSPPDLLTPPI

SEQ ID NO: 45337 - protein, 142 aa, Homo sapiens
KWDSNVIETFDIARLTVNADVGYYSWRCPKPLKNRDVITLRSWLPMGADYIIMNYSVKHPKYPPRKDLVRAVSIQTGYLIQSTGPKSCVITYLAQVDPKGSLPKWVVNKSSQFLAPKAMKKMYKAGAAAWLDRAPINDPTAS

SEQ ID NO: 45338 - protein, 116 aa, Homo sapiens
  MOD_RES (1)..(1): Any amino acid
XHLTSYICFLRKILPYQLKSLEEECESSLCTSALRARNLELSQDMKKMTAVFEKLQTYIALLALPILQRASRSTELLTLTWQKQNSVIFGYRARWTPSDKLQFCVNKCWCCSAWIS

SEQ ID NO: 45339 - protein, 242 aa, Homo sapiens
MAKFRRRTCIILALFILFIFSLMMGLKMLRPNTATFGAPFGLDLLPELHQRTIHLGKNFDFQKSDRINSETNTKNLKSVEITMKPSKASELNLDELPPLNNYLHVFYYSWYGNPQFDGKYIHWNHPVLEHWDPRIAKNYPQGRHNPPDDIGSSFYPELGSYSSRDPSVIETHMRQMRSASIGVLALSWYPPDVNDENGEPTDNLVPTILDKAHKYNLKIWKSSGLLQVQDEDWQCSSYVLCL

SEQ ID NO: 45340 - protein, 98 aa, Homo sapiens
MGSKDHAVFFREMTQLILNEMPKAGYSSILNDFVESNFFVIDGDSLLVTCLGVKSFKWGQNLHFFYLVECYLVDLLSNGGQFTIVFFKDAEYAYFDFP

SEQ ID NO: 45341 - protein, 550 aa, Homo sapiens
TDFAFFLQPASRPPMPAHQVPPYKAVSARFRPFTFSQSTPIGLDRVGRRRQMRASNVSSDGGTEPSALVDDNGSEEDFSYEDLCQASPRYLQPGGEQLAINELISDGNVVCAEALWDHVTMDDQELGFKAGDVIQVLEASNKDWWWGRSEDKEAWFPASFVRGYIRQCRKHTGMFTVAQLATIFGNIEDIYKFQRKFLKDLEKQYNKEEPHLSEIGSCFLQNQEGFAIYSEYCNNHPGACLELANLMKQGKYRHFFEACRLLQQMIDIAIDGFLLTPVQKICKYPLQLAELLKYTTQEHGDYSNIKAAYEAMKNVACLINERKRKLESIDKIARWQVSIVGWEGLDILDRSSELIHSGELTKITKQGKSQQRTFFLFDHQLVSCKKDLLRRDMLYYKGRLDMDEMELVDLGDGRDKDCNLSVKNAFKLVSRTTDEVYLFCAKKQEDKARWLQACADERRRVQEDKEMGMEISENQKKLAMLNAQKAGHGKSKGYNRCPVAPPHQGLHPIHQRHITMPTSVPQQQVFGLAEPKRKSSLFWHTFNRLTPFRK

SEQ ID NO: 45342 - protein, 143 aa, Homo sapiens
FQDTLPKQPCGSNPLPGLTKQEDCCGSIGTAWGQSKCHKCPQLQYTGVQKPGPVRGEVGADCPQGYKRLNSTHCQADKPEEKSLCFRLVSPEHQCQHPLTTRLTRQLCCCSVGKAWGARCQRCPTDGTAAFKEICPAGKGYHI

SEQ ID NO: 45343 - protein, 71 aa, Homo sapiens
MHKNPKVQLWSTYQVRSADWSLEALLYKWDMKCVHIPLESFDADKEDIAESTLPGRHTVEMLVISFAKDSL

SEQ ID NO: 45344 - protein, 174 aa, Homo sapiens
MADGGSPFLGRRDFVYPSSTRDPSASNGGGSPARREEKKRKAARLKFDFQAQSPKELTLQKGDIVYIHKEVDKNWLEGEHHGRLGIFPANYVEVLPADEIPKPIKPPTYQVLEYGEAVAQYTFKGDLEVELSFRKGEHICLIRKVNENWYEGRITGTGRQGIFPASYVQVSREP

SEQ ID NO: 45345 - protein, 149 aa, Homo sapiens
MRVLCAFPEAMPSSNSRPPACLAPGALYLALLLHLSLSSQAGDRRPLPVDRAAGLKEKTLILLDVSTKNPVRTVNENFLSLQLDPSIIHDGWLDFLSSKRLVTLARGLSPAFLRFGGKRTDFLQFQNLRNPAKSRGGPGPDYYLKNYED

SEQ ID NO: 45346 - protein, 161 aa, Homo sapiens
  MOD_RES (1)..(1): Any amino acid
XIINIMSAEDFPLPYQAEFFIKNMNVEEMLASEVLGDFLGAVKNVWQPERLNAINITSALDRGGRVPLPINDLKEGVYVMVGADVPFSSCLREVENPQNQLRCSQEMEPVITCDKKFRTQFYIDWCKISLGKEKHANTRHPTGPSQCYSEIYQGASRHVQE

SEQ ID NO: 45347 - protein, 366 aa, Homo sapiens
MEEEIAALVIDNGSGMCKAGFAGDDAPRAVFPSIVGRPRHQDSYVGDEAQSKRGILTLKYPIEHGIVTNWDDMEKIWHHTFYNELRVAPEEHPVLLTEAPLNPKANREKMTQIMFETFNTPAMYVAIQAVLSLYASGRTTGIVMDSGDGVTHTVPIYEGYALPHAILRLDLAGRDLTDYLMKILTERGYSFTTTAEREIVRDIKEKLCYVALDFEQEMATAASSSSLEKSYELPDGQVITIGNERFRCPEALFQPSFLGMESCGIHETTFNSIMKCDVDIRKDLYANTVLSGGTTMYPGIADRMQKEITALAPSTMKIKIIAPPERKYSVWIGGSILASLSTFQQMWISKQEYDESGPSIVHRKCF

SEQ ID NO: 45348 - protein, 354 aa, Homo sapiens
MTMAGGRRGLVAPQNTFLENIVRRSNDTNFVLGNAQIVDWPIVYSNDGFCKLSGYHRAEVMQKSSTCSFMYGELTDKDTIEKVRQTFENYEMNSFEILMYKKNRTPVWFFVKIAPIRNEQDKVVLFLCTFSDITAFKQPIEDDSCKGWGKFARLTRALTSSRGVLQQLAPSVQKGENVHKHSRLAEVLQLGSDILPQYKQEAPKTPPHIILHYCVFKTTWDWIILILTFYTAILVPYNVSFKTRQNNVAWLVVDSIVDVIFLVDIVLNFHTTFVGPAGEVISDPKLIRMNYLKTWFVIDLLSCLPYDVINAFENVDEVSAFMGDPGKIGFADQIPPPLEGRESQHFSMPPSSGM

SEQ ID NO: 45349 - protein, 79 aa, Homo sapiens
MSDRLENCDLEESNSRDYLEAKGKMEKQQENQKEYFRQGMIIYDKMSIFNQHTYLSQHSRCHSTEKPYKCKECGKAFRR

SEQ ID NO: 45350 - protein, 161 aa, Homo sapiens
MENSGFFPSGLVVLSGGMDAQLKIWSAEDASCVVTFKGHKGGILDTAIVDRGRNVVSASRDGTARLWDCGRSACLGVLADCGSSINGVAVGAADNSINLGSPEQMPSEREVGTEAKMLLLAREDKKLQCLGLQSRQLVFLFIGSDAFNCCTFLSGFLLLAG

SEQ ID NO: 45351 - protein, 81 aa, Homo sapiens
MSGGWMAQVGAWRTGALGLALLLLLGLGLGLEAAASPLSTPTSAQAADHLAMRSLVKTLGSARPEFEAQLRYQLFFFSFLW

SEQ ID NO: 45352 - protein, 236 aa, Homo sapiens [sequence omitted]

SEQ ID NO: 45353 - protein, 193 aa, Homo sapiens
  MOD_RES (1)..(1): Any amino acid
XSGDVLVAAGFVAYLGPFTIAGLPNDTLSVENGVINQFSQRWTHFIDPQSQANKWIKNMEKDNGLDVFKLSDRDFLRSMENAIRFGKPCLLENVGEELDPALEPVLLKQTYKQQGNTVLKLGDTVIPYHEDFRMYITTKLPNPHYTPEISTKLTLINFTLSPSGLEDQLLGQVVAEERPDLEEAKNQLIISNA

SEQ ID NO: 45354 - protein, 512 aa, Homo sapiens
MEGVSSHRTLSYSRWSYDSVLDDEGRNLRQQKLDRQRALLEQKQKKKRQEPLMVQANADGRPRSRRARQSEEQAPLVESYLSSSGSTSYQVQEADSLASVQLGATRPTAPASAKRTKAAATAGGQGGAARKEKKGKHKGTSGPAALAEDKSEAQGPVQILTVGQSDHAQDAGETAAGGGERPSGQDLRATMQRKGISSSMSFDEDEEDEEENSSSSSQLNSNTRPSSATSRKSVREAASAPSPTAPEQPVDVEVQDLEEFALRPAPQGITIKCRITRDKKGMDRGMYPTYFLHLDREDGKKVFLLAGRKRKKSKTSNYLISVDPTDLSRGGDSYIGKLRSNLMGTKFTVYDNGVNPQKASSSTLESGTLRQELAAVCYETNVLGFKGPRKMSVIVPGMNMVHERVSIRPRNEHETLLARWQNKNTESIIELQNKTPVWNDDTQSYVLNFHGRVTQASVKNFQIIHGNDPDYIVMQFGRVAEDVFTMDYNYPLCALQAFAIALSSFDSKLACE

SEQ ID NO: 45355 - protein, 1382 aa, Homo sapiens
MKDPCFSNPCQGSATCVNTPGERSFLCKCPPGYSGTICETTIGSCGKNSCQHGGICHQDPIYPVCICPAGYAGRFCEIDHDECASSPCQNGAVCQDGIDGYSCFCVPGYQGRHCDLEVDECASDPCKNEATCLNEIGRYTCICPHNYSGVNCELEIDECWSQPCLNGATCQDALGAYFCDCAPGFLGDHCELNTDECASQPCLHGGLCVDGENRYSCNCTGSGFTGTHCETLMPLCWSKPCHNNATCEDSVDNYTCHCWPGYTGAQCEIDLNECNSNPCQSNGECVELSSEKQYGRITGLPSSFSYHEASGYVCICQPGFTGIHCEEDVNECSSNPCQNGGTCENLPGNYTCHCPFDNLSRTFYGGRDCSDILLGCTHQQCLNNGTCIPHFQDGQHGFSCLCPSGYTGSLCEIATTLSFEGDGFLWVKSGSVTTKGSVCNIALRFQTVQPMALLLFRSNRDVFVKLELLSGYIHLSIQVNNQSKVLLFISHNTSDGEWHFVEVIFAEAVTLTLIDDSCKEKCIAKAPTPLESDQSICAFQNSFLGGLPVGMTSNGVALLNFYNMPSTPSFVGCLQDIKIDWNHITLENISSGSSLNVKAGCVRKDWCESQPCQSRGRCINLWLSYQCDCHRPYEGPNCLREYVAGRFGQDDSTGYVIFTLDESYGDTISLSMFVRTLQPSGLLLALENSTYQYIRVWLERGRLAMLTPNSPKLVVKFVLNDGNVHLISLKIKPYKIELYQSSQNLGFISASTWKIEKGDVIYIGGLPDKQETELNGGFFKGCIQDVRLNNQNLEFFPNPTNNASLNPVLVNVTQGCAGDNSCKRQTNVGRALTELGSRGPKYQVSLFRFCVGSWATGNTFFLSSIKPGSNPCHNGGVCHSRWDDFSCSCPALTSGKACEEVQWCGFSPCPHGAQCQPVLQGFECIANAVFNGQSGQILFRSNGNITRELTNITFGFRTRDANVIILHAEKEPEFLNISIQDSRLFFQLQSGNSFYMLSLTSLQSVNDGTWHEVTLSMTDPLSQTSRWQMEVDNETPFVTSTIATGSLNFLKDNTDIYVGDRAIDNIKGLQGCLSTIEIGGIYLSYFENVHGFINKPQEEQFLKISTNSVVTGCLQLNVCNSNPCLHGGNCEDIYSSYHCSCPLGWSGKHCELNIDECFSNPCIHGNCSDRVAAYHCTCEPGYTGVNCEVDIDNCQSHQCANGATCISHTNGYSCLCFGNFTGKFCRQSRLPSTVCGNEKTNLTCYNGGNCTEFQTELKCMCRPGFTGEWCEKDIDECASDPCVNGGLCQDLLNKFQCLCDVAFAGERCEVDLADDLISDIFTTIGSVTVALLLILLLAIVASVVTSNKRATQGTYSPSRQEKEGSRVEMWNLMPPPAMERLI

SEQ ID NO: 45356 - protein, 366 aa, Homo sapiens
MLMAWCRGPVLLCLRQGLGTNSFLHGLGQEPFEGARSLCCRSSPRDLRDGEREHEAAQRKAPGAESCPSLPLSISDIGTGCLSSLENLRLPTLREESSPRELEDSSGDQGRCGPTHQGSEDPSMLSQAQSATEVEERHVSPSCSTSRERPFQAGELILAETGEGETKFKKLFRLNNFGLLNSNWGAVPFGKIVGKFPGQILRSSFGKQYMLRRPALEDYVVLMKRGTAITFPKDINMILSMMDINPGDTVLEAGSGSGGMSLFLSKAVGSQGRVISFEVRKDHHDLAKKNYKHWRDSWKLSHVEEWPDNVDFIHKDISGATEDIKSLTFDAVALDMLNPHVTLPVFYPHLKHGGVCAVYVVKRIAF

SEQ ID NO: 45357 - protein, 123 aa, Homo sapiens
MGRVQLFEISLSHGRVVYSPGEPLAGTVRVRLGAPLPFRAIRVTCIGSCGVSNKANDTAWVVEEGYFNSSLSLADKGKFGSQFPSGDPWGQPLEWGLSVLSSPFPRSASWIWHWPILSQGCGP

SEQ ID NO: 45358 - protein, 1770 aa, Homo sapiens
MTTMLQKSDSNASFLRAARAGNLDKVVEYLKGGIDINTCNQNGLNALHLAAKEGHVGLVQELLGRGSSVDSATKKGNTALHIASLAGQAEVVKVLVKEGANINAQSQNGFTPLYMAAQENHIDVVKYLLENGANQSTATEDGFTPLAVALQQGHNQAVAILLENDTKGKVRLPALHIAARKDDTKSAALLLQNDHNADVQSKSGFTPLHIAAHYGNVNVATLLLNRGAAVDFTARNGITPLHVASKRGNTNMVKLLLDRGGQIDAKTRDGLTPLHCAARSGHDQVVELLLERGAPLLARTKNGLSPLHMAAQGDHVECVKHLLQHKAPVDDVTLDYLTALHVAAHCGHYRVTKLLLDKRANPNARALNGFTPLHIACKKNRIKVMELLVKYGASIQAITESGLTPIHVAAFMGHLNIVLLLLQNGASPDVTNIRGETALHMAARAGQVEVVRCLLRNGALVDARAREEQTPLHIASRLGKTEIVQLLLQHMAHPDAATTNGYTPLHISAREGQVDVASVLLEAGAAHSLATKKGFTPLHVAAKYGSLDVAKLLLQRRAAADSAGKNGLTPLHVAAHYDNQKVALLLLEKGASPHATAKNGYTPLHIAAKKNQMQIASTLLNYGAETNIVTKQGVTPLHLASQEGHTDMVTLLLDKGANIHMSTKSGLTSLHLAAQEDKVNVADILTKHGADQDAHTKLGYTPLIVACHYGNVKMVNFLLKQGANVNAKTKNGYTPLHQAAQQGHTHIINVLLQHGAKPNATTANGNTALAIAKRLGYISVVDTLKVVTEEVTTTTTTITEKHKLNVPETMTEVLDVSDEEGDDTMTGDGGEYLRPEDLKELGDDSLPSSQFLDGMNYLRYSLEGGRSDSSDRSHTLSHASYLRDSAVMDDSVVIPSHQVSTLAKEAERNSYRLSWGTENLDNVALSSSPIHSGFLVSFMVDARGGAMRGCRHNGLRIIIPPRKCTAPTRVTCRLVKRHRLATMPPMVEGEGLASRLIEVGPSGAQFLGPVIVEIPHFAALRGKERELVVLRSENGDSWKEHFCDYTEDELNEILNGMDEVLDSPEDLEKKRICRIITRDFPQYFAVVSRIKQDSNLIGPEGGVLSSTVVPQVQAVFPEGALTKRIRVGLQAQPMHSELVKKILGNKATFSPIVTLEPRRRKFHKPITMTIPVPKASSDVMLNGFGGDAPTLRLLCSITGGTTPAQWEDITGTTPLTFVNECVSFTTNVSARFWLIDCRQIQESVTFASQVYREIICVPYMAKFVVFAKSHDPIEARLRCFCMTDDKVDKTLEQQENFAEVARSRDVEVLEGKPIYVDCFGNLVPLTKSGQHHIFSFFAFKENRLPLFVKVRDTTQEPCGRLSFMKEPKSTRGLVHQAICNLNITLPIYTKIDMTSEKNPQDEQERIEERLAYIADHLGFSWTELARELDFTEEQIHQIRIENPNSLQDQSHALLKYWLERDGKHATDTNLVECLTKINRMDIVHLMETNTEPLQERISHSYAEIEQTITLDHSEGFSVLQEELCTAQHKQKEEQAVSKESETCDHPPIVSEEDISVGYSTFQDGVPKTEGDSSATALFPQTHKEQVQQDFSGKMQDLPEESSLEYQQEYFVTTPGTETSETQKAMIVPSSPSKTPEEVSTPAEEEKLYLQTPTSSERGGSPIIQEPEEPSEHREESSPRKTSLVIVESADNQPETCERLDEDAAFEKELTEELGELEASSDEEAMVTTRVVRRRVIIQGDDMPEIPPETVTEEEYIDEHGHTVVKKDNNE

SEQ ID NO: 45359 - protein, 443 aa, Homo sapiens
  MOD_RES (1)..(1): Any amino acid
XKVQHTVCMDCSSYSTYCYRCDDFVVNDTKLGLVQKVREHLQNLENSAFTADRHKKRKLLENSTLNSKLLKVNGSTTAICATGLRNLGNTCFMNAILQSLSNIEQFCCYFKELPAVELRNGKTAGRRTYHTRSQGDNNVSLVEEFRKTLCALWQGSQTAFSPESLFYVVWKIMPNFRGYQQQDAHEFMRYLLDHLHLELQGGFNGVSRSAILQENSTLSASNKCCINGASTVVTAIFGGILQNEVNCLICGTESRKFDPFLDLSLDIPSQFRSKRSKNQENGPVCSLRDCLRSFTDLEELDETELYMCHKCKKKQKSTKKFWIQKLPKVLCLHLKRFHWTAYLRNKVDTYVEFPLRGLDMKCYLLEPENSGPESCLYDLAAVVVHHGSGVGSGHYTAYATHEGRWFHFNDSTVTLTDEETVVKAKAYILFYVEHQAKAGSDKL

SEQ ID NO: 45360 - protein, 128 aa, Homo sapiens
MMVVLLGATTLVLVAVAPWVLSAAAGGKNLKSPQKVEVDIIDDNFILRWNRSDESVGNVTFSFDYQKTGMDNWIKLSGCQNITSTKCNFSSLKLNVYEEIKLRIRAEKENTSSWYEVDSFTPFRKGKD

SEQ ID NO: 45361 - protein, 676 aa, Homo sapiens
MTSQYPFEAETPECLVGSVPVQCLCQGLELDCDETNLRAVPSVSSNVTAMSLQWNLIRKLPPDCFKNYHDLQKLYLQNNKITSISIYAFRGLNSLTKLYLSHNRITFLKPGVFEDLHRLEWLIIEDNHLSRISPPTFYGLNSLILLVLMNNVLTRLPDKPLCQHMPRLHWLDLEGNHIHNLRNLTFISCSNLTVLVMRKNKINHLNENTFAPLQKLDELDLGSNKIENLPPLIFKDLKELSQLNLSYNPIQKIQANQFDYLVKLKSLSLEGIEISNIQQRMFRPLMNLSHIYFKKFQYCGYAPHVRSCKPNTDGISSLENLLASIIQRVFVWVVSAVTCFGNIFVICMRPYIRSENKLYAMSIISLCCADCLMGIYLFVIGGFDLKFRGEYNKHAQLWMESTHCQLVGSLAILSTEVSVLLLTFLTLEKYICIVYPFRCVRPGKCRTITVLILIWITGFIVAFIPLSNKEFFKNYYGTNGVCFPLHSEDTESIGAQIYSVAIFLGINLAAFIIIVFSYGSMFYSVHQSAITATEIRNQVKKEMILAKRFFFIVFTDALCWIPIFVVKFLSLLQVEIPGTITSWVVIFILPINSALNPILYTLTTRPFKEMIHRFWYNYRQRKSMDSKGQKTYAPSFIWVEMWPLQEMPPELMKPDLFTYPCEMSLISQSTRLNSYS

SEQ ID NO: 45362 - protein, 275 aa, Homo sapiens
MRDPNTKRSRGFGFVTYATVEEVDAAMNARPHKVDGRVVEPKRAVSREDSQRPGAHLTVKKIFVGGIKEDTEEHHLRDYFEQYGKIEVIEIMTDRGSGKKRGFAFVTFDDHDSVDKIVIQKYHTVNGHNCEVRKALSKQEMASASSSQRGRSGSGNFGGGRGGGFGGNDNFGRGGNFSGRGGFGGSRGGGGYGGSGDGYNGFGNDGSNFGGGGSYNDFGNYNNQSSNFGPMKGGNFGGRSSGPYGGGGQYFAKPRNQGGYGGSSSSSSYGSGRRF

SEQ ID NO: 45363 - protein, 315 aa, Homo sapiens
MPSPVGLLRALPLPWPQFLACTLRRLAGPRESTGPSQKPPPLCSVPCRVPAMTEEVAREALLSFVDSKCCYSSTVAGDLVIQELKRQTLCRYRLETFSESRISEWTFQPFTNHSVDGPQRGASPRLWDIKVQGPPMFQEDTRKFQVPHSSLVKECHKCHGRGRYKCSGCHGAGTVRCPSCCGAKRKAKQSRRCQLCAGSGRRRCSTCSGRGNKTCATCKGEKKLLHFIQLVIMWKNSLFEFVSEHRLNCPRELLAKAKGENLFKDENSVVYPIVDFPLRDISLASQRGIAEHSAALASRARVLQQVSQGGGAIWL

SEQ ID NO: 45364 - protein, 68 aa, Homo sapiens
MGSACIKVTKYFLFLFNLIFFILGAVILGFGVWILADKSSFISVLQTSSSSLRMGAYVFIGVGAVTML

SEQ ID NO: 45365 - protein, 352 aa, Homo sapiens
MEEAGGPMARAKARVDGPVDPPAATVLPMVRSEHVTVPGQPPAPSTTRRKDVPSPGVDRVSPSPGGTPAPVPTGAEASTESQLVSDPTEGKTCTETSREEDEVALAADLEIFLDTLRSMEPPEILRTHRLPRAPRSSYLSMYATLPAIEEDQLGPWVLGPGPQEVPSLEEKEEEEEEEPENPYLSDDEKLQRRQEKAGPSPSRDLHPARPTQVSCSPLEMMKKHVAGTKGPHSELGLELQGGSRPTSRLGGSLLFGSLVPTAKEASTPEPLGTKLSALLPHGAPGLRKVPGQLPLLCSERSSPTEKLACSLPLEGWPSLKDPGQAEHQAWKGDLLLRVWLPRQWQGGLGRHR

SEQ ID NO: 45366 - protein, 106 aa, Homo sapiens
MDNYSTGYDVKPPCLYQMPLSGQQSSIKVEDIQMHNYQQHSHLPPQSEEMMPHSGSVYYKPSSPPTPTTPGFQVQHSPMWDDPGSLHNFHQNYVATTHMIEQRKTP

SEQ ID NO: 45367 - protein, 72 aa, Homo sapiens
  MOD_RES (1)..(1): Any amino acid
XPQPTIPIVGIVAGLVVLGAVVTGAVVAAVMWRKKSSGPAPECLYLSNKYSHPGAIFPPEDISYVWKNVLLP

SEQ ID NO: 45368 - protein, 43 aa, Homo sapiens
MNYLDRYLSCVPTRKAQLQLLGAVCMLLASKLRETTPLTIEKL

SEQ ID NO: 45369 - protein, 134 aa, Homo sapiens
MLVKHKETGNHYAMKILDKQKVVKLKQIEHTLNEKRILQAVNFPFLVKLEFSFKDNSNLYMVMEYVPGGEMFSHLRRIGRFRLFPMSGYLRIRCLAFLTAGLEVSSSGVGSAGPPAGPFWGMTTDVHLPICPHQ

SEQ ID NO: 45370 - protein, 26 aa, Homo sapiens
MTVSHCQDACAERSYVYAGLEAGAEC

SEQ ID NO: 45371 - protein, 88 aa, Homo sapiens
MNPAAEAEFNILLATDSYKVTHYKQYPPNTSKVYSYFECREKKTENSKLRKVKYEETVFYGLQYILNKYLKGKVVTKEKIQEAKDVYK

SEQ ID NO: 45372 - protein, 283 aa, Homo sapiens
MALPHDSNETSYLLPPNNEDWGRQTIPDFVYGQKDLMAEGIQWPRNAPGIPDALPQSPFDAALCSAWKQRVELGLFRYRLRELQTQILPGAVGFVAQLNVERGVQRRPPQTIKSVRQAFDPVQFNFNKIRPGEVLFRLHREPDLPGTLLQEDILVVINVSPLEWGHVLLVPEPARQLPQRLLPGALRAGIEAVLLSLHPGFRVGFNSLGGLASVNHLHLHGYYLAHRLPVEQAPSEPLDPGGHLHLLQDLPAPGFLFYTRGPGPDLESLISRITGHQPDQLQV

SEQ ID NO: 45373 - protein, 504 aa, Homo sapiens
MGDWMTVTDPESKTISQYTSETKMSPSSLYSQQVLCSSIPLSKNVHSFFSAFCTEDNIEQSISYLDQELTTFGFPSLYEESKGKETKRELNIVAVLNCMNELLVLQRKNLLAQENVETQNLKLGSDMDHLQSCYSKLKEQLETSRREMIGLQERDRQLQCKNRNLHQLLKNEKDEVQKLQNIIASRATQYNHDMKRKEREYNKLKERLHQLVMNKKDKKIAMDILNYVGRADGKRGSWRTGKTEARNEDEMYKILLNDYEYRQKQILMENAELKKVLQQMKKEMISLLSPQKKKPRERVDDSTGTVISDVEEDAGELSRESMWDLSCETVREQLTNSIRKQWRILKSHVEKLDNQVSKVHLEGFNDEDVISRQDHEQETEKLELEIQQCKEMIKTQQQLLQQQLATAYDDDTTSLLRDCYLLEEKERLKEEWSLFKEQKKNFERERRSFTEAAIRLGLEIGFLLLSVLHKKSLLGIHHSSTVSRCGVRRQCNQDYICCLKKKGI

SEQ ID NO: 45374 - protein, 106 aa, Homo sapiens
MCVQNCGPSFQSLIVKKEFVKENLVKLLNPRYNLPLDIQNRILNFIKTWSQGFPGGVDVSEVKEVYLDLVKKGVQFPPSEAEAETARQETAQISSNPPTSVPTAPA

SEQ ID NO: 45375 - protein, 79 aa, Homo sapiens
MSLEGVLKPGNPLPFPLPPLQYPPPSTLSHSDNLAMTSRSTARPNGQPQASKICQFKLVLLGESAVGKSSLVLRFVKGQ

SEQ ID NO: 45376 - protein, 436 aa, Homo sapiens
MLYAKPPPTINGIKGLQRKERLKPAHIHLQQLTCFSITCSSTMSYSCCLPSLGCRTSCSSRPCVPPSCHGYTLPGACNIPANVSNCNWFCEGSFNGSEKETMQFLNDRLASYLEKVRQLERDNAELEKLIQERSQQQEPLLCPSYQSYFKTIEELQQKILCAKAENARLVVNIDNAKLASDDFRSKYQTEQSLRLLVESDINSIRRILDELTLCKSDLESQVESLREELICLKKNHEEEVNTLRSQLGDRLNVEVDTAPTVDLNQVLNETRSQYEALVETNRREVEQWFATQTEELNKQVVSSSEQLQSCQAEIIELRRTVNALEIELQAQHNLRDSLENTLTESEAHYSSQLSQVQSLITNVESQLAEIRCDLERQNQEYQVLLDVRARLECEINTYRSLLESEDCKLPCNPCATTNASGNSCGPCGTSQKGCCN

SEQ ID NO: 45377 - protein, 107 aa, Homo sapiens
MAATAREDGASGQERGQRGCEHYDRGCLLKAPCCDKLYTCRLCHDNNEDHQLDRFKVKEVQCINCEKIQHAQQTCEECSTLFGEYYCDICHLFDKDKKQYHCENCGI

SEQ ID NO: 45378 - protein, 1740 aa, Homo sapiens
MFRQFYLWTCLASGIILGSLFEICLGQYDDDCKLARGGPPATIVAIDEESRNGTILVDNMLIKGTAGGPDPTIELSLKDNVDYWVLMDPVKQMLFLNSTGRVLDRDPPMNIHSIVVQVQCINKKVGTIIYHEVRIVVRDRNDNSPTFKHESYYATVNELTPVGTTIFTGFSGDNGATDIDDGPNGQIEYVIQYNPDDPTSNDTFEIPLMLTGNIVLRKRLNYEDKTRYFVIIQANDRAQNLNERRTTTTTLTVDVLDGDDLGPMFLPCVLVPNTRDCRPLTYQAAIPELRTPEELNPIIVTPPIQAIDQDRNIQPPSDRPGILYSILVGTPEDYPRFFHMHPRTAELSLLEPVNRDFHQKFDLVIKAEQDNGHPLPAFAGLHIEILDENNQSPYFTMPSYQGYILESAPVGATISDSLNLTSPLRIVALDKDIEDTKDPELHLFLNDYTSVFTVTQTGITRYLTLLQPVDREEQQTYTFSITAFDGVQESEPVIVNIQVMDANDNTPTFPEISYDVYVYTDMRPGDSVIQLTAVDADEGSNGEITYEILVGAQGDFIINKTTGLITIAPGVEMIVGRTYALTVQAADNAPPAERRNSICTVYIEVLPPNNQSPPRFPQLMYSLEISEAMRVGAVLLNLQATDREGDSITYAIENGDPQRVFNLSETTGILTLGKALDRESTDRYILIITASDGRPDGTSTATVNIVVTDVNDNAPVFDPYLPRNLSVVEEEANAFVGQVKATDPDAGINGQVHYSLGNFNNLFRITSNGSIYTAVKLNREVRDYYELVVVATDGAVHPRHSTLTLAIKVLDIDDNSPVFTNSTYTVLVEENLPAGTTILQIEAKDVDLGANVSYRIRSPEVKHFFALHPFTGELSLLRSLDYEAFPDQEASITFLVEAFDIYGTMPPGIATVTVIVKDMNDYPPVFSKRIYKGMVAPDAVKGTPITTVYAEDADPPGLPASRVRYRVDDVQFPYPASIFEVEEDSGRVITRVNLNEEPTTIFKLVVVAFDDGEPVMSSSATVKILVLHPGEIPRFTQEEYRPPPVSELATKGTMVGVISAAAINQSIVYSIVSGNEEDTFGINNITGVIYVNGPLDYETRTSYVLRVQADSLEVVLANLRVPSKSNTAKVYIEIQDENNHPPVFQKKFYIGGVSEDARMFTSVLRVKATDKDTGNYSVMAYRLIIPPIKEGKEGFVVETYTGLIKTAMLFHNMRRSYFKFQVIATDDYGKGLSGKADVLVSVVNQLDMQVIVSNVPPTLVEKKIEDLTEILDRYVQEQIPGAKVVVESIGARRHGDAFSLEDYTKCDLTVYAIDPQTNRAIDRNELFKFLDGKLLDINKDFQPYYGEGGRILEIRTPEAVTSIKKRGESLGYTEGALLALAFIIILCCIPAILVVLVSYRQFKVRQAECTKTARIQAALPAAKPAVPAPAPVAAPPPPPPPPPGAHLYEELGDSSIWSFCWQLVICMRTCAIWRTLTRRGYGSEQQQLLRPSLLKPEELSMESGIDPGQEYGQDYYSYEHGYEMPQYGSRRRLLPPAGQEEYGEVVGEAEEEYEEEEWARKRMIKLVVDREYETSSTGEDSAPECQRNRLHHPSIHSNINGNIYIAQNGSVVRTRRACLTDNLKVASPVRLGGPFKKLDKLAVTHEENVPLNTLSKGPFSTEKMNARPTLVTFAPCPVGTDNTAVKPLRNRLKSTVEQESMIDSKNIKEALEFHSDHTQSDDEELWMGPWNNLHIPMTKL

SEQ ID NO: 45379 - protein, 105 aa, Homo sapiens
MHRTTRIKITELNPHLMCVLCGGYFIDATTIIECLHSFCKTCIVRYLETSKYCPICDVQVHKTRPLLNIRSDKTLQDIVYKLVPGLFKNEMKRRRDFYAAHPSAD

SEQ ID NO: 45380 - protein, 119 aa, Homo sapiens
MNVTPEVKSRGMKFAEEQLLKHGWTQGKGLGRKENGITQALRVTLKQDTHGVGHDPAKEFTNHWWNELFNKTAANLVVETGQDGVQIRSLSKETTRYNHPKPNLLYQKFVKTAQTLSRN

SEQ ID NO: 45381 - protein, 1136 aa, Homo sapiens
MHPQSLAEEEIKTEQEVVEGMDISTRSKDPGSAERTAQKRKFPSPPHSSNGHSPQDTSTSPIKKKKKPGLLNSNNKEQDGRNDFYCWVCHREGQVLCCELCPRVYHAKCLRLTSEPEGDWFCPECEKITVAECIETQSKAMTMLTIEQLSYLLKFAIQKMKQPGTDAFQKPVPLEQHPDYAEYIFHPMDLCTLEKNAKKKMYGCTEAFLADAKWILHNCIIYNGGNHKLTQIAKVVIKICEHEMNEIEVCPECYLAACQKRDNWFCEPCSNPHPLVWAKLKGFPFWPAKALRDKDGQVDARFFGQHDRAWVPINNCYLMSKEIPFSVKKTKSIFNSAMQEMEVYVENIRRKFGVFNYSPFRTPYTPNSQYQMLLDPTNPSAGTAKIDKQEKVKLNFDMTASPKILMSKPVLSGGTGRRISLSDMPRSPMSTNSSVHTGSDVEQDAEKKATSSHFSASEESMDFLDKSTASPASTKTGQAGSLSGSPKPFSPQLSAPITTKTDKTSTTGSILNLNLDRSKAEMDLKELSESVQQQSTPVPLISPKRQIRSRFQLNLDKTIESCKAQLGINEISEDVYTAVEHSDSEDSEKSDSSDSEYISDDEQKSKNEPEDTEDKEGCQMDKEPSAVKKKPKPTNPVEIKEELKSTSPASEKADPGAVKDKASPEPEKDFSEKAKPSPHPIKDKLKGKDETDSPTVHLGLDSDSESELVIDLGEDHSGREGRKNKKEPKEPSPKQDVVGKTPPSTTVGSHSPPETPVLTRSSAQTSAAGATATTSTSSTVTVTAPAPAATGSPVKKQRPLLPKETAPAVQRVVWNSSTVQQKEITQSPSTSTITLVTSTQSSPLVTSSGSMSTLVSSVNADLPIATASADVAADIAKYTSKIRRLRIEIEKLQWLHQQELSEMKHNLELTMAEMRQSLEQERDRLIAEVKKQLELEKQQAVDETKKKQWCANCKKEAIFYCCWNTSYCDYPCQQAHWPEHMKSCTQSATAPQQEADAEVNTETLNKSSQGSSSSTQSAPSETASASKEKETSAEKSKESGSTLDLSGSRETPSSILLGSNQGSVSKRCDKQPAYAPTTTDHQPHPNYPAQKYHSRSNKSSWSSSDEKRGSTRSDHNTSTSTKSLLPKESRLDTFWD

SEQ ID NO: 45382 - protein, 299 aa, Homo sapiens
MPGPAAGSRARVYAEVNSLRSREYWDYEAHVPSWGNQDDYQLVRKLGRGKYSEVFEAINITNNERVVVKILKQLYQILTDFDIRFYMYELLKALDYCHSKGIMHRDVKPHNVMIDHQQKKLRLIDWGLAEFYHPAQEYNVRVASRYFKGPELLVDYQMYDYSLDMWSLGCMLASMIFRREPFFHGQDNYDQLVRIAKVLGTEELYGYLKKYHIDLDPHFNDILGQHSRKRWENFIHSENRHLVSPEALDLLDKLLRYDHQQRLTAKEAMEHPYFYPVVKEQSQPCADNAVLSSGLTAAR

SEQ ID NO: 45383 - protein, 74 aa, Homo sapiens
MRGAAPGKKTSGLQQKNVEVKTKKNKQKTPGNGDGGSTSETPQPPRKKRARVDPTVENEETFMNRVEVKVKIPE

SEQ ID NO: 45384 - protein, 95 aa, Homo sapiens
MLFRNRFLLLLALAALLAFVSLSLQFFHLIPVSTPKNGMSSKSRKRIMPDPVTEPPVTDPVYEALLYCNIPSVAERSMEGHAPHHFKLVSVHVFI

SEQ ID NO: 45385 - protein, 114 aa, Homo sapiens
MQSWSRVYCSLAKRGHFNRISHGLQGLSAVPLRTYADQPIDADVTVIGSGPGGYVAAIKAAQLGFKTVCIEKNETLGGTCLNVGCIPSKALLNNSHYYHMAHGKDFASRGIENL

SEQ ID NO: 45386 - protein, 236 aa, Homo sapiens
  MOD_RES (1)..(1): Any amino acid
XEEASVGNPEGAFMKMLQARKQHMSTQLTIESEAPSDSSGINLSGFGGDQLEIQLTEQLRSLIPNEDVRKFMSHVIRTLKMECSETHVQGSCAKLMLRTGLLMKLLSEQQEAKALNVEWDTDQQKTNYINENMEQNEQKEQKSSELMKEVPGDDYKNKLIFAISVTVILIILIIIFCLIEVRTIINSGFQNTILCLCGFRIHKLKTNVTFPLDILLLSFKAEVCFVLLLQCIFQDC

SEQ ID NO: 45387 - protein, 206 aa, Homo sapiens
MLMLFVFGVLLHEVSLSGQNEAPPNTHSIPGEPLYNYASIRLPEEHIPFFLHNNRHIATVCRKDSLCPYKKHLEKLKYCWGYEKSCKPEFRFGYPVCSYVDMGWTDTLESAEDIFWKQADFGYARERLEEMHVLCQPKETSDSSLVCSRYLQYCRATNLYLDLRNIKRNHDRFKEDFFQSGEIGGHCKLDIRTLTSEGQRKSPLQS

SEQ ID NO: 45388 - protein, 951 aa, Homo sapiens
MEKQKPFALFVPPRSSSSQVSAVKPQTLGGDSTFFKSFNKCTEDDFEFPFAKTNLSKNGENIDSDPALQKVNFLPVLEQVGNSDCHYQEGLKDSDLENSEGLSRVYSKLYKEAEKIKKWKVSTEAELRQKESKLQENRKIIEAQRKAIQELQFGNEKVSLKLEEGIQENKDLIKENNATRHLCNLLKETCARSAEKTKKYEYEREETRQVYMDLNNNIEKMITAFEELRVQAENSRLEMHFKLKEDYEKIQHLEQEYKKEINDKEKQVSLLLIQITEKENKMKDLTFLLEESRDKVNQLEEKTKLQSENLKQSIEKQHHLTKELEDIKVSLQRSVSTQKALEEDLQIATKTICQLTEEKETQMEESNKARAAHSFVVTEFETTVCSLEELLRTEQQRLEKNEDQLKILTMELQKKSSELEEMTKLTNNKEVELEELKKVLGEKETLLYENKQFEKIAEELKGTEQELIGLLQAREKEVHDLEIQLTAITTSEQYYSKEVKDLKTELENEKLKNTELTSHCNKLSLENKELTQETSDMTLELKNQQEDINNNKKQEERMLKQIENLQETETQLRNELEYVREELKQKRDEVKCKLDKSEENCNNLRKQVENKNKYIEELQQENKALKKKGTAESKQLNVYEIKVNKLELELESAKQKFGEITDTYQKEIEDKKISEENLLEEVEKAKVIADEAVKLQKEIDKRCQHKIAEMVALMEKHKHQYDKIIEERDSELGLYKSKEQEQSSLRASLEKLKREAKENTATLKEKKDKKTQTFLLETPEIYWKLDSKAVPSQTVSRNFTSVDHGISKDKRDYLWTSAKNTLSTPLPKAYTVKTPTKPKLQQRENLNIPIEESKKKRKMAFEFDINSDSSETTDLLSMVSEEETLKTLYRNNNPPASHLCVKTPKKAPSSLTTPGSTLKFGAIRKMREDRWAVIAKMDRKKKLKEAEKLFV

SEQ ID NO: 45389 - protein, 877 aa, Homo sapiens
MPAANMMENRPLPALQVPEPQGAPEGSPVWSSSSTPTLRRRRFKMRRMKNVQEQSLEAGLARDLPAVLAPGKEFLQLPSIEITPSSDEDTPWSNCSTPSASPRRKRFLLRKWLRVRERKECSESSSQQSSQQSSHDDDSSRFLSPRAREESTASNSNRSTPACSPILRKRSRSPTPQNQDGDTMVEKGSDHSSDKSPSTPEQGVQRSCSSQSGRSGGKNSKKSQSWYNVLSPTYKQRNEDFRKLFKQLPDTERLIVDYSCALQRDILLQGRLYLSENWICFYSNIFRWETLLTVRLKDICSMTKEKTARLIPNAIQVCTDSEKHFFTSFGARDRTYMMMFRLWQNALLEKPLCPKELWHFVHQCYGNELGLTSDDEDYVPPDDDFNTMGYCEEIPVEENEVNDSSSKSSIETKPDASPQLPKKSITNSTLTSTGSSEAPVSFDGLPLEEEALEGDGSLEKELAIDNIMGEKIEMIAPVNSPSLDFNDNEDIPTELSDSSDTHDEGEVQAFYEDLSGRQYVNEVFNFSVDKLYDLLFTNSPFQRDFMEQRRFSDIIFHPWKKEENGNQSRVILYTITLTNPLAPKTATVRETQTMYKASQESECYVIDAEVLTHDVPYHDYFYTINRYTLTRVARNKSRLRVSTELRYRKQPWGLVKTFIEKNFWSGLEDYFRHLESELAKTESTYLAEMHRQSPKEKASKTTTVRRRKRPHAHLRVPHLEEVMSPVTTPTDEDVGHRIKHVAGSTQTRHIPEDTPNGFHLQSVSKLLLVISCVLVLLVILNMMLFYKLWMLEYTTQTLTAWQGLRLQERLPQSQTEWAQLLESQQKYHDTELQKWREIIKSSVMLLDQMKDSLINLQNGIRSRDYTSESEEKRNRYH

SEQ ID NO: 45390 - protein, 100 aa, Homo sapiens
MSMEDYDFLFKIVLIGNAGVGKTCLVRRFTQGLFPPGQGATIGVDFMIKTVEINGEKVKLQIWDTAGQERFRSITQSYYRSANALILTYDITCEESFRCL

SEQ ID NO: 45391 - protein, 185 aa, Homo sapiens
QAVRPKYLLGREVTGNMRAILIDWLVQVQMKFRLLQETMYMTVSIIDRFMQNNCVPKKMLQLVGVTAMFIASKYEEMYPPEIGDFAFVTDNTYTKHQIRQMEMKILRALNFGLGRPLPLHFLRRASKIGEVDVEQHTLAKYLMELTMLDYDMVHFPPSQIAAGAFCLALKILDNGEWLCSTWLRM

SEQ ID NO: 45392 - protein, 231 aa, Homo sapiens
MSNCLQNFLKITSTRLLCSRLCQQLRSKRKFFGTVPISRLHRRVVITGIGLVTPLGVGTHLVWDRLIGGESGIVSLVGEEYKSIPCSVAAYVPRGSDEGQFNEQNFVSKSDIKSMSSPTIMAIGAAELAMKDSGWHPQSEADQVATGVAIGMGMIPLEVVSETALNFQTKGYNKVSPFFVPKILVNMAAGQVSIRYKLKGPNHAVSTACTTGAHAVGDSFRFIAHGDADVM

SEQ ID NO: 45393 - protein, 58 aa, Homo sapiens
MQNSDIISTVEFNHTGELLATGDKGGRVVIFQREQESKNQVHRRGEYNVYSTFQSHEP

SEQ ID NO: 45394 - protein, 249 aa, Homo sapiens
MERNVLTTFSQEMSQLILNEMPKAEYSSLFNDFVESEFFLIDGDSLLITCICEISFKPGQNLHFFYLVERYLVDLISKGGQFTIVFFKDAEYAYFNFPELLSLRTALILHLQKNTTIDVRTTFSRCLSKEWGSFLEESYPYFLIVADEGLNDLQTQLFNFLIIHSWARKVNVVLSSGQESDVLCLYAYLLPSMYRHQIFSWKNKQNIKDAYTTLLNQLERFKLSALAPLFGSLKWNNITEEPCFWFISC

SEQ ID NO: 45395 - protein, 159 aa, Homo sapiens
MAGEKVEKPDTKEKKPEAKKVDAGGKVKKGNLKAKKPKKGKPHCSRNPVLVRGIGRYSRSAMYSRKAMYKRKYSAAKSKVEKKKKEKVLATVTKPVGGDKNGGTRVVKLRKMPRYYPTEDVPRKLLSHGKKPFSQHVRKLRASITPGTILIILTGRHRG

SEQ ID NO: 45396 - protein, 12 aa, Homo sapiens
MSLGIMEEEDLA

SEQ ID NO: 45397 - protein, 82 aa, Homo sapiens
MAERQEEQRGSPPLRAEGKADAEVKLILYHWTHSFSSQKVRLVIAEKALKCEEHDLLICSILVEEQLTWCQRQQWTWQSLLP

SEQ ID NO: 45398 - protein, 135 aa, Homo sapiens
MMEEEELEFVEELEAVLQLTPEVQLAIEQVFPSQDPLDRADFNAVEYINTLFPTEQVKEITRDIKQLDHAKRHLTTSITTLNHLHMLAGGVDSLEAMTRRRQYGEVANLLQGVMNVLEHFHKYMGIPQIRQLSER

SEQ ID NO: 45399 - protein, 180 aa, Homo sapiens
MLPAATEGQKDMVWKWMPLLLLLVCVATMCSAQDRTDLLNVCMDAKHHKTKPGPEDKLHDQCSPWKKNACCTASTSQELHKDTSRLYNFNWDHCGKMEPACKRHFIQDTCLYECSPNLGPWIQQVNQSWRKERFLDVPLCKEDCQRWWEDCHTSHTCKSNWHRGWDWTSGVNKCPAGALC

SEQ ID NO: 45400 - protein, 84 aa, Homo sapiens
MAGGRPHLKRSFSIIPCFVFVESVLLGIVILLAYRLEFTDTFPVHTQGFFCYDSTYAKPYPGPEAASRVPPALVYALVTAGPTL

SEQ ID NO: 45401 - protein, 151 aa, Homo sapiens
MLLAQINRDSQGMTEFPGGGMEAQHVTLCLTEAVTVADGDNLENMEGVSLQAVTLADGSTAYIQHNSKDAKLIDGQVIQLEDGSAAYVQHVPIPKSRDSLRLEDGQAVQLEDGTTAFIHHTSKDSYDQSALQAVQLEDGTTAYIHHAVQVP

SEQ ID NO: 45402 - protein, 234 aa, Homo sapiens
MYTTNQEQLQEIEYLTKQVELLRQMNEQHAKVYEQLDVTARELEETNQKLVADSKASQQKILSLTETIECLQTNIDHLQSQVEELKSSGQGRRSPGKCDQEKPAPSFACLKELYDLRQHFVYDHVFAEKITSLQGQPSPDEEENEHLKKTVTMLQAQLSLERQKRVTMEEEYGLVLKENSELEQQLGATGAYRARALELEAEVAEMRQMLQSEHPFVNGVEKLVPDSLYVPFKE

SEQ ID NO: 45403 - protein, 125 aa, Homo sapiens
MQEMSDMSLTMAPQSLPSSRMAPLGMLLGLLMAACFTFCLSHQNLKEFALTNPEKSSTKETERKETKAEEELDAEVLEVFHPTHEWQALQPGQAVPAGSHVRLNLQTGEREAKLQYEDKFRNNLK

SEQ ID NO: 45404 - protein, 134 aa, Homo sapiens
MDPSADTWDLFSPLISLWINRFYIYLGFAVSISLWICVQIVIKTQGKNLQEKSVPKAAQDLMTNGYVSLQEKDIFVSGVKIFYGSQTGTAKGFATVLAEAVTSLDLPVAIINLKEYDPDDHLIEEVGKNVDKWL

SEQ ID NO: 45405 - protein, 92 aa, Homo sapiens
MARFLTLCTWLLLLGPGLLATVRAECSQDCATCSYRLVRPADINFLVSVARGECCAPCETEFPQQYADCLRPTARRVWRFAPGRSRSGASPW

SEQ ID NO: 45406 - protein, 111 aa, Homo sapiens
MIRGRNSATSADEQPHIGNYRLLKTIGKGNFAKVKLARHILTGKEVAVKIIDKTQLNSSSLQKLFREVRIMKVLNHPNIVKLFEVIETEKTLYLVMEYASGGEVFDYLVAH

SEQ ID NO: 45407 - protein, 762 aa, Homo sapiens
MQIGWCTISCRFNQEEGVGDTHNSYAYDGNRVRKWNVTTTNYGKAWAAGDIVSCLIDLDDGTLSFCLNGVSLGTAFENLSRGLGMAYFPAISLSFKESVAFNFGSRPLRYPVAGYRPLQDPPSADLVRAQRLLGCFRAVLSVELDPVEGRLLDKESSKWRLRGQPTVLLTLAHIFHHFAPLLRKVYLVEAVLMSFLLGIVEKGTPTQAQSVVHQVLDLLWLFMEDYEVQDCLKQLMMSLLRLYRFSPIVPDLGLQIHYLRLTIAILRHEKSRKFLLSNVLFDVLRSVVFFYIKSPLRVEEAGLQELIPTTWWPHCSSREGKESTEMKEETAEERLRRRAYERGCQRLRKRIEVVEELQVQILKLLLDNKDDNGGEASRYIFLTKFRKFLQENASGRGNMPMLCPPEYMVCFLHRLISALRYYWDEYKASNPHASFSEEAYIPPQVFYNGKVDYFDLQRLGGLLSHLRKTLKDDLASKANIVIDPLELQSTAMDDLDEDEEPAPAMAQRPMQALAVGGPLPLPRPGWLSSPTLGRANRFLSTAAVSLMTPRRPLSTSEKVKVRTLSVEQRTREDIEGSHWNEGLLLGRPPEEPEQPLTENSLLEVLDGAVMMYNLSVHQQLGKMVGVSDDVNEYAMALRDTEDKLRRCPKRRKDILAELTKSQKVFSEKLDHLSRRLAWVHATVYSQEKMLDIYWLLRVCLRTIEHGDRTGSLFAFMPEFYLSVAINSYSALKNYFGPVHSMEELPGDGTIQAEAEAEKGSLV

SEQ ID NO: 45408 - protein, 43 aa, Homo sapiens
MANMNSDSRHLGTSEVDHERDPGPMNIQFEPSDLRSKRLPQTM

SEQ ID NO: 45409 - protein, 886 aa, Homo sapiens
MDHYDSQQTNDYMQPEEDWDRDLLLDPAWEKQQRKTFTAWCNSHLRKAGTQIENIEEDFRDGLKLMLLLEVISGERLAKPERGKMRVHKISNVNKALDFIASKGVKLVSIGAEEIVDGNVKMTLGMIWTIILRFAIQDISVEETSAKEGLLLWCQRKTAPYKNVNIQNFHISWKDGLGFCALIHRHRPELIDYGKLRKDDPLTNLNTAFDVAEKYLDIPKMLDAEDIVGTARPDEKAIMTYVSSFYHAFSGAQKAETAANRICKVLAVNQENEQLMEDYEKLASDLLEWIRRTIPWLENRVPENTMHAMQQKLEDFRDYRRLHKPPKVQEKCQLEINFNTLQTKLRLSNRPAFMPSEGRMVSDINNAWGCLEQVEKGYEEWLLNEIRRLERLDHLAEKFRQKASIHEAWTDGKEAMLRQKDYETATLSEIKALLKKHEAFESDLAAHQDRVEQIAAIAQELNELDYYDSPSVNARCQKICDQWDNLGALTQKRREALERTEKLLETIDQLYLEYAKRAAPFNNWMEGAMEDLQDTFIVHTIEEIQGLTTAHEQFKATLPDADKERLAILGIHNEVSKIVQTYHVNMAGTNPYTTITPQEINGKWDHVRQLVPRRDQALTEEHARQQHNERLRKQFGAQANVIGPWIQTKMEEIGRISIEMHGTLEDQLSHLRQYEKSIVNYKPKIDQLEGDHQLIQEALIFDNKHTNYTMEHIRVGWEQLLTTIARTINEVENQILTRDAKGISQEQMNEFRASFNHFDRKTGMMDTDDFRACLISMGYNMGEAEFARIMSIVDPNRLGVVTFQAFIDFMSRETADTDTADQVMASFKILAGDKNYITMDELRRELPPDQAEYCIARMAPYTGPDSVPGALDYMSFSTALYGESDL

SEQ ID NO: 45410 - protein, 106 aa, Homo sapiens
MAETLSGLGDSGAAGAAALSSASSETGTRRLSDLRVIDLRAELRKRNVDSSGNKSVLMERLKKAIEDEGGNPDEIEITSEGNKKTSKRSSKDRGQRNYKQFRYFII

SEQ ID NO: 45411 - protein, 669 aa, Homo sapiens
MLTFFLVSGGSLWLFVEFVLSLLEKMQTQEILRILRLPELGDLGQFFRSLSATTLDSGGARRSVIGSGPQLLTHYYDDARTMYQVFRRGLSISGNGPCLGFRKPKQPYQWLSYQEVADRAEFLGSGLLQHNCKACTDQFIGVFAQNRPEWIIVELACYTYSMVVVPLYDTLGPGAIRYIINTADISTVIVDKPQKAVLLLEHVERKETPGLKLIILMDPFEEALKERGQKCGVVIKSMQAVEDCGQENHQAPVPPQPDDLSIVCFTSGTTGNPKGAMLTHGNVVADFSGFLKVTEKVIFPRQDDVLISFLPLAHMFERVIQSVVYCHGGRVGFFQGDIRLLSDDMKALCPTIFPVVPRLLNRMYDKIFSQANTPLKRWLLEFAAKRKQAEVRSGIIRNDSIWDELFFNKIQASLGGCVRMIVTGAAPASPTVLGFLRAALGCQVYEGYGQTECTAGCTFTTPGDWTSGHVGAPLPCNHIKLVDVEELNYWACKGEGEICVRGPNVFKGYLKDPDRTKEALDSDGWLHTGDIGKWLPGEYVAPEKIENIYIRSQPVAQIYVHGDSLKAFLVGIVVPDPEVMPSWAQKRGIEGTYADLCTNKDLKKAILEDMVRLGKESGLHSFEQVKAIHIHSDMFSVQNGLLTPTLKAKRPELREYFKKQIEELYSISM

SEQ ID NO: 45412 - protein, 144 aa, Homo sapiens
  MOD_RES (1)..(1): Any amino acid
XIISKRKFAIGSAREADPALNVETEIEILKKLNHPCIIKIKNFFDAEDYYIVLELMEGGELFDKVVGNKRLKEATCKLYFYQMLLAVQDEDMKRKFQDLLSEENESTALPQVLAQPSTSRKRPREGEAEGAETTKRPAVCAAVL

SEQ ID NO: 45413 - protein, 1065 aa, Homo sapiens
MSLKPQQQQQQQQQQQQQQQQQQQQQQQPPPAAANVRKPGGSGLLASPAAAPSPSSSSVSSSSATAPSSVVAATSGGGRPGLGRGRNSNKGLPQSTISFDGIYANMRMVHILTSVVGSKCEVQVKNGGIYEGVFKTYSPKCDLVLDAAHEKSTESSSGPKREEIMESILFKCSDFVVVQFKDMDSSYAKRDAFTDSAISAKVNGEHKEKDLEPWDAGELTANEELEALENDVSNGWDPNDMFRYNEENYGVVSTYDSSLSSYTVPLERDNSEEFLKREARANQLAEEIESSAQYKARVALENDDRSEEEKYTAVQRNSSEREGHSINTRENKYIPPGQRNREVISWGSGRQNSPRMGQPGSGSMPSRSTSHTSDFNPNSGSDQRVVNGGPPRMSPKAQRHPRNHRVSAGRGSISSGLEFVSHNPPSEAATPPVARTSPSGGTWSSVVSGVPRLSPKTHRPRSPRQNSIGNTPSGPVLASPQAGIIPTEAVAMPIPAASPTPASPASNRAVTPSSEAKDSRLQDQRQNSPAGNKENIKPNETSPSFSKAENKGISPVVSEHRKQIDDLKKFKNDFRLQPSSTSESMDQLLNKNREGEKSRDLIKDKIEPSAKDSFIENSSSNCTSGSSKPNSPSISPSILSNTEHKRGPEVTSQGVQTSSPACKQEKDDKEEKKDAAEQVRKSTLNPNAKEFNPRSFSQPKPSTTPTSPRPQAQPSPSMVGHQQPTPVYTQPVCFAPNMMYPVPVSPGVQPLYPIPMTPMPVNQAKTYRAVPNMPQQRQDQHHQSAMMHPASAAGPPIAATPPAYSTQYVAYSPQQFPNQPLVQHVPHYQSQHPHVYSPVIQGNARMMAPPTHAQPGLVSSSATQYGAHEQTHAMYVSTGSLAQQYAHPNATLHPHTPHPQPSATPTGQQQSQHGGSHPAPSPVQHHQHQAAQALHLASPQQQSAIYHAGLAPTPPSMTPASNTQSPQNSFPAAQQTVFTIHPSHVQPAYTNPPHMAHVPQAHVQSGMVPSHPTAHAPMMLMTTQPPGGPQAALAQSALQPIPVSTTAHFPYMTHPSVQAHHQQQL

SEQ ID NO: 45414 - protein, 180 aa, Homo sapiens
MAGTARHDREMAIQAKKKLTTATDPIERLRLQCLARGSAGIKGLGRVFRIMDDDNNRTLDFKEFMKGLNDYAVVMEKEEVEELFRRFDKDGNGTIDFNEFLLTLRPPMSRARKEVIMQAFRKLDKTGDGVITIEDLREVYNAKHHPKYQNGEWSEEQVFRKFLDNFDSPYDKDGLVSKRA

SEQ ID NO: 45415 - protein, 424 aa, Homo sapiens
PSISPSILSNTEHKRGPEVTSQGVQTSSPACKQEKDDKEEKKDAAEQVRKSTLNPNAKEFNPRSFSQPKPSTTPTSPRPQAQPSPSMVGHQQPTPVYTQPVCFAPNMMYPVPVSPGVQPLYPIPMTPMPVNQAKTYRAGKVPNMPQQRQDQHHQSAMMHPASAAGPPIAATPPAYSTQYVAYSPQQFPNQPLVQHVPHYQSQHPHVYSPVIQGNARMMAPPTHAQPGLVSSSATQYGAHEQTHAMYACPKLPYNKETSPSFYFAISTGSLAQQYAHPNATLHPHTPHPQPSATPTGQQQSQHGGSHPAPSPVQHHQHQAAQALHLASPQQQSAIYHAGLAPTPPSMTPASNTQSPQNSFPAAQQTVFTIHPSHVQPAYTNPPHMAHVPQYKPTTNSSCKAALEEPKGQIPSSLLLLLPTGSTEN

SEQ ID NO: 45416 - protein, 161 aa, Homo sapiens; identical to SEQ ID NO: 45221

SEQ ID NO: 45417 - protein, 299 aa, Homo sapiens [sequence omitted]

SEQ ID NO: 45418 - protein, 169 aa, Homo sapiens
  MOD_RES (1)..(1): Any amino acid
XASSQVPRVMSTQRVANTSTQTMGPRPAAAAAAATPAVRTVPQYKYAAGVRNPQQHLNAQPQVTMQQPAVHVQGQEPLTASMLASAPPQEQKQMLGERLFPLIQAMHPTLAGKITGMLLEIDNSELLHMLESPESLRSKVDEAVAVLQAHQAKEAAQKAVNSATGVPTV

SEQ ID NO: 45419 - protein, 138 aa, Homo sapiens
MVPSFLSLSFSSLGLWASGLILVLGFLKLIHLLLRRQTLAKAMDKFPGPPTHWLFGHALEIQETGSLDKVVSWAHQFPYAHPLWFGQFIGFLNIYEPDYAKAVYSRGGGCVSFVSHLAMSSDTSSWTQALWVQLRYRN

SEQ ID NO: 45420 - protein, 393 aa, Homo sapiens
MVTEMNPNVVVISVLAILSTLLIGLLLVTLIILRKKHLQMARECGAGTFVNFASLERDGKLPYNWRRSIFAFLTLLPSCLWTDYLLAFYINPCPVQLDDFDAYIKDMAKDSDYKFSLQFEELKLIGLDIPHFAADLPLNRCKNRYTNILPYDFSRVRLVSMNEEEGADYINANYIPGYNSPQEYIATQGPLPETRNDFWKMVLQQKSQIIVMLTQCNEKRRVKCDHYWPFTEEPIAYGDITVEMISEEEQDDWACRHFRINYADEMQDVMHFNYTAWPDHGVPTANAAESILQFVHMVRQQATKSKGPMIIHCSAGVGRTGTFIALDRLLQHIRDHEFVDILGLVSEMRSYRMSMVQTEEQYIFIHQCVQLMWMKKKQQFCISDVIYENVSKS

SEQ ID NO: 45421 - protein, 186 aa, Homo sapiens
  MOD_RES (1)..(1): Any amino acid
XSKSKSERANIQLAATKKTQYQQLPVSDEILFQIYQPREPLHFSKFLDPDFQPSCSEVDLIGFVVSVVKKTGLAPFVYLSDECYNLLAIKFWIDLNEDIIKPHMLIAASNLQWRPESKSGLLTLFAGDFSVFSASPKEGHFQETFNKMKNTVERQSLALSPPGWSTIAQSRITAVSASWAQAILVP

SEQ ID NO: 45422 - protein, 301 aa, Homo sapiens
MEAHEIIEEPHITMDAEKHPPSKDPSAEDLQENHISESFLKPSTSETPLEPHTSESPLVPSPSQIPLEAHSPETHQEPSISETPSETPTYEASLDSPISVVPEKHLTLPPQSRDYVCLSSSDTLKEDLSSESSSNEVPWTRRSTHLSESESLPEHCLSGPSSQVQVDTTEKQEEEAGEVEKGVDASDSTAHTAQPGHQLGNTARPVFPARQTELVEVAKAMHREEFGAQVNNLFQWEKDAALNAIQTGLYIGWRCPHYLWDCFRIGDESRCFCGHLLREHRIISDISVPCKVSQCRCFMFC

SEQ ID NO: 45423 - protein, 597 aa, Homo sapiens
MNMSQASVSFQDVTVEFTREEWQHLGPVERTLYRDVMLENYSHLISVGYCITKPKVISKLEKGEEPWSLEDEFLNQRYPGYFKVDHIKGIREKQEKPLWQEIFISDADKTLSKEGQKVLEKPFNLEIAPELSEKISCKCDSHRMNLPVASQLIISERKYSRKKTEYMNVCEKLQLDIKHEKAHAEEKSYEHGENAKAFSYKKDQHWKFQTLEESFECDGSGQGLYDKTICITPQSFLTGEKSCKDDEFRKNFDKITLFNHMRTDTRGKCSDLNEYGTSCDKTTAVEYNKVHMAMTHYECNERGINFSRKSPLTQSQRTITGWSAFESNKCEENFSQSSAHIVHQKTQAGDKFGEHNECTDALYQKLDFTAHQRIHTEDKFYLSDEHGKCRKSFYRKAHLIQHQRPHSGEKTYQYEECAKSFCSSSHPIQHPGTYVGFKLYECNECGKAFCQNSNLSKHLRIHTKEKPCDNNGCGRSYKSPLIGHQKTDAEMELCGGSEYGKTSHLKGHQRILMGEKPYECIECGKTFSKTSHLRAHQRIHTGEKPYECVECEKTFSHKTHLSVHQRVHTGEKPYECNDCGKSFTYNSALRAHQRIHT

SEQ ID NO: 45424 - protein, 156 aa, Homo sapiens
MGGEWGQSAICPESAQEWTYQVGQHLVDMDLGAITKYSALHAKPNGLILQYGTAGFRTKAEHLDHVMFRMGLLAVLRSKQTKSTIGVMVTASHNPEEDNGVKLVDPLGEMLAPSWEEHATCLANAEEQDMQRVLIDISEKEAVNLQQDAFVVIGRD

SEQ ID NO: 45425 - protein, 112 aa, Homo sapiens
MGNAALCSSCHADKSIRAQGNMQELDKTPDYYGCNSEDVKEPGVWSDSNASFLRAARAGNLDKVVEYLKGGIDINTCNQNGLNALHLAAKEGHVGLVQELLGRGSSVDSATK

SEQ ID NO: 45426 - protein, 249 aa, Homo sapiens
MPRVKAAQAGRQSSAKRHLAEQFAVGEIITDMAKKEWKVGLPIGQGGFGCIYLADMNSSESVGSDAPCVVKVEPSDNGPLFTELKFYQRAAKPEQIQKWIRTRKLKYLGVPKYWGSGLHDKNGKSYRFMIMDRFGSDLQKIYEANAKRFSRKTVLQLSLRILDILEYIHEHEYVHGDIKASNLLLNYKNPDQVYLVDYGLAYRYCPEGVHKEYKEDPKRCHDGTIEFTSIDAHNGPHQDVVIWKYLVIA

SEQ ID NO: 45427 - protein, 202 aa, Homo sapiens
GVIEGGLNVTLTIRLLMHGKEVGSIIGKKGESVKKMREESGARINISEGNCPERIITLAGPTNAIFKAFAMIIDKLEEDISSSMTNSTAASRPPVTLRLVVPASQCGSLIGKGGCKIKEIRERRVSLFCSGWSPTPELPMIRLPWSPKVLGLQIVQGLRSRWQGICYPTQLSGPSLLLAFHNPSLSVSNRSAWSCWSPPRRA

SEQ ID NO: 45428 - protein, 56 aa, Homo sapiens
VIHAVDSLFNTTFVCTVTNAVGMGRAEQEEEPVATGDSTIRKLRCWEMGTPSSGHQ

SEQ ID NO: 45429 - protein, 199 aa, Homo sapiens
  MOD_RES (1)..(1): Any amino acid
XDIPGARALDNGLARTPTMGWLHWERFMCNLDCQEEPDSCISEKLFMEMAELMVSEGWKDAGYEYLCIDDCWMAPQRDSEGRLQADPQRFPHGIRQLANYVHSKGLKLGIYADVGNKTCAGFPGSFGYYDIDAQTFADWGVDLLKFDGCYCDSLENLADGESRLSIGHRERSIFIPAFPQYTHHLCTTSSEQSQQSGRL

SEQ ID NO: 45430 - protein, 217 aa, Homo sapiens
QNFNTLMAVIGGLCHSSISRLKETSSHVPHEINKVLGEMTELLSSSRNYDNYRRAYGECTDFKIPILGVHLKDLISLYEAMPDYLEDGKVNVHKLLALYNHISELVQLQEVAPPLEANKDLVHLLTLSLDLYYTEDEIYELSYAREPRNHRAPSVFKNYDHDQDGYISQEEFEKIAASFPFSFCVMDKDRAHGSNHEVAHTILPLRIKRKGRPHQQG

SEQ ID NO: 45431 - protein, 166 aa, Homo sapiens
MQESSIILQMFCFLSRESYFVTDYDPTIEDSYTKQCVIDDRAARLDILDTAGQEEFGAMREQYMRTGEGFLLVFSVTDRGSFEEIYKFQRQILRVKDRDEFPMILIGNKADLDHQRQVTQEEGQQLARQLKVTYMEASAKIRMNVDQAFHELVRVIRKFQEQECPP

SEQ ID NO: 45432 - protein, 278 aa, Homo sapiens
MALLLVSLLAFLSLGSGCHHRICHCSNRVFLCQESKVTEIPSDLPRNAIELRFVLTKLRVIQKGAFSGFGDLEKIEISQNDVLEVIEADVFSNLPKLHEIRIEKANNLLYINPEAFQNLPNLQYLLISNTGIKHLPDVHKIHSLQKVLLDIQDNINIHTIERNSFVGLSFESVILWLNKNGIQEIHNCAFNGTQLDELNLSDNNNLEELPNDVFHGASGPVILSELHPICNKSILRQEVDYMTQARGQRSSLAEDNESSYSRGFDMTYTEFDYDLCNE

SEQ ID NO: 45433 - protein, 84 aa, Homo sapiens
MVAKQRIRMANEKHSKNITQRGNVAKTLRPQEEKYPVGPWLLALFVFVVCGSGQPHKLASPGDCQNFLKVVTSRGSHPTPKTGN

SEQ ID NO: 45434 - protein, 296 aa, Homo sapiens
MSLMVIIMACVGFFLLQGAWPQEGVHRKPSFLALPGHLVKSEETVILQCWSDVMFEHFLLHREGKFNNTLHLIGEHHDGVSKANFSIGPMMPVLAGTYRCYGSVPHSPYQLSAPSDPLDMVIIGLYEKPSLSAQPGPTVQAGENVTLSCSHLSREGEAHERRLPAVRSINGTFQADFPLGPATHGGTYRCFGSFRDAPYEWSNSSDPLLVSVTGNPSNSWPSPTEPSSKTGNPRHLHVLIGTSVVKIPFTILLFFLLHRWCSDKKNAAVMDQEPAGNRTVNSEDSDEQDHQEVSYA

SEQ ID NO: 45435 - protein, 165 aa, Homo sapiens
ALYLSLGVLWVAQMLLAASFETLQCEGPVCTEESSCHTEDDLTDAREAGFQVKAYTFSEPFHLIVSYGASSSAAPPTLNPAPQKSAAPGTAPEEAPGPLPPPPTPSSEDPGFSSPLGMPDPHLYHQMGLLLKHMQDVRVLLGHLLMELRELSGHRKPGTTKATAE

SEQ ID NO: 45436 - protein, 510 aa, Homo sapiens
QLCPGWLGPTSTSAVQLFLLGEMEPAGEKDEPLSVKHGRPMKCPSQESPYLFSYRNSNYLTRLQKPQDKLEVREGAEIRCPDKDPSDTVPTSVHRLKPADINVIGALGDSLTAGNGAGSTPGNVLDVLTQYRGLSWSVGGDENIGTVTTLANILREFNPSLKGFSVGTGKETSPNAFLNQAVAGGRAEDLPVQARRLVDLMKNDTRIHFQEDWKIITLFIGGNDLCDFCNDLVHYSPQNFTDNIGKALDILHAEVPRAFVNLVTVLEIVNLRELYQEKKVYCPRMILRSLCPCVLKFDDNSTELATLIEFNKKFQEKTHQLIESGRYDTREDFTVVVQPFFENVDMPKTSEGLPDNSFFAPDCFHFSSKSHSRAASALWNNMLEPVGQKTTRHKFENKINITCPNQVQPFLRTYKNSMQGHGTWLPCRDRAPSALHPTSVHALRPADIQVVAALGDSLTAGNGIGSKPDDLPDVTTQYRGLSYRESKPGFLSDSWVSKSNRKCTRKAPNP

SEQ ID NO: 45437 - protein, 209 aa, Homo sapiens
  MOD_RES (1)..(1): Any amino acid
XRGCPRTALEYCKLILSLEPDEDPLCMLLLIDHLALRARNYEYLIRLFQEWEAHRNLSQLPNFAFSVPLAYFLLSQQTDLPECEQSSARQKASLLIQQALTMFPGVLLPLLESCSVRPDASVSSHRFFGPNAEIRLTAHTCVPQPHALRPAAQGPPFTPGHRALPGPPVCPSMGLCQPRGRLWSEEGFCSEPLLSPSQPPALSQLVNLY

SEQ ID NO: 45438 - protein, 41 aa, Homo sapiens
  MOD_RES (1)..(1): Any amino acid
XARCGSRTLLLTHRVDTIGEERGCCGTWRRTQAASFPPPPV

SEQ ID NO: 45439 - protein, 237 aa, Homo sapiens
MVTTAVIIRDKYVRNVSCSVNNTLLGQEKETVIFIPESFMPSASPWMVALAVILTASPWMVSMTVILAVFIIFMAVSICCIKKLQREKKILSGEKKVEQEEKEIAQQLQEELRWRRTFLHAADVVLDPDTAHPELFLSEDRRSVRRGPYRQRVPDNPERFDSQPCVLGWESFASGKHYWEVEVENVMVWTVGVCRHSVERKGEVLLIPQNGFWTLEMFGNQYRALSSPERILPLKES

SEQ ID NO: 45440 - protein, 221 aa, Homo sapiens
MRALAANRVNDLCQEPPSQGATDMGEPQGSMRILVTGGSGLVGKAIQKVVADGAGLPGEDWVFVSSKDADLTDTAQTRALFEKVQPTHVIHLAAMVGGLFRNIKYNLDFWRKNVHMNDNVLHSAFEVGARKVVSCLSTCIFPDKTTYPIDETMIHNGPPHNSNFGYSYAKRMIDVQNRAYFQQYGCTFTAVIPTNVFGPHDNFNIEDGHVLPGLIHKVHLA

SEQ ID NO: 45441 - protein, 301 aa, Homo sapiens
MNGLSLSELCCLFCCPPCPGRIAAKLAFLPPEATYSLVPEPEPGPGGAGAAPLGTLRASSGAPGRWKLHLTERADFQYSQRELDTIEVFPTKSARGNRVSCMYTVLFSHGNAVDLGQMSSFYIGLGSRLHCNIFSYDYSGYGASSGRPSERNLYADIDAAWQALRTRYGISPDSIILYGQSIGTVPTVDLASRYECAAVVLHSPLTSGMRVAFPDTKKTYCFDAFPNIEKVSKITSPVLIIHGTEDEVIDFSHGLALYERCPKAVEPLWVEGAGHNDIELYSQYLERLRRFISQELPSQRA

SEQ ID NO: 45442 - protein, 347 aa, Homo sapiens
  MOD_RES (1)..(1): Any amino acid
XVRGWTNPDFLSHRAEKEWGDGIRGLSLNAARYALLRVEHGPPHTKNWRPQVLVMLNLDAEQAVKHPRLLSFTSQLKAGKGLTIVGSVLEGTYLDKHMEAQRAEENIRSLMSTEKTKGFCQLVVSSSLRDGMSHLIQSAGLGGLKHNTVLMAWPASWKQEDNPFSWKNFVDTVRDTTAAHQALLVAKNVDSFPQNQERFGGGHIDVWWIVHDGGMLMLLPFLLRQHKVWRKCRMRIFTVAQVDDNSIQMKKDLQMFLYHLRISAEVEVVEMVENDISAFTYERTLMMEQRSQMLKQMQLSKNEQEREAQLIHDRNTASHTAAAARTQAPPTPDKVQMTWTREKLIAE

SEQ ID NO: 45443 - protein, 170 aa, Homo sapiens
MDPAARVVRALWPGGCALAWRLGGRPQPLLPTQSRAGFAGAAGGPSPVAAARKGSPRLLGAAALALGGALGLYHTARWHLRAQDLHAERSAAQRHFRRLLWKTPLGAGPGPGGARSRSLFRLLPAALPVQPPAADPVPVQDVSLLQQGPSLPRLPCPALPGGGGEPCAQG

SEQ ID NO: 45444 - protein, 168 aa, Homo sapiens
  MOD_RES (1)..(1): Any amino acid
XFRDIEEVSQGLLSLLGANRAEAQQRRLLGRHEQVVERLLETQDGAEKQLREILTMEKEVAQSLLNAKEQVHQGGVELQQLEAGLQEAGEEDTRLKASLLQLTRELEELKEIEADLERQEKEVDEDTTVTIPSAVYVAQLYHQVSKIEWDYECEPGMVKGSILFGEPF

SEQ ID NO: 45445 - protein, 175 aa, Homo sapiens
MGHEQNQGAALLQMLPLLWLLPHSWAVPEEQSMITFLPLLLGLSLGCTGAGGFVAHVESTCLLDDAGTPKDFTYCISFNKDLLTCWDPEENKMAPCEFGVLNSLANVLSQHLNQKDTLMQRLRNGLQNCATHTQPFWGSLTNRTRPPSVQVAKTTPFNTREPVMLACYVWGFYPA

SEQ ID NO: 45446 - protein, 235 aa, Homo sapiens
  MOD_RES (1)..(1): Any amino acid
XNYVYQLRQECYAFNGTQRFLERYIYNREEFVRFDSDVGEFRAVTELGRPDEDYWNSQKDLLEEKRAVPDRVCRHNYELDEAVTLQRRVQPKVNVSPSKKGPLQHHNLLVCHVTDFYPGSIQVRWFLNGQEETAGVVSTNLIRNGDWTFQILVMLEMTPQQGDVYICQVEHTSLDSPVTVEWKAQSDSARSKTLTGAGGFVLGLIICGVGIFMHRRSKKGEKACKFNEDLHKQGS

SEQ ID NO: 45447 - protein, 23 aa, Homo sapiens
  MOD_RES (1)..(1): Any amino acid
XPSKEKEAGTTPAKVCTTTDYSA

SEQ ID NO: 45448 - protein, 312 aa, Homo sapiens
MSLRRHIGNPEYLMKRIPQNPRYQHIKSRLDTGNSMTKYTEKLEEIKKNYRYKKDELFKRLKVTTFAQLIIQVASLSDQTLEVTAEEIQRLEDNDSAASDPDAETTARTNGKGNPGEQSPSPEQFINNAGAGDSSRSTLQSVISGVGELDLDKGPVKKAEPHTKDKPYPDCPFLLLDVRDRDSYQQCHIVGAYSYPIATLSRTMNPYSNDILEYKNAHGKIIILYDDDERLASQAATTMCERGFENLFMLSGGEQGDTLLGTSKADHPSVPPASPFLSWCSEFSVLEREKAMLAERSQELCETSLSFISTCF

SEQ ID NO: 45449 - protein, 47 aa, Homo sapiens
MKRAHPEYSSSDSELDETIEKLEFGSRFHVPNYIFPDFGQKKTERNN

SEQ ID NO: 45450 - protein, 71 aa, Homo sapiens
  MOD_RES (1)..(1): Any amino acid
XLSIQPSLNAILIPPHLRSPAGTTTLTPSSQVSPERYSYGTSSSSKRTEGSCRRRRQSSSSANSQQGQWET

SEQ ID NO: 45451 - protein, 195 aa, Homo sapiens
GLPPFSEPSSLVPWPPGRSLPKAVRPPLSWPPFSQQQTLPVMSGEALGWLGQAGPLAMGAAPLGEPAKEDPMLAQEAGSALGSDVDDGTSFLLTAGPSSWPGFSVWEPVPGSGPTGVLGLGPPGSLEGRGGSGPAWAPAESSPLDVGEPGFLGDPELGSQELQDSPLEPWGLDVDCAGLALKDEVESIFPDFFAC

SEQ ID NO: 45452 - protein, 218 aa, Homo sapiens
RVRWLLFWLLFWLLLGFISHQSTCVSRWVLWLLFWLLLGFISHQSTCVINTLADHRHRGTDFGGSPWLLIITVFLRSYKFAISLCTSYLCVSFLKTIFPSQNGHDGSTDVQQRARRSNRRRQEGIKIVLEDIFTLWRQVETKVRAKIRKMKVTTKVNRHDKINGKRKTAKEHLRKLSMKEREHGEKERQVSEAEENGKLDMKEIHTYMEMFQRAQALR

SEQ ID NO: 45453 - protein, 725 aa, Homo sapiens
MESAGGFKLGEKKKLLKMTSRRLEESMGAVQMGLVNMFKGFQSKVLPPLSPKVVTEEEVNRMLTPSEFLKEMSLTTEQRLAKTRLMCRPQIIELLDMGETTHQKFSGIDLDQALFQPFPSEIIFQNYTPCEVYEVPLILRNNDKIPRLVKVVEESSPYFKVISPKDIGHKVAPGVPSIFRILFTPEENKDYAHTLTCVTEREKFIVPIKARGARAILDFPDKLNFSTCPVKYSTQKILLVRNIGNKNAVFHIKTCRPFSIEPAIGTLNVGESMQLEVEFEPQSVGDHSGRLIVCYDTGEKVFVSLYGAAIDMNIRLDKNSLTIEKTYISLANQRTITIHNRSNIIAHFLWKVFATQQEEDREKYRACDDLIKEEKDETDEFFEECITDPLLREHLSVLSRTFANQRRLVQGDSKLFFNNVFTVEPLEGDVWPNSSAEITVYFNPLEAKLYQQTIYCDILGREIRLPLRIKGEGMGPKIHFNFELLDIGKVFTGSAHCYEAILYNKGSIDALFNMTPPTSALGACFVFSPKEGIIEPSGVQAIQISFSSTILGNFEEEFLVNVNGSPEPVKLTIRGCVIGPTFHFNVPALHFGDVSFGFPHTLICSLNNTSLIPMTYKLRIPGDGLGHKSISYCEQHVDYKRPSWTKEEISSMKPKEFTISPDCGTIRPQGFAAIRVTLCSNTVQKYELALVVDVEGIGEEVLALLITARYCSPACSSPESPPSLQ

SEQ ID NO: 45454 - protein, 78 aa, Homo sapiens
MLKVHYPKFGVSEDCLYLNIYAPAHADTGSKLPVLVWFPGGAFKTGSASIFDGSALAAYEDVLVVVVQYRLGIFGFFT

SEQ ID NO: 45455 - protein, 94 aa, Homo sapiens
MLLTCILWRLTKKHTDRKSYSWKQRLFIINFISFFSALAVYFRHNMYCEAGVYTIFAILEYTVVLTNMAFHMTAWWDFGNKELLITSQPEEKRF

SEQ ID NO: 45456 - protein, 98 aa, Homo sapiens
MMQAQESLTLEDVAVDFTWEEWQFLSPAQKDLYRDVMLENYSNLVAVGYQASKPDALSKLERGEETCTTEDEIYSRICSDSGGASGGAYAGLSHGYIA

SEQ ID NO: 45457 - protein, 58 aa, Homo sapiens
MTVLEQDTQGLDGWWLCSLHGRQGIVPGNRLKILVGMYDKKPAGPGPGPPATPAQPQP

SEQ ID NO: 45458 - protein, 732 aa, Homo sapiens
MVSWGRFICLVVVTMATLSLARPSFSLVEDTTLEPEDAISSGDDEDDTDGAEDFVSENSNNKRAPYWTNTEKMEKRLHAVPAANTVKFRCPAGGNPMPTMRWLKNGKEFKQEHRIGGYKVRNQHWSLIMESVVPSDKGNYTCVVENEYGSINHTYHLDVVERSPHRPILQAGLPANASTVVGGDVEFVCKVYSDAQPHIQWIKHVEKNGSKYGPDGLPYLKVLKAAGVNTTDKEIEVLYIRNVTFEDAGEYTCLAGNSIGISFHSAWLTVLPAPGREKEITASPDYLEIAIYCIGVFLIACMVVTVILCRMKNTTKKPDFSSQPAVHKLTKRIPLRRQVTVSAESSSSMNSNTPLVRITTRLSSTADTPMLAGVSEYELPEDPKWEFPRDKLTLGKPLGEGCFGQVVMAEAVGIDKDKPKEAVTVAVKMLKDDATEKDLSDLVSEMEMMKMIGKHKNIINLLGACTQDGPLYVIVEYASKGNLREYLRARRPPGMEYSYDINRVPEEQMTFKDLVSCTYQLARGMEYLASQKCIHRDLAARNVLVTENNVMKIADFGLARDINNIDYYKKTTNGRLPVKWMAPEALFDRVYTHQSDVWSFGVLMWEIFTLGGSPYPGIPVEELFKLLKEGHRMDKPANCTNELYMMMRDCWHAVPSQRPTFKQLVEDLDRILTLTTNEEYLDLSQPLEQYSPSYPDTRSSCSSGDDSVFSPDPMPYEPCLPQYPHINGSVKT

SEQ ID NO: 45459 - protein, 116 aa, Homo sapiens
MAAPPRPAPSPPAPRRLDTSDVLQQIMAITDQSLDEAQARKHALNCHRMKPALFSVLCEIKEKTVVSIRGIQDEDPPDAQLLRLDNMLLAEGVCRPEKRGRGGAVARAGTATPGLS

SEQ ID NO: 45460 - protein, 1486 aa, Homo sapiens
MAYSWQTDPNPNESHEKQYEHQEFLFVNQPHSSSQVSLGFDQIVDEISGKIPHYESEIDENTFFVPTAPKWDSTGHSLNEAHQISLNEFTSKSRELSWHQVSKAPAIGFSPSVLPKPQNTNKECSWGSPIGKHHGADDSRFSILAPSFTSLDKINLEKELENENHNYHIGFESSIPPTNSSFSSDFMPKEENKRSGHVNIVEPSLMLLKGSLQPGMWESTWQKNIESIGCSIQLVEVPQSSNTSLASFCNKVKKIRERYHAADVNFNSGKIWSTTTAFPYQLFSKTKFNIHIFIDNSTQPLHFMPCANYLVKDLIAEILHFCTNDQLLPKDHILSVCGSEEFLQNDHCLGSHKMFQKDKSVIQLHLQKSREAPGKLSRKHEEDHSQFYLNQLLEFMHIWKVSRQCLLTLIRKYDFHLKYLLKTQENVYNIIEEVKKICSVLGCVETKQITDAVNELSLILQRKGENFYQSSETSAKGLIEKVTTELSTSIYQLINVYCNSFYADFQPVNVPRCTSYLNPGLPSHLSFTVYAAHNIPETWVHSYKAFSFTCWLTYAGKKLCQVRNYRNIPDKKLFFFLVNWNETINFPLEIKSLPRESMLTVKLFGIACATNNANLLAWTCLPLFPKEKSILGSMLFSMTLQSEPPVEMITPGVWDVSQPSPVTLQIDFPATGWEYMKPDSEENRSNLEEPLKECIKHIARLSQKQTPLLLSEEKKRYLWFYRFYCNNENCSLPLVLGSAPGWDERTVSEMHTILRRWTFSQPLEALGLLTSSFPDQEIRKVAVQQLDNLLNDELLEYLPQLVQAVKFEWNLESPLVQLLLHRSLQSIQVAHRLYWLLKNAENEAYFKSWYQKLLAALQFCAGKALNDEFSKEQKLIKILGDIGERVKSASDHQRQEVLKKEIGRLEEFFQDVNTCHLPLNPALCIKGIDHDACSYFTSNALPLKITFINANPMGKNISIIFKAGDDLRQDMLVLQLIQVMDNIWLQEGLDMQMIIYRCLSTGKDQGLVQMVPDAVTLAKIHRHSGLIGPLKENTIKKWFSQHNHLKADYEKALRNFFYSCAGWCVVTFILGVCDRHNDNIMLTKSGHMFHIDFGKFLGHAQTFGGIKRDRAPFIFTSEMEYFITEGGKNPQHFQDFVELCCRAYNIIRKHSQLLLNLLEMMLYAGLPELSGIQDLKYVYNNLRPQDTDLEATSHFTKKIKESLECFPVKLNNLIHTLAQMSAISPAKSTSQTFPQESCLLSTTRSIERATILGFSKKSSNLYLIQVTHSNNETSLTEKSFEQFSKLHSQLQKQFASLTLPEFPHWWHLPFTNSDHRRFRDLNHYMEQILNVSHEVTNSDCVLSFFLSEAVQQTVEESSPVYLGEKFPDKKPKVQLVISYEDVKLTILVKHMKNIHLPDGSAPSAHVEFYLLPYPSEVRRRKTKSVPKCTDPTYNEIVVYDEVTELQGHVLMLIVKSKTVFVGAINIRLCSVPLDKEKWYPLGNSII

SEQ ID NO: 45461 - protein, 196 aa, Homo sapiens
MISSKPRLVVPYGLKTLLEGISRAVLKTNPSNINQFAAAYFQELTMYRVEKWSEGTTPQKKLECLKEPGKTSVESKVPTQMEKSTDTDEDNVTRTEYSDKTTQFPSVYAVPGTEQTEAVGGLSSKPATPKTTTPPSSPPPTAVSPEFAYVPADPAQLAAQMLAMATSERGQPPPCSNMWTLYCLTDKNQQGHPSPP

SEQ ID NO: 45462 - protein, 677 aa, Homo sapiens
MADKVRRQRPRRRVCWALVAVLLADLLALSDTLAVMSVDLGSESMKVAIVKPGVPMEIVLNKESRRKTPVIVTLKENERFFGDSAASMAIKNPKATLRYFQHLLGKQADNPHVALYQARFPEHELTFDPQRQTVHFQISSQLQFSPEEVLGMVLNYSRSLAEDFAEQPIKDAVITVPVFFNQAERRAVLQAARMAGLKVLQLINDNTATALSYGVFRRKDINTTAQNIMFYDMGSGSTVCTIVTYQMVKTKEAGMQPQLQIRGVGFDRTLGGLEMELRLRERLAGLFNEQRKGQRAKDVRENPRAMAKLLREANRLKTVLSANADHMAQIEGLMDDVDFKAKVTRVEFEELCADLFERVPGPVQQALQSAEMSLDEIEQVILVGGATRVPRVQEVLLKAVGKEELGKNINADEAAAMGAVYQAAALSKAFKVKPFVVRDAVVYPILVEFTREVEEEPGIHSLKHNKRVLFSRMGPYPQRKVITFNRYSHDFNFHINYGDLGFLGPEDLRVFGSQNLTTVKLKGVGDSFKKYPDYESKGIKAHFNLDESGVLSLDRVESVFETLVEDSAEEESTLTKLGNTISSLFGGGTTPDAKENGTDTVQEEEESPAEGSKDEPGEQVELKEEAEAPVEDGSQPPPPEPKGDATPEGEKATEKENGDKSEAQASVCRASVTRFGF

SEQ ID NO: 45463 - protein, 865 aa, Homo sapiens
MPGKRGLGWWWARLPLCLLLSLYGPWMPSSLGKPKGHPHMNSIRIDGDITLGGLFPVHGRGSEGKPCGELKKEKGIHRLEAMLFALDRINNDPDLLPNITLGARILDTCSRDTHALEQSLTFVQALIEKDGTEVRCGSGGPPIITKPERVVGVIGASGSSVSIMVANILRLFKIPQISYASTAPDLSDNSRYDFFSRVVPSDTYQAQAMVDIVRALKWNYVSTVASEGSYGESGVEAFIQKSREDGGVCIAQSVKIPREPKAGEFDKIIRRLLETSNARAVIIFANEDDIRRVLEAARRANQTGHFFWMGSDSWGSKIAPVLHLEEVAEGAVTILPKRMSVRDRERIGQDSAYEQEGKVQFVIDAVYAMGHALHAMHRDLCPGRVGLCPRMDPVDGTQLLKYIRNVNFSGIAGNPVTFNENGDAPGRYDIYQYQLRNDSAEYKVIGSWTDHLHLRIERMHWPGSGQQLPRSICSLPCQPGERKKTVKGMPCCWHCEPCTGYQYQVDRYTCKTCPYDMRPTENRTGCRPIPIIKLEWGSPWAVLPLFLAVVGIAATLFVVITFVRYNDTPIVKASGRELSYVLLAGIFLCYATTFLMIAEPDLGTCSLRRIFLGLGMSISYAALLTKTNRIYRIFEQGKRSVSAPRFISPASQLAITFSLISLQLLGICVWFVVDPSHSVVDFQDQRTLDPRFARGVLKCDISDLSLICLLGYSMLLMVTCTVYAIKTRGVPETFNEAKPIGFTMYTTCIVWLAFIPIFFGTSQSADKLYIQTTTLTVSVSLSASVSLGMLYMPKVYIILFHPEQNVPKRKRSLKAVVTAATMSNKFTQKGNFRPNGEAKSELCENLEAPALATKQTYVTYTNHAI

SEQ ID NO: 45464 - protein, 111 aa, Homo sapiens
MQPPPGMPLPPADIGPPPYEPPGHPMPQPGFIPPHMSADGTYMPPGFYPPPGPHPPMGYYPPGPYTPGPYPGPGGHTATVLVPSGAATTVTVLQGEIFEGAPVQTVCPHCQ

SEQ ID NO: 45465 - protein, 258 aa, Homo sapiens
MSRYSYQSLLDWLYGGVDPSFAGNGGPDCAAFLSWQQRLLESVVVLTLALLEILVALRHILRQTKEDGRGSPGSQPEQVTQRPEEGKESLSKNLLLVALCLTFGVEVGFKFATKTVIYLLNPCHLVTMMHLPFELEIYYIQHVMLYVVPIYLLWKGGAYTPEPLSSFRWALLSTGLMFFYHFSVLQILGLVTEVNLNNMLCPAISDPFYGPWYRIWASGHQTLMTMTHGKLVILFSYMAGPLCKYLLDLLRLPAKKID

SEQ ID NO: 45466 - protein, 172 aa, Homo sapiens
MFQQVPMVEIDGMKLVQTRAILNYIASKYNLYGKDIKERALIDMYTEGMADLNEMILLLPLCRPEEKDAKIALIKEKTKSRYFPAFEKVLQSHGQDYLVGNKLSRADISLVELLYYVEELDSSLISNFPLLKALKTRISNLPTVKKFLQPGSPRKPPADAKALEEARKIFRF

SEQ ID NO: 45467 - protein, 687 aa, Homo sapiens
MEARSMLVPPQASVCFEDVAMAFTQEEWEQLDLAQRTLYREVTLETWEHIVSLDWKATLEENRLNSEKDRAREELSHHVEVYRSGPEEPPSLVLGKVQDQSNQLREHQENSLRFMVLTSERLFAQREHCELELGGGYSLPSTLSLLPTTLPTSTGFPKPNSQVKELKQNSAFINHEKNGADGKHCESHQCARAFCQSIYLSKLGNVETGKKNPYEYIVSGDSLNYGSSLCFHGRTFSVKKSDDCKDYGNLFSHSVSLNEQKPVHFGKSQYECDECRETCSESLCLVQTERSGPGETPFRCEERCAAFPMASSFSDCNIIQTTEKPSVCNQCGKSFSCCKLIHQRTHTGEKPFECTQCGKSFSQSYDLVIHQRTHTGEKPYECDLCGKSFTQRSKLITHQRIHTGEKPYQCIECRKSFRWNSNLIVHQRIHTGEKPYECTHCGKSFSQSYELVTHKRTHTGEKPFKCTQCGKSFSQKYDLVVHQRTHTGEKPYECNLCGKSFSQSSKLITHQRIHTGEKPYQCIECGKSFRWNSNLVIHQRIHTGEKPYDCTHCGKSFSQSYQLVAHKRTHTGEKPYECNECGKAFNRSTQLIRHLQIHTGEKPYKCNQCNKAFARSSYLVMHQRTHTGEKPFECSQCGKAFSGSSNLLSHHRIHSGEKPYECSDCGKSFRQQSQLVVHRRTHTGEKP

SEQ ID NO: 45468 - protein, 79 aa, Homo sapiens
MVGKVQIPIMLVGNKKDLHMERVISYEEGKALAESWNAAFLESSAKENQTAVDVFRRIILEAEKMDGAASQGKSSCSVM

SEQ ID NO: 45469 - protein, 630 aa, Homo sapiens
MGLLMGEARAVLKWADGKMIKNEVDMQVLHLLGPKLEADLEKKFKVAKARLEETDRRTAKDVVENGETADQTLSLMEQLRGEALKFHKPGENYKTPGYVVTPHTMNLLKQHLEITGGQVRTRFPPEPNGILHIGHAKAINFNFGYAKANNGICFLRFDDTNPEKEEAKFFTAICDMVAWLGYTPYKVTYASDYFDQLYAWAVELIRRGLAYVCHQRGEELKGHNTLPSPWRDRPMEESLLLFEAMRKGKFSEGEATLRMKLVMEDGKMDPVAYRVKYTPHHRTGDKWCIYPTYDYTHCLCDSIEHITHSLCTKEFQARRSSYFWLCNALDVYCPVQWEYGRLNLHYAVVSKRKILQLVATGAVRDWDDPRLFTLTALRRRGFPPEAINNFCARVGVTVAQTTMEPHLLEACVRDVLNDTAPRAMAVLESLRVIITNFPAAKSLDIQVPNFPADETKGFHQVPFAPIVFIERTDFKEEPEPGFKRLAWGQPVGLRHTGYVIELQHVVKGPSGCVESLEVTCRRADAGEKPKAFIHWVSQPLMCEVRLYERLFQHKNPEDPTEVPGGFLSDLNLASLHVVDAALVDCSVALAKPFDKFQFERLGYFSVDPDSHQGKLVFNRTVTLKEDPGKV

SEQ ID NO: 45470 - protein, 160 aa, Homo sapiens
MSLLDGLASSPRAPLQSSKARMKKLPKKSQNEKYRLKYLRLRKAAKATVFENAAICDEIARLEEKFLKAKEERRYLLKKLLQLQALTEGEVQAAAPSHSSSLPLTYGVASSVGTIQGAGPISGPSTGAEEPFGKKTKKEKKEKGKENNKLEDHHRPTWLS

SEQ ID NO: 45471 - protein, 49 aa, Homo sapiens
MPVLYDRWSLALLPSLECSGMISAHYNLRLLGSSDSPASASLEAGITGY

SEQ ID NO: 45472 - protein, 181 aa, Homo sapiens
  MOD_RES (1)..(1): Any amino acid
XEMAINLAKSQHLDSDGLAQIFMQYGDHLYSKGNHDGAVQQYIRSASDSCVHELEKYTDSDAIGCTCLPRTIGKLEPSYVIRKFLDAQRIHNLTAYLQTLHRQSLANADHTTLLLNCYTKLKDSSKLEEFIKKKSESEVHFDVETAIKVLRQAGYYSHALYLAENHAHHEWYLKIQLEDIK

SEQ ID NO: 45473 - protein, 156 aa, Homo sapiens
MAAAGAFRLRRAASALLLRSPRLPARELSAPARLYHKKVVDHYENPRNVGSLDKTSKNVGTGLVGAPACGDVMKLQIQVDEKGKIVDARFKTFGCGSAIASSSLATEWVKGKTVEEALTIKNTDIAKELCLPPVKLHCSRKEGMRNISLNASMEVY

SEQ ID NO: 45474 - protein, 204 aa, Homo sapiens
MATNFLAHEKIWFDKFKYDDAERRFYEQMNGPVAGASRQENGASVILRDIARARENIQKSLAGSSGPGASSGTSGDHGELVVRIASLEVENQSLRGVVQELQQAISKLEARLNVLEKSSPGHRATAPQTQHVSPMRQVEPPAKKPATPAEDDEDDDIDLFGSDNEEEDKEAAQLREERLRQYAEKKAKKPALVAKSSILLDVKP

SEQ ID NO: 45475 - protein, 108 aa, Homo sapiens
MATVAELKAESGQPVVPLDRQFLIHELNAFEESKDNTIPLLYGILAHFLRGTKDGIQNAFLKGPSLQPSDPSLGRQPSRRKPMDDHLRKEEQKSTNIEDLHVSQAVNR

SEQ ID NO: 45476 - protein, 156 aa, Homo sapiens
MQNPRVLAALQERLDNVPHTPSSYIETLPKAVKRRINALKQLQVRCAHIEAKFYEEVHDLERKYAALYQPLFDKRREFITGDVEPTDAESEWHSENEEEEKLAGDMKSKVVVTEKAAATAEEPDPKGIPEFWFTIFRNVDMLSELVQEYDEPILKH

SEQ ID NO: 45477 - protein, 79 aa, Homo sapiens
MQPQNVQGLSKVSEEPSTSSDERASLIKKEIHGSLPHVAEPSVPYRGTVFAMDPRNGYMEPHYHLVTCLPETSFFYNTD

SEQ ID NO: 45478 - protein, 81 aa, Homo sapiens
MAGRSMQAARCPTDELSLTNCAVVNEKDFQSGQHVIVRTSPNHRYTFTLKTHPSVVPGSIAFSLPQSPYIHLTKPNSVLAQ

SEQ ID NO: 45479 - protein, 113 aa, Homo sapiens
MENLPAVTTEEPTPMGRGPVGPSGGGSTRDQVRTVVMRPSVSWEKAGPEEAKAPVRGGATVPAESLERPGPSSCFSRDASVITKLAKNEAGAFEPPCSETVPETVRWVWPWNP

SEQ ID NO: 45480 - protein, 74 aa, Homo sapiens
MAETSLLEAGASAASTAAALENLQVEASCSVCLEYLKEPVIIECGHNFCKACITRWWEDLERDFPCPVCRKTSR

SEQ ID NO: 45481 - protein, 103 aa, Homo sapiens
MAVLAPLIALVYSVPRLSRWLAQPYYLLSALLSAAFLLVRKLPPLCHGLPTQREDGNPCDFDWREVEILMFLSAIVMMKNRRSRGTRTGQEGHLDCGVLCQLV

SEQ ID NO: 45482 - protein, 121 aa, Homo sapiens
MESSGSQGGRAPSYDQPDYGQQDSYDQQSGYDQHQGSYDEQSNYDQQHDSYSQNQQSYHSQRENYSHHTQDDRRDVSRYGEDNRGYGGSQGGGRGRGGYDKDGRGPMTGSRSQGLWTQNRC

SEQ ID NO: 45483 - protein, 37 aa, Homo sapiens
MHPDLSPHLHTEECNVLINLLKECHKNVFRCWFHGSS

SEQ ID NO: 45484 - protein, 55 aa, Homo sapiens
MTTTRYRPTWDLALDPLVSCKLCLGEYPVEQMTTIAQCQCIFCTLCLKQYVELLI

SEQ ID NO: 45485 - protein, 613 aa, Homo sapiens
MLVGSQSFSPGGPNGIIRSQSFAGFSGLQERRSRCNSFIENSSALKKPQAKLKKMHNLGHKNNNPPKEPQPKRVEEVYRALKNGLDEYLEVHQTELDKLTAQLKDMKRNSRLGVLYDLDKQIKTIERYMRRLEFHISKVDELYEAYCIQRRLQDGASKMKQAFATSPASKAARESLTEINRSFKEYTENMCTIEVELENLLGEFSIKMKGLAGFARLCPGDQYEIFMKYGRQRWKLKGKIEVNGKQSWDGEETVFLPLIVGFISIKVTELKGLATHILVGSVTCETKELFAARPQVVAVDINDLGTIKLNLEITWYPFDVEDMTASSGAGNKAAALQRRMSMYSQGTPETPTFKDHSFFSNLPDDIFENGKAAEEKMPLSLSFSDLPNGDCALTSHSTGSPSNSTNPEITITPAEFNLSSLASQNEGMDDTSSASSRNSLGEGQEPKSHLKEEDPEEPRKPASAPSEACRRQSSGAGAEHLFLENDVAEALLQESEEASELKPVELDTSEGNITKQLVKRLTSAEVPMATDRLLSEGSVGGESEGCRSFLDGSLEDAFNGLLLALEPHKEQYKEFQDLNQEVMNLDDILKDAKHLDDQKLNGAASWTEITEGE

SEQ ID NO: 45486 - protein, 197 aa, Homo sapiens
MEPNDSTSTAVEEPDSLEVLVKTLDSQTRTFIVGAQMNVKEFKEHIAASVSIPSEKQRLIYQGRVLQDDKKLQEYNVGGKVIHLVERAPPQTHLPSGASSGTGSASATHGGGSPPGTRGPGASVHDRNANSYVMVGTFNLPSDGSAVDVHINMEQAPIQSEPRVRLVMAQHMIRDIQTLLSRMECRGGPQPQHSQPP

SEQ ID NO: 45487 - protein, 99 aa, Homo sapiens
MESIFHEKQEGSLCAQHCLNNLLQGEYFSPVELSSIAHQLDEEERMRMAEGGVTSEDYRTFLQQPSGNMDDSGFFSIQVILYLSLRVICQIAKLTNSCR

SEQ ID NO: 45488 - protein, 170 aa, Homo sapiens
LGAEGNVDESQKILMEVEKVRAKKKEAEKTVAEKQEKRNQDRLRRREEREREERLSRRSGSRTRDRRRSRSRDRRRRRSRSTSRERRKLSRSRSRDRHRRHRSRSRSHSRGHRRASRDRSAKYKFSRERASREESWESGRSERGPPDWRLESSNGKMASRRSEEKEAGEI

SEQ ID NO: 45489 - protein, 350 aa, Homo sapiens
MKCVNHKNIISLLNVFTPQKTLEEFQDVYLVMELMDANLCQVIQMELDHERMSYLLYQMLCGIKHLHSAGIIHRDLKPSNIVVKSDCTLKILDFGLARTAGTSFMMTPYVVTRYYRAPEVILGMGYKENVDIWSVGCIMGEMVRHKILFPGRDYIDQWNKVIEQLGTPCPEFMKKLQPTVRNYVENRPKYAGLTFPKLFPDSLFPADSEHNKLKASQARDLLSKMLVIDPAKRISVDDALQHPYINVWYDPAEVEAPPPQIYDKQLDEREHTIEEWKELIYKEVMNSEEKTKNGVVKGQPSPSGAAVNSSESLPPSSSVNDISSMSTDQTLASDTDSSLEASAGPLGCCR

SEQ ID NO: 45490 - protein, 48 aa, Homo sapiens
MPTAESEAKVKTKVRFEELLKTHSDLMREKKKLKKKLVRSEENISVSK

SEQ ID NO: 45491 - protein, 46 aa, Homo sapiens
MTVFFKTLRNHWKKTTAGLCLLTWGGHWLYGKHWCLAINSFLPMHK

SEQ ID NO: 45492 - protein, 495 aa, Homo sapiens
MDVVEVAGSWWAQEREDIIMKYEKGHRAGLPEDKGPKPFRSYNNNVDHLGIVHETELPPLTAREAKQIRREISRKSKWVDMLGDWEKYKSSRKLIDRAYKGMPMNIRGPMWSVLLNIEEMKLKNPGRYQIMKEKGKRSSEHIQRIDRDVSGTLRKHIFFRDRYGTKQRELLHILLAYEEYNPEVGYCRDLSHIAALFLLYLPEEDAFWALVQLLASERHSLQGFHSPNGGTVQGLQDQQEHVVATSQPKTMGHQDKKDLCGQCSPLGCLIRILIDGISLGLTLRLWDVYLVEGEQALMPITRIAFKVQQKRLTKTSRCGPWARFCNRFVDTWARDEDTVLKHLRASMKKLTRKKGDVPPPAKPEQGSSASRPVPASRGGKTLCKGDRQAPPGPPARFPRPIWSASPPRAPRSSTPCPGGAVREDTYPVGTQGVPSPALAQGGPQGSWRFLQWNSMPRLPTDLDVEGPWFRHYDFRQSCWVRAISQEDQLAPCWQA

SEQ ID NO: 45493 - protein, 52 aa, Homo sapiens
MPLAQLKEPWPLMELVPLDPENGQTSGEEAGLQPSKYVTASGPRWRETSWLM

SEQ ID NO: 45494 - protein, 390 aa, Homo sapiens
MADNLQATFGESLLSDMLDDFPDTLPSPEALKFKILVKNKKIGTLKETHERKGSDKRGKVEEWEEEVADGEEEEEEEEEEEEEEEDKFKESEVLESVLGDNQDKETGVKKLPGVMLFKKKKTRKLKIALALSDLVIYTKAEKFKSFQHSRLYQQFNENNSIGETQARKLSKLRVHEFIFHTRKFITRIYPKATRADSSNFNPQEFWNIGCQMVALNFQTPGLPMDLQNGKFLDNGGSGYILKPHFLRESKSYFNPSNIKEGMPITLTIRLISGIQLPLTHSSSNKGDSLVIIEVFGVPNDQMKQQTRVIKKNAFSPRWNETFTFIIHVPELALIRFVVEGQGLIAGNEFLGQYTLPLLCMNKGYRRIPLFSRMGESLEPASLFVYVWYVR

SEQ ID NO: 45495 - protein, 87 aa, Homo sapiens
MAPGRAVAGLLLLAAAGLGGVAEGPGLAFSEDVLSVFGANLSLSAAQLQHLLEQMGAASRVGVPEPGQLHFNQEEQIWKQFPQSLVL

SEQ ID NO: 45496 - protein, 431 aa, Homo sapiens
MAATDIARQVGEGCRTVPLAGHVGFDSLPDQLVNKSVSQGFCFNILCVGETGLGKSTLMDTLFNTKFEGEPATHTQPGVQLQSNTYDLQESNVRLKLTIVSTVGFGDQINKEDSYKPIVEFIDAQFEAYLQEELKIRRVLHTYHDSRIHVCLYFIAPTGHSLKSLDLVTMKKLDSKVNIIPIIAKADAISKSELTKFKIKITSELVSNGVQIYQFPTDDESVAEINGTMNAHLPFAVIGSTEELKIGNKMMRARQYPWGTVQVENEAHCDFVKLREMLIRVNMEDLREQTHTRHYELYRRCKLEEMGFKDTDPDSKPFSLQETYEAKRNEFLGELQKKEEEMRQMFVQRVKEKEAELKEAEKELHEKFDRLKKLHQDEKKKLEDKKKSLDDEVNAFKQRKTAAELLQSQGSQAGGSQTLKRDKEKKNLGFL

SEQ ID NO: 45497 - protein, 920 aa, Homo sapiens
MHEATSAETKRSKRKRCEVWGENPNPNDWRRVDGWPVGLKNVGNTCWFSAVIQSLFQLPEFRRLVLSYSLPQNVLENCRSHTEKRNIMFMQELQYLFALMMGSNRKFVDPSAALDLLKGAFRSSEEQQQDVSEFTHKLLDWLEDAFQLAVNVNSPRNKSENPMVQLFYGTFLTEGVREGKPFCNNETFGQYPLQVNGYRNLDECLEGAMVEGDVELLPSDHSVKYGQERWFTKLPPVLTFELSRFEFNQSLGQPEKIHNKLEFPQIIYMDRYMYRSKELIRNKRECIRKLKEEIKILQQKLERYVKYGSGPARFPLPDMLKYVIEFASTKPASESCPPESDTHMTLPLSSVHCSVSDQTSKESTSTESSSQDVESTFSSPEDSLPKSKPLTSSRSSMEMPSQPAPRTVTDEEINFVKTCLQRWRSEIEQDIQDLKTCIASTTQTIEQMYCDPLLRQVPYRLHAVLVHEGQANAGHYWAYIYNQPRQSWLKYNDISVTESSWEEVERDSYGGLRNVSAYCLMYINDKLPYFNAEAAPTESDQMSEVEALSVELKHYIQEDNWRFEQEVEEWEEEQSCKIPQMESSTNSSSQDYSTSQEPSVASSHGVRCLSSEHAVIVKEQTAQAIANTARAYEKSGVEAALSEAFHEEYSRLYQLAKETPTSHSDPRLQHVLVYFFQNEAPKRVVERTLLEQFADKNLSYDERSISIMKVAQAKLKEIGPDDMNMEEYKKWHEDYSLFRKVSVYLLTGLELYQKGKYQEALSYLVYAYQSNAALLMKGPRRGVKESVIALYRRKCLLELNAKAASLFETNDDHSVTEGINVMNELIIPCIHLIINNDISKDDLDAIEVMRNHWCSYLGQDIAENLQLCLGEFLPRLLDPSAEIIVLKEPPTIRPNSPYDLCSRFAAVMESIQGVSTVTVK

SEQ ID NO: 45498 - protein, 998 aa, Homo sapiens
MKLMTALVNVALNLSIHQDNTQRQYEAERNKMIGKRANERLELLLQKRKELQENQDEIENMMNSIFKGIFVHRYRDAIAEIRAICIEEIGVWMKMYSDAFLNDSYLKYVGWTLHDRQGEVRLKCLKALQSLYTNRELFPKLELFTNRFKDRIVSMTLDKEYDVAVEAIRLVTLILHGSEEALSNEDCENVYHLVYSAHRPVAVAAGEFLHKKLFSRHDPQAEEALAKRRGRNSPNGNLIRMLVLFFLESELHEHAAYLVDSLWESSQELLKDWECMTELLLEEPVQGEEAMSDRQESALIELMVCTIRQAAEAHPPVGRGTGKRVLTAKERKTQIDDRNKLTEHFIITLPMLLSKYSADAEKVANLLQIPQYFDLEIYSTGRMEKHLDALLKQIKFVVEKHVESDVLEACSKTYSILCSEEYTIQNRVDIARSQLIDEFVDRFNHSVEDLLQEGEEADDDDIYNVLSTLKRLTSFHNAHDLTKWDLFGNCYRLLKTGIEHGAMPEQIVVQALQCSHYSILWQLVKITDGSPSKEDLLVLRKTVKSFLAVCQQCLSNVNTPVKEQAFMLLCDLLMIFSHQLMTGGREGLQPLVFNPDTGLQSELLSFVMDHVFIDQDEENQSMEGDEEDEANKIEALHKRRNLLAAFSKLIIYDIVDMHAAADIFKHYMKLFNELVQEQGPNLDRTSAHVSGIKELARRFALTFGLDQIKTREAVATLHKDGIEFAFKYQNQKGQEYPPPNLAFLEVLSEFSSKLLRQDKKTVHSYLEKFLTEQMMERREDVWLPLISYRNSLVTGGEDDRMSVNSGSSSSKTSSVRNKKGRPPLHKKRVEDESLDNTWLNRTDTMIQTPGPLPAPQLTSTVLRENSRPMGDQIQEPESEHGSEPDFLHNPQMQISWLGQPKLEDLNRKDRTGMNYMKVRTGVRHAVRGLMEEDAEPIFEDVMMSSRSQLEDMNEEFEDTMVIDLPPSRNRRERAELRPDFFDSAAIIEDDSGFGMPMF

SEQ ID NO: 45499 - protein, 127 aa, Homo sapiens
  MOD_RES (1)..(1): Any amino acid
XKLRIPGDGLGHKSISYCEQHVDYKRPSWTKEEISSMKPKEFTISPDCGTIRPQGFAAIRVTLCSNTVQKYELALVVDVEGIGEEVLALLITASAPELCNRKVMLSVLQWKIHRAKRSLPRDTVAVT

SEQ ID NO: 45500 - protein, 156 aa, Homo sapiens
MDAIHIGMSSTPLVKHTAGAGLKANRPRVMSKSGHSNVRIDKVDGIYLLYLQDLWTTVIDMKWRYKLTLFAATFVMTWFLFGVIYYAIAFIHGDLEPGEPISNHTPCIMKVDSLTGAFLFSLESQTTIGYGVRSITEECPHAIFLLVAQLVITTLI

SEQ ID NO: 45501 - protein, 295 aa, Homo sapiens
MSEDPRGPKVPRKAVVEKPARAAEREARALLEKNRSYRLLEDSEESSEETVSRAGSSLQKKRKKRKHLRKKREEEEEEEASEKGKKKTGGSKQQTEKPESEDEWERTERERLQDLEERDAFAERVRQRDKDRTRNVLERSDKKAYEEAQKRLKMAEEDRKAMVPELRKKSRREYLAKREREKLEDLEAELADEEFLFGDVELSRHERQELKYKRRVRDLAREYRAAGEQEKLEATNRYHMPKETRGQPARAVDLVEEESGAPGEEQRRWEEARLGAASLKFGARDAASQEPKYQL

SEQ ID NO: 45502 - protein, 91 aa, Homo sapiens
MWTLGRRAVAGLLASPSPAQAQTLTRVPRPAELAPLCGRRGLRTDIDATCTPRRASSNQRGLNQIWNVKKQSVYLMNLRKSGTLGHPGVVS

SEQ ID NO: 45503 - protein, 91 aa, Homo sapiens
MDHLRPVNSANSNVLLIGRRKEEERLMESYYAGSVLYRTKEFYRRRKNKGRAWDLHIQIHLLHLLLRKTSIIQNIITTIITITIVTAVAIT

SEQ ID NO: 45504 - protein, 547 aa, Homo sapiens
MTVLEITLAVILTLLGLAILAILLTRWARCKQSEMYISRYSSEQSARLLDYEDGRGSRHAYSTQSERSKRDYTPSTNSLALSRSSIALPQGSMSSIKCLQTTEEPPSRTAGAMMQFTAPIPGATGPIKLSQKTIVQTPGPIVQYPGSNAGPPSAPRGPPMAPIIISQRTASQLAAPIRIPQVHTMDSSGKITLTPVVILTGYMDEELAKKSCSKIQILKCGGTARSQNSREENKEALKNDIIFTNSVESLKSAHIKEPEREGKGTDLEKDKIGMEVKVDSDAGIPKRQETQLKISEMSIPQGQGAQIKKSVSDVPRGQESQVKKSESGVPKGQEAQVTKSGLVVLKGQEAQVEKSEMGVPRRQESQVKKSQSGVSKGQEAQVKKRESVVLKGQEAQVEKSELKVPKGQEGQVEKTEADVPKEQEVQEKKSEAGVLKGPESQVKNTEVSVPETLESQVKKSESGVLKGQEAQEKKESFEDKGNNDKEKERDAEKDPNKKEKGDKNTKGDKGKDKVKGKRESEINGEKSKGSKRAKANTGRKYNKKVEE

SEQ ID NO: 45505 - protein, 200 aa, Homo sapiens
MKTILGFKGLFYLHSLIWTCAGDWSAIQVHCTQFWFFARIKPTIFYNLYVNPDEVFLGDGCHVTHVLPNVYYEFFYHPHDCGIVTQPLQEVLLLKTKIRYISRDSTVRSEMPLSCVVHNQHHLLNAVEMRDGETDNVNEWEIEVRIHIANEDMGSNFCNTILNLTATLPRSSNEYLYCKRRNCSVPFDIERQFGISAMIA

SEQ ID NO: 45506 - protein, 20 aa, Homo sapiens
TTSGTYKYIFGTGTRLKVLA

SEQ ID NO: 45507 - protein, 202 aa, Homo sapiens
MTTAGRGNLGLIPRSTAFQKQEGRLTVKQEPANQTWGQGSSLQKNYPPVCEIFRLHFRQLCYHEMSGPQEALSRLRELCRWWLMPEVHTKEQILELLVLEQFLSILPGELRTWVQLHHPESGEEAVAVVEDFQRHLSGSEEVSAPAQKQEMHFEETTALGTTKESPPTSPLSGGSAPGAHLEPPYDPGTHHLPSGDFGYCGI

SEQ ID NO: 45508 - protein, 36 aa, Homo sapiens
MLGITSCSDQQAKEGEGIQHRLLLRQPRWERRRKWT

SEQ ID NO: 45509 - protein, 109 aa, Homo sapiens
MSAHMSGLEIMDEDQLIKDVLDKFLNCHEQTYDEEFLNTFTHLSQEDHVSKRGVFGTDSSENIFTSAKVTHKNEADDYHLRNKTIFLRTSSQCLEEQICCCFQEKWSRM

SEQ ID NO: 45510 - protein, 123 aa, Homo sapiens
MVVQDPLLCDLPIQVTLEEVNSQIALEYGQAMTVRVCKMDGEVMPVVVVQSATVLDLKKAIQRYVQLKQEREGGIQHISWSYVWRTYHLTSAGEKLTEDRKKLRDYGIRNRDEVSFIKKLRQK

SEQ ID NO: 45511 - protein, 395 aa, Homo sapiens
MTVLLFSSFTRTHFNKCYEGKSSKDILKRVAANALMSLLAVSRRAQKHALKANLIDNCMEQMKHINAQLNLDSLRPGKAALKKKEDGVIKELSIAMQLLRNCLYQNEECKEAALEAHLVPVLHSLWPWILMDDSLMQISLQLLCVYTANFPNGCSSLCWSSCGQHPVQATHRGAVSNSLMLCILKLASQMPLENTTVQQMVFMLLSNLALSHDCKGVIQKSNFLQNFLSLALPKGGNKHLSNLTILWLKLLLNISSGEDGQQMILRLDGCLDLLTEMSKYKHKSSPLLPLLIFHNVCFSPANKPKILANEKVITVLAACLESENQNAQRIGAAALWALIYNYQKAKTALKSPSVKRRVDEAYSLAKKTFPNSEANPLNAYYLKCLENLVQLLNSS

SEQ ID NO: 45512 - protein, 106 aa, Homo sapiens
MGSWALLWPPLLFTGLLVRPPGTMAQAQYCSVNKDIFEVEENTNVTEPLVDIHVPEGQEVTLGALSTPFAFRIQGNQLFLNVTPDYEKAGPFRDEAAWAHTLSTDH

SEQ ID NO: 45513 - protein, 643 aa, Homo sapiens
MAGLTAAAPRPGVLLLLLSILHPSRPGGVPGAIPGGVPGGVFYPGAGLGALGGGALGPGGKPLKPGLGAFPAVTFPGALVPGGVADAAAAYKAAKAGAGLGGVPGVGGLGVSAGAVVPQPGAGVKPGKVPGVGLPGVYPGGVLPGARFPGVGVLPGVPTGAGVKPKAPGVGPFGGPQPGVPLGYPIKAPKLPGYGPGGVAGAAGKAGYPTGTGVGPQAAAAAAAKAAAKFGAGAAGVLPGVGGAGVPGVPGAIPGIGGIAGVGTPAAAAAAAAAAKAAKYGAAAGLVPGGPGFGPGVVGVPGAGVPGVGVPGAGIPVVPGAGIPGAAVPGVVSPEAAAKAAAKAAKYGARPGVGVGGIPTYGVGAGGFPGFGVGVGAEAQAAAAAKAAKYGLVPGVGVAPGVGVAPGVGVAPGVGLAPGVGVAPGVGVAPGVGVAPGIGPGGVAAAAKSAAKVAAKAQLRAAAGLGAGIPGLGVGVGVPGLGVGAGVPGLGVGAGVPGFGAVPGALAAAKAAKYGAAVPGVLGGLGALGGVGIPGGVVGAGPAAAAAAAKAAAKAAQFGLVGAAGLGGLGVGGLGVPGVGGLGGIPPAAAAKAAKYGAAGLGGVLGGAGQFPLGGVAARPGFGLSPIFPGGACLGKACGRKRK

SEQ ID NO: 45514 - protein, 134 aa, Homo sapiens
MCNTNMSVPTDGAVTTSQIPASEQETLVRPKPLLLKLLKSVGAQKDTYTMKEVLFYLGQYIMTKRLYDEKQQHIVYCSNDLLGDLFGVPSFSVKEHRKIYTMIYRNLVVVNQQVSLLVNGTTHLFTQVGILESS

SEQ ID NO: 45515 - protein, 409 aa, Homo sapiens
MSVGCACPGCSSKSFKLYSPKEPPNGNAFPPFHPGTMLDRDVGPTPMYPPTYLEPGIGRHTPYGNQTDYRIFELNKRLQNWTEECDNLWWDAFTTEFFEDDAMLTITFCLEDGPKRYTIGRTLIPRYFRSIFEGGATELYYVLKHPKEAFHSNFVSLDCDQGSMVTQHGKPMFTQVCVEGRLYLEFMFDDMMRIKTWHFSIRQHRELIPRSILAMHAQDPQMLDQLSKNITRCGLSNSTLNYLRLCVILEPMQELMSRHKTYSLSPRDCLKTCLFQKWQRMVAPPAEPTRQQPSKRRKRKMSGGSTMSSGGGNTNNSNSKKKSPASTFALSSQDVMVVGEPTLMGGEFGDEDERLITRLENTQFDAANGIDDEDSFNNSPALGANSPWNSKPPSSQESKSENPTSQASQ

SEQ ID NO: 45516 - protein, 44 aa, Homo sapiens
MSRVPSPPPPAEMSSGPVAESWCYTQCSQQLKKVIKAIGQCEIS

SEQ ID NO: 45517 - protein, 64 aa, Homo sapiens
MTKCIYCGFCQEACPVDAIVEGPNFEFSTETHEELLYNKEKLLNNGDKWEAEIAANIQADYLYR

SEQ ID NO: 45518 - protein, 169 aa, Homo sapiens
MTPASITAAKTSTITTAFPPVSSTTLFAVGATHSASIQEETEEVVNSQLPLLLSLLALLLLLLVGASLLAWRMFQKWIKAGDHSELSQNPKQAATQSELHYANLELLMWPLQEKPAPPREVEVEYSTVASPREELHYASVVFDSNTNRIAAQRPREEEPDSDYSVIRKT

SEQ ID NO: 45519 - protein, 892 aa, Homo sapiens
MSERAADDVRGEPRRAAAAAGGAAAAAARQQQQQQQQQQPPPPQPQRQQHPPPPPRRTRPEDGGPGAASTSAAAMATVGERRPLPSPEVMLGQSWNLWVEASKLPGKDGTELDESFKEFGKNREVMGLCREDMPIFGFCPAHDDFYLVVCNDCNQVVKPQAFQSHYERRHSSSSKPPLAVPPTSVFSFFPSLSKSKGGSASGSNRSSSGGVLSASSSSSKLLKSPKEKLQLRGNTRPMHPIQQSRVPHGRIMTPSVKVEKIHPKMDGTLLKSAVGPTCPATVSSLVKPGLNCPSIPKPTLPSPGQILNGKGLPAPPTLEKKPEDNSNNRKFLNKRLSEREFDPDIHCGVIDLDTKKPCTRSLTCKTHSLTQRRAVQGRRKRFDVLLAEHKNKTREKELIRHPDSQQPPQPLRDPHPAPPRTSQEPHQNPHGVIPSESKPFVASKPKPHTPSLPRPPGCPAQQGGSAPIDPPPVHESPHPPLPATEPASRLSSEEGEGDDKEESVEKLDCHYSGHHPQPASFCTFGSRQIGRGYYVFDSRWNRLRCALNLMVEKHLNAQLWKKIPPVPSTTSPISTRIPHRTNSVPTSQCGVSYLAAATVSTSPVLLSSTCISPNSKSVPAHGTTLNAQPAASGAMDPVCSMQSRQVSSSSSSPSTPSGLSSVPSSPMSRKPQKLKSSKSLRPKESSGNSTNCQNASSSTSGGSGKKRKNSSPLLVHSSSSSSSSSSSSHSMESFRKNCVAHSGPPYPSTVTSSHSIGLNCVTNKANAVNVRHDQSGRGPPTGSPAESIKRMSVMVNSSDSTLSLGPFIHQSNELPVNSHGSFSHSHTPLDKLIGKKRKCSPSSSSINNSSSKPTKVAKVPAVNNVHMKHTGTIPGAQGLMNSSLLHQVGNGL

SEQ ID NO: 45520 - protein, 202 aa, Homo sapiens
MPEQFSVAEFLAVTAEDLSSPAGAAAFAAKMPRYRGAALAREEILEGDQAILQRIKKAVRAIHSSGLGHVENEEQYREAVESLGNSHLSQNSHELSTGFLNLAVFTREVAALFKNLIQNLNNIVSFPLDSLMKGQLRDGRQDSKKQLEKAWKDYEAKMAKLEKERDRARVTGGIPGNLGIPAKPHPTLKRASESPQAPPDPA

SEQ ID NO: 45521 - protein, 156 aa, Homo sapiens
MKSLSLLLAVALGLATAVSAGPAVIECWFVEDASGKGLAKRPGALLLRQGPGEPPPRPDLDPELYLSVHDPAGALQAAFRRYPRGAPAPHCEMSRFVPLPASAKWASGLTPAQNCPRALDGAWLMVSISSMGHAMPVEFTIPACLPRGAALRSPWR

SEQ ID NO: 45522 - protein, 368 aa, Homo sapiens
MSANSSRVGQLLLQGSACIRWKQDVEGAVYHLANCLLLLGFMGGSGVYGCFYLFGFLSAGYLCCVLWGWFSACGLDIVLWSFLLAVVCLLQLAHLVYRLREDTLPEEFDLLYKTLCLPLQVPLQTYKEIVHCCEEQVLTLATEQTYAVEGETPINRLSLLLSGRVRVSQDGQFLHYIFPYQFMDSPEWESLQPSEEGVFQVTLTAETSCSYISWPRKSLHLLLTKERYISCLFSALLGYDISEKLYTLNDKLFAKFGLRFDIRLPSLYHVLGPTAADAGPESEKGDEEVCEPAVSPPQATPTSLQQTPPCSTPPATTNFPAPPTRARLSRPDSGILGEDSTSLVLEDFEEVSGSESFMDYRSDGEYMR

SEQ ID NO: 45523 - protein, 124 aa, Homo sapiens
MLKAVILIGGPQKGTRFRPLSFEVPKPLFPVAGVPMIQHHIEACAQVPGMQEILLIGFYQPDEPLTQFLEAAQQEFNLPVRCLCTHSYMGGWGCPRPLSSWKWVESAFAGVHPRLLEGFLFGHQ

SEQ ID NO: 45524 - protein, 89 aa, Homo sapiens
MPLVKRNIDPRHLCHTALPRGIKNELECVTNISLANIIRQLSSLSKYAEDIFGELFNEAHSFSFRVNSLQERVDRLSVSVTQLDPKEEE

SEQ ID NO: 45525 - protein, 194 aa, Homo sapiens
MVSRMVSTMLSGLLFWLASGWTPAFAYSPRTPDRVSEADIQRLLHGVMEQLGIARPRVEYPAHQAMNLVGPQSIEGGAHEGLQHLGPFGNIPNIVAELTGDNIPKDFSEDQGYPDPPNPCPVGKTADDGCLENTPDTAEFSREFQLHQHLFDPEHDYPGLGKWSVNPYLQGQRLDNVVAKKSVPHFSDEDKDPE

SEQ ID NO: 45526 - protein, 204 aa, Homo sapiens
MWPLALVIASLTLALSGGVSQESSKVLNTNGTSGFLPGGYTCFPHSQPWQAALLVQGRLLCGGVLVHPKWVLTAAHCLKEGLKVYLGKHALGRVEAVNYPKTLQCANIQLRSDEECRQVYPGKITDNMLCAGTKEGGKDSCEGDSGGPLVCNRTLYGIVSWGDFPCGQPDRPGVYTRVSRYVLWIRETIRKYETQQQKWLKGPQ

SEQ ID NO: 45527 - protein, 198 aa, Homo sapiens
MATVAELKAVLKDTLEKKGVLGHLKARIRAEVFNALDDDREPRPSLSHENLLINELIREYLEFNKYKYTASVLIAAHCILRLLGSSSSPASASRVPGTTESGQPVVPLDRQFLIHELNAFEESKDNTIPLLYGILAHFLRGTKDGIQNAFLKGPSLQPSDPSLGRQPSRRKPMDDHLRKEEQKSTNIEDLHVSQAVNR

SEQ ID NO: 45528 - protein, 236 aa, Homo sapiens
MSSGADGGGGAAVAARSDKGSPGEDGFVPSALGTREHWDAVYERELQTFREYGDTGEIWFGEESMNRLIRWMQKHKIPLDASVLDIGTGNGVFLVELAKFGFSNITGIDYSPSAIQLSGSIIEKEGLSNIKLKVEDFLNLSTQLSGFHICIDKGTFDAISLNPDNAIEKRKQYVKSLSRVLKVKGFFLITSCNWTKEELLNEFSEGFELLEELPTPKFSFGGRSGNSVAALVFQKM

SEQ ID NO: 45529 - protein, 70 aa, Homo sapiens
MALLSRPALTLLLLLMAAVVRCQEQAQTTDWRATLKTIRNGVHKIDTYLNAALDLLGGEDGLCQYKCSDA

SEQ ID NO: 45530 - protein, 310 aa, Homo sapiens
MMLLRKCCNHPYLIEYPIDPVTQEFKIDEELVTNSGKFLILDRMLPELKKRGHKVLLFSQMTSMLDILMDYCHLRDFNFSRLDGSMSYSEREKNMHSFNTDPEVFIFLVSTRAGGLGINLTAADTVIIYDSDWNPQSDLQAQDRCHRIGQTKPVVVYRLVTANTIDQKIVERAAAKRKLEKLIIHKNHFKGGQSGLNLSKNFLDPKELMELLKSRDYEREIKGSREKVISDKDLELLLDRSDLIDQMNASGPIKEKMGIFKILENSEDSSPELETGFHHLGLTGPELISGDLPTSASQSAGITSVSHCVA

SEQ ID NO: 45531 - protein, 451 aa, Homo sapiens
MAGLRNESEQEPLLGDTPGSREWDILETEEHYKSRWRSIRILYLTMFLSSVGFSVVMMSIWPYLQKIDPTADTSFLGWVIASYSLGQMVASPIFGLWSNYRPRKEPLIVSILISVAANCLYAYLHIPASHNKYYMLVARGLLGIGAGNVAVVRSYTAGATSLQERTSSMANISMCQALGFILGPASTDEAQVPQGNIDQVAVVAINVLFFVTLFIFALFETIITPLTMDMYAWTQEQAVLYNGIILAALGVEAVVIFLGVKLLSKKIGERAILLGGLIVVWVGFFILLPWGNQFPKIQWEDLHNNSIPNTTFGEIIIGLWKSPMEDDNERPTGCSIEQAWCLYTPVIHLAQFLTSAVLIGLGYPVCNLMSYTLYSKILGPKPQGVYMGWLTASGSGARILGPMFISQVYAHWGPRWAFSLVCGIIVLTITLLGVVYKRLIALSVRYGRIQE

SEQ ID NO: 45532 - protein, 120 aa, Homo sapiens
MFKFDQFKRLIEDFSSIADFLVIYIEEAHASDGWAFKNNMDIRNHQNLQDRLQAAHLLLARSPQCPVVVDTMQNQSSQLYAALPERLYIIQEGRILYKGKSGPWNYNPEEVRAVLEKLHS

SEQ ID NO: 45533 - protein, 35 aa, Homo sapiens
MSLDIQSLDIQCEELSDARWAELLPLLQQCQVVRL

SEQ ID NO: 45534 - protein, 202 aa, Homo sapiens
MVHVARLLLLLLTFFLRTDAETPPRFTRTPVDQTGVSGGVASFICQATGDPRPKIVWNKKGKKVSNQRFEVIEFDDGSGSVLRIQPLRTPRDEAIYECVASNNVGEISVSTRLTVLREDQIPRGFPTIDMGPQLKVVERTRTATMLCAASGNPDPEITWFKDFLPVDTSNNNGRIKQLRSGTDFSPSSLSLLLNGWSMFVMS

SEQ ID NO: 45535 - protein, 40 aa, Homo sapiens
MRRPAAVPLLLLLCFGSQRAKAATAPLRRPCTRSCWGQGS

SEQ ID NO: 45536 - protein, 46 aa, Homo sapiens
MAECPTLGEAVTDHPDRLWAWEKFVYLDEKQHAWLPLTIEIQGLAL

SEQ ID NO: 45537 - protein, 65 aa, Homo sapiens
MGVTCVSQMPVAEGKSVQQTVELLTRKLEMLGAEKQGTFCVDCETYHTAASTLGSQGGVWPLCGS

SEQ ID NO: 45538 - protein, 291 aa, Homo sapiens
MDVVEVAGSWWAQEREDIIMKYEKGHRAGLPEDKGPKPFRSYNNNVDHLGIVHETELPPLTAREAKQIRREISRKSKWVDMLGDWEKYKSSRKLIDRAYKGMPMNIRGPMWSVLLNTEEMKMKNPGRYQIMKEKGKRSSEHIQRIDRDVSGTLRKHIFFRDRYGTKQRELLHILLAYEEYNPEVGYCRDLSHIAALFLLYLPEEDAFWALVQLLASERHSLQGFHSPNGGTVQGLQDQQEHVVATSQPKTMGHQSASRRRPGVARGHVFATGSLIPGPGMRTLCSSILGPL

SEQ ID NO: 45539 - protein, 5333 aa, Homo sapiens
  MOD_RES (1)..(1): Any amino acid
XTTEDTLITGSKTAAPVTSTGSTTATLEGQSTAASSRTSNQDISASSQNHQTKSTETTSKAQTDTLTQMMTSTLFSSPSVHNVMETAPPDEMTTSFPSSVTNTLMMTSKTITMTTSTDSTLGNTEETSTAGTESSTPVTSAVSITAGQEGQSRTTSWRTSIQDTSASSQNHWTRSTQTTRESQTSTLTHRTTSTPSFSPSVHNVTGTVSQKTSPSGETATSSLCSVTNTSMMTSEKITVTTSTGSTLGNPGETSSVPVTGSLMPVTSAALVTFDPEGQSPATFSRTSTQDTTAFSKNHQTQSVETTRVSQINTLNTLTPVTTSTVLSSPSGFNPSGTVSQETFPSGETTTSSPSSVSNTFLVTSKVFRMPTSRDSTLGNTEETSLSVSGTISAITSKVSTIWWSDTLSTALSPSSLPPKISTAFHTQQSEGAETTGRPHERSSFSPGVSQEIFTLHETTTWPSSFSSKGHTTWSQTELPSTSTGAATRLVTGNPSTGTAGTIPRVPSKVSAIGEPGEPTTYSSHSTTLPKTTGAGAQTQWTQETGTTGEALLSSPSYSVTQMIKTATSPSSSPMLDRHTSQQITTAPSTNHSTIHSTSTSPQESPAVSQRGHTQAPQTTQESQTTRSVSPMTDTKTVTTPGSSFTASGHSPSEIVPQDAPTISAATTFAPAPTGDGHTTQAPTTALQAAPSSHDATLGPSGGTSLSKTGALTLANSVVSTPGGPEGQWTSASASTSPDTAAAMTHTHQAESTEASGQTQTSEPASSGSRTTSAGTATPSSSGASGTTPSGSEGISTSGETTRFSSNPSRDSHTTQSTTELLSASASHGAIPVSTGMASSIVPGTFHPTLSEASTAGRPTGQSSPTSPSASPQETAAISRMAQTQRTRTSRGSDTISLASQATDTFSTVPPTPPSITSTGLTSPQTETHTLSPSGSGKTFTTALISNATPLPVTYASSASTGHTTPLHVTDASSVSTGHATPLPVTSPSSVSTGHTTPLPVTDTSSESTGHVTPLPVTSFSSASTGDSTPLPVTDTSSASTGHVTPLPVTSLSSASTGDTTPLPVTDTSSASTGHATSLPVTDTSSVSTGHTTPLPVTDTSSASTGHATSLPVTDTSSVSTGHTTPLHVTDASSASTGQATPLPVTSLSSVSTGDTTPLPVTSPSSASTGHATPLLVTDTSSASTGHATPLPVTDASSVSTDHATSLPVTIPSAASTGHTTPLPVTDTSSASTGQATSLLVTDTSSVSTGDTTPLPVTSTSSASTGHVTPLHVTSPSSASTGHATPLPVTSLSSASTGDTMPLPVTSPSSASTGDTTPLPVTDASSVSTGHTTPLHVTDASSASTGQATPLPVTSLSSVSTGDTTPLPVTSPSSASTGHATPLLVTDTSSASTGHATPLPVTDASSVSTDHATSLPVTIPSAASTGHTTPLPVTDTSSASTGQATSLLVTDTSSVSTGDTTPLPVTSTSSASTGHVTPLHVTSPSSASTGHATPLPVTSLSSASTGDTMPLPVTSPSSASTGDTTPLPVTDASSVSTGHTTPLPVTSPSSASTGHTTPLPVTDTSSASKGDTTPLPVTSPSSASTGHTTPLPVTDTSSASTGDTTPLPVTNASSLSTGHATPLHVTSPSSASTGHATPLPVTSTSSASTGHATPLPVTGLSSATTDDTTRLPVTDVSSASTGQATPLPVTSLSSVSTGDTTPLPVTSPSSASTGHASPLLVTDASSASTGQATPLPVTDTSSVSTAHATPLPVTGLSSASTDDTTRLPVTDVSSASTGQAIPLPVTSPSSASTGDTTPLPVTDASSASTGDTTSLPVTIPSSASSGHTTSLPVTDASSVSTGHATSLLVTDASSVSTGDTTPLPVTDTNSASTGDTTPLHVTDASSVSTGHATSLPVTSLSSASTGDTTPLPVTSPSSASSGHTTPLPVTDASSVPTGHATSLPVTDASSVSTGHATPLPVTDASSVSTGHATPLPVTDTSSVSTGQATPLPVTSLSSASTGDTTPLPVTDTSSASTGQDTPLPVTSLSSVSTGDTTPLPVTNPSSASTGHATPLLVTDASSISTGHATSLLVTDASSVSTGHATALHDTDASSLSTGDTTPLPVTSPSSTSTGDTTPLPVTETSSVSTGHATSLPVTDTSSASTGHATSLPVTDTSSASTGHATPLPVTDTSSASTGQATPLPVTSPSSASTGHAIPLLVTDTSSASTGQATPLPVTSLSSASTGDTTPLPVTDASSVSTGHATSLPVTSLSSVSTGDTTPLPVTSPSSASTGHATPLHVTDASSASTGHATPLPVTSLSSASTGDTTPLPVTSPSSASTGHATPLHVTDASSVSTGDTTPLPVTSSSSASSGHTTPLPVTDASSASTGDTTPLPVTDTSSASTGHATHLPVTGLSSASTGDTTRLPVTNVSSASTGHATPLPVTSTSSASTGDTTPLPGTDTSSVSTGHTTPLLVTDASSVSTGDTTRLPVTSPSSASTGHTTPLPVTDTPSASTGDTTPLPVTNASSLSTRHATSLHVTSPSSASTGHATSLPVTDTSAASTGHATPLPVTSTSSASTGDTTPLPVTDTYSASTGQATPLPVTSLSSVSTGDTTPLPVTSPSSASTGHATPLLVTDASSASTGQATPLPVTSLSSVSTGDTTPLPVTSPSSASTGHATSLPVTDTSSASTGDTTSLPVTDTSSAYTGDTTSLPVTDTSSSSTGDTTPLLVTETSSVSTGDTTPLPVTDTSSASTGHATPLPVTNTSSVSTGHATPLHVTSPSSASTGHTTPLPVTDASSVSTGHATSLPVTDASSVFTGHATSLPVTIPSSASSGHTTPLPVTDASSVSTGHATSLPVTDASSVSTGHATPLPVTDASSVSTGHATPLPLTSLSSVSTGDTTPLPVTDTSSASTGQATPLPVTSLSSVSTGDTTPLPVTDTSSASTGHATSLPVTDTSSASTGHATPLPDTDTSSASTGHATLLPVTDTSSASIGHATSLPVTDTSSISTGHATPLHVTSPSSASTGHATPLPVTDTSSASTGHANPLHVTSPSSASTGHATPLPVTDTSSASTGHATPLPVTSLSSVSTGDTTPLPVTSPSSASTGHTTPLPVTDTSSASTGQATALPVTSTSSASTGDTTPLPVTDTSSASTGQATPLPVTSLSSVSTGDTTPLPVTSPSSASTGHATPLLVTDASSASTGQATPLPVTSLSSVSTGDTTPLPVTSPSSASTGHATSLPVTDTSSASTGDTTSLPVTDTSSAYTGDTTSLPVTDTSSSSTGDTTPLLVTETSSVSTGHATPLLVTDASSASTGHATPLHVTSPSSASTGDTTPVPVTDTSSVSTGHATPLPVTGLSSASTGDTTRLPVTDISSASTGQATPLPVTNTSSVSTGDTMPLPVTSPSSASTGHATPLPVTSTSSASTGHATPVPVTSTSSASTGHTTPLPVTDTSSASTGDTTPLPVTSPSSASTGHTTPLHVTIPSSASTGDTSTLPVTGASSASTGHATPLPVTDTSSVSTGHATPLPVTSLSSVSTGDTTPLPVTDASSASTGQATPLPVTSLSSVSTGDTTPLLVTDASSVSTGHATPLPVTDTSSASTGDTTRLPVTDTSSASTGQATPLPVTSLSSVSTGDTTPLLVTDASSVSTGHATPLPVTDTSSASTGDTTRLPVTDTSSASTGQATPLPVTIPSSSSSGHTTPLPVTSTSSVSTGHVTPLHVTSPSSASTGHVTPLPVTSTSSASTGHATPLLVTDASSVSTGHATPLPVTDASSASTGDTTPLPVTDTSSASTGQATPLPVTSLSSVSTGDTTPLPVTDASSASTGHATPLPVTIPSSVSTGDTMPLPVTSPSSASTGHATPLPVTGLSSASTGDTTPLPVTDTSSASTRHATPLPVTDTSSASTDDTTRLPVTDVSSASTGHATPLPVTSTSSASTGDTTPLPVTDTSSVSTGHATSLPVTSRSSASTGHATPLPVTDTSSVSTGHATPLPVTSTSSVSTGHATPLPVTSPSSASTGHATPVPVTSTSSASTGDTTPLPVTNASSLSTGHATPLHVTSPSSASRGDTSTLPVTDASSASTGHATPLPLTSLSSVSTGDTTPLPVTDTSSASTGQATPLPVTSLSSVSTGDTTPLPVTIPSSASSGHTTSLPVTDASSVSTGHGTPLPVTSTSSASTGDTTPLPVTDTSSASTGHATPLPVTDTSSASTGHATPLPVTSLSSVSTGHATPLAVSSATSASTVSSDSPLKMETPGMTTPSLKTDGGRRTATSPPPTTSQTIISTIPSTAMHTRSTAAPIPILPERGVSLFPYGAGAGDLEFVRRTVDFTSPLFKPATGFPLGSSLRDSLYFTDNGQIIFPESDYQIFSYPNPLPTGFTGRDPVALVAPFWDDADFSTGRGTTFYQSNTYQAILSTDGSRSYALFLYQSGGMQWDVAQRSGNPVLMGFSSGDGYFENSPLMSQPVWERYRPDRFLNSNSGLQGLQFYRLHREERPNYRLECLQWLKSQPRWPSWGWNQVSCPCSWQQGRRDLRFQPVSIGRWGLGSRQLCSFTSWRGGVCCSYGPWGEFREGWHVQRPWQLAQELEPQSWCCRWNDKPYLCALYQQRRPHVGCATYRPPQPAWMFGDPHITTLDGVSYTFNGLGDFLLVGAQDGNSSFLLQGRTAQTGSAQATNFIAFAAQYRSSSLGPVTVQWLLEPHDAIRVLLDNQTVTFQPDHEDGGGQETFNATGVLLSRNGSEVSASFDGWATVSVIALSNILHASASLPPEYQNRTEGLLGVWNNNPEDDFRMPNGSTIPPGSPEEMLFHFGMTWQINGTGLLGKRNDQLPSNFTPVFYSQLQKNSSWAEHLISNCDGDSSCIYDTLALRNASIGLHTREVSKNYEQANATLNQYPPSINGGRVIEAYKGQTTLIQYTSNAEDANFTLRDSCTDLELFENGTLLWTPKSLEPFTLEILARSAKIGLASALQPRTVVCHCNAESQCLYNQTSRVGNSSLEVAGCKCDGGTFGRYCEGSEDACEEPCFPSVHCVPGKGCEACPPNLTGDGRHCAALGSSFLCQNQSCPVNYCYNQGHCYISQTLGCQPMCTCPPAFTDSRCFLAGNNFSPTVNLELPLRVIQLLLSEEENASMAEVNASVAYRLGTLDMRAFLRNSQVERIDSAAPASGSPIQHWMVISEFQYRPRGPVIDFLNNQLLAAVVEAFLYHVPRRSEEPRNDVVFQPISGEDVRDVTALNVSTLKAYFRCDGYKGYDLVYSPQSGFTCVSPCSRGYCDHGGQCQHLPSGPRCSCVSFSIYTAWGEHCEHLSMKLDAFFGIFFGALGGLLLLGVGTFVVLRFWGCSGARFSYFLNSAEALP

SEQ ID NO: 45540 - protein, 54 aa, Homo sapiens
MAAEKQVPGGGGGGGSGGGGGSGGGGSGGGRGAGGEENKENERPSAGSKGLLFP

SEQ ID NO: 45541 - protein, 266 aa, Homo sapiens; identical to SEQ ID NO: 21972

SEQ ID NO: 45542 - protein, 433 aa, Homo sapiens
LPTCALQRVDRLGVAGAGGRRCRACRARTSVLPGLRAVRRGQGQAAGRVCVAPDSPRLPVPRGDLKGRGREIRSPAAAPSRSSPAQTRPAGRPQQPARLALGERSWQEGRPVCTRFGPLRPGWQDGHAPSRDGASRTPSGTEDQLYPGTLPFPPLWPHSTTTTSPSSPLFWSPLPPRLPTQRLPQVPPLPLPQIQALSSAWVVLPPGKGEEGPGPELHSGCLDGLRSLFEGPPCPYPGAWIPFQVPGTAHPSPATPSGDPSMEEHLSVMYERLRQELPKLFLQSHDYSLYSLDVEFINEILNIRTKGRTWYILSLTLCRFLAWNYFAHLRLEVLQLTRHPENWTLQARWRLVGLPVHLLFLRFYKRDKDEHYRTYDAYSTFYLNSSGLICRHRLDKLMPSHSPPTPVKKLLVGALVALGLSEPEPDLNLCSKP

SEQ ID NO: 45543 - protein, 62 aa, Homo sapiens
MEAVNLLSSNRYTEKQIGYLFISVLVNSNSELIRLINNAIKNDLASRNPTFMGLALHCIASV

SEQ ID NO: 45544 - protein, 190 aa, Homo sapiens
MDWKEVLRRRLATPNTCPNKKKSEQELKDEEMDLFTKYYSEWKGGRKNTNEFYKTIPRFYYRLPAEDEVLLQKLREESRAVFLQRKSRELLDNEELQNLWFLLDKHQTPPMIGEEAMINYENFLKVGEKAGAKCKQFFTAKVFAKLLHTDSYGRISIMQFFNYVMRKGDSFLLCLNSLSGNQVGFWSVLL

SEQ ID NO: 45545 - protein, 302 aa, Homo sapiens
MDNAGKEREAVQLMAEAEKRVKASHSFLRGLFGGNTRIEEACEMYTRAANMFKMAKNWSVSSSAAGNAFCQAAKLHMQLQSKHDSATSFVDAGNAYKKADPQEAINCLNAAIDIYTDMGRFTIAAKHHITIAEIYETELVDIEKAIAHYEQSADYYKGEESNSSANKCLLKVAAYAAQLEQYQKAIEIYEQVGANTMDNPLLKYSAKDYFFKAALCHFIVDELNAKLALEKYEEMFPAFTDSRECKLLKKLLEAHEEQNSEAYTEAVKEFDSISRLDQWLTTMLLRIKKSIQGDGEGDGDLK

SEQ ID NO: 45546 - protein, 1029 aa, Homo sapiens
MRSAAKPWNPAIRAGGHGPDRVRPLPAASSGMKSSKSSTSLAFESRLSRLKRASSEDTLNKPGSTAASGVVRLKKTATAGAISELTESRLRSGTGAFTTTKRTGIPAPREFSVTVSRERSVPRGPSNPRKSVSSPTSSNTPTPTKHLRTPSTKPKQENEGGEKAALESQVRELLAEAKAKDSEINRLRSELKKYKEKRTLNAEGTDALGPNVDGTSVSPGDTEPMIRALEEKNKNFQKELSDLEEENRVLKEKLIYLEHSPNSEGAASHTGDSSCPTSITQESSFGSPTGNQMSSDIDEYKKNIHGNALRTSGSSSSDVTKASLSPDASDFEHITAETPSRPLSSTSNPFKSSKCSTAGSSPNSVSELSLASLTEKIQKMEENHHSTAEELQATLQELSDQQQMVQELTAENEKLVDEKTILETSFHQHRERAEQLSQENEKLMNLLQERVKNEEPTTQEGKIIELEQKCTGILEQGRFEREKLLNIQQQLTCSLRKVEEENQGALEMIKRLKEENEKLNEFLELERHNNNMMAKTLEECRVTLEGLKMENGSLKSHLQGEKQKATEASAVEQTAESCEVQEMLKVARAEKDLLELSCNELRQELLKANGEIKHVSSLLAKVEKDYSYLKEICDHQAEQLSRTSLKLQEKASESDAEIKDMKETIFELEDQVEQHRAVKLHNNQLISELESSVIKLEEQKSDLERQLKTLTKQMKEETEEWRRFQADLQTAVVVANDIKCEAQQELRTVKRKLLEEEEKNARLQKELGDVQGHGRVVTSRAAPPPVDEEPESSEVDAAGRWPGVCVSRTSPTPPESATTVKSLIKSFDLGRPGGAGQNISVHKTPRSPLSGIPVRTAPAAAVSPMQRHSTYSSVRPASRGVTQRLDLPDLPLSDILKGRTETLKPDPHLRKSPSLESLSRPPSLGFGDTRLLSASTRAWKPQSKLSVERKDPLAALAREYGGSKRNALLKWCQKKTQGYAKRNLLLAFEAAESVGIKPSLELSEMLYTDRPDWQSVMQYVAQIYKYFET

SEQ ID NO: 45547 - protein, 418 aa, Homo sapiens
MRACAGPRLGAAMMEGLDDGPDFLSEEDRGLKAINVDLQSDAALQVDISDALSERDKVKFTVHTKSSLPNFKQNEFSVVRQHEEFIWLHDSFVENEDYAGYIIPPAPPRPDFDASREKLQKLGEGEGSMTKEEFTKMKQELEAEYLAIFKKTVAMHEVFLCRVAAHPILRRDLNFHVFLEYNQDLSVRGKNKKEKLEDFFKNMVKSADGVIVSGVKDVDDFFEHERTFLLEYHNRVKDASAKSDRMTRSHKSAADDYNRIGSSLYALGTQDSTDICKFFLKVSELFDKTRKIEARVSADEDLKLSDLLKYYLRESQAAKDLLYRRSRSLVDYENANKALDKARAKNKDVLQAETSQQLCCQKFEKISESAKQELIDFKTRRVAAFRKNLVELAELELKHAKGNLQLLQNCLAVLNGDT

SEQ ID NO: 45548 - protein, 57 aa, Homo sapiens
MADGGAASQDESSAAAAAAADWKSKKSFPAFLITKLLSVFNESVQRKNAVFLYLTQE

SEQ ID NO: 45549 - protein, 133 aa, Homo sapiens
MKLHCEVEVISRHLPALGLRNRGKGVRAVLSLCQQTSRSQPPVRAFLLISTLKDKRGTRYELRENIEQFFTKFVDEGKATVRLKEPPVDICLSKMESHSVTQVGVQWEELGSLQPTGHFQQFKRFPFSYETGS

SEQ ID NO: 45550 - protein, 561 aa, Homo sapiens
MALSLEEEAGRIKDCWDNQEAPALSTCSNANIFRRINAILDNSLDFSRVCTTPINRGIHDHLPDFQDSEETVTSRMLFPTSAQESSRGLPDANDLCLGLQSLSLTGWDRPWSTQDSDSSAQSSTHSVLSMLHNPLGNVLGKPPLSFLPLDPLGSDLVDKFPAPSVRGSRLDTRPILDSRSSSPSDSDTSGFSSGSDHLSDLISSLRISPPLPFLSLSGGGPRDPLKMGVGSRMDQEQAALAAVTPSPTSASKRWPGASVWPSWDLLEAPKDPFSIEREARLHRQAAAVNEATCTWSGQLPPRNYKNPIYSCKVFLGGVPWDITEAGLVNTFRVFGSLSVEWPGKDGKHPRCPPKGYVYLVFELEKSVRSLLQACSHDPLSPDGLSEYYFKMSSRRMRCKEVQVIPWVLADSNFVRSPSQRLDPSRTVFVGALHGMLNAEALAAILNDLFGGVVYAGIDTDKHKYPIGSGRVTFNNQRSYLKAVSAAFVEIKTTKFTKKVQIDPYLEDSLCHICSSQPGPFFCRDQVCFKYFCRSCWHWRHSMEGLRHHSPLMRNQKNRDSS

SEQ ID NO: 45551 - protein, 50 aa, Homo sapiens
MFSLKPPKPTFRSYLLPPPQTDDKINSEPKIKKLEPVLLPEIPLQKPSSW

SEQ ID NO: 45552 - protein, 329 aa, Homo sapiens
MSLVSGFVEGKDEQGRLLRRTLIRYANLGNVLILRSVSTAVYKRFPSAQHLVQAGFMTPAEHKQLEKLSLPHNMFWVPWVWFANLSMKAWLGGRIRDPILLQSLLNEMNTLRTQCGHLYAYDWISIPLVYTQVVTVAVYSFFLTCLVGRQFLNPAKAYPGHELDLVVPVFTFLQFFFYVGWLKVGLSRALLGWRHGQRGHGQQLPETRMQCQERKVSRVESSQAWWRTPVIPATREAEAGESLEPGRRRLWWQSSSSTPLERMMMILRPTGLSTGICRCPCWLWMRCTRTCLGWSRTCTGISPSHSPPTQLLPPSSVEPPLWAPPSTSA

SEQ ID NO: 45553 - protein, 162 aa, Homo sapiens
MKDSCITVMAMALLSGFFFFAPASSYNLDVRGARSFSPPRAGRHFGYRVLQVGNGVIVGAPGEGNSTGSLYQCQSGTGHCLPVTLRGSNYTSKYLGMTLATDPTDGSILACDPGLSRTCDQNTYLSGLCYLFRQNLQGPMLQGRPGFQVCCCSVFHKLQNRI

SEQ ID NO: 45554 - protein, 40 aa, Homo sapiens
MKPGGGFHSGGNRGRGRGGKRGNQSGKNVMVEPHRHEGRR

SEQ ID NO: 45555 - protein, 151 aa, Homo sapiens
MAPLYQAAGKGDVPTKRPPVLRAGVNTVTTLVENKKAQLVVIAHDVDPIELVVFLPALCRKMGVPYCIIKGKARLGRLVHRKTCTTVAFTQVNSEDKGALAKLVEAIRTNYNDRYDEIRRHWGGNVLGPKSVARIAKLEKAKAKELATKLG

SEQ ID NO: 45556 - protein, 360 aa, Homo sapiens [sequence omitted]

SEQ ID NO: 45557 - protein, 1278 aa, Homo sapiens
MSEAPRFFVGPEDTEINPGNYRHFFHHADEDDEEEDDSPPERQIVVGICSMAKKSKSKPMKEILERISLFKYITVVVFEEEVILNEPVENWPLCDCLISFHSKGFPLDKAVAYAKLRNPFVINDLNMQYLIQDRREVYSILQAEGILLPRYAILNRDPNNPKECNLIEGEDHVEVNGEVFQKPFVEKPVSAEDHNVYIYYPTSAGGGSQRLFRKIGSRSSVYSPESNVRKTGSYIYEEFMPTDGTDVKVYTVGPDYAHAEARKSPALDGKVERDSEGKEVRYPVILNAREKLIAWKVCLAFKQTVCGFDLLRANGQSYVCDVNGFSFVKNSMKYYDDCAKILGNIVMRELAPQFHIPWSIPLEAEDIPIVPTTSGTMMELRCVIAVIRHGDRTPKQKMKMEVRHQKFFDLFEKCDGYKSGKLKLKKPKQLQEVLDIARQLLMELGQNNDSEIEENKPKLEQLKTVLEMYGHFSGINRKVQLTYLPHGCPKTSSEEEDSRREEPSLLLVLKWGGELTPAGRVQAEELGRAFRCMYPGGQGDYAGFPGCGLLRLHSTYRHDLKIYASDEGRVQMTAAAFAKGLLALEGELTPILVQMVKSANMNGLLDSDSDSLSSCQQRVKARLHEILQKDRDFTAEDYEKLTPSGSISLIKSMHLIKNPVKTCDKVYSLIQSLTSQIRHRMEDPKSSDIQLYHSETLELMLRRWSKLEKDFKTKNGRYDISKIPDIYDCIKYDVQHNGSLKLENTMELYRLSKALADIVIPQEYGITKAEKLEIAKGYCTPLVRKIRSDLQRTQDDDTVNKLHPVYSRGVLSPERHVRTRLYFTSESHVHSLLSILRYGALCNTNDSQNEDGGMVKEMESKDEQWKRAMDYLNVVNELNYMTQIVIMLYEDPNKDLSSEERFHVELHFSPGAKGCEEDKNLPSGYGYRPASRENEGRRPFKIDNDDEPHTSKRDEVDRAVILFKPMVSEPIHIHRKSPLPRSRKTATNDEESPLSVSSPEGTGTWLHYTSGVGTGRRRRRSGEQITSSPVSPKSLAFTSSIFGSWQQVVSENANYLRTPRTLVEQKQNPTVGSHCAGLFSTSVLGGSSSAPNLQDYARTHRKKLTSSGCIDDATRGSAVKRFSISFARHPTNEHLHLYRCWSVSSVEFLGSSGFELYSMVPSICPLETLHNALSLKQVDEFLASIASPSSDVPRKTAEISSTALRSSPIMRKKVSLNTYTPAKILPTPPATLKSTKASSKPATSGPSSAVVPNTSSRKKNITSKTETHEHKKNTGKKK

SEQ ID NO: 45558 - protein, 146 aa, Homo sapiens [sequence omitted]

SEQ ID NO: 45559 - protein, 54 aa, Homo sapiens
MTPLVSRLSRLWAIMRKPRAAVGSGHRKQAASQEGRQKHAKNNSQAKPSACDET

SEQ ID NO: 45560 - protein, 296 aa, Homo sapiens
MAEAVFHAPKRKRRVYETYESPLPIPFGQDHGPLKEFKIFRAEMINNNVIVRNAEDIEQLYGKGYFGKGILSRSRPSFTISDPKLVAKWKDMKTNMPIITSKRYQHSVEWAAELMRRQGQDESTVRRILKDYTKPLEHPPVKRNEEAQVHDKLNSGMVSNMEGTAGGERPSVVNGDSGKSGGVGDPREPLGCLQEGSGCHPTTESFEKSVREDASPLPHVCCCKQDALILQRGLHHEDGSQHIGLLHPGDRGPDHEYVLVEEAECAMSEREAAPNEECYIGKALHFTMQVILSLSS

SEQ ID NO: 45561 - protein, 436 aa, Homo sapiens
MMTKVLGMAPVLGPRPPQEQVGPLMVKVEEKEEKGKYLPSLEMFRQRFRQFGYHDTPGPREALSQLRVLCCEWLRPEIHTKEQILELLVLDEPGHQVSTPPNEQKPVWEKISSSGTAKESPSSMQPQPLETSHKYESWGPLYIQESGEEQEFAQDPRKVRDCRLSTQHEESADEQKGSEAEGLKGDIISVIIANKPEASLERQCVNLENEKGTKPPLQEAGSKKGRESVPTKPTPGERRYICAECGKAFSNSSNLTKHRRTHTGEKPYVCTKCGKAFSHSSNLTLHYRTHLVDRPYDCKCGKAFGQSSDLLKHQRMHTEEAPYQCKDCGKAFSGKGSLIRHYRIHTGEKPYQCNECGKSFSQHAGLSSHQRLHTGEKPYKCKECGKAFNHSSNFNKHHRIHTGEKPYWCHHCGKTFCSKSNLSKHQRVHTGEGEAP

SEQ ID NO: 45562 - protein, 588 aa, Homo sapiens
MFSGIATSTSSSMSGTGLEHSSLSDCLLLIPLEEEAGRIKDCWDNQEAPALSTCSNANIFRRINAILDNSLDFSRVCTTPINRGIHDHLPDFQDSEETVTSRMLFPTSAQESSRGLPDANDLCLGLQSLSLTGWDRPWSTQDSDSSAQSSTHSVLSMLHNPLGNVLGKPPLSFLPLDPLGSDLVDKFPAPSVRGSRLDTRPILDSRSSSPSDSDTSGFSSGSDHLSDLISSLRISPPLPFLSLSGGGPRDPLKMGVGSRMDQEQAALAAVTPSPTSASKRWPGASVWPSWDLLEAPKDPFSIEREARLHRQAAAVNEATCTWSGQLPPRNYKNPIYSCKVFLGGVPWDITEAGLVNTFRVFGSLSVEWPGKDGKHPRCPPKGYVYLVFELEKSVRSLLQACSHDPLSPDGLSEYYFKMSSRRMRCKEVQVIPWVLADSNFVRSPSQRLDPSRTVFVGALHGMLNAEALAAILNDLFGGVVYAGIDTDKHKYPIGSGRVTFNNQRSYLKAVSAAFVEIKTTKFTKKVQIDPYLEDSLCHICSSQPGPFFCRDQVCFKYFCRSCWHWRHSMEGLRHHSPLMRNQKNRDSS

SEQ ID NO: 45563 - protein, 979 aa, Homo sapiens
MELAALCRWGLLLALLPPGAASTQDNYLSTDVGSCTLVCPLHNQEVTAEDGTQRCEKCSKPCARVCYGLGMEHLREVRAVTSANIQEFAGCKKIFGSLAFLPESFDGDPASNTAPLQPEQLQVFETLEEITGYLYISAWPDSLPDLSVFQNLQVIRGRILHNGAYSLTLQGLGISWLGLRSLRELGSGLALIHHNTHLCFVHTVPWDQLFRNPHQALLHTANRPEDECVGEGLACHQLCARGHCWGPGPTQCVNCSQFLRGQECVEECRVLQGLPREYVNARHCLPCHPECQPQNGSVTCFGPEADQCVACAHYKDPPFCVARCPSGVKPDLSYMPIWKFPDEEGACQPCPINCTHSCVDLDDKGCPAEQRASPLTSIISAVVGILLVVVLGVVFGILIKRRQQKIRKYTMRRLLQETELVEPLTPSGAMPNQAQMRILKETELRKVKVLGSGAFGTVYKGIWIPDGENVKIPVAIKVLRENTSPKANKEILDEAYVMAGVGSPYVSRLLGICLTSTVQLVTQLMPYGCLLDHVRENRGRLGSQDLLNWCMQIAKGMSYLEDVRLVHRDLAARNVLVKSPNHVKITDFGLARLLDIDETEYHADGGKVPIKWMALESILRRRFTHQSDVWSYGVTVWELMTFGAKPYDGIPAREIPDLLEKGERLPQPPICTIDVYMIMVKCWMIDSECRPRFRELVSEFSRMARDPQRFVVIQNEDLGPASPLDSTFYRSLLEDDDMGDLVDAEEYLVPQQGFFCPDPAPGAGGMVHHRHRSSSTRSGGGDLTLGLEPSEEEAPRSPLAPSEGAGSDVFDGDLGMGAAKGLQSLPTHDPSPLQRYSEDPTVPLPSETDGYVAPLTCSPQPEYVNQPDVRPQPPSPREGPLPAARPAGATLERPKTLSPGKNGVVKDVFAFGGAVENPEYLTPQGGAAPQPHPPPAFSPAFDNLYYWDQDPPERGAPPSTFKGTPTAENPEYLGLDVPV
